United States Patent Application Publication US 2017/0009304 A1 - sequence listing, part 11

SEQ ID NO: 215553 - DNA, 83 bp, Homo sapiens
gaccggctacttctcggcgctgccgtctctggaggagtactggcaacaggaccgcctctttttcgtcatggaatatgtaaatg

SEQ ID NO: 215554 - DNA, 75 bp, Homo sapiens
gaaagatgagttttttaaacttctgcagatacaaactggactctcaggacaaaacgacaccagccaaaccagcag

SEQ ID NO: 215555 - DNA, 75 bp, Homo sapiens
catcccatcgggagatgctcatcagaacccagcccttgctgacatctacacagagcacgcccatcaggtggtggt

SEQ ID NO: 215556 - DNA, 74 bp, Homo sapiens
cgcagttcccggacatgatcctctccgcctctcgaggcctgcctcggtctcgcagtcagacgtgcctgccagag

SEQ ID NO: 215557 - DNA, 75 bp, Homo sapiens
cacaatgtcaagtgctccaaccctcaaatcaccgagttaagtgggcagaccaacatccacctcagcaaaaacttc

SEQ ID NO: 215558 - DNA, 82 bp, Homo sapiens
ttaggagctctgctcaaagccagacggctctatctaatgttcctcctctccggaactactttctggaagaagacaattataa

SEQ ID NO: 215559 - DNA, 82 bp, Homo sapiens
cccacctgtcctcaggcatatcaaaggttgaaatcacaaagattagacacctttttagataggtgttcttcagcaccactga

SEQ ID NO: 215560 - DNA, 98 bp, Homo sapiens
tcgctgctgctcgttcgagtcgcagaatacagtcgttttgaagctaaaatacatgatttacgggagcagatgatgaatagtagtattagttcagggtc

SEQ ID NO: 215561 - DNA, 90 bp, Homo sapiens
ctcaagtgtgccagtctccaaaaatttggagaaagagctttcaaagcatgagaacttcaatagtactcaaaaatttatagaagataatat

SEQ ID NO: 215562 - DNA, 87 bp, Homo sapiens
acagacggcctggctggagccctggacgcccggcagcagagcactggcgcgggaaatgtttcaacgtgcgcaagcgttgcggcggcg

SEQ ID NO: 215563 - DNA, 82 bp, Homo sapiens
gccgtgctctacctctatccgtctgcagatctccaggggagcccaccagcctagtcaacatggcctcggaagacattgccaa

SEQ ID NO: 215564 - DNA, 50 bp, Homo sapiens
atcaatgacgtgtttgaaggaagacgagatacagtttatgtaacttgatg

SEQ ID NO: 215565 - DNA, 101 bp, Homo sapiens
gcctggagaagctgcagcaggccgtgaggcagttcctgtgccttaagaacattagaaccttcctgtccacctgctgtgagaagttcggcctcaagcggagc

SEQ ID NO: 215566 - DNA, 83 bp, Homo sapiens
gacacggtactaccgggcgcccgaagtcatcctgggtatgggctacaaagagaacggtggagccttttgccagcttgaccgag

SEQ ID NO: 215567 - DNA, 96 bp, Homo sapiens
aggccagatctacgagctagagttgccatttcgctgggatttttgggtggtgcaaagcaagatggattctggatatactctgagtattgtaacaac

SEQ ID NO: 215568 - DNA, 89 bp, Homo sapiens
tgagcagcccgtacctctccaacggacccctgtctcccggaggagcgcgcaccatcctggccaatttggagcaaggcttagcagaagac

SEQ ID NO: 215569 - DNA, 74 bp, Homo sapiens
aaacaagctcctacttccagaaaaagtgctcctgggactccaggataccagtagggacggggtttcaccgtgtt

SEQ ID NO: 215570 - DNA, 80 bp, Homo sapiens
aagcgctcggcgcctggcgctggcgctggccaaggctggggggccctcagcctcttggccttgaacgggctgttcatctt

SEQ ID NO: 215571 - DNA, 75 bp, Homo sapiens
tatcggggtgaacgcatcaatcagctcatccgtcagctgaactagacccagtttgttgctgctggagggcttcaa

SEQ ID NO: 215572 - DNA, 100 bp, Homo sapiens
gctcggctgcgggaaatcgggctgaagcgactgagtccgcgatggagtgaacagagtatctgtcaggcaagagctgctgtgatggtttatgatgatgcca

SEQ ID NO: 215573 - DNA, 100 bp, Homo sapiens
atttgcagcagccaacttttcacccatctgtacatcctatgtcaactgcttctcaggtagcaagtacatggggaggtggaatgaatcttacttgttgaat

SEQ ID NO: 215574 - DNA, 100 bp, Homo sapiens
tccaattgcagagggacgccctccgccacttcgcgccctgccagccccgcgcccgcggcctccagacaatgcagatcttcgtgaagactctgactggtaa

SEQ ID NO: 215575 - DNA, 83 bp, Homo sapiens
tttcggcgcgggcccgggccccgagcgcccgaacaggatgccggaccagatctctgtctcggagttcatcgccgagaccaccg

SEQ ID NO: 215576 - DNA, 75 bp, Homo sapiens
agcatcgcaacgggatctgcagaacctgaactcggtggaagttgatgggtcgaaactaaatgtgaccagcacgtg

SEQ ID NO: 215577 - DNA, 91 bp, Homo sapiens
cgcgtctctctgctgcggcgcggggaccgctgtgctctcggtgtcgtgaaaactacccctaaaagccaaaatgggaaaggaaaagactcat

SEQ ID NO: 215578 - DNA, 100 bp, Homo sapiens
caagagtccctctaaagcagctcaaaaggtgactctgacatcattagaagcatgccagaacagactggtgaaaagtaaaccttttcacctacaaaatttc

SEQ ID NO: 215579 - DNA, 100 bp, Homo sapiens
ctcataataattcagatggagaatatatggctggacagctagctgcttatggctataaaattacaggatgaatttcatcctttcatcgaagcacttctgc

SEQ ID NO: 215580 - DNA, 100 bp, Homo sapiens
ctgcagatgtctttttccggcagattttggctctgactggatggggttaccgggttatcgctggctccaacaaaagaatcctctgaagaggagtatgact

SEQ ID NO: 215581 - DNA, 50 bp, Homo sapiens
gccccgcccgaccaggaggccctgcagaaacccttgggagagcagttccg

SEQ ID NO: 215582 - DNA, 87 bp, Homo sapiens
ctcaagagaagctgcaagagcaacatctttcctcaccccaaggttcaggcgtgaacggcctggaggagcccagcatcgccaagcgac

SEQ ID NO: 215583 - DNA, 98 bp, Homo sapiens
gctcagatcctgtggtcatcgtctcggcggcgcggaccatcatagcgctcctttaccctcatcgtggaggcctgggactgggacaacgataccacccc

SEQ ID NO: 215584 - DNA, 100 bp, Homo sapiens
gaggcgttgtttttgcttctccataacgagatggtgtctggagtgtacaagtccgcggagcagggggaggtgggtatatgagtgtaacaaacgctgcaaa

SEQ ID NO: 215585 - DNA, 73 bp, Homo sapiens
aagctgccacgcaccttctgccagctgatcctggaccccatcttcaaggtgtcttctgtttatgaagcaagat

SEQ ID NO: 215586 - DNA, 90 bp, Homo sapiens
cgccgagctggacccggaccggttttggtcatccgtccttggctcaggatttggagagcttgcaccaccaaaaatggcaaacatcaccag

SEQ ID NO: 215587 - DNA, 99 bp, Homo sapiens
cgccgccgccgctgccgctgccgctgccgcacctccgtagctgactcgggagtgcatccgccccaacccttttccccctcgtctcctgtgagaattccc

SEQ ID NO: 215588 - DNA, 75 bp, Homo sapiens
gtgccctcaacatctctcagagacgaaaggatgtacagttacccagcacgtgtacctcctcctcctcctattgct

SEQ ID NO: 215589 - DNA, 90 bp, Homo sapiens
agcatgttatgctctacgtggtacccatctacctgctttggaaaggaggtatgcagtggaactgatgaagaccctgatgataaaaacgca

SEQ ID NO: 215590 - DNA, 98 bp, Homo sapiens
gaaaactcgtgtccatcaaaatccagatgctggatgacacccaggaggcatttgaagttccaatttctacctggacaaggactggtactatacccaca

SEQ ID NO: 215591 - DNA, 50 bp, Homo sapiens
tggcccttctgcttcaaaaatatgcaagttggactccatgaaagaattgc

SEQ ID NO: 215592 - DNA, 87 bp, Homo sapiens
ggcaccgagagggactacgtgggcaccttgcgcttcttgcagtcggcggcgctggcggcggccctgggacccgcggaagccggcatg

SEQ ID NO: 215593 - DNA, 75 bp, Homo sapiens
cggccgcctagagtggttcagccacaaggaggcagcaattccatttccgtgagggcgtttctagatgaagatgac

SEQ ID NO: 215594 - DNA, 83 bp, Homo sapiens
aattaggtgtgagacaccatgcccagcccctgagccatcactggtgcaagctatatttaacggagatcctgatgaagttcgag

SEQ ID NO: 215595 - DNA, 100 bp, Homo sapiens
caaactaagccgattttccggaaaaaggcagggcaagaatcctttcgttccatcacaaggtcgtattacagaggtgcagcaggagctttactagtttacg

SEQ ID NO: 215596 - DNA, 97 bp, Homo sapiens
aacaaaggacactacatcaaggactgcccccaggacagtcggcccaatatgtcaagacctctgatcactagatcccctgcatctccactgaacaacc

SEQ ID NO: 215597 - DNA, 90 bp, Homo sapiens
tggctgatgctgatgcccgtcattggttacaactgagtcccaccgatgcttcaaatttaacagggatatcccagagaaggaaggaaatac

SEQ ID NO: 215598 - DNA, 97 bp, Homo sapiens
gccacggccccgtaggtgctcggggacccaccttccacctagcacggggcggcgactggcggcgcgatggacctgaccgggctcctgctggacgaag

SEQ ID NO: 215599 - DNA, 83 bp, Homo sapiens
ggggcgtcgtgcgcaaaggcctgcagtgcgcgcgtgtccttaagtttgctcgcttggtcaagtcctacgaagcccaggatcct

SEQ ID NO: 215600 - DNA, 100 bp, Homo sapiens
acagatgcaggatcaggatctggagatggaggatcaaaaccattcaagtgcaagatatgccattttgcaacagctcagcttggagatgccagaaaccatg

SEQ ID NO: 215601 - DNA, 99 bp, Homo sapiens
aaggaggttcagtggacccttggagccatcctctacaggacccgctttctaccattaagaatcttgacaaaacttttggaagtgtcagatgatccccaa

SEQ ID NO: 215602 - DNA, 100 bp, Homo sapiens
ctcatggggaagggccaggtccaggggaggaactggacttgcggctcattcggacaaaggggggtgtggacgcagccctggaatatgccaagacctggag

SEQ ID NO: 215603 - DNA, 50 bp, Homo sapiens
cctaaagcctgactggggcaagggcttcgtgggacacatatgcaacatgc

SEQ ID NO: 215604 - DNA, 75 bp, Homo sapiens
gtcggccagcctgagcaagcggaggacctacgccggcctggagctgagctcaatgtgcagcaatggatgacgaca

SEQ ID NO: 215605 - DNA, 80 bp, Homo sapiens
gtggtcaagcgggccacgcacctcgtcaccaaggccaaggtggcacaagaatggctcaactctccaaatagagagaattt

SEQ ID NO: 215606 - DNA, 83 bp, Homo sapiens
cccaggaagcccctctgaagcctcctcgccgccgtttctgagaagcactattcctgatcagagaactccagttgcttcaacac

SEQ ID NO: 215607 - DNA, 74 bp, Homo sapiens
aactcggagatgcctggaatacagtaaggcatttatgtttgaatcatctttaagtctggcggtcacaaagtggg

SEQ ID NO: 215608 - DNA, 75 bp, Homo sapiens
cgcgtgcgcggacatggcctcaaacgtttttcccctacatcctgctgctctttgcgatcctcctgtacctgcccc

SEQ ID NO: 215609 - DNA, 75 bp, Homo sapiens
ggaagcagccgatccagcctgcggagcctgtggggcaggggacggcaaaacagaacagaaaggcggagataaaaa

SEQ ID NO: 215610 - DNA, 50 bp, Homo sapiens
acgtgttagacaagttcatgagaacccttaggagaaatcttgagagtgga

SEQ ID NO: 215611 - DNA, 82 bp, Homo sapiens
tagactttcgacattggagtgcttcattaccacgagataggcaatacgaaaggcagcggaggaggaaatggcaggtcctaat

SEQ ID NO: 215612 - DNA, 100 bp, Homo sapiens
cctcactaagtgcagggattacagacatatgtagagtgtgtcggtcagaaggaacacctgagaaaccgctttatcatccttgtgtatgtactggcagtat

SEQ ID NO: 215613 - DNA, 75 bp, Homo sapiens
cgagtttccgatttaaagctgagctgcgaggaaaatggcggcgggaggacactgcccatctctaagataagaacc

SEQ ID NO: 215614 - DNA, 82 bp, Homo sapiens
ggtgctctgccatattgtgtcttccccggccggtccctcgcctcccggccgagctgacggcctggtactgtggcgctccgtg

SEQ ID NO: 215615 - DNA, 75 bp, Homo sapiens
gacacagattttaattatgacctttgtgactctatgtgctgctttctgtgaaccactgaagtagagcagctgaaa

SEQ ID NO: 215616 - DNA, 90 bp, Homo sapiens
cttagaaaaaatgggccagaagatcgcaccttactctgttgaaattaaggagccagatgaccaagatgctccagatgaacatgagtcgcc

SEQ ID NO: 215617 - DNA, 90 bp, Homo sapiens
accgaggagaatatcttgctgggagtggacttttccagtaaggaaagtatagctctcatatggcccagtgagtggcaaatgatacaaaag

SEQ ID NO: 215618 - DNA, 100 bp, Homo sapiens
ctttgactgttttaagaaagtgctacgctatgaaggcttctttggactgtatagagattactacaatgcagctagaacgtgaaaaggctcttgaacataa

SEQ ID NO: 215619 - DNA, 82 bp, Homo sapiens
gacggtgtggggcggtcccggccccgcaggtgagaagccctaccactgcaactgggacggctgcggctggaagtttgcgcgc

SEQ ID NO: 215620 - DNA, 51 bp, Homo sapiens
aggcctccccagccacgtgaaactacaaaacttgccaatggcacttccagt

SEQ ID NO: 215621 - DNA, 95 bp, Homo sapiens
cgacatggcccggaggcagcagaagagctattaagaatggcaaaggattgcatagcaagaaggaagtgcctatccaccgtgttgcagatatatct

SEQ ID NO: 215622 - DNA, 76 bp, Homo sapiens
gaaaactcaagcatagtcaagatccaggctctctaggaaacaccagaattatcagtgaagaatatattaaatggct

SEQ ID NO: 215623 - DNA, 90 bp, Homo sapiens
gacctgctgaaatccaggatagagagtgagatcccctacaaaagaccatgtttcttctcagcttgctcagtccagctgagccagctttcc

SEQ ID NO: 215624 - DNA, 50 bp, Homo sapiens
cagaaatctttactgattccaataaactggcgatggaatatgagaggagc

SEQ ID NO: 215625 - DNA, 83 bp, Homo sapiens
gagccggagctgggcgcggattcgccgaggcaccgaggcactcagaggagggcaaaataacatggcagccagacgaattacac

SEQ ID NO: 215626 - DNA, 98 bp, Homo sapiens
ctggctccgggctgagcttcctggagaagaggaaggtgcggcggcagcacatggagcgttgtaccagcttcctggtggatgagctgggcgtggtggat

SEQ ID NO: 215627 - DNA, 51 bp, Homo sapiens
ggtaaatgggaaaagaggggtttaaaggctttatcctgtggataaacgcag

SEQ ID NO: 215628 - DNA, 100 bp, Homo sapiens
cgaacttttgacacggctttggaaacgacgtcatgtgttagttgttgacctcctgtactggagagacattaagaagactggagtggtgtttggtgccagc

SEQ ID NO: 215629 - DNA, 74 bp, Homo sapiens
ccaatcttagcaagtgcggggaagagctgggtcgactcaagatctggaatcaatgtgtgagaccaaaatattat

SEQ ID NO: 215630 - DNA, 82 bp, Homo sapiens
cagggggacaccacccacggcacaggagcctcctggaggcagcagggtggatgtgaacactgaccggaagatcagtgccaag

SEQ ID NO: 215631 - DNA, 95 bp, Homo sapiens
tgctgggtctgtagaggagcgcaggcctggtgcaaacagactcaagaggctcggagaaccagcttgggaatatgatgaagaatgggctaagaaaa

SEQ ID NO: 215632 - DNA, 108 bp, Homo sapiens
caccctcacagactataccaaccagctgctccaggcaatgcagcgcgtctatggagcccaggtactaggttttgacaagcttgcatcatgcgtgagtataagctagtc

SEQ ID NO: 215633 - DNA, 83 bp, Homo sapiens
gagagctgacaatgatgaatctcaaataccaagctgctattttacacttgaagagggagcacaaagaagaaattgaaaacctg

SEQ ID NO: 215634 - DNA, 82 bp, Homo sapiens
ccatggtgtcagagcaaggagaagctgttgggcgtgatggtgggcatgggtcagaaggattcctatgtgggcgacgaggccc

SEQ ID NO: 215635 - DNA, 83 bp, Homo sapiens
gtcgagtctgcagtcgcccgggcgacggcggggtccgcgcggccaggagctgctctcgtttgaggatgtggcgatgtacttca

SEQ ID NO: 215636 - DNA, 83 bp, Homo sapiens
cccagggagtgcaagcttagagcgtctggccaagaatcagaggaagtgggcctccaggcccaaggtcagcatcccactgtcag

SEQ ID NO: 215637 - DNA, 101 bp, Homo sapiens
ctcattgcaagatcatcgcctccctggtttatagtagacagaccttttctgtttttcatccgacataatcctacaggtgtggtgtggaacctataggccag

SEQ ID NO: 215638 - DNA, 75 bp, Homo sapiens
tgaattaaaaggtgtcaagaagctcagaatgttgcacgtgcattatttaatcacatagacaagtcaggattgaag

SEQ ID NO: 215639 - DNA, 50 bp, Homo sapiens
tgcaaagcaagtggttcacgaggatctttaccttatatagtaaatctctg

SEQ ID NO: 215640 - DNA, 98 bp, Homo sapiens
aaccttgtggagatagattattttgggctacgttactgtgacagaagccatcagacggtgtgtggaggtcattgcaaaggaaggacaaaacctgaaag

SEQ ID NO: 215641 - DNA, 100 bp, Homo sapiens
ggtgtggcaatgaggacaaccccacactgggacggcagcagcagcggaaccgcttaggcagtgggggaagcggggacggtccgtccgtctcctggtctcg

SEQ ID NO: 215642 - DNA, 100 bp, Homo sapiens
gcagcgctgcagtgaattttccccccaaactgcaataagccgccttccaaggtttattcttcagtccaaggaagcaattcacagtcagctgttagagaag

SEQ ID NO: 215643 - DNA, 100 bp, Homo sapiens
ctcagttgccagaagatgcatttaagaactttccttttctagaagagctgcagaatccagagaccacatttgaagtatatgttgaagtggcctatcccag

SEQ ID NO: 215644 - DNA, 96 bp, Homo sapiens
atccaaggactttaaaaattttgattgaacaaaacaggtttccactgtatccaaaaggaggggagaagttgcagtttgattatggtgtctatcttc

SEQ ID NO: 215645 - DNA, 75 bp, Homo sapiens
gagctagacaagtactggtctcagcagctgaggagaagaaagtggaagcaaagaaagaagaatccgaggagtctg

SEQ ID NO: 215646 - DNA, 98 bp, Homo sapiens
aggacctcagcagcggtttcccaagtttcctgacttcttccatcctctggaaatcagctgtggcagtggttgcaggaatccagcaggctcacgcggaa

SEQ ID NO: 215647 - DNA, 100 bp, Homo sapiens
gacgcgcccggcccggagcccccagcgcagcggccgcggatgtacagttacccagcacgtgtacctcctcctcctcctattgctcgggctgtagtgccct

SEQ ID NO: 215648 - DNA, 90 bp, Homo sapiens
gacagccccagctcggtgttcctcaggtggtatcacggaaaacttgacagaacgatagcagaagaacgcctcaggcaggcagggaagtct

SEQ ID NO: 215649 - DNA, 74 bp, Homo sapiens
tacacagacgagcatggggaaggacacattcagctaacgtattttagcaggtggagtgaggttgaagattcctg

SEQ ID NO: 215650 - DNA, 71 bp, Homo sapiens
gtgcttgccctgtcatcccacctgagaaccatgctcaccgaccctgttaatacaatctgttggaatgacac

SEQ ID NO: 215651 - DNA, 107 bp, Homo sapiens
agattcgcagtggtcgcttcttctccttgatgaggaccttgagattgaattggttgaggaagagcctccattcctgagagggcacactaagcaaagcatggacatga

SEQ ID NO: 215652 - DNA, 89 bp, Homo sapiens
caggagaaacaaagagaaagccatagaagaaggaataccagctttcacttactataatgtaactgcaaactccaagctggtcattatca

SEQ ID NO: 215653 - DNA, 71 bp, Homo sapiens
agttcgagatcagcctgggcaacatgatgttcgagcctgtgagctgcaccttcacgtacctgctgggtgac

SEQ ID NO: 215654 - DNA, 82 bp, Homo sapiens
ctggaggaagcacaccctgtcctatgtggacgttggcactgggaagtgaataaccctataccttccaatttgaaatcagaag

SEQ ID NO: 215655 - DNA, 75 bp, Homo sapiens
ggaggattgcattcagtctagttcctggttgccggctgaaataacctgggtcaatataaaaaggcgatagccagc

SEQ ID NO: 215656 - DNA, 90 bp, Homo sapiens
ccgctgccgagcgtggagttgcctctcgactcctcccttttggcggaacgacaccgtaactatccgcactagaaagttcatgaccaaccg

SEQ ID NO: 215657 - DNA, 100 bp, Homo sapiens
gcggcaacaccatggctgggtagttcgaggggtttttgcgacagagtctcgttctgtcacccagcctggtgtgcagtggttcaagccattctcctgcctc

SEQ ID NO: 215658 - DNA, 82 bp, Homo sapiens
ccctcctcgtcgggaagaatcgtttggtctcctgccgtgcccggtctcggcgcggaagatggccggcggcgtggacggcccc

SEQ ID NO: 215659 - DNA, 75 bp, Homo sapiens
agcgtgaactacagtcagggcagcctgaaggatgcactctatggctactgctaccaggacagcgaggacatccca

SEQ ID NO: 215660 - DNA, 75 bp, Homo sapiens
atgggtgatcagacgattcacgtgttaaaggccactaaagatgctggccagatatctggactgaatgtgcttcgg

SEQ ID NO: 215661 - DNA, 82 bp, Homo sapiens
ttataagacaaaagaaatagcaagaactgaggagcaccaggagacgcaactcatcgggaaataatgcaaaaggtgtcccaag

SEQ ID NO: 215662 - DNA, 83 bp, Homo sapiens
cgggagggatcctgaaccgcgcggccgaaccctccggttgtgaccgagattcccgacgagagagactgaggggaagagaggaa

SEQ ID NO: 215663 - DNA, 90 bp, Homo sapiens
gtgtacacccgtgtcacctccttcctggactggatccacgagcagatggaggctttgggaacgatcactgcagtgcctgtcacgggtcct

SEQ ID NO: 215664 - DNA, 100 bp, Homo sapiens
ggctgctgagacgaacgcttcactggggcagtctctgcatatcatggggagatagacgctgctgcctggtaggaaaatgtctgtgtgcaccgacaatgtc

SEQ ID NO: 215665 - DNA, 74 bp, Homo sapiens
caggctattcaatatgaacttcagtcattgggggaatccaatgcacaaatgggaaatatcggctcatcaaattg

SEQ ID NO: 215666 - DNA, 75 bp, Homo sapiens
attctggtgtaactgtggacatcaccattcaggaaggaactgcaagcacatgttgaccagataactgaaatggca

SEQ ID NO: 215667 - DNA, 75 bp, Homo sapiens
ccgacttcgatgatcgtgtgtcggatgaggagaagtctctagtgatccctgaaaagttccagcatattttgcgag

SEQ ID NO: 215668 - DNA, 98 bp, Homo sapiens
ggctttatacaagaagattatggttttttgcatgtctgacacccatgactccacctggaccttatggctccacccagaagcaattcagcccaacagga

SEQ ID NO: 215669 - DNA, 97 bp, Homo sapiens
ccacctgggccccagaccgtgctgatcttcgatgagctctcggattccttatgcagagtggccgacttggatacttttgtggaactctatgggaaca

SEQ ID NO: 215670 - DNA, 75 bp, Homo sapiens
cactggaggacaacagctctcaataagtgacgctttcatcaaagctgagctgcccctcctggacctgatgaagct

SEQ ID NO: 215671 - DNA, 90 bp, Homo sapiens
atttgaagcttattccctatcagataatgattatgacggaattaagaaattactgcagcagctttgcttgtgccatctgcccccatcgac

SEQ ID NO: 215672 - DNA, 90 bp, Homo sapiens
gtacctgctcaactggtgtgtgcagatcgcaaaggtggagccgccaccaaaatgcagattttcgtgaaaacccttacggggaagaccatc

SEQ ID NO: 215673 - DNA, 100 bp, Homo sapiens
agatcgaagcggatttccgattgaatgttaatgaaattatcaggaaggagttttcaggacctcctgccagaaatcagacgtaaaagaagccattatagca

SEQ ID NO: 215674 - DNA, 101 bp, Homo sapiens
aagcgcagggagaaggaagaggtgtttgaaaagatcaatgaactgagccatgttcaaatccctgttatgttgatgccagatgacttcaaagcctattcaaa

SEQ ID NO: 215675 - DNA, 100 bp, Homo sapiens
aacatgttcatgttcagggccagccttgacctgaagctgatattcctggattccagttggctagagatttactacatccgtccttggaagaggaaaagaa

SEQ ID NO: 215676 - DNA, 100 bp, Homo sapiens
tttcactgtgtcttcagaaagatccttccaaaagggatcactacttgtgtgatgtgacatgggcaacacaagaaagaatttctttgcagtggctcaggag

SEQ ID NO: 215677 - DNA, 101 bp, Homo sapiens
ccgcccgccatggcccgggactacgaccacctcttcaagctgctcatcatcggcgacagcggtcagtctagagcacgaggagcagaaactggagctcaagc

SEQ ID NO: 215678 - DNA, 75 bp, Homo sapiens
gttgctgcgctctgctcggtgtcgtggcctcgcagatgcatcctgaggttagcattacacttctcccagtggagc

SEQ ID NO: 215679 - DNA, 101 bp, Homo sapiens
aaggagttcgagcagatcgacaagtccgggagctgggcggccatttaccagagctttcagcagaggccaaggcagcattgcttgaatttgaagaaagggag

SEQ ID NO: 215680 - DNA, 87 bp, Homo sapiens
ggagggctggccaacttctgctacagacgactcagtgatgaagtacattacatctttgaatgaagactctactgtacatgggttctt

SEQ ID NO: 215681 - DNA, 100 bp, Homo sapiens
aaagaccgaccattcttccctgggctggtgaagtacatgaactcagggccggttgtggccatgcttcataaacaagcagatatgcaagaagagaaaaacc

SEQ ID NO: 215682 - DNA, 78 bp, Homo sapiens
gttaaagtctctcttcaccctgccgtcatgtctaagtcagagccaaaacctattgatgtacaagtcattacacaccac

SEQ ID NO: 215683 - DNA, 75 bp, Homo sapiens
cttctcaacatgcaaaaagctggaggagtctttgacagttgaggctgctggatgtcattcacacagaaaataaac

SEQ ID NO: 215684 - DNA, 100 bp, Homo sapiens
tatagcttggggaagatgtacagatgtcctgctgtgtggctttacttgtggagcagaaaacaggcatttttataagcaatggctgccatccggaagaaac

SEQ ID NO: 215685 - DNA, 103 bp, Homo sapiens
acaagaccatgctggcaagtctgaaggtcaaacatagggcctgattacattccaacagaggaagaaaggagagtcttcgcagaatgcaatgatgaaagcttct

SEQ ID NO: 215686 - DNA, 82 bp, Homo sapiens
gctgtgcgagagcctcctcacttgggctccccatcaacccgggcagccgggatttaaattcacggtggctgagtcttgtgac

SEQ ID NO: 215687 - DNA, 75 bp, Homo sapiens
agactgtggcagaatgtcgtgtgctgcagaagctgggagcagacgctgttgagttttccgtctgatgaaggttgg

SEQ ID NO: 215688 - DNA, 75 bp, Homo sapiens
cacacgacgtgcgctatgggtcaggttgctccttgagggcaggacagttcttatggctttatccgttgcgtaagc

SEQ ID NO: 215689 - DNA, 80 bp, Homo sapiens
cctcctccttggtcgccgcgtccttggctggcgtccttgccaacattccactaacccccgagactcagcgggaccaggag

SEQ ID NO: 215690 - DNA, 100 bp, Homo sapiens
taggcctttttgactacaattcccagcagcagctgctaaaggcctggagccctgtttttaggaactacataaagcgcgcagccgaccatttggaagcgtt

SEQ ID NO: 215691 - DNA, 75 bp, Homo sapiens
gcggagctgacggtggaggttcgcggctctaacggggctttctacaagcaaaagctgatgaagcattgaaagcca

SEQ ID NO: 215692 - DNA, 98 bp, Homo sapiens
tatggccgcttcaggcacttcttggatatcatcgaccctcgcacactctttgtcactgaggaagtcctggctgagcaaggttggaagccctagttctc

SEQ ID NO: 215693 - DNA, 100 bp, Homo sapiens
tccagggccactagcccatcgtccgccaactgcaggtgagaagccctaccactgcaactgggacggctgcggctggaagtttgcgcgctcagacgagctc

SEQ ID NO: 215694 - DNA, 75 bp, Homo sapiens
ccaccgggctgtccctctacggcgtcttcctcagtgggctcatggacatgatgtgtttcaacaccactggcaccc

SEQ ID NO: 215695 - DNA, 90 bp, Homo sapiens
cgcgcctttgtgcgcgcgccgagaatgtggccccgtcccagagcaccacccgagacatcaggagcccatcgtgggctagggaagatcctc

SEQ ID NO: 215696 - DNA, 75 bp, Homo sapiens
cactgagtggtaatggatgatgcagttcaaataactaagtggatcaatcttcctgtcctacaactgacaaaggat

SEQ ID NO: 215697 - DNA, 97 bp, Homo sapiens
gggattgtgggagtctccgcgtcccgctcgctgggagagaggaatgtatcctgtcaggtataatgtcagtgaatggcaagaaagttcttcatatgga

SEQ ID NO: 215698 - DNA, 100 bp, Homo sapiens
cctcgcactggcgctgcaacaagaccctgcccgtggccttcaaggtattctttaggtgatgctagaaggcctcttcatgaaacagcagttttggtagaag

SEQ ID NO: 215699 - DNA, 100 bp, Homo sapiens
gcagtccccgcgcagtcccagcgccaccgggcagcagcggcgccgtgctcgctccagctcctgaagctgaaggagaagtgccagagctttatcatcaaag

SEQ ID NO: 215700 - DNA, 89 bp, Homo sapiens
agcagaaacactgtacaaagagattctcactcgtgcacatgaaagggagtttggttctgtagatgggtgttcatttagaagaaagcaac

SEQ ID NO: 215701 - DNA, 82 bp, Homo sapiens
cctcgggaccggctgtatgattaggccacaatcttcaatgagtaaacatattcctgtgactctgttttgagaagtgcaacca

SEQ ID NO: 215702 - DNA, 120 bp, Homo sapiens
tttgaaccactggaaagtgaggaattttgaagtacaccgtggtgacattgtatcattggtagacatcatttcagctttccatccatttttatttatggacatactgctagtggaaagacc

SEQ ID NO: 215703 - DNA, 82 bp, Homo sapiens
gaagacttaaaagatatattacatgctgcaaagcagataggaatcctgaagtgggtaaaactgattgacaactttgaagggg

SEQ ID NO: 215704 - DNA, 76 bp, Homo sapiens
tgctgcaggtgttcaagtgcagggagttcccgttacaatcactagtgttgcaggatttaagaggggtgcagatccc

SEQ ID NO: 215705 - DNA, 74 bp, Homo sapiens
atttgatgctcttgtgctcagtgacatcattcagactatctttgagatcaacgcctccagccgagacctgtgca

SEQ ID NO: 215706 - DNA, 100 bp, Homo sapiens
tgccattattctcggggctttcatagcagctgggtcttcttctggattgggaaacatgccaacgaggaggagaagaaggccgcagcaaccactgcacagg

SEQ ID NO: 215707 - DNA, 75 bp, Homo sapiens
tgggaggtctggtagggctgagcttgcaagaggatcaacatgccttactatactggcaattgctggagaagattt

SEQ ID NO: 215708 - DNA, 98 bp, Homo sapiens
ttatttgttacaagttggcttatgagtggaacatggctagcaggaatgcttactgttgcgtggttcgttattaacagcttggatttacactgggcaac

SEQ ID NO: 215709 - DNA, 75 bp, Homo sapiens
gtttcatctgtggatggagtattgctgggctcaaaatgcagagaactcaaagatattcatttcggccagtgttac

SEQ ID NO: 215710 - DNA, 87 bp, Homo sapiens
gaagcgcacacggttagaagagagtgttctgccagttctggataatccactgtccaagaaggttcgaggcctcattgatagcttacg

SEQ ID NO: 215711 - DNA, 75 bp, Homo sapiens
gattccgccatcaaagctcagactgccctgcacgagcagaagaccttgcccggactagttcttctggagctcaac

SEQ ID NO: 215712 - DNA, 74 bp, Homo sapiens
gggccgaaatgatccgcctgcctcagcctccaaagtagctgagactacaggtccgagtggacagatgaattaaa

SEQ ID NO: 215713 - DNA, 101 bp, Homo sapiens
ctgctgcacaggtggcctccgaacccgggaaaagaggaactaaggcggaggaactgagacgtttcgaattccaggttgaaatcacaaagattagacacctt

SEQ ID NO: 215714 - DNA, 75 bp, Homo sapiens
gctgagctgcgaggaaaatggcggcgggagtgtctccagaacgctatagctatggcacctccagctcttcaaaga

SEQ ID NO: 215715 - DNA, 50 bp, Homo sapiens
cgtgaacggacagtcccccccaggcaccaggatcatctacgaccgaaagt

SEQ ID NO: 215716 - DNA, 80 bp, Homo sapiens
tgaagaactcagatcaaaacctgttactgaaggaactggtgatattattaaggttcagaatttaacattacgcagccaga

SEQ ID NO: 215717 - DNA, 76 bp, Homo sapiens
caatcagcagacacgggagtttgtggagaaggctgaagacagttccccagggataagcctgtccagcagcagaggc

SEQ ID NO: 215718 - DNA, 83 bp, Homo sapiens
tacgcggccaagactgtgttcgagagtctctggccagccgcagagtgtgaccgcctcctcggacaaggcttttgaagactggc

SEQ ID NO: 215719 - DNA, 88 bp, Homo sapiens
catcgtgcctgaaggagtacatgccctttatgaagatattcttgagggcatcccgggcccaaatcctagacaaagccacagaatatat

SEQ ID NO: 215720 - DNA, 82 bp, Homo sapiens
agaagcgcctggccggggagtacggccgaggagacctcgtcggcgtgtgaagatagtgatccggggagacaggaacacgggc

SEQ ID NO: 215721 - DNA, 100 bp, Homo sapiens
ccggagcccaccaagttctgggaagtggaatgaatcttacttgttgaatatcttctggttactagttggattcatttgtgaaagaatcattttcccctgt

SEQ ID NO: 215722 - DNA, 75 bp, Homo sapiens
agcaggtggctgcccaggcatctgcatctggaatgtttcctggacaaagaagggcaattgaaggaacagactaaa

SEQ ID NO: 215723 - DNA, 90 bp, Homo sapiens
atatcctgtaagaccagaattgcaaggccaggtcacagaacagaaagtgctggtggacatctcttcttgccccaagatcttcgttggaag

SEQ ID NO: 215724 - DNA, 83 bp, Homo sapiens
ctgcggccaattcggtggaacgaggacgcggactgcgaaggcaggcaaatgttctgaaaaagactctgcatgggaatggcctg

SEQ ID NO: 215725 - DNA, 100 bp, Homo sapiens
ctgagcctgttggaggaactggcccggaaacaggaggacgacccttgaacatctgtgaagaaatgactattctgcatggaggcttcttgctggccgagca

SEQ ID NO: 215726 - DNA, 100 bp, Homo sapiens
caccagctccgaaatcaccaccaagacagcacttcaaatgcaggcggggcgaaggcggagccccgggaccgtttgtcccccgaatcgcagctgaccgaag

SEQ ID NO: 215727 - DNA, 78 bp, Homo sapiens
ctttacataagcaacttcagaatgctggtggcaagaaacctccacagctgttgagaaaaaggagaaacctcttccaag

SEQ ID NO: 215728 - DNA, 95 bp, Homo sapiens
cgggaggtttggggtcaaggagcaaactctgcacaagatggcggcggtagcggcagtggcggcgcgtaggaggcgtagagacggggtttcaccgt

SEQ ID NO: 215729 - DNA, 96 bp, Homo sapiens
gggcggcgcgcgcggctgcggggctccagggccgccccgcccgcaggtgctatgctgtgggccccgctcagttcatcaatggtgctaaggaaattt

SEQ ID NO: 215730 - DNA, 75 bp, Homo sapiens
gctggtcagagggctgtgaagacgcacggtgccaggaccaagtatctgaaccaacatcccgggtaaccgggtggc

SEQ ID NO: 215731 - DNA, 100 bp, Homo sapiens
gactaccttgcacctgagctgttactaggcagggcccatgacaccatgaccacccttgatgataagttgctgggggagaaactgcagtactactatagca

SEQ ID NO: 215732 - DNA, 100 bp, Homo sapiens
tgagaatgatgccaagatcctcaatgatgtgcaggatcgctttgaggtcgctttgctgttcgtgatatgagacagacagttgcggtgggtgtcatcaaag

SEQ ID NO: 215733 - DNA, 100 bp, Homo sapiens
aaagtgaatgactccaacgaattaggtggtctgactaccagtggctctgcagagaactggaagccttgaagcagcgtttctggaagcatgctaatccagc

SEQ ID NO: 215734 - DNA, 75 bp, Homo sapiens
ggccaggcggatggtgagcaatgggggatatgagactttctactcggaatatcctgagtgttgcgtggatgtaaa

SEQ ID NO: 215735 - DNA, 100 bp, Homo sapiens
gtgcctctctcgcccacattttccccaagcactctcaggaacctggcaacagattaagcctgatcaagatgacaacctcccaaaagcaccgagacttcgt

SEQ ID NO: 215736 - DNA, 97 bp, Homo sapiens
aagcctctgctctgcctccggggacaagaaactagagcaaataaccgttttgaaattatgcctgtgaggagccaccaacatttgaagctatggagct

SEQ ID NO: 215737 - DNA, 75 bp, Homo sapiens
agacctcggcccccagaccagcacctccccgggacgcctggtgccaggaccaggcggccaccaccacagtctcta

SEQ ID NO: 215738 - DNA, 100 bp, Homo sapiens
agcagctggaaccatgacaggcatgttgtataaatgtacaggctgttcggctcttgaatcccagcgatgaaaccaggaactcactttcccgggatgccga

SEQ ID NO: 215739 - DNA, 75 bp, Homo sapiens
agtgatctctataatggttccagtatagtctctaggtttaaagttctagctaaccaatacaaatctatatacccc

SEQ ID NO: 215740 - DNA, 106 bp, Homo sapiens
ctcgctgggagagaggtacctctccttttccctctccctttccctaagactgattcttgctattccaaatcctcttccacgttgacagcccttcagatatttcaac

SEQ ID NO: 215741 - DNA, 75 bp, Homo sapiens
ccaacatgcctggccagaaggttctggtttgttaaccagaatgtcatacccaggctatcccccaacaggctaccc

SEQ ID NO: 215742 - DNA, 100 bp, Homo sapiens
gagggaatgatcatggttataatcaaaagtggtcttcagaatcttctttggtgagcacctgcggatctgtccccagggctacacctgctgcaccagcgag

SEQ ID NO: 215743 - DNA, 100 bp, Homo sapiens
agccagtccccacagcataacagggttactattgaacatgctagggctcggtcacgaggtggaagaggtagaggacgatactctgaccgttttagtagtc

SEQ ID NO: 215744 - DNA, 101 bp, Homo sapiens
tcaatatctgtcttcggtggactccttcggcagtccacccaccgccgccgcctcccaggtattgttgcagcatctggcagtgagactgaggatgaggacag

SEQ ID NO: 215745 - DNA, 101 bp, Homo sapiens
gaggctgggctgaggcgccgcggtaccatgaggcgccgtatgagccgcacagcctacacggtgggagccctgcttctcctcttggggaccctgctgccggc

SEQ ID NO: 215746 - DNA, 51 bp, Homo sapiens
cttttcctccacctaccttcccgagctaggcagctggaagagaaagaccga

SEQ ID NO: 215747 - DNA, 100 bp, Homo sapiens
aagtgctgctgttgcttcccgtgtagagttgtttttcagaggcaccaaataatgtcatctgaaatgttgccagcatttattgaaacttctaatgttgaca

SEQ ID NO: 215748 - DNA, 75 bp, Homo sapiens
ggagcttctcagaagacagagggttttcttttgagaatgtgacagtgatgataacatgggtgccaaaaatacttc

SEQ ID NO: 215749 - DNA, 116 bp, Homo sapiens
cagacatgggactggaggacgagcaaaagatgcttaccgaatccggagatcctgaggaggctggtagagcagatcacccccaaagcaagaagttccagatgaaatatgcataagaa

SEQ ID NO: 215750 - DNA, 97 bp, Homo sapiens
aaggaatagaaaattttgacgtttatgcaattaaaccaggtccttttagaattgctgcaggctggaggcatagttcaatttgaagagagtcgactca

SEQ ID NO: 215751 - DNA, 100 bp, Homo sapiens
gggcggttctgcgtacccctctccgttttggtatcaggatgacgctggcctcataaaatgagttagggaggagtccctctttttctgttgtttggaatag

SEQ ID NO: 215752 - DNA, 100 bp, Homo sapiens
aattgttagcagagaagcaaagcttcagtttgcttgcatatcacacctgaaaaattttatgtggaagcttgtgatgatggagcagatgacgtacttacca

SEQ ID NO: 215753 - DNA, 75 bp, Homo sapiens
caaaaatttaaacaagaatccactgttgctactgaaagggttggatggcaagcatgtggtgtttggcaaagtgaa

SEQ ID NO: 215754 - DNA, 113 bp, Homo sapiens
tcgtgaagaagcaggaggctaagaaagtggtgaatcccctgtttgagaaaaggcctaagaattttggcattgaaatcatattccatgcccatcagcattgaatttcagcggag

SEQ ID NO: 215755 - DNA, 117 bp, Homo sapiens
tttctgtcctgctgatgaagtctacgttcattcagggcctgctgtggaagaccagccccaaagttctccaaggagaggcacatcatggacaggacccccgagaaactgaagaaggag

SEQ ID NO: 215756 - DNA, 98 bp, Homo sapiens
ccagacaaacctctccaccctcagtgacccggtgcagctagaagtccatatcggtactccaaagattcaggtttactcacgtcatccagcagagaatg

SEQ ID NO: 215757 - DNA, 100 bp, Homo sapiens
ccccctccactcacccggcagatatccgtgaaggctctaggacccagatgatgtggtaccagttggccaaagaagagcctggtgttggtgcatgtgcttt

SEQ ID NO: 215758 - DNA, 90 bp, Homo sapiens
cttcagcagcccgcgcccgggcagttggtgagtttgtaagtgatgcccttctcgttcctgacaagtgcaaattcttacaccaggagagga

SEQ ID NO: 215759 - DNA, 90 bp, Homo sapiens
ctgcgaggaaaatggcggcgggaggatgccggaccagatctctgtctcggagttcatcgccgagaccaccgaggactacaactcgcccac

SEQ ID NO: 215760 - DNA, 100 bp, Homo sapiens
tggatgggcacactgtgggggtgtcctggtgcacccccagtgggtgctcacagctgcccattgcctaaagaataactctctgtcctggtatggtggggaa

SEQ ID NO: 215761 - DNA, 80 bp, Homo sapiens
caggagcccagacaccagccccccaccatggtctatgacacacagctggagaatgtggaggcctttgagggcctgtctga

SEQ ID NO: 215762 - DNA, 82 bp, Homo sapiens
atgtgtcggaactagatctttctgacaacaaactcgaagactggcatgaggttcagcagatagatcgtgtggtagaagttgt

SEQ ID NO: 215763 - DNA, 82 bp, Homo sapiens
gaccatctggcagatgcagaaacaggcccagagagatgccatggacaatattaccaggcagaaccaattctacgatacccaa

SEQ ID NO: 215764 - DNA, 75 bp, Homo sapiens
ctcatgttgacgggcagccagctagctgggacgtggacgaatgtcgcgagcgaggcccagccctgtgcgggtcgc

SEQ ID NO: 215765 - DNA, 100 bp, Homo sapiens
cgaagatggcgacttctggcgcggcctcggcggagctggtgatcggctggtgcatattcggcctcttactactggacttcagaaatgggcttgggaacca

SEQ ID NO: 215766 - DNA, 100 bp, Homo sapiens
atttgtgttctctgtgtaacgtagaatgtagtcatttgaaggaaaaggaatgtagctcaacttgtgataaaaatgaagaaaagagtctatacaaaggctt

SEQ ID NO: 215767 - DNA, 73 bp, Homo sapiens
cccagcccttggaggagagacggcagcctcagggtttccaggcctgaggtgcccgccctggccccaggagaat

SEQ ID NO: 215768 - DNA, 95 bp, Homo sapiens
ggaaaacaaaagctgctacttatggaagatacaaagggaggacgaatccatgaaccaaccaggaccaatcaaaaccagactggctattagtcagt

SEQ ID NO: 215769 - DNA, 51 bp, Homo sapiens
gagaatgtcaagtacgaagatatctatgagaatggttatacgccactgcac

SEQ ID NO: 215770 - DNA, 74 bp, Homo sapiens
aggaaatcagtactactttaggaacagatattggtatcttgatggacaaacactactaataatcatatgtgttg

SEQ ID NO: 215771 - DNA, 75 bp, Homo sapiens
gacttgatgaagaagatgaagatgaggatgaggatgaagagctcgtccgcatggtgctgaatggctgaggacctt

SEQ ID NO: 215772 - DNA, 100 bp, Homo sapiens
agcgcgagctggaccacgagaggaagctgagggagacccgggaatgcatatcagtccacgtgggccaagcgggagttcagattggcaatgcctgctggga

SEQ ID NO: 215773 - DNA, 76 bp, Homo sapiens
taaggattccaagtaactcttatttgccaccaccaaagatccctgacaagcagttagatgaaagggaacacacaat

SEQ ID NO: 215774 - DNA, 100 bp, Homo sapiens
tccaacattcatcgcagctggtgggtgtacacactgctgtttaccttggcgaggcctttcaccaagtccatggtagaatgtaagaaagctcagccgaaag

SEQ ID NO: 215775 - DNA, 100 bp, Homo sapiens
attattagtcctgaatccaataaagagaggcagcttggaaggagttcccattagacttgaagttgggccacgtgatatgaagagctgtcagtttgtagcc

SEQ ID NO: 215776 - DNA, 75 bp, Homo sapiens
gccaagaaggcctctgcctcagggcaggctcagacggcactggcggctgaggctgaaggccctgaagtgggttcg

SEQ ID NO: 215777 - DNA, 100 bp, Homo sapiens
gtttctgcggaggtggagggagatcaggaaacggcttcttcctcacttcgccgcctggagtcaactgagagttcaaatacaacaattgaggatgaagatg

SEQ ID NO: 215778 - DNA, 101 bp, Homo sapiens
ctcctgaggatttctgtgcctggaaaatatctgttaacagactgcttttacacctacgcgaatctttctgcattgaatttgaagatttctgaacagaagga

SEQ ID NO: 215779 - DNA, 85 bp, Homo sapiens
tgaacctgagctgcaagttggaattgatataatgaagactagttttccaggaatacaaacagaagcttgcacgagtaacccaggt

SEQ ID NO: 215780 - DNA, 96 bp, Homo sapiens
gaagaaagatgttttgcctactgttgatccgtggaagatagatgataagcctgtaaaaattgacaagtgggatggatcagctgtgaaaaactcttt

SEQ ID NO: 215781 - DNA, 75 bp, Homo sapiens
atatttctgagtgtgaaaaaaacaaaagcagcccaatttttgcattccaggaggcaacagatcccctaatttgtg

SEQ ID NO: 215782 - DNA, 75 bp, Homo sapiens
ggggaagtcattcatctgaatgtgggaggcaagagcttctgaaagttctgctgaagacagtgagcaggaagatga

SEQ ID NO: 215783 - DNA, 82 bp, Homo sapiens
ggagacacggtggaaacgcttatgatgatatcatcaagttgaatcgaaaggaagggaagaagcagaattttccaagactaaa

SEQ ID NO: 215784 - DNA, 75 bp, Homo sapiens
cccatctcagcggcatatgcaagagcaagaggtgcggagctctggactgggattaagaaggggcccccacgcaaa

SEQ ID NO: 215785 - DNA, 123 bp, Homo sapiens
aaagacagtgttctgctttcatggagttcacagaagagtcgaggaggtctgtagcatctctgtctgttggagaaggcacaggtgtcagagcaccagtcagaacagcaacagatgataccaaac

SEQ ID NO: 215786 - DNA, 98 bp, Homo sapiens
caaggaagaatggttaaagggaatgacttcattacatggatcaatcttcctgtcctacaactgacaaaggatcccctaaagacccctggaaggctgga

SEQ ID NO: 215787 - DNA, 95 bp, Homo sapiens
cagattggaggaggctggctctggtcttcgatgcacaggagtggccgttatggaacgcagagatgtgtgcacagacccaggccatgcagatactg

SEQ ID NO: 215788 - DNA, 75 bp, Homo sapiens
gagaaggcaaagaacctctggtgttgaaaggggtgctgatggtctgtatagtgattggtgctcgaaagctcgggg

SEQ ID NO: 215789 - DNA, 100 bp, Homo sapiens
caggaaaacctttcaatgaactgtgggattatgaagggcatgagccagaaggagagctctaagtctgccatgatgtatattcaggagttgaggtcaggct

SEQ ID NO: 215790 - DNA, 50 bp, Homo sapiens
tattaatcagtatgtcatatggatgcacaaacggcggcgtattgctctga

SEQ ID NO: 215791 - DNA, 97 bp, Homo sapiens
gagactcctgaccctcagaatggtgagccagccatgagagggtatcttgtggccatattcctgagtgctgtcttcctctattatgtactgcattgca

SEQ ID NO: 215792 - DNA, 83 bp, Homo sapiens
ccagaacccgccaatgctggggaacggaaaatgagggagttcaactctgcacatagattttcctataccatgtccacttagaa

SEQ ID NO: 215793 - DNA, 80 bp, Homo sapiens
ttcagatgggatctttccggatcaatccagatggcagccagtcagtggtggaggcgtcctgcatcctgcagctggtcaag

SEQ ID NO: 215794 - DNA, 100 bp, Homo sapiens
gtggaatcataagcgaaacagcacactgtttgaataaagagcgagtggtttgtgatgaaaatggttccaagggctatggatttgtacactttgagacgca

SEQ ID NO: 215795 - DNA, 75 bp, Homo sapiens
gaccttggaaatgcttgttgggtgagctacttcctcagccgagcccagagcctgtgtggccccgagcacagtgct

SEQ ID NO: 215796 - DNA, 100 bp, Homo sapiens
aaggtgatgcccaagatggaccaggtccatggaaagaaattattccttagatttgatctagatgaagaaatggggccccctggcagcagcccaacaccag

SEQ ID NO: 215797 - DNA, 96 bp, Homo sapiens
tgagggcagggacgtgttggacacgctgactttgtaggctccgccaagaggcgccgcaggaggccatttcataattctgaatcatgtctgataacg

SEQ ID NO: 215798 - DNA, 127 bp, Homo sapiens
cagacccgtgggtaacacagcctgtgaatcttgctgactatacatgggaagaggtgtttcgagtaaacaagccaggactaatttattattgtgcaactgccagtcctgcgcattccagctacgctaa

SEQ ID NO: 215799 - DNA, 98 bp, Homo sapiens
tggagatggggaccgccctggacatcaagattaaaagagcgaataaagtttatcacgccgggtactatactggcaattgctggagaagattttgcaat

SEQ ID NO: 215800 - DNA, 74 bp, Homo sapiens
caacaggaattgatgtggccagcaaatccttcctcttgtttgcatttgcccagtataacatggatcagttcacg

SEQ ID NO: 215801 - DNA, 100 bp, Homo sapiens
cccggggccccgggatctcggctgtccttcctcccgactctttttgatcagaacaatgctgcaaaaaaagaagagtcagaaactgccaacaaaaatgatt

SEQ ID NO: 215802 - DNA, 80 bp, Homo sapiens
agcacgagctgtgaggggattcacttgtgtgcggaactcctcggaaccatgccagagcagctgagttccagataaaaact

SEQ ID NO: 215803 - DNA, 51 bp, Homo sapiens
tattatggtgttggtcgttcagaggacgccgattacacctcaacaagaagg

SEQ ID NO: 215804 - DNA, 90 bp, Homo sapiens
aataatgatagaatgaagaccacaataaaagagacctctacttagctcagcaattcttacctttacctaggtgctgatatggaagaattt

SEQ ID NO: 215805 - DNA, 75 bp, Homo sapiens
gtaaaagacatccctgatggtgccacggttttggttggtgatgacagcatattaaagtgagtgaccctgcgaccc

SEQ ID NO: 215806 - DNA, 75 bp, Homo sapiens
tccgggaaaaggcaaggctttgttccagaagtgatggtgaaagttcatgttgttgatctaaaggcagaatctgta

SEQ ID NO: 215807 - DNA, 75 bp, Homo sapiens
gcgctgctgaccgacatcgaagcgggaagggtcaagagggaaaaatataatcctgaaagggcacagaaattaaag

SEQ ID NO: 215808 - DNA, 95 bp, Homo sapiens
ctggtaatgtgtccattcgagggcggatcctctctgtgtgcctacaagacagtgtgctagctttctggaaacatggaatgcaaggtagaagtttt

SEQ ID NO: 215809 - DNA, 98 bp, Homo sapiens
cactgtgcatcccggagcttacatgggagcagcttaagcagtttcatgccactcactatcacccaagcaatgctaggctttatcctgtggataaacgc

SEQ ID NO: 215810 - DNA, 100 bp, Homo sapiens
cggtatcattccataaatatggggaatactttcctggcacaggagacttgaggaatcactgagcttcagctcaaacttgagagtgcccttactgaactag

SEQ ID NO: 215811 - DNA, 74 bp, Homo sapiens
gcagtgtggacaaaattcctgataaaggttcctaaaagtaaagctttagaggccaccaaattggcaattgaagc

SEQ ID NO: 215812 - DNA, 100 bp, Homo sapiens
cccgcctctacaacatcaagaagctcactgttaatgaagcggctgctcaactctgtgtgaaggataatgccctgctgacaagaagagatgagctttttgc

SEQ ID NO: 215813 - DNA, 100 bp, Homo sapiens
tacgtgtgctttttcaagggagctgataaagaacttcttcccaaaatggggttatgtaccgaaggactctaccgtgtcagcgggaataaaactgaccaag

SEQ ID NO: 215814 - DNA, 75 bp, Homo sapiens
gttctgcgtggggacggccgcctagagtggttcagccacaaggaggtagaacaatctccatctagcagcaaactg

SEQ ID NO: 215815 - DNA, 100 bp, Homo sapiens
gtagccctggcatgttttctgcatttcgggaagaccggcagttacatcttccggcccagctgtactcgcctggggcagtgggccatcggctatgtgagct

SEQ ID NO: 215816 - DNA, 140 bp, Homo sapiens
tggacatccctgtccagcgagtctgtgtcctgcccccagggatcgctgagccctgcaacctccctaatgcagggagcagcagaaggcccaggagcgtcaggagttatggcaaggtctggaggagctgcggctacgccggc

SEQ ID NO: 215817 - DNA, 75 bp, Homo sapiens
tggagattctggaggagtgatggacagggtctacatcaactattacgacatgaacgcggccaatgtgggctggaa

SEQ ID NO: 215818 - DNA, 83 bp, Homo sapiens
gctcctttggttgaatccccaggcccttgttggggcacaaggtggcagcttctgaaagttctgctgaagacagtgagcaggaa

SEQ ID NO: 215819 - DNA, 130 bp, Homo sapiens
gtcgcctagtaaacggggctgctggtgggccgcgtcgaagacatggaccagggctacggaggctttcccaacgagcctgctgcagtcattgccctcaacaccattaaggaatggcttgccaagaatcacc

SEQ ID NO: 215820 - DNA, 75 bp, Homo sapiens
gccgaatcttccttcaggatatcaaggatgccttccgcgccttccaccctgacctggaattcgtgggcaagttct

SEQ ID NO: 215821 - DNA, 97 bp, Homo sapiens
ctccagagtagctgggattacagatctgtaagagcaaagctaaagaatctcagcagtattatcacagcttggctgtccggcagagtctggctgtcca

SEQ ID NO: 215822 - DNA, 109 bp, Homo sapiens
actaccatgacgaaaacatgtactacagccagtcttctatgtttccacatcggtcagaaaaagatgaattacatgaacgacagccttcgcaccgacgtcttcgtgcggt

SEQ ID NO: 215823 - DNA, 101 bp, Homo sapiens
gcgtcaggtccgggctcctggacttcgcctttcccgagccctggaggtggggagaaaagagagaagaagaaggaggttcctgctgtgccagaaacccttaa

SEQ ID NO: 215824 - DNA, 100 bp, Homo sapiens
gagccggagcgcggagcccggctcccgcaccatggaggaggacgacagctacggaacaagatcactcaaggtgaaggataatctactaataccagcactt

SEQ ID NO: 215825 - DNA, 83 bp, Homo sapiens
tctacagccgaccctccaagttagctgacttctgggggaacaacaacgagatcctcagtggggcagaaccccttcgagctggc

SEQ ID NO: 215826 - DNA, 141 bp, Homo sapiens
gcagcgactagggctcgggcgccggcgagatgcctttgttcaccgccaaccccttcgagcaagacgtgggttaaatggaagctgatcggcgttcacatggaatcctcctcacgtagctcagatggatggccacagggagca

SEQ ID NO: 215827 - DNA, 82 bp, Homo sapiens
ctgccgctgccgcacctccgtagctgactcgatatgtaactggttcatcaatgcccggcggcggcttctcccagacatgctt

SEQ ID NO: 215828 - DNA, 75 bp, Homo sapiens
atgatgacaaggaactgcagacagcgtccatttttggctcagccaaagtccttctgtacctcccttagtgaatcc

SEQ ID NO: 215829 - DNA, 100 bp, Homo sapiens
cagctgccctcgcccagccagctgcgggagaagatcatcatcaaggaggtgttccctgtcttggctgcaaagcactgtatcatgcaggccaatgctgagt

SEQ ID NO: 215830 - DNA, 75 bp, Homo sapiens
cagagccacacacaccatcatggtcctggggttgtgtttgcacattatggtcccgtctggagacaacaaaggaag

SEQ ID NO: 215831 - DNA, 100 bp, Homo sapiens
catccgcagcaaggacgtccgcagcaggctgttttggagtcagcggaagatcaccaaggccagggagtggttccaccgcactgtgaagattgactcggac

SEQ ID NO: 215832 - DNA, 98 bp, Homo sapiens
cctactcgcccgccaccctgcgctgccgccgctctgaggagttaaagaatcccgcccattgtcagttcctgttaaagccatgttgaatatatctgaaa

SEQ ID NO: 215833 - DNA, 100 bp, Homo sapiens
atgaatcaagagtgatttgttaatcttcatcactggtccagctgtaataccagggtacttctccgttgatgtgaataatgtggtactcattttaaatgga

SEQ ID NO: 215834 - DNA, 96 bp, Homo sapiens
tgctcttctaagaaacaagtctgccataatctccatctgtgttggaatctgttaactagaattgaatgatctggcacgggaccctccagcacagtg

SEQ ID NO: 215835 - DNA, 75 bp, Homo sapiens
gagacattagaagagagacttgtccagtaatgaaggtgatgccatcaaagtttttgtgcgaattcgtcctcctgc

SEQ ID NO: 215836 - DNA, 80 bp, Homo sapiens
ggagacactggcattggaacttcctgttctgatagcgtggaagctcttttggtacaccagaaggccagaatggaacgact

SEQ ID NO: 215837 - DNA, 100 bp, Homo sapiens
agcacctggaatctaaggagtggtttgtgcagctctattaccacgggaaggctgttgaagctcaaatccgaagttttggacagactccttctcaactact

SEQ ID NO: 215838 - DNA, 100 bp, Homo sapiens
agcggggtggtgaacctcagcaccgagaacatctactctttcaactacaccagccagcccgaccagatgatcatgacgcagtcctgaggtttaatggggc

SEQ ID NO: 215839 - DNA, 100 bp, Homo sapiens
ggaaagaccgctttccatggagagtaaaggccggctggaaagtccccaagcgattctgaaaaagagttccacgtcctcccttatcgagtctttgttcccc

SEQ ID NO: 215840 - DNA, 50 bp, Homo sapiens
gggacctgcccgcctgcggctgctccgggactttgcctcccgggccaaac

SEQ ID NO: 215841 - DNA, 122 bp, Homo sapiens
ctcgcggttagcccgtcagtccctgctctgtgcgcgcctccatctgggccatggatgggtaatggaactgctggtccatctgaataaacgtataaaaagccgccccaaaatacaacttccag

SEQ ID NO: 215842 - DNA, 88 bp, Homo sapiens
cccatacacctaccagatgcacggtgattgcagtggtcatggacgtgttcacagacatcgacatcttcagagacctgcaagaaatatg

SEQ ID NO: 215843 - DNA, 71 bp, Homo sapiens
tggttgccttactggctgatgtggttctgcagccccggctaacaggttttgccagatcgaagtcatcctaa

SEQ ID NO: 215844 - DNA, 100 bp, Homo sapiens
gaggctggataacctaccagggattcctttcccagtggacgcattgctaccatttatgttcgttataagcaagttcatgctctgagtcctgaagagaacg

SEQ ID NO: 215845 - DNA, 50 bp, Homo sapiens
tgatgatgtcatcctgacagaaggattttttgccaggtggtaggagagat

SEQ ID NO: 215846 - DNA, 50 bp, Homo sapiens
cttgtatctacagagtatccgtgaggaagtccagaacacatattacataa

SEQ ID NO: 215847 - DNA, 96 bp, Homo sapiens
ggacgggactgccaagagacatgttagaaggacaagccataggaaaaggatacagagtagagtttcatgaacctgaaacttggtggaaatttgatc

SEQ ID NO: 215848 - DNA, 100 bp, Homo sapiens
cgaggagatattcagacattaaagaactatcactggctcaatgatgaaaattggcagagggggtcgatttgggaggaaaggtgtggctataaactttgtt

SEQ ID NO: 215849 - DNA, 101 bp, Homo sapiens
aaatcaagattgcgtttctcaaagtcctacagtatgtccgtggttcagaccctgtattaaagcttttggacgacaatgggaacattgctgaagaactgagc

SEQ ID NO: 215850 - DNA, 51 bp, Homo sapiens
aacaaaattctgaactcaggacttggcaaatgccttattggaggaactgga

SEQ ID NO: 215851 - DNA, 90 bp, Homo sapiens
ctgctgacacggaaccctcacctcaacaagtgtaaacaggaacatcgataagtagtgtaaaaacttgcacaatgaaatccgaagccaagg

SEQ ID NO: 215852 - DNA, 100 bp, Homo sapiens
ccgcccgcctgcccagagagggccagagcgtcggggaggcaagatgatccaccagcggttccatcctacacttggaaacagcacttcttctcagtctcag

SEQ ID NO: 215853 - DNA, 100 bp, Homo sapiens
gtggagcggccgccggagatgcctgacgcatctgtctgaggagcggtctcctctgagcctccggcctccataagacccaaaacagatgacacctcttccc

SEQ ID NO: 215854 - DNA, 75 bp, Homo sapiens
aggatggacaaatacgtgggacagtttattcgacttgaatcaacatttaaggacccccgcactgctgaagaaaga

SEQ ID NO: 215855 - DNA, 50 bp, Homo sapiens
tcccagggccaggcgccgctcagaacggctctgtgtgctccgggatggag

SEQ ID NO: 215856 - DNA, 83 bp, Homo sapiens
ctcgctctgtgtcagcgcccgaacccaaaggggtggacgcggcctccaggctgaccccgcactacatctacccaccagccatc

SEQ ID NO: 215857 - DNA, 98 bp, Homo sapiens
gaaaactggacattataacattaagatggagaagagttcctgggaaatacatgagaggagaatgaaggaacagtaccttatggctatctcagataaag

SEQ ID NO: 215858 - DNA, 98 bp, Homo sapiens
ttttctttcccttattccagttgatccccagaagcacatggaacaagcagctatacccctgataagtcatcttttaatttagctacagttgttgctga

SEQ ID NO: 215859 - DNA, 83 bp, Homo sapiens
ccaaaagacaggctcttcacctgaaggtgcctgtgtcagtggccatgatgactccccaggtgatcacccctcagcaaatgcag

SEQ ID NO: 215860 - DNA, 82 bp, Homo sapiens
tggaactgtgttcagattcacttccttctcatccttttccaccagctaaaggttatcaatactctggctgaccatcatcatc

SEQ ID NO: 215861 - DNA, 100 bp, Homo sapiens
cacataacaagcagcagtgaggacaccaaagaccagcatctcagacatgtcgaaaaagatgttttgatccctaaaataatgagagaaaaggccaaagaga

SEQ ID NO: 215862 - DNA, 83 bp, Homo sapiens
ggtcagtgtgcttgcttggagatcaggacgcaaagaatcattcttacagtcactctcatggaatgaagaagaggtcttctgat

SEQ ID NO: 215863 - DNA, 82 bp, Homo sapiens
gaagctcggggacgcgaggagccggcgtggccctggggggatatgagactttctactcggaatatcctgagtgttgcgtgga

SEQ ID NO: 215864 - DNA, 100 bp, Homo sapiens
cttctgaaatttacagaaacaaactacatctcagggttgctccttgagggcaggacagttcttatggctttatccgttgcgtaagcacagagaggtctgc

SEQ ID NO: 215865 - DNA, 75 bp, Homo sapiens
cgccaaagccttaatttatctgaaagctccgacagttagttaatatgtgcatcaacccagatccagagaagcgac

SEQ ID NO: 215866 - DNA, 75 bp, Homo sapiens
agattttgatgtggatgatgccaaagttttattaggttgcttttaactttgacagaggaagaattttccaagacg

SEQ ID NO: 215867 - DNA, 75 bp, Homo sapiens
ctgactctcggactgagaaacgcaagcccgcggcgccatggctcacgtcggctcccgcaagcgctcgaggagtcg

SEQ ID NO: 215868 - DNA, 80 bp, Homo sapiens
cgaaaggagcaagagcaagatcaccgtgacatccgaggtgcctttctccaaaagccagatcaagtcaaatttacgttctg

SEQ ID NO: 215869 - DNA, 75 bp, Homo sapiens
cgcgaggtccgcgcagcccagcgcagccatcacatacccccggcctcatgagtacctgtccccagcggatctgcc

SEQ ID NO: 215870 - DNA, 76 bp, Homo sapiens
tccctaaactagcagtttagggtgtcaggtattgacctgatggacatggcttcggacatcctgcagcccaaaggag

SEQ ID NO: 215871 - DNA, 100 bp, Homo sapiens
gcagcggcggcgagcgctcgcgagcggctgcgggacgcgaggtttccgggtggaaatgagttctcaacagtttcctcggttaggagccccttctaccggg

SEQ ID NO: 215872 - DNA, 74 bp, Homo sapiens
ccttagctgtgctcgcgctactctctctttctggcctggaggctatccagcctgccgcagcgggaaccgcaaga

SEQ ID NO: 215873 - DNA, 100 bp, Homo sapiens
taaaatgaaagaaaccgctgaggcttatttgggaaagaaggttttatgggagaattgtagacaaacctggtgaccatgatcctgagactttggaagcaat

SEQ ID NO: 215874 - DNA, 97 bp, Homo sapiens
tttcaaggggcctgttgccaacaggtgttatttggaagatggagcttcaaagggtgcctggctgaaccggtcaagtattatttttgcgggaggtgat

SEQ ID NO: 215875 - DNA, 80 bp, Homo sapiens
taagcctggaagaaaaagatacaacgaactagcacaacgaggcactgccagtgaaagatgtagaagataaacctgaacaa

SEQ ID NO: 215876 - DNA, 101 bp, Homo sapiens
atttctctgaacatactgccttatgggacagatcaagtgagactgctgctcctcgggccattttgaccggccatgactatgaggtcacatgtgctgcggtg

SEQ ID NO: 215877 - DNA, 83 bp, Homo sapiens
cctcgctaaggaattcccggcccctcagggccacggctttagcggtgtcttttgcgtgtaaacaggaacatcgataagtagtg

SEQ ID NO: 215878 - DNA, 75 bp, Homo sapiens
tgcatgtgaagttatcaaaaacagaccccctcagaattcctggagaaccccagccagagctcccgactaacagct

SEQ ID NO: 215879 - DNA, 100 bp, Homo sapiens
ctggagttcagcctcagaatccaggagttcattgaactcatccggcagaataagagactggacgctgtgagtcattgcacgtgcagaagagcgacgtgga

SEQ ID NO: 215880 - DNA, 83 bp, Homo sapiens
cagaggtggaggcgctttgaaagggggggccctcagcctcttggccttgaacgggctgttcatcttgattcacaaacacaacc

SEQ ID NO: 215881 - DNA, 98 bp, Homo sapiens
catctgcctttatgatgaatgcaataattctccattgagaagagagaagaacattctcgaatacctagaatggggtgattgatgagatttatcgtgtg

SEQ ID NO: 215882 - DNA, 82 bp, Homo sapiens
gcagcagagaaaaaagggagcggtctcgtagcccaagaaggaagtttgtggtatatgaagtattgcgagaagatgagttttc

SEQ ID NO: 215883 - DNA, 75 bp, Homo sapiens
acaagcacatggaggctcagcgggccgaggaggtaattggtacgcctcagagaccggcagcgtcaaacaccctgg

SEQ ID NO: 215884 - DNA, 74 bp, Homo sapiens
gttaactatggtagcccacccagcattgtggcataagaagggactggctgtgttattctgcatattgcagttct

SEQ ID NO: 215885 - DNA, 90 bp, Homo sapiens
cctattcccagtaacagaattgatactaccagctctgccagttgggttgctggttctttcaggcctcatgcattgtgcgtcagcagcaat

SEQ ID NO: 215886 - DNA, 88 bp, Homo sapiens
agtaccggctgacctcgctgtacgccgagcacccaggcgactgcctcatcttcaagggagagcaacaagccccggccctcagagctca

SEQ ID NO: 215887 - DNA, 75 bp, Homo sapiens
aacgggagccaacatggcagcggggttcgggcgatgctgcagggcgttcgtggcattcagggatgtggctgtgta

SEQ ID NO: 215888 - DNA, 90 bp, Homo sapiens
gcctccaccagaggaaaatagtatgggaattcctattatggtaatccatcagctgaggctctcagagaatgaaagtgtggccctgcagga

SEQ ID NO: 215889 - DNA, 83 bp, Homo sapiens
cccatccgaaaggatgatgaagttcaggagtatgagcattactggacagagttgagaggaactactcttttcttttataccga

SEQ ID NO: 215890 - DNA, 100 bp, Homo sapiens
cgggcgtggaggaggtggacatcccgtctaattccgtgtaccgctacccgcccaagtccggtactcgtcctcacaagtgcccagactgcgacatggcctt

SEQ ID NO: 215891 - DNA, 75 bp, Homo sapiens
gtcatgacaggcgaggtgggttctgaggtctcctctgagcctccggcctccataagacccaaaacagatgacacc

SEQ ID NO: 215892 - DNA, 90 bp, Homo sapiens
gcaaagaggatgagggggaggaggccgcttcccccatgctgcaggtggttgtgtcaaaccgattggtgacatctccatgctgtattgtca

SEQ ID NO: 215893 - DNA, 51 bp, Homo sapiens
ctttatgcagctggtgccttggttgaaggggaccagctgcctccaggacac

SEQ ID NO: 215894 - DNA, 76 bp, Homo sapiens
gtatcacaaaagaagagagtatattgctgcttttctcagtcactttggcacggtgctggtgacagctttgtgggag

SEQ ID NO: 215895 - DNA, 80 bp, Homo sapiens
gttctgacattttgccttctgattctaactgcaaaggtagttgatgtcacttggcgatattcctgcaaacatgaagaggt

SEQ ID NO: 215896 - DNA, 100 bp, Homo sapiens
caggcctcagcagccaggtggagcccctccccactgatcgaagacctcaaggttgttaccccttctacaaaactgacccgttcatcttcccagagtgccc

SEQ ID NO: 215897 - DNA, 82 bp, Homo sapiens
tcagcctcctaagtagctgggactacaggctctgaaccaagttgtcctatgggacaagattgttttgagaggtgataatccg

SEQ ID NO: 215898 - DNA, 90 bp, Homo sapiens
gacctaatggagatgctggtcgccctggggagcctggtctcatgggacccagaataggatcacgagaccattcaaatctctccattcctt

SEQ ID NO: 215899 - DNA, 51 bp, Homo sapiens
gggaaaatcccggtgtccagaggcagcaattccatttccgtgagggcgttt

SEQ ID NO: 215900 - DNA, 100 bp, Homo sapiens
ccggacaatatagtggttctccccaactgctcaaaaaccttaatattgttggcaatatatcccatcacaccacatattacatcattgaagtgaatgccag

SEQ ID NO: 215901 - DNA, 100 bp, Homo sapiens
agagaagcccctaatccgcagccagagcctgcgtgtggtcaagaggaagccaccggtgcgggagggcttttactacaaggatccgagcattcccaggttg

SEQ ID NO: 215902 - DNA, 50 bp, Homo sapiens
ggcctgacaacttcatctttgagacgagttgtactgctgtcacaggaaat

SEQ ID NO: 215903 - DNA, 90 bp, Homo sapiens
cactgctctgctgtctcctgcaagaactggctcaagaaatttgcctcgaaaaccaagtacggggctgatgttgacgtcaaccaccacctg

SEQ ID NO: 215904 - DNA, 90 bp, Homo sapiens
gcgttcatcgaggagggcacattccttttcacctcagagtcggtcggggaaggccacccaggtatcagaagagcaaggtcaagaaaaccc

SEQ ID NO: 215905 - DNA, 96 bp, Homo sapiens
ccgagctggagagcgtggacaagagcgcggggcaagtggctcggaacacaggttttcacctcaaatggccccacggtgatcatgcccacctggttc

SEQ ID NO: 215906 - DNA, 82 bp, Homo sapiens
ccacctacagccgcttgctagaggttgaggacgctcagtgtcgtgaaaactacccctaaaagccaaaatgggaaaggaaaag

SEQ ID NO: 215907 - DNA, 75 bp, Homo sapiens
gtcggtgctccggggaggtcacctgacgaggaggttttcatactctgcacaccatcctcggggtccagtgtctcc

SEQ ID NO: 215908 - DNA, 50 bp, Homo sapiens
gctggacccggaccggttttgggagttgtaagacgttcatcgccgtgtta

SEQ ID NO: 215909 - DNA, 100 bp, Homo sapiens
aacgtatggactacctccttttgataaataggatttaccaatccttggatgaagtgcttgggaagtctttaagtgccataatcaactgccatttcaaaga

SEQ ID NO: 215910 - DNA, 100 bp, Homo sapiens
cactggatgagggcccgaaaatggtttcagcacctgtgtcagcatcttcatgatacagttaagaggaatcttgacagcgccacttcccctcagaatggcg

SEQ ID NO: 215911 - DNA, 50 bp, Homo sapiens
tctcgtggagtcagacaatgagaggctccaccagctgcagaatttcaaca

SEQ ID NO: 215912 - DNA, 113 bp, Homo sapiens
aaaaagttactttccagacacctgaagcagctcctctcagaccatgagctcaccaaagttgggtatcagaaattaaaaaagaagaagataaaatgcactttcatgaaactgag

SEQ ID NO: 215913 - DNA, 90 bp, Homo sapiens
cagagtggccatgtatgtgcatgcatatacactctacagtgctgttagaccttttggctgcagaacgtcaagtctgagttggagatggcc

SEQ ID NO: 215914 - DNA, 104 bp, Homo sapiens
aagggaccacggtcaccgtctcctcagaccctacagcttggggcctgggctcctctgaccatcctcattgagaaaggaaagtgagtccagagaagttgatgctt

SEQ ID NO: 215915 - DNA, 100 bp, Homo sapiens
cgcagggcctgcagcgggagctggacggcgagcgcgagcggcgcgagaaaggactttgaacatgtcggggatcgccctcagcagactcgcccaggagagg

SEQ ID NO: 215916 - DNA, 100 bp, Homo sapiens
cgtagctgcttccacgtccttgcttcacctcaggtaaagctattgacctgaaaagtggttctggaaaagtgtaccaaggccctgcaaaaggtgctgctga

SEQ ID NO: 215917 - DNA, 74 bp, Homo sapiens
tcgcccgcagcgctcgccccacgggccgcgcgtggagggtcccggtgcagagcattgtagaccaaggagccatg

SEQ ID NO: 215918 - DNA, 111 bp, Homo sapiens
tttcgccagcccgtgccgcgagcgcggcctgcaggaggtggaagttaaacgagctgagcctcgggacagcaagagccaagcgccgggacagccaggtgccagccagtgggg

SEQ ID NO: 215919 - DNA, 80 bp, Homo sapiens
taatatggagacactaatcgaatgtcaatcagagaaccactcacgaattcttgtttggtgcccttgctgaactggttgat

SEQ ID NO: 215920 - DNA, 75 bp, Homo sapiens
cgtgcttcgtggcccggcaccgttccgcggacgtgctcggagcgcctggaccatgctgctgagcgcctactggca

SEQ ID NO: 215921 - DNA, 74 bp, Homo sapiens
aaaactccagtgattttcaatcaaacattgcataggtaagcggaagggtacagccaatgcccgaatgccagaga

SEQ ID NO: 215922 - DNA, 75 bp, Homo sapiens
agagattgttcctgtggagcaaagagctgcatcatgaattcaggagcatcgtattctgagagaagcctcacaaag

SEQ ID NO: 215923 - DNA, 100 bp, Homo sapiens
tctattttgacagtgatgccaaaattgaagaatgtaaagacttgaacatatttggatctactttcaccaacaatcaccagtggtttacacaacattgcaa

SEQ ID NO: 215924 - DNA, 100 bp, Homo sapiens
tttgattcttttgaaccaggaatgtttcctcctactcctctttcacctgccaggttcaaacgaggacctattaaacttggaatggctaaaatcacgcaag

SEQ ID NO: 215925 - DNA, 100 bp, Homo sapiens
tctcgcccaacagcagcaaccctatcatcgtctcctgtggctgggacaagctggtcaaggactctgaagacctactgggtgagcaaaggcagtgccttta

SEQ ID NO: 215926 - DNA, 100 bp, Homo sapiens
cgttctaaacctgttccatgtgcctgtgaaccagattttcatgatggctttttacttgaagtacacagagaaagcttggatctctcaaaggccttggttc

SEQ ID NO: 215927 - DNA, 100 bp, Homo sapiens
gaggaggagctgaagaggaaagtggagcaatgcagggtcccctctgagccctctcaccttgtcctgtggaagaagcacaggctcctgtcctcagatcccg

SEQ ID NO: 215928 - DNA, 99 bp, Homo sapiens
cctcctcccccctcccctcagcggtggctcccaagaagtccgagacacgcggtgaggcggcgacgggctccggacactacccgaagcagtccttcacca

SEQ ID NO: 215929 - DNA, 90 bp, Homo sapiens
tcctggaactgtacacctattggaacccttaagagatcctgcagatcattcagctggacctagacctgaagtttaagaccaacatccggg

SEQ ID NO: 215930 - DNA, 71 bp, Homo sapiens
gccacatactatccgtttgttcaggaaccaccagtgacagaatagtgtgtgtaccatatcagtggcgtgta

SEQ ID NO: 215931 - DNA, 95 bp, Homo sapiens
cacttagcaattgctcaagagctgaatgataggacagtcattttgtttactcattcagccctgttgcaggtcccaataaactcttcataaggttg

SEQ ID NO: 215932 - DNA, 80 bp, Homo sapiens
tcactctgggactcgtggggctgcagcaccgcaacgcgcagcctggatcatcccattcttctgttaccagatctttgact

SEQ ID NO: 215933 - DNA, 96 bp, Homo sapiens
taatcagaatagcaggtcagagggcttgctttcagaaatcctccgaaaggaagaggaccccaagactgcatcccagtctttgctggtaaaccttcg

SEQ ID NO: 215934 - DNA, 100 bp, Homo sapiens
gaatgcttctcacccggaaacaaacttgccagttgggtatcctcctcagtatccaccgacagcattccaagggcaaacttgaagataaatcttttgactc

SEQ ID NO: 215935 - DNA, 75 bp, Homo sapiens
atggaaaaccagttattgaatatcaagaggaggagttgttggtcctacgggaagtgaaggtgctggcaggtcttc

SEQ ID NO: 215936 - DNA, 75 bp, Homo sapiens
gtcacttgtgaattttgaaccagcagcaagaagagcatccaatatctggttcaaaccttgtactactcagctgat

SEQ ID NO: 215937 - DNA, 75 bp, Homo sapiens
ccaacatccgaagggagcacctaatgcagatctaatctttaagactggtgggagcaactttcatcctttgaaacg

SEQ ID NO: 215938 - DNA, 83 bp, Homo sapiens
accacatagacatttacgcggatgtcggcgaagagttcaaccaggtgtgggcaagagcagtttactgttgcgttttgcagaca

SEQ ID NO: 215939 - DNA, 83 bp, Homo sapiens
ctcgcggaccggcgtccccggcgcgaagaggctggactcggattcgttgcctgagcaaattgtggctactaatttgccccctg

SEQ ID NO: 215940 - DNA, 101 bp, Homo sapiens
ctgaatgctcgccgcgacctggaccgcatcaatgccagcttccgccagtgccagggtgaccggccagtgagctcctccgacagcgaggcccccgaggccaa

SEQ ID NO: 215941 - DNA, 100 bp, Homo sapiens
gggatttctgccttccctgaatcagacaaccttttcaaatgggtagggaccatccatggagcagctggaacagcactgcaacatggtgctggagaacgtg

SEQ ID NO: 215942 - DNA, 51 bp, Homo sapiens
cagtggcagcactggatggggctaagtactataaacctctacttgaaaatg

SEQ ID NO: 215943 - DNA, 82 bp, Homo sapiens
gtgattttcagaggggaatactaagaaaggctgggaggcggcagaatgcagccagaggagggcacaggctggctgctggagc

SEQ ID NO: 215944 - DNA, 74 bp, Homo sapiens
caggcagacctggtgtctccagctgatgatttgtccctgtctgaaggcaaagaggccatgctgcgacagaagga

SEQ ID NO: 215945 - DNA, 75 bp, Homo sapiens
gcctttcaccttccaccatgattgtgaagccttcccagacatgtgacacagcttgcagatgggtcaagggttgtg

SEQ ID NO: 215946 - DNA, 123 bp, Homo sapiens
gaacttttagaatatgaaaataagagccctgaggatccacaggtcttggataatttaattggttggggtcagataagaagaggagtgacaatcaagccaacagtagatgatgactgaagaata

SEQ ID NO: 215947 - DNA, 100 bp, Homo sapiens
ctatgacaacggcaaggtggtcatcacagacttcgggctgtttgggatctcaggcgtggtccgagagggacggtaccaggatttctatgcattcgacctg

SEQ ID NO: 215948 - DNA, 75 bp, Homo sapiens
aacttgtcttctccagcggaagtgaccgtggtggcttcaataaatttggtgatgatgaggagtctgatgaggaag

SEQ ID NO: 215949 - DNA, 101 bp, Homo sapiens
gaactttttcacttactgcaggattttcagcttcagcaagcaggtggataattactgtaccttcctcatggaaaaagttttatttaaagtgttatttctca

SEQ ID NO: 215950 - DNA, 75 bp, Homo sapiens
ggtttactcctcatgccgagatggaccttgggcagctcagttcacaagggaaacctcaaatgaattctgaagggg

SEQ ID NO: 215951 - DNA, 100 bp, Homo sapiens
cctggcaggacgtgaaggggaagaggcccaccctggagtaaccctcactggagaatccagagtatgcccagcagtggaaccagtactatcagaaccaggg

SEQ ID NO: 215952 - DNA, 100 bp, Homo sapiens
tgaaactgaagaagataacaatcaagatgaatatgaccctatggaagcagaagaagctgaggatgaagaagatgatcctaactgaattgggtggttttga

SEQ ID NO: 215953 - DNA, 75 bp, Homo sapiens
gagaggaggcttaccacagccggtgtgatgaatgcagactctgctaccattttggctgtttggatcctcctttga

SEQ ID NO: 215954 - DNA, 75 bp, Homo sapiens
gaaacattaagacctactaccagacgttccatcctcagagcagcctgaactgttcctaaagaaacttcagcagtg

SEQ ID NO: 215955 - DNA, 75 bp, Homo sapiens
tggtgtttttctcaggtgaaaggagcagtagatgatgatgtagcagaagatcaggatcctcatgaccagccaaag

SEQ ID NO: 215956 - DNA, 80 bp, Homo sapiens
tccttactcacggggacatttgcatccagatacgggaagaaactggcgatggaatatgagaggagccctctggaaagaaa

SEQ ID NO: 215957 - DNA, 100 bp, Homo sapiens
gcggatctggaggagcagttgtctgatgaagagaaggagtttaccgtgaagaagctgactgctatgaacagcatgtgaaggtggaggaattccagcccag

SEQ ID NO: 215958 - DNA, 81 bp, Homo sapiens
cgcctccaagaagccagcccaggaagggggcaagggcagccccgagaaccacaggtgtacaccctgcccccatcccgggat

SEQ ID NO: 215959 - DNA, 100 bp, Homo sapiens
ccacaattagaaaactagaggatggatattttggaggagccaggaccatgcagtgctggaggccgagaggcagaagatgtcagcccttgtgcgagggctg

SEQ ID NO: 215960 - DNA, 100 bp, Homo sapiens
ttctgattggccggtgtacttcagtttccgtccaaggtccgcctcctacctccttctgcttcggtggaatgcagtagccctctgggcctgggatattgtg

SEQ ID NO: 215961 - DNA, 100 bp, Homo sapiens
cacagagagtgcaggtcagaaaataaaggagctgctgtctggaattggcaacatctctgagagggtttgaaagtattcttgaagggctgtttggacctgc

SEQ ID NO: 215962 - DNA, 74 bp, Homo sapiens
gctcatggtcaccggcttcgtcttcatccagggcatcggtgtcatggagaaactccagctgggcccagagattc

SEQ ID NO: 215963 - DNA, 82 bp, Homo sapiens
cccggctccgctctgccgccggcgcggctcatgggcagagtcggccgggcgggccgggtgctggagaatctggtaaaagcac

SEQ ID NO: 215964 - DNA, 51 bp, Homo sapiens
atcaggacatggagtatgaaagacgatggatagctcccagttgatccattg

SEQ ID NO: 215965 - DNA, 100 bp, Homo sapiens
acaattgccaaggtgggactgctttcaactttactgtgcttgaagctgcaaaggttgcccccaagtttcctggcagtgtgtgatactgaggaggtgagct

SEQ ID NO: 215966 - DNA, 100 bp, Homo sapiens
cggcaagtctactgcgggctggtccgggctcctcaggttcagacccgaccgttatccagtcggttcgtggagaggagagcaatggcaccagcatgatatc

SEQ ID NO: 215967 - DNA, 51 bp, Homo sapiens
atcagtgcgagaaccaggagctcgagtcactcagcctctgaagaagcttcg

SEQ ID NO: 215968 - DNA, 51 bp, Homo sapiens
ggctgacatggccaccaacacacgtggttgaaactttgaatggattaaagg

SEQ ID NO: 215969 - DNA, 90 bp, Homo sapiens
catgtgctaactaccagacgatgaaagaacatttcctctagtttctggataatgagcaggcacacaggaagcaagatttccagatgtagc

SEQ ID NO: 215970 - DNA, 75 bp, Homo sapiens
gttaagaaccaactggttgaggttcaatgcagacaagacggatgtgatgctgcttcatgattgtatccaaaaaac

SEQ ID NO: 215971 - DNA, 50 bp, Homo sapiens
ctggtgcgtggcccagcctcagataagactttgaccccgacgcaggcttc

SEQ ID NO: 215972 - DNA, 90 bp, Homo sapiens
ctcatttacaccatttcgcaaagatgtatcctccactcctcgctggccaccatcctgctgcccaacagaagaagctcttctgtctccgat

SEQ ID NO: 215973 - DNA, 100 bp, Homo sapiens
cccactgctggggtggtggttccaatgagacagggcacaccaaactccatctggtcgcctgcgaggccgctggccaggcctgagcctctgccaccatggc

SEQ ID NO: 215974 - DNA, 51 bp, Homo sapiens
gccgaggctgttgctgttgatctgtggtgtctgaatctccctggctccatg

SEQ ID NO: 215975 - DNA, 83 bp, Homo sapiens
aaggacttacgacgggagatcagctatgccattaagaacatccatggagtcaggtgagaagccctaccactgcaactgggacg

SEQ ID NO: 215976 - DNA, 100 bp, Homo sapiens
gaagaaatttgccctaaatcataaaactttgtaagtggcagaacaaggatttgaagctggcagtctggttccagtaagactttgaccccgacgcaggctt

SEQ ID NO: 215977 - DNA, 87 bp, Homo sapiens
gaagctttggatcagacttttgtgttgcagttcggacccaacatgagtgaagtttcctgcaagaaacgggacgactatttggaatgg

SEQ ID NO: 215978 - DNA, 101 bp, Homo sapiens
ccaagaggaatgacaaacaaccagctcttcagatcttccaccacctcctgtgccgccacctgctataaagtcacctactgcccaatccaagacacagctgg

SEQ ID NO: 215979 - DNA, 80 bp, Homo sapiens
acatttcttttgtgcaagatgagcctcaagtgcttctgcattacagattctgtttcactgaggccatctatccgatttca

SEQ ID NO: 215980 - DNA, 100 bp, Homo sapiens
gagttttctctgccatgttgctattgcaggacggatgttcagcctcacaggcctacaacaaatccaaacacttctaaatttgctcagaaatatggaggtg

SEQ ID NO: 215981 - DNA, 97 bp, Homo sapiens
ggcatccccttcctggagtataagcacttcgtgacccgcaccttcttccccaaggagcatccccccggtccttcagaatccaaacacgctttccgtc

SEQ ID NO: 215982 - DNA, 100 bp, Homo sapiens
ctgcagccaattcaaattcaattttcgccaactctagtatttccaaatctgaagtctgtccgagaactcattttgaaacgtggacaagccaaggtcaaga

SEQ ID NO: 215983 - DNA, 100 bp, Homo sapiens
atatgaccctatggaagcagaagaagctgaggatgaagaagatgatcttcgcaaatactgtggacaatgcccgcatcgttctgcagattgacaatgcccg

SEQ ID NO: 215984 - DNA, 100 bp, Homo sapiens
cgcgcccctccagccctcgccgccctcgccaccgctcccggccgccgcgctccggtacacacagatgctgacctgacctttgaccagacggcgtgggggg

SEQ ID NO: 215985 - DNA, 75 bp, Homo sapiens
cagtctggaaagctttaggagttcacagtcctgattacatcaaccccagagccgtgcagctgggctcccttctcg

SEQ ID NO: 215986 - DNA, 97 bp, Homo sapiens
cagccctacctgcactgctctggtctagtacaaacaggctgctggcattgagctgattgggcagaaagtggcccatgctctggcagagggactcgga

SEQ ID NO: 215987 - DNA, 50 bp, Homo sapiens
aactactctacggcatctggagcaactgaatggccacatctgttgctcag

SEQ ID NO: 215988 - DNA, 100 bp, Homo sapiens
tcaggtcctcgggggcggcggccacgccaaggacgggtgctgcccaccaaccctgaggagagctggcaggtgtacagctctgcccaggacagcgagggca

SEQ ID NO: 215989 - DNA, 51 bp, Homo sapiens
cttgatgaacagttatactcatttgcgggagacatgagacatcaatcaata

SEQ ID NO: 215990 - DNA, 90 bp, Homo sapiens
gttaatgcacaaaactatgttcgatttattgaagatgagcttcaaattccagggtttggacagaggagccaaaggccaaatttccacttt

SEQ ID NO: 215991 - DNA, 98 bp, Homo sapiens
caggacgtgaaggggaagaggcccaccctggagtaaccctcactggagaatccagagatatggatcagaaactttcgaagttggtagaagagctcaca

SEQ ID NO: 215992 - DNA, 50 bp, Homo sapiens
cgccatcgttgctgccttcttcgtcaagggatcactacttgtgtgatgtg

SEQ ID NO: 215993 - DNA, 75 bp, Homo sapiens
gtaagcctatgtcatttcatccaccacattacttagggggaggacggaatctctcgctcttgtcgcccagcctgg

SEQ ID NO: 215994 - DNA, 82 bp, Homo sapiens
gtaaccaagaggaagttggaggtgccgacgggacctgaagtgcagacccctaagcagaaaaatatggctcaggagactaacc

SEQ ID NO: 215995 - DNA, 75 bp, Homo sapiens
ctttacagaaggtaccctcttctcagtgaaccaggagttcagtttaatgatgtgatggtggcaggtgggatggag

SEQ ID NO: 215996 - DNA, 74 bp, Homo sapiens
ttcttcagctgctcggacagatgaagctccccaaggagctgcagatattgatgatgttaagaagttcaaaccgg

SEQ ID NO: 215997 - DNA, 100 bp, Homo sapiens
aacctcatctccctgctggaggtcctctcgggggacagcctggtcccgagcagcccggcccaccatggacccctctgcccacaggtcccgagcagccccg

SEQ ID NO: 215998 - DNA, 75 bp, Homo sapiens
taagcagcttcggaaaggagccaatgagggatcttaccaacagtatcattacagctgtgttcctttcagtagttg

SEQ ID NO: 215999 - DNA, 100 bp, Homo sapiens
gtaagtgatgttaatgatgatgtcaggagggcagcagtagaatcacttgggttcattctattcagcattcaacagaaggtgtcaaattgacagctctcaa

SEQ ID NO: 216000 - DNA, 100 bp, Homo sapiens
cttctggccactgggcgagcgtctggcagttcagacttggttccttcaacctagagaaagttgaaaacccagctgaagtcattagagaacttatttgtta

SEQ ID NO: 216001 - DNA, 118 bp, Homo sapiens
cgccttttcagaagcggctgcgcacggactgctggagatggtggagtccgtcaagaatggatcttggagaatgtctgaaagtccatgacctggctttaagagcggattatgaaattgc

SEQ ID NO: 216002 - DNA, 132 bp, Homo sapiens
cttcttccaagtctaccagcaccttcagtaacacacctggaacaggaacccagcaacaattcttctgccaggtaaaaaagctcacacatttgacttggaagcaatgtttgaacaaactcaaagaacagctgt

SEQ ID NO: 216003 - DNA, 100 bp, Homo sapiens
aatatcaccgcatagagctggaccccagcaaggtcaccagcatgtcggccgtggagttcaccccattgccgaaccaagatcactccatggatgaaatgac

SEQ ID NO: 216004 - DNA, 148 bp, Homo sapiens
tggacactgcttagagaatcctctccaggaatgccacccagcacagttagaagaatgggctctcaaaggctgtcctggataatgaaagacttactgcagaggagatggatgaaaggagacgtcagaacgtggcttatgagtacctttg

SEQ ID NO: 216005 - DNA, 100 bp, Homo sapiens
tccaggcatgccccgctacgagctggctttaatcctgaaagccatgcagcgggtttgcctgcaatgagatttcattctctacatttaaaggacatccttt

SEQ ID NO: 216006 - DNA, 100 bp, Homo sapiens
cggcctgatggagtaagaggggttggctgtgaatggagtgcattattggttcatccagtcacagaaccaaaagccaccacagttgatgtgtttcttccag

SEQ ID NO: 216007 - DNA, 74 bp, Homo sapiens
agttcctgatgatgaacagtttgtcccagattttcagtctgataaccatgacttcaaacctgcttctattgaca

SEQ ID NO: 216008 - DNA, 83 bp, Homo sapiens
gagttcattgaactcatccggcagaataagagactggacgctgtgaggcttgggcactgtttaaaggaaagttccgagaaggc

SEQ ID NO: 216009 - DNA, 101 bp, Homo sapiens
agacattgttcttgccggctccctacggtgccgtgtgtgcgtgagagaagaccagtctttcctctaggtagatgacattaatgctgataagaatatctctt

SEQ ID NO: 216010 - DNA, 90 bp, Homo sapiens
cgcttttcacgtcacctggagagatgcacaggtgagccaccagctgggcagcatcatggacctcttcaccaccagcctggcccttgcggg

SEQ ID NO: 216011 - DNA, 95 bp, Homo sapiens
cctggaggccgtcctgcaggtggttgccatcgcggccttcaccagcgagaaccctctgcccacagtggagattgccatccggaacacgggcgatg

SEQ ID NO: 216012 - DNA, 100 bp, Homo sapiens
cctcggccccccaatggacagtctcccattgcccttgcttcaggacagaggtgtgatcagcactggaaaagatgcctgcccctgctgccacatatgaaag

SEQ ID NO: 216013 - DNA, 74 bp, Homo sapiens
cctcggtttagtctagaatactctgcgaatcagctttttggccctaggttctgggtccctccgagcaaaatttg

SEQ ID NO: 216014 - DNA, 74 bp, Homo sapiens
gaagagacatgagatggtggaagaatccccagctgataggaagatgtcttcaggaaatgctaaaattgggcacc

SEQ ID NO: 216015 - DNA, 51 bp, Homo sapiens
aaaagatgacagactacgccaagaagcctacgaggacaagcagaaactcaa

SEQ ID NO: 216016 - DNA, 75 bp, Homo sapiens
ctgggaccccggaatcccgcgcgctgcccacgattcgcttctgagtttcagacccaaagtttacgcctatcagac

SEQ ID NO: 216017 - DNA, 75 bp, Homo sapiens
tgctagtctgtttatgctttcctactctccaaagcatggattccgtgaaggaacaacacctaaacccaagagggc

SEQ ID NO: 216018 - DNA, 75 bp, Homo sapiens
gacagacgcacagacacctgcaggcgcatattaaatttcctattgactacccctattcaccacctaccttcagat

SEQ ID NO: 216019 - DNA, 100 bp, Homo sapiens
agctctgcgagacccaatatttgccaataagaatggttatggtgcaagttcttcagtctgactgagacaccagaggattacactatcattgtcgatgagg

SEQ ID NO: 216020 - DNA, 82 bp, Homo sapiens
caaaacagaaccttccaaatttccttttccaactaaggcactcttaaaagacccattttacatgggcttgtaccagaaacga

SEQ ID NO: 216021 - DNA, 83 bp, Homo sapiens
cgccacccgtgatcgtgcgccgaggcccgcgaggggtcgccgcccaggccagaagcggactcctagaagaggggagcagcaag

SEQ ID NO: 216022 - DNA, 100 bp, Homo sapiens
acggctacgacgtggattcgaaccagaatccagttcggacctatggttatgcgttccttttttccctcactggatattttggaatctcctttgttctggc

SEQ ID NO: 216023 - DNA, 100 bp, Homo sapiens
gtctcggcgcctttggtgctgcttcctgcgtggctcgtgatggtcgcctgcagcccgcactccttgaggatcgatatttggagttcttacaacatggcag

SEQ ID NO: 216024 - DNA, 76 bp, Homo sapiens
gcacagtatgaccggcagatccgcctgtggggactggaggcccagaaacgaggagaaaagccatactcctgtggca

SEQ ID NO: 216025 - DNA, 100 bp, Homo sapiens
gggtatgaggctgggactaagccaagggattcaggtgtggtgccggtgggaactgaggaagcgcccaaggcaagacatctgtatagattctgcttcatcc

SEQ ID NO: 216026 - DNA, 95 bp, Homo sapiens
aaaacccggtactgtgcactattctttcccaggaaccattggataaggataaagagttcacagttaccagccaagaaaacttgaaaatgagcagc

SEQ ID NO: 216027 - DNA, 100 bp, Homo sapiens
ttcaattcatggtttcttataaccctactccacgtctggatttaagcgagagcctcactggttcccaggacatcaacctgaactggatcctccccgatac

SEQ ID NO: 216028 - DNA, 100 bp, Homo sapiens
tcgctacacagcaatgcatcgagtctaccctgatgggagagtctgcatttccatcctccacgcgccaggcgatgaccccatgggctacgagagcagcgcg

SEQ ID NO: 216029 - DNA, 90 bp, Homo sapiens
caaagaatgacagcaagaggcaaaacttcggacatagaggccaaccaacctttggagcttgcctgggaccagtggcagggaccccggaac

SEQ ID NO: 216030 - DNA, 82 bp, Homo sapiens
agctgcgaggaaaatggcggcgggaggttcgatacaagaggctgttttcctagcgtggcttgctgcctttggtaagaacatg

SEQ ID NO: 216031 - DNA, 82 bp, Homo sapiens
atcgcctgctttgattcattgaaagattttttatcaagcagaaatgcatcgaacaacgagaatcaagatcactgagctaaat

SEQ ID NO: 216032 - DNA, 75 bp, Homo sapiens
ccaaactcagctcgcccggtttctcggcgaatgacagcacagatatccttggaacagaagatcttattgtggaag

SEQ ID NO: 216033 - DNA, 92 bp, Homo sapiens
atcaagcatggatcggcgctggacgtgctcctctccatggggttccccagagcccgcgcgcaaaaactgattattccaagtggaagttgccc

SEQ ID NO: 216034 - DNA, 83 bp, Homo sapiens
cgctggagctgggtcagtccgccgctcaccccgcggccgcaccttcccgccttctcagcaaattgtggctactaatttgcccc

SEQ ID NO: 216035 - DNA, 75 bp, Homo sapiens
gcaggacgtgtctttcactgtgatgcctggacagacacttgccctgaggagctctacggtgactttgaagacttg

SEQ ID NO: 216036 - DNA, 75 bp, Homo sapiens
catgattctcatcatggtggtaatactacagttgagaagaagagctgtccagaccaaaacgaagaagacgttagc

SEQ ID NO: 216037 - DNA, 100 bp, Homo sapiens
gtgaagaacttccagatcatccatggcaatgacccagcctcgtcttacagcgtgactgcaaagaaaaagacttttgttttgcaaaagaaaagcagctcgg

SEQ ID NO: 216038 - DNA, 83 bp, Homo sapiens
ccccactccgcagtagaactccagttgtttacattcagagctctatcaataagaggaatacatattacagtgaattcgacaac

SEQ ID NO: 216039 - DNA, 100 bp, Homo sapiens
gcaacagcttctttcatgggaagaggatcggcagaaagtgttgacactggaagaacgttgcagcaaattagaagtgccatcagacaagatcagttgatca

SEQ ID NO: 216040 - DNA, 100 bp, Homo sapiens
ccgagcgccgcgccttcgcgcacaagatcaacagatgccatggacaatattaccaggcagaaccaattctacgatacccaagtcatcaaacaagaaaacg

SEQ ID NO: 216041 - DNA, 82 bp, Homo sapiens
ccccacggccgttttcatggctgcttaaaatggtctatggtctgtctctgagcaggccgggctctcgccatgggtcactgtc

SEQ ID NO: 216042 - DNA, 50 bp, Homo sapiens
tccctatttgaagaacttggaagtagtcggatgtttcatcttctcgctcg

SEQ ID NO: 216043 - DNA, 100 bp, Homo sapiens
cattgagagccttctggacaggaaggtgcaggccctgaagggtcagcctgggccagtgggcccccaggggtacaatgggccaccaggattacaaggattc

SEQ ID NO: 216044 - DNA, 76 bp, Homo sapiens
gcttgtgatccatgggcgagtctacgatgtcacccgcttcctcaacgagtactcgcttcccactcccaaagggggc

SEQ ID NO: 216045 - DNA, 100 bp, Homo sapiens
aggagttcgagcagatcgacaagtccgggagctgggcggccatttaccagcctcccctggtgaagacacaaactgtcaccatctcagataatgccaatgc

SEQ ID NO: 216046 - DNA, 75 bp, Homo sapiens
ttcctttttgaagtagttccagagcttctggaagctgaggtctactgagaagtcgtcccagaagcagaaagtgaa

SEQ ID NO: 216047 - DNA, 100 bp, Homo sapiens
tgagtagggtgtgacctccgcagccgcagaggaggagcgcagcccggcctcggatggggaagcagaatagcaaactggcccctgaagtgatggaggacct

SEQ ID NO: 216048 - DNA, 80 bp, Homo sapiens
ctaagcaaaaccctgcagaacggctgcctaatttacagcaaccatgaggtgtatgcaacagcgttattgcaacaggctaa

SEQ ID NO: 216049 - DNA, 95 bp, Homo sapiens
caggggctggggcgcccagggcctcttccccagagaaggctgaagaggacaggaggctgccgggcagccaggaggaagagcaagcaggccctgag

SEQ ID NO: 216050 - DNA, 82 bp, Homo sapiens
cgcgggtctgctctgtgtgccatggacgggaagccatcttcgacaagagcacagggaaggttgttttgaagacgttcagcct

SEQ ID NO: 216051 - DNA, 74 bp, Homo sapiens
tggtggaaaaaggaatcattgacccaacaaaggtggacattgaagtggacctaattcggttttccttttaaaag

SEQ ID NO: 216052 - DNA, 100 bp, Homo sapiens
ggagtgggaacaggcttcggcgaacacaaagctccctgtgctgtcaggaatctacaggacttggctcgtatttacattcgacgcacacttagaaatttca

SEQ ID NO: 216053 - DNA, 75 bp, Homo sapiens
agattctgccaattcgttttcaggagcatctccaggaacctcggagagctgatagatcggtttgtggctgatttc

SEQ ID NO: 216054 - DNA, 96 bp, Homo sapiens
tccagcgctcggacccccctacccacgctgaacgagagggacacggagcaggtggtggacataatgcgagttaacgtggacaaggttctggaaaga

SEQ ID NO: 216055 - DNA, 83 bp, Homo sapiens
cggcagtcgcgaagcagcaaccatggattattgcatcgagcttttagtgtcttcttattcaacaccgaaaataagcttctgct

SEQ ID NO: 216056 - DNA, 83 bp, Homo sapiens
atcgcaccgcggacgcccgctgagcttggcgcacgggccgaccaggcccgcgatgctcccagcccggtgagacctgcctgaat

SEQ ID NO: 216057 - DNA, 50 bp, Homo sapiens
agctgtaattgaacttcttgaaaaatcagacagagtctcgttctgtcacc

SEQ ID NO: 216058 - DNA, 80 bp, Homo sapiens
ctctatgtatcagctctggatcctcggggccctggacaacacaggtggcccgctgcaagcagctgatctgtgaccccagc

SEQ ID NO: 216059 - DNA, 99 bp, Homo sapiens
gcagtcccccaggatacagggtcaaaggagagcacaaccatcgcagttggaagcccatggggcaggctgctttgctggctctgcaagaaaatggactag

SEQ ID NO: 216060 - DNA, 90 bp, Homo sapiens
cggtaccggaccctgcagccgcagaggctattgagggcacctacattgacaagaaatgccccttcactggtaatgtgtccattcgagggc

SEQ ID NO: 216061 - DNA, 83 bp, Homo sapiens
ttagagagtttgaggtggaaacagaacggctgaataggttggtcaaagaaaaagtgatgtatgaaaaagaggcaaaacaacaa

SEQ ID NO: 216062 - DNA, 101 bp, Homo sapiens
gccgggtcaactgctcggtctatgtgcagctggagaaggtgtgcaggggaaaccctgctgatgtcaccgaggccagacacctgaaagaccccgccgtggca

SEQ ID NO: 216063 - DNA, 75 bp, Homo sapiens
cggtcaggaacggtttcggacgatcacaacggcctactacaggggtgcaatgcggaccctcgaggtctcggagca

SEQ ID NO: 216064 - DNA, 90 bp, Homo sapiens
gttacccaacagcactatctacgtggtcgaacctggatacctagaaactcccacgttaacccacgaaaccttcaaagcactgaagccagg

SEQ ID NO: 216065 - DNA, 83 bp, Homo sapiens
cacagccgggcgttgggggaaaggctagcttgtcactttctgcaaaggtttccctcagggagcctcctgctgccaggcaccat

SEQ ID NO: 216066 - DNA, 96 bp, Homo sapiens
ctgtggagatggcggctcagaagataaacgaggggctggaacacctcgccaaagcagagaaataatgacttcctgaagccacagatcatcacccag

SEQ ID NO: 216067 - DNA, 90 bp, Homo sapiens
caagctcgcgccggatgcggagcgcggtgctgccggtggagcttcaggctttggctcccttggcctgatgacgtccgtcctggtctgccc

SEQ ID NO: 216068 - DNA, 90 bp, Homo sapiens
gacacctgcaagactgtgaggtttaaaaacaaaatctgtgttgagagcagctaccaggaggcagcctgaacgtgtcagggcctgggcacg

SEQ ID NO: 216069 - DNA, 149 bp, Homo sapiens
ggaagagggagtcaccactggacctccaaggaagccacgtgcagacatctacaaccttcgatctcctgacgatatgaagtattcagaacagaagaggaagaaaaaataaaatctcagggacaagatgttacatcatcagtatatttcat

SEQ ID NO: 216070 - DNA, 83 bp, Homo sapiens
cagggagtggagcttggtttcgggatctcggtgctgcagacggcgagacctcctgcacagctccgggttgacaaatggtgggg

SEQ ID NO: 216071 - DNA, 83 bp, Homo sapiens
cacgcacctcgtcaccaaggccaagttcaaacaagctgtatataaacagacaatgaaactctttgcagagctggaaattaaaa

SEQ ID NO: 216072 - DNA, 50 bp, Homo sapiens
cgtggaggcagaggtggcatggggcaaactaggcgtggcaactgctggct

SEQ ID NO: 216073 - DNA, 100 bp, Homo sapiens
gcaaggagagaattcagctccagttcaaaagcctacaaaatctgagactgtcattgcttttataagtggattgtattacacagagcatgaatatacttct

SEQ ID NO: 216074 - DNA, 90 bp, Homo sapiens
cctagcgcttggcctgatttcaacagtttgaagaaaacaggtctgaaacaaggtcttacccccagctgcttctgaacacagtgactgcca

SEQ ID NO: 216075 - DNA, 87 bp, Homo sapiens
tatcaaacttgggaataaaaagtattgtaacagctgaagtgtcttcaatgcctgcttatcgttaactgaagacaatatgcaaaattc

SEQ ID NO: 216076 - DNA, 82 bp, Homo sapiens
gcgtgtctaggtgagtcgcggtgggtcctcgcttgcagttcagcgaccacggactggcattgcggactgacctccagggaga

SEQ ID NO: 216077 - DNA, 100 bp, Homo sapiens
aggaggaggaggacgacgacgatggggatatcggtctctaattaacagaagatggcaaagcccagccacagcagctatgtccttcagcagctaaacaacc

SEQ ID NO: 216078 - DNA, 101 bp, Homo sapiens
caatagggaaagtgaggcagctgcaaggagggcggcgggactgcactcgagtgtccagacctgctcgatgggaagtcgagacaacatgagtgtgattttga

SEQ ID NO: 216079 - DNA, 100 bp, Homo sapiens
tggtgcagagattgtctcggctcttgagtacttgcactcgcgggacgtggtataccgcgacatcaaggcctccccaaagccagtcctgtgtcaccaatca

SEQ ID NO: 216080 - DNA, 100 bp, Homo sapiens
aagccatgcccgaggatgctaaggggcaggttcaaaccttgtactactcagctgatcacaagctgcttgatgggaacctactagatggacaggctgaggt

SEQ ID NO: 216081 - DNA, 82 bp, Homo sapiens
atggcccacaagcagatctactactcggacaagtacttcgacgaacactacgagtaccgctcaccatggatgatgatatcgc

SEQ ID NO: 216082 - DNA, 107 bp, Homo sapiens
acaaaagaggacagcacttccggtcacgccatcgttgctgccttcttcgtcaagacagtctccttcccctttccaggcacttgaggctgaacccttggaaagaaaaa

SEQ ID NO: 216083 - DNA, 75 bp, Homo sapiens
aagcagccaaccatgctcaacttcggtgcctctctccagcagactgcgaacgtgctggccaaagcgctctatgac

SEQ ID NO: 216084 - DNA, 100 bp, Homo sapiens
cttcaagtcgagtgacgctgttttctgattccaagccacttgggtcagaggatatagataatcaaggggaggagctttatctttatatactgcccttacc

SEQ ID NO: 216085 - DNA, 80 bp, Homo sapiens
tcggcagtccacccaccgccgccgcctcccaggtatctttaggtggtgttgatcttacagtccgggtgctcacgacagga

SEQ ID NO: 216086 - DNA, 96 bp, Homo sapiens
cacagcaatatctctgggctttcacagacaaaacttgccaatggcacttccagtatgattgtgcccaagcaacggaaactctcagcaagctatgaa

SEQ ID NO: 216087 - DNA, 82 bp, Homo sapiens
cccgggttcaagcaattctcctgcctcagcctcctaagtagctgggactacagcccagctcaacattggcaatgtgctccct

SEQ ID NO: 216088 - DNA, 100 bp, Homo sapiens
gctcggctgcgggaaatcgggctgaagcgactgagtccgcgatggaggtcttcccaaaagttatcttctgggaagatgccaatacatgatcacgactctg

SEQ ID NO: 216089 - DNA, 75 bp, Homo sapiens
gccagggcctcaagtgcgatggaatactcccccagttgcaagaggcgcaggaccgtggaagacttcaacaaattc

SEQ ID NO: 216090 - DNA, 83 bp, Homo sapiens
agagagagcagctgctcatcaaagcctcaattcctggaaaactcaagcaattcgtatttgacttacattctggaaaactgcac

SEQ ID NO: 216091 - DNA, 74 bp, Homo sapiens
cctctgatcaaagcccccaagagaggccctggccaacgtcaacattgggagcctcatctgcaatgtaggggccg

SEQ ID NO: 216092 - DNA, 100 bp, Homo sapiens
cggcagcgaactgggtggcgaacggggcgagcctggaggattgtcactccaacctcttttcgctgttcaggacaaagaggtgtgggcaggccactgggcc

SEQ ID NO: 216093 - DNA, 83 bp, Homo sapiens
cctggcgccaaggggttcgtgcgctgtggagacgcggagggtcgaggcggcgcggcctgagtcgtcattgaattttgagaagc

SEQ ID NO: 216094 - DNA, 95 bp, Homo sapiens
gacgcgctcaaccagatcgcgcgggaggaggcaaaaccttcaactgaggacttgggggataagaaggaaggtgaatatattaaactcaaagtcat

SEQ ID NO: 216095 - DNA, 74 bp, Homo sapiens
agtgcagaggcatcacctgaaagggttgtgagtcccggcccagcccctccacccccctgcccccccgatgcgac

SEQ ID NO: 216096 - DNA, 100 bp, Homo sapiens
tgcctcagcctcccgagtggctgggattacagaaaatgcatccgatgcagatttatggctcctgaacagttgcactgtaaaaaacccagctgaagaccac

SEQ ID NO: 216097 - DNA, 100 bp, Homo sapiens
gttgctctgtgacctgagggtattggacaatttgtagctaagactcccggataccctgaagtcgggaaatgatcctgggtttgagcagtttaaaatgtca

SEQ ID NO: 216098 - DNA, 55 bp, Homo sapiens
caaatgaagaacggcaggatacagacatgattactgagagtcttcagttactagg

SEQ ID NO: 216099 - DNA, 83 bp, Homo sapiens
gtgggagaagagctgaagagacctggagccgacagacggttcgtgagccacacatctccccacaccaagctcctccatacaag

SEQ ID NO: 216100 - DNA, 90 bp, Homo sapiens
gctcccaggagccagtcaaggttgtctgtctgtccatccactcaggacatctgcagttctggagagtcttggcttctgggaggaagtcag

SEQ ID NO: 216101 - DNA, 100 bp, Homo sapiens
gtcgccagaaggaagatggcggatctggaggagcagttgtctgatgaagagaaggaataagacgagttggaagaagacctgatcaacaacttcagggtga

SEQ ID NO: 216102 - DNA, 143 bp, Homo sapiens
ccaaagttccgtgagttgatcatcgaattctccaaaatggcccgagacccccagcgctaccttgtcattcagtgtctccaatccttccagaagtcaaacatctccacagaccacctctactagtccttcctttcttctctctg

SEQ ID NO: 216103 - DNA, 111 bp, Homo sapiens
tccccggccacacaggcctgaagctacccccagcatggcctctctgggcccagcgagaaccctctgcccacagtggagattgccatccggaacacgggcgatgcggaccag

SEQ ID NO: 216104 - DNA, 100 bp, Homo sapiens
actgaacttatgacgtctggaacacttaaaacgtggaacaatccaaagttttaatcaaagaaggtggtattcagttgctgcttacaatagttgatacccc

SEQ ID NO: 216105 - DNA, 83 bp, Homo sapiens
gtggaccacaggccctcgttgcccagatcctgacatttaccccggtaactgctgggcatttaaaggctcccaggggtacctgg

SEQ ID NO: 216106 - DNA, 74 bp, Homo sapiens
ggaaccgaataggtgtttccttcattgatgatggaagtaatgcaacagagtggttctgatggctttgtaaatat

SEQ ID NO: 216107 - DNA, 100 bp, Homo sapiens
caagctgtcatcacaaaagagttgattgaaattatctctggtgctgcagctctgactgactgcattgcacagatgatggatatttacgtatgtttgaaac

SEQ ID NO: 216108 - DNA, 75 bp, Homo sapiens
ttcctctccagctcagccgcgtagacgaaatctcacaaaactgtcccttatcttcagtcacatgctggcagaaat

SEQ ID NO: 216109 - DNA, 75 bp, Homo sapiens
aaagtatttgtggtaataacccttaccgggagtttcactgaaggtctctaattaacagaagatggcaaagcccag

SEQ ID NO: 216110 - DNA, 90 bp, Homo sapiens
cgcaactccgccgcccaccatggcttccgaggagctgtacgagatacgatgaatggattaaagcagataaaatagtaagacctgctgata

SEQ ID NO: 216111 - DNA, 75 bp, Homo sapiens
aagccccacatttgcagctcattgaaggaaagggaattcacaactttgaatcaattgaggatgccaccaatgccg

SEQ ID NO: 216112 - DNA, 100 bp, Homo sapiens
tcagattccctgaagctctgctgccccgcaggcaccttcgggccctcctgccttcaccccaccaacaactgaacgctttggtcaggctgctacaatggaa

SEQ ID NO: 216113 - DNA, 100 bp, Homo sapiens
gggaggacctcacttccccggggtgtaataatgttaactgagggggtcctgatgacaacttaattgaaggtggaggaacaaaatttgtctgcaaacctgg

SEQ ID NO: 216114 - DNA, 100 bp, Homo sapiens
aatccttttggcttagagatcactaatccatcttcagcttcaattacaaggtgttgaaagcagcaggggcctagaagacattaaaccgataccacagaaa

SEQ ID NO: 216115 - DNA, 88 bp, Homo sapiens
cttgaattccccttcgtgaatggttcggctgaaatcatgggaatgactctactaatgatggggtcagcagatgctcttccagaagaac

SEQ ID NO: 216116 - DNA, 100 bp, Homo sapiens
agctgaggacacacccaggaaaagactcaggacggacaagcacagtcttcggaaggaaagtatgtgatggtgatgggagtggttcaggcctgcagccctg

SEQ ID NO: 216117 - DNA, 80 bp, Homo sapiens
ggctccctcgggagctcatcttcgtggggcgtgaggagtgtgagctcatgctacaggagggagccatggatttgctgcgg

SEQ ID NO: 216118 - DNA, 97 bp, Homo sapiens
tggcgcgaggccgcagagctaaatgggggcctctccagggagtgctctgttcacggctccatcgctgttagtcatagcaaatgacagaagtcccttg

SEQ ID NO: 216119 - DNA, 51 bp, Homo sapiens
tcctgagtagctcggattacagtatttagcatttacgtgtggcttaatcag

SEQ ID NO: 216120 - DNA, 90 bp, Homo sapiens
cgcgcctgtagctcgcgggcctcgcaggacacaactcagatgggaagttcatcgcccgggcacagcggatagagtacgactgtgaactag

SEQ ID NO: 216121 - DNA, 96 bp, Homo sapiens
gaggccttcccagctcttctcacagaaggaagataaactccacatatttctgtcatcatcagatttgaaatatttaaagtggatacaaaactattt

SEQ ID NO: 216122 - DNA, 96 bp, Homo sapiens
gaggctggggcgcaggggccagcgcgccgctcaaagcttggattctgccgtgccactcacgaatggcgacacagaagacgatgctgacaaaatgca

SEQ ID NO: 216123 - DNA, 98 bp, Homo sapiens
tttgatcgtcttcctcttcagccatccaggactcatctgatgatgtgagaagagttcagaggagggagaaaaatcgtattgccgcccagaagagccga

SEQ ID NO: 216124 - DNA, 100 bp, Homo sapiens
tttgtctcttccagatcagaactgaggaacaaaaacccccatcctgggaaaaatggggaagctggtgaattatgtaacctcattacgctggatgtagctc

SEQ ID NO: 216125 - DNA, 80 bp, Homo sapiens
accctggagcctcagttggaagcagccgatccagcctgcggagcctgtggggcagctgctcagatggaagataaaaagcc

SEQ ID NO: 216126 - DNA, 50 bp, Homo sapiens
ctgagagtcctgaattcttactgggaccatggccaacctggagcgcacct

SEQ ID NO: 216127 - DNA, 97 bp, Homo sapiens
acagtgacgtgttctccaaataccagctcgacaaagatggggttgtcctctttaagaagcccgtggaccgggagcccgtggaccgggagccggtggt

SEQ ID NO: 216128 - DNA, 98 bp, Homo sapiens
aaagagccctggaatgtgaagagacaggaggcagcagacggacatccagcttgggcatgaaccacgacgatgaccactcatcttgcgctggcaggtcc

SEQ ID NO: 216129 - DNA, 100 bp, Homo sapiens
attcttttgaactagatcgagctgatagagaccctagtaacatggagtctatgggtaaaacatcagggaagctgtttgatagcagtgatgatgacgaatc

SEQ ID NO: 216130 - DNA, 85 bp, Homo sapiens
gactctatacagggacgtgatgctggagaattataggaacctggtctccctggatgagacgtgcaggtaccatcaggaagcagcg

SEQ ID NO: 216131 - DNA, 121 bp, Homo sapiens
gttcgcgtctctctgctgcggcgcggggaccgctgtgctctcgcccgtggaccgggagcccgtggaccgggagccggtggtgtgccaccccgacctggaggagcggctgcaggcctggcca

SEQ ID NO: 216132 - DNA, 100 bp, Homo sapiens
caggtctgcaaaagatgattttacatccattattgggaaatgtcaaggcagttatttggcagaaaagcagagtatcagatcacaagatggctctcatgtc

SEQ ID NO: 216133 - DNA, 98 bp, Homo sapiens
gaaattctgacatgttagtggtgaccacaaaagcaggccttcttgagtgtgttctaggtcagtggcttcaaagactccagttggattcattggactgg

SEQ ID NO: 216134 - DNA, 99 bp, Homo sapiens
ctcgtgcctccctgaaccactccactgcctttaaccctcagcctcagagtcagatgcagggaaacaaaccatcaggcctcccagaaagtatccgggatc

SEQ ID NO: 216135 - DNA, 83 bp, Homo sapiens
gaaacaccatggctgcggcggcccagctctctctgacacagacccaacatgagtgaagtttcctgcaagaaacgggacgacta

SEQ ID NO: 216136 - DNA, 101 bp, Homo sapiens
cagcgcgggccccgcagaggaaggaagccggcgggcgggactttgaataatgagatgagtacagatgaagacaatgaatatgcagaagaaaaggatagcta

SEQ ID NO: 216137 - DNA, 100 bp, Homo sapiens
ccggactcagccaagttccccaacggctccccgtcgtcctggtgctgcagcgatgaaggatttgggggcagagcacttggcaggtcatgaaggggtccaa

SEQ ID NO: 216138 - DNA, 89 bp, Homo sapiens
ctttcccttattccagttgatccccaggttcgatacaagaggctgttttcctagcgtggcttgctgcctttggtaagaacatgtcgtcc

SEQ ID NO: 216139 - DNA, 83 bp, Homo sapiens
gacctgccttctcatcagctacaccaccaacgcctttcccggagagtacatccccaccgtggattacatctactacaacgacg

SEQ ID NO: 216140 - DNA, 82 bp, Homo sapiens
ctgcccagacggctcacctgtgcgggatggaacaaaaggactgaatgtgggcccagttggcgtcattctgctttgacctaaa

SEQ ID NO: 216141 - DNA, 98 bp, Homo sapiens
cttctttaatcaaaagaaaaagaagaaaaaaactaaaaagatatttgatattgatgaagctgaagaaggtgtaaagtgtaaggcaaacattggtgggc

SEQ ID NO: 216142 - DNA, 98 bp, Homo sapiens
caaatagtacttcaagagcacagtcttatgtaagaagcctggctacagataagggaccaaaatgactgactcaaaatatttcaccacgaccaagaaag

SEQ ID NO: 216143 - DNA, 100 bp, Homo sapiens
atagtcctggatcttctggggttccctatgcaaatgccaaaggaattggttatccagaaccactcacgaattcttgtttggtgcccttgctgaactggtt

SEQ ID NO: 216144 - DNA, 100 bp, Homo sapiens
aggaacgttgtgtgtggcagcaaggagcccgcagagattgaggagagcaccacagtggtcaccacacagtctgctgaggttggagctgctgagacgacgc

SEQ ID NO: 216145 - DNA, 75 bp, Homo sapiens
gtcccgggctctggtgacgccgtggccgcaggccacacgtgctcttggggagatgctggctgtttcgggctgcgt

SEQ ID NO: 216146 - DNA, 83 bp, Homo sapiens
cgccgggacacctggaagccgagaaatgatgaggagcgggaaggcctcctgcaccctggagaccgtgtgggaagacaagcaca

SEQ ID NO: 216147 - DNA, 50 bp, Homo sapiens
gcataccactgccattgacaaagagagttggaagctgtgaaatgtttcag

SEQ ID NO: 216148 - DNA, 90 bp, Homo sapiens
cctcagccctaccagcactggtcatgtctaaagactctcttgagcctgagggatccattacagtttcaatgggtattgacttttgtgatt

SEQ ID NO: 216149 - DNA, 86 bp, Homo sapiens
gctggactgctcagggtgccagacctcatcgcctctgtgtcctttgtcccaatagtaacaactccctcctggcctttccgggcacg

SEQ ID NO: 216150 - DNA, 100 bp, Homo sapiens
cagaggcttaaggtcttcagcggggcgctccaggaggcactcacaggtgatgcagaagatggggaagaatatgatgacccttttgctgggcctccagaca

SEQ ID NO: 216151 - DNA, 83 bp, Homo sapiens
gcatctcgggtaacaaccgagcccctcctcgcagcctcctgtccaaatatgacccccagaaggaggcagagctccgcacctgg

SEQ ID NO: 216152 - DNA, 90 bp, Homo sapiens
caatgtcagagaaatctttgacaagagaatagtgacagtggtacaggaaagaaagaaaaagaaaagaaaaacagaaagggcaaagacaag

SEQ ID NO: 216153 - DNA, 75 bp, Homo sapiens
cgtctgcggaagtgcagctgcctcagttcttagcgcagctgtgagccgtgagctttgaggcggtgggatgtgtca

SEQ ID NO: 216154 - DNA, 75 bp, Homo sapiens
gtcgtcactgtactggtatagcaatcaaatgggagcagattaagcgagtaaaagactcggatgatgtacctatgg

SEQ ID NO: 216155 - DNA, 78 bp, Homo sapiens
atatctccatttcatgatattccaatttatgcagataagtgaaggtggtgtttttaaggctcatcttactttcccaaa

SEQ ID NO: 216156 - DNA, 82 bp, Homo sapiens
cttctataaaaaacttatgtttgaacagcaaaaatcgaagcctaaagaaactgttccaactcttgctccaaaaactctttca

SEQ ID NO: 216157 - DNA, 75 bp, Homo sapiens
ctcaacttcggtgcctctctccagcagactgcgggctggaccccaatggagaacaggtggtgtggcaggcgagcg

SEQ ID NO: 216158 - DNA, 83 bp, Homo sapiens
gtcctcccatgtcaggccggggaacactgggggatagctgggagtatggccaccctgctccacgatgcggtaatgaatccagc

SEQ ID NO: 216159 - DNA, 101 bp, Homo sapiens
atctggctggagccctgcattcgcggcgtgtgcaggatgtacagttacccagcacgtgtacctcctcctcctcctattgctcgggctgtagtgccctcgaa

SEQ ID NO: 216160 - DNA, 131 bp, Homo sapiens
aaaagatgccctctgaatctttgtgtttggctgcccaggctcgcctcgactccaaatggttgaaaacagatatacagctatctctgaagggcacaaatcagaaggcaccatgcctcctaataaagaggcca

SEQ ID NO: 216161 - DNA, 75 bp, Homo sapiens
tgctcctgcggctgtatggagcgattttgcagatggtcctgctggttggggcagacaacttcacgctgcttggca

SEQ ID NO: 216162 - DNA, 100 bp, Homo sapiens
aggctgcctccgagcgccgtccgccaggaagactccctgcctcctgagtcccacaaagttctcatatagatgtggttcgttttccatgtgtggtttatat

SEQ ID NO: 216163 - DNA, 100 bp, Homo sapiens
aaaatggatacagttcaatggacgctgtggctcaggtgaccttggagtcatctctgaatttgagcaatggtgaaacggaatctgtgaaaaccatgattgt

SEQ ID NO: 216164 - DNA, 100 bp, Homo sapiens
ctggagaagccacagcttctgcaaagacaggaggagtgggccctttgtgattgttctctggggccggactgagaaatgcctgaaggagacgacggaggag

SEQ ID NO: 216165 - DNA, 75 bp, Homo sapiens
tcagatagtctaatctcagtttttcagggtgtcagtgtggaggcagttgatccagtgttccaagctaaaatgttg

SEQ ID NO: 216166 - DNA, 74 bp, Homo sapiens
cggcaccgcgcctgctgccgggttgcgctccgtgcacctcttgcgggtgaatgttggatgtgtacccaaaaagg

SEQ ID NO: 216167 - DNA, 100 bp, Homo sapiens
ctggaagctgatgctgctggacgccactttccggggtgcacagcaagtggttctcagaggcactgtgactgacttccctggatttgatgagcgggctgat

SEQ ID NO: 216168 - DNA, 50 bp, Homo sapiens
gcgtccttggcagcccagctggtactccaatatctttgttacctccccaa

SEQ ID NO: 216169 - DNA, 100 bp, Homo sapiens
cgaagccccttcccaggtcctcaactttgaagagatcgactacaaggagatcgaggtggaagagaactccatccggcacaacctgtcactgcatagtcga

SEQ ID NO: 216170 - DNA, 50 bp, Homo sapiens
gtttgcttccccttctaccatgattacttcacagagaatgcagttgtctt

SEQ ID NO: 216171 - DNA, 73 bp, Homo sapiens
gttcccccaaatgtctgactctgactctcggactgagaaacgcaagcccctggcgaagcggtgctgcctccag

SEQ ID NO: 216172 - DNA, 100 bp, Homo sapiens
agcagttgttgcacaggtaacagttcacacaaaagatgttggacaatttctacaattttgcttcatcatttgctgtctctcaggcccagatgacaccaag

SEQ ID NO: 216173 - DNA, 75 bp, Homo sapiens
tgaaatccattggggagagggacctcatctttcacaaaggccttcacaactcccccccgaagggcgtgaccatcc

SEQ ID NO: 216174 - DNA, 50 bp, Homo sapiens
tcatcattaaggacggaggcacggagcgggacggtatgcgggccatcctg

SEQ ID NO: 216175 - DNA, 100 bp, Homo sapiens
tgaaaagtgaagaaagtgatcataggagaaaaccatttcagcacatcaaagctgcccaatgatctgcttgatttgcagcagccaacttttcacccatctg

SEQ ID NO: 216176 - DNA, 98 bp, Homo sapiens
gcggcggcgctcggcgatggtaggcgtccctggagcggccgccttccagcatgccttcaattaagttgcagagttctgatggagagatatttgaagtt

SEQ ID NO: 216177 - DNA, 100 bp, Homo sapiens
ctcccaacctggacgcttgcaccggagtattaaatccagctagagaatggcatgtgcaaagatacagaggtacagagaactacaacttagtacagaaagc

SEQ ID NO: 216178 - DNA, 82 bp, Homo sapiens
gctttgaagtgggagcccagttggaagcccgggaccgtttaaaaaactggtactaggttttgacaagcttgcatcatgcgtg

SEQ ID NO: 216179 - DNA, 98 bp, Homo sapiens
tgggatccggctcctccagctaccggcccaaggccatctacctggacatcgatggacgcattcagaaggtctcggcgcggaagatggccggcggcgtg

SEQ ID NO: 216180 - DNA, 100 bp, Homo sapiens
attaggactttgttttccgtcactgagcggattcaccaagcacaagcagctgcagctaaagccagaaaagctcttcagcaaaaacccaagcccccatcca

SEQ ID NO: 216181 - DNA, 100 bp, Homo sapiens
caaaataagcagacacttctagatgtcatccatactgtagggccaatagccaggggccatattaatggttcccacaaggaagaccttgcaaattgctata

SEQ ID NO: 216182 - DNA, 100 bp, Homo sapiens
aaggacagctggaagccttgtcactggaggcgagtcagggctatgacacaccgttgcattttgcttgtaagtttggaaatgcagatgtagtcaacgtgct

SEQ ID NO: 216183 - DNA, 83 bp, Homo sapiens
cacaaatcagcaacacagaatttctgcaagtaattggtctggccagcatgacccagaacttagagccacttctgaagaagcag

SEQ ID NO: 216184 - DNA, 82 bp, Homo sapiens
tgttgttttaacatatcaagctgaacggatgccagagcaaatcaggctgaaaatggtcagtaggacagaaggtaacattgat

SEQ ID NO: 216185 - DNA, 90 bp, Homo sapiens
cacctgctgcacccacgaatctgcccacccctcctgtaacccagcctgtttcacttcttgagcttgtggacaaatgtataggatcaagaa

SEQ ID NO: 216186 - DNA, 118 bp, Homo sapiens
cgcggctgccggctgccctgtgaatgggaagttacgcgaagtccacccagcgtttctgagggtgcttcaaggatgaccgcatcgtcttctggacttggatgttctccacctacttcat

SEQ ID NO: 216187 - DNA, 100 bp, Homo sapiens
tacatggaaccatatgatgcacagcaaatgataacaggtgtttcagtcacctccagtaacacgggcgtgccagatatctcgggttctgtgtactccaaaa

SEQ ID NO: 216188 - DNA, 75 bp, Homo sapiens
ctcctggctcccttctgccccagctccgtctcggcggcggcggtactatactggcaattgctggagaagattttg

SEQ ID NO: 216189 - DNA, 100 bp, Homo sapiens
tcagatcaaccatattaatagcaattaaaagaaaatagaatgtggccacttatttcactatcttcttcaaatacaaagttcaaaccttgtactactcagc

SEQ ID NO: 216190 - DNA, 82 bp, Homo sapiens
agcagcccagacgcggcacagagagggcctgggagcttgctgcagcttcaggacacctgctccacttcaccttttgccatga

SEQ ID NO: 216191 - DNA, 51 bp, Homo sapiens
tgattactcagtctctaaaaagctaaggaaaactaggtgtctgtgttcact

SEQ ID NO: 216192 - DNA, 100 bp, Homo sapiens
aaatggcattctctcaaaagcagggaggaataagtttttttcatctgtaatttggaagccaagtcagtaacaaaatgaaaccagtaaagcatctgttgac

SEQ ID NO: 216193 - DNA, 75 bp, Homo sapiens
ctaggcgaagatccggactctgggtgttttgctaccgtgaccgtttagatcaaagacacagctctccccttctat

SEQ ID NO: 216194 - DNA, 100 bp, Homo sapiens
cattgaagaagaggaggaggaggaggaagaggaggaagaaaaatctgaggttatcaatgacgaggttggtttgttggaccttgaactcaatcggctgacg

SEQ ID NO: 216195 - DNA, 51 bp, Homo sapiens
tttggaacctttagacaaagctagtaaaggcctgcactgcccaaagtcttg

SEQ ID NO: 216196 - DNA, 50 bp, Homo sapiens
atgtgtatgaccttcacctcattaacagtaatggcaccattgacttcccc

SEQ ID NO: 216197 - DNA, 75 bp, Homo sapiens
ctgtgttccagttaataaagcatctacaaatgaggcagcctggggcagtgtatgggtttcgacagaccatgatga

SEQ ID NO: 216198 - DNA, 95 bp, Homo sapiens
tgaggaatgtctttcctaccatctaaaatacgaaggtttctggctgggagatatgtcagtattgaattctcccagacatcagagctgtataatgc

SEQ ID NO: 216199 - DNA, 95 bp, Homo sapiens
aatgttggctgaaattcatcccaaggctggtctgcaagtggccacgtcttttattagaacaatagagcttggagggaaaggatatgcaccaccac

SEQ ID NO: 216200 - DNA, 100 bp, Homo sapiens
ggctacgacccttgggatctgccctccgctcagctcgagcttccctcgtggccgacggaacaatgaagtgctaatcctccatctggaattgaagatgaaa

SEQ ID NO: 216201 - DNA, 100 bp, Homo sapiens
gaagctgccacaaaccaggccaagatccacgctgacgcagagcggaaggagcttgatggaccagacaaataggatgatggctgcccccacacaataaatg

SEQ ID NO: 216202 - DNA, 75 bp, Homo sapiens
aagaaatccacagatttagttctcttccgaagaactgaccattgctggcatgacgtttacaacttttgatctggg

SEQ ID NO: 216203 - DNA, 82 bp, Homo sapiens
tgacagagtggagccatggctagagcagcctcccgcgacgatgcccctcaacgttagcttcaccaacaggaactatgacctc

SEQ ID NO: 216204 - DNA, 75 bp, Homo sapiens
cctttaaatccggagggggaaaaaatcccaaggtctgcaaaggtatgaaaatgaaagtcttcagaatggaaggaa

SEQ ID NO: 216205 - DNA, 95 bp, Homo sapiens
gctccacttgcaccatttttaggatggagcctggagacctatagtgcctggaagagctgggatgtctggttgagtcctatggcatgaatgtttgc

SEQ ID NO: 216206 - DNA, 74 bp, Homo sapiens
ttcagattcacttccttctcatccttttccaccagctaaaggtacagaagattatcgatcaaaattaagtggag

SEQ ID NO: 216207 - DNA, 88 bp, Homo sapiens
tgttctaacattttgctgaataacaggtgaagattgtccccagtggatggtccctatcacaatctctactagtgaagaccccaaccag

SEQ ID NO: 216208 - DNA, 90 bp, Homo sapiens
gagcatcaaccctgatgaagctgttgcttatggtgcagagaatgtgatcaatgggcaggactacgaagtgatgatgcagattgactgtca

SEQ ID NO: 216209 - DNA, 82 bp, Homo sapiens
tacagaaagagtcaacagcagtggcaacagtgttctaagaacggaagcatctgggctggatggaatttagcatcaagcagag

SEQ ID NO: 216210 - DNA, 101 bp, Homo sapiens
ggccatcatcacccaggtgaccaaccccaaggaggacgagggccggttgccgggcgcgggcgagaaagaatttcgctaaggagtttgtgatcagtgatcgg

SEQ ID NO: 216211 - DNA, 100 bp, Homo sapiens
catcactggagccaccagcccaaccgtgttgtatgtgagtggaggaaatacgcagatgttggggatcagccaggtgaggtaggttattcaggctctcctg

SEQ ID NO: 216212 - DNA, 75 bp, Homo sapiens
agaaagaaaacgacgagaaccagagaggagacgactttcttctccaagtgggagattttgataagatctggcgag

SEQ ID NO: 216213 - DNA, 75 bp, Homo sapiens
tgatgatgatgacatcacccttacaggtgtctttcaggttgcagaaaagatggaaaaaaggacatgtgcactctg

SEQ ID NO: 216214 - DNA, 74 bp, Homo sapiens
taggcacggacgcaacacttttggaacttagacgctaactgtgccctgtccacggtgcctcctgcatgtcctgc

SEQ ID NO: 216215 - DNA, 82 bp, Homo sapiens
cgcggcgggcgcgagcgaggcgccctagacatcttctccctcccttgcctcagatgctcagcctacagaaggagagagagaa

SEQ ID NO: 216216 - DNA, 74 bp, Homo sapiens
cccatttcagaacctgagaaagtagagactgaattatcaggaagcccttcgatacatcggcaagctgccttttg

SEQ ID NO: 216217 - DNA, 82 bp, Homo sapiens
cgccaggacaatggggacccgggacgacgagtacgactacctattcaaagattttgcaagaacgaggctcaaggatgtgagg

SEQ ID NO: 216218 - DNA, 90 bp, Homo sapiens
gcgctgcagtgcgccctggcgctggagatcagctcaaaggtagaagatagcaccatgccgattcgtcgaactgtgaattctacccgggaa

SEQ ID NO: 216219 - DNA, 50 bp, Homo sapiens
gggcactatggaggtgaagagcaagatcctatagcaatggaactcagcga

SEQ ID NO: 216220 - DNA, 82 bp, Homo sapiens
gacagagccaaaatcagagctggaacctgaggagagaggtcatgcaagacaagataatctgccttccgaaaagagtgcagcc

SEQ ID NO: 216221 - DNA, 50 bp, Homo sapiens
gagtacccaaatgttgaagagctcaggatgcttcctttaaataccaatat

SEQ ID NO: 216222 - DNA, 75 bp, Homo sapiens
tattgaaccactccatgtgtcagctgctctgttaaaagcgaaaatgaaacaattgcctgcggcaacagttcgact

SEQ ID NO: 216223 - DNA, 87 bp, Homo sapiens
agtccattgactatgcagcctaatgctctaagcgaaagacatgaggcctcagcctgaaatgaggttgttttgaggtcatctgatttc

SEQ ID NO: 216224 - DNA, 75 bp, Homo sapiens
ctcggcgcccgcctgccgcctccggagcgcctgtgtggaatcctcactatggatgggctcattgaggacattaag

SEQ ID NO: 216225 - DNA, 100 bp, Homo sapiens
tgaagacctgtgttgatacctataccaaccgtttaagctcggggtgtggttttctctcggttgtgcctatttggccttggaagactatcaaggttcagca

SEQ ID NO: 216226 - DNA, 95 bp, Homo sapiens
cgccttcatggaatgtcttcaaagaatattaaaaaatctggagggactccaacttcaatgttatattccctgctcagagaggatacacgtagctg

SEQ ID NO: 216227 - DNA, 75 bp, Homo sapiens
ggcgccgacatcatccagctgcctcaaatcgtcgtagtgggaacgcagctcaagaaatcctggggctccaaggac

SEQ ID NO: 216228 - DNA, 75 bp, Homo sapiens
cggaaaccacaatagcgggattgatctccttaggacctggctggacatccacttcatccacgtgaagccccccca

SEQ ID NO: 216229 - DNA, 60 bp, Homo sapiens
tgcagctggtgccatgtcctccagaggcaaagacaatgcggccgtcatggtgcagagctg

SEQ ID NO: 216230 - DNA, 100 bp, Homo sapiens
ataagaatggctgtagaggaacttcagtctataataaagagatgtgcagctgttgtgctgtgtatggacgtgggctttaccatgagtaactccattcctg

SEQ ID NO: 216231 - DNA, 50 bp, Homo sapiens
cggcatctccttcagcttcccaggcatcctggcactgcaggctcgcactt

SEQ ID NO: 216232 - DNA, 100 bp, Homo sapiens
tagccaagagtctgggtctccgggccaacctgaggatgatgtctttctacctaaagatattgacctagacagtgtggatatggatgagacagagagggaa

SEQ ID NO: 216233 - DNA, 82 bp, Homo sapiens
ctgcgcgccggccagatggtcacggctgtctgtccccagaccccagagcacgtccggcaccaccatgactgggctgttgaag

SEQ ID NO: 216234 - DNA, 90 bp, Homo sapiens
gtgggcgccctccccgccaaggcccgtgcgaggtgtgggttgctgaccgaggaaataaaagaatccaagtatttgataaagacactgggg

SEQ ID NO: 216235 - DNA, 78 bp, Homo sapiens
acagcccgagaaaccgcagcactacacattgccatcacgaaagccaaagtggatttctccagtgtggtgtgcctgccc

SEQ ID NO: 216236 - DNA, 75 bp, Homo sapiens
ctggaatgcatccaagagaatccctcaacatgctggtgaaagaacttgtcctggacaacagtcggtcgaatgaag

SEQ ID NO: 216237 - DNA, 88 bp, Homo sapiens
ctccctgtgtactttccatttgccttcctggtttcaccagtgatcattaaagaatgggcagcttacaaaggaaagtctcctcaaaccc

SEQ ID NO: 216238 - DNA, 101 bp, Homo sapiens
ctttctcggcgccgcggctcttttctaaaagtcagcagcgtgcagggtcaaagacagccggccccccatgtcagtggtctaggatggccagtgaaggcacc

SEQ ID NO: 216239 - DNA, 80 bp, Homo sapiens
accatcaacagtttgactacataataaggatgatgaattgtactctacagaaactggaggaagcagcatctcgtgcagca

SEQ ID NO: 216240 - DNA, 74 bp, Homo sapiens
agagacttcaattgatgaattcctaggacttccggatcccatggtccattattgcctttaccaagtcgttacag

SEQ ID NO: 216241 - DNA, 73 bp, Homo sapiens
tgagcaactcctttcatggaattagaccacctcaacttgaacaaccagattggtgctggtgaagagaagcaaa

SEQ ID NO: 216242 - DNA, 75 bp, Homo sapiens
tgggcctactcgcccgccaccctgcgctgccgccgctctgaggagttaaagtaatctatgccagcaattatgaca

SEQ ID NO: 216243 - DNA, 50 bp, Homo sapiens
gacttcgagcaactgcagccagacaggaaccctacatgaagcctgtgaac

SEQ ID NO: 216244 - DNA, 82 bp, Homo sapiens
aacggaggcagaggagctgaagactccagtatgcaactgactacaaggaggtctctaattaacagaagatggcaaagcccag

SEQ ID NO: 216245 - DNA, 100 bp, Homo sapiens
ctggactccatgccgaaggtatctggaagtcgtgacacgggtcgagctgtgcagttttagcgggtacaagatctaccccggacacgggaggcgctacgcc

SEQ ID NO: 216246 - DNA, 71 bp, Homo sapiens
aatccagtgccctataatgaaggacatcatccacgacccgggccgcggcgcgcccctcgccaaggtggtct

SEQ ID NO: 216247 - DNA, 100 bp, Homo sapiens
cgatgccagagccaggtgaactggaggagcgatttgccatcgtgctgagttgtctgctggttctcagcttgaagaagattctgcagtccttattgatcct

SEQ ID NO: 216248 - DNA, 82 bp, Homo sapiens
atcgggtggagtgtaggtcatatcgccgcgatgatatcatcaagttgaatcgaaaggaagggaagaagcagaattttccaag

SEQ ID NO: 216249 - DNA, 101 bp, Homo sapiens
tatggatttgccaccatagccagtgctattcctgcttactctaaaagaggggacattgtttttgtctcaaagcttggattctgccgtgccactcacgaatg

SEQ ID NO: 216250 - DNA, 89 bp, Homo sapiens
aggtgaaggacaagctcctacaaggcaggcagtattgggtgcagagcgtcctccaggctttgaccgtgtccgaaatgctgagattggga

SEQ ID NO: 216251 - DNA, 76 bp, Homo sapiens
ccctgggggctcgtgaggctgccaccgctgctgccgctacaggtctacttccccagcaggacagcatcattctcct

SEQ ID NO: 216252 - DNA, 83 bp, Homo sapiens
ccggccggcaccgcattgaggcaggtgtgcaggtgcggttgcggcgagccagatctgacagacatccctgaatcttggtgttt

SEQ ID NO: 216253 - DNA, 88 bp, Homo sapiens
gaattcaaacatggaaaagctcctattctgattgctacagatgtggcctccagagggctaggttcttctgtgtggcagttcagaatga

SEQ ID NO: 216254 - DNA, 100 bp, Homo sapiens
cagaagatctggattccacacagcagcggcagcagcaggctgcaacggagaaggggctgcaaactcttccacatagactttggatatattttgggtcggg

SEQ ID NO: 216255 - DNA, 75 bp, Homo sapiens
accagaggactagacctgaagtttcaaaggctggtgcagtggtgtcatcttggctcagtgcagcctcgacttcct

SEQ ID NO: 216256 - DNA, 100 bp, Homo sapiens
agcaccggaggcccaggtctccgtgcagcccaacttccagcaggacaagcccgtggaccgggagcccgtggaccgggagccggtggtgtgccaccccgac

SEQ ID NO: 216257 - DNA, 80 bp, Homo sapiens
gaggcgtttctataagaattgccattttgcagactctgatcacagtgaaacgttccatgggaacttgggccatgagaaac

SEQ ID NO: 216258 - DNA, 90 bp, Homo sapiens
tacatggaactcagacatctgcaaatcatgatcaatgagctgagcaatgttcctgttcctgtcatgctaatgccagatgacttcaaagcc

SEQ ID NO: 216259 - DNA, 100 bp, Homo sapiens
ggccatgatttctggagagcttgacattctcaaagactggtgctatgaagctactcccgaggcttgccgacaggcccgaagctaccttgagttttctgag

SEQ ID NO: 216260 - DNA, 100 bp, Homo sapiens
ttactgtctcagctctaggatgtgcgttcttccactagaagctcttctgagggagaggaagctggcgcgtatggcagccgaggagcacactctgcaggac

SEQ ID NO: 216261 - DNA, 50 bp, Homo sapiens
ggaaaaatggccctcttcaagcctgaattatatccagatcgagagacaga

SEQ ID NO: 216262 - DNA, 83 bp, Homo sapiens
ggccgccgctgctacctgcagcgccgtgtggcacgacacaaaaatcagggcgtgatggtgggcatgggtcagaaggattccta

SEQ ID NO: 216263 - DNA, 82 bp, Homo sapiens
ctgtatctgctgctgctgctcataatggagtcccctgtttccacaccagcagtgctgccaatacaccttttggtgccagtgg

SEQ ID NO: 216264 - DNA, 75 bp, Homo sapiens
cgagacctacttctgcatcaccacaggtgagaagccttataagtgctcatgggagggatgtgagtggcgttttgc

SEQ ID NO: 216265 - DNA, 75 bp, Homo sapiens
cagctccaaccatgggaggccgcgtctttctcggatctgcctacaaactggtttgctactttaccaactggtccc

SEQ ID NO: 216266 - DNA, 100 bp, Homo sapiens
cataggtagtcagacgacaaagaaagcatcagccatatccatcaaacttggatcaagtgcacctacaaaggcagcacctaagcaaaagattgtgaagcct

SEQ ID NO: 216267 - DNA, 50 bp, Homo sapiens
aatgtggaatcctgggccttcattggagaccaagacacattccaccccag

SEQ ID NO: 216268 - DNA, 100 bp, Homo sapiens
agaagacaaagaataaaaatagaagcaaattgggatctcttctattataggaagatgagaatgtgcctactgctcctgatcctccaagtcaacatttacg

SEQ ID NO: 216269 - DNA, 75 bp, Homo sapiens
catggggaaaatctccccggtgactttcagggtatcagttagcagagcaatcaagccctttgcagaacctggccg

SEQ ID NO: 216270 - DNA, 50 bp, Homo sapiens
caacgctacagatgggatcaagggtgggctgaaggccgtcatctggacag

SEQ ID NO: 216271 - DNA, 113 bp, Homo sapiens
aaatgtgtgcagaaggaggtcctgccgtccatgcggaagatcgtcgccacctggatgctggagggagtgcatccgccccaacccttttccccctcgtctcctgtgagaattcc

SEQ ID NO: 216272 - DNA, 128 bp, Homo sapiens
ttttcatgttgctggtggaccagattggtaactcccatgtgcattctactgacggtttttcatcatcaaagagagctttctgctttactactctgagagcgaaaaaaagagctttgaaaccaataaat

SEQ ID NO: 216273 - DNA, 83 bp, Homo sapiens
cagaagtggaagcaacttctatttagtgatcatgatccatctctcctgtcaccaaattgataatacagtcaaccctccatatt

SEQ ID NO: 216274 - DNA, 100 bp, Homo sapiens
agagagaaagggagagagagagggggactctgtgtgagggaaagaaaacaatttctcctgctctgcagcttctgttcagaatgatatggaacctagcaaa

SEQ ID NO: 216275 - DNA, 75 bp, Homo sapiens
gcaatcgcttgggagagctcctgggccacccctcctttcaggtcaaggtggcatttacaccctacgccccggagc

SEQ ID NO: 216276 - DNA, 82 bp, Homo sapiens
cggcggcccgagcgcgccccaagcccgggcgccaccgctgccacctccgcgagatgtgaagttcatttccaatccgccctcc

SEQ ID NO: 216277 - DNA, 100 bp, Homo sapiens
atggcgtcctccgcgcagagcggcggctcctccgggggacccgcggtccccaccgtgcagcggggcatcatcaagatggcctatatgaacccaatagcaa

SEQ ID NO: 216278 - DNA, 95 bp, Homo sapiens
gacaccagctccgaaatcaccaccaagttataggatattccaagataaatgcatgaatactaccttgacggaatgtgatttctcaagtctttcca

SEQ ID NO: 216279 - DNA, 98 bp, Homo sapiens
gccgagatgtctcgctccgtggccttagctgtgctcgcgctactctctctttctggcctggaggctatccagcatggtcatcatgggccagtgctact

SEQ ID NO: 216280 - DNA, 100 bp, Homo sapiens
ggacaggagtatctgaggatggagaactcagcagtgagagtggaggtatgcagagtgctgccagtcacctggtttcccaagatggagggatgataacgat

SEQ ID NO: 216281 - DNA, 75 bp, Homo sapiens
gttcttaccaaatttgataccattgatgacaaggtgggatgcagatcttcgtgaagaccctgactggtaagacca

SEQ ID NO: 216282 - DNA, 80 bp, Homo sapiens
ggatccagaactggagtggaaggtatgatctcgtgaaatcttgagagaaactgaatgacgaatgaaactattgttcctgt

SEQ ID NO: 216283 - DNA, 78 bp, Homo sapiens
aaaaaagaaaagacatgaaaaacatactattcctttggtagtccagaaagaaacataaccttcaacaactagtactgc

SEQ ID NO: 216284 - DNA, 74 bp, Homo sapiens
ggggtccccaggctaaagaacatgactattgcagatatcatccgaacatgtttgggacccaagtccatgatgaa

SEQ ID NO: 216285 - DNA, 83 bp, Homo sapiens
aactgtcggcttcaaagagaaaaggcaacatcctgtcacaggccatgctctggcaaaaacgagtgtacctcacagccttctag

SEQ ID NO: 216286 - DNA, 100 bp, Homo sapiens
aaagcattacagatcctgagacgcattgctaagtgcaatgggaaatacctctcatcaaattactcagaggtgttttaaggatttccaactgcagcgggct

SEQ ID NO: 216287 - DNA, 100 bp, Homo sapiens
cagccatgtggccatcgcagctactaattttcatgatgctcttagctccaataattcatgagagctcagaaatatgctcagcaagtcttgcagaaggaat

SEQ ID NO: 216288 - DNA, 60 bp, Homo sapiens
gaaaagacagaagccttgacttctggtccttgaatgggcaagagggcacatgaagtacgg

SEQ ID NO: 216289 - DNA, 88 bp, Homo sapiens
ttcccgaggctccgcaccagccgcgcttctgtccgcctgcagggcaattgaaggaacagactaaaaatcgtgtcctggaaggaaacta

SEQ ID NO: 216290 - DNA, 50 bp, Homo sapiens
tggagagaagcagcggatcagcagaggtatcgagaaccttccctgcgaac

SEQ ID NO: 216291 - DNA, 100 bp, Homo sapiens
tcgggttcctccctcctccgagagaccgccgaggtgcgggctgtgagagggggagcgtggagcctccgaggccgagacatgttttgagcgcctgctgtgt

SEQ ID NO: 216292 - DNA, 97 bp, Homo sapiens
aatagtctcaagatgctgcttactggtgggaaatcaagtcgtaaaaacaggtcaagtggtgtgatgaatgcagactctgctaccattttggctgttt

SEQ ID NO: 216293 - DNA, 50 bp, Homo sapiens
gtcaccactcgcaaacaccactggacccagtggcttttaaggatgtggct

SEQ ID NO: 216294 - DNA, 99 bp, Homo sapiens
tccatttctcctattgaggagtcaacgtaaataccagctgtcccctacagtgaatatgccccaagatgacactgtcattatagaagatgacaggttgcc

SEQ ID NO: 216295 - DNA, 97 bp, Homo sapiens
gccttgaggacctactcacagataggaattgaaggtgagaattatgaagatgatgacctagtaaattctgatgaggttatgaagaaaccatgtccag

SEQ ID NO: 216296 - DNA, 50 bp, Homo sapiens
actcttctggtggcactaacttagacagttcaaatctgaacatcaatgat

SEQ ID NO: 216297 - DNA, 75 bp, Homo sapiens
gcctacttgcagcatattacctatcaggagaggagcatgaactggaaaatattgaacctactcaaggcctttcaa

SEQ ID NO: 216298 - DNA, 100 bp, Homo sapiens
cgcaggcgccgcacggagttgcgtcccggggacttggggccgcagggagagcttggggcttccttggtcgcacccaccacctgcctgcccactggtcagc

SEQ ID NO: 216299 - DNA, 100 bp, Homo sapiens
agcgttctgagtgtggacgagtagccagtgaagataatgaatgtcgaatgtgactgactagcagcttcattttgaaggtgagcagggcagcatttccttc

SEQ ID NO: 216300 - DNA, 74 bp, Homo sapiens
gttcaaccgcatgaagcagctggctaaccagaccgtgggcagggatttagtgcaagaagaagaacagttgatgg

SEQ ID NO: 216301 - DNA, 90 bp, Homo sapiens
acagtcctcaggcccatgacaatccacaggagaagagacttgcagcaggtgagcacctgcggatctgtccccagggctacacctgctgca

SEQ ID NO: 216302 - DNA, 99 bp, Homo sapiens
atctaacgtttaccctagcaaaccacttgagaatgccagactgtcatcagagatgaatacttctactgtcaacagtgccagggaagaactgatggaaag

SEQ ID NO: 216303 - DNA, 80 bp, Homo sapiens
cggccgagcgggcggcttcctggcctgggcgctccggtggcggcggagattgtcactgctgttccaagggcacacgcaga

SEQ ID NO: 216304 - DNA, 90 bp, Homo sapiens
ccgtccagcagatggcggatgccctgcagtacctgcagaaggtctctggagacatcttcagcagtctcgtttcctctcagtccatccacc

SEQ ID NO: 216305 - DNA, 74 bp, Homo sapiens
tttgcttttgtaacttttgatgatcatgatacagttgataaaattgttgcggttgctgatgctattagaacaag

SEQ ID NO: 216306 - DNA, 80 bp, Homo sapiens
cacaagatggcggcggtagcggcagtggcggcgcgtaggaggcgatggagaaggaggagacaacccgggagctgctgctg

SEQ ID NO: 216307 - DNA, 75 bp, Homo sapiens
tttttttttctttttcttttttcttaccagcctccccccaatgagagcacagcaatggaggaaacagctatatgg

SEQ ID NO: 216308 - DNA, 89 bp, Homo sapiens
ccagagaaaggccggcctgcagcacccgccaccgtcgccggccgcccgcacgtccgtccggcgcaccacgaggtctgccccaagttccc

SEQ ID NO: 216309 - DNA, 100 bp, Homo sapiens
gcccccttcgcccgtttccatcacgagtgccgccagcatgtctgacaaactgccctacaaagtcggatcttaagattgaaagtgatgttcaagaaccaac

SEQ ID NO: 216310 - DNA, 100 bp, Homo sapiens
agccagactcagggatcaaagagcaaacagattcagtggcctgcattggctgaaggaagagctggaaaagcatggaatgcaagtccctgcccaagcccag

SEQ ID NO: 216311 - DNA, 108 bp, Homo sapiens
attggtccagaacagtttccggtcaatgagcactattttggattagtcaatgtttgatctgtggatgaaatgaatcatgattttcaagctcttgcattagaatctcgg

SEQ ID NO: 216312 - DNA, 100 bp, Homo sapiens
agctcttcatctacaacccgaccaccggagaattcctggggcgcaccgccaagagctggggttcagttggaacattggaagaaggcattcaagaagaaag

SEQ ID NO: 216313 - DNA, 82 bp, Homo sapiens
tcgcccctcgcgtccggagtccccgtggccagagttgtctgctggttctcagcttgaagaagattctgcagtccttattgat

SEQ ID NO: 216314 - DNA, 82 bp, Homo sapiens
caaaactatgcatcaattccacagcctatggacaagcaggaggacatgaagactattttggagggcatagatccggccaagc

SEQ ID NO: 216315 - DNA, 90 bp, Homo sapiens
cattgtccaggtggatgtcagcaacctgcagtcattcttccgggcctccaaggaacttaagcaaagagctacagagacttctgaagtgga

SEQ ID NO: 216316 - DNA, 50 bp, Homo sapiens
agaatgtctccatggtggactatggagcagtgaggagaatgaataccttc

SEQ ID NO: 216317 - DNA, 97 bp, Homo sapiens
catgagcagctacagtgtccctcgaaccccagatgacttcctgaacagtgtggatgagatggatacaggtctcacttctccatttaagccagctatg

SEQ ID NO: 216318 - DNA, 83 bp, Homo sapiens
ttcctgtacagcctgcagaactaaatgtagacaaccaatttcctgggcaagctgctccacctggattcccagtgtatcccgcg

SEQ ID NO: 216319 - DNA, 75 bp, Homo sapiens
cgagggacctcacatcaacttctaccagctgatgaaggatttgggggcagagcacttggcaggtcatgaaggggt

SEQ ID NO: 216320 - DNA, 100 bp, Homo sapiens
agactcagaaagaaaacctcaggaaattctacaaggtgaaagacccctgacaaaagacaatcatcttctgggtacatttgatctgactggaattcctcct

SEQ ID NO: 216321 - DNA, 75 bp, Homo sapiens
gttcaagcaattcagaagaaaagtggaaactttgatagagacaagagagacacctccaacttcgacaaagagttc

SEQ ID NO: 216322 - DNA, 100 bp, Homo sapiens
cgagaagcccacaattactcagcgctgccattttatttcaaaggtgcctaccagtaacacagagggaggctggtcctgctctctcgctgagtacatccgc

SEQ ID NO: 216323 - DNA, 101 bp, Homo sapiens
gggaggtgaatttccatgtcaacatagtccaggtgctggagaatctggtaaaagcaccattgtgaagcagatgaggatcctgcatgttaatgggtttaatg

SEQ ID NO: 216324 - DNA, 99 bp, Homo sapiens
ggaagaccctcctgccaaaaggaaatgcatctttatgtcagaaacacaaagcagcccaaccaaagggttcctgattgtcctggggtgcttgattctggc

SEQ ID NO: 216325 - DNA, 74 bp, Homo sapiens
ttggggccgtcttcctcatccttccttttctcggggctcccgtggacagcaatggatcaacttcatatgcactt

SEQ ID NO: 216326 - DNA, 100 bp, Homo sapiens
tcacaagataatagccagctccccagaaatgaacctgcccacggtgtccgcgctcaggatgacaagattctgcagatcattacggaattgataaaaacag

SEQ ID NO: 216327 - DNA, 100 bp, Homo sapiens
cccagtctgagtgtctgtccccagagcctcagtttgtgcaggacaccgacatggaacagggactcactggggtgtggaggtcatccgtctgggccacagc

SEQ ID NO: 216328 - DNA, 75 bp, Homo sapiens
gccggcccggacatggccgccaacatgtacagggtcggaggccctgggaggagcggggacactgaggacctctct

SEQ ID NO: 216329 - DNA, 83 bp, Homo sapiens
cgacgtcgtgatccagaagtccagagctgaggactgcctgtttgcagtccactgcttttaaggccctgcactgaaaatgcaag

SEQ ID NO: 216330 - DNA, 75 bp, Homo sapiens
agctttgcaaggcatccgtgtccagaggatgttgaaatattttgcaacatttgaagtattctttgaagaaaatct

SEQ ID NO: 216331 - DNA, 75 bp, Homo sapiens
taccgctttgccactgataggaatgacttccggagctggtgccgacaagaaagccgaggctggggctgggtcagc

SEQ ID NO: 216332 - DNA, 90 bp, Homo sapiens
ggactgcagccacctttatgactacactgtcaagcttctcttcaaactccactcctgggaggaacatcatcgtgttctacggctcccaga

SEQ ID NO: 216333 - DNA, 75 bp, Homo sapiens
gtgggagggagccatgaagcattacgagctcattgctatggacagtgctatcaccctgtggcagttccttcttca

SEQ ID NO: 216334 - DNA, 116 bp, Homo sapiens
ctttattagaagagtgccagtccttggatccctcctaaatttacctggaattagatcaaatgagtccctggaacgccagatgcgtgaaatggaagagaactttgccgttgaagctg

SEQ ID NO: 216335 - DNA, 75 bp, Homo sapiens
cccggcggcggcggcagcggggtccgggtccggagcgccacatttgcatttatgtcggatcctcagtgaaaataa

SEQ ID NO: 216336 - DNA, 100 bp, Homo sapiens
tgccccgccatgaatgaggagtacgacgtgatcgtgctgggcaccggcctgacggtttctgggtggagcggacccctgtgcacgaggcagcccagcgggg

SEQ ID NO: 216337 - DNA, 87 bp, Homo sapiens
agaactggcgattggacgatttgaaagtgaagatttgacctccatagttacacagcaggatgccaatgcctcttccctcttagacat

SEQ ID NO: 216338 - DNA, 120 bp, Homo sapiens
gctggagcaaggcgacgaaccttggagagaggagaacgaacatcttctggacctttgtccagctttctactaccaaagattccccacagcctgttgaggagaaggttggtgctttcacaa

SEQ ID NO: 216339 - DNA, 82 bp, Homo sapiens
ccatttgtgtccattgatctcttggagcagctggggatcatgtgctgtccccggcataggtccatctctgcagaagccattt

SEQ ID NO: 216340 - DNA, 98 bp, Homo sapiens
aaaattatccctactacaggactgcggacaagggctggcaggtggttatcactaggctaaaactggacaaagaccgcaaaaagatcctcgaacggaaa

SEQ ID NO: 216341 - DNA, 100 bp, Homo sapiens
agagctgaggcagagggtggcccatgagccggttgcgccacccgaggacaagggatctgaaacttgcccacccttcgggatattgcaggacgctgcatca

SEQ ID NO: 216342 - DNA, 107 bp, Homo sapiens
cttcccggcgctctcctggctcccttctgccccagctccgtctcggcggcggcggacctgcctagagctggaacgttacctccagagcgagccctgctatgtttcag

SEQ ID NO: 216343 - DNA, 100 bp, Homo sapiens
gttcaccctggtcaacaagaagaacgctctcatccggaggcaggaccagctgcagctgctgtgtggcgctcttggccaatgcccctgagcgggttgtcga

SEQ ID NO: 216344 - DNA, 74 bp, Homo sapiens
tagaatcaactgagagagatgcttaaaaatcaccagttactttaatgactcaccagaacaagctagaagaaatg

SEQ ID NO: 216345 - DNA, 83 bp, Homo sapiens
agaagcgtctatgattccttcagataccagggactgttcacagaagaaaagcttggccaggctgagaagacagaattggatgc

SEQ ID NO: 216346 - DNA, 74 bp, Homo sapiens
aacggcggtggcgcccggagcccgagatctaaagcgggaagccagtatctgtcatatgctgaaacatccacaca

SEQ ID NO: 216347 - DNA, 88 bp, Homo sapiens
cagtcctggcatgctaggttctataaatagcaagggcaagtattttgtaaccttcccatatccatatatgaatggacgccttcatttg

SEQ ID NO: 216348 - DNA, 91 bp, Homo sapiens
gaaggagcggaagaatggcagtgctcaaactcaccgaccaggaaattcagttcatgaagataagaagtttcttgacaaatacatgccccag

SEQ ID NO: 216349 - DNA, 75 bp, Homo sapiens
tttagaaactccccttgaacgtgctgggctgaccttcctctgatcacaggcaagacggagtttcgctcttgttgc

SEQ ID NO: 216350 - DNA, 100 bp, Homo sapiens
ggcccgcgaggggtcgccgcccagcctcccgtacccccagtacttcggaggagtctcagcacttactcctgaccagtacctgaagatgaatggcttcccc

SEQ ID NO: 216351 - DNA, 101 bp, Homo sapiens
gcgaggggtgcacggcggccacctgagtggcgcggcggtgtcaggacgcacaagaccagccactgctaccgcatcacgtaccgccacatggaacggactct

SEQ ID NO: 216352 - DNA, 78 bp, Homo sapiens
ctggatgtgtagaagacaagacaatcagtgaccaggaatcctttagggaagttattactggtggagcagtacagagaa

SEQ ID NO: 216353 - DNA, 74 bp, Homo sapiens
atgccctcaagtcctggctggccaagttactggagccgatatgtcaaaatccacaggcaacttcctcactttga

SEQ ID NO: 216354 - DNA, 75 bp, Homo sapiens
tctttggcatcactgcagctagtaatttgccttctggattgatgaagtgtcctcttgctagcaccaataaaagat

SEQ ID NO: 216355 - DNA, 97 bp, Homo sapiens
ttttccgtgagagacgtagagctgagcgacccagcccgcgagcgagatgcctgaggaagtgcaccatggagaggaggaggtggagacttttgccttt

SEQ ID NO: 216356 - DNA, 87 bp, Homo sapiens
gtacccgccaacaagcgggaccgagcaggaatccgtatctgggaacaggacacattcagctaacgtattttagcaggtggagtgagg

SEQ ID NO: 216357 - DNA, 75 bp, Homo sapiens
cactggaagagaacgtctccgagtccctcaactctctacgctttgcctccaaggcccataagatggcctggcctt

SEQ ID NO: 216358 - DNA, 100 bp, Homo sapiens
gcagcgctaagagtgtttgatcttcctctgacttggtactattctctctcccagaaagtgactgagaccgaagatgatagtgatagtgacagcgatgatg

SEQ ID NO: 216359 - DNA, 100 bp, Homo sapiens
tgggggtgtgcaaacccgagagaactggctgactcttttggtgatcccttcttcccccggactacacagatactattagaatatcagctagggagatggg

SEQ ID NO: 216360 - DNA, 102 bp, Homo sapiens
agaccctggagcctcagttggaagcagccgatccagcctgcggagcctgtggggcaggaagaaggtagataatgactataatgcccttcgagaaagactcag

SEQ ID NO: 216361 - DNA, 75 bp, Homo sapiens
ataagactcgctatatggggaagggcagccctgatggaaagctcccgcctgaaagagctgctgacgatgctgcag

SEQ ID NO: 216362 - DNA, 83 bp, Homo sapiens
caccctctcgcctcgggtctcgggggccgctctgggatcccggccaccagcaattgtccgggccatcgatgcacccctcggag

SEQ ID NO: 216363 - DNA, 100 bp, Homo sapiens
gccaccagtgccaacgacagcgagcagcagagcctgtccagcgatgcagacaccctgtccctcacggacagcagcgtgaaactcccagtacagccagcag

SEQ ID NO: 216364 - DNA, 74 bp, Homo sapiens
ctgagaagatgcatgccagagacttcacagtttctgctctgaatggagatttacagacagtcatctgggtggag

SEQ ID NO: 216365 - DNA, 83 bp, Homo sapiens
cgtccgtgcgtctagcctttgcccacgcaggttttttattggcacctcagtctcaacattttcttttcggattcatgaggaaa

SEQ ID NO: 216366 - DNA, 100 bp, Homo sapiens
tttgttggtggaggaggtggcaggcctcggcgttgcctttccccatcttcctggttctgctccttcgtggcctagtcttgtggacaccagcaagcagtgg

SEQ ID NO: 216367 - DNA, 100 bp, Homo sapiens
attttgcggggttcgtcgggcctgtggaagaagcgccgcgcacggacttcggcagaggtggtccgggggctgagtgcaggtgcccgggtctttgagtaca

SEQ ID NO: 216368 - DNA, 74 bp, Homo sapiens
agaacagctggatcttgctcagtctctgccaggggaagattccttgtctgtgtcggccctggtagacaagttta

SEQ ID NO: 216369 - DNA, 87 bp, Homo sapiens
tccctttggatgtagcaaggaagaaattgttcagttcttctcaggtggtgaaattgcctctacctttgatcacccagaactggtgaa

SEQ ID NO: 216370 - DNA, 82 bp, Homo sapiens
cgggcagccatggccctccacagcccgcagattttgagaagagggggaaaaaggaagtttgtcctgtcctggatcagtttct

SEQ ID NO: 216371 - DNA, 90 bp, Homo sapiens
tttctttgaagagagctccagtttatgcagatttgatggcaatacattaaaaactactcatgtgcctcctgacaaggtgatccgggcggg

SEQ ID NO: 216372 - DNA, 98 bp, Homo sapiens
caagaacccccaggagcagaagtccttcttcgccaaatacgctgaaactgccgccaaccggatctgtaaggtgctggctgtcaaccaagagaacgagc

SEQ ID NO: 216373 - DNA, 83 bp, Homo sapiens
cctacaccctgcagaatcactattaccgcaacaataggtctaccaggtccagaaggtcctccaggtctccctggaaatggagg

SEQ ID NO: 216374 - DNA, 80 bp, Homo sapiens
agaaggagcaggattaccaaagggagagaagtggatgggccctatacctccagccgtgaatgccagactttaagattgcc

SEQ ID NO: 216375 - DNA, 90 bp, Homo sapiens
agcggcacgccacagcagaggaggtggaggaagaagagagggaccggatcccaggccccgtttgcaagccctcaagggaacaaagccgat

SEQ ID NO: 216376 - DNA, 87 bp, Homo sapiens
aggggacaaaagaggggaaactgagagttcccaattaataatgaagcagggttacacatcattttggaatgactgtatatcatctgg

SEQ ID NO: 216377 - DNA, 83 bp, Homo sapiens
gccgatccgccgcccgtccacacccgccgccaggactggagactgatgcatgagggggctacggaggcgcaggagcggtggtg

SEQ ID NO: 216378 - DNA, 100 bp, Homo sapiens
cgaagatggcgacggccttgagcgaggaggagctggacaatgaagactattactcgttgctgaacgtgcgcagggaggagcagtttttgcaagaaaggat

SEQ ID NO: 216379 - DNA, 74 bp, Homo sapiens
cccaacctagtgggtgtaatacatcatgaactgcaggattatagatgcccagttcatttttactgggtgcgtgg

SEQ ID NO: 216380 - DNA, 75 bp, Homo sapiens
aaaattactgatacagagacgatggtcggaatcagatttgaaaatgaaagtgtggataattactgtaccttcctc

SEQ ID NO: 216381 - DNA, 100 bp, Homo sapiens
actaagaaatgtatcaaatctgaaacctgtcccgctcattggtccaaaattgaagagaagagttgatctctctaatgtattagatcttcatgcctttgat

SEQ ID NO: 216382 - DNA, 49 bp, Homo sapiens
atggagcaaaatggcggatcatgtgcagctgtatgcaggagctattctt

SEQ ID NO: 216383 - DNA, 73 bp, Homo sapiens
ccaactggaattccacttacgggtgtcccctgaagaccttgcaaaagtgtgagatcgccctggagaaactcaa

SEQ ID NO: 216384 - DNA, 100 bp, Homo sapiens
ccgcgactacagccactactacacgaccatccaggacctgcgggacaaggtagttgatgtcacttggcgatattcctgcaaacatgaagaggtgattgcc

SEQ ID NO: 216385 - DNA, 90 bp, Homo sapiens
ctccaagttggaacaaggagaagagccatggatcataaagagacacataccaaattggatctatccaggatctcctcttcagcgtgtgtg

SEQ ID NO: 216386 - DNA, 74 bp, Homo sapiens
ctttgcgatccttatggctcattatgacgtggagactctggtggagcaacgttcaggtggttcaggaaagggca

SEQ ID NO: 216387 - DNA, 82 bp, Homo sapiens
attctcgacctgctaacagaactggaccttttcgaatgtgacagtgatgataacatgggtgccaaaaatacttcaataggag

SEQ ID NO: 216388 - DNA, 99 bp, Homo sapiens
gagggtttgagtccgcatcgccacagctgaaggctgcgagggactaagagcagagcactactgcagtcttcagttaagcaacaagtagaagctattgaa

SEQ ID NO: 216389 - DNA, 75 bp, Homo sapiens
tgtggagcggagggagccctccatcaccaaggaggagaaggacaggtctctatggtcactctgctgtctaccacg

SEQ ID NO: 216390 - DNA, 73 bp, Homo sapiens
tcatgtatgcagtagcgcttgaccttcgagtgtttgccaataatgcgggctgcatgctgttcccccacatctc

SEQ ID NO: 216391 - DNA, 74 bp, Homo sapiens
gggagccccgggagccgcacgtttctacgctcttcaactcagatgacttggggagccctcttcaggcatgaaat

SEQ ID NO: 216392 - DNA, 82 bp, Homo sapiens
ccaggccccgccgaggcggccaggatgatcggctgaatgtaacagaggaactaacgtccaacgacaagacgaggattctcaa

SEQ ID NO: 216393 - DNA, 98 bp, Homo sapiens
gacgctgctcaaaacctcgctccggaaaggggacacctggtgattgtagagaaggctccaaaagccagggtgcctgatctggacaagaggaagtacct

SEQ ID NO: 216394 - DNA, 100 bp, Homo sapiens
aatatctgttaacagactgcttttacacctacgttacaattcaacaaacatggtgtgttgcgggtagaaggcttcttaacaccaaacaagtatgacaatg

SEQ ID NO: 216395 - DNA, 74 bp, Homo sapiens
actgaggacttaaatgaagccactgattagcaatttaaagatcctctccaagttttcatggagtgataatgaaa

SEQ ID NO: 216396 - DNA, 90 bp, Homo sapiens
gaacctgaggggcctcttccaggacttcaacccgagggacagtatgatttggtgaaatgcctggctcctattcgagaccccaagaccgag

SEQ ID NO: 216397 - DNA, 75 bp, Homo sapiens
caactgcttagcacccctggccaaggtccatctggttggtattgacatctttactgggaagaaatatgaagatat

SEQ ID NO: 216398 - DNA, 88 bp, Homo sapiens
aaagcaggcacttgagaagtctaagagaagctctaagacgtttaaggaaatgctgcaggacaggttcagacagtaactttaattccag

SEQ ID NO: 216399 - DNA, 100 bp, Homo sapiens
ggaattagaaaatgtgtcatatccaccaatatttctgcaacgtctttgacaatagatggaatcaggattccagacagcattggaaaagacatagaaaagg

SEQ ID NO: 216400 - DNA, 100 bp, Homo sapiens
cagtcagcagtttttgaactccatcaaaaagggttccgccatggagtcatagttgcagctgactccagggctacagcgggtgcttacattgcctcccaga

SEQ ID NO: 216401 - DNA, 75 bp, Homo sapiens
atgggctctatcaaggaaaacaagtgtctgcttatgtcggtgtggaaccactttgacagcggttcgtgcccaggc

SEQ ID NO: 216402 - DNA, 98 bp, Homo sapiens
ccgtcttctcagtgaaagattttcagtcaaccagttagatagtgaccactgggcacccattcattatgcatgctggacttttcttggtagagatggaa

SEQ ID NO: 216403 - DNA, 82 bp, Homo sapiens
gtacaaacaggacctgcctaattaccttcaaacctgtgtcggagatgtatgcagtgtgacgccaagtttgactttctcacca

SEQ ID NO: 216404 - DNA, 75 bp, Homo sapiens
cgccatgaagatcaaagatgccaagaaaccctggaaggacaccactggtaccagctgcgccaggctctgaaccag

SEQ ID NO: 216405 - DNA, 50 bp, Homo sapiens
aaagtatcgtcgagaagcctatcatcgtaccattgtttgttgcaatgacc

SEQ ID NO: 216406 - DNA, 74 bp, Homo sapiens
ttttagggtcctttatatagaagggagagtagattttctggcatccttaaatcttgtgtcaaggattggttata

SEQ ID NO: 216407 - DNA, 83 bp, Homo sapiens
caagaacaaaggccgcgacttggagcagaaccttctaagtctcagacacgtaaacccaagtgtggcaaaggaactcattgctc

SEQ ID NO: 216408 - DNA, 100 bp, Homo sapiens
atccgtggtgtggagggctctgactacatcaatgccagcttcctggatggttatagaagccgatcctactgcagggccatgagcggtccattacgcagat

SEQ ID NO: 216409 - DNA, 100 bp, Homo sapiens
ttcagtcgtgcccagtctacctatttcaatgatcccaagtggcccagcatgtggtatatggccatgaccacaatgtttcttcagtagccatcatgcccaa

SEQ ID NO: 216410 - DNA, 100 bp, Homo sapiens
ggtggaattatgccctgttggttccaatgctgggattggctgcttttcgacctgatcccaaccttgaagaaagtcctaaaagaaaaaatattacatatga

SEQ ID NO: 216411 - DNA, 74 bp, Homo sapiens
tttaccaaacttattaataggaataccactattccaaccaagaagagccaggcatttattgaaatggcaaccac

SEQ ID NO: 216412 - DNA, 49 bp, Homo sapiens
ggatcagaagacattcagcatttttgttgcatattctaaggacccagac

SEQ ID NO: 216413 - DNA, 75 bp, Homo sapiens
ggacagtccaatgtcaacattgcccagcaagtgttggagtgcttagtgcagttggtgagagcgggagccacactc

SEQ ID NO: 216414 - DNA, 90 bp, Homo sapiens
gatggctcttctctggaagatcttgtggaatgtatcctgtcaggtataatgtcagtgaatggcaagaaagttcttcatatggatcgaaac

SEQ ID NO: 216415 - DNA, 75 bp, Homo sapiens
cggctgcgaagacgcggtgggccgcccctccggtctgggaggggctgaacgtggtgaagacaggccgagtgatgc

SEQ ID NO: 216416 - DNA, 75 bp, Homo sapiens
ctgcttcccgaggagcattggaaggcagacgcgtgccatgcctaccagatcattcaccgcaatgggattcctgac

SEQ ID NO: 216417 - DNA, 59 bp, Homo sapiens
gaacagcctccgcggctccggggagaagatccccaagtaagcccttggcacggaaatta

SEQ ID NO: 216418 - DNA, 100 bp, Homo sapiens
acagctcctccagataccagcacatgcagcccatctgctgacattgggactactactgaggtcatctccgcggtgtcgaggctctccctgcacagcatcg

SEQ ID NO: 216419 - DNA, 98 bp, Homo sapiens
ctttggaacacgaagtgtgtctcatttgagaaaggacaaagctctgatggcaccaaatcttgactcctttggacgcgatcgggcactgtatcaagagc

SEQ ID NO: 216420 - DNA, 95 bp, Homo sapiens
cgctgtcctaaatgtggcgacttgtgcacacatgtagagacctttgtatgtggtagacttgctgctggctcgaggtgcaaataaagaacatagga

SEQ ID NO: 216421 - DNA, 51 bp, Homo sapiens
ggcatctaagaaatttgctgttaaagtcttaaagaaagtgcagaagagatg

SEQ ID NO: 216422 - DNA, 118 bp, Homo sapiens
ctgcatcagaggctgcagctgtgtgttttccagcaggacgttcagcaggtgcttaatttacccatttctgatgcgaggaggaaagcctatgccactgttggcgtgtacaatggcgatt

SEQ ID NO: 216423 - DNA, 90 bp, Homo sapiens
caagccttgtttattttcctcaccactgaatctacagtgtgtggctgtgacctggcacaagggggcttcttcataaagaacggagagtat

SEQ ID NO: 216424 - DNA, 75 bp, Homo sapiens
gcagcaaagagggctctatctggaaccaccagatctccagatcacactaagtttgtgggaagcttcaaaaccaaa

SEQ ID NO: 216425 - DNA, 82 bp, Homo sapiens
agtgtacaagtcaagacggggaataaagcggagcgaggacagcaagattttgagaagagggggaaaaaggaagtttgtcctg

SEQ ID NO: 216426 - DNA, 74 bp, Homo sapiens
gcggcggcggcctcggctgaagaaagaaggtgggagcggagagcgcaggcgtgctgtttgcagacaaggtccca

SEQ ID NO: 216427 - DNA, 80 bp, Homo sapiens
ggacgaggtggatgttatctggtggatgttatagggttttttgattaactcaaaaccagagaatgcctgtgaacccatag

SEQ ID NO: 216428 - DNA, 78 bp, Homo sapiens
aggctccctacctgagtccatgggtaattccagaattgattggccataccattgtcactgtattactgctcatgtcat

SEQ ID NO: 216429 - DNA, 50 bp, Homo sapiens
gcactcggagccggcacggctcggcggctccctggggaagggaatgcagg

SEQ ID NO: 216430 - DNA, 74 bp, Homo sapiens
cccaagtcgcggcccctcctctgagagccacagtcaggaaattttacctggattgttcttaggcccatattcat

SEQ ID NO: 216431 - DNA, 101 bp, Homo sapiens
ggaccaggaggaggttttcaggaccaaaattgtggaaaagtcactctggcgtcgggtttggagttcaagtcggtagccgacagcgttctgtttttacgtga

SEQ ID NO: 216432 - DNA, 75 bp, Homo sapiens
aatgctcctttaatttttgaacgagctgcaggactcatgcacacgttcaatgcccacgccgccactgacatcacg

SEQ ID NO: 216433 - DNA, 83 bp, Homo sapiens
tgtggcgcgcccagagccccgcgtttcagccctagggaagctgtatgcaggagctattcttgaagtttgtggatgaaaattgg

SEQ ID NO: 216434 - DNA, 100 bp, Homo sapiens
gaccatctgtgagaaggccagtgggtacctgcaggacagcctggctaccacaccagccagcagctccattgacaaggcacgtctgagaatggtggatgtg

SEQ ID NO: 216435 - DNA, 97 bp, Homo sapiens
agtttgaagcctttcatgtttttaaggacccagatgatgtggtaccagttggccaaagaagagcctggtgttggtgcatgtgctttggactagcatt

SEQ ID NO: 216436 - DNA, 100 bp, Homo sapiens
acctggtgaaggtggaacggggctcccaggacctccactaatcaccagaacaaaatgtgcaggtctaaatctcaaaacatcctcagcacagaggaggaac

SEQ ID NO: 216437 - DNA, 75 bp, Homo sapiens
gaattatgggcgtgagccactgtgcccagttgggatgaatgggttccggagagcagagtactcaaatacgtggac

SEQ ID NO: 216438 - DNA, 100 bp, Homo sapiens
cttttaagtgcaaacagttttttattcaacttagaaaagaattggatgctggatgagtactttgaggagcagatgaaggagatcatccgaatgtgttccc

SEQ ID NO: 216439 - DNA, 100 bp, Homo sapiens
cgtgtctaggtgagtcgcggtgggtcctcgcttgcagttcagcgaccacgcaaatggagctgctcctggtgaacaagctcaagtggaacctggccgcaat

SEQ ID NO: 216440 - DNA, 100 bp, Homo sapiens
tacgccctcatggggaaaatctccccggtgactttcagccaagaaatatttttcttcatggccctgatcagcaagtaaaaataggagactttggtctggc

SEQ ID NO: 216441 - DNA, 104 bp, Homo sapiens
tgtcccgcgagacagccgacacagatacagcagaccaagtcatggcttccttcaagatcctggctggggacaagtctcacaccattttgctggtacagcctacc

SEQ ID NO: 216442 - DNA, 89 bp, Homo sapiens
gtctttgtagctgcttaggcagcaagtatgtcagtgaggagacttgtcacatgcatcaggaccagagatgctggcatcaccatctacat

SEQ ID NO: 216443 - DNA, 104 bp, Homo sapiens
caccctaacaagccgcaacgtaaaatccttggaaaagggtgtgctgggcatcaaggtgaagatcatgctgccctgggacccaactggtaagattggccctaaga

SEQ ID NO: 216444 - DNA, 83 bp, Homo sapiens
ccgcagagcaagcgcggggaaccaaggagacgctcctggcactgcagaattcaattcgtcataatctgtccctacacagcaag

SEQ ID NO: 216445 - DNA, 100 bp, Homo sapiens
gtgtggtctacgagctgtttctcatctttatactcttccagcttccccgggcgctgcctggacaggcctgcctgcgtgctgggacatgtctggcctccaa

SEQ ID NO: 216446 - DNA, 101 bp, Homo sapiens
atgataaagggctctgaaagctagaagaaaaggtgtacttgcaagaaacctcaggacttgagtaacagcaacatggttaaccttgattttcacacaaaaga

SEQ ID NO: 216447 - DNA, 82 bp, Homo sapiens
gcctgcgccgccggggccgctgcaaggggaggagagaggccgcctcagggggatatgagactttctactcggaatatcctga

SEQ ID NO: 216448 - DNA, 98 bp, Homo sapiens
caaggctcttccctgaccattttctactgtccctgcgcgaggattgttaaaatgagtcttcggaagcaaacccctagtgacttcttaaagcaaatcat

SEQ ID NO: 216449 - DNA, 82 bp, Homo sapiens
ggatcctttgataatgaaggcattgctatttttgcacttcagttcacatactatttatgggagatcatgaatcagacagata

SEQ ID NO: 216450 - DNA, 100 bp, Homo sapiens
cttgaatgtgtcaaaaccaaacaccctcagctccacattgagagcaaaatctacaagatgatgcagggaggagccctgggcgctgcctatggcacagcca

SEQ ID NO: 216451 - DNA, 96 bp, Homo sapiens
caggcgtgcgcggacggtgtgcggaaccacgaccatgcctgcatcgcctgtcggatcatctatcggtcagacgagcaccaccctcccatcctgccc

SEQ ID NO: 216452 - DNA, 100 bp, Homo sapiens
cccgcgcagccgccggcgtcgccgccatggacctaggcgcttgaagaggctcagaaagctatccaacaactctttggcaaaatcaaagatatcaaagaca

SEQ ID NO: 216453 - DNA, 98 bp, Homo sapiens
ttgaacaaatgtttccttaaagtgcctcgatctaaggatgaccctggaaagatccataatgagatggcatcaacatcagataaaggtgcccaaggaag

SEQ ID NO: 216454 - DNA, 99 bp, Homo sapiens
agagcgcgaatatcgtcatcgttagaagtatatacgtctgtcctgcgacacggacgcggaaatcctttacgagctgctgacccagcactggcacctgaa

SEQ ID NO: 216455 - DNA, 75 bp, Homo sapiens
tttcctaagctcaactctagccagctaggttcctggtgctttggggatcacgagctgctcaggcaagagctgaac

SEQ ID NO: 216456 - DNA, 89 bp, Homo sapiens
ggctctttcagtgcttttgggaattatgacccttctgggagcacttggtcttgctcagtgtgcagaactctgctggcagctgagagggg

SEQ ID NO: 216457 - DNA, 97 bp, Homo sapiens
aggaaataggatttaaccgctctctgcctcccagctccagaacctgggtatcaacccagcaaacattggcttcagtaccctgactatggagtctgac

SEQ ID NO: 216458 - DNA, 100 bp, Homo sapiens
gttcgaggcatgcatcctgaactttttcaagaaaatcaagctgttgcaagaggattttttaactatattgaaaaactgaagtatgaacaccacctgaaag

SEQ ID NO: 216459 - DNA, 100 bp, Homo sapiens
acacttactccagtgggaggaggactccacgcacataaaatccaaatcccacttgaaccaactgaagaaaagaagaagattggactcagatgctgtcaac

SEQ ID NO: 216460 - DNA, 100 bp, Homo sapiens
gaagatcttgctagtgccatagggaaggagtcaagactgagaacaacgatcatattaatttgaaggtggcggggcaggatggttctgtggtgcagtttaa

SEQ ID NO: 216461 - DNA, 82 bp, Homo sapiens
caggttcagtacgtgcagctggcgccagtgagtgaccacacggccggggcacagcagcccctgtcaaagggaacaggaagca

SEQ ID NO: 216462 - DNA, 75 bp, Homo sapiens
ccagttaactatggtagcccacccagcattgaaataaactatcaatcttgcccagactggagaaaggactgcagc

SEQ ID NO: 216463 - DNA, 76 bp, Homo sapiens
gcggagcccgggacgcgcgtacgccctgctgcttctcctgggggaaggttcctcctcattcttgtcggaaacttgc

SEQ ID NO: 216464 - DNA, 95 bp, Homo sapiens
tctgtctttgtgtcctgagatcaaatggcacttcattggccacctacagaaacaaaatgtcaacaaattgatggaacaaaatccagtctcatagc

SEQ ID NO: 216465 - DNA, 82 bp, Homo sapiens
tggaagacgcgctcctgcgccgaaatgacctccaccttcaacccccgagaatgtaaactgtccaagcaagaagggcaaaact

SEQ ID NO: 216466 - DNA, 83 bp, Homo sapiens
cttcgggccccggccccgcgcgccccggcccggccccgcgaggtgagcactcaccaccttcactcctcaagtgaggacgagga

SEQ ID NO: 216467 - DNA, 125 bp, Homo sapiens
atgaattgtacggcacttggcgtaaagccgcttccctcaagagtaactacaagagcaatttacagcaatgagggatttatacatgaaaaatggacaaggatttgcattagtttattccatcacag

SEQ ID NO: 216468 - DNA, 76 bp, Homo sapiens
gaggaaaacaacttcgagggcagaggaagatttaggattcagatttatatcggaacaggtcagtcaccaccccccc

SEQ ID NO: 216469 - DNA, 98 bp, Homo sapiens
aagggctacagaagtgtgcatcccaaccttccttctgacaagtcccaggaaaaacaagaatggtggtggctttacattgcagataggaaggagcagac

SEQ ID NO: 216470 - DNA, 96 bp, Homo sapiens
tggcgctgcgatggtgacgcggactgtgatgaccagtctgatgagcgcaactgcaatccaatggatttgaacagaagcgctttgccaggcttgcca

SEQ ID NO: 216471 - DNA, 100 bp, Homo sapiens
tactgtgcaccttccatttgaagggggaagtctcttgcaaattccagtcaaggccctaaaatatagatgacatggcagagcttctcctcggggagtcgaa

SEQ ID NO: 216472 - DNA, 82 bp, Homo sapiens
aatcagaaacctgaagttagaaaggctcaacgagaacaagctatcagaattggcagagggggtcgatttgggaggaaaggtg

SEQ ID NO: 216473 - DNA, 100 bp, Homo sapiens
cagaagtgaaccggcaaatgctgcaggaactggtgaacgcaggatgcgaccaggtgagactgctgctcctcgggccattttgaccggccatgactatgag

SEQ ID NO: 216474 - DNA, 83 bp, Homo sapiens
tatcaaagccatcggatggatgagcagtcacacagactttggttctccagcatttggctcaaggccccaagggcacatgtgac

SEQ ID NO: 216475 - DNA, 82 bp, Homo sapiens
ccagggcacgggagagctgggggattggttttcagagacatttcggaaagtgaaggagaaactcaagactgactcatgagga

SEQ ID NO: 216476 - DNA, 90 bp, Homo sapiens
cgccacgggggccatgtaagcagtgaacagagtatctgtcaggcaagagctgctgtgatggtttatgatgatgccaataagaagtgggtg

SEQ ID NO: 216477 - DNA, 90 bp, Homo sapiens
aagaatcctgtctcacgcctgtatcccagcactttgagaggccaagaatatatcactgatgtccattcgaatgacctgtctacaccacag

SEQ ID NO: 216478 - DNA, 80 bp, Homo sapiens
tgtgacttataatggagttgataacaacaagaataaagggcagctgactaacaatgcagcaagtcttggaaaaccttacg

SEQ ID NO: 216479 - DNA, 124 bp, Homo sapiens
cccgcgtccagcacctacgtcccgctgccgtcgccgccgccaccatgcccaagagaaaggtcacaccgacaaatctgaagcgggtttgccaggggagtgtacccgtctccccagcctgggccac

SEQ ID NO: 216480 - DNA, 100 bp, Homo sapiens
tagtggccgtcttttgcctctttctctcaggctttcctacaactcatgcccagcagcagcaagcaggtacctggactatgccagagtccccaatagcaat

SEQ ID NO: 216481 - DNA, 83 bp, Homo sapiens
cttggactgagtcctgcaggacacagattgggagtatgtatttaaaaacagtgaattttcatcaaagcaagagacatatgaag

SEQ ID NO: 216482 - DNA, 75 bp, Homo sapiens
gaaccctggtcaccgtctcctcagacccaacatgagtgaagtttcctgcaagaaacgggacgactatttggaatg

SEQ ID NO: 216483 - DNA, 100 bp, Homo sapiens
acactggtgactgatgaaaacagaagggtggccaggaagccagacaacatttagactgctatttgaactgctgggacctgaaggacttgaacttattgag

SEQ ID NO: 216484 - DNA, 100 bp, Homo sapiens
cacgagccagtacgtacgtctgacccctgacgagcgcagcaaagagggctctatctggaaccaccaggaatgtatcctgtcaggtataatgtcagtgaat

SEQ ID NO: 216485 - DNA, 100 bp, Homo sapiens
gctgttgccatgtccgcaccgggacgatcatcctggggacctggtacatgatcccttcccactggaggcatgtgatgagaggaaatcaccgaaaacgtgg

SEQ ID NO: 216486 - DNA, 100 bp, Homo sapiens
aagcatgaaaaatcaaaaggagttcatgcttatgaatgctcgacttcaggtttattatttccgacaaggacatgaagcctatgtcgaaatggcccggaaa

SEQ ID NO: 216487 - DNA, 75 bp, Homo sapiens
tcttcccactatctgctaggaaacacgagggcttcctgtgtccagtaccggttagtggtccgggatgtgaacacc

SEQ ID NO: 216488 - DNA, 111 bp, Homo sapiens
ttgttggggagaagaggattggaggtgtcagtgttaaaggaacctctacaacgaaggtgaagccacggaagataagatatttggagttcttacaacatggcagacattgac

SEQ ID NO: 216489 - DNA, 121 bp, Homo sapiens
aagagatacagggcagaggaaaatgcaagaagactgatggagcaggcttgcaatattaaagaattgaatgatctggcacgggaccctccagcacagtgttcagcaggtcctgttggagatg

SEQ ID NO: 216490 - DNA, 90 bp, Homo sapiens
tctacatcagtttggtttcactcagaccgattataagcgccatggctatggctagtgttaaattgcttgccggtgttttaagaaagccag

SEQ ID NO: 216491 - DNA, 107 bp, Homo sapiens
gactcaccgctctggccagggtgcttttggaaacaaatctgacccggtcgtctcgtaccgcgagacggtcagtgaagagtcgaacgtgctctgcctctccaagtccc

SEQ ID NO: 216492 - DNA, 74 bp, Homo sapiens
tcaaggctatgccctgcaactgcaccagttacaggattcgctaaatattgtaatggatcaaggagatacaccta

SEQ ID NO: 216493 - DNA, 75 bp, Homo sapiens
ggagaaggagacgccggatgaggtggcccaagagatggttcttctgtgtggcagttcagaatgatggatcaagct

SEQ ID NO: 216494 - DNA, 90 bp, Homo sapiens
gagaagacgtctgtgtcgtgcggcgcatattaaatttcctattgactacccctattcaccacctaccttcagattcttgaccaaaatgtg

SEQ ID NO: 216495 - DNA, 98 bp, Homo sapiens
agagagctattagagattgtgaagaagaatttcgatctccgccctggggtcattgtcagggtgaaaatcctatttataagagtgccgtaacaactgtg

SEQ ID NO: 216496 - DNA, 95 bp, Homo sapiens
gtttcagggagggaaacagattcagcagcggcagcagctggagaaggtcgtggagcagcaccttgcctgcaggtgggccatgcacagacacagct

SEQ ID NO: 216497 - DNA, 83 bp, Homo sapiens
agcatccctgcagccttctggtataccatcgtcaccatgacaacactaggggaaatcctcattgacgattcaatttgttgaag

SEQ ID NO: 216498 - DNA, 74 bp, Homo sapiens
cgggatttggagctgcctagcctcgcggtcgatgtcaaataaggagttgtttccaccaagtccttctgaaatgg

SEQ ID NO: 216499 - DNA, 50 bp, Homo sapiens
ctcgtgaagatccgcttcgccgacctgaagattatcggctataagagaat

SEQ ID NO: 216500 - DNA, 74 bp, Homo sapiens
gaagagaacgtctccgagtccctcaactctctacgctttgcctccaaggtctctggacctctgactgacactgt

SEQ ID NO: 216501 - DNA, 100 bp, Homo sapiens
ctgcagcctcgtgcggacgctcgtgcacagatactgaacacctacctcttcatgatgcaagcccaaggcattctgatccgggacaacgtgagaacaatcg

SEQ ID NO: 216502 - DNA, 75 bp, Homo sapiens
atcattgaataagtgttttaagaaagtggacaaagagaggagtcaggtattagaaaactactcggatgctccaat

SEQ ID NO: 216503 - DNA, 101 bp, Homo sapiens
ggaaggactcctcgctctatatagatgagcgtgaagccgtgcagaagaagaccttcaccaagtgggtcaattcccaccttgcccgtgtgtcctgccggatc

SEQ ID NO: 216504 - DNA, 100 bp, Homo sapiens
gggcggtggagcaggagctggcgtctctggagaaaggtggtgttatcaaggagaagaaattcctgccttgaccagatgtgtggagcatctacaaatgaat

SEQ ID NO: 216505 - DNA, 75 bp, Homo sapiens
gcttctgcccaacgacatcgatggcctggagaagggtgtccgcaatgttgccagtgtctgtctgcagattggcta

SEQ ID NO: 216506 - DNA, 96 bp, Homo sapiens
agaaaaagcattgtggacaccgtatccattcaggtggatattttatccaacaatgttccttctgatgatgtggcactggggaacaagcagctggcc

SEQ ID NO: 216507 - DNA, 82 bp, Homo sapiens
gatcgagaggatctggtgtaccaggcgaagctggccgagcaggctgagcgatacgacggattgtctcaaagcttgccaggag

SEQ ID NO: 216508 - DNA, 75 bp, Homo sapiens
ccgaggcccgcagcctccgcggatccgggcccgctcggcccctcccatggtgagaagccctaccactgcaactgg

SEQ ID NO: 216509 - DNA, 82 bp, Homo sapiens
aagacccagctcaagcagaggcctacacgatttactgcaaattgtggctactaatttgccccctgaagatcaagatggctct

SEQ ID NO: 216510 - DNA, 103 bp, Homo sapiens
cgccaatgtgggatcgatgtttcaatattggaagcgatttgatctacggcgactccagtattaaaggtggaagaaggtccatatctttttctgtgggtgcttc

SEQ ID NO: 216511 - DNA, 75 bp, Homo sapiens
gtgatgctgtacagaacacaggtggcctgcttccatgcctcctcagcttcaaggaccagtcctgcctctgttgta

SEQ ID NO: 216512 - DNA, 83 bp, Homo sapiens
cttagagagcacgcccatgctggagaaggagaagtttccgcaggactacttccccgaggtttttagaacttcagccataaaaa

SEQ ID NO: 216513 - DNA, 80 bp, Homo sapiens
caaaaggagcagaaaactttacaggtgccttagctggaccaattattgtggagccacatgtcacagcagtatggggaaag

SEQ ID NO: 216514 - DNA, 90 bp, Homo sapiens
atagccttcgacccaagcaacatgccacctggcattgaggccagtcctgacaaaatgcttcaggtccatgtgaaatctgaggtccttgct

SEQ ID NO: 216515 - DNA, 100 bp, Homo sapiens
tttcccgttgaaggtgctaccgctgacgacacccctggtggatggcgaggatgagaggactgaaagaggtgtccccactgcctctaaatctcaaacgttt

SEQ ID NO: 216516 - DNA, 100 bp, Homo sapiens
tcgctggtgctgcgctactgcgagaacaagtttaacgacaagcacatcaccactctgcagctatgtggtatcttgatcctagcattagcaatatgggtac

SEQ ID NO: 216517 - DNA, 82 bp, Homo sapiens
gggagaagaggaggatgcggctcgtggtggatggcatggggcgctttggcagttacagaatgtctgaaggggacagtgtggg

SEQ ID NO: 216518 - DNA, 99 bp, Homo sapiens
ctgacatcgaaaacccggacctcgcttacctgcatgctgggcagatcttgaaccttctggatgagctgagattggctaatgataccctcatctacttca

SEQ ID NO: 216519 - DNA, 101 bp, Homo sapiens
cacatgctcttgttgtctgtggcacttactctattggaaaagagaaagtcttcctaggtgcaggccctagcaggtgcaggtggagtagacaatctccatgt

SEQ ID NO: 216520 - DNA, 75 bp, Homo sapiens
cgccggccgtctccttaacaccgaacaccagtcatcttagtgggatttggggaagcaacagggctgtgtggggta

SEQ ID NO: 216521 - DNA, 76 bp, Homo sapiens
taccaagatgtgatgctggagaacttcaggaacctgctgtcagtgggtgtgctgatgtatcgggactaccccctgg

SEQ ID NO: 216522 - DNA, 99 bp, Homo sapiens
catggatctggccactttacctccgaccactgccatggctgtacttctctataatagatggaaatctgaaatagagtactatgctatgttggctaaaac

SEQ ID NO: 216523 - DNA, 90 bp, Homo sapiens
attaacctggccatggaaatcgctgagaagcacctggatattcctaaaatgttggatgctgaagataccagtttcattccaggacctgac

SEQ ID NO: 216524 - DNA, 98 bp, Homo sapiens
tcccgacggtcacccgaatcgcagggagtcgccgctggagaggggctcggcgcccggcggggactgcaggctttcttgatcatggatggtgaagatat

SEQ ID NO: 216525 - DNA, 100 bp, Homo sapiens
ctcctgaatagctgggattgcagtgtctttacatccaaaatgcaaagcagacaaatgggcatatcagggaagaacatgacaaaaagcaccagcatcagtg

SEQ ID NO: 216526 - DNA, 100 bp, Homo sapiens
tgtgaagataccagtttgcgtcaggagacacaggatgtttcgtctgaactcactttctgctttggcagaactggctgtgggttctcgatggtaccatgga

SEQ ID NO: 216527 - DNA, 75 bp, Homo sapiens
cgcggagcccgggacgcgcgtacgccctgctgcttctcctgggcttaaaagacaaccttcttgcttctgggacat

SEQ ID NO: 216528 - DNA, 82 bp, Homo sapiens
tggcggccatcggagttcacctgggctgcacctcagcctgtgtggccgtctataaggaaggaagcagccaccctcgccatgg

SEQ ID NO: 216529 - DNA, 101 bp, Homo sapiens
cgctctgggagcctagaatgcatcagtgcccttgtggcgaatggggctcacgtcgagcatggaggagtgacggcaggaactttctgtgctctgacaaccct

SEQ ID NO: 216530 - DNA, 75 bp, Homo sapiens
cccttccagctcgatctgctcttcgtctgcttcttcctcttcagtcaagccatgaaccagagaatcagtcagagt

SEQ ID NO: 216531 - DNA, 98 bp, Homo sapiens
taaactctcctttgaagactgaacggtaatggtaggagagagagagcagggattggggaatgctgcccccccaaagtttctgtggctgcgcttagcac

SEQ ID NO: 216532 - DNA, 100 bp, Homo sapiens
actggccaatacaaatcccttgtatccgaattacatgaatgacagtcttcgaaccaatgtgtttgttcgatttcaaccagagactatagcatgtgcttgc

SEQ ID NO: 216533 - DNA, 97 bp, Homo sapiens
tggcagtggaaaatgcgctcgggctggaccagcaggcatgagccatgagcccaagtccccttcgctagggatgctttccaccgcgaccaggaccacc

SEQ ID NO: 216534 - DNA, 97 bp, Homo sapiens
tgaatcagtgggatcatgtactacaaatggtcacagaaaaaatcactctgaggagcggggctgttcacaggttgtttacattcagagctctatcaat

SEQ ID NO: 216535 - DNA, 83 bp, Homo sapiens
gtctacggcagcctggggatataagtccctgtgaagcaggaagagtgagggcaggttcactgcagctcagcagcatgtctgca

SEQ ID NO: 216536 - DNA, 83 bp, Homo sapiens
tctaccgcaactctcagttcgagagtaaagagtccctgtgaagcaggaagagtgagggcaggttcactgcagctcagcagcat

SEQ ID NO: 216537 - DNA, 90 bp, Homo sapiens
catggatgcttgttggatgaattaatgaaccttgacccacaccaaggctcccagccaacctctgataaaccctcccagcggccatcagag

SEQ ID NO: 216538 - DNA, 75 bp, Homo sapiens
agagtcagtgatttccataaattgaagcaaaacctgagtcagaactccatcacaggggaacacagccaactgtta

SEQ ID NO: 216539 - DNA, 98 bp, Homo sapiens
ttcgaattttacttctgaacgaaatggagaaactggaaaagaccctcttcagacttgaacaagggtctcactgtcaccttggctggagtacagaggcg

SEQ ID NO: 216540 - DNA, 75 bp, Homo sapiens
ttttgagggatgagacaagaggaccttgcccaggtttgttgataagccggggcccttcgtgggaccctgcggtca

SEQ ID NO: 216541 - DNA, 82 bp, Homo sapiens
tgcacacctggatccaggataacggaggctggcaaatgaagaaacacccctgccgccagtgtgacaagtctttcagctcgtc

SEQ ID NO: 216542 - DNA, 126 bp, Homo sapiens
gccctttcccgagatcaccaagatgctgggcgccgagtggagcaagctgcagccaacggaaaagcagggtatcagctttcccagcctgacgctgcctccaggctggacactgaggaactccggttg

SEQ ID NO: 216543 - DNA, 75 bp, Homo sapiens
cttcacaggaattgccatttgaaaaccagtagattcccagacatcgcgaagtgaatctgaaattgtgccaaaagt

SEQ ID NO: 216544 - DNA, 100 bp, Homo sapiens
cggcactgcctggctgcgagcacatgatggcgatacgggagctcaaagtgtgccttctcgggattacaccaccaccttcactgtcagatccacttaaaga

SEQ ID NO: 216545 - DNA, 97 bp, Homo sapiens
ctcccgtgtttgtagaagtggctttgtggaatattcccatctcctgcctcctaatagctttgaggattgagaggatccagaatccagatctctggaa

SEQ ID NO: 216546 - DNA, 76 bp, Homo sapiens
cccaggactgcgcccccgggagcgggcgcccagaggactatgatttaatctccaaagaaccaaagccttttgtatt

SEQ ID NO: 216547 - DNA, 100 bp, Homo sapiens
ggcctgtcatgagagacacgatgagaagtccttaaaggtagatcactgattcacaggggagcaggcggaggcaagggacgtgatgcctgggccacggcag

SEQ ID NO: 216548 - DNA, 103 bp, Homo sapiens
ccagaaaccagcagatattcctgcgggacatagaacaggtgccacagggattgtcaatgaggcagatcagattccgatttgacgggcaaccaatcaatgaaac

SEQ ID NO: 216549 - DNA, 100 bp, Homo sapiens
atgaaatatggaaacgactcctcggccgagctgagtgagaagtcaacgaaaggttccgttgtccttgaccacgtattccatcacgtaaaccttgtggaga

SEQ ID NO: 216550 - DNA, 90 bp, Homo sapiens
tgagcaccttttggcccaatgaatatcaggcgtttactgaagcatttgaaagggaactaagaagacataaagttcaagagaatattggac

SEQ ID NO: 216551 - DNA, 100 bp, Homo sapiens
cgctggtgcagctcaacgagctgctggaggacgagggccagctgacggagatggtgcagaagatggaggagtttgaaggatgacctctaggaagaaagtg

SEQ ID NO: 216552 - DNA, 102 bp, Homo sapiens
cctcaattgttgcttatctcatagcaaaaggacaggctgagactcgggctgagtttgcggagaggtcagtaactaaattggagaaaagcattgatgacttag

SEQ ID NO: 216553 - DNA, 109 bp, Homo sapiens
gtctcgctccgtggccttagctgtgctcgcgctactctctctttctggcctggaggctatccagccggagcgtgctttggacaccatgaattttgatgttataaagggc

SEQ ID NO: 216554 - DNA, 100 bp, Homo sapiens
gccggcagcgcgacaggaacccctccgagacccagtccaaaaggaatcccttggcaccatgtcctgtgtgcattataaattttcctctaaactcaactat

SEQ ID NO: 216555 - DNA, 75 bp, Homo sapiens
ttggttacctatgtacctgttaccactttcaaaagtatgcatcttctattgatgatattttggaagatgaagaac

SEQ ID NO: 216556 - DNA, 75 bp, Homo sapiens
tagaactgcagaggttcctctacagcaaggtggagacagattactgtctgctgctggctctgccctgtggccgtg

SEQ ID NO: 216557 - DNA, 100 bp, Homo sapiens
ctggaactgtgttcagattcacttccttctcatccttttccaccagctaaaggtgaccaagaatatggcccaggtgaccaaagccctggacaaggccctg

SEQ ID NO: 216558 - DNA, 75 bp, Homo sapiens
caggaatttgaagagatgctggaacatgcagagtctgcacaagtggataagattgtggaccagctgcagcagtta

SEQ ID NO: 216559 - DNA, 101 bp, Homo sapiens
cgccgcagaggaaaagcaggtgccggtgcctgtccccgggggcgccatggcgaccggagcgaacgccacgccgttggagacactatggacagcgtgaagca

SEQ ID NO: 216560 - DNA, 100 bp, Homo sapiens
gaaattacatccagaggattttcctgaagaagactccctgagaaatgtttcctcagccggtcatggcccccgctcttctccagctgagctcagcagctct

SEQ ID NO: 216561 - DNA, 75 bp, Homo sapiens
gaagcgctgcgctcgcgcccggatccctcaggcctgacctctcgggacacacccagccctgtggacccagacacc

SEQ ID NO: 216562 - DNA, 100 bp, Homo sapiens
gaagcccatccagactgtttgatgctgaacttcaccgttaagcctttggattatgagactcgcccagcgcaaagcctcatcattgtcgtggagaatgagg

SEQ ID NO: 216563 - DNA, 90 bp, Homo sapiens
cccaggatgtgacgaccatgcaaacctgcttcttctcagcctgttgataaccatgttagcccatcttccttcttgggccagacaccagca

SEQ ID NO: 216564 - DNA, 101 bp, Homo sapiens
cagaaaatgagtagtcttttaccaactatgtggcttggagctcaaaatggctggtccccgcggaagccgcggtgtcggcgccatggcggagctgacggctc

SEQ ID NO: 216565 - DNA, 75 bp, Homo sapiens
agctggcgactttctccagtgactgggaaatccaggaagacagtagggtggagccgccaccaaaatgcagatttt

SEQ ID NO: 216566 - DNA, 80 bp, Homo sapiens
cacggtcctaagagctgggcaccaggaagcgaaggctgtaatctcaggggcgatataatcaatgaggtggtcctaaagtt

SEQ ID NO: 216567 - DNA, 50 bp, Homo sapiens
cctgacccgagctctgccacttggtaatttgcattgtatatagatgatcg

SEQ ID NO: 216568 - DNA, 126 bp, Homo sapiens
ccctacgcgctacacaagtggagctccttttcctccacctaccttcccgagctgaccggttccctgatgtgttacctgcttctgctactgatccaaactgcagaacttctcattcatccccaaggc

SEQ ID NO: 216569 - DNA, 100 bp, Homo sapiens
catcagcactgcctctggcatccccgacttcagctatcatggtgaacttacttcagattgtgcgggaccactgggttcatgttcttgtccctatgggatt

SEQ ID NO: 216570 - DNA, 100 bp, Homo sapiens
ctggagtccgcgcctccctggggcgatgccagtccctccactccagaggagaacgaaaccacgacaaccagcgccttcaccatccaggagtactttgcca

SEQ ID NO: 216571 - DNA, 82 bp, Homo sapiens
gcagaggcggcagcaccaccggggttgactccgggggcgcggcgaggagatggactcaccctgtcacccaggttggactgca

SEQ ID NO: 216572 - DNA, 100 bp, Homo sapiens
gctccacgaggagcacagccgggccgctgcgaagaaccccatgcatcccagctcaaggtggtcagagctagaccttcttattctgttggggacggcgggc

SEQ ID NO: 216573 - DNA, 100 bp, Homo sapiens
ttccctcggattaaacgccggagagagcgtgaatttgcctcggggacgcctctccaggtacaccagaggatcgcttcctggcagaatttgggagctgttt

SEQ ID NO: 216574 - DNA, 129 bp, Homo sapiens
gtgtatcctgtcaagggggcaagtggataccctggggctgagaggaatcttctggagtactcttattttgaaaaggaggggattgtagcatattcctaatggagcaccaaggtgatgtgacactgctgc

SEQ ID NO: 216575 - DNA, 95 bp, Homo sapiens
tatcatgaaatcctccccacttatgtttgtaaatgtgagtggaagccatgaggccaaaggcagttgtattgacaagttggatggcttgaggactg

SEQ ID NO: 216576 - DNA, 87 bp, Homo sapiens
ggatgagcggaaccttggaaaaggtaatggtaactcgggatttgaaggacagagtcgctatgtaccatcctctggaatgtccgccaa

SEQ ID NO: 216577 - DNA, 111 bp, Homo sapiens
gcagtgatcacacgtcggctgctgggaagatctggattctcgtttcaggtctaccccgagccccggagcgagagcgagtgcctgagcaacatccgcgagttcctgcgcggc

SEQ ID NO: 216578 - DNA, 50 bp, Homo sapiens
catatattggagctacatggatctctaaagcccaaatttgcagaatctac

SEQ ID NO: 216579 - DNA, 100 bp, Homo sapiens
gcacgggcggctccgcagtgaccggactcgggggaggttacggcctccgctgccacagggccatcatcaccatctgccggctcattggcatcaaagacat

SEQ ID NO: 216580 - DNA, 100 bp, Homo sapiens
cagtcctatcggaaggatgatttcgttatgagcaatggtggaacaaagcggcaaaagatatcccatcaaaattatatagcctatcaaaagcaagttattc

SEQ ID NO: 216581 - DNA, 75 bp, Homo sapiens
acagtctatgatgtcaaggataagtctcatgacaccgtggagccgccaccaaaatgcagattttcgtgaaaaccc

SEQ ID NO: 216582 - DNA, 75 bp, Homo sapiens
cttcgcctaagtttccagaagactttgacgatggagagcatgcaaagcagctgaaggaagaggatcaccttccaa

SEQ ID NO: 216583 - DNA, 101 bp, Homo sapiens
aaaagaggctgaatttaaagcaatgttggagcaacttaagaagcaacaggaagaggcacagttaatagatgagcagattttgtgtgtccatggtggtttat

SEQ ID NO: 216584 - DNA, 100 bp, Homo sapiens
gaaggaagagtcagcagagcaaccagagttctactacgatgagtttggtttccgtgtgtacaaggaagcagccagactgccttccgggtcactgccatgg

SEQ ID NO: 216585 - DNA, 74 bp, Homo sapiens
ctggagcagttgtatgtgtagaaagtgaaatcagaggagatgtaactatcggtttcctatcctgggagcaggag

SEQ ID NO: 216586 - DNA, 80 bp, Homo sapiens
agccctggacggcattcagtgttttgagccctgggccggtgtctccctggcatcagtgcccctgccggtaatggagggcc

SEQ ID NO: 216587 - DNA, 96 bp, Homo sapiens
gcgggaggaggcggcggcggcgggccaattcctgtccccccagcagcatggcatcgtgtgctgaaccctctgagccctctgccccactgcccgccg

SEQ ID NO: 216588 - DNA, 100 bp, Homo sapiens
ggtgaaccagatccagaagactgtgatcgagcccttaaaaaaggctgctggtggggtgaggccatcccacgcaactctggggtctgtgaagccaccaagg

SEQ ID NO: 216589 - DNA, 50 bp, Homo sapiens
cgtcaatcagagcgtcctgtgcggttttgtggtctttgcaacccttgtgg

SEQ ID NO: 216590 - DNA, 98 bp, Homo sapiens
gcggcggcggcgcccgcgggtggtataaaatggcggatttcgaagagttgagggtgtcatggagaaactccagctgggcccagagattctgcagcggg

SEQ ID NO: 216591 - DNA, 50 bp, Homo sapiens
aaggagttagcgacctactgggaaatatccgcgcaagatgttgacgttgc

SEQ ID NO: 216592 - DNA, 90 bp, Homo sapiens
cccatgtaccgtcctcggccagccaacccagatgaaatcggcaactttataattgagtgcacctgtggcgattctcaggtggctacccag

SEQ ID NO: 216593 - DNA, 94 bp, Homo sapiens
ttcagacagcatatttgagtcatttccttcgtacccacagtgcttcatgagaggggtttcctggaagcaccttcatgtcatcctatcaaaacca

SEQ ID NO: 216594 - DNA, 75 bp, Homo sapiens
cactgttttttctgacatctttgtttccaagattgagaggatccagaatccagatctctggaatagctaccaggc

SEQ ID NO: 216595 - DNA, 82 bp, Homo sapiens
ctgggggagctgaaacagaacctgtccaggagctggcatgacgtgcaggtctctagcgcaccctgtattcagtggatcagct

SEQ ID NO: 216596 - DNA, 83 bp, Homo sapiens
ccattgtctgcatggaagagtttgaggacatggagagaagtctgccactagcctacgagaagcagcggggcacccggcgcgag

SEQ ID NO: 216597 - DNA, 90 bp, Homo sapiens
agggccttctcccgcttctctcctcctcctctccacgctggggggatcctggcaataggcgaatatgaagaccttagagcagagaaccag

SEQ ID NO: 216598 - DNA, 116 bp, Homo sapiens
ggacgtggccactgtggccttctgcgacgcgcagtccacgcaggagatccatgagaagcatttgcaagtgaggaagcagcacaaccctgggttttagataatttctaacagagagg

SEQ ID NO: 216599 - DNA, 97 bp, Homo sapiens
ttgcctttcctcatagaagactacgaagagcagccagggttgcaaccccacataaatgacgagtagcacagcccctctatggtttagatggcagtgc

SEQ ID NO: 216600 - DNA, 75 bp, Homo sapiens
cagatggacaaggagaccaaagagaacaacctctctgaagaaggctacagagtgcggtggcgccagcacagaact

SEQ ID NO: 216601 - DNA, 80 bp, Homo sapiens
tcccccacgtggtgcggctcaaggctctgacgcccgctctgcggcttcggtgtttgaacaggccacagtccaggagcgct

SEQ ID NO: 216602 - DNA, 90 bp, Homo sapiens
agatctgcagagctcccagggcggacagcagcctcgggtgcaatcctggagccccccagtgagggtggagtctttcattttggatcagga

SEQ ID NO: 216603 - DNA, 97 bp, Homo sapiens
atatcttgaaaagctgccagaaagggtgtgctgatctgcaaaccctggacacaatgcagccaattgagaggaaaagacagggctatattcatgagct

SEQ ID NO: 216604 - DNA, 100 bp, Homo sapiens
gccgtccgcgcgcccgggcgcaggacatgtattcctctgagaaaccttggacagcagattttggtttaatatctgattgggacaacattcagacccattt

SEQ ID NO: 216605 - DNA, 83 bp, Homo sapiens
catgcggaagatcgtcgccacctggatgctggagatgatcaagcggtgctgattcacgagagtggaagcctccagagcttggg

SEQ ID NO: 216606 - DNA, 100 bp, Homo sapiens
ggagctcataacccctactccacagctaatgtggcagatcagattgcatttcaagctgctggtggattaacagcccttgaacacatccttcaagcagtag

SEQ ID NO: 216607 - DNA, 90 bp, Homo sapiens
caggactaagagaagtcacaaaacagcagatttcccaagagcagcggaaaatgatccagtcacagggttgaaaaataccggccacagacc

SEQ ID NO: 216608 - DNA, 110 bp, Homo sapiens
gcactcggtcatgtacccggtggactcggtgaagcttgctgatgaccgtatggcactggtgtcaggcatcagcttagatccagaagcagcgattggtgtgacaaaacggc

SEQ ID NO: 216609 - DNA, 103 bp, Homo sapiens
ccccgagctgggcagtgtccccagccgccatggatagcgacgacgagatggtggaggaggcggtggaaggtgctggagaatctggtaaaagcaccattgtgaa

SEQ ID NO: 216610 - DNA, 100 bp, Homo sapiens
cagcatcctagtggaggacgcccctgtggtgggcctgggtcctccaggatgccctgggcatcgccttctgcctctacatgctgaagaccatccgtctgcc

SEQ ID NO: 216611 - DNA, 74 bp, Homo sapiens
cggaacagcttgtccacccgccggccggaccagattttaacctttgagaccaagaacccgtcggaattagcaga

SEQ ID NO: 216612 - DNA, 100 bp, Homo sapiens
gctcaagtaccagcagcaccaggagtccctctccgcccagttacaagcaatgtctcaggctgtgcagacaaacggaactcaaccattaagcaaaacatgg

SEQ ID NO: 216613 - DNA, 90 bp, Homo sapiens
cgccgctgctgggagatgggcctactcgcccgccaccctgcgctgccgccgctctgaggagttaaaggtggcacaagatctctgtaaagt

SEQ ID NO: 216614 - DNA, 100 bp, Homo sapiens
ggaaaagcaagcttcagaaaagcaagttgcgctcttgaccaatgagagatatttgaaggaagatgttaccgagtacttcagtgaattccttagtgcaggg

SEQ ID NO: 216615 - DNA, 98 bp, Homo sapiens
ggaggaagaagaagtgttatatgtcctaaagtaaggtttcagttactccacaggatccgctgaacataggatgttgccacaaaatctacctcgtgtat

SEQ ID NO: 216616 - DNA, 100 bp, Homo sapiens
ctgcctctgaggatatttctggctgtcgccaactccatggctttccagcagagtctccttggaggtgacatggatatgggcaacccaggaaccctttcgc

SEQ ID NO: 216617 - DNA, 76 bp, Homo sapiens
aagaggcgcaaacaagccaatcccaggaggaaaaacggatgaaaacaccgttcttcatctttaacctggcagaaac

SEQ ID NO: 216618 - DNA, 100 bp, Homo sapiens
cagcgcaaccacgagacggccttccaaggtttgtgaaatggctgctgacatttctgaatccagcggggctgactgcaaaggagacccaaggaacagtgcc

SEQ ID NO: 216619 - DNA, 100 bp, Homo sapiens
gagcccgaggagatgctggatgttaaaatggaggacatcaagctgggcctgctggttgacctctccccagatggcctgatgatccctgaggacggggcta

SEQ ID NO: 216620 - DNA, 135 bp, Homo sapiens
ccttctcagccctgcagatcctgccctacacactggcctccctctaccaccgggagaagcagcttccaggtggttcacttatttttaacactctgcagcagcagcaacagcagctctcccagtttacaccacaac

SEQ ID NO: 216621 - DNA, 100 bp, Homo sapiens
agcttgacccaggagccaggggaaggccaggacatgcaaaaactctctgaagaggatgatgaaagaggagatgttaaagtaacccatcttgcaggacgac

SEQ ID NO: 216622 - DNA, 101 bp, Homo sapiens
ctcagtcacgggcctagaactccaaggagaaaggcggcggctgaccccgcactacatctacccaccagccatcgtgcagcccagcgtggtgatcccagccg

SEQ ID NO: 216623 - DNA, 50 bp, Homo sapiens
gccacgctggatggaaacagtcaaggactaatgtttcaagccagactccc

SEQ ID NO: 216624 - DNA, 75 bp, Homo sapiens
gcatttacggggtctcccggagggccagagtcgggaacaagctgccaataatgtctgcaaaaagtgaattcttcc

SEQ ID NO: 216625 - DNA, 50 bp, Homo sapiens
gatcatcctgctgctccccggaattaccgtgcagacggtctacgtgcagc

SEQ ID NO: 216626 - DNA, 80 bp, Homo sapiens
atttgaagtctgtgtcaaacatccatatcataagtggaattttggagatattcaaaggtttttctaaagagtgaccgagt

SEQ ID NO: 216627 - DNA, 100 bp, Homo sapiens
cctgcctgagaagctccagatcgtgaagccgctggaagtatttggcatgatcattactatcggccagtctatcgtgtatgtgatgaccgggatgtatggg

SEQ ID NO: 216628 - DNA, 100 bp, Homo sapiens
aaagagctgagaaaaaagataaagataaacaagctattaatgaatatgaaaaatggctgcatgaactggaaaatattgaacctactcaaggcctttcaat

SEQ ID NO: 216629 - DNA, 75 bp, Homo sapiens
catggaaggcaactgtgtttcacttaccagaatactacgttcagctaaattaagatggcggacttccaccacaaa

SEQ ID NO: 216630 - DNA, 82 bp, Homo sapiens
gagaaggaagatactattaaacagaggacaagtgaggttcagctgtccatgctgttcacagaggagtgtgacaaggtgcggg

SEQ ID NO: 216631 - DNA, 127 bp, Homo sapiens
gcagcaagacccgcgccgccgggacccccaggacgacgtgtacctggacatcaccggccagaagcggactcctagaagaggggagcagcaaggatggaatgacagccgtgggccggaggggatgctc

SEQ ID NO: 216632 - DNA, 75 bp, Homo sapiens
agcggaaaccagtggccacagcatctttgtctagccccagtgcagggtctttttggagttcctgagctgagtgcc

SEQ ID NO: 216633 - DNA, 100 bp, Homo sapiens
agtgggcccagcgttcattcagactatgaaagtgatgacgactcttatgaagtgttggatttaactgagtatgcaagaagacaccagtggtggaatcgag

SEQ ID NO: 216634 - DNA, 75 bp, Homo sapiens
ggaacccttcgctggcgggagcgcggttcggggccgcagaggttatttggaaatagcggtgcttgcagcgcttgc

SEQ ID NO: 216635 - DNA, 97 bp, Homo sapiens
tgttatttgtctcaacaaaagaggaggcagcagatggctgaaattctgatccgatgtggctggttaatgcatgatctgaaaacccctgcactggtga

SEQ ID NO: 216636 - DNA, 98 bp, Homo sapiens
tacaagttctttgtggatggacagtgggttcatgatccatcagaggaagttggctggaatgtgatgacttaaaaggcccatgttctgaaaggcacaag

SEQ ID NO: 216637 - DNA, 60 bp, Homo sapiens
gcgaaggaggcagaggcacttatgcttgtcagagacggggcctcaatatgttgcccagtc

SEQ ID NO: 216638 - DNA, 97 bp, Homo sapiens
cgagcggtggtttggacgccggcggagacgcgggcgagggaaaaagacctcgatgaagttctgcagacccactcagtgtttgtaaatgtttctaaag

SEQ ID NO: 216639 - DNA, 75 bp, Homo sapiens
ttataaaacaaatgctgctgctatgaatatgggtcgaccattccaaaaaaatcgccaaaacctattgatgtacaa

SEQ ID NO: 216640 - DNA, 75 bp, Homo sapiens
cgcccgcttcaaccccaggggaccagaggaactcagccctgattgcggtacttttaggttgaaatacgcccctcc

SEQ ID NO: 216641 - DNA, 50 bp, Homo sapiens
tcccccatcaccccaacctacagggaaacagtactgggagtaccagttcc

SEQ ID NO: 216642 - DNA, 100 bp, Homo sapiens
caggctcaggtttccttccttcgcagcttttagaccaaaatatgaaagacttacaggcctcgctacaagttgaaaatgacccacatttcatcatttatct

SEQ ID NO: 216643 - DNA, 117 bp, Homo sapiens
tcaggctctcagaagctgcctgtgaggatgaagattcagcctcagaaggtctagagtctcttctccttcaagtccgtggttctggtggagcccgactgagcactaaggatcctctgc

SEQ ID NO: 216644 - DNA, 90 bp, Homo sapiens
cgcagatgctggagaagtccccttatgaccagctgtgatgcagatccatccgccctagcaaaatatgttctggctttggtaaagaaagac

SEQ ID NO: 216645 - DNA, 83 bp, Homo sapiens
atcctgatgaagttcgagcactaatatttaagaaagaagatgttaactttcagattgtgccttataacctgcctttgcctggg

SEQ ID NO: 216646 - DNA, 100 bp, Homo sapiens
cgagaacatcgtggccaactcgctgctgctgaaagcgcgtcaagtctccggagtagagatgaagagagaatttctaaacctggggctgtctcaactcctg

SEQ ID NO: 216647 - DNA, 51 bp, Homo sapiens
atactctgttatagataaacaaggtgtggtggctcacgtctgtaatcccag

SEQ ID NO: 216648 - DNA, 75 bp, Homo sapiens
ggggtctccagactgtttttggatgtcacatgtacttcagtttgaggataaaagcagaaaagtgaaagatgcaag

SEQ ID NO: 216649 - DNA, 100 bp, Homo sapiens
gctgcgccagtacatcagcgtgaagacgcagagggagacagatgctgtcttcgcaggtgccatgcctacaatggcaagcgtcaagctgtctacacttcat

SEQ ID NO: 216650 - DNA, 100 bp, Homo sapiens
tggcgcccgacccatcagttcgaaatgtagaagtaatagagttgccaagagtcgaagctaaaccagaagttcaatctcagccacctcgtgtgcgtgaaca

SEQ ID NO: 216651 - DNA, 75 bp, Homo sapiens
gttttcatggcatccaccatcaatggggtaaagcccacagcttgaagccaagcataaaggagaagctggcaggca

SEQ ID NO: 216652 - DNA, 100 bp, Homo sapiens
ctcttgcgcgcgggaagcagcaccaagttcacggccaacgccttggcactagggctttcagtccagtgtaaagctgttggagcgcgggagcaaaggtaaa

SEQ ID NO: 216653 - DNA, 100 bp, Homo sapiens
gaagaggccctgatggggcccaccatcccggacccaagtcttcttcctggcgggcctctcgtctccttcctggtttgggaatggaggctccagagtgaaa

SEQ ID NO: 216654 - DNA, 98 bp, Homo sapiens
aaaaactggagagcttcatcaaaaatagtgatagctttgataacacaacctccaagagggaaaacatttctccagattatccactcacccttctagaa

SEQ ID NO: 216655 - DNA, 74 bp, Homo sapiens
tgggcctccccagcagcagccatgggcaactataatgtaactgcaaactccaagctggtcattatcacggctgg

SEQ ID NO: 216656 - DNA, 75 bp, Homo sapiens
gtcttgggcttctggttattgttggccttcatcaactcctagaatctagaaagctcatcgagcggtccccccgca

SEQ ID NO: 216657 - DNA, 83 bp, Homo sapiens
cagcactctagttccaacatggttatcatgctcattgggaataagaggatatccaaattatctcataaggaaatttatgtttg

SEQ ID NO: 216658 - DNA, 90 bp, Homo sapiens
cttgtgacagaatatgccaaaaatggagaaatttttggctttcatgagaaggacaagaagccatattgccgaaaggatttcttagccatg

SEQ ID NO: 216659 - DNA, 100 bp, Homo sapiens
gaataattcatgaagaaggggctggatccgtgggtcagagaacacaggaccagtttgccatcccaaggccgaaggtactaggttttgacaagcttgcatc

SEQ ID NO: 216660 - DNA, 82 bp, Homo sapiens
agggatttattcccaagaactacatccgcgtcaagccccatccaatatgagttggaagtaaagagggtgcaagacattcttt

SEQ ID NO: 216661 - DNA, 83 bp, Homo sapiens
ccagcggcagccgagcccgcccgcgcgccgcaaaatgatgcttcaacacccaggccaggtctctgcctcggaagtgagtgctt

SEQ ID NO: 216662 - DNA, 76 bp, Homo sapiens
accgcttcctggagttcacgactctgagtgctggagtgttgaagcctggaaatcccctccccttccccctcccccc

SEQ ID NO: 216663 - DNA, 89 bp, Homo sapiens
gctcttgtgccctagcaccccgagaaccgtcagtttgagccagatggttgcagcattgcaggaagagaaaagtagtttgttggcagaga

SEQ ID NO: 216664 - DNA, 82 bp, Homo sapiens
gcgcgaccgccgaatcgctcctgcagcagaggttctgcggggagtgtctccagccctgcctgcaggtgccatccccgctgtg

SEQ ID NO: 216665 - DNA, 80 bp, Homo sapiens
tggtgttcgggaagaaaataaccccattgccttgagtcttacaggccccagaatcagaatgcctgctcctcggaaatgtt

SEQ ID NO: 216666 - DNA, 55 bp, Homo sapiens
gctgtgacctctatgagtgcaaaccaggttctgcagcagtgcatgagaaagctcc

SEQ ID NO: 216667 - DNA, 73 bp, Homo sapiens
agctactgtactggctattggaaggaggagattctgaagataaggaggtgttgacttcaaaatcaaaactgta

SEQ ID NO: 216668 - DNA, 90 bp, Homo sapiens
gcattttggcattgacatttaattttagggtcctttatatagaagggagagtagcaagcttgcgggttcgagtacacctctaaacttcag

SEQ ID NO: 216669 - DNA, 100 bp, Homo sapiens
gagctcctgggcttccaggccccgggcacctagagacggatggtcgcacgcatgattgtcggcatctcacaggctccccacaggtgcaggaagccgccgc

SEQ ID NO: 216670 - DNA, 74 bp, Homo sapiens
tcctcaccatgcccttctgcttcaaacagggacagcatggacagtgtcaagcagagtgcggccctgtgcctcct

SEQ ID NO: 216671 - DNA, 88 bp, Homo sapiens
aagtgaagaatggcattccttctaacagaattattttgggagggttttctcaggaagcagagcaatgggagagaagcagaatattcgg

SEQ ID NO: 216672 - DNA, 50 bp, Homo sapiens
gcaacatccgccaggtgttcaggcctgacctccgagggcatctaccgcaa

SEQ ID NO: 216673 - DNA, 75 bp, Homo sapiens
aataagtctcctgaggccaaaccattgcctggaaagctaccaaaagagtctggaaagagcaatgaaagaaaaggc

SEQ ID NO: 216674 - DNA, 87 bp, Homo sapiens
ggattgctgggatcttgctgggtgagatggcagtgtgtgcaaaaaagcgccccccaggtcgcctgcgaggccgctggccaggcctga

SEQ ID NO: 216675 - DNA, 98 bp, Homo sapiens
caaatcaagcctagtgcttcgttttgtgaaaggccaatttcatgaatttcaagagagtaccattggggcttccaaactacaaaaactttaaaggcacg

SEQ ID NO: 216676 - DNA, 80 bp, Homo sapiens
cggaagctggttttcaggccacaaatgctttcacaggatctaagcctttcccacgttatggttataaaccctccccaccg

SEQ ID NO: 216677 - DNA, 95 bp, Homo sapiens
atgcttactgttgcgtggttcgttattaacagattttgtggaagtataatactttgtcattatgagatgtcgtctctcggtgcctcctttgtgca

SEQ ID NO: 216678 - DNA, 75 bp, Homo sapiens
tgaatgaagacttcagatctggttctccatcaagtatgatggtgaaggatgaatatgtgcatgactttgagggac

SEQ ID NO: 216679 - DNA, 82 bp, Homo sapiens
gttcttgaaccgaagactcataatattctacaagggggttgctcctctctggatgagacagataccatacaccatgatgaag

SEQ ID NO: 216680 - DNA, 99 bp, Homo sapiens
tcctcccgcacggacccatgaaccagccgggcggcgcggcggctccgcagagagtactgcttggcagtaaaggagctcttctgcgcaaaagaatggctg

SEQ ID NO: 216681 - DNA, 89 bp, Homo sapiens
gtttgcggttcagccctttgatgaccgcagcagattactcaaagactgtcctggtttcgtgtttacccctcgatcaagggaggaacttc

SEQ ID NO: 216682 - DNA, 74 bp, Homo sapiens
caggctgaagaagatcccgacatggaaggagatggcgaaaggactgcctccgggcctgccaggagcagatcgaa

SEQ ID NO: 216683 - DNA, 100 bp, Homo sapiens
ggattaactttgagaaatatgatgatataccagtagaggcaaccggcagtaactgtcctccacatattgagaatgtcatctaatacatgggagaaacatg

SEQ ID NO: 216684 - DNA, 83 bp, Homo sapiens
cttactgaagagccattttttcaccatgctaaaaaggtgaaatgacaatggatgctctgttggctcgattgaaacttctgaat

SEQ ID NO: 216685 - DNA, 82 bp, Homo sapiens
agggcttggtggatgacaaggaggcctgagtagaccgcaggctgtgggtgagcgtggaggatgctcagatgcacaccgtcac

SEQ ID NO: 216686 - DNA, 100 bp, Homo sapiens
gtgtaagaagtgccttttgcctcccaccgtgattctgaggcctccccaaccatgtgcaattgtcagcccaaggccaaccccactgtcactctgttcccgc

SEQ ID NO: 216687 - DNA, 117 bp, Homo sapiens
cgcaaagtggggctcatgaaccgcgccgtgcaactgctcatcctggcctacgtcatcgggtccaggagccggctgtgcacatcccaggacaggagcccctgaccgcgtccatgctgg

SEQ ID NO: 216688 - DNA, 83 bp, Homo sapiens
gctgccgcggctcctgtgtgctttgaagtcatcttggccaagtatggtctggacggaaagaaggacgctcggcaggtgaccag

SEQ ID NO: 216689 - DNA, 90 bp, Homo sapiens
acaagaacgcagacctttgttgtgcccttcgctttatgaggcggataattggacttaaagatgaattttataatcgttacatcaccaagg

SEQ ID NO: 216690 - DNA, 75 bp, Homo sapiens
ctattgtgaaggagggttggctgcacaaacgagattttgcaagaacgaggctcaaggatgtgagggacacagtat

SEQ ID NO: 216691 - DNA, 96 bp, Homo sapiens
atttttttgtggagtggtttgaatatcgtaagcgcacgtttaaacatctcaagaattttgattcagctaaagttccatcagatgagtattgccctg

SEQ ID NO: 216692 - DNA, 75 bp, Homo sapiens
aatactcttcattcaagtcaatcagtttgcattggtggatgatgaagacttacaagatgaacctttacagatcac

SEQ ID NO: 216693 - DNA, 114 bp, Homo sapiens
accgtttctggctcccctaaagtgcatcctcctaatgggacccggttttacacttttcaaccgtgctatcaagactaatcaggaccttctcccagaaactccatggacgcacat

SEQ ID NO: 216694 - DNA, 100 bp, Homo sapiens
gctgagaatttgaaaaatgaagatgatgtagacactggactattaggaaggtgggagtcaatcattttgacaagtctcctgaaaggaacagctagcagga

SEQ ID NO: 216695 - DNA, 51 bp, Homo sapiens
gaagaggcgagtccggtctcaaaatggagaagttaaagtctgacacggctg

SEQ ID NO: 216696 - DNA, 90 bp, Homo sapiens
tgtgaagcgaattatgtaaagaggtggataaattagatgcttcagaatcactgagaaaagaagaagaacaagctacagagacacaaccca

SEQ ID NO: 216697 - DNA, 97 bp, Homo sapiens
ccaagaagcaataatccactttcgggaggccatacggctcgcaccttgtcgcttagattgttatgaaggacagtcattttgtttactcattcagccc

SEQ ID NO: 216698 - DNA, 75 bp, Homo sapiens
gactgtatgaactggacatctcgttccctcccaggtccggcctctttggcctacccccgttggctccgctgcccc

SEQ ID NO: 216699 - DNA, 87 bp, Homo sapiens
tttattgacattgctgaagtggagacagtacctggagtagaacagaaaaattattatgtctgtgttcccttgggactcattggaaat

SEQ ID NO: 216700 - DNA, 95 bp, Homo sapiens
gtgagagtatcatggttgaactcgcagctggaccttttggaaataatgaaaagtcccagaaatcctggatagaaagcactttgaccaagagggaa

SEQ ID NO: 216701 - DNA, 100 bp, Homo sapiens
cctcgcggctggggaggcgcggcccgggacgctcgagcttagggagcctcccttctgtctgccccaccatgccgggacatcgttatcgaaatggaagaca

SEQ ID NO: 216702 - DNA, 97 bp, Homo sapiens
gaaaaagctgccctgagacggtgtcccgccgaaagtgtatgttttaactggaaaaagtcttccatgaaaacgtcacttttaaaaaataagtaatgcc

SEQ ID NO: 216703 - DNA, 76 bp, Homo sapiens
cctctcgggagaagcagcgcctgttcccggggcagatccaggttcagatcatggaagggaagtggttgctgtgtat

SEQ ID NO: 216704 - DNA, 90 bp, Homo sapiens
tcccatgtgtatcctgtgaccattctatctggggcacgcttaaaaaggcctcttaagagccttgatggtgctctatatgatgatgaagat

SEQ ID NO: 216705 - DNA, 100 bp, Homo sapiens
tttatgatggttccaaggtaaaggaagaaggcgatccaacaagagctggcatttgttacttttatccttcccaggtttttcgttggaatatacgttgcac

SEQ ID NO: 216706 - DNA, 75 bp, Homo sapiens
agaagtcaagccgatcttgcagaaattgcagactcgagaacaggaagaactggaagaagctttagaagtggaacg

SEQ ID NO: 216707 - DNA, 50 bp, Homo sapiens
aagatcttccagagaataagaagcaggcttcttctcatatcggtaattcc

SEQ ID NO: 216708 - DNA, 100 bp, Homo sapiens
gttcaaatcaaaaaacgtgcgtgtgctcaaatgtgggcacaagtatcacaaaggggaggagagacttcagcatgcaaaccttcatctgttcggcttgcac

SEQ ID NO: 216709 - DNA, 100 bp, Homo sapiens
gccaagtttccagaaaacagaaatcgaaacagatacagagatgtaagcccatcaatacgtttggtttaatattggcagtgtggacacctttgaacggaat

SEQ ID NO: 216710 - DNA, 75 bp, Homo sapiens
ttggccccctcgtcgtctgccccagatgaacacaatgacgtacagaagaaaacctttaccaaatggataaatgct

SEQ ID NO: 216711 - DNA, 97 bp, Homo sapiens
gtccagcaacatgcatgaagccgaagagtggtaccgctccaaggactttgtgtcattgtatcaagattttgaaaacttttatacaaggaatctgtac

SEQ ID NO: 216712 - DNA, 82 bp, Homo sapiens
tctgacagaatgtctgaacctcatcgaaggggttaaacccatccagagtaatggctgcggccttacccaggaccctggggga

SEQ ID NO: 216713 - DNA, 96 bp, Homo sapiens
ctgccacgccctctcatccaccccaccttgtatgcaacgccccccttcacacacagtaagcctagaacattccatattctgcttcacacacggtga

SEQ ID NO: 216714 - DNA, 75 bp, Homo sapiens
aagagcggcctcctgaaggaggggaagggacgtgggggcggccacggcaggatcaagtcttccataccagggacc

SEQ ID NO: 216715 - DNA, 80 bp, Homo sapiens
actttgactactggggccagggaaccctggtcaccgtctcctcaggccaagtcctgtatctgccatgtctgtggcgtcca

SEQ ID NO: 216716 - DNA, 90 bp, Homo sapiens
cacaaaacagcagatttcccaagagcagcggaaaatgatccagtcacagcctcctgacaaggtgatccgggcgggccccgcaggaatttt

SEQ ID NO: 216717 - DNA, 90 bp, Homo sapiens
ctgctttcaactttactgtgcttgaagctgcaaagggtgtgggccgaagatatgctcatgtggtgttgaggaaagcagacattgacctca

SEQ ID NO: 216718 - DNA, 98 bp, Homo sapiens
tggagctgtacagaccctgcttctcagaaataccagcgaaggcggaagtacagcctgtctgccgtgtttcattcagccaccatgttgcaagatgttgg

SEQ ID NO: 216719 - DNA, 98 bp, Homo sapiens
gcagaggccccgagccccgtggatccgctggagcggagccggccgtacgcggtgctgcgagggcagaacctgggcaaaacctatgtgggtctaaaaat

SEQ ID NO: 216720 - DNA, 98 bp, Homo sapiens
cgagcccgggtcgcgtacttgctgaggcaactgcaacgcgcagcgtgcgaatcataaacatgtacaaggaaattgatcaaacaccctacaaacaagag

SEQ ID NO: 216721 - DNA, 82 bp, Homo sapiens
atgtgtgacccttcacctttgatcccctgacctgcattaccttgggcaatttgcatatttctccaaagaaccatccagaacc

SEQ ID NO: 216722 - DNA, 80 bp, Homo sapiens
cagccggcctctcgcccacactgaccccgggggagcggcagcaggtgagaagccctaccactgcaactgggacggctgcg

SEQ ID NO: 216723 - DNA, 82 bp, Homo sapiens
aattgtggaatggaatgggaaaacgcacagaaaactgaatctgtagataacgagggagaatgaattgtcatgaaaaattggg

SEQ ID NO: 216724 - DNA, 90 bp, Homo sapiens
ctattacaatcgcttgtacaaaggagagtttaaacagccaaaacagttcattcatattcagcgtggtattggaatgctatgtaagaaagg

SEQ ID NO: 216725 - DNA, 90 bp, Homo sapiens
cttctggccgcgggaaggagagggatacccacccaccatcccagggtctacaacatccacagccggaccgtcacccgctatcctgccaac

SEQ ID NO: 216726 - DNA, 90 bp, Homo sapiens
aacgggatcgcagtcctgcacaagcggcccgacgagatcagccagattctggtgcagcaggagcgggacgagctctatcggaagttcacc

SEQ ID NO: 216727 - DNA, 100 bp, Homo sapiens
ttccgcgacgatgcgtgcagaaaagagatccagggcttcctcgattgtgccgcgagggctcagagaatcagatatcaccaaggagagaattcagaagatc

SEQ ID NO: 216728 - DNA, 50 bp, Homo sapiens
ctgtattctgacgtttacaaaactacagactatcacattgcaaccggcag

SEQ ID NO: 216729 - DNA, 75 bp, Homo sapiens
acccattgggacagtgacccctgctctgaagctcaccaaaaccatccaggacccgaagattagtacaagtctgcc

SEQ ID NO: 216730 - DNA, 75 bp, Homo sapiens
gaaaggatggctggatcaggaagaccaggaagcaccactgcagctggctctgaagcaccgacaaggcaagaatca

SEQ ID NO: 216731 - DNA, 100 bp, Homo sapiens
cgaggacagtggcacttcagctgccagctcccctaccatcatgcggaaaagcagcggcagccccgactctcagcactgatattaataaggcagcggaaag

SEQ ID NO: 216732 - DNA, 75 bp, Homo sapiens
cagtccctcgtccagccacccccaggttctgctccagacgagcccttaccacgttgactcactcctgcagctcag

SEQ ID NO: 216733 - DNA, 90 bp, Homo sapiens
gggattccggcgccgctctccgagctcgatccgctgctcgcacgggagccagctgggtgtgccggtggtggtgtgcacattgagccccgg

SEQ ID NO: 216734 - DNA, 100 bp, Homo sapiens
gcaggagaagaacaccctgccgaccaaagagaatggctcccgcaaagaagggtggcgagaagaaaaagggccgttctgccatcaacgaagtggtaacccg

SEQ ID NO: 216735 - DNA, 100 bp, Homo sapiens
caaacccttggagccttggttgtttgcaattgaagctgagaaactgaggaagagactggtggaaactgtccagaggtatctcgggggagctttgtgcctt

SEQ ID NO: 216736 - DNA, 97 bp, Homo sapiens
cggtgcctgtccccgggggcgccatggcgaccggagcgaacgccacgccgttggatgtgaagttcatttccaatccgccctccatggtggcagcggg

SEQ ID NO: 216737 - DNA, 90 bp, Homo sapiens
ggaagctgttggagcagtgtggggaatttcccaccaggatgagtatgattggctgtgattttaggttggaaagggcaaagaaattacaag

SEQ ID NO: 216738 - DNA, 100 bp, Homo sapiens
aatcactgggaacatgcggcaagaggccattgaccgcttcaatgatcgccacatcacagaatcgtatctatctcacagctgacaaccttgtgctgaacct

SEQ ID NO: 216739 - DNA, 51 bp, Homo sapiens
tgactgaggagccattgatgtgtaaatctctctgatccagctggatagcat

SEQ ID NO: 216740 - DNA, 100 bp, Homo sapiens
tgggcagatgaggcagaatggggcacaggaagctgtgctgaatggtttggtggccactgaggtgttgatgtggttttatgtcggagagattataggcaag

SEQ ID NO: 216741 - DNA, 100 bp, Homo sapiens
ctgcagaagtgtcagagactgaggacttaaatgaagccactgattagcaatttaaagatcctctccaagggtgggttaggagtacagaagatgctgtgga

SEQ ID NO: 216742 - DNA, 90 bp, Homo sapiens
gttaaggattccaagtaactcttatttgcattgggggccttattctggacacaactgtatcagacccaaacttggttgggattgttgttt

SEQ ID NO: 216743 - DNA, 100 bp, Homo sapiens
gtgtgatagagagggcattcaaagatgaatatatggtcaatttggtcagagctccagaagttcctggacatctggaggacctgttgatgctagttcagag

SEQ ID NO: 216744 - DNA, 98 bp, Homo sapiens
atgaaaccacttctctacatcccatctcaatcagaattactagattttctctcaaactacgagcacctgtggaatcctctcaagaggaacagtcattg

SEQ ID NO: 216745 - DNA, 80 bp, Homo sapiens
cggtgggccccagccccacagaccagcccagcattcagaacccagtgacttgattgtaaaaatttacagagcggaatcat

SEQ ID NO: 216746 - DNA, 75 bp, Homo sapiens
gactttactgaagaggaggaagcccagagggctctgaactcctacttcgagcctccggtggaggagagcgccttg

SEQ ID NO: 216747 - DNA, 90 bp, Homo sapiens
gagttcctggaccgtgagagcatcaagctcgtgtccatcgggactggttaaatatgttgagcccaccaatcgttcctcccagtcaacagc

SEQ ID NO: 216748 - DNA, 75 bp, Homo sapiens
agatgctctgcggtttttgggctgtgttgacatcaaggatctaccagttatggctgcagcttcgattgccaatat

SEQ ID NO: 216749 - DNA, 100 bp, Homo sapiens
actcatatatttaacccccctccaaaaaggtgagaggatcacactgctccggcaggtagatgagaactggtacgaagggaggatcccggggacatcccga

SEQ ID NO: 216750 - DNA, 110 bp, Homo sapiens
gggccgtcaagatcctcaagaagaagaagttgcgaaggatccccaacggggaggccaacgtgaagaaattcccactggaaattcgttgtatgaatcttattacaagcagg

SEQ ID NO: 216751 - DNA, 82 bp, Homo sapiens
cgctggcagccgcggatctcaccgccgctcagggacttgcaccttcgagatcccctgtgtttacccagctggaggatgatga

SEQ ID NO: 216752 - DNA, 83 bp, Homo sapiens
gccagtcgggccaagagaagaggcggtggaggacacgacgcgcttaaaggtgcctccggagccagcgtggtggccatagacaa

SEQ ID NO: 216753 - DNA, 90 bp, Homo sapiens
ctcagaggcaagggaacaaatggccacccttggagagaggacgttcaactgttgctacccagagtcttgctgcgacacccaggctggagt

SEQ ID NO: 216754 - DNA, 87 bp, Homo sapiens
ttaactccaagactgtgttcgggagtccttggaactgtggtccatggtaaagttttacaggatgcggaagggagagctgtttgacta

SEQ ID NO: 216755 - DNA, 50 bp, Homo sapiens
gagcagaggaaccacacgctgatcatggtttcaagacaacagatgaattg

SEQ ID NO: 216756 - DNA, 75 bp, Homo sapiens
gacctagaccaaagaacagagggttccataccccatgaagtgcctcagatattaattaatagagaacctttgcct

SEQ ID NO: 216757 - DNA, 100 bp, Homo sapiens
gaactgccccatgtatcagaagttttctccactagaaagagatctggacagcatggatcctgcagtctattctttaactaataccgtagcagtaggcagg

SEQ ID NO: 216758 - DNA, 98 bp, Homo sapiens
gaaaagcaaggcatgcggacacacgccgtctctgtgtcaggaccaaaagatctcagattgctataactgaaggtatatttgaacttccaaatctcaca

SEQ ID NO: 216759 - DNA, 95 bp, Homo sapiens
gccggggcctggtccgggcggtgcaggaagatgaagatcctgccaaaggtgatcagagtcgatcagttgaccttggggaagataatgtgacagag

SEQ ID NO: 216760 - DNA, 74 bp, Homo sapiens
aattgataaaatgtatatacccagatggtgaaatacactaactagcagcagccgtttccctggggagatggtaa

SEQ ID NO: 216761 - DNA, 100 bp, Homo sapiens
ttcatagccatttattaccatgcttcaagagccattccttttggaacaatgggtctaaaattcccaggactccacagctttgcaccagataagcctggag

SEQ ID NO: 216762 - DNA, 100 bp, Homo sapiens
cgggaccggggccgaggcgaaccgaggggcctgtgcggccgcccggcccggccgcggatcagtttggaaattttagcattcaggtgccaggaatgcagat

SEQ ID NO: 216763 - DNA, 101 bp, Homo sapiens
ccaagcactagtattggcccccaccagagaactggctcaacagattatgcggatcaaacctcaccaaggccagcacataggagagatgagcttcctacagc

SEQ ID NO: 216764 - DNA, 100 bp, Homo sapiens
cactttggaacaacggaagctacagaagccttctttgcaatgacgcgattgtttcaatctaatgatgttgcttctagaactgctggagttactgtttgac

SEQ ID NO: 216765 - DNA, 83 bp, Homo sapiens
cagaaagcaggcgaacccgcggcgcaataacgtttctctgcaggtggatattgttcccagccagggggagatcagcgttggag

SEQ ID NO: 216766 - DNA, 75 bp, Homo sapiens
ccggccccgcggggagcgcccccggcgcgatgcccttcaggaaaggtgacagagctgaatgaacctctctccaat

SEQ ID NO: 216767 - DNA, 82 bp, Homo sapiens
cgcggagtcccaatgaaacgggcagccatggccctccacagcccgcagaacactatggctatgcatcctccaacgtcagccc

SEQ ID NO: 216768 - DNA, 50 bp, Homo sapiens
tctttggagtcggcgaaacccgggaattcgaatttagagtttaatttctc

SEQ ID NO: 216769 - DNA, 105 bp, Homo sapiens
agccccgcgaccactggcacattcttgctgacagaggatgaggaagatgaggaaatggtggaatctaaagttggccaggactcagaactggaaaatcaggacaaa

SEQ ID NO: 216770 - DNA, 90 bp, Homo sapiens
caaacacacacacatttttcccccggacttggaaagtcacccaaagccgccccaagtgcagttaacaagcacaagccctggctggagccc

SEQ ID NO: 216771 - DNA, 90 bp, Homo sapiens
cctgggaggagttcagccgcgctgccgagaagctttacctcgctgaccctatgaaggccggaaggtggtggtcgtacgctgtgaaggcat

SEQ ID NO: 216772 - DNA, 83 bp, Homo sapiens
ctgagagtctcatcgctgtcctcgagtataatgggtctctcccaaatggcgatagaggaaggaggaaaagtaggtttgctttg

SEQ ID NO: 216773 - DNA, 85 bp, Homo sapiens
ttgggtcgcagttcttgtttgtggatcgctgtgatcgtcacttggagctgacatggacccaaatcctcgggccgccctggagcgc

SEQ ID NO: 216774 - DNA, 82 bp, Homo sapiens
ccagaagggccaccccgacctccaagggcagcctggtgaagagatggcgtttgtgaagagtggctggttgctgcgacagagt

SEQ ID NO: 216775 - DNA, 75 bp, Homo sapiens
gaagtgatttgtcggatgaagataagacactttctcagttacagagaggtatcaatgctgtagatggatggaaga

SEQ ID NO: 216776 - DNA, 98 bp, Homo sapiens
atttcttccaaggtcaaaggacgaagattttgatggatcatcaaaatctgtcagaacatgtactctgcatggttttatatctgattgaattaggactt

SEQ ID NO: 216777 - DNA, 100 bp, Homo sapiens
ggtgaaaatattcctcaagaaaaggatattccagattgcccctgtggtgccaagagaatattggaattccaggtctctgtcgtgtctccagaccacgtga

SEQ ID NO: 216778 - DNA, 98 bp, Homo sapiens
gaccatcgtgggctcggtgctggaggggacgtacctggacaagcacatggaggctcagcgggccgaggagaggctgggaggcggcagaatgcagccag

SEQ ID NO: 216779 - DNA, 75 bp, Homo sapiens
gagaaacaatggtaaatgtgccacatattcatgcaagcttcttggacacttaatgattgttggcaagaaatgtgc

SEQ ID NO: 216780 - DNA, 75 bp, Homo sapiens
cccgcgctgcggcctggcggcttccaggcgcactaccgcggatgaatctcctccgaaacaacagctgcctctcca

SEQ ID NO: 216781 - DNA, 100 bp, Homo sapiens
ctacagacacagcatcctacttactggctatttcccagtaacaaaagaaaatgatcaagtcccagggtgatacaattctggagactggagaagtaattcc

SEQ ID NO: 216782 - DNA, 90 bp, Homo sapiens
cgggagaccctgtgcccctaaatcgcggtccactgcgcgcgtcaggcaacatgagtgagaatgaggaagaggaaatttctcagcaagaag

SEQ ID NO: 216783 - DNA, 100 bp, Homo sapiens
gaggaggcttcatggctgaggaggtcgcagcgccatgaagtccctgtctctgctcctcgctgtggctttgggacatggatttgattgacatactttggag

SEQ ID NO: 216784 - DNA, 90 bp, Homo sapiens
ctcatcgcagagaccatctgccattcagctgctgcagagtgaacttttccaaaattctggaaatccgccctgcccgcaggccatgtggcc

SEQ ID NO: 216785 - DNA, 97 bp, Homo sapiens
ctcggtcagcagctgctctcccagccgcgccagcctcctcactggcctgccccagttctctgtggacattgactcggagctggtggaggagctgccg

SEQ ID NO: 216786 - DNA, 100 bp, Homo sapiens
ctcagttgtccatgaccctgaaggtccaggagtacccgaccctcaagattttcagctgaactctcatctctcaacactggcaaatattcataagatctac

SEQ ID NO: 216787 - DNA, 108 bp, Homo sapiens
ccatcaacaagctgaaccccaaacccaaattcttcgttctgtgcggcgacctcatccacgccatgccaggtactccaaagattcaggtttactcacgtcatccagcag

SEQ ID NO: 216788 - DNA, 100 bp, Homo sapiens
ttcttaaaggactgatttttagaactccacatttgagggcgtctctggccgagcctctttttgtggaaaacgacagcagcagcagtggcctggaagacgc

SEQ ID NO: 216789 - DNA, 75 bp, Homo sapiens
gcggcagtcgggccagacccaggactctgcgactttacgcccacctgccgtttgctgtcattggcagcacagaag

SEQ ID NO: 216790 - DNA, 82 bp, Homo sapiens
cccgactcgggcttggcgcggcggccagaggaaccccgagctgcctgtggaggaaccgattgtgtccacagatgaggtcatc

SEQ ID NO: 216791 - DNA, 95 bp, Homo sapiens
atttaattttagggtcctttatatagaagggagagtaggacctgagtacttcccagaatgcttaaacttgataaaagataaaaacttgtataacg

SEQ ID NO: 216792 - DNA, 75 bp, Homo sapiens
aggatctctgcccacagtcagcagcacaacagaggcgggagctaatttcgttactcgaaaaattagccggtcagt

SEQ ID NO: 216793 - DNA, 83 bp, Homo sapiens
ggggaacacaccgtgaacgccagttggattgcagttcaggtgggcaaacgcagaggcgggaacaaactagccctcaagacggg

SEQ ID NO: 216794 - DNA, 98 bp, Homo sapiens
tggacagctagctgcttatggctataaaattacaggttgacctgacagttcaagaaaaggagaaatatcttaatgtgtctcgctggttttgtcacatt

SEQ ID NO: 216795 - DNA, 95 bp, Homo sapiens
ggagcatgtgattgaggccctgcgcagggccaagttcaagtttcctggccgccagaagtttcaccgggagaagtcggcctcttcctgatgggcaa

SEQ ID NO: 216796 - DNA, 90 bp, Homo sapiens
cagaagggcatcaccgtgaagcagaagaggaaactggaggcgaccagtgcccagaatatcgagttcctacaggtgattgccaagagggag

SEQ ID NO: 216797 - DNA, 50 bp, Homo sapiens
cttcaaaggctgtcgcaaggaggaagcgtgtccggagcggtgactggaag

SEQ ID NO: 216798 - DNA, 75 bp, Homo sapiens
tggaggagcagttgtctgatgaagagaagtgacttttttgaacgaaccattctgtgcaacagccttgtgtggagt

SEQ ID NO: 216799 - DNA, 107 bp, Homo sapiens
gtccttggcgcccccagagagtaccgacgagggggccgaaaccgagaggcctgagacctgggaggaagctggagaaaagatgccctctgaatctttgtgtttggctg

SEQ ID NO: 216800 - DNA, 83 bp, Homo sapiens
tttttttctgttcagtgacatctggtgaaagaccttttatgtgtgaaacatgtggcaagagttttgcttctaaggagtactta

SEQ ID NO: 216801 - DNA, 59 bp, Homo sapiens
gcatgggaggggtatggagaagtccaagagatctattgggaaactgattataaccactc

SEQ ID NO: 216802 - DNA, 90 bp, Homo sapiens
cgctctagcagacaagatcagatccacagttgcagcaatgtgaattgggccagaagatcagagtgtaatatgtgtaatactccaaagtat

SEQ ID NO: 216803 - DNA, 75 bp, Homo sapiens
ctcagggcaagggtgtccgacggctggagcggttcgtgctggccgtgggcagcgccgtctttgatgccatgttca

SEQ ID NO: 216804 - DNA, 100 bp, Homo sapiens
ctccgcccccgccgccgccattacggagctcccagtgcctcccctcccgtggagctggaagccaggcaccctgggggccatgcagaaggcgggggctggg

SEQ ID NO: 216805 - DNA, 100 bp, Homo sapiens
atgagggcgagtacgagtgccgggtcagcaccttccccgccggcagcttccaggcgcggctgcggctccgagtgctggttggtcgcattatgtttcagct

SEQ ID NO: 216806 - DNA, 100 bp, Homo sapiens
gcagcaccatcgagccagaagcagtatttgtcctggttatgaagacagtatggagtttccagaccatagtagacatttgctacagtgtctgagcgagcag

SEQ ID NO: 216807 - DNA, 100 bp, Homo sapiens
ccgccgcgcaggagcctcccggagctgttgattatggaagattcccacaagagtaccacgtcagagacagcacctcaacctggttcagcagttcagggag

SEQ ID NO: 216808 - DNA, 73 bp, Homo sapiens
agcctgcagcctgccccgcggccaacatgagcttcttgttggacgcatggaatacctcgtgaaatggaaggga

SEQ ID NO: 216809 - DNA, 75 bp, Homo sapiens
tgaattggtggaacttgttggaaatggaacatacgggcaagtttataaggcacattgcaagcaacccgtgccttg

SEQ ID NO: 216810 - DNA, 110 bp, Homo sapiens
tatttttggacctgaaacagaaattctggaacacctatatggattaaagcaaggagagccaatcatgactggcaaaacacagaccagcaacgtcaccaataagaatgacc

SEQ ID NO: 216811 - DNA, 75 bp, Homo sapiens
agcaagagcaagatcaccgtgacatccgaggtgcctttctccaaaaggtgtggatgaggtcaccattgtcaacat

SEQ ID NO: 216812 - DNA, 100 bp, Homo sapiens
gcagcagctgcagctctactccaaggagagttcatttgatgaatacagttcagaacttaaatctggaaggttggaatggagtcctgtgcacaaatctgag

SEQ ID NO: 216813 - DNA, 100 bp, Homo sapiens
gccctttgaggaccctcaccatggcaatgggcagttcaccgagaagcgggtgtatctcaacaggcaatggatttagaagtaccggtattggccaggaaca

SEQ ID NO: 216814 - DNA, 51 bp, Homo sapiens
catcattgtccaggcctgcagaggtgataacgtgtccaggagagacagcac

SEQ ID NO: 216815 - DNA, 101 bp, Homo sapiens
gacctggtacatcgccgagttcttgtctaaaaagcacggcaagctcattacgttcttacgaacattcatgaagtctcgtccaacaaaacagaagctgaagc

SEQ ID NO: 216816 - DNA, 51 bp, Homo sapiens
atggaagttctgcataagcatggcgccaagtttgacggtgagaacatgtat

SEQ ID NO: 216817 - DNA, 51 bp, Homo sapiens
cgagccagtgatttacaatagagcaagggtggttctcttcccaaagtggaa

SEQ ID NO: 216818 - DNA, 102 bp, Homo sapiens
tgaaaattttccccagcagcactatgctaaggaaactccaaggcttgccttcaagaataactgcgaactacttggagtggacatccgccataacaaggaccg

SEQ ID NO: 216819 - DNA, 75 bp, Homo sapiens
tatagggccaagtcaattctggagacctgggtgtgggtcaagcaaccaggaattactctgcttaatgtaagcaag

SEQ ID NO: 216820 - DNA, 100 bp, Homo sapiens
aaacatgccagaaggaaaatggcctaactggatgaaaggagaacctgactgctgtgcactctctctggagacaagcgagcagctcacctttgagatcccc

SEQ ID NO: 216821 - DNA, 89 bp, Homo sapiens
cgggtgctgggcacggtcccgcgagtcctattttgtaacggattatgatccaaccattgaagattcttacacaaagcagtgtgtgatag

SEQ ID NO: 216822 - DNA, 98 bp, Homo sapiens
catcaaacatgattgaacgatctgtggtggaagcagcagtccaggaatgcagtcagtctgttgatgaaactatgctggagtgcaatggcgcgatctcg

SEQ ID NO: 216823 - DNA, 101 bp, Homo sapiens
ccgggagacctaaccgccgaatgcgttcggagtttcggagcaacatcccctgtcacctggttgatatctcttgcggattaccctgcagtgccacgctacca

SEQ ID NO: 216824 - DNA, 95 bp, Homo sapiens
cccagcttaaagagctccacattcaggggaaccgcctcaccgttctgcccccagaactagatgatgattattctccaccgtctaagagaccaaag

SEQ ID NO: 216825 - DNA, 76 bp, Homo sapiens
agattgacgggtgccaatataattgatgaacctctccagcaagagccctctggcacaaatggaagaagaaagaagg

SEQ ID NO: 216826 - DNA, 101 bp, Homo sapiens
ctcaagccttattgaagagataggaactcttggttgggataaatatccttggaacagaagatcttattgtggaagtgacttccaatgatgctgtgagattt

SEQ ID NO: 216827 - DNA, 98 bp, Homo sapiens
gaagactctgccttggctgaacaggggacctctgcagatgaagaggaaggcattactgggtaccggccaagaggctgtttggtggtcagatcgtgggc

SEQ ID NO: 216828 - DNA, 98 bp, Homo sapiens
cgccacctactgaagacatcatttgggaccaagctgatgagcccttgaagcacagcagatggcccactgcgtgaccttggttcagctgtccatttcct

SEQ ID NO: 216829 - DNA, 117 bp, Homo sapiens
gggaaccgtcgctatgccaagaagtgccaggtggagcggcaggaaggccactcacagggcttcaacaagctagctgaggctgaaggggatgctaagggagataaagcaaaggtgaag

SEQ ID NO: 216830 - DNA, 100 bp, Homo sapiens
atccagcctgcggagcctgtggggcaggaacaagctgaaagctggatacctaatgtcagtggagtcttctgagtgtttcctggaagaagtcgggtcccag

SEQ ID NO: 216831 - DNA, 50 bp, Homo sapiens
cagagacatcccgatctggggaatgtcaacagcatctccaccctggagcc

SEQ ID NO: 216832 - DNA, 81 bp, Homo sapiens
ccttgcttggaattctgcccactctgcggagttagcagtcacgacctccagcacaggttaatgttgaagaaggaaaatgcg

SEQ ID NO: 216833 - DNA, 74 bp, Homo sapiens
tttattaaaggaagcacacctaagtgtgccggtccaacaaaagcccttgggtctgtttgacttgttcaagtgtc

SEQ ID NO: 216834 - DNA, 76 bp, Homo sapiens
acaacagtgatgaggaaagctgtgaaagttctcaagagccatgggaccacaccaccaccaccacaaccaataggcc

SEQ ID NO: 216835 - DNA, 74 bp, Homo sapiens
ggcagcgggtcctacgaggagggctgtcagagcctcatggagtacgcatcaggcactggccaagatgatgctga

SEQ ID NO: 216836 - DNA, 80 bp, Homo sapiens
ggagcggccggggcctggggctgcctgccgggcggccgggcgcggcgagcccagaaatatggctacacacacctttctgc

SEQ ID NO: 216837 - DNA, 75 bp, Homo sapiens
aatcgacttggactcagatggctttctcactgaaagttctaagctggtctatgtccatcaccttcttggagaagg

SEQ ID NO: 216838 - DNA, 99 bp, Homo sapiens
gaaaagcttttgatggtggagacagaaaccccaagagatggatgttcagaaacctgaatagagtcaccttgtaataactgggaactcttcccctgaaga

SEQ ID NO: 216839 - DNA, 83 bp, Homo sapiens
cccgagcccggctccgcgcgcctggcggctacatggagagtgtcagtgcctacaccaactaatgttacaattgaatcctataa

SEQ ID NO: 216840 - DNA, 82 bp, Homo sapiens
gtgggtcggggatcggtcgcctgagaggtactccaaagattcaggtttactcacgtcatccagcagagaatggaaagtcaaa

SEQ ID NO: 216841 - DNA, 76 bp, Homo sapiens
gattgtaggtggtgtccagctccagactgtgggaaaatgtctaatcaacaggagaagtatgaagctcagaatatag

SEQ ID NO: 216842 - DNA, 100 bp, Homo sapiens
aggaggtggagttgctgcccttccggagtccgccccgtgaggagaatgtaaaccagtatttcacactgagattgtcggctgcgggtatattccaattccc

SEQ ID NO: 216843 - DNA, 100 bp, Homo sapiens
cgacgaccctagtgctcgtcgccgtggcgccatgggtgttgtccgcagccgcaggtaatgctatgggctatgtacgaatgataagatctggtggtcttca

SEQ ID NO: 216844 - DNA, 100 bp, Homo sapiens
taaatacggagaaaagaaaactaaggagaaatggaatctcactgtacattactactgtttggatttttgtgagcatggaacaaagtctgggttaaaccag

SEQ ID NO: 216845 - DNA, 111 bp, Homo sapiens
agttctggggagcgcctcgtcgacatgagtgatgtggaggaaaacaacttcgagggcagaaaaacgttgtgtgacgtgatcctcatggtccaggaaagaaagatacctgct

SEQ ID NO: 216846 - DNA, 97 bp, Homo sapiens
gaccgctgccgcccagcacgtccagatgcctggaatgatgtcgtcagtaatgcctggaatgatgatgtctcatatgtctcaggcttccatgcagcct

SEQ ID NO: 216847 - DNA, 75 bp, Homo sapiens
cagtccgccgctcaccccgcggccgcaccttcccgccttctcagctcctggagcagaatggaggctacgggagcg

SEQ ID NO: 216848 - DNA, 100 bp, Homo sapiens
gacaaggccacagagtcggggtcttcacgatgcctgaggaaacccagacccaagaccaaccgatggaggaggaggaggttgagacgttcgcctttcaggc

SEQ ID NO: 216849 - DNA, 100 bp, Homo sapiens
ttgaaatcattgatgaccacagagctgggaaaattgttgtgaacctcacaggcaggctaaacaagtgtgtggacctgagctgtaatgagctaagtgaagt

SEQ ID NO: 216850 - DNA, 75 bp, Homo sapiens
tcgcacgctggactggatttattcagtggccttgtacctaatagcaactaatggaaccccagaacttcagaatcc

SEQ ID NO: 216851 - DNA, 82 bp, Homo sapiens
gcggcctgagcccggcgcaggtgaccggcgcgcgggagcgctacggccccaacgaacaggccgcccgcctgaagaaactaca

SEQ ID NO: 216852 - DNA, 50 bp, Homo sapiens
ctatggcatctatgttatcaaccagtgctcaatggtgcccaggctggagt

SEQ ID NO: 216853 - DNA, 82 bp, Homo sapiens
gtggggccgcggccggaccgagcgcctcgacctcggtctgaggcgagaaccactgtctctgatcaacgtgcggaagaggaac

SEQ ID NO: 216854 - DNA, 100 bp, Homo sapiens
ggtttggaattgatgatcaagatttccaggcccagtttaccctcaatttaccctcttctacatcttccacatctgcaccaatctggggagatgaagaaac

SEQ ID NO: 216855 - DNA, 90 bp, Homo sapiens
aaattatgcaagctccaggaagcactgaagtttctggagcaggaaactcatctcttcagcgccattaacagccatttgctgactgcgcaa

SEQ ID NO: 216856 - DNA, 75 bp, Homo sapiens
gtggcgggcgcagctgctgtgacagggttattttggagctgttggagcactccttgagctgttgaagatcccgtg

SEQ ID NO: 216857 - DNA, 100 bp, Homo sapiens
aagcctaattaatgactgtcttctggacctctgagaccatgtttctagtgttttccgtggaatattatcagttcactgagacttttttgacggagaggga

SEQ ID NO: 216858 - DNA, 100 bp, Homo sapiens
caagtgaatgcagtctttccagaatcaaaagcagacctcattttgattgtagtagcagtggagcgccagcagccctgtggtggcgacgacgatggaccag

SEQ ID NO: 216859 - DNA, 100 bp, Homo sapiens
ggagagagaatgagccagagggacacgctggtgcatctgtttgccggagggtgcgttgtagaagacaagaactcaaaggtggcctggttgaaccgttctg

SEQ ID NO: 216860 - DNA, 82 bp, Homo sapiens
ttcaccatcccgttttccagcaaggtgtctgcctgtatcccagtgttcaggctggctagacggcggaagaagatcctatttt

SEQ ID NO: 216861 - DNA, 83 bp, Homo sapiens
ggtggcggcggcgctttcggcgcgggcccgggccccgagcgcccgaacaggcagcctgcttctgcaaagtggtacgatcgaag

SEQ ID NO: 216862 - DNA, 101 bp, Homo sapiens
acccgcagcagcttcagagaccaactgggaatctgtcacaagctctatttcatgtcctctcgcatggcagagcaagtgggaaggcccagaagatcccttac

SEQ ID NO: 216863 - DNA, 100 bp, Homo sapiens
aagagcagtgggggctccagcagtggcaccatcacagatgagggaaaaatgccagctgtgggacaaggagtgcaggccgcacaacctcggcaggcaccgg

SEQ ID NO: 216864 - DNA, 71 bp, Homo sapiens
gggcttggaatctcgagcgggaaaagctgaccctctggtgggcagcatcgccacacagtacatgaccaaca

SEQ ID NO: 216865 - DNA, 114 bp, Homo sapiens
ggcggcggtcgacatgttccaggtcccggatagcgagggcggccgcgccggctccagatttcgatggggtcctctatcatatttcaaatcctaatggagacaaaacaaaagtga

SEQ ID NO: 216866 - DNA, 75 bp, Homo sapiens
acaagatggaagcaggtttaaaattttacataagaagttacctttttcagtgccggtggtggtgtgcacattgag

SEQ ID NO: 216867 - DNA, 96 bp, Homo sapiens
caatgattatgttcgtgtgactcagctttactgtgatggggtggtgggaacatccagttgcgggaaaacaagcttaacacgcccactgattctaca

SEQ ID NO: 216868 - DNA, 76 bp, Homo sapiens
cacgaggcggcgggctggagacatggaccgcggcgagcaaggaaactactaaagttcctggggaagcaaagtagaa

SEQ ID NO: 216869 - DNA, 89 bp, Homo sapiens
ctgggccgcagcgggaccccagttcctccgccaagcgcggccgccgcccccgcctcagggagcatttcctgaagacgtagtcatgcagc

SEQ ID NO: 216870 - DNA, 99 bp, Homo sapiens
tcatctcggacatggcgcagaccaaggaggccattgtcaacgctgccaagctcctctatgaatctcgggaccagtaactctacgtggggctgagcttgg

SEQ ID NO: 216871 - DNA, 100 bp, Homo sapiens
cgcctgcttcccgtctgcgcgagtccacgcagctccccagatatgagggaaggcaccattggagatatggctatcctgggtataacagaaagttttcaag

SEQ ID NO: 216872 - DNA, 103 bp, Homo sapiens
ttgggctacggttgttgttggcgactgtgcttcaagcgacggtcctaaaatctctacacttgccaaaaaacaacagtctttatgtccttacaccagatttgcc

SEQ ID NO: 216873 - DNA, 90 bp, Homo sapiens
tccctgtgacaacgagttgaaatctgaggccatcattgaacatctctgtgccagcgagtttggacagaataacgggctcccagattcaca

SEQ ID NO: 216874 - DNA, 82 bp, Homo sapiens
cttagagcgtctggccaagaatcagaggaagtgggtgtggacactgccagcggctgcagccgacttggaatgacctgggaga

SEQ ID NO: 216875 - DNA, 97 bp, Homo sapiens
aatcggcccgcggtgcggtgcggagactccatgaggccctgcacaccaatgactttgccctgtacacagaagccatcaagtttttcaaccaccctga

SEQ ID NO: 216876 - DNA, 75 bp, Homo sapiens
aaaattcggcggcttatgggaaaaccacggagtatgattcatccagccttccagctctgttatttaaagcaagaa

SEQ ID NO: 216877 - DNA, 100 bp, Homo sapiens
ttgccaagacaagagatgctggctgtaggccatacatggcatttggaaattttagcattcaggtgccaggaatgcagatgggacagccagtgccagaaac

SEQ ID NO: 216878 - DNA, 50 bp, Homo sapiens
cacctccaaatcatgcaagacacaggatgacttgtggggggaccacagtc

SEQ ID NO: 216879 - DNA, 118 bp, Homo sapiens
ctcggagaagatgtggtggcttccgtttgttggtggaggaggtggcaggcctcggcggtgctggagaatctggtaaaagcaccattgtgaagcagatgaggatcctgcatgttaatgg

SEQ ID NO: 216880 - DNA, 99 bp, Homo sapiens
attgtgcagaaacacccacatacaggagacaccaaagaagagaaagacaaggatgaccaggaatgggaaagccccagaactgatagtgcatcagctgac

SEQ ID NO: 216881 - DNA, 74 bp, Homo sapiens
ataatgctcgcagataagcatgctacttgctcatcagtttggaaggaatttggctccgtgggacgttgtaatgt

SEQ ID NO: 216882 - DNA, 100 bp, Homo sapiens
atgccatgtccggcaccgccatccccatttctatggtcctcctcacctatggccgctggcagatccatcatgttacacaaaatggaggactatataaaag

SEQ ID NO: 216883 - DNA, 75 bp, Homo sapiens
ctcctcagtgcgaagaagctgcagccgcacctggccaaggaggtgaacaagaaggaggtggtggaggctgtgacc

SEQ ID NO: 216884 - DNA, 100 bp, Homo sapiens
tggaggctgagtgctaaactgtgtggggcgcggatgggatccagctgttagtcgggaggcaaaaccttcaactgaggacttgggggataagaaggaaggt

SEQ ID NO: 216885 - DNA, 100 bp, Homo sapiens
gttggaccctcgtcaatctctttcgaagccattcagtcctcaatctccttttccttggctacccaactgataaatttcaaacggaagagagtggcagcat

SEQ ID NO: 216886 - DNA, 82 bp, Homo sapiens
ttctggggctgggattggaactgtgtttgggagcctcatcattggttatgccaggttgaagaagaggatgaacttgaatctg

SEQ ID NO: 216887 - DNA, 115 bp, Homo sapiens
cacgacggcgccatcaccgagcgcttgatgtgcgcggagagcaatcgccgggacagctgcaagttaaacacagtgggaatatcacttttgatgagattgtcaacattgctcgaca

SEQ ID NO: 216888 - DNA, 98 bp, Homo sapiens
gacgagaatgaatgggggtaccacggagagggcaataagagcctggtggtggcccacgcgcagatacccagaaagcggtactctagaaatgaatgtca

SEQ ID NO: 216889 - DNA, 76 bp, Homo sapiens
attggaaactctttgggaaagccactcgaaaaggcatcctctggtatcacgattccaaaacccccaaagccaccag

SEQ ID NO: 216890 - DNA, 83 bp, Homo sapiens
ccgccacaaaaagagggccgaggcgcagaaaaggagcgagtccttcctgctgagcggactggatggcagaaacggtggacaca

SEQ ID NO: 216891 - DNA, 82 bp, Homo sapiens
attattgatgacagtcttcatttagaacttgaaaagcaggagtccttcaataatgttaaacagtggctgcaggaaatagatc

SEQ ID NO: 216892 - DNA, 100 bp, Homo sapiens
aggtagcgccgctgctgaagagtttccaaggagagtaatctcaggggcgatataatcaatgaggtggtcctaaagttgctcaaggctggatggtcccggg

SEQ ID NO: 216893 - DNA, 87 bp, Homo sapiens
gaggccggcatcgtctttccgtcctctgaggcgacggccgcggctgcacaggttaatacaatctgttggaatgacactggagaatat

SEQ ID NO: 216894 - DNA, 90 bp, Homo sapiens
atataggttgctgtagatgaatgttcttagctgtcatgtttaaaaatacttctgcttcgttacctcaatggagatggctatttcgaaaac

SEQ ID NO: 216895 - DNA, 75 bp, Homo sapiens
gagaaggggaaggagacgctgcttcacctggtggttaaagaaatggattaaaaagtgtgatgatgacagtgaaac

SEQ ID NO: 216896 - DNA, 74 bp, Homo sapiens
atagcatacattatgctgccgcctatgggcacaggcagtgtctggaattgattagaatatggctacatattccc

SEQ ID NO: 216897 - DNA, 100 bp, Homo sapiens
gatggcggagaaggactccctggacccctccttcacgcacgccctgcgcctggtgaaccaagtagcaggacccagtgctccataaaggataatagtttcc

SEQ ID NO: 216898 - DNA, 101 bp, Homo sapiens
aaacaatggcatttacagaaagagtcaacagcagtggcaacagattctgaagactactttgaggtcaacattccaacagacctacgagcaaaacattctgg

SEQ ID NO: 216899 - DNA, 142 bp, Homo sapiens
ttaccatgggaaaatgagcaacctggaatcatgggagaaaaccagacctccacttccaaggatatagagcaggtagtgaaacagtttcgtgacggtggttacaacacgctggtttctacctgtgtgggtgaagaaggtttgg

SEQ ID NO: 216900 - DNA, 100 bp, Homo sapiens
gaggaaagcgggaagactcatcggagcgtgtggatttgagccgccgcattttttaaccctagatctcggtacaggtttgcagattccgccagcagcacag

SEQ ID NO: 216901 - DNA, 100 bp, Homo sapiens
tgatggatccatttctcctattgaggagtcaacgtctgctcaccaggtggccagataccgcccacgtgcccccatcattgctgtgacccggaatccccag

SEQ ID NO: 216902 - DNA, 83 bp, Homo sapiens
cgcggatccgggcccgctcggcccctcccatggtgctggagaatctggtaaaagcaccattgtgaagcagatgaggatcctgc

SEQ ID NO: 216903 - DNA, 90 bp, Homo sapiens
agccaacggcaagggcggcgaggctccggccaacgggctgcgcagagccgcggcgccggagtgaagtcgccactgaggtcccattccgcc

SEQ ID NO: 216904 - DNA, 100 bp, Homo sapiens
tcaagctgttgaaaatgagcagctgtcctcatgtctctccagcagaaaggacaactgggcagaccaattttggatgtgccatattggaatgcaaagccag

SEQ ID NO: 216905 - DNA, 75 bp, Homo sapiens
ttatttccgcacttggagtccaggaaaacccttcgatcagggtgagcctgaatttaaatacattgggaatatgca

SEQ ID NO: 216906 - DNA, 75 bp, Homo sapiens
agtgccgaaagagcactggactccggaagctcctacagaagaagggaaaaaagagctgctgttcctaagtaacgc

SEQ ID NO: 216907 - DNA, 100 bp, Homo sapiens
gccttctgggccctggtcaaactcttctcaggccctaaacatgccatgcatggttctcaggaatcagatagctcgcagtcggccaagaaggacatgctgg

SEQ ID NO: 216908 - DNA, 101 bp, Homo sapiens
ccgccgccgccgccgctgccgctgccgctgccgcacctccgtagctgactcgttgtaggtaaaactccaccatccacgacggtgggcagccattctccccc

SEQ ID NO: 216909 - DNA, 112 bp, Homo sapiens
cttggtgcagaagctggagctggacgtgaggagtgtcacttccgtcaggagagagtggagcctttcaggctggcatggagagcttaaggggcaactgaaggagacacactgg

SEQ ID NO: 216910 - DNA, 100 bp, Homo sapiens
cagcaacgacatgtaccacagccgcgcgctgcaggtggtgcgcgcccgcaagcaggagccagggagtaacgaagagatcaaagagttcgccgcgggctac

SEQ ID NO: 216911 - DNA, 75 bp, Homo sapiens
gctcgctgggagagaggtacctctccttttccctctccctttccctaagttcctgtgccttaagaacattagaac

SEQ ID NO: 216912 - DNA, 103 bp, Homo sapiens
tggaaaggtgctggcgaagctcgcctggtgtgccaaaatgacctggaattggagcagggagaaggttttaaggtgaaaacgaagaaagaaatccggcatgtgg

SEQ ID NO: 216913 - DNA, 100 bp, Homo sapiens
gtcgggagagctttctggatgatgtaaaccttattctggccaacagtgttaagtataatgtaggagagaagtttgctgaggaatgccttcaagcacaaag

SEQ ID NO: 216914 - DNA, 100 bp, Homo sapiens
ggaaggcgggagacgagaagcctgaaaagtcgcagcgagctggagccgccggaggtactaggttttgacaagcttgcatcatgcgtgagtataagctagt

SEQ ID NO: 216915 - DNA, 100 bp, Homo sapiens
cttcgcctcccgaagggaaactagagactaaagctggacacccgcccgccgagttttgcggcctccaggtggtggatccaatttttcattaggttttgat

SEQ ID NO: 216916 - DNA, 74 bp, Homo sapiens
agacatccacagcagtgtttctcgggttggaaaagccattgataaggcccgccatgttcatagaggataaagca

SEQ ID NO: 216917 - DNA, 83 bp, Homo sapiens
cgcagtggtcgcttcttctccttggccatacaggaactaatgaaaatccatggacaagatcctgtttcatttcaagatgtcaa

SEQ ID NO: 216918 - DNA, 83 bp, Homo sapiens
agcgtgctttccacgacggtgacacgcttccctggattgggtggatccataaagaacccagccaacccgcagagggaggggag

SEQ ID NO: 216919 - DNA, 100 bp, Homo sapiens
cagaccatggcatctacggaagggattgtgctcatggacgatgccatggactgcttgatgtctttttcagatttcctctttgccttccagatccagtttt

SEQ ID NO: 216920 - DNA, 74 bp, Homo sapiens
tccaaggtttgaaaagcagctggcctgcaagggtcccaggccataaaacaacggagagctgtacttgcttgtca

SEQ ID NO: 216921 - DNA, 83 bp, Homo sapiens
cgactccgtcgcagactacggacctgtctgggtctcagccgccaaagaccccgtccggtgttgacttcaaaatcaaaactgta

SEQ ID NO: 216922 - DNA, 90 bp, Homo sapiens
gtgaaatgtttggatatatgaaattacatccagaggattttcctgaagaaggccccttcacagatgtagtcactacaaatcttaaattgc

SEQ ID NO: 216923 - DNA, 100 bp, Homo sapiens
gcgcaataccagttcactggtattaaaaaatatttcaactcttatactctcacaggtgccacgctgatcaatgaacaatggctgctgaccacggctaaaa

SEQ ID NO: 216924 - DNA, 75 bp, Homo sapiens
aatgatcctgaagcctcaaagtttcatggcccagaggcagagctacacaaccatggaatccaaattaattcctgt

SEQ ID NO: 216925 - DNA, 75 bp, Homo sapiens
ctctccttttccctctccctttccctaagccattcaaactcctccccacgacactctgaagcagcgacggcacag

SEQ ID NO: 216926 - DNA, 129 bp, Homo sapiens
ttctacgtgtcccccgaggatctggaggcacagctgcagtctgacgagaggggaggatcccttttcccccagaaattactcaatgctgaaacctctcaaagtggtattagagacgctgaaagcaccatg

SEQ ID NO: 216927 - DNA, 82 bp, Homo sapiens
caagtgattcttctgcctcagcctcccaagtagctggaattacaggtgtctgacttccagcaactgctggcctgtgccaggg

SEQ ID NO: 216928 - DNA, 98 bp, Homo sapiens
gggaaatgctggcgcgcgcggcgcggggcactggggcccttttgctgagggtagccaatgagactcacgggcatgtgggtgctgacttagcagccctg

SEQ ID NO: 216929 - DNA, 82 bp, Homo sapiens
ctttgccctcagcatctcccttcatgtctgggtcatggtcagagtggtgctgggaacaactgggccaaggggcactacacag

SEQ ID NO: 216930 - DNA, 100 bp, Homo sapiens
caggacatccggctgctgcaggcccagctgcaggagcatggcttgaacttccagagactcctggacaccagcacctacaaggaggcctttcggaaggaca

SEQ ID NO: 216931 - DNA, 100 bp, Homo sapiens
gaccactggatctccaaacagggccagaagctggagatgatgctggagcagaagttagcgcttctctctcgtttgcagaaaaaacttcagcatgtgccag

SEQ ID NO: 216932 - DNA, 50 bp, Homo sapiens
caactatcgacttggagtactcgggatccatatggctttggagacagtcg

SEQ ID NO: 216933 - DNA, 88 bp, Homo sapiens
cggagactgggcggccggccgacccttcctgtcgctgacggcgactgcgggaggccaggtctctgacccctcccaaggatcatgccgc

SEQ ID NO: 216934 - DNA, 80 bp, Homo sapiens
gaaataggatttaaccgctctctgcctcccagccttatgccagcctggaccatcttggaggcagtgtaggatcatggaag

SEQ ID NO: 216935 - DNA, 74 bp, Homo sapiens
taaaggtgctggtaagatttcttctgcaaggacacccaggcccattattttcctccagcctccatggaccacag

SEQ ID NO: 216936 - DNA, 100 bp, Homo sapiens
gccgttgttgcctaatccgtatattatggctccagggctgttacatgcctacccgtgaacagcagagaatttcaaaggaccttgctaatatctgtaagac

SEQ ID NO: 216937 - DNA, 100 bp, Homo sapiens
gctgaccaagcaggacaccatgctgaaggccatgttcagcgggcgcatggaagtgctcaccgacagtgaaggtataaagatggctgtgaccacatcgggg

SEQ ID NO: 216938 - DNA, 100 bp, Homo sapiens
ggattgtgggagtctccgcgtcccgctcgctgggagagaggtacctctccttttccctctccctttccctaaggaccccaaaatgtatgtacagacagtg

SEQ ID NO: 216939 - DNA, 90 bp, Homo sapiens
gggggatggttccatcatggcgtcaatgcagattgcagagggaatggcatacatcgagcggaagaactacattcaccgggacctgcgagc

SEQ ID NO: 216940 - DNA, 82 bp, Homo sapiens
tggtgtcttagagcaagagcctccctgagctttcggagtggaaggtggcagaatcgtgtcctcgaaaccctttgcacctctg

SEQ ID NO: 216941 - DNA, 100 bp, Homo sapiens
gttacatccctggaatatgtgtggccagagtttaccatgggtcctatggcagcgtatacaaagctattcataaagagaccggccagattgttgctattaa

SEQ ID NO: 216942 - DNA, 90 bp, Homo sapiens
ttacaacatggcagacattgacaaatctattaatgagatgaagcggttggaagaaatgtcaaatatgtttcagagctctggagtccagca

SEQ ID NO: 216943 - DNA, 50 bp, Homo sapiens
attaccatcagctgaagggaaaatgaagactcattgcttccagctgttcg

SEQ ID NO: 216944 - DNA, 75 bp, Homo sapiens
agggcgggccggtcccgctgatcacgtgacacgatttttgaaagccctgtatcaaatcagtcacttttatcagaa

SEQ ID NO: 216945 - DNA, 100 bp, Homo sapiens
cgtgggggtgatcagcttcgcccagaagccggagcggttgcagggcacacattactcggtgcagtcggacatctggagcatgggcctgtccctggtggag

SEQ ID NO: 216946 - DNA, 75 bp, Homo sapiens
gcctaggcattttgctgtctcctcctaatacggggcatggtctgcatgggataggagaaactgtccatgtcccat

SEQ ID NO: 216947 - DNA, 90 bp, Homo sapiens
aagcaaaaaattcaagaaactgactaaagctatatgtggactgattgtccccttggggcggaaagaagccaaggccaaggagctggtgcg

SEQ ID NO: 216948 - DNA, 119 bp, Homo sapiens
agacaacaagcagcctattatgcccagacaagtccccagggaatgccacagcatcctccagcacctcagacatatctgaagagatggattaagaatgctttggattaaggattgtggag

SEQ ID NO: 216949 - DNA, 96 bp, Homo sapiens
tggagatggaccacttcgccctggtggtgcacgagcagatccagtgtgccgtgagcgatgtggagatgcaggaacactatgatgagttttttgagg

SEQ ID NO: 216950 - DNA, 74 bp, Homo sapiens
gatgggaagttaatgtttacggcgaagtctactcaacgtttccaaggggacggcaaaacagaacagaaaggcgg

SEQ ID NO: 216951 - DNA, 83 bp, Homo sapiens
ctcagactctcacctttgcttccagggggaggaggaagagctgggcagatgctcaaactcaaatccaaaacattgctgcatct

SEQ ID NO: 216952 - DNA, 120 bp, Homo sapiens
cctgcgcagcccaagaagatcgtggcccctacggtgtcccaaatcaatgcggagttcgtgacccaggaaaatatgagagccacacccgtgttcacacaggtgagaagccctttgagtgtg

SEQ ID NO: 216953 - DNA, 100 bp, Homo sapiens
cccctggagaccataatccccatcctgcagcacctcaaatacaagggtacggcttcaggtccagagcgtggagaagcctcagtaccgcgggacgttgcac

SEQ ID NO: 216954 - DNA, 75 bp, Homo sapiens
agttattgaatatcaagaggaggagttgttggccataaaattttgagtagaaaaatccagaaatttgaaaatcag

SEQ ID NO: 216955 - DNA, 100 bp, Homo sapiens
tacaacccgaccaccggagaattcctggggcgcaccgccaagagctgggggatttatcaaagatgttcatgaagactcccttacagttgtttttgaaaat

SEQ ID NO: 216956 - DNA, 75 bp, Homo sapiens
ttgatatgccttcaagtatggatgagtatgtccatcaggtgattgaaatctctgaatatcgaacccagctctatg

SEQ ID NO: 216957 - DNA, 100 bp, Homo sapiens
gtgaacctgtcactgttcgggaagtcacctggtggttctcttcccaaagtggaagccaaattcatcaattatgtgaagaattgcttccggatgactgacc

SEQ ID NO: 216958 - DNA, 76 bp, Homo sapiens
gtacctgttaccactttcaaaagtgaccattgtgaggtagatattttgttctaattttccagatgaggaagctgag

SEQ ID NO: 216959 - DNA, 90 bp, Homo sapiens
ggtttgcaagcagcagtgtggctgtcaacccaagctttgcgattacagggaacctcagggcatcatagcttgctgcaacccagtaccgcc

SEQ ID NO: 216960 - DNA, 100 bp, Homo sapiens
ggtgtttgccatggaccccaggaatggttacatggagccccactaccaatctggtgggccctttattgaccaggtttacgtcctgcaaagttacgcagag

SEQ ID NO: 216961 - DNA, 100 bp, Homo sapiens
gactccagcagccaagatggtgaagcagatcgagagcaagatttctatattcagatgaagttcaaattggtccagaaacagttatgaccactctttatac

SEQ ID NO: 216962 - DNA, 101 bp, Homo sapiens
atcagcttctctcattttctttccctgcaccaactagcagtcccggcccaggcccctgagctggagggatggaaaactcctctgcagcatcagcctcctcg

SEQ ID NO: 216963 - DNA, 50 bp, Homo sapiens
agctgcctagcctcgcggtcgtacatgggttgtgtggaggtcctccagtc

SEQ ID NO: 216964 - DNA, 82 bp, Homo sapiens
gggcggaggcggaggcagaggtggaggcgctttgaaagctcagagtcaagatctccactgaagttggcatcacaaatgttga

SEQ ID NO: 216965 - DNA, 98 bp, Homo sapiens
ctctatcataagtcgccaaaaacaaatggggcaggaaattgggaatgaattggatgaacaaaatgaaactggcgatggaatatgagaggagccctctg

SEQ ID NO: 216966 - DNA, 98 bp, Homo sapiens
gccaagataattgaagttggtgacaccccaaaagaccgagctctcttcaacggagcccaaaagtctgctcagataaagaatttgatgagccagctagg

SEQ ID NO: 216967 - DNA, 100 bp, Homo sapiens
aagggtctctccagaaaatcttgtggacaaatccaggggaaggtcagtaacagatccaagagatggaaagagagtagcgctcaaaaagatgcccaacgtc

SEQ ID NO: 216968 - DNA, 80 bp, Homo sapiens
caaaacgccaggcggatctcagaaggccagttcaaagaggtcctgctgtactagccaccaaagcagctgctggtactaag

SEQ ID NO: 216969 - DNA, 95 bp, Homo sapiens
cttgtacagagatgtgatgttggagaactatagcaatctggttttcttggtgagaaagatcagtctaaagaaaaggagaagaaagtgaaaaaaac

SEQ ID NO: 216970 - DNA, 100 bp, Homo sapiens
ctaatgttttccttcagcaaggacaaaggtttttctttggactcagggaaaggtattgtttctaaagatgagatcacttttgtatctggtgctcccagag

SEQ ID NO: 216971 - DNA, 82 bp, Homo sapiens
gcggcatcgtcgtctatgggggctactcgaaacagacaatgcagatcttcgtgaagactctgactggtaagaccatcaccct

SEQ ID NO: 216972 - DNA, 83 bp, Homo sapiens
attcagtggtgttaaggattccaacaacaattccgatggcaaagccgttgccaagggcatccgtttccgaggctttagtatcc

SEQ ID NO: 216973 - DNA, 50 bp, Homo sapiens
ggttggaacagctggagacatgataccccagaatcttccatgctccgtca

SEQ ID NO: 216974 - DNA, 82 bp, Homo sapiens
cattcatgcaatcttgagatcagagactggatacacgtctgtttaactacgcaaaaggtaatgctggcatggcttactggga

SEQ ID NO: 216975 - DNA, 100 bp, Homo sapiens
ccgcccaaggtctctcgcgggcgggagaacggaaaactcccaacttcctgatgcctgtgaggagccaccaacatttgaagctatggagctcattggtaaa

SEQ ID NO: 216976 - DNA, 100 bp, Homo sapiens
cgcgcggctgactgcgactcgggagctccgggagcggcccgcgcaggttccagcaacagatagaaatgctttaagttcactctggggaaagctggcctct

SEQ ID NO: 216977 - DNA, 90 bp, Homo sapiens
cacgacggcaggaattattggaggccaggtttactggagtaggtgttagtaagaggccagctccaccagggcaagggtttttccctgcct

SEQ ID NO: 216978 - DNA, 82 bp, Homo sapiens
cagcttttacttgcatccagggccaatcatcgcagacccagacgtctgcagagggtgtgatgaatgcagactctgctaccat

SEQ ID NO: 216979 - DNA, 50 bp, Homo sapiens
tgaagaggatgatgtttttggtgaagacttaattcagtgcacaaatgaga

SEQ ID NO: 216980 - DNA, 75 bp, Homo sapiens
gtcatcattgactgctggattgacaatatcaggtaccttaacatggggaatcttcttaaagttttgacatgcaca

SEQ ID NO: 216981 - DNA, 135 bp, Homo sapiens
atcacttatatttttatcacgttcagtgtgctgggatgaggttacgagtagccatgtgccatatgatttatcggaagctcactccccacttcaagataaaccctgaagcactcctaggatttaagaggattgttg

SEQ ID NO: 216982 - DNA, 117 bp, Homo sapiens
tcccgtagggtgaacaacccgttcttgcctcaggccagtcgcctccaggccaagagggatccttcacccgtgtctggcctgtttaaagaagaaaacccgtatgctagatttgaaaac

SEQ ID NO: 216983 - DNA, 87 bp, Homo sapiens
gccctgttccccgcgctgcggcctggcggcttccaggcgcactaccgcggtctcctctgagcctccggcctccataagacccaaaac

SEQ ID NO: 216984 - DNA, 99 bp, Homo sapiens
aggaagtccactagcagcttctaaggacatgacaatggatgaagtccgagaatttgaacgagccactcaggaagccaccaacaagaaaatcggcatttt

SEQ ID NO: 216985 - DNA, 100 bp, Homo sapiens
cgcccccgccccggggaacgctgcctctgccgcaaagatgcccccttccgctggaaagcggagccgcccaggaggctcctcaggccgaccccagaccctg

SEQ ID NO: 216986 - DNA, 98 bp, Homo sapiens
aagacagtccctggatcaccgacagcacagacagaatccctgctaccaagggtgctcgagaggaagacctcgatgctgtggaagcgcagattggctgc

SEQ ID NO: 216987 - DNA, 90 bp, Homo sapiens
ggactgaaatgtatggaccccagacgttgaatagtcagccttactttataccataaggaggagcttgaataacctccaggatttggctca

SEQ ID NO: 216988 - DNA, 98 bp, Homo sapiens
tggctgcagctgacccggcgaagggagccgaccgggccctgggctggaggtaaaaccccacgatactgaacggctgtattcagtggtgtttcaagaaa

SEQ ID NO: 216989 - DNA, 50 bp, Homo sapiens
tcgggacctaaagaaactggagtttgcttgcagactggtctagaaacaaa

SEQ ID NO: 216990 - DNA, 74 bp, Homo sapiens
aaagagatgtggggggattctcgacctgctaacagaactggaccttttcggatagaatttttgcggcatttgaa

SEQ ID NO: 216991 - DNA, 75 bp, Homo sapiens
agcctctctggggggaaagggtttcccgttaaccccaatactttaaaagaggctctgtggatagcaactggatcg

SEQ ID NO: 216992 - DNA, 96 bp, Homo sapiens
actaaaggcctgggcctgagaactgaatcaggtaaatcgatttagtaaggtggaagacagagcaatttttgtcactgaccgtcacctgtataaaat

SEQ ID NO: 216993 - DNA, 98 bp, Homo sapiens
ggaaaagattgaatgtaacaagaggcataaaacagttctcactgaactacagcaccagggaaaaattggagttaagtttaatgttgggacagatgaca

SEQ ID NO: 216994 - DNA, 100 bp, Homo sapiens
atctttccatggagtggacctgtcggccctccgaggtgccgcggtggatgagtatttccggcagcctgtggtgggagaagccggagacccagggccccct

SEQ ID NO: 216995 - DNA, 75 bp, Homo sapiens
cagcaccatcggggagacaagcaatcactctgagaggagtgataccaatgaaaaaaggtcagttgattccagtgc

SEQ ID NO: 216996 - DNA, 75 bp, Homo sapiens
tccatgtgatggtggagtaggaggcaggtctccgcgagttcttgaagccagcatagcagagaataaagcatgttt

SEQ ID NO: 216997 - DNA, 100 bp, Homo sapiens
ccctctccgccccccaggaggggcgagagggagccgcagctgatgtcagtccaatatcagatggaaatgatgcggagccttcgccatgtaaacattgatc

SEQ ID NO: 216998 - DNA, 90 bp, Homo sapiens
aaaagggtgaaggaggcgaattttcagttgataggtctgtttctgtcgactgtggaccacttatgtgcgatccgtggaccacttgcgtgc

SEQ ID NO: 216999 - DNA, 101 bp, Homo sapiens
ctagctttctgggctgccgggagctcgcggcgagcgccccagccaggcctgcgccggcatcctccgagattactggaagaattggttcggaaagagaaaga

SEQ ID NO: 217000 - DNA, 97 bp, Homo sapiens
gaccatgcagcggaggtgggtcttcgtgctgctcgacgtgctgtgcttactggtcggcatcatgacggtgatgtcagctctgtcggtggccccctcc

SEQ ID NO: 217001 - DNA, 75 bp, Homo sapiens
ccatccataaaatactcattcccctctcaggccttctccacagtaggcactcctgactacattgctcctgaggtg

SEQ ID NO: 217002 - DNA, 100 bp, Homo sapiens
agttaaaatctttaatataacagataatgctgcaattaaaccagttgatgcggatgaaattaaaaggctaggaaagagatttaagaagcttgatttggac

SEQ ID NO: 217003 - DNA, 100 bp, Homo sapiens
cacgtgtgtggccaacaccactctggacagcgtctccgccagcgctgtgcttagcgttgttgagatctaaaattgcagtgtttgataaaatgtggaccta

SEQ ID NO: 217004 - DNA, 100 bp, Homo sapiens
actgcggcggcggggagagcggcggctgccacctgtatgctattaacactcaccacagcagagagctgaggattgtggttgcaattcggaataaactgct

SEQ ID NO: 217005 - DNA, 100 bp, Homo sapiens
ggaagtcatggtcgcccgaaaaatcaccttctactgggtggataccaccgaatggtctaaggtaggacagcaaggagattccaataataacttaagtccc

SEQ ID NO: 217006 - DNA, 100 bp, Homo sapiens
ggcgtgctgaccagcggcggggatgctcaaggaatgtatcctgtcaggtataatgtcagtgaatggcaagaaagttcttcatatggatcgaaacccttac

SEQ ID NO: 217007 - DNA, 90 bp, Homo sapiens
caggatcccagtttcctacaagcgaacaggattctttggaaagtctataagaaggagaaagctcgagtcatcactgaggaagagaagaat

SEQ ID NO: 217008 - DNA, 100 bp, Homo sapiens
cctcctgaaactctaccctccaggggatgaggaaggtgaccatcttggtgctgcagggccggctggatgaggcccgacagatgctctccaaggaagccga

SEQ ID NO: 217009 - DNA, 74 bp, Homo sapiens
gctggacgtgcacgcagcccggcgggaggataaagaccaccacggagcggttggttccccgaggcgtacgtgaa

SEQ ID NO: 217010 - DNA, 71 bp, Homo sapiens
gttgttggtcgagctggcgggtcccgcgggccaggccgtggaggttttcctaggacattaggacaagccga

SEQ ID NO: 217011 - DNA, 82 bp, Homo sapiens
gggcggcttcctggcctgggcgctccggtggcggcggaggactggagactgatgcatgagggggctacggaggcgcaggagc

SEQ ID NO: 217012 - DNA, 82 bp, Homo sapiens
tgactttcaacgggactattatgataggtgaggaaaatagcagctgaatactatgacaacctccctcactacaattcctgga

SEQ ID NO: 217013 - DNA, 100 bp, Homo sapiens
ggggctcgccgtcaacgtggtcaccacgctcgtgctcatctcctactgtcccacggccaccgaagaggttacacgacagatccatgagcatgagcaggag

SEQ ID NO: 217014 - DNA, 83 bp, Homo sapiens
ccgcggggcgcgggcggcggacagattgaccttcagagcgaggtggtgtttggactctagaccatgtgcctaggtagaagttt

SEQ ID NO: 217015 - DNA, 103 bp, Homo sapiens
cccctgcatcggatcaccggcgtgccccaccatgtcagacgcagccgtagacaccagctccgaaatcaccaccaaggccctgggaggagcggggacactgagg

SEQ ID NO: 217016 - DNA, 75 bp, Homo sapiens
cctgaggacacttctctgtcgtcacagttaggaacgaatgatcacacactttgaaaggtccaaaatggagtaagg

SEQ ID NO: 217017 - DNA, 96 bp, Homo sapiens
tgacgtgttctccaaataccagctcgacaaagatggggttgtcctctttaagaagtactcccctgccctcaacaagatgttttgccaactggccaa

SEQ ID NO: 217018 - DNA, 100 bp, Homo sapiens
tctcgctctgggtctccaggcccgcgaccgtccgccagtcgtcccgagggcgccctgcgtccggcagaggaggcgagcatcccgctcaggtgatgaggaa

SEQ ID NO: 217019 - DNA, 80 bp, Homo sapiens
gccgcctccaccatgccgccgaagttcgaccccaacgagatcaaagtcgcctcggctctgcgcacgcccatctccatcac

SEQ ID NO: 217020 - DNA, 100 bp, Homo sapiens
gaggagccaagtgtggcagcagttcgtgaagtctgtgaggaggccctggaacgtctttgaaactccctggaactaatcagacaggagggcctagccaggc

SEQ ID NO: 217021 - DNA, 98 bp, Homo sapiens
gaggctccaagacctcatcaacaattaagttgaacaagagatttttcaatcaagactttggaactacgaagatggaagagatttgaagagggatatag

SEQ ID NO: 217022 - DNA, 51 bp, Homo sapiens
gaggtgctgaagtccacgaagagatgtgaagttcatttccaatccgccctc

SEQ ID NO: 217023 - DNA, 80 bp, Homo sapiens
ggagcctcagttggaagcagccgatccagcctgcggagcctgtggggcaggttgaaggggcccggccaggactcggggaa

SEQ ID NO: 217024 - DNA, 99 bp, Homo sapiens
ctccacaagcggcgccgcgccctcggcctgcacggaacccttaggagaaatcttgagagtggacagcaattgtgaagatcgccagagagttctgtgttt

SEQ ID NO: 217025 - DNA, 101 bp, Homo sapiens
ccgggcccaggtcccttcctccctgatttgcttcttgaaggatttaataactacaggtttctctccaatggctatattcctattccgggacagcaagacaa

SEQ ID NO: 217026 - DNA, 76 bp, Homo sapiens
gtgggattggagataacccaggcagctgaagggtatgtgattggcagctgtattaaacacattccaatcgcaggac

SEQ ID NO: 217027 - DNA, 75 bp, Homo sapiens
gaaaccttcacatcttggtcaagaacaggtgggattgttcctccagcagctcaacagcttcacagagaaaatatt

SEQ ID NO: 217028 - DNA, 98 bp, Homo sapiens
tttactccgcccagaagacaacatcaggctggttcaccatcattaatagcaaacaaatgggaagttattcttgtttctttcgagaggaaaaggaacaa

SEQ ID NO: 217029 - DNA, 100 bp, Homo sapiens
ccgggacctcggcccgttcctccggacccgagaggccgccgcacggggacctgaaggagaagaaggagaaggtggaggagaaggcaagccggaaagagcg

SEQ ID NO: 217030 - DNA, 79 bp, Homo sapiens
ccaccttcagtatctcagtcctccagtgtttggatattcaggagctgaagaagaagctgttcaaacgccggcgggtgtt

SEQ ID NO: 217031 - DNA, 90 bp, Homo sapiens
tctgctcctcggaagaaacttaaccatcttttgaaagcccttgaaacgtcaaaggtaaagagaaatgtgtatgaccttacaagtatcccc

SEQ ID NO: 217032 - DNA, 83 bp, Homo sapiens
tgcaccgtgggtatgcagacagtccttcaaaagttggtagctggcagtgttgtgatggcttttgaagaagtatgcccggacag

SEQ ID NO: 217033 - DNA, 83 bp, Homo sapiens
cttgggccgccgagctggacccggaccggttttgggtcagcccaaggccaaccccactgtcactctgttcccgccctcctctg

SEQ ID NO: 217034 - DNA, 101 bp, Homo sapiens
gaaaagattatgtgaaattttcacaagaatgtttgctgaccctcatggcaagctccctagatctttagcttctactcccactgctcctaccactccagcaa

SEQ ID NO: 217035 - DNA, 75 bp, Homo sapiens
gcgctctccgcccagcggaagttttcgctgggcaactgagaagcgtctgtctacacagagagattcatgggtctc

SEQ ID NO: 217036 - DNA, 89 bp, Homo sapiens
agccggagaagcgagtttcagctggaaatgagtggcttatactctcctgtcagtgaggatagcacagtgcctcaatttgaagctccttc

SEQ ID NO: 217037 - DNA, 101 bp, Homo sapiens
tagggacagcgaggttgtggtgaattcagtgtttgcagctgctggacatttccatgtaccgccagttccctgcagggtcatgtccaaagtaatggagatgt

SEQ ID NO: 217038 - DNA, 101 bp, Homo sapiens
agttcgtctcttacgtctgcggaagtgcagctgcctcagttcttagcgcagtaagagttccctatttcattgatttgaaaaaaccacaggatcaaggtttg

SEQ ID NO: 217039 - DNA, 97 bp, Homo sapiens
acagccgcgcgctgagggtctcggggcgggcgccgcgggacctctccgggccatgggttgatgataattagaagcatgctttccactgaacttcccg

SEQ ID NO: 217040 - DNA, 100 bp, Homo sapiens
ctttgccgagaaggagttgtttcccattgcagcccaggtggataaggaacatctcttcccagcggctcaggtgttggagcgggccggagagaagtagagt

SEQ ID NO: 217041 - DNA, 83 bp, Homo sapiens
gcgcgctgctcctcgccctcaagttcacctgcagatgttggtgaccttcaaggatgtggctgtgacctttacccgggaggagt

SEQ ID NO: 217042 - DNA, 82 bp, Homo sapiens
cgcaaccattgacgccatgtcgggttattcgagtgaccgagaccgcggccgggaccgaggggatctatttgtgatgactata

SEQ ID NO: 217043 - DNA, 75 bp, Homo sapiens
agccaaggccaaacctcgtttggatatcaatatcacttctgtgctaattggcctctgagcccaagctaagccatc

SEQ ID NO: 217044 - DNA, 75 bp, Homo sapiens
tctctctctcttttctttcagtctgcaactgtgtctgatggcggcttgaactgaagttgaaaaaggaaaactggg

SEQ ID NO: 217045 - DNA, 90 bp, Homo sapiens
gagaaggataagtcgaaggggaaggcgcctgaagaggacgaagctactgtttcagctcattattgactacttagctgagttcaattccac

SEQ ID NO: 217046 - DNA, 74 bp, Homo sapiens
gcctcccgagaagaagttgaggcgctattggggtgctgacctacggactgaacatgaaaagtacctggtgaagc

SEQ ID NO: 217047 - DNA, 100 bp, Homo sapiens
ctattgtgaaaaacctaaaggataccttagtgttccttgcctgtatctccccttggttcaatagctaccagatttttggaagaggaggaactgaggtctc

SEQ ID NO: 217048 - DNA, 100 bp, Homo sapiens
gagcgggagcggccggaggagccatggactgcagcctcgtgcggacgctcgtgcacagatacctgcagacctattcacagacttggaaaatgcatttcag

SEQ ID NO: 217049 - DNA, 75 bp, Homo sapiens
gggcacgcacagagtgcaagacgctgagcaatgcagaccctgtgtgtaagcagaacctccactccctccgctgcc

SEQ ID NO: 217050 - DNA, 75 bp, Homo sapiens
atcctataacaatgcagtgtataaagaactgtagtgaaatgtagtattgccaagtcccaagccctctacagtgcc

SEQ ID NO: 217051 - DNA, 90 bp, Homo sapiens
gaggtacgagatgccacggcacgaagtctacgttctcctgatccgaaactgccattcaccatccctgagctggttcatgcctctccctgc

SEQ ID NO: 217052 - DNA, 87 bp, Homo sapiens
gagttaccccagacccctcagcgtctggcatcttggttagcaggaagaagatgagccttaagtctgaacgccgaggaattcatgtgg

SEQ ID NO: 217053 - DNA, 100 bp, Homo sapiens
gtttgaatcgctgagcgatatcacagaacacaagattaatcaatgtcaactgacagggtagctataaccagcctctgggcctgtccagcacccagtcaga

SEQ ID NO: 217054 - DNA, 100 bp, Homo sapiens
cttcggaatgcactacaacaggaaaatcatattatagatggagtaaaggtgtgcggagatgatcatcagcatggacagcagccagatccacagcaaagac

SEQ ID NO: 217055 - DNA, 75 bp, Homo sapiens
aaactcgaagaacagctgtggaaagaagttgcaaaacactgggcaaaggcagctcgagcatctcatctgacgtga

SEQ ID NO: 217056 - DNA, 83 bp, Homo sapiens
gctgggtctcggagtgggagacgtggagtgcagccaagacaatgcaaactccagtgaacattcccgtgcctgtgctccggctg

SEQ ID NO: 217057 - DNA, 100 bp, Homo sapiens
agaatttaattacctaaacacagcacgtaccttagaactctatggagttgaattccactatgcaaggtgctgtgttaaatgagaataatgtgcccctccc

SEQ ID NO: 217058 - DNA, 74 bp, Homo sapiens
ccgtggtccttctccatattcgagatggaatcgccacttatatatgtttcagttttgcttttgaacatatttga

SEQ ID NO: 217059 - DNA, 73 bp, Homo sapiens
ttggcggtccctgtgacctgtggagacacggccagatctgccctccagtttctgcatatgaagtgtgtaaaat

SEQ ID NO: 217060 - DNA, 98 bp, Homo sapiens
gactgatttgcaacccttccgggaagccatagctctgcatgagacagagtttcaccatgttgcccagactggtctcaaacacctggattcaagcaatc

SEQ ID NO: 217061 - DNA, 50 bp, Homo sapiens
cggagcttcgccaaggctggcgcagtcggaagctcttcgtgggcggtctt

SEQ ID NO: 217062 - DNA, 88 bp, Homo sapiens
atgccctgctgtctgccatcgaagagtcccggaagagggtgcccctgggcgctgggattgctctagcctgtaagtataatggaaaaga

SEQ ID NO: 217063 - DNA, 114 bp, Homo sapiens
ggacctgagccgcgaggacacgggctgcaacctgcagcacatcagcgaccgggagaacatagacgcatgccccaggatttgtcagaggccctgaaggaggccaccaaggaggtg

SEQ ID NO: 217064 - DNA, 75 bp, Homo sapiens
ggtggcaagtattgctgtgggtgctgggacttcccgtccgcggcgtggagggtggtggtgaagtttattaagaag

SEQ ID NO: 217065 - DNA, 100 bp, Homo sapiens
acaggcattagacagaaagctggaagttgaaatgaaggaagcccggtgccagccagccttcctgaaagaccaagcccgcgccatccggcttcctccagtg

SEQ ID NO: 217066 - DNA, 95 bp, Homo sapiens
aggactagagagccagcaatgcctccatgaacaatctcacccaattactctgctcagtgaatttaggaggacttttactccaagcactcctggaa

SEQ ID NO: 217067 - DNA, 82 bp, Homo sapiens
aggatcgtcaggctgaaggaatcttggtaaatggtgttctaagaacggaagcatctgggctggatggaatttagcatcaagc

SEQ ID NO: 217068 - DNA, 112 bp, Homo sapiens
gtgaagatcctgaatataaaccactccaaggtcccccaaaggaccaagatgatgagatggagagaccagagaagagaacaagctgttgattcctaagcagaaaatttcggaa

SEQ ID NO: 217069 - DNA, 75 bp, Homo sapiens
gagtgatgtcttccagactcggtgctgtacccgccgcgccaggaactccgagagcttcggctgctccagaaagaa

SEQ ID NO: 217070 - DNA, 100 bp, Homo sapiens
gcattaacatttgtggccttgtgctctttcatcggacttctaatggttccatcaatggtgagcaccagcctgaatgcagaagcgctccagtatctccaag

SEQ ID NO: 217071 - DNA, 105 bp, Homo sapiens
cggaggccagcggccgggatagccccggcggagcccgcagcttccctgccgcaattctgtggtgttcttggtcacacatttatggagtttctgaagggcagtgga

SEQ ID NO: 217072 - DNA, 90 bp, Homo sapiens
gtacttgaagatttgcataaagccaacattcgcaccgtcatggtcacaggtttcacaagaagtactgtggctgtatacagtacctgtatg

SEQ ID NO: 217073 - DNA, 100 bp, Homo sapiens
ggcgtcgcgcgcgcctgtagctcgcgggcctcgcaggtgacggatggtggcaccatcaagcaaaagatcttcaccttcgacgccatgttctccaccaact

SEQ ID NO: 217074 - DNA, 89 bp, Homo sapiens
tgcccacaccagaagccatcagcagcaaggtgctttacaaggccaagtacggtccaatgtggatgtcctacttagggcctcagatgcac

SEQ ID NO: 217075 - DNA, 83 bp, Homo sapiens
acttccctggtcgaacagttttttctaatggctattcaagagtattgggaaagggtcgttgtggtgcatagacccagagtata

SEQ ID NO: 217076 - DNA, 75 bp, Homo sapiens
agaattcttctagaaccctataaatacttacttcagttaccagaatacagattctgttcatcttgctctgaaatt

SEQ ID NO: 217077 - DNA, 75 bp, Homo sapiens
ttcagtgactgctattgaaccaccaaaagtccattatgaaactggtcctgctcaggttccaatgatgtccccaaa

SEQ ID NO: 217078 - DNA, 75 bp, Homo sapiens
catatacaaaggcatggaagtatgaaaatgtgaacacctacctcttcatgatgcaagcccaaggcattctgatcc

SEQ ID NO: 217079 - DNA, 75 bp, Homo sapiens
tgaactactatgaccatgcggatttccaccacagtgtaaaaaatgtttgagacggaggcagatgagaagagggag

SEQ ID NO: 217080 - DNA, 100 bp, Homo sapiens
gaagacatagctgtgaagctgggaactgatctagaatagatggtgccatgacaatggtgtgaactacaagattggagagaagtgggaccgtcagggagaa

SEQ ID NO: 217081 - DNA, 100 bp, Homo sapiens
cgccgccgccgccgccaccatgacgcaagatggctgtcctctctaaggaatatggttttgtgcttctaactggtgctgccagctttataatggtggccca

SEQ ID NO: 217082 - DNA, 82 bp, Homo sapiens
ctggcgagacctcacctgcatggacttccactatgagctcaccatggatgatgatatcgccgcgctcgtcgtcgacaacggc

SEQ ID NO: 217083 - DNA, 100 bp, Homo sapiens
cgagccagccgctgttttgccggaggagcccctcaggccatcttcctcagaactgtgatcctaacattcccctagttgctcaggaattaatgaaaaagat

SEQ ID NO: 217084 - DNA, 100 bp, Homo sapiens
cactgcttcatccgggaagtgcttggggatggagtgcctccaaaggttgctgagttctgggaaatgccagtgcaaagtgggtgtcattggctctatatgt

SEQ ID NO: 217085 - DNA, 50 bp, Homo sapiens
gcagcctccagcagggacctgtgacagatcccaccagccagcaagctaaa

SEQ ID NO: 217086 - DNA, 80 bp, Homo sapiens
cactgctgaacggaatatctgcagcaagtattcgagactgggtgtgttgctgtattgcccaggctggtgtggaactcctg

SEQ ID NO: 217087 - DNA, 100 bp, Homo sapiens
cctggacgcaatggactccctggctttgatggtgcaggagggcgcaaaggagacccaggtctgccaggacagccaggttggtccagccagtgcctgcagg

SEQ ID NO: 217088 - DNA, 83 bp, Homo sapiens
agacagttgcgctggctcagcggggccggaacatggctgcgtccggtctgatctccagcaccctgccggtggcactactgaga

SEQ ID NO: 217089 - DNA, 100 bp, Homo sapiens
atatttcagctgttgaaacagaagaagttgagcctgatgaagaagaagtttacacagtaaacaatgtgaatgtgatcaccaaaatacgcacagaacatct

SEQ ID NO: 217090 - DNA, 87 bp, Homo sapiens
tgaatttgaaaacggtaacatcgcagtgctgctcgcgggtctggctagtcaggcgaagtttgcagatgaatcatccagatcttctga

SEQ ID NO: 217091 - DNA, 88 bp, Homo sapiens
gttggatcccactgcttccatttctgatgaaatctgtaagtacagacctgagaattctgttgctaatgacactggcttcacagtggtc

SEQ ID NO: 217092 - DNA, 100 bp, Homo sapiens
ctggacagaccaacctgtcagtgctgcaaacttcccaagtaagaagcggaagaggagccgctggaaccaagacacaatggaacagaagacagtgattcca

SEQ ID NO: 217093 - DNA, 102 bp, Homo sapiens
tctcacacagacttttgatggacaggagtgagaaagatcagtctaaagaaaaggagaagaaagtgaaaaaaacaattccttcctgggctaccctttctgcca

SEQ ID NO: 217094 - DNA, 75 bp, Homo sapiens
agcgtcttggctgccgccctgctccacgcagtctgcttcagtgcagtgaagagtaattccctcctggtcccagac

SEQ ID NO: 217095 - DNA, 100 bp, Homo sapiens
gtggaagaaggagagaaggttgtgaagacagccctggatgcttttggaagaatagatgttgatgttagtgaagattcacctcctcccctacctgaaagaa

SEQ ID NO: 217096 - DNA, 100 bp, Homo sapiens
cactttgtggagaaagtcgtcttccacttgcacgaaagctttcctaggccaaaaagagccctgggcgctgcctatggcacagccaagagcggtaccggca

SEQ ID NO: 217097 - DNA, 101 bp, Homo sapiens
ctgggtcagcttcatcctcggcggcggtggccgctagctccaaggaagaatccagactccaaaatgatgcaaatcaacctgactggatttttgaatggaaa

SEQ ID NO: 217098 - DNA, 71 bp, Homo sapiens
cagcttcaagcttaggaccacccaccatgcctatccaggagccggcatcatggattccttcaaagtagtgc

SEQ ID NO: 217099 - DNA, 73 bp, Homo sapiens
agtggtcgcttcttctccttgcggaaggcagacagattgctgccaacatgaggggtattgggatgatgcccaa

SEQ ID NO: 217100 - DNA, 74 bp, Homo sapiens
cgaggagtacgagttcctgacccccgtggaggaggcacccaaggtcagcgtcaccgtggggggcaagcagtacc

SEQ ID NO: 217101 - DNA, 88 bp, Homo sapiens
tctcctttgggttgtactcatagattgtgtaggcgttggtcttctgatagcaactttaatgtggtcatactactagatattacactgg

SEQ ID NO: 217102 - DNA, 60 bp, Homo sapiens
aagatttccaatcatttctaaaagagcagtcatgatggcctgcactccacacaatgcaac

SEQ ID NO: 217103 - DNA, 82 bp, Homo sapiens
ctgaacctcactgtctggttcttagtttggacaactggagtgtatgttcttttccctggttcagcctgaactatataccagg

SEQ ID NO: 217104 - DNA, 101 bp, Homo sapiens
gtgaatctcaggagagagcagccagagtgtccaaaagaaactcttccttcaaaacctgtgaagaaagagaaggaacagaggacacgtcacttactcacaga

SEQ ID NO: 217105 - DNA, 97 bp, Homo sapiens
cgtctgatgctgaactggatgctaaacttgagggtctgggagagtcgggggtgttcctggggtgttccgtgtttttcgctatccatgacgcagtgag

SEQ ID NO: 217106 - DNA, 78 bp, Homo sapiens
aggagttcgtctcttacgtctgcggaagtgcagctgcctcagttcttagcgcaggccctctttggattccagtacgat

SEQ ID NO: 217107 - DNA, 73 bp, Homo sapiens
cctgcctcaggtttatttgtacaaatagcacaggaggccaagccgtacaaaaatgatccagaaattttagcaa

SEQ ID NO: 217108 - DNA, 90 bp, Homo sapiens
ggacgaagctctctccagaaagacatcctgagaggacttggcaggtaagaatgattgatgttggctgatattggagtgctcattcacatg

SEQ ID NO: 217109 - DNA, 75 bp, Homo sapiens
gatattgtgcttgccatccttgaattactaaagagttcatgatcaagtgttgcccacaccaaatgcttcatccag

SEQ ID NO: 217110 - DNA, 98 bp, Homo sapiens
agtgaaggatatggctggagactggcactgggctctgaggttgctagacctgatgcacaccctgcacacgcgggcagcctctatctacagctcatggg

SEQ ID NO: 217111 - DNA, 83 bp, Homo sapiens
aagttcgagcactaatatttaagaaagaagatgttaactttcagacgtcattgtccctgagaatggagaaccagtaggcacca

SEQ ID NO: 217112 - DNA, 80 bp, Homo sapiens
caggaacctgggcgagcagcggcgggggcccgaggggaactgggcaggcaaaaggcttctcttcccctccattcatgcac

SEQ ID NO: 217113 - DNA, 75 bp, Homo sapiens
cgcgcctcagcgtgtcgggcgaggtgcgcggacatcgcccgcagcatgggtgccaaaacggtcatcgccattgac

SEQ ID NO: 217114 - DNA, 75 bp, Homo sapiens
ccccgctcccggggtccccggccggccaagcagattgaatagggaaaacctgctttctgcaaacaactgaaaaag

SEQ ID NO: 217115 - DNA, 50 bp, Homo sapiens
tgctctttacttcctttgtggagcgcatagagaaggagacgtgccagaag

SEQ ID NO: 217116 - DNA, 82 bp, Homo sapiens
cggcggaggcagcggagccctgggccatcggttgtggcagcactgcctgaaggtatgagaccagattctaatctttatggtt

SEQ ID NO: 217117 - DNA, 90 bp, Homo sapiens
atcttccctttgaaccttcaaagaaactttatgttgtcaagcaagagacaatgactgatgtggtgggtaacccagaggaggagcgccgag

SEQ ID NO: 217118 - DNA, 75 bp, Homo sapiens
cagagaggttaaggaactcgtcctacgtaacacagccagttagatagcctgggctggaagctcttctacgtcaca

SEQ ID NO: 217119 - DNA, 75 bp, Homo sapiens
gaggagtcagaaactcagccactggttgccttggtaggcaataaaaatggaagatggtaccccaaagcatatcat

SEQ ID NO: 217120 - DNA, 88 bp, Homo sapiens
aacagatagtaaaactgaagaaaagacagctgctagtgctcctgccaatgtggctttccttaaagtttcccatgtctcaatggactcc

SEQ ID NO: 217121 - DNA, 75 bp, Homo sapiens
gccgggcgcgccggagcgttcaggcttcccgtttttaagaaaactgtcgctgaaaagcaggagaagagaaatcag

SEQ ID NO: 217122 - DNA, 74 bp, Homo sapiens
gagagtctgttgaacaacaggctgatagtttcaaagaattggcagagggggtcgatttgggaggaaaggtgtgg

SEQ ID NO: 217123 - DNA, 98 bp, Homo sapiens
ggccctggacacagcaatatctctgggctttcacaggtgcttacactccagagcccctcagcagtttccggtgggctcttctctcaactggcctcatg

SEQ ID NO: 217124 - DNA, 90 bp, Homo sapiens
gtctgaagatcctctgggtgatcatggttcagcgctttagcctcaggaggcagctatccaaggtgaagcccaacactcctgtcttaatgt

SEQ ID NO: 217125 - DNA, 90 bp, Homo sapiens
cttgctgaagagactttccgttacatgagtttgccagaacccaataaagatgccatcttccaaggcctgacgcaggaccaggggttttat

SEQ ID NO: 217126 - DNA, 75 bp, Homo sapiens
tccagccctgcctcggcggaccaaaggtttttgaagagcctgaagatcccagcagtaggtccttcttctcagaaa

SEQ ID NO: 217127 - DNA, 81 bp, Homo sapiens
cggagcccggggcccggagccggcgcccccggcgcggagcaagtgcaccggcacctggaccaacacgaagtgagatacctg

SEQ ID NO: 217128 - DNA, 74 bp, Homo sapiens
catcttttatacactcttagtgctgtccaggatgaggatgaagatgacgctgatctctcaaaatataatcttga

SEQ ID NO: 217129 - DNA, 100 bp, Homo sapiens
tggctgaaggacttggggagcccagaagctgccaccgaaccaaggtgctggagaatctggtaaaagcaccattgtgaagcagatgaggatcctgcatgtt

SEQ ID NO: 217130 - DNA, 90 bp, Homo sapiens
agcgggtgtgaggagcgcggcgcggcagatacttttctgctgtgagaatgtaagatggatccagaagagcaggagctcttaaatgattac

SEQ ID NO: 217131 - DNA, 100 bp, Homo sapiens
atctgctataacctacaagcagttggacagaatttatccagttggcgaaggactttgaggatttccgtaaaaagtggcagaggactgaccatgagctggg

SEQ ID NO: 217132 - DNA, 75 bp, Homo sapiens
agtgaggaattttgaagtacaccgtggtgacattgtatcattggtaaagatgtagcacttaagcctcaggaacgt

SEQ ID NO: 217133 - DNA, 75 bp, Homo sapiens
gggcaagccccgctccggccaacaaaaccttttgatggaacaaatacagccagagcagtgcacgaaaagcagaaa

SEQ ID NO: 217134 - DNA, 90 bp, Homo sapiens
cgagggaccgccgggcggcggaaagcaggggaatcacttgcaaggtccacacaagtccgcctatgtactctctggatcgaatatttgctg

SEQ ID NO: 217135 - DNA, 75 bp, Homo sapiens
cagctaaaaccttcctcaccgtgtactcaaagtgaaggtgctttttaagttcaccaaggtggacagtcgacccaa

SEQ ID NO: 217136 - DNA, 82 bp, Homo sapiens
gtcatatatccttcatatgatccatcttagtgaagaattaggatacagaaactaatggcagatcccggaaatccagacttgt

SEQ ID NO: 217137 - DNA, 83 bp, Homo sapiens
ttaccagatcgaatctgggccaaatagaaagggggaagcgagtagcattatctgatgatgagacaaaggaaactgaaaacatg

SEQ ID NO: 217138 - DNA, 124 bp, Homo sapiens
tgggaaggcgtgggcgacccggtgtgtggcgcgcccagagccccgcgtttcagccctagggaagacaatgcagatcttcgtgaagactctgactggtaagaccatcaccctcgaggttgagccc

SEQ ID NO: 217139 - DNA, 76 bp, Homo sapiens
agaacccccctatcaacaccaagagtcaggcagtgaagttgggtatccctggtcagtaagaattatgagattgaac

SEQ ID NO: 217140 - DNA, 98 bp, Homo sapiens
ttactttaatgagaagatctccattcctgaggaggagagagcctatctctggcagaagtagccaacgagctggacacggagaccctgcggaggctgaa

SEQ ID NO: 217141 - DNA, 98 bp, Homo sapiens
atgatctccttaacggacacgcagagacgaaaatgatgatgacgatgactggaacccctgcaaagcagcaggggtgtgcctcatgcttctggccacct

SEQ ID NO: 217142 - DNA, 75 bp, Homo sapiens
ccagcctcttcttcggcgccctccaggcctgttggaggaacctcactctggagcctgagatcatgcctgctgcca

SEQ ID NO: 217143 - DNA, 116 bp, Homo sapiens
gatgggaagttacggtttacagcgaagtccacccagcgtttccgaggtgaaggcgccgcgccaggccgggcgggcgcctcctgacaaggtgatccgggcgggccccgcaggaattt

SEQ ID NO: 217144 - DNA, 50 bp, Homo sapiens
gcggccaagccatgctcggccccaggccaaacaccagagcaccctagaag

SEQ ID NO: 217145 - DNA, 75 bp, Homo sapiens
gtggtaggctatgaccacgagaagccaggtcccttcaccgatgttgtcaccaccaacctaaagcttggcaacccg

SEQ ID NO: 217146 - DNA, 75 bp, Homo sapiens
cagagggctgccatcctgcagactgagcaattaccagctctggctgggtcgccacaacttgtttgacgacgaaaa

SEQ ID NO: 217147 - DNA, 75 bp, Homo sapiens
atttggaaactggtcatctccagaaccaacctgtcaaggtctgaaggggcgtctcgattacctgagctctctgaa

SEQ ID NO: 217148 - DNA, 74 bp, Homo sapiens
gcggagcgccatggcctgcatcctgaagctcacggatgattgatatccagaccaggatggctgggcgagcattg

SEQ ID NO: 217149 - DNA, 50 bp, Homo sapiens
cacgattctccctctcctagaggcgaattggcagagggggtcgatttggg

SEQ ID NO: 217150 - DNA, 75 bp, Homo sapiens
tgtgggaggagcccagcaatctgtgtttcgcaaaccctccagaagcaaaacggacaagtcggtttttaagtggca

SEQ ID NO: 217151 - DNA, 89 bp, Homo sapiens
gtttgggcccaaagaggtgtccacagcttgtgccaccgccgtgctgggcaatcaggatggatgtggagaaaggcaagattgaagacaca

SEQ ID NO: 217152 - DNA, 82 bp, Homo sapiens
tcacctcgctgcgggccaacggtgtggagatcaaccgtgagcagtggatccagattttgcaagaacgaggctcaaggatgtg

SEQ ID NO: 217153 - DNA, 100 bp, Homo sapiens
gggtcagccccccgcccggccagccgccccgtccgggagaatgaagagcttcgaaacttgtctttgtctggccatgtgggatttgacagcctccctgacc

SEQ ID NO: 217154 - DNA, 90 bp, Homo sapiens
cagcgaggcagtctgttctggttcacagtcatcaccctcagctttggctactacacagtcctggcattgatgtgcctgctccagacatga

SEQ ID NO: 217155 - DNA, 50 bp, Homo sapiens
attatgtggaccctgaccatgtaaagggagactcatgcatctgtatgccg

SEQ ID NO: 217156 - DNA, 124 bp, Homo sapiens
aaaacaagatggggcagctgggccttggcaaccagacagacgctgttcccagccccgcgcagatgactttgaagaagccaaggaaattttgacaaagatgagatacttttcaaatatagaagaa

SEQ ID NO: 217157 - DNA, 49 bp, Homo sapiens
cgggggaacagctagcggcaagaaaactttagaaactgttcctttggag

SEQ ID NO: 217158 - DNA, 100 bp, Homo sapiens
attgttctagtctccaggcccagtacatggatgcttgttggatgaattaatgaaccttgacccacaccaaggacgccaggaaagcatgtgcagatgcaac

SEQ ID NO: 217159 - DNA, 97 bp, Homo sapiens
tgtgccttgaactctatgagtctgatgggaagaactctgccaaagaggaaaccaagtttgcacagactcagattgatggacaacttttcttaattaa

SEQ ID NO: 217160 - DNA, 80 bp, Homo sapiens
cggccagccagtcatcaaacagaagtagctgattttcagctttctgtggattctttattggaaaaagacaatgaccattc

SEQ ID NO: 217161 - DNA, 101 bp, Homo sapiens
caaaaagtaaaccacgatcgttatgctgactcttttggtacaccagaaggccagaatggaacgacttcaaagagaacttgagattcaaaagaaaaagctgg

SEQ ID NO: 217162 - DNA, 97 bp, Homo sapiens
tttttaatgaccacaacaagcaagcatgcagcttactgcttgaaagttgttcccatgactttgccgactaaagttctaagtgcccaccgtaaatcac

SEQ ID NO: 217163 - DNA, 82 bp, Homo sapiens
tcctttgagaaaaatgtacgggcaggaagatgaataggtgtctgtttgattaaggtctgccatcatggatgttctcgcagaa

SEQ ID NO: 217164 - DNA, 94 bp, Homo sapiens
tctgtcttcggtggactccttcggcagtccacccaccgccgccgcctcccagccgccaccggcacggccaggccagcatggtggaccacttact

SEQ ID NO: 217165 - DNA, 50 bp, Homo sapiens
gcagccgctgtacagattcatcaccacgaagagaaggaggcagagactgg

SEQ ID NO: 217166 - DNA, 75 bp, Homo sapiens
ctgccggcccctgttttagctgaaatatgataaatgatcccgcactgagacacacaggcctctactgcaaccagc

SEQ ID NO: 217167 - DNA, 75 bp, Homo sapiens
aaaggaattagcagaagacattatgtcaggggctatctgatgggttagagtgcctttgagaagaaatcagtggat

SEQ ID NO: 217168 - DNA, 89 bp, Homo sapiens
aacaggtgtcaccttgaaggtgggagtgatcaaaaggacctacaagaacagtgaggagcttcggtctcgtattgtgtctggaatcatca

SEQ ID NO: 217169 - DNA, 60 bp, Homo sapiens
gcaacgagcacaacaggagctacgaggagttggtaaaatctgtaaaaactgggtcagttt

SEQ ID NO: 217170 - DNA, 75 bp, Homo sapiens
caagacatttcctgctcggaaccttgtttactaattactctgatgccagtatggactggagatgatgggagccag

SEQ ID NO: 217171 - DNA, 80 bp, Homo sapiens
acagctatggtgatgattagagacatactaatgtacatggtctcggcgcggaagatggccggcggcgtggacggccccat

SEQ ID NO: 217172 - DNA, 82 bp, Homo sapiens
ctgcagcgggagctggacggcgagcgcgagcggcgcgagaaagaaaccatcaagatctcattttacagctgggattctctgg

SEQ ID NO: 217173 - DNA, 97 bp, Homo sapiens
tgaagactttggaccaggcaaaagacatatgtagagtgtgtcggtcagaaggaacacctgagaaaccgctttatcatccttgtgtatgtactggcag

SEQ ID NO: 217174 - DNA, 100 bp, Homo sapiens
aagtagtgtggcacagataaaaaaacttgtggtggagaatgttgatgtgttaacacaaatgaggaccagctttgacaaaccagaccagatggctgcactg

SEQ ID NO: 217175 - DNA, 75 bp, Homo sapiens
cgccgacatgaagaaagacgtgcggatcctgctggtgggagaaccagcctcccgcgacgatgcccctcaacgtta

SEQ ID NO: 217176 - DNA, 100 bp, Homo sapiens
gaagccagtactacagaagttaggtcaagatgaagacatggatgtcaaatactttgcacaggaagctataagtgccacttctgccccaccaacgttgggc

SEQ ID NO: 217177 - DNA, 83 bp, Homo sapiens
ccaggcgggccagtgcggcaaccagatcggcgccaagattttgcaagaacgaggctcaaggatgtgagggacacagtattgac

SEQ ID NO: 217178 - DNA, 100 bp, Homo sapiens
cactttcttatccggactgggatattaaatatacgacacatccaggagtttattggagcgcagactgatggcgcaaaggaatctcattttcagcttctgc

SEQ ID NO: 217179 - DNA, 73 bp, Homo sapiens
agatggcattgaagatgcctttgaggttggatggcaagcatgtggtgtttggcaaagtgaaagaaggcatgaa

SEQ ID NO: 217180 - DNA, 100 bp, Homo sapiens
caaaaacttgttgtttgttggctattttactgaagacaacaaatagagcctctagaaaccctgtggttttcctcatgtggaaaatggaagaattgcccaa

SEQ ID NO: 217181 - DNA, 80 bp, Homo sapiens
cacctggtacatcgcctcagggcattcatttcaggctccttctaaatggccaagcatctggcagctacccaaggaattct

SEQ ID NO: 217182 - DNA, 74 bp, Homo sapiens
aatacttcatacattacagtggttggaataaaaaactgtgtcagggaaaagggaggcaaggtcctggtccactg

SEQ ID NO: 217183 - DNA, 100 bp, Homo sapiens
attttgggacccctctgcacgttgcctgtgcccgggagcatctggactgtgtcaaagtgctgctcaatgcagcctgtgggccaaagctgaccaactcccc

SEQ ID NO: 217184 - DNA, 75 bp, Homo sapiens
aaaacatcctggaatcaaatagtgttacggcaacaagaaatgcaatggcacatcgtgattctgagatgaaagaag

SEQ ID NO: 217185 - DNA, 75 bp, Homo sapiens
atcaatttatggtggatattttaaagactgtctatgctgtgccaattctgatcttttcatttgtctgtcatcctg

SEQ ID NO: 217186 - DNA, 82 bp, Homo sapiens
gacaagaattcagcaggccataagccatccagcaacagagactagaaaattatggcatgccgtttagcagaactgaagatgg

SEQ ID NO: 217187 - DNA, 83 bp, Homo sapiens
gtggcaaccagatcggtgccaagggcataattggaatatcatttggagaaagtgtcatggaagttctgcgtccacagcttata

SEQ ID NO: 217188 - DNA, 90 bp, Homo sapiens
gaacacatccaggaaaagataactttcgacacacctgtagacgttcgccaggtaaaggttgtctgcattcaaaagagcattctattaaag

SEQ ID NO: 217189 - DNA, 100 bp, Homo sapiens
cgagaatggaccctgatggacttggacatggagctgtccttggtcctacaacgtgactttaaaaagacagcagaaagcaaaaatgtcccattggaacgag

SEQ ID NO: 217190 - DNA, 82 bp, Homo sapiens
gctgctggaggaggataacaagttttgtgcagattgccagtctaaagcttgttctaaagacgaaggggaactccctagtgct

SEQ ID NO: 217191 - DNA, 100 bp, Homo sapiens
cttcacaaacggtctcatacagattacctggctggtgtttgcttgttctggagtgatcttctgactggaaaagaactatgtcatggatcaaggaaggaga

SEQ ID NO: 217192 - DNA, 98 bp, Homo sapiens
gggatgctacagagaatcaatgctttcattgaaaaacaggttaatccagcacgtatggggccaagtgtaggctcccagcaggaactgagagcgccatg

SEQ ID NO: 217193 - DNA, 50 bp, Homo sapiens
ggaactacctctcccagcctcgcctcagtacagaggtgcagttccatggt

SEQ ID NO: 217194 - DNA, 51 bp, Homo sapiens
gagttgagcctgtgggacacttcgggtccctgtgcgttttattgcgacctg

SEQ ID NO: 217195 - DNA, 75 bp, Homo sapiens
taatcctcaatttaagcctgatctaacccctagaaacagagtattgggaaagggtcgttgtggtgcatagaccca

SEQ ID NO: 217196 - DNA, 75 bp, Homo sapiens
agaatcaacgtctactacaatgagtcatcgtagcacagcaatggaggaaacagctatatgggaacaacatacagt

SEQ ID NO: 217197 - DNA, 95 bp, Homo sapiens
gtggatctgaaagtgacaagcattttagaaagatgtgggaagaatatcctgatgtttatggggtcaggcggtcaaaccgaagcagacaagaacca

SEQ ID NO: 217198 - DNA, 100 bp, Homo sapiens
gcgaactcggcctatcgctaccctccgaagtccggaagcccctccgcttggccagaatggagcagccgaagggagttgattggacagtcatcatcctgac

SEQ ID NO: 217199 - DNA, 98 bp, Homo sapiens
ctcggcgtgcgcccggaaggcgtcgtcttctcttaaaatgaggagatgttaaagtaacccatcttgcaggacgacattgaagattggtcttctgttga

SEQ ID NO: 217200 - DNA, 83 bp, Homo sapiens
agacggcggccttcgaggaggtcatgaaggacctgagcctgacgcgggccgcgcggtttgatgaaggccggaacaactttgaa

SEQ ID NO: 217201 - DNA, 83 bp, Homo sapiens
gcagaagccgagttcaacatcctcctggccaccgactcctacaaggttacaagatgttcacctaagattgagacctagtgact

SEQ ID NO: 217202 - DNA, 100 bp, Homo sapiens
gctcctgcggctgcgactcaggctccggcgtctgcgcttccccatggggctggcctgcggcgcctgggcgctctgaggatgaatccttaaagcaattgca

SEQ ID NO: 217203 - DNA, 100 bp, Homo sapiens
gatctggagccagaaggaagagtgtatgtgatcatcgatctctcagggtcgtcgggtgaaggcagccttaagtgccttgaaacaattttctgaacaagga

SEQ ID NO: 217204 - DNA, 100 bp, Homo sapiens
tgttaaacctcagcatcggcggcccggacttcatggatcatccgtttgttgacaaggtgtggatgaagcaaccatcattgacattctaactaagcgaaac

SEQ ID NO: 217205 - DNA, 75 bp, Homo sapiens
cgttttccacaggcatcaaaatggtggatctcgagccagaggggaaagtatttgtggtaataacccttaccggga

SEQ ID NO: 217206 - DNA, 88 bp, Homo sapiens
ttacaacatggcagacattgacaaatctcgaatacctgatgcatgcaaaacagcagctagtaaccacagctaaacgttgggattcttc

SEQ ID NO: 217207 - DNA, 100 bp, Homo sapiens
caggctacgtggccactaggtggtacagggctcctgagatcatgctgaactggatgcattacaaccagacagatctccaagaaggagaagcttctctcgc

SEQ ID NO: 217208 - DNA, 74 bp, Homo sapiens
tgacaaagccacttttgaaagtcagatgtctgtgatgaggggtcagattccacagtggtgtgtggagtacatgc

SEQ ID NO: 217209 - DNA, 90 bp, Homo sapiens
tggccactgactcatgggccctggcggtggacgagcaggaagctgcggctgagtcggcagcacgctggctcttctcctgaacttcctcgc

SEQ ID NO: 217210 - DNA, 89 bp, Homo sapiens
ttgccatcttggtccagtctggctgcagcaaaaagcaggaaagcttgtggctcttgcagttattgatgagaaaaatacatcagttgaac

SEQ ID NO: 217211 - DNA, 74 bp, Homo sapiens
cggccggggcctgcgggcgcccagagccgcgccgtccgcgccgcccgttctgttacagaatgtctgaaggggac

SEQ ID NO: 217212 - DNA, 101 bp, Homo sapiens
tcttctgccgcaccaggctcatcctgtccatcgtgtgcctgatgatcacgcagctggctggcttcagtggaccaggtggagagattcaaccagttagcgtg

SEQ ID NO: 217213 - DNA, 98 bp, Homo sapiens
gaagaactcgtcatgctctttgtagcgtggtgcttctgttgctcacaggttgcctgtgatttgcttcggaggattattcgtatcttgaatctcagtaa

SEQ ID NO: 217214 - DNA, 75 bp, Homo sapiens
ctcggagaacgactatctcaagcttcgagagctgtgcccaggagtgaacaaccagccctacctctgtgagagtgg

SEQ ID NO: 217215 - DNA, 74 bp, Homo sapiens
cgacgatcgggcctacagcagcttcggcggcggcagaggattgttgccaatgccaaaggcgctgtgactggggc

SEQ ID NO: 217216 - DNA, 95 bp, Homo sapiens
aactgccatctatcgaataactactacatttggtgaacatctgaaaaaaatatggtgttatccctaagaaatgcttccctgaatcttatacaaca

SEQ ID NO: 217217 - DNA, 97 bp, Homo sapiens
gtcttcggtggactccttcggcagtccacccaccgccgccgcctcccagaggttgacggatatattcagacgttacgacacggatcaggacggctgg

SEQ ID NO: 217218 - DNA, 90 bp, Homo sapiens
catgtttgagtacccggagtatcagggaagtcgagataacatgagtattgtactagtttgcttttcaaatgctcccaaggtctcagatga

SEQ ID NO: 217219 - DNA, 75 bp, Homo sapiens
aatcatttctatgcagcgatcttgggatatgatgagggatgtttttgaactaaatttcatgaacgtcaaattttc

SEQ ID NO: 217220 - DNA, 100 bp, Homo sapiens
tcaattgaccgagaaatgctagaaaaattgactgtatcctatgatgaagcagcttccgacttcgactccttaccttaaaagatgctggagtcatatgtaa

SEQ ID NO: 217221 - DNA, 75 bp, Homo sapiens
accagcaccgaagcctagaaaagtagagttatctgaatcggagagagcaggagattcggatgggtcagatggcta

SEQ ID NO: 217222 - DNA, 100 bp, Homo sapiens
caggatcctgcaccgggtggtggctgggaatttccccccaaagtagagatgctaagccaaatccagaagaacccatagatgaagatgaagatattcaaac

SEQ ID NO: 217223 - DNA, 100 bp, Homo sapiens
cctgtcaggagttcattgcaaatctgcaaggggtaaatgagggtgttgatttctccaaggatctgctgaaaatgtgccgtttgggggtgctaaagctggt

SEQ ID NO: 217224 - DNA, 100 bp, Homo sapiens
catttataccgtctgagggtagcagctcgaaagtagaagaaaccagcatctcagacatgtcgaaaaagatgttttgatccctaaaataatgagagaaaag

SEQ ID NO: 217225 - DNA, 89 bp, Homo sapiens
ctgcatcaaagaaggagccaccgccaagttcgaagggcgggtgctccatacttgcttgcagtgcctacgtggctctggctttgggtgat

SEQ ID NO: 217226 - DNA, 100 bp, Homo sapiens
cagctgcctcagttcttagcgcaggtcagctggccgccggcacctgtgagattgtgaccttggaccgggacagcagccagcctcggaggacgatcgcccg

SEQ ID NO: 217227 - DNA, 75 bp, Homo sapiens
actggctgataacgaagcagctattgtccaggagaacagtcgtgaagccctggcagaggcagccttggagagccc

SEQ ID NO: 217228 - DNA, 97 bp, Homo sapiens
actaagaagtaaaattacgaactcactgagctggaagtcattcaacgggaattgaatagtcaacgaaggcttgaaccaacctacggatgactcgtgc

SEQ ID NO: 217229 - DNA, 100 bp, Homo sapiens
tctgcgcacgctctaccacgagcacatcatcaagtacaagggctgctgcgaggaccaaggttggatggcaagcatgtggtgtttggcaaagtgaaagaag

SEQ ID NO: 217230 - DNA, 100 bp, Homo sapiens
ctgggagcttgctgcagcttcagctctggcaggctgccctgagcacgctcaaccccaaccccacggacagctgtcccctctacctgaactacgccaccgt

SEQ ID NO: 217231 - DNA, 75 bp, Homo sapiens
gcaactgtacccaaagtcacagtcatcaccaggaaggctcagaggaataacgaggacatttccatcatcccgcct

SEQ ID NO: 217232 - DNA, 75 bp, Homo sapiens
gtccatgcctcttaagaactcttttcgaggaactatccggtcagtttgctgagaacgaaaccaatgaggtcaatt

SEQ ID NO: 217233 - DNA, 49 bp, Homo sapiens
tccatgaacagcaagggctgcaaggtgcccctgggcgctgggattgctc

SEQ ID NO: 217234 - DNA, 90 bp, Homo sapiens
gctggaggagaaggctatggaagagctcaaggagatcatacagggtcttctaagtcagagacatcaaaacctggaccttctggattacag

SEQ ID NO: 217235 - DNA, 51 bp, Homo sapiens
attcgcagtggtcgcttcttctccttggtgtcgcacctccttcttttgtag

SEQ ID NO: 217236 - DNA, 82 bp, Homo sapiens
caacgcctttcccggagagtacatccccaccgtcaattctgtggtgttcttggtcacacatttatggagtttctgaagggca

SEQ ID NO: 217237 - DNA, 100 bp, Homo sapiens
gagatttatggattcagcacaagtagcagttgacaggactgaggtgattcgcacctgcataaacccagtgtactcaaaactgtttactgtggacttttac

SEQ ID NO: 217238 - DNA, 51 bp, Homo sapiens
ttggaaagcatctgtgtggtatggcaacagtgcgaagaatttatatatggg

SEQ ID NO: 217239 - DNA, 83 bp, Homo sapiens
gcagcagcgaaggtggcggcggcagcagcggcagcggctcattgctgggagcctggtatattcctatatcactttcactgaag

SEQ ID NO: 217240 - DNA, 102 bp, Homo sapiens
gtagcaagaaggaaatgtctaaaagagatggcaaggagaaaaaagacagaggagtgacgagggtgtcagaaatggctgtttctgagctacctggtaacccca

SEQ ID NO: 217241 - DNA, 74 bp, Homo sapiens
cgccccctatcctatccgcaaacagtgtggatgtggaagcagccaagcgggcagaagaggaattgctccttcat

SEQ ID NO: 217242 - DNA, 97 bp, Homo sapiens
taagacgccgggactccctggaaacctagaaatggttcattcctgaatctccccgatggctgatatcccagagaagatttagagaggctgaagatat

SEQ ID NO: 217243 - DNA, 95 bp, Homo sapiens
cggagcccgagctggaggaagcccccaggtgccaggatctgcccggatccccaacctgcccccgacgctggccaaatcgcaggtgagcagtgtgc

SEQ ID NO: 217244 - DNA, 98 bp, Homo sapiens
cagcttcttcagttccaggaagatgcctttgggaagcatgtcaccaacccggccttcaccaaactccctgaggatctcctgatgcagtccagcaaaga

SEQ ID NO: 217245 - DNA, 100 bp, Homo sapiens
tcgaagaatgcaggattatcaggattcctgtattttacattctctcagtgttcctgaagaagccatcagtccaggagctccagagattatattggggttg

SEQ ID NO: 217246 - DNA, 50 bp, Homo sapiens
tggttccaagtattccctatctagatgagcgtgaagccgtgcagaagaag

SEQ ID NO: 217247 - DNA, 100 bp, Homo sapiens
gcaaacttgctacaatggcaaaattactggaaacacctatttctaacttaccagggcagggtgcgaagcatcctccgggaggtggcagccagggagagcc

SEQ ID NO: 217248 - DNA, 50 bp, Homo sapiens
cgtgatcgtgctgggcaccggcctgacgtagagatgaggtttcaccatgt

SEQ ID NO: 217249 - DNA, 83 bp, Homo sapiens
cgggatcaggcgcggcggcacccccaggccaggggcacctctggtggggcagaaggtgcctctgagcctcggaacatgatcta

SEQ ID NO: 217250 - DNA, 82 bp, Homo sapiens
gatgtggtccaaggaagaaattgatattttgatgaacaatattgaacgctatcttaagtacttggaccatgagactgtttca

SEQ ID NO: 217251 - DNA, 75 bp, Homo sapiens
cctgaaggatggggaggagcggggggaggaggacccagaagcctcgaagcggaggatccctgtgtcccagccggg

SEQ ID NO: 217252 - DNA, 74 bp, Homo sapiens
ggaaatcctaatgacagtctccaaattcgcctccatctgtaccatggcctccggtgtggctgtctctgatggtg

SEQ ID NO: 217253 - DNA, 98 bp, Homo sapiens
tcatttaatgcataaaaactgcaatcatttttcttcagctttatcagagcttcttcgtgatcaatttaattataaaccaattttgacaaaaaagcagt

SEQ ID NO: 217254 - DNA, 75 bp, Homo sapiens
gggcggtgccggcgccggagacgatgccgttcaggttcaggagaagtggcacctggtggaggacctgtcgcgact

SEQ ID NO: 217255 - DNA, 75 bp, Homo sapiens
tgatacagcaggcgctcaccatgttccctggagggaaatgtttcaacgtgcgcaagcgttgcggcggcgggcaga

SEQ ID NO: 217256 - DNA, 82 bp, Homo sapiens
caaagttttgcagatcttcaacaagaggacccaggagaaattcgccctcaaaagatgccctgtatccaagcccaatatggga

SEQ ID NO: 217257 - DNA, 74 bp, Homo sapiens
cctcaaaatgctgtggctcttcttccagagaatgacacaggtgaaaggacacattcagctaacgtattttagca

SEQ ID NO: 217258 - DNA, 75 bp, Homo sapiens
cctgcagcggagcccacgagaggcagcgccatggcggagcagacctactcgtgccgctgtgattggaaccaggct

SEQ ID NO: 217259 - DNA, 50 bp, Homo sapiens
accagttcgaatgcctaccaaggaaaatggaaggtatgggcgccgcaaac

SEQ ID NO: 217260 - DNA, 82 bp, Homo sapiens
catcatcacaagaagaagggtgcatacagcatgcagatcgccaaactgaggcagcaactacaacgcagtaaacagagtagtc

SEQ ID NO: 217261 - DNA, 98 bp, Homo sapiens
tatcagagaatgagttaatctcctcagaaatcactaaatactactctgaggggcttagaaattaacaggaggtcctgctgtactagccaccaaagcag

SEQ ID NO: 217262 - DNA, 100 bp, Homo sapiens
ctggcgggcataccagcgggccctggccgctcacccgtggaaagtacaggtcctgacagctgacgcccagcggcagcaggatgagtgcggaggcaagcgc

SEQ ID NO: 217263 - DNA, 100 bp, Homo sapiens
aaaacatgggagaagagggatatgaagccagcagctaacactgggaaagttcagatcatctctaataataggtcttgtccaataagcatgtggctcctga

SEQ ID NO: 217264 - DNA, 80 bp, Homo sapiens
ggcttcgtcggcttcttggtgccttggttcatccctaagggtcctaaccggggatttgaagaacccaagtgattcagcag

SEQ ID NO: 217265 - DNA, 100 bp, Homo sapiens
cagagggccaggcgccagccgtggggggtcccccgtcaaagcttctaggttctggccactcgctctggtgggaccctcgtgcttgtggggctgggctctg

SEQ ID NO: 217266 - DNA, 75 bp, Homo sapiens
atttctcctattgaggagtcaacaacagaaactgttcatacttggtgcgctgtggactcttgtgataattaacca

SEQ ID NO: 217267 - DNA, 90 bp, Homo sapiens
agacgcagatgtggacttgaaagaagctgcagcggaggaaggcgagaaaataaacagagttgtctttgttggaaactttttacgtgtcaa

SEQ ID NO: 217268 - DNA, 75 bp, Homo sapiens
gccgatccagcctgcggagcctgtggggcaggacggctgtcctcagcgaggggccgtgcacccgctcctgagcag

SEQ ID NO: 217269 - DNA, 74 bp, Homo sapiens
gagcgctcgatggaacctcatcccagccacctggtttccatcgggcctatagttccccactctacagcaaccag

SEQ ID NO: 217270 - DNA, 83 bp, Homo sapiens
cgacgaggatatcgtgtctggagcagtggagcccaaagacccctggagacatgctcgagatgtctttttaatgctaaagaagc

SEQ ID NO: 217271 - DNA, 75 bp, Homo sapiens
acaggaggcagcagacggacatccaggcccagaccgagccataattccagaaatggagtggacgagccaggccct

SEQ ID NO: 217272 - DNA, 75 bp, Homo sapiens
ctgcactccaaaggtgtatttcaccgcgacctcacatccaagtaaaatgatcaacctgtcagtgccagacacaat

SEQ ID NO: 217273 - DNA, 90 bp, Homo sapiens
agtcactgcactacagaaaaagactcaaggctatttaggggaagccatatgtttttgaccgtgtattccccccaaacacgactcaagagc

SEQ ID NO: 217274 - DNA, 74 bp, Homo sapiens
aacccgcaccaagctctgctccacactgccaaccggccagaggacgagtgtgcctctgcagggaagaaggccag

SEQ ID NO: 217275 - DNA, 83 bp, Homo sapiens
tggaggagaggttcaaccgcgccctggccatcgctcaggagatatacgcggacctggtcgaggattcttgtttgggattctgc

SEQ ID NO: 217276 - DNA, 90 bp, Homo sapiens
gagagagcgcgagagatggagatgggcagacggattcatttagagctgcggaacaggacgccctctgataatgaccagtcaacaggggac

SEQ ID NO: 217277 - DNA, 103 bp, Homo sapiens
aggaaggttcttaaagaagtcagggtgcaggatgagaacaaccaaattgtggctactaatttgccccctgaagatcaagatggctctggggatgactctgaca

SEQ ID NO: 217278 - DNA, 75 bp, Homo sapiens
gttggcaaaagtgaagcaagttcacaaagaagtattaaactgtggttgaagctccattcataccaaagtttagag

SEQ ID NO: 217279 - DNA, 100 bp, Homo sapiens
gaatgccaaagtaaccagatctaacatgaggagtggaatttgaggcctccccaaccacctaccaaaaaaggagggtgaaatgaaaggaagaagaaaaact

SEQ ID NO: 217280 - DNA, 100 bp, Homo sapiens
cgcagagtctgcggacccggcgccgaggcggccacccgagacgcggcgcgcacgctccggcctgcggctgcaggaggagattcagttgaaggaagaagca

SEQ ID NO: 217281 - DNA, 74 bp, Homo sapiens
cataatcttcatggagactctgaagtagcacacacatgccctcttggttctgtttctttgaagaaccccaggaa

SEQ ID NO: 217282 - DNA, 97 bp, Homo sapiens
aaaacaccatccaagcagccaggcagtatcgggagcaggaaagccagtgttgtggaccctagcacagaggatcgaatcatcaatttagttgttggca

SEQ ID NO: 217283 - DNA, 97 bp, Homo sapiens
agaggaagccttgaggacctactcacagataggaattgaaggtgccttcgaaacatctgcaagtttttagtcttgctcatcccactcttccttttac

SEQ ID NO: 217284 - DNA, 100 bp, Homo sapiens
gtacaagcattcctcgtcagcaacatgctcctagcagaagcctatggatctggagcaatgcaaacctcacaagaggcctgtgtgtggcagtaatggcaag

SEQ ID NO: 217285 - DNA, 100 bp, Homo sapiens
aaggagttcgagcagatcgacaagtccgggagctgggcggccatttaccagatgcagaagataaatgtgtaatagaaggcaacaactgcacatttgttcg

SEQ ID NO: 217286 - DNA, 98 bp, Homo sapiens
acgagttcaacgcccacctggtttgtcgcatgtgctgtatggccatgcctttcttggacatccagaaaaggttcggccttaacatagatcgatggttg

SEQ ID NO: 217287 - DNA, 101 bp, Homo sapiens
agaggctggactcggattcgttgcctgagatcgcccaggaccacaccgcagcgtaactgcaggcctctcagcgaaaaagggggaaagcaaagacccgggtg

SEQ ID NO: 217288 - DNA, 74 bp, Homo sapiens
tcccgagtggctgggactacagctggttcgatgcccagaactgaatgctgtgctccagctgtggcctcaccggt

SEQ ID NO: 217289 - DNA, 100 bp, Homo sapiens
gtgtggggccggaggagtcagctgtgtgtccagaacgtgccatggagacgcttaacgaaacaagtgttgaaaatgttaaaggctgtgctgaagaagagcc

SEQ ID NO: 217290 - DNA, 100 bp, Homo sapiens
ggaaggaacctgggatggttgtgagggaagggacaagaagatactgccctgaacatgccagcagaagcattcaccaactgacatgtgccctgaaagaagg

SEQ ID NO: 217291 - DNA, 90 bp, Homo sapiens
caaagaattgagaaaattagtattgcagaaagatgacaaaggcattcatcatagaaagcttaaggacatagctcgccttttgcaagaaaa

SEQ ID NO: 217292 - DNA, 101 bp, Homo sapiens
ttgcttattcccccaccatgggactctacctggggatatacatgcatgcaccaaaacgaggacaggtgggatatgagcctcttcctccaacaataggacga

SEQ ID NO: 217293 - DNA, 75 bp, Homo sapiens
acagagaaggaggaagtaatggggctgtgcataggggaggttggatggcaagcatgtggtgtttggcaaagtgaa

SEQ ID NO: 217294 - DNA, 98 bp, Homo sapiens
acagagttcagaagactttaacatgggctcttcctctagcagccagtatactttctgtcagccagaaactgacaaaaagtaaccttcctgaagaggac

SEQ ID NO: 217295 - DNA, 75 bp, Homo sapiens
cgcttttccaagtacatgcccagcgtcaaggacggagaggatgaggagggaaaagaggatgggagagaagaaggc

SEQ ID NO: 217296 - DNA, 100 bp, Homo sapiens
gagcgagctgagtggttgtgtggtcgcgtctcggaaaccggtagcgcttgcagcatgaaattgttccaactgctggtgttctgcaagatggagccaggag

SEQ ID NO: 217297 - DNA, 90 bp, Homo sapiens
ccccggaaaacctaaccatgaagacttgaacttaatacagcaagaaagaccatcaagtttaccaaaaacagaatcttggcattgtcttcc

SEQ ID NO: 217298 - DNA, 143 bp, Homo sapiens
gaggtggatctgacagatgccagcgtagctgaatccagtaccaaaaacgtcaacaacagttttacgcatgcttttcacttccactgcatctctcgctggctcaaaacacgacaggtgtgtccattggacaacagagagtggga

SEQ ID NO: 217299 - DNA, 98 bp, Homo sapiens
acaggcggtggaggagctcacagagcagcttgagcagttcaagagggaaagaccacagcaagattctttcattcgtctcctcctagcctgggggacca

SEQ ID NO: 217300 - DNA, 98 bp, Homo sapiens
tttcggatgatgccttcaatactacctttatttccaccataggtgtggtggacacaggcctattcatcaacatggctgagagagtctactttgggatg

SEQ ID NO: 217301 - DNA, 83 bp, Homo sapiens
gtcacggcgtacgccctcatggggaaaatctccccggtgactttcagcccaagaggagagggtttgaccgcttcggaccagat

SEQ ID NO: 217302 - DNA, 98 bp, Homo sapiens
caacagaataatgctacaaagacatttcgagaattttgtggacctgctgatcctggaggaagaaagggaagattttgatactagcattgagagcaaag

SEQ ID NO: 217303 - DNA, 75 bp, Homo sapiens
cagattgttcctaaaccagaagaggaggttgcccagaagaaaaagaaggcagacggtaacaagtactccttgctg

SEQ ID NO: 217304 - DNA, 83 bp, Homo sapiens
ctctcgtcttctgcggctctcggtgccctctccttttcgtttccggaaacatgagaggtggagaagagcgagtacttgagaaa

SEQ ID NO: 217305 - DNA, 82 bp, Homo sapiens
cagggaatggggaggaggtcatcagctttgctactgtcacaggtgttggagcgggccggagagaagtagagtgggctgcgag

SEQ ID NO: 217306 - DNA, 100 bp, Homo sapiens
ctgccactgtcactcctcagaaaggaaagctgtgtgaagagacaaagggagaatgccatgtgaagatggaggatcggagtgatgcgtctacaagccaagg

SEQ ID NO: 217307 - DNA, 75 bp, Homo sapiens
gagctgtatggccgccgtcgcaagaagattcagtggtcccaatttaaaggctattttattttcaaactggagaaa

SEQ ID NO: 217308 - DNA, 83 bp, Homo sapiens
cggaacccgagctggagctgaagcgcaggctgcggggcgcggagtcgggaggtgagaagccctaccactgcaactgggacggc

SEQ ID NO: 217309 - DNA, 106 bp, Homo sapiens
agactagccactttgcattgactggaaacaatggcatttacagaaagagtcaacagcagtggcaacagaggctgggaggcggcagaatgcagccagaggagggcac

SEQ ID NO: 217310 - DNA, 98 bp, Homo sapiens
cgagatgatcaaacgcctgaagatccctgcatgtcactgagtccaccatgctttacagaagaagacagatttagtctggaagctcttcaaacaataca

SEQ ID NO: 217311 - DNA, 100 bp, Homo sapiens
gcgcagcccagcgcagccatgagtacttctttgattccagagtattaacagatggagaactggctcccaatgatagatgttgccgtgtgtgtggaaaaat

SEQ ID NO: 217312 - DNA, 98 bp, Homo sapiens
tccatggtcttgcctccttgcagatgctgcagttggagaagaaacttgaacgtgaacttgaggatgatgcacgagttattgcttgccggttccctttc

SEQ ID NO: 217313 - DNA, 100 bp, Homo sapiens
caggtgtgcgccacaacacccagggctaagttctaaaaacatcagttcatctccaagcgttgagagtttgcctggaggaagagaattcactggctctcca

SEQ ID NO: 217314 - DNA, 100 bp, Homo sapiens
gtctgctcttgccctggctttttacctagcaaagacaggtgcagttcaggagcagatgagatccaagggaaaccgagataggccatggagcaattctagg

SEQ ID NO: 217315 - DNA, 50 bp, Homo sapiens
cggagcttgacccgtccatcgctgtggtagcagatgatggctatggagtt

SEQ ID NO: 217316 - DNA, 75 bp, Homo sapiens
aagcaattgagcaggctgatctactgcaggagggctggttgatatgtgaagagccaacctgtcgcaatcgaactc

SEQ ID NO: 217317 - DNA, 100 bp, Homo sapiens
ccacacttgccattgtgaaaggagagacagttccacttgatgtcttgcagatcaaggaggctattctgcagaccatcctgttattaaggtcttctggaga

SEQ ID NO: 217318 - DNA, 100 bp, Homo sapiens
cccaacaagaggaaagacacacctaccaagaagccagtcaagcggccagatgtgaagttcatttccaatccgccctccatggtggcagcggggagcgtgg

SEQ ID NO: 217319 - DNA, 50 bp, Homo sapiens
accaggaggccaggggtgtcgccatgcatcctggtggggaagaagtttta

SEQ ID NO: 217320 - DNA, 98 bp, Homo sapiens
ggaaggcttcaaaggctgtcgcaaggaggaaggtgatggcccgctccctctccccacccccggagctggaagaaagggatgtggccgcatactcggcc

SEQ ID NO: 217321 - DNA, 83 bp, Homo sapiens
gagctgcaagccggtgcagcagccttcagcttttggcagcatgaaagttagcaattatgacttacaggtaggcattgtagaag

SEQ ID NO: 217322 - DNA, 100 bp, Homo sapiens
ctggtgaaattgccggcaagagggagttaaggacattccaggcagaggcaaggtgtctgacttccagcaactgctggcctgtgccagggtgcaagctgag

SEQ ID NO: 217323 - DNA, 99 bp, Homo sapiens
cttggatccacttccccatctgtaacgaggtgttgagacgagagaagccgtgtggagacccgccttcgttcccacacaccatcctgcagggccgcaccg

SEQ ID NO: 217324 - DNA, 75 bp, Homo sapiens
cgaaaacgtggttgtagagttccgtgactcccagagggagaaccgaagattacaggaggccagcatgaggttgga

SEQ ID NO: 217325 - DNA, 101 bp, Homo sapiens
tgcattctcagtgctacggaagagtgacagcatcctgagttgggcagaggggagctggtctttcagccaccattgctaggagtgagcatgagatttctgaa

SEQ ID NO: 217326 - DNA, 75 bp, Homo sapiens
ctgttgcgatggcgcagaaaccccgttgacaaggcactgctttttcatgacggttgcataccctgtcctgagggc

SEQ ID NO: 217327 - DNA, 100 bp, Homo sapiens
ctttttttcaagccacagatctgccctatgatattgaggacgctgtcatgtactggataaataagctccgacagttagttaatatgtgcatcaacccaga

SEQ ID NO: 217328 - DNA, 100 bp, Homo sapiens
gttcttggcaagagaggcatcctccttgaagtatttggctgaggagttttcaatcccactgtcccctttcctccaacccaacggcttactttcaaggaag

SEQ ID NO: 217329 - DNA, 96 bp, Homo sapiens
gtggacgccctgagctcccattaggagccgctggctgcggcagcaggggactagcgtgagaggttatggaaacgtggtggagttgcgcattaacag

SEQ ID NO: 217330 - DNA, 83 bp, Homo sapiens
ccagaattggacccgaaaccatgcctcactgtcctaggcaaggttttgattcccaccatggccatcacccagtttcggttatt

SEQ ID NO: 217331 - DNA, 96 bp, Homo sapiens
ccttgctgcactttattatgccggagaatactatactggcaattgctggagaagattttgcaattgttgcttctgatactcgattgagtgaagggt

SEQ ID NO: 217332 - DNA, 74 bp, Homo sapiens
gttattgaagctgtttatagtagactgaatccacatagagaaagtgatgggagttatgcccagccaagtcttca

SEQ ID NO: 217333 - DNA, 100 bp, Homo sapiens
tcacctgtacttggtcatgcagctatcctgaggaggatgaaggggctggccctggaggccgagagtgagctggagagacaagacgaagccctggatggcg

SEQ ID NO: 217334 - DNA, 98 bp, Homo sapiens
ctgctcagtcttttgaatgatttccactctggaaaacttcaagcatttggtggctgactgttcttgggatgaaacaataaagatctatgaccctgctt

SEQ ID NO: 217335 - DNA, 74 bp, Homo sapiens
ccaacattgaattgacctcgccacgcatgttcacctatgatcaaatcctttttatgaacctaaatcaactcctc

SEQ ID NO: 217336 - DNA, 83 bp, Homo sapiens
tggacatggatgagcagtccaaagcatggacgatttaccgcccagccccacagagcaggtgttgccaatgctgcggttcgtgc

SEQ ID NO: 217337 - DNA, 90 bp, Homo sapiens
ctgcagagacagaattcctgagtgaacgaacagagcagctcctcttccatctccaggaatatatatgtcccagatgtgaatcaggcttta

SEQ ID NO: 217338 - DNA, 100 bp, Homo sapiens
agaagatgactgggacaggcacacacagaggcttcggctttgtggacttcctcaccaagcaggatgcgaagtgcacttgcccccgtggccgccatcatcc

SEQ ID NO: 217339 - DNA, 75 bp, Homo sapiens
gtcagcctcccctgtcccgaacgcagtgtgtggaaaggtatatgactgatgggatgttacttcgtgaagctatga

SEQ ID NO: 217340 - DNA, 100 bp, Homo sapiens
gtaaccgggacccggtgtctgctcctgtcgccttcgcctcctaatccctagccactatggaggtggtccaggccacgctggtggtcctggccttggccat

SEQ ID NO: 217341 - DNA, 100 bp, Homo sapiens
ccaggcaatgctggatagataccgaattcttatcacaaagatgaaagttttagacaaagccgatcaaacctcacctctctattagtgcagcccatctctg

SEQ ID NO: 217342 - DNA, 89 bp, Homo sapiens
tcagtacgcgaaggatatcggtttcattaagtcataccctaatgatcccagcaagataatgtcctgtcttctaagatgtgcatcaagcc

SEQ ID NO: 217343 - DNA, 90 bp, Homo sapiens
ctgaggcactgcagaaagtgggcctgagcctcgaggatgacggtgctgcaggaacccgtccaggtacttgaagaagcagaagctcaacat

SEQ ID NO: 217344 - DNA, 82 bp, Homo sapiens
cttgggacccaccgctgccctcagctccgagtccagggcgaggacccagatcaacttcactgtggccattgatttcactgcc

SEQ ID NO: 217345 - DNA, 100 bp, Homo sapiens
ctgacgaagcttggaagttgcagaaggaacaagaccctgcagatggagaagatcaaggctcgtttgaaggctgagtttgaggcacttgagtcagaggaaa

SEQ ID NO: 217346 - DNA, 98 bp, Homo sapiens
gggcgctgctggcgctctggctgtgctgcgcgacccccgcgcatggtcccgcagcccccggaagccaatagactccctcagggactctcggtccctca

SEQ ID NO: 217347 - DNA, 74 bp, Homo sapiens
aaaatggctctggtgaaactggcaaaatcaaaagtggaccaggtacaggacatagttactggtaaccctacagt

SEQ ID NO: 217348 - DNA, 74 bp, Homo sapiens
gaacttcagggtttccaccgttcgttcaaggcgacggagcactgttccgggagcacggtctgttgggtgtgacg

SEQ ID NO: 217349 - DNA, 98 bp, Homo sapiens
tacagcagagacgtcatacttggaaatggctgcaggttcagactgccactgcagagccccgccatggaagacacgccgttggtgatatcgaagcagaa

SEQ ID NO: 217350 - DNA, 99 bp, Homo sapiens
atagactgcccttgcaacaacatgaaacagcatctcagacttctttcccagatgtttataatgagggcacacagaaactaattctgaagcaagccctta

SEQ ID NO: 217351 - DNA, 100 bp, Homo sapiens
ggaaaccatgggttattgcagtggcaggtgcacgcttatctttatctgtggcatgcaactgaattagacctttacgagaagcacagttttgtcttcagtt

SEQ ID NO: 217352 - DNA, 100 bp, Homo sapiens
tgtttcctcctactcctctttcacctgccaggttcaagctgggatatgaagaacaacagcctgaggttccaattctttatcatgatgtaacatccctttt

SEQ ID NO: 217353 - DNA, 83 bp, Homo sapiens
tatagatgccagtcataatagatttcgagacaacagtggccttctgatgaatactttaaggagtgcatccgccccaacccttt

SEQ ID NO: 217354 - DNA, 82 bp, Homo sapiens
gctcttcttggaaaaccagatccagaaactggaggagtcccgctcgaagctaggtgtgaaatctaagaatcccctgccaact

SEQ ID NO: 217355 - DNA, 75 bp, Homo sapiens
gccgcgctcccctcgcccgcccgggccgccagctgctcagatggaagataaaaagccctttatcctgtcttccat

SEQ ID NO: 217356 - DNA, 98 bp, Homo sapiens
cgactgcctcccagaacaaagtgggaaagggaagcttagcccgccgctgccgcctccgagcagcccgccaggtatcattggaacatttcaagatcatc

SEQ ID NO: 217357 - DNA, 75 bp, Homo sapiens
cacgaggttcgcccgtgaccacgcgggagcccacgccgcgcctgcaggagggtacaggtttgcagattccgccag

SEQ ID NO: 217358 - DNA, 75 bp, Homo sapiens
cgcgcccggtgacggcggagaggcgccccccgcagcaggttacgggcaggacttgagtggcttcggacagggctt

SEQ ID NO: 217359 - DNA, 90 bp, Homo sapiens
gatcattggaaattgtgtgtccatcttggttttgagctctgctctgcctgtgatgtcgagaacactggccccaggctccccctccaccgc

SEQ ID NO: 217360 - DNA, 50 bp, Homo sapiens
aagaggctctcccagaaaagagcattaatcttatcactggtcatttagag

SEQ ID NO: 217361 - DNA, 75 bp, Homo sapiens
cgcccctggcctcgcgggccgtgtctccggcatcatgtgtggtactccaaagattcaggtttactcacgtcatcc

SEQ ID NO: 217362 - DNA, 75 bp, Homo sapiens
gcagattcctccgggcagcagggatctttaccttatatagtaaatctctgcccctcgacctggcctgtcgtatct

SEQ ID NO: 217363 - DNA, 100 bp, Homo sapiens
tcttattggtgtagctacagctgcagataccttagtgacaaagtttaatcagcttcctgttgagccttatcctccatttatgcctcggaggcttacagga

SEQ ID NO: 217364 - DNA, 75 bp, Homo sapiens
ctgactgctctaaacccttcatccctgtgtactgtgttgcatctgacagagagacttttccttgaccacccgcat

SEQ ID NO: 217365 - DNA, 121 bp, Homo sapiens
gcgacggcggaacccgtgggcctgtggactgcagcctcggcggtcagcagtttaaggaagaaatctctaaacgttttaaatcacatactgaccaacttgtgttgatatttgctggaaaaat

SEQ ID NO: 217366 - DNA, 83 bp, Homo sapiens
cggacgctctatgacgtcatcttgtacgggttctgttgcaaaatgtgaaaatgaaggtgaagtcctccagattccatttatca

SEQ ID NO: 217367 - DNA, 75 bp, Homo sapiens
aggcgaggttcccgcaccggataggacctagatgtgaaggctggtggaggctgtgtaatgaccattggagaaatg

SEQ ID NO: 217368 - DNA, 90 bp, Homo sapiens
gatgctttgctctgtggacccgtgagcaagcataagctgccaaaccaaggtttgtcaattaacagatgaacagatccatcacctcatgaa

SEQ ID NO: 217369 - DNA, 90 bp, Homo sapiens
acgtatgacgaagtgaaagctcggctccagaaattcattcacaaacctggcaggctttcggacagtcctttctccagcccgacatccacc

SEQ ID NO: 217370 - DNA, 89 bp, Homo sapiens
ccaagagaggctaaaggaagaacaacagatggatcccttcagaaccactcacgaattcttgtttggtgcccttgctgaactggttgata

SEQ ID NO: 217371 - DNA, 79 bp, Homo sapiens
gggtggcttacagacgctgccagcatcgccgccgccagggactttgaacatgtcggggatcgccctcagcagactcgcc

SEQ ID NO: 217372 - DNA, 98 bp, Homo sapiens
tgaagaccacttacaaggcttccaccagcaagtgttctaagaacggaagcatctgggctggatggaatttagcatcaagcagagtcccctttctgttc

SEQ ID NO: 217373 - DNA, 100 bp, Homo sapiens
gtacttcggcgcccccggtgcctacaactggaaaggctgagcgtcaagctatcaacacaatagtccaaggatcagcagctgatattgtcaaaatagccac

SEQ ID NO: 217374 - DNA, 146 bp, Homo sapiens
cctgaccttaaagatgctgaagctgttcagaagttcttccttgaagaaatacagcttggtgaagagttactagctcaagaatacagattctgttcatcttgctctgaaattaaataattctgaactcatggggagaaaactcagag

SEQ ID NO: 217375 - DNA, 82 bp, Homo sapiens
gcccctgtcccctacgtcctacatgagagggaagtcttgccggaccatcacctttgagcagttccaggaggcgctggaggag

SEQ ID NO: 217376 - DNA, 95 bp, Homo sapiens
accagtcccaagtcgtccccctctccgccccccaggaggggcgagagggagccgcagctgatgtcagagactctccaacatgtgccttctgacca

SEQ ID NO: 217377 - DNA, 100 bp, Homo sapiens
tcaacagagtgatggagaaaggttcgaatcctcactatggatgggctcattgaggacattaagcatcggcggtattatgagaagccatgccgccggcgac

SEQ ID NO: 217378 - DNA, 92 bp, Homo sapiens
cttagctgtgctcgcgctactctctctttctggcctggaggctatccagccctggtccgacccccagtggcactaacgtgggatcctcaggg

SEQ ID NO: 217379 - DNA, 114 bp, Homo sapiens
gtcggaggtctcatctttgaactactgccggagcttctgccagactgaacattcttcacgatctgaaaggaaaagaagagattctttcgggatgtttgacggttatgatagctg

SEQ ID NO: 217380 - DNA, 90 bp, Homo sapiens
ggccactatggaattctaatttgaaccatgtttggattgaagccgcctctgtattacttaccaggtgtgaatgacagaggtggtgccatc

SEQ ID NO: 217381 - DNA, 100 bp, Homo sapiens
tgcacaagctgctggacaaggaccctgacctgcctgtcgtcgtggtggccaacaagcagttccaaaagctgagacaagatcttgaaatggtactgtccac

SEQ ID NO: 217382 - DNA, 98 bp, Homo sapiens
gagaggaaaacagttacagatttttgttatcttctggataaatctaagcaactgttcaatgggttaaggtaggtgagctcgtgaaacaatatgaagag

SEQ ID NO: 217383 - DNA, 83 bp, Homo sapiens
gactgccgggactggtcagatgaacccatcaaagagtgcggagtccttcaataatgttaaacagtggctgcaggaaatagatc

SEQ ID NO: 217384 - DNA, 83 bp, Homo sapiens
cggacgcagtgatttgctccccctcgtgcagcaacccccacacccagcaccagaatgatatggaacctagcaaagctgttcca

SEQ ID NO: 217385 - DNA, 143 bp, Homo sapiens
ggcctcggaggctgctcaactccaagcagctgggaatgatcgaggcaagacctgtaggaggatattcttcatgaaggagctcatgaaagacttcttagagaagagagacaaggggaaacttctcatacagagaagtagaagac

SEQ ID NO: 217386 - DNA, 83 bp, Homo sapiens
aaggcaaaggattcggatttattaagcttaatattatccagcaatgcaaatgaacaaactataactacacacagctgcatgga

SEQ ID NO: 217387 - DNA, 100 bp, Homo sapiens
atttacttgaaatgaaaggagattccaacctacttcaggtggtcaaacctgtcctgacacccagaggtctgcatgaggggtggccactgaaggaggagtt

SEQ ID NO: 217388 - DNA, 83 bp, Homo sapiens
ctggcagcactcaccaactacctgcagccgcagctggactggcaggcccgagggcgagtattttaaccacatcagcatcgagg

SEQ ID NO: 217389 - DNA, 133 bp, Homo sapiens
cgctcaccgcagacgtggtggctgcagtcagtcttcccgagtgagggatttcgccgcccgctttcaggcccgtgaaccagtgacgacctgttccaggactcggaaggacgagagggttcagaggctgtggagg

SEQ ID NO: 217390 - DNA, 100 bp, Homo sapiens
aatccatgttgaaaaatctatccaggattcatcccgtgtcaacaatggtaaaggctcagcacaaacactgggaactggcggggaccaaactgggagatat

SEQ ID NO: 217391 - DNA, 100 bp, Homo sapiens
gtggtctcgaatatggcatgtgattggagatcacttcaataaggctgtgaagctcaccagctctcgaacccagctaccttatgaatactattcactgccc

SEQ ID NO: 217392 - DNA, 75 bp, Homo sapiens
ttttgatgacaggagttgcttttgtacaggaagaccaacactgtcatctgaagttggaatcatcatctgtgatat

SEQ ID NO: 217393 - DNA, 100 bp, Homo sapiens
cggcgctcccttgtcacgcctcgggaagcgcgcacctgccaagcagaatcagcatgattcttcagaggctcttcaggttctcctctgtcattcggtcagc

SEQ ID NO: 217394 - DNA, 96 bp, Homo sapiens
ccggaacggcggcgacaagggtgttcccgaactagagtggaactccatccggcacaacctgtcactgcatagtcgattcatgcgggtccagaatga

SEQ ID NO: 217395 - DNA, 96 bp, Homo sapiens
ttattttggaggaagtctgtatgctagacaaggaggaggaggagaacggggctgaggaggaagaagaagaaactgccgaggatggagaggaggaag

SEQ ID NO: 217396 - DNA, 100 bp, Homo sapiens
cactcagctcactcgggcctctggccaacagggcatggggacatcatatcagcggggatctgacgagcttttctctacttgtgtcactaacggaccgttt

SEQ ID NO: 217397 - DNA, 100 bp, Homo sapiens
tgggaacctactagatggacaggctgaggtgtttggcagtgatgatgaccacattcagtttgtgcagatggacaatctaaaatatgtaaatcagttgaag

SEQ ID NO: 217398 - DNA, 100 bp, Homo sapiens
acacattgaagcacttaccaaaaaaaagagagagcactttaggcaacttctggatgaaacttctgcagtggttgaagatggatatgaattttttgcaaag

SEQ ID NO: 217399 - DNA, 98 bp, Homo sapiens
tgcttcgtttttcgccgtcatgggcgcctcggccgccatggtcttcagcgaacccagcgggtgccgcttctccacccgaggcttccacctccaacgag

SEQ ID NO: 217400 - DNA, 100 bp, Homo sapiens
gaggcctcaccgtgagaccttacaaagccggctttgtgtccctggtgatgttggaacattaatgatggaacatggccaaacttcagtcatgatcctgaag

SEQ ID NO: 217401 - DNA, 82 bp, Homo sapiens
aaccttgaaggcatcgtgtggcaggaaacagaagatgtaaggaagagcccaacactgctggaagtgagcatgccccatttca

SEQ ID NO: 217402 - DNA, 98 bp, Homo sapiens
tctgaagcgagcgtcttcgatggtctctaattaacagaagatggcaaagcccagccacagcagctatgtccttcagcagctaaacaaccaaagagaat

SEQ ID NO: 217403 - DNA, 75 bp, Homo sapiens
tcattactaacaggatattcctcatgacattgctgtctgccggatcgagctgggagatgtgacaccacacaatat

SEQ ID NO: 217404 - DNA, 75 bp, Homo sapiens
caggtgtaagcgcagaaagcaggcgaacccgcggcgcaataacgtttgaagaaaacaggtctgaaacaaggtctt

SEQ ID NO: 217405 - DNA, 75 bp, Homo sapiens
aataaaaggcctgacatatctgagggagaagcacaagatcatgcacagagaattggatttgcaactcaaaaccaa

SEQ ID NO: 217406 - DNA, 98 bp, Homo sapiens
caatccaaagagacaaatggaaaccagtcaactgatattgatagtacattggccaacttcctagcggtggtgatctttgtgaagtctgtgcagcggtg

SEQ ID NO: 217407 - DNA, 100 bp, Homo sapiens
cacaccggagacttttggggggaaactaggtcgatggtcggcggcgcccggatgggcagctgaggcatccaccatgttacgagcctccttggcacccgtg

SEQ ID NO: 217408 - DNA, 146 bp, Homo sapiens
gtggatgaacatgtgcttggtgtcgtttttccttgagctgaacgtcttgcaacagtggccgcacgcatagggcagagcggcttgggtaaatccaccttaatcaacaccctcttcaaatccaaaatcagccggaagtcggtgcagcc

SEQ ID NO: 217409 - DNA, 51 bp, Homo sapiens
gaaaggcgatgttggaaaaagacggagagttggtaaaatattaaagaagat

SEQ ID NO: 217410 - DNA, 100 bp, Homo sapiens
ggggttcgggtgtctcgtgtgtgaacatcacaggaggagatgttaaagtaacccatcttgcaggacgacattgaagattggtcttctgttgatctaagat

SEQ ID NO: 217411 - DNA, 99 bp, Homo sapiens
gtgacagtaactgaacattggtctaaagtctttccaaaaggtcaaggttcacaagcatgcttgagagttcaaaccggcttgatgaagaacacaggctaa

SEQ ID NO: 217412 - DNA, 101 bp, Homo sapiens
ggctgagacgtcgtcctaatgcagtattctccaagcatgacgatgagtgtgtgatccccccttctccgagacgctgagagagcaggcattgcaggcgggaa

SEQ ID NO: 217413 - DNA, 74 bp, Homo sapiens
ccgcagccatggaggccaactggaccgcgttcctgttccagatgtcaagccctccaacatcctagtcaactccc

SEQ ID NO: 217414 - DNA, 96 bp, Homo sapiens
cgagagagcgcggccctcaggagcaaggcggacaaggagactggctttcacagaggtttgggttgggttcagttttcttcagaagaaggacttcgg

SEQ ID NO: 217415 - DNA, 74 bp, Homo sapiens
atgtcttcacgtggtctttaccgtttgttggagaaaaagataacactgaggttgcatatttaaagacacttacc

SEQ ID NO: 217416 - DNA, 75 bp, Homo sapiens
cattgccaaggtgaaggagcggctggagcccagaggcggggtttcaccatgttgcccagactggtcttgaactcc

SEQ ID NO: 217417 - DNA, 75 bp, Homo sapiens
aaacagatggttgcaaatgtggagaaacagcttgaagaagcgaaagaactgggcccactgatgatggtgaagaag

SEQ ID NO: 217418 - DNA, 100 bp, Homo sapiens
cagatccttcagcaaaagctgtccttacagaccagcatctcagacatgtcgaaaaagatgttttgatccctaaaataatgagagaaaaggccaaagagag

SEQ ID NO: 217419 - DNA, 100 bp, Homo sapiens
tgggcagggcctggggaatgcttttttatctcatattagtgcctgtgatggcatctttcatctaacacgttattttagtgtccgccaacaaattgactcg

SEQ ID NO: 217420 - DNA, 49 bp, Homo sapiens
gtgggatctgtaatagaaatatgtggtgaagctgtagagaaaaacaagc

SEQ ID NO: 217421 - DNA, 90 bp, Homo sapiens
gaaggggcgacgcctgtgagcttggccttggagcgaggctatcacaagctgcaccagcttctaaccgaaccccatatcatgtgaacctcc

SEQ ID NO: 217422 - DNA, 87 bp, Homo sapiens
gacgcattctgtggagttggaggaaataccattcagtttgccttaacaggaatgagagggagaactaatgccgacgtgatgaccgcc

SEQ ID NO: 217423 - DNA, 100 bp, Homo sapiens
gattggaggtgtcagtgttaaaggaacctctacaacgaaggtgaagccacggaagataaggtctctaattaacagaagatggcaaagcccagccacagca

SEQ ID NO: 217424 - DNA, 122 bp, Homo sapiens
tgaagatggacctgttgaactatcagtacttggacaagatgaacaacaatatcggcattctgtgctacgaagatccggggatttctttcacggtttgataatgtccttcccgtcagcctggc

SEQ ID NO: 217425 - DNA, 100 bp, Homo sapiens
ctcaaggcacaggtggcccgatcccagcaggacattgaaagccggagcggttgcagggcacacattactcggtgcagtcggacatctggagcatgggcct

SEQ ID NO: 217426 - DNA, 103 bp, Homo sapiens
attgacttccataagcagcagccactgttcgtctctggaggagatgactataagattaaggatgttggttcctgcaaacaagaactgaccctatcacctctgc

SEQ ID NO: 217427 - DNA, 80 bp, Homo sapiens
ctggcccctcgcgcgtgaggatctatctcagacctgtcatttactccatcctttatagtgatgctacaggacgaagagga

SEQ ID NO: 217428 - DNA, 100 bp, Homo sapiens
cagaaataaaggatggagaaaaatctgggacagtatcatcgagaaaggagaagaacactgtggacatctaattgaggcccacaaggaatgcatgagagcc

SEQ ID NO: 217429 - DNA, 104 bp, Homo sapiens
acctgctgcacccacgaatctgcccacccctcctgtaacccagcctgtttcacttcttgacggaagctcctcagtcttagagagttctgaaggtggatttctca

SEQ ID NO: 217430 - DNA, 75 bp, Homo sapiens
tggcaaccccctacatgaatcattacatgaagcatcaggtgaaacctttgtcctggggaatagtctggcccgctc

SEQ ID NO: 217431 - DNA, 50 bp, Homo sapiens
cagccttagccctagtgtagagggtgaaaagttcggaccctttgctggag

SEQ ID NO: 217432 - DNA, 90 bp, Homo sapiens
ctcgaagaaggcgagcagggtgcgggagagccccttgcagaagacgccgtacgagggttctcggaccagcagtgaccttcaaagtgagcg

SEQ ID NO: 217433 - DNA, 100 bp, Homo sapiens
attcatcaataatgaaatgctgactaaggaacaagggttacattttgccatctgcctttccagagtaagtggctctatgtgggcactgaacgaggtaata

SEQ ID NO: 217434 - DNA, 100 bp, Homo sapiens
tctgctctgccctggctgggccactacaggtactccaaagattcaggtttactcacgtcatccagcagagaatggaaagtcaaatttcctgaattgctat

SEQ ID NO: 217435 - DNA, 90 bp, Homo sapiens
cgccccaagcccgggcgccaccgctgccacctccgcgaggcctctggctgtacctggcagggagcagcctgccctgtctcacgctgattg

SEQ ID NO: 217436 - DNA, 115 bp, Homo sapiens
ctgccctggagcagttcgtgaacagtgtccgacagctctcagctcaaggacctgagagtcagtatactaagactgcccaggagattgtgaacgtctgttaccagacattgactga

SEQ ID NO: 217437 - DNA, 100 bp, Homo sapiens
agttcttcttcaagtctatggacgacgatttcgggtagaatggaagaatctcacttcaattctaacccgtacttctggccttctatccccacagtctcag

SEQ ID NO: 217438 - DNA, 50 bp, Homo sapiens
tcgacggggtggacggcgtgaagggtgaatttggagccgacggtcgcaag

SEQ ID NO: 217439 - DNA, 76 bp, Homo sapiens
acactttctcaagcactgtgatcttcaaatccagtaatgttaaagtagagactcagagtgatgaagagaatgggcg

SEQ ID NO: 217440 - DNA, 74 bp, Homo sapiens
tgcgtcacactacgacagtgagaaaggaggctttcctcggagacgggtggcatggggagcagctagaacaatgc

SEQ ID NO: 217441 - DNA, 51 bp, Homo sapiens
gaacgttttccggagttggaagcccttcagcgcctgctcctggtcatcact

SEQ ID NO: 217442 - DNA, 100 bp, Homo sapiens
aacgggcggcccgcgcggaggctcgcgagatccgcatgaaggagctggagcggcagcagaaggagggaaacttcgtggcttgcatgacagctattttacg

SEQ ID NO: 217443 - DNA, 90 bp, Homo sapiens
gagcagctcctttatggaaatcatactattgggaggcatgcatctccccatgtgctatgatgctggctctggtgtacattgaacggctcc

SEQ ID NO: 217444 - DNA, 75 bp, Homo sapiens
agcgactcatggagctgccgtaaggctctccgtgtgaaatggtcccatctcagactgccctgggtagacctagac

SEQ ID NO: 217445 - DNA, 82 bp, Homo sapiens
tgggaacaagcacaggcctgaaggggagcccaagggtgcacagcccctggctacgggactggtgattgcagctggaagtgcc

SEQ ID NO: 217446 - DNA, 82 bp, Homo sapiens
atcaaatggcacttcattggccacctacagaaacaaaatgtcaacaaattgatggcccaagaagatgaaaggattgttcttg

SEQ ID NO: 217447 - DNA, 50 bp, Homo sapiens
ggttgcagcaaccaaaagccagtttggaaattttagcattcaggtgccag

SEQ ID NO: 217448 - DNA, 75 bp, Homo sapiens
gtgaagtgctccgccgcccttgcctccagaaaactgtggatttagttactccactctgccatgtctttccaccac

SEQ ID NO: 217449 - DNA, 90 bp, Homo sapiens
aatatttgggtgtgacctcctttaaaaggaaatatccagatttcctttcctggatgaaaatgttgtctcctttctaaattctctgccgat

SEQ ID NO: 217450 - DNA, 76 bp, Homo sapiens
tagacatgggggcctcaaacgtggagatcaactcctctctgttaatggagtggaaatgggtcctgatgaatatgaa

SEQ ID NO: 217451 - DNA, 88 bp, Homo sapiens
gcaagcgcccaaagccaatgggaatcacctggttcaagctatcagaggactcctgaaacctggagagctacctgctgtataaaggctg

SEQ ID NO: 217452 - DNA, 82 bp, Homo sapiens
gcgggaggtggagcacctgaagagatgccagcaggagggtgtgaagacagagaatgaccacatcaacctgaaggtggccggg

SEQ ID NO: 217453 - DNA, 99 bp, Homo sapiens
ccaggactggggctgggagattctgcagagcttcagccgattcacacggacaatgcagatcttcgtgaagactctgactggtaagaccatcaccctcga

SEQ ID NO: 217454 - DNA, 75 bp, Homo sapiens
tggcgctggaggcagcggtgcacgtgcagatccggggatttctttcacggtttgataatgtccttcccgtcagcc

SEQ ID NO: 217455 - DNA, 100 bp, Homo sapiens
atgaacttcgaaacgtgataagaagcacctggatgagacatttgctacagcatcccacattaagtcaacggtaaaataccatgaagattttgaaaaaaca

SEQ ID NO: 217456 - DNA, 100 bp, Homo sapiens
attagcccaagaaacattatattcataaaaggaacggctgtagtagatctctctgggaatggcgacccctcctcaatttgtactgtaatgcgaagtgatg

SEQ ID NO: 217457 - DNA, 75 bp, Homo sapiens
gttagtgcgcctctaagatggcgacgcctttggcggtaaattcggttgaagactgggatagtttccaagctattt

SEQ ID NO: 217458 - DNA, 80 bp, Homo sapiens
gcgggcgtttactcttagcagaagctcacctgtggaacacctacataatttcattttgtttcggttttcaatgggcttca

SEQ ID NO: 217459 - DNA, 100 bp, Homo sapiens
tgaacttgggggtcagcatgctgaggatcctcttcctcctggtcatttccctcaaagcttctgaagagtcatcctttgagaaaacaaaagagacttgggc

SEQ ID NO: 217460 - DNA, 97 bp, Homo sapiens
gattgctgaccctttgcactttggcatggcccatcccctaatttctgaccagaagccctccctctaccctaagaggaagcagaccagcccactacag

SEQ ID NO: 217461 - DNA, 74 bp, Homo sapiens
ctgccgttactgccctgtggggcaaggtgaacgtggatgaagttggtggtgagacatggaatccattaaaattg

SEQ ID NO: 217462 - DNA, 75 bp, Homo sapiens
ggccgagcaggctgagcgatacgacggtattagaaaactactcggatgctccaatgacaccaaaacagattctgc

SEQ ID NO: 217463 - DNA, 83 bp, Homo sapiens
cggccgctccgaggacttccgcaggacccgcaacagcgcagagggtctgctgagaacagacccagtccctgaggaaggagaag

SEQ ID NO: 217464 - DNA, 80 bp, Homo sapiens
gcttggacgaagatggggagaaggaagcgagactcatacgcaacctcaatggctaccggctctctgaccagttccacgac

SEQ ID NO: 217465 - DNA, 82 bp, Homo sapiens
tcctgccggcagctccaaccatgggaggccgcgtctttctcgccagaagatcagctgccatgttacttgactcacaccaacc

SEQ ID NO: 217466 - DNA, 85 bp, Homo sapiens
tcgtgactattcagatcatccaagtggaggttcctacagagattcatatgagagttatgacggtgacaaggcttctcaacatcaa

SEQ ID NO: 217467 - DNA, 75 bp, Homo sapiens
ctggaatctctgcacgggccttggccacacgctggaagccggctggtttctgctccgtcattgcattcggaaagg

SEQ ID NO: 217468 - DNA, 90 bp, Homo sapiens
agtgtttcagtcccagacagcagtggccccgagcgttctccaaatgacaagaagtctttttgctcaattgaaggggaatggaatggtgtg

SEQ ID NO: 217469 - DNA, 100 bp, Homo sapiens
caaagactatgttttcaagctccagttcaaatcccacgtctacttcttccgggctgagagcaagtacacatttgaaagctcgggttcatgacgctctcga

SEQ ID NO: 217470 - DNA, 96 bp, Homo sapiens
ctggctgctctactgcttccctgtgtgcctgcagtttttcaccctcacgctgatgaacttgtacttcacgcaggttgtccatctgggactttcaag

SEQ ID NO: 217471 - DNA, 98 bp, Homo sapiens
ttctccaggaaccgaaaaggcgaggagtatagtacggcaaaaaactgtcgaatgtccctcttccagtggaaagcccaaccatgcagacatcttgctca

SEQ ID NO: 217472 - DNA, 101 bp, Homo sapiens
agcatgatcgccgcgcagctcctggcctattacttcacggagctgaaggatgaccaggtcaaaaaggggatcccaacaagccctcaggattcagaagtgtt

SEQ ID NO: 217473 - DNA, 75 bp, Homo sapiens
gcatcagtgcccttgtggcgaatggggctcacgtcgaaaatgcactcggtgatggaaagagagccactattctga

SEQ ID NO: 217474 - DNA, 74 bp, Homo sapiens
cgagcggtgactccccgccgctcccgggggccgtgacggtgctggtaaaccgcctatgtttggtgattatgaag

SEQ ID NO: 217475 - DNA, 100 bp, Homo sapiens
gattccaaccttccagccccttttgaaagggaaatcctcattgacgattcaatttgttgaaggccaatttgtggactcctacgatccaaccatagaaaac

SEQ ID NO: 217476 - DNA, 74 bp, Homo sapiens
tctcttggcagccttcctgatttctgcagctctgtgtgaagacacgatgaggcgagtggtacgacagagcaagt

SEQ ID NO: 217477 - DNA, 98 bp, Homo sapiens
gctgggtctcggagtgggagacgtggagtgcagctcctactccaatgtggccagatgacctgcaaaaccacacattcctgcacacagtgtactgccag

SEQ ID NO: 217478 - DNA, 74 bp, Homo sapiens
aaagaaagggaagctattgctgggattttgaggaggtttatgtgagattaagaccatttttcagggaattcctg

SEQ ID NO: 217479 - DNA, 101 bp, Homo sapiens
gccatttgaaaagttcttgctgaagctagaagggcaattactggatggaatgatattccaggtgatcaactgggagaacacgctccacattccagcccagg

SEQ ID NO: 217480 - DNA, 100 bp, Homo sapiens
gtggccccgtgtcctgcaggtattgggagatccacagctaagacaccgggacctcctggaagccaaaaatgattgagtgccatctatggggggacatata

SEQ ID NO: 217481 - DNA, 75 bp, Homo sapiens
atctccactctcatcaacaccaccgacagatgtctatccagaagttaaaggagagattgctcgtaaagatgaaaa

SEQ ID NO: 217482 - DNA, 90 bp, Homo sapiens
gatgaggaaagcatggacctaatgaacgggcaggcaagcagtgtcaatattgcagctactgcttctgagctttggggccatttggatcac

SEQ ID NO: 217483 - DNA, 75 bp, Homo sapiens
ggtcaaatgcttaccaggatttgctgctggccaagaagaagggggagctgatcaccttctattactattggaaga

SEQ ID NO: 217484 - DNA, 101 bp, Homo sapiens
ctggccgaaggggcgtctgcggctctccgccgtccccagccctgcctctccctgggctctgccaaagtggaacaggtgaagttcgatgccacatccatgca

SEQ ID NO: 217485 - DNA, 100 bp, Homo sapiens
ctgcttctgccccagaaccggtcgaaaaccgtgtatgagggattcatctcggctcaggttctcatcccaggccttgtggagggatctaccaaaaggaagc

SEQ ID NO: 217486 - DNA, 100 bp, Homo sapiens
cggaagtgcagctgcctcagttcttagcgcagtgtactaatggtcacttgatgtgcgctggctgttttatccacctactagcagatgcccggctgaagga

SEQ ID NO: 217487 - DNA, 96 bp, Homo sapiens
caccgaagctcggggacgcgaggagccggcgtggccctggggccaattcctgtccccccagcagcatggcatcgtgtgctgaaccctctgagccct

SEQ ID NO: 217488 - DNA, 75 bp, Homo sapiens
ggtcacctacgacgaacccccgtactgcatcaagcaaattcaacacccaacagcttccttaatagcaaaggtagc

SEQ ID NO: 217489 - DNA, 100 bp, Homo sapiens
atgcctactggataggcttaggaattttgtcttctgttgggcttggaacagggctgcacacctttctgctttatctgatgccctccaaatccttggttat

SEQ ID NO: 217490 - DNA, 100 bp, Homo sapiens
tcctgaaaccactcaagagtcataggattagatgatccaagtcaccaagaaattactgtctcaagtgatacgctcagggagccaatggtactctggagaa

SEQ ID NO: 217491 - DNA, 50 bp, Homo sapiens
gtgaacactgcagggccatttggtttggtgcacctcgatttggaggaagt

SEQ ID NO: 217492 - DNA, 100 bp, Homo sapiens
gaagatacccgccctgcgccccgctctgctgtgggcgctgctggcgctctggctgtgctgcgcgacccccgcgcatggtatagctgtggaccaactgtat

SEQ ID NO: 217493 - DNA, 83 bp, Homo sapiens
caacaccacaataatccacagccaaggtcccccacggcccttcaggatgaaagctgcggtgctgaccttggccgtgctcttcc

SEQ ID NO: 217494 - DNA, 82 bp, Homo sapiens
ccagggaaccctggtcaccgtctcctcaggtcctgtaagtagtgttttggtgaataaatacggcagccggccggtggtgata

SEQ ID NO: 217495 - DNA, 74 bp, Homo sapiens
agagacgggaagaggactcctttgacagtgatagcacagccaccttgctcaagcatctctgggaaaggacctgg

SEQ ID NO: 217496 - DNA, 100 bp, Homo sapiens
agagccacctggatgacgccgagccctacctcctcacgggggggatgttaccatcactgacctgcccctggccctagaacagatccagggcaacgtccag

SEQ ID NO: 217497 - DNA, 75 bp, Homo sapiens
ctgtggctgaggctacaccccggagccaggaggcttggtttatggcagctccaggacctcgcaccccgagacgga

SEQ ID NO: 217498 - DNA, 100 bp, Homo sapiens
ccgtatcttcgtctatttcatcacaaaactgtcccgggtgggaagaggaacagcctatgtgggcttccacggaggccagtacgggatccctgaaccatgg

SEQ ID NO: 217499 - DNA, 83 bp, Homo sapiens
ggattatcgagcaaaactttgggcttgcaacttttgttaccaaaggaatcagtggaagaagttgttccgaatgtaattgaacc

SEQ ID NO: 217500 - DNA, 100 bp, Homo sapiens
agatggccgacttcgatgatcgtgtgtcggatgaggagaagggtcgagctgtgcagttttagcgggtacaagatctaccccggacacgggaggcgctacg

SEQ ID NO: 217501 - DNA, 75 bp, Homo sapiens
ccagcaagcactatctcagtgccactgacatgttgagaatggatcttggagaatgtctgaaagtccatgacctgg

SEQ ID NO: 217502 - DNA, 100 bp, Homo sapiens
tttctttcacaactcatccagaagtttatctctgtgctgaaatcagtcccactttctgatctgtttacccgaggtattgatatacaagctgtgaatgtgg

SEQ ID NO: 217503 - DNA, 98 bp, Homo sapiens
ctcagggcgctctcccagcaaagcagtggccgcccgggcggcgggatccactgtccggcagaggtttggacatatttgactcttttccccccaggttg

SEQ ID NO: 217504 - DNA, 100 bp, Homo sapiens
acacgcttcctctccagagtgatcaagtgtgacccggtgagaagccctaccactgcaactgggacggctgcggctggaagtttgcgcgctcagacgagct

SEQ ID NO: 217505 - DNA, 100 bp, Homo sapiens
ttgctattgattctagtcatccctggcttcatgagtgtatgattcgtctctttaatactgtctcatataagaactacagctcatcaggaggagatcgcag

SEQ ID NO: 217506 - DNA, 83 bp, Homo sapiens
ggagaagtgtccggggtagccccgttacaggtcatttcatgggcaacaacacagtgctggatgttttgcggcgtgaaggctat

SEQ ID NO: 217507 - DNA, 83 bp, Homo sapiens
ctgacctccgcgcgacgtacccgccgccgccgttggctggagaattcggttccctcaaaattataaaggcaggaaagctcaag

SEQ ID NO: 217508 - DNA, 100 bp, Homo sapiens
cccggccctgaggatggacccaggagatcccgctggtgaccctgccgctggcgagcgccaccgcatggctcgtttgatcccttccaactgataccttgta

SEQ ID NO: 217509 - DNA, 82 bp, Homo sapiens
ggatccgaaacgcaggccaactcgaccacaggtgagatcggactggaactgttcggctgcgaccagaaatttattttcctga

SEQ ID NO: 217510 - DNA, 96 bp, Homo sapiens
gcccagaggactttcttccagcttctgctgtccttctttgtggagagcaagaggcaaggtcttgctatgttgctcagactgatcttgaactcctga

SEQ ID NO: 217511 - DNA, 95 bp, Homo sapiens
ccagctccgaaacctggacaacgcggtcctcatcgaggatctgaagaggcaaaatgcagtattacaagctgcacaagatgatttgggacaccttc

SEQ ID NO: 217512 - DNA, 75 bp, Homo sapiens
ccgggagctggtacacagcctcagactatcatagaactctctgaagagcgggatggtctccattttctaccccat

SEQ ID NO: 217513 - DNA, 100 bp, Homo sapiens
gtcgataagctggaactgatgtgaggagaaggaggaagtgaccatggacacaagtgaaaacagacctgaaaatgatgttccagaacctcccatgcctatt

SEQ ID NO: 217514 - DNA, 51 bp, Homo sapiens
ggaggaagtctgtatgctagacaaggagactcagcccgcctgcacccaggt

SEQ ID NO: 217515 - DNA, 97 bp, Homo sapiens
ggattacgcacaaacggcatggatccattccattgtagattgtgtgaccatgctctgtgaatcctgtgaagcagctccagctatgtgtgaagaagag

SEQ ID NO: 217516 - DNA, 51 bp, Homo sapiens
cgccctaccccccaagcagcggcagctgcaattggtagaagaatgtgcaca

SEQ ID NO: 217517 - DNA, 74 bp, Homo sapiens
cagctctgcggctcgggccctgaggagatggcagcagaaaaggccaaagcagcagccggggaggccaaagtgaa

SEQ ID NO: 217518 - DNA, 87 bp, Homo sapiens
tctaaaaatgcagatcatttactgcacctaaagacaaagggttattttagggacacagtgatgtactatggcttttacaccaattcc

SEQ ID NO: 217519 - DNA, 96 bp, Homo sapiens
cgcgagcaccagagtcggcgtaactatcgcctgacagggtccagtggcattgcagagcacggatggttgcaggagccaacttttacattgttggac

SEQ ID NO: 217520 - DNA, 97 bp, Homo sapiens
tgagcgacccggacaccgacgcgctcatctgctggagcccgaggtccagttccggccgtaccgcacagacgacttcatcacgcgcctgtactatgag

SEQ ID NO: 217521 - DNA, 98 bp, Homo sapiens
gcttatctctaggatccataagatcacagattctgctggccatattctctactccaaagaggatgcaaccaaggggaaatttgcctttaccactgaag

SEQ ID NO: 217522 - DNA, 100 bp, Homo sapiens
gccaatcgcagaaaatcaagtgtcagtggtattcgcatcaaaataggtgttagtaaaatggcctttcgccatttaattgagttcacatatacagcaaaat

SEQ ID NO: 217523 - DNA, 82 bp, Homo sapiens
tcatcacagtggattcctgcaaaggcttgagtgacatccaccacagagtgttttctgcctacattaaagaagtggatgaaaa

SEQ ID NO: 217524 - DNA, 55 bp, Homo sapiens
agccctggacggcattcagtgttttgacacacaaactcgggccacttctaagagt

SEQ ID NO: 217525 - DNA, 148 bp, Homo sapiens
gtggtagagctgccgcaaatgctttttgaatacgtgtgattatgaatctaaatggcagatggcagggagtgataaggacagtcattttgtttactcattcagccctgttgcaggtcccaataaactcttcataaggttgacagaagca

SEQ ID NO: 217526 - DNA, 100 bp, Homo sapiens
attgttttcagctaacagtaaccccagagccaccccagatgcccctcctgctgatcttcaggatttcttgagtcggatctttcaagtacccccagggcag

SEQ ID NO: 217527 - DNA, 143 bp, Homo sapiens
ttaacacctcaaggttgaagcagaagaataaggagaaggataagtcgaaggggaaggcgcctgaagaggacgaaggttccgtggggaccccactgcctggagtacaggtgcgcattgtctcagaaaacccacagagggaagcc

SEQ ID NO: 217528 - DNA, 98 bp, Homo sapiens
ttatggacaaatctgtgtcccggctttgtgcttctcccgaatcagcttcgtttggttccttgattctttcttgtggagaagttattcatgtgaagatc

SEQ ID NO: 217529 - DNA, 85 bp, Homo sapiens
ttgatagaggaaatgtatgatgaaggattgctgggaggagtaataactataaaatgataatgacaataatggccaacattttttg

SEQ ID NO: 217530 - DNA, 96 bp, Homo sapiens
gccatgtttcgaagacctgtattacagttccgatgaagttaaattccgtcaagatttaatgaatattgcgggcacaacattatcctcaaaacttct

SEQ ID NO: 217531 - DNA, 82 bp, Homo sapiens
gctgcgccgcgtgtcctcggagcgcggtccctgtattggtctcctgctcctagagaacccagtgacttgattgtaaaaattt

SEQ ID NO: 217532 - DNA, 135 bp, Homo sapiens
tggcccgtcatggagatggaaaaggagttcgagcagatcgacaagtccgggagctgggcggccatttaccagctcctcaagagttactgatctatgaaatggcagagaatggaaaaaattgtgaccagagacgtg

SEQ ID NO: 217533 - DNA, 82 bp, Homo sapiens
cgggggcgggccggggtcaccacgcctgccccagggaaccgcacaggtgagaagccctaccactgcaactgggacggctgcg

SEQ ID NO: 217534 - DNA, 75 bp, Homo sapiens
caatgtcacttacaacattaatcagatactgcatttaaggttctccccatgacaccacctgaacgtctcttcctc

SEQ ID NO: 217535 - DNA, 82 bp, Homo sapiens
agtggagtctggcatcttattggattttctgccgtctcttggcaaaaatggcaaataatgatgctgttctgaagagactgga

SEQ ID NO: 217536 - DNA, 98 bp, Homo sapiens
tacagcttcggcggcgaaggtcagcgccgacggcagccggcacctgacggcgtgaccgacccgagccggttctggcctataggaacaagacattttca

SEQ ID NO: 217537 - DNA, 100 bp, Homo sapiens
gcaacaacaagctccgagggcagccattctatgctgtggaaaagaaagcatactgcgagccctgctacattaatgcaaggccagaaactgtcactaatga

SEQ ID NO: 217538 - DNA, 133 bp, Homo sapiens
aacaagagagacatttctggctctgaaggcgaacgcttcgctggccatttaggagctctgctcaaagccagacgatgatggtggtgctaccccagtacaggatgaacgggattcagggtcagacggtgaggat

SEQ ID NO: 217539 - DNA, 50 bp, Homo sapiens
agcaagtgcagatagatggccttaacaactctgctcatggtgattacatg

SEQ ID NO: 217540 - DNA, 101 bp, Homo sapiens
gcagcggggacttcggcggcggcgcctcaggcacctcggcccgggtcgctacccacaggagaacaagggaacctacatcccagtgcctatagtctcagagt

SEQ ID NO: 217541 - DNA, 75 bp, Homo sapiens
ggggaggatgaagagcgaggcactgtggagcgccctgcccacccttggagccaggcacacagtgacgactcggag

SEQ ID NO: 217542 - DNA, 113 bp, Homo sapiens
ttgagcttcattcagatgtggtggaatatgccaaggaaaaactggagagcttcatcaaaaatagtgatagctttgataaacaaatttacatgtattggagaccagaccagaag

SEQ ID NO: 217543 - DNA, 89 bp, Homo sapiens
gccagttgatgccacttgctattggagttgtggagagatcgatgtcttattgtgatgagtctcgactgtcatatcttcttcggaggatc

SEQ ID NO: 217544 - DNA, 90 bp, Homo sapiens
cttcaagttcccggctcccaggtttattctcccatagcatgtgtagtgagcctgatgcccccagactactgccttcccctgtcacctgca

SEQ ID NO: 217545 - DNA, 75 bp, Homo sapiens
gaaagaaacgaagagccactggaggtctgcatgctgggtaaccgcaccctttcatcaagacacattgacgtttgc

SEQ ID NO: 217546 - DNA, 99 bp, Homo sapiens
ccccctcggcctcgcggcgacggcggcggtggcggcttggacgactcggagagccggttggatggtcccggggagccagatgtgcgggatggcttcagc

SEQ ID NO: 217547 - DNA, 100 bp, Homo sapiens
ccgccgtctacccgtggccgctgccggtctacggtcccgacggcctacacatggggcgctgtgggcgccgtggggctggtgtgggccaccgattggcggc

SEQ ID NO: 217548 - DNA, 100 bp, Homo sapiens
agcgagcgctggacggagaggaaagcgaagtagacaatgtggcacaatgtcacattcagcttgcacagagtttaagagaagaggccaggaagatggaaga

SEQ ID NO: 217549 - DNA, 98 bp, Homo sapiens
cgagcccttccttataggcgtcagcgggggaacagctagcggcaagtaatctatgccagcaattatgacaatgttagcagaccatgcagctcgtcagc

SEQ ID NO: 217550 - DNA, 98 bp, Homo sapiens
tggacactgactccagagggcaaggtgacagcttcgccgtgagcgctgcctgggctcggaagggcatcgaggagtggatcgggagacagcgctgcccg

SEQ ID NO: 217551 - DNA, 98 bp, Homo sapiens
tgagagatttcatttctgtcctgctgatgaagtctacgttcattcagggcctgctgtggaagaccagccccaaagagatggggtctcgctatgttgcc

SEQ ID NO: 217552 - DNA, 83 bp, Homo sapiens
caagaggaaggaattcctggatgacttgttcagcttcatgcagaagcgaggtccagggagtcggtagtaagggatggcgggac

SEQ ID NO: 217553 - DNA, 101 bp, Homo sapiens
tgaggagggtggaaagcatttcggctcagctggaggaggccagctctacaggcgtttccacctggatgtttgaggttgtgtagatgtggccggcacccttg

SEQ ID NO: 217554 - DNA, 84 bp, Homo sapiens
aactcgactcttggcgccaccgcctcatgcactgtgtagtgcctccggagccagcgtggtggccatagacaacaagatcgaaca

SEQ ID NO: 217555 - DNA, 75 bp, Homo sapiens
agctggagccggcactgcggcgcacggagcggagcgctgcagccaagccgagccgacggtcgcaaggtcctacgg

SEQ ID NO: 217556 - DNA, 75 bp, Homo sapiens
gctgacgaggttctgtgagagcatagaggaattcatagcagtgtgcagtgcaaactgcgctatggaatgtggcat

SEQ ID NO: 217557 - DNA, 50 bp, Homo sapiens
ccgatgtgcatcggtacatgaagatgtgcattcatccctggagcgcccgt

SEQ ID NO: 217558 - DNA, 49 bp, Homo sapiens
ttctgcatccttaactgagaatgagataacaacgaacttgatgcaagtg

SEQ ID NO: 217559 - DNA, 87 bp, Homo sapiens
aatctataccacaatctttgtaccagcctgttccctactatacatgatacgagggcaccatgtagcacagctggaccccctggggat

SEQ ID NO: 217560 - DNA, 74 bp, Homo sapiens
acagctttgggtggaccagtaatgagcacgtgcagcacatccgcatcgatggctccacctcatcagctgagcgg

SEQ ID NO: 217561 - DNA, 143 bp, Homo sapiens
cttacatgtgtggggtgttacaactgaaaagtcaaaagaagtttgtattaccattttcaatagcagtataaaagctattgacctgaaaagtggttctggaaaagtgtaccaaggccctgcaaaaggtgctgctgatacaacaa

SEQ ID NO: 217562 - DNA, 83 bp, Homo sapiens
gagaaccgcgacctgcgcaaagccagcgtgaccatcatttatacctaaaactggaagatgtgacccataaatttaataagccc

SEQ ID NO: 217563 - DNA, 75 bp, Homo sapiens
gtttgatagttgtcaggaggattcgacgttcagtgcccagggatgtggagtctatccttcactggagtctgatga

SEQ ID NO: 217564 - DNA, 50 bp, Homo sapiens
ggaccagcttttcaaacaatacagctcctccccggcctcctgtttctgac

SEQ ID NO: 217565 - DNA, 100 bp, Homo sapiens
actcatctgtcattcaaaggaaaaaagtagctgtcattggtggtggcttgggaaatcctcattgacgattcaatttgttgaaggccaatttgtggactcc

SEQ ID NO: 217566 - DNA, 90 bp, Homo sapiens
ccttccagctgtttgaccgaacagagcttggggcttccttggtcgcacccaccacctgcctgcccactggtcagccttcagggaccctga

SEQ ID NO: 217567 - DNA, 73 bp, Homo sapiens
aagcactatgcaggggacgtcacgttctacttccagtgtgaaggacatgagcctaccctcttgctcatcaaga

SEQ ID NO: 217568 - DNA, 100 bp, Homo sapiens
gaggatgacgaagatgatgaggatgacgatgacgatgaggaagatgagagaagaagaaggaggttcctgctgtgccagaaacccttaagaaaaagcgaag

SEQ ID NO: 217569 - DNA, 100 bp, Homo sapiens
ccggccgcaggagcacggatgccccccggagccgcgggctggcagttcagaatgaccgaagaagcatgccgaacacggagtcagaaacgagcgcttgaac

SEQ ID NO: 217570 - DNA, 100 bp, Homo sapiens
gaacacctgggccatgctcgccatcttcatcctggtgatggcaaatgtcgtggacatgccgattccacgactcttctttgcgggagaacatacgatccgt

SEQ ID NO: 217571 - DNA, 100 bp, Homo sapiens
gtcatggatctggaagctgagggcacgtgtttgcggttcagccctttgatgaccgcagcagtaaagcccaatctgcaggtgttgcgagcccgattctctg

SEQ ID NO: 217572 - DNA, 100 bp, Homo sapiens
gactgcagatcggtggaaaactgataagccagatttatgtcccagcgagggtgagagcgacgccgaggccgagagcaaagaggagcatggccccgaggcc

SEQ ID NO: 217573 - DNA, 74 bp, Homo sapiens
tgtcggtggcggggctgaagaagcagttctacaaggcgagccagattttgatgcatacgaaagagatggtacaa

SEQ ID NO: 217574 - DNA, 100 bp, Homo sapiens
aggatgcggagtaggcttcccccagcgcttgccgccctgggcgcggccctgctcctgtcttccattgaggcagaaggtgctggagagtcatgcctgtgag

SEQ ID NO: 217575 - DNA, 100 bp, Homo sapiens
cgcagggcctggcactggccaaggagattgctgagcgtgctccgcctctcaccttccatgggccacccgctggaggtggggctggcgctgcggcacctgc

SEQ ID NO: 217576 - DNA, 100 bp, Homo sapiens
ccagagggaatggaccccgatggtgtcatcgaggtaagaaacggttgtggatcttgaagctttggaaagattgtcactgctgttccaagggcacacgcag

SEQ ID NO: 217577 - DNA, 80 bp, Homo sapiens
tgactcaagcggaggcgcgcggaacagtcgccgaggcgattcccgcccagacccaacatgagtgaagtttcctgcaagaa

SEQ ID NO: 217578 - DNA, 75 bp, Homo sapiens
ccctaaaagcacctggccccgctacagcaaaccagggactttgaacatgtcggggatcgccctcagcagactcgc

SEQ ID NO: 217579 - DNA, 98 bp, Homo sapiens
aacatcatgcagtggaatgcagttatatttggaataactctgtgtcaccctcggaaagcctccgggccagtgagaagcaccggggctctgcggactac

SEQ ID NO: 217580 - DNA, 50 bp, Homo sapiens
gtgtaaccagtctatgggaagtgagattgtgccttgccagtacatgctgc

SEQ ID NO: 217581 - DNA, 83 bp, Homo sapiens
ctcgaacagatgtgagcgagaaagccgttgcctccagcaccacttctaatgactgggctggcttagatgaagatgaagatgca

SEQ ID NO: 217582 - DNA, 82 bp, Homo sapiens
atgaacatgggcaggataaatgtccacaggtcctggctaccctgggaagagacaagaagtaaatgaagaaagaggaagattc

SEQ ID NO: 217583 - DNA, 100 bp, Homo sapiens
catgtctttcagagcccggcaccacccatcttgagtatctggcttgtctggagcgggaaagactactgtgagcatggccttggaggagtacctggtttgt

SEQ ID NO: 217584 - DNA, 101 bp, Homo sapiens
ggactgacgggcgctactttctccaggctgccaagcaaatggacagcaactggacacttatgaagatggaataactgaagtgaagtgatggactccgattt

SEQ ID NO: 217585 - DNA, 75 bp, Homo sapiens
tccccttccaggtggcccagaaagaggtgcggccgggtgtgtggcaacattacttcatgatgcagccatgaaccc

SEQ ID NO: 217586 - DNA, 100 bp, Homo sapiens
aatatgtgttcaagttcattgttcggtcgaggacattattttcacattgctctaggtcgtaaccagcctttgaaaaaggagaaaccaaaatggaaaagcg

SEQ ID NO: 217587 - DNA, 100 bp, Homo sapiens
ccggctgctggatggaggggattttgtcagcttgtcgtcaagagctccctctttgcccactagcagggcattagctggtgctgaagacagtggctgcttg

SEQ ID NO: 217588 - DNA, 76 bp, Homo sapiens
ggggtggcactttccatagctgtaggactgctggagggtgtgaacggcatgtctgtggatgagaagcctgactccc

SEQ ID NO: 217589 - DNA, 100 bp, Homo sapiens
tggagctgacgctcgtggggctgcagtactcgggcaagaccaccttcgtcaatgtcatcgcggtttcctatgttattcgagatgaagtggagaagtacaa

SEQ ID NO: 217590 - DNA, 75 bp, Homo sapiens
ttcatctcgacactgaaattacagcgttgcaggtggcgagctgtttgacttcttagctgaaaaggaatctttaac

SEQ ID NO: 217591 - DNA, 93 bp, Homo sapiens
cagaaacacttcttttattttcctgtaatatatctgtatcatcggagatttcaacactacacttgcacaatgtctttgaaaccaagagtagta

SEQ ID NO: 217592 - DNA, 83 bp, Homo sapiens
cggatggcggcggccgcgctgaggcccccggctcagaagtcgttggcttcgtaagagcagggtctatgggaagcctcctcagc

SEQ ID NO: 217593 - DNA, 76 bp, Homo sapiens
ctaagccatcccctggcggaaccgcccccaggaaacccagcgtttgctggcagaaccagttcctggcatcaaagcc

SEQ ID NO: 217594 - DNA, 100 bp, Homo sapiens
acatttccccctttcatgatattcctctgaaggtgaactctaaagaggtataatacttctccacgtctgcttcaggaagaaagtgcctgccattcttatc

SEQ ID NO: 217595 - DNA, 100 bp, Homo sapiens
cgagtgggcccgcttcgaggtggagagagcccagtgggaggtggagcgggcggagctgcaggctattgagggcacctacattgacaagaaatgccccttc

SEQ ID NO: 217596 - DNA, 75 bp, Homo sapiens
tagcatgggatccaacgacatgcactgacaggcagaactcaccagtcacatcaccaggatcctctccccttgccc

SEQ ID NO: 217597 - DNA, 100 bp, Homo sapiens
ttatttgcagtatatgttgtcgggtacattgatatatgtaaattacggaagatcatttatatacacatggaaattcacagtatggccaacagcaagatgc

SEQ ID NO: 217598 - DNA, 75 bp, Homo sapiens
cggacacataacaagcagcagtgaggacaccaaagggccggagttaagatgagtccagcgaagtgcctagagtac

SEQ ID NO: 217599 - DNA, 130 bp, Homo sapiens
gttttgctgggacgcctactccaaagcggccgggagtcgcgcttcttccccactcccgagacaggtatcattgcccagtgcctaagatcttttatgttcagctcactgtaggaaataatgaattttttgg

SEQ ID NO: 217600 - DNA, 95 bp, Homo sapiens
atggagtacctggcagagcagaagtttgtgcacagggacctggctgcgcggaactgcatgtatcttggagatggccgcttccatctggagtctgt

SEQ ID NO: 217601 - DNA, 95 bp, Homo sapiens
aaaatggttcgctattcacttgacccggagaaccccacgaaatgtgtaaccctttagtaaacctgaactatgctgtgctgctgtacaaccagggc

SEQ ID NO: 217602 - DNA, 100 bp, Homo sapiens
tcaaggttgaagcagaagaataaggagaaggataagtcgaaggggaaggcgcctgaagaggacgaagagggcaaaagcagatggctacaccgagaactca

SEQ ID NO: 217603 - DNA, 90 bp, Homo sapiens
cagtacctatagccaagctgcagcgcagcagggatgtgttcagagcaacattgttttgttgacacaagcatttagaagaaagtttgtgat

SEQ ID NO: 217604 - DNA, 98 bp, Homo sapiens
ctacattctgggtgacacgctgggggtcggcaccttcggcaaagtgaaggctattgtggacgatgaaaggctctctgcagaggagatggatgagagga

SEQ ID NO: 217605 - DNA, 100 bp, Homo sapiens
agaagtcatgctggtggcctggacagtgaagggagagaagtggatttgggagacatttaggagttcccagccccagagccagggtcaccacgctgtccaa

SEQ ID NO: 217606 - DNA, 74 bp, Homo sapiens
cacttgtagatccagagaaagccaaagcagatatctatgctttatgtgtggcctatcctgaaccccttggagaa

SEQ ID NO: 217607 - DNA, 50 bp, Homo sapiens
gtggttccttaaatgtcgaagaagggctcagcaggagacacagaaggcag

SEQ ID NO: 217608 - DNA, 98 bp, Homo sapiens
catgcctctgacaatctctagtgactttgtgttttatgccccacgtctgagaatcaacaagcggatcctgcagctctgcatgggcaaccatgagttgt

SEQ ID NO: 217609 - DNA, 83 bp, Homo sapiens
gccgcacttacctatgaggccagcaagcggaggtgctgggagcgagttggctggctatgactttgcagccgtcctggagtggt

SEQ ID NO: 217610 - DNA, 83 bp, Homo sapiens
acgacttcaactatggcagcagcgtggcctccgccaccgtgcacatccgaatggagaccatcatgcagacatcagagactggg

SEQ ID NO: 217611 - DNA, 100 bp, Homo sapiens
cgggagatgcagccagtttacaggaggagatgggcatctcctgtgagctgctggaatcggacttcctcaaatgcagcgtgggatttcctttcatgaggtc

SEQ ID NO: 217612 - DNA, 51 bp, Homo sapiens
caaacccacccggcccaactcactcctggcacctgtgtttgctctgtttgt

SEQ ID NO: 217613 - DNA, 87 bp, Homo sapiens
cccggtgtctgctcctgtcgccttcgcctcctaatccctagccactatgcttcgagagctgtgcccaggagtgaacaaccagcccta

SEQ ID NO: 217614 - DNA, 83 bp, Homo sapiens
actccttcggcagtccacccaccgccgccgcctcccaggtgatggctggaccggcggaggaggcgggagcccattgtcccgag

SEQ ID NO: 217615 - DNA, 97 bp, Homo sapiens
atcctcaaacacctaggctcaagtgatccttttgccttagcctgccaagagctgggactacagcttccaaaggaactgtcttcagagacttttgaca

SEQ ID NO: 217616 - DNA, 51 bp, Homo sapiens
caaagaggaactggaacagaagtgcaaggatctggacaactctcctctgtc

SEQ ID NO: 217617 - DNA, 98 bp, Homo sapiens
tgattttccggtcccggcgcccggcgagggcgcgcggctggtgtccgccccgcccgaaaggtgattttcttccacccccacctccacctctagatgat

SEQ ID NO: 217618 - DNA, 75 bp, Homo sapiens
aaacaatttctcctgctctgcagcttctgttcagagcttttcatcctactataaaggaggatttgaacagaaaat

SEQ ID NO: 217619 - DNA, 75 bp, Homo sapiens
aaatcattcagtgaatcccaactgttatgccaaagggtatatgagtgtaacaaacgctgcaaatgtgacccaaac

SEQ ID NO: 217620 - DNA, 75 bp, Homo sapiens
agaaggaatgaacagatacggaagttagaggccagactttctggatttgatcaaagatctgaaatctgaactgtc

SEQ ID NO: 217621 - DNA, 100 bp, Homo sapiens
tagatgccctctctcttcatcttcacttgaaataccggatgattttggagccactacttccttcattggactgcaaggtatttctgtttggaaaagtaat

SEQ ID NO: 217622 - DNA, 90 bp, Homo sapiens
agaagtcgaaaatggagcacgtccaggctgaccacgagcttttcctccaggcctttgagagcctcatgcgctcacgggttcggggggccg

SEQ ID NO: 217623 - DNA, 75 bp, Homo sapiens
cgcgtgtctaggtgagtcgcggtgggtcctcgcttgcagttcagcgaccacgttctaggtctcgttccagatcat

SEQ ID NO: 217624 - DNA, 100 bp, Homo sapiens
aaacttggttcaacacagtctggatttttagttgaagagtctcttcccctttcagagctcacagagacttcaaatggaaatcacattctgcctgatgaag

SEQ ID NO: 217625 - DNA, 74 bp, Homo sapiens
tctcgacctgctaacagaactggaccttttcgcgcctagaagattatcagcgtcgccttgatacctccagcctg

SEQ ID NO: 217626 - DNA, 90 bp, Homo sapiens
tcctaaagtgctgggattacagaaatggctcatttgggaaactacgatagtgggacagcagaaacaccagaaacagatgaatcagtgagt

SEQ ID NO: 217627 - DNA, 100 bp, Homo sapiens
cgtcgatccagctgccagcgcagccgccagcgccgggtcttagtggtgcaatggctagtataagcgtgcgttcgagtaccccaggctctcctacacatgt

SEQ ID NO: 217628 - DNA, 83 bp, Homo sapiens
acgggatcagtgttgtgataaggcagctgcaaaaagcggcagaaatgagccgtcagactgctacagcattacctaccggtacc

SEQ ID NO: 217629 - DNA, 99 bp, Homo sapiens
gccacatggtgtcagatgaatatgagcagctgtcctctgaagccctggtttcctgaggtttgtgagggttttatgtggcatgtcttctgatgaaaggaa

SEQ ID NO: 217630 - DNA, 82 bp, Homo sapiens
aagcaataccaggatagctgttgtttcagagaaagacctagaggatcaagacataatgggagcatttttagacaagccaaag

SEQ ID NO: 217631 - DNA, 90 bp, Homo sapiens
gacttggacaacatgtcccaacattacatcccacccgagaccgaggacgagaagaagcgctttgaggaaggcaaagggcggtacctgcag

SEQ ID NO: 217632 - DNA, 50 bp, Homo sapiens
gtttctaggaaaggccggacaccagggaaccattggaggataaactgaga

SEQ ID NO: 217633 - DNA, 110 bp, Homo sapiens
ttcaagacaataactactgcctactaccgtggagccatgctcctgtgtcctaccgacctctccactgtatctgggaattgccaaggagaagagtaccaaggctgctagtg

SEQ ID NO: 217634 - DNA, 100 bp, Homo sapiens
gaattcagaaggagctggcggacatcactttagaccctccacctaattgcagttgcagatctgatctcttctgaacacctcatcgtgtctccatccctgg

SEQ ID NO: 217635 - DNA, 51 bp, Homo sapiens
gctccctctcagcacctgggcggacggccggtctaattgaagccaacggag

SEQ ID NO: 217636 - DNA, 82 bp, Homo sapiens
cagacccagttgaggagaccagacaccatgcagcacgtgaagaacagtaagcacagcaacaagtacgaaggctggcccgagg

SEQ ID NO: 217637 - DNA, 75 bp, Homo sapiens
ccgagaacgtgcgggaagagaagatcatcgagcatttcaaacgaattcagaaggagctggcggacatcactttag

SEQ ID NO: 217638 - DNA, 82 bp, Homo sapiens
cgggtattgtaccgctgagggaaaggagcgggactccggacctccaggagacagtgatgtgtgttctgaaattgtgaaccat

SEQ ID NO: 217639 - DNA, 51 bp, Homo sapiens
caaaaacagaccagaagattaccaaggtgagaattatgaagatgatgacct

SEQ ID NO: 217640 - DNA, 83 bp, Homo sapiens
acttctgccaagcatagccaccacgtcttcagccagggttgacgagcccatgaccatgttcctctggacactttgtactagcc

SEQ ID NO: 217641 - DNA, 74 bp, Homo sapiens
ccgacacgaattggccttattaatgatatggttacaattcaacaaacatggtgtgttgcgggtagaaggcttct

SEQ ID NO: 217642 - DNA, 90 bp, Homo sapiens
gagcagcccaagcgccttccctcacattcagaatggacagtttagaagaacctcagaaaaaagtctttaaggctcgaaaaacgatgagag

SEQ ID NO: 217643 - DNA, 101 bp, Homo sapiens
tccaaatcgcaccatcaccgttgatgacaagatgtccctccggctccactaccggatgaggaggttcagcaacatcagatgaccatgaatttgatccatca

SEQ ID NO: 217644 - DNA, 75 bp, Homo sapiens
ctaagcaccgttggtatcctcatggacgttaatgtgttaagagccattgacatttgaagatcatcagaagtgaag

SEQ ID NO: 217645 - DNA, 98 bp, Homo sapiens
gtgcttcgtgctcctgtgcggagtagtggacttctgcctggtgtcgaaggtggtgggcagatgccgggcctccatgcctaggtggtggtacaatgtca

SEQ ID NO: 217646 - DNA, 100 bp, Homo sapiens
cagagacccagaaaatggtgcttaccaactacatgttccctcaacagccaaggactgaggatggtatccatcacgaattgaaaaaattgactatgaggag

SEQ ID NO: 217647 - DNA, 82 bp, Homo sapiens
gctgcgctggcgcggcttttggcggcctttctgctcctcgcggcccaggttttggctacgggcctccacctccaccgccaga

SEQ ID NO: 217648 - DNA, 75 bp, Homo sapiens
aaagaccagccagctaaccctacagaaggaccctgatgctcccataagacagaaaatgccccttgatgatctgga

SEQ ID NO: 217649 - DNA, 75 bp, Homo sapiens
ggggcaaatcagagtgaagaggaagccagaagatgggagagacatttttgaatttgcctgagaatacagatcaac

SEQ ID NO: 217650 - DNA, 75 bp, Homo sapiens
ggatggccgtaaccccgaaggaaatgtggtatcacggaaaacttgacagaacgatagcagaagaacgcctcaggc

SEQ ID NO: 217651 - DNA, 100 bp, Homo sapiens
cagtacacgtgggcaacgtacgtcagacggcagtggtggaaaagatccatgccaaggactgctgatggaggaggtttggtagaaaaacactacgtctttc

SEQ ID NO: 217652 - DNA, 97 bp, Homo sapiens
cttggcaagttatggcaatgtgatcgtcatcacagtcaactatcgacttggagtactcgccccgcagcgcctccaccccagagacccggaccaagtt

SEQ ID NO: 217653 - DNA, 75 bp, Homo sapiens
tttatgaatgtcacaatgctgggggaaaccagatcagttggccttatttcctcagtggaaatctactcactatga

SEQ ID NO: 217654 - DNA, 90 bp, Homo sapiens
agcaatgacattgggggcctgtggaaattttcagtgctatgtgagctcattaatgcactgtaccccgaggggcaggccccagtaaagaag

SEQ ID NO: 217655 - DNA, 75 bp, Homo sapiens
tgcacgaccagctgaaccgcctcaaggtgtaccaagcaggcagtgggcagctcatgttcatgaacaagtaccatg

SEQ ID NO: 217656 - DNA, 105 bp, Homo sapiens
cattgaggacgcgcttgtcgtgtcgttccgcttcggggagaagctcttctccggggtcctcatggatctgtccaaaagggtctccctctgttgcccaggctggag

SEQ ID NO: 217657 - DNA, 75 bp, Homo sapiens
tactttggaagaggatagcattgaaagttactccacaggatccgctgaacataggatgttgccacaaaatctacc

SEQ ID NO: 217658 - DNA, 75 bp, Homo sapiens
gactcaaggcacagactctccagcaaaacacttactattttggagtttaaagtatgtcatcatggcaaagtttcg

SEQ ID NO: 217659 - DNA, 100 bp, Homo sapiens
tccaagttcagcatccccaagcagggggaggtcattggaaatatgggccaaaccatggagcagttaactccagaactcaagtcttcaatcctgaaatgtg

SEQ ID NO: 217660 - DNA, 100 bp, Homo sapiens
actgacgtgccccctggagactacctgttccaggaaggacttttgactagatctgctcaggaaacagtcaagcattctgatttattttcttcatcatccc

SEQ ID NO: 217661 - DNA, 98 bp, Homo sapiens
ccagaggcagggcacaccagaagccagtggtcatgatgaaaatgtccaagccttatgcatttgatcgggtgttccagtcaagcacatctcaagagcaa

SEQ ID NO: 217662 - DNA, 100 bp, Homo sapiens
gattacattaacagtaacagaagtgaggagatggatatggatcacattatgacctgggccactgatgtagccaaaggaaaaggatataatggatttgtac

SEQ ID NO: 217663 - DNA, 100 bp, Homo sapiens
cttccagcttctgctgtccttctttgtggagagcaaggttacttcttgctgcagattctgcgcaggatcggagctgtgggccaggctgtgtccaggacgg

SEQ ID NO: 217664 - DNA, 50 bp, Homo sapiens
gctaccttctcccatcaccccagttatcttcaggcagagtgagaagctgc

SEQ ID NO: 217665 - DNA, 100 bp, Homo sapiens
acagagatgggcttcaaaccctggacgttatgaagaggacatgtactggaggagaatggaggaagaacaacatcattgggatgatcgccgccgaatgcca

SEQ ID NO: 217666 - DNA, 82 bp, Homo sapiens
cgggttcaagcaattctcctgcctcagcctcctaagtagctgggactacaggaggatacgaagcgttttcggcttcctgccc

SEQ ID NO: 217667 - DNA, 100 bp, Homo sapiens
ggataagcacaaagtcaagagacagcgattggacagaatttgtgaagaaataagcgggttttgaaaacaaaaaaaagaaggagtggaagagggggccagg

SEQ ID NO: 217668 - DNA, 83 bp, Homo sapiens
ggaaccctggtcaccgtctcctcagccttatgccagcctggaccatcttggaggcagtgtaggatcatggaagaactttgaat

SEQ ID NO: 217669 - DNA, 88 bp, Homo sapiens
agggtcctttatatagaagggagagtaggcgacattgactacagcaccgtgctcctcggcatgctggtgacgcaggacgtgcagctcg

SEQ ID NO: 217670 - DNA, 154 bp, Homo sapiens
ggtaacattttaccatgcagctactggatcactgccatttagaccctttgaagggcctcgtaggaataaagaagtgatctaggacctccagaacactgacaaaaagaagtggtgcagtggaaatccttgccttgttcctaatcttagggggaaa

SEQ ID NO: 217671 - DNA, 100 bp, Homo sapiens
atatgaaaaagcagagcgactcggttaagggaaagcgccgagatgacgggctttctgctgccgcccgcaagcagagggaccaaagggaaagcaaggcaag

SEQ ID NO: 217672 - DNA, 100 bp, Homo sapiens
cataaatcctgcttcctgtgcagactggggttttaaggggtgtggcaggaggttttggactcgatgagtttccaccgaaatgtcggagaagtcaggccag

SEQ ID NO: 217673 - DNA, 82 bp, Homo sapiens
aaatcaaactggcagtgcgaatggataaaccagcacatatgaagcatagtggaggctaagaatattgtacacaaagattctt

SEQ ID NO: 217674 - DNA, 75 bp, Homo sapiens
cttggagctgccgccgccgggactcccgtcccagcagattaagatgttctacgaggagcatttgcacttggacga

SEQ ID NO: 217675 - DNA, 90 bp, Homo sapiens
cccacagtcgcaggaccccaatccagatgaatatccagagtcctggtggaggacgatgagatcatgcagggattcatcagggctttcagg

SEQ ID NO: 217676 - DNA, 75 bp, Homo sapiens
cttggaatctcgagcgggaaaaggtgctgccatgcttactgagtcccttctctctccttctctatcatcttccat

SEQ ID NO: 217677 - DNA, 98 bp, Homo sapiens
tcaaactcccaggctcaagcagtcctaccatgtcagccttcccagtagctgggaccacagcacttttccagccattaactccaggctctcgagaattt

SEQ ID NO: 217678 - DNA, 75 bp, Homo sapiens
atcagatcaaccaccaaagtgggaaacattgaaatcaaggtttatcttgcagattatggactttcctacagatat

SEQ ID NO: 217679 - DNA, 73 bp, Homo sapiens
aagaaaaggatcccagaaagtttcaggcatcatggaccgatctaaagaaaactgcatttcaggacctgttaag

SEQ ID NO: 217680 - DNA, 100 bp, Homo sapiens
cgcgaatatcgtcatcgttagaaggctttttttacagaaaagtacttgcaggagcatcctgaagaccaggagaaggttgagctgctaaagcgactaatag

SEQ ID NO: 217681 - DNA, 82 bp, Homo sapiens
ccattgctgactcgtggttgggaaaattcaaaaatgctgagccgattatcaggattagcaaatgttgttttgcatgaattat

SEQ ID NO: 217682 - DNA, 80 bp, Homo sapiens
atcgcctgggtggttgttggcgtgtccctgcagcgaaggatcctggttttaaaatcaaagatgggaaaatcggagaaaat

SEQ ID NO: 217683 - DNA, 98 bp, Homo sapiens
agcctcccgagtagctgagattacaggtatgatctcgtgaaaccttgagagaaactgaatgacgaatgaaactattgttcctgtttcacacagaagaa

SEQ ID NO: 217684 - DNA, 73 bp, Homo sapiens
gctgtttgcagacaaggtcccaaagacagcagaggaagcaagggaagagttgagagaacaggtttatgacgcc

SEQ ID NO: 217685 - DNA, 82 bp, Homo sapiens
cctggtctacatcctgcgggtgcctttgaaaatcaacgacaacttgagcacagggactggtgattgcagctggaagtgccca

SEQ ID NO: 217686 - DNA, 75 bp, Homo sapiens
gaggttaacagctatctttctgaaatcgctgataaagatgggaacaataaagttctgtctttcactatcccctcc

SEQ ID NO: 217687 - DNA, 75 bp, Homo sapiens
tatcgtggacgtcactggccctggtggggattgacagccacgggaagtgagtgagatcattggccgagacctgag

SEQ ID NO: 217688 - DNA, 87 bp, Homo sapiens
cctgaacttctcaggaagcagtactattcaagagggaggagagagcgatggcttttttcacccagaaggccagccccagcggcttcc

SEQ ID NO: 217689 - DNA, 127 bp, Homo sapiens
ctgagtagggtgtgacctccgcagccgcagaggaggagcgcagcccggcctcggaaaatttgtgtagccagagaggtttggtacccaacacagatggtcagacttttgagattgcaatttctaacca

SEQ ID NO: 217690 - DNA, 78 bp, Homo sapiens
gatggcccccggtgcaagaggcgcaaacaagccaatcccaggaggaaaaacgatcgacgacatcgcggatggcgccgt

SEQ ID NO: 217691 - DNA, 144 bp, Homo sapiens
tgcagtggcacctgcgcgaagctggccaaagcctgcccagacggctcacctgtgcgggatggaacaaaagaaattcattgagtttgaagatgctctggaacaagagaagaaagagctgcaaatccaggtggagcactacgagtt

SEQ ID NO: 217692 - DNA, 83 bp, Homo sapiens
cgagaaaggaacaggcgccttcaaaagcccacttggcgatgggttacagtaagagttttcggctttgtgagaaaccttaccat

SEQ ID NO: 217693 - DNA, 100 bp, Homo sapiens
gtctttgttccaccagagtcattgcaggaagtggatgagttccacctcattttagagtatcaagcaggtgaccattgtgaggtagatattttgttctaat

SEQ ID NO: 217694 - DNA, 82 bp, Homo sapiens
ggagctggccttcaaggtggctgcaggagagctcaaggaatcgggcgcctgattgctgagtgtcatctcaaccccatcatcc

SEQ ID NO: 217695 - DNA, 82 bp, Homo sapiens
ctgctgtgggcgctgctggcgctctggctgtgctgcgcgacccccgcgcatggtgaagatcatgacggagaaggaactcctg

SEQ ID NO: 217696 - DNA, 82 bp, Homo sapiens
gagaaggtggctgtggagttcgggaaccagctggagacggtctggaaaatcccgaagcagaagcccgtattcatctaggcat

SEQ ID NO: 217697 - DNA, 100 bp, Homo sapiens
gggagcgaggggcgccggctggggtgtgtgctcctgacaatggcgatgaccactcagaaggaggcctggtggagaaccacgtggacagcaccatgaacat

SEQ ID NO: 217698 - DNA, 100 bp, Homo sapiens
taccaagaaagttgggtttcttttactggcaaatagtacttcaagagcacagtcttatgtaagatattggcgtgccacttttgaagaaggaaaatactta

SEQ ID NO: 217699 - DNA, 100 bp, Homo sapiens
aggcagtacagctgatggcggaggccgagaagcgagtcaaggcctcccactccttcctccgagggctgtttgggtacaatggcttggtgaccggcacgag

SEQ ID NO: 217700 - DNA, 75 bp, Homo sapiens
gcacaaagagcttgctccctacgatgagaactggttctacacgcgagctggccctggccaacgtcaacattggga

SEQ ID NO: 217701 - DNA, 75 bp, Homo sapiens
acagcacttcattatgcagctaagatcgggcccgggacacccagacagatgagattgtcgcactgaagaaggtgc

SEQ ID NO: 217702 - DNA, 80 bp, Homo sapiens
ctttctggcctggaggctatccagcgtggagccccctgagctgcccgctgatctgcagcactggatctcctacaacgagg

SEQ ID NO: 217703 - DNA, 100 bp, Homo sapiens
tgaaggtgctgaagaagtctgcctacctgtcagccgtgggcaccttcacctgggtctgcacgccctttctgactcaatgatgaggcacggcggctcattg

SEQ ID NO: 217704 - DNA, 97 bp, Homo sapiens
cggccggcaggttgggaggagcggccgaaggtatgttgagtcgatgggatgatagccagagatttttgtctgaccatccataccttgtatgtgaaga

SEQ ID NO: 217705 - DNA, 88 bp, Homo sapiens
gccgcggtcgctccgagcggcgggccgcagaggaagcaccagcagtatgactgtaagtggtacatccccctggccgacctggtgtttc

SEQ ID NO: 217706 - DNA, 100 bp, Homo sapiens
tgaaagttttcaaacacactctccctcccaaggtatttgagatgctgttgcacaaaattccccttatttgccagggtaagagtaaagtctccaccagaag

SEQ ID NO: 217707 - DNA, 100 bp, Homo sapiens
ccggtctccggtactggagccggcggctgcggccggcagccggcagctttgcagcggcaacatctgaatgaattgatgacgaagaagtggctattagggt

SEQ ID NO: 217708 - DNA, 74 bp, Homo sapiens
caccaactgttaggtttttatccaaaatgtttcatccaaatgaacagacccaggaaagcattcagcattttgag

SEQ ID NO: 217709 - DNA, 75 bp, Homo sapiens
ggacttctggctttggccactttacttcctgccaggtaaaatgtcggttccaggaccttaccaggcggccactgg

SEQ ID NO: 217710 - DNA, 50 bp, Homo sapiens
cccggaagagggaggcgtggacgcggtaatcaatgagcttattggaaatc

SEQ ID NO: 217711 - DNA, 98 bp, Homo sapiens
tgattcagaatcctgaaaatgtgatctcccttaaaaaggtgtttcggcatggagaccgaagtcccattgacacctttcccactgaccccataaaggaa

SEQ ID NO: 217712 - DNA, 144 bp, Homo sapiens
ttcacctcgcgtcgcgcccgggaggaaggaacgaggcaaggagctaaagcagcgtgcgttcagccctgggatggtcagtaggacagaaggtaacattgatgactcgctcattggtggaaatgcctccgctgaaggccccgaggg

SEQ ID NO: 217713 - DNA, 100 bp, Homo sapiens
cgtagatctaatggaagcaagccaactgtgtagcatggactcgaaagcaaatattgtacatgcacggcagcaatttgataggtatgtctgatctcaatgt

SEQ ID NO: 217714 - DNA, 83 bp, Homo sapiens
cgggggacagggtcatttgcttacaggtacggaaaaaggaccagatcaatattgaaacaaagaataaaactgttcgttttata

SEQ ID NO: 217715 - DNA, 82 bp, Homo sapiens
cgcgcgtgcgcggacatggcctcaaacggccaccagcttgggctccccacggagggcagcaagtgggacttggggaacccgg

SEQ ID NO: 217716 - DNA, 90 bp, Homo sapiens
catgaccaaggccatgtgggaagcctggggaaatcccagcagcccgtattcagcagttccaggaatggatggaggtgctttaactgatac

SEQ ID NO: 217717 - DNA, 75 bp, Homo sapiens
catcaggacggaagcacaggggccactcagagtcgcccgagaagttccttgcattgactccatggagagtatatc

SEQ ID NO: 217718 - DNA, 74 bp, Homo sapiens
cgcagtggtcgcttcttctccttggatgtcatccaagtctccaagaagttcctgccaggcatggccattggcta

SEQ ID NO: 217719 - DNA, 74 bp, Homo sapiens
tcacgagttcaggcgtctgagacttggtgggaacggaccttcctcttagggcgtctctggccgagcctcttttt

SEQ ID NO: 217720 - DNA, 75 bp, Homo sapiens
ctgaagctgcgggaggcccccagccccactcattctgatgaaggaaagagcgtccctgtgcagctgcgtgtcctt

SEQ ID NO: 217721 - DNA, 75 bp, Homo sapiens
tccttgtcatgattatcaaaaacctgaagaagtattttaccttcgaagtgcagtctattatgtcctataacggag

SEQ ID NO: 217722 - DNA, 103 bp, Homo sapiens
aggcgctgcgccgcaacgccgagcgcaccgacatctgcctgctcaaaggttttaaaatcaaagatgggaaaatcggagaaaattgcccttccccatggccagc

SEQ ID NO: 217723 - DNA, 101 bp, Homo sapiens
gccctggccctctcgctgttgctggtctctggctccctcctcccagggccaggcgccgctcagaacggcagtggagctactgctgtggttcaggcagccct

SEQ ID NO: 217724 - DNA, 90 bp, Homo sapiens
agcggaggtgggtcttcgtgctgctcgacgtgctgtgcttactggtcggaccggccagccttgcagctgtatgatccaggagctcgcttc

SEQ ID NO: 217725 - DNA, 100 bp, Homo sapiens
cgagccgcgaaccgagcgggcggcgggcgcgcgcaccatgggggagaaacccgggaccaggcgacgttgtggacgtttaccagcgggagttcctggcgct

SEQ ID NO: 217726 - DNA, 95 bp, Homo sapiens
ccccaagtagggggagtcgggggagatgtccagactgccataggcaacacactggtccaggacatctgttattctccagatacccaaaagctcct

SEQ ID NO: 217727 - DNA, 75 bp, Homo sapiens
gaaagcattaccgggttcgctaggctcacagatggaggagatgtataagaaagctcatgctgctatacgagagaa

SEQ ID NO: 217728 - DNA, 100 bp, Homo sapiens
tctaagaagcgaggcgaaacccaccagagatgctgcgtgcttctgcccacctcctcgtgtcaaaggtgaccattgtgaggtagatattttgttctaattt

SEQ ID NO: 217729 - DNA, 74 bp, Homo sapiens
cgcaaccccagatccatttacactttacatcttccaggatctcaaccagttctctcactgcagagtctggagaa

SEQ ID NO: 217730 - DNA, 90 bp, Homo sapiens
tcccaggaatctacatgacctgctattttcagatttctgaaatgtcaccttatcagtggacatcttcaataaggagctactgctaatccc

SEQ ID NO: 217731 - DNA, 100 bp, Homo sapiens
cccgcttcctagaccacccagaaatctacaggtcattcctggagatcctgcacacgtaccagattgcaggatacctatatggggtgagcccaccagataa

SEQ ID NO: 217732 - DNA, 75 bp, Homo sapiens
caggagtttggtcaaagcaaccgaaaaggagagtttcctggtccccagcctgggtaaagatggccccatggcccc

SEQ ID NO: 217733 - DNA, 88 bp, Homo sapiens
cgaaattgaaattacctccgagggaaacaagaaaacatcaaagaggtctagcaaaggaccctaaagtaaattggttgaagaaattaga

SEQ ID NO: 217734 - DNA, 83 bp, Homo sapiens
ctgaagacaaaaatccagaagtacaagcagtctggtattgtgttggctgcgtgccaggccttggagaacagcacgtccccgct

SEQ ID NO: 217735 - DNA, 101 bp, Homo sapiens
ggcttttggcggcctttctgctcctcgcggcccagggggccgtggagcccatgcagatcgacgtggacccccaggaagacccgcagaatgcacctgacgtc

SEQ ID NO: 217736 - DNA, 82 bp, Homo sapiens
gccagctgacggagatggtgcagaagatggaggaggttcatgcagcatcccaagaactttggcctgatcgcatcattcctgg

SEQ ID NO: 217737 - DNA, 90 bp, Homo sapiens
gaatctatgagatgaacaagagactgcagtctcgcacagaggatagaatttttgcggcatttgaagagctttttccagattatgtttaaa

SEQ ID NO: 217738 - DNA, 100 bp, Homo sapiens
gctcaggaatgtcagaacttagaggtggaatccatagagctccccatggacaacaagaccaataagaggcgtgggttctgctttattacctttaaggaag

SEQ ID NO: 217739 - DNA, 75 bp, Homo sapiens
tcgctgtcggaggagaatgagaccctggtggagtttgctattgaaaacacacccctggtggagatttaagatgct

SEQ ID NO: 217740 - DNA, 80 bp, Homo sapiens
agcaacagaggggactagcagcgaatatatgcctggagttactgtaaaagacgtgaaccagcaggagttcgtcagagctc

SEQ ID NO: 217741 - DNA, 100 bp, Homo sapiens
tctggcttctgtgtcgggcactgagtaccaagtgggtcccacctgcaccactgtctggaaatcctcattgacgattcaatttgttgaaggccaatttgtg

SEQ ID NO: 217742 - DNA, 98 bp, Homo sapiens
tctgcaacaactggtgccgtagcaacagctctaggactcaatgcattgaccaaggccttggacaagattcgctatgagagcctgacagacccttcgaa

SEQ ID NO: 217743 - DNA, 83 bp, Homo sapiens
ctgggatcccggccaccagcaattgtccggtgtcacaacataatgaaagttgctcaagccaaactggaaatgataaaacctga

SEQ ID NO: 217744 - DNA, 74 bp, Homo sapiens
ctgagcagtgacgagaacagcaatccagacctctctggagacgagaatagctcttcagtatccccatcagccag

SEQ ID NO: 217745 - DNA, 100 bp, Homo sapiens
tgatacctcaaacttcgatgagtttccagaatctgatattcttaagccaacaggtcagtcatatcatttggatcaaaaaatagaacaatcggagttgcag

SEQ ID NO: 217746 - DNA, 139 bp, Homo sapiens
cgcgtctcggcgcctttggtgctgcttcctgcgtggctcgtgatggtcgcctgcagcccgcactccttgaggatcggtcctggcagtcagtaacttttgaaaggcagcctgcctccttcatccgtatcgttgggacaca

SEQ ID NO: 217747 - DNA, 101 bp, Homo sapiens
accagaatgaaagtagtcaggtatccggagttactcgtggcttcctataacaacaatgaagatgcccctcatgagcctgatggtgtggcccttgtatggaa

SEQ ID NO: 217748 - DNA, 75 bp, Homo sapiens
acagaaacctggtctccctggcttctgcagaaagccgtcattacacctgattttgaaaaaaaccactgtgttcca

SEQ ID NO: 217749 - DNA, 83 bp, Homo sapiens
acctacatgggccataccggagctgtgtggtgtgtggacgctgactctgtggaataatggcaacagaaagactggctaactac

SEQ ID NO: 217750 - DNA, 90 bp, Homo sapiens
cgcctgttcccggggcagatccaggttcaggctccgagctctgtccagtggtgggagtattacatcccctcctctttctccagcattgcc

SEQ ID NO: 217751 - DNA, 50 bp, Homo sapiens
attctgcaagcaggcaacctgaatacagatgagattgtggggaacctggg

SEQ ID NO: 217752 - DNA, 76 bp, Homo sapiens
ccgaagaagaaaggattcgttacagccagagattggccaatggtggcagagtctacatagaactatgcttcgtggt

SEQ ID NO: 217753 - DNA, 50 bp, Homo sapiens
taggagctctgctcaaagccagacgtgccaaacccaagtctgaaatccac

SEQ ID NO: 217754 - DNA, 150 bp, Homo sapiens
aaagcccccaaatcgccctggaatcacttttgagattggtgctcgtttggaggcactggactacttacaaaaatgatattatgccttagaagtctcatatttcaaatcctctttggatcgcaaattgcttgagctgttgtggaataaata

SEQ ID NO: 217755 - DNA, 100 bp, Homo sapiens
ttctgaacccagccggctccatctcagcttctggtttctaagtccatgtgccaaaggctgccaggaaggagctcccctcccacccggtcactccgtccag

SEQ ID NO: 217756 - DNA, 87 bp, Homo sapiens
catctacaacccgaccaccggagaattcctggggcgcaccgccaagagctgggatgagtgagcagtttgccaggtacattgaccaac

SEQ ID NO: 217757 - DNA, 100 bp, Homo sapiens
gtcagcccgcgcgccggccggctccgttatggcgacccgcagccctggcgtcgtggtgccgctacctggctgttcagctgtctcctgccatccctgtatt

SEQ ID NO: 217758 - DNA, 99 bp, Homo sapiens
cgagcgccgcggacgcgtcatcgagtgtgacgtggtgaaagggagtgcatccgccccaacccttttccccctcgtctcctgtgagaattccccgtcgga

SEQ ID NO: 217759 - DNA, 75 bp, Homo sapiens
ggcctccccttggattcagacgccgattcgcccaggtacgacagtgccagcccacagggccatcctggtggcccg

SEQ ID NO: 217760 - DNA, 83 bp, Homo sapiens
gttcggtgtgccgtgggtccgcgctgcttccacccaacttcctgttagatatggctcgtggacagcagaaaattcagtctcag

SEQ ID NO: 217761 - DNA, 101 bp, Homo sapiens
agaatctgcagatggggctgctctcggccctgcctctggctgtggaaacaggcctccaagtacccaagcttaacagagcgttccaaaaagaggactctcca

SEQ ID NO: 217762 - DNA, 75 bp, Homo sapiens
gctggctgctgctcacatggtgtctgggcccttggcactccgctctgcagccagatggaacagctggagcaagag

SEQ ID NO: 217763 - DNA, 50 bp, Homo sapiens
ctgtgtgacaccaagataagtaacgccttagcagtaggaggactaggctc

SEQ ID NO: 217764 - DNA, 100 bp, Homo sapiens
gaagaggtcaaagaaacgtgggatggcatagtcaatccaacaataagaaaagatttgaaaactggaccgaaattctactgctgtccaattgaaggctgcc

SEQ ID NO: 217765 - DNA, 127 bp, Homo sapiens
ctaccatctcggactcccgacccgccgccggctccggccgcgtttcccgggtaaaggggttggtcaaagaaaaagtgatgtatgaaaaagaggcaaaacaacaagaagaaaagattgaaaaaatgag

SEQ ID NO: 217766 - DNA, 48 bp, Homo sapiens
taccacgtggcatgttaccactgtgagtagagacggggtttcgccgtg

SEQ ID NO: 217767 - DNA, 75 bp, Homo sapiens
ctgcctgcccggtgtctgcccctgaggagagaaggggttttgccatgttcgctaggctggtctcaaactcatgga

SEQ ID NO: 217768 - DNA, 51 bp, Homo sapiens
agcaggtcctgttggagatgatattctactcctttcaataaagaagagtta

SEQ ID NO: 217769 - DNA, 100 bp, Homo sapiens
cactgctcctctttctggctttcctgctcctggatcagtttgacaacttagaaaaacacacacagtggggaattgatattcttgagaaatatatcaagtt

SEQ ID NO: 217770 - DNA, 83 bp, Homo sapiens
ctgaaaatcatatagagaaagacagatggaagtctttaaggattttttatcaagcagaaatgcatcgaacaacgagaatcaag

SEQ ID NO: 217771 - DNA, 83 bp, Homo sapiens
tgcagcgggagctggacggcgagcgcgagcggcgcgagaaaatgctgtgtgctgtggacccacctggggttcatggagtgggc

SEQ ID NO: 217772 - DNA, 50 bp, Homo sapiens
cttgaacattgaaatgcacaagcagttccctgtattgaacactgatatac

SEQ ID NO: 217773 - DNA, 99 bp, Homo sapiens
gatttaaacaagagatttccacagaaggtgtcatggagaaactccagctgggcccagagattctgcagcgggaaaatccaaggcttatttatgccaggc

SEQ ID NO: 217774 - DNA, 88 bp, Homo sapiens
ccgcctgtgcgcctctgctgagtcccgcctgtcttggttagatggctctggattaggattctcactggaataccccaccattagttta

SEQ ID NO: 217775 - DNA, 82 bp, Homo sapiens
cccggcctgcgctcccatccacacgctcgaacatccagtcatggataaaaatgagctggttcagaaggccaaactggccgag

SEQ ID NO: 217776 - DNA, 100 bp, Homo sapiens
agcctgcaggacggcgcggcagagtccccgtacgcctacagtaacgatgaaggatttgggggcagagcacttggcaggtcatgaaggggtccaacttctc

SEQ ID NO: 217777 - DNA, 100 bp, Homo sapiens
gggattttccagcctgggcgctgacgccgcggacctccctgcgaccgtcgcggaccatgggcgacaaagggacccggtcactcctggaagcaaggcggct

SEQ ID NO: 217778 - DNA, 75 bp, Homo sapiens
tttcttttcctcagaactactatattcagtggctaaatggctccctgattcatgattacctctctagtgaccctt

SEQ ID NO: 217779 - DNA, 75 bp, Homo sapiens
cagggaggcagcagtggcagtccatcgaggggaccaaactctccatcacccaggcccgtggaacacagagcattc

SEQ ID NO: 217780 - DNA, 118 bp, Homo sapiens
gcagctgtgggagccccgagaacgcctccagcggggatgacacagaaggcctcattgctacgatttcagagtaccctggtaatagctgagcatgcaaatgattccctagcacccatta

SEQ ID NO: 217781 - DNA, 78 bp, Homo sapiens
gaagatgcaagcggtttgggaccttgaacaaggcaaatatggttttgggagttctgggaaatcgttcattcatttaca

SEQ ID NO: 217782 - DNA, 101 bp, Homo sapiens
ggaagaggagggcaagaagggcaagaaggctacgcagtgccagctggaggcggacgtgctgtggtctgacgtggtcagtcacccaccggaagggccatggc

SEQ ID NO: 217783 - DNA, 100 bp, Homo sapiens
ctgagtggttgtgtggtcgcgtctcggaaaccggtagcgcttgcagcatgggagttggtctctcagtccatgggcaatttcgagtggctacagaaaagtg

SEQ ID NO: 217784 - DNA, 74 bp, Homo sapiens
agaagcgtccctccaggagccaggaagcgctcctggttgcagccagaatgcatgacttcaggaggactgtgaag

SEQ ID NO: 217785 - DNA, 75 bp, Homo sapiens
ggaagaccaaagaggatgagaaggacgacaagcccatccgagagatgagcatcaggattttatggatgagcaaaa

SEQ ID NO: 217786 - DNA, 50 bp, Homo sapiens
agaatatttagaatgcaggatggagaggcagtacgccccgaggtgctccg

SEQ ID NO: 217787 - DNA, 82 bp, Homo sapiens
actgcgcagacctggtggaggtgttaaatgaaaggacacagcaggtcaggagagattcaacagcattacctcagcttattac

SEQ ID NO: 217788 - DNA, 100 bp, Homo sapiens
gcccaccgtagtggatcccgtcagcttcatgttctggaagggtgcttcaaggatgaccgcatcgtcttctggacttggatgttctccacctacttcatgg

SEQ ID NO: 217789 - DNA, 101 bp, Homo sapiens
ggaggaatgaagatggtgaaagaagagctatgataactcctgctctccgagaagcccttactaaacaagacagcacccaagaaaacctcatttggctcgct

SEQ ID NO: 217790 - DNA, 90 bp, Homo sapiens
gccgggcacctccgagcgcaaggacagcgcgaggtccgcgcagcccagcgcagccatccttatgccagcctggaccatcttggaggcagt

SEQ ID NO: 217791 - DNA, 100 bp, Homo sapiens
tgatcatcatgccgggcatgatcagccgcgcattgttcccaggtggacgtgctgcgggcactgggggctgagattgtgaggacgcccaccaatgccaggt

SEQ ID NO: 217792 - DNA, 98 bp, Homo sapiens
cagccgggctggtcctgctgcgagccggcggcccggagtggggcggcgggtgtactattgactggaagaaaggaaagaatgttactgtcaaaaccatc

SEQ ID NO: 217793 - DNA, 80 bp, Homo sapiens
caaagcctgcccagacggctcacctgtgcgggatggaacaaaaggccacggcgtatgcctccaaggacggggtcctgacc

SEQ ID NO: 217794 - DNA, 100 bp, Homo sapiens
caggctttatgggagcatgggttaccagcgacgcaccctaaaaactgcttaaggttgaaaagagaaatttaagaaattgctgacggaataaaaacataat

SEQ ID NO: 217795 - DNA, 75 bp, Homo sapiens
tcctcagcagcaccggcttctttttgaagtgtttgacgaaaaccgattgtttattaaccttgcaagaactcttca

SEQ ID NO: 217796 - DNA, 90 bp, Homo sapiens
tgagcacttacctcctggagaaatccagagttgtctttcaagccattttcgaccagagtttattcgtccaccgcctccactccacatttg

SEQ ID NO: 217797 - DNA, 90 bp, Homo sapiens
acaggcatagatgaccgcaagtgcatgggtattgtgtcactctgtctgctgtttgaaactcttcttcaaacttatcttccccaactcttt

SEQ ID NO: 217798 - DNA, 90 bp, Homo sapiens
ctcaaatcaaccacaagctggagtgctacacacgcagggccctgtcgatggcagcctttacgcgaaggtgaggaagaaaagctcctcgga

SEQ ID NO: 217799 - DNA, 82 bp, Homo sapiens
ggaagaccgcgcgcagggcctgcagcgggagctggacggcgagcgcgagcggcgcgagaaaatctaccccaacgagagacac

SEQ ID NO: 217800 - DNA, 74 bp, Homo sapiens
tcagccttcccagtagctgggaccacaggagacagcaatatgttgggaaggtcaagtttgcctccttggaattt

SEQ ID NO: 217801 - DNA, 50 bp, Homo sapiens
cagagcccatcaagcccgagcagatacatccagaaagtgcccagaagaaa

SEQ ID NO: 217802 - DNA, 100 bp, Homo sapiens
tggaacaggaggagtaagattgagtggcatgccctctcccgtgaagagcaggctaaatattatgaattagcacggaaagaaagacagctacatatgcagc

SEQ ID NO: 217803 - DNA, 100 bp, Homo sapiens
ttttccctctccctttccctaagggagcactcaacatcagtgatagaaccatacctcagccccccattcttcagctttcagtggagaagctgagcagaga

SEQ ID NO: 217804 - DNA, 96 bp, Homo sapiens
tcagcgacagcagcggcttcagcgactcggagaatgttactcctccacaaacatctggttatatagaagtcactgatcttcaatcaaagaaactcc

SEQ ID NO: 217805 - DNA, 100 bp, Homo sapiens
cagagagggaagagattcagccagcacactcctcgcgagcaagggtgtgattaggcccactgggggatacgctgtcatgctacactggtcaatgtcttcc

SEQ ID NO: 217806 - DNA, 100 bp, Homo sapiens
ggaagaacaaaggaaggggagcccgggacccccgggggcgcagaaacagagctgtcagtcagtgctgaattagtgcctacctcatcatggaacatctcaa

SEQ ID NO: 217807 - DNA, 75 bp, Homo sapiens
gtataaaggatgggttttaactacagacccagtctctgccaaaaactgttcaggttccattatcaaaacgagcaa

SEQ ID NO: 217808 - DNA, 99 bp, Homo sapiens
atgctttccacccacaaagattgaacgacatgccatgtactgcaatggtctgatggaggaagatacagggttacacatcattttggaatgactgtatat

SEQ ID NO: 217809 - DNA, 74 bp, Homo sapiens
aaagggcgtgtgggcaccgtgggttacatgggtactatgcgcctgcaggacctacctcagcccaaccagctgcc

SEQ ID NO: 217810 - DNA, 75 bp, Homo sapiens
gtggggccttttgacaactccaatgttgactatagctgatctggccaatgaagatactccacagttgtatgtggc

SEQ ID NO: 217811 - DNA, 90 bp, Homo sapiens
gttgttttttcctgtatgaagcggttggcaccactgaagtgaccgaatgaggattggtagcttatgtcgatcttgatgaaagagcaattg

SEQ ID NO: 217812 - DNA, 101 bp, Homo sapiens
cgagggcgccgggagccgcggcccggaatcggggcgcttcgccccgggccccccagcatgaagaccccggcggacacaggacagctggcctgaagctcaga

SEQ ID NO: 217813 - DNA, 80 bp, Homo sapiens
gcttccttcgttattggagccaggcctacaccccaggtttttagaacttcagccataaaaatgggcagaattttccttga

SEQ ID NO: 217814 - DNA, 90 bp, Homo sapiens
ctcgcaacaaactatttgtcgcagatgccgacatcagtggctcagacagttgtccagaaggaaagtggcctgcagcacacccgaaagatg

SEQ ID NO: 217815 - DNA, 83 bp, Homo sapiens
gagcgataaacactcgctggagagggagacgcaggaagcgatgaaagagatgtctgctctgaagatgatgagaaactgaaaaa

SEQ ID NO: 217816 - DNA, 100 bp, Homo sapiens
ctcctttctccgcggcgttggtggccagacgggctggtgcagcgactgcagccgacgccgttcaaaggaacgaggtgctggagaatctggtaaaagcacc

SEQ ID NO: 217817 - DNA, 97 bp, Homo sapiens
gccgaaagagcccataatgatgtcatggaagttctgcataagcatggcgccaagacaactgatcaatactgggttccatgtttacatgatgaaactg

SEQ ID NO: 217818 - DNA, 75 bp, Homo sapiens
aggacatggagtatgaaagacggcgcagacggggaagcggagccaacatgccagtggcccggagctgggtttgtc

SEQ ID NO: 217819 - DNA, 75 bp, Homo sapiens
atatggtgatcttcttgtatctggccagtgtgaagaggaagagcctattcaggaaatggcccgccagctgctggc

SEQ ID NO: 217820 - DNA, 77 bp, Homo sapiens
ctttcagcgatatgaagttaaaaccaggctgtcttcacagatttggagatcctggctgccatttttgcagctgccat

SEQ ID NO: 217821 - DNA, 83 bp, Homo sapiens
atgacatatttttggacctgaaacagaaattctggaacacctatatgagagatcaaccagctttcactcctagtggaatatta

SEQ ID NO: 217822 - DNA, 74 bp, Homo sapiens
cttcgaggaacagagaaaatgaaaccagcagacagaatttgtcagtctgtaagtacactgttcacgaccagtgt

SEQ ID NO: 217823 - DNA, 83 bp, Homo sapiens
ccggacggtacttctgccactgctgctccgtggagatcgtcccgcgcctgccgaaagtttcctacactactgaggtttagggg

SEQ ID NO: 217824 - DNA, 75 bp, Homo sapiens
aggcgaacgcttcgctggccatttaggagctctgctcaaagccagacggtgccagatgtgacatccagatgaccc

SEQ ID NO: 217825 - DNA, 82 bp, Homo sapiens
caagcagcccaccttctgcagccactgcaccgacttcatctggatagaagatcttggcgttgtggtagattgccttcctgtg

SEQ ID NO: 217826 - DNA, 99 bp, Homo sapiens
ggaaaagattttgcatctagaggaattgaaattgctttgcggagtcaggccagtgctcatgccggcctcacatgattggacgtcagtgcaacgaagtgg

SEQ ID NO: 217827 - DNA, 100 bp, Homo sapiens
gtgtgaagattgggaagtggttcctgaacctgttgccagatggtgcaatgttcaaagtactcaagatgaatttgaggccaccataccatttacatcggag

SEQ ID NO: 217828 - DNA, 51 bp, Homo sapiens
tggggagtttcatcctagcggatgtagccatagctgtaacgtataaccatg

SEQ ID NO: 217829 - DNA, 100 bp, Homo sapiens
ttaatgtctgcaagagcacgctatgagagatacagtggcaatcaggttctcttttggctcatagcctcaggagtggtgatgcgcccctatgtggaggcca

SEQ ID NO: 217830 - DNA, 100 bp, Homo sapiens
actgatctttgctggcaagcagctggaagatggacgtactttgtctgactacaatattcaaaagatgagttatcaccaccttgttctgaacaacacaaca

SEQ ID NO: 217831 - DNA, 97 bp, Homo sapiens
ctttatccaagaggaacagatcctggagatcgattgcaccatgctcacccctgagccagttttaaattctgcaggctggaaatccaagatgaagtca

SEQ ID NO: 217832 - DNA, 95 bp, Homo sapiens
gagagttttctagaagcctgtcgaaaaatgggggtgcctgaggtcatagagctgcccaacatccagaaggtcgaagtgtacccagtagaactgct

SEQ ID NO: 217833 - DNA, 90 bp, Homo sapiens
cctgcgaaggtggcggcgctgctgctcgggctgctcttggagggtgactatgaccagagcaggaccaaagtgctgcacatgagcctgaac

SEQ ID NO: 217834 - DNA, 75 bp, Homo sapiens
catacctcagattcattgtctcccgcatgaaggagaggctgcgttcctttgcctgcaacaggggtcaagatgagt

SEQ ID NO: 217835 - DNA, 83 bp, Homo sapiens
caggttcccacgctggcgcccggcgaccgggtggggctgcggtctgcgaggctaagtgtctccgcggcgcacctcgcggcgag

SEQ ID NO: 217836 - DNA, 100 bp, Homo sapiens
ggcggagctgtgcgagagcctcctcacttggtccacaagaatcggaatgtcagttaatgctattcgcaagcagagtacagatgaggaagttacatctttg

SEQ ID NO: 217837 - DNA, 90 bp, Homo sapiens
cctcccgggtagctgggactacagtcctcgcagtccgcctgagagagtagagaagaccccctcccagaaccttcctgtaaggtctccccg

SEQ ID NO: 217838 - DNA, 100 bp, Homo sapiens
gcctctgcggctccaggagggcgcaggagcgggactgagagcgcctggaggctcgagcggagggtcctggctataagtcaccatggcacagcaagctgcc

SEQ ID NO: 217839 - DNA, 83 bp, Homo sapiens
gtcatgagctttgtgaacctgggatttttagactctgaggagcagttggagctaatccacattatggaaatggaaaccaccga

SEQ ID NO: 217840 - DNA, 46 bp, Homo sapiens
gcgtgaaccacatgcccagcacggacccttctcaggtgcagccaga

SEQ ID NO: 217841 - DNA, 75 bp, Homo sapiens
tcttcctggacatgaccaactggttctctacttaaaagacaatgactactgatgaaggtgccaagaacaatgaag

SEQ ID NO: 217842 - DNA, 75 bp, Homo sapiens
cctgagggcagctgttcccactggctctgctgaccttgtgccttggtctcctttacagaaaggggcttggataag

SEQ ID NO: 217843 - DNA, 87 bp, Homo sapiens
tgactgctacacctcagcccggggctgcactgccaccctgggcaacttcggctctggaagcaaacaccatctctacagcctcagtaa

SEQ ID NO: 217844 - DNA, 100 bp, Homo sapiens
acagaagagcttctcctcatcaactggggatgattacagttcttcctaaaaaagtcttgcctccagattaactttggctgagctaaatcagatcctttac

SEQ ID NO: 217845 - DNA, 117 bp, Homo sapiens
cgcctctccgccccgcgtccagctcgcccagctcgcccagcgtccgccgcgcctcggccaagacaatgcagatcttcgtgaagactctgactggtaagaccatcaccctcgaggttg

SEQ ID NO: 217846 - DNA, 97 bp, Homo sapiens
tgaactgaagggacagggaacagccagacgagagcttcagccatcacgaggatgatttcggaacctggagaaaatgaccatggccaacctggagcgc

SEQ ID NO: 217847 - DNA, 83 bp, Homo sapiens
catcgtccgcagacgccgccaccgccatgggctcctgagcctcccgcgacgatgcccctcaacgttagcttcaccaacaggaa

SEQ ID NO: 217848 - DNA, 96 bp, Homo sapiens
gaacgaggcaaggagctaaagcagcgtgcgttcagccctgggcgctggccgcgcgccgaacccgagtccggcggcaccgacgacgacctcaacagc

SEQ ID NO: 217849 - DNA, 83 bp, Homo sapiens
atcctccttcagcctcctggcgcccatccgcagcaaggacgtccgcagcaggaagcaggtcctggggaccaaggtggacgcgg

SEQ ID NO: 217850 - DNA, 82 bp, Homo sapiens
agcgcccggattggggatgagtatgcggaggacagctctgatgaggaggtcctgcctcccagcttgatggtggccggcgtgt

SEQ ID NO: 217851 - DNA, 96 bp, Homo sapiens
gagctggcggacatcactttagaccctccacctaattgcagattttaccaaatgttgcaagaactctggagttcttatggtagtaaaatgccggaa

SEQ ID NO: 217852 - DNA, 75 bp, Homo sapiens
gaagagctatggtgaaacaccactgaagcattgccaaggaatactcccccagttgcaagaggcgcaggaccgtgg

SEQ ID NO: 217853 - DNA, 75 bp, Homo sapiens
atatgtgcaaattcttcatcttacagcaagctgttgcaagaggattttttaactatattgaaaaactgaagtatg

SEQ ID NO: 217854 - DNA, 98 bp, Homo sapiens
aacagacgtggaaccggccatgcaagtaattgagaatgtaactggtcactacatttccccctttcatgatattcctctgaaggtgaactctaaagagg

SEQ ID NO: 217855 - DNA, 101 bp, Homo sapiens
ctgcctcaggtttatttgtacaaatagcacaggaggagagcgcagatgcccgggcccccagcgggaaggtgcggcgttgggaccagggcctggagaagccc

SEQ ID NO: 217856 - DNA, 100 bp, Homo sapiens
gctttggagggagaaaggagattgcctcggattccgacagcaggaccttgcctcatagtattcgatcagattcagaagatatctgtttatttacgaagga

SEQ ID NO: 217857 - DNA, 90 bp, Homo sapiens
gagatggaaacctcatagcagctgcctgccagaatggaagcatacagatctgggaccgaaatttgacttgcgagatgaggacagaagcac

SEQ ID NO: 217858 - DNA, 49 bp, Homo sapiens
tccatctccagccataggtttaatgaagcttgacctcagagatgatgtg

SEQ ID NO: 217859 - DNA, 74 bp, Homo sapiens
ggtcacggaggtagtcatgatctatgacgccgagaagcagaggccccgaggtctgccatcatggatgttctcgc

SEQ ID NO: 217860 - DNA, 100 bp, Homo sapiens
gctgtgcaaggactgccaggtgatcgacggcaggaacgtgaccgtcactgacgtggacatcgtcttcagcaagatcaaaatccagacatctgttgagccc

SEQ ID NO: 217861 - DNA, 87 bp, Homo sapiens
ggggggtccgcgccctgcagaccatcccacaggggaccttcatctgcgattccacaggcgcatgggccacgtttccagtgcttggtg

SEQ ID NO: 217862 - DNA, 101 bp, Homo sapiens
cttcaacggaaactagctcatctgtagagactgatttgcaacccttccgggaagccatagctctgcatggtacgtgtgcattgctatggaggctttggacc

SEQ ID NO: 217863 - DNA, 100 bp, Homo sapiens
ggaggagctggagtgcggggcgcccggcgccaggggagccgccacagttcccagtgacctgacagcagaggagcgtcaagaactggagaacatccgacgg

SEQ ID NO: 217864 - DNA, 100 bp, Homo sapiens
gacaagatgcgccgcgccagctcctactcctccctcaactccctcatcggcaagtgaaccggagcaaacgacttccgatccagtctgcgctgttgcggct

SEQ ID NO: 217865 - DNA, 75 bp, Homo sapiens
gcagcccaggctgcacatcaggggactgcctcgtctggcttcagccttgtcatgaaccacccagcctgtgtcaat

SEQ ID NO: 217866 - DNA, 100 bp, Homo sapiens
ggcccggttttatggtgcagagattgtctcggctcttgagtacttgcactcgcgggacgtggtataccgcgacatcaagaatactgcaccgccaacgcag

SEQ ID NO: 217867 - DNA, 83 bp, Homo sapiens
aatgtccatggatttgtttctcattctcatatttcaccaataaagaatatcctccgaatcctaaatctagagctccaaggatg

SEQ ID NO: 217868 - DNA, 75 bp, Homo sapiens
ggagcggcgggcggcgagcagaggagctaacaggtttctgcataaagaccaactcctcggaagggaaggttttca

SEQ ID NO: 217869 - DNA, 164 bp, Homo sapiens
gacaagcaaacaagccagaactgctcaggcagctccgtagcatgaggaagagtcaggggcacagagagatggagagagacctagttagttccacccaatctgactgttccacaggaaaaatcaccattggtcaccagagaaggagacacaatagaactgcaatg

SEQ ID NO: 217870 - DNA, 75 bp, Homo sapiens
ctaggagatctcctcaaagaagtttgtccttctgctattgatcctgaagctcttttggtacaccagaaggccaga

SEQ ID NO: 217871 - DNA, 97 bp, Homo sapiens
gcagtgggaaaaatggaccaacttctttggcaagtggacattttactggctcaaagcattggggagtcagcaatgtccgttgtgttaaatcagctgc

SEQ ID NO: 217872 - DNA, 100 bp, Homo sapiens
agaacatccgcgtggttcgttgtggcggcagcgagttgaactttaggagagctgtgttctctgcagattctaagcatgtggagaccccaaggcaaaacca

SEQ ID NO: 217873 - DNA, 100 bp, Homo sapiens
cgacgggctgcggagccgcgtcaaatacggggtgaagaccacccccgaggtgatgtgtccaatctagatcccaacttctcatttgaaggcaccaaactgg

SEQ ID NO: 217874 - DNA, 90 bp, Homo sapiens
ggtgacaggccgtcgcatcggcaacaacttcatggacggcctcaaagatggcatcattctttgcgaatgtgcactcccagcaacacccct

SEQ ID NO: 217875 - DNA, 74 bp, Homo sapiens
agatcggcctcagcccccgcaaggatggcctttcctaccagggccgttgctccagggagaactgcaaatatctt

SEQ ID NO: 217876 - DNA, 75 bp, Homo sapiens
atcgacaaggaagatttgcatgatatgcttgcttcattgggtcaagttgaagaagcaagattaaaagaggcccaa

SEQ ID NO: 217877 - DNA, 96 bp, Homo sapiens
gggggagggctccgggagggagtgcctggccaggccggcctgtctgccgcgatggatgacagtaaggcagacctcaacaccaacatcgaggatgaa

SEQ ID NO: 217878 - DNA, 75 bp, Homo sapiens
cccaactccacccagcgctaccggctggaagccctcaagatgtgacaagccgaggcggtgagccgggcaggagga

SEQ ID NO: 217879 - DNA, 74 bp, Homo sapiens
gattccaagtaactcttatttggtaaagagaaatgtgtatgaccttacaagtatccccgttcgccaccaattat

SEQ ID NO: 217880 - DNA, 75 bp, Homo sapiens
gaagaagatgtactgggagatgaaacagaggaagtggccatgaggactgtgaagaagtcctcggtgatgcgtgag

SEQ ID NO: 217881 - DNA, 73 bp, Homo sapiens
tttggacctgaaacagaaattctggaacacctatatgacaggaattccaggcttggactggagtgaagccctc

SEQ ID NO: 217882 - DNA, 90 bp, Homo sapiens
agtgattcttctgcctcagcctcccagcaggaggagcaatctcagaactgttatgaagaccttcgaagttcttcattctttctcactttg

SEQ ID NO: 217883 - DNA, 98 bp, Homo sapiens
ggaagtttgtctggattttcctgtagaactgagggcagacgctctgctgttgcccgtattcaggagttcttcagacggagaaaagaaaggaaagaaat

SEQ ID NO: 217884 - DNA, 142 bp, Homo sapiens
cagcaaagtatggacagtaaattatcaggaagatatcggcgacattgtggacttggcttcagtgagtgggagccaagaagaaaggtttgctcccgggtggaacagggattatcctcctcctccccttaagagtcatgctcaa

SEQ ID NO: 217885 - DNA, 80 bp, Homo sapiens
caaccgtcattgactctgctcaccagcccagggagtgcatccgccccaacccttttccccctcgtctcctgtgagaattc

SEQ ID NO: 217886 - DNA, 50 bp, Homo sapiens
ggattccaagtaactcttatttgatactgaacggctgtattcagtggtgt

SEQ ID NO: 217887 - DNA, 100 bp, Homo sapiens
ctggtctcgaactcccgacctcaggcattgaacctggccacatcccaggtaccgtgaacatccccttcacagacttcctgagccaggaggggctggagaa

SEQ ID NO: 217888 - DNA, 99 bp, Homo sapiens
cagaaagaaggggttcctggtcatacaccagtactaccaaggacagcttttttcctgcaagaagtccttggatgaggatgacctaggtcctagaagggt

SEQ ID NO: 217889 - DNA, 51 bp, Homo sapiens
actgatgaagctgtggtgataaaaggggagcgacctttcaaatgtaatgag

SEQ ID NO: 217890 - DNA, 75 bp, Homo sapiens
agcttcgagaagattggctacacaggtgctggagaatctggtaaaagcaccattgtgaagcagatgaggatcctg

SEQ ID NO: 217891 - DNA, 98 bp, Homo sapiens
ttgaccagattccttttctggcagtagcaagagcacttggtgctggagaatctggtaaaagcaccattgtgaagcagatgaggatcctgcatgttaat

SEQ ID NO: 217892 - DNA, 100 bp, Homo sapiens
ccgttatcatccattcttatatgatagagaaacttaccctgatgatccatgctttccatcaagtcaaatttgttggggcataaaggtgaagtggcagaag

SEQ ID NO: 217893 - DNA, 75 bp, Homo sapiens
aaagaacagaatgctaaggaagctgtggcaattacagctcttttgaggaagcttaagcagcaatccagggaaagt

SEQ ID NO: 217894 - DNA, 100 bp, Homo sapiens
agctcctggaactttctcatcttttcagcatctcaaccctgtggaatcttttaactcccaagttattcaagcggagaaatgttgctacagcagaagaaga

SEQ ID NO: 217895 - DNA, 76 bp, Homo sapiens
acgcaaccccagatccatttacactttacaaaccttcaacaactagtactgcttcaaattatccagatgtgttaac

SEQ ID NO: 217896 - DNA, 76 bp, Homo sapiens
ctcctgtggacaagccagtgctaccccattcacagacatcaagaccacagagtattcagccatggcctcgctggct

SEQ ID NO: 217897 - DNA, 87 bp, Homo sapiens
ttcgcatgtgcaaggacctgaagcatctcatctattatcgtttcaacacgagagcagcacttgaggcatgtcacaagggctggggcg

SEQ ID NO: 217898 - DNA, 101 bp, Homo sapiens
tagagttcagcttccaaagagatacagggcagaggaaaatgcaagaagactgatggagcaggcttgcaatattaaaatgatcatgggaacagcaatagtag

SEQ ID NO: 217899 - DNA, 98 bp, Homo sapiens
atccgaagaggaagggcggtccgggctccacacttagcttcgctggagtgcagtggcgagatctcgactcactgcaggctccgactccccagttcaag

SEQ ID NO: 217900 - DNA, 100 bp, Homo sapiens
cagtgaacagacacgggtgaatgctgctaaaaacaagactggggctgctcccatcattgatgtggtgcgatcgtgctgaggaatgtaaacaagtttgctg

SEQ ID NO: 217901 - DNA, 123 bp, Homo sapiens
cgcaaagcggggacccagaccctggagcctcagttggaagcagccgatccagcctgcggagcctgtggggcagaacatggtccaagacaattcctgggaaagttcagttcttctcaagtgagg

SEQ ID NO: 217902 - DNA, 75 bp, Homo sapiens
cacctctgcagtgtcttccacaacctgggtcaaaatgcagatcttcgtgaaaacccttaccggcaagaccatcac

SEQ ID NO: 217903 - DNA, 90 bp, Homo sapiens
tgagcagggcttcctctggagcttcttgggacctgtgaccttcatcattttgagtgagcctcgcagctggtccctgctagagcagctggg

SEQ ID NO: 217904 - DNA, 82 bp, Homo sapiens
tcaccaaggaactggtgctgcagcgagagtttttcagaagaagtgaagtcaagatgaagaaccatttgcttttctggggagt

SEQ ID NO: 217905 - DNA, 100 bp, Homo sapiens
cgccgccgccgcaggccgggaggagccgcagcgccgggcgaccccgcccgggcctcgggtgattgtagagaaggctccaaaagccagggtgcctgatctg

SEQ ID NO: 217906 - DNA, 100 bp, Homo sapiens
cccagagtgacctagaacagaccaagacacgacatctagccctgaatctgcagggactatgcagccatcgtcttctttgctaacaaccgctttgagacag

SEQ ID NO: 217907 - DNA, 110 bp, Homo sapiens
gtagatttgaagcgcttcaaaggaccggacccagagaagaggaaaactctaccggtgcagggacagatatggcttttctaaagactgctttggaaatggcaagaacagca

SEQ ID NO: 217908 - DNA, 75 bp, Homo sapiens
ccaacattcttggcattacgcaggccagcaactcccagctcaatgcaatgatgtgttttcgcattataacaagga

SEQ ID NO: 217909 - DNA, 75 bp, Homo sapiens
tggaaaaccagatccagaaactggaggagtcccgctcgaagctagactgaccccaattcttggcattcagaaaca

SEQ ID NO: 217910 - DNA, 75 bp, Homo sapiens
ggcagcagctgcctcaagaggagcaggtaagaatgattgatgttggctgatattggagtgctcattcacatgaag

SEQ ID NO: 217911 - DNA, 88 bp, Homo sapiens
aaaatggagaaaagcaatacaaactgggtggacattacccaagattttgaagaagcttgtcgagttgaagggatctgaactggaaatt

SEQ ID NO: 217912 - DNA, 90 bp, Homo sapiens
gaacggactgcatccgagccctgatgctagcagagcttacaagaccctatgaaaaaattagttgagaaagaagagaagaagaaaatcaac

SEQ ID NO: 217913 - DNA, 51 bp, Homo sapiens
aactgggctggcggccaggatggttcttagccttgttgtcctcctggtgcg

SEQ ID NO: 217914 - DNA, 100 bp, Homo sapiens
cctggattttcttctaggcttctcggccggcactgagtacatggacctgcagaatgacctaggccagctgattgggcagaaagtggcccatgctctggca

SEQ ID NO: 217915 - DNA, 51 bp, Homo sapiens
caggggaggaagccacctcgagtgtaaacaggaacatcgataagtagtgta

SEQ ID NO: 217916 - DNA, 82 bp, Homo sapiens
cccgggcagagaaggtacagtacttcttccttccaaggaccagcggtagctcccgggttgatattcactgatggactccaaa

SEQ ID NO: 217917 - DNA, 76 bp, Homo sapiens
ggcaatgggactgatggtgccattttcttttagtatatttccacagattggacagtcaccaggagactaaagtcca

SEQ ID NO: 217918 - DNA, 83 bp, Homo sapiens
ggtggtcggatttcaccacaagaagggctgccaggatattagaaatggctactccccagtcaattttcatctttgcaatctgc

SEQ ID NO: 217919 - DNA, 82 bp, Homo sapiens
tcgttggctgccgtccccgctgctgtgcattgggccaagtcctgtatctgccatgtctgtggcgtccacctcaacaggctgc

SEQ ID NO: 217920 - DNA, 102 bp, Homo sapiens
gccgccggcaccagcctctatgtgcggcctgtgctcattgggaacgaggtcccattaagcaactaccagattttaaacagatacgcagtaacatgtgttggc

SEQ ID NO: 217921 - DNA, 78 bp, Homo sapiens
acagggacctaaagccggaaaacatcctctgtgagcaccccaaccagtgaccaaagacttgaccactcaaagtccagc

SEQ ID NO: 217922 - DNA, 80 bp, Homo sapiens
tagcatcaaccatctggatattgctccttcggccaggaaggaatactgggagaatcttcggatagcctcaggccggccat

SEQ ID NO: 217923 - DNA, 111 bp, Homo sapiens
ggctggcgctgcgatggtgacgcggactgtgatgaccagtctgatgagcgcaactgcaagtctgaaaagtgtcgaagagacagttttcaggaacaacaagcaattattcct

SEQ ID NO: 217924 - DNA, 75 bp, Homo sapiens
ccggagccgtgtggaccaggaggagcgcttatttagcgtggactacaatgatgaactggatatcttggtgagcgg

SEQ ID NO: 217925 - DNA, 100 bp, Homo sapiens
cctaagggatgctgaagccaaccagctcaaggaagagttggaaaaagtaacaagacttacccaggggctgggcctgtatgctgctcgagacattgagaaa

SEQ ID NO: 217926 - DNA, 101 bp, Homo sapiens
agagaaggcactcaagtttatgtacgaggatgtcgtccaggaaagattgtgcagatgactgaagcagaagttcgaggcttatgtatcaagtctcgggagat

SEQ ID NO: 217927 - DNA, 98 bp, Homo sapiens
gaaccttggagagaggagaacgaacatcttctggacctttgtccagagcctccattatggcatgctgaatttaccaaagaagaattggttcagaagct

SEQ ID NO: 217928 - DNA, 100 bp, Homo sapiens
agattttgaagatgatgatctctacggccagtctgtagaggatgattattgtatttcgccgtcaacagatggagcagcatattgtatgggacgtatgaat

SEQ ID NO: 217929 - DNA, 50 bp, Homo sapiens
cgccgctggcttcaagtgcaagattcatgttacatgtaaagctgtcctca

SEQ ID NO: 217930 - DNA, 100 bp, Homo sapiens
atcttccaactggacaacctctctccccaaatatgcctccagagcagcccgacggccatggaggctgaagagacgatggaatgccttcaggagttccctg

SEQ ID NO: 217931 - DNA, 100 bp, Homo sapiens
aagcaagcaagatacgagagcttttagcagagaagagtcagcaagccgcttacagatgattctgaatgagattcagcctcgagatactaatgattatttt

SEQ ID NO: 217932 - DNA, 88 bp, Homo sapiens
tcgcagtggtcgcttcttctccttggggtccccacggagtctggaccatggaggagcgaggtctggcccccaagttcgacaccacctt

SEQ ID NO: 217933 - DNA, 75 bp, Homo sapiens
gacaccatggatctcttcaggcacactacagaactaaatatgcataggcggggtttcaccatgttgcccagactg

SEQ ID NO: 217934 - DNA, 96 bp, Homo sapiens
gaattgacagaaaaggattctgtgaagatgacgcctcctttgtggcagccatcccttcgacccaggtcgtctacttcttcttcgaggagacagcca

SEQ ID NO: 217935 - DNA, 80 bp, Homo sapiens
tcggcggccccggcgccggcaaggggacccagtgcgcccgcatcgtcgagcctcctgacaaggtgatccgggcgggcccc

SEQ ID NO: 217936 - DNA, 76 bp, Homo sapiens
cggcacttcggctgcagagttttgcccacgcttcgagacttagggagcagctatgctaagaaggaatctgatctta

SEQ ID NO: 217937 - DNA, 74 bp, Homo sapiens
tttgcagcgtagcccgagtcggtcagcgccggagtactatactggcaattgctggagaagattttgcaattgtt

SEQ ID NO: 217938 - DNA, 50 bp, Homo sapiens
ggagatggtggaggaggctgaagaggaaggaacagagccacagagaaaaa

SEQ ID NO: 217939 - DNA, 50 bp, Homo sapiens
caaatacccctttgaattaattatggcttcataccctaatgatcccagca

SEQ ID NO: 217940 - DNA, 100 bp, Homo sapiens
ttgtttgtcaccacaaaaaggacagaataaagccattattgcccgtgtcacaaccttgtcagatgtagtagttggtctggaatcatttattggttctgag

SEQ ID NO: 217941 - DNA, 101 bp, Homo sapiens
tttgtgtggagcacacattgaatgggccaaggaaaaatcgagcagaaagaatgtctttcaggagtttgggctttgcaaaactgagaacaaagccaagtcgg

SEQ ID NO: 217942 - DNA, 100 bp, Homo sapiens
tcaggcgtgcgcggacggtgtgcggacaagttggatggcttgaggactggtactaaaaggaaacgtgactgggaggccattgccagcagaatggaggatt

SEQ ID NO: 217943 - DNA, 74 bp, Homo sapiens
tggacatcgagatcgccacctaccgcaagctgctggagggcgaggagagccgggtttgtgaaacaggatctgat

SEQ ID NO: 217944 - DNA, 90 bp, Homo sapiens
aattttctgtacaccaatggaaagtgcgtcatcctaaggaacatcgacgtctccgtgttggtcctcttcgccctggccttcctcacctgc

SEQ ID NO: 217945 - DNA, 75 bp, Homo sapiens
ggaaattctgacatgttagtggtgaccacaaaagcaggccttcttgagatcttgtcacaaatacagaagtatgat

SEQ ID NO: 217946 - DNA, 51 bp, Homo sapiens
aaagtagctgtcattggtggtggcttgatgtttccattcctgaaaaaccca

SEQ ID NO: 217947 - DNA, 83 bp, Homo sapiens
gctggcagcctccccgggtgcctccgcggttcatcatgcctagtggcgtataagaagaccccgccaccggtccctccacgcac

SEQ ID NO: 217948 - DNA, 100 bp, Homo sapiens
cagaactttggtctccagcatctctccagcggccacttcttgcgggagaacatcaaggccagcaccgacttgtgcaccatggacaattttgctgagggag

SEQ ID NO: 217949 - DNA, 75 bp, Homo sapiens
gctggactcggattcgttgcctgagattgagaggatccagaatccagatctctggaatagctaccaggcaaagaa

SEQ ID NO: 217950 - DNA, 100 bp, Homo sapiens
gaagaagcggaaaaaagaaaactctagaagtctggatgtcggtgggcctctgagatatgccgtttacgggacacattcagctaacgtattttagcaggtg

SEQ ID NO: 217951 - DNA, 82 bp, Homo sapiens
ggttccagctgcccgcacgccccgaccttccatcgtagaaatcaatggtgcctgctctgcctgtggggggctggtggtgccc

SEQ ID NO: 217952 - DNA, 90 bp, Homo sapiens
gaggcggcgggctggagacatggaccgcggcgagcaagctgagatctgtatctgtggacctgaatgttgatccctcgcttcagattgaca

SEQ ID NO: 217953 - DNA, 83 bp, Homo sapiens
cgggcagtttgtcgaacgatgttggactcatagtcactgccagaaagtttcagaaaatgatcagagctttgaagtgaccatga

SEQ ID NO: 217954 - DNA, 100 bp, Homo sapiens
gaaagatgtgctcttggacgtggcctatgcctatgagctagagccggtgcaggccacgcagaacaagacagggaagtatgtgccgccgagcctgcgcgac

SEQ ID NO: 217955 - DNA, 80 bp, Homo sapiens
tccggcccgggacggaggagccggcgctcgacacagaggtctcggcgcggaagatggccggcggcgtggacggccccatc

SEQ ID NO: 217956 - DNA, 100 bp, Homo sapiens
gttggaacacagcagagggtgtgtaataaaatacaggttacttcctcagaatgttggcctcctgtatgttggaggttatgaaagaccctttgcacaaatc

SEQ ID NO: 217957 - DNA, 98 bp, Homo sapiens
gctaactccagaatcccccattggtggcagcatcttgagtactcgctgttctgaaacttacgaaaccaaaacggcgctgatgagtctgtttgggatcc

SEQ ID NO: 217958 - DNA, 100 bp, Homo sapiens
tgaagccagccagaccaggaacccaccagaaggaaccaattccggacacataacaagcagcagtgaggacaccaaaggcaaaatgtttagaaagtgagaa

SEQ ID NO: 217959 - DNA, 100 bp, Homo sapiens
ttctcctattgaggagtcaacgaattacatgaatgacagtcttcgaaccaatgtgtttgttcgatttcaaccagagactatagcatgtgcttgcatctac

SEQ ID NO: 217960 - DNA, 88 bp, Homo sapiens
ccggctcatcacctcctcactcgcctccgcgcagagagacacgatgaggcgagtggtacgacagagcaagtttcggcatgtatttggg

SEQ ID NO: 217961 - DNA, 105 bp, Homo sapiens
ccctggccggtcatcaactgatccgcggcctggggcaggaatgcgtcctgagcagcagccccgcggtgctggatgttttactgtgcctggctaactatagtcgag

SEQ ID NO: 217962 - DNA, 90 bp, Homo sapiens
ctttgactactggggccagggaaccctggtcaccgtctcctcagataacaacgaacttgatgcaagtgataggtttgccaaggtcagacc

SEQ ID NO: 217963 - DNA, 83 bp, Homo sapiens
gtgaaggcgtcggccggaggacaccccatcgtgcagaggccacaagaggaagctgaatgaagaggacgccgccagcgagtcca

SEQ ID NO: 217964 - DNA, 102 bp, Homo sapiens
ggctgtgcgcgctggcgctgagcctgcagccggccctgccggttattcagcttctcaaggctggaaaagcgaaggaagtttcctacaatgcactagcctcac

SEQ ID NO: 217965 - DNA, 50 bp, Homo sapiens
ataacaagcagcagtgaggacaccaaaggatttgaatttgttgaaatgag

SEQ ID NO: 217966 - DNA, 78 bp, Homo sapiens
ctgaaaatgaattcaacataccattaggatcttaccggagtcagagtattcatcgaaaagaaagcacagctaacactt

SEQ ID NO: 217967 - DNA, 83 bp, Homo sapiens
ccagcagatggcggatgccctgcagtacctgcagaaggtctctggagacatcttcagcagaggctgacccgcggctgattgag

SEQ ID NO: 217968 - DNA, 100 bp, Homo sapiens
agttgcatttcctcgtcgagcgcaacccaagaagactgtgcagtctttgtaactgatgaagagcaaggctttgtctctaattctgcccagttaaagtgca

SEQ ID NO: 217969 - DNA, 75 bp, Homo sapiens
gttggaataccggctctcagcggctgccaagcagtgaagccgttaccactgacctgccctgacttccaggacccc

SEQ ID NO: 217970 - DNA, 82 bp, Homo sapiens
actctccagtgtaatgattattgacaacaggaaactcccagtacagccagcagcaggccgggtaccagcagggtgccgcgca

SEQ ID NO: 217971 - DNA, 75 bp, Homo sapiens
aaggggcccttctcggtggaggccgacccatccagtgacatattcgatgccatgttccctgtcactcacatcgct

SEQ ID NO: 217972 - DNA, 100 bp, Homo sapiens
ttttgtcccagcttcgaaagtgtgtggatcacccatatttgtttgatggatttgaagaagatatcctgattgtttcagaggggaaaatggcaccttttac

SEQ ID NO: 217973 - DNA, 83 bp, Homo sapiens
gcgcccggattggggatgagtatgcggaggacagctctgatgaggagcgcgagcccagcattgacctgctgcaggccttcgtg

SEQ ID NO: 217974 - DNA, 75 bp, Homo sapiens
taccgcctcacacgcttcctctccagagtgatcaagtgtgacccgacaatgcagatcttcgtgaagactctgact

SEQ ID NO: 217975 - DNA, 110 bp, Homo sapiens
ccagaccctggagcctcagttggaagcagccgatccagcctgcggagcctgtggggcaggagtgtggccatctggggccgtgtggtatttgccactcaggagacatgtcc

SEQ ID NO: 217976 - DNA, 74 bp, Homo sapiens
ctaccgctcactgtagaccatctcaagcagaatctaggtcaacctattaagatacgtttccaggaatctgaaga

SEQ ID NO: 217977 - DNA, 100 bp, Homo sapiens
aaacacatctttacacactaagtctggagcccggcactgtggtcataacagagcaggcagtggatacctgcttcaaggcagagtttgagcagattgtcct

SEQ ID NO: 217978 - DNA, 100 bp, Homo sapiens
tggagcagaagactctgagcccccgaactctgcaaagcctccagaggacataccacctccaggatcaggatgcagagcctcccaaagtgaaatgcctgac

SEQ ID NO: 217979 - DNA, 98 bp, Homo sapiens
gctggaccagttgatgggcacctcccgggacgagaaatctgacagaatattttgtggctgtggatgttaacaacatgttgcatctgtacgccagtatg

SEQ ID NO: 217980 - DNA, 83 bp, Homo sapiens
tcctccgttagctaattaaaacatttttcagggacgtagccatccagaggctctgtgtgctccgggatggagcaggtgtgcag

SEQ ID NO: 217981 - DNA, 96 bp, Homo sapiens
ggaaaacctggccctcttcaatttctgacaaaagattcaagatggaaaaggtgatgtaaccattacaaatgatggtgctaccattctgaaacaaat

SEQ ID NO: 217982 - DNA, 129 bp, Homo sapiens
cggcgtcgggggtcgcggggaccatgcagcggaggtgggtcttcgtgctgctcgacgtgctgtgcttactggtcggggacggtattcagaattcgagcgcaggagctccgcttctccacctgctcccgg

SEQ ID NO: 217983 - DNA, 83 bp, Homo sapiens
cgccctctgggaggcttaccgagagtttgaaagtgcgattgtggaagctgctcgggaaggctttgtgatacctgatgaagggg

SEQ ID NO: 217984 - DNA, 74 bp, Homo sapiens
gctgaatccgcccgggctacgctcctccatcacgtgtacaacacctcaggtattgagccccactattacatctc

SEQ ID NO: 217985 - DNA, 100 bp, Homo sapiens
tattgttttgaagcacctacactggcaacattagatccacctcatacagtggaaaatctgaatacattgaacctgccaaaagagctcatgttgtgccacc

SEQ ID NO: 217986 - DNA, 75 bp, Homo sapiens
atgcccctcctccaccagaggactgggaggagcatgtcaacaggcaagtgtcaattgaggagggagagaggaaag

SEQ ID NO: 217987 - DNA, 74 bp, Homo sapiens
ttcattgctgcaaggaacttccatgcctctaacactcatcttcaaaagactgctcatcaaggtgctgtacaaga

SEQ ID NO: 217988 - DNA, 100 bp, Homo sapiens
ggcttctgcggcggagacgcgcgtgtttctggaggtgcggggacagctgcagagcgcgcttctgatcctgggaaattgaagccaaggaagcttgtgattg

SEQ ID NO: 217989 - DNA, 82 bp, Homo sapiens
caaggtggcctaccaggaggccaggggtgtcgccatgatgtcttctgctgctgaaaatggagaggcagcacctggaaaacaa

SEQ ID NO: 217990 - DNA, 142 bp, Homo sapiens
attggagttactgaaagatgagggactgcagtacttggagagactctatatgaaaaggaactccctgacatccttggctctgaacaagaaggaacacagagggtgcgacagcccagaccctgatacttcatatgtgctaact

SEQ ID NO: 217991 - DNA, 98 bp, Homo sapiens
agaatccaaaggcagcgcaaaaaacagccaccgattttgctatgtctctgagctgcgagtgcatgcaagatatgggaaatactaaagcaagactactc

SEQ ID NO: 217992 - DNA, 75 bp, Homo sapiens
gcgcccttgcccctcggccgggcggacgcattccccgtcggagccctttctagagaaaccagtgccggatatgac

SEQ ID NO: 217993 - DNA, 100 bp, Homo sapiens
aaaaaatcaaagaggcatttgaagtctttgaccatgagtcgaataatacagtggatgtgaggagcgagaacccgagcagcgccatgagcaacactaccgt

SEQ ID NO: 217994 - DNA, 100 bp, Homo sapiens
ttctcctcgcgctgcaaggatgctcctgggatttcggagaggccgcaggagtcatttcgtggtgtaaattggtccaatgtaacttgccaggcaactcaga

SEQ ID NO: 217995 - DNA, 101 bp, Homo sapiens
gcggcgtcgggacctggtttccgggcatgagctgagagcaccacgccgaggccacgagactctgagatttgcccacctgatgaccttgccagcttgccatc

SEQ ID NO: 217996 - DNA, 98 bp, Homo sapiens
gcgacatggccttcaattttggggctccctcgggcacctccggtaccgctgcagccaccgcggcccccgcgggagattacctggggcaattgatgtta

SEQ ID NO: 217997 - DNA, 95 bp, Homo sapiens
atgtacctctgccagcaggttgggagatggcaaagacatcttctggtcagagatacttcttaaaggctgatggagttatgagaacaatgaacaca

SEQ ID NO: 217998 - DNA, 75 bp, Homo sapiens
catctatgccagtgagaggcccaagtccctagcccgccgccgccatgcccttctccaacagccacaacgcactga

SEQ ID NO: 217999 - DNA, 89 bp, Homo sapiens
cgctttccgtgctgctgctggcgcagctgtcagacgccgccaagggctctgggtttgcagagagccgaaatgaccatgactgccaacaa

SEQ ID NO: 218000 - DNA, 89 bp, Homo sapiens
cgagagctgggccctcaaggccatcgaggcgctttcagccactgaggcggctcccagctgcgttggcgacatggccgacacccccagag

SEQ ID NO: 218001 - DNA, 100 bp, Homo sapiens
gttctcttgcaggatctccttcccagccttcagaaattgccggtctgggagttgggggcaaggagaagatcctgggcaagtgtccagagaatggctggga

SEQ ID NO: 218002 - DNA, 76 bp, Homo sapiens
cctcgtcagcactgactttcagctatggaatcgactactccaaaggattcggcgggaagtatggggtgcagaagga

SEQ ID NO: 218003 - DNA, 100 bp, Homo sapiens
gccgtacgcggtgctgcgagggcagaacctggacacgatgaggcgagtggtacgacagagcaagtttcggcatgtatttgggcaagcggtgaaaaatgac

SEQ ID NO: 218004 - DNA, 75 bp, Homo sapiens
gtccggggatcgggatgtccctcctccttctcctcttgctagggtttggaatcacttgctaggagtcttgtctct

SEQ ID NO: 218005 - DNA, 100 bp, Homo sapiens
cggccgcgcggcgctggactggagcagaaccccaggactgcgcccccgggagcgggcgcccagaggctgtgggtgagcgtggaggatgctcagatgcaca

SEQ ID NO: 218006 - DNA, 96 bp, Homo sapiens
gaacgagcccagcaccggccggatggagcgtccgcaacccgacagatgcctgaggaaacccagacccaagaccaaccgatggaggaggaggaggtt

SEQ ID NO: 218007 - DNA, 75 bp, Homo sapiens
gattatatcgcatcctatggctcaaagaaagatgattatttactgaatcaaatggatggatttgatactctgcat

SEQ ID NO: 218008 - DNA, 98 bp, Homo sapiens
aacctagaaaatttcactgcaaagagacggtgccgagacctcaaggccaagggaattttatttgtggggagcggagtcagtggtggagaggaaggggc

SEQ ID NO: 218009 - DNA, 74 bp, Homo sapiens
ggctataaaagcacagttttaagagagcgaaaccttgaaagccatttgatgtcccctgctgagattccaggcca

SEQ ID NO: 218010 - DNA, 100 bp, Homo sapiens
cgttggtatttcatctgaaggaaagttcaattcccatgaaagtgcagcacatgcaattgtttctgttaatggtactaccattgaaggtcatgttgtgaaa

SEQ ID NO: 218011 - DNA, 88 bp, Homo sapiens
tgcagtggcgcctaaagtctgagagagggaagtcgcctctgtgctcgtgagtgcatggggtataagcttggattccttagcaccacca

SEQ ID NO: 218012 - DNA, 97 bp, Homo sapiens
ccgtcgccagcggagcgaacccgagagcgtggagcgggctgggccagacaatgcagatcttcgtgaagactctgactggtaagaccatcaccctcga

SEQ ID NO: 218013 - DNA, 83 bp, Homo sapiens
cccagagaagaggaaaactctaccggtgcaggtttttagaacttcagccataaaaatgggcagaattttccttgatcatatcg

SEQ ID NO: 218014 - DNA, 75 bp, Homo sapiens
cagcgccatccccgagcagcggtggaagctgaggtggggctggtgtccgagcacttctcgcaggccccgcagagg

SEQ ID NO: 218015 - DNA, 96 bp, Homo sapiens
cctcggcggcggtggccgctagctccaaggaagacatgcgtcgggatgtccaggaaatttttcgcatgaccccccacgagaagcaggtcatgatgt

SEQ ID NO: 218016 - DNA, 76 bp, Homo sapiens
cctcctagcggcgcggcgctcgctcctacggtacgcatagctgctaaattcatcactcatgcacccccaggggaat

SEQ ID NO: 218017 - DNA, 90 bp, Homo sapiens
gccagcccgtgccgcgagcgcggcctgcaggagggaacccgagcgtcatgttagggtgaagcagaggacctcagtgctgaacatgctaag

SEQ ID NO: 218018 - DNA, 50 bp, Homo sapiens
ccaccgccatccgccaccatggagtgcctgtgaagaaaacggggtattgc

SEQ ID NO: 218019 - DNA, 74 bp, Homo sapiens
ggaggtggagcaggccctgactccaggtttttagaacttcagccataaaaatgggcagaattttccttgatcat

SEQ ID NO: 218020 - DNA, 100 bp, Homo sapiens
ttcagtatattggagaatcgcaaggatatgatatcatggaaccagcagcaaagaagtgctatctggaaagagagggttactatgaatgaaaaagacaatt

SEQ ID NO: 218021 - DNA, 96 bp, Homo sapiens
gtgaaaacagccctgttatctcaggcatcattggcatcctctatgccacagaggtaaggatttaattggggtccagaatctgctaaagaaacatca

SEQ ID NO: 218022 - DNA, 98 bp, Homo sapiens
ccagattggctcagaaatcatagaagagctgggggaacaacgagaccagttagaacgtaccaagagtagaagatggagtttcactgtgtcagccagga

SEQ ID NO: 218023 - DNA, 110 bp, Homo sapiens
atcggtgaagagaggttttgaattcacgcttatggtagtgggtactaggttttgacaagcttgcatcatgcgtgagtataagctagtcgttcttggctcaggaggcgttg

SEQ ID NO: 218024 - DNA, 101 bp, Homo sapiens
tcatcgccaactccaccctctacatcaggatgacccctccggcgaaggtgtcctgccctcggcccgcggcccagccaccttcctccccttcctcactgtgg

SEQ ID NO: 218025 - DNA, 100 bp, Homo sapiens
tgagcctggagcagctcagcctggacctgtaccaaggcaccgggtccctcgcccaggtccccttggacaaatggtccagttacaacacagggatcacaac

SEQ ID NO: 218026 - DNA, 74 bp, Homo sapiens
tcatgtttggcagctgagtattggagccaggagcctgccatgaggtgactctgacatcattagaagcatgccag

SEQ ID NO: 218027 - DNA, 82 bp, Homo sapiens
ctccaatgggcctttccagcccgtggtccttctccatattcgagatctcataggaaatgttcaacaattctgtgaaaggtca

SEQ ID NO: 218028 - DNA, 96 bp, Homo sapiens
gagaactcctgactgattagcattcacaccagcactcattaggtgaataaacaatattccctatacctatagagtggaataccacccagcatcctc

SEQ ID NO: 218029 - DNA, 117 bp, Homo sapiens
ggaagccttactgcataggcagttgaaggaacggagaatgctggccacagatggtgctgcccaacagtcatccgtccttggctcaggatttggagagcttgcaccaccaaaaatggc

SEQ ID NO: 218030 - DNA, 75 bp, Homo sapiens
tctcacaactgctcgcgtgacgaccgcattcgtggcaggatccagatgaagaaatggccaaaatcgacaggacgg

SEQ ID NO: 218031 - DNA, 74 bp, Homo sapiens
acagctgctgtcttcaatgctgttaactggattgagtccagctcttgggatgctccagtggctgttggacaatt

SEQ ID NO: 218032 - DNA, 98 bp, Homo sapiens
cgagagtggcagaggagctggcggagagcggcctgcgggcgatcgggccgaggacccttgaacatctgtgaagaaatgactattctgcatggaggctt

SEQ ID NO: 218033 - DNA, 75 bp, Homo sapiens
tttagtttcatctctctataaagttatccaggagccacaaagtgaggttgtttacattcagagctctatcaataa

SEQ ID NO: 218034 - DNA, 75 bp, Homo sapiens
tttcgctcttcgcgctacacacccagattggcttccagcgcgcagggaggagattggacaggctggactccccat

SEQ ID NO: 218035 - DNA, 83 bp, Homo sapiens
ggatggcgcctgtgggcacagacaaggagctcagtgacctcctggacttcagcatgcggggatctgacgagcttttctctact

SEQ ID NO: 218036 - DNA, 83 bp, Homo sapiens
atttaccgtcccattcgacagcgggtctactcactcttactggaggactgtcaagtgagaaagatcagtctaaagaaaaggag

SEQ ID NO: 218037 - DNA, 74 bp, Homo sapiens
gaacaccgggtggctggtgcagccgaggtcttcgggaattccagcgagggtttgtaaccaaattattggaagat

SEQ ID NO: 218038 - DNA, 100 bp, Homo sapiens
cagactgacccctcgggcacataccatgcctggaagaatgcatctactcatgcctcgaaatctcctgacagtgttaatggaagtgaaccaagcattcctc

SEQ ID NO: 218039 - DNA, 82 bp, Homo sapiens
gggctttccaggacaagtactttatgatagctgggattctgtccctgaccgtcttcacagtccaggtgatcttgactactgc

SEQ ID NO: 218040 - DNA, 100 bp, Homo sapiens
gcaacaaccactggttctccaggaaccgaaaaggcgaggagtatagtacggcaaaaaactgtcgcatgccttggactttattgtgggaagaccctattat

SEQ ID NO: 218041 - DNA, 98 bp, Homo sapiens
ttatccttcagtggggctattggactgacttttcttatgctgggatgtgccttagaggattatggatatttggagttcttacaacatggcagacattg

SEQ ID NO: 218042 - DNA, 100 bp, Homo sapiens
ggaccacctggagaatgtcatcaagcagcacattcaaggtgctggggctgctggtgtgggcgctgattgcggacaccccgtaccacctgtatccggccta

SEQ ID NO: 218043 - DNA, 97 bp, Homo sapiens
ctctgggggccaatggagctgcgcggggcctcagcggcctgacacagtttgcagacctgacagacgctgctgcccgcaacgcggagctgctccgcca

SEQ ID NO: 218044 - DNA, 98 bp, Homo sapiens
atgaacagttgagaaaagatgctgctgccaagaatctgcaaaacctccttatcctcactgcaattaaggctgaccgtacacgtgttatggagtatatt

SEQ ID NO: 218045 - DNA, 76 bp, Homo sapiens
gcttcaccggacgaccctctgcgcgcagccacgatggaggtgatgaacctgatggagcagcctatcaaggtgactg

SEQ ID NO: 218046 - DNA, 100 bp, Homo sapiens
caagaaaagcctctgggagcagaagggaggctccaagacctcatcaacaattaaggtctctaattaacagaagatggcaaagcccagccacagcagctat

SEQ ID NO: 218047 - DNA, 100 bp, Homo sapiens
ctgcacgtcgtcgctgcccactccccaggatacctcgttaagcttaatgctgctgacaataaacagagggataagaacatgacttgtattaaagtttcta

SEQ ID NO: 218048 - DNA, 75 bp, Homo sapiens
tgtcctccggccggaggcactacgagcctgggtcccactatagcggcttcgcagaccctgtattcagtggatcag

SEQ ID NO: 218049 - DNA, 50 bp, Homo sapiens
ccggggcggagcacgcgagctatgtaggcagtactcatcttggccctggg

SEQ ID NO: 218050 - DNA, 92 bp, Homo sapiens
aagaagcaaagacctttgatcagctgacaccagaagagagcaaggaaaggcttggggaacagaaagaacagcttcaaaagatgaaagacttc

SEQ ID NO: 218051 - DNA, 82 bp, Homo sapiens
ggtttccttgtaacagggtgaagccctatgtccatacacaacatttgcctgcaacaaggacagcggccagtggcactacttt

SEQ ID NO: 218052 - DNA, 74 bp, Homo sapiens
gacaaaagccaagaggaggacagttcgctacacagcaatgcatcgaggttacaggaggttccagtggcatcggg

SEQ ID NO: 218053 - DNA, 100 bp, Homo sapiens
gcacctgggagcgacgggcggcccaggcgcgcagctgggcgcctccttcctgcaggccagacaggcaggattgaacccaactaccccaaggtctgcggcc

SEQ ID NO: 218054 - DNA, 98 bp, Homo sapiens
ccggcgtttgggctacggttgttgttggcgactgtgcttcaagcgattgtgattgctagcattatgtgcagttacaataaaaatgactggacggaact

SEQ ID NO: 218055 - DNA, 100 bp, Homo sapiens
aagacataaatccctgagtgcccgggaggagccttaacaagcgcacggagccctcaagtgtggtgtaaaggaattcattagccatggatgtattcatgaa

SEQ ID NO: 218056 - DNA, 74 bp, Homo sapiens
caggcccctggcgagcaggacagcatgctgcctgagctctattaccaggttttaaacttcgccatgatcgtgtc

SEQ ID NO: 218057 - DNA, 103 bp, Homo sapiens
ggaggacgatgacgaggaggaaaaggcccctgtgacctctctgcttatgataatgtcaacaaagttcgagtagctatcaagaaaatcagcccctttgagcacc

SEQ ID NO: 218058 - DNA, 100 bp, Homo sapiens
ggggttctgcgactggagcgcccgctattttgcccagcccgtcatgaagggtatgagtattatagaacaattagaccctgtatcttttagcaattacttg

SEQ ID NO: 218059 - DNA, 89 bp, Homo sapiens
agctgctgctggattgaactcagagaagccgggggttacacatcattttggaatgactgtatatcatctggattacgtggctgtatgtt

SEQ ID NO: 218060 - DNA, 101 bp, Homo sapiens
cgcggctagccccttcccacaggctctctccgctcgattttgtcaccgttatgtgggaagcgaatccaaaacaaaggatggagtatggcccaagaccagct

SEQ ID NO: 218061 - DNA, 100 bp, Homo sapiens
ttagggcgtggcctgaggcttggataagtgggatacgtcggtaacctttccagagatgtgacagaagctctaattctgcaactctttagccagattggac

SEQ ID NO: 218062 - DNA, 75 bp, Homo sapiens
gaaaaggccaaagagaggtgttctgaacaagttcaagatagtgtgtgtaccatatcagtggcgtgtaactatgct

SEQ ID NO: 218063 - DNA, 87 bp, Homo sapiens
ggatcccataccaaagccctgtgagttcatcagagtcagctccaggaaccatcatggtgtatctacatcagcaatcaaaatggcatc

SEQ ID NO: 218064 - DNA, 75 bp, Homo sapiens
tcctggcgaacctctcggcgctggcagagctggctgaaatctctttaatgatggagggaagcaggcagacgcgag

SEQ ID NO: 218065 - DNA, 82 bp, Homo sapiens
caggattcggacagcaagcatgtggatgtacatctagttcaactaaagagttcttcgtaagtacatcttaaagctgtcaaga

SEQ ID NO: 218066 - DNA, 100 bp, Homo sapiens
tcagtccgcacctgttttccacagcagggcctctgaaaaatggaaccaaattctctgaggactaaagtcccagctttcttatctgatttggggaaggcca

SEQ ID NO: 218067 - DNA, 75 bp, Homo sapiens
tggatatctttggattgaaccctgctgatgaaagcacacggaggatggcttctggaaacttacaccagaactggg

SEQ ID NO: 218068 - DNA, 98 bp, Homo sapiens
aataccaacatgtctgtacctactgatggtgctgtaaccacctcacagattccagcttcggaacaagagaccctgagcatttgaagatgagaagaagg

SEQ ID NO: 218069 - DNA, 75 bp, Homo sapiens
ccttcccaacctgaaaaacttcatggagcatggactaatggtcaggtgaaaagagtagttgaacagctacggaag

SEQ ID NO: 218070 - DNA, 75 bp, Homo sapiens
ctcggccgcccagcgtggactccttgtccaggatcaacactctgtggtaggccagaacacaggccccagtccaag

SEQ ID NO: 218071 - DNA, 50 bp, Homo sapiens
aggaaggagactgtggagagccacttccgatctgcttggctttgaggaag

SEQ ID NO: 218072 - DNA, 97 bp, Homo sapiens
tcctactggacaagaatatgctgccaaaattatcaacaccaaaaagctttctgctagggctgttcaacggttttgtgtatagcatttgaggttcttc

SEQ ID NO: 218073 - DNA, 100 bp, Homo sapiens
tacagagatgtcatgctggagaccttcaagcacctggcctcagtaggccacggcagagacaacgtgtgtaccccaagtgcacatggctgaccacccctaa

SEQ ID NO: 218074 - DNA, 73 bp, Homo sapiens
ggtcagcctgatctcggacttcacagccagcagaactgagaacttgcgcctgtcaggggctggatccagaaac

SEQ ID NO: 218075 - DNA, 100 bp, Homo sapiens
tcgctgtcgcctgctgctggctcctcactgccatggtctgaaaaagttcttttcttgtcgtggaattgcaattgcagttgaatatttttggaagcttggc

SEQ ID NO: 218076 - DNA, 90 bp, Homo sapiens
ctctccctggggcgttatgaaggtggcacaagaatggctcaactctccaaatagagagaatttctatcagttgcaagtacgaaaatttcc

SEQ ID NO: 218077 - DNA, 88 bp, Homo sapiens
caagatggaagaattcaaggaccaattacctgctgatgagctctttccaacaactgatcctgtgggtactttgctccaagttccagaa

SEQ ID NO: 218078 - DNA, 100 bp, Homo sapiens
tgcctaccctgtgaagatctctcaccatccaaaaaagttacctgtcctgctgccgattcctggatgacaatcagatcgtcaccagctctggagacaccac

SEQ ID NO: 218079 - DNA, 98 bp, Homo sapiens
attggaaaatgtatctgcaaagcaggctaccagcaaaaaggagacacttgtgaacgtactccacaatttacaccatgtttcctgtgttttctctggtc

SEQ ID NO: 218080 - DNA, 48 bp, Homo sapiens
gggatatcatggcatctatctggcacaacattctgaaattttttggtt

SEQ ID NO: 218081 - DNA, 100 bp, Homo sapiens
agccaagggattcaggtgtggtgccggtgggaactgaggaagcgcccaagcaccccgagcagaaggcagaccggtattttgtgttatacaaaccgccccc

SEQ ID NO: 218082 - DNA, 90 bp, Homo sapiens
ctggtggcatttgtcccgggaccagatcccacccatgagggcacagcagagggcatggagaacatggcagatgctgtcacccatgctcgt

SEQ ID NO: 218083 - DNA, 101 bp, Homo sapiens
gaccagtccaggcccagcctctcgaatgggcacacctgtgtagggaactaaaggagaagattcagccagaaatcttagagctgatcaaacagcaacgcctg

SEQ ID NO: 218084 - DNA, 50 bp, Homo sapiens
gtataatccagcaggcaaccaaagttggtacattaagattttgtggaaca

SEQ ID NO: 218085 - DNA, 90 bp, Homo sapiens
tttcatattacatctacaagaggggacaagtacctttatgaaccagtgtatcccaaaggtaaacctcctttgcggtggacaaacttcgac

SEQ ID NO: 218086 - DNA, 51 bp, Homo sapiens
tgaaacccagctcaaatgccacctcctctgtggaatgcagtagccctctgg

SEQ ID NO: 218087 - DNA, 101 bp, Homo sapiens
cgcggggaccgctgtgctctcgtatctagtcctcagactattgtggagttattcttccaagaagttgcaagaaaacacattatatctcacctcttctctca

SEQ ID NO: 218088 - DNA, 88 bp, Homo sapiens
aaattacatttatgaagatgcttatgacaaactttctccagaaaatgaacactatgtggctgccgtgtaagagtggaactgtcgaatg

SEQ ID NO: 218089 - DNA, 100 bp, Homo sapiens
gtctggaatactcctaaccaagaagttgcccagcagccattgtttgatgtcctgtgactgagaaaccaggctttaaactttatgcctttggagatggagc

SEQ ID NO: 218090 - DNA, 73 bp, Homo sapiens
ctagcagtgactctagcatttcaagcaaggcccggggaagcaacaaggatccttggcgtggagtcttcctccc

SEQ ID NO: 218091 - DNA, 122 bp, Homo sapiens
aaaatcatctactcagtttggatcctacaagcaagctgaatggaggccagatagtaccatgatagctgtatcagtgggcaatgggcactccaatgaggcagccttgatcctccacagaaaag

SEQ ID NO: 218092 - DNA, 101 bp, Homo sapiens
aggagctgaaggtgctgaagaagtctgcctacctgtcagccgtgggcaccttcacctgggtctgcacgccctttctgtacaagttgtgcaaagtgaggaag

SEQ ID NO: 218093 - DNA, 90 bp, Homo sapiens
gcggcatcgccggcctcgctatggtcgaatgagtgatttgagtgtaattggtcatccaatagattcagaatctaaagaagatgaaccttg

SEQ ID NO: 218094 - DNA, 75 bp, Homo sapiens
gataagaagcacctggatgagacatttgctacagcatcccacattaagtcaacgtaagagatgctaaaaaccttg

SEQ ID NO: 218095 - DNA, 75 bp, Homo sapiens
cggggacatctatttggcgatcaacatcaccaacggcgaggagtcaacaaggctttaaacaggggaaggatgcca

SEQ ID NO: 218096 - DNA, 74 bp, Homo sapiens
actgaggaacggtgcctggaaaaggttttggagattttaggtaagaagtttcctgttactgagaactcaaaggg

SEQ ID NO: 218097 - DNA, 75 bp, Homo sapiens
accccgactgccgaggaacgagagcgcgaagctaaggatgaatttcacccattcatcgaggcacttcttccacat

SEQ ID NO: 218098 - DNA, 90 bp, Homo sapiens
gagccccgtggatccgctggagcggagccggccgtacgcggtgctgcgagggcagaacctgggaccacctttcactcacctgaggactcc

SEQ ID NO: 218099 - DNA, 100 bp, Homo sapiens
atccggagggggaaaaaatcccaaggtctgcaaagagacacctatggctgccgatgaaggctcagcagagaaacaggcaggagaggcccacatggctgcg

SEQ ID NO: 218100 - DNA, 114 bp, Homo sapiens
gcagtacgggaagaacttcttcagaattagaaaggagctgcttcccaataaggaaacaggtactgccagggggatggttaccgcatcggctttggccagtgtgctggaaaagtg

SEQ ID NO: 218101 - DNA, 90 bp, Homo sapiens
gaagaatagagccataaagaaagcaaagcgcagaaatgttggatttgaaagtgatcagcagctggactgtgccttggacctaatgaggcg

SEQ ID NO: 218102 - DNA, 96 bp, Homo sapiens
gtcacactttggagtcggctggtcttagccctcagctgttgttggtctattacaatggctaccatggagacacctctgaaacatttttggtgggca

SEQ ID NO: 218103 - DNA, 95 bp, Homo sapiens
aacgagccatttctccgtcgattaaagagccatctgtggtgccaattgaagagaaaggagccgaaaggcgaggccagctcttccaaccctgccac

SEQ ID NO: 218104 - DNA, 50 bp, Homo sapiens
gggcatcatcaatttcgagcagaaggaattcctcctgatcagcagagact

SEQ ID NO: 218105 - DNA, 75 bp, Homo sapiens
aggcctggagagccgcccagcagcacaacacagggaagcttggggagcccagaagattagccagctggctgcggt

SEQ ID NO: 218106 - DNA, 74 bp, Homo sapiens
cggtgtcccaaatcaatgcggagttcgtgacccagactagacgcttgaagcaaagctgccatcccagaagacga

SEQ ID NO: 218107 - DNA, 100 bp, Homo sapiens
tgttctccataagtttacccctttacattgggcagcacattctggaagtttggagatataattgaccctgcaatcctgcgcccgggccgcctggacaaaa

SEQ ID NO: 218108 - DNA, 75 bp, Homo sapiens
aatgagcagttcttcgggccagggacacggctcaccgtgctagcttccccgggcgctgcctggacaggcctgcct

SEQ ID NO: 218109 - DNA, 76 bp, Homo sapiens
gtgggtgtaatacatcatgaactgcagggtatctcagatgaagacatcatcaacattactcttcctactggagtcc

SEQ ID NO: 218110 - DNA, 90 bp, Homo sapiens
gcacccgctacctgcgcacggtggagaacctggatgagagccactcagagtgggtgtcttgtgtccgcttctcgcccaacagcagcaacc

SEQ ID NO: 218111 - DNA, 97 bp, Homo sapiens
tggattcctacctaaaccagtcatatggcatggacaatcacagtggtggtggtgggggtagcaggaggagatgttaaagtaacccatcttgcaggac

SEQ ID NO: 218112 - DNA, 100 bp, Homo sapiens
gggaaggtggagccaccagcctctccctggatgactcactggttgtgtggaaggaagtcgatttgacccggctgtctgagaaggaacgtcgtgatgcctt

SEQ ID NO: 218113 - DNA, 96 bp, Homo sapiens
catggaaacgtctgctaagactgcttccaatgtagaagaggtgtccatcagcggagaatggtctccgtggcaggccaaggtgcctcagattgaagt

SEQ ID NO: 218114 - DNA, 50 bp, Homo sapiens
agattgagccagaaggaagacaatgctggctgagtcatcactagagagtg

SEQ ID NO: 218115 - DNA, 74 bp, Homo sapiens
ggcggagctgacggtggaggttcgcggctctaacggggctttctacaagcattttgaaagcgaagcagaagccg

SEQ ID NO: 218116 - DNA, 90 bp, Homo sapiens
tgcgaacagtggcagcgcgacctggccagctgccgcgactgggaggagcgccggaacgccgaggcccagatccgtaatgcctcctgcctg

SEQ ID NO: 218117 - DNA, 74 bp, Homo sapiens
tgccctcgctgcacccaggaaggccgcaccagcaagttggtgtaatacggtgcccagtatgccgccaagaatgc

SEQ ID NO: 218118 - DNA, 100 bp, Homo sapiens
tgacagcaggcagggaccgcttcaggtcctgggtcgatgtctgtctatggaataaagccccgtcaggattcgctaaatattgtaatggatcaaggagata

SEQ ID NO: 218119 - DNA, 83 bp, Homo sapiens
ggaaaagaccgagcccaaggcccgctcgtgggatgagagcagatgccgcgggactggtgattgcagctggaagtgcccatgac

SEQ ID NO: 218120 - DNA, 75 bp, Homo sapiens
cttgggacccaccgctgccctcagctccgagtccagggcgagatttggtcgtattgggcgcctggtcaccagggc

SEQ ID NO: 218121 - DNA, 75 bp, Homo sapiens
ccaacacacccttccttggttacttctatcatggtgctgtgtgtgggcaagagcagtttactgttgcgttttgca

SEQ ID NO: 218122 - DNA, 100 bp, Homo sapiens
gttcttacaacatggcagacattgacaacttcacgaggctgacattgtggtcctaggctcacctaagccagaagagattccccttacttggatacaacca

SEQ ID NO: 218123 - DNA, 100 bp, Homo sapiens
cagaggcagagcgagggtgtgtggagggccggcggggaccgccgggagcgcgcggatgtcggtgttcctggggccagcaaaccaagatggagtatgagtg

SEQ ID NO: 218124 - DNA, 75 bp, Homo sapiens
catcgcggtcatcaagtactcccgtggaccgggagcccgtggaccgggagccggtggtgtgccaccccgacctgg

SEQ ID NO: 218125 - DNA, 83 bp, Homo sapiens
atcatgtctgcgagccaggattcccggacccttgaacatctgtgaagaaatgactattctgcatggaggcttcttgctggccg

SEQ ID NO: 218126 - DNA, 100 bp, Homo sapiens
gagatttccctcctggaaccaaaggaaatacatttgtacacgatcccaagcgtcgtctcggagatgcagccaagaaagccatcagtaaattgacaaccag

SEQ ID NO: 218127 - DNA, 100 bp, Homo sapiens
gaagagaggcctctcccaaagcacctgcgcaggagtgtacctcacagccttctaggatctccagagtggacaggaatctcacttggagggaccatggagc

SEQ ID NO: 218128 - DNA, 116 bp, Homo sapiens
agtcccccaggatacagggtcaaaggagagcacaaccatcgcagttggaagcccatggggcagctgtctgagtggtggctcaagaccgcctacctccagtaccgccagcctgtggt

SEQ ID NO: 218129 - DNA, 75 bp, Homo sapiens
gaggatttagagaataatggcagtaagaaagatggcgtgtgtggcaaggtgattgagcactgcagtaactttaaa

SEQ ID NO: 218130 - DNA, 80 bp, Homo sapiens
ttctacgacccggagcacccgacccctgagtgaaaagccatacaagtgtacctgggaaggctgcgactggaggttcgcgc

SEQ ID NO: 218131 - DNA, 83 bp, Homo sapiens
catcttccgaatctacattaaagcacaaaacgagtggatcattcaaataccagattggcttcccagcttgatagaaatccagg

SEQ ID NO: 218132 - DNA, 87 bp, Homo sapiens
tgaacttaaaaagcagtctaaacctgtgaccacccctgaagaaattgcacagagagaaaaggaacagttccgtaagctctttattgg

SEQ ID NO: 218133 - DNA, 74 bp, Homo sapiens
ttgacacgatattttttgctaagcagaccatccttcctgctgctgcccaggatgtttattaccgggatgagatt

SEQ ID NO: 218134 - DNA, 100 bp, Homo sapiens
cttagctgtgctcgcgctactctctctttctggcctggaggctatccagcgggtacttcggtccttggtggaagcatctagctcaggtgtgtcggtactg

SEQ ID NO: 218135 - DNA, 100 bp, Homo sapiens
gcagcaccagctcatcctatccaagcttctgagggaggaggacaacaagtactgcgccgactgcgaggccaaaggtgtcatggagaaactccagctgggc

SEQ ID NO: 218136 - DNA, 100 bp, Homo sapiens
ttaactccttcctctgccactttttaccttggggacctcagatttggatttacagtgtgagataatcagctacatagaagtacccacttatgaaacagat

SEQ ID NO: 218137 - DNA, 100 bp, Homo sapiens
ccagcggagtactttctggagggaagcaaaccctgcaaagcggaatctggtggacagtaacaaactttggtgaaatttcaggaaccatagccattgaaat

SEQ ID NO: 218138 - DNA, 100 bp, Homo sapiens
agtagaggaagctgtgcggtcctggcggggggctgctgaggtgactgaggagagaggcgcctcctcgctcccgccaccgccggacttcaatgcccagtcc

SEQ ID NO: 218139 - DNA, 101 bp, Homo sapiens
gcctacccgggatacggaggaggggtccagcactcctggggagaagacagagacgctggcgctgcagaggctgggggagctggggccacccagcccaggcc

SEQ ID NO: 218140 - DNA, 88 bp, Homo sapiens
ggtgcaaagtgggacgcggcacctacggtcacgtctacaaggcgaggcggaaagatgggttgctgttgaagaaatctggttgcagaac

SEQ ID NO: 218141 - DNA, 75 bp, Homo sapiens
aaaggcctaagaattttggcattgggagagacaaaggcagcgctgccctcgggggagtattggccctggcggaac

SEQ ID NO: 218142 - DNA, 50 bp, Homo sapiens
ggcggagcgcgcagcgggggctgcagatgccccttggtgtggccactgca

SEQ ID NO: 218143 - DNA, 83 bp, Homo sapiens
ggagctgtgcagccgcgaggaggcgcgggaggtgttcgagaacgaccccgagacgtcattttttgagaccagtactgttataa

SEQ ID NO: 218144 - DNA, 76 bp, Homo sapiens
gcagaggatcagaagattcaccggcccatggctcccaaggaggctattgagggcacctacattgacaagaaatgcc

SEQ ID NO: 218145 - DNA, 97 bp, Homo sapiens
tgcctgatgatcacgcagctggctggcttcagtggaccactatatgttctcctttcagccaagacctttcaccagtgcaggggatagaagattcatt

SEQ ID NO: 218146 - DNA, 75 bp, Homo sapiens
gtgccattaaaaacaacaaggaagctttcagtccccagcatgagaccagatgtaagctctcctccatccagctcc

SEQ ID NO: 218147 - DNA, 98 bp, Homo sapiens
tcatgttgacgggcagccagctagctggggatttcttacaatctccagctacaacctgcttagcttgctactcagtacgtgaattaggatgcaggcaa

SEQ ID NO: 218148 - DNA, 82 bp, Homo sapiens
agataaagatgcccattttccaccaccaagcaagcagacatagggcctgattacattccaacagaggaagaaaggagagtct

SEQ ID NO: 218149 - DNA, 51 bp, Homo sapiens
cccgcttcaacgaagaccgagactttcagtgcccaaggttgaagcaatgaa

SEQ ID NO: 218150 - DNA, 75 bp, Homo sapiens
gttctctcaggctcccgttcagaaatgggacgtcggtcatcagatactgaagaagaaagcagaagcaagagaaaa

SEQ ID NO: 218151 - DNA, 99 bp, Homo sapiens
accaaagccattgcttttgaagttattaaagtctgttggtgcacaaaaagacacttatactatgaaagagatatttggagttcttacaacatggcagac

SEQ ID NO: 218152 - DNA, 90 bp, Homo sapiens
tgattgtgctgctgggcctcagcgctctgctgcagtgagatcccaggaagctgggaattccaatgcccactttcggaggcctcttcccct

SEQ ID NO: 218153 - DNA, 83 bp, Homo sapiens
cggcgagccggagcgcggagcccggctcccgcaccatggaggaggacgacagctacgggaggaggtacaggagaactgtgtgc

SEQ ID NO: 218154 - DNA, 90 bp, Homo sapiens
gttacgcagcggccagatgatgctggcacagggccttctgctgcatttcctgcccagagggaaatcctcattgacgattcaatttgttga

SEQ ID NO: 218155 - DNA, 146 bp, Homo sapiens
aggagttgtgtctatcaaaggagtgtgtgctaaccgttacctggctatgaaggaagatggaagattactggcttctgctttgatgcggcctggaagaattgatagaatcatctatgtgcctttaccggatgcagcaacaagaaggg

SEQ ID NO: 218156 - DNA, 50 bp, Homo sapiens
agaccagtttccagtgagctcctgagggaaaatgtttataggaggcctta

SEQ ID NO: 218157 - DNA, 100 bp, Homo sapiens
tttactactgtgccttgcttatgtttgttaggaccaaacctcaaagcatggctaagagtgttcagtagaaatggctatgtgatgatgatgccatttaaac

SEQ ID NO: 218158 - DNA, 75 bp, Homo sapiens
cacttttgaagcttctcattctgtcaatggctgctgtattatgagcacgtgaattgcctctgcttacgttcaggc

SEQ ID NO: 218159 - DNA, 101 bp, Homo sapiens
ctttggacgtgggagtcacctgaaagccaggaaatgtttaattggttggggtcagataagaagaggagtgacaatcaagccaacagtagatgatgactgaa

SEQ ID NO: 218160 - DNA, 75 bp, Homo sapiens
cagtgtgacagtccatatgtaaccaaatattatggatcctatctgaagatatttggagttcttacaacatggcag

SEQ ID NO: 218161 - DNA, 100 bp, Homo sapiens
gggccttcccccgcgtcacccccaccgccaaccagtgggactacaagaacatcattgagaagctgcaggacatcaacaatggctggcagcacttggagca

SEQ ID NO: 218162 - DNA, 100 bp, Homo sapiens
gacctgtggaatatgagtgatgacaaaccctttctatgtactgcgcctggatgtggccagtcagcagataagcagagagccctagaagaaaccaaagcct

SEQ ID NO: 218163 - DNA, 100 bp, Homo sapiens
cttaagatgatgtttgagaaaggtgaaccaactcaaactaagggtgataaaagaaaatgtggctgaagttacccgaagttcagcttgcagtgtaattcag

SEQ ID NO: 218164 - DNA, 100 bp, Homo sapiens
caccagtacccctcttggatcttcattaatgagaagacattcataaccagccatgtacatcttcatgtgatcagccaggattttgattctccttgcctta

SEQ ID NO: 218165 - DNA, 100 bp, Homo sapiens
tcggaaacttaaagaaatatttaacaaagctttggttgatccaggtcttttggtgggccttgtgcttcggtatggcattcatgttccgagtgatgtaaat

SEQ ID NO: 218166 - DNA, 74 bp, Homo sapiens
ccaccctccaactttgcgacggaaatgtgtcatcgaaagccagggaaaggtggcccagacagcgtgtatgtcag

SEQ ID NO: 218167 - DNA, 97 bp, Homo sapiens
agaagaagaagtgttagaccaggtattgactcggagacaaaaagaggccaagaccaagagtgacagtgggacagctgcccagacttctctagacatt

SEQ ID NO: 218168 - DNA, 126 bp, Homo sapiens
ttccaggcgcacactagtctacaaggccagagctttctggaagggggcactcaagggtaaaaagccccccgtggcgtctaatggggtcacaggaaaagggaagactctgagcagtcagccaaagaa

SEQ ID NO: 218169 - DNA, 75 bp, Homo sapiens
tcagacgaactacgaacccctggacgggagagtctgccggcggagaatataagcttgaattcggagtgatttacc

SEQ ID NO: 218170 - DNA, 131 bp, Homo sapiens
gcagaagttgtctgagtgcgttggtcggcggcagtcgggccagacccaggactctgcgactttacttctgggaggtgatcagtgatgaacatggcatcgaccccaccggcacctaccacggggacagcgac

SEQ ID NO: 218171 - DNA, 75 bp, Homo sapiens
ctatgcagttcgaaaactggataacactaagtttagatctcatgaggccttggaaaaccattgcagagtgaatgg

SEQ ID NO: 218172 - DNA, 75 bp, Homo sapiens
ggaacttggagttaatggtctaatttatgataggaagtgtttggattgtgagctatttcagaactgttctcagga

SEQ ID NO: 218173 - DNA, 74 bp, Homo sapiens
ggagatcctttctattcaggataacacaagtcccttgccgctacacacttgaatgcaactacaacactggacgc

SEQ ID NO: 218174 - DNA, 51 bp, Homo sapiens
ggagaagccgcccaaagaactggaagtgggaaaactcttgcctttgccatc

SEQ ID NO: 218175 - DNA, 116 bp, Homo sapiens
gccaacatggcggcgcccagtggcgtccacctgctcgtccgcagagacctggccagaggactgtggatgacctagagattatctatgaggagcttcttcatattaaagccttatcc

SEQ ID NO: 218176 - DNA, 90 bp, Homo sapiens
agcgcagagtgccctacaactacctgcagcgggcctacatcaagtgatcctggtggagggattgaaatgtctgagttcatccgagaggcc

SEQ ID NO: 218177 - DNA, 75 bp, Homo sapiens
ttgacaatacaggaaatgtttctgctgaaatgggttgcggattgaacaagttagagaaacgtgatgaaaaacggc

SEQ ID NO: 218178 - DNA, 100 bp, Homo sapiens
cgctcttgctcctctctccttggcctctcctgggatcggcccaaggccagttctccgcaggggccctgtattacggcagcaaagtggttccagattccac

SEQ ID NO: 218179 - DNA, 75 bp, Homo sapiens
ttctactggctgcgctcctttctggccggagggactggtttggctgaaagacaaagaagcaacacattgtaaact

SEQ ID NO: 218180 - DNA, 75 bp, Homo sapiens
ccagcctgcggagcctgtggggcaggtctggatgtaccgactgcttttggaataaaaagattcccaggatgtgag

SEQ ID NO: 218181 - DNA, 75 bp, Homo sapiens
aaaagagccctggaatgtgaagagacaggaggcagcagacggacatccagacagatttgaccagttttgggccat

SEQ ID NO: 218182 - DNA, 83 bp, Homo sapiens
attgtagctgacgaagcattttgcaacgcagttcggagttattatgaggtttttagaacttcagccataaaaatgggcagaat

SEQ ID NO: 218183 - DNA, 75 bp, Homo sapiens
atgcaggaaaatttcgatattgaagtgtcaaaatccatagatggaaaagatggaaaatcctgccttgcttcgttg

SEQ ID NO: 218184 - DNA, 50 bp, Homo sapiens
tgcgtctcctttctactctgcaagttttatgtgctgaaagagttggccag

SEQ ID NO: 218185 - DNA, 98 bp, Homo sapiens
gaactttttgagaaaatcaatgacaactgtaatgaagaaatgtcttactctgtagagctggaatgttctgaagaactgggtgatcttgtgaaatctgt

SEQ ID NO: 218186 - DNA, 100 bp, Homo sapiens
ctcatacaaaccatgcggcctccagcgaagccttccactagcaaagctccatttctttcacctcaaagctggccgccaccgctgccacctgctcagagtg

SEQ ID NO: 218187 - DNA, 73 bp, Homo sapiens
cctttgctatgatcattgacaaactggaagaggatggagatgaagatgaggaagctgagtcagctacgggcaa

SEQ ID NO: 218188 - DNA, 100 bp, Homo sapiens
tcctgctggggctcatgtttgaggtgtgcaactgaggaacatggctcaagaaactaatcacagccaagtgcctatgctttgttccactggctgtggattt

SEQ ID NO: 218189 - DNA, 51 bp, Homo sapiens
ggcggcggccacgccaaggacggcccaagctgttggccaaggagcttcttg

SEQ ID NO: 218190 - DNA, 89 bp, Homo sapiens
ttcgccgagcagtagatgaaatctatgtaacttgcgaatcagatcagagtgtggtcgaatgtaagatgctggctccccgtcccctgtcc

SEQ ID NO: 218191 - DNA, 100 bp, Homo sapiens
gtcccctggcggctccagccgcgggtcaccctccgtcagagatcttcgctttaacagaatcagagagatccaacctggggcattcaggcggctgaggaac

SEQ ID NO: 218192 - DNA, 75 bp, Homo sapiens
agcctctccagcttctgcagtgcattgttgatgaggagcggcggcatggaggctctcaccactcagctggggccg

SEQ ID NO: 218193 - DNA, 50 bp, Homo sapiens
tcttctactgacagcctctgaaagtatcagatgtagaaggtggtgatgga

SEQ ID NO: 218194 - DNA, 128 bp, Homo sapiens
catctctctagaccataaaaataaaaaacatatccgagggtgtcctgttacttccaagtcatcaccagaaagcttcctgtgcttcccagaattccatcatctgactgccatcctagaaggcattctca

SEQ ID NO: 218195 - DNA, 76 bp, Homo sapiens
agttacaggaacatcgtctgcttcatgtatctggagtccatctttcaccatcttctcctgagattgtactggaccg

SEQ ID NO: 218196 - DNA, 100 bp, Homo sapiens
gggcttgtcagttcacctcacaagtcaggaggaggatgcattcagcctcctttttgagcccattgcagatgcaaaggctcctgagaagcgggcctcacca

SEQ ID NO: 218197 - DNA, 75 bp, Homo sapiens
cagaggatgcctctgaagtgagaggcatgaaaaaagaggctaaccttcagggtcacgaccgctgcaagcaggctt

SEQ ID NO: 218198 - DNA, 87 bp, Homo sapiens
tgggtgagaacagcgaagtcttgaagagtggccgggggtggcctatgtatgcacagctactgattgatttattcaaatatttagcgc

SEQ ID NO: 218199 - DNA, 90 bp, Homo sapiens
atcaacgcaaccacagaaacaagtggtacaggatgctcgtcagaagttccgctctgttctggttgaagcaacggtgaaactggatgaact

SEQ ID NO: 218200 - DNA, 82 bp, Homo sapiens
cgtagagtcgctggagcgggcggagctgtgcgagagcctcctcacttggctgcctgtggaggaaccgattgtgtccacagat

SEQ ID NO: 218201 - DNA, 96 bp, Homo sapiens
ggacgtgaacgggggtcctgagcctgccccagccagtaccagcgccgtgcttagaccatgctcagcctccaagcagccttgtcatcgacaaagaat

SEQ ID NO: 218202 - DNA, 98 bp, Homo sapiens
tggccctgggctttaccatctttgtggctgtgcttgccaggcctggctccagtgttggagcgggccggagagaagtagagtgggctgcgaggagaagg

SEQ ID NO: 218203 - DNA, 74 bp, Homo sapiens
accacaacaagcaagcatgcagcttactgcttgaaagatgctgggctcttgcactgtttggtggaaatggtgag

SEQ ID NO: 218204 - DNA, 73 bp, Homo sapiens
aaaagcttggtagacagctttcgaatgattttccaaatggaagggtcaaatttgtcaagatgtccacaatccc

SEQ ID NO: 218205 - DNA, 95 bp, Homo sapiens
tcaagtgatcctcccaccttagcctcctaagtagctgggaccacagttgatcatggccttgccaggttggtgacagtatattgtgagcatggtca

SEQ ID NO: 218206 - DNA, 82 bp, Homo sapiens
gtggtcagaatggatccacgcctgatggctccacgcatttcccttcgtgctttagccacagtagaagacttccagattcgtc

SEQ ID NO: 218207 - DNA, 135 bp, Homo sapiens
tttaagtgaaatggtagaatatatcacccataatcggaatgtgatcacagagcctatttacccagaagtagtccatatgtattgactcggagacaaaaagaggccaagaccaagagtgacagtgggacagctgcc

SEQ ID NO: 218208 - DNA, 50 bp, Homo sapiens
agtcaatgcattatggcctaaaacaggtcccagctagtccacagggacca

SEQ ID NO: 218209 - DNA, 103 bp, Homo sapiens
ctggcccgctccctggcggtgcagagaccagcatccttggagaagtaatccagtccctcatagcactggtgaatgacccccagcctgagcacccgcttcgggc

SEQ ID NO: 218210 - DNA, 100 bp, Homo sapiens
actgaggagaaggaggaggagatgagttggaagtgagccgaacctgctcgtccgtgcctgcaaccagttgggccagtttctgcagcaccgcgagaccaac

SEQ ID NO: 218211 - DNA, 51 bp, Homo sapiens
acaggtacagacttcagtacatagtcattttcagagcacatggatgatagc

SEQ ID NO: 218212 - DNA, 100 bp, Homo sapiens
ctggatgatgtgggccatggtgtcaagttgagtcagcagatactggagttatttgaaacatgtcagcagcaaataagtgatttaaagaagaaagaactct

SEQ ID NO: 218213 - DNA, 100 bp, Homo sapiens
tgtgacctgcatgtactgggggattcgcagggaggatgtcgggacaccccggaagctgggaaatggcaaacaagcatgcatttaggatccttatgcacgg

SEQ ID NO: 218214 - DNA, 75 bp, Homo sapiens
gatccacagactggcgtctgccggcgtggacaccaatgtcaggtacataccgagcatcaaatattaaggcacccg

SEQ ID NO: 218215 - DNA, 51 bp, Homo sapiens
tgatgccacttgctattggagttgtggggcctttaccttctaatgcaaaag

SEQ ID NO: 218216 - DNA, 100 bp, Homo sapiens
actcctccataaaaacaagtgtgtgcatctggctgttagaagaattcatgctcatccgggtggacccccaaaagtacaagggcatatttaacggattctc

SEQ ID NO: 218217 - DNA, 101 bp, Homo sapiens
agacacaactacgaggtggcgttccgcgggatcttgcagaggagagcacgtttcttgcagcaggataagtatgagtgtcatttcttcaacgggacggagcg

SEQ ID NO: 218218 - DNA, 82 bp, Homo sapiens
ccatctggaggactggctggagaagagagccaagcggctgagctcagccccaagtagcagacttcccaagtaagaagcggaa

SEQ ID NO: 218219 - DNA, 73 bp, Homo sapiens
ggtgagcggcggccacggcatcctgtgctgtgggggctacgaggaaaggtgggaccatccagttgcaggaaaa

SEQ ID NO: 218220 - DNA, 75 bp, Homo sapiens
ccatcagaggcaccccagacacactggtggtcccagaatactccatccacggcctcttctgtctgatgtttctgt

SEQ ID NO: 218221 - DNA, 101 bp, Homo sapiens
aagaccagctggggaaacatggtgagaaacaaacaccagttggattggatgctgctggcaagacaaccattctgtataaactgaagttaggggagatagtc

SEQ ID NO: 218222 - DNA, 100 bp, Homo sapiens
atttgaagcacatttgggaagccacattttgcaggctggttatgatggtgagagtatcggaaattgcccgttttctcagcgtctctttatgattctctgg

SEQ ID NO: 218223 - DNA, 95 bp, Homo sapiens
gaggaacctagtaaaaagggagcacttaaggaagaatcctgataacttaagtgactctctcttttccggtgatgaagaaaatgctgggactgagg

SEQ ID NO: 218224 - DNA, 150 bp, Homo sapiens
atttgttggggagaagaggattggaggtgtcagtgttaaaggaacctctacaacgaaggtgaagccacggaagataaggttcgagaacttgtcttggacaattgcaaatcaaatgatggaaaaattgagggcttaacagctgaatttgtg

SEQ ID NO: 218225 - DNA, 90 bp, Homo sapiens
gggagggagccgcaggcgcagacccacccgccatgaagccccccgcaggttgacctgacagttcaagaaaaggagaaatatcttaatgtg

SEQ ID NO: 218226 - DNA, 101 bp, Homo sapiens
atggaacagatttcaaaaggacgtaatactccactgtgcgacagtgataaaaagttgattgcagaaggacctggggaaacagtattggttgcagaagaaga

SEQ ID NO: 218227 - DNA, 100 bp, Homo sapiens
ggaaaacgttcgtcaacatcacgttgggccatatggtgctcttcccagtctggttcctgtacagtctgctcatgaagctgttccagcgctccacgccagc

SEQ ID NO: 218228 - DNA, 83 bp, Homo sapiens
ctatcgtgaggttcagctgatgaagcttctgaaccatccacacatcataaagctttaccaggctcctgttctggatgtcagat

SEQ ID NO: 218229 - DNA, 75 bp, Homo sapiens
ttatggtaccctgattctcaagcctgtttatgaaattcaaggtgtgatgaaatattgtttaacaaacaacagtga

SEQ ID NO: 218230 - DNA, 97 bp, Homo sapiens
cctgctgctattgcagaatttttgactggagactatagtaggtcccgcggcagtgctggtggccatggttcccgtagccagaaggagttgcccacag

SEQ ID NO: 218231 - DNA, 74 bp, Homo sapiens
agaatcacacctgagccagcagtcagtaatacagaagaaatggaccaattttgacaagatatagtgctgcagcg

SEQ ID NO: 218232 - DNA, 109 bp, Homo sapiens
atgggaagccctgctactgctggattagcgccaggtatctcagatgaagacatcatcaacattactcttcctactggagtccccattcttctggaattggatgaaaacc

SEQ ID NO: 218233 - DNA, 86 bp, Homo sapiens
gtcctgcccccagatactctgcccaaccgcacggtcaccctctatccaacttgataaagtcaatcttcaagtatattgtgcatggt

SEQ ID NO: 218234 - DNA, 83 bp, Homo sapiens
ctcacctttaactctccttatgctgggtgaaaacaaagtaagactttgaccccgacgcaggcttcagtgattgccgcggatca

SEQ ID NO: 218235 - DNA, 100 bp, Homo sapiens
tttggcattgacatttaattttagggtcctttatatagaagggagagtaggcgcatattaaatttcctattgactacccctattcaccacctaccttcag

SEQ ID NO: 218236 - DNA, 82 bp, Homo sapiens
agattaactaaactccaaatattagagcttagagaaaaccagttaaaaatgttgcctaactaatatgcaagtgaaccagtga

SEQ ID NO: 218237 - DNA, 80 bp, Homo sapiens
cgcccggcgcccctgagccggccgagcggcgacggaccgcgagttaattggccttggtcctcacagctccaaaaagaaac

SEQ ID NO: 218238 - DNA, 100 bp, Homo sapiens
gccctcttgataaaaagagatgtggggggattctcgacctgctaacagaactggaccttttcgtacctttgtgttggatgaatttaagcgcaagtactcc

SEQ ID NO: 218239 - DNA, 98 bp, Homo sapiens
ccatgaccacctccagagctaatcagcttcagggtaaatctgcagagaccagagaaagcacacagctgagccctgcagatctcacagaagggaaaccc

SEQ ID NO: 218240 - DNA, 100 bp, Homo sapiens
ttcagaaggatatcgacgtcgtgatccagaagtccagagctgaggactgcctgtttgcaggctggctactactgcaggtctccagcagagtcttcacgga

SEQ ID NO: 218241 - DNA, 97 bp, Homo sapiens
ctttcctgcttttggtttccctggcaggggttgaactgtggagtgtgtgggaattgaaagatgttggccatcgtgatcagatggctgcagctagagg

SEQ ID NO: 218242 - DNA, 75 bp, Homo sapiens
gctcggacgccagcggacacgcgggcgagatttctttaccaactcccgcctcccacagccgcccatgccttcaaa

SEQ ID NO: 218243 - DNA, 101 bp, Homo sapiens
cccttgcaacaaaggcagactgagcgccagagaggacgtttccaactcaaaacctcccagtgccaagtgtataagcgtgtccagaattggtgggtctcact

SEQ ID NO: 218244 - DNA, 119 bp, Homo sapiens
cgtagcgcagaaagtgaagctgtttcgggccagcgacccgctgctcagcgtcctcatgtggggggtaaaccactcgatatgcctcttcatgttcgacgcagtagtgacccagctctaat

SEQ ID NO: 218245 - DNA, 75 bp, Homo sapiens
gtgcggacgctcgtgcacagatacacagcccacctgaggatattgaccataaggactcatatctcattacaagaa

SEQ ID NO: 218246 - DNA, 75 bp, Homo sapiens
agaaaactggtcaaggaagctactgaacctccattgaatactccagaaaacagggaatatactgctgaaataatg

SEQ ID NO: 218247 - DNA, 122 bp, Homo sapiens
acgcagagccgagtgcagaagatctgggtgcccgtggaccacaggccctcgttgcccagataatcattgatcagcgattcgagaaggtttcctactttgtatttggtgatttcaacttccgg

SEQ ID NO: 218248 - DNA, 100 bp, Homo sapiens
ggcggaactgcggagttgctgggtccaccgacccttaccctcagcgagagaagtaaccatatgaaagctttcaaaatccaaagaggagaaaaaatcaaag

SEQ ID NO: 218249 - DNA, 100 bp, Homo sapiens
agccaaatacatcctgaaagacagcttctccatcttttgcgagactggctatgagcttctgcaattatcccagatcactgaagctgagatggctgatgaa

SEQ ID NO: 218250 - DNA, 90 bp, Homo sapiens
ccaaggtgttcggtccttccgaggaagctaaggccgcgttggggtgagaccctcacttcatccgggtgtgctgatctgcaaaccctggac

SEQ ID NO: 218251 - DNA, 89 bp, Homo sapiens
gccgtcccggcctgcgcagcctgagagtaaacatcagtctccaaagataactacatcccttcttcccatcaacaatggctccaaagaaa

SEQ ID NO: 218252 - DNA, 51 bp, Homo sapiens
ctggcggtcccgggtgctgctggaatggaagttggatacactttgtgactt

SEQ ID NO: 218253 - DNA, 100 bp, Homo sapiens
attcactactatgagcagatcacgctcaagtccatggcgtgggtgtataacattctcgacaagaaggctgaagcggaccggattgttttcgagaacccag

SEQ ID NO: 218254 - DNA, 96 bp, Homo sapiens
cgtttctgcgtctgccgtggacagcgaagctgctgcggttcctgagccggagacctggaatggccaaatatcaaggtgaagttcaaagtttgaaac

SEQ ID NO: 218255 - DNA, 100 bp, Homo sapiens
ctgcaagtattgtgggaagatgtgtcgaagcagcaactcgatggccttcctggcacacattcgcactcacacagcttatgttcctgaggaagaattgaag

SEQ ID NO: 218256 - DNA, 75 bp, Homo sapiens
caccatcttcacccagctcgccaccatggccgccttccctgcctccggagccagcgtggtggccatagacaacaa

SEQ ID NO: 218257 - DNA, 50 bp, Homo sapiens
ctcagcaagaacgggaacaaaactctggagtaataagaagctctttgaac

SEQ ID NO: 218258 - DNA, 83 bp, Homo sapiens
tgttgcagcacatcctcatccgagcctttgatttgagtgggagagcgacttgcagttgtggaggtacagtgtgaacggctgag

SEQ ID NO: 218259 - DNA, 96 bp, Homo sapiens
gactccagattatctacaacactgatgagaccgcctggacattagggcagcccggattcttctggataatgaccattacgccatggaaaaattgaa

SEQ ID NO: 218260 - DNA, 80 bp, Homo sapiens
gcccgtgccgcgagcgcggcctgcaggagacggcgggcgctaacaccaccgacaaggagctagaggttctctccttgcac

SEQ ID NO: 218261 - DNA, 75 bp, Homo sapiens
gcggccgtttgtcattcccttcctgaagggcgtgaacctgtctgggggccagaagcagcgcgtgagcctggcccg

SEQ ID NO: 218262 - DNA, 109 bp, Homo sapiens
tttttctcaggtgaaaggagcagtagatgatgatgtagcagaagcgatctataactacaatgcttctcaagatgtggagctctccttgcagatcggtgacacagttcac

SEQ ID NO: 218263 - DNA, 75 bp, Homo sapiens
gccaggaccccctgaaagcctagacatgttcagaatgaccgaagaagcatgccgaacacggagtcagaaacgagc

SEQ ID NO: 218264 - DNA, 90 bp, Homo sapiens
acccagaggtcgtggaggtggccgtggaggcagaggtggcatgggtgccggtggtggtgtgcacattgagccccggtatagacagttccc

SEQ ID NO: 218265 - DNA, 100 bp, Homo sapiens
ggacagcatcagcctcgagctgcgcaagcccgacggcaccctcgtctccttcaccgccgacttcaagaaggctcttgtcaggatggtgaagctgttcatc

SEQ ID NO: 218266 - DNA, 90 bp, Homo sapiens
gaaagtttcatctgtggatggagtattgaccataaatactgtatcagaagttattcgaggctgccaagtaaaccaagactactttgcatc

SEQ ID NO: 218267 - DNA, 75 bp, Homo sapiens
cggagttccggtacaagctcctgcgggccggcggggggccaaaccagtgctcctgccacctctctggctgccccc

SEQ ID NO: 218268 - DNA, 51 bp, Homo sapiens
gtgtattgttatgtggatcatctggatgctgtccagaccaaaacgaagaag

SEQ ID NO: 218269 - DNA, 88 bp, Homo sapiens
ttaaggattccaagtaactcttatttggctcaacgagaacctttgacaagagcacgaagtgaagaaatggggaggatcgtaccaggac

SEQ ID NO: 218270 - DNA, 49 bp, Homo sapiens
caggcactgagctgtctgtgcgcggcattctttagtggcaggctgaagg

SEQ ID NO: 218271 - DNA, 83 bp, Homo sapiens
ctctcctgatacagcaggcgctcaccatgttccctggagaaaccaaggtgtatgttggtaacctgggaactggcgctggcaaa

SEQ ID NO: 218272 - DNA, 100 bp, Homo sapiens
atcgtgcgcgccctcaatgacaagctgtacgaaaagcggaaggtggcagcgctggagatcgagaaagcttacaattgagactgctaacccctacctttga

SEQ ID NO: 218273 - DNA, 86 bp, Homo sapiens
gaaatgtacaccctcgagagcggcctgattgggaagaaactcttagcgcaatgtggaagatagatgataagcctgtaaaaattgac

SEQ ID NO: 218274 - DNA, 100 bp, Homo sapiens
aaccagaacctcttgttcctcctgtcccaaaagaccatcctgctctcaactacaacatcgtttcaggaccctacagcttggggcctgggctcctctgacc

SEQ ID NO: 218275 - DNA, 96 bp, Homo sapiens
ggaaaacactatcctctgagatcccagatcatgaggtcatacagcagatggaacaaaaaaaattacaacaaggaattcctccatcagggccagctg

SEQ ID NO: 218276 - DNA, 82 bp, Homo sapiens
agagacgagccccgagcccggctggacgccgctgcctcagagggaagtctcaggttgccctgaagatcatccgcaacgtggg

SEQ ID NO: 218277 - DNA, 75 bp, Homo sapiens
tggcgaccaagcagcgcccggtcgccagatcgaaaatcaagatgccttcaattaagttgcagagttctgatggag

SEQ ID NO: 218278 - DNA, 82 bp, Homo sapiens
aatgtatgtctcacagttatgatgaatggtgtatctcctggatcttcctcagttgacttcttggacacttaatgattgttgg

SEQ ID NO: 218279 - DNA, 98 bp, Homo sapiens
cctctatggccctctgacctgcaggtattggcgatccatagctaagacgccaggtcccccggaaacctagaaatgggtcttgctctgtcacccaggct

SEQ ID NO: 218280 - DNA, 90 bp, Homo sapiens
tgcccccggccccgcgcggaggggcgggggaggcgccgggaagtcgacggcgccggcggctcctgagtaacagttacccctcaatgagcg

SEQ ID NO: 218281 - DNA, 75 bp, Homo sapiens
cagttcacataagaagttcttcgatgtatctaaacttggcaccaagtatgaaatgttcccactgccaggaggcag

SEQ ID NO: 218282 - DNA, 96 bp, Homo sapiens
gcgatctggacccttcacacaccctgatttcgaaccgagcactgaaagacgagttgtactgctgtcacaggaaatggacgctggattacaagcatg

SEQ ID NO: 218283 - DNA, 89 bp, Homo sapiens
ggcaaatttctgttccatcagcgtttgtttgtacgtagagaaatcgacactcttaatgaacgtttagctgctgaaggacaagcgattga

SEQ ID NO: 218284 - DNA, 123 bp, Homo sapiens
tgtacacacggcagagcatggccaagtccagatatatggagctctacacgtatcctcctgcctagcgcagggtcaatgcaaccaacttcatggaggcaggagccccagttatgtggaatgggc

SEQ ID NO: 218285 - DNA, 139 bp, Homo sapiens
ctcgagggaggccacgacctgaccgccatttgcgacgcctcggaagcatgtgtttctgccttgctgggaaacgagctgccgggccgcaagtacagccctgggtacaacaccgaggtgggagacaagtggatctggctga

SEQ ID NO: 218286 - DNA, 83 bp, Homo sapiens
gtgatcaccatgaacgaggagtacgagacgaggttcctgtgcaactcttcacagggtgaagagggaacagaaatctttgcccc

SEQ ID NO: 218287 - DNA, 100 bp, Homo sapiens
actccatcgtgggactcagcagccttggtgctcaggtgccagatgcaaagccccgtcgcagaatttagtctcaaaggaaacttcaaccacagcactgcag

SEQ ID NO: 218288 - DNA, 90 bp, Homo sapiens
atggcctataaaatgcttcaagtagtcctgtgctcaacattgcttatcggtttggcaaacatcgaaaagatgacaagattgagaaaacgg

SEQ ID NO: 218289 - DNA, 97 bp, Homo sapiens
gagaactggctggttctggagcccaggggcttgtgagtgctgactggtcacttgaagctttactctacaaatgggatatgaaatgtgtccacattcc

SEQ ID NO: 218290 - DNA, 75 bp, Homo sapiens
ggagtgaagaacgccgccatccagccaccattccaagtgatgaattgactctggaaggcatcaagcaatttttcg

SEQ ID NO: 218291 - DNA, 96 bp, Homo sapiens
attgttcactatgcaaagtggctgtgaactccctgtcacagctagaggcacacaacacaggaaatggaggagtttgtacagagctctggagaaaat

SEQ ID NO: 218292 - DNA, 100 bp, Homo sapiens
ccaaggcagacattcaacacctttacatttagcagcttctctatcaaggcccaagtccctcctggtatcctctccatccaccaaactgctgacattggaa

SEQ ID NO: 218293 - DNA, 75 bp, Homo sapiens
gaaagttcgaaaagttcctccaggtttgccatcttcatcagtcaagaacaatacccaagtgctcatcaactgccg

SEQ ID NO: 218294 - DNA, 100 bp, Homo sapiens
aattctggctctgattcaccttataaagcaaaattggtggaacgagaatgcctacacgcagccacaggaatccagtttccatggaaaccaaaagcagttg

SEQ ID NO: 218295 - DNA, 106 bp, Homo sapiens
ttttccttgacctttaggtgcttttatattcatctcaaaaacaaaattctgaactcaggacttggcaacactggatttcctggaacaaattttgacatttagcccc

SEQ ID NO: 218296 - DNA, 85 bp, Homo sapiens
atcaataagccatggcatctaagaaatttgctgttaaagcatttatgtttgaatcatctttaagtctggcggtcacaaagtgggg

SEQ ID NO: 218297 - DNA, 98 bp, Homo sapiens
ggggatccctcgtttgtggtagagccaggaggaaaacagttccgttcattctttcacagattgtgaagaggtctcttgaagtttggggtagtcaagaa

SEQ ID NO: 218298 - DNA, 122 bp, Homo sapiens
ctggaaccatctcagaagccatgcccctcaggctggaacttgccctgtctcctcgcagatgagggtttggacagaggagccaaaggccaaatttccactttcagcagttttatttcagctgt

SEQ ID NO: 218299 - DNA, 78 bp, Homo sapiens
ggacaagaaactagagcaaataaccgttttgaaattcatcagccactatgtgattgtcatgtccatgaccatcttttt

SEQ ID NO: 218300 - DNA, 98 bp, Homo sapiens
cactttttgttgcggcgttattgggccttaggaaattcgttgatgttctggtggattatggatcagatccaaatcaaagttgggatatctaaagcaga

SEQ ID NO: 218301 - DNA, 82 bp, Homo sapiens
gagtgagtcacccctttccagccagcaaacaaggtttacccaaggtccagcctagcccctaggcaccatgtcggacagtgat

SEQ ID NO: 218302 - DNA, 87 bp, Homo sapiens
tcttcatgtgtctcttctaagctgaataaagctgttttggaactgtcaggtacctcaaagcatcccaagtgtccttcaagatatcac

SEQ ID NO: 218303 - DNA, 89 bp, Homo sapiens
gtgagattctttttattgaagtggccccaggcaagttaggaaatcaacattgaatcccaatgcaaaggagttcaacccacgttccttct

SEQ ID NO: 218304 - DNA, 95 bp, Homo sapiens
tggcgcctgtgggcacagacaaggagctcagtgacctcctggacttcagcatggagcatcagatccatgctgctgctgactcggagccccacagc

SEQ ID NO: 218305 - DNA, 96 bp, Homo sapiens
atgagtaagcaaaatggaggtgaaggcggcatcattatcaatatgtcatctttagcagcaaagtggaagatgctttctacaaaggtgaactcaggc

SEQ ID NO: 218306 - DNA, 144 bp, Homo sapiens
aaacttccagaacatctgggagaatatttaatggaaaatcgcttggttaaaacctgacacttttaacagagataattgacgaccttgccaacctagtggagaacacagatgaaaaacttcgcaatgaaaccaggcgggtaaaca

SEQ ID NO: 218307 - DNA, 75 bp, Homo sapiens
ctgagcgcccagcacttggagcgtgaggaagttgggttcaaccaaagggaaggagccaagagcctcaaaggacca

SEQ ID NO: 218308 - DNA, 98 bp, Homo sapiens
cacccgcacccacggcgccgtcttcaacctcgagtactcgcccgacggtgaaggtggtgtttttaaggctcatcttactttcccaaaagattatcccc

SEQ ID NO: 218309 - DNA, 90 bp, Homo sapiens
gccgacctggatgtgcacggcaaggccaaggccacctttgatgccatttctaagacctacagctacctgacccccgacctctggaaggag

SEQ ID NO: 218310 - DNA, 100 bp, Homo sapiens
cagagggcctgaggcaggagatgagcaaggatctggaggaggtgaaagccacgtggtacatcccagcattcacaacctctccagttccatctgcatccct

SEQ ID NO: 218311 - DNA, 75 bp, Homo sapiens
gagacagaagcagatggattcgtccttttaggaaacctgtaggaagtgtcagggactctggaaagaacataatgg

SEQ ID NO: 218312 - DNA, 80 bp, Homo sapiens
ctcacctttgtctccccgatctacggggctgacatcagcggctctttgtatgatgaccggggatctgacgagcttttctc

SEQ ID NO: 218313 - DNA, 100 bp, Homo sapiens
gccgttaccttcttgctggcgttggtgggagccgtgctctacctctatccgtggctgcttcaacccccaactccactgctggtgcagccatgaactcctt

SEQ ID NO: 218314 - DNA, 80 bp, Homo sapiens
tcggccaagggaccaaggtggaaatcaaacgtgatgtccttgcaaatatcaatggtgtgagcacagaaggttttacctac

SEQ ID NO: 218315 - DNA, 74 bp, Homo sapiens
tcctcaaccagtgagggcgctgatcagaaaatgagagcatacctggatgtccaggcaagactgggcgaagtttc

SEQ ID NO: 218316 - DNA, 101 bp, Homo sapiens
caccaatgtgatggtgacagtggccaagtccttcgaggcaccaataaaatggtcggcactcttcaccctcccgagccctgcccgtctcggccccatgcccc

SEQ ID NO: 218317 - DNA, 80 bp, Homo sapiens
catctatcattatgaattggatatcaagccagagaagtgcccgaggagagttaacagaaagcgtggatacccatcaacga

SEQ ID NO: 218318 - DNA, 75 bp, Homo sapiens
actatgctctccgctgtgtccacagcgttcaagagatttaccgcattgtttctcagaagcaaatgtcagacagac

SEQ ID NO: 218319 - DNA, 50 bp, Homo sapiens
ctttggatgctttattgtacaaaggcagagactccccctaatgggccaga

SEQ ID NO: 218320 - DNA, 100 bp, Homo sapiens
aactatgtttggatgttggatctacactttctcaagcactgtgatcttcaaataacatacatatgatagttgagaaagacacatattctgatcatgaaga

SEQ ID NO: 218321 - DNA, 100 bp, Homo sapiens
cgtctctcaagccactttagccagtgtagccccagtatttactgtggtaaaaccagtaatccatagcaggatcaacgtgtcagctcgctttagaaaaccg

SEQ ID NO: 218322 - DNA, 50 bp, Homo sapiens
ctaccgggagctggtcaagaactgctggtcctttggagtccttctttggg

SEQ ID NO: 218323 - DNA, 83 bp, Homo sapiens
gcgctcaacaagaatcactcggagggcggcggagtgatcgtcaataacaccgagaggtaatagcctgcagctggtgttttgag

SEQ ID NO: 218324 - DNA, 100 bp, Homo sapiens
tatgacatcgttccaaccagttcaaagcttgttgtctttgatactacattacaagatgaatattctatctttcctcagacatactccatagatattaatg

SEQ ID NO: 218325 - DNA, 99 bp, Homo sapiens
cagaagaacctgtacagagaggtgatgctggagaactacaggaacgtggtctccctggggtgtcaaattgagaaccaggtagatccccaccacctacag

SEQ ID NO: 218326 - DNA, 75 bp, Homo sapiens
gaacatggccctggagcggctctgctcggtcctcaaagctttggaggaattttttacatcacttgtgaagcaaga

SEQ ID NO: 218327 - DNA, 100 bp, Homo sapiens
tcccacctcagcctcccgattagctgggattacaggcactgccaggacttaccgtacaacactccttggcttctggaattttatctctgctcacagtcta

SEQ ID NO: 218328 - DNA, 87 bp, Homo sapiens
ggtgttgcagcgctgtgacctcgagcatcactttcaaaccaggctgacggagccagtgcagccggaaggaaaagcactgcgagcagg

SEQ ID NO: 218329 - DNA, 82 bp, Homo sapiens
cgccgccaccatgcccaagagaaagcagcctcccgcgacgatgcccctcaacgttagcttcaccaacaggaactatgacctc

SEQ ID NO: 218330 - DNA, 82 bp, Homo sapiens
ctgtgctagcacctcccccaggagaccgttgcagtcggccagcccccttctccacggcccgtgatggaagtgcccaccctca

SEQ ID NO: 218331 - DNA, 100 bp, Homo sapiens
gagcagaaccccaggactgcgcccccgggagcgggcgcccagaggcttccgaggcaatccggcagtgtcagtctacagccgctaagctgagaagatctgg

SEQ ID NO: 218332 - DNA, 100 bp, Homo sapiens
tgggacactcgtatagccaaactccgagtgtctgctgacagctttgtgagacagcaggaggcacatgccaagctgtgtcagcgtgttatgatgccgtccc

SEQ ID NO: 218333 - DNA, 83 bp, Homo sapiens
tccctgacagcgcggaatctgggtgcagttcctgcagtaccccactctacgatcagtgcctccggagccagcgtggtggccat

SEQ ID NO: 218334 - DNA, 100 bp, Homo sapiens
acgcacagagaccgtgaagattccaagttcaggagaactcgaccggggtcagtatttggattatgagaaggaggaagtggaagctcagcccaggcagtgg

SEQ ID NO: 218335 - DNA, 88 bp, Homo sapiens
gacctggagctgggccaggccgtggagcacaaacggcggcgtattgctctgaagaagcagcgtaccaagaaaaataaagaagaggctg

SEQ ID NO: 218336 - DNA, 96 bp, Homo sapiens
tctagtgactggacgtggatgtgaccgctgcctgggtcatgtgaaggtggtgcgctacttagtcaaagaagtcaatcagtttccatcagattctga

SEQ ID NO: 218337 - DNA, 75 bp, Homo sapiens
cctcagtcttctgctgcatgacagctatgactacgacctgcaggaacagtattaaaggtggaagaaggtccatat

SEQ ID NO: 218338 - DNA, 82 bp, Homo sapiens
tttcctcttccaatggaagtgtttaagatacctaatcatgagctggtttgggctaaaatgaaaggttttgggttttggccag

SEQ ID NO: 218339 - DNA, 100 bp, Homo sapiens
aggaaggagagcccttcagcgaggaagctacacttttcaccaaggaactggtgctgcagcgagagattttctaccctagcaaggatggtacgaagattcc

SEQ ID NO: 218340 - DNA, 104 bp, Homo sapiens
ggataattgggatgatgacaatgtagaggatgacttctctaatcagttacggattaagttgtcatcattctgggaagaaaaaaaaaacattaatgaagaggcca

SEQ ID NO: 218341 - DNA, 75 bp, Homo sapiens
attggccaagcgtataccatgcaatgccttgtacttcaagcgtagcgagggcctggagcgccaccttcgacgagc

SEQ ID NO: 218342 - DNA, 82 bp, Homo sapiens
ctgctgccgccggcgaaggaggaggcgttgccggggcgatgccagtccctccactccagaggagaacgaaaccacgacaacc

SEQ ID NO: 218343 - DNA, 90 bp, Homo sapiens
cggggacttctctctggccctgctccctccgagcgctccgccgttgcccgcctggcccctacgggctgtctgctgctcggaccaccagca

SEQ ID NO: 218344 - DNA, 75 bp, Homo sapiens
ctgaggtgctgggacagccatggtttcagacggggaaggcaaagaggaaattgtgaaggtgacttttgaagagct

SEQ ID NO: 218345 - DNA, 98 bp, Homo sapiens
gaaaaaggaatcattgacccaacaaaggttcctggtacagttcagacaggacaaagtatgtgtgaagtttattcagggaaaccagaaaaatgggagtg

SEQ ID NO: 218346 - DNA, 100 bp, Homo sapiens
gatcaatccagatggcagccagtcagtggtggagtgttctaagaacggaagcatctgggctggatggaatttagcatcaagcagagtcccctttctgttc

SEQ ID NO: 218347 - DNA, 90 bp, Homo sapiens
ctctatcatgaagggtggggccgtggctgctgatggacgcatcgagccaggagatatgttgttacagattttctggcatccttaaatctt

SEQ ID NO: 218348 - DNA, 75 bp, Homo sapiens
tctttctccacccatcccgagaacacatttgacattgtgcagcaaagaaatggttatggagaagcccagtccgct

SEQ ID NO: 218349 - DNA, 75 bp, Homo sapiens
tggcctcaagtgatcctcctgccttagcttccaagaatgctgaggttacaggctggagcgcaatggcgcgatctt

SEQ ID NO: 218350 - DNA, 75 bp, Homo sapiens
actttggtatcgtggaaggactcatgacccctgttccctgccactggatgagggctcctgcactgcctacaccct

SEQ ID NO: 218351 - DNA, 90 bp, Homo sapiens
gctgaaacagaagatccactcgattacaggcatctgggaacaaagtcagtcgccagtcagtgttgtgtggaagccagaacatcgttctca

SEQ ID NO: 218352 - DNA, 75 bp, Homo sapiens
tggatcttaattggagaatcaagtagaaaacatcctgccattcactgtaaaaatgtgaagcctcagtttaggtca

SEQ ID NO: 218353 - DNA, 75 bp, Homo sapiens
ggcgaagatcgccaagactcacgaagatttattgctaaacatgggtgcatttttggataaacccaaaactgaaaa

SEQ ID NO: 218354 - DNA, 89 bp, Homo sapiens
tagtgcaagcatctgggccatcttcaattttcaccagtgatcattaaagaatgggcagcttacaaaggaaagtctcctcaaaccccgga

SEQ ID NO: 218355 - DNA, 83 bp, Homo sapiens
gttccttgtggagccggagctgggcgcggattcgccgaggcaccgaggcactcagaggagacggttgatgatgaagcgccggc

SEQ ID NO: 218356 - DNA, 99 bp, Homo sapiens
ccaaaagagccaaactcagctcgcccggtttctcggcgaatgacagcacagacgtactctggcctcttctgcgtggtggtcaacccctataaacacctg

SEQ ID NO: 218357 - DNA, 100 bp, Homo sapiens
cgagtgaatgggggctgaatgtgcgagtccatagctgaagaggagcgccagatggtggaggaatacacttatttatgaatctgcgctcctcagaccaccg

SEQ ID NO: 218358 - DNA, 82 bp, Homo sapiens
ttgtaggggttacagaacagtcgttcccgcctcacaacctggacaatcagagatgacttggttgtagtgtggaaaccagtag

SEQ ID NO: 218359 - DNA, 100 bp, Homo sapiens
gcgctcctcgccgtgctcagtgcctgttacttgggcaccccgagtgactgtgaagtgctgaccacactcaccccagacactggccgtatcctgtccaagc

SEQ ID NO: 218360 - DNA, 76 bp, Homo sapiens
ataagggcttaactcatatatttaacccccctccaaaaacctcctgaatgatgccagcccagtatgctctaacctc

SEQ ID NO: 218361 - DNA, 98 bp, Homo sapiens
agggggcagtcctcgccggcgagttcagcgttctgatctacaatggccaactggacatcatcgtggcagctgccctgacagagcgctccttgatgggc

SEQ ID NO: 218362 - DNA, 75 bp, Homo sapiens
aaaaccccgaggagccctgttccaaagcctcctggaccgtccaagaagtcgttcagattctaggagataagtttc

SEQ ID NO: 218363 - DNA, 75 bp, Homo sapiens
ggggctccctcgggcacctccggtaccgctgcagccaccgcggcccccgcgggaataagacgagttggaagaaga

SEQ ID NO: 218364 - DNA, 149 bp, Homo sapiens
gaagttgcagctgattaaggactatcgggagaaagtggagtccgagctgagatccatctgcaccacggtgctgtgtggccagactccactgatgatagctgccgaacaaggcaatctggaaatagtgaaggaattaattaagaatggag

SEQ ID NO: 218365 - DNA, 90 bp, Homo sapiens
tgcagcggggcatcatcaagatggcgatatgagtctcatccagtctgtgctgatctgcaggccaaaattcttcagtgttaccgtgagaac

SEQ ID NO: 218366 - DNA, 50 bp, Homo sapiens
caaccatgggaggccgcgtctttctcgagagcagttagccgagagcatcc

SEQ ID NO: 218367 - DNA, 100 bp, Homo sapiens
ccaggctcatcctgtccatcgtgtgcctgatgatcacgcagctggctggcttcagtggaccagaggcatgtgagcgcagcctggcagagatggagtcctc

SEQ ID NO: 218368 - DNA, 96 bp, Homo sapiens
gtcagctgtgccgtcgcgcagcacgcgccgccggtcctacaacgtgactttaaaaagacagcagaaagcaaaaatgtcccattggaacgagaagcc

SEQ ID NO: 218369 - DNA, 95 bp, Homo sapiens
ccgctctccaagatgaagaagctccagggagctcacctccgcaaggaccgccgggagagcctgcccacctccccaccctggacgccgggcgcgtc

SEQ ID NO: 218370 - DNA, 100 bp, Homo sapiens
attggagcctaccttccgcagcctccgagtgctggagaatctggtaaaagcaccattgtgaagcagatgaggatcctgcatgttaatgggtttaatggag

SEQ ID NO: 218371 - DNA, 74 bp, Homo sapiens
tcagcgtcccggcgccgtcgcgccactcctccgatatgccgagattttgctgtcctggaggaccacaccctggc

SEQ ID NO: 218372 - DNA, 100 bp, Homo sapiens
gaccggcagctgatgttctctcagtttgcacaagggaggcgacagagacagcagcagtgggggcccctgaagccactgatggaagccacactaccggggc

SEQ ID NO: 218373 - DNA, 100 bp, Homo sapiens
tgttgctgtgatcagtctgaaatacaatgataagagcacttttgaagaaacgtgtccatactgtttccagctgttggttctggataactctcgagtgcgt

SEQ ID NO: 218374 - DNA, 51 bp, Homo sapiens
ccccagctccgtctcggcggcggcggggccatgaagcccccaggaggagaa

SEQ ID NO: 218375 - DNA, 100 bp, Homo sapiens
actgccacctgctcactgcgaaaccctccggtacctcatggcacatctaaagagagtaaagatgctggtatcaggactttggttatgttggatgaacaag

SEQ ID NO: 218376 - DNA, 100 bp, Homo sapiens
cgcgtctgcagtgtgtggggttcgcggggcggcgggtagaggtatctctcctaaatgtgtgatcaaggaattaccaccaacagagaacagtaatacagga

SEQ ID NO: 218377 - DNA, 102 bp, Homo sapiens
ctgtacaccccatcccagacgaagacagtccctggatcaccgacagcacagacagaatccctgctaccacattgcagtgtcgagatggctatgaaccctgtg

SEQ ID NO: 218378 - DNA, 73 bp, Homo sapiens
aaagggaacttcagacaccaggcagggctcaaatttctgcctacagcaagagcctcctgatctagcagccaag

SEQ ID NO: 218379 - DNA, 98 bp, Homo sapiens
cccaatcttgcatcagtgggaacaagactacctcctcctttaccccagaacctcctttacacagtatcagaacgatttggtgctatggagaaattttt

SEQ ID NO: 218380 - DNA, 95 bp, Homo sapiens
ggaaacccgttcgccgagcccagcgagcttgacaacccctttcaggtctgagagtcactggagctaccagaagcatcatggggccctggggagag

SEQ ID NO: 218381 - DNA, 100 bp, Homo sapiens
agctgggcagtctgggcagtggaggcagagggacatttcatatatatggatttcacagctacactcgatccacgccccacaccacatacaggctgctgtc

SEQ ID NO: 218382 - DNA, 112 bp, Homo sapiens
cccagaccctggagcctcagttggaagcagccgatccagcctgcggagcctgtggggcaggagaataaaggcagccccgttgatgactgaaaatgacaaagcatccacctaa

SEQ ID NO: 218383 - DNA, 82 bp, Homo sapiens
tcatcatcaagcagatgaaggaggatggcgcctgtctcttccgggctgtaggtgctccatatgtttgagatccattttgtcc

SEQ ID NO: 218384 - DNA, 82 bp, Homo sapiens
cactgctgggccctgaggctgcaccaagtggcgaaggagccggctccaaggtcagtcatatcatttggatcaaaaaatagaa

SEQ ID NO: 218385 - DNA, 90 bp, Homo sapiens
ctgtgagttcaacatgatagagcagagtggaccaccccatgaacctcgacatgtcatgctgcccaaggacatagccaagctggtccctaa

SEQ ID NO: 218386 - DNA, 100 bp, Homo sapiens
agtaacaggcaaagctgatgcagacaccatgaaagctcaggccccggggcctccagcggcaccagcggagaccacggtgagctcgtcgtccggattgcca

SEQ ID NO: 218387 - DNA, 87 bp, Homo sapiens
ccgagctgttgactggaagaacattgtttcctggtacagaccccaaaagttttggaaggtctccatcaagaaaacaaaattattcat

SEQ ID NO: 218388 - DNA, 100 bp, Homo sapiens
ttgtttctggtgggatcgttggctatgtaaaaacagaaatacatgctacaggatttaactatcagaatgaagatgaaaaagtcaccttgtctttccctag

SEQ ID NO: 218389 - DNA, 82 bp, Homo sapiens
gctcggccgatgaagtgcagaggtttttttctgatgtggacgagtgctcactagcagaaaaaacctgtgtgaggaaaaacga

SEQ ID NO: 218390 - DNA, 108 bp, Homo sapiens
cctggggctgccttgcttgcctaaagccaagggagcagatggaccctactggaagtcagttggattcagatttctctcagcaagatactccttgcctgataattgaag

SEQ ID NO: 218391 - DNA, 104 bp, Homo sapiens
gagccggagctgggcgcggattcgccgaggcaccgaggcactcagaggagcaagagtgagccatggagctacgtgtggggaacaagtaccgcctgggacggaag

SEQ ID NO: 218392 - DNA, 109 bp, Homo sapiens
agtaccgtgagaagatagaggcagaactgcaggacatctgcaatgatgttctggactactgttcgaagatttttggaagaatactgagaacggcataaagtgaagatcg

SEQ ID NO: 218393 - DNA, 100 bp, Homo sapiens
ccgggtggcagagttgccaaccccagagctgccgagcaaggatgcctgagagggcgccctcgcgcgacgtcctgctggtctctgccatcatcaccgtcag

SEQ ID NO: 218394 - DNA, 75 bp, Homo sapiens
ttgtatcgaggctataaaagcacagttttaagagagattgtcagaagcttcagttctggtaaaagagaaggtggg

SEQ ID NO: 218395 - DNA, 76 bp, Homo sapiens
gtcaaatgcatgccaacattccagttttttaagaagggacaaaagcgtatccagtatgccaagaccgactcagata

SEQ ID NO: 218396 - DNA, 75 bp, Homo sapiens
caagaaggccctggacacagcaatatctctgggctttcacagacttttgcccgctacctttcattccggcgtgac

SEQ ID NO: 218397 - DNA, 83 bp, Homo sapiens
gaggacgccctgacggtcatcaaccagcaggaggactccagcgagagaagcagggccctgagcggaagaggattaagaaggag

SEQ ID NO: 218398 - DNA, 100 bp, Homo sapiens
caagaatgctcgcgccacgctcagcagcatcagacacatgatccgcaagaacaagtaccgccccgacctgcgcatggactatggtgcagccctgcggggc

SEQ ID NO: 218399 - DNA, 75 bp, Homo sapiens
tcaaatgacatttctattcatcatttcacatgtgatgaagagttggtagctggcagtgttgtgatggcttttgaa

SEQ ID NO: 218400 - DNA, 141 bp, Homo sapiens
ggaaggggtccagatgggaatgcacacaacctccgctttgaagggatggagaggcagtacgcatccttacccaggagctactctcctcctggtgaggtggaaattccagcaagaatagaggtgaagacaagccaccaggac

SEQ ID NO: 218401 - DNA, 50 bp, Homo sapiens
gtggcagccatctccttctcggtcccgcaggctcccgatggcgagattac

SEQ ID NO: 218402 - DNA, 51 bp, Homo sapiens
cttatgtgccaagaggtagtgatgaagatgtcatcacaatggatcccaaag

SEQ ID NO: 218403 - DNA, 95 bp, Homo sapiens
ggaacaggaacaggtctctttgggcagaccaatactggatttggtgctgttggttcgtggccctcatggagcacagcaactgctcgtcggagccc

SEQ ID NO: 218404 - DNA, 100 bp, Homo sapiens
aagcgggttaacaacaccttttgccaaggtgctacttttactgactggtttacctcttatgtcaaaaatgttgtatcaggtggcttccccatcatcagag

SEQ ID NO: 218405 - DNA, 100 bp, Homo sapiens
acggaagttatagtaaagagcatactccaaggggtttgccaacttgttaataagatggaggagaatactggcaaggttaagcctttcaaccgaaatgacg

SEQ ID NO: 218406 - DNA, 74 bp, Homo sapiens
tctgatgagctgagaaacaaagccacccagccaatgaaggtgagaatgagatggtgatcatgagacctggaaac

SEQ ID NO: 218407 - DNA, 74 bp, Homo sapiens
ccccagagaaagtcctcgctcgtcaccagcaagcttgcgggggatccatctgtctctaagtctgtagaacgaat

SEQ ID NO: 218408 - DNA, 100 bp, Homo sapiens
gtcgctggagcgggcggagctgtgcgagagcctcctcacttgggccaccagcccctcgggttccaagatgcagctactggagacagagttctcacacacc

SEQ ID NO: 218409 - DNA, 88 bp, Homo sapiens
tcattacgagaaagtgtcttatgtctctggatcctccttgcttaccacacacccccaggtggtccgtactgagaagaacagtttgaac

SEQ ID NO: 218410 - DNA, 100 bp, Homo sapiens
gaaaatgcagaggtgcacgttcagcaagcaaatcagcagctgtcaagggcagcagattatcaggatctctgctgtctcttggatcccatctgcctagatg

SEQ ID NO: 218411 - DNA, 75 bp, Homo sapiens
cttcagataacttctgtgaagctgatggggatcatcgtcttgctcttcttttatctcagtttgtgggtagccagt

SEQ ID NO: 218412 - DNA, 96 bp, Homo sapiens
aaaatacagccaagatcttggcaaagcttctccctcagtatttagaccaggaacagatggagtcggataactgttcaggaggagatgatgactgga

SEQ ID NO: 218413 - DNA, 98 bp, Homo sapiens
tacgaggcagcattatgtctctttgaagaggagcatctttccttgaagaagtacattattgacattgtggttgaaagtacagctccagcagaagcttt

SEQ ID NO: 218414 - DNA, 100 bp, Homo sapiens
catttatgacatgaaaaagaagattgagcatggggctctagtgcatcacagtgtgtttgaaagatgtatggtgatcttgaaacctccagacacaagaaaa

SEQ ID NO: 218415 - DNA, 82 bp, Homo sapiens
gctgagtcacacacaacgcttgttatgttttcatcacttctctccagaagatgcttgggatttgctttacattctaagtgga

SEQ ID NO: 218416 - DNA, 100 bp, Homo sapiens
gcggctgcgggaagcgtaccgcgagctcaaggaggacctcacgcccttcaaggatgaccgctactacaggcgtgacgcctgcttcacatctctaatgaac

SEQ ID NO: 218417 - DNA, 74 bp, Homo sapiens
gcgaacgaccaagagggtgttcgactgctagagccgagcgaagcatcgtcagtatttaaacagatcacatcatg

SEQ ID NO: 218418 - DNA, 74 bp, Homo sapiens
gttacgggaatttagacttgtagcagctgaccgaagggctgcctctaagaatcaaacttcactcttgggagaac

SEQ ID NO: 218419 - DNA, 83 bp, Homo sapiens
tcagtcccagccttctgttccagccaagctgaggccccagcggatacaccaggcaccgacatatgtttgtaaaacaagttgat

SEQ ID NO: 218420 - DNA, 100 bp, Homo sapiens
gggtttaggcctgtctccagatctggtgcataaggcaaatccaatacgcaagtaccagggtctggagataaagtcaagtgaccagcctctgactgtgcct

SEQ ID NO: 218421 - DNA, 75 bp, Homo sapiens
ggccgcgcggactgaaggagactgaaggaaatctggcattttttaaagtttgcgccccacaaagaggaaatattc

SEQ ID NO: 218422 - DNA, 82 bp, Homo sapiens
ctggaggcaagagtaagacagctggaggaagaaaatcgcatgctgccccaggtgctggagaatctggtaaaagcaccattgt

SEQ ID NO: 218423 - DNA, 100 bp, Homo sapiens
cccccgagagccgccgacatgaagaaagacgtgcggatcctgctggtgggagaacgctaccaagcagtttctcgaagagattaacaagtggacagttcag

SEQ ID NO: 218424 - DNA, 100 bp, Homo sapiens
gcgggcggccgggagccatggagcgcggccctggggcccgggggcgcgggccggggtgatatcagttttagagaatgtggcgtggagaaattctcaagga

SEQ ID NO: 218425 - DNA, 74 bp, Homo sapiens
ccacctgaaggatctctggaatgatggggtgtccgcaatgttgccagtgtctgtctgcagattggctacccaac

SEQ ID NO: 218426 - DNA, 96 bp, Homo sapiens
agacattcgacagctaccccgccgtgctggtatagaggactctaagaagtggggcatgctgtttctggtgaaccagctgtttaaaatctacttcaa

SEQ ID NO: 218427 - DNA, 100 bp, Homo sapiens
aggagctgcaaaccacccaagtctgcaatcttaccagggaggccaagcgaccacccaaagaagtgccgcagtgtgtctggagaataaatgtggatatccc

SEQ ID NO: 218428 - DNA, 100 bp, Homo sapiens
agcatggcatttcagtcactggtttgcagagtccaggaaagctggcagttaaggaaaggagtaagtgaaattggagaagatgtggactatgatgaggaac

SEQ ID NO: 218429 - DNA, 88 bp, Homo sapiens
agcttctgaaccatccacacatcataaagctttaccagggcttgtcaatgaggcagatcagattcaggttcgacgggcagccaatcaa

SEQ ID NO: 218430 - DNA, 75 bp, Homo sapiens
tcctatttttggcttcaagattttgtgccaaccaggtatgtcttactgaaagaaagaaacatgcttctaacccta

SEQ ID NO: 218431 - DNA, 90 bp, Homo sapiens
gagcggggccttccacaccccctccgtgggtgtgtggtggctgctacaccccatgtaaaaagcggaaaataaaatgaagattttccagcg

SEQ ID NO: 218432 - DNA, 75 bp, Homo sapiens
cttgggaccgcctgcctggccattgcgagcggcatctacctactggcccagtactacggggagattggcatcggg

SEQ ID NO: 218433 - DNA, 98 bp, Homo sapiens
tgtcggaggagaagctgcaggagaaaggacagtcattttgtttactcattcagccctgttgcaggtcccaataaactcttcataaggttgacagaagc

SEQ ID NO: 218434 - DNA, 100 bp, Homo sapiens
ttccaagttataacatattacgaagtccttgttgtaagaacgcttggtttcatagagactgtttacaggttaatccagcacgtatggggccaagtgtagg

SEQ ID NO: 218435 - DNA, 51 bp, Homo sapiens
acagtttacaggctgactactggaaggtaaatgaattggtggatgccagag

SEQ ID NO: 218436 - DNA, 75 bp, Homo sapiens
ccctacttcaaggataagggcgacagcaacagctctgccggctggaagaagcctccccagctttctgaggatgat

SEQ ID NO: 218437 - DNA, 98 bp, Homo sapiens
agcgtctgcaccttcagaaacagtgctgaagcctttaaatgcagcatctgcgatgtgaggaaaggcacctccaccagctgtgtcagcgtgttatgatg

SEQ ID NO: 218438 - DNA, 83 bp, Homo sapiens
agggtccgagccagccgctgttttgccggaggagcccctcaggccgaacggcagagtcgaaacaaacaatgagggcgaaccag

SEQ ID NO: 218439 - DNA, 100 bp, Homo sapiens
actttttcttgtccgggtgcggataagggacccgacactgatgtgcaatggatgagcttcatagtctggatccaagaaggcaagagttattggaagctag

SEQ ID NO: 218440 - DNA, 100 bp, Homo sapiens
aaaattcactaaaacccacaagtttcggttgcacgtcacagctctggattaccttgcaccttatgccaagcttcgcagaatcaagaacggctatgtgcgt

SEQ ID NO: 218441 - DNA, 90 bp, Homo sapiens
ctcccagctaccatgccagagccagtttattttcactgtgcagctgttacaccaatgtctgaggataaaaaggatgaaggcagtgggaca

SEQ ID NO: 218442 - DNA, 100 bp, Homo sapiens
ccaagtgcgcgccctggcgggtccggaccaaggtcgcctggtcggcgctctggatgcagtgttggattccaatgcacgggtcgctccatttcgaattctg

SEQ ID NO: 218443 - DNA, 75 bp, Homo sapiens
cagaaaaaagatcacaagcaactctggatgggattgcaaaatgaaactgttttggctgggcctacttcacctata

SEQ ID NO: 218444 - DNA, 100 bp, Homo sapiens
cgagcaggctgagcgatacgacggtgtgtagctgggacggtgctggtctgagctggaccttgtctgatggcttcctccaaccctcctccacagcctgcca

SEQ ID NO: 218445 - DNA, 97 bp, Homo sapiens
gaggggaggattttgaggacacttgtggagagctcgaattccagaatgatgaaattgtggttgtctcctcacagactatgagctccttgaaagaggg

SEQ ID NO: 218446 - DNA, 75 bp, Homo sapiens
ccaggctgtactgctccccaagaagactgagagtcaccacaaggccaagggtatgttatgcataaaagtggataa

SEQ ID NO: 218447 - DNA, 100 bp, Homo sapiens
ccgcgtgtgccctaagcacacctggagcaacaacctggcggtgctcgagtgcctgcaggatgtgagggaggccaagtcctgtatctgccatgtctgtggc

SEQ ID NO: 218448 - DNA, 133 bp, Homo sapiens
gttcatttctaatcaactatgctagacagctgcaagctgaaaagtgcctgcaatttgccatttatttgtaataaggtccaagggtagccaaggatggctgcagcttcatatgatcagttgttaaagcaagttg

SEQ ID NO: 218449 - DNA, 88 bp, Homo sapiens
agaccatcgcagagggaaggcgaatccccataagtaaggatgtccttggtgaggattttgaaaatttgatcttcacaagagttgcctg

SEQ ID NO: 218450 - DNA, 95 bp, Homo sapiens
gatcatcgagcatttcaaacgaaattccgggtagatatgcctggctcaggcagtgcattcatccccaccatcaacgccatcacgaccagccagga

SEQ ID NO: 218451 - DNA, 75 bp, Homo sapiens
caatggggaacgctcacggactgtgtgcaagttgaagtcgattgccaacagtgtatgctcgaaatcctggatact

SEQ ID NO: 218452 - DNA, 83 bp, Homo sapiens
agataattgataacaccctgtaacagctgaatttattgctaaacatgggtgcatttttggataaacccaaaactgaaaaacat

SEQ ID NO: 218453 - DNA, 100 bp, Homo sapiens
ctcgggtcgttgtggtgcgctgtcttcccgcttgcgtcagggacctgcccgactcagtggcctttccgttccgaacgtccacggcgccctggcccccctg

SEQ ID NO: 218454 - DNA, 90 bp, Homo sapiens
tgaactcagtgctcatggggatgaagaaccagctcgtttctgatgaagaattgaaaagaagagtagctgaggagctggcattggagcaag

SEQ ID NO: 218455 - DNA, 83 bp, Homo sapiens
atcctgggcaaacctgcggactggagacctttggcgacttggcctttggcgacatcttcctccacctgctcacgggcaacctt

SEQ ID NO: 218456 - DNA, 75 bp, Homo sapiens
tcaactaaaaacaaaattgccagaaaatctttcctctaaagtcaaactgatcctgataacttaagtgactctctc

SEQ ID NO: 218457 - DNA, 83 bp, Homo sapiens
cggagcgggagtgttcgttgtgccagcgactaaaaagagtgtactaatggtcacttgatgtgcgctggctgttttatccacct

SEQ ID NO: 218458 - DNA, 98 bp, Homo sapiens
acttactccagtgggaggaggactccagacctcagcaatggagaatatccccatcatcacaactgtcatcactctgccgcacgtgattgtggagaata

SEQ ID NO: 218459 - DNA, 74 bp, Homo sapiens
gccgccgacccgccgagcaaaatggtcaaaatgcagatcttcgtgaaaacccttaccggcaagaccatcaccct

SEQ ID NO: 218460 - DNA, 82 bp, Homo sapiens
tgaaactggggaaaagtgcaatgcagctgtatgcaggagctattcttgaagtttgtggatgaaaattgggaaggttccctca

SEQ ID NO: 218461 - DNA, 75 bp, Homo sapiens
aacagcatcagcatgtcggtggagatcaacggcatcatgtacacaggagctcgaggccatgagcagatataccag

SEQ ID NO: 218462 - DNA, 98 bp, Homo sapiens
ccgtggagagatcataatttggggttcaagattccagttgtggacatcggatacccaaggagacgaagctgaagcaggagaaggaggggaaaattaac

SEQ ID NO: 218463 - DNA, 83 bp, Homo sapiens
ccttgggcctcgcgccggctatggccgtgccctggggctgagccctcagtgatgaacggcagcagccactcaccaacagccat

SEQ ID NO: 218464 - DNA, 82 bp, Homo sapiens
aggtcatctcgctcggagcttcgctcggaagggtctttgttccctgcagccctcccacggagcgtgaggatcatccccggag

SEQ ID NO: 218465 - DNA, 82 bp, Homo sapiens
ggaagcagccgatccagcctgcggagcctgtggggcaggtggtatcacggaaaacttgacagaacgatagcagaagaacgcc

SEQ ID NO: 218466 - DNA, 75 bp, Homo sapiens
gctcgccagtcttggggacagtgtcagcgtgctggagaatctggtaaaagcaccattgtgaagcagatgaggatc

SEQ ID NO: 218467 - DNA, 90 bp, Homo sapiens
ctgctaaagaggatcctgccaacattttacagttctacatcaaacagttcgttaactgcagacgtaaattctggatttgccaaacgtgtt

SEQ ID NO: 218468 - DNA, 90 bp, Homo sapiens
ctgatgaagaaaattaaaaaactggagaatgacaccatttctaagcaacttacattagaacagcgtcgtctcggagatgcagccaagaaa

SEQ ID NO: 218469 - DNA, 75 bp, Homo sapiens
aagcaaacagcaagctttcatcaagagaagatggggagccccgaggatgacctgattgggattccattcccggac

SEQ ID NO: 218470 - DNA, 98 bp, Homo sapiens
ttcagtcccagtgcagggacctcaagatcctccccggcgtgaaggtcatcatcgcacacaccgagaccaaaggacccttgggagactcacacctggga

SEQ ID NO: 218471 - DNA, 100 bp, Homo sapiens
cccagcattaccaagacacgctgattagagcgaagagagagaaagcccaggtgctactcgtgagcagtagtcgccatccagacagatggattgtccctgg

SEQ ID NO: 218472 - DNA, 100 bp, Homo sapiens
ttcgaaaagcagttcaacgagaatgaagccatccaatggatgcaggaaaactggattttttatcaagcagaaatgcatcgaacaacgagaatcaagatca

SEQ ID NO: 218473 - DNA, 100 bp, Homo sapiens
gttagaaaaaaggatatatatacctctcccaacagaatatcaacacctttgagaacagaatgttaatgcttgatgggatgccggcagtcagagtcaaaac

SEQ ID NO: 218474 - DNA, 92 bp, Homo sapiens
gatatttgcacagaacagtgtacccttagtgaccagatcttgtaaggccacaagatacatatcaattttttgttaagcatggtgagttgaag

SEQ ID NO: 218475 - DNA, 73 bp, Homo sapiens
tcaaggccttcagaaacatccctgcctgacaggagcaatggccaccagcaggtgaagggcatcgctgccccag

SEQ ID NO: 218476 - DNA, 99 bp, Homo sapiens
cggccatcgccgcgtcgcctggcgcccggctccggcggacccttctccggcaggtagcccagccatgacccataggaatctgacttcctccagtctgaa

SEQ ID NO: 218477 - DNA, 87 bp, Homo sapiens
acggcctggctttctgcgccatcctgcaccgccaccggcccgacctcatgacgtagacaagtttggcaacgagatcacccagctggc

SEQ ID NO: 218478 - DNA, 100 bp, Homo sapiens
ggcgactacgcacgcgcgctgcgctacctgcaggaggcccgcagccgggaacccacagacatagatgagtgcagccaggacccgagcctgtgccttcccc

SEQ ID NO: 218479 - DNA, 90 bp, Homo sapiens
acctaccatgggacctggcaaagtacttcagaacttttattccttccagaagcaggacttggaccctctgtggaacacccgagtacctag

SEQ ID NO: 218480 - DNA, 98 bp, Homo sapiens
acaggtccctggcgagccccttgcagaataactgaagtgaagtgatggactccgatttggagagtagtaagacgtgaaaggaatacacttgtgtttaa

SEQ ID NO: 218481 - DNA, 78 bp, Homo sapiens
aagaagttcgtgaccttttgggcaaggatcagacacaaaggttagagaaaaggcgacggcggattgacagaagtatga

SEQ ID NO: 218482 - DNA, 82 bp, Homo sapiens
cttcccgcgtccgccgattcctcctccttggtcgccgcgtccttggctggcgtgccaccagcccctcgggttccaagatgca

SEQ ID NO: 218483 - DNA, 75 bp, Homo sapiens
gggtaatggctgaggggcgagaactgatcctggacctggagaagaatgagttactcactataaacaatatccacc

SEQ ID NO: 218484 - DNA, 99 bp, Homo sapiens
taccagggcatggtggacggaggctcaaacatcgcagaggccgactgggagagtgtctccagcatcctgcaagtggtatcgagaaccttccctgcgaac

SEQ ID NO: 218485 - DNA, 100 bp, Homo sapiens
gccttcgtacccgtcttgattgagacggctgcgacgaggagctggtgggtcccctgtatgcacgctccctgggcgcctcctcctactacagtctccttac

SEQ ID NO: 218486 - DNA, 83 bp, Homo sapiens
aggcggcggccgagggcgtcgcggactctccccgcgatgatgccgcttagaccatgctcagcctccaagcagccttgtcatcg

SEQ ID NO: 218487 - DNA, 74 bp, Homo sapiens
atgaagccaacatatcaactcttcttcgagaatttcagaccttgaagctgatgatgttaagggcagtgtaccac

SEQ ID NO: 218488 - DNA, 73 bp, Homo sapiens
gaaaatgcgctcgggctggaccagcagatgaatgatttcggaatcaagaatatggaccaggtagcccctgtgg

SEQ ID NO: 218489 - DNA, 95 bp, Homo sapiens
caacaacccacacgcaccccagaacattgtcaggtacagcttcaaaaagctgcacacatacatgtaagagaagcaaaaatgtcagatgatatcag

SEQ ID NO: 218490 - DNA, 125 bp, Homo sapiens
gccgagatgccgggggagcggggccttccacaccccctccgtgggtgtgtggtgtcatggagaaactccagctgggcccagagattctgcagcgggaaaatccaaggcttatttatgccaggctg

SEQ ID NO: 218491 - DNA, 100 bp, Homo sapiens
tgaaaatgagcctgaaacgtgcatggtggagaaaatgaacttaactttccatgtgtgtataggacaaattctacgaataatacaactacttggaaccaca

SEQ ID NO: 218492 - DNA, 83 bp, Homo sapiens
gctgtgtctacggcagcctggggatataacctgcctagagctggaacgttacctccagagcgagccctgctatgtttcagcct

SEQ ID NO: 218493 - DNA, 100 bp, Homo sapiens
aacggagacttcgtgtgcggacagtgtgtgtgcagcgagggctgcatcctaatgtcctatgatcacgtggaactcacattcaatgacatgaagaacgtgc

SEQ ID NO: 218494 - DNA, 100 bp, Homo sapiens
acaacaagcaagcatgcagcttactgcttgaaagatgtcttcaatgaacgagacaattgtccctacgtctacaacactgaccagagggacacggatggtg

SEQ ID NO: 218495 - DNA, 99 bp, Homo sapiens
aggagtttcggctcagtggggaggccttcgactggctgcttggggagattgagtccaagttcaaccaagccattacctacattgccccaccagctgcca

SEQ ID NO: 218496 - DNA, 75 bp, Homo sapiens
gcaaagaagagttgagcacaatcagttagtaacaggagtatgggaaggcaaatacaacttcttctgtcagggcac

SEQ ID NO: 218497 - DNA, 74 bp, Homo sapiens
ctaccctggaggagattctggggcagtatcaacggagtctccgggcaccagatactgctacaccatctcatcgg

SEQ ID NO: 218498 - DNA, 101 bp, Homo sapiens
ggagactgtattgtgtgcgagaagggagttgaccacatttggccatttcccagaagggccccaccccaagggtgagtggccaatggggagctgtttctgct

SEQ ID NO: 218499 - DNA, 80 bp, Homo sapiens
ctcaaagctgtgatcaccctgatgtcaccgaatggccacagcttgtaaaaggccggagcctcaacagaaagctcctttag

SEQ ID NO: 218500 - DNA, 50 bp, Homo sapiens
tgaccccgctttcctcacgcccaggaatactcccccagttgcaagaggcg

SEQ ID NO: 218501 - DNA, 100 bp, Homo sapiens
gacctgctaacagaactggaccttttcggcagaagctcctcctggggtagagacagatcttattgatgttggattcacagatgatgtgaagaaaggaggc

SEQ ID NO: 218502 - DNA, 100 bp, Homo sapiens
gctggtcttaccacttatcatctccagtcttgtcacaggcatcaagcatgatggaaccatgtgtgatacctgccgccagcaaccaatcattggcattcga

SEQ ID NO: 218503 - DNA, 76 bp, Homo sapiens
ccgaaagggttgtagacatggcggccatcagggtaaatggtcttaaaatggttgatgagccaatggaagagggaga

SEQ ID NO: 218504 - DNA, 75 bp, Homo sapiens
tctgcttttccagaaactgtgccaggatcacggcatcgactgggcccccgagagtaaccgtattgtgacctgcgg

SEQ ID NO: 218505 - DNA, 95 bp, Homo sapiens
actgaagcgcccgtccattccaagctggatgactgtactctgcagctctctcacaatggcgcctacctggatttggaggccaccctggcagagca

SEQ ID NO: 218506 - DNA, 74 bp, Homo sapiens
catggggatggcttggcaatctggtacacaaaggatcggatgcagccaggctgaccaactgactgaagagcaga

SEQ ID NO: 218507 - DNA, 100 bp, Homo sapiens
tttctggattcctgtatgggtgtcgttcagtgggcctttggagtgacgctgtgggaactcatgactctgggccagactccctacgtggacattgacccct

SEQ ID NO: 218508 - DNA, 75 bp, Homo sapiens
atcaccgctctgcaggctgttcctcctcggacctcagttggatgaacccattccactgtatgaggcaaaagtttc

SEQ ID NO: 218509 - DNA, 75 bp, Homo sapiens
aagtgatgagcgtaggacaaaactacactattgaactggaaaaacctatatgaagcaacagcatgtcatagaaac

SEQ ID NO: 218510 - DNA, 101 bp, Homo sapiens
gctgaagcagaagtccccggagctgcggtctccccgccgcggctggtgccgacgccaccgccgagcccatgatcctggaacagtacgtggtggtgtccaac

SEQ ID NO: 218511 - DNA, 88 bp, Homo sapiens
catcctggagatctacaggatttatcaaatcgagtcactgtcaagaatctttgtctgaagtggaagaaaaatacaagaaagccatggt

SEQ ID NO: 218512 - DNA, 58 bp, Homo sapiens
acaccgcggaagtcgggaaatggctggttgtggtgactcatgcccataatcccaacac

SEQ ID NO: 218513 - DNA, 51 bp, Homo sapiens
gcatggtggactgctcgacaggatatattttttgaaattggcacaatggaa

SEQ ID NO: 218514 - DNA, 101 bp, Homo sapiens
gaaccatcttcctgcacacagccacgatttgcaaaggtcgtccttggtggaaggaaccatgaactggcatctccccctcttcctcttggcctctgtgacgc

SEQ ID NO: 218515 - DNA, 82 bp, Homo sapiens
gaaggcctctctcctgatacagcaggcgctcaccatgttccctggagatgctgtgtgctgtggacccacctggggttcatgg

SEQ ID NO: 218516 - DNA, 101 bp, Homo sapiens
gtgcgttccatggatgaactgaatcatgattttcaagcacttgctctggagggaagagcgatgggagaggtagacgttacatccaagaggaaataatccag

SEQ ID NO: 218517 - DNA, 82 bp, Homo sapiens
ctcgggacggaggacgcgctagtaacaagttgaaatcatcgcagaaggataaagttcgtcagtttatgatcttcacacaatc

SEQ ID NO: 218518 - DNA, 75 bp, Homo sapiens
cagccgatccagcctgcggagcctgtggggcaggaatgggtaccacagaccatgtcatcgtcctggcgtccacga

SEQ ID NO: 218519 - DNA, 100 bp, Homo sapiens
cagccacaaatgtacccccagtacacttactactatcctcattatctccaaaccaaggaattgccacaagcagtctgtgagatccttgggcttcaaggca

SEQ ID NO: 218520 - DNA, 75 bp, Homo sapiens
gaaggaggctcagttcaaagacctgttcttaaaaaaagcacttttccagccattaactccaggctctcgagaatt

SEQ ID NO: 218521 - DNA, 90 bp, Homo sapiens
ctccgtgctttccgcgggtctgtccgggggctccggaccctcggcgcagcaacccccttgggcaacgtggaggagtgctaccgctacttc

SEQ ID NO: 218522 - DNA, 75 bp, Homo sapiens
tggaggcacagctgcagtctgacgagagggtttaatggctatgctgggagcctcttctcaagtggaccctacgag

SEQ ID NO: 218523 - DNA, 98 bp, Homo sapiens
gctggtacgtgcttttcctcctgcagcccaccgtctacttggactcgctgattcttgagaagagtcaaaactggagctctcaaaaaatggaccatatt

SEQ ID NO: 218524 - DNA, 75 bp, Homo sapiens
gccgcggtccagaccaacatgagagacgcaacacctaagtggaccaacccctctgcctgtcctgccccccagacg

SEQ ID NO: 218525 - DNA, 100 bp, Homo sapiens
acccgcgccgccgggacccccaggacgacgtgtacctggacatcaccgtcggatcctgacctcccagccgatgtgcagacaccatcctcggtggaactgg

SEQ ID NO: 218526 - DNA, 50 bp, Homo sapiens
gccaaaaacttgctggaaaccctgaaagggccaggaaggaatactgggag

SEQ ID NO: 218527 - DNA, 74 bp, Homo sapiens
tctggtgcatgctgatgacgaaaaacatctgcgagtgaagagggacgagggaaaagaaacaaagccacagacgc

SEQ ID NO: 218528 - DNA, 82 bp, Homo sapiens
cagagaagggccaggagaggagcactttgaggacatggcctccgacgaggacatgacacctgctccacttcaccttttgcca

SEQ ID NO: 218529 - DNA, 75 bp, Homo sapiens
cgccactacagttcatcaacatcaactacgtccctctgaaggagcaaatcttggagcttgcagcagccagaacca

SEQ ID NO: 218530 - DNA, 102 bp, Homo sapiens
cgcaggaagagccgggccgggccgagcggcgcccggagcccgcgggcctgacacgcggcgggacatgcagacgcaaaatcgaatgaagctaatggccgacaa

SEQ ID NO: 218531 - DNA, 48 bp, Homo sapiens
acttccttccagcagctacacaggtattgttgcagcatctggcagtga

SEQ ID NO: 218532 - DNA, 74 bp, Homo sapiens
tttatgttctatgctccctaatgaagatgctattaaggaggtggtggttgtccaggccatcagtgccctgtgtc

SEQ ID NO: 218533 - DNA, 50 bp, Homo sapiens
cggagctgtgcgagagcctcctcacttggaatgttgtaccatctttgggt

SEQ ID NO: 218534 - DNA, 100 bp, Homo sapiens
aagcctattgaaagttttaatgagtatttatttgctttacaaagccatctatgctactgaccctgcttttacatggaaacatcatcacctctcttagaat

SEQ ID NO: 218535 - DNA, 100 bp, Homo sapiens
gcctgccgcctcgctgtccctgcggcttctgggggttgtgctggtgaggtggaatgagccctaccagaaactggccacgtgcgatgcggacggaggcata

SEQ ID NO: 218536 - DNA, 75 bp, Homo sapiens
tacaccatcgacaccgaaaactccaccgtagcccttgccaaagaaatttaaaagcctgttgattcaagaactttc

SEQ ID NO: 218537 - DNA, 50 bp, Homo sapiens
tgcggtgggaccacgagagcctggaggagcaccggaattcacagaagcag

SEQ ID NO: 218538 - DNA, 100 bp, Homo sapiens
aaggctgcgagggactaagagcagaatttaggcctattaaaggaaggcaggaagaactaaaggaagtaattgaacgttttaagaaagatgaacacttgga

SEQ ID NO: 218539 - DNA, 74 bp, Homo sapiens
tcgaagcgggaagatggctgcagacaagcctgcagatgccgacaaaaggatcaaggtggcgaagcccgtggtgg

SEQ ID NO: 218540 - DNA, 83 bp, Homo sapiens
ctccaagttgtggagaagctgcaggcgcgcctggccgcgaacccggaccctaagaaggccctgggaggagcggggacactgag

SEQ ID NO: 218541 - DNA, 100 bp, Homo sapiens
gggaccatgttccgacgcaagttgacggctctcgactaccacaaccccgccggcttcaactgcaaaggagattgtgaagacctttgagatttcagagcct

SEQ ID NO: 218542 - DNA, 90 bp, Homo sapiens
gcgtctccggggaaagccgtggccccgagggcggatccgagtgcttagatgagtacgaagatgatgaagcagggcagaaagagcggaaac

SEQ ID NO: 218543 - DNA, 90 bp, Homo sapiens
agcatgcctcaccaagtcacatgacaagcaatttctggacttcaagaaacattgaagaaactgcaaagaggacatagttaccatggtcct

SEQ ID NO: 218544 - DNA, 75 bp, Homo sapiens
ctacccgcttctcgtagtcctgggagcacagcagaagtgtttggtgcacctcgatttggaggaagtagggcaggg

SEQ ID NO: 218545 - DNA, 100 bp, Homo sapiens
gccgcggcaccagggcgcgcagccgggccggcccgaccccaccggccatacgtgtcgtgtgggagccaatgggagatgggaagaaaatcatttccttggc

SEQ ID NO: 218546 - DNA, 100 bp, Homo sapiens
attatccatgagattacagttgtaacttcatagactcccaaagggaaattcttggacccagatgatgtggtaccagttggccaaagaagagcctggtgtt

SEQ ID NO: 218547 - DNA, 74 bp, Homo sapiens
gccgtctgctcttctgcctcttgatctccgccaccgtcttcaggccaggtctgtgtgaaaatgtgtgaccctgc

SEQ ID NO: 218548 - DNA, 82 bp, Homo sapiens
aaagccacagataaaccagtggaagcaggagaagcagcaattatcgtccgagcagggaaaactgcctttgcttctgagccgg

SEQ ID NO: 218549 - DNA, 100 bp, Homo sapiens
agccttcccctgagtactagcgtccctgacagcgcggaatctgggtgcagttcctgcagtaccccactctacgatcaggccccccggacagaccacccag

SEQ ID NO: 218550 - DNA, 123 bp, Homo sapiens
caaaccgtggctgctcgataaatcagacagaacagttaatcctcaatttaagcctgatctaacccctagaaacagaaagggctaagaactctgtgtatagcatatagaaaatttacatcaaaa

SEQ ID NO: 218551 - DNA, 74 bp, Homo sapiens
tgcatggtgtttcaaagggtggtgaagaactaaggtggaacggccgccttctccattctccatggccccacaag

SEQ ID NO: 218552 - DNA, 85 bp, Homo sapiens
ccaaaatcacagctttgagtgagaaacaggtaacaaacctgaatttggcaactggcatcataaacagaagcagtgcttcagctcc

SEQ ID NO: 218553 - DNA, 100 bp, Homo sapiens
tccgtggattcctctgctaagaccgctggtattcgtggacaccgtagggatgccagagacataccaggcgcggctgcagcaaagttttcccgggattgag

SEQ ID NO: 218554 - DNA, 100 bp, Homo sapiens
gcagctgctgctgaccctggccttcaaccccgagccgctggtgctacagttggttcgactatgcaatgagggcgcccggaagatggaaaggactgagatg

SEQ ID NO: 218555 - DNA, 100 bp, Homo sapiens
ggtttatttccaaagttgaagaagtcttgaatgactggaaactgattggaaactctttgggaaagccactcgaaaaggtattgttgcagcatctggcagt

SEQ ID NO: 218556 - DNA, 90 bp, Homo sapiens
gtagaaacagagaaaatgtacgtggacgacttggggcagattgtggagctgctgccttccagggtcttctgctgctgttgccgccaccac

SEQ ID NO: 218557 - DNA, 90 bp, Homo sapiens
gcgaggggatcctcatgagttaagaaacatatttctacaggaccagaggagcgagagcagcaagaaccacacccagcagcaatgtcagcg

SEQ ID NO: 218558 - DNA, 82 bp, Homo sapiens
cctccccgcgccgctcgcgcagccatgtccgaggagaagcccaaggcataatcaccagcaacacccgggacaataatacggg

SEQ ID NO: 218559 - DNA, 82 bp, Homo sapiens
gatttttggcctaccctccaaagaaaagatcccaaagttctttgagctctgctctgatgctgtttggggcatgcggaaagcc

SEQ ID NO: 218560 - DNA, 82 bp, Homo sapiens
attctcaacgatgcagtctccattgttctgaccaaagatctggttggagttggagggtgagagaaaatgaattctaatttac

SEQ ID NO: 218561 - DNA, 78 bp, Homo sapiens
aatcagtctttgacaagtgatgagaagctgtcggagcttcccaaggtggatgcccggagcataccagtgttagcaaaa

SEQ ID NO: 218562 - DNA, 49 bp, Homo sapiens
cctcccggcgcccttcagcgaggaaggtccatggaggtgaaccacccag

SEQ ID NO: 218563 - DNA, 71 bp, Homo sapiens
aggctctggaacttctgcccagctctccttggtagtccaggggatcctgctcatctcagctgtgccagcac

SEQ ID NO: 218564 - DNA, 82 bp, Homo sapiens
gcgcgaatatcgtcatcgttagaaggctgttcacggaagaccaggatgtagatgagggacttgtctatgacactgtattcaa

SEQ ID NO: 218565 - DNA, 100 bp, Homo sapiens
cgaggacacgaccttcctgcccttcacgctccaggagctagtttgtttcgacgccggaccgcgtaagagacgatgatgttgggcacggaaggtggagagg

SEQ ID NO: 218566 - DNA, 101 bp, Homo sapiens
aggggacagaggcaccaaggacctccaagacaggccatggtaggggaggagtgtgtaggtgccatcgtttgcaagttggatatgcacaaaaagatgttccg

SEQ ID NO: 218567 - DNA, 50 bp, Homo sapiens
ctgctctggatcatcgaactgaatgtgctggagaatctggtaaaagcacc

SEQ ID NO: 218568 - DNA, 100 bp, Homo sapiens
cgtctcttacgtctgcggaagtgcagctgcctcagttcttagcgcaggtacggttcctggagcagcagaacaagatgctggagaccaagtggagcctcct

SEQ ID NO: 218569 - DNA, 75 bp, Homo sapiens
ggattccaagtaactcttatttgctctcctacaagcttgtgtgccctgtaaccagtatgtatggtacaatattta

SEQ ID NO: 218570 - DNA, 83 bp, Homo sapiens
caggacgctgggagctgcctgcgggaaggtgcggggagcggagccatggcctccggagatcatttggcatttagctgtgatgt

SEQ ID NO: 218571 - DNA, 100 bp, Homo sapiens
gatggggtgccaagacggtgcagggctccgggcaccaggagcatatcaacaccactgccggaactgtggccacatcttctgcaacacctgctccagcaac

SEQ ID NO: 218572 - DNA, 96 bp, Homo sapiens
gaaagttttccttccatctctgctgctctctcatttgctggccatcggattggggtgctaactgccaaagaaaggaaaactcaaattgatgataga

SEQ ID NO: 218573 - DNA, 89 bp, Homo sapiens
gggagggtccgagccagccgctgttttgccggaggagcccctcaggccaacagcgatttcttgcgggagctcgtgatcaccatcgccag

SEQ ID NO: 218574 - DNA, 75 bp, Homo sapiens
cacaataagagcagaggatggaacacttcagtgcattcaagagacaaagcatggaggacacaagaatgggaggaa

SEQ ID NO: 218575 - DNA, 51 bp, Homo sapiens
atggtctgaggcagagtgtggttcagagagattaaacagattctagaaaat

SEQ ID NO: 218576 - DNA, 75 bp, Homo sapiens
gcgggactccggacctccaggagccttggcaaatgcaacattatgtattcttgaacctattatggctgtggaagt

SEQ ID NO: 218577 - DNA, 100 bp, Homo sapiens
ctttgatagtcgtaccatatgcagaaggtgaccaagaatatggcccaggtgaccaaagccctggacaaggccctgagcaccatggacctgcagaaggtct

SEQ ID NO: 218578 - DNA, 100 bp, Homo sapiens
aaaagtattgcaagcaacagtagtcgctgttggatcgggttctaaaggaaagggtggatgaggtgaactggtctcactggaaccagaacttgggcatcat

SEQ ID NO: 218579 - DNA, 50 bp, Homo sapiens
actctttccagcttgtgtctgggtaaaaaatatttccgagataggagggg

SEQ ID NO: 218580 - DNA, 98 bp, Homo sapiens
aatgctttgcagtcagtggagaattgtccagaagacttggctcaggactcaggtacttctgccctccctttggtctccctgttcttctatgtggtgac

SEQ ID NO: 218581 - DNA, 116 bp, Homo sapiens
agaccatgtacatgactgtctccattattgatcggttcatgcagaaccttattttggggagtaaagtcaattgggcagaggatcctgcccttaaggaaattgttctgcagcttgag

SEQ ID NO: 218582 - DNA, 75 bp, Homo sapiens
aaggacctgggggccgacatcatcctggacatggccaccctgaccggggctcagatgctggagagcatgatcaag

SEQ ID NO: 218583 - DNA, 50 bp, Homo sapiens
atgccaggaggtcgtctgcagtcagaactgggcacctccgggctgtgaaa

SEQ ID NO: 218584 - DNA, 82 bp, Homo sapiens
tgttcatgaggatagcaaaagcttatgctgcgttattggagtgatgagtaaagaatacataccaaagggcacacgttttgga

SEQ ID NO: 218585 - DNA, 97 bp, Homo sapiens
gcggagctggcgcggcccctagctttctccttctggtgtggggcccgaggttcatctgcagaagccagcggacgcctctgttcaacttgtgggttac

SEQ ID NO: 218586 - DNA, 100 bp, Homo sapiens
atgtggaccccgtgctcaacatgctggtctttggagaaagtattctcaacgatgcagtctccattgttctgaccaaggcagtaaacaagagctctgaaag

SEQ ID NO: 218587 - DNA, 100 bp, Homo sapiens
ggcagcgccaagcaggagctgaaggacttcagaactctaagaaggagctgatgtggaggagcagctgagacagttcaagatgacgaccacagtagccaca

SEQ ID NO: 218588 - DNA, 100 bp, Homo sapiens
caacttcttgtcctcaagtgatcctcccaccttagcctcctaagtagctgggaccacagctggacccgcaggccctgcaggacagagactggcagcgcgc

SEQ ID NO: 218589 - DNA, 51 bp, Homo sapiens
tggagctcagccctccacctccacaggctttctctgctcagagctccaagc

SEQ ID NO: 218590 - DNA, 100 bp, Homo sapiens
gggattcgtgcgcggtaagaagctgcgcggtagcgcggtgagaacactcctatgccaccttcaccagctgtacaagtgcagggccagcctaacagttctc

SEQ ID NO: 218591 - DNA, 91 bp, Homo sapiens
tgtaactataagcagcttcggaaaggagccaatgagggtgtgtgtggtttcagcgcagcatggctgtggtcatccgtttgcaaggtctccc

SEQ ID NO: 218592 - DNA, 82 bp, Homo sapiens
tttatgcaaagccagcgttacagtaatgttccagaacatacatatgatagttgagaaagacacatattctgatcatgaagaa

SEQ ID NO: 218593 - DNA, 73 bp, Homo sapiens
agcttgtgtgtccttggtattagagggcttgcgtttcaagaaagcccatgtaacacatcctgaactgaaagcc

SEQ ID NO: 218594 - DNA, 100 bp, Homo sapiens
caagaggctccggtcagaaaatgcaaccactgagaaaacggaaccgaatagtcaagaggacaagaatgatggtggaaaatcaagaaaagggaatatagaa

SEQ ID NO: 218595 - DNA, 99 bp, Homo sapiens
gaagccactgattagcaatttaaagatcctctccaagatcaattctctccattttcgtctagcagtggaagaagactgaatatctcgtataccagaaac

SEQ ID NO: 218596 - DNA, 82 bp, Homo sapiens
cgagaaacccctcagccaccccatgcaggaaactgaaattgggatggcggttcttgttaagctcccctatgccgcccagcag

SEQ ID NO: 218597 - DNA, 100 bp, Homo sapiens
tttaaatccggagggggaaaaaatcccaaggtctgcaaagttgctctaggtcgtaaccagcctttgaaaaaggagaaaccaaaatggaaaagcgattatc

SEQ ID NO: 218598 - DNA, 116 bp, Homo sapiens
ggaaggtgtgtccggaggtttgcaggggtgcagtgtgtctggtcttatgaggcccccgggctggcgactacacctaccgtgagggccttgagcacaagtgcaagcgggacatcctg

SEQ ID NO: 218599 - DNA, 100 bp, Homo sapiens
atcgaagtgatggccctgcccaaaccgggcggggcccacagcctagactgcaaaattcaaaatggggctcaaggtattcgtttcatctacaccagagaag

SEQ ID NO: 218600 - DNA, 74 bp, Homo sapiens
aagaggaggatgacccacttggtcggcggcgtgatggcggagaaggcgctggaggccgtgggctgtggactagg

SEQ ID NO: 218601 - DNA, 100 bp, Homo sapiens
ccgtcatcgagcagctcttcttcgtccgtttgtcagtcaagaacaatacccaagtgctcatcaactgccgcaacaataagaaactcctgggccgcgtgaa

SEQ ID NO: 218602 - DNA, 75 bp, Homo sapiens
ccccagtgctgcctgcattcgcggggcatgttcccgaggctgtcaccaggatttgttaaggattccaagtaactc

SEQ ID NO: 218603 - DNA, 79 bp, Homo sapiens
ccagcaccagcttccagttagtggatatagcacaccatccccagccaggaaagcaggcaggatgggagagtcgccgata

SEQ ID NO: 218604 - DNA, 154 bp, Homo sapiens
gtttggccagtgggctgatagccgggcaaacaccgtttatggattgggattctcctctgagcatcatctttcgaaaggcatcctagaacgtttaaatgctggagagattgtgattggagatggagggtttgtctttgcactggagaagaggggc

SEQ ID NO: 218605 - DNA, 96 bp, Homo sapiens
atcgtcaccgtgtgggagcgggagctgcggaaaggatccactagttcctggactatgggaactgatgactcgcccaatgtcacagatgatgcagct

SEQ ID NO: 218606 - DNA, 100 bp, Homo sapiens
ggccattgggagggcatgcctctcctcagcccacccccaccctgtgtgggtctccattctgaaatttccattcagaaatgtccagaaggaagaccgcact

SEQ ID NO: 218607 - DNA, 100 bp, Homo sapiens
agaagaagccctttgaggagcactggaggaagcacaccctgtcctatgtggacgttggcactgggaagaagcctccccagctttctgaggatgatatctg

SEQ ID NO: 218608 - DNA, 82 bp, Homo sapiens
gcagatacctggagaacgggaaggagacgctgcagcgcgcggggttcccggtggtgtgctgtgaagatgtcttcctctcgga

SEQ ID NO: 218609 - DNA, 100 bp, Homo sapiens
acagcctgcctgagattgtccctcccatgggcaccctcttccacactgtccttgagttaccagacaacaaatggagtctcgctttgttgcccaggctgga

SEQ ID NO: 218610 - DNA, 90 bp, Homo sapiens
ctggaaaggaagtaccaggacttgcacagctccatcaagtatgatggtgaaggatgaatatgtgcatgactttgagggacagccatcgtt

SEQ ID NO: 218611 - DNA, 75 bp, Homo sapiens
ccgccaccatgcccaagagaaaggctcagacaaatgacagtgactctgacactgagtctaagaggcaggcccaga

SEQ ID NO: 218612 - DNA, 78 bp, Homo sapiens
gctccgttgtatactcagccaccaaagattacaaggaccacggctataggatgaagcctgctgggagcgtgaatgaca

SEQ ID NO: 218613 - DNA, 83 bp, Homo sapiens
ggcgcccatccgcaggctggagtggcagaagcagacttcagaggagtgtggccatctggggccgtgtggtatttgccactcag

SEQ ID NO: 218614 - DNA, 100 bp, Homo sapiens
gatcagctgatcctcctcctgcaatttgggttgcaacaactaagtctacagtaaataaatggtctgtggagtccccagagaaccctttgaagaaaaacag

SEQ ID NO: 218615 - DNA, 82 bp, Homo sapiens
cgcagctgcgggtccgggattcccagccatggcagattcctccgggcagcaggggggatatgagactttctactcggaatat

SEQ ID NO: 218616 - DNA, 82 bp, Homo sapiens
aggatcttaaagagaccagttagcagatgcttggaactgtggctgcaccatctgtcttcatcttcccgccatctgatgagca

SEQ ID NO: 218617 - DNA, 75 bp, Homo sapiens
ccccgggacccccacgccgccgccagattcctggtcgggtggcttccagtggtcttcagtctgtcgtgcaccgat

SEQ ID NO: 218618 - DNA, 80 bp, Homo sapiens
gcgcggccctggaggccaggctgtgggagaccgaggtccctggatggccggttgcaggtgtcccatcggaaggggctccc

SEQ ID NO: 218619 - DNA, 82 bp, Homo sapiens
ccagagataattgataacaccctgtaacagctgagacatcaccttgaagatacagtttttgaggcttcttcagagcttcagt

SEQ ID NO: 218620 - DNA, 76 bp, Homo sapiens
ttcccttccagcctatcgagctcaactccttcaccaagacaaagccacagacccaagcatgtcggaacaggattgg

SEQ ID NO: 218621 - DNA, 100 bp, Homo sapiens
aaggagcagatggataggtcctcagcccaggtggtggccgaaatgttattttaacgaggtgaccaagaatatggcccaggtgaccaaagccctggacaag

SEQ ID NO: 218622 - DNA, 82 bp, Homo sapiens
ggcggtgccccaggacctagcgtcgcaatgtatctgctgagcaaaaagatgaaaacaaagaagcaaagcctcgatccctacg

SEQ ID NO: 218623 - DNA, 90 bp, Homo sapiens
cttcaagcttaggaccacccaccatgcctatccagcttcacgtggagtgacgcacgcctgcaccgaggcctggtgaccctgctgactggt

SEQ ID NO: 218624 - DNA, 101 bp, Homo sapiens
aacgcagacggtgcgcctgtgcagccctcccaggtggagtacacggcagactggaaaagagcatgacatttggcatcagaaggctggatgtggaatcccat

SEQ ID NO: 218625 - DNA, 75 bp, Homo sapiens
atttccatgtcaacatagtcctgggactggtgattgcagctggaagtgcccatgaccgagctggcgtcctccggg

SEQ ID NO: 218626 - DNA, 100 bp, Homo sapiens
gcggctctaacggggctttctacaaggtgcaagtgaaagtgtaggaaaacatatgcttgaagcgtgcaacaataatctggaaatggcagtcactatgttt

SEQ ID NO: 218627 - DNA, 100 bp, Homo sapiens
tccccagacaccaccatccagagaaccgtgcaacaattctgacccagtgggtgatatatgccatccgaaaccttaccgaagacaacagccaaaaccaaga

SEQ ID NO: 218628 - DNA, 83 bp, Homo sapiens
tggagctggagctctcggaggcagccattgtttgatgtcctgtgactgagaaaccaggctttaaactttatgcctttggagat

SEQ ID NO: 218629 - DNA, 82 bp, Homo sapiens
acgagcagatcctggtcctcgatccgcccacagacctcaaattcaaagggaaatcctcattgacgattcaatttgttgaagg

SEQ ID NO: 218630 - DNA, 82 bp, Homo sapiens
cgtgacttcccggacgctgggaaatgcgtccgtctccaagagagtatgaagagagtgcgtctgtagggcagggaagatggcg

SEQ ID NO: 218631 - DNA, 111 bp, Homo sapiens
tccagtccgcggtgccatggcccccgcccgtctgttcgcgctgctgctgttcttcgtaggcggagtcgccgagtcggtcaaaatgcagatcttcgtgaaaacccttaccgg

SEQ ID NO: 218632 - DNA, 83 bp, Homo sapiens
cttcttgacaatttgcttgcgcttataagaccaagatcactccatggatgaaatgacagctgtggtgaaaattgaaaaaggag

SEQ ID NO: 218633 - DNA, 98 bp, Homo sapiens
aatctttacaggagaaccacttccaagaagatgagcagtttctgggagccgttatgccaaggcttggtaagaatgattgatgttggctgatattggag

SEQ ID NO: 218634 - DNA, 60 bp, Homo sapiens
ggattcttttcaatacatcctaaaacaggtgctggagaatctggtaaaagcaccattgtg

SEQ ID NO: 218635 - DNA, 90 bp, Homo sapiens
acgcggtcctgctccccgccgattctcccacagctccccacatctacgcagtcttcacctcccagtgattcaagtccagcatccagcggc

SEQ ID NO: 218636 - DNA, 124 bp, Homo sapiens
aacactttccagagttccctgcaacccgtgcttatgcagatagttactattatgaagatggaggtgattttcttccacccccacctccacctctagatgattccagtgcccttccatctatctc

SEQ ID NO: 218637 - DNA, 75 bp, Homo sapiens
ttgcgaatcagatcagagtgtggtcgaatgtaagaatgcccttctgcctgcagggttccggcagaagaaccagac

SEQ ID NO: 218638 - DNA, 74 bp, Homo sapiens
acagctaaaaccttcctcaccgtgtactcggagctccctgggtcctcagcagtgaggctggcctccctgcgtga

SEQ ID NO: 218639 - DNA, 100 bp, Homo sapiens
agaaatccttgtgacagtaggagcatatggatctctttttaacaccattcaagcattaattgatgagggagatgaagaatgtaaaaaacttcgtggtgta

SEQ ID NO: 218640 - DNA, 100 bp, Homo sapiens
ccggccgaggcggtgctgcaagagaaggcactcaagtttatgatcatcacgggggaattctaccggatctattacctgaagaagtcgcggtcgacgattc

SEQ ID NO: 218641 - DNA, 51 bp, Homo sapiens
agaagcaaagatccaaattcccagcccagtgacctgatctttgagttcgca

SEQ ID NO: 218642 - DNA, 83 bp, Homo sapiens
cacatcagccggcagcccgggcgggtcccggggtgcgagcagcgcacttccggtctattctggataagcaggttttgtgaaga

SEQ ID NO: 218643 - DNA, 131 bp, Homo sapiens
gagacggtcatctcgagtagcgacgacgactccatcgtgctctatgactgccaggagggcaaatggtatggtgtatgctctggggggaatgggccctgacacggccccccaggcccaggtacgtgtgtatg

SEQ ID NO: 218644 - DNA, 75 bp, Homo sapiens
cgcgtgctgtctggcgcttctcagaagccgagacccaagaagccaccgcctccatccgctcctgtcatcaaacaa

SEQ ID NO: 218645 - DNA, 83 bp, Homo sapiens
ggggtcacccctcagcacatggtgggggccacaccatttgccgtggccaggctagaggtaatagcctgcagctggtgttttga

SEQ ID NO: 218646 - DNA, 100 bp, Homo sapiens
acagcacagtccacatttaacgatttacaagacctgagagaacagattcttcgagttaaagacactgatgatatcaacaacccctccccgtcgtaaacgc

SEQ ID NO: 218647 - DNA, 114 bp, Homo sapiens
cctcttcgagcgccgcggacgcgtcatcgagtgtgacgtggtgaaagcttcgagagctgtgcccaggagtgaacaaccagccctacctctgtgagagtggtcactgctgcgggg

SEQ ID NO: 218648 - DNA, 100 bp, Homo sapiens
gcattcatggcctccccctctaacggctattcatacaccatgcaaaacagaaccttccaaatttccttttccaactaagaatgttggctcaattaagaaa

SEQ ID NO: 218649 - DNA, 142 bp, Homo sapiens
ggccttcaggtgaccgtgcccttcatgtttgcaggcctgggactgtcctgggccggcatgcttctggactatttccaggacttcggaagcccacggtccatcacctctcggtgtgatctgagggcaaaccttgtcaaaaatg

SEQ ID NO: 218650 - DNA, 96 bp, Homo sapiens
agccatcgcctggccccggctctctggaccttgtctcgctcgggagcggaaacagcggcagccagagattctgtttctggcgtctgcatacgcaag

SEQ ID NO: 218651 - DNA, 90 bp, Homo sapiens
cccatttctcctcctttgacagggacatcagtggagccttctcagacccacaggaccacggaggggtgatcgtgaacatcactgccaccc

SEQ ID NO: 218652 - DNA, 80 bp, Homo sapiens
tgagcagggctgagatgggcaccgcggatctggggccgtcctcaggttatgagtgccagtgagccgccttagatagaagc

SEQ ID NO: 218653 - DNA, 100 bp, Homo sapiens
gcatctttgtctagccccagtgcagatatgtcttctccgactactatgaagaagcctgaaaagccattgttcagctctgcatctccacaggattcttccc

SEQ ID NO: 218654 - DNA, 80 bp, Homo sapiens
atttagcagaaacaatggttgcatctgcagatggtttagtttatgaaccagtggatcggatcattttctgtgtcttctta

SEQ ID NO: 218655 - DNA, 90 bp, Homo sapiens
ttttctattttccttaaattctagaaagcgaaattattattgacgatggacaatttggaatccacaatggagtcttgctctgtcgcccag

SEQ ID NO: 218656 - DNA, 90 bp, Homo sapiens
gaagatgcaagcggtttgggaccttgaacaaggcaaatatggttttgatatatttttgccatcatggatcagtttggagatatattagaa

SEQ ID NO: 218657 - DNA, 100 bp, Homo sapiens
gagttagtaaggcgctccacaatgggacactgagctttgtggaagcatttggcggcataccaccctgcactgtgaggctgatcccaaagaactaatcaag

SEQ ID NO: 218658 - DNA, 101 bp, Homo sapiens
gccctgagagaacagggtggccgcttggtccagcgcttctctgaagtagctttggaaagtagagaagaaaatccagtttgcttcttggagaacactggaca

SEQ ID NO: 218659 - DNA, 76 bp, Homo sapiens
ggaaatctaaagcatgaacaggcatctaatgttcttagtgacattagtgagtctcgctctcagtcaaaatctccaa

SEQ ID NO: 218660 - DNA, 100 bp, Homo sapiens
gttgataatcagaaaaaaacgggactcaactgcaatgatgcagagacagtgatggggtcaaaatgcagatcttcgtgaaaacccttaccggcaagaccat

SEQ ID NO: 218661 - DNA, 98 bp, Homo sapiens
ggggcacacaggtgctggatggtacctcggggttctctcctgcccccaagctggagcacgaacttccaggagccggtgcagccgctgacacagcagca

SEQ ID NO: 218662 - DNA, 90 bp, Homo sapiens
gcagctgcctgggagaatgttgactctactgcagattggtggaccagacagttcacggctgacttcgcgtttggggaatcagtatgtcaa

SEQ ID NO: 218663 - DNA, 83 bp, Homo sapiens
tcctaagagtcacccaaacaatcggctgagaatgagaagagttgatattcactgatggactccaaagaatcattaactcctgg

SEQ ID NO: 218664 - DNA, 75 bp, Homo sapiens
aagaattttccaaatgaatttgcaaaacttactgtagtctctgctggatgaaccgaatcctaacagtccagccaa

SEQ ID NO: 218665 - DNA, 75 bp, Homo sapiens
cctgcctttctttggtttctctgaaccccttgccgcaccacgtcaccagctcacaggcgcctgaagtacatatcc

SEQ ID NO: 218666 - DNA, 96 bp, Homo sapiens
tggggataacattcatgcagaacatcagaaggtagaagatagcaccatgccgattcgtcgaactgtgaattctacccgggaaactcctcccaaaag

SEQ ID NO: 218667 - DNA, 100 bp, Homo sapiens
ccttcttaggtggggaagactttgaccaggccttgctacggcacattgtgaaggagttcaagagagaggcagagacatttgtttgggtgaacaatgcatc

SEQ ID NO: 218668 - DNA, 73 bp, Homo sapiens
taaataccaagcccgagaagacggaggaggactcagaggaggtggcaattttggaggtagccccggttatgga

SEQ ID NO: 218669 - DNA, 50 bp, Homo sapiens
agttcacccaacataactttcaagaggcagtagaagatggtgaaagaaac

SEQ ID NO: 218670 - DNA, 100 bp, Homo sapiens
tagcgtcctggaattacttcaatcaagttctaagctggtctatgtccatcaccttcttggagaaggagcctttgcccaggtgtacgaagctacccaggga

SEQ ID NO: 218671 - DNA, 100 bp, Homo sapiens
cgcctcttcctcgggcttcgtggcgatttgagagggaagatctgatctcctagaattagagttggtacagaaaccatttcagctccaaaaatgttggagg

SEQ ID NO: 218672 - DNA, 82 bp, Homo sapiens
ctagcagccagttccggcccgaggacaccgactaccagcagcgtcaagggttccacactgttgggagtcgctgcaagaatcg

SEQ ID NO: 218673 - DNA, 99 bp, Homo sapiens
aaaaccacaaatgtttttctgttttgcctgaatacatgatttaaacaagagatttccacagaagaaacgcttcgttaagggactcaggcagtacgggaa

SEQ ID NO: 218674 - DNA, 75 bp, Homo sapiens
gcatcgggccctgtctgcaatacacctgcaggaagagctcgatcaggttcagctcctacagaagaagggaaaaaa

SEQ ID NO: 218675 - DNA, 59 bp, Homo sapiens
tcctccctgagaaacttggggtagatttagcccgagtgattgatgtatctaatgggaaa

SEQ ID NO: 218676 - DNA, 75 bp, Homo sapiens
catcgggggcgactcaggcctgtccagccggggcaagaaggggctgaggaagctgccctcgaaaccctccagaag

SEQ ID NO: 218677 - DNA, 100 bp, Homo sapiens
ttatttagttctggggagcgcctcgtcgacatgagtgatgtggaggaaaacaacttcgagggcagagctgctttgaatgctgcatcaagtgtctgggagg

SEQ ID NO: 218678 - DNA, 74 bp, Homo sapiens
gtcccgccaccggccgcttctgtcctcggtgaaaaattagacgatttcaagaattggagctgaatctgatgtta

SEQ ID NO: 218679 - DNA, 50 bp, Homo sapiens
ggactgatcaagaaacacagctaggcttataccagccagtttgtatccct

SEQ ID NO: 218680 - DNA, 100 bp, Homo sapiens
cacgtccatcagtacggggaccttacaaacaactgcaacagactcggcccagccttctgccatccctgaggcctccaacccagcctccaacccagcctct

SEQ ID NO: 218681 - DNA, 82 bp, Homo sapiens
gcggtggggactgcacgtagcccggcgctcggcatggctctcctggtgctcggaacttggcattagaattcctcgaccacta

SEQ ID NO: 218682 - DNA, 74 bp, Homo sapiens
cccgagggctttgagctggactcccagggagcgttttgtgtggtggattgggccgtggaacaggcccacttcgc

SEQ ID NO: 218683 - DNA, 80 bp, Homo sapiens
ctgaacgtctctccctgtcctagctctgtaactgtttacattatgcagaaggggttaaaagataactttgctgatgtcca

SEQ ID NO: 218684 - DNA, 83 bp, Homo sapiens
cgcaagaccgggcagatctggcccaacgatggcgagggcgccttccatggagacgcaggacaaccctccatatgataagggag

SEQ ID NO: 218685 - DNA, 75 bp, Homo sapiens
ggagagggggcgctgagctgttgggtgaaggcattggagtctttcagcaatcttctaaacaaagtctgtttgatt

SEQ ID NO: 218686 - DNA, 75 bp, Homo sapiens
gaggaatttgcctcttctacagatagagctgttaagagtcggtggatcagactcagcagctggtgcccctcgtga

SEQ ID NO: 218687 - DNA, 131 bp, Homo sapiens
atttttggactgtgctctcaaactttactttgcctcatttgaggagtgggaacaggcttcggcgaacacaaaggcatagaatgtcaagctaaccaggcgtccgctacttcagaagagtgtactgtcgcatg

SEQ ID NO: 218688 - DNA, 100 bp, Homo sapiens
cacctacgtcccgctgccgtcgccgccgccaccatgcccaagagaaagcgaccccgataacgtggtgttgtgcctgctggcggcggacgaggacgacgac

SEQ ID NO: 218689 - DNA, 74 bp, Homo sapiens
ggatgttcatgaagattcaataacagttgcatttgaaaacaacttcttctcagcctgttgataaccatgttagc

SEQ ID NO: 218690 - DNA, 100 bp, Homo sapiens
tgaaaacagaaccgacttctccccttgtggaattacaagagatttcgactgtggaagggccgggtatgactttgcaactgaagctgaaggagtcttttct

SEQ ID NO: 218691 - DNA, 75 bp, Homo sapiens
tgcaggatctcacgcctctgaagctggccgccaaggagggcaagatcgagcatgtacattgccgttttcatccag

SEQ ID NO: 218692 - DNA, 83 bp, Homo sapiens
aacctatcaaacctgtttagaaaataaaccagggggatatgagactttctactcggaatatcctgagtgttgcgtggatgtaa

SEQ ID NO: 218693 - DNA, 100 bp, Homo sapiens
cccctccgacctcctaaaatgaaattcattacagaaatctggcacccaaatgggtgtcaaattgagaaccaggtagatccccaccacctacagtaaaaag

SEQ ID NO: 218694 - DNA, 84 bp, Homo sapiens
gcagtgggaggagacgccatgacccccatcctcacggtcctgatctgtctcgggctgagtctgggccccaggacccacgtgcag

SEQ ID NO: 218695 - DNA, 100 bp, Homo sapiens
ccggccgctaccgctcaggtgctgcaggcacagcccgagaaaccgcagcactacacctgcagaaccttggcctgaaaatgctacattatatcagcaattg

SEQ ID NO: 218696 - DNA, 100 bp, Homo sapiens
aggccattttctcaaacgagagtcagcctttaacgcgcgggtccaagcctgtagccccaaatcggataatctctgcagctgataacaagcaaaagagaag

SEQ ID NO: 218697 - DNA, 88 bp, Homo sapiens
ttctccaaggtttgaaaagcagctggcctgcaagcttcctgcctgacacagctcacttcaagaagtgcacaatgtcagaacgtggaat

SEQ ID NO: 218698 - DNA, 100 bp, Homo sapiens
atatttccttggtcaagagagagcatgattttttggacagagatgccattgaggctctatgcagaaattgcaggtgctgcagtgtctgaaatttccgggc

SEQ ID NO: 218699 - DNA, 75 bp, Homo sapiens
cctacgatgtgatcgccaaccagcctgtcgtgatcgacaaccagcccctgtcaaagggaacaggaagcagtccac

SEQ ID NO: 218700 - DNA, 83 bp, Homo sapiens
atcagcgcggagttaccccagacccctcagcgtctggcatctttgcagcaatatcagtactacagtgcaggcctgctctccac

SEQ ID NO: 218701 - DNA, 98 bp, Homo sapiens
gcccaagtggacatggcaagaacagcctacctggacctgctccgcctgatccgggctggctgtgtgaactgctccgctggaaggagaacccaagccca

SEQ ID NO: 218702 - DNA, 98 bp, Homo sapiens
cccgatggccctgggtcctcgctgtggggcaatccgggcttgcagacgagagtcattcaggagagcaggaaagaaaaggccatccctgtggatgtcgc

SEQ ID NO: 218703 - DNA, 82 bp, Homo sapiens
ccggcgcatcatggcggctggccgggcccaggtcccttcctccaatcacggtcactttcaacattaacaacagcatcccacc

SEQ ID NO: 218704 - DNA, 49 bp, Homo sapiens
ggaaattgtccactgggaaaagctctctattggaggcatcatcattctg

SEQ ID NO: 218705 - DNA, 90 bp, Homo sapiens
atgaggagggacgtgaacggagtgaccaagagcaggtttgagatgctggatcccctgagcagtgcagaaaattccttgtctggaagctgc

SEQ ID NO: 218706 - DNA, 87 bp, Homo sapiens
ggccgcgagcagagccgcccagccctgccagctgcgccgggacggccgagacgcatccagagctttcgtgaccggggactgttctga

SEQ ID NO: 218707 - DNA, 100 bp, Homo sapiens
ggttcttgaagcttatcagaagtaccttgcacagaagccatatgctgggattctctctgaaagtatgaagcagcagttgcaccaccagcaccaccttcca

SEQ ID NO: 218708 - DNA, 95 bp, Homo sapiens
tccacgtctggaataatgggtactctttcctcgtggaatttgaagattctacagataaatcaggcatggaagaggagatggttcgtgttacgcag

SEQ ID NO: 218709 - DNA, 90 bp, Homo sapiens
gcggcggcaagacctctccccctcggaggcggcgggcggaggcggcggcccgtggaccgggagcccgtggaccgggagccggtggtgtgc

SEQ ID NO: 218710 - DNA, 73 bp, Homo sapiens
tcagacaagtgcactcaacagaacggcccttcaaatgtgagtgagaaggcaaccaaagtgcaggacatcaaaa

SEQ ID NO: 218711 - DNA, 100 bp, Homo sapiens
aaatcagacagaacagttaatcctcaatttaagcctgatctaacccctagaaacagaggcgtggagctatttcctatgacagttctgatcagactgcatt

SEQ ID NO: 218712 - DNA, 82 bp, Homo sapiens
aaacaggagtgtctcaacaacattggcgatgcctcctcgctcatccgagccaccattgtctattatcctcccagtccacaac

SEQ ID NO: 218713 - DNA, 76 bp, Homo sapiens
gaaggagttccaccaggccgggaagcccatcgggatgcctgccatattagatggagaggaggcagtttctaaatgg

SEQ ID NO: 218714 - DNA, 100 bp, Homo sapiens
tccataaaatccttttctgaccacgctcaatgtggaagaaacaagtcaccaagctctccagaacatgcccaaagtgctccgtgatgttgaagccctaaaa

SEQ ID NO: 218715 - DNA, 74 bp, Homo sapiens
gttcttccgggtctgcagtctgtggtgtgtttgctgttcccaggaagaatatgaagaactgcttcattatgcta

SEQ ID NO: 218716 - DNA, 100 bp, Homo sapiens
gtctacatgattacctgaagtttaataaggcgtctctggccgagcctctttttgtggaaaacgacagcagcagcagtggcctggaagacgccaccgctaa

SEQ ID NO: 218717 - DNA, 82 bp, Homo sapiens
aaaagttatcaaacccggtggaccatatgtaggatattcagtcggagctggtcattttcggagccagcatactaccgaagta

SEQ ID NO: 218718 - DNA, 100 bp, Homo sapiens
accagatggggagcaccaaggtctttgtcaagaacccagagtcggtccagaggtgtccttctaaagctggtagaggtttcacgagtcatcagggacccag

SEQ ID NO: 218719 - DNA, 100 bp, Homo sapiens
acttccctgaaaaagctaaggatatctttattgaagctcacctttgtctaaataaagcagcccgacggccatggaggctgaagagacgatggaatgcctt

SEQ ID NO: 218720 - DNA, 82 bp, Homo sapiens
gttctggggagcgcctcgtcgacatgagtgatgtggaggaaaacaacttcgagggcagaacgttggacctctcgaacaacca

SEQ ID NO: 218721 - DNA, 87 bp, Homo sapiens
ctcctgtatctggagctgggagacaagcccgcgcccaacaccttctatgtagcttgccttgcgccatggactggcagccagacgagc

SEQ ID NO: 218722 - DNA, 83 bp, Homo sapiens
ggccatttagtaacttctttgcaaggctaactcaggtgagatggagccgctatagtcctgaattcaaggatcccttgattgac

SEQ ID NO: 218723 - DNA, 83 bp, Homo sapiens
ctctcggactgagaaacgcaaggtatcgagaaccttccctgcgaacttcagaggaacttccagctgatgcgagagctggacca

SEQ ID NO: 218724 - DNA, 100 bp, Homo sapiens
ttttgcctcccaccgtgattctgaggcctccccaaccatgtgcaattgtacgtcagcctgtcatatgcatcaacaaccatgtattttgttcgatttgtat

SEQ ID NO: 218725 - DNA, 98 bp, Homo sapiens
ccgctcgcgctccaagctccctgcggggaagaacgtgctactgctggactttgtgtggacagtaatgacctcacgtttccgattgcctgctggcagaa

SEQ ID NO: 218726 - DNA, 97 bp, Homo sapiens
gaagctgcagcggaggaaggcgagaccatcctcatgtcccccaaattccactgtacagaggagatcctgaccattgtctccctgctgtctgtggaca

SEQ ID NO: 218727 - DNA, 97 bp, Homo sapiens
ttcaaagaatgatatttccaaagtttgcagaaaagaatatgagctatacctgcaggcccgcttcacttggcgaggagcccgcctgctccggcccctc

SEQ ID NO: 218728 - DNA, 98 bp, Homo sapiens
ttttttcgaaagctgggtttcccgggagatcccaggcggtgacagagtggagccatggctagaggcgcacatggcacagcactcaagcctacggcccc

SEQ ID NO: 218729 - DNA, 99 bp, Homo sapiens
tttgactccgctgcaggagagctgcctcattagacttcgccagtggctccaggagacccacaagggcaaatgctgtccccggcataggtccatctctgc

SEQ ID NO: 218730 - DNA, 51 bp, Homo sapiens
cgggcatcgacctggccgtctacgagagaagttgtgatggaacaggtgcca

SEQ ID NO: 218731 - DNA, 74 bp, Homo sapiens
caaacttctcagatgttaataccaaccgttggtctatccatgttagttcagctatcactgaagaccaaaagaaa

SEQ ID NO: 218732 - DNA, 49 bp, Homo sapiens
ccagggccaggcgccgctcagaacggctgtggaaaatctctgttctcac

SEQ ID NO: 218733 - DNA, 75 bp, Homo sapiens
ctttcctgctggtggcaaccgcctacgagacactcaaggttccagagagattcctggaagttgctcagatcacat

SEQ ID NO: 218734 - DNA, 75 bp, Homo sapiens
cctccctcccgcgcgtgctgcgggtctgctcgggggtctacttcgaggatgcttcaggactgccccaaggcccgc

SEQ ID NO: 218735 - DNA, 100 bp, Homo sapiens
gtgcaaacccgagagaactggggaaacctcaaatgaattctgaaggggagataccttccctgccatcaggcagccaatctgcaaaaccagtaagccagcc

SEQ ID NO: 218736 - DNA, 90 bp, Homo sapiens
tgagctgcgtgagaacccgcccatgaagccagatttctcccagggaatgggtactgttcaaaaaggaatgccccacaagtgttaccatgg

SEQ ID NO: 218737 - DNA, 75 bp, Homo sapiens
caggcctggtgctggcctcctgtgatgggccttcgcactcccagccgtccacccatgacattcccaagttccccg

SEQ ID NO: 218738 - DNA, 89 bp, Homo sapiens
cctcttgctcacagagctctgtaaagacatccacgacagcgatggcagttccagcagcagccaccagagcctcaagagcacagccaaat

SEQ ID NO: 218739 - DNA, 71 bp, Homo sapiens
gccggcggcggcggcgtgagccaccgcgcagagcttcagagaagaggcagaagtgtgcaaacaggagcagg

SEQ ID NO: 218740 - DNA, 97 bp, Homo sapiens
acaagatttggaaaaccaactgagaataactcaagtatcagcacctccacccaggagttctgtttccgaagaaagagccagatgattctagagatga

SEQ ID NO: 218741 - DNA, 50 bp, Homo sapiens
gccagtcttggggacagtgtcagcgattgtgcagactggtgcttaaaatg

SEQ ID NO: 218742 - DNA, 82 bp, Homo sapiens
ctttcaatgacaaaaagtttgtcattaaacccatcgacaagaaggcacctagcttttgtgctgccttgcaccaggaactcag

SEQ ID NO: 218743 - DNA, 104 bp, Homo sapiens
gtgactttggagccagcctgctaggggctgaattctgactcagccatttactaactgtgtgaccttagtgcgttcaagattcaacttcacccgtaacccaccgc

SEQ ID NO: 218744 - DNA, 98 bp, Homo sapiens
ctctgactgcccggaaatatcagccaaaggccagcgtacacctctgctctgacttatgatggagtccttgtgatggctgaaactttccgaagtcttag

SEQ ID NO: 218745 - DNA, 80 bp, Homo sapiens
cggccatcacggcggccgcagtggcgtcctggagccctcctcaggggaaagttgctcagacagcttgcatgtcagcctgc

SEQ ID NO: 218746 - DNA, 117 bp, Homo sapiens
aaaatcttactcatgttactattcaccatatatagtatttcgtcactgaagactttattcaggtttgcatcgccagcttctatatattacggcctttttttttgctggatattatct

SEQ ID NO: 218747 - DNA, 97 bp, Homo sapiens
tatgtggaggagatgtactgtgcttggctggaaaaccccaaaagtgtacataagatgcgatctgtgagccgagtctttaagttcattgacatgccaa

SEQ ID NO: 218748 - DNA, 83 bp, Homo sapiens
gaaaatgaaatttcttcagactgcaatcatcttgcattgaaaggctctagttacagtggacttcttgaacgacatcatattca

SEQ ID NO: 218749 - DNA, 90 bp, Homo sapiens
tgtccaatcagcggagtataactacagacccatttatgaccaccgtttctgtagaaaatgtttcctgactgcaatgagggaaagcggagc

SEQ ID NO: 218750 - DNA, 97 bp, Homo sapiens
cagttacagtgaactctatagattctgctggtatacagctacatccaggagagaatgctgacagtcctgcaggtttgagatttttaagagctctgag

SEQ ID NO: 218751 - DNA, 101 bp, Homo sapiens
gcctgccgggcggccgggcgcggcgagcccaggtgcatgcctacatcatcagctacctgaagaaggagatgccaagtgtatttggaaaggaaaacaagaag

SEQ ID NO: 218752 - DNA, 74 bp, Homo sapiens
acggaaaagagcaaatgcagcatttttgataggtgcctatgcagtgaatcttggaagcaaccagtaccttttct

SEQ ID NO: 218753 - DNA, 73 bp, Homo sapiens
agtcctgtttgcctcatgatatcagtgaacagcagagaatttcaaaggaccttgctaatatctgtaagacggc

SEQ ID NO: 218754 - DNA, 75 bp, Homo sapiens
atgaatccagctagcaaagtaattgcactgaaagattgtttgttgacacaagtgtttactaacactggaccagat

SEQ ID NO: 218755 - DNA, 98 bp, Homo sapiens
tcaggtcacccagcagagatcagcaatccttggctcactgaggaggtttgtcggtcctgaccgccagcctgtcgtacatggtggggatgatcgccagc

SEQ ID NO: 218756 - DNA, 83 bp, Homo sapiens
ctttgccgtgacaacaccgttcccccagccgggctgatgaggagcgggaaggcctcctgcaccctggagaccgtgtgggaaga

SEQ ID NO: 218757 - DNA, 100 bp, Homo sapiens
aagaattacagcagccaacctatgttgccctgagttacataaatagctattgacctgaaaagtggttctggaaaagtgtaccaaggccctgcaaaaggtg

SEQ ID NO: 218758 - DNA, 97 bp, Homo sapiens
ggccccggcgacccctgctccccagtcctccgccccctcgcgtcgcggccctgggcgggcgccgcgagccggtttccatcttgctgctgcaaaagga

SEQ ID NO: 218759 - DNA, 83 bp, Homo sapiens
gaagatcggcagcggctccttcggagacatctatctcgtagccacgatggaggtgatgaacctgatggagcagcctatcaagg

SEQ ID NO: 218760 - DNA, 100 bp, Homo sapiens
gaagatgttggcattaactatagggaagtcacttttgttcctggtttgtacaaaatctttgatgagattctaggtgtttttcaagattgaagagaaagaa

SEQ ID NO: 218761 - DNA, 83 bp, Homo sapiens
gagcgcgcggcggacgcgcccgggacgcgcggcggcaccgggaggccgggccgagcggatcctgatggtgaacatgccaggag

SEQ ID NO: 218762 - DNA, 82 bp, Homo sapiens
cccggatctgacggggcgggacctggcgccaccttgcagatgacaacggcaacacgacaagaagtccttggcctctaccgca

SEQ ID NO: 218763 - DNA, 54 bp, Homo sapiens
accctaaagtggagaatgaggatgaggacccatcatcatccacactgatgaagc

SEQ ID NO: 218764 - DNA, 98 bp, Homo sapiens
ttgatcgattctcacatctgaagccagctgtgtattcttgggacatttttgaagaagataattacagccccatccctgttgtcaatgaagaagaatat

SEQ ID NO: 218765 - DNA, 101 bp, Homo sapiens
cacacacgttctgcaaagtcgacaagaatctcaataacagtatgcctgagttctaccaagtatgccacaccaaaaaggattatgaagaaattggacctagc

SEQ ID NO: 218766 - DNA, 100 bp, Homo sapiens
cgcgcgcaccccaacacccccaccagctgggcctcggggtgcaacacgcaggactacatctggcacaaggggatgcgctgcgagtccatcatcaccgact

SEQ ID NO: 218767 - DNA, 75 bp, Homo sapiens
ggctgtgctggatggagtgaaggctggaggctctcaggtcatttttaccaacccattggagatagtgaagattcg

SEQ ID NO: 218768 - DNA, 78 bp, Homo sapiens
tggcaatcgagttgagtacttggatagacttatacctcaggaacaactggaaacctccaggagggaaatgattgggct

SEQ ID NO: 218769 - DNA, 96 bp, Homo sapiens
cgagttatgcccaccctccaactttgcgacggaaatgtgtcatcgaaagccaggactgactgcattgcacagatgatggatatttacgtatgtttg

SEQ ID NO: 218770 - DNA, 82 bp, Homo sapiens
cgggatttacgtggagatcaagcgcagcgatgtgccatcagacaagatcagttgatcagaacagaaagctagctcggaaaat

SEQ ID NO: 218771 - DNA, 100 bp, Homo sapiens
gagctgctgcagaaggctatcagaaaccagccctggtacctgacagtgtaaagaaggagctcctacaaagaataagaacattccttgctcagcatgccag

SEQ ID NO: 218772 - DNA, 82 bp, Homo sapiens
tgaacagatccgagggatcactatgaaatccagtgccatttccctacattatgcaacagctgacatagcccagagatacagg

SEQ ID NO: 218773 - DNA, 50 bp, Homo sapiens
ggaccagcctcttctgaaacactgggaggactacactgaaacattcaaat

SEQ ID NO: 218774 - DNA, 100 bp, Homo sapiens
ttccaggtagacatggaggccgtcggggagacgctgtggtgtgactggggcaggaccatcaggtccagcaagactatgaatctctgttccaaatgctttg

SEQ ID NO: 218775 - DNA, 83 bp, Homo sapiens
gccgatccagcctgcggagcctgtggggcaggcccgtcatcctgagtcccaccatggaggagggccatgggctggacctcact

SEQ ID NO: 218776 - DNA, 100 bp, Homo sapiens
gaagggaagctgcagaatatggaaaacatatattggagctacatggatgtttttgattggtcaaggagcacatgtaggggctgtcaacagtgaaggagat

SEQ ID NO: 218777 - DNA, 75 bp, Homo sapiens
tggaaaggaatgaggagttacagagggccgagaaggacaggatcagggcaattgaaggaacagactaaaaatcgt

SEQ ID NO: 218778 - DNA, 100 bp, Homo sapiens
ctccctgcctctcaataccttgggcccagtcatgaagatggaacctctgaataacctccaggtcacagaagatgtgaattcaagtatcaagacatttttt

SEQ ID NO: 218779 - DNA, 98 bp, Homo sapiens
tgacagattacgccccctatcctatccgcaaacagtattctgcctttgactgcaactcttgtcgtcttatgtgggtgttgaattgatctgtctctgca

SEQ ID NO: 218780 - DNA, 74 bp, Homo sapiens
cttttgtctgcccctattgtaagtgcagatggaacacaacaggcctctgagcccaagtctgcacgtattcatcc

SEQ ID NO: 218781 - DNA, 90 bp, Homo sapiens
ctgagagagatgcttaaaaatcaccagttactttaatgagtggtttcagacaccctcacaggttttctaccatgcagcaactgaacatgg

SEQ ID NO: 218782 - DNA, 83 bp, Homo sapiens
gcgagcggacggctgcatttacggggtctcccggagggccagagtcgagcccacacgatgaagacccccaggcagtgacgtat

SEQ ID NO: 218783 - DNA, 101 bp, Homo sapiens
tatgacggagaatccgtttcaggaaaggggtttgtgaccatgactctggaaagcctagaggaaatacaggatgtcagctgtgcttggaaagaacttaacag

SEQ ID NO: 218784 - DNA, 106 bp, Homo sapiens
gatgccctgcagtacctgcagaaggtctctggagacatcttcagcagaggctgggaggcggcagaatgcagccagaggagggcacaggctggctgctggagctgct

SEQ ID NO: 218785 - DNA, 98 bp, Homo sapiens
atcgacaaaagaaccattgaaaaatttgagaaggaggctgctgagacagagaaagagctggacccagatgggctgaagaaggagtcagagcgggatcg

SEQ ID NO: 218786 - DNA, 74 bp, Homo sapiens
atctttcaccaccgttgccgccttctcgagggttacattggcgaatttgaaatcattgatgaccacagagctgg

SEQ ID NO: 218787 - DNA, 98 bp, Homo sapiens
gctcattgtgcttttgaatacgttggtggtgttgtcatgatgttgaaagtgtgatgaacagtgtggtatccctactcttgatcctggaaccagacaag

SEQ ID NO: 218788 - DNA, 90 bp, Homo sapiens
cttccatctggccaagatcaaggttcggaattactggacagctgatggccttctcagcagtggaagccgatacctcattcgatcagatga

SEQ ID NO: 218789 - DNA, 100 bp, Homo sapiens
agggactcttgaagatggggacccaagtggttatgagattcaataactccttgctgccaacagagccttctattcttcaaacacctaaatgaaagtgata

SEQ ID NO: 218790 - DNA, 82 bp, Homo sapiens
ctatcagccactaatgaagttgggaactcagaccgtaccttgcaacaagggggacttgatctcatcttcatgccaggccttg

SEQ ID NO: 218791 - DNA, 75 bp, Homo sapiens
caatcccactgatgaggatcagcccatgttgcacgtgcattatttaatcacatagacaagtcaggattgaaggat

SEQ ID NO: 218792 - DNA, 97 bp, Homo sapiens
cagtcaaggacacgaggtcaccatctccagcacacttgatttgtccaatatgtgcagcgttacctggaggcgatcctaatcatgtcacggatgactt

SEQ ID NO: 218793 - DNA, 75 bp, Homo sapiens
tcttcatctatgagactttctccaagctgatcaagggtcgtggttttggaaagtaggccaactgataaccccaca

SEQ ID NO: 218794 - DNA, 51 bp, Homo sapiens
tgaagctcacctttgtctaaataaagcaacaagaaggccgaggtccttaac

SEQ ID NO: 218795 - DNA, 83 bp, Homo sapiens
ggggtccatacggcgttgttctggatgagatccgaaatggcccataccgacagctcttccacccagagcagctcatcactggg

SEQ ID NO: 218796 - DNA, 83 bp, Homo sapiens
gaaacaaaagcaggcaaatggagtcgttgggaatgactttgtgttttatgccccacgtctgagaatcaacaagcggatcctgc

SEQ ID NO: 218797 - DNA, 90 bp, Homo sapiens
cgggaagacagtaggatcgggggacttcctcgttctgcccatcttcctaacaaggctatggctgataacagcagtgatgagtgtgaagag

SEQ ID NO: 218798 - DNA, 100 bp, Homo sapiens
ctcaaggtggggttcggggggccaccgaatcgctgtcacgccggcagaggctgggaggcggcagaatgcagccagaggagggcacaggctggctgctgga

SEQ ID NO: 218799 - DNA, 100 bp, Homo sapiens
ctctgttcacggctccatcgctgttattactgtaaaatggggaaaggagaaatttgaaggtgtagaattgaatacagatgaacctccaatggtattcaag

SEQ ID NO: 218800 - DNA, 96 bp, Homo sapiens
cttcactgcttacctatatcccaaacagtgctgtctggtggcccttctatcacttctatgcaggtctcctctgagcctccggcctccataagaccc

SEQ ID NO: 218801 - DNA, 98 bp, Homo sapiens
gaaggtcccaggtagccgcggagcgcacccccgtgcccttttcaggtacatgtcccagagcaagcacacggaggcccgggagctcatgtactcgggag

SEQ ID NO: 218802 - DNA, 51 bp, Homo sapiens
ctctgcctgaggccctggagggagagaagaagacgtgaacgatcaagagag

SEQ ID NO: 218803 - DNA, 100 bp, Homo sapiens
agaggcccagcgggagtcgcggaacagcaggcccgagcccaccgcgccgggccccggacgccgcgcggaaaagtagccggatcgagctgggagatgtgac

SEQ ID NO: 218804 - DNA, 75 bp, Homo sapiens
ggccgcgggctccatcagcatggctgaggtcctagcagaagatgtgactcagactgcctctgggtggggctggct

SEQ ID NO: 218805 - DNA, 98 bp, Homo sapiens
gtgtgcggggaggtaacaagaaataccgtgccctgaggttggacgtggggaatttctcctggggctcagagtaaaccaccttgcgtgggttcaagaag

SEQ ID NO: 218806 - DNA, 75 bp, Homo sapiens
gtggaatgggtccaggccgtggtcagccgcttcgacgagcaggtcagttcaccgggacctggaggcccagattgc

SEQ ID NO: 218807 - DNA, 75 bp, Homo sapiens
ctcccggaaccatcaagatcttcacagagaacttcttatgaatcaaaaaagaagtcgttggcttcgtaagagcag

SEQ ID NO: 218808 - DNA, 83 bp, Homo sapiens
gattgtaatgaatttgcccaatgttttgatgattggcagagacccactgtctgcattgttggaaactgttactacatttttac

SEQ ID NO: 218809 - DNA, 102 bp, Homo sapiens
ctcggaaaccggtagcgcttgcagcatgccttctttgaatcctggggggagccagtcatctgatgtggtgcttttgaaccactggaaagtgaggaattttga

SEQ ID NO: 218810 - DNA, 98 bp, Homo sapiens
tccccctgaagattctgccgctgattgctatcacttctgcagaatccagtggggactggttaaatatgttgagcccaccaatcgttcctcccagtcaa

SEQ ID NO: 218811 - DNA, 100 bp, Homo sapiens
atgacatctacctccatcaggaccccagatgtctgacagccctgtgtgacaccaagataagtaacaaaaggccaatgtaggcaagcatcctccagttgcg

SEQ ID NO: 218812 - DNA, 74 bp, Homo sapiens
agaagttgagggagaaaggcgggcccgggaacagattgcccccgaggaattagcacttgttcacaacttgagga

SEQ ID NO: 218813 - DNA, 98 bp, Homo sapiens
cgcaacttacgggaggacggggaaaaagcggccaaagaagtgaagctgctgctactcgattgccaggctgcggagtgaactggacgtcgttcgaggaa

SEQ ID NO: 218814 - DNA, 75 bp, Homo sapiens
attttgtggatagagaaactgttggaactgctttacaaagtattttagtcatcagaagattgagagaaagaggag

SEQ ID NO: 218815 - DNA, 75 bp, Homo sapiens
ggaacattgtagagtctgagaaggcccttgtgcttggacgaaccttgacaggatgggtgcagcgaactttccaga

SEQ ID NO: 218816 - DNA, 75 bp, Homo sapiens
cggcgcggcagcggagggacggcagtctcgcgcgaataatccagaatggctactctgatctatgttgataaggaa

SEQ ID NO: 218817 - DNA, 82 bp, Homo sapiens
ctggtggcaagtattgctgtgggtgctgggacttcccgtccgcggcgtggaggcaatggctgccatccggaagaaactggtg

SEQ ID NO: 218818 - DNA, 82 bp, Homo sapiens
ccgcatgtgatcactctgggactcgtggggctgcagcaccggtgaaaggtgtagcagtcactcggcctacacccacagcatc

SEQ ID NO: 218819 - DNA, 120 bp, Homo sapiens
cccgggaggaaggaacgaggcaaggagctaaagcagcgtgcgttcagccctggggtacatgtcccagagcaagcacacggaggcccgggagctcatgtactcgggagccctgctcttctt

SEQ ID NO: 218820 - DNA, 82 bp, Homo sapiens
gtccggttctgggacagctggagacagtggtggtgactgaaactaatctggattcactccctctggttgatacccactcaaa

SEQ ID NO: 218821 - DNA, 83 bp, Homo sapiens
ctagaagaggtgatgatagctttggagacagtaattctgttccacaggatatctgctgtatggcagctgatggcagattagtc

SEQ ID NO: 218822 - DNA, 50 bp, Homo sapiens
gcggggaccgctgtgctctcggaggccccgtgtgggccgcggcccggccc

SEQ ID NO: 218823 - DNA, 97 bp, Homo sapiens
cgctgggctgctcttcctgaggttttcctaagccatcccctggcggaaccgcccccagccgtgctatcaagactaatcaggaccttctcccagaaac

SEQ ID NO: 218824 - DNA, 100 bp, Homo sapiens
cttgtcccagcaagaccacaaatttattcaagtcaattaccatcctttaccaggcttgctttgaccagatcaagttctttaagtgacttttcctggtctc

SEQ ID NO: 218825 - DNA, 96 bp, Homo sapiens
gcggcctcacggacgaggccgccctcagttgctgctccgacgcggaccccagtaccaaggtattaatctctggagaagacacatccacagttagca

SEQ ID NO: 218826 - DNA, 75 bp, Homo sapiens
ggcggtccctgtgacctgtggagacacggccagatctgccctccaatgccttcaattaagttgcagagttctgat

SEQ ID NO: 218827 - DNA, 95 bp, Homo sapiens
acatctgctattcttatagaaaatatggatctttacatgttgaatccttgcagcactaaaatttggaatgatgagaagacagcagctgattacaa

SEQ ID NO: 218828 - DNA, 90 bp, Homo sapiens
cgagtgaccgagaccgcggccgggaccgagggacctcagcagccatgtcgaagccccatagtgaagccgggactgccttcattcagaccc

SEQ ID NO: 218829 - DNA, 100 bp, Homo sapiens
aactcatccttaaaggggtcatactgctggaataacttagcttgcacatgaatgcagtcatgcaaaccgttaggaaaaccagagcctatatggagttccc

SEQ ID NO: 218830 - DNA, 89 bp, Homo sapiens
cgaaattgcagaacaggccaagcattccaatggatgggaccccaatgaaatgttcaagttcaatgaggagaactacggtgtgaagacta

SEQ ID NO: 218831 - DNA, 140 bp, Homo sapiens
ctatgagagtaagaaggaagaacacaagtggatatacgaggagtccttgcaatctggcccatcaattcttactttgacccccaggctggagtgcagtggcacgatcttggttcaccacaatctcgtctcgaaggctcagg

SEQ ID NO: 218832 - DNA, 140 bp, Homo sapiens
gcggatggtggtgatggaagcaggtggaattatgccctgttggttccaatgctgggattggctgcttttcgtggccagcatcgaaatgttcagccttttagtgatgaagatgcatcaattgaaacaatgagccattgcag

SEQ ID NO: 218833 - DNA, 100 bp, Homo sapiens
gtttgattgctgctactcgtgcacaactggcaaagaatgcaaaaaccagcagcaatggtgctggagaatctggtaaaagcaccattgtgaagcagatgag

SEQ ID NO: 218834 - DNA, 100 bp, Homo sapiens
gttcagtggccatgttagctgggtcgggaagacatccatggaagtgaagatgcaaatgttccaggctcccacatcaggacgagaaggagccctcgagtta

SEQ ID NO: 218835 - DNA, 76 bp, Homo sapiens
gcatctttatgataattggatcaaagatgctggttggtgatgacaaaactgtgaagcagtggaaaatggatgggcc

SEQ ID NO: 218836 - DNA, 90 bp, Homo sapiens
gcaacacaagatcaagaactccatctgggtgacagcagtattcgctattttgagatcacggatgaatccccgtacgtccactacctcaac

SEQ ID NO: 218837 - DNA, 101 bp, Homo sapiens
tcggaggccagcggggccggaagcggcggcgcagcaaattcaacacccaacagcttccttaatagcaaaggtagcaacagcccaggatgatataactggtg

SEQ ID NO: 218838 - DNA, 97 bp, Homo sapiens
cacggagtgtatgaccacaaacagccatcaagcggatgtgatgctggtacaacccagagtagaatttattctgtctttcattgaccacattgctgga

SEQ ID NO: 218839 - DNA, 100 bp, Homo sapiens
cccagctcttcccgccttccgcggtataatcaacactacgagagatagagccgcctagaaccaggttatcctgaatacatgtctaacaattttccttgca

SEQ ID NO: 218840 - DNA, 100 bp, Homo sapiens
ctgctgtccagcctctcccgctgctcagcaaccaaccagtggttcatcccagccgtgaggggggacattccccctgggtgtgcagcctatggcttcgtgt

SEQ ID NO: 218841 - DNA, 100 bp, Homo sapiens
cggtacccatccggggaggagcgttgcattgcctgcaagctctgcgaggccatctgccccgcccagggctacttctacaagtccgaacagccagtccagc

SEQ ID NO: 218842 - DNA, 83 bp, Homo sapiens
cgacccgcgaacccctctgggatccccgccgctctgtctacaacccgaggtttccacttgagcggcacagtgacagaacctgc

SEQ ID NO: 218843 - DNA, 82 bp, Homo sapiens
attcgcagtggtcgcttcttctccttgggtgaagtaccatgcaagcatttcttaaaggtacatccatcagtactaaaccccc

SEQ ID NO: 218844 - DNA, 101 bp, Homo sapiens
gcaaggaggccgtcaccttcaaggccgtcagacaaggttgcctgcctgattcgagttccatctgaagtggttaagcagagggcacaggtatctgcttctac

SEQ ID NO: 218845 - DNA, 100 bp, Homo sapiens
cttaagaagcaatttaatgatgaagaaactttgctacagcctcctttgaccagatccatgactgttggtggtttattacccagaactctttgtctgggtc

SEQ ID NO: 218846 - DNA, 100 bp, Homo sapiens
agcatatcatgaaatcctccccacttatgtttgtaaatgtgagtggaagccatgaggccaaaggcagttgtattgatttatcatagaatccccgactcag

SEQ ID NO: 218847 - DNA, 100 bp, Homo sapiens
tgggctatggaacccttttagaaagaatgaaaggtgaagcatctggatggggaagaggatggcagcagtgatcagagtcaggcttctggaaccacaggtg

SEQ ID NO: 218848 - DNA, 101 bp, Homo sapiens
ccgggacccggccagccgtggagacaggtacatgctggtcacctacgacgaacccccgtactgcatcaagggacacagcaggtcaggagagattcaacagc

SEQ ID NO: 218849 - DNA, 100 bp, Homo sapiens
gaggactcagactgtggaacttccgtgccccccaccctcaccaagaccaagatcactccatggatgaaatgacagctgtggtgaaaattgaaaaaggagt

SEQ ID NO: 218850 - DNA, 74 bp, Homo sapiens
acaccacttcgagatgtctgctttcaccttctaaaactctacagtgacagattatttgcatgggtgcaaaagaa

SEQ ID NO: 218851 - DNA, 83 bp, Homo sapiens
gcaacatgacgctggaagagctcgtggcgtgcgacaacgcggcgcagaaagagcgcctgctcgctgtgcccccgggttatgac

SEQ ID NO: 218852 - DNA, 124 bp, Homo sapiens
ggaatatcctggaaccttcttttgtttgtcagcagccaaggtgtttccaggaagttcagagagaacaggtgctggagaatctggtaaaagcaccattgtgaagcagatgaggatcctgcatgtt

SEQ ID NO: 218853 - DNA, 75 bp, Homo sapiens
caagattctggagtctggaaagccttcacttggtctcttcaggacagaaagtcatgttctatgtctcctcaggac

SEQ ID NO: 218854 - DNA, 82 bp, Homo sapiens
gcagcccggcgggacagcggggcggctggcgccgggggccggggagcgccaggccaagtcctgtatctgccatgtctgtggc

SEQ ID NO: 218855 - DNA, 100 bp, Homo sapiens
gggaaacgaacggtgttgaacgcccgggtggaggaggcaattaagttggaatatgcaaggttggttaagttggcccaagaagacaccccaccagaaaccg

SEQ ID NO: 218856 - DNA, 83 bp, Homo sapiens
agggaaaggatgacatatttttggacctgaaacagaaattctggaacacctatatggatgcagactcatctgagcgtatcatt

SEQ ID NO: 218857 - DNA, 100 bp, Homo sapiens
gatcacttgtctggagcaagggaaagaggcctggagtatgaagagacatgagatcatggtggccaaacccacaggcagaagctcctcctggggtagagac

SEQ ID NO: 218858 - DNA, 99 bp, Homo sapiens
cgggtggtcaccatcggcaccgtgctggtgcccatcctgctggtcaccctggtcttcaccaagaacttcgcaggtgtcatggagaaactccagctgggc

SEQ ID NO: 218859 - DNA, 74 bp, Homo sapiens
agagttcaaggaggccttccagctgtttgaccgaacagagctagagccggtgcaggccacgcagaacaagacag

SEQ ID NO: 218860 - DNA, 89 bp, Homo sapiens
gctcttcccggcgctctcctggctcccttctgccccagctccgtctcggcggcggcgggagctggaagctatcaaagctcgagtcaggg

SEQ ID NO: 218861 - DNA, 100 bp, Homo sapiens
aactataagcagcttcggaaaggagccaatgagggtatctcgggggagctttgtgccttgatggatcaagttcatcatatgcagcactcaaaatggcagc

SEQ ID NO: 218862 - DNA, 98 bp, Homo sapiens
ggacaccatgcagtcggatgatgtgttcagctccgaggccgcctggcagtgtgtgagtgaggcgctgcagatcctcgggggcttgggctacacaaggg

SEQ ID NO: 218863 - DNA, 86 bp, Homo sapiens
cccgctgccgtcgccgccgccaccatgcccaagagaaagatgagcagcaccagcagtaagagggctccgaccacggcaacccagag

SEQ ID NO: 218864 - DNA, 118 bp, Homo sapiens
cggccagcctgagcaagcggaggacctacgccggcctggatctgactgcagccatgagcagcaatgagtgcttcaagtgtggacgatctggccactgggcccgggaatgtcctactgg

SEQ ID NO: 218865 - DNA, 100 bp, Homo sapiens
gcagcagcgaagaggtggagaaagtggtggagattgtccgctcgagcctgaaggaccctgagaaagttctgggaggtgatcagtgatgaacatggcatcg

SEQ ID NO: 218866 - DNA, 100 bp, Homo sapiens
ttcaatcggatcggtggagtgcagcaggacactatcctggccgagggccttcacttcaggcagcctgcttctgcaaagtggtacgatcgaagggactatg

SEQ ID NO: 218867 - DNA, 74 bp, Homo sapiens
gcagaagaaatcttggagaagggtctaaaggcctcgaaggagctccagcaagcccagacaaccagaccagaatc

SEQ ID NO: 218868 - DNA, 75 bp, Homo sapiens
cttcaatactacctttatttccaccatagctatccagtcagttcgctgctattcccatgggtcacaggagacaga

SEQ ID NO: 218869 - DNA, 90 bp, Homo sapiens
ggaccctggaagagaagagggtggctaatgattaagtatggtttgaagtggtgaacatggatttttctcggcttcacatgtacagtcctc

SEQ ID NO: 218870 - DNA, 100 bp, Homo sapiens
caggctttaggtatcaccactaaaatctccaggggcaccattgaaatcctgattgaagataaaactttccaagtccttggtaatctttacagcgagggag

SEQ ID NO: 218871 - DNA, 114 bp, Homo sapiens
ctggaaccgttgattggagatatgcccttagttggagctttgtctatcttcttccttaggaaaccagtttctgacgtagaagagcttacccctccagagcatctttctgatctt

SEQ ID NO: 218872 - DNA, 97 bp, Homo sapiens
cttccactgattctacattatgctattactactgaactatttcacaaacccattttgaaagtcaaaaaccgagcactgagtctttctctgtaatcca

SEQ ID NO: 218873 - DNA, 100 bp, Homo sapiens
atggtgattggaaatctagtggtctttactgggattttcacagcagaaatggttctcaagatcattgccatggatccttattactatttccaagaaggct

SEQ ID NO: 218874 - DNA, 100 bp, Homo sapiens
aggatgagacgctagagacagagaaagctcagtactacctgcctgatggcagcaccattgagttccagtctcatcagattttccatgtcctggtggtggc

SEQ ID NO: 218875 - DNA, 100 bp, Homo sapiens
agctccccaggggacttctccatctctgtcaggaagagagaagggcacagttacctaagtatcaacgtaatcttcctcggccaggacaggcccccatcgg

SEQ ID NO: 218876 - DNA, 75 bp, Homo sapiens
acggcactgccgacctccgggagcagcgcagggcaattgaaggaacagactaaaaatcgtgtcctggaaggaaac

SEQ ID NO: 218877 - DNA, 82 bp, Homo sapiens
gccaggagtcatgagcgacagcggcgagcagaactacggcgagcgggatgataatgaagataattcaaatgatgggacccag

SEQ ID NO: 218878 - DNA, 100 bp, Homo sapiens
ttgtactactacaagcactatttatcaacaaaggttacaggaggttccagtggcatcgggaagtgcattgctatcgagtgctataaacaaggagctttta

SEQ ID NO: 218879 - DNA, 98 bp, Homo sapiens
agccatcaggtaggctgcgttgaggatctttgctcttccatccgcctttgatcgtcttcctcttcagccatccagtgtgacttcaccgaagaccagac

SEQ ID NO: 218880 - DNA, 100 bp, Homo sapiens
gcggaagacagtgagctgttcgagctggattattgcctcaaaggccgggcagtgacggtgaatggggtgagcgtgacgccccccaaggtctacacaggcc

SEQ ID NO: 218881 - DNA, 85 bp, Homo sapiens
gaccccgactacctgcgcggcgcgctcggccgcctcaaggtcgcccaagtgactggttcatgtctcttggggtcggcctgctcac

SEQ ID NO: 218882 - DNA, 110 bp, Homo sapiens
ttcagcttcgaaggcgacttcaagacgcggcccaaggtgtcccttggcggcgcgagcaggaagggcagccactgatcacaatgtggataatacaacagaaatattcaggg

SEQ ID NO: 218883 - DNA, 75 bp, Homo sapiens
gaagatggcggatctggaggagcagttgtctgatgaagagaaggtctacatgttcaagtgcgtgtggcggtgcta

SEQ ID NO: 218884 - DNA, 75 bp, Homo sapiens
cagttacaagagaaactttatgtgcctgtaaaagaatacccagatcttttcctccgcaaccatgtctgacaaacc

SEQ ID NO: 218885 - DNA, 100 bp, Homo sapiens
gcttttgaagctggatggggttttgccctcaccaaaactttctctcttgataagtttggatttaggtggcgagtagaaaaagaagtaatttcaggaaaag

SEQ ID NO: 218886 - DNA, 96 bp, Homo sapiens
gcgtggagagggagtgatgtcttccagactcggtgctgtacccgccctccagaagaaaaggaagtcattaaaggacagtatggcaagctcacggac

SEQ ID NO: 218887 - DNA, 119 bp, Homo sapiens
ctactttgactactggggccagggaaccctggtcaccgtctcctcaggtgctggagaatctggtaaaagcaccattgtgaagcagatgaggatcctgcatgttaatgggtttaatggag

SEQ ID NO: 218888 - DNA, 80 bp, Homo sapiens
cagctgcttcaaattggacttaagtctgaatttcggcagaatttaggtctcggcgcggaagatggccggcggcgtggacg

SEQ ID NO: 218889 - DNA, 82 bp, Homo sapiens
catttatgaaagcccaaatcacctgtacttggtcatgcagctggggatatgagactttctactcggaatatcctgagtgttg

SEQ ID NO: 218890 - DNA, 100 bp, Homo sapiens
ctactcctttttacctttggttcacaacatcatcaaatgatcctctgtcgatgggtcctcagaaagctctggaaaccatcggtgcaaatttacagaagca

SEQ ID NO: 218891 - DNA, 142 bp, Homo sapiens
atttacttaacacatcatgaaggctagtttggatgtggaggggaatagactccatctatccatatgaggaaatgtgactggaaacagtaactccacgttcatctccagcgggcaggtgatgaacttcaagggcgacatcatc

SEQ ID NO: 218892 - DNA, 75 bp, Homo sapiens
cctggaactagcgtcaaccttgaaggcatcgtgtggcaggaaacagaagatgaccctttggctttgctgagagag

SEQ ID NO: 218893 - DNA, 80 bp, Homo sapiens
ccgccatcatggacaccagccgtgtgcagcctatcaagctggccaggcttcctgcctgacacagctcacttcaagaagtg

SEQ ID NO: 218894 - DNA, 98 bp, Homo sapiens
gatggagtgcctccaaaggttgctgaggatattccccgagtccctccggtggctaatggccacccagcagtttgagtctgcaaagaggctgatcctcc

SEQ ID NO: 218895 - DNA, 100 bp, Homo sapiens
aattaatcaacagagtgggacctaatggtgagaggttggcatggatcctattagctgtgtaatactggaattatcaatgatatgcactggtggaggtgtt

SEQ ID NO: 218896 - DNA, 75 bp, Homo sapiens
ctaggccttttagaaaacatggatctaaaatgtccactgaggcacaaagagttgatgacagtccaagcactagtg

SEQ ID NO: 218897 - DNA, 83 bp, Homo sapiens
atcggctcagcagagaggaaaaatgaactcccccactggaaaggattctgaaagaaatgaagtcagccctcagaaatgaagtt

SEQ ID NO: 218898 - DNA, 100 bp, Homo sapiens
ccgatccagcctgcggagcctgtggggcagatgctctctgtgtgggtatgtgtgtagccatcctccttctttgaagtctcatatgtggaaacatgcaagt

SEQ ID NO: 218899 - DNA, 100 bp, Homo sapiens
aagaaaattccagtacccccaagagactttacttcagagccccggcttattgatagtgtgtgtaccatatcagtggcgtgtaactatgctcatcattgtt

SEQ ID NO: 218900 - DNA, 75 bp, Homo sapiens
ccggatctggtaacatggcaaaagatacctgcctgaccagtgcacgcccaacccctgcgataggaaggggaccca

SEQ ID NO: 218901 - DNA, 50 bp, Homo sapiens
gggcgagttctcactcattggaagaacctggagaagcagatgcgccagct

SEQ ID NO: 218902 - DNA, 75 bp, Homo sapiens
gctcggaagaggaggaagaagcagaagccgaaaccgccaaagccatactgaccaagtgccaggaagaggtcagcc

SEQ ID NO: 218903 - DNA, 76 bp, Homo sapiens
ccctctccgccccccaggaggggcgagagggagccgcagctgatgtcaggtgatagtgatacagacttactacagg

SEQ ID NO: 218904 - DNA, 95 bp, Homo sapiens
attggcatcacttcctgatagcaagttcatctgcatggaatgtaaaactggtcagatggcaaaaatcaagcaaacccttctagacagccggggag

SEQ ID NO: 218905 - DNA, 75 bp, Homo sapiens
gcagcagtcagggacatttctgaagcgagcgtcttcgatgctgatcttgcatctttaatggataaaacatttgag

SEQ ID NO: 218906 - DNA, 74 bp, Homo sapiens
gacgcactgtgaaagcagcatggaaaatggatttatcaaagatgttcatgaagactcccttacagttgtttttg

SEQ ID NO: 218907 - DNA, 101 bp, Homo sapiens
gcggaaaaccgaagttggaagtgtctcttagcagcgcgcggagaagaacggggagccagacttcccaagtaagaagcggaagaggagccgctggaaccaag

SEQ ID NO: 218908 - DNA, 82 bp, Homo sapiens
tgcctccttactcctggccctctacatgaagaagctcggatactggcccccaggctccgctcttgccagagggacaggagcc

SEQ ID NO: 218909 - DNA, 83 bp, Homo sapiens
cgcagttcttgtttgtggatcgctgtgatcgtcacttggagcatattaatgaaaagtgccataaactgaaaaaccaaacatga

SEQ ID NO: 218910 - DNA, 75 bp, Homo sapiens
tcaatttaagcctgatctaacccctagaaacagaggcggggtttcaccatgttgcccagactggtcttgaactcc

SEQ ID NO: 218911 - DNA, 100 bp, Homo sapiens
catggcggcgcccagtggcgtccacctgctcgtccgcagaggtagtgtgccagtatttgaaaaatcccaatgtatctgattcactgctgctgcagaatat

SEQ ID NO: 218912 - DNA, 82 bp, Homo sapiens
cggcgagtttccgatttaaagctgagctgcgaggaaaatggcggcgggagctcagatttcttttatccaagatattggaagg

SEQ ID NO: 218913 - DNA, 98 bp, Homo sapiens
aatgggagcagttttcatggatgcccctgtttctggtggtggaaccgtcccaaaatgtcccttgctcagaagaaggatcgggtagctcaaaagaaggc

SEQ ID NO: 218914 - DNA, 102 bp, Homo sapiens
gatacatttggtcctggagatgatgatgaaattcagtttgatgacattggagatgatgatgaagatattgatgacaatttgccattttcagtggaaaacaag

SEQ ID NO: 218915 - DNA, 75 bp, Homo sapiens
tctggactttgggcgtcccattgccatgaacattgacatcaccaatttcagcagcagctggagcgatggcctggc

SEQ ID NO: 218916 - DNA, 98 bp, Homo sapiens
agatggtgttggaaagcactatggtgtggcgagaaccactgtctctgatcaacgtgcggaagaggaacgtggaatctggggaagaagagctggcgtcc

SEQ ID NO: 218917 - DNA, 75 bp, Homo sapiens
ataggaggaaaattcatcatctggcagaggtggaggagacactgaagcgactgcagagccagaagggagtgcagg

SEQ ID NO: 218918 - DNA, 98 bp, Homo sapiens
cgggcgcgggcgctgcggcgggacagctcgacgcgcaggacgtggcccagtggaacatcgggagcctccggaccatcctggacatggtggagcgcgag

SEQ ID NO: 218919 - DNA, 101 bp, Homo sapiens
cgtcttcctatccttacccgacctcagatgctcccttctgctcctgctgaagaaaaggtgactggtctcatgagccctgaagaatgaactcagaggaggtt

SEQ ID NO: 218920 - DNA, 75 bp, Homo sapiens
ctggaaccttgtcgaagacctaattttgagaatttgctggtgaccggggcggttgactgtagtttgagaggctgg

SEQ ID NO: 218921 - DNA, 82 bp, Homo sapiens
agctcgccctgttcgctctggctgttagcgtgctggactctgcggacatagaggtcacagacagtcgcctgcctcatgccac

SEQ ID NO: 218922 - DNA, 100 bp, Homo sapiens
cagtgcctctgaccagcatcgtctgtaaagggtaacgccatcctctgaaaatcctaatggtgctacttctagtgtcagccaaggaaaaccctctttaaga

SEQ ID NO: 218923 - DNA, 100 bp, Homo sapiens
cgcacaggccgtcgctatgagcgggaccaccctgggcacagcaggcatcggagcaagagtgagccatggagctacgtgtggggaacaagtaccgcctggg

SEQ ID NO: 218924 - DNA, 75 bp, Homo sapiens
agactaacatgtatgaaggtgtaggaagaatgaatgtttacccttgcggaagttgcatcacttaatgacattcag

SEQ ID NO: 218925 - DNA, 100 bp, Homo sapiens
cctgtgaaggaccagcatgggaatcctatactctgaggtggtttgttggaaatgctccgactacaaagctcaacttgaatatgatggtggtaaattgagc

SEQ ID NO: 218926 - DNA, 100 bp, Homo sapiens
actgtcgccagacttcgggaagcagtgtctatggaaacaaagatccccactgatcagccactatggaaggaggggtcaggattacagcagaggagactgg

SEQ ID NO: 218927 - DNA, 75 bp, Homo sapiens
tctgaggcgctggcgcggcgggcgcgggattttttatcaagcagaaatgcatcgaacaacgagaatcaagatcac

SEQ ID NO: 218928 - DNA, 101 bp, Homo sapiens
actttttgaatttcaagaacagtaaagttggaacacagcagagggtgtgtaataaaatacagcttagaccatgctcagcctccaagcagccttgtcatcga

SEQ ID NO: 218929 - DNA, 51 bp, Homo sapiens
cacgccgtggccggagccgtggtttacaagtaaaagtaaccaagctaaaac

SEQ ID NO: 218930 - DNA, 100 bp, Homo sapiens
ggaacagatttcagtgtcctccttagctctgcagatgcctctttgacaaggccacttcatcatcaagcttctgcctgcccgcattctcatggaaaccccc

SEQ ID NO: 218931 - DNA, 141 bp, Homo sapiens
tgcacatgtgatcttggcctgcaggaacatggcaagggcgagtgaagcagtgtcacgcattttagaagaatggagagttaagaaagacgtggacaagggcacacggcactcagacatgttcctgctgaagccagaggacgg

SEQ ID NO: 218932 - DNA, 98 bp, Homo sapiens
agccatagcatggacttcttcctgctcaagtgcgaagacaagttggatggcttgaggactggtactaaaaggaaacgtgactgggaggccattgccag

SEQ ID NO: 218933 - DNA, 100 bp, Homo sapiens
tggctcacaccacaaaggttaacggcagtgcctcagcggggatctgatgagcttctttcttctggcatcattaacggaccttttaccatgaatagttcta

SEQ ID NO: 218934 - DNA, 100 bp, Homo sapiens
atgcagaagctactcaaatgcagtcggcttgtcctggctcttgccctcatcctggttctggaatcctcagttcaagaacactctgctccagccaaggtgg

SEQ ID NO: 218935 - DNA, 100 bp, Homo sapiens
ctgtttcgggccagcgacccgctgctcagcgtcctcatgtggggggtaaaccactcgaaactatgttccaacttcctgtcaacaatcttggcagtttaag

SEQ ID NO: 218936 - DNA, 75 bp, Homo sapiens
ctggctacagcttcagaagaccgaagcgttcgtatctggaaggtgaccagaagtcagcagcttcccagaagcccc

SEQ ID NO: 218937 - DNA, 82 bp, Homo sapiens
aaagacagggaaaggggaaatgagttcaccagaaaccaacaggcagcacaggagatgctgaagagtttctggcagaaggttt

SEQ ID NO: 218938 - DNA, 100 bp, Homo sapiens
tgtaaaatgagaataactgcagaagaaatgagtgcactaatagaagaacgggatgctgccttgtctaagaaatgagccgtcagactgctacagcattacc

SEQ ID NO: 218939 - DNA, 83 bp, Homo sapiens
actgtgctatcctagaatcaaggatttcagcaacaatgcctctgttcaaactcccaggctcagggaaggcctccatattatac

SEQ ID NO: 218940 - DNA, 100 bp, Homo sapiens
gtttgtcctgtcctggatcagtttctttgtcatgtagccaagactggagaaacaatttgtacaatggtagatggagtgatgattcttcctgtgcttatca

SEQ ID NO: 218941 - DNA, 114 bp, Homo sapiens
ccaccatccacgccagccgcaccatgccgctcctaagcctgcacagccgcggcggcagcagcagtgagagggccgttgccgtctgcacccagaccctgagccgccgccgccggc

SEQ ID NO: 218942 - DNA, 75 bp, Homo sapiens
ttgaacatgaagaatactggaaagttgctatgttttggtacaccaggggttggaaaaaccacactaggcaaagaa

SEQ ID NO: 218943 - DNA, 50 bp, Homo sapiens
gccgaatcttccttcaggatatcaaggacccagatgatgtggtaccagtt

SEQ ID NO: 218944 - DNA, 76 bp, Homo sapiens
ggattccatgtagagacccctggagacttaattcagtgcacaaatgagatgaatgtgaacatcccacagttggcag

SEQ ID NO: 218945 - DNA, 99 bp, Homo sapiens
catagctgatgtcaagttggttgctgatttccaaaggtgtgatgaatgcagactctgctaccattttggctgtttggatcctcctttgaaaaagtctcc

SEQ ID NO: 218946 - DNA, 82 bp, Homo sapiens
cgggagctgggcggccatttaccagcctaccttatgttcagtattttggaggtgtctctgctctaagtaaacaacagtttct

SEQ ID NO: 218947 - DNA, 90 bp, Homo sapiens
tacagctggagcgcccagaggcgagccctggtggaggaagagttgagaagctgatgtctcctcgacttccaactggaaccttgaaccccc

SEQ ID NO: 218948 - DNA, 82 bp, Homo sapiens
tagatttttccctctaccttaaggatgtgcaggatcttgatggtggcaaggaatgatatcatcaagttgaatcgaaaggaag

SEQ ID NO: 218949 - DNA, 75 bp, Homo sapiens
tcaagtacctcatgttcgccttcaacctgctcttctggtgagccgaacctgctcgtccgtgcctgcaaccagttg

SEQ ID NO: 218950 - DNA, 100 bp, Homo sapiens
gggcggctctgcgctggccgggggcgcgggcggcggcgccggcaggaaggctgaccggttccctgatgtgttacctgcttctgctactgatccaaactgc

SEQ ID NO: 218951 - DNA, 99 bp, Homo sapiens
ctgcagggactggtagtctgtgagcagcagagcagggaaggccgtggtggtgactgatggggagcgcatcctgggcctgggagacctgggctgctacgg

SEQ ID NO: 218952 - DNA, 93 bp, Homo sapiens
gatctggagccagaaggaagagtgtatgtgatcatcgatctctcagggtcgtcgggtgaagaatgaagctatgaatcctgattatgctcaagt

SEQ ID NO: 218953 - DNA, 100 bp, Homo sapiens
tgataatgcatggatggagacagaagctgtgaactaccatgacgaaacaggtcaaaatgcagatcttcgtgaaaacccttaccggcaagaccatcaccct

SEQ ID NO: 218954 - DNA, 83 bp, Homo sapiens
cctgcagcagaggaactcctataaccaccaccaggttttaaaatcaaagatgggaaaatcggagaaaattgcccttccccatg

SEQ ID NO: 218955 - DNA, 100 bp, Homo sapiens
cggaacaggccgccgcgcgctgcgcgccggacccgctgcccctgccggcccggccgggtcgggcggcccagagaggaacttgatacagatgaatatgaag

SEQ ID NO: 218956 - DNA, 108 bp, Homo sapiens
ttttggaagagggagtcaccactggacctccaaggaagccacgtgcagacatctacaaccttcgatctcctgacgagatttgttaaggattccaagtaactcttattt

SEQ ID NO: 218957 - DNA, 82 bp, Homo sapiens
gacataaggaactagtcacagtgttgctgcaacatagagctgacattaactgtcaggctaggcagctggaagagaaagaccg

SEQ ID NO: 218958 - DNA, 85 bp, Homo sapiens
ggggcaaatgatgaagaaactttggctgataatattgcagcattttccagttacgccccatggtgtccatcctgccagcagactg

SEQ ID NO: 218959 - DNA, 90 bp, Homo sapiens
ggctgcgttaagccggctctggagacaggtacccactgatggtaatgctggcctgctggctgaaccccagattgccatgttctgtggcag

SEQ ID NO: 218960 - DNA, 97 bp, Homo sapiens
ccggggctctgggagcgtggtaacgtggctgcaaccttagcgacatcaggaagaacagggtcgaggatcgaggaatcagtgtctgtccctgaagggt

SEQ ID NO: 218961 - DNA, 73 bp, Homo sapiens
ctgaagagaaactgcaccttatcacccggaacctgcaggttcagtggtcacctcacaatgagactattttagc

SEQ ID NO: 218962 - DNA, 50 bp, Homo sapiens
acctcagatgtgaagtccattaaaggagtgctcctgaccatcaccttcat

SEQ ID NO: 218963 - DNA, 75 bp, Homo sapiens
caccacgcctctgtgacctgggtgagccagctatggctggcagtggttgtggtgccccttgctgtctcagtcgcc

SEQ ID NO: 218964 - DNA, 100 bp, Homo sapiens
tagcgatgatgagaaatcagacaggaacagaccttggtggagaaaacgttttgtttcagccatgcctaaagcttgtactcccagagtacctcatccacgc

SEQ ID NO: 218965 - DNA, 96 bp, Homo sapiens
atagagcagagtggaccaccccatgaacctcggcctgtatccggtgtccgaggcgaactcagtaagatgatgttaagaggaaacctgaagcaagtg

SEQ ID NO: 218966 - DNA, 75 bp, Homo sapiens
ttcgggagaggatatgtagcgaggaggaacgcgctaaggcaaagcacctgaaggacagaataacgggctcccaga

SEQ ID NO: 218967 - DNA, 100 bp, Homo sapiens
cgtgttccagaggcgcggggcgccgccgctgcagctgccgcgcgtacaatgcagatcttcgtgaagactctgactggtaagaccatcaccctcgaggttg

SEQ ID NO: 218968 - DNA, 50 bp, Homo sapiens
gttcgaagctgagtatgtgacaggtcaaaatgcagatcttcgtgaaaacc

SEQ ID NO: 218969 - DNA, 50 bp, Homo sapiens
ggactgcctcactgagcaaccaagagggaaatggtgtcctgctggaggga

SEQ ID NO: 218970 - DNA, 100 bp, Homo sapiens
aactaccgctgctggaccacaaaccgctgccagaaaagtgtggacactgcaagagacttgcacctgagtatgaagctgcagctaccagattaaaaggaat

SEQ ID NO: 218971 - DNA, 75 bp, Homo sapiens
agaggatccagtgttcaccatcctggccccggaaggccagttttgttgcatctggaaataggacagatatttcct

SEQ ID NO: 218972 - DNA, 75 bp, Homo sapiens
ggcggcatgatccgacacgccggggcgcccgcgcgcggggaccccacggggaagctcttcgtgggcggtcttgac

SEQ ID NO: 218973 - DNA, 83 bp, Homo sapiens
cccagggcccagtgcggactcgcctccgtgaaggtgatgctactaggaggtggagcctttgggaggtgattagttcatgaaag

SEQ ID NO: 218974 - DNA, 75 bp, Homo sapiens
agctgcctcagttcttagcgcaggctttccttaaagtttcccatgtctcaatggactcctgaatataacgagctc

SEQ ID NO: 218975 - DNA, 85 bp, Homo sapiens
ggccactgtttcttggatcgctgcaaccatctccgccagaacgacaaagaggagatgaagactggcccatttgcagagcactcca

SEQ ID NO: 218976 - DNA, 51 bp, Homo sapiens
gctcttggcaaaacaccagatgggaaaaatgccagctgtgggacaaggagt

SEQ ID NO: 218977 - DNA, 97 bp, Homo sapiens
tacttcaaaatgaagttaatcggcaagtatgagaataatgttatcactattgatctggttcaaaattcttctcaaaaaactcagaatgatgtggaca

SEQ ID NO: 218978 - DNA, 50 bp, Homo sapiens
ctttcatccctatgtggaaaacgttatcaagtgggaatcctgtatatgaa

SEQ ID NO: 218979 - DNA, 74 bp, Homo sapiens
gtggagttcattgcttcttcagattacatggtaagaatcaggccttattggagacattcaagcaaaggttggac

SEQ ID NO: 218980 - DNA, 101 bp, Homo sapiens
tgaagcagccgatcatggcggatggcccccggtgcaagaggcgcaaacaagccaatcccaggaggaaaaacggcctcaggagtgcaagtagctgatgaagt

SEQ ID NO: 218981 - DNA, 100 bp, Homo sapiens
tctggaccttcagctactatcagagcttctttgacgtggacacctcacagtgtgtaatgctgtgtcatggagctaaaatcggatttttccaaggagatat

SEQ ID NO: 218982 - DNA, 49 bp, Homo sapiens
agtgactccctggagctcatggtctcagcttccggaagttcaacattct

SEQ ID NO: 218983 - DNA, 100 bp, Homo sapiens
gagagcctctgagctcaacggaggattgtgcctgagaagaacccacagagctttaaggaagcctcctatttcagtttctcaacatgaaagtcatcaagca

SEQ ID NO: 218984 - DNA, 82 bp, Homo sapiens
agagagccgaggtcgctccccatccactctcacaagattgtccagaacatcgtgggcacagctctgatgattttagtggcca

SEQ ID NO: 218985 - DNA, 100 bp, Homo sapiens
acatatatgattctgctactggctactattatgaccccttggcaggaacttattatgaccccaatacccaggttgatggaaatcacaatcttctgacaaa

SEQ ID NO: 218986 - DNA, 82 bp, Homo sapiens
agaaagcagatggaagccaggccccctcctgaaagaggctccttgaaggttatcttagatatgagaacaaatacaatctgtt

SEQ ID NO: 218987 - DNA, 51 bp, Homo sapiens
gtgcaaacccgagagaactggggtcaaagaaggctcttccaagaaacatgt

SEQ ID NO: 218988 - DNA, 74 bp, Homo sapiens
gcggatttgtgaatctcacatttaccaaggctgaccggttccctgatgtgttacctgcttctgctactgatcca

SEQ ID NO: 218989 - DNA, 90 bp, Homo sapiens
acatctgcaaacaatggacggagattcttcactttacaggcagacctgttatcctaaactaggtgagtcagcttttggtacatgtgatga

SEQ ID NO: 218990 - DNA, 101 bp, Homo sapiens
aatcataaagtgttactggaaatcttatttagttttgggaatttttacgttaattgagaacctaaaggcagacccagaagagctttttacaaaactagaga

SEQ ID NO: 218991 - DNA, 100 bp, Homo sapiens
cggattgccagagaattggcagaaggtggttatcactaggctaaaactggacaaagaccgcaaaaagatcctcgaacggaaagccaaatctcgccaagta

SEQ ID NO: 218992 - DNA, 75 bp, Homo sapiens
tacctggcattgccttttgttgaggacttaaccaccaccatgtcgagcaaaagaacaaagaccaagaccaagaag

SEQ ID NO: 218993 - DNA, 76 bp, Homo sapiens
gcggagtctacgatgggaccgagatccacgaggcctcggcgtgaataagtctgatgacacagcagaacatcttctg

SEQ ID NO: 218994 - DNA, 100 bp, Homo sapiens
aggtctgatcatcaattgtctctctgggcggccacctatgagacttcatctgtgtggggagattagtaatttttaggtattaaagatacactcaaccaaa

SEQ ID NO: 218995 - DNA, 75 bp, Homo sapiens
agataacaaaagctgctcagagtctcaatgaacttggtggagatacactacgccttgacacacttatagaatggt

SEQ ID NO: 218996 - DNA, 75 bp, Homo sapiens
atgaacgaggagtacgagacgaggttcctgtgcaactcttcacaggttgactgttacagactcggacggagccac

SEQ ID NO: 218997 - DNA, 100 bp, Homo sapiens
ggcatcggcgccttcccggcggggctagcttgtcactttctgcaaaggtttccctcagggagcctcctgctgccaggcaccatgacagtgaggggggatg

SEQ ID NO: 218998 - DNA, 74 bp, Homo sapiens
tcacctctacctgggctcgcagaaggacgtcctaaacaagattttcagctgaactctcatctctcaacactggc

SEQ ID NO: 218999 - DNA, 51 bp, Homo sapiens
ttcatattggcgatcctgttgtacctctcgctgcttcaggaggacctgcag

SEQ ID NO: 219000 - DNA, 100 bp, Homo sapiens
gcccctgagccagagctccagcagccttgttagggcgtggcctgaggcttggataagtgggatggagtctctctgtcacccagactggaatgcagtggca

SEQ ID NO: 219001 - DNA, 100 bp, Homo sapiens
gacttacatggaggagacgtgtcgtcactatgtggcccatgtgaaggcagaggcaaggctggcagcaaaacgggctgcccgggcagaagcaagagatata

SEQ ID NO: 219002 - DNA, 87 bp, Homo sapiens
cacggttgtgttgcgtgtagcttccactttcataagtaagactttgaccccgacgcaggcttcagtgattgccgcggatcagaagcc

SEQ ID NO: 219003 - DNA, 87 bp, Homo sapiens
ccttcgggtcgggcgtctccgccggctactgccgcttcagttctcccggtgtggccacgagtcggtgatcggagggtatggttggca

SEQ ID NO: 219004 - DNA, 98 bp, Homo sapiens
ggctttgcctctgaacagcatctgacacagcctgctgttcatgtacaaggtcaggaacctttgactgcttccatgttggcatctgcccctcctcaaga

SEQ ID NO: 219005 - DNA, 100 bp, Homo sapiens
attcatcttgtggttggactgtcatcagtcatgaggattcactccttctccagttgcacagccacacccttcagctggccttaatgttgactttgaatct

SEQ ID NO: 219006 - DNA, 82 bp, Homo sapiens
atgcatctttatgtcagaaacacaaagcagcccaaccaaagggttaatggcacagatgcagattatgaatatgaagaaatca

SEQ ID NO: 219007 - DNA, 127 bp, Homo sapiens
acactgtggaataaaaatattgcctctgacattagggaactggcattcccctcctccactgtttgaaaagcaaagtacccacgtttgttcgaatgctggccccagagggagccctgaatatacacga

SEQ ID NO: 219008 - DNA, 100 bp, Homo sapiens
tttgagttcacactgatggtggtcggtagatgatgagctggagatcaaggcctactatgcaggccacgtgctgggggcagccatgttccagattaaagtg

SEQ ID NO: 219009 - DNA, 95 bp, Homo sapiens
ctccgcaccctgcccggcttcctcatcgtggccgagatcaacgtgctggccaaagcgctctatgacaatgtggccgagtccccggatgagctctc

SEQ ID NO: 219010 - DNA, 90 bp, Homo sapiens
tcactgtgcgggctgctgctccagagggcggaggtcatcatcctgaaccacccggggcagattagcgccggctactccccggtcatcgac

SEQ ID NO: 219011 - DNA, 75 bp, Homo sapiens
gcatgcgtgtgaacttcgggaaatcatgggaacaccagaatatttaggtgcatggaggactgcaacagaggagtg

SEQ ID NO: 219012 - DNA, 90 bp, Homo sapiens
tgcccagacggctcacctgtgcgggatggaacaaaagggctgttttgctgcagcttctgaagtgttaaagcacttgaaggaacgatttcc

SEQ ID NO: 219013 - DNA, 96 bp, Homo sapiens
actttgatgagaacactgctctggatgatgcagaagaggagtcctttaggaagggtgaaatagtggtgaaaaataacccaaatgaatctgtaactg

SEQ ID NO: 219014 - DNA, 100 bp, Homo sapiens
tagcacagattcctcctccccaggccttccctactcaacggtcaggaagtattaaggaagggccatgtgaaactttctgactttggtctttgcacaggac

SEQ ID NO: 219015 - DNA, 100 bp, Homo sapiens
cggcgctggagtactgcaagctcatcctgaggaatccctttgcccacgtccagctgaagccgacagtgaccaacgacaggtctgcccccctcctcagctg

SEQ ID NO: 219016 - DNA, 100 bp, Homo sapiens
aagaggatgatgtttttggtgaagtgaggatcaaggttcaaaagcctctgaaaacaacgaaaacaaaaaagaaacagatgaagtttccaacactaaatca

SEQ ID NO: 219017 - DNA, 74 bp, Homo sapiens
attgatgggaaacagataaaacttcagatatgggatacggaatacaaacagaagcttgcacgagtaacccaggt

SEQ ID NO: 219018 - DNA, 100 bp, Homo sapiens
tgaaaacgaagatgacgtgtatggaaactcatcaggacggaagcacaggggccactcagagtcgcccgagaaacttcagaagaaacacctacaacaggag

SEQ ID NO: 219019 - DNA, 90 bp, Homo sapiens
cgagagcgtcatcgcccccgactgtggagaagtgtccggggtagccccgttacaggagacgaaaccagacagagggtcaagtttacagat

SEQ ID NO: 219020 - DNA, 100 bp, Homo sapiens
ggaagaccgtgatgggagctgcagcacagtcgggggtgtaggttatgggggtaagaccatgaattatggcatttcttaaatgaagcgttcaagaagtgag

SEQ ID NO: 219021 - DNA, 90 bp, Homo sapiens
ccggcaatggcggcgctgacgagaggtaaggggcctggataccaagaagtgactgctcatctaatccataaagctatgttaacagattgg

SEQ ID NO: 219022 - DNA, 75 bp, Homo sapiens
tgtcttcggtggactccttcggcagtccacccaccgccgccgcctcccagatgaatgatttcggaatcaagaata

SEQ ID NO: 219023 - DNA, 90 bp, Homo sapiens
ggattggaactgtgtttgggagcctcatcattggttatgccaggtccacgctgcttttatgagctgtaacactcaccgcgaagatctgca

SEQ ID NO: 219024 - DNA, 75 bp, Homo sapiens
ccacctctgaagttgccaggcttcccaacattcttgtctgtggttcgagaacttgtcttggacaattgcaaatca

SEQ ID NO: 219025 - DNA, 75 bp, Homo sapiens
cagacatgcgccagcacgcctgggtcacctgtctgtgtgcccagtttgaagccgtcctgcagcatggcttgaaga

SEQ ID NO: 219026 - DNA, 100 bp, Homo sapiens
gggaaggatctgtcatctcggagcaaaacagatcttgactgcatttttgggaaaagacagagtaagaagactcccgagaatttctctgcaaagaatgtcc

SEQ ID NO: 219027 - DNA, 75 bp, Homo sapiens
ctggacaccaaccctgccatccgggagcagacggtcaagagtgtgtcctgcccagagctcttggaccagcattat

SEQ ID NO: 219028 - DNA, 82 bp, Homo sapiens
ggatttttttctattttccctacgaaaaacagatctttttaagaaatcttctctacatataccctcagagtcttaattttgc

SEQ ID NO: 219029 - DNA, 75 bp, Homo sapiens
acctgagtcaggacgtaaatggaaccctggtacatggactatatcgcacaacaggtgctagttttgagaaggccc

SEQ ID NO: 219030 - DNA, 80 bp, Homo sapiens
cgtcctaccggaaacctaggaaaagagttttcttgaagtacaactaaggacaggtcaccactaggcactaacatcgctga

SEQ ID NO: 219031 - DNA, 109 bp, Homo sapiens
ctccaggcatgccccgctacgagctggctttaatcctgaaagccatgcagcggggcccctttcctgggcgtctactggcggggcccccgccccggttcccgggcggcac

SEQ ID NO: 219032 - DNA, 100 bp, Homo sapiens
gctggtgttggtgcagctgtcccctgctcgcggccaccgcaccacaggccccaggatttgaggcttaagcaacttcttccggggaagagtgccagtgcag

SEQ ID NO: 219033 - DNA, 97 bp, Homo sapiens
tggggctgcgacgagcaagcagcgggtcctggacgaggaagagtatatcgagacacacctgccagggtttgtggagcaggctgaggctctgaaggcc

SEQ ID NO: 219034 - DNA, 118 bp, Homo sapiens
tctcgcgcgggtgtcgctgggctgtcggcctggaccttgcagccgcaatgtcacccacaaaagctgtatataatgccagacattggaatcatccagattcagaagaactgcctgggcc

SEQ ID NO: 219035 - DNA, 82 bp, Homo sapiens
ggcaccgaggcactcagaggaggaacttgctactaccagcaccatgccctaccaatatccagcactgaccccggagcagaag

SEQ ID NO: 219036 - DNA, 100 bp, Homo sapiens
ctgtggccgagttgctgttgccgggtgatagttggagcggagactatgagtgagcagtttgccaggtacattgaccaacagatccagggtggcctgattg

SEQ ID NO: 219037 - DNA, 75 bp, Homo sapiens
tataccctcatgagcatggtggccaacctcttgtatgagaaacggtaaatgtctgctctaagaagcagacaaccg

SEQ ID NO: 219038 - DNA, 83 bp, Homo sapiens
gcgcgtcgtggggcgagcggcaggcattttccctgaagatgagatcccagagaaggcctgcaggcgcctgcttgaagggaggc

SEQ ID NO: 219039 - DNA, 100 bp, Homo sapiens
accccggaagggcggacacctccacatcgccttttgccacctttccctttatttccggaggcaacgtgttggaccttccggagcttctcagaagacagag

SEQ ID NO: 219040 - DNA, 87 bp, Homo sapiens
ctaagctaaatcgagagaactttccagataattctatccagaccatgatcacttttgaccaaggaggaaggtggacgcacctgagga

SEQ ID NO: 219041 - DNA, 100 bp, Homo sapiens
catctgccctgcctacaagttggccaggaacaaaagcatacctaccttcccctagaggttgtaggtagtatggatgcacacccaagcagatactgtgcca

SEQ ID NO: 219042 - DNA, 75 bp, Homo sapiens
ggacagtccaatgtcaacattgcccagcaagtgaaaactctcccaccatgtcgcagaatggatacttcgaggatt

SEQ ID NO: 219043 - DNA, 82 bp, Homo sapiens
aaggcaaagaacaagagaagacctcagatgtgaagtccattaaagcccagaagaatcagtgcggtttctgtggcagagcgag

SEQ ID NO: 219044 - DNA, 82 bp, Homo sapiens
gttattgttcctgaggaacatctccagattgtctacaacctgttgtctctgcgcttcaactcacggatccgtgtgaagacct

SEQ ID NO: 219045 - DNA, 82 bp, Homo sapiens
gttatgaggattcaatgaggagacctgtatgaagtgccttcccctgtgcctggctcataggtcctctcatcgttactgaaga

SEQ ID NO: 219046 - DNA, 101 bp, Homo sapiens
aattgcaaaggtacttctttagaaaatctcatcatggaaatcacagcacctgattcccaaggcaagacaggtacttttacagcgggttgatgaactagaga

SEQ ID NO: 219047 - DNA, 49 bp, Homo sapiens
cagagttgtacaggaggaaaaccagctgagatctgtatctgtggacctg

SEQ ID NO: 219048 - DNA, 50 bp, Homo sapiens
aaagtgatgacctggatagtgaagatacagtttatgtaacttgatggaag

SEQ ID NO: 219049 - DNA, 83 bp, Homo sapiens
tgtagggtatggtccagctgtgccgcaccgaggcgagcaggagcagggaacaggcaaagcgaaggctggagctaggagaaagc

SEQ ID NO: 219050 - DNA, 75 bp, Homo sapiens
cagcgtcaacttcctcaagtcgcccaaagggctgaagaagatgcagagcagcctgaagctggtggactgtatcat

SEQ ID NO: 219051 - DNA, 100 bp, Homo sapiens
attttgcaaaagtaaaattggcaagacatatccttacaggcagagagaactcctctttcctaaaatggagtcgagtaaaaagatggactctcctggcgcg

SEQ ID NO: 219052 - DNA, 82 bp, Homo sapiens
ctgctgatgagggaggtgcccctgcgttgtaccatccgcctgtgggacacctaccagattcagagcattcttcactccagaa

SEQ ID NO: 219053 - DNA, 100 bp, Homo sapiens
ggaaccttggtggaggggtggtgaccatcgaaaggagcaagagcaagatcaccgtgacatccgaggaaccattaaagagatcctggggactgcccagtca

SEQ ID NO: 219054 - DNA, 146 bp, Homo sapiens
cctggataaaggcatcatggcagatccaaccgtcaatgtccctctgctgggaacagtgcctcacaaggcatcaggggaacacttaagaatctgtcctcaggaatatacatgctgcaccacagaaatggaagacaagttaagccaac

SEQ ID NO: 219055 - DNA, 82 bp, Homo sapiens
acttgccccaggacacctttatccagtttcctggatggaccaagcagcccctgtcaaagggaacaggaagcagtccacggag

SEQ ID NO: 219056 - DNA, 100 bp, Homo sapiens
tgtccttattatcggaccccgaggatcaggaaaaactatgggaagcagctcgagagtgtcgtagaaagaagaaagaatatgtgaaatgtttagaaaacag

SEQ ID NO: 219057 - DNA, 100 bp, Homo sapiens
tctgcatcctcaccagcatttggtgtggtcagtattttggattttcaccattctaatagtcatgtctcacaagagaacagcgagtacggatcttaagcaa

SEQ ID NO: 219058 - DNA, 82 bp, Homo sapiens
aaaccgccccagcgatggaagaggatcaggagctggagaggcaactatggtcctgagctccgcacacttctggttgggatta

SEQ ID NO: 219059 - DNA, 110 bp, Homo sapiens
gtgcacatccaggctggtcagtgtggcaaccagatcggtgccaagattcatgatgttgctatcaaaagttgagaaattgtcagaagaaatcatggagataatgcaaaatt

SEQ ID NO: 219060 - DNA, 97 bp, Homo sapiens
acggtctcctcgaaaaaacaaacagttcattgcagcacttttccttgttgacaatcaccacgaggtgtacctctggcaaggctggtggcccatcgag

SEQ ID NO: 219061 - DNA, 75 bp, Homo sapiens
ttggggccaaaggaatccagaatgaggaacttgaggcaagtcaccagcccctgatcatttcgcctaaaagagcaa

SEQ ID NO: 219062 - DNA, 73 bp, Homo sapiens
ctatggtggcaacagatgtatgctcatcagtattatatgcagtaacctttccaaagtgaaactgatgagattt

SEQ ID NO: 219063 - DNA, 101 bp, Homo sapiens
acttccttaaacttgcaaataatggcactgttctcagtttaaaattggtggtgaatggtggacatggatcgattataaccgcttccaggagctcatccagg

SEQ ID NO: 219064 - DNA, 83 bp, Homo sapiens
aggacgtggaatcataagcgaaacagcacactgtttgaataaagagcgagaaatccctttggaccaggtggacatagacaaag

SEQ ID NO: 219065 - DNA, 100 bp, Homo sapiens
cggagaccgagggggagccccgcgcgcggcgtcgggacagtatgatttggtgaaatgcctggctcctattcgagaccccaagaccgagcaggatggacat

SEQ ID NO: 219066 - DNA, 83 bp, Homo sapiens
ccaagaacaatagcttgccctcataaagttttcccatcatatgattcccggtcctcctggtccccacacaactggcatccctc

SEQ ID NO: 219067 - DNA, 100 bp, Homo sapiens
gtcaaagaaaaggagttctgcccaaacatctcaacttacatttaaaggtgagccgttctccaaccctttggcccccgatggccacgatgtggatgatcct

SEQ ID NO: 219068 - DNA, 100 bp, Homo sapiens
caaacagcccccgaaaacgctacgtgagctgggccctgggccagaggcagaaaacggacggaagaaaaggtctggccgaacctatgagaaccccaaagac

SEQ ID NO: 219069 - DNA, 97 bp, Homo sapiens
gggcacttagcacagcgcctggcgcaaggagaaactggctcttcgacagcagttgaatgaagcgaagcagcaactcctgcagcaggcagagtattgt

SEQ ID NO: 219070 - DNA, 89 bp, Homo sapiens
gcccctcctcgccaagagagctcctcggatttcaccgcgcggcggctctcaggaccatggccaacctggagcgcaccttcatcgccatc

SEQ ID NO: 219071 - DNA, 100 bp, Homo sapiens
cttggaaagtcacccaaagccgccccaagtgcagattgttctctggggccggactgagaaatgcctgaaggagacgacggaggagatccggcagatgggc

SEQ ID NO: 219072 - DNA, 99 bp, Homo sapiens
agggcgacggccccacctccggccactgggacggcggcgcggagaaggcaggtgccagagtgggtcatcgctccttgatgagatactacaaacagcgat

SEQ ID NO: 219073 - DNA, 98 bp, Homo sapiens
gtatcaagtaatggtgcaaagcctgaagaggatcgtttaaaaattgatgtaattgactggttggtatttgacccagcgcagagggcagaagcactgaa

SEQ ID NO: 219074 - DNA, 75 bp, Homo sapiens
aactaatgaaagcctattgtgaacgacagttcttctcaccactaaatccaatacgagttcatattgatattggag

SEQ ID NO: 219075 - DNA, 80 bp, Homo sapiens
tccatccctgatgcttggagaagctgaggacacacaggttcagaatgaccgaagaagcatgccgaacacggagtcagaaa

SEQ ID NO: 219076 - DNA, 73 bp, Homo sapiens
ggaggatttgctgatctcatggacaattccaagctcgagtgtctcggcaaactctgttggcacttgagaaaga

SEQ ID NO: 219077 - DNA, 95 bp, Homo sapiens
tatttgagtcatttccttcgtacccacagtgcttcatgagaggcgtcgattagcaaggtaaaagtaacagaaccatggctcagtttccaacacct

SEQ ID NO: 219078 - DNA, 75 bp, Homo sapiens
cacatagacatttacgcggatgtcggcgaagagttcaaccagccggcagagcacttctgcaggcaggaggacagg

SEQ ID NO: 219079 - DNA, 75 bp, Homo sapiens
cagcgtccacacacaaatccacacgccctgtgaagaaggtctccactatcagttgagggatttgcagttgataaa

SEQ ID NO: 219080 - DNA, 97 bp, Homo sapiens
gcgtggtggagttttcctgtggaggaagagcaagcaggccctgagggactataagaaggttcagatccagctggagaatctggagagcagtgtgcgg

SEQ ID NO: 219081 - DNA, 96 bp, Homo sapiens
cccgcagcaagcctgtgtgcattcataagaattcggaatgtctgaaagagcagcagaaacgctactttccagttcgttactatcttggaaggagtg

SEQ ID NO: 219082 - DNA, 68 bp, Homo sapiens
cggctttcaaacagcggcaaagccggctagagcagatcaatggctacacaggaccagggacagtgcgc

SEQ ID NO: 219083 - DNA, 97 bp, Homo sapiens
cgaaactcctgcacctgtatatagggccaagtcaattctggagacctgggtgtgggtcaagcaaccagggctcctcgcacctaccccagcaactcaa

SEQ ID NO: 219084 - DNA, 116 bp, Homo sapiens
ccagatgatgcggtggtgggggacctgccggcacgcgactccccccgggcccaaaggtggcccagttgaaatccttcccttcctctaccttggaagtgcctaccatgcatccaagt

SEQ ID NO: 219085 - DNA, 100 bp, Homo sapiens
cttgggcccagtttatggcttccagtggaggcattttggggcagaatacagagatatggaatcaggtatcctgtggtctgaggccatcttcctcgaggca

SEQ ID NO: 219086 - DNA, 74 bp, Homo sapiens
catcctccttgaagtatttggctgaggagttttcaatcccaccgttggacataccagatggtcgaagagctcca

SEQ ID NO: 219087 - DNA, 90 bp, Homo sapiens
tagagtggctcacttgcatgtatttggaacaaaaaaaggagatgcctggcagccccgctctctgcaagccctgaggatgatgacaggaag

SEQ ID NO: 219088 - DNA, 75 bp, Homo sapiens
tactaccatgccaatgcagctgtgaacgatcagagaggtctgcggggtttccgagaggctcgccgggatttctgg

SEQ ID NO: 219089 - DNA, 75 bp, Homo sapiens
ttaaggattccaagtaactcttatttggattgtggataatatgcctgtaacgtggtgttacgatgttgaagatgg

SEQ ID NO: 219090 - DNA, 90 bp, Homo sapiens
cggatttgtggcaagaagcatgctggattgtaatcagggggattttggcaattgcttggagcatggcagatcctgaattgttactgagct

SEQ ID NO: 219091 - DNA, 73 bp, Homo sapiens
gattttttaactgaagatagtgcctttcagccctaccagtgaccaaagacttgaccactcaaagtccagctcc

SEQ ID NO: 219092 - DNA, 75 bp, Homo sapiens
ccagctattgctgcagcatttgccaaggagacatccctcttagtatatgaaaatgatgatcagctcctgtgggac

SEQ ID NO: 219093 - DNA, 100 bp, Homo sapiens
aggcgcctcgggtccccgcaccacctcctgctgccttcccgtcgccgctcccgaagcttttccaggagcatccccttagtgcaggtgctgcggactacgg

SEQ ID NO: 219094 - DNA, 98 bp, Homo sapiens
ggtgaggcaggctcgcctcctccagctgttgttgctgctggtggactataatgcgagtgcctggctgaccaagaatatggacccgctgaatgacaacg

SEQ ID NO: 219095 - DNA, 75 bp, Homo sapiens
acttccaagaggtggctcagaaattccaaggtgtttggagtagatgacaatcaggattataataggcctgttatc

SEQ ID NO: 219096 - DNA, 82 bp, Homo sapiens
ttgcaggccgggcagtgcggcaaccaaatcggcgccaaggatattagaaatggctactccccagtcaattttcatctttgca

SEQ ID NO: 219097 - DNA, 76 bp, Homo sapiens
tagaagacatgtggtgtatataaagtttgtgatcgttggcggacattttgcgccacccaagactgtcaaaccccct

SEQ ID NO: 219098 - DNA, 103 bp, Homo sapiens
attagaaaggagctgcttcccaataaggaaacacctcaaggaataggttctcctagtgtctatcatgcagttatcgtcatctttttggagttttttgcttggg

SEQ ID NO: 219099 - DNA, 50 bp, Homo sapiens
gaagaagctggaggccggcaaagccaagggtgaggcgctcaggcaagttc

SEQ ID NO: 219100 - DNA, 74 bp, Homo sapiens
caagtgtcacggcatacaagcaggaatctagagctttggctgaaattgccaaagccgaactggatgatacaccc

SEQ ID NO: 219101 - DNA, 100 bp, Homo sapiens
atgaagatggcacatggcccaggcagaccttgcagtcaaatgcaggcctgagtgttccttccagcatgtcggagggggagtcccagacagtacttagcag

SEQ ID NO: 219102 - DNA, 82 bp, Homo sapiens
gcgggtgctcatcctggacaattcacctgcctcctatgtcttccatccagacaatgctgttccctacttcagcaaagcgtgg

SEQ ID NO: 219103 - DNA, 75 bp, Homo sapiens
ggagagagagcttgttggtctgaggagatgaagaaggcacagagatagatactctacagtttcgtctccaggtca

SEQ ID NO: 219104 - DNA, 50 bp, Homo sapiens
aggagcagggcctgactgcgcagctctgggtgaaccaggaggatgaggtg

SEQ ID NO: 219105 - DNA, 95 bp, Homo sapiens
cctcatacagatcctgcagctcatggccaacagttcatggacctgattgagcaggtggagaagcagacctctgtcgccgacctgctggcctcctt

SEQ ID NO: 219106 - DNA, 101 bp, Homo sapiens
ttggtgcccagggagaaccccttggatatcgccaggatgagacaacattttgctctgtcacccaagctgaactgaactgggctccagaaatcctcccacct

SEQ ID NO: 219107 - DNA, 137 bp, Homo sapiens
gcaaacggaggcgtgaggaggacgccaggtggacacgcccatccttggacttcctgaaaatgacccagattacctaaaacctcgggcagaagaggagaggaggatagcagcagaagagaagaagaagcaggatgaac

SEQ ID NO: 219108 - DNA, 50 bp, Homo sapiens
agaaggtctctggagacatcttcagcagtggagttcacagggcccccaca

SEQ ID NO: 219109 - DNA, 150 bp, Homo sapiens
ggcagccccggggcggcggccgaggctacagagccggcggcaggggatggcaagatagcggcgcgggagcgtaccgcaatgaatcgctccctggctaatgtgattcttggaggctatggcaccacttcaacagctggtggaaaacccatg

SEQ ID NO: 219110 - DNA, 126 bp, Homo sapiens
gcagggacaggagtactccacagaggataaatttcaacctccggggccacaatagcgaggactttgtgttttatgccccacgtctgagaatcaacaagcggatcctgcagctctgcatgggcaacc

SEQ ID NO: 219111 - DNA, 100 bp, Homo sapiens
ccagattgtgtacttaaggtagttgggttggctttctgccacctcagcgagcagtgctgcgaatacatctctgaaatgcttctgcgtaacaagagcgtgc

SEQ ID NO: 219112 - DNA, 82 bp, Homo sapiens
gggcatgccaagaagatgagaccgggggaggcgacgctaagttgctgatcgtggcgacgagccaaactcaggctgtaccttg

SEQ ID NO: 219113 - DNA, 106 bp, Homo sapiens
gggtgaagagacaagaaaagataaaacaaaggctcttacccactttctgaagggtataactccaccagggaatgctccgactgtcacttcaatgagcagcatcaac

SEQ ID NO: 219114 - DNA, 75 bp, Homo sapiens
aaagcaaaggagtcagggatggctcttcctcagtaagcactatcctttgtactccctcaacgtggcctccatgtg

SEQ ID NO: 219115 - DNA, 82 bp, Homo sapiens
cctggttcaacgaggccattgacttcatagaaaatgtggtgacctggaagaagaactcaagaatgttactaacaatctgaaa

SEQ ID NO: 219116 - DNA, 74 bp, Homo sapiens
gtatgctgctgttagctggagaacatgctcttggcacaccagagcacttagtgacctttgaggatgtggctgtg

SEQ ID NO: 219117 - DNA, 82 bp, Homo sapiens
aatatctgtcttcggtggactccttcggcagtccacccaccgccgccgcctcccagacggagttttgctcttgttgcccagg

SEQ ID NO: 219118 - DNA, 97 bp, Homo sapiens
gcacagtggagaaaccgcctcgaaaacggagaagcaggttctgtggacaatcacaatgggaatccaaggagggtctgtcctgttcgggctgctgctc

SEQ ID NO: 219119 - DNA, 100 bp, Homo sapiens
gcaagtcctgacagattcagcaacacttatggggacaccacacacaccctggtggagaagatgaactacatcggccaattcttgcctggatatgaggccc

SEQ ID NO: 219120 - DNA, 100 bp, Homo sapiens
aaggagccctgccgaggagctgaaggccttcagagtccttggggtgattgacaaggtacccattcctggcccagtgggtaacaagagaatggttcatttt

SEQ ID NO: 219121 - DNA, 82 bp, Homo sapiens
aggagctagctgaaataacccttgatcctcctcctaattgcagcttaaagcttttcaagccaggccaagaagctgtgaagta

SEQ ID NO: 219122 - DNA, 75 bp, Homo sapiens
aaacgaaaactgtacagattgagccctactttttattggactccacagtgcttaccccagagtgaagagaagggc

SEQ ID NO: 219123 - DNA, 110 bp, Homo sapiens
ctgcaggatgggggactccaaagtgaaagtggcggtgcggatacgacccatgaaccggcgagtgttgcctatgattgctccatggcaaagaagagaacagctgaagatca

SEQ ID NO: 219124 - DNA, 100 bp, Homo sapiens
cagagccatggatcatggagccaagcattccagtaggtacctgtgcagaggtgtggcgaaatcttgtttgagaaccccgatcagaatgccaaatgtgttt

SEQ ID NO: 219125 - DNA, 100 bp, Homo sapiens
taaatccaaccagccaaaatcactcgaagatttaatttttgagtctttaccagagaatgcatcacacaagttagaggcagactgccagattcacttacag

SEQ ID NO: 219126 - DNA, 97 bp, Homo sapiens
tctcctgtcccacccatatttggctgtcgtctcccacccccagaaggagctcaggtgaccaagaatatggcccaggtgaccaaagccctggacaagg

SEQ ID NO: 219127 - DNA, 100 bp, Homo sapiens
tgggagatggataccaaagaaaaattggagcaggctgccattgtcaaagagaagggaaccgtatacttcaaggtttgaattcctcagcaacatctacagc

SEQ ID NO: 219128 - DNA, 96 bp, Homo sapiens
gcctccgccgccgccaccgccgcctccgccgctgcctcaggagcggaacaacgtcggcgagcggggctgaccaactgactgaagagcagattgcag

SEQ ID NO: 219129 - DNA, 98 bp, Homo sapiens
tgctggtcatctggaaccaggcctcgcagtgtgtggaccacatcttcctggggaaccaggcgcagcccagcctcgaaatgcagaacgacgccggcgag

SEQ ID NO: 219130 - DNA, 100 bp, Homo sapiens
gggccaggaaaggaagcattcagggaatttaggtgtagccagaagaaaatcagtttggaaattttagcattcaggtgccaggaatgcagatgggacagcc

SEQ ID NO: 219131 - DNA, 74 bp, Homo sapiens
tcccagctgcgcaaagcttgcgaggtggcgttaggctggagcattggatttgctaaaggagcttaagaatattc

SEQ ID NO: 219132 - DNA, 100 bp, Homo sapiens
tgggtctacaccgaccagccgcacgccgaccggcgccgggagatcctgggaatcaaacattttaagtccagtgcaggatggaacaaagaaacctcagatt

SEQ ID NO: 219133 - DNA, 83 bp, Homo sapiens
ctggtttacccctccttgtggcttataaagaagatgaaatccctgttcttaaatacgaattggagcaatgttggcttatacac

SEQ ID NO: 219134 - DNA, 75 bp, Homo sapiens
atcccttgctcccatccctgcagcatgaacaagcttccagctgatcttaccaagatgcatctcacagaaaaccct

SEQ ID NO: 219135 - DNA, 51 bp, Homo sapiens
cctgaaagtggaggctgcgaaaataggatgatagtgatcttcctaaaacat

SEQ ID NO: 219136 - DNA, 81 bp, Homo sapiens
gagcgacaagccgctggcagccgcggatctcaccgccgctcaggatctgtgccatcattggcgggaccttcaccgtcgccg

SEQ ID NO: 219137 - DNA, 100 bp, Homo sapiens
catttacagaaagagtcaacagcagtggcaacagcctctgaagagccaatccattcaggatgggaaaccacgcaggcaaacgagaattaaatgccgagaa

SEQ ID NO: 219138 - DNA, 82 bp, Homo sapiens
cacggccagttttgaaatcgacacacaaagaatagagttgagcctgtgggacacttcgggacatggatttgattgacatact

SEQ ID NO: 219139 - DNA, 95 bp, Homo sapiens
ttccctgtgtgcctgcagtttttcaccctcacgctgatgaacttgtacttcacgcagatgcctgtgaggagccaccaacatttgaagctatggag

SEQ ID NO: 219140 - DNA, 75 bp, Homo sapiens
agaaagttcgagaagaatatgaagaaatattgaacacaaaacttgcaggcaaaaatctccagccctacagagact

SEQ ID NO: 219141 - DNA, 75 bp, Homo sapiens
ctaccttgtatgcctcaatttgctggatttaagcactgctgcactttatgagtgacaaccatgagtggaaaaaac

SEQ ID NO: 219142 - DNA, 100 bp, Homo sapiens
agtggatccttgaatgttgaagatgtccttaccagctttgacaatacaggaaatgtttgaagagtttaaagaacgctgtactcagtgtgctgctgtctca

SEQ ID NO: 219143 - DNA, 75 bp, Homo sapiens
aacaacggattgagctatatcagtgtggcttcctgttgtggtgcatggccccgagcccttctaatggggctgaac

SEQ ID NO: 219144 - DNA, 96 bp, Homo sapiens
ttgataaaaagagatgtggggggattctcgacctgctaacagaactggaccttttcggaaactttgagggaaattttgagtcactggaccttgcgg

SEQ ID NO: 219145 - DNA, 100 bp, Homo sapiens
tgggtagagatgaacgagacttttctcagatgttggatatttgcttggaaaaacgtgtgggtacgaccttgtctgaccagtgcacaggacttcagggctt

SEQ ID NO: 219146 - DNA, 75 bp, Homo sapiens
ttctttaagggctacgggaagatcctggaggtggatctgaagaacggacaatgcagatcttcgtgaagactctga

SEQ ID NO: 219147 - DNA, 100 bp, Homo sapiens
actggcgcgtccaggtggccgtgaagcacctgcacatccacactccgctgctcgacagattgctggactcgctgaagagagactacgcaggaaagcccca

SEQ ID NO: 219148 - DNA, 136 bp, Homo sapiens
ttctctgctgtctccttctcttcctcagggctcccgtgtctgctcgccctccgacgctgctcaggacctcagcagccatgtcgaagccccatagtgaagccgggactgccttcattcagacccagcagctgcacgc

SEQ ID NO: 219149 - DNA, 75 bp, Homo sapiens
ctggcaagcacctcgggatcccattccttcacagggaccctagccagcgccctcacaaagccaatgctgaggaga

SEQ ID NO: 219150 - DNA, 50 bp, Homo sapiens
gcggcggctgcggcccaatataggcaattgttctcttaactgaattaatt

SEQ ID NO: 219151 - DNA, 88 bp, Homo sapiens
cgtccttggattacaggagatgagagtattgtaggccttatgaaggacattgtaggagaagtgccagaaagcccggaagcaaggaagg

SEQ ID NO: 219152 - DNA, 75 bp, Homo sapiens
gaattatccaacaagaaaaagacctgtggctattaagataggtgcttttgaagatgatgatatcacgcacgttga

SEQ ID NO: 219153 - DNA, 75 bp, Homo sapiens
gttttatactgcttccatatttacaaagcttgaacccattgacttgccacgagtaattacttcaggaagactcct

SEQ ID NO: 219154 - DNA, 100 bp, Homo sapiens
gtcacctattccaaccgggagcagaccaggcagtctcggtgactctgaccacacccagctcaggactggattctgcccttcacttagcacctgcctcagc

SEQ ID NO: 219155 - DNA, 74 bp, Homo sapiens
tcccacttcaaacattcgtctcggaaaccccgcctcttacagtcacgaggtgcccgcccctgcatccctaaaag

SEQ ID NO: 219156 - DNA, 100 bp, Homo sapiens
gtgaaattgaggaatcccaattgaagtttttgagctctttccttcggggaacaagccgggcccttgctggccgggccccagctcacatgccaatggagac

SEQ ID NO: 219157 - DNA, 75 bp, Homo sapiens
ctatgctgggtccagagcattgtccagactgattcgggaactggagcctctcctctgtcacagtgacaatccatc

SEQ ID NO: 219158 - DNA, 99 bp, Homo sapiens
agccccaaactggaaagaagatgctaattaaagtgaagtatgggattgtgctggatgcgggttcttctcacacaagtttatacatctataagtggccag

SEQ ID NO: 219159 - DNA, 74 bp, Homo sapiens
gacgtatcatggcgtgtttgtcaacattcagattgagaggatccagaatccagatctctggaatagctaccagg

SEQ ID NO: 219160 - DNA, 75 bp, Homo sapiens
cttagaccacccgacagaccagaaactcatcccagagttcattaagaagctctattaccaggttttaaacttcgc

SEQ ID NO: 219161 - DNA, 74 bp, Homo sapiens
acgggcccctggagtggagctacaccctccccatcacctgccagctgtcactaaacctgctcctccaaagccag

SEQ ID NO: 219162 - DNA, 100 bp, Homo sapiens
aacagagattcgggttctgccgcttatcttcaggagcgaagagctgcttctgtatcttaagtggagatggctatttcgaaaacagcccactgatgtccca

SEQ ID NO: 219163 - DNA, 100 bp, Homo sapiens
ggatcctcttccaaaaccacaaacttgcctacgtcagtaacagccaccaaggcataatcaccagcaacacccgggacaataatacgggggccacctaccc

SEQ ID NO: 219164 - DNA, 83 bp, Homo sapiens
aaaaaaaggagatgcctggcagccccgctctctgcaatgtgaaggagctcttagattctgacagtgataaaccctgcaaggaa

SEQ ID NO: 219165 - DNA, 51 bp, Homo sapiens
cgtcaatcagagcgtcctgtgcggctttgtccagggatctgaaaccacttt

SEQ ID NO: 219166 - DNA, 100 bp, Homo sapiens
aagaaacctagcaacaaaaagaaagctgcgttaatgtttgcaaatgcagaggaagaatttttctatgaggtcatacttacctggttgcttgcgcatctag

SEQ ID NO: 219167 - DNA, 50 bp, Homo sapiens
tacgttattatcaacacaggaccagcacttttccagccattaactccagg

SEQ ID NO: 219168 - DNA, 90 bp, Homo sapiens
gagtttaaacagccaaaacagttcattcatattcagcctctacattaatcatactcctccaccactgtccaagagtaaggagagagaaat

SEQ ID NO: 219169 - DNA, 101 bp, Homo sapiens
cgcagatcagaggtagtcggacctttcccgctggcgcgcagcctcagctagatgttcaagacagagttccttcatattcacaaggagcaagaccaaaagaa

SEQ ID NO: 219170 - DNA, 100 bp, Homo sapiens
aagatggcgacggcgaccatagctctcgccagcactccttgcccgaggacagagatggcgagcgcccggattggggatgagtatgcggaggacagctctg

SEQ ID NO: 219171 - DNA, 100 bp, Homo sapiens
caagctgtcatcacaaaagagttgattgaaattatctctggtgctgcagctctaacttgggaatcagtgaaacgtacaaccaggaaagagcagactgcgg

SEQ ID NO: 219172 - DNA, 100 bp, Homo sapiens
gcgcactgcgggcgcatccctgccccggcgccgtccgtgcccgcgggacctgacagccgggtcagaggctttacaggaagtatggtgctggcatctgctt

SEQ ID NO: 219173 - DNA, 98 bp, Homo sapiens
tgggaaagtcagtattttatatagcaatgtaaacaggaacatcgataagtagtgtaaaaacttgcacaatgaaatccgaagccaaggatggagaggag

SEQ ID NO: 219174 - DNA, 90 bp, Homo sapiens
ttggccccgtccttacctcacaggaggcaagtgaggcctatctggttggcctttttgaagacaccaacctgtgtgctatccatgccaaac

SEQ ID NO: 219175 - DNA, 100 bp, Homo sapiens
accgcagatgttgtcaaggtggcctaccaggaggccaggggtgtcgccatggtgacagtcatggcgtctctgcgaaggcccaagcgcatcatcatccgtg

SEQ ID NO: 219176 - DNA, 100 bp, Homo sapiens
atgcctgcagagctgtggcttaccagatcacaaaatttgtccaggatagacatagagctagaagaaacagacttcgtaaagatcaacttaagaaacttcc

SEQ ID NO: 219177 - DNA, 90 bp, Homo sapiens
gaatatgccattcgactgaacaaggagggtgaacagtggctcaagatgagaagcgtattgagacaaagaattctgaaaccgaaagatgtg

SEQ ID NO: 219178 - DNA, 75 bp, Homo sapiens
gcaaggctgagggacgagaacgaggttgctgcagcaactggtcacacagtagtgttggtagaccagacagaggac

SEQ ID NO: 219179 - DNA, 82 bp, Homo sapiens
agaaaggcgggcccgggaacagacaatgcagatcttcgtgaagactctgactggtaagaccatcaccctcgaggttgagccc

SEQ ID NO: 219180 - DNA, 100 bp, Homo sapiens
cagaagttctcgaatcattctttgtacagaaattgaaaggcttcaaagctagcagggaaggggatgctgaggaaagcctgggatcacccagtgatccaag

SEQ ID NO: 219181 - DNA, 73 bp, Homo sapiens
gggaaacgatccgctcccaaaacgtgtgtctaaagtgagcacaacttggaagaagatcctagaagatgataag

SEQ ID NO: 219182 - DNA, 96 bp, Homo sapiens
cgctgcctgcctgcctggcatctctctctcccggtacatgtcccagagcaagcacacggaggcccgggagctcatgtactcgggagccctgctctt

SEQ ID NO: 219183 - DNA, 80 bp, Homo sapiens
ttcttcgtagcacctttgctgtattcacacaccttcctcagtccagagcgtgagtccattcacatcctgagtgttgatga

SEQ ID NO: 219184 - DNA, 100 bp, Homo sapiens
cgccgctgcaccttcaccgcgtacccgggacccgcccgcccgcgggagggtggtaataggagttcttcacgtgaacaggagctggcccttaggtcttatg

SEQ ID NO: 219185 - DNA, 100 bp, Homo sapiens
cttcgctggccatttaggagctctgctcaaagccagacggcacccaggcatgtggaatatgctcatagtggcgatgtgcttggcccttctgggctgcctg

SEQ ID NO: 219186 - DNA, 100 bp, Homo sapiens
cagtaactcctccataaaaacaagtgtgtgcatctggctgttagaagaattcatgctcatccgggttttaaaatcaaagatgggaaaatcggagaaaatt

SEQ ID NO: 219187 - DNA, 100 bp, Homo sapiens
acggcagaggaagagtgagcgccaggttcggtggctcacccagcaaagcagccaccgtgagatcaccctaaatgcgatggccaggtattactgacacaag

SEQ ID NO: 219188 - DNA, 90 bp, Homo sapiens
ggctgcctgcggatgaaggaccagtgtgacaagtgccgggagatcttgtctgtgggtgtctcctgcacctgcgctggttcctgcaagtgc

SEQ ID NO: 219189 - DNA, 100 bp, Homo sapiens
gatgaccagcggcaacctcatcgccttcatcatctacgagtttgtcctgggagattgtatggagatttcgatggggtcctctatcatatttcaaatccta

SEQ ID NO: 219190 - DNA, 83 bp, Homo sapiens
ctccttttcgtttccggaaacatgccgatacggaagatgtgtgcattgtagagagattgttctccagcagcctagtggccatc

SEQ ID NO: 219191 - DNA, 89 bp, Homo sapiens
cttgctttctgtcgtggcaatgttttgaaactggcaaaatcaggttggcattgcaaatggtatggtcaccgaacaggctacaaagaatg

SEQ ID NO: 219192 - DNA, 75 bp, Homo sapiens
ttttgaattgcccccctgggaagtttcggcaacgcggtaaaaatattgcttcggtgggtgacgcggtacagctgc

SEQ ID NO: 219193 - DNA, 100 bp, Homo sapiens
cgattattagctttagtgaaatgggctaataatgctggcaaagtggaaaaatgtgcggttacggcctccgctgccacagggccatcatcaccatctgccg

SEQ ID NO: 219194 - DNA, 82 bp, Homo sapiens
aaggaattcccggcccctcagggccacggctttagcggtgtcttttgcgatgagtaacgaaagaggctttgaaaatgtagaa

SEQ ID NO: 219195 - DNA, 100 bp, Homo sapiens
aagaggagccagttaccatgactcatccagcatgctacaagtgaaaactgatgagaaactgaatgtgtctgatgagaatacagcaagttgccctttgagc

SEQ ID NO: 219196 - DNA, 100 bp, Homo sapiens
ggagaagtccagggcgacaacaagactcagcccaagtctccatgtccatcacctgggacactgtctgaggaactctgtgaggagagccttttccacagag

SEQ ID NO: 219197 - DNA, 74 bp, Homo sapiens
gcgtgcccgccggggggctagtggccacgctgcagagcctcgggcagctcagttctggcaccaaaccaaatccc

SEQ ID NO: 219198 - DNA, 87 bp, Homo sapiens
gcgaagtcgcagcgccagacccaaggcccccgagtgagcgcgggcgccgagaggctgggaggcggcagaatgcagccagaggagggc

SEQ ID NO: 219199 - DNA, 80 bp, Homo sapiens
agcaagagcagcggcgcagaaaggtggaggccgggaggacgaagtgtactaatggtcacttgatgtgcgctggctgtttt

SEQ ID NO: 219200 - DNA, 50 bp, Homo sapiens
aattgaagagacgttaaaatacttccgataaaagaatcagagtgtctcaa

SEQ ID NO: 219201 - DNA, 96 bp, Homo sapiens
atgtggagacgctcctagaggttttagggtggcaaccaactatatctgaggaccagagccattttggggcaccagagcttgtgacctctccatctc

SEQ ID NO: 219202 - DNA, 83 bp, Homo sapiens
gcagccgatccagcctgcggagcctgtggggcagagaagcagggccctgagcggaagaggattaagaaggagcctgtcacccg

SEQ ID NO: 219203 - DNA, 100 bp, Homo sapiens
tcattgtcatcgtggggcatgtggcaaaacacacagctgaggtcctaatcaaacaggaaattcaaaggaagagtggttatgccattcaggctgatgaaga

SEQ ID NO: 219204 - DNA, 75 bp, Homo sapiens
aagtaaagaagaagaaaacttcagtgaaacaagaatgggatgttggtagtcatatcactggcggagacatttatg

SEQ ID NO: 219205 - DNA, 75 bp, Homo sapiens
gtgaaacttgtccgtgccaaatttcctgaacacaccattatgattttgagaagagggggaaaaaggaagtttgtc

SEQ ID NO: 219206 - DNA, 75 bp, Homo sapiens
agaagcgagtccccaatgcctacgacaagacagccttggctttggagacacgatgaggcgagtggtacgacagag

SEQ ID NO: 219207 - DNA, 90 bp, Homo sapiens
ggcatggactcggagattggctgcctcatccgcttctatgcaggagagtgcgtagaagggctgcgggaaaatgactatctgctgattcat

SEQ ID NO: 219208 - DNA, 101 bp, Homo sapiens
caagaaacagcaagcaaatcatttggttttggcaggtttaccaaagatgcaggtcattaggaactattctggaacaccacccccagctctgcatgaaggac

SEQ ID NO: 219209 - DNA, 97 bp, Homo sapiens
tcacttggaaacagaatcacgccttgtgaagagatcatccctaagcaggagagaagctactaaagaccactaaggcttttcttcctacgatgctgga

SEQ ID NO: 219210 - DNA, 100 bp, Homo sapiens
aggccacccggccgtcagcagcatgcaggtgaatggataccacgcatcagggaccccagcgcaccctccagagactgcccacatgagtgtccgaaaatcc

SEQ ID NO: 219211 - DNA, 101 bp, Homo sapiens
tgattaagcagttttacagtcttttgaaaattccttgacatactccaagaataaggtaggataacataaaggtggtaactctagaaaacttaacgtggaca

SEQ ID NO: 219212 - DNA, 90 bp, Homo sapiens
aaccctgaaggacagtgacttattatatatgattctataacagactcttccagaaatgatatgaagaggaaatttgccctgacaatggaa

SEQ ID NO: 219213 - DNA, 74 bp, Homo sapiens
gaagagctcgaggctttgaggagttctagtctggggtcaagaacactggcagcggaggaggagaaagagatgga

SEQ ID NO: 219214 - DNA, 96 bp, Homo sapiens
ggatcgtgaccgagaccgtgaccgagagcgtgaccgagagcgcgaatatcgtcatcgttagaagttacagaatgtctgaaggggacagtgtgggag

SEQ ID NO: 219215 - DNA, 50 bp, Homo sapiens
atttaaccgctctctgcctcccagttctttggccaataaccacataaaag

SEQ ID NO: 219216 - DNA, 90 bp, Homo sapiens
gcaagaagaaggtctggttagaccccaatgagaccaatgaaatcgccaatgccaactcccgaaacatcgtgggaatcggccagtgcctgc

SEQ ID NO: 219217 - DNA, 116 bp, Homo sapiens
gtgaatcactgcatctgactatggcaaggatctctgtcactgagctatactgacttctgttgaaaccattcaaagctaaagacatggaccttcagcagtgtaagaagatattgtac

SEQ ID NO: 219218 - DNA, 75 bp, Homo sapiens
gctgcagccacctgcggccacatcaacctggtgaagatcctcgttcagtaagtccggcagcgtcttctcttgagg

SEQ ID NO: 219219 - DNA, 100 bp, Homo sapiens
ttcagagcgtcacggcgtacgccctcatggggaaaatctccccggtgactttcaggtgggaaccgtatcacacaggcggtgctgggcgcccacgacggcg

SEQ ID NO: 219220 - DNA, 82 bp, Homo sapiens
ttaaggaacagcgagctgtttgacccctttgacctcttcgatgtgcgagactttggaaaggactggagactgatgcatgagg

SEQ ID NO: 219221 - DNA, 95 bp, Homo sapiens
atagtccctactacaaaatttttcaacctgttctccccagccacacatgtgggaacccagggaggctgcccaatggcatccagcagggttcaacc

SEQ ID NO: 219222 - DNA, 74 bp, Homo sapiens
atcttggacctaccacttgaaaccattagtgagctgaggtatatggaggtcagtgggaacctgagggatttgta

SEQ ID NO: 219223 - DNA, 98 bp, Homo sapiens
tgacttggaccctggaaaacctggccctcttcaatttctgacaaaaggcactacctggcagcaccatctaaacctgtatcatctgctgtggtcccagt

SEQ ID NO: 219224 - DNA, 100 bp, Homo sapiens
catgatccagagctgagtaatcatctcaatgagattggtttcattccagatgtctgctaaaaggtcagagtaatgcagaatgcgtgccttcatctcagat

SEQ ID NO: 219225 - DNA, 90 bp, Homo sapiens
tttgatttccggagtcagtcattttactgtcaagacatttcttcggcattctgcaacagaagtctggaacgttttttcttagagttccag

SEQ ID NO: 219226 - DNA, 90 bp, Homo sapiens
cggcaactcaatggagaattctggtcactcagtgacacacacaactcgggcctccccagcgacaggtccacatatagcctcagttacatt

SEQ ID NO: 219227 - DNA, 101 bp, Homo sapiens
accatatcagatgcctcgcagagcaccaggcccaccgtgaaagctaccaagtcaggattgttacccccaccacctgcgctccctccaagaccttgtccatc

SEQ ID NO: 219228 - DNA, 100 bp, Homo sapiens
ggaacaaggagaagagccatggatcataaagagacacataccaaattggatctatccagggaactctaatgatccaggacaaagaagttaccctggagta

SEQ ID NO: 219229 - DNA, 90 bp, Homo sapiens
ggagctgttcggtgcatttgtaacgaaaattatgctggacctaactgtgaaaggtccagcaagactatgaatctctgttccaaatgcttt

SEQ ID NO: 219230 - DNA, 83 bp, Homo sapiens
agaccctggagcctcagttggaagcagccgatccagcctgcggagcctgtggggcagcttagaccatgctcagcctccaagca

SEQ ID NO: 219231 - DNA, 83 bp, Homo sapiens
aagcaaaagtccattcagaaaagacaagagccctgtgaggtgggtcatgataactgggtacgtggagttctgttccattctgg

SEQ ID NO: 219232 - DNA, 100 bp, Homo sapiens
aagatgcagccgcgccaggggacgaccgaggcggcacacagggcggatgaagaccccatcatggggttccaccagatgttcctattaaagaacatcaacg

SEQ ID NO: 219233 - DNA, 123 bp, Homo sapiens
cgctgatggtgtcggtgagcgcgtttcccgcctgagcgcaactagcggcgggtcgtgggcacctccagtactatactggcaattgctggagaagattttgcaattgttgcttctgatactcga

SEQ ID NO: 219234 - DNA, 90 bp, Homo sapiens
aggcagacgaggacgcggtgcggaagggcacgtgcagcttcccggtcagggtttgttgataagccggggcccttcgtgggaccctgcggt

SEQ ID NO: 219235 - DNA, 100 bp, Homo sapiens
ctggacatgtcagtgtcctttcacacccatgtgaaagagaaccgagattaagcgtagctcctgaaatggatatcatggactactgcaaaaaagaatggag

SEQ ID NO: 219236 - DNA, 83 bp, Homo sapiens
caagaactggattcgtggcgccacaagctcattcactgtgtagaataaagttacctcaatgaccttcttaactggcaaagcag

SEQ ID NO: 219237 - DNA, 73 bp, Homo sapiens
aacagctgcgcaaggaggaagagaatgcatcagaattacggatccagatcaggagatttgaggagctgctgcc

SEQ ID NO: 219238 - DNA, 75 bp, Homo sapiens
acttcgagaactggaaggctatgataaggaaactggagcacccatcctaactgatgatgttagcctgcaggtgtt

SEQ ID NO: 219239 - DNA, 100 bp, Homo sapiens
tccaggtagcccaagagctatcaggggaagatatgcatcagttccatcgagccattactacaggtgctaactttgagtacatcatcgcagaaaaaagagg

SEQ ID NO: 219240 - DNA, 75 bp, Homo sapiens
cccgtcagagctgaggtacttcgtgaaggcatgccagaggaacagagagaagggctccaggaagaactgattgac

SEQ ID NO: 219241 - DNA, 75 bp, Homo sapiens
tcgaacccccgcttcgcagctcaggagcctgaggtccgaaagaggttgcagaacttgaagctaatttaccttgta

SEQ ID NO: 219242 - DNA, 102 bp, Homo sapiens
tggaaaagtaagcacagaaaatggagacgcacccagagaaagaggctcatcactgtcagaaactggcgatggaatatgagaggagccctctggaaagaaaag

SEQ ID NO: 219243 - DNA, 83 bp, Homo sapiens
tgatgctgttctgtgactgttcgcggcacctcatcactctaccctgatgggagagtctgcatttccatcctccacgcgccagg

SEQ ID NO: 219244 - DNA, 91 bp, Homo sapiens
taagacttggcgaagcgctgcgctcgcgcccggatccctcaggtcaaaatgcagatcttcgtgaaaacccttaccggcaagaccatcaccc

SEQ ID NO: 219245 - DNA, 98 bp, Homo sapiens
gttgattatgccagccagatgcagcaagccttcaatgccacggctgtggtgcggcacatgaggaaactgcagctgggcaccagccaggaggggcaggg

SEQ ID NO: 219246 - DNA, 100 bp, Homo sapiens
gagctggagcgcctgtcaggctgggaggaggaggaggagagctgtttgcagctcaccttgtgaagatgaaatatccaagaatctgtattctagatggtgg

SEQ ID NO: 219247 - DNA, 75 bp, Homo sapiens
ctcaggcaccttccaccaaccgccagatcggctctattaccaggttttaaacttcgccatgatcgtgtcttctgc

SEQ ID NO: 219248 - DNA, 54 bp, Homo sapiens
atgggctttgtcctgcatgtagaaagtgagctccagtgctgtgaatctctgctt

SEQ ID NO: 219249 - DNA, 100 bp, Homo sapiens
gagcaacagtttacagcccttccagatacagctaccagcgtcgagggcgaggcccccagcagtgagactggcacatccctggacagcccctcagcctacc

SEQ ID NO: 219250 - DNA, 74 bp, Homo sapiens
ctcttcaggcacactacagaactaaatatgcatgacactgtctcagtgcatcgcccaggcttctacgctgaacg

SEQ ID NO: 219251 - DNA, 76 bp, Homo sapiens
aattgaagactttcgacaaggaagtgaaacaccaatgcaggtctgacggtaactgctgtaaaagactcaggagaat

SEQ ID NO: 219252 - DNA, 102 bp, Homo sapiens
acgtgggccctcggaacctttttagtgccggactccgggccgcaggcagtcccgcggcagcaggatcacaggacttcattgacttaactagagagaccagac

SEQ ID NO: 219253 - DNA, 98 bp, Homo sapiens
actaaactggcgggctccgtggaagcgtggccggcagcgtcccggacgaggagatggaacagattaaacgtgcaaaccgcctttatactaatgactcc

SEQ ID NO: 219254 - DNA, 75 bp, Homo sapiens
attccattcttttccttattcttctgatgtggatccaggtattgggagagttgctgctacatctttaggaaattt

SEQ ID NO: 219255 - DNA, 82 bp, Homo sapiens
gagggtttgatgaaggtggaggcagcgcggctctcagcccgtggaccgggagcccgtggaccgggagccggtggtgtgccac

SEQ ID NO: 219256 - DNA, 98 bp, Homo sapiens
gcacatcggccggaggcggctccgctcggccggcgcggcgcagaagaaacccgcggcgaccacagccaaagcgggcaaggccaatgatgaggccaatc

SEQ ID NO: 219257 - DNA, 101 bp, Homo sapiens
cggcccgcccggatcgtggcctctcgagagcaaggaaacttggatttaactggccagaagcaggtattcaaagcagagaacaatccctgggtgacccccat

SEQ ID NO: 219258 - DNA, 51 bp, Homo sapiens
ccaggtttattctcccatagcatgtgttgtcacaggtagtactgatggaat

SEQ ID NO: 219259 - DNA, 50 bp, Homo sapiens
agcaatatctctgggctttcacaggtgctcctgacctctgataaagctgc

SEQ ID NO: 219260 - DNA, 90 bp, Homo sapiens
caggaccgtggccgaccggcagctggttcctggtagagttacacagttgtgccgccagtatagcgacatgcctcctttgacgttagaggg

SEQ ID NO: 219261 - DNA, 99 bp, Homo sapiens
cgtgaagtcaagtaaaatcgcacactgtgatctgcagaatgcagccgccggttccttcgcctctgcctttgctgcactggtgctctgccccacggagct

SEQ ID NO: 219262 - DNA, 80 bp, Homo sapiens
agaccgcgcgcagggcctgcagcgggagctggacggcgagcgcgagcggcgcgagaaatatacgctcaacggcaagaaag

SEQ ID NO: 219263 - DNA, 83 bp, Homo sapiens
tgccgcccgcttccccatcatcgccagctgcacactcttggggctctacctctttttcaaaatgcagcagcttttttatgaga

SEQ ID NO: 219264 - DNA, 98 bp, Homo sapiens
aattatagagtgtaatttccttaagccaactcataataaacaagatttcgactatactaatgagtacaggtggagggagcaaagtcctgcacactgga

SEQ ID NO: 219265 - DNA, 100 bp, Homo sapiens
taaaggactgatttttagaactccacatttgagatttaatgtgtgccgaccatttccttcagtgctggacaggctgctgtgaagggacatcaccttttcg

SEQ ID NO: 219266 - DNA, 82 bp, Homo sapiens
taagaaaggaatgaacatgtatttaaccaagttccaacaaaagaatgctgccgcagtgcacagccagagaacaacacatcac

SEQ ID NO: 219267 - DNA, 74 bp, Homo sapiens
ggatgtgaaagcattaatctagggggcataaacatcccttatacaacagggtgacgatggcttaatagaattta

SEQ ID NO: 219268 - DNA, 78 bp, Homo sapiens
gagaactttacacttctggcctctctggctaatgatggaaactggccaacattaaaacagaattctagctcttccgtg

SEQ ID NO: 219269 - DNA, 100 bp, Homo sapiens
gctctgcgccgatctatgcacgcagatgctggagaagtccccttatgaccagctcgaattacatctttacaagaggaggtgaagcatctcaaacataatc

SEQ ID NO: 219270 - DNA, 90 bp, Homo sapiens
cgggggtcatccgagccgtgtcacacagggacagccgcaatccggacctggcggtgttcaggcgcttcgtggaggttggccgggtggcct

SEQ ID NO: 219271 - DNA, 83 bp, Homo sapiens
tttagtatcagccaaacttgcagctgttcagaccgcgctccgccgaggttcgagaacttgtcttggacaattgcaaatcaaat

SEQ ID NO: 219272 - DNA, 100 bp, Homo sapiens
gtgtccggaggtttgcaggggtgcagtgtgtctggtcttatgaggtctatgctccatcagcaagcactgccgactacaatagggactcgccaggctatcc

SEQ ID NO: 219273 - DNA, 110 bp, Homo sapiens
ggaagaaacctcagacagatcgccggggaggcagcgcgggatcccagcctcaggcgtgcgcggacggtgtgcggcatgccaatgaagatgtggaaagaatgttactagga

SEQ ID NO: 219274 - DNA, 76 bp, Homo sapiens
gttgacaaaaacttaaattgtggaatggttccttttgaggatggccacacagacaaccacttacctcttttagaaa

SEQ ID NO: 219275 - DNA, 98 bp, Homo sapiens
tggagatcagcgtgaaggagttgcggacaatcctcaataggatcatcagcaaacactggcacagcctccaggttggcgggctcatctgcgctggggtt

SEQ ID NO: 219276 - DNA, 74 bp, Homo sapiens
cggcctagcgtcctggaattacttcaatcaacaaatcaccgatgttcatatggttagtgatagcgatggagatg

SEQ ID NO: 219277 - DNA, 155 bp, Homo sapiens
tttgttggggagaagaggattggaggtgtcagtgttaaaggaacctctacaacgaaggtgaagccacggaagataaggtttttcgttggaatatacgttgcacatttatggcgattctgagtgtgagggcagacttctgccaggctcagcacagc

SEQ ID NO: 219278 - DNA, 100 bp, Homo sapiens
gagtgacccgggtgccgaggagcgggaagagttgctggggtgaccctggcaaagatgagagtgcacatttcgtcctgcctgaaggtccaggagcagatgg

SEQ ID NO: 219279 - DNA, 100 bp, Homo sapiens
ggacgccctggtgcagtacgacgaactggacgccctcttctctcagtatgtggtcaacttcggggccgggggcataatggttatgaaagcttctgtagat

SEQ ID NO: 219280 - DNA, 98 bp, Homo sapiens
gtgcaaacccgagagaactggatcgacgtaattaacacattccagacgggagcctcttttaagggagtcctaaggcgacagaacatgggtcaacacct

SEQ ID NO: 219281 - DNA, 100 bp, Homo sapiens
ctacgccgccgccatgtcggcgcaggcccagatgcgcgcgatgctggaccagttgatgggcacctcccgggacgcctcttgttgctgtaccacatagaat

SEQ ID NO: 219282 - DNA, 75 bp, Homo sapiens
acaaaggctgtgctcttggtgaggaagttgtgaatggctatgtggtgaaccttttctgggcatttgacacccaca

SEQ ID NO: 219283 - DNA, 100 bp, Homo sapiens
ggaaacaaggccgacctagcaaataaaagagcagtagatttccaggaatttttaccattcgcctgcccaaagaaacccctggccagcattttgaggggct

SEQ ID NO: 219284 - DNA, 75 bp, Homo sapiens
ccagctcgtcctggagcacctgcagctggcgcctctgcagtggggaaggatctgagtctctccctgcggagacag

SEQ ID NO: 219285 - DNA, 83 bp, Homo sapiens
ccggaagtcactggagatgttggagctcggcctgagtgaggcacagaagcggctgcagcctcctgatttcatcgaccccctag

SEQ ID NO: 219286 - DNA, 80 bp, Homo sapiens
accctggccgcgtttcccgcagtgccaaatctttggagtgttgatggagaagttacagtagctgaacagaagccgggaga

SEQ ID NO: 219287 - DNA, 80 bp, Homo sapiens
tccgcgggacaagaaaattcatgcggtgatcatggaggaagcactttactcccaccaaatgtcacaaatgaatttccaga

SEQ ID NO: 219288 - DNA, 87 bp, Homo sapiens
gattccaagtaactcttatttggtgtactttcggctccatgcttccatcctgaagctcctggggaagcccgattctggggttggtgc

SEQ ID NO: 219289 - DNA, 82 bp, Homo sapiens
tgcaccgacctcgacgtcttgcctgtgtcccacttgttcgcggcctataggcacccaggcatgtggaatatgctcatagtgg

SEQ ID NO: 219290 - DNA, 80 bp, Homo sapiens
gtttatctggagaactgtggaagcctgtcccgttgtcagagtggaagattgagctaagagaacgagagatagaacgactg

SEQ ID NO: 219291 - DNA, 88 bp, Homo sapiens
agaagatgtccacgcctgttgaagttttatgtaaggacagtcattttgtttactcattcagccctgttgcaggtcccaataaactctt

SEQ ID NO: 219292 - DNA, 75 bp, Homo sapiens
cggagtatctggaaagctcgggacaggatgaccgagacatgggtgcccggcaccgcgcccgagcccactccattc

SEQ ID NO: 219293 - DNA, 100 bp, Homo sapiens
gttttacagttgaaccacctgaggagctttttcaaaatacacatgtctggtttccagacccagagattctgattggggaacgctgtgaggagctccgtgt

SEQ ID NO: 219294 - DNA, 90 bp, Homo sapiens
gcgagaatggaccctgatggacttggacatggagctgtccttgacattgtgttggaggacacccagccgttctctcagcccatggttggc

SEQ ID NO: 219295 - DNA, 130 bp, Homo sapiens
tttcaagacatggagtgtgtgccttgtggagaccctcctcctccttacgaaccgcactgtgctggagaatctggtaaaagcaccattgtgaagcagatgaggatcctgcatgttaatgggtttaatggag

SEQ ID NO: 219296 - DNA, 82 bp, Homo sapiens
ggaccatctggattcatatccttcgaaaacgacggtcacgagaagagaatgccttctagatgcaaaatcacctccaaaccag

SEQ ID NO: 219297 - DNA, 122 bp, Homo sapiens
ctgagcgcactctggagggattctggcatcagggaggctttcagccggagaagcgagtttcagctgctgtgttggagtagaagaacatcatgctgttgacattgacctgtatcactgtccca

SEQ ID NO: 219298 - DNA, 96 bp, Homo sapiens
tgggcccgcgagccaggccggcgcttctcctcctgatgcttttgcagaccgcggtcctgcaggggcgcttgctgcaccactaaggcttttcttcct

SEQ ID NO: 219299 - DNA, 100 bp, Homo sapiens
gcggggcctcgaggacgcgtcacacacagcgaggatttgaggagggaagcgccttccaggtgctggagaatctggtaaaagcaccattgtgaagcagatg

SEQ ID NO: 219300 - DNA, 97 bp, Homo sapiens
ggaaggaggccgagccgggatctcaggtcctcgggggcggcggccacgccaaggacggggcctattccctggtggattccagtcaagtgtctacatt

SEQ ID NO: 219301 - DNA, 49 bp, Homo sapiens
tctgttccttagagatccaaagggtatcggtacagcaatcggagagctg

SEQ ID NO: 219302 - DNA, 95 bp, Homo sapiens
gtgagcagccggaggatcgcggagtcccaatgaaacgggcagccatggccctccacagcccgcaggtgaagccaaaaaccttccctcttacccgg

SEQ ID NO: 219303 - DNA, 75 bp, Homo sapiens
tgtcactccaacctcttttcgctggagaacgtatttaccgggcagtcaaagatctattcctacatgagcccgaac

SEQ ID NO: 219304 - DNA, 101 bp, Homo sapiens
cgacggctctcctctgactgcagcgtcactcagcttaattggcttagtgtcgacttcaataattggaaagactgggaagatgattcagatgaagacatgtc

SEQ ID NO: 219305 - DNA, 100 bp, Homo sapiens
gcagctacatcaaggcatgtttccccaagcaatgaagaatctgagactgaacctgcacttgttgccaagtcttccatcttactagatgtgaaaccttggg

SEQ ID NO: 219306 - DNA, 75 bp, Homo sapiens
gcaatttgaacttctgaattatacaccagcagattatgcacccagtcagcttgaagagtttcaaatggaccctac

SEQ ID NO: 219307 - DNA, 50 bp, Homo sapiens
caggttcttccgccacctcccagccagattatacccaacaagcaacccaa

SEQ ID NO: 219308 - DNA, 98 bp, Homo sapiens
ccccactttgttcatttttgctgaaaatgatgttgtgattccactcaaggacaaagtggaagatgcgaagattgcaattctcacatgtccatttgaac

SEQ ID NO: 219309 - DNA, 98 bp, Homo sapiens
ctgattttcgagagccgaatgcagaggttccaagaccaattccccaacattgatgatggcacctcagatcgcccctacagccatgctctggtggctgg

SEQ ID NO: 219310 - DNA, 99 bp, Homo sapiens
aatgtacttagaattattaatgagccaactgctgctgctattgcttacggcttagacaaaaaggctggatggaaagaaaaccatgcaacgtttatgaat

SEQ ID NO: 219311 - DNA, 83 bp, Homo sapiens
gaagagtcttgtgatttgggagacaggtgccttagctggaccaattattgtggagccacatgtcacagcagtatggggaaaga

SEQ ID NO: 219312 - DNA, 101 bp, Homo sapiens
gtcacccggcggccaaaggccagtgactaccaacgtttggaccagaagtgtcctgtttcccagaggaacagttcatttcaacagccagggagaaagcctgg

SEQ ID NO: 219313 - DNA, 82 bp, Homo sapiens
cagcctggagcggcagctcagcttggagcaggaggtccagtgtggacgaatgtggaacctcgctctgtggctgtgttccctt

SEQ ID NO: 219314 - DNA, 50 bp, Homo sapiens
ttctgagggctcccagacatatataatggccaaacgtaccaagaaagtcg

SEQ ID NO: 219315 - DNA, 96 bp, Homo sapiens
ccttgtatctcaacaccctgagtgcggatttctgctatgatgacaggtgtggaatatcaaacaaatgattaagttgacacaggaacatatagaggc

SEQ ID NO: 219316 - DNA, 74 bp, Homo sapiens
cagccagcacactcctcgcgagcaaggttattctcgttcaagttaatccaggtgagactttcacaataagagca

SEQ ID NO: 219317 - DNA, 104 bp, Homo sapiens
gtgctatggcagttagaagagttttaaaaagggaccttaaacgcattgccaaagcttctggagaacatcgatatattgaactcttcttgaattctactcctgga

SEQ ID NO: 219318 - DNA, 97 bp, Homo sapiens
tcagggcagagaaccatcttatgccagacagctgttccaagaaggtaaatatgcagaggacatttttggagagctctttactcaggcaaataccttt

SEQ ID NO: 219319 - DNA, 100 bp, Homo sapiens
ccgagaaaacggctcgagcagcgacaacccgtcctctcccgagtttttcatcaacagggagctgccaccaccgtgtactgtgctgctgtcccagaactgg

SEQ ID NO: 219320 - DNA, 51 bp, Homo sapiens
tcattccaagttccaggattaattctgatttttgcactgagtggccagccg

SEQ ID NO: 219321 - DNA, 100 bp, Homo sapiens
aggctcgagttacccctcttaccaccgtcatggcagtcccagggtgtccggtggagagctgtttgaccggatagtggagaaggggttttatacagagaag

SEQ ID NO: 219322 - DNA, 98 bp, Homo sapiens
tcggtcgcgagtatctccgtttcctggatgtgaacgggaacgcccttttgcttgtgactggcagggctgcgacaagaagttcgcccgctccgacgagc

SEQ ID NO: 219323 - DNA, 98 bp, Homo sapiens
cgagaccagacgcggagccatggccgaggtgttgcggacgctggccgtgaacagagtatctgtcaggcaagagctgctgtgatggtttatgatgatgc

SEQ ID NO: 219324 - DNA, 75 bp, Homo sapiens
ggacggctgcgtcgcccgaggcgaggaggagcgctggcgtcacatcgatcagacaacaacatggcaggaccccag

SEQ ID NO: 219325 - DNA, 100 bp, Homo sapiens
gtttggcaaaatcctagatgtagaaataatctttaatgaacgtggctctaagatcatgcatgcattttcagttgctccttttgaccagaatttgtcaatt

SEQ ID NO: 219326 - DNA, 75 bp, Homo sapiens
tgtctttgtgttgtctgcatttggaggagcaacaatgtgggactatacgtttggatttaggtggcgagtagaaaa

SEQ ID NO: 219327 - DNA, 75 bp, Homo sapiens
cggagcgcaggcgccgagactgacaacgcggtcccacaggaaagctatttttgatacaccagatgaggatccaaa

SEQ ID NO: 219328 - DNA, 100 bp, Homo sapiens
ctcatatttacattcaagttaaagaatttatttatgccagccttaaattttcagagtcactacaccggaggttatggaggttttgatgactatggtggct

SEQ ID NO: 219329 - DNA, 82 bp, Homo sapiens
caattattaggctctcagatgtaactagagagagaaggaacattccagaaactttggacttgttcgctgatatctaaattaa

SEQ ID NO: 219330 - DNA, 75 bp, Homo sapiens
ctgtcatccgccacttccgcgagcccatccgtctcaagactgtgaaaccagagcatgcaagcggcaagatgtcct

SEQ ID NO: 219331 - DNA, 74 bp, Homo sapiens
ggaggggccttcctggtgctgcccctgggcaagaccccaccaacaactgaacgctttggtcaggctgctacaat

SEQ ID NO: 219332 - DNA, 76 bp, Homo sapiens
tcttcttttgcatcctacgtaaccagaccaagctgtgggctcttagaacaagctctggtgattgaggaacagctgc

SEQ ID NO: 219333 - DNA, 98 bp, Homo sapiens
tttgcatttgtgtatgaagctcaagatgtggggagtggcagagagtatgcattaaaggatcagtttgacaacttagaaaaacacacacagtggggaat

SEQ ID NO: 219334 - DNA, 103 bp, Homo sapiens
cggagcggcggatctggacacccagcggtctgacatcgcgacgctgctcaaaacctcgctccggaaaggggacacctgattcacaatgacatcctttcaagaa

SEQ ID NO: 219335 - DNA, 82 bp, Homo sapiens
atagagctggaattaggcaaatatggacaggtgtgtttccattgtagaaaacctggtcatggaattgcagattgccccgccg

SEQ ID NO: 219336 - DNA, 75 bp, Homo sapiens
tccggcaggcagtcacaagcagcagaacttcgggttttgaaatggatgcagtcagaactgaatgttgaagaagtg

SEQ ID NO: 219337 - DNA, 100 bp, Homo sapiens
gccgcttccagaccatggaggagaagaaagcattcatgggccctcctggtagtcgtggtgcaagtggccctgctggagtccgaggacctaatggagatgc

SEQ ID NO: 219338 - DNA, 75 bp, Homo sapiens
tgaacccaacctagtgggtgtaatacatcatgaactgcaggagccagtcttggtgctctgtgttcacctggttca

SEQ ID NO: 219339 - DNA, 82 bp, Homo sapiens
gcggagcccggcttccgacgtgcagcctggcagtgcagtggtctgcgcgtctgttcccagcgctctgcgaggcctaaaaagg

SEQ ID NO: 219340 - DNA, 90 bp, Homo sapiens
cggcgggaactcgactcttggcgccaccgcctcatgcactgtgtaggtgaaaaattagacgatttcaagaattggagctgaatctgatgt

SEQ ID NO: 219341 - DNA, 98 bp, Homo sapiens
cagttgcttgatcaggtggaacagattcagaaggagcaggattaccaaaggttttaacttctagtcatggcgaatgatcgcaggagagcacagactgg

SEQ ID NO: 219342 - DNA, 119 bp, Homo sapiens
gatgtctcatatgtctcaggcttccatgcagcctgccttaccggaagagagaagggcacagttacctaagtatcaacgtaatcttcctcggccaggacaggcccccatcggtaatccac

SEQ ID NO: 219343 - DNA, 90 bp, Homo sapiens
gtccagagctgaggactgcctgtttgcaggagggggtccgcatggaagaaatagttgaaggttgtaccggagcccttcacatcctagctc

SEQ ID NO: 219344 - DNA, 75 bp, Homo sapiens
aaaccaaactggagctggtgcagcaggaattgggatcgtgtcgctgcggactatggcaaggagtctcaggccaag

SEQ ID NO: 219345 - DNA, 75 bp, Homo sapiens
aaatcccctgctcagggtcttcatccagaaacgaggctcttgcagaccaatttgaagataaaactacatctgtat

SEQ ID NO: 219346 - DNA, 82 bp, Homo sapiens
ccgtcctctcccgagtttttcatgttttaaaatcaaagatgggaaaatcggagaaaattgcccttccccatggccagcttgt

SEQ ID NO: 219347 - DNA, 75 bp, Homo sapiens
cctacgtggcagctgtgaaaaaagccatttccgaagggatcatagacggtatttctatgtaaacgaacagtcggg

SEQ ID NO: 219348 - DNA, 75 bp, Homo sapiens
gaagatggagaagaaatagttacctatgatcgtgccgacgccaccgccgagcccatgatcctggaacagtacgtg

SEQ ID NO: 219349 - DNA, 100 bp, Homo sapiens
gatgggcacactgtgggggtgtcctggtgcacccccagtgggtgctcacagctgcccattgcctaaagaaggagcccacctacgatgcagaattccagca

SEQ ID NO: 219350 - DNA, 51 bp, Homo sapiens
agcaaatggacgggatcattgcaggtgagacacagtaacctggttgaactc

SEQ ID NO: 219351 - DNA, 107 bp, Homo sapiens
tcgaagagtccccccaagtctcctgaagaggaaggagcggtgtcctcttaagaaaatgggtgccttcaccagggatggaagaggcaggctgcagcagagagatgcag

SEQ ID NO: 219352 - DNA, 89 bp, Homo sapiens
gttgtggagagctgattcccaaatctaaagggaaatcctcattgacgattcaatttgttgaaggccaatttgtggactcctacgatcca

SEQ ID NO: 219353 - DNA, 98 bp, Homo sapiens
aaggacgagccggggcgctgaaggaggtttcagtcaggaagaacttctgaaaatctggaaggggctcttctactgcatgtgggtgcaggatgaacccc

SEQ ID NO: 219354 - DNA, 86 bp, Homo sapiens
agccttctgagtcagcctgaaaggaacaggccgaactgctgtatgggctctgctgaccggttccctgatgtgttacctgcttctgc

SEQ ID NO: 219355 - DNA, 97 bp, Homo sapiens
tgaaacagattggaaattaattgctatcaatgcgaatgatcctgaagcctcaaagtttcatgacaagttggatggcttgaggactggtactaaaagg

SEQ ID NO: 219356 - DNA, 75 bp, Homo sapiens
ccgagggtgcctgggaatcggtcgcctggaggaccagtatttcccatggagggggataaaaacattcagatggca

SEQ ID NO: 219357 - DNA, 100 bp, Homo sapiens
aaagaggcgaaaggaagcaagcagttcagaagagccaaggaataaacatgcaatgaacccaaaagggcggtggatgaattttattccaagatagaaggcc

SEQ ID NO: 219358 - DNA, 111 bp, Homo sapiens
cggcgtgctactgtgcgctcgatccagcaccatggggaagcgggacaatcgggtggacatcggcagaaactagatgatcagaccaagcccgggagcttgtccttttccgag

SEQ ID NO: 219359 - DNA, 74 bp, Homo sapiens
cgccatcaagaaagtattgcaggacaagagatttaaggaaaccactgattgcttgtgtggagaaacagctatta

SEQ ID NO: 219360 - DNA, 80 bp, Homo sapiens
agctggacggcgagcgcgagcggcgcgagaaagctctacagattctcccctgcccctggagaaggaggagcaggtccgac

SEQ ID NO: 219361 - DNA, 75 bp, Homo sapiens
ggcagctctgcccggcagaaacctgtcttgcgccatgatagcagtggcagtggacattcagcatttgagcccctg

SEQ ID NO: 219362 - DNA, 85 bp, Homo sapiens
agagcactgcgctgtcagcgatagcccagtggatggccattccaggtgcactttacaggtccccgatgaaccaagagaaccctcc

SEQ ID NO: 219363 - DNA, 118 bp, Homo sapiens
gaagaccgcgcgcagggcctgcagcgggagctggacggcgagcgcgagcggcgcgagaaagttttggctacgggcctccacctccaccgccagatcagtttgcccctccgggggttcc

SEQ ID NO: 219364 - DNA, 100 bp, Homo sapiens
aaaaagagaaacctgggtgaactttcacggacaacctcagaggacaacgaagtgttcgacattagaccagctcccactcaccaaccctgagcattttggc

SEQ ID NO: 219365 - DNA, 75 bp, Homo sapiens
tttttggcctcatactctgttatagataaacaagtggctacagcaaaccaaacagcccagcagcccagcagccca

SEQ ID NO: 219366 - DNA, 97 bp, Homo sapiens
tcaccaaggaactggtgctgcagcgagagaagctcattcacacagaagacccatttaatgatgaacatcaggagaggcaagaggtggaaatgttggc

SEQ ID NO: 219367 - DNA, 99 bp, Homo sapiens
agggagacgctgctgcagctccgggacacctggggccgccgaggcaaaggtgtttgggaatattgccctggatgatgacaccagcatcaaccgccacaa

SEQ ID NO: 219368 - DNA, 50 bp, Homo sapiens
gacctgcctgggcatagacttccttaagttttcggctttgtgagaaacct

SEQ ID NO: 219369 - DNA, 87 bp, Homo sapiens
agaaaattgagacggagctaagagatatctgcaatgatgtactggaatggaagttggatacactttgtgacttgtacgagacactga

SEQ ID NO: 219370 - DNA, 101 bp, Homo sapiens
tcaatgtttgactatgaatgtttcgttataactgcctggaaggttagcgtcaaagaagttgagttgtattccctgaatgactataaaccacccatttcgaa

SEQ ID NO: 219371 - DNA, 98 bp, Homo sapiens
tctttacctgcttcccaatcccactgatgaggatcagcccatggtagttccaatttgccagcagaatgagtacagaaagagactcagaaacgacattt

SEQ ID NO: 219372 - DNA, 76 bp, Homo sapiens
tgattctgaagagggtctggaggagccttctcaagaacagaggagtgagctgagtcgacagaaacttcatacccaa

SEQ ID NO: 219373 - DNA, 90 bp, Homo sapiens
tgggcccgtggacatgcgcacctcacacagatatccctcctaaatgtacaatcaaggatttgctaccaaaagagaagagcagtacagaag

SEQ ID NO: 219374 - DNA, 83 bp, Homo sapiens
ctttcagccaaatgccagactgattgtcatgctcagggaccctgtggagagggggatatgagactttctactcggaatatcct

SEQ ID NO: 219375 - DNA, 100 bp, Homo sapiens
cggatggcaagaatcagctggggcagaagcgcgtggtcaaggtttcaagtgccccatttgctccaagtctgtggcttctgacgagatggaaatgcacttt

SEQ ID NO: 219376 - DNA, 100 bp, Homo sapiens
ccagtgctcatcttgttctcgagttttctctgccatgttgctattgcaggacggatgaatgatttgggaggggacttcaaaggagttggtaaaggctcct

SEQ ID NO: 219377 - DNA, 100 bp, Homo sapiens
cgggtacccttcgactgggcgttgccgctgttccctgcgcggcatggaggggacggccgtggccgtgttcgaggtgctgatgtatggacagccgtatcgt

SEQ ID NO: 219378 - DNA, 148 bp, Homo sapiens
catggattaaaaatatggaaagagctaccactagcaaggaagacccggcctccagcacaggagggattaaagtaattttgcacgatggcagtcaaatgagagcaaaagcatttccagaaaccagagattattctcaacctactgcagc

SEQ ID NO: 219379 - DNA, 75 bp, Homo sapiens
cacacgttactcagcccctgcgaacctgtatgtgcgagctggcggaggcagtgacctcagactctggacggtgaa

SEQ ID NO: 219380 - DNA, 100 bp, Homo sapiens
taagcctgatctaacccctagaaacaggtgcaaatatatacagagcttcataatcagcccaagaccacatagagcaaacatgaatgatatttcccaaaag

SEQ ID NO: 219381 - DNA, 90 bp, Homo sapiens
cataaaccacctcctctgtatgaagaacgatccccacctttgcctcagaaagacctatttcagcaattgaaacacagagcaccagctctg

SEQ ID NO: 219382 - DNA, 74 bp, Homo sapiens
caccttttccacagggaattgagttgtttagtactgctaaactaaagtagattaatgagaagggagagagagcc

SEQ ID NO: 219383 - DNA, 88 bp, Homo sapiens
tattcgagtgaccgagaccgcggccgggaccgaggctggagatggagctgaagatgctgaagtctcagtccagctctgccgaacagag

SEQ ID NO: 219384 - DNA, 100 bp, Homo sapiens
ccaaaacccaacagaccaccaaatgttgacctgacgaaattccacaaaacctcttctggaaacaagatccagttgtcatcggtatccaggaagctctcct

SEQ ID NO: 219385 - DNA, 98 bp, Homo sapiens
gaattatgcagttgctcgatgtgcctcctggtgaagacaaggggggatatgtgatcaaagcatcagaagtgcaggtcgtaatctgaaggagtggctga

SEQ ID NO: 219386 - DNA, 90 bp, Homo sapiens
ccagccgtctcctgtgaaggccatatttgataaacaggaacttgaggaatcccgttctgcttccagaagtggaagtgctcacggatcggg

SEQ ID NO: 219387 - DNA, 97 bp, Homo sapiens
cttgctgtggaaggcaatctttttgaaataaagaaacttcgagaactggaaggctatgataagtgaatgagttcacggtgatcaggaagaagttcaa

SEQ ID NO: 219388 - DNA, 83 bp, Homo sapiens
ccaacatggcggaacgcaggagacacaagaagcggatccaggtatttaaagatcatgcaattgatggagaaactttgccatta

SEQ ID NO: 219389 - DNA, 82 bp, Homo sapiens
ctgtccctgctcatccattctcctgccacccccagacctcctcagctccagagcactacaaacaccactggtttcccgaaaa

SEQ ID NO: 219390 - DNA, 97 bp, Homo sapiens
ataaacagaggaaaattgcagtggttcagccagaaaaacaaatgattccagcttcctcagtacacttcatgaagtctacttgcaggttctgaccaag

SEQ ID NO: 219391 - DNA, 100 bp, Homo sapiens
atatgagcctgtttctggggcaaaaacattcaagaatgagagcgagaacacctgtcaaggcctgtagtggtggagacacgcccagtggatgatcctactg

SEQ ID NO: 219392 - DNA, 98 bp, Homo sapiens
gcccagggtgcggcgggagattttgggtgaagagaactctctttgctcacaagttaccaaaaaaaaaagagccaacatgttggtattgctggctggta

SEQ ID NO: 219393 - DNA, 90 bp, Homo sapiens
gcggaggcggaggcggccggcccggggtgaagagggaacagaaatctttgccccctgactttggaaatctcgtttaaccttcaaactggc

SEQ ID NO: 219394 - DNA, 100 bp, Homo sapiens
ctctgcgtgcattctccactgccgtctactcggccactccggtcccgacacctagcctgccattgtgatgaccacctgctccaccttctgtgcccttggc

SEQ ID NO: 219395 - DNA, 100 bp, Homo sapiens
cagaactactggcagaatatgtgataagaacatttgctgttgaaaagtgtgtaatgctgtgtcatggagctaaaatcggatttttccaaggagatatcag

SEQ ID NO: 219396 - DNA, 100 bp, Homo sapiens
gtcccccaaagatgagatttacctgtgagatgtttcatcccaacacctactccagtagggtcagttcacgtagattctggtgcatctgcaataactcgag

SEQ ID NO: 219397 - DNA, 51 bp, Homo sapiens
gatccgtggacttctgtatgatcaggcagcctggcatcctcgctacaacct

SEQ ID NO: 219398 - DNA, 100 bp, Homo sapiens
ctctgtgaatctgtggtggaagcagacctcgtggaagcgctggaaaaatttgggacaatatgatccccgtcgaggtcaagatcaagatccaggtctattt

SEQ ID NO: 219399 - DNA, 100 bp, Homo sapiens
tgcgcttcgtgcaccggggcggtccgttgccaaagccaggtatttcaggagccagcagaggaagaacgagatggcagaaaaaagaaatatcctagtcccc

SEQ ID NO: 219400 - DNA, 100 bp, Homo sapiens
ctcaaggcctgggtgcttctactgcagaaatatcagctagaaccatgcagtcaagttcttccaggggacccagccccctaaccatgggagctcaggacac

SEQ ID NO: 219401 - DNA, 50 bp, Homo sapiens
ctcagtttctacgagctggtgtcagctgtctgtgatcctggaaacatacg

SEQ ID NO: 219402 - DNA, 98 bp, Homo sapiens
accagcgcttcgaccgaattaactggccctgtctgtatgaatccaagagtcgcatgtcagcagaggctgccctgagtcactcctacttccggtctctg

SEQ ID NO: 219403 - DNA, 73 bp, Homo sapiens
ggaggagataggcatcttggtggagaaggctcagacctgcctagagctggaacgttacctccagagcgagccc

SEQ ID NO: 219404 - DNA, 83 bp, Homo sapiens
ggaagatggcggctgggttcaagccatggtaggggaggagtgtgtaggtgccatcgtttgcaagttggatatgcacaaaaaga

SEQ ID NO: 219405 - DNA, 98 bp, Homo sapiens
gagatcttcgccttcttgatctcactcatcttcatctatgagaccttctacaagctggtgaagatactaatggaccatactaccaaggaccagtccac

SEQ ID NO: 219406 - DNA, 87 bp, Homo sapiens
cgggcagccacccccggccctgctgccacagcagataacgaaggaggcccaacttcattcaataaggagcctgacggatttatccca

SEQ ID NO: 219407 - DNA, 90 bp, Homo sapiens
catctttctgaaatggtgatgaaattggaattgggtttacatgagtgccacctgtgtgacaagacattcatgaatgccacctttctccgg

SEQ ID NO: 219408 - DNA, 51 bp, Homo sapiens
ctgcaatctgaaaagcagactgaaagaaaaggaagatggcgccatttctac

SEQ ID NO: 219409 - DNA, 75 bp, Homo sapiens
cgcagtggtcgcttcttctccttgagggagtctcgctctatcccctaggctggagtgcattggcgccatctcggc

SEQ ID NO: 219410 - DNA, 147 bp, Homo sapiens
acgtacaaagactgagacaaatgctggcttgccctccacatggtttactggacagggtcataacaaatgtttgtggggacattcatggacaattctttgatttgatgaagctctttgaagtcgggggatctcctgccaacactcgct

SEQ ID NO: 219411 - DNA, 51 bp, Homo sapiens
ggtgcggggagcggagccatggcctccgaaacgatggaaagaactttctaa

SEQ ID NO: 219412 - DNA, 100 bp, Homo sapiens
aattatggataataatggaatatcttggtggaggctccgcactagatctagtggaagttgatgggtcgaaactaaatgtgaccagcacgtggaacctggc

SEQ ID NO: 219413 - DNA, 100 bp, Homo sapiens
tactaccccgaggaggatgaagagctggagagcgccgaggacgacgagcgcagctgtcggggccgcgagtcggacgaagctcgacagaacaattggcccc

SEQ ID NO: 219414 - DNA, 100 bp, Homo sapiens
cttggatccgcgggacaagaaaattcatgcggttttgacaagcttgcatcatgcgtgagtataagctagtcgttcttggctcaggaggcgttggaaagtc

SEQ ID NO: 219415 - DNA, 96 bp, Homo sapiens
cgtaaagatagtgtgtggggctctggaggtgggcagcaatctgtcaatcaccttgttaaagagtacaagttgtgcaaagtgaggaagattactgtg

SEQ ID NO: 219416 - DNA, 80 bp, Homo sapiens
ccaacttctttggcaagtggacattttactggctcaagtttctagagaggaaggatctccccagctgtcttcagcaaggc

SEQ ID NO: 219417 - DNA, 133 bp, Homo sapiens
aaagaacctgagacgtgacactgaaaatcagtagaagaaatacgccacatttattctaccggggaagacagtgggtatgttatgcataaaagtggataatttacatgataaatgaaaatggccaattctttaa

SEQ ID NO: 219418 - DNA, 100 bp, Homo sapiens
atggattaaaaagtgaacttttctctggacttccccagaagaagattgtggttgaattcagggctttccagcgctagagctgcagacatacagagctaca

SEQ ID NO: 219419 - DNA, 82 bp, Homo sapiens
cggcactgattttcagttctgggaaaatggtgtgcacaggagccaagaggcatagcgcgctggctaggactccagtaccgtg

SEQ ID NO: 219420 - DNA, 100 bp, Homo sapiens
cctcaccctctgccgagtctcaatatctgtcttcggtggactccttcggcagtccacccaccgccgccgcctcccaggaagcctcagttttggagaggaa

SEQ ID NO: 219421 - DNA, 139 bp, Homo sapiens
gggaaaatcctgaggaagatgaagaccagagaaaccctgcaaaggagtccctagagacacctagtaatggacacattcagctaacgtattttagcaggtggagtgaggttgaagattcctgtgacagcgatgccataga

SEQ ID NO: 219422 - DNA, 83 bp, Homo sapiens
cggccgtctctggagagcagcaggttaaaaataagaagttggttgagctgctgagaaggaaagttcgtctcgcccagccttat

SEQ ID NO: 219423 - DNA, 75 bp, Homo sapiens
ctgcggcagacggcgacagtggcggcggcgccatggcagggcttgcagggcagcctggacaacatgacctgcatc

SEQ ID NO: 219424 - DNA, 100 bp, Homo sapiens
ccctccacgggcggctgcagggtggagatgatgaaccaggtggaagggcagcagaagaaccttgtgcacgccattgagtccctgccagggtccggccccc

SEQ ID NO: 219425 - DNA, 100 bp, Homo sapiens
ttcaggttacttcatggcagctatcccacagggattgtcgatcagtcacaacaagcataccaagaagcttttgaaatcagcaaaaaggaaatgcaaccaa

SEQ ID NO: 219426 - DNA, 98 bp, Homo sapiens
tttcttctgacttgagcctgcagtgtgctgtgagagatctaccactaggttatgagcagccgttttctgccctacgacaacatcatcacagacgccgt

SEQ ID NO: 219427 - DNA, 98 bp, Homo sapiens
agtggtcgcttcttctccttggcctgctgaattagccaccaagtacgcaaacttttcagagggagcttgcaagcctggctatgcttcagccttgatga

SEQ ID NO: 219428 - DNA, 100 bp, Homo sapiens
cttcggcgtgcagtaccccacctcggtcaacatcaccctccgcctagttcgaagcattcagcaaacaatggcaaggcagagccaccagaaacgtacacct

SEQ ID NO: 219429 - DNA, 99 bp, Homo sapiens
cttagctgtgctcgcgctactctctctttctggcctggaggctatccagcggtggcccagttgaaatccttcccttcctctaccttggaagtgcctacc

SEQ ID NO: 219430 - DNA, 76 bp, Homo sapiens
tgaggcctccccagccatgtggaactaaaagtagcagctctgaatccttaagtgacaaaggctctgaattgaagaa

SEQ ID NO: 219431 - DNA, 109 bp, Homo sapiens
ccagatagaaaacggcgagagtgggcgagaacgtccactgcgggccggcgaaagctgggggatatgagactttctactcggaatatcctgagtgttgcgtggatgtaaa

SEQ ID NO: 219432 - DNA, 100 bp, Homo sapiens
gagtgtcgattccattgatgcatgaagcaatgcagaagtggtattacaaagatcctcagggagaaattcaagttcctggtccagaactttacacagaaaa

SEQ ID NO: 219433 - DNA, 100 bp, Homo sapiens
attgtccaaagcagtcgtaagaagaggtcccaatcccccactctttccgccctaatggaggtctccagtttcgagggaatctggaaaaattgcaatcaaa

SEQ ID NO: 219434 - DNA, 75 bp, Homo sapiens
tgtggggggattctcgacctgctaacagaactggaccttttcggcagcctgcttctgcaaagtggtacgatcgaa

SEQ ID NO: 219435 - DNA, 98 bp, Homo sapiens
ttctgtgggtcctctggtgttgagtggtcggcttggtgtggtgtgcggaggagctccaggcccgtcggcgcggaggcgctaatgtgcatgctacaaca

SEQ ID NO: 219436 - DNA, 50 bp, Homo sapiens
tcaagtttttttctctatctcaggcaggcccttcataacacaaggctttt

SEQ ID NO: 219437 - DNA, 83 bp, Homo sapiens
ctcaccccgcggccgcaccttcccgccttctcagatatggctcgtggacagcagaaaattcagtctcagcagaaaaatgccaa

SEQ ID NO: 219438 - DNA, 90 bp, Homo sapiens
cacctggcagagaagttccggcagaaggcctccatccacgaggcctggactgacgctgccccagtgctcagctgtgaagctgcaacacag

SEQ ID NO: 219439 - DNA, 75 bp, Homo sapiens
gaagccctttgtgactgcaatctcgagttcccagtgacctgacagcagaggagcgtcaagaactggagaacatcc

SEQ ID NO: 219440 - DNA, 82 bp, Homo sapiens
agctcagacctgccaatttaccagagataattgataacaccctgtaacagctgattggaaatctacatttctgaaggaaccc

SEQ ID NO: 219441 - DNA, 80 bp, Homo sapiens
ggtttattggcacagagaaggaagcacccaacagttacaaactacttctccaaaggatttgaagcattcattaccatctg

SEQ ID NO: 219442 - DNA, 100 bp, Homo sapiens
ctcagatgaagcggtgaaaaaagattcagagttggataagcacttggaatcacgggttgaagctgctggagccagttctgcttctcggcaaggagcgatt

SEQ ID NO: 219443 - DNA, 102 bp, Homo sapiens
aggagtcctccacttgccactggaaacgttcagtgcctgtagccactgtagaactggaagaaaagaggttcagaactctgcctttagtgccaagccccctac

SEQ ID NO: 219444 - DNA, 100 bp, Homo sapiens
ggtgaagcgattcctgcaggcgttggttcccctctttgacctgtgccgcagaatggaattcggcattgttcctacacagcttctcggcaacatctctatg

SEQ ID NO: 219445 - DNA, 74 bp, Homo sapiens
gaccaataaaaataaactgcttgaacatcctttgactggttagccagggactgctgagatgtcctctattcttg

SEQ ID NO: 219446 - DNA, 100 bp, Homo sapiens
agattttcactgctcatccggataccatgctgggaagatgctatctgtgagcagcagttgataatgtgcataaaatctgggaacaggccagatgtggatg

SEQ ID NO: 219447 - DNA, 106 bp, Homo sapiens
tcaccatcagggacgtgctggccgtgatcaaacactgcaaggaccccctccggctcaagtgtgtcaagcaagctccagtaataaaccgattcacaaggcgtgcctc

SEQ ID NO: 219448 - DNA, 100 bp, Homo sapiens
tggacagcgtgcggtctgggccttttgggcagcttttccggcctgacaacttcatctttggctcagcaggagttgatgaagcagctctccatccttcctc

SEQ ID NO: 219449 - DNA, 99 bp, Homo sapiens
gaaagaaggaagaagacccgctgtctgcgaaggcctaaaggtggagccgccaccaaaatgcagattttcgtgaaaacccttacggggaagaccatcacc

SEQ ID NO: 219450 - DNA, 100 bp, Homo sapiens
aacccatctgctatgatgatgaatgctgtctttgtaaagcggaaagtgaccagaagaggtgtgcagtttccaggcctggcccatacagacctccaacagg

SEQ ID NO: 219451 - DNA, 73 bp, Homo sapiens
gtgaatcccctgtttgagaaaaggcctaagaattttggcattgatactggactaagcatgcccagtgatactt

SEQ ID NO: 219452 - DNA, 96 bp, Homo sapiens
gttttcctcgcagaacgcctttatgcagaagccttagattgtaagcaaaagaaatcaaggtcaagatctggaagcaagaagaaaatgctaacatta

SEQ ID NO: 219453 - DNA, 96 bp, Homo sapiens
tgtgacctgcaggtattgggaatccacagctaagacgccgggacaccctggaagcctagaaatgacaccaactctacaacattacctgtcatatac

SEQ ID NO: 219454 - DNA, 100 bp, Homo sapiens
ccgtcgcggagccggagggcgggaggaacatgacatcgcggagaaatatggctacacacacctttctgcaggagagctgcttcgtgatgaaaggaagaac

SEQ ID NO: 219455 - DNA, 95 bp, Homo sapiens
cagccccacctcttccacaacgagtcatctttagtagagcagatgattctcaacaaggaatttgcactggtaagaactcagggccctatcctcac

SEQ ID NO: 219456 - DNA, 73 bp, Homo sapiens
gggaaatcgggctgaagcgactgagtccgcgatggagattcaggaggtacatgtgcttgtttgtcatatggat

SEQ ID NO: 219457 - DNA, 90 bp, Homo sapiens
cggacggtgctggccccgggcaacgatcggaactcggacacgcctacacgcttgaatgtgttcaagaatgatcaggatacttgggactac

SEQ ID NO: 219458 - DNA, 75 bp, Homo sapiens
gccgcctcagccatggacgcgtccctggagaagccacaagtatatggttatgatgacttgcagatgcttcagaca

SEQ ID NO: 219459 - DNA, 75 bp, Homo sapiens
tgttgggccaggccagtcatgctagaacaaagacctggtggaagaggaggctgaggaggctggagtggctttgag

SEQ ID NO: 219460 - DNA, 75 bp, Homo sapiens
gtcagttgtttgatttcatcgatgatctggcagacctcagctgcctggtatagaagctttggagaaaatgaatga

SEQ ID NO: 219461 - DNA, 83 bp, Homo sapiens
ggcaaaggggaggttacgcagcaaaccatccagaaggtgtccctacctgcaccggacgacgggggacacagaacgcaagtacc

SEQ ID NO: 219462 - DNA, 100 bp, Homo sapiens
tccctcaagagaacacaagaagtgctttaagagacttaattcagtgcacaaatgagatgaatgtgaacatcccacagttggcagacagtttatttgaaag

SEQ ID NO: 219463 - DNA, 101 bp, Homo sapiens
ccttcgccgcgccccacttgctcgtgcactttacacacatgaggactcacaccacccggcaagaactgctcactacggctccctgccccagaagtcacacg

SEQ ID NO: 219464 - DNA, 80 bp, Homo sapiens
gcatgcagctggtcgggcgccatctccacctggccagcccggtgcaaggtggggcaggagaccctgtaggaggaccccgg

SEQ ID NO: 219465 - DNA, 75 bp, Homo sapiens
ggaaccatgattgaatggggcaattactgccgggcccctcagatgagagctgcacccaggccagcaccagtcgct

SEQ ID NO: 219466 - DNA, 75 bp, Homo sapiens
ccgcaggcgcagacccacccgccatgaagccccccgcaggcctggagctgctgaagactgctattgggaaagctg

SEQ ID NO: 219467 - DNA, 74 bp, Homo sapiens
tcctggtctggccttctccatggcctcaacacgtccctaacttgtggaattcttactgttgatgaacttttggc

SEQ ID NO: 219468 - DNA, 75 bp, Homo sapiens
gaacataaaggcctcccatatcttatcagatttctgagttctgattcaggttatgaagacagtatggagtttcca

SEQ ID NO: 219469 - DNA, 85 bp, Homo sapiens
caaggccaacctgtcccaagtggccggtaaatcagtggcacagtatactgcctccttgtgcctctggatcctgccacttcacatc

SEQ ID NO: 219470 - DNA, 119 bp, Homo sapiens
agcaggatcccctggtgctccggggcaggatggaacacggggagagcctcaattctgtggtgttcttggtcacacatttatggagtttctgaagggcagtggagattactgccaggcac

SEQ ID NO: 219471 - DNA, 74 bp, Homo sapiens
agaaagtaccaggcactaggtcggcgctgccgggagatcgagcagcagggtggcaacatccggggtccctgggc

SEQ ID NO: 219472 - DNA, 100 bp, Homo sapiens
cgcagcttggctgggacctatcaggagccgaggacggcatgtcccaggccccgggagcacagccgagcccacccaccgtgtaccacgaacggcagcgcct

SEQ ID NO: 219473 - DNA, 102 bp, Homo sapiens
gggcgcgcgtgcggaggaccaggcgcggcgcggctgcggctgagcaccacacactggaagcagacgctgttcatgatggacgacccagtccctgtccataca

SEQ ID NO: 219474 - DNA, 75 bp, Homo sapiens
agaagggatggaaatacttcaacaagaattatatccagatcgagagacagaagattctgaaagggttcaatgaaa

SEQ ID NO: 219475 - DNA, 101 bp, Homo sapiens
acagaccttcgcctcgccccgccggttcctcaccctcggggagcaacatgggaatgttttaaaggaagttgggctactcacaagttactacataagaaagc

SEQ ID NO: 219476 - DNA, 100 bp, Homo sapiens
ccgtggtagttactcaaacagagggaactacaacagaggtggaatgcccaacagagggaactacaaccaggaattttatggtgattacattgctgtgaac

SEQ ID NO: 219477 - DNA, 75 bp, Homo sapiens
aggatatgcctgaggagagctctgaggaggattcactcaggagagcagcccgacggccatggaggctgaagagac

SEQ ID NO: 219478 - DNA, 100 bp, Homo sapiens
ctcatttctgagtattgtctttatatcctgacactatgaatgctacttggatgcctcttaaggtcagggatgttggaagctggagtagacaggattattt

SEQ ID NO: 219479 - DNA, 74 bp, Homo sapiens
ctaggcaagatcgacgaactgcgcctcttcccgccggatgataaacaagcaactttgattcctgatgaggtgtt

SEQ ID NO: 219480 - DNA, 80 bp, Homo sapiens
cgacgtcttgcctgtgtcccacttgttcgcggcctatagttttcggctttgtgagaaaccttaccatcaaacacgatggc

SEQ ID NO: 219481 - DNA, 100 bp, Homo sapiens
tgcagccttcctaggtccaggtcttaaaatccttgcacgtttgatgactgccaaattcttgcatacagaaattcgagaaaaaggcggtgcttatggtgga

SEQ ID NO: 219482 - DNA, 83 bp, Homo sapiens
ccagtgagctcctggattctgctggtcaggccggctccggcgtcaaacccaagccacaagtctactctaccctcctcaacagt

SEQ ID NO: 219483 - DNA, 100 bp, Homo sapiens
gtccagactctcctgaggagcgagtcaagtaagggagaattgactacgcttatacatcagcttcaagaaaaggacaagttactcgctgctgtgaaggaag

SEQ ID NO: 219484 - DNA, 90 bp, Homo sapiens
ggagaaggaaattgtcccgaatccctgcaggtctccatcacatttttgcccagaggtaggggggattatgcccagttttgggatgttgaa

SEQ ID NO: 219485 - DNA, 139 bp, Homo sapiens
aaaagcgaaggaatttcgcagagctgaagatcaagcgcctgagaaagaagtttgcccaaaagatgaacactcgtgaaactgctcaggccatcaagggtatgcatatacgaaaagccacgaagtatctgaaagatgtcac

SEQ ID NO: 219486 - DNA, 82 bp, Homo sapiens
tggactgggatttggaggatttaatacacagcagcagcagcaaactagtaaatcaacagactgggaagatgatggttgggga

SEQ ID NO: 219487 - DNA, 83 bp, Homo sapiens
ctttgcgtgctggtcagcatccggaacaacaggaaataatgcaaaaggtgtcccaaggctcctgaccagtgaacaaagatttg

SEQ ID NO: 219488 - DNA, 75 bp, Homo sapiens
cagagctgaaggaggcgctctctgaggaaatctgaaatagagtactatgctatgttggctaaaactggtgtccat

SEQ ID NO: 219489 - DNA, 100 bp, Homo sapiens
tcacctggcggtgcccgaggagtagtcgctggagtccgcgcctccctggcatcctggtggggaagaagttttaagggaacaagctggaggtgacgctact

SEQ ID NO: 219490 - DNA, 75 bp, Homo sapiens
cggctgggcgttcatctaccacgctttcgtagatgtcggcttatttataggaattgcttgaagccagagtcatgg

SEQ ID NO: 219491 - DNA, 82 bp, Homo sapiens
ctcgggggccgaactggccctggactacctctgcaggtttttagaacttcagccataaaaatgggcagaattttccttgatc

SEQ ID NO: 219492 - DNA, 75 bp, Homo sapiens
cccgaaaccatgcctcactgtcctaggcaagcccaagaaagagattccagctagtccttccaggacaaaaatccc

SEQ ID NO: 219493 - DNA, 101 bp, Homo sapiens
cgtaggcggagtcgccgagtcggtactccaaagattcaggtttactcacgtcatccagcagagaatggaaagtcaaatttcctgaattgctatgtgtctgg

SEQ ID NO: 219494 - DNA, 75 bp, Homo sapiens
gaaaacaagactccccaggggcgagagtatggcatgatctaccttggaaaaggcagaggtggaggagacactgaa

SEQ ID NO: 219495 - DNA, 82 bp, Homo sapiens
tgtgagctgggagaaagcggggcccgaggaggccaaggcgccagtgagaggcggactgactgcattgcacagatgatggata

SEQ ID NO: 219496 - DNA, 87 bp, Homo sapiens
gatctacaggaccagttgaatcatctgttgaaatagaatgacatgcaggcattccagaccctccaaacatgtcagcagaattaatcc

SEQ ID NO: 219497 - DNA, 75 bp, Homo sapiens
ccggcctggagctcccagggccgaggcatccattctggacttgcactcaggggccctgtctgtcgggaagcactt

SEQ ID NO: 219498 - DNA, 75 bp, Homo sapiens
ctcgcgaccgccgagcctgcagcctgccccgcggccaacatgagcttcttgttatacgggagcagaaagacaggc

SEQ ID NO: 219499 - DNA, 83 bp, Homo sapiens
acgaggtggactacaagacggctgaggagaagtacatcaaggggccttcgctgagctaccgtgtcacccgcaactacctagac

SEQ ID NO: 219500 - DNA, 100 bp, Homo sapiens
gcgggggcgaggttcgggctggttgttccgttgcgagctgcagctgcgatctctgtggtaggcccagagcaaggtccgtggtcctgtcagtggaagcccg

SEQ ID NO: 219501 - DNA, 97 bp, Homo sapiens
gcctgaatgcagtactgaagaactgctttcaattctaagttattatcagaaaatccacccagcttcaccattactgtgacgtctgaggctggagaaa

SEQ ID NO: 219502 - DNA, 75 bp, Homo sapiens
ctttagtgcactcttctccttcacagtaaagtggctggtctcagtggcccttagcagcagctccattcgtgtggc

SEQ ID NO: 219503 - DNA, 80 bp, Homo sapiens
tgctagccaggaacatggactgaagtatccagcgctcattgggaatttagttaaggctctgctgttctcctgcactcagg

SEQ ID NO: 219504 - DNA, 82 bp, Homo sapiens
ggcaggttcaaatggctggtataattataggcaccagatcatgtatcagttggaggacttggagacagcttctatgagtatt

SEQ ID NO: 219505 - DNA, 74 bp, Homo sapiens
ggcaggtgggggcggcgacctgagcaccagtgaaatattgtggggctgagatccctcgtagcaacaaaaagttt

SEQ ID NO: 219506 - DNA, 100 bp, Homo sapiens
cgtcttttgcctctttctctcaggctttcctacaactcatgcccagcagcagcaagcagtgaagtgctccgtgtgcaagagcgtctcggacacctacgac

SEQ ID NO: 219507 - DNA, 50 bp, Homo sapiens
ggagaagaaatagttacctatgatcggaacactgactatgccaaatggag

SEQ ID NO: 219508 - DNA, 88 bp, Homo sapiens
gctccctccgccgccgccgccttgctgctgctcaaagctgctgccgccccttgggctaaaagctcttccaccaaagccacctaagcca

SEQ ID NO: 219509 - DNA, 100 bp, Homo sapiens
ttcgcagtggtcgcttcttctccttgcaagagtgagccatggagctacgtgtggggaacaagtaccgcctgggacggaagatcgggagcgggtccttcgg

SEQ ID NO: 219510 - DNA, 87 bp, Homo sapiens
gccaagctgtcatcacaaaagagttgattgaaattatctctggtgctgcagctcttgtggacaacagtgagtatatgcggaatggag

SEQ ID NO: 219511 - DNA, 75 bp, Homo sapiens
gcacactgggctctgcagcctcatcctacagccccctagatcatggaagggaagtggttgctgtgtatgttactg

SEQ ID NO: 219512 - DNA, 100 bp, Homo sapiens
ggggtttcttcgttgcattgcctgagaggagcggagtctgccaggtggtgtccatcatgggatactacatcaacctcgctaacgcctgaggacactgaag

SEQ ID NO: 219513 - DNA, 100 bp, Homo sapiens
atagaggacttgaagcagaaagcaagtgaatacgagtcagaagacactttttcaaaaatggcaatggtatcagaattcctcaagcaggcctggtttattg

SEQ ID NO: 219514 - DNA, 82 bp, Homo sapiens
gcgtggagcgctgcgcggcgcggcggccgggccctcgagacggggacggtgtccctggccagtgtccttccacctgtccaca

SEQ ID NO: 219515 - DNA, 114 bp, Homo sapiens
cgggtccggcgagaggggctgtgacagtcggagtcccaagctgcggttcggctgctgccgagatgaaggatttgggggcagagcacttggcaggtcatgaaggggtccaacttc

SEQ ID NO: 219516 - DNA, 100 bp, Homo sapiens
gctctaagtgtacgacgagggaggtctcatcggcgggctgcccctgatggggcctggcaatgactgagcaggcccagccccagaggacaaggaagagaag

SEQ ID NO: 219517 - DNA, 75 bp, Homo sapiens
cagctgtattgcaagagaacactcagatcgaggatgaagtcgtcttcttcggtgaccacttccgagacccaaccc

SEQ ID NO: 219518 - DNA, 100 bp, Homo sapiens
tcacctagtatgtgagcagtccctgcagatggcccatttggagatcttgacaaagcctcttctgtttccaatggggagccagcaccgctctttgaccttg

SEQ ID NO: 219519 - DNA, 100 bp, Homo sapiens
tgcacttcgcattttggcattgacatttaattttagggtcctttatatagaagggagagtagggattaatgaaaatcaagttccatcctcagacaagagg

SEQ ID NO: 219520 - DNA, 100 bp, Homo sapiens
cttatcacccacacccacacgtgttcaatacacctcccacctgtcctcaggcatatcaaagcagccgaatccagtggagcagcgttacatggagctctta

SEQ ID NO: 219521 - DNA, 100 bp, Homo sapiens
tgcagtggcgcctaaagtctgagagagggaagtcgcctctgtgctcgtgagtgcatggggtataagccttgttgtcctcctggtgcgaagagctcggccg

SEQ ID NO: 219522 - DNA, 75 bp, Homo sapiens
cagcaatatctctgggctttcacagagccagttcctgtgcttggccgtgcaagaaggcagcctcgtgctgttgta

SEQ ID NO: 219523 - DNA, 73 bp, Homo sapiens
ggggaagtgggggagctggcagaactcttgtcctggacccaagccagaagcctctgcaaagcttccttccaga

SEQ ID NO: 219524 - DNA, 100 bp, Homo sapiens
catctgcaaacatagagaattctgggcttccacacaactccagtgctaactcaacagacacttggagaccagaaagcttctttgacaaagtgaagaagaa

SEQ ID NO: 219525 - DNA, 100 bp, Homo sapiens
gttcctcgagcgatctggacccttcacacaccctgatttcgaaccgagcactgaagtgattggcgaggacaacgtggcagtcccctcacacctttataag

SEQ ID NO: 219526 - DNA, 83 bp, Homo sapiens
gtcagtcattttactgtcaagacatttcttcggcattctgcaacagtgcctccggagccagcgtggtggccatagacaacaag

SEQ ID NO: 219527 - DNA, 75 bp, Homo sapiens
gtccctgaagagggaagacacgcggaaacaggttaaagactcagtctctgagaaaacaattggactgatgcgaat

SEQ ID NO: 219528 - DNA, 104 bp, Homo sapiens
gtaggaaggaacttggttccccctccctcagcttccgccccaaaaggtcatcatcagatttgaaatatttaaagtggatacaaaactatttcagcaatgcagac

SEQ ID NO: 219529 - DNA, 100 bp, Homo sapiens
gttgcggcgaaaggaacggctgaaggccctacgggagaaaaccgggcgcaagatgtctgtgatcatgatctgcatgtttctggtggcatggtccccttat

SEQ ID NO: 219530 - DNA, 75 bp, Homo sapiens
aacagctcacttttcttccaaggataagttgcaagagatgccatggacaatattaccaggcagaaccaattctac

SEQ ID NO: 219531 - DNA, 51 bp, Homo sapiens
ttgtcccaaagatactcaactcaaatgctgtgaaacaagctatgcagaagc

SEQ ID NO: 219532 - DNA, 100 bp, Homo sapiens
tacctcaacaacccgtacgtgcggaaggccctcaacatcccggagcagctgccacaatgggacatgtgcaagtggttggttttggacacagagaccagag

SEQ ID NO: 219533 - DNA, 100 bp, Homo sapiens
gccaagaaaggcagcgaggtggagagcggtggaaatggatattgttgaaaaactggtgaaaatgataccttgtgagcatgaagacctgctgaatatcacc

SEQ ID NO: 219534 - DNA, 100 bp, Homo sapiens
agtgctcattggaagcttgtcggattcttgacactttgggattgcttcggcaggaagcaggtgccaggaccattgacaccagaaatggaggcacggcagg

SEQ ID NO: 219535 - DNA, 123 bp, Homo sapiens
gattggttgttttttcctgtatgaagcggttggcaccactgaagtgaccgaatgaggtttctatgcttgagtctgctcaacagcaggcagccagtgtcccaatcttagaagaacagattataa

SEQ ID NO: 219536 - DNA, 97 bp, Homo sapiens
cgggtgtggacgccactacagttcatcaacatcaactacgtccctctgaagggtctactgacattcagggatgtggccatagaattctctcaggagg

SEQ ID NO: 219537 - DNA, 98 bp, Homo sapiens
caagtgcaggggccagaagacaaagtcaattccatatctgaacagaattaagacgaacgagctttcacaattgcagcagatgaagatccattggtaaa

SEQ ID NO: 219538 - DNA, 104 bp, Homo sapiens
ttgcgagccgtcttccccaggcctgcgtccgagtctccgccgctgcgggcccgctccgacgcggaagttacagaatgtctgaaggggacagtgtgggagaatcc

SEQ ID NO: 219539 - DNA, 83 bp, Homo sapiens
cagacacagaccttcactacctattctgacaaccagcctggtgtgcttattcaggagaatacttatctctggcgcacatcact

SEQ ID NO: 219540 - DNA, 75 bp, Homo sapiens
cttctggagtactcttattttgaaaaggtacggttcctggagcagcagaacaagatgctggagaccaagtggagc

SEQ ID NO: 219541 - DNA, 82 bp, Homo sapiens
atgatagcttctggaggcagttcaagcactctgagaaggttccacacagtaggactgaaggtttaaagccaagggagaggat

SEQ ID NO: 219542 - DNA, 100 bp, Homo sapiens
tattgaagctgcagaacatcatttgcgggacaagggtctaggtgctggagtgcgcacggaggccgatgtagaggaggaggccctgaggaggaagctggag

SEQ ID NO: 219543 - DNA, 90 bp, Homo sapiens
gaggaatgtcagcaccagaccaaggctcggggacctccagccggctggagccgagagaacgcatggagcccacctatcagctgtcccgct

SEQ ID NO: 219544 - DNA, 90 bp, Homo sapiens
tcagtggaccaagcatgatgattcttcagataacttctgtgaagctgatgagacgagttgtactgctgtcacaggaaatggacgctggat

SEQ ID NO: 219545 - DNA, 98 bp, Homo sapiens
ggaaacaatggcatttacagaaagagtcaacagcagtggcaacaggtcgttcttccctctttccaatagatgatggcttgcttgatgatggtcacagt

SEQ ID NO: 219546 - DNA, 100 bp, Homo sapiens
ctacaaccagtggcagcagggtcttgtactcccagagtacctcatccacgctttcttctgtgtcatgtttctttgtgcagcagagtggcttacactgggt

SEQ ID NO: 219547 - DNA, 120 bp, Homo sapiens
tccgggtaccagttcgcgtcctgctccaaggactgcactgtgaagatgacctgttgcagctattaatgtcatgtccccaagttgaattaattcagtgtctcactaaagagttgaatgaga

SEQ ID NO: 219548 - DNA, 83 bp, Homo sapiens
ctaccagctatccttaatactttgttgacactgcaagaggcaatctgaaagcaaatcctgtttagatgcaggcgaaggttcct

SEQ ID NO: 219549 - DNA, 82 bp, Homo sapiens
cagttattgaccagattccttttctggcagtagcaagagcacttgtgttctaagaacggaagcatctgggctggatggaatt

SEQ ID NO: 219550 - DNA, 74 bp, Homo sapiens
tcgctgggagagaggtacctctccttttccctctccctttccctaaggaattgtggtgcttggaataaacagag

SEQ ID NO: 219551 - DNA, 101 bp, Homo sapiens
ggcgcagctgccctgggaggacggcaggtgccgaacccacggccaggcttccgtggccagcagccctagaggaatggccatcctgtccctgcgagcccctg

SEQ ID NO: 219552 - DNA, 75 bp, Homo sapiens
ggaacctcactgaaaattggtattgttggattgccaaatgttggtcttttatcacgagtcatgaatacaggatca

SEQ ID NO: 219553 - DNA, 101 bp, Homo sapiens
acgggaccctgtgccccaactctacttccctctgctccttcccagaatttcgctaaggagtttgtgatcagtgatcggaaggagctggaggaagatttcat

SEQ ID NO: 219554 - DNA, 100 bp, Homo sapiens
acttgcctaaatgaggaatgtctttcctaccatctaaaatacgaaggtttctggctggaatgttgtaccatctttgggtaggcagacttccctgacgaca

SEQ ID NO: 219555 - DNA, 87 bp, Homo sapiens
gatgttagtgtggacttgccagcctatatgaacccaatagcaatggcgagatcaaggggtccaatccagtcttcagggccaacaata

SEQ ID NO: 219556 - DNA, 75 bp, Homo sapiens
ctcagacgctggcgggcgcagtttctcacgacgggccgagcctgccactccacataaagaagatccctaatagtc

SEQ ID NO: 219557 - DNA, 75 bp, Homo sapiens
catttctcctattgaggagtcaacgtttactcctggcttgggggcattaggaagcactggaggctcttcgggaac

SEQ ID NO: 219558 - DNA, 83 bp, Homo sapiens
catagtccatcgaagaagagtccttggaacaagcaactggctattgaaaaggtaatagcctgcagctggtgttttgagaagcc

SEQ ID NO: 219559 - DNA, 87 bp, Homo sapiens
aaaaggtgatctggacaaaggaacaggtatctcagaagttgattcaagtcagttgagacgccagttgtgtggaggaagtcaggccgc

SEQ ID NO: 219560 - DNA, 100 bp, Homo sapiens
ccggcccccacctttcctcaggagtcatttctgttccgcacaggcctgctgaactgggtgctttatataggcatgttggcagataaattgaacatgactc

SEQ ID NO: 219561 - DNA, 100 bp, Homo sapiens
tggctctcaacttattcccttcaattcaagtaacagtaggtgagtcaacacaagatggcaaatcaggatcaggtgaaaagatcaagaaacgtgtgaaaac

SEQ ID NO: 219562 - DNA, 100 bp, Homo sapiens
aaaccctcctcatcatctactccttcgtcttctggcacaacaagccgctctactcctttgaagacaatgcagactatgtgtacgatgtcatgtggtcccc

SEQ ID NO: 219563 - DNA, 100 bp, Homo sapiens
atctcatcattttctccccttcggtagaagggtgacagtgaggcttttccgtggcattggatgagtggcgtggagcagcaggtggcctctctgtctggac

SEQ ID NO: 219564 - DNA, 109 bp, Homo sapiens
tcgtgaggtgcatcgcgtaccccttcaacgccaagcagcccaccgacatggcccggaggcagcagaagatgctattaactgagtacttggatatgaaaaatactcgtac

SEQ ID NO: 219565 - DNA, 97 bp, Homo sapiens
gcgagaagctgccgccgaacgacaggacgttggggcggcctggctccctcagaatgccagaggattcaacatgagcatacctatgcctgggcatcca

SEQ ID NO: 219566 - DNA, 75 bp, Homo sapiens
aaatgcaccaatcagcatgctgtgtctagctcaaggttctaagctggtctatgtccatcaccttcttggagaagg

SEQ ID NO: 219567 - DNA, 101 bp, Homo sapiens
gggacctgaaccccgaagacttttgggagattataggagaactgggcgacggagcctttgggaaagtgtacaagatcccagcatggtgagtgcctacatgt

SEQ ID NO: 219568 - DNA, 100 bp, Homo sapiens
ctcagcctggcctgctacatcgcctccctggtgttcttacacgagttcatcgaagagccgaatgcacataaggtcgccagcccaccctccggacccgcat

SEQ ID NO: 219569 - DNA, 98 bp, Homo sapiens
agtgggaaacattgaaatcaagatgttttgaacagagataaggatgaggagccaactgtaaaacaagagattgaagaaattgaggaagaagtggaacc

SEQ ID NO: 219570 - DNA, 100 bp, Homo sapiens
gggagacgacgctgctgggtccgctgagcggggcgacccgagggccaattcctgtccccccagcagcatggcatcgtgtgctgaaccctctgagccctct

SEQ ID NO: 219571 - DNA, 98 bp, Homo sapiens
tcagctgccacctgcctttgacctttttgaagcctttgcaaaagggataattctatttaaagaaaaagccaaggaagcattgggtaaagccaaagatg

SEQ ID NO: 219572 - DNA, 75 bp, Homo sapiens
ttaagctgcagtcccaaaattagggccttatgtttgatcatcggccaaggtcctggcgagaactgcctctgcggc

SEQ ID NO: 219573 - DNA, 100 bp, Homo sapiens
atcacagcttagcccccatgtactacaggggtgcccaagctgcaatcgtggtttacgacattactaatcaggaaaccagtcggggaagaatgtgatggtg

SEQ ID NO: 219574 - DNA, 98 bp, Homo sapiens
gcgaccctcccagaccggccgctctcccctcctctcacggcacctcccaccatgaagctttccccagacatggccaacaagggtccttcctatggcat

SEQ ID NO: 219575 - DNA, 75 bp, Homo sapiens
ttgccgttcgttcgtttccagcctcaggaatttatggtcgcctttttgaatgagacttctctcagctggcgccac

SEQ ID NO: 219576 - DNA, 83 bp, Homo sapiens
gatgaggacactgaaattcagagaggggaagtgatttgcctcagcttgtactgagatcatgaatcagacagataaaaatcaac

SEQ ID NO: 219577 - DNA, 100 bp, Homo sapiens
tgatattttgatgaacaatattgaacgctatcttaaggaggcaagtgaggcctatctggttggcctttttgaagacaccaacctgtgtgctatccatgcc

SEQ ID NO: 219578 - DNA, 100 bp, Homo sapiens
cacctgcactcttcaacttcaccactcaagaaactcccatcaagactgaagcagacgttttggcagaaaaccaggttcttgatagcagtgctcctaagag

SEQ ID NO: 219579 - DNA, 82 bp, Homo sapiens
cggcgggggcggcgtgcggcctagcgtctcagggaaatcctcattgacgattcaatttgttgaaggccaatttgtggactcc

SEQ ID NO: 219580 - DNA, 100 bp, Homo sapiens
tcatcttcacatttggtttctagaccatctacctcatctagaaggagagcaattagtgagacagagcccccatcacctcaggcttctcagttcccttagc

SEQ ID NO: 219581 - DNA, 100 bp, Homo sapiens
ctcctttccagtcggagacctctgccgcaaacatgctccgccagatcatcggtcaggccaagaagcatccgagccagttgcaccaccagcaccaccttcc

SEQ ID NO: 219582 - DNA, 90 bp, Homo sapiens
caaaaaacaccacagtactatcgtctatcattggatgaagtggctccggagatggtcatccgcacagaatggcagcgcattaaagaggga

SEQ ID NO: 219583 - DNA, 82 bp, Homo sapiens
cctgttcgagatcagccagccgaccgaggtgtcgtgaaaactacccctaaaagccaaaatgggaaaggaaaagactcatatc

SEQ ID NO: 219584 - DNA, 50 bp, Homo sapiens
tggttcacaacatcatcaaatgcatgggcctcctacatgaccaactcccc

SEQ ID NO: 219585 - DNA, 75 bp, Homo sapiens
cctgtgatccaagcggcagtgatttgcctcaagactccatggacgcagcgacgagagtgatcagcaggagtccct

SEQ ID NO: 219586 - DNA, 76 bp, Homo sapiens
ggctccgggtcttccagagcgtgaagatcaagatcgatctgcagcctcatgagagggggcattgctgagcgagggg

SEQ ID NO: 219587 - DNA, 74 bp, Homo sapiens
aaaacattccaccattcaacaaaaggatcatcatgcctagggttcataacataaaaaagtctcttacacctcac

SEQ ID NO: 219588 - DNA, 80 bp, Homo sapiens
gacccactggctgctggagcttgtcaccaccagtgtactaatggtcacttgatgtgcgctggctgttttatccacctact

SEQ ID NO: 219589 - DNA, 96 bp, Homo sapiens
cacacctgcaagtagggcaccagataacgaaggaggcccaacttcattcaataaggagcctgacggatttatcccagacggtagaacaaaaggaag

SEQ ID NO: 219590 - DNA, 101 bp, Homo sapiens
tttggatggtgaaccctgaagtcggtgtctgctgcgttcacggcaggattcggttaggtatctcgggggagctttgtgccttgatggatcaagttcatcat

SEQ ID NO: 219591 - DNA, 98 bp, Homo sapiens
tggaacttgtgattgagcagtttgaagacttgctagttaggattttattactggcagcatgtatatcttttaacaccttccaccatgaccacctcagc

SEQ ID NO: 219592 - DNA, 83 bp, Homo sapiens
ctgagtgctaaactgtgtggggcgcggatgggatccagctgttagtcgggtaggcataggtggaggaggaactgcaggagcaa

SEQ ID NO: 219593 - DNA, 127 bp, Homo sapiens
gtcggagtgcatcacggaggacggcaggactgtggccgtgggggacatcgtctgggggggatatgagactttctactcggaatatcctgagtgttgcgtggatgtaaaacccatttcacaagagaag

SEQ ID NO: 219594 - DNA, 100 bp, Homo sapiens
agctcccacctaaccttctgatgaaggctgacagcaaatgaagaaacacccctgccgccagtgtgacaagtctttcagctcgtcccacagcctgtgccgg

SEQ ID NO: 219595 - DNA, 90 bp, Homo sapiens
agaactttgagggcgaaggggccttgtggattggcagccaccatttgcatgtgatgttgataaacttcattttacgccacgtatccagag

SEQ ID NO: 219596 - DNA, 82 bp, Homo sapiens
aaaaaaccaacaccttcctgtgcagtcctgttggaatttcttatatagaattggtgataggatcacaacttctgaggtccca

SEQ ID NO: 219597 - DNA, 101 bp, Homo sapiens
ctgtatccaggccttattcttatagactatggacattttcatcatttgatccttcaaaaatcacaaggaagaaaagtgttataacttattctccaacaact

SEQ ID NO: 219598 - DNA, 100 bp, Homo sapiens
aatccagttccaaggactccacggggactgactgcattgcacagatgatggatatttacgtatgtttgaaacgaccatcctggatggtggacaataaaag

SEQ ID NO: 219599 - DNA, 83 bp, Homo sapiens
ccgaagaccagccagaccatggagctcgcccccaacttccaggccaccaaaaccctcaacaggggcatctctgagttcatcgt

SEQ ID NO: 219600 - DNA, 153 bp, Homo sapiens
gaatacggaggaaaagttcgttatggactgatccctgaggaattcttccagtttctttatcctaaaactggtgtaacagatgacgagttccagttattacagagaaatttcatggacaagtactacctggagtttgaagacacagaagagaat

SEQ ID NO: 219601 - DNA, 100 bp, Homo sapiens
agccagcatcttctttattgagggccaaaagagaaacattggctactttgacaaccttaaagcggactccaggaatatcaccaacagcatgacctttgcg

SEQ ID NO: 219602 - DNA, 99 bp, Homo sapiens
aaatttcagcagcgggagaagatggacaagagaaagctcgggcgacggccatcttcatccgaagcctaaagaaactgttccaactcttgctccaaaaac

SEQ ID NO: 219603 - DNA, 95 bp, Homo sapiens
aagccctaccctcaccattcaccagatccagtccttctgtggaacttctgaacatcttttattagtggaaatattttctacacaatgaagtcaac

SEQ ID NO: 219604 - DNA, 80 bp, Homo sapiens
cttcaatgtccgcatcgcaaccaccgccctggccatctaccatgtgagctgttgcgcagccattggtacctgtattgggg

SEQ ID NO: 219605 - DNA, 83 bp, Homo sapiens
ctgcccaggctcgcctcgactccaaatggttgaaaacagatatacagaaaactttagaaactgttcctttggagaggaaaaag

SEQ ID NO: 219606 - DNA, 51 bp, Homo sapiens
ggaggcttagccagccccgcggagagggccatcactgtgcatgtccccatg

SEQ ID NO: 219607 - DNA, 71 bp, Homo sapiens
ctgcagcatattgtactggcctgctgctggcccgcaggaaatctgagtggatgacaacaacctgcaatcac

SEQ ID NO: 219608 - DNA, 100 bp, Homo sapiens
cctaccgttttgagagactgactcgggacaaatacgcctacaccaagcagaaagcgacagggggcccgtcacagctggagctgactctccaggcatccaa

SEQ ID NO: 219609 - DNA, 74 bp, Homo sapiens
ccgatattcaccaagcgcttcgctacaagagaatggatcttggagaatgtctgaaagtccatgacctggcttta

SEQ ID NO: 219610 - DNA, 73 bp, Homo sapiens
gcttcaaaggctgtcgcaaggaggaagatggagtcgggtggtacagttttgagtaccaactggtctgatgtag

SEQ ID NO: 219611 - DNA, 100 bp, Homo sapiens
agaagttgcttacgccttgtacaaacttgcagcccaagagaacaggtgaaaccagcccagagaagttacgggatttgcccccggggctcctgcccagcaa

SEQ ID NO: 219612 - DNA, 100 bp, Homo sapiens
atatctgaaacagttccactgtcttccataactttcataactttgaacattttgggcatggtgctgatgtgaaatgtgtagactggcatccaaccaaagg

SEQ ID NO: 219613 - DNA, 100 bp, Homo sapiens
ggctcaccaaccgggacaccctggctgtcatccgccacttccgcgagcccatccgtctcaagactgtgaaaccagataaaagcttcgatgatgaagaatc

SEQ ID NO: 219614 - DNA, 95 bp, Homo sapiens
tgtcgtccagtaaagaagataacctcaatcatggccataccgagcaggtgatggaagtcaaaggacaaatgatccatgttccagaatcaaattcc

SEQ ID NO: 219615 - DNA, 98 bp, Homo sapiens
ttctgcctcttgatctccgccaccgtcttcaggccaggaatgtaaccaatttacctacaagtttgccgaagaaatcagaaggcagtctttcggggcag

SEQ ID NO: 219616 - DNA, 100 bp, Homo sapiens
gcttctgagacggcggcagcagcggcattcagagtttattaaccacttaacctctcagaactgaacaaagacaacattgttcctggaacgccctcttttt

SEQ ID NO: 219617 - DNA, 75 bp, Homo sapiens
gactactacgaggcgcaccagatgtaccggaccctgttcttcagaagtggagcttcccctgaagaaggatgggtt

SEQ ID NO: 219618 - DNA, 75 bp, Homo sapiens
gcggcggcggcggcgattgggtaccgagatttctggcatcagaaaaacaccgactacaacaacagccctttccac

SEQ ID NO: 219619 - DNA, 133 bp, Homo sapiens
ggacactttgttattggagaaacatgcagattatatcgcatcctatggctcaaagaaagatgattatgctgattcaccccaagagtggccgttcctaccacgaggagttcaaccctccaaaagagcccatgaa

SEQ ID NO: 219620 - DNA, 100 bp, Homo sapiens
ccctcgtccagacgccccaaacaaacagccatcgaggagggcacgctggaggagatcgaagaggaggtccggcagaagaaatcatcacggaagcgcaagc

SEQ ID NO: 219621 - DNA, 90 bp, Homo sapiens
gaggaatagtctacaaaggaagacttgtaacctggagaagaggtcaaaatgcagatcttcgtgaaaacccttaccggcaagaccatcacc

SEQ ID NO: 219622 - DNA, 98 bp, Homo sapiens
tcagacccagcagctcccctcccactgtggctcccgcatctgcctccctgccccagcccatcctctctaaccaagtcttaggaaaagtcctcagtgct

SEQ ID NO: 219623 - DNA, 98 bp, Homo sapiens
ttctgaactggattcccctgggatatatttttgagaccaaattaatcagcacattgatttataaggtggtttctcagtattcaagtctgctttctcca

SEQ ID NO: 219624 - DNA, 97 bp, Homo sapiens
ggaaccgtgtgagaatccctaaggcggggaaccgcagcgcagtgacagtgcagaaccccggcgcggcccttggtcttttgccaactcctattactca

SEQ ID NO: 219625 - DNA, 89 bp, Homo sapiens
gccgtcgcttcaagagaagaatgttacttgggcgtcataacttagagcaggaccttgtcagggagagtctagctctttcacccaggctg

SEQ ID NO: 219626 - DNA, 98 bp, Homo sapiens
ggatcttctcttcagaactatctcgtgactttaccagtctttagatgacctttcaaatgtttcttctgatgactcagtacaacttcatgcctacattt

SEQ ID NO: 219627 - DNA, 98 bp, Homo sapiens
agcagctgaaaccaattggctctggggcccaagggattgtttgcaaaccagtccagctacgggggcccagccagccagcagctgagtgggggttacgg

SEQ ID NO: 219628 - DNA, 101 bp, Homo sapiens
gggaaacctgggggctccctggacaactccgagcagctcctgccagggccatccaggtgaccgtgtccaacccctaccacgtggtgatcctcttccagcct

SEQ ID NO: 219629 - DNA, 96 bp, Homo sapiens
ggaggcagaggtggaggcgctttgaaaggtcttctgagctacgataattttttggaacggcagaaatgattggttctagcaacagatgggaatttg

SEQ ID NO: 219630 - DNA, 100 bp, Homo sapiens
ggtgttggaacttcgttgcttgcttgcctgtgcgcgcgtgcgcggacatggcctcaaacgtgaacagcagagaatttcaaaggaccttgctaatatctgt

SEQ ID NO: 219631 - DNA, 83 bp, Homo sapiens
cttcatcgaagatgctattcagaatgaggaaaatggggagcaggaggctgacaatgaggtagacgaagaagaggaagaaggtg

SEQ ID NO: 219632 - DNA, 96 bp, Homo sapiens
cactcagatgggaatatggtagcgtcttgccaaatgcattacgatttcacatggctgctgaagaagtgcataaggcaaatccaatacgcaagtacc

SEQ ID NO: 219633 - DNA, 75 bp, Homo sapiens
cctgtcctgccggagccgctgtgtgcaaagttcctattgatggtccccccatatgtacttttcccaacactggtg

SEQ ID NO: 219634 - DNA, 83 bp, Homo sapiens
ggactacttcgtgctggtggcgttcgggccgcacccgcgcgaagtaagcactttaaaggatctatttggactcgctagcaatg

SEQ ID NO: 219635 - DNA, 100 bp, Homo sapiens
aagagcacgaactgctttggagataatgatcctattgatgtttgcgaaataggctcaaaggtaaatcagaagactgaagcacggcatatactcaccttag

SEQ ID NO: 219636 - DNA, 99 bp, Homo sapiens
aaaaggtcccggaccccccggatctgacggggcgggacctggcgccaccttgcagaattaaacaaccaccatgtcgagcaaaaaggcaaagaccaagac

SEQ ID NO: 219637 - DNA, 74 bp, Homo sapiens
aaggattccaagtaactcttatttggtgccacatcatctcacagttcaaccaaggcttctacgactgtgtcata

SEQ ID NO: 219638 - DNA, 75 bp, Homo sapiens
ctgctttctaaaacaccagaactcaacctgttaattggccttggtcctcacagctccaaaaagaaacaggatctc

SEQ ID NO: 219639 - DNA, 115 bp, Homo sapiens
cagcgccctggccctctcgctgttgctggtctctggctccctcctcccagggccaggcgccgctcagaacggtgagcgagtgctgtgctttcatgggcctcttctttatgaagca

SEQ ID NO: 219640 - DNA, 90 bp, Homo sapiens
ctgaagatgttgatggagaagctctaagtacactcgtcttgaataggtaaactgaaggaacttaatggaactgcacctgaagagaagaag

SEQ ID NO: 219641 - DNA, 74 bp, Homo sapiens
accatggccacgcctgggctccagcagcatcaggcgatcagtgggtgaccgcggctgcgagggactttgtcatc

SEQ ID NO: 219642 - DNA, 100 bp, Homo sapiens
agagaggcgctgctgacaccgccgccacaccgccgccacaccgccgctgcctcagtcatgccgcctatttgatggctttgcagatggactaggagttgct

SEQ ID NO: 219643 - DNA, 100 bp, Homo sapiens
tgcctccactgactatgacctatctgacaagagcatcaaccctctggagcgaatccgtttagctcgacagattgagaaatctgagtatcggaacttccag

SEQ ID NO: 219644 - DNA, 83 bp, Homo sapiens
cgcgccggctatggccgtgccctggggctgagccctcaggttgacatcatggacatatgtgagtccatcctggagaggaagcg

SEQ ID NO: 219645 - DNA, 142 bp, Homo sapiens
gaaaagttgatggataaagaacaacaagtggctgatttacaactcaaactttctcggttagaagagcagttcgttactatcttggaaggagtgctggcaaaattatccagatatgacgaagggactttgttttcttcttttc

SEQ ID NO: 219646 - DNA, 82 bp, Homo sapiens
tggaattgaaaagtccagaggaagagttacagaatgtctgaaggggacagtgtgggagaatccgtccatgggaaaccttcgg

SEQ ID NO: 219647 - DNA, 96 bp, Homo sapiens
aagaacatccgagggtgcctgggaatcggtcgcctggaggaccagtatttcccatggaggctgtgtcagcgtgttatgatgccgtcccgtaccaac

SEQ ID NO: 219648 - DNA, 75 bp, Homo sapiens
ggagcacttcaaggagaagtatgccgtggacgacgtccagtacgtagatgagaatctggcaatgggggcaggagc

SEQ ID NO: 219649 - DNA, 75 bp, Homo sapiens
cagaggacccggcgggcggcctcgcgggtcagctcatgatggagcagtccaagaagtcctccctcatggtggccc

SEQ ID NO: 219650 - DNA, 75 bp, Homo sapiens
acacggtcctaagagctgggcaccaggaagcgaaggctgggggatatgagactttctactcggaatatcctgagt

SEQ ID NO: 219651 - DNA, 83 bp, Homo sapiens
atagagttgagcctgtgggacacttcgggatccctgctgccttggtgatcccgggctgacagccagagagcacagcggctcag

SEQ ID NO: 219652 - DNA, 100 bp, Homo sapiens
atggatttcagaaactgttggagtttatatacacaggaactttaaatcttgacagtgccacaccagaggaatataatacagttgtacagaagccaagaca

SEQ ID NO: 219653 - DNA, 100 bp, Homo sapiens
cagacgatattgatattgaagcaatgcttgaggctccttacaagaagactgagagagatttctgatattgccagaagacaagttgaaattttgaatgcac

SEQ ID NO: 219654 - DNA, 75 bp, Homo sapiens
cagatctgaagggaaagctccagatactagtgctatggtctttagaattgggtcactggatttctgaggagccgt

SEQ ID NO: 219655 - DNA, 97 bp, Homo sapiens
ccggccttgtgtgtccgactcggcagcagtggattcactccttctccagttgcacagccacacccttcagctggccttaatgttgactttgaatctg

SEQ ID NO: 219656 - DNA, 75 bp, Homo sapiens
ctgaacctgttatcacctggagacaccttacaccaactggagatacaactcgtcaacgaatcaaattcagtgatg

SEQ ID NO: 219657 - DNA, 97 bp, Homo sapiens
ctcagttggaagcagccgatccagcctgcggagcctgtggggcaggagtacaagcgcaagctagccagagtttccctggtgcgcaaagaactcaggt

SEQ ID NO: 219658 - DNA, 75 bp, Homo sapiens
cagccgggggacagctgtagtgaagactgattttgcacgatttagcggaacaaatgtggaaactgactttgtaga

SEQ ID NO: 219659 - DNA, 76 bp, Homo sapiens
cccaaaggttgagcagaaaattgcccacaagagtgaacagatactgaaagcggccagtctccaggttcccaggccc

SEQ ID NO: 219660 - DNA, 50 bp, Homo sapiens
gtggagtcggaaaatctactacagcagctgtgttgcccactgtgcctgag

SEQ ID NO: 219661 - DNA, 82 bp, Homo sapiens
gggaccacggtcaccgtctcctcaggagggccctcctggacccgggagcggaccctggtggcggtgaagcccgatggcgtgc

SEQ ID NO: 219662 - DNA, 88 bp, Homo sapiens
ccggggtgaccctgccggagcctccgctgccagcgacatgttcaaggaaatggctagtgatgagctgaaagagatgcggaaaaacttg

SEQ ID NO: 219663 - DNA, 100 bp, Homo sapiens
caagaaccgactggaccccacgtggcaggagatgctgaaccatgctacctgcaagttcgtgccctcgtgaggctggcatgcaggatggcaggacagcccg

SEQ ID NO: 219664 - DNA, 106 bp, Homo sapiens
ttctctgttgtctcggtagaaggccagagtcacacacggtcctaagagctgggcaccaggaagcgaaggctgaaagctctgggtgtgcggcagtaccatgtggcct

SEQ ID NO: 219665 - DNA, 51 bp, Homo sapiens
ggcttctttgagactgaaatggcagataagtatgctgtgcgcttcatccct

SEQ ID NO: 219666 - DNA, 90 bp, Homo sapiens
tggctgggctgctcgggttagatcgtcaggaaaaccaggagagctgacgttgttctcagtgctgccagagctgagccagtccctagggct

SEQ ID NO: 219667 - DNA, 99 bp, Homo sapiens
cctgctttgccttcgccttccaccatgatcggtgttttgaatgctgtatcaaatgcctggggggcattccctatgcctctctgattgccaccatcctgc

SEQ ID NO: 219668 - DNA, 75 bp, Homo sapiens
ctggaccgcatcgtggccttgacctccaaccaggcccgatgagagaaagggaaagttaaggatgctggagcagaa

SEQ ID NO: 219669 - DNA, 82 bp, Homo sapiens
atactcggataccagcgctcagcccacctgtgattatggcacagttggcgggcagctcccaggtctccatgagtacggcgcc

SEQ ID NO: 219670 - DNA, 75 bp, Homo sapiens
caacgatgccggatacaggagggacgtgcaccagcaagagtgagccatggagctacgtgtggggaacaagtaccg

SEQ ID NO: 219671 - DNA, 100 bp, Homo sapiens
ttcaccacgcggctgcacaactgcaggaacaccgtcacgctgctggaggagatacagtaccaatgaaggggagacctggaaaacattcatcttctctgag

SEQ ID NO: 219672 - DNA, 75 bp, Homo sapiens
gtgaaaaataccacgacaaaaccaccctagactctgaagaagaagaactagccagtactccccccagctcagagg

SEQ ID NO: 219673 - DNA, 87 bp, Homo sapiens
tactcctccctcaactccctcatcgtttgacaactttaaacgggtcttcaaggtggtagaggaaatgcggggctccctggtggacaa

SEQ ID NO: 219674 - DNA, 100 bp, Homo sapiens
atcagtgtttgggaatgattctgatgatgatgatgaggaggaagaaccctttgagagctccagtgaagaagagtttggtggtgaggaccatcagagccta

SEQ ID NO: 219675 - DNA, 82 bp, Homo sapiens
cctgcatctcctctccgccatgagccaggagacgtacctttaccacatagacaaaggcagctaagaatggagcaacaggcgt

SEQ ID NO: 219676 - DNA, 100 bp, Homo sapiens
tttgctcctggtggaacagttgttgcagcaagcgattcagttagtgtgactctggatccagatacagctcatcacgaactaattctctctgaggatcgga

SEQ ID NO: 219677 - DNA, 75 bp, Homo sapiens
tgaaagtggcggtgcggatacgacccatgaaccggcgagtgggaatgtaagacggacttagatattgcatacaaa

SEQ ID NO: 219678 - DNA, 102 bp, Homo sapiens
ggataataatggttcttcctgaagacccaaagtatgccctgaaaaaggttgatgacaacaagaaactaggagaatgggtaggcctttgtaaaattgacagag

SEQ ID NO: 219679 - DNA, 122 bp, Homo sapiens
cccaaacctggcaaggatggtgcagattttggcagattatggctttgtccccacccagcactgatgatattataaaaatctccctggaaaaggagacatgaatgtctgcaatgatacttcct

SEQ ID NO: 219680 - DNA, 100 bp, Homo sapiens
aaaacgccctctgcggtgaaggagagagctctgcgtgcctcttgctgtgccctacctggacaaacccccaactccgctccacttctaccgggactgggtc

SEQ ID NO: 219681 - DNA, 100 bp, Homo sapiens
gtcttcccggcgagtccgcgacggtcgccgcccacggcgaggcatctcgtccccggtgaagaagacagagatggacaagtcaccattcaacagcccgtcc

SEQ ID NO: 219682 - DNA, 100 bp, Homo sapiens
tttgactgaagaacagaaggcgatcaaggccaagtatccgccagtcaataggaagtacgagtggtgataaaagaaaatgtggctgaagttacccgaagtt

SEQ ID NO: 219683 - DNA, 83 bp, Homo sapiens
cgtcccttcgcctccttcaccgccgcagaccccttcaagttctagtcatgtgtcaacagcatctccaccctggagcctgtgag

SEQ ID NO: 219684 - DNA, 100 bp, Homo sapiens
ggtggtgctgacaatcgagcaaggaaacctggatacgtaggtaacctttccagagatgtgacagaagtccttatacttcagttgttcagtcagattggac

SEQ ID NO: 219685 - DNA, 142 bp, Homo sapiens
ggaggcgactagcggcggcgggagcggcgccgagaggccgtgcgggacgcgggcgccaggaccggccgaacgcagaggcgatcagtgggtgaccgcggctgcgagggactttgtcatccgtcctccaggatctggggagaaa

SEQ ID NO: 219686 - DNA, 75 bp, Homo sapiens
agcagagaaagcacatgctgcaggagaagatcccagatgcagtgactggttactacctgaaccgtgctggctttg

SEQ ID NO: 219687 - DNA, 106 bp, Homo sapiens
acagtttgctctgctcttccaacaccagtggaagatgatcacatcccagtgtaaggagaggatgaggcccgtgaaaaaggcactgaaacagctcgacaaacctgac

SEQ ID NO: 219688 - DNA, 75 bp, Homo sapiens
gcacattttacaatatgggataagctattggaaagatctcggaaaatgattctggatgaaattgaagaacataac

SEQ ID NO: 219689 - DNA, 82 bp, Homo sapiens
tgaaatggatttgcatcttgtaatgtgtttaacaaagccacgaataacctataatgattcgacctcacattactactttgcg

SEQ ID NO: 219690 - DNA, 100 bp, Homo sapiens
ctacttgattctaatggccatgtggtgctgacagattttggtctgagtaaggagtttgtggctgatgaatccagttacaacacagggatcacaacaaaca

SEQ ID NO: 219691 - DNA, 51 bp, Homo sapiens
acaccaaagattgtctctggcaaaggtgttggggatgtcctttgcactgac

SEQ ID NO: 219692 - DNA, 50 bp, Homo sapiens
ccagctccgaaatcaccaccaagacgagccaaactcaggctgtaccttga

SEQ ID NO: 219693 - DNA, 98 bp, Homo sapiens
aaatggaagcttatacacccaagttaactcaggggccttggacaagttgttactgactatgttcatggggatgccttgcagaaagctgccaaggcagg

SEQ ID NO: 219694 - DNA, 82 bp, Homo sapiens
ctgccgctaccagaagtgcctggccatgggcatgaagcgggaagcgccgtgccgtccctgcagtgacaccgaggtgctccta

SEQ ID NO: 219695 - DNA, 98 bp, Homo sapiens
gaagatgggggatttctacgacccggagcacccgacccctgagttctggcctataggaacaagacattttcagtaatggaagaaggagcttccaggct

SEQ ID NO: 219696 - DNA, 100 bp, Homo sapiens
tcgggcttcccagcagcggcctagcgggtaagtaaggaggtctctgtaccatggctcgtacaaagcagactgcccgcaaatcgaccggtggtaaagcacc

SEQ ID NO: 219697 - DNA, 50 bp, Homo sapiens
tcatactctgttatagataaacaagggaaacagtgcttcttagtcctacg

SEQ ID NO: 219698 - DNA, 83 bp, Homo sapiens
ccgggggcgcgcgacgccatgggccggccgggcccagagctcctgtctctcagcttcatggcggctgaagagatgcattggcc

SEQ ID NO: 219699 - DNA, 101 bp, Homo sapiens
tgaagagcgacaagccgctggcagccgcggatctcaccgccgctcagggtgtggacactgccagcggctgcagccgacttggaatgacctgggagacaaat

SEQ ID NO: 219700 - DNA, 83 bp, Homo sapiens
gaggagtttaaggagctgaaagcgcgctttcgaacctctgatttggagttcagtggaaatttaacctttttggacctcttccc

SEQ ID NO: 219701 - DNA, 100 bp, Homo sapiens
agagccctggatgtcatttggaaaaacactagagacagacggctggcaggcagctgagtatgtcccagagaaggtgaagaaagcggaaaagaaattagaa

SEQ ID NO: 219702 - DNA, 138 bp, Homo sapiens
tcgcagtttgactctggagccactcaggtttttcctaagctcaactctagccagctaggttcctggtgctttggggatcatccagacttgaaacatatcgacccagtggttttaaaacattgtcatgcagcagctgca

SEQ ID NO: 219703 - DNA, 100 bp, Homo sapiens
gaacgtattaagaactgattcctctcatcaagcctggatcagaattcaggctataaatgaaattggagctggaccatttagtcagttcattaaagcaaaa

SEQ ID NO: 219704 - DNA, 96 bp, Homo sapiens
tctacggcatcaccgacgaggtgcagcttctggaaaaggcaacagatggctccctgcaaagtgaggattggacgttgaatatggagatctgtgaca

SEQ ID NO: 219705 - DNA, 75 bp, Homo sapiens
ttgccgcgatacccaaggcagacattcaacacctttacatttagcaggacagtcattttgtttactcattcagcc

SEQ ID NO: 219706 - DNA, 100 bp, Homo sapiens
acatcagccgaaattcagatcgatttgtctcaatgaaggttgatttcatcagactaaaaagttacaggtggatcaatcttcctgtcctacaactgacaaa

SEQ ID NO: 219707 - DNA, 76 bp, Homo sapiens
cgggaccaccctgggcacagcaggcatcggagggtctcctatggacagaagtgcgggcaaggagctttgttcctcc

SEQ ID NO: 219708 - DNA, 50 bp, Homo sapiens
caggacacggcctacaacaccaagagcttccccgggcgctgcctggacag

SEQ ID NO: 219709 - DNA, 48 bp, Homo sapiens
gtacctgttaccactttcaaaatacatccagcagtggtcattcgacaa

SEQ ID NO: 219710 - DNA, 82 bp, Homo sapiens
tggcgatgcctaccacctagaactggattgtgcggtggcttgcaattcgcctggagctggttgggaacctgactgtcttctt

SEQ ID NO: 219711 - DNA, 90 bp, Homo sapiens
gctcaacaaagctgtctgggccaaaggaataagaaaaagcggatggtggttcctgctgccctcaaggtcgtgcgtctgaagcctacaaga

SEQ ID NO: 219712 - DNA, 83 bp, Homo sapiens
cagggaataggagctggggagcccttctgcgccacaggaagtttgtgtttttcaacatacctcagattcaatacaaaaaccct

SEQ ID NO: 219713 - DNA, 73 bp, Homo sapiens
atgaaggacgtgcccgactggaagttatgtgtctcggtaccacgtgaaagactcctcacgccacgtcatccta

SEQ ID NO: 219714 - DNA, 98 bp, Homo sapiens
tccgaggagcccttcggggtgatcgtgcgccggcagctggacggccgcgtgctggtgaggacgcttgagcggaagttagaagcaaaaatgatcaagga

SEQ ID NO: 219715 - DNA, 80 bp, Homo sapiens
catcagcatcactgaaaacgtgctgcatttcaaagcttctactcgaacacgaatgcaaaagcagaaaatgaatgatagca

SEQ ID NO: 219716 - DNA, 100 bp, Homo sapiens
ggggactgggcacatcatcaatacgtatgtttttacccagtacaacaaaccattcttcagcacctttgcaaaaacatctatgtttgttttgtaccttttg

SEQ ID NO: 219717 - DNA, 100 bp, Homo sapiens
ctttggacgccggtggagacgcaggcgaggttggacgtgataagtatgagcctgcagctgtttcagaacaaggtgataaaaagggcaaaaagggcaaaaa

SEQ ID NO: 219718 - DNA, 80 bp, Homo sapiens
acgccgagcacccaggcgactgcctcatcttcaaggcctgtaaaagaggaaattcagacatcgtacgactcgtaattgaa

SEQ ID NO: 219719 - DNA, 50 bp, Homo sapiens
gggaaatgatgactctgacaaaactgaggaacgtcaaggtcgtgggaaat

SEQ ID NO: 219720 - DNA, 87 bp, Homo sapiens
ttgtatagtgaaatccatgagcgtggatgagacagataagacctgtcatttactccatcctttatagtgatgctacaggacgaagag

SEQ ID NO: 219721 - DNA, 100 bp, Homo sapiens
tatacagctacatccaggagagaatgctgacagtcctgcaggttcagccgtctgtatatctccccagatacctgaaactgaccacctgagtacgttttcc

SEQ ID NO: 219722 - DNA, 76 bp, Homo sapiens
tcggaatgcactacaacaggaaaatcatattatagatggagtaaaggtcgacaaagatgctgaattagtggcccaa

SEQ ID NO: 219723 - DNA, 90 bp, Homo sapiens
catggaggaggcggaccgaatcctcatccattcgctgcgccaggccggcactgtaaaacctgttctgagccaaaaaagataaccagttcc

SEQ ID NO: 219724 - DNA, 90 bp, Homo sapiens
gtgagccgccccgcgcccccgccgcgccctcagcctagaacattccatattctgcttcacacacggtgactcactcactactgctttgta

SEQ ID NO: 219725 - DNA, 99 bp, Homo sapiens
cgccggcggtggcgcctgcggacctaactagctccaggttaggccgagctttgcgggaaagcagcgaccaagagcagtgatgaccttttagctggaatg

SEQ ID NO: 219726 - DNA, 90 bp, Homo sapiens
aatttgaagattctacagataaatcagactattgggaagaagttacctgcaactacagcaactccagactcatcaaaaacagaaatggac

SEQ ID NO: 219727 - DNA, 75 bp, Homo sapiens
gcgctcgatccagcaccatggggaagcgggacaatcgggtggtgaaggaaatactcatgaccagccagatgtctt

SEQ ID NO: 219728 - DNA, 75 bp, Homo sapiens
gccttccatagggctgagtctgggaccgaggctgctctttggcgtaaattgcaatcgattagggatcgtttctca

SEQ ID NO: 219729 - DNA, 90 bp, Homo sapiens
aatgtagaggatgacttctctaatcagttacgattcccaaatgctggaaaatcctctttgctaagttgtgtttctcatgcaaaacctgca

SEQ ID NO: 219730 - DNA, 90 bp, Homo sapiens
gcccccggctcgccggtcagcggctcgtcgccgttcgccacccaagtttcaaccacaccacgggcttttgaccacacaaaacagaaccag

SEQ ID NO: 219731 - DNA, 75 bp, Homo sapiens
agcctcccaagcctcccagtgcaccttctaggagacaagcaaggctgaacctcctcagaagagcaactggagata

SEQ ID NO: 219732 - DNA, 50 bp, Homo sapiens
cggctcacctgtgcgggatggaacaaaagtgctcttaaagttccgtacag

SEQ ID NO: 219733 - DNA, 99 bp, Homo sapiens
cacagagaattaagtaactggtcgaggttgtatcagtaagaagggagcacggaacagattcaagctcagcctacttctgcttcctcctggccgctctgg

SEQ ID NO: 219734 - DNA, 99 bp, Homo sapiens
gaagcgactgagtccgcgatggagtctctagtgatccctgaaaagttccagcatattttgcgagtactcaacaccaacatcgatgggcggcggaaaata

SEQ ID NO: 219735 - DNA, 100 bp, Homo sapiens
ctctgttccaaatgctttgctggtggttgctgtatatggaactttatctgatttgctttctgtggccagcagtaaactcggcataaaagccaccagtgtg

SEQ ID NO: 219736 - DNA, 71 bp, Homo sapiens
tgaaacagaaattctggaacacctatatggccaggaccaaaccgtcacgagccaggtggccgtgaccctcc

SEQ ID NO: 219737 - DNA, 90 bp, Homo sapiens
ctgacagatgccagcgtagctgaatccagtaccaaaaacgtcaacaacagttttacggaattgaatgatctggcacgggaccctccagca

SEQ ID NO: 219738 - DNA, 75 bp, Homo sapiens
gggctacctggagacagtggcggcttattatgaggagcagcacccaatggattaccgggccttggtgcatgagcg

SEQ ID NO: 219739 - DNA, 100 bp, Homo sapiens
gggcagtcccggggaggacggtttcgtcccgtcggcgctggggacccgcgagcagtaaacctagcctttaagcaacctggaaagaggctagaacaccaag

SEQ ID NO: 219740 - DNA, 75 bp, Homo sapiens
gttctaagagaagcaaggaagaagtaggcatcaatactgaggctgcagttcatggagctcgtttcaaagggcaag

SEQ ID NO: 219741 - DNA, 100 bp, Homo sapiens
ggccagagctggagacctagcacccagaagatgagaccgcaattcgagaatcaaagggccgggagcgatgccactgaggcggctcccagctgcgttggcg

SEQ ID NO: 219742 - DNA, 104 bp, Homo sapiens
cagtgatataaaaactcacaagtggtttgccacgacagattggattgctatttaccagaggaagttccatggaaaatgggagaccacctgatcctgcagactgg

SEQ ID NO: 219743 - DNA, 100 bp, Homo sapiens
gtctctttggggatacagtcaacacagcctcaagaatggagtctaatggggaagcacccagaggcctccattcaggctgttttttcagatgcccaaatgc

SEQ ID NO: 219744 - DNA, 83 bp, Homo sapiens
ccacctggaaaatgcaggctgcaacaaaattggcaacttcagtactgacatcaaggttttgagcaaaattttggactgtgaag

SEQ ID NO: 219745 - DNA, 75 bp, Homo sapiens
ttgcatgaggatgctgaggctgtcctgtcctcgtccgtctcatcaaagtgtactaatggtcacttgatgtgcgct

SEQ ID NO: 219746 - DNA, 97 bp, Homo sapiens
tttattcttattacaggccatccgagttactcatgagaccagtgcccatgaaggtcagactgaggcacattgcaagcaacccgtgccttgatggtgg

SEQ ID NO: 219747 - DNA, 50 bp, Homo sapiens
aggctggtggagttcatggccagtgatgtttatccatgcatcgttgagac

SEQ ID NO: 219748 - DNA, 74 bp, Homo sapiens
tgcggtcgaagaaggggacgccgacaaggttcagcagactgtacaggatctttttggcagagccccaagtaaag

SEQ ID NO: 219749 - DNA, 96 bp, Homo sapiens
tctcgctcggctgcgggaaatcgggctgaagcgactgagtccgcgatggaggagccttcacgtaaatgggtccagtcatgcctcccagtaagaagc

SEQ ID NO: 219750 - DNA, 75 bp, Homo sapiens
ctggacaagtgtaatgaaattatcaactggcttgataagaatcagggtgtgctgggtgcatcatgtaactggcat

SEQ ID NO: 219751 - DNA, 90 bp, Homo sapiens
aattgatgccagacatcatgagggccgttaccattacgatccatctccgattcctccattgcatatagccgggaaaagcttctgaaacca

SEQ ID NO: 219752 - DNA, 75 bp, Homo sapiens
agacgatttgctcatggaacagcaggtctggtgttccttacggccctctcaggcctgagacctgggaggaagctg

SEQ ID NO: 219753 - DNA, 82 bp, Homo sapiens
tgtaccacatgggccaacacagcaacaaggcctgctatggtgtgctgcggttcatcatggagagtggggccaaaggctgcga

SEQ ID NO: 219754 - DNA, 100 bp, Homo sapiens
tccacgacctcccagaaaacttgcgaaacatcaagttcgaatgatcttctggatgacctgaaatcagaactaactggaaaatttgaaaaattaattgtgg

SEQ ID NO: 219755 - DNA, 75 bp, Homo sapiens
gctaatggtggagccaaaatgctattgccctgtcttcatcaacatttaatcagaaaatatatgcagatgatgaac

SEQ ID NO: 219756 - DNA, 80 bp, Homo sapiens
tgatggccagacctgcagttgctctacactttcagattcaaccctatgaaaagataaaggccaggggcttgcctgataat

SEQ ID NO: 219757 - DNA, 100 bp, Homo sapiens
cgccgccactgccgcaggaggcgtgagacgcaaacatgcagatctttgtgaagaccctcactggcaaaaccatcacccttgaggtcgagcccagtgacac

SEQ ID NO: 219758 - DNA, 50 bp, Homo sapiens
cagttctcccggtgtggccacgagtcggggtctcactgtcacccaggctg

SEQ ID NO: 219759 - DNA, 88 bp, Homo sapiens
tggtgaagcagatcgagagcaaggatgttgacaatgcgtctctggcacgtcttgaccttgaacgcaaagtggaatctttgcaagaaga

SEQ ID NO: 219760 - DNA, 75 bp, Homo sapiens
cagtggcgcttgagttggtcgggggcagcggcagaaactgccagaggcatgcagcattggtgatggaaagccctt

SEQ ID NO: 219761 - DNA, 98 bp, Homo sapiens
ggaccagccccagggagcctgcaggaccccagcaccccactcctgaacctgaatgagcccctggtctgaagttgcagccggagtgaagaagagcggac

SEQ ID NO: 219762 - DNA, 83 bp, Homo sapiens
cgccgctcaccccgcggccgcaccttcccgccttctcaggacccttgaacatctgtgaagaaatgactattctgcatggaggc

SEQ ID NO: 219763 - DNA, 75 bp, Homo sapiens
tgaggacatggcctccgacgaggacatgtggaagttaaacgagctgagcctcgggacagcaagagccaagcgccg

SEQ ID NO: 219764 - DNA, 60 bp, Homo sapiens
catcggcgagggcgcctacggcatggtgtggacaaccctccatatgataagggagccttc

SEQ ID NO: 219765 - DNA, 83 bp, Homo sapiens
ctggggaaggcgattggcatcgatctctccatcccttccgaggcccgacttcggtggtatcacggaaaacttgacagaacgat

SEQ ID NO: 219766 - DNA, 100 bp, Homo sapiens
aaagatccctgctggccaaaacattctgattaccggactccctggaggaaaagcggaagcggcagcggtctgaacgcctggaacggattttccaacttag

SEQ ID NO: 219767 - DNA, 82 bp, Homo sapiens
ggatagccccggcggagcccgcagcttccctgccgtaagactttgaccccgacgcaggcttcagtgattgccgcggatcaga

SEQ ID NO: 219768 - DNA, 147 bp, Homo sapiens
agtggtgggattacaggaacgggaggtcaaatgtgttgaagatgtactgaaactcattgacataggcaacagttgcagattcagaatggacagtttagaagaacctcagaaaaaagtctttaaggctcgaaaaacgatgagagtgag

SEQ ID NO: 219769 - DNA, 75 bp, Homo sapiens
agccaagtgtggcagcagttcgtgaagtctgtgaggaggaactcgaatcatttatgacagaaagtttctgttgga

SEQ ID NO: 219770 - DNA, 73 bp, Homo sapiens
tgtcaaattatgggcaaaacattcaagatggaaaaggtgatgtaaccattacaaatgatggtgctaccattct

SEQ ID NO: 219771 - DNA, 100 bp, Homo sapiens
ggagggaattcagcctcagtgatgtccatgagatggcccctgagttctgcagcctcgaggaaggcctgccctatctggacatggtgattgcagagacgct

SEQ ID NO: 219772 - DNA, 98 bp, Homo sapiens
atcaagggaaaatggggtgaggaagattttgaagacaatcgtcacttatacagggatattggagaagatattccactagacaaagatttctgaaattg

SEQ ID NO: 219773 - DNA, 74 bp, Homo sapiens
agatactttaagcttcgagggcgaacgctttactatgccaaaacggcaaagtaatagctcttcaagtctgcaat

SEQ ID NO: 219774 - DNA, 83 bp, Homo sapiens
cagcaacaacagagagcacgtgccattgagacccagagcagcagttctgaagagatagtgcccagccctccctcgccaccccc

SEQ ID NO: 219775 - DNA, 100 bp, Homo sapiens
gggagcgagagctggagaagctgggattggagattccacccaaacttgctggtcactgggagctgaagaaatcaggggagaaacccctgcttggtggaag

SEQ ID NO: 219776 - DNA, 90 bp, Homo sapiens
aatatctgtcttcggtggactccttcggcagtccacccaccgccgccgcctcccaggtactggctgtgatcgaacttctcaaccctcaga

SEQ ID NO: 219777 - DNA, 100 bp, Homo sapiens
tacctcaaccctgagctgcgtgagaacccgcccatgaagccagatttctcccagagatgaggtctcactctgtcacacaagttggagtgcagtggtatga

SEQ ID NO: 219778 - DNA, 98 bp, Homo sapiens
gccagtagtgcccgccccacccgcatgctctttgtcactccccggcggcagcacgaaagtaccatagcgtccagttgtaaatgccaatgtctcagtgc

SEQ ID NO: 219779 - DNA, 137 bp, Homo sapiens
gtccgttccgggctcggtgcgactgcgcagctcctcggcgcttcctcggtggcttccccgggtcgagcaaacaggattatatgcgtcaggcaggagaagtgacttatgcagatgctcacaagggacgcaaaaatgaa

SEQ ID NO: 219780 - DNA, 82 bp, Homo sapiens
ctcaatttaagcctgatctaacccctagaaacaggttacccatgcagttgttactgtaccagcctattttaatgatgcccaa

SEQ ID NO: 219781 - DNA, 80 bp, Homo sapiens
gaggggccgcgggagcccgaaagcgaggaatgggtaccacagaccatgtcatcgtcctggcgtccacgaaccgagctgac

SEQ ID NO: 219782 - DNA, 100 bp, Homo sapiens
agtggtcgagtgcttcaggcaaggaacacccttgattgcattttctttactacctcatgaacagaaggtaatgtagtttggctggatgaaatgacagcca

SEQ ID NO: 219783 - DNA, 100 bp, Homo sapiens
cccctcgtgctcggcttcctgcgcgataaccaactctcagaggtggccaataagttcgccaaagcgacaggagctactttgagaagcccgagagcccccg

SEQ ID NO: 219784 - DNA, 100 bp, Homo sapiens
gaactggcggacgtgggggcggcagccagctcgcagggtggctctcgggggctggtccatgggcggctgtggcgtcaggatggagtcctagctgtgacct

SEQ ID NO: 219785 - DNA, 50 bp, Homo sapiens
tggatttgtaaacaggatggctcaaaatcaccaggacagccaatacaagt

SEQ ID NO: 219786 - DNA, 74 bp, Homo sapiens
gagtcgcgggcgcctccgcctcaggatgttgcttcagagtgtgaagtcaaatgcatgccaacattccagttttt

SEQ ID NO: 219787 - DNA, 100 bp, Homo sapiens
gcagctgcttgccggccccaacacggaccttggaatttagataatgggctgtgtgcaatgtaaggataaagaagcaacaaaactgacggaggagagggac

SEQ ID NO: 219788 - DNA, 75 bp, Homo sapiens
agttacagagatggagtgcggtcgctctgaaatcgacgagctgatcaaggagatcattgccactgcggtttgcca

SEQ ID NO: 219789 - DNA, 75 bp, Homo sapiens
ttgttctcagtttctcggtttatgtgctcttccagccagatctgccagtgagcctcaggctttaggaactgaaga

SEQ ID NO: 219790 - DNA, 50 bp, Homo sapiens
taacatcacctccgtagtcaagatctgatgaagcaagctgctcttgggag

SEQ ID NO: 219791 - DNA, 100 bp, Homo sapiens
gctcagaagaaaatgcaaaaaaactaatggaattagcctgcaacatgaaggaggagctagaaaccctacagagcatcaataagaagttggaactgaaagt

SEQ ID NO: 219792 - DNA, 97 bp, Homo sapiens
ttggagggtctcgccgccagtggaaggagccaccgcccccgcccgaccatggccgaggtggcgagctttcctgcccggcctgaagttcgaggtcatc

SEQ ID NO: 219793 - DNA, 75 bp, Homo sapiens
tcttccactgatatctcaaaaggtgatctggacaaaggaacaggtatctcaggatgccaaagaagagtgaatggc

SEQ ID NO: 219794 - DNA, 82 bp, Homo sapiens
gccgtccttctccactttcgccagcccgtgccgcgagcgcggcctgcaggagcgagcagctgatgcagctgtacagtgcgcg

SEQ ID NO: 219795 - DNA, 82 bp, Homo sapiens
ccagatccatttacactttacagttttaaatgcacagagagcaggatacaaggcagccatagttcacaatgttgattctgat

SEQ ID NO: 219796 - DNA, 88 bp, Homo sapiens
cttcagtttttgtgtataagagagaaaatgaagacaaggttaataaagctgccaagtgagaaagatcagtctaaagaaaaggagaaga

SEQ ID NO: 219797 - DNA, 100 bp, Homo sapiens
taagcccggagcccggcgctttccccgcaagatggacggtttcgccggcagtctcgaaagctgatgtcctgaccactggagctggtaacccagtaggaga

SEQ ID NO: 219798 - DNA, 75 bp, Homo sapiens
ctcaggtctacacacagaatgctgaaatgaggcctcttggttgttatactagagtaaaaggatggtttcttctgg

SEQ ID NO: 219799 - DNA, 49 bp, Homo sapiens
gtctttcaggattcctgggacacagaggctcaaagatttggaaagagac

SEQ ID NO: 219800 - DNA, 74 bp, Homo sapiens
gccgcctggcggccatcgtggctaaacaggtactgctgggcctcatggcggtccgagcttcgttcgagaacaac

SEQ ID NO: 219801 - DNA, 90 bp, Homo sapiens
cagatgtcctcatcatcccgtcagagctgaggtacttcgtgaaggatgccgaggaatgtgacagggctgggagtgtggccacctgccagg

SEQ ID NO: 219802 - DNA, 119 bp, Homo sapiens
cttatttagttctggggagcgcctcgtcgacatgagtgatgtggaggaaaacaacttcgagggcagaagcgtttcccaaagtgtattctgcggaactagcacctactgtgttctcaaca

SEQ ID NO: 219803 - DNA, 74 bp, Homo sapiens
agaaaccagccgaacttcagggtttccaccgttcgttcaaggcccagcgcttgagaagtcggaggccaaggccg

SEQ ID NO: 219804 - DNA, 100 bp, Homo sapiens
ccgcatcccggacggtacttctgccactgctgctccgtggagatcgtcccgcgcctgccgactgtgccctgtccacggtgcctcctgcatgtcctgctgc

SEQ ID NO: 219805 - DNA, 89 bp, Homo sapiens
ctagcgccgctgggcctgcaggtctctgtcgagcagcggacgccggtctctgttccgcaggatgaatagcctaacatggcagaccagag

SEQ ID NO: 219806 - DNA, 74 bp, Homo sapiens
gaaccagagcttgaagatttgactagatacgatgttggtgatttggatatctactctggagataaagttggttc

SEQ ID NO: 219807 - DNA, 100 bp, Homo sapiens
caagcagcgacgccagcggcggagaaccgacgaaagaacaggccgcccgcctgaagaaactacaagagcaagagaaacaacagaaagtggagtttcgtaa

SEQ ID NO: 219808 - DNA, 80 bp, Homo sapiens
tctgggggcgctggcggcctgcgcagccacctcaagattctggaacttttcaaagcctgactctcttcttgaaacagtgg

SEQ ID NO: 219809 - DNA, 101 bp, Homo sapiens
gcgtgagctccaggaatgaggactacccccgaacctgcaggatgtggctctgccaaggctgagaatgacaaacatctaagtgtagggcctggccaggggcc

SEQ ID NO: 219810 - DNA, 100 bp, Homo sapiens
ccaagaaacatctcaccaatttcaaatctgtatattccagaagatattcttaagaatttagtagaggagcttcctcaaccacgaaaaatacctaaacgtc

SEQ ID NO: 219811 - DNA, 113 bp, Homo sapiens
tttgacagactcctgttcttctggtcagatcgtaggaacccacacgaagtgcagccctcttacgcaaccagggtggctcctatggacggaaaacagtcttaagaggcaactcc

SEQ ID NO: 219812 - DNA, 82 bp, Homo sapiens
gtcgggtcatgtatacaataatcagtttggttgaaatgttggatatgtctgtccctgcagttgctaaattgagacgtctttt

SEQ ID NO: 219813 - DNA, 82 bp, Homo sapiens
cgcgatcttcgccgttaccttcttgctggcgttggtgggagccgtgctctacctctatccgctacaccaaaattgcattgag

SEQ ID NO: 219814 - DNA, 100 bp, Homo sapiens
cgcctccaggccaagagggatccttcacccgtgtctgaaatggtggagtcaatgaagaaagtagcagggatggatgtggagctgacagttgaagaaagaa

SEQ ID NO: 219815 - DNA, 100 bp, Homo sapiens
ctctcctcggtctctccctgaagcccaccggtccccaacgcatcatgccagggagccaagcgtcctgcccggcctgatgtcttggcattgcccattttca

SEQ ID NO: 219816 - DNA, 105 bp, Homo sapiens
ggcggctccgcagtgaccggactcgggggaggttggtcaaagaaaaagtgatgtatgaaaaagaggcaaaacaacaagaagaaaagattgaaaaaatgagagctg

SEQ ID NO: 219817 - DNA, 83 bp, Homo sapiens
ccggactccatcgactcccccggctcttagactagatccaaactactggatacaggtgcatcgcttggaacatggagatggag

SEQ ID NO: 219818 - DNA, 102 bp, Homo sapiens
ctgggacacaacgacgacattatcagctgcacatcattgactcctgggcccaactgtgaccgatttaaactgcacataccatatgctggagagacattaaag

SEQ ID NO: 219819 - DNA, 100 bp, Homo sapiens
gttcagtgggaagcatgtcgtctttatcgctcaggcctcccatgtgagtgcagccagctgcgcaaggccatcggggagatggacaaccaggtctctcagc

SEQ ID NO: 219820 - DNA, 83 bp, Homo sapiens
cacaggctggatgaagattggggaggcaagtgaggcctatctggttggcctttttgaagacaccaacctgtgtgctatccatg

SEQ ID NO: 219821 - DNA, 75 bp, Homo sapiens
aagcaggcgaacccgcggcgcaataacgaattcagaaggagctggcggacatcactttagaccctccacctaatt

SEQ ID NO: 219822 - DNA, 83 bp, Homo sapiens
ccaacatggcggaacgcaggagacacaagaagcggatccagcttttctgggagaagaggctacaaggacttagtgcatcagat

SEQ ID NO: 219823 - DNA, 92 bp, Homo sapiens
ccgcagccttgggcctcgcgccggctatggccgtgccctggggctgagccctcagatgtgaagttcatttccaatccgccctccatggtggc

SEQ ID NO: 219824 - DNA, 74 bp, Homo sapiens
ggggaaagcaaggccaaagacagggagaagtttggtaactctcattcgacatccatctgaactaatgaatgttc

SEQ ID NO: 219825 - DNA, 82 bp, Homo sapiens
ccacttgcagcatggagtcgcccgcctcgagccagcccgccagcatgccccagtccaaaggctgaccccgcactacatctac

SEQ ID NO: 219826 - DNA, 145 bp, Homo sapiens
gaaagcgcaggagttgccagcgagggccgggcggcccgcggcgtttgggacagtgaaggaggacagcggcagtgcaagaagaaacacacgctgctgtgccccgactttgcccgcaggggggcgtgtccccgcggcgcccagtgcc

SEQ ID NO: 219827 - DNA, 82 bp, Homo sapiens
ttggcggcgcccggagccggcgtggcgctcatcgagggacgcccggcccaagtgactggatacacgtctgtttaactacgca

SEQ ID NO: 219828 - DNA, 75 bp, Homo sapiens
ctactttgactactggggccagggaaccctggtcaccgtctcctcaggtggtacagaagttggtcctgccctttg

SEQ ID NO: 219829 - DNA, 75 bp, Homo sapiens
ttcatctcaaaaacaaaattctgaactcaggacttggcaacttcctgcctgacacagctcacttcaagaagtgca

SEQ ID NO: 219830 - DNA, 50 bp, Homo sapiens
cgcggctctaacggggctttctacaagttctcagagagtgtgagtggtac

SEQ ID NO: 219831 - DNA, 101 bp, Homo sapiens
tctacaccgaccagccgcacgccgaccggcgccgggagatcctggaaacggtgggagcccagagtatatgagatgtcttcagaggctcatctaactctgtc

SEQ ID NO: 219832 - DNA, 74 bp, Homo sapiens
gaggaccgagtggcctgcgcgctgaccctgcccttcatctgccggtcacggtctagatcacattctcgatccag

SEQ ID NO: 219833 - DNA, 75 bp, Homo sapiens
gtcccgcctgaagaaacctggatctttgctagaaagagaggtgacttaagagattaaaattaatttggttgctgt

SEQ ID NO: 219834 - DNA, 75 bp, Homo sapiens
actgggtgctcctgcccgctggcccctcgcgcgtgaggatctatctcagcggtcttgcgagtggctggttccctg

SEQ ID NO: 219835 - DNA, 90 bp, Homo sapiens
ctgtaacttacgtgtactttaccaacgagctgaagcaggtttacaaagatgagcaggtggtggtgataaaggataaatacccaaaggccc

SEQ ID NO: 219836 - DNA, 96 bp, Homo sapiens
ccgactctgggatgaactgatgaagacaaggccttccagtttggaacttttgtctgatccaaactatggggtccatcttccggctgtgaaactgcg

SEQ ID NO: 219837 - DNA, 100 bp, Homo sapiens
aagcgactgagtccgcgatggaggtacaccaggggttggaaaaaccacactaggcaaagaacttgcgtcaaaatcaggactgaaatacattaatgtgggt

SEQ ID NO: 219838 - DNA, 98 bp, Homo sapiens
ccctcctaactatgtttggcctgccccagtgacagtgggacgggctgccctatccataatgagatggcatcaacatcagataaaggtgcccaaggaag

SEQ ID NO: 219839 - DNA, 80 bp, Homo sapiens
aatttgcctccacttagtgagcggaagaatggtcagattgaagttatcatggatcgaagactcatgcaagatgataatcg

SEQ ID NO: 219840 - DNA, 75 bp, Homo sapiens
aagccagacagctgggccggagcagccgcgggcgcccgaggggccgagcgagatgatgattattctccaccgtct

SEQ ID NO: 219841 - DNA, 83 bp, Homo sapiens
agcaaagtgcgtgaggagtttaaggagctgaaagcgcgccctaccacttatgtcttggatgaagatgaacctcgattccttga

SEQ ID NO: 219842 - DNA, 98 bp, Homo sapiens
aaaacactactggaagcacaatagctgaggttggtgttcgaggaagagacattgttgttcttggtgtggagaagaagtcagtggccaaactgcaggat

SEQ ID NO: 219843 - DNA, 100 bp, Homo sapiens
gacgccatcctgccgcagctggcgcagcccacgctcatgatcgacttcctcacccgcgcctgcgacctcggtccctgtgcgttttattgcgacctgccgg

SEQ ID NO: 219844 - DNA, 100 bp, Homo sapiens
ttaaaagagaatctgggagtgattctgacctctttcactcacccagtgatgacatggacagcatcatcttcccaaaggatttgttaaggattccaagtaa

SEQ ID NO: 219845 - DNA, 73 bp, Homo sapiens
tggcagctccactgccgtcaactcctgttctcctcagagcctgccaaatttgtatcctactgtggggcttcaa

SEQ ID NO: 219846 - DNA, 51 bp, Homo sapiens
aaaggaggagtattctgatcttttcagatccctgcatgtcactgagtccac

SEQ ID NO: 219847 - DNA, 90 bp, Homo sapiens
cgggtggccgccctgttccccgcgctgcggcctggcggcttccaggcgcactaccgcgttacagaatgtctgaaggggacagtgtgggag

SEQ ID NO: 219848 - DNA, 98 bp, Homo sapiens
ggccgcgaaccgcagtatcatgctggccaagaagatcatcattaaggacggaggcacgcctgaaaacagactcctgctgaaggaagtcggacccacgg

SEQ ID NO: 219849 - DNA, 75 bp, Homo sapiens
ttgcaaggatattcctcatgtatcatgcaaggatattcctcatatatcatgaaaatggatgttatggagcttcaa

SEQ ID NO: 219850 - DNA, 90 bp, Homo sapiens
ccgctgcccgacgagcaggacttcatccaggcctacgaggaggtgcgcgagaagtacaaagtgcaagaagaaacacacgctgctgtgccc

SEQ ID NO: 219851 - DNA, 97 bp, Homo sapiens
cgcccggggcccaggaaggcaagaagcagtataagatgatctgccatgtgttcgagtcggaggatgagtatatgcaggaaaaatccaaagaaagcgg

SEQ ID NO: 219852 - DNA, 98 bp, Homo sapiens
tctggtgtatgttgtcaactatccaaaagatgagacgtgcaggtaccatcaggaagcagcgggataagctgataaaggaaggaaagtacacccctcca

SEQ ID NO: 219853 - DNA, 100 bp, Homo sapiens
agagctgaatgttatgtttattgaaactagtgcaaaagctggatacaatgtaaagcaggatcctcagtcttccacaatgaaccctgtttacagccccgtg

SEQ ID NO: 219854 - DNA, 98 bp, Homo sapiens
tacaaagggggcctagtttgggatgagaacagctctgacggccggtatgtgaaggagaactgcaaacctctgaaggtaagaatgattgatgttggctg

SEQ ID NO: 219855 - DNA, 83 bp, Homo sapiens
ccgagaaggtgtccgaggcccgcaaaagtcaaaatgcagatcttcgtgaaaacccttaccggcaagaccatcacccttgaggt

SEQ ID NO: 219856 - DNA, 75 bp, Homo sapiens
gaccccttgagcagcagtcagcacaggcagctctgtggccatggatatgttccagaaggtagagaagatcggaga

SEQ ID NO: 219857 - DNA, 99 bp, Homo sapiens
ctgatagtctccagcgggcctggactgtgggctggtgtgtggaactggaacaagcacatcatgattgacttggggactggcaacaacaacaagattaac

SEQ ID NO: 219858 - DNA, 82 bp, Homo sapiens
cacgcaaccccagatccatttacactttacatacttggaccatgagactgtttcagccactttcatcgacagcagtggacag

SEQ ID NO: 219859 - DNA, 99 bp, Homo sapiens
gaggttccggtgtgtccaattttgctcaacttattgtgagagttcaagtacccttacaagactgatggaattacagttgtataaatatggactactgaa

SEQ ID NO: 219860 - DNA, 96 bp, Homo sapiens
tgccagcatgatgtcgtatttataatatgtggaggagagagagctcaccatgctcagggttacattccgaaaagcaaatgggagatggacacatct

SEQ ID NO: 219861 - DNA, 82 bp, Homo sapiens
ctgctgcgcaggataaaaggcaaactcttcacctgggttatgtaccgaaggactctaccgtgtcagcgggaataaaactgac

SEQ ID NO: 219862 - DNA, 75 bp, Homo sapiens
gctgccgtgtacagtgctgcgattctggagtacctcactgcagagctctcctccgagtggaaaccagagatcagg

SEQ ID NO: 219863 - DNA, 101 bp, Homo sapiens
cccagaaatacccaccagtaaagtttttatcagaaaaggatcggaaaagaattttggaacgtcaaggtcgtgggaaataaaaggcagttctacacagactg

SEQ ID NO: 219864 - DNA, 99 bp, Homo sapiens
cctcaagaagcagctccacgaaaggcagccgcggatcgccgcgctcagcgacaaacaatatggtttgaagtggtgaacatggatttttctcggcttcac

SEQ ID NO: 219865 - DNA, 99 bp, Homo sapiens
caaggaacctgctttgatgacataagtggctacacttgccactgtgtgctgccatacacaggtgatggaggacgaggagaaggcagtggagatcttggg

SEQ ID NO: 219866 - DNA, 90 bp, Homo sapiens
acaccttcgacctgaagaggcacgtccgcacacacacaggattcagtttagctgcatttaaaagaaacaagaggaaactagagctggcag

SEQ ID NO: 219867 - DNA, 83 bp, Homo sapiens
cactccctttcctctgctgccgctcggtcacgcttggtgaaatgacaatggatgctctgttggctcgattgaaacttctgaat

SEQ ID NO: 219868 - DNA, 83 bp, Homo sapiens
ccaagaaccaaccctgccagcacctggaccttggacattcagacttcagaatgctccccgaagtgcataccaacagctgtgac

SEQ ID NO: 219869 - DNA, 100 bp, Homo sapiens
tagtccattgactatgcagcctaatgaaaaaggtggcgaggtgcagtgactcacgcctgtaatgccagcactttgggaggccaaggcacgtggattgctt

SEQ ID NO: 219870 - DNA, 75 bp, Homo sapiens
ccaggcgggccagtgcgggaaccagatcggcaccaaggtattgttgcagcatctggcagtgagactgaggatgag

SEQ ID NO: 219871 - DNA, 100 bp, Homo sapiens
ttaggcatccagggacgcaggattcacaaggactatctcagcaaaaactcatcatcaggctgttaacttcaacattttcgagggcatggtttgccacggg

SEQ ID NO: 219872 - DNA, 87 bp, Homo sapiens
catgtccgcccaggcgcagatgcgggccctgctggaccagctcatgggcacggctcgggacgagctacttcctcagccgagcccaga

SEQ ID NO: 219873 - DNA, 82 bp, Homo sapiens
cggcgagtccgcgacggtcgccgcccacggcgagggttttcagagaaagatgctgatgaggtgaaaggaatttttgtagata

SEQ ID NO: 219874 - DNA, 100 bp, Homo sapiens
accatcatgctgcgcggccttcccatcaccatcacagagagcgatctctggattaatcgaattacagctgctagccaggaacatggactgaagtatccag

SEQ ID NO: 219875 - DNA, 100 bp, Homo sapiens
ggggcgcagcttcgagggccgggagctcctggtcatcgagctgtccgacaaccctggcgtccatgagcctggctaccggctctctgaccagttccacgac

SEQ ID NO: 219876 - DNA, 95 bp, Homo sapiens
cttgggcctcgcgccggctatggccgtgccctggggctgagccctcagacctcctgccccccgaggtctgcagtctcctgaacccagcagccatc

SEQ ID NO: 219877 - DNA, 100 bp, Homo sapiens
caagtcctgcgcttggggatcctctgtacgcccgttcactgtatcaatggagtgagcccaaaggttcgaaaggtgttgcagcttcttcgccttcgtcaaa

SEQ ID NO: 219878 - DNA, 51 bp, Homo sapiens
ttcctgcctttgagcggactcccttttaagtttttggctttcacccccaac

SEQ ID NO: 219879 - DNA, 75 bp, Homo sapiens
tttggaatcactgcctgcctttctcagattagtgacaagagctggggttaggatccggttggactctgacatcgg

SEQ ID NO: 219880 - DNA, 76 bp, Homo sapiens
gtggattacaaccggctaggctacacacacctgtactcttccactcaggccggcaagctggacccgcatctcgtgc

SEQ ID NO: 219881 - DNA, 75 bp, Homo sapiens
agaacaggtgccatttgtgccatagattatacgtggaatttactaaaagctgggagtttcactcttgttgctcag

SEQ ID NO: 219882 - DNA, 75 bp, Homo sapiens
ccccttcactggtaatgtgtccattcgagggcggatcctctctgctcttgccgccacctcggtcgcgatgggggc

SEQ ID NO: 219883 - DNA, 74 bp, Homo sapiens
tgggtgacaatgccttggtttcaacactatcggaatgagaatggatcttggagaatgtctgaaagtccatgacc

SEQ ID NO: 219884 - DNA, 100 bp, Homo sapiens
atgatacaattacctgcacgacacatggaaattggactaaattaccagaatgcaggggtacttcttgcaagggatatgcattagcacatactcaagaagg

SEQ ID NO: 219885 - DNA, 100 bp, Homo sapiens
gacagagatagaagcaggactagaagcagaagcagaacacgaagcagggggtgtgtccgcagccggccaggtggtatccctgaaggtgtggctgattgac

SEQ ID NO: 219886 - DNA, 83 bp, Homo sapiens
aagctggccgagcaggctgagcgatacgacggtaccccagtgtggcctgcgagattctgacctcagatgtgccccagatcaat

SEQ ID NO: 219887 - DNA, 90 bp, Homo sapiens
cgaattggagaaaaagttcagtgggaagcatgtcgtctttatcgctcagatcgtcaatgtatggtactctgtgaatggtgagaggctggg

SEQ ID NO: 219888 - DNA, 78 bp, Homo sapiens
gcggggtgcgtgggtgcctggagatgaagctggaaagtgttggctgcaccaattctagaagtaagctctccaagttca

SEQ ID NO: 219889 - DNA, 80 bp, Homo sapiens
aagccatcaaatgtggaacctatggaaaaggccaccaggaaaccctccccgaagaatgggtagaatcaatcatctgcgtg

SEQ ID NO: 219890 - DNA, 90 bp, Homo sapiens
gggtgaggaggatgtgattatggaagctctgcggtcatacaaccaggagccgactgcaagtacaagtttgagaactggggtgcgtgtgat

SEQ ID NO: 219891 - DNA, 87 bp, Homo sapiens
cctccatgggaccaggaccgtaggatgatgtttcctccgccaggaaaggttatttgtcaatgaagaaaatgttaatgagtttcttga

SEQ ID NO: 219892 - DNA, 75 bp, Homo sapiens
aaggacggatgatgaagtagtacagagaagatgaatttgctgtcatgttttgtggaatgagggaccgttgagctc

SEQ ID NO: 219893 - DNA, 96 bp, Homo sapiens
tggcgattcgtgttcgtgagggccttttctgacccaacatgagtgaagtttcctgcaagaaacgggacgactatttggaatggccagagtatttta

SEQ ID NO: 219894 - DNA, 90 bp, Homo sapiens
catactcatcttatgggagagaatcaaacttacagggttgccaccagggtaaaccagacttgaatacaacattgccaattagacaaacag

SEQ ID NO: 219895 - DNA, 75 bp, Homo sapiens
ggtatcaaatatgacccaagcattggtatctacggcctggacttctatgtgtgggtaattccagaattgattggc

SEQ ID NO: 219896 - DNA, 100 bp, Homo sapiens
gggtcagcagccggccaaccgcagccaggagaaggagttcgtgcaggcgtacgaggatgtgctggagcggtacaaaggttgcttagccagacaatgaagg

SEQ ID NO: 219897 - DNA, 100 bp, Homo sapiens
ctgaaacagaacctgtccaggagctggcatgacgtgcaggtctctagcgcggacccagcctccaacactgccccgctccagccagagcagctccaagtgt

SEQ ID NO: 219898 - DNA, 83 bp, Homo sapiens
ttaaaagacagtcctcgtcagcactgactttcagctatggaatcgggaaccttctgaccagcctcatgggctcctcagagcag

SEQ ID NO: 219899 - DNA, 83 bp, Homo sapiens
agaggcgcctcctccacaccccccgccgcagcagcaccggcgacagacaatgcagatcttcgtgaagactctgactggtaaga

SEQ ID NO: 219900 - DNA, 101 bp, Homo sapiens
gcagaaccccggcgcggcccttgttaacacttcatggcctgtaaagatggctacaaatgctgtgctttgttgccctcctatcgcattaagaaatttgatca

SEQ ID NO: 219901 - DNA, 74 bp, Homo sapiens
tgcttcgacttgcgtgtgatgttgatcaggtactaggttttgacaagcttgcatcatgcgtgagtataagctag

SEQ ID NO: 219902 - DNA, 101 bp, Homo sapiens
gtggatgccctcaagtcctggctggccaagttactggagccgatacttagaaatggctgttgcgtattggaaattagtgttatctggaaggtttaaatttt

SEQ ID NO: 219903 - DNA, 98 bp, Homo sapiens
tcctaaaacagaaaatggtgattctccaagacctactgtccactctgattcaggcctctgacagctcttggaagagggtctccccagacacccgagca

SEQ ID NO: 219904 - DNA, 74 bp, Homo sapiens
ggcccgtccccagcccgggccgtccatcctcgcattgctgttgaatggtaagaatgattgatgttggctgatat

SEQ ID NO: 219905 - DNA, 130 bp, Homo sapiens
caaatacctgcccaaccatcagtagcaaaagttccctatgggaaaggaccttcatttaatcaggactcagctgaaagagtttgtgctaaatgatgagctcccaggacgcatcatcactgggaaagtgttc

SEQ ID NO: 219906 - DNA, 74 bp, Homo sapiens
tcagtcggcccaagaaatcaaaataaaggaaacacatttcatatactgcagaagatttgtctacaagtatctct

SEQ ID NO: 219907 - DNA, 76 bp, Homo sapiens
gcccaacgacatcgatggcctggagaagaattatatccagatcgagagacagaagattctgaaagggttcaatgaa

SEQ ID NO: 219908 - DNA, 85 bp, Homo sapiens
ggaagcaattctggaagcgcagcaacagcaagctcccgggcagattcttcaaacttcatgagagaaagtgtgaacctattattat

SEQ ID NO: 219909 - DNA, 100 bp, Homo sapiens
acagaaccaaaggctattggatcagctcagcaggctgccaatttgtggtgtctgaagaccaagactacacagctcattttgctgatcctgatacattagt

SEQ ID NO: 219910 - DNA, 100 bp, Homo sapiens
gtgaagaggtcagggatgctctgctggatccgagatctggttggagttggagggtgagagaaaatgaattctaatttacctgcagagaacttaaccattg

SEQ ID NO: 219911 - DNA, 75 bp, Homo sapiens
ctggcaaagtgggaaaaataaagtgttgagtaaacagaccaagttgggtaaaattgcggagttgctctctccggg

SEQ ID NO: 219912 - DNA, 83 bp, Homo sapiens
cccatacctgatccggagaatcgaggagctcaacaaggcgtccgagctgggccacagcctgaacgagaacgtcctcaagcctg

SEQ ID NO: 219913 - DNA, 96 bp, Homo sapiens
ttggagtgtgcgtgcgcgccgagcgactgattcttgctattccaaatcctcttccacgttgacagcccttcagatatttcaacactcctctcagca

SEQ ID NO: 219914 - DNA, 50 bp, Homo sapiens
agaacatctcgctgtcggtgaagaagtgtaaacaggaacatcgataagta

SEQ ID NO: 219915 - DNA, 82 bp, Homo sapiens
aagctctctgaaaagaaggtggcagacccggtttgctgatcgccccagggatcaggaggtgtgagttcttgatacgaatgaa

SEQ ID NO: 219916 - DNA, 97 bp, Homo sapiens
gaggacatctgggggccacaaatgctccttctcctggagacgcaactcaagccataccttcagagtgttattttcctttttgtcataaggtgtctgg

SEQ ID NO: 219917 - DNA, 100 bp, Homo sapiens
atggtgtttgcgaaaacttgcggaagctggagatcacaggcgtgtcttgtcgggacgtctatgcgaagcagtacaggggctcaggtccaggtggcagggg

SEQ ID NO: 219918 - DNA, 90 bp, Homo sapiens
agaaggcgcatcactcccagctgcgcaaagcttgcgaggtggcgttagggtctccgtctctccaccgggggcttcatccttccagggagg

SEQ ID NO: 219919 - DNA, 83 bp, Homo sapiens
ctcctagaaattccccccgaagaagactcccccacatctggctctacgaactcgacggggaccccaagaggaaggaattcctg

SEQ ID NO: 219920 - DNA, 100 bp, Homo sapiens
tgcaagatgtggcagaagaacaagaagttgagaccgagaatgtggaaacaggaattacatgaacgacagccttcgcaccgacgtcttcgtgcggttccag

SEQ ID NO: 219921 - DNA, 100 bp, Homo sapiens
atgagatccaagtaaataagacccaaatcccgatggcagtcttgggcacgtccatctgtaaacctgctgagagctctggtgacaagaaaggcagtggctg

SEQ ID NO: 219922 - DNA, 75 bp, Homo sapiens
aaatcaaagcgagagcgcctcggcctctccagctgtccgcgccagtacaggctactctgtcatctttgaagatgt

SEQ ID NO: 219923 - DNA, 90 bp, Homo sapiens
ggggaccccggtacggacctgtgcaggtgaggacaggccagaaagtgaagtcactgcttttgctgtcttggatcaagaccagaaagaaat

SEQ ID NO: 219924 - DNA, 50 bp, Homo sapiens
tgcctttgagcggactcccttttaagttatcttcaggcagagtgagaagc

SEQ ID NO: 219925 - DNA, 75 bp, Homo sapiens
cttcgagccagcctgagactgaagcgcggccatggggggcggcgactggcggcgcgatggacctgaccgggctcc

SEQ ID NO: 219926 - DNA, 90 bp, Homo sapiens
atagccgagcagactggcatctgtaaggtgcggccgccgccggaaagcagatggtggagctgaatatgccacttaccagactaaatcaac

SEQ ID NO: 219927 - DNA, 100 bp, Homo sapiens
agccctcctggaagactcagtttccctctttgtcccatgcagaggtgcagagattcattattatgaaggactgaaccatgaatgcaaactctgcagccag

SEQ ID NO: 219928 - DNA, 75 bp, Homo sapiens
ctatggttatgggggacaaaaaagacctttagaagatggaggatcttttgccagaaatgagggcatactggcctg

SEQ ID NO: 219929 - DNA, 101 bp, Homo sapiens
cggcctgggtgctggcgaagcggaggccggagaatgtctgtaaacctgtggaggagacacagcgcccgcccacactgcaggagatcaagcagaagatcgac

SEQ ID NO: 219930 - DNA, 101 bp, Homo sapiens
ccacgtgaaggggcccttctcggtggaggccgacccatccagtatgaacggtgccttagcgtttgtggacacttcggactgcacggtcatgaacatcgcag

SEQ ID NO: 219931 - DNA, 90 bp, Homo sapiens
gacttcccaccagattgctgggtgtctttaaatgaaatggttatggaccagcttttgggaaatatgattgaaatgtgggttgatcgaatg

SEQ ID NO: 219932 - DNA, 75 bp, Homo sapiens
ggaacgaatgggacaagatcccgtccatgaatcaggtcagaagccaatgacctggccctgaggctggctcgccac

SEQ ID NO: 219933 - DNA, 50 bp, Homo sapiens
cgtgtactttaccaacgagctgaagcagggttttttgattaactcaaaac

SEQ ID NO: 219934 - DNA, 74 bp, Homo sapiens
gtggaacagattcagaaggagcaggattaccaaaggcctagatattatcctactgaagatgtgcctcgaaagct

SEQ ID NO: 219935 - DNA, 80 bp, Homo sapiens
atgaagatgatgatgatgaagatgatgaggaggaggaagaagaggaggaggaagagtattgggaaagggtcgttgtggtg

SEQ ID NO: 219936 - DNA, 98 bp, Homo sapiens
gccgcccagacgctgcccgcgggcccggccacggcggagccaagcacttgcacctcctgcgccgccgccccccatccaaggatatgccttcaagcctc

SEQ ID NO: 219937 - DNA, 75 bp, Homo sapiens
gcggagcccacgagaggcagcgccatggcggagcagacctactcgtgatggaaagaactccagtggatccaagcg

SEQ ID NO: 219938 - DNA, 98 bp, Homo sapiens
aggggacccaggagaagatgggcaacctacatcaactagtcaggcagtcttccgtctccagtctggcatctgccatctcttccgagaaactttaatta

SEQ ID NO: 219939 - DNA, 50 bp, Homo sapiens
ttcacagatgctgagagtgaaggggggcacctgaatggacagaagaggac

SEQ ID NO: 219940 - DNA, 82 bp, Homo sapiens
tgtagatttaccagaagtagatggagcagatgatggtccgtgtcatcctgtgatgccttcctgagtctgttccaaagtcatg

SEQ ID NO: 219941 - DNA, 82 bp, Homo sapiens
cgcagagcggagagcggagcccggagcccgccgccccagtcagagcaccataacatggtgtgggaagtgaagacaaatcaga

SEQ ID NO: 219942 - DNA, 80 bp, Homo sapiens
aagtttggcatcgagaaggaggtgcgcgtgtgtgagccctgctacgagcagctgaacagccgcggcgagtcctttgcaca

SEQ ID NO: 219943 - DNA, 99 bp, Homo sapiens
tcaaaatctatgaatgaaagcatgaaaaatcaaaaggagttcatgcttatgaatgctcgacttcaggcgggagacactatattcaatcgtgctaagctc

SEQ ID NO: 219944 - DNA, 100 bp, Homo sapiens
ctgaggcagcctgcagatacggaactcagattgatggacaacttttcttaattaagcaccttttgatacttcgtgaacaaattgctccatttcacactga

SEQ ID NO: 219945 - DNA, 75 bp, Homo sapiens
cccaactatcaggagggcttacgggtgatgggagaagtcggtgcaggtgatggtcctaccagtgtgtctgttgag

SEQ ID NO: 219946 - DNA, 75 bp, Homo sapiens
agcaaagagggctctatctggaaccaccaggcttatgcatctggatgtgacattgtaatactgggaagcgatttt

SEQ ID NO: 219947 - DNA, 101 bp, Homo sapiens
cattacaccaccacctgggctgtgctctccggctcccgccgccacccccgccctcgccttcgcctccgcctccggtacatcaggaacgtctctatcaagaa

SEQ ID NO: 219948 - DNA, 110 bp, Homo sapiens
gtcggggccggctgaccaggaacctgggcgagcagcggcgggggcccgagggacctgcctagagctggaacgttacctccagagcgagccctgctatgtttcagcctcag

SEQ ID NO: 219949 - DNA, 85 bp, Homo sapiens
gggagacgagaagcctgaaaagtcgcagcgagctggagccgccggaggaggtatatcgaattccaaagaaaagtcaaactgaaaa

SEQ ID NO: 219950 - DNA, 75 bp, Homo sapiens
cagccccagacacggaccccgcaggagccccccaagatgaacccagtggtggagccactgtcctggatgctgggc

SEQ ID NO: 219951 - DNA, 50 bp, Homo sapiens
ctcccacagtgctgggattacagaatcctggtaattgatgtccacccgag

SEQ ID NO: 219952 - DNA, 75 bp, Homo sapiens
gcagacaagaaacattcgtttatgagatggattggcctaatgaagaagttcaacctggagagatggaaaatcagc

SEQ ID NO: 219953 - DNA, 87 bp, Homo sapiens
tcaggacatggagtatgaaagacgttgacattttgctaaaggctgtgggagacactcctattatgaaaacaaagaagtgggcagtag

SEQ ID NO: 219954 - DNA, 100 bp, Homo sapiens
gaagctgcccttcaccgcgggcgccaatggggagcagaaggactcggacacaggaaactactttgcttcgcactttttcatgggaggagagaaattcgac

SEQ ID NO: 219955 - DNA, 83 bp, Homo sapiens
ggatggtcagcgacagctactgcaggctgtctgtccccagaccccagagcacgtccggcaccaccatgactgggctgttgaag

SEQ ID NO: 219956 - DNA, 82 bp, Homo sapiens
atgaagtacgaggacgccatccagttcatccgccagtccttctctgcattccaggcagctccaccaaagtctgcgtgcaacg

SEQ ID NO: 219957 - DNA, 74 bp, Homo sapiens
aacccgagagcgtggagcgggctgggccaggttacctgtcctgctgccgattcctggatgacaatcagatcgtc

SEQ ID NO: 219958 - DNA, 100 bp, Homo sapiens
tgacttcccattatgtgattgccatctttgccctgatgagctcctgtttagccactgcagaaactatcagccatccccgtttcagcattctgtaactcag

SEQ ID NO: 219959 - DNA, 100 bp, Homo sapiens
gaagagaaggtggatgcaattctttgcgttgctggaggatgggccgggggcaatgccaaatccaagtattgactttgaagatgtgattgcagaaccagaa

SEQ ID NO: 219960 - DNA, 100 bp, Homo sapiens
gcagccatgtcccgggggcccgaggaggtgaaccggctcacggagagcacctaccgggtcgtcaaagtcctacattttagctttcagtgctgaacttcct

SEQ ID NO: 219961 - DNA, 98 bp, Homo sapiens
cctgttgcagccatggtgcattgcagttgcgtgttgttcagaaagagcactgcagcctgtggtgttgaggctcacagcgatgccatccagccctgcca

SEQ ID NO: 219962 - DNA, 100 bp, Homo sapiens
acccccagcggccgccggctcccccacgaggtgaatggaagagaatccgaagaagaaaatctcaataaatctgaaataagtcaagtgtttgagattgcac

SEQ ID NO: 219963 - DNA, 100 bp, Homo sapiens
cctcgtcaaccagcagagcttccaggacatcaagcccatgcgggaccagatcatccgcgtgaagcgcattaaagggcagtatttaaagtcagttggcaag

SEQ ID NO: 219964 - DNA, 75 bp, Homo sapiens
ccgttatgtgggaagcgaatccatttccaacatggctagatccatcagaaactgaagccgtggagaacgctctcg

SEQ ID NO: 219965 - DNA, 100 bp, Homo sapiens
gttatctgcaggtattgggagatgcacagctaagatgccaggaccacctggaagcctagaaatgacctagaggatcaagacataatgggagcatttttag

SEQ ID NO: 219966 - DNA, 100 bp, Homo sapiens
ggggacaacagtgacgaagagaactgtctcctggtgaccgagcacccgcctccgggcatcttcaactggatgatcatggtgattttactgctgcttgtgg

SEQ ID NO: 219967 - DNA, 100 bp, Homo sapiens
cttgcttatcgtcatgctaagcagaataaaaaaaattcgtcatgctttttacttggttctctgacagcagacgaagactcagatgccactgcatcatcag

SEQ ID NO: 219968 - DNA, 75 bp, Homo sapiens
cctctggttcctacatctggattgtagccataagtggactttgtgtgctgtatttgtgggccttgaaaattctct

SEQ ID NO: 219969 - DNA, 83 bp, Homo sapiens
tgctggaccgccgcgactccgccgcgctgcgcacgcccagatgaaggatttgggggcagagcacttggcaggtcatgaagggg

SEQ ID NO: 219970 - DNA, 75 bp, Homo sapiens
tgccgcaagttcatgcaagatgtggggtggaagacaacccgtgagtattacaccttcatgtgggttactttgccc

SEQ ID NO: 219971 - DNA, 83 bp, Homo sapiens
atcgggctgaagcgactgagtccgcgatggagttcccagtgacctgacagcagaggagcgtcaagaactggagaacatccgac

SEQ ID NO: 219972 - DNA, 90 bp, Homo sapiens
gagccgggtaccggccgtggaagcggccaccgactactgtcagcagctgtgccaggactaccgaccagactcccggaaatcatgttggta

SEQ ID NO: 219973 - DNA, 101 bp, Homo sapiens
catctcagtgaatttgcaagtgaatcccgcccattgtcagttcctgttaaagccatgttgaatatatctgaaagctgtagaagtcctgaagaaagaatgaa

SEQ ID NO: 219974 - DNA, 90 bp, Homo sapiens
tgggggtgggcgtcttcacccccaccattgaggcccgcacagcccagtccagtgtggatgaggtcaccattgtcaacattttgaccaacc

SEQ ID NO: 219975 - DNA, 75 bp, Homo sapiens
cgcgtcggcaagaagatcggctgcggcaacttcggggagctccgcctagactggacgccgggcatggcagtgcca

SEQ ID NO: 219976 - DNA, 100 bp, Homo sapiens
ggacactgaaccccttcaagtctttgtggtgcctcattcccataacgacccagttgttgacctcctgtactggagagacattaagaagactggagtggtg

SEQ ID NO: 219977 - DNA, 100 bp, Homo sapiens
gttttgatcatgttgttaccctcggacgtagcccggcttgtattggatatggaatgtgcagatgtcccactattaactccaagcagcaaagaaatgatgt

SEQ ID NO: 219978 - DNA, 83 bp, Homo sapiens
gcagtcttgacatcttaacgtggatagaaaaagttgtcctgggaccaagacaaattcgcctaagataaggagttacgtagaag

SEQ ID NO: 219979 - DNA, 100 bp, Homo sapiens
ccacactctgctcacctatgccactcgagatgacctcatctacacccgcatcaggccacggcagagacaacgtgtgtaccccaagtgcacatggctgacc

SEQ ID NO: 219980 - DNA, 83 bp, Homo sapiens
ctcagttggaagcagccgatccagcctgcggagcctgtggggcaggattacttccttaggatagattgccagaagtggagtta

SEQ ID NO: 219981 - DNA, 100 bp, Homo sapiens
ctcgcctcctcgcagcagcgccatgcatcacaggacatggccccctcagccacctagctggggcccatctaggagtggcatcttttttggtgccctgaag

SEQ ID NO: 219982 - DNA, 75 bp, Homo sapiens
ggccaactccttcgtgggcacgcgctcctacatggcttgtatgctggaaaaagttggaaattggaattttgatat

SEQ ID NO: 219983 - DNA, 75 bp, Homo sapiens
atgccctgcagtacctgcagaaggtctctggagacatcttcagcagactggaaagctacccttgaggagaatagg

SEQ ID NO: 219984 - DNA, 139 bp, Homo sapiens
cttcacccctcacctcgatgcagccagtagcttggatccttgtgggcatgatccataatcggtttcaaggatcagggagcttccaaggcatttgatacctttttgatgggaagaagggctctgaggagctccaagatac

SEQ ID NO: 219985 - DNA, 50 bp, Homo sapiens
ccggagtccgccccgtgaggagaatgcctgatcctgcctgaagatggtgc

SEQ ID NO: 219986 - DNA, 74 bp, Homo sapiens
cgtccttctccactttcgccagcccgtgccgcgagcgcggcctgcaggaggtcagcgttgaagttttggtagag

SEQ ID NO: 219987 - DNA, 99 bp, Homo sapiens
gaacaatgcctccactgactatgacctatctgacaagagcatcaaccctctggtggccgtgaagaacaacatcgatgtcttctacttcagcaccttgta

SEQ ID NO: 219988 - DNA, 100 bp, Homo sapiens
gatgaattgggtagagagaccaaagatcttgatgagctcgccaagaatattgggaatgcaggctttaatgagatcatggaatgttgcctaccagctgagg

SEQ ID NO: 219989 - DNA, 74 bp, Homo sapiens
gctgcgcctgcctgctccgccccagacctgtcggcgaaaggatatctccacaggaccttcttggttaaatcagg

SEQ ID NO: 219990 - DNA, 75 bp, Homo sapiens
agatagggtccacagaatggtcagaaaccctccataacctgaaggtaaatgaattggtggatgccagagatgtcg

SEQ ID NO: 219991 - DNA, 95 bp, Homo sapiens
cggaggagttggaggaggagggagagaatgatattggggtgagagctcctggaccgtggcaaggaggtgtacagccctgactttcatagcctcgg

SEQ ID NO: 219992 - DNA, 79 bp, Homo sapiens
gggcatacctatggctttattgacctcgactcccatgcgagcactgcagtttcctcctgaaggctggctccggctctcc

SEQ ID NO: 219993 - DNA, 75 bp, Homo sapiens
tgaagtttcttctgggtccatcaccaaagagcagatgccaaatctggctattcagcttgaccctgaagaaactcg

SEQ ID NO: 219994 - DNA, 100 bp, Homo sapiens
ggacccttcggccagatcttcagaccagacaacttcgtgttcgatgctgtacccctcaaggatttaaactaacgaaaaatcaataaataaatgtggattt

SEQ ID NO: 219995 - DNA, 98 bp, Homo sapiens
tttggaagagggagtcaccactggacctccaaggaagccacgtgcagacatctacaaccttcgatctcctgacgaattgctgctaaaattgattcaat

SEQ ID NO: 219996 - DNA, 100 bp, Homo sapiens
ggagcgccggccgcaccaccgccctctggccgttgcctcaccgggttgagcttcagcgacagcgagagtgacaacagcgccgactcctccctgcccagcc

SEQ ID NO: 219997 - DNA, 50 bp, Homo sapiens
aatcgaaatggcttatccccaccgccatcacgtcagctaactgttcagat

SEQ ID NO: 219998 - DNA, 100 bp, Homo sapiens
ctttccctgtggctatgttctgggtttccaatcaggccgagtggtttgaggacgatgtcatacagcgcaaggtctcctctgagcctccggcctccataag

SEQ ID NO: 219999 - DNA, 90 bp, Homo sapiens
gctgccagccccaagaaggagaccctcatccagctgatgcccttcttcgtgatccacacccaagtccgctcatcaccctggagactcagg

SEQ ID NO: 220000 - DNA, 90 bp, Homo sapiens
ggtgaatcagtatgttgtgcaagaggtactgtccatcaaacatcttccaccacagcttagagtggagacctttggcgacttggcctttgg

SEQ ID NO: 220001 - DNA, 51 bp, Homo sapiens
tcatgtcaacacagcgtgttggtgtaaaatactagacagacatctggcaat

SEQ ID NO: 220002 - DNA, 75 bp, Homo sapiens
gctccaaattcattcttgacctcatactgaacaaaagctgcagttcatcatctgctgtgatagttccacaaccag

SEQ ID NO: 220003 - DNA, 75 bp, Homo sapiens
tgcctccttatgtctccaacatggaccgcctgggggactcggaactgtacaatcctgagaacctggccaccctgg

SEQ ID NO: 220004 - DNA, 90 bp, Homo sapiens
ttaatatctgattgggacaacattcagacccatttccagtcatgaagaactggaccccatcctgactgaggtcaccctgatgaatgcccg

SEQ ID NO: 220005 - DNA, 82 bp, Homo sapiens
agagctgctcacggagaagtccgcctgtaagaggtcatcatcagatttgaaatatttaaagtggatacaaaactatttcagc

SEQ ID NO: 220006 - DNA, 122 bp, Homo sapiens
attatgaatgacaggcttactgaatatcctcttgtaattaatgcagtaaaacgcttccatatttatccagaggagtctccccaggacagtgctatcacccgggatattaaccgaacattccc

SEQ ID NO: 220007 - DNA, 75 bp, Homo sapiens
gccgtgccccgaccggactggacgcatttttatacatagggtcatcttttcttgagtcccttctgcaaccagagt

SEQ ID NO: 220008 - DNA, 99 bp, Homo sapiens
ctgggtcagtccgccgctcaccccgcggccgcaccttcccgccttctcagcttcatggcggctgaagagatgcattggcctgtccctatgaaggccatt

SEQ ID NO: 220009 - DNA, 75 bp, Homo sapiens
cagcttcagacttactcacttccaccctttctaaaggcagtcttgagacagccatccttacccgacctgggatgg

SEQ ID NO: 220010 - DNA, 97 bp, Homo sapiens
gaacgaacatcttctggacctttgtccaggtcccctgacaagcccaccaggccccctgctgagatggctgtgaccctgggctgacccgcccagtggc

SEQ ID NO: 220011 - DNA, 99 bp, Homo sapiens
acggagcccgcggccaaacggtgcctgcggtgcctgagctgagtgaggccgaggccgggaggccgtgcccggagaaataacatctgctttgctgccgag

SEQ ID NO: 220012 - DNA, 90 bp, Homo sapiens
caagttctatagcctggatgaattgcatattctggacatgatagagcagattgtatctgctgtacagtattgtcatcaaaagtacattgt

SEQ ID NO: 220013 - DNA, 100 bp, Homo sapiens
gaagaataagactaaagaaaacattttggaagaattcagtaaagtcacaggcatgcccaagagaatcgtaaatgcaaaaattgcttgccttgacttcagc

SEQ ID NO: 220014 - DNA, 83 bp, Homo sapiens
gtttcagatgacaatgctccctctccttatatggctactggatcaaggtcagttcctatgccactgtcaaatatatcagtgcc

SEQ ID NO: 220015 - DNA, 50 bp, Homo sapiens
tggaatgttggcagctataacttacacaatcttcttcagcagtatcgttc

SEQ ID NO: 220016 - DNA, 100 bp, Homo sapiens
ctgctggggggcccggggcctcgcgctggggacgttgcgtctgcagctgcggcgcgaccgcaggatggaaacaagcccactgagactagtcaacctcaat

SEQ ID NO: 220017 - DNA, 82 bp, Homo sapiens
cagaaggcgtggccgcccagtccccagttccgcgcttgctcggcagtcacgttccgcctgacatttaccccggtaactgctg

SEQ ID NO: 220018 - DNA, 100 bp, Homo sapiens
cctggtacgccacactttggaatacagaatagctccagaggctatgagtgggaatgtaagacggacttagatattgcatacaaatttggaaaaactgtgg

SEQ ID NO: 220019 - DNA, 75 bp, Homo sapiens
atggtcatgagctttgtgaacctgggtacttcgtactggatttcgaggctggcatcctgcagtattttgtgaatg

SEQ ID NO: 220020 - DNA, 90 bp, Homo sapiens
atttgctccccctcgtgcagcaacccccacacccagcaccaggaaagaccacagcaagattctttcattcgtctcctcctagcctggggg

SEQ ID NO: 220021 - DNA, 80 bp, Homo sapiens
cggagaactctaccctggaggagattctggggcagtatcaacggagtctccgggggacatccaacgggctcatagagtgg

SEQ ID NO: 220022 - DNA, 75 bp, Homo sapiens
attttttaactgaagatagtgcctttcagccctaccagtctgatgccaatgcaagttacttaagagcagctcgag

SEQ ID NO: 220023 - DNA, 100 bp, Homo sapiens
aaagtggagaggtaccataatctatgtcagaaacaagttaaagcacaactcccaagaaagatgttctcgtccgtggcgcacctggcgcgggcgaacccct

SEQ ID NO: 220024 - DNA, 83 bp, Homo sapiens
cttacaacaagagtcctcaatccaacagcccagtgcttctgtctcgactgcactttgagaagcttctgcagaaagccgtcatt

SEQ ID NO: 220025 - DNA, 101 bp, Homo sapiens
cttcgtggatgccctgcaccgggtccggcaggtcataactccatgcaggaagctcatcttgtgtgctgataacagaaaagaaatggaagattggattgcag

SEQ ID NO: 220026 - DNA, 75 bp, Homo sapiens
agaagctctttgtgtatgaccttcacgcagtcaagaacgacttccagaacctaaaggcagacccagaagagcttt

SEQ ID NO: 220027 - DNA, 48 bp, Homo sapiens
ggaggtcagaggccctttcatcatcagacagaataaatccaagtccga

SEQ ID NO: 220028 - DNA, 100 bp, Homo sapiens
accgcttcgagtctattgccattgcccaagttactgcaacaaggaggtatacaataaggagaatcttttcaacagcctgaactatgatgttgcagccaag

SEQ ID NO: 220029 - DNA, 98 bp, Homo sapiens
ggcggcggcggcggcagcggcagcgcggcggggccggatcatacatctgtcggtggcctgggagacagtttttatgaatacttactgaaagcatggtt

SEQ ID NO: 220030 - DNA, 88 bp, Homo sapiens
aaaaaacaggtggaattgcaggaagaacggaggggactgatgtcccaactagaggagaaggaggattatacttactcagctgttaaga

SEQ ID NO: 220031 - DNA, 100 bp, Homo sapiens
ggaaatactaatcgagcactttggcaaggctatgtatgtcaaaaaggatgttcctttgtggcaaaaacatggacggaacttctgaaacatgtgagagaaa

SEQ ID NO: 220032 - DNA, 100 bp, Homo sapiens
tggtggagaatagaaggcaaatgctagatgaggaagaggagcgaaggaaaaggcgccgggagaagaacaaagtcgcagcagcccgatgccggaacaagaa

SEQ ID NO: 220033 - DNA, 88 bp, Homo sapiens
gatggtggttcctgctgccctcaaggtcgtgcgtctgaagcctacaagaaaggcattgaacctggccacatcccaggtaccgtgaaca

SEQ ID NO: 220034 - DNA, 101 bp, Homo sapiens
gtgaaacaccactgaagcattgccaagtcaaagaagtttggcagagatcacggagctaattcatattgctctccttgtacatcgtgggatagtaaatttaa

SEQ ID NO: 220035 - DNA, 72 bp, Homo sapiens
gactcctgtggcagtggaaagacccaagaatgccagtcaagaagacaggacatggatttgattgacatactt

SEQ ID NO: 220036 - DNA, 75 bp, Homo sapiens
caggactccaaaatggcgtcagttggtgagtgtccggccccaggccctcgggaccaaggatcacgtcatgactcc

SEQ ID NO: 220037 - DNA, 100 bp, Homo sapiens
cggacgtagagcatcggacgcgggcgccgtggcgctgggcaggagggcgaagccatgacgtcagtcaggggctttgttatgcacctaaagccatattgga

SEQ ID NO: 220038 - DNA, 96 bp, Homo sapiens
gcgaatggcacgagctggagggagaatttcaagaactgcaggtgggtgtttgtgtgggaaaagggctaccaggaaactgactccgtggtcagctcc

SEQ ID NO: 220039 - DNA, 100 bp, Homo sapiens
caaacactgtagcgtctttcagttaggacgggagagggaggagggagtcagtgggacctgatgcagaacatcatgaatgacatgccgatctacatgtact

SEQ ID NO: 220040 - DNA, 75 bp, Homo sapiens
gggagaggacgtgcggcttctctgcttcctttgaacagagctctaggttgacctgacagttcaagaaaaggagaa

SEQ ID NO: 220041 - DNA, 99 bp, Homo sapiens
cttcatcgtggtaggctatgaccacgagaagccaggagatgtgggttccttcgtgctgaagttagtggagggccttcagggccagacctgggccccaga

SEQ ID NO: 220042 - DNA, 100 bp, Homo sapiens
tggagaagctgctgaaaaaaatttatatctctctcagttgattatattggatacactggaaaaatgtcttgctggggatttccggaaatatgaggaaggc

SEQ ID NO: 220043 - DNA, 100 bp, Homo sapiens
gtattgaatcccactagatttggaactacggtgccatcaggatgtgcgctttcattccaaatacttcacagaagagctaagaagaatttttatagaggac

SEQ ID NO: 220044 - DNA, 75 bp, Homo sapiens
attccaagtaactcttatttggttgatgtcgagcaacatactttggccaaatacctgatggaactaactatgttg

SEQ ID NO: 220045 - DNA, 75 bp, Homo sapiens
ttttgtattaatggatcacattttgaatttgaaggaacaagagtttgttcagaaacaacagcaagaattagatgg

SEQ ID NO: 220046 - DNA, 82 bp, Homo sapiens
acaacctgaacgtcaccgaggagaagtaccaggaggcgttggccaagggtgagaagccctaccactgcaactgggacggctg

SEQ ID NO: 220047 - DNA, 100 bp, Homo sapiens
ctgcccaacagccccgcgctcaacatgcacctagtcaagagccaccgcctgcagattgagatggccatcctgcggttcccttacgagtcctgggggaccc

SEQ ID NO: 220048 - DNA, 90 bp, Homo sapiens
agcgcttccgggtcgccgccggcagcagcctcccggcgcggcatgctggaagatggactgccctccaatggtgtgccccgatctacagcc

SEQ ID NO: 220049 - DNA, 99 bp, Homo sapiens
atcagggaggctttcagccggagaagcgagtttcagctgagctgaagaagcaggtggagagtgccgagctgaagaaccagcggctcaaggaggttttcc

SEQ ID NO: 220050 - DNA, 127 bp, Homo sapiens
cagcggtccagggaaggaagcaaagcaaatggagaatggcatgctggtgacggacagtgcagggaagcaactgcagagtcaggatttgcatgaagatgtcgaagaagctggtgcactgcagaaaaat

SEQ ID NO: 220051 - DNA, 98 bp, Homo sapiens
tcccgctggccgccatctgctgcagactggagcctgagagcagttacaggtcggttcacccagaagccagggggcatctcagtgaagcgctcactgaa

SEQ ID NO: 220052 - DNA, 100 bp, Homo sapiens
aaaggatcggaaaagaattttgatattaaggctaagacatactgcatttgtaataccaaagaaaaacgttcctacctcaaaacgtgaaacttacacagag

SEQ ID NO: 220053 - DNA, 106 bp, Homo sapiens
tcaagagcacaaaacagatgagatgcacactgccttaatggaggcctgcatggtccagagcagagcaaacagaaaaaagtggctccccgcccaagtatccctgtaa

SEQ ID NO: 220054 - DNA, 73 bp, Homo sapiens
tcaagaggctgggagcatcacttgcctttaataatatctacagggaattcagagacggagtttcaccatgttg

SEQ ID NO: 220055 - DNA, 87 bp, Homo sapiens
tgtttccacaatggaaccaattgttttacagtctgttccgcatgatcgttataataaggaacaggagtacagctgtgtagtaaagat

SEQ ID NO: 220056 - DNA, 82 bp, Homo sapiens
tggcggggactgttggtctcggccctgcggaaggtgcctctcttgaccagctaccctcccaggggaccatgaggaagctcag

SEQ ID NO: 220057 - DNA, 100 bp, Homo sapiens
aggccgactacctcaacctggtgcagtgcgagacgctagaggggttgctatgcgaaagcaagactgtggtttcattccaatttcctgtatatcggaatca

SEQ ID NO: 220058 - DNA, 50 bp, Homo sapiens
caagaccagcctgggcaacataaaatacactttcgggaaatggcctctaa

SEQ ID NO: 220059 - DNA, 100 bp, Homo sapiens
gagaaccagcacttctgggacgcacagagaccgtgaagattccaagttcaggagaactcgaccggagagaaatatgagttggagggaaggaaaagtggtt

SEQ ID NO: 220060 - DNA, 100 bp, Homo sapiens
cggccggaagtcttctcccctgcacttcgctgcaggtgcactattgacaaccgggtcacccgggtggcctggctaaaccgcagcaccatcctctatgctg

SEQ ID NO: 220061 - DNA, 100 bp, Homo sapiens
cacgactcccgatagtgagagacctgctcaagctctcttaagagattatgctgactggaaataccggcatgcaggattgatggccttatctgccattggt

SEQ ID NO: 220062 - DNA, 51 bp, Homo sapiens
gcctctcagagtgctgggattacagagtcattcttatagaagagcatcaga

SEQ ID NO: 220063 - DNA, 75 bp, Homo sapiens
tgcgtgtggaagactacgaaccttacccggatgatggcatgggggcggcgactggcggcgcgatggacctgaccg

SEQ ID NO: 220064 - DNA, 82 bp, Homo sapiens
agaagcttctgaaaacatttttgaaaagacaagccatcaaaactgccttcagaagcaaaagtcagctcctagacctagacta

SEQ ID NO: 220065 - DNA, 100 bp, Homo sapiens
ggaaggaaagcatgaagcagaagatggaggagcacacgcagaaaaagcagcttcttctgcgcaccaagctgtcatcacaggagatccagcagtttgcagc

SEQ ID NO: 220066 - DNA, 83 bp, Homo sapiens
ccgtgcgggacgcgggcgccaggaccggccgaacgcagaggtgagagtgattttccagtgattgctttggcctgtacaaccag

SEQ ID NO: 220067 - DNA, 98 bp, Homo sapiens
gatatccctgtggatttcaagtacatagcagaacccagtatgcactcaatgcctgcagtgactttgtctccaaatgggtgttactgtgttgcccaggc

SEQ ID NO: 220068 - DNA, 90 bp, Homo sapiens
gaaaaagagaagatgaagaaacccagcttgatatgttggacaggaagatgtcacccaagcgcatagctaaaagaaggtcccccccagcag

SEQ ID NO: 220069 - DNA, 105 bp, Homo sapiens
atagtgatcccattgggggttgatacagcagagacgtcatacttggaaatggctgcaggttcagattgctgatagtccaactccaccgccaccacctccaccaga

SEQ ID NO: 220070 - DNA, 90 bp, Homo sapiens
gcccgaccatcctttctacagcaacatcagtaagtttcgcacccctcatcggatcattctgtctggctcaccgatgcaaaataacctccg

SEQ ID NO: 220071 - DNA, 75 bp, Homo sapiens
ggcgaggccaaggccttccaggactattcctcctccgcctcctcctctctgcatgcgcgtcagagcccgtgccaa

SEQ ID NO: 220072 - DNA, 100 bp, Homo sapiens
agaccactgcctgtgtctcgtcttgtatctctaattggaagcactgtcggaaaaggtaacagaagatggaactcgaaatcccaatgaaaaacctacccag

SEQ ID NO: 220073 - DNA, 90 bp, Homo sapiens
gcttttttatctcatattagtgcctgtgatggcatctttcatctaacacatgtcaagccctccaacatcctagtcaactcccgtggggag

SEQ ID NO: 220074 - DNA, 100 bp, Homo sapiens
aatgccggtgacaaattaacagaggtccttgaagaggctaacactctgtttaatgaagcgtaactggcggaaacccagaggcattgacaacagggttcgt

SEQ ID NO: 220075 - DNA, 75 bp, Homo sapiens
ccgcagtgattgaagctttgataaatgaaatcttcctaagtataggatcattttacttctccagatgaatatgat

SEQ ID NO: 220076 - DNA, 90 bp, Homo sapiens
agcatgaccttccagcttctgagggagaagtctggtccatgcctgtacctgttgaacgaaggtaatgtgtcagtggatggaaaagtttag

SEQ ID NO: 220077 - DNA, 75 bp, Homo sapiens
gtccccaaaaagcctcccccatcaccccaacctacagacaatgcagatcttcgtgaagactctgactggtaagac

SEQ ID NO: 220078 - DNA, 75 bp, Homo sapiens
actggagggctctgcgtgttccggcaggaatggtttgtaccctcttagtggcatgggtttaccaacatttaaaga

SEQ ID NO: 220079 - DNA, 112 bp, Homo sapiens
cgacgctccctgtctgggaccttctccctgcctggacccctactattgcaacaaggtactccaaagattcaggtttactcacgtcatccagcagagaatggaaagtcaaatt

SEQ ID NO: 220080 - DNA, 101 bp, Homo sapiens
gagagaggcaccgggatcgtgaccgagaccgtgaccgagagcgtgaccgagagcgcgaatatcgtcatcgttagaagctgcatggctacttggagaatgag

SEQ ID NO: 220081 - DNA, 100 bp, Homo sapiens
atgtacggcaaaggcaagagtaacagcagcgccgtcccgtccgacagccaggcccgggagaaatcaggatcctcatgaccagccaaagagaagaagaatt

SEQ ID NO: 220082 - DNA, 51 bp, Homo sapiens
gctgaggcgggtggatcacctgagaactgttcgtcaggtggcacaggagca

SEQ ID NO: 220083 - DNA, 100 bp, Homo sapiens
ccagggtgtcaggactaagagaagtcacaaaacagcagatttcccaagagcagcggaaaatgatccagtcacaggcacttgcactgttgcctagactgga

SEQ ID NO: 220084 - DNA, 75 bp, Homo sapiens
taattcacagggacctgaaaccaccaaaaactcttcatcttggcttatacctatactgcctgatatgctccgaca

SEQ ID NO: 220085 - DNA, 97 bp, Homo sapiens
taggcttggttcacgggctgccttacgtagcagacagacagggctttgctgccaccttagagcagggtaaaatccagtacaaggaatatatcattga

SEQ ID NO: 220086 - DNA, 95 bp, Homo sapiens
gcggctccgcaagaagtaccgagaagatgggcttaggtcacgagcaaggatttggagccccttgtttaaaatgcaaagaaaaatgtgaaggattc

SEQ ID NO: 220087 - DNA, 83 bp, Homo sapiens
cctaaatgaggaatgtctttcctaccatctaaaatacgaaggtttctggctgggatcgttccaggaagagaaaggagatccat

SEQ ID NO: 220088 - DNA, 138 bp, Homo sapiens
tccttttctgagctgccatgagtatatcgatccatacttatatattgccagctgtgttaatgatctttgcaaaccctcaactttgtagagcattccattagttgcaaggaaaaattaaataaaaaaaataaaattgga

SEQ ID NO: 220089 - DNA, 83 bp, Homo sapiens
ctctggaaaaacttcttgccaaccaaaccatcagccagcaaagacctcgtcagtgtctttaactgcgacctttcgtcctcagg

SEQ ID NO: 220090 - DNA, 75 bp, Homo sapiens
gctttattgacctcgactcccatgcgagacagggtctcgatatgttgcccaggctggtcttgaacctctggcctc

SEQ ID NO: 220091 - DNA, 88 bp, Homo sapiens
gaccattgagtttgtccgggccactcagctccagggtgatgaggtttgaattttctcggagaaagacaggccggccacgaggaaaaca

SEQ ID NO: 220092 - DNA, 74 bp, Homo sapiens
tgagcgagatgctgcagatgccgttaaacaaatcctggaggcagttgctgttaattaccatgctcagcattacc

SEQ ID NO: 220093 - DNA, 75 bp, Homo sapiens
ggcgccatcttcgaacttagacttccggaaggactttggcgagggtctagatgttgatggaatatatcgagttag

SEQ ID NO: 220094 - DNA, 98 bp, Homo sapiens
gccatgtccattggagcccgttcccaatcagctcgtacttacttggagagacatatgtctgaatttatggagtgttgggagccacgtgtaccagtgtg

SEQ ID NO: 220095 - DNA, 90 bp, Homo sapiens
ctgatacagaagagatggatattgaaatggacagtggagatgaagcctaagaatatgatcagagaacacgtagcgactccgaagatcagc

SEQ ID NO: 220096 - DNA, 74 bp, Homo sapiens
ggagacccagtcgctacgggagcagccagaaatgaaatatgactgaggactctcagagaaactttcgttcagta

SEQ ID NO: 220097 - DNA, 100 bp, Homo sapiens
gggggattctcgacctgctaacagaactggaccttttcggcaagtatatcgcgtcaacacagcgacctgacgggacctggcgcaagcagcggagggtgaa

SEQ ID NO: 220098 - DNA, 100 bp, Homo sapiens
ttcttcatcctttacgagcacggcctcttgcgctacgccctggatgagatggtcaaaggccctttcagaagcaactccatttcattggataacttaaaac

SEQ ID NO: 220099 - DNA, 82 bp, Homo sapiens
atcactaaaaattatccctactacaggactgcggacaagggctggcagacctcctgccccccgaggtctgcagtctcctgaa

SEQ ID NO: 220100 - DNA, 100 bp, Homo sapiens
atttgtaaatcgtcccgataagaagaaaatacttttcttcaatgataagagctgtcagttttctgtggatgaaggagtcaatcttaagatgtgatacttt

SEQ ID NO: 220101 - DNA, 74 bp, Homo sapiens
cccaatggatccattcctcccattcatgtgcctccaggttatatctcacaggttctgtcagatagtgagaaacg

SEQ ID NO: 220102 - DNA, 82 bp, Homo sapiens
cgagaggatctggtgtaccaggcgaagctggccgagcaggctgagcgatacgacggtgtggatgaggtcaccattgtcaaca

SEQ ID NO: 220103 - DNA, 100 bp, Homo sapiens
gtcgccatcttggatccgcgggacaagaaaattcatgcggtactagcaaaggccagacgtcttactcaacaacttccctgccaccacctccaccatccca

SEQ ID NO: 220104 - DNA, 75 bp, Homo sapiens
aggagaatatgaagaagcgcttaagcgcaagcaccaggaaatccgagccatgagaagtcagctcaaaaagatcga

SEQ ID NO: 220105 - DNA, 100 bp, Homo sapiens
accggttccggaagagagacaaagtgatgttttacggccggaagatcatgaggaagaggctgaggggatctggcggtggagcgctaggatcagacgcccc

SEQ ID NO: 220106 - DNA, 83 bp, Homo sapiens
ccctgttttgcaaaaaccatcagtgtttgggaatgattctgatgatgatgatgagcctccagggtcgtatagacctccccctc

SEQ ID NO: 220107 - DNA, 82 bp, Homo sapiens
gcgtccgccgattcctcctccttggtcgccgcgtccttggctggcgtgttgtgcagcctgactctgaagaagctggtggtct

SEQ ID NO: 220108 - DNA, 95 bp, Homo sapiens
gagactttcacaataagagcagaggatggaacacttcagtgcattcaaggactgatcctttgaaatactccagccatgactaaaagagaagcaga

SEQ ID NO: 220109 - DNA, 100 bp, Homo sapiens
cggcaccagcagtaacaacagcgaggaagaagaggacgacgacgacgaggaagaggaggtttctgaggtcatagatctgtactggggagtggaagaagat

SEQ ID NO: 220110 - DNA, 50 bp, Homo sapiens
gcaatcgccgggacagctgcaagcttcggaaccaaaaagaagcttcccag

SEQ ID NO: 220111 - DNA, 97 bp, Homo sapiens
attggatcaaacatgtcacaagagtcggacaaacactggccaaaagaagaccctagacaagaaagatggaagacgaatgtcttttcagaaacctaaa

SEQ ID NO: 220112 - DNA, 100 bp, Homo sapiens
ggccaaagcctgcccagacggctcacctgtgcgggatggaacaaaagaaagttcaggagccctggaaaggagaaggaataagacggcaggaggaagagag

SEQ ID NO: 220113 - DNA, 75 bp, Homo sapiens
ggaggaggaggcggaggtccaagcggaaagtttgccaaggcacgagtaacaagctcacgcagttgggcacttttg

SEQ ID NO: 220114 - DNA, 101 bp, Homo sapiens
gggtcgtggtgattaatggtttcagaaggaagtgcagcaggaagagactttgcaggaatggaagagattgaccctgctacgggaatggttatgaatctggc

SEQ ID NO: 220115 - DNA, 101 bp, Homo sapiens
taagtatgttccctactcggagagcttcagccaagttttagaggagccagatgaccaagatgctccagatgaacatgagtcgcctccacctgaagatgccc

SEQ ID NO: 220116 - DNA, 90 bp, Homo sapiens
cgccccgattaaagactgtgttgcattatcagattacttctctaacaggatcaccagtttgctccacaaagcacaatgtctcgatcacga

SEQ ID NO: 220117 - DNA, 115 bp, Homo sapiens
ggcccgaaacgccgccgcggagccgaggcggagccgctgtcctcgtccccagcggtcccgcccaacgcccgactctacaggcaggattgaacccaactaccccaaggtctgcggc

SEQ ID NO: 220118 - DNA, 100 bp, Homo sapiens
gaagagctacttcaaaatgaagttaatcggcaagaaattcggaactatccgggcagatttgattgaacagatgagattcaaacagagactgaaagtgatc

SEQ ID NO: 220119 - DNA, 100 bp, Homo sapiens
cttccggaaggactttggcgagggagttcaaagaaggacgcagagccagccacacagccccacaggtcctctttagccacagggaacctcctctggagct

SEQ ID NO: 220120 - DNA, 50 bp, Homo sapiens
gaagcccaggaaacacaggcagcggggcagggtgccatttgccgtgcctg

SEQ ID NO: 220121 - DNA, 82 bp, Homo sapiens
tttatgtgcctgtaaaagaatacccagatgttatggaggttttgatgactatggtggctataataattacggctatgggaat

SEQ ID NO: 220122 - DNA, 75 bp, Homo sapiens
cgggaaggtaccaaggattggagcacagaggctcagaagcaagtccagttgatattcactgatggactccaaaga

SEQ ID NO: 220123 - DNA, 98 bp, Homo sapiens
gtcaactgattgatgttcttcaaaacatggtgaaaacatgcaactctgaagaatcagggctgactttggtttctgtgcccagatcacccctgagcaga

SEQ ID NO: 220124 - DNA, 75 bp, Homo sapiens
cggcggagaggcgccccccgcagcagaggaaaggagcagtggcttccggttgaagccaccaacgctgatccacgg

SEQ ID NO: 220125 - DNA, 76 bp, Homo sapiens
tccggagtcagtcattttactgtcaagacatttcttcggcattctgcaacagaggctgctggtttgcctagaagag

SEQ ID NO: 220126 - DNA, 82 bp, Homo sapiens
ggagaagtgattcccgaagaatcaaggctgggccggacccggtggcctggcaacaggtatcatcgagaaaggagaagaacac

SEQ ID NO: 220127 - DNA, 100 bp, Homo sapiens
ggagcacattgagaggtccaagatgcagcaggtcggaggaaacagccagaccgagagcagcctgccggggcggagtgctatgctggaaaatgagaagaag

SEQ ID NO: 220128 - DNA, 100 bp, Homo sapiens
actgatgatccatcaggaggcaacaaagttcttctgctctcaattcagaatccgctttatccaattacagtgtcagcagataagcagagagccctagaag

SEQ ID NO: 220129 - DNA, 80 bp, Homo sapiens
tctttctcttgatgatcttgccaaaaggatagagattgcagaggaatcccagtcagaagttccagcctgccactgttctc

SEQ ID NO: 220130 - DNA, 98 bp, Homo sapiens
cgcaaaccaaggatctggggatcttcgcactatcccaagacctgcaggctgggacaatgaaaagaaaatagctattttacatgaaaattttacaaccg

SEQ ID NO: 220131 - DNA, 71 bp, Homo sapiens
ctcacccaaggtctcagagcagctgctcaagcttgatgaacaagggatgatgattattccccaccttctaa

SEQ ID NO: 220132 - DNA, 99 bp, Homo sapiens
gtcccaagagtggcccaaaagagagaatttatctagaggaaaacccagagaaaagtgaaacaattcaggacactgagtgatttgggccccgatgttggc

SEQ ID NO: 220133 - DNA, 100 bp, Homo sapiens
caggacgttggggcggcctggctccctcaggtgatttgatgaaggctgctgcaggagagttcgcagatgatccctgctcttctgtgaagcgaggcaacat

SEQ ID NO: 220134 - DNA, 101 bp, Homo sapiens
gaaaataaacggagcaggaagccggctcacccagtgaaaagggagatcaatgaggagatgaaggcctttgtggaggcccagaataagattactgtgccatt

SEQ ID NO: 220135 - DNA, 75 bp, Homo sapiens
ctgctgcagagactcttcagtcgccaagttaatttggagtggcccctggagtcagtttcctacaccatccgaggc

SEQ ID NO: 220136 - DNA, 100 bp, Homo sapiens
cagctatcttcccatccaatacttggtgactggtctattcaagttcaagtgaatatcagtgtgcgtgtgaccaccatggatgcagagctggagtttgcca

SEQ ID NO: 220137 - DNA, 100 bp, Homo sapiens
ctacagctccactcgaggcatctcacaggcaaatgaagaggattcttccagttctctagtgaaggatcacctttttcagcaagagacagttgttaccagt

SEQ ID NO: 220138 - DNA, 75 bp, Homo sapiens
cggagcagtagccgccgtgggagggagccatgaagcattacgaggaccttatggattttctgaacccaaacggta

SEQ ID NO: 220139 - DNA, 100 bp, Homo sapiens
aaaggagaatggggatttaaagcactgaaacaaatgattaagattaacttcaagttgcttccattgaagattgacatcattaaacatccaaatgaaacag

SEQ ID NO: 220140 - DNA, 98 bp, Homo sapiens
ctggagtcccccttactaggggcaggctgctggtggtctacccttggacccagaggttctttgagtcctttggggatctgtccactcctgatgctgtt

SEQ ID NO: 220141 - DNA, 50 bp, Homo sapiens
ggcacctacggcgacgtctacaagactaatagggatgccaaaggaaaaat

SEQ ID NO: 220142 - DNA, 82 bp, Homo sapiens
ccgccatggatcccagcaactggagcagcttcatcttccaggtgtggacactgccagcggctgcagccgacttggaatgacc

SEQ ID NO: 220143 - DNA, 82 bp, Homo sapiens
agggcttaactcatatatttaacccccctccaaaaagttttacagacatttcaccagaggaattgaggcttgaataccataa

SEQ ID NO: 220144 - DNA, 83 bp, Homo sapiens
cggcgtgctgcgcctccgcggctgccctgcgccaggtttttagaacttcagccataaaaatgggcagaattttccttgatcat

SEQ ID NO: 220145 - DNA, 101 bp, Homo sapiens
aaagatgctgttccaggcgcacactagtctacaaggccagagctttctggaagggggcagaatgaatctgaagtctgctgcagtaaaacacagaaggcttt

SEQ ID NO: 220146 - DNA, 50 bp, Homo sapiens
gacagtggtctccacccagctgttaaaatatttggagttcttacaacatg

SEQ ID NO: 220147 - DNA, 75 bp, Homo sapiens
cagatggcgtcttccgtgggcaacgtggccgacagcacaggattttttatcaagcagaaatgcatcgaacaacga

SEQ ID NO: 220148 - DNA, 100 bp, Homo sapiens
ggaaggacgacgacaaacacgtcatgaggaaggagcagcgcaaggaggatatgatggttaccgcccttcattctctaacactccaaacagtggttataca

SEQ ID NO: 220149 - DNA, 100 bp, Homo sapiens
gtgcatcaaaggtgtgaacgcagatggcgatgaagatgatgaagaggaagaggaaaatgaagctggtccaccggaaggatatgaggaagaggaggaggaa

SEQ ID NO: 220150 - DNA, 90 bp, Homo sapiens
cttcatcaagctcattaacagcaactctgatgtggagttcttgaagcaactaaggacattgagagggaaaaggcctcatcgacataccaa

SEQ ID NO: 220151 - DNA, 110 bp, Homo sapiens
cagggcctgcagcgggagctggacggcgagcgcgagcggcgcgagaaactgatccagtgtctctttgggccacttcaggcggggccgagcaatgcaggaggcaagagaaa

SEQ ID NO: 220152 - DNA, 98 bp, Homo sapiens
ggccagggccgcactccggagactcgcggttgctacgcgcaccatggctggagcggagcccatcgtggtgaggcttaaggaggtccgactgcagaggg

SEQ ID NO: 220153 - DNA, 100 bp, Homo sapiens
gacgaggacgacgacgaggacgagcacggtggcgtcttctcccagtccttcctgcccgatgagagaaagggaaagttaaggatgctggagcagaacaatg

SEQ ID NO: 220154 - DNA, 82 bp, Homo sapiens
acaaatccctcaacttgctaaaaatcaaataagaaaggaggtattcgaacttctggaaatgggagtgctcagtctgtgcaag

SEQ ID NO: 220155 - DNA, 87 bp, Homo sapiens
cgtctcggaaaccggtagcgcttgcagcatggttaccccacagcctatccagcagctgcccctgcctacaatcccagcctgtacccc

SEQ ID NO: 220156 - DNA, 100 bp, Homo sapiens
gacgattcagagactgaaaaacctgaggctgatgacccaaagagtggagactgctgcacggactctggaaccatgaacatatttgatcgaaagatcaact

SEQ ID NO: 220157 - DNA, 100 bp, Homo sapiens
cagaagcgcagcatcacgcgccccaacgcgggctttatgaggcagctgtctgagtatgaaggcatcttggatgcaagaacaagaatgtggtggtggctga

SEQ ID NO: 220158 - DNA, 96 bp, Homo sapiens
tcggtcccgcgctgcgcatccccgcggacgccacagcgctatcagctggacatcatctccatggcggagacaaccatgatgccagaggagattgag

SEQ ID NO: 220159 - DNA, 97 bp, Homo sapiens
tatggacactacatccatggaggagggtgcattctgggtgatgacatgggacttggaaaaacagtacaggtctcggacagcccgggagacgagccct

SEQ ID NO: 220160 - DNA, 82 bp, Homo sapiens
aggagcaggatttagaggaccactagttggaccccatcctcgtgctggaggaacagggactggtgattgcagctggaagtgc

SEQ ID NO: 220161 - DNA, 100 bp, Homo sapiens
gtccagccgtccccagaacgcagatcagaggtagtcggacctttcccgctggcgcgcagcctcagctaggttctgtcatatgttgaagaatccatacacc

SEQ ID NO: 220162 - DNA, 83 bp, Homo sapiens
ggccgtctcgctctgggtctccaggcccgcgaccgtccgccagtcgtcccgaggccctcgggaccaaggatcacgtcatgact

SEQ ID NO: 220163 - DNA, 82 bp, Homo sapiens
gatctctccatcccttccgaggcccgacttcgggcaactccaacaacattgccaccgtggacatctccgcaggcttcgtggg

SEQ ID NO: 220164 - DNA, 100 bp, Homo sapiens
ggccttgaaggggaggcagtatctgccgctcctggctcctagggcagcgcctagagcacagcgggtatttctgtgggacttggatgaaaccatcatcatc

SEQ ID NO: 220165 - DNA, 82 bp, Homo sapiens
atggaaagaactttcacctgatccaggccaacaagcacagacgcagtcttcagcaaggaagtgctgggaacgccctggagtg

SEQ ID NO: 220166 - DNA, 100 bp, Homo sapiens
ccgactgctgcctggtctgcaaagaagtcctttcaagtctctaggactggactcttcctaagcaagtccggtatgtagatcagaccaaacattgtctggc

SEQ ID NO: 220167 - DNA, 82 bp, Homo sapiens
tgggattggagattccacccaaacttgctggtcactgggagcgccgcgcggtgaggttctctagtccacgctcgcagccatg

SEQ ID NO: 220168 - DNA, 75 bp, Homo sapiens
agaggcagcagaagccagggcagctgaaagacagagaccttcaggtgtgatgaatgcagactctgctaccatttt

SEQ ID NO: 220169 - DNA, 75 bp, Homo sapiens
tccgtttgttcaggaaccaccagtgacagagtccagtgcacgtgccaacattacactgtcagggaagaagcgcag

SEQ ID NO: 220170 - DNA, 75 bp, Homo sapiens
gttcggtggcctctagtgagatctggaggtgagaagccctaccactgcaactgggacggctgcggctggaagttt

SEQ ID NO: 220171 - DNA, 98 bp, Homo sapiens
agacagaggtgtatgttggcaatcttccactggatatttctaaggagttcatgatcaagtgttgcccacaccaaatgcttcatccagagtcatagtac

SEQ ID NO: 220172 - DNA, 90 bp, Homo sapiens
gctccacagaaacccggactgagaggcagcgagagggcgcccacggcctgcgagaggagcccgagtttgtgacggcaagagctggggaga

SEQ ID NO: 220173 - DNA, 100 bp, Homo sapiens
ggccgtccagcagatggcggatgccctgcagtacctgcagaaggtctctggagacatcttcagcaggtctggaggcggctggtggaaatccaattccccg

SEQ ID NO: 220174 - DNA, 75 bp, Homo sapiens
ggctgaggctacctgtgaacagtacgcagtgaatgttaacatccatgatagcagtcttctgtaaatcgaactttt

SEQ ID NO: 220175 - DNA, 90 bp, Homo sapiens
aaagaaaatgatatggaaatggaaattaaatgggttccagtttcatgaacaggcgtgttatatctgctaacccatatctagggggcacct

SEQ ID NO: 220176 - DNA, 75 bp, Homo sapiens
acccagcaagatatgcagtccaggattttctgccgtctcttggcaaaaatggcaaataatgatgctgttctgaag

SEQ ID NO: 220177 - DNA, 98 bp, Homo sapiens
caccatcgccctcttcaccatctatgtcctctggacgctgggaccattgcaatttagagatgtggccatagaattctctctggaggagtggcattgcc

SEQ ID NO: 220178 - DNA, 75 bp, Homo sapiens
agcaggaatgcttactgttgcgtggttcgttattaacagtttgcctgagaatacagatcaacccacagaacaaag

SEQ ID NO: 220179 - DNA, 75 bp, Homo sapiens
ggcatcaagtggcatccatcataagggtagatacaacaagaattgaatactccattcctttaagagaaaactggg

SEQ ID NO: 220180 - DNA, 50 bp, Homo sapiens
gggaaggagcacccaggagctgaaggtgaccattgtgaggtagatatttt

SEQ ID NO: 220181 - DNA, 100 bp, Homo sapiens
cagcgacagagccaaaatcagagctggaacctgaggagagaggccgctttgtagttcagaatgtttctgcacagaaagatggagaaaaatctagagtaaa

SEQ ID NO: 220182 - DNA, 51 bp, Homo sapiens
cctgcagcgggcctacatcaaggtgttacagttcgagtgcctcaaacaacc

SEQ ID NO: 220183 - DNA, 51 bp, Homo sapiens
cgccaacagcaacgcggaccactttgcccagtatgcggagatcgtccactt

SEQ ID NO: 220184 - DNA, 101 bp, Homo sapiens
gttcacagatgatacctttgatccagaacttgcagcaacaataggcaagaaagtgagagtgtgctgactctcaagggcctgactcccacaggcacactccc

SEQ ID NO: 220185 - DNA, 75 bp, Homo sapiens
gtgtacgagaagccggtacaggtgccctgcggacacgtgtgtttgaggaactgtggaagagggaaggcaagactc

SEQ ID NO: 220186 - DNA, 98 bp, Homo sapiens
gcagcccgagtcccagaaggcggcgatcctgggctgcgggcaaggcggtatctgtgggagctaatcctgtccaggtggaagtaggagaatttgatgat

SEQ ID NO: 220187 - DNA, 75 bp, Homo sapiens
gtagcgtctctgtttccttgtgggcgctcgcgcggccctggcgcagataaagtgagcccggaaagggaaggaggg

SEQ ID NO: 220188 - DNA, 75 bp, Homo sapiens
acatggcggcggcgggtgttgtgagcgggaagtccaagtggtaagaagttcagaagcaagcctcagttggcaagg

SEQ ID NO: 220189 - DNA, 83 bp, Homo sapiens
ctgatgacacagccctcagcgagagtgccaaccaggccttcctgagctgccatcagtcatgctcttaaacggggactgcccag

SEQ ID NO: 220190 - DNA, 51 bp, Homo sapiens
tcggcctcccaaagtgctgagattacaggcatgagccaccgtgcccggcct

SEQ ID NO: 220191 - DNA, 100 bp, Homo sapiens
tattcgtaatgcgactcaaagctgcacggcagtctgtttatgagcttgaattcggagtgatttaccactgcacagaggagcggctgtacacgggccggcg

SEQ ID NO: 220192 - DNA, 75 bp, Homo sapiens
aagacatttcctgctcggaaccttgtttactaattactaaaagaacatattgctgataagaagaaactacccata

SEQ ID NO: 220193 - DNA, 75 bp, Homo sapiens
atcctgtgaccattctatctggggtgaactcaaggttagtcataagcattttgaagaagctttcaagaaagtaag

SEQ ID NO: 220194 - DNA, 74 bp, Homo sapiens
ctgctttccactcggctcctgtcgtccgttctctcaggctcccgttcagccactgaggcggctcccagctgcgt

SEQ ID NO: 220195 - DNA, 96 bp, Homo sapiens
ccccctgaagccggcagcaccaagaggaccaatacgggcgatcagcagttgtgtgatcctggtgaatttctttgccacgatcacgtgacttgtgtc

SEQ ID NO: 220196 - DNA, 123 bp, Homo sapiens
ccgtggccttcgcgtctgcccggccaagaggcaaaggggaggttacgcagcaaaccatccagaagggggggccctcagcctcttggccttgaacgggctgttcatcttgattcacaaacacaa

SEQ ID NO: 220197 - DNA, 98 bp, Homo sapiens
ggaagacgaccaagcgggagcgggagcgggagcgggagccggagcgagagcgcgcgggcgcggccgacagattttaggtgatgggcaagtcagaaagt

SEQ ID NO: 220198 - DNA, 75 bp, Homo sapiens
tgtgagatgtttcatcccaacaaatgtgaaaacctttgcatcttctgatagtctagccaaggtccaagaagtagc

SEQ ID NO: 220199 - DNA, 50 bp, Homo sapiens
ccgcaccatgatcgttatgaatgatcagaggagaattctgcctaagccaa

SEQ ID NO: 220200 - DNA, 95 bp, Homo sapiens
tctgtactgacgcgccctcgcttcttcctctttctcgactccatcttcgcggtagctgggaccgccgttcaggtctcagctgagtctgctctgat

SEQ ID NO: 220201 - DNA, 100 bp, Homo sapiens
gcccgggagctgagctggatgtccagttgaaactggaacgccaagctgaagaagaacgaatacggaagcacaaagcagctgctgagaaagctttccagga

SEQ ID NO: 220202 - DNA, 51 bp, Homo sapiens
tgcgtttccgttgtcggcctcccactgcagtcctcctccatcaaagaaaat

SEQ ID NO: 220203 - DNA, 74 bp, Homo sapiens
ccatcctcgtgctggaggaacagggggtcctgatgacaacttaattgaaggtggaggaacaaaatttgtctgca

SEQ ID NO: 220204 - DNA, 75 bp, Homo sapiens
aggctggctgtggcagatgcaactgcagcatccagcagattcagtgctgtttggacaagatgaacttcatctaca

SEQ ID NO: 220205 - DNA, 100 bp, Homo sapiens
ccctcctggtcagtacatggattcttcacttgttaagatattgctatatggagatttgccaaaaaataaagaaaatataatatatttagcaaatcatcaa

SEQ ID NO: 220206 - DNA, 50 bp, Homo sapiens
cggaagcccaggaaacacaggcagcgggaccgaatcccttttgccgtggt

SEQ ID NO: 220207 - DNA, 100 bp, Homo sapiens
gagctggttggccctgtgatccctcaagactggtccacggagtgtatgaccacaaacagccatcaaggtttttgtctgatgaaaatagtctggagtataa

SEQ ID NO: 220208 - DNA, 75 bp, Homo sapiens
tttatgccagttgcaaagaagaatattggctcactatttttcctctgggcatgcaaataagggcgagactgaaaa

SEQ ID NO: 220209 - DNA, 128 bp, Homo sapiens
ggagctaagtccccagattggaggaggctggctctggtcttcgatgcacaggagtggccgttatggaacgcagattactattttggatgcaaaacggagcatgaacattgggatatttcttaagcaat

SEQ ID NO: 220210 - DNA, 100 bp, Homo sapiens
cgcctccttgcccgtgaccgtcgctagaactcagttgtgcgttgcggccagtcgccactgctcagccagacccggtccgtttggaatgcctgggatggtg

SEQ ID NO: 220211 - DNA, 74 bp, Homo sapiens
agcctcaaaaccgtcctgctgcttgctgaccaaatgtgtggacgaatgtggaacctcgctctgtggctgtgttc

SEQ ID NO: 220212 - DNA, 51 bp, Homo sapiens
gcctccaaagtagctgagactacagttgccttttcgggccttggcttcacg

SEQ ID NO: 220213 - DNA, 100 bp, Homo sapiens
agttaattgaagagtcttgtccacagctggcaaattcagtgcagatcagatcctttcccggagttcagttatgggtgtgagaggtttgcaaggatttgtg

SEQ ID NO: 220214 - DNA, 83 bp, Homo sapiens
gccaagggaccaaggtggaaatcaaacgagccaaaaacctgtatatcatctccgtgaaggggatcaagggacggctgaacaga

SEQ ID NO: 220215 - DNA, 87 bp, Homo sapiens
gagcctgccctcgcatggtggccagggcacgtcactgcaggccagcaagagtgagccatggagctacgtgtggggaacaagtaccgc

SEQ ID NO: 220216 - DNA, 100 bp, Homo sapiens
gtatcctcctgtgttttttcagactccttggaaattaaggaatgcaattctgccaccatgatggaaggcagtgatgaagcagtggctgacactagcaggc

SEQ ID NO: 220217 - DNA, 101 bp, Homo sapiens
ctgaagttattgtaccgcatttgactgagtcttacaatagtcattgtggacttccatatgtggaggtgctgtgtaaaaaccggtatgtagggagaaccttc

SEQ ID NO: 220218 - DNA, 90 bp, Homo sapiens
tgaagaataccaaggaggatcttttagaggctacgggcgcacctacttcagctgcacgtctgcccacaccagcactggcgacggcacggc

SEQ ID NO: 220219 - DNA, 75 bp, Homo sapiens
ggagaatcgaggagctcaacaaggtgtcggaactggtgaaggtgtcagccatgtccagccccaaggtggttctgg

SEQ ID NO: 220220 - DNA, 80 bp, Homo sapiens
ctgccgcaggacctgcagcatcccagaggaactgtggctgcaccatctgtcttcatcttcccgccatctgatgagcagtt

SEQ ID NO: 220221 - DNA, 75 bp, Homo sapiens
gatcttcaacaagaggacccaggagaaattcgccctcaaaacctcctgccccccgaggtctgcagtctcctgaac

SEQ ID NO: 220222 - DNA, 83 bp, Homo sapiens
gaaggagatacattaaatgcaatagcccttcagtactgttgtacggcctgtctccactaactctggaccctaaaacagctcac

SEQ ID NO: 220223 - DNA, 100 bp, Homo sapiens
cacggagtcccgtgacctcagcaagtacaactttgagaacaaggtaaacgagatcaactttgagaacatgagtaatgacgatgcagtccgggtactgcgg

SEQ ID NO: 220224 - DNA, 75 bp, Homo sapiens
ccgctgtacactctttgtaaggaggatttagagagtatggacaaagagcccgaccctgcccgccctggactggca

SEQ ID NO: 220225 - DNA, 100 bp, Homo sapiens
caactcttcagtgttggctgataaaattgccctgaaactggttggtgaagaaggatttgtaggaaaccactgattgcttgtgtggagaaacagctattag

SEQ ID NO: 220226 - DNA, 88 bp, Homo sapiens
gagatttcatgaagatggcgccaggacgaaggccctactgggcaaggaacctagaaagattgtacaatgaatggtgattctcgtgctg

SEQ ID NO: 220227 - DNA, 75 bp, Homo sapiens
tcttttcctgatcttaaagagaaagcatccaagctttcaccagttgttatcgtcaggagctgtgcaaactgatgt

SEQ ID NO: 220228 - DNA, 100 bp, Homo sapiens
agctcagtgagtgccatcactgatattaaaaggattttctggcatccttaaatcttgtgtcaaggattggttataatataaccagaaaccatgacggcgg

SEQ ID NO: 220229 - DNA, 90 bp, Homo sapiens
cctgaatcctgaattttccttgatggtcaaaagattaagggtgtttgtgaaccgaagtttagcaatggaaaagataaagtgttttggttt

SEQ ID NO: 220230 - DNA, 75 bp, Homo sapiens
aataaataattccagtgggatgagggacccaataattgcaaaacagctctttagcagcttgttttctggaatttt

SEQ ID NO: 220231 - DNA, 97 bp, Homo sapiens
cagtagcgcagaggcggcggtggcgagaggtgcggcgaaggaggcagaggcacttatgcttgtcagagactttggctatgaaaggattaacactgaa

SEQ ID NO: 220232 - DNA, 95 bp, Homo sapiens
aactcattgttaagcacaagttcacgaaagcctacaaaagtgtggagaggttccttcaggaggatcaggatgattatttcagaaactggaatccc

SEQ ID NO: 220233 - DNA, 75 bp, Homo sapiens
ccggaacaaccaccggagcaacgtcacggcggtgcacaaagccaacatcatgttcagctctgttcagctccttgg

SEQ ID NO: 220234 - DNA, 83 bp, Homo sapiens
gatgaacgaagttatggcagagttagctaaagaactccctcaagtttcatttgtgaaggagatggaataaactgagactgcag

SEQ ID NO: 220235 - DNA, 98 bp, Homo sapiens
ctgcaggtcacctacctgaaggacaacagcacccgtaacatcttcatctaccatgaggacgggaagggatcgactacaagaccaccaccatcctgctg

SEQ ID NO: 220236 - DNA, 98 bp, Homo sapiens
gctggggcccccagaagtgatcgctcagctggagaacgcggctaaagttctgatgcggagtttaagagagctgtgaaagtagcaacaggacaagaact

SEQ ID NO: 220237 - DNA, 100 bp, Homo sapiens
gggaaatgaagaggaaagtcttgcctctccattttcttccgttcatgaggaattactcaaggtgatgaggacaattgatgacagaatagtacatgaatta

SEQ ID NO: 220238 - DNA, 88 bp, Homo sapiens
tgacagtgattttaaagttggagatgcctcagcgatcatctcagtccacattggaacgatctgaacagcagatcagggctgcttctag

SEQ ID NO: 220239 - DNA, 90 bp, Homo sapiens
ggcgcatgacgatggagagcagggaaatggactgctatctccgtcgcctcaaacaggagctgaacagggaattgatagctgctgagctga

SEQ ID NO: 220240 - DNA, 141 bp, Homo sapiens
ctatctgacctcacagttctatgccctcaactacagcctccggcagcgcatggacatcctggatgtgctgggtaggccaggtttcagcatcgcagacaagaagcgcaggacaggctgcattggggccaaacacagaatcag

SEQ ID NO: 220241 - DNA, 116 bp, Homo sapiens
gtccacgtaatccaagagaggctaaaggaagaacaacagatggatcccttcagcgaaccggccgatgatttacaaaggcaggacaacagagttgtaacgggtttgaagaaacaaag

SEQ ID NO: 220242 - DNA, 98 bp, Homo sapiens
caatcagttgcgaccttctcttaacagtttggtgccctggttgtcagatgttggaaagcagtaggacggaacatactcttcgtggttgtgtatccgtt

SEQ ID NO: 220243 - DNA, 100 bp, Homo sapiens
atacaccagctccaaaaccactcgcatctgagcctgccgatgacactgggaccgcagatgttcatggactgcagcccacaggccctgcccatcgcatcag

SEQ ID NO: 220244 - DNA, 98 bp, Homo sapiens
cattgcttcccagaacatgatgcgagcagttgcaagacaagtctgtgaacaattgataagtggtgttggagcgggccggagagaagtagagtgggctg

SEQ ID NO: 220245 - DNA, 83 bp, Homo sapiens
cggggggccaccgaatcgctgtcacgccggcaggagacatatactgcctggactgcctggctgatgtgagctagtttgtctgg

SEQ ID NO: 220246 - DNA, 82 bp, Homo sapiens
cacgagatcttcaatctgacagaaaacgagcgtccgctggcggggggatatgagactttctactcggaatatcctgagtgtt

SEQ ID NO: 220247 - DNA, 90 bp, Homo sapiens
ctcctccgggcttctgaggacccgcagggagcggtgtaaggcaaacattggtgggcaccgatcttcctgttcattctgcaagaacccaag

SEQ ID NO: 220248 - DNA, 74 bp, Homo sapiens
gactctgctggctttggcgtatacacaggaacgtcaaggtcgtgggaaataaaaggcagttctacacagactgc

SEQ ID NO: 220249 - DNA, 90 bp, Homo sapiens
agcgagtcaaggcctcccactccttcctccgagggctgtttggatggcaccgaaagcgaaggaagctcctgctcctcctaaagccgaagc

SEQ ID NO: 220250 - DNA, 100 bp, Homo sapiens
cctccattggatttaaaagacagtcctcgtcagcactgactttcagctatggaatcggaagacaatggtgtaaaattggttgatcctttgggtgaaatgt

SEQ ID NO: 220251 - DNA, 75 bp, Homo sapiens
ccttcatggaaagccaatagctggaatgaggtgttagacaaacccagtaggctaactgaaaaggaacttgctgag

SEQ ID NO: 220252 - DNA, 100 bp, Homo sapiens
tgccctggagctgagtggggcgctccgcttctacgacagatccgacatcgacgcagtctacgtggccataaaagtcattgataagaagagagccaaaaag

SEQ ID NO: 220253 - DNA, 76 bp, Homo sapiens
ctgttcggacttccccgttagaactcgcgtttccacttcagagatctgatattgatgatgttaagaagttcaaacc

SEQ ID NO: 220254 - DNA, 98 bp, Homo sapiens
gccagccactcgcccctggcctcgcgggccgtgtctccggcatcatgtgtgcggtcttgcgagtggctggttccctgcagaagagcacagaagtgatg

SEQ ID NO: 220255 - DNA, 102 bp, Homo sapiens
cgcgaggcaggagagaggaggaggagtgcggcgcggcggccccgggaccaaggagacaatgcagatcttcgtgaagactctgactggtaagaccatcaccct

SEQ ID NO: 220256 - DNA, 125 bp, Homo sapiens
ctgatccgcggcctggggcaggaatgcgtcctgagcagcagccccgcggtgctgggatgccaaccctgtggtaattgagccatcatctgttttgaatggaggaaaatactcatttggaactgcag

SEQ ID NO: 220257 - DNA, 100 bp, Homo sapiens
tttgagcggactcccttttaagcaccgacgagagtgctggggaataaaaaggggatcttcactcggcagagacaaccaaaaagtgcagcgttccttttgc

SEQ ID NO: 220258 - DNA, 98 bp, Homo sapiens
cagaaagagcgggagtccatcatgaaggagttccggtcgggcgccagctcaccatggatgatgatatcgccgcgctcgtcgtcgacaacggctccggc

SEQ ID NO: 220259 - DNA, 83 bp, Homo sapiens
ggcaggtgacagtctgcatgtgcagttttcagagcttcttcgagacaccttcacttccctgggctatgaagtccagaaattct

SEQ ID NO: 220260 - DNA, 104 bp, Homo sapiens
gttcgtcatggggctgtttggaaagacccaggagaagccgcccaaagaactgggacaagaatccttcaagaaacaggaaaaaactcctaaaacaccaaaaggac

SEQ ID NO: 220261 - DNA, 97 bp, Homo sapiens
gggctgacagtggctgacctcgtgttcccgtgttgggatgaatgggttccggagagcagagtactcaaatacgtggacaccaatttgcagaaacagc

SEQ ID NO: 220262 - DNA, 75 bp, Homo sapiens
cggacaagcacagtcttcggaaggtgtggtggctcacgtctgtaatcccagcactttgacaggctgagcgaggga

SEQ ID NO: 220263 - DNA, 74 bp, Homo sapiens
tgtgatgctggagaactacagcaaccttgtctcagtgggtgaatctatgttttgaccaatttgtttacaagcta

SEQ ID NO: 220264 - DNA, 73 bp, Homo sapiens
gaagatggcgcctgttgtgacaggcataagctgtggccatgactactgaagtaggctctgtgtctgaagtgaa

SEQ ID NO: 220265 - DNA, 75 bp, Homo sapiens
gctctacatctctgagaaggagggctacttctacaagtccgaacagccagtccagcaaaatgaacagcattgtct

SEQ ID NO: 220266 - DNA, 100 bp, Homo sapiens
aatttaatgctcctgatatattcatgggagtactggccaagtccaagtgtcctcgattaagaactggtgaattttcagctcgtttccttttgaagctgcc

SEQ ID NO: 220267 - DNA, 100 bp, Homo sapiens
gcccatttcgcaggaattggagcccaggccagttctctgagcctatcattagggctaaagaccaccctcaaagaagaagtgaatgaactacaatacagac

SEQ ID NO: 220268 - DNA, 74 bp, Homo sapiens
aggcctgacagctctgcggctcgggccctgaggtggaggtggaggaagcgtccctgggatcgagaggatgggtc

SEQ ID NO: 220269 - DNA, 75 bp, Homo sapiens
cgttggcaatcaactaccttttgtaggatttacatattatagcaatcgtaggtgtgggccatgtttgaggattgc

SEQ ID NO: 220270 - DNA, 100 bp, Homo sapiens
ctttctgcgccatcctgcaccgccaccggcccgacctcataatttgaaagacatattggctgacctgatacctaaggagcaggccagaattaagactttc

SEQ ID NO: 220271 - DNA, 100 bp, Homo sapiens
catcctgtcacaggccatgctctggcaaaaacgttcccgatgagcacttctccaccctgctggcctacctggaggggctgcagggccgggcccgagagct

SEQ ID NO: 220272 - DNA, 50 bp, Homo sapiens
tgcctcattcccataacgacccagcaggtagatgaaactcaagagaaaag

SEQ ID NO: 220273 - DNA, 83 bp, Homo sapiens
cccgtgcctgtgaacctcggcggtgcgtccctgggactctgctccgtgagacaatgcagatcttcgtgaagactctgactggt

SEQ ID NO: 220274 - DNA, 127 bp, Homo sapiens
ggccaatgtgggatcgatgtttcaatattggaagcgctttgatttacagcagctgcagtaaggatggggatgataagaagagacctgtgatcattcatcgagccattttgggatcagtggaaagaat

SEQ ID NO: 220275 - DNA, 90 bp, Homo sapiens
ttttttctaataatgctgatcaacagctaacagcaacacagaaatttagaaagctgctttctaaagaatgtccctcttccagtggaaagc

SEQ ID NO: 220276 - DNA, 100 bp, Homo sapiens
ctggctttaatcctgaaagccatgcagcggcattgggaatggtaccacctcccgaaaatgtcagaatgaattctgttaatttcaagaacattctacagtg

SEQ ID NO: 220277 - DNA, 75 bp, Homo sapiens
tgctccctcgccgtcactgttgtataaatgttccaatcgttgcacttactgctactgcaagttcttcaatccggg

SEQ ID NO: 220278 - DNA, 75 bp, Homo sapiens
gtcacctccaacaacatccgcgagatcgaggaggtatttaactgaaaggaatatctgcttcactgttgcaaccaa

SEQ ID NO: 220279 - DNA, 96 bp, Homo sapiens
cctttccagttttcacaagaagacatgccccgagtgcggaagaggatttacaaggagctatgaccaagaatcgccttcagccctgtctggtgcatc

SEQ ID NO: 220280 - DNA, 98 bp, Homo sapiens
ccgttagcccagccaagcccagccaagcccagccaagccccgccgatcgcgggcaccggagccagccccgcagcggactgagcgtgcctaccaaaagc

SEQ ID NO: 220281 - DNA, 75 bp, Homo sapiens
ggagttcattgaactcatccggcagaataagagactggacgctgtgagggtctcgctctcacccaggctggagtg

SEQ ID NO: 220282 - DNA, 90 bp, Homo sapiens
tcccaaagaaggccaagaaattgcaagtgtgagtgacgatcacacctgcaggttcaactttcatttgagcagccagatgataaagcacag

SEQ ID NO: 220283 - DNA, 100 bp, Homo sapiens
caaggccatcggcgtgctgaccagcggcggggatgctcaagatctattaatgagatgaagcggttggaagaaatgtcaaatatgtttcagagctctggag

SEQ ID NO: 220284 - DNA, 100 bp, Homo sapiens
gtggaccccaagaagaccattcagatgggatctttccggatcaatccagatggcagccagtcagtggtggagtgcacagccagagaacaacacatcacac

SEQ ID NO: 220285 - DNA, 80 bp, Homo sapiens
atatcctgctgtgggatttacaggaaagctcgagccaggctgtgacaatgcagatcttcgtgaagactctgactggtaag

SEQ ID NO: 220286 - DNA, 82 bp, Homo sapiens
aacgcggagagcacgccatgaaggcctcgggcacgtgcctccggagccagcgtggtggccatagacaacaagatcgaacagg

SEQ ID NO: 220287 - DNA, 76 bp, Homo sapiens
gccggtgtaaatgttgagcctttttggcctggcttgtttgcaaagtgggtaaaggaagaagccccagatatactgt

SEQ ID NO: 220288 - DNA, 75 bp, Homo sapiens
agcggcgcagaaaggtggaggccgggaggacgaaggttttttattggcacctcagtctcaacattttcttttcgg

SEQ ID NO: 220289 - DNA, 100 bp, Homo sapiens
tacagggggggcctgaggcactgcagaaagtgggcctgagcctcgaggatgacggtgctgcaggaacccgtccagacgattttcaggagttcgccgagat

SEQ ID NO: 220290 - DNA, 50 bp, Homo sapiens
atcggtatctgaccaaccaaaagcaagaggaggaacgacgtagaagagag

SEQ ID NO: 220291 - DNA, 75 bp, Homo sapiens
cagcagctgctgtaagacagtctaaactacgaaatacaccttatcaggttcacagatgaagagtctagagtattc

SEQ ID NO: 220292 - DNA, 100 bp, Homo sapiens
gcaagactccacctcctggtgaagaaagcaaacaaactctcagaaattgagcccaatgtattccttcgaccttttctggaagtgattcgctctgaagata

SEQ ID NO: 220293 - DNA, 75 bp, Homo sapiens
caatgagatcattgccgacttcgacgaggagccagcaccgctctttgaccttgccatgcttgccttagatagtcc

SEQ ID NO: 220294 - DNA, 100 bp, Homo sapiens
ctcccctgagtaagagtcagccagccgcggatggggagcgtgagtggcgagagagcagagctgacatctgataaagacatgtaccttgacaacagctcca

SEQ ID NO: 220295 - DNA, 100 bp, Homo sapiens
atgatctctacggccagtctgtagaggatgattattgtatttcgccgtcaacaggaaaatgtttataggaggccttagctgggacactacaaagaaagat

SEQ ID NO: 220296 - DNA, 100 bp, Homo sapiens
agctacccgagcggcggcggcggcagcagcggcagcggcaagcaccctgtcaataccagcaaatatgcagaaagctatcggatccaaacctatgctgaat

SEQ ID NO: 220297 - DNA, 100 bp, Homo sapiens
gttatgcttgttggaattggtgacaaaatcagaggcatactttataggtcgtggagggcccccaagacccaacagagggatgccgcaaatgaacactcag

SEQ ID NO: 220298 - DNA, 80 bp, Homo sapiens
ttctcagaacttatgcatacctcacagagtgaaaaggtgagattacattggcctacatccttgccctctggagatgcctt

SEQ ID NO: 220299 - DNA, 82 bp, Homo sapiens
cggagcgctggtgccggcagaggcggcgacggtggcgcccctcctcatcatgactgattcttgctattccaaatcctcttcc

SEQ ID NO: 220300 - DNA, 96 bp, Homo sapiens
ctgggtttcccgggagatcccaggcggtgacagagtggagccatggctagaggttgtctttctactcgggacactcttcctttgggatgtactgca

SEQ ID NO: 220301 - DNA, 90 bp, Homo sapiens
atcagatggcagacatacatcatttaaaggttgactaagataacacgcacaggtccttcagcttgggaaaccaaaaagattcttgctgtt

SEQ ID NO: 220302 - DNA, 98 bp, Homo sapiens
ggggtactcggaaggcgcgggcaggagcctggcgaggatgcaccttcccctgccttggaaaggcttaatgccagaccgggagttggaggtgtccgatc

SEQ ID NO: 220303 - DNA, 82 bp, Homo sapiens
ccggctgctccgcaccccggggtcccaggaagggcggcccagcgggctgacgcacgaggcacacaggaaggaggtggagcag

SEQ ID NO: 220304 - DNA, 80 bp, Homo sapiens
tatttcactatcttcttcaaatacaaagttaatttggagtggcccctggagtcagtttcctacaccatccgaggccccac

SEQ ID NO: 220305 - DNA, 75 bp, Homo sapiens
gaggttcagagaggttaagagactccactgaggtcacacagccggaattcctcctgatcagcagagactgatctt

SEQ ID NO: 220306 - DNA, 100 bp, Homo sapiens
gtattttggctgctgcaggagccattttaggtgggaagaagagcgctatcctgaaggcatcaagtggaaattcctagaacataaaggtccagtatttgcc

SEQ ID NO: 220307 - DNA, 83 bp, Homo sapiens
agaggggacaagtacctttatgaaccagtgtatcccaacaattctgtggtgttcttggtcacacatttatggagtttctgaag

SEQ ID NO: 220308 - DNA, 98 bp, Homo sapiens
gacagaattaatagaatgtacagtgatcggaaaggagaagcctgtgtctcccaaatcaggaacactgaagagccctcccaaaggatttgatacgactg

SEQ ID NO: 220309 - DNA, 87 bp, Homo sapiens
ccgaggctcgcgggcggcgggcccggctgtgagccgtgagctttgaggcggtgggatgtgtcagcagaatgtctcctgcccccgaga

SEQ ID NO: 220310 - DNA, 51 bp, Homo sapiens
attttttggataaaagtggattgcaagcctgtggagaagctaacagactac

SEQ ID NO: 220311 - DNA, 98 bp, Homo sapiens
gtggaattatcaggaattattgattcagacttcctctcaaaatgtgaaaataaatgcaaggttttgttccgatgaagttaaattccgtcaagatttaa

SEQ ID NO: 220312 - DNA, 83 bp, Homo sapiens
cggggacaagaaactagagcaaataaccgttttgaaattagctggactggccattatggaggaggagctgcagcattcccatt

SEQ ID NO: 220313 - DNA, 90 bp, Homo sapiens
ttttaaacctcatttgaccttcatgaagttgtcaaaatcaccgtggctccgtaagaatatggttctgactctagagataagccaaagctt

SEQ ID NO: 220314 - DNA, 75 bp, Homo sapiens
tggcgctagtctgaccctccgccaggcaaaaggaaggcacttttaaatcaacttagagctgtgtttgatcaaatt

SEQ ID NO: 220315 - DNA, 80 bp, Homo sapiens
cggccgaaggcccgagcgcccgaggcgtctgggatggtgtgggaccgggggggtcctgtggagatccttcccttcctcta

SEQ ID NO: 220316 - DNA, 75 bp, Homo sapiens
gcagccgtcccctctgcagcctctctgacaagtgagagacaagagagacacctccaacttcgacaaagagttcac

SEQ ID NO: 220317 - DNA, 100 bp, Homo sapiens
caaagagtcacctaaagttaggcggcactccagccccagctcggaagatgagaatgtgcctactgctcctgatcctccaagtcaacatttacgtgggcat

SEQ ID NO: 220318 - DNA, 100 bp, Homo sapiens
gaaaaatgggttggaaagaaggacaaggagttggtcctcgagtaaagagacggccacgccgacagaaacctgctcctgcaaaatcttccttattctgaaa

SEQ ID NO: 220319 - DNA, 83 bp, Homo sapiens
tgatttttaaagcttcaaaatcctaagactcagcactgttgcgggacaatgcagatcttcgtgaagactctgactggtaagac

SEQ ID NO: 220320 - DNA, 96 bp, Homo sapiens
ctttaccctcttcttcttctgcaacacggccactgtgtacaagatatgtgcctggatgcagctcacctccggtctattctggataagcaggttttg

SEQ ID NO: 220321 - DNA, 75 bp, Homo sapiens
cgtggtcagccgcttcgacgagcagctcccagatggacgtatcatcaaagttgggggagagagatttgaagcacc

SEQ ID NO: 220322 - DNA, 75 bp, Homo sapiens
cagaaagagttaaggaaggcagcctaactctggtgaactggatcctttgtatgtagtagaagtacttctgcgctg

SEQ ID NO: 220323 - DNA, 80 bp, Homo sapiens
cttgtcctggctcttgccctcatcctggttctggaatcctcagttcaagtttccaaggcaggaaaggtaaagagacaaag

SEQ ID NO: 220324 - DNA, 83 bp, Homo sapiens
attgaactcgagttggaagaggcgagtccggtctcaaaatggagagagaagaagaaggaggttcctgctgtgccagaaaccct

SEQ ID NO: 220325 - DNA, 98 bp, Homo sapiens
tggcatttcacacgctcctgttgacagcgatggctcagacagttggataacagggcaagattcagaggaagaaaaggatattgatgcattatgttgaa

SEQ ID NO: 220326 - DNA, 100 bp, Homo sapiens
ggggctggcattggaaccgtgtttggcagcttgatcattggctatgccagacaaacgagggagcaggagacaccccctgactttttttatttctctgact

SEQ ID NO: 220327 - DNA, 89 bp, Homo sapiens
cgtggacaagtttgcagatcgggagcgcaaggtcgccctcaaggccatgatcaaaacgatgctgcagccgtccagcagcccgctctggg

SEQ ID NO: 220328 - DNA, 100 bp, Homo sapiens
cgcgaatatcgtcatcgttagaaggattgaaagaaggtggcaagaggaagaagcagaagcagagagaggagtcgaagaagaagaagtcgaccaaaggcaa

SEQ ID NO: 220329 - DNA, 100 bp, Homo sapiens
agcagtccagaaagcggcttatcgaacagagccgggagttcaagaagaacactccagaggtggagccgccaccaaaatgcagattttcgtgaaaaccctt

SEQ ID NO: 220330 - DNA, 83 bp, Homo sapiens
tggatgacaagaagacgtccaatctgagcgtgctgcggacggcgctgcggtacatccaggtcaaaatgcagatcttcgtgaaa

SEQ ID NO: 220331 - DNA, 75 bp, Homo sapiens
tcctcagaggtcccggcccgtgacagtcccatccatcggagtctatcctcttgctgcagcccagggcaaagaagt

SEQ ID NO: 220332 - DNA, 100 bp, Homo sapiens
gggcgagcggctgtgtggatgtcggcgaagccgcgggcgagatctttaatctcatgaagtacgacagctacagccgcttcttaaagtctgacttgttttt

SEQ ID NO: 220333 - DNA, 100 bp, Homo sapiens
ggaaaatcatcttatcagacgaaggcaaaatgtatgctgttacaacttctaaatgggaattatttgaccagcatgaagaatcagaagaagaagaaaatca

SEQ ID NO: 220334 - DNA, 83 bp, Homo sapiens
cgcggactgaaggagactgaaggctgaccccgcactacatctacccaccagccatcgtgcagcccagcgtggtgatcccagcc

SEQ ID NO: 220335 - DNA, 100 bp, Homo sapiens
gtcactccccaggattatgcgcgtctgctcccagttctcgagaggggtgtatgccatctttggattctatgaccagatgtcaatgaacaccctgacctcc

SEQ ID NO: 220336 - DNA, 61 bp, Homo sapiens
gctccggcgtgggatcccggatatagatgtttctttctcagcaaaatagaggagaagctta

SEQ ID NO: 220337 - DNA, 87 bp, Homo sapiens
agattccaacaggatgatgctcacatattctgtgccatggagcaggaagtggcggtgcgagggctgctgcacagcgagcggagccgc

SEQ ID NO: 220338 - DNA, 100 bp, Homo sapiens
gtcaacatctcctcgtccgacctcacaggccgacaagatacctctcgcatgtccacctcacaggcacgtctgagaatggtggatgtggtggagaaagaag

SEQ ID NO: 220339 - DNA, 100 bp, Homo sapiens
gcctcccgagtggctgggattacagacccagctcatccagatggtggtgtggatgctgcagcgccggcttctcatccagctgcacacctatgtctgcctg

SEQ ID NO: 220340 - DNA, 82 bp, Homo sapiens
cagccgatccagcctgcggagcctgtggggcaggagctctgccagtgccggccgggagaaggcaattgctcctgctgtaagg

SEQ ID NO: 220341 - DNA, 90 bp, Homo sapiens
cgcgtataccaggcatccagccccgatgaggtgttcatgaagtctgtgaagctggagtgggtgcaagacaacatcagggcagcccaagat

SEQ ID NO: 220342 - DNA, 82 bp, Homo sapiens
ccagcctgcggagcctgtggggcagataatgagcttcagtccccaagatctgcgaagacgtttgtgggtgatttttccagga

SEQ ID NO: 220343 - DNA, 83 bp, Homo sapiens
tgaacttctccggacagaggaacatctgtaccctctcaacactccatcaagaatgctggaggaagggtgtttgtccactgcca

SEQ ID NO: 220344 - DNA, 101 bp, Homo sapiens
gctggccatggcgaggggtgcacggcggccacctgagtggcgcggcggtgtcaggactctcaaatggtggtagactccttcaaatctggttttgaacctcc

SEQ ID NO: 220345 - DNA, 98 bp, Homo sapiens
ccggcgtccgcggcagctgataccagagtcttgctccggccgcggccagcggagccctgggctggggcaggagccgggcgccaatgcttcggcattag

SEQ ID NO: 220346 - DNA, 152 bp, Homo sapiens
caagactggagaagttaggcctcagacatcccaagccttctcctttcattggaaacttgacatttttccgccaggggagggatgctgtgcacactgtggaaggctatcattgactttcgaaacaaacagacttgactgttgctcaatctaat

SEQ ID NO: 220347 - DNA, 90 bp, Homo sapiens
cagaggccgcggacaccgacctggagaatttcgctaaggagtttgtgatcagtgatcggaaggagctggaggaagatttcatcaagagcg

SEQ ID NO: 220348 - DNA, 73 bp, Homo sapiens
cagtggctggcggtgcctggacgtacaacaatggcaccagcatgatatcattgatcattcctcccaaagacca

SEQ ID NO: 220349 - DNA, 100 bp, Homo sapiens
tagctttggcgaggggacggagccggatcaggagccgccgccgccatatcagctattttgaagatgaggaagaagattctagcaacgttgatttacctta

SEQ ID NO: 220350 - DNA, 50 bp, Homo sapiens
cctgaatttggaaactatttatttggggatattccctgcccaaaaaattc

SEQ ID NO: 220351 - DNA, 50 bp, Homo sapiens
ctcagatgctcccttctgctcctgaattaaacaaccaccatgtcgagcaa

SEQ ID NO: 220352 - DNA, 75 bp, Homo sapiens
gattccgggagcacagttccgccgagatacaatgtctctttgctatatgaccttgaaaatcttccggcatccaag

SEQ ID NO: 220353 - DNA, 90 bp, Homo sapiens
tctttgtggctgtgcttgccaggcctggctccagcatgtcagagcgggagcgacaggtgatgaagaagctgaaggaggtggtggacaaac

SEQ ID NO: 220354 - DNA, 50 bp, Homo sapiens
aaaattcccccagattcgggcaggttaacgtccctaaaacccgccggact

SEQ ID NO: 220355 - DNA, 82 bp, Homo sapiens
attttatctagtgcctccagggctggaattactatggaaaggcttgaagtagaaaatgccatgatgagaaaaactattaaaa

SEQ ID NO: 220356 - DNA, 82 bp, Homo sapiens
caccttcctgtgcagtcctgttggaatttattctccctgactctgctcatctggaccttttctgtgtgtctgccacccctgt

SEQ ID NO: 220357 - DNA, 100 bp, Homo sapiens
cggatccccaagaccctaaagttcgtcgtcgtcatcgtcgcggtcctgctgccaaacaaaatccagtctcatagcagaggagaatataatgtttacagca

SEQ ID NO: 220358 - DNA, 51 bp, Homo sapiens
gactccctatgttactgacgagaccggcggctggagtgcaatggcataatc

SEQ ID NO: 220359 - DNA, 90 bp, Homo sapiens
gaaaatacaaatcacacgcataatggatgaaaggaaccgacaggttatgaagacagtatggagtttccagaccatagtagacatttgcta

SEQ ID NO: 220360 - DNA, 90 bp, Homo sapiens
gcgctgttcgtgctgctgggattcgcgctgctgggcacccacggagcctccggggctggagcaggatgacacagctgccatgctggccga

SEQ ID NO: 220361 - DNA, 76 bp, Homo sapiens
gaccgagaccgcggccgggaccgagggtccaacgagcgctcctccaagcggagccttggagggcacggccggcacc

SEQ ID NO: 220362 - DNA, 50 bp, Homo sapiens
tggatccacagcagtgggggctgggtgccatgcctctgcaactcctcctg

SEQ ID NO: 220363 - DNA, 82 bp, Homo sapiens
cggagttccaggtcgagcagttaggccgcgagcgactgcggcgccgagccggtgtgaacccacatccctgcccccagggcca

SEQ ID NO: 220364 - DNA, 74 bp, Homo sapiens
acaggcccaccaggaagatctcagtgacctttatcaagaggcagggcaagaatcctttcgttccatcacaaggt

SEQ ID NO: 220365 - DNA, 100 bp, Homo sapiens
gggagaggcgtactcggcggcggcggagcgggcggcagagcagggcggcggcgactcgccacttccggctcctgcgtcgctccggaagcctgcgagttcc

SEQ ID NO: 220366 - DNA, 83 bp, Homo sapiens
tgacagcggcgaggagaacgtcccgctggatctgacccgagcattactctactgactggcagagacaggagaggtagatgtcc

SEQ ID NO: 220367 - DNA, 110 bp, Homo sapiens
ctggcaggatactcgtgatgatccctacagaccagtgggctcggtttgttgcagttatgcaggtcatcacacaaactgccgagaatactgtcaagccatttttcgaacag

SEQ ID NO: 220368 - DNA, 100 bp, Homo sapiens
aacttgttgaagagattggctggtcctatacagagtaaagccaatcccagctgaaggaatcaagtcaaatccttccaagcggcatagagaccgacttaat

SEQ ID NO: 220369 - DNA, 100 bp, Homo sapiens
agccactttgcattgactggaaacaatggcatttacagaaagagtcaacagcagtggcaacagacacgaagatcgattgagaagttattagaatgggaaa

SEQ ID NO: 220370 - DNA, 83 bp, Homo sapiens
catcagcctccatcggcctccagaccttcaaccacaggagcatcagatccatgctgctgctgactcggagccccacagcttgg

SEQ ID NO: 220371 - DNA, 101 bp, Homo sapiens
agaagggcttcatgccggtaccatgttgacaacattcactgctcaggacccagatcgatatatgcagcaaaatattaggttgaggaacaggttagcaccac

SEQ ID NO: 220372 - DNA, 89 bp, Homo sapiens
gcagccaaccatgctcaacttcggtgcctctctccagcagactgcggttattcagcttctcaaggctggaaaagcgaaggaagtttcct

SEQ ID NO: 220373 - DNA, 75 bp, Homo sapiens
gatggccatggcataaggaactctatcccaggaatacagctttgcattagctccctgtgctgtcaggaatctaca

SEQ ID NO: 220374 - DNA, 76 bp, Homo sapiens
agtactatcgtctatcattggatgaagtggctccggagatggacctcaggatggaaaccagcagcctgcaccgccc

SEQ ID NO: 220375 - DNA, 101 bp, Homo sapiens
gggccggagcagccgcgggcgcccgaggggccgagcgaggtgtttggagtagatgacaatcaggattataataggcctgttatcaacgaaaaacataaaga

SEQ ID NO: 220376 - DNA, 100 bp, Homo sapiens
cgagagcgcttctcgccacctcgccacgaactcagcccgccacagaagcgcatgaggagagactgaccacagcaccgggaagtccagtcagcggcagatg

SEQ ID NO: 220377 - DNA, 90 bp, Homo sapiens
gagaaaaagaacattactgtcttgcttagaccatgctcagcctccaagcagccttgtcatcgacaaagaatctgaagtttacaagatgct

SEQ ID NO: 220378 - DNA, 80 bp, Homo sapiens
gttacattctctatctgcgcaccttggagtccaagcttgtgctctttggtgtggacactgccagcggctgcagccgactt

SEQ ID NO: 220379 - DNA, 101 bp, Homo sapiens
attgatttagggactggcaagataatcaactttatcaaatttgatacagagccatgggaccacaccaccaccaccacaaccaataggccaggaaccaccag

SEQ ID NO: 220380 - DNA, 75 bp, Homo sapiens
tgagctgccaacgatacctgaggggggttgttttgatgaaagtgaaagtgcatttgcccagtataacatggatca

SEQ ID NO: 220381 - DNA, 100 bp, Homo sapiens
agacccatctggactaccaaggagaagctatagactacttctactccaccaggaagggtagggctctacttcactgggcctgtgatcgaggacataagga

SEQ ID NO: 220382 - DNA, 50 bp, Homo sapiens
agccaatacccgcggcagcagcaccagtgtgaacgagctctatgtcgatg

SEQ ID NO: 220383 - DNA, 100 bp, Homo sapiens
tggagctggccaacgtgcaggaggctccactttgaggctctgatgaacattccagtgctggtgttggatgtcaatgatgatttttctgaggaagtaacca

SEQ ID NO: 220384 - DNA, 50 bp, Homo sapiens
ccggcagaagggaggcacttgaggagcaccatactggaccaacacagaaa

SEQ ID NO: 220385 - DNA, 89 bp, Homo sapiens
tctgttcacggctccatcgctgttagagtttaccgtgaagaagctgactgctatgaacagcatgtgaaggtggaggaattccagcccag

SEQ ID NO: 220386 - DNA, 76 bp, Homo sapiens
cggccgtcccgggccgggggacccgcccgccatggccaccaaggtagtcagatgcctccgcagccacccgggagcc

SEQ ID NO: 220387 - DNA, 98 bp, Homo sapiens
aaatttgatagactgctgtttttctggtctgaccgtcgcaaccctcatgaagtacaaccagcatatgctacaagaaaaagatgcagatcttctctatg

SEQ ID NO: 220388 - DNA, 83 bp, Homo sapiens
gatccttcacgcaggctttaagatgatgagcaaagctttatcctgtggataaacgcagagtgaacgagtttggggagtcctac

SEQ ID NO: 220389 - DNA, 83 bp, Homo sapiens
ccgctggcagccgcggatctcaccgccgctcaggggctgcccttgagatggagttgctgcctctttggctctgcctgggtttt

SEQ ID NO: 220390 - DNA, 100 bp, Homo sapiens
cccacttcattgcagttgtgactgagtgtgctggtggaggggccttcctcgtcatccccctgcaccaggaccagggtttggtatctatgcagtggttcac

SEQ ID NO: 220391 - DNA, 100 bp, Homo sapiens
cagcatttgtcttgatattctacgatcacagtggtctccagcactaactatttcaaaaggtattatccatgcagcagaagagaaggactggaaaactgcg

SEQ ID NO: 220392 - DNA, 97 bp, Homo sapiens
atattccaatttatgcagataaggaggctgaaccgtctgagcccagaagtgctgaggtgacgaggaagcccaaggctgctgttccttctgtgaacaa

SEQ ID NO: 220393 - DNA, 100 bp, Homo sapiens
cgggcgtctccgccggctactgccgcttcagttctcccggtgtggccacgagtcggctgcggataaccgtctggtccttgtgcacaaaatccgtgtctta

SEQ ID NO: 220394 - DNA, 98 bp, Homo sapiens
gccaatcagacctctgtgggctgtacccagttggtgctagtggaaggggccttcccttcttcttggtggtgttcttgagtaagataatctggactggc

SEQ ID NO: 220395 - DNA, 100 bp, Homo sapiens
gagacataagaccgttggttctgacgaggcacagcgtttcttgcaagaatgggaggaaacatggtagaatggtgcttacctcaagatattgaccttgaag

SEQ ID NO: 220396 - DNA, 83 bp, Homo sapiens
gaaggaacgaggcaaggagctaaagcagcgtgcgttcagccctgggctgtcgcctggttgggcccggaaatgggacgtcgcgc

SEQ ID NO: 220397 - DNA, 75 bp, Homo sapiens
actaaactgccaaagttcaccatcctccaaacaagtgaagcttatggtgaaggctctggtgctgattgtagacgc

SEQ ID NO: 220398 - DNA, 98 bp, Homo sapiens
catttcaggtcacaccttcaactatggcaaatattgtgaaaggcctgtataccctcagaccagtgctgacttgctcatcagttttgcacagtggcaat

SEQ ID NO: 220399 - DNA, 75 bp, Homo sapiens
caagaactaagtaacgatctggatgcccagaactggaagaagttcgggaactcagagtttgacccccccggaccc

SEQ ID NO: 220400 - DNA, 71 bp, Homo sapiens
aaggccagtgactaccaacgtttggaccagaaggaggaggaagccaagaatctggtgagcgaagccatcgc

SEQ ID NO: 220401 - DNA, 100 bp, Homo sapiens
atgaatgcatatgtagcctacaaagttacaacacaggattgtatgttccaggcctcaatgaggagtccaaacatggagccattcaagcagcagaaggtgg

SEQ ID NO: 220402 - DNA, 100 bp, Homo sapiens
tctaaagcttcggcacaagggcccaactggaattccacttacgggcccagacatgtccgtccttgtaagttaaaagcttccatgggagccttccttccta

SEQ ID NO: 220403 - DNA, 95 bp, Homo sapiens
aagaagaggagaggaaaaaggaagagagcactgcagccagtgaaaccactgagatggtcatcatgggccagtgctactacaacgagaccatcggc

SEQ ID NO: 220404 - DNA, 75 bp, Homo sapiens
tttgcaccctgcttggagacggacttgcttccgttttcggctttgtgagaaaccttaccatcaaacacgatggcc

SEQ ID NO: 220405 - DNA, 100 bp, Homo sapiens
cccaagcaaggttccttggaagaagatgtctgcagagatcatcaatgctgtggtactgttgattttattgagtgccctggctgatccggatcagtataac

SEQ ID NO: 220406 - DNA, 96 bp, Homo sapiens
atttgccgaagattaggaagaatccactgatagaaatcatttccatcaataccggctctgagcagcgggtcccctgttccacttcttaccacagct

SEQ ID NO: 220407 - DNA, 88 bp, Homo sapiens
gactttcttcttctcagagttcatattctccaagcaatagggaagccatggatcctatagctggaatgttgcatagaacgaccgcctc

SEQ ID NO: 220408 - DNA, 90 bp, Homo sapiens
tggctgaacaggggacctctgcagatgaagagtttgccagatccggcccggtgcctgggttccaggaggacacgctgcagttggccttca

SEQ ID NO: 220409 - DNA, 90 bp, Homo sapiens
tgcaggatgtagacctcgctgaggtgaagcctttggtggagaaaggggagctggatcagctcctttgtggcagtaaagcagacacttggg

SEQ ID NO: 220410 - DNA, 89 bp, Homo sapiens
gttagaattgagaatctggaactaatgtcacagcatggatgtaatgcctggaaagtatacaatgaatctcaggaaacaggctcgacagc

SEQ ID NO: 220411 - DNA, 90 bp, Homo sapiens
aacaggcttttaaatacttaagagaagaagttaaaacatttcagggcaagccaattatggccgaaatagaactatttgtgaacagacttg

SEQ ID NO: 220412 - DNA, 58 bp, Homo sapiens
tacttcactacctccggcatccaggtgcgctacaaggaggagtttgagaagaacaagg

SEQ ID NO: 220413 - DNA, 75 bp, Homo sapiens
cccccattcattctggattggtggatctgaagtacaaaatattttccagctgcaggacaagttcgagcatcttaa

SEQ ID NO: 220414 - DNA, 73 bp, Homo sapiens
caaacactcagagtggaaaaagtaccatcatttgaaacaggtatttgaaatggacatcgctaaacagttacaa

SEQ ID NO: 220415 - DNA, 101 bp, Homo sapiens
agcggtccctgcgcttgctgctgggaagtgggacttccaatagtagtcagacattatcatcctgtcatactatggagccatgtacatcagatgaatttttc

SEQ ID NO: 220416 - DNA, 90 bp, Homo sapiens
gctcggctgcgggaaatcgggctgaagcgactgagtccgcgatggaggaacgtgaagatgagtcttcctctatgtttgacgaatattttc

SEQ ID NO: 220417 - DNA, 100 bp, Homo sapiens
gaagctggtggtgttgatcactcctcaggtgtccagcctgctcaggcccagatagctaataaccgaacacctggaagatggacccagcggtactattcag

SEQ ID NO: 220418 - DNA, 75 bp, Homo sapiens
cggagcttgaagcaaagctgcaggttttaaagggtgtgggccgaagatatgctcatgtggtgttgaggaaagcag

SEQ ID NO: 220419 - DNA, 90 bp, Homo sapiens
gctggatccgcggtgcggctgtgggtacatgtcccagagcaagcacacggaggcccgggagctcatgtactcgggagccctgctcttctt

SEQ ID NO: 220420 - DNA, 100 bp, Homo sapiens
tcctaacttaatcaacaacctggaaacattctttgaattggattatcccaaagtgcagagatggcagcggttctgaggcaagagtactgaaatttgcttt

SEQ ID NO: 220421 - DNA, 98 bp, Homo sapiens
cgttactccctgccacagatcctcatccaaagatcaatatttacacacggtctgtaattgaccctgttcctgcaccagttggtgattcacatgttgat

SEQ ID NO: 220422 - DNA, 97 bp, Homo sapiens
agtcttctatttgaaaatgaaaggagattactaccgttacttggctgaggttgccgctggtgatgacaagaaaggccatgaccacaatgtttcttca

SEQ ID NO: 220423 - DNA, 74 bp, Homo sapiens
gtggatgattactacgacaccggcgaggaacttggcagattgtatctgattaccagagggatccagctatcacc

SEQ ID NO: 220424 - DNA, 88 bp, Homo sapiens
agcctgctctcttgcaaagacaaacagctttgctgagccatcaaggtctaatggaagcatggttcggcattcttcatctccatatgta

SEQ ID NO: 220425 - DNA, 98 bp, Homo sapiens
caaaatatgcaaagtgtgaccagtgtggaaacccaaagaagtttgcccgctactacctggccaataaatcatcccaggcccaagctcaggagctggag

SEQ ID NO: 220426 - DNA, 100 bp, Homo sapiens
gtcgccaggaaagtggtgatccaggcaggaccaggctgcactgaagggacagagcctgtagcagccatgatggaggaggagccagagtcggccagaccag

SEQ ID NO: 220427 - DNA, 83 bp, Homo sapiens
gggagatgggcctactcgcccgccaccctgcgctgccgccgctctgaggagttaaaggctgatcagctgaccgaagaacagat

SEQ ID NO: 220428 - DNA, 98 bp, Homo sapiens
ctggttccagctctacagccccggaggggtggcctgcgacgatgacggggagctgttcgccagcatggtccaagacaagctgctgctatctgcgtgcc

SEQ ID NO: 220429 - DNA, 98 bp, Homo sapiens
gaaaaactctaaacgggattacactggaaaccagcctggacaccaagtctgtgtcagaaggccacctcaagaggaacatcgtggtgaagaccgtggag

SEQ ID NO: 220430 - DNA, 75 bp, Homo sapiens
ctcaatttaagcctgatctaacccctagaaacaggccctggagagtgaatttgtttcctgccagcttcaccaatg

SEQ ID NO: 220431 - DNA, 90 bp, Homo sapiens
tgtagaggctgcagcacacgagagtgaacagcagaaagaggcttcttggaaacataaccagaaaacattgctgtctgaatcaagttctca

SEQ ID NO: 220432 - DNA, 96 bp, Homo sapiens
tcggtacctcggaccagctctgtaaaagccccgcctctgccttcggatagatttatcatagaatccccgactcagacccatcttctagcaaaacaa

SEQ ID NO: 220433 - DNA, 82 bp, Homo sapiens
ggtagaggcagtggcgcttgagttggtcgggggcagcggcagtgtccaacaagcacccatttgtggacagcaatcttctcta

SEQ ID NO: 220434 - DNA, 74 bp, Homo sapiens
cccaacgaagagtggagaacggcaacccatccagatcaccatgccgttaagtgggcagaccaacatccacctca

SEQ ID NO: 220435 - DNA, 109 bp, Homo sapiens
aattttagggtcctttatatagaagggagagtaggatatcacgcagcagcacctctgtgaccccctgacggtgtccctgattgagaagtgcacccggtttcacatccac

SEQ ID NO: 220436 - DNA, 82 bp, Homo sapiens
ctgcggcgtgtgcgcgcccgccagctgctccggagatacggtcatcatcagatttgaaatatttaaagtggatacaaaacta

SEQ ID NO: 220437 - DNA, 98 bp, Homo sapiens
aagggaccaaggtggaaatcaaacgttgcagagaacacatcttagaagatgaaaaacctgaatctatcagtgacactactgacttggctctaccacct

SEQ ID NO: 220438 - DNA, 75 bp, Homo sapiens
caaggatgactcaatcatcactgttttaacaggtgtgtcacggggtcccagccctgtcagccttggaaatcagga

SEQ ID NO: 220439 - DNA, 100 bp, Homo sapiens
ctgaagggaaacagatgaagaacatgacctcaaggagcttcctgtcaatgagaagaccaagctgacgcctggcaaaggtgctggagaatctggtaaaagc

SEQ ID NO: 220440 - DNA, 75 bp, Homo sapiens
ctgcggctgcgggtgcggcgggtcctggccgaagtctctgctttctatccgtcaagatgataaagtcgtgtgccc

SEQ ID NO: 220441 - DNA, 82 bp, Homo sapiens
cccgatcccagtatctatgcctatgataactttggcgtgctgggcctggacctctggcagggtcttgctacgtacgttgccc

SEQ ID NO: 220442 - DNA, 51 bp, Homo sapiens
catttagcgcatcatgtgatccggctatccagtcagttcgctgctattccc

SEQ ID NO: 220443 - DNA, 75 bp, Homo sapiens
actagaagctaaggtgaagaagctgcaagaactagacagtacggatggtgccaaagtttttagtaaacaaccagg

SEQ ID NO: 220444 - DNA, 75 bp, Homo sapiens
catccccttccaggcccacagccgggagatccgagagctcttcaggttgtttacattcagagctctatcaataag

SEQ ID NO: 220445 - DNA, 90 bp, Homo sapiens
cagatggtgttacctggagcttaaaaagctgcacgcaagtgttaaacttctgacttttggaacagcgatcgtaatcaatcctgagaaaga

SEQ ID NO: 220446 - DNA, 75 bp, Homo sapiens
atatttctgcaacgtctttgacaatagatggaatcaggcctccccatggccacccatggaccagtcggcattcac

SEQ ID NO: 220447 - DNA, 80 bp, Homo sapiens
ttgttcaagataaagtgattttttgcctttgttgattaactggacaaattcaggcatcattcttaacaaagaagttaaat

SEQ ID NO: 220448 - DNA, 75 bp, Homo sapiens
ggggcaaagggaccacggtcaccgtctcctcagagcaccagccacatcctcaatgggcaggtctttgcctctcgg

SEQ ID NO: 220449 - DNA, 82 bp, Homo sapiens
agaaggcggccctgaagctgggtatgtaccctctggtcacagcgacccaggatgctgacagcagccggaagctggctcactt

SEQ ID NO: 220450 - DNA, 51 bp, Homo sapiens
ggaaagcatacagttggactgagaaactgctgaagtgcaatgttgtgatct

SEQ ID NO: 220451 - DNA, 75 bp, Homo sapiens
gaaagtaacgcatttttgtttttggaaggagaaggatagacttggctttgagctgaagacgcagctggagtggac

SEQ ID NO: 220452 - DNA, 75 bp, Homo sapiens
cttcgagtatttcaacattgcaatgataatacctcagtgttcacataactgtttttcgttggaatatacgttgca

SEQ ID NO: 220453 - DNA, 75 bp, Homo sapiens
tgtattgtggaaggcctccggcacaattcagttcaactgcaagaggaagaaggcacctacgatcaaactctggag

SEQ ID NO: 220454 - DNA, 101 bp, Homo sapiens
atgccaatctctgcttgaaaggagaagacttggattctcagacagttgaatttctgaatgaaaagctggaaaaaagggaggctcagttattatctcttagt

SEQ ID NO: 220455 - DNA, 100 bp, Homo sapiens
gttgatttgctctttcaagaaaactctacgataggtcaaaaaatggtgagcagggcagcatttccttctcccactgctgctgagatggcagaaattagtc

SEQ ID NO: 220456 - DNA, 76 bp, Homo sapiens
tgcagacacaactacgaggtggcgttccgcgggatcttgcagaggagagatgaaggcttgactattgacctgaaga

SEQ ID NO: 220457 - DNA, 92 bp, Homo sapiens
ccctggcccgtgctggaaaagtgagaggtcagactcctaaggaggctaaggagaagcgccaggaacaaattgcgaagagacgcagactttcc

SEQ ID NO: 220458 - DNA, 100 bp, Homo sapiens
ggaacagttcatggttggggaggagatctgtggggctgtggtgtctgtccgctttcaggagccaaaaacctgtatatcatctccgtgaaggggatcaagg

SEQ ID NO: 220459 - DNA, 75 bp, Homo sapiens
gacatcaccaagctggaggtggacgccatcgtcaacgccggatttatgattggctacttgggctattgtaaaggg

SEQ ID NO: 220460 - DNA, 97 bp, Homo sapiens
gtaaaaacaatagctcaaggaaacctttccaacacagatgtccaagctgccaatgtaaaccagaatacaaggttccgggattatatgtaattgactc

SEQ ID NO: 220461 - DNA, 100 bp, Homo sapiens
tcgtcgcctccttgcccgtgaccgtcgctagaactcagttgtgcgttgcggccagtcgccactgctataagtaatggaacatcatctgtgatcgtctcca

SEQ ID NO: 220462 - DNA, 100 bp, Homo sapiens
atatgatgacgaacatcacagtacattggtatctacaagacattatagagcacctgaagttattttaggatccagttcactatcctagccttgcagacaa

SEQ ID NO: 220463 - DNA, 75 bp, Homo sapiens
tagctgacacatctatgtcctcgccttggttggagcccagctcaacattggcaatgtgctccctgtgggcaccat

SEQ ID NO: 220464 - DNA, 100 bp, Homo sapiens
ctttcagtgagtcatcgctgacagctgaggaagtctgcatccacattgcacataaagttggctcggacatcatcatgcagctggacgacgtggttagcag

SEQ ID NO: 220465 - DNA, 75 bp, Homo sapiens
tggcagcagcatctcagcccaagagaagccattcgttcctggttaactcggaaacacatccagaggctgcatgca

SEQ ID NO: 220466 - DNA, 100 bp, Homo sapiens
agagaaccgagcatccagtcatctcctataaagatctcagtggttcaatagcatccccagatgtcaaattaaatcttggtggagattttatcaaagaatc

SEQ ID NO: 220467 - DNA, 82 bp, Homo sapiens
ccgtggccttagctgtgctcgcgctactctctctttctggcctggaggctatccagcgccacggcatatgcctccaaggacg

SEQ ID NO: 220468 - DNA, 50 bp, Homo sapiens
aaatgcgctcgggctggaccagcagggtcatgatcagagttcgactcttg

SEQ ID NO: 220469 - DNA, 95 bp, Homo sapiens
agactagccactttgcattgactggaaacaatggcatttacagaaagagtcaacagcagtggcaacagaggcaaatttctggagatgtgcaatga

SEQ ID NO: 220470 - DNA, 50 bp, Homo sapiens
cttctgttacgctaggaatatggcaaactggaatgcagtagccctctggg

SEQ ID NO: 220471 - DNA, 100 bp, Homo sapiens
ccggaaccgagcaatggcagacgtgtcccttcaccggaacccagcaacgctggacccacaaaccgtggagaccaagaactggcacacggacgtgattgag

SEQ ID NO: 220472 - DNA, 75 bp, Homo sapiens
gcaggctgcgcctctggatgggcctcagcaaggtcaaggagccctgggcgctgcctatggcacagccaagagcgg

SEQ ID NO: 220473 - DNA, 76 bp, Homo sapiens
gagtatcaggaatttgaagagatgctggaacatgcagagtctgcacaaggtaatcactttgatcagtatgaggaag

SEQ ID NO: 220474 - DNA, 100 bp, Homo sapiens
tctaacatcacctgcttcatccttgtttaatgactttggtgccctcaacatctctcagagacgaaaggatctgtctggctccattgatgacctccccacg

SEQ ID NO: 220475 - DNA, 100 bp, Homo sapiens
gatgatgagcctggcccttggacgaaggaggggaaggaccggatcaagaagctggggctgaccatgcaggaatcagagatcattgatttcttcctggggg

SEQ ID NO: 220476 - DNA, 75 bp, Homo sapiens
agcctgcggagcctgtggggcagagtgcgatgacatggatcctgcggacaaaccgccccagggcgtacctagcac

SEQ ID NO: 220477 - DNA, 75 bp, Homo sapiens
ctgaaactcatcattttgccattaattatatccagcatgattacagggaaatcctcattgacgattcaatttgtt

SEQ ID NO: 220478 - DNA, 50 bp, Homo sapiens
aacagcagccacaggaaccttgaccgataacagtagaactctgaacgtgg

SEQ ID NO: 220479 - DNA, 90 bp, Homo sapiens
cctgttatgaacttggctgtcttctattagacaaaccagaggtggtctggacttggctattgagggcccctcaaaagcagaaatcagctg

SEQ ID NO: 220480 - DNA, 100 bp, Homo sapiens
ctttctcctcaaccagtgtggatcccttctctattacctcaccttggcatcgacagggcttcgtgggacacatatgcaacatgcctatgatttttacaag

SEQ ID NO: 220481 - DNA, 100 bp, Homo sapiens
gcggtggcaggagctgacagagtgatgggaaacgcgtgagccaggccgagagtactatactggcaattgctggagaagattttgcaattgttgcttctga

SEQ ID NO: 220482 - DNA, 100 bp, Homo sapiens
ctgcttcgttgttgtgctctgtgctttcctggctctgccgctgtccatgaccttcatagaacatttttctgcacattgtggacttgtctgatcccaagca

SEQ ID NO: 220483 - DNA, 98 bp, Homo sapiens
atggactgcagcctcgtgcggacgctcgtgcacagatacgcgtggtgtccctcgtggccgttcacccctccaccgtcaacccgctcgggaagcagctc

SEQ ID NO: 220484 - DNA, 100 bp, Homo sapiens
gaatgatccagcttattgttgcaaggagaataagcaagtgcaatgagaatcccaaggactgcagcaaagccaaaaagctggtgtgtaatatcaacaaagg

SEQ ID NO: 220485 - DNA, 102 bp, Homo sapiens
agcccgccagcatgccccagtccaaaggtatacccctagaaacacttaaagaagaaagtcagtcaagacatgttctacctgcaagttttgaagtcaacagtt

SEQ ID NO: 220486 - DNA, 87 bp, Homo sapiens
ctccgcttccgattgggctaccacgccattccgagtatgaggatctgcaatcagaactattgaacttctccattcagaccgccactc

SEQ ID NO: 220487 - DNA, 90 bp, Homo sapiens
gtccccatcatgtacatctgccatgggatgacgcctcaggagtgcatcatcgacgaggactgtgggcccagcatgtactgccagtttgcc

SEQ ID NO: 220488 - DNA, 88 bp, Homo sapiens
agttgactggaagatgctggatgaagctgttttccaagtgttcaagctcctggtaacgtttttatccatggatgacttgcttgggtaa

SEQ ID NO: 220489 - DNA, 101 bp, Homo sapiens
gaagattaaactattatacaggcttcatatccctccagcaaaccagtccagctacgggggcccagccagccagcagctgagtgggggttacggaggcggct

SEQ ID NO: 220490 - DNA, 75 bp, Homo sapiens
ctccgaggtggcgcggcacctgccctgattgagtccctcaaccagaaaccacagactgccggtgaccaaccccca

SEQ ID NO: 220491 - DNA, 75 bp, Homo sapiens
gcataggatccggcaaagtcctgaagaggttcctactatctgaccaccacctacggggccctggagcacatcaag

SEQ ID NO: 220492 - DNA, 50 bp, Homo sapiens
gccgcgggcgcgaccggaggcagttacagaatgtctgaaggggacagtgt

SEQ ID NO: 220493 - DNA, 98 bp, Homo sapiens
tggaggaagactcgatccgcctgcctgcgcacctgcgaattttggagagtaaaaggctgaaccttgttaaagagaaaaccattaatcagaccatcggc

SEQ ID NO: 220494 - DNA, 96 bp, Homo sapiens
tgattcacccactccaaattcaagggataattctatttaaagaaaaagccaaggaagcattgggtaaagccaaagatgcaaataatggtaacctac

SEQ ID NO: 220495 - DNA, 98 bp, Homo sapiens
ttaattcaaggtcacacaatgtcggggatggacctccagatttccttactgccctgctgctgaggccgcgccctccccgccctgaggtgggggcccac

SEQ ID NO: 220496 - DNA, 100 bp, Homo sapiens
aagaaatggttaatgtaatctgccaactaatagtaatggcccggaaccgtgaagttatccaagcattaggtgaacatcttaaattaagacaacaagttat

SEQ ID NO: 220497 - DNA, 75 bp, Homo sapiens
ggggcatctacaaggatgacattgctcaggtggacgcggatctgtcaacatgggtaaaggagaccccaacaagcc

SEQ ID NO: 220498 - DNA, 60 bp, Homo sapiens
atggaacccaaacctcagaagagtccagatggcagatgatcagggctgtattgaagagca

SEQ ID NO: 220499 - DNA, 100 bp, Homo sapiens
ttgatgcccgccctgctgccgaccgaggactgaccactcgaccaggtgagggagcacacgtcgcatttggaggcagagctggaaaagcacatggcggccg

SEQ ID NO: 220500 - DNA, 75 bp, Homo sapiens
gctcagaaagatggatttttgcatgagacgcttctggacagcactgctcagcacgcaggcatgtgaggaagctgg

SEQ ID NO: 220501 - DNA, 100 bp, Homo sapiens
ccggcccggaggaggctcatgcgggatttcaagcgcccagaagaatcagtgcggtttctgtggcagagcgagttgcatttgaaagaggagaagagcctgg

SEQ ID NO: 220502 - DNA, 100 bp, Homo sapiens
cttgctccgaagatgtggacttgccctgcaccgccccctgggatccgcaggttccctacacggtctcctgggtcaaggaaacctgtaggaagtgtcaggg

SEQ ID NO: 220503 - DNA, 75 bp, Homo sapiens
agaacctccacagtcaagaggacggtattgttgcagcatctggcagtgagactgaggatgaggacagcatggaca

SEQ ID NO: 220504 - DNA, 90 bp, Homo sapiens
aggaaaggtttacaagcaggccacgattgaatctctgaaggattacatcccagtagaccaagaagagttaagagattatgtcaaagctag

SEQ ID NO: 220505 - DNA, 90 bp, Homo sapiens
ctccgccacgcagccggccaccgccgagacccagcacatcgccgaccagatattccaatggagacagttggaaaacctgtacttcagaga

SEQ ID NO: 220506 - DNA, 96 bp, Homo sapiens
aaaggagtcaacgtgtggccgggcggccaaagaacgtgctggccaaagcgctctatgacaatgtggccgagtccccggatgagctctccttccgca

SEQ ID NO: 220507 - DNA, 101 bp, Homo sapiens
cctgccattgttcgtcgggctgcagcagtggcgggcgcaggagcccggccccggagccaccgttttaaaagaaggtagacagctgacctatgagaaagtga

SEQ ID NO: 220508 - DNA, 100 bp, Homo sapiens
gtgagcgtgaggtgtgggtgttcgtttctcagctctggattaatcgaattacagctgctagccaggaacatggactgaagtatccagcgctcattgggaa

SEQ ID NO: 220509 - DNA, 80 bp, Homo sapiens
gccctggaaaggagaaggaataagacggcaggaggaagagagagagagggtatctcgggggagctttgtgccttgatgga

SEQ ID NO: 220510 - DNA, 100 bp, Homo sapiens
gaggaggagcgcagcccggcctcgtcaccaggagactaaagtccatcaaaaacatccagaaaattaccaagtctatgaaaatggtagcggcagcaaaata

SEQ ID NO: 220511 - DNA, 49 bp, Homo sapiens
aatgctccctctccttatatgatgatggaccatttggattgtgcaacaa

SEQ ID NO: 220512 - DNA, 75 bp, Homo sapiens
caggtcctcgggggcggcggccacgccaaggacggcactttaaaaataccattccggtggccgggcaccgtggct

SEQ ID NO: 220513 - DNA, 73 bp, Homo sapiens
ccttcaccagcccgcccctttcggccgctgctgcccacttcccgctcgggaaatacaaacctggtcgatgtga

SEQ ID NO: 220514 - DNA, 100 bp, Homo sapiens
ccgcccgcgggccagcgcaccggtcccccagcggcagccgagcccgcccgcgcgccggtacatgtcccagagcaagcacacggaggcccgggagctcatg

SEQ ID NO: 220515 - DNA, 82 bp, Homo sapiens
gagcatcacagccaaggaagccctcatctgcccaactgcctgtggaggaaccgattgtgtccacagatgaggtcatcttccc

SEQ ID NO: 220516 - DNA, 87 bp, Homo sapiens
ccccgccatgagccccccgctctgagggccccggcccctggatgcacagccccggcgctgctgcaagctttcttcctggtggcagat

SEQ ID NO: 220517 - DNA, 75 bp, Homo sapiens
tggcaaggcttttgcttccaaatacaagctgtataggtcgactaatggaaaatgaaaccaacaccaacactgcag

SEQ ID NO: 220518 - DNA, 82 bp, Homo sapiens
gtggcgtccgcttttctctaaggaacccggattttttatcaagcagaaatgcatcgaacaacgagaatcaagatcactgagc

SEQ ID NO: 220519 - DNA, 74 bp, Homo sapiens
ggcgaggtcagccccaaactaccggtatgtgatagtggaatgtgaagatcaagatactcagcagagagatccaa

SEQ ID NO: 220520 - DNA, 78 bp, Homo sapiens
cttgatgaaggcgtggatagcctgaaggcagccattcagctttgctgcaagataacatcgctgatgctgtagcttgtg

SEQ ID NO: 220521 - DNA, 83 bp, Homo sapiens
agccgatccagcctgcggagcctgtggggcagtcttccgtgtgtgctaagatcgtgcagctcctggggcagaatgaggtggac

SEQ ID NO: 220522 - DNA, 101 bp, Homo sapiens
cgctcggtcccgcgctgcgcatccccgcggacgccacagcgctgccagaagaatgtttgaaggtgagatggcaagtttaactgccatcctgaaaacaaaca

SEQ ID NO: 220523 - DNA, 75 bp, Homo sapiens
gaaactgaggcctggaatttgattaactcattcaaggttacccagttggtattatgactctgtccccctttgatc

SEQ ID NO: 220524 - DNA, 100 bp, Homo sapiens
gtggtgacccctgccctcgtgtgcctcagtcagctgctcaccaaggtggattttcaagacacgaatgctcggagtctggcagaaaggaagagagaagagg

SEQ ID NO: 220525 - DNA, 100 bp, Homo sapiens
ttgaaacaactgatgagagcctgaggagccattttgagcaatggggaacgctcacggactgtgtggcccccattgccgtgcggctgggcaaagtagccat

SEQ ID NO: 220526 - DNA, 73 bp, Homo sapiens
gtggagagggagtgatgtcttccagactcggtgctgtacccgccttctggacatggcaagacatgtgccactc

SEQ ID NO: 220527 - DNA, 98 bp, Homo sapiens
ctctccaccctcagtgacccggtgcagctagaagtccatatcggttgtgcacagggacctgaagcccagcaacatcctgtatgtggacgagtccggga

SEQ ID NO: 220528 - DNA, 152 bp, Homo sapiens
ggaagctcaagctcttctacgggatgagctctgacaccgccatgaacaagcacgcaggaggagttgctgagtacagggccggtgcataaacttctcccgagttccatctcagtaaaagggaagcaggaagaccaagaaggtacgaagatggc

SEQ ID NO: 220529 - DNA, 100 bp, Homo sapiens
atccttgggtttgaagatgatgttgtgattgagtttatattcaaccagctggaagtgaaggctgcatatctggttggtgtctctgaccccaatagccaag

SEQ ID NO: 220530 - DNA, 97 bp, Homo sapiens
ggaggagcgacggaagccagaccccaggaggcttcattgaggaccctgagaggaagtatcactttgagtgcagcagcgaggagcagtgtcaggagtg

SEQ ID NO: 220531 - DNA, 80 bp, Homo sapiens
ccgggcatggtggtctggggcaacgcggaagcctcccgcgacgatgcccctcaacgttagcttcaccaacaggaactatg

SEQ ID NO: 220532 - DNA, 74 bp, Homo sapiens
caataccaggatagctgttgtttcagagaaagtttttcagtactaccagctctccaatactggtcaagacacca

SEQ ID NO: 220533 - DNA, 90 bp, Homo sapiens
cttatatcctcctgagctatctgagtgagaagacagccataggaaaaggatacagagtagagtttcatgaacctgaaacttggtggaaat

SEQ ID NO: 220534 - DNA, 74 bp, Homo sapiens
gaattgcaggcccatacgatttgagccaccaatgctggatttccatgaacacttgcccaacagaaggtggaaaa

SEQ ID NO: 220535 - DNA, 100 bp, Homo sapiens
gctgattccacgttgcaaaagtgaaaggcttccgttacaagatgaggtctgtgtatgctcacttccccatcaacgttgttatccaggagaatgggtctct

SEQ ID NO: 220536 - DNA, 83 bp, Homo sapiens
cttccggcaagaggtgcctggaggaggccgagcccaagagctcactgaagggctgaaggcctttcggcagcagctgaggaaga

SEQ ID NO: 220537 - DNA, 82 bp, Homo sapiens
ccggacggtacttctgccactgctgctccgtggagatcgtcccgcgcctgccgggagtaccctgacttctaccggaagctct

SEQ ID NO: 220538 - DNA, 50 bp, Homo sapiens
gaacatccactagcctcactaaaggctcagtttatgaacctcttaaaagc

SEQ ID NO: 220539 - DNA, 100 bp, Homo sapiens
cagcactgtgcagggcagcaacatctttgagagaacggaggtcctggcagggaaggaattgttacttgaagaatgctggggaaagccaaatgtcaaagaa

SEQ ID NO: 220540 - DNA, 100 bp, Homo sapiens
ccagactggcggttcatggagagcaaggagaaggatcgccaggtgctggaggacttcccaacgggttgcttttgtaatgaagaagcacttaaatactcat

SEQ ID NO: 220541 - DNA, 100 bp, Homo sapiens
accggtgccaggcattggcagagagctcagcactcccgtcaccttccctgatgggcgctccttgcccaaaggtgtttgacccttcccgttttgcaccggg

SEQ ID NO: 220542 - DNA, 83 bp, Homo sapiens
cagcagccccgagcactgtggccgaggcccacctgctgacatctacctgccaggtactccaaagattcaggtttactcacgtc

SEQ ID NO: 220543 - DNA, 100 bp, Homo sapiens
ctcccaagagggcggcggcagcgggtcctacgaggagggctgtcagagcctcatggagtacggtgcccttcgttttaaaagaaagattattggattaaaa

SEQ ID NO: 220544 - DNA, 100 bp, Homo sapiens
cttcctggtttacctggcactcctggacaggatggattgccagggcttcctggcccgaaaggagagcctgatgaaaactcctcctctactaatctctgtg

SEQ ID NO: 220545 - DNA, 88 bp, Homo sapiens
tgcagccggtcctcttggggaaggctgtgtgggccagcccagccatgaggcatttcatccttcatgaagccattcaggattttgaatt

SEQ ID NO: 220546 - DNA, 75 bp, Homo sapiens
gactacatgtcggaggagaagctgcaggagaaagggcttcgtgggacacatatgcaacatgcctatgatttttac

SEQ ID NO: 220547 - DNA, 100 bp, Homo sapiens
tcctgccggccaactacgtggtcaaggatcgctggaaggtggaggtggctgatgccctgggagggggtgcggacccagaaaccaactcgaccagcaacag

SEQ ID NO: 220548 - DNA, 82 bp, Homo sapiens
atattggaagcgctttgatttacagcagctgcaggattttttatcaagcagaaatgcatcgaacaacgagaatcaagatcac

SEQ ID NO: 220549 - DNA, 100 bp, Homo sapiens
gtttcctaatgtgggatattggtggccaagaatctcttcgttcttcctggaacacttactatactaacacagaggtgagcacctgcggatctgtccccag

SEQ ID NO: 220550 - DNA, 90 bp, Homo sapiens
attcccaatgatgatgcacagtttgatgcttcccattgtgacagtgacaagggtggaaacagattattacttccaacaccaacagtaaag

SEQ ID NO: 220551 - DNA, 111 bp, Homo sapiens
ggtcccttggcattacttctatagaaatggctgaaggaaaacctccttatgctgatatacatccaatgagggtgctgtacttctttgcagtatacaaggactagcagttaa

SEQ ID NO: 220552 - DNA, 90 bp, Homo sapiens
cttaaaggagctccaccaaaggtctcgtacctctcagaggagaagtacagcatcggggagcccacagtgccatccaccctggcagaggag

SEQ ID NO: 220553 - DNA, 100 bp, Homo sapiens
ggagcacttgagccacgtgcatgaaccaaacccacttcgttcaagacaggtgtttaagcctgtgtcagcgtgttatgatgccgtcccgtaccaacctggc

SEQ ID NO: 220554 - DNA, 51 bp, Homo sapiens
atcctctcctctctgaatctcaaacaaggtggtcgttctcgttaccggacc

SEQ ID NO: 220555 - DNA, 50 bp, Homo sapiens
ggtgatttctgcatttccaactgagggcttccgctgggactaggatcagg

SEQ ID NO: 220556 - DNA, 100 bp, Homo sapiens
tgtcctggatcagtttctttgtcatgtagccaagactggagaaacaatgttagcactctacgtatatgaatatctgctccatgtaggagctcagaaatca

SEQ ID NO: 220557 - DNA, 73 bp, Homo sapiens
tggcagcatgtatatcttttgctatgtccaaactgggtcttcggcaggttacaggagttactagagtcactat

SEQ ID NO: 220558 - DNA, 75 bp, Homo sapiens
ctttgaccttctgccatgattgtgaggcctccccagccacgtgaaactggaactctaatgatccaggacaaagaa

SEQ ID NO: 220559 - DNA, 75 bp, Homo sapiens
ctcttctaagagaagtagtaaaaccagctgcagtgttatcaaaggctcacctccacctccagtaaaagtttcttc

SEQ ID NO: 220560 - DNA, 96 bp, Homo sapiens
gaggaggtggcctcgctgcaggccatcctgaaagttgcatttgctggtctggcctttgcgtccttctacctggcagggaagttacactgcttcaca

SEQ ID NO: 220561 - DNA, 88 bp, Homo sapiens
tggggccctcttgataaaaagagatgtggggggattctcgacctgctaacagaactggaccttttcgaggtcctgctgtactagccac

SEQ ID NO: 220562 - DNA, 116 bp, Homo sapiens
tggaattgctactgctgcctctgtcactcctggtgaccagcattcaaggaaaatggctttgtaaagaagtttgaacctaaatctggctggatgacttttctagaagttacaggaaa

SEQ ID NO: 220563 - DNA, 100 bp, Homo sapiens
atacttgaattttctaaggtgtcattaggtgtgccttgaaggggagatttctcgccagtccatcttgaacagtctgtctcgaggcaagaaggcttcaggg

SEQ ID NO: 220564 - DNA, 101 bp, Homo sapiens
ctcaacaccaacatcgatgggcggcggaaaatagcctttgccatcactgccattaaggtggtgttcccactgatgaagagcaggcgactgggttggagagg

SEQ ID NO: 220565 - DNA, 100 bp, Homo sapiens
aaaagaggctcttcctcctcctcccgcgacgttttctgagtttaaccagtaatgccattcagttgccaatctcaagcaaagcaaacataagccagtttta

SEQ ID NO: 220566 - DNA, 75 bp, Homo sapiens
tgcatttttgggaaaagacagagtaagaagactcccgagatccagacatttaatgtggatgcaccatgccagacc

SEQ ID NO: 220567 - DNA, 87 bp, Homo sapiens
ccaacttctttggcaagtggacattttactggctcaatgagatggaagattttcgaggtatagcagaagaatcatttccaagctttc

SEQ ID NO: 220568 - DNA, 90 bp, Homo sapiens
acacttcgtggaagaggaaccccgagctcctcagccccaaagttcgtcagcaggtccgagaacaagtataagcggatgaacagcaacgag

SEQ ID NO: 220569 - DNA, 76 bp, Homo sapiens
agaaatcgaggagctgcggctctaccccccggacttcctgcctgacacagctcacttcaagaagtgcacaatgtca

SEQ ID NO: 220570 - DNA, 73 bp, Homo sapiens
caagcgccccatctatgagttcaagatcacatggtgacctgccaggtatgccaaatgctgctgcccaaccagt

SEQ ID NO: 220571 - DNA, 97 bp, Homo sapiens
ggagccctcccccgctgcttctgctgaggctgatggcaagctccagcggcgccatgagcaaatgaaaaagaatttggaagcacagcacaaagaattg

SEQ ID NO: 220572 - DNA, 98 bp, Homo sapiens
tcagatgggagtgctcggcggagcggggctgggcgaggagcgcagaggagtcagaggtggtccattatggctgacatgcaaaatctggtagaaagatt

SEQ ID NO: 220573 - DNA, 75 bp, Homo sapiens
ggcaccggggagccggccttggacacgactttgctgtaaacagactaaagctggcagaaattttgtattataaaa

SEQ ID NO: 220574 - DNA, 100 bp, Homo sapiens
cctctgcagccagaagaacaagaagtaggcattgaccccttgtccagttactctaacaagtctggaggatctaaaatgtccactgaggcacaaagagttg

SEQ ID NO: 220575 - DNA, 51 bp, Homo sapiens
ttgagctgacagaaatggagagtatgaagacataggaagaatcgtgagaca

SEQ ID NO: 220576 - DNA, 90 bp, Homo sapiens
ctccctgctctacaacgtgcctgcagtggccgaggagattcaggatgaagttgacagcccacctgaggatattgaccataaggactcata

SEQ ID NO: 220577 - DNA, 100 bp, Homo sapiens
cttgaagaaatgtgacatctccctgcaattcttttacctggtaggagatgaattgtttgtggtcatggaataccttgctggggggtcactcactgatgtg

SEQ ID NO: 220578 - DNA, 83 bp, Homo sapiens
taggacccaacttgatgggaggagcgaccccaaagtacttcagacccaggtggttatcactaggctaaaactggacaaagacc

SEQ ID NO: 220579 - DNA, 75 bp, Homo sapiens
caccttgtgtggatggattcagtaccgaaggttaaacagctaccactggtgaaaccgtatttgcgttcagttcag

SEQ ID NO: 220580 - DNA, 80 bp, Homo sapiens
ggccaattcggtggaacgaggacgcggactgcgaaggcagtggccataaaatgcagtaaaaacaaatccagttcccaaga

SEQ ID NO: 220581 - DNA, 95 bp, Homo sapiens
gactcacaatctgtcttttgatgaaatcaacaaagcctttgaactgatgcattctggaaagaggttttacagaaggcgacacatgttgttcagag

SEQ ID NO: 220582 - DNA, 51 bp, Homo sapiens
caaacaaggcttttgggaagaatttgagctgatgtagaaggccaatcctta

SEQ ID NO: 220583 - DNA, 119 bp, Homo sapiens
cattcagaatgggaccacaaacgagggccaagaggatcacagagtggagactgctgcacggactctggaaccatgaacatatttgatcgaaagatcaactttgatgcgcttttaaaatt

SEQ ID NO: 220584 - DNA, 100 bp, Homo sapiens
ctggcatggagcgggaactggaaaacatcatccaggaggcagatgacctcagcaacccctttggacaaatgagccttagtcgccaaggttctactgaagc

SEQ ID NO: 220585 - DNA, 134 bp, Homo sapiens
gaacaagatgtgaactgtttctcttctgcagaaaaagaggctcttcctcctcctcccgcgacggttgaaatcacaaagattagacacctttttagataggtgttcttcagcaccactgacaacacggttctgac

SEQ ID NO: 220586 - DNA, 80 bp, Homo sapiens
gcccggccggacccgggcccgaggatattagaaatggctactccccagtcaattttcatctttgcaatctgcattttaat

SEQ ID NO: 220587 - DNA, 88 bp, Homo sapiens
ctacaggacccgctttctaccattaagtcagcaccttgctggatgcctcggcaacactggaagaaggacatgcaaaggaaacaattca

SEQ ID NO: 220588 - DNA, 100 bp, Homo sapiens
gtaccagttccgcttcggacgctggaactgctctgccctcggcgagaagaccgtcttcgggcaagagctccgagtaggttttggcacaaataccagtggg

SEQ ID NO: 220589 - DNA, 100 bp, Homo sapiens
aaagtcttgcgttatgagggcttctttggactctacagggaagccacagaagaagtttctttggacagccctgaaagggaacctatcctatcctcggaac

SEQ ID NO: 220590 - DNA, 100 bp, Homo sapiens
ccgtctcgctctgggtctccaggcccgcgaccgtccgccagtcgtcccgagcttactggaggttttggctctgcgtgagtgtggtctacgagctgtttct

SEQ ID NO: 220591 - DNA, 100 bp, Homo sapiens
gcaaaatccaaccaggttctcaacaggctgactatatttgtcaggatacgaatcaggttctcttcaagtgctgccagggatctgaagaggtaccctgcaa

SEQ ID NO: 220592 - DNA, 76 bp, Homo sapiens
ttttgaccagaatgctttggttaaacgaatcaaagaggcagtttggtggttatgccaaggaagcagactacgtagc

SEQ ID NO: 220593 - DNA, 100 bp, Homo sapiens
actgtgcttcttgtgcaagtaatcagtctttgacaagtgatgagaagctgtcggagcttcccaagggtctgttcctggtttcccagatgcataaaggaag

SEQ ID NO: 220594 - DNA, 88 bp, Homo sapiens
ccgctacttccgggagctctttgggatccggccagatgattacttgacaatgcagatcttcgtgaagactctgactggtaagaccatc

SEQ ID NO: 220595 - DNA, 90 bp, Homo sapiens
ttccggtaggagctgtaatcaattgtgctgacaacacaggtttggacttctcccactgagcatgacaagcactcgaaaggctaaatcaac

SEQ ID NO: 220596 - DNA, 87 bp, Homo sapiens
gctatacttttgaactgttaactcaagggagaaaatccccttcaacattcctgggatatatatctaatagtcccatatattgtgaaa

SEQ ID NO: 220597 - DNA, 98 bp, Homo sapiens
gaaaacagaaatcgaaacagatacagagatgtaagcccatagttttgcggcctccaggtggtggatccaatttttcattaggttttgatgaaccaaca

SEQ ID NO: 220598 - DNA, 100 bp, Homo sapiens
ctcttccctgggtggactggaggaggccgcgccgatgaacctgaccgaggacgcagagggctctacgtgtttgcacctggctgccaagaaaggccactac

SEQ ID NO: 220599 - DNA, 100 bp, Homo sapiens
ctgcctggtggagcataagacctgctctcccgcgtccctgagccaggccagcgccgacctggaggtctatgttaacaatgaatgggcaaccagtgttggg

SEQ ID NO: 220600 - DNA, 100 bp, Homo sapiens
cggagccagccgggagctgggcagcagcggccgaggaggaagaagcagctgcggcggccacaccctggatgaggtggagttggcatgaacttaacagcag

SEQ ID NO: 220601 - DNA, 96 bp, Homo sapiens
cacttttgagtgcaactgccttccagagtgaagtcaccctgctgagaaatgaagtggcacagctgaaacagcttcttctggctcataaagattgcc

SEQ ID NO: 220602 - DNA, 90 bp, Homo sapiens
aaccagagcagattccagcctccacatgtacatatgctccgagctctgtccagtggtgggagtattacatcccctcctctttctccagca

SEQ ID NO: 220603 - DNA, 75 bp, Homo sapiens
cgggcccacgcggaacgacggggcgagtgatgatgacagcctcttcatctatgactgcagtgctgcagaaaagaa

SEQ ID NO: 220604 - DNA, 100 bp, Homo sapiens
tgcacgacacatggaaattggactaaattaccagaatgcagggttcgccagcttcatcgagagttcctcagagctggctcaaacgtcatgcagaccttca

SEQ ID NO: 220605 - DNA, 100 bp, Homo sapiens
ggcggggcaagaagcacagcatcatcctaaggacgcagctgtctgtgagggtccatgcctgcatcgggatggagcctatagaggtgcctcttgaggaaaa

SEQ ID NO: 220606 - DNA, 83 bp, Homo sapiens
tctggatttccaaggaagaatttcctctgaagcaccgggcgccatgttttggaagtttgacctgcacacaagctcgcacctgg

SEQ ID NO: 220607 - DNA, 75 bp, Homo sapiens
ctggaccacttctctgtcgacggctatgacagttctgttatctccagaagaagaagagaaaaggagaatccgaag

SEQ ID NO: 220608 - DNA, 100 bp, Homo sapiens
ggctcctccagcgtcgccgctatgaagaaagtggttcaacagctccggctggaggccggactcaaccgcgtaaaacttggttctacagccattgggatcc

SEQ ID NO: 220609 - DNA, 89 bp, Homo sapiens
cttggttcgggtctcttcgtgttctcgctcactctctgtgacctgcctgctgcctccctcaacgaccagttgccccaacatacatttcg

SEQ ID NO: 220610 - DNA, 74 bp, Homo sapiens
ccgggcccagcacagccagcaccgcacgccctgcaagggagctgaactagatgcagagcacgcccagaaggtcc

SEQ ID NO: 220611 - DNA, 87 bp, Homo sapiens
ttaagacctcctccactggcaaagagtcacctaaagttaggcggcactccagccccagctcgcctactcatgaaggttacttctctt

SEQ ID NO: 220612 - DNA, 100 bp, Homo sapiens
cgagctggtgactggaagtgtcctaatccacgcctgtgtgagcacaagtatggcaatgcgccccgtgtccgcatcaatggccatgtggctgcccggttcc

SEQ ID NO: 220613 - DNA, 100 bp, Homo sapiens
caggagccgccgccgccatatcaggatgacgtagctttgccaaagacttagaagctaagcagaaaatgagcttaacatcctggtttttggtgagcagtgg

SEQ ID NO: 220614 - DNA, 87 bp, Homo sapiens
ctttcagagagaacagcgtttcagttttggtcatcggaagtggtgccttcagcacagtgcaattccaaaagccaaggtgagaaagaa

SEQ ID NO: 220615 - DNA, 103 bp, Homo sapiens
aaacttcgaaaagttggagataaaattctcggagatctgagctacagaagtgcagacttaattcagtgcacaaatgagatgaatgtgaacatcccacagttgg

SEQ ID NO: 220616 - DNA, 98 bp, Homo sapiens
agaaactgtagagtttgatgtggttgaaggagagaaggctgcacggttaggtattttacctgtgggtcgaggaaagaccatgtcctctcaaggtcgag

SEQ ID NO: 220617 - DNA, 100 bp, Homo sapiens
ttcggttcgggtgcgctgctcaaggacacggtctacaccgacttcgacgccacataaagaagatccctaatagtcatttctcaacaattatatagtcaac

SEQ ID NO: 220618 - DNA, 50 bp, Homo sapiens
agcagaggcagagcgcctcaaaaccgaagattcttctgatgtagagcgac

SEQ ID NO: 220619 - DNA, 100 bp, Homo sapiens
cagttaccgcatgggaaatgaggcccgattcatcaaccatagctgtgacccaaattgtgaaatgcagaaatggacagtcattttgtttactcattcagcc

SEQ ID NO: 220620 - DNA, 100 bp, Homo sapiens
gcattgcagttgcgtgttgttcagaaaggagaggcacatgatcatgcacaagcgcacccacaccggggagaagccttacgcctgcagccactgcgataag

SEQ ID NO: 220621 - DNA, 98 bp, Homo sapiens
gacccaggaagccgcgggcaaactcagactcgaaggtgtggatgtggaagcagccaagcgggcagaagaggaattgctccttcatgacacgaggtgct

SEQ ID NO: 220622 - DNA, 74 bp, Homo sapiens
tcagactccaatcaccggcatttttggtggacacatcagatgtctatacctgagatccgacaatgtggtagaag

SEQ ID NO: 220623 - DNA, 83 bp, Homo sapiens
aagccagcaatgccaagatctgttgtgaacaccttccaccatgaccacctcagcaagttcccacttaaataaaggcatcaagc

SEQ ID NO: 220624 - DNA, 80 bp, Homo sapiens
atccagcctgcggagcctgtggggcaggaagaaaacaggcagattttggcgcggcaaaagtcaaactcacagtcggactc

SEQ ID NO: 220625 - DNA, 90 bp, Homo sapiens
ggcagacgaggacgcggtgcggaagggcacgtgcagcttcccggtcagggtctttaagtggagtggagaaaattcatactttatcaatgg

SEQ ID NO: 220626 - DNA, 100 bp, Homo sapiens
gggggccacactgcaggcctccgcgctcagtggtgagaattatgaagatgatgacctagtaaattctgatgaggttatgaagaaaccatgtccagtacag

SEQ ID NO: 220627 - DNA, 78 bp, Homo sapiens
gaccgagagcgtgaccgagagcgcgaatatcgtcatcgttagaaggctctttcaagtgagtcatttgagagacttcca

SEQ ID NO: 220628 - DNA, 74 bp, Homo sapiens
atggcgataagtcattaccacagcgccccgggatgccgtctggagcccggatgccccaccagggggcgcccatg

SEQ ID NO: 220629 - DNA, 104 bp, Homo sapiens
ttgagaccaagaagttgctcaagtacatgaagcacaccgtggtagtatactggtgcgggccagtgctattgcccaggacgcggaccagaactacgactacgcca

SEQ ID NO: 220630 - DNA, 82 bp, Homo sapiens
cagggcttccactgattctacattatggattgtctcaaagcttgccaggagcagattgaggcggtgctcctcaatagcctgc

SEQ ID NO: 220631 - DNA, 100 bp, Homo sapiens
ttagtcctcgggaagaagtttcagactacaaggtatgtacaagctgtgaggacaacgcagaagccaatgggttttgtgtagagtgtgttgaatggctctg

SEQ ID NO: 220632 - DNA, 75 bp, Homo sapiens
ttacatccaagaactacaggctttacttttgtggtagaccgtctaagagaaggtccaacctaaacatgtgaagga

SEQ ID NO: 220633 - DNA, 100 bp, Homo sapiens
gctcctggacagatatggacacacccagccgctgtgttttgtcaaagcaacaggcttcacaagtcctggttaggaagcgtcgtgcaaattctttacttga

SEQ ID NO: 220634 - DNA, 100 bp, Homo sapiens
ggcaaaaccactcttcttcacatgctcaaagatgacagattgggccaacatgttccaacactacatccgactgctgaggagcttgatatggaaaatgaat

SEQ ID NO: 220635 - DNA, 100 bp, Homo sapiens
aggccgaaagccaggcaccaggcagagacatcacaaagattggattaccagcccagagggacgcttcataccgctacacctgggatcggagtctgtttct

SEQ ID NO: 220636 - DNA, 95 bp, Homo sapiens
gcacccctaccagtgggcgaagcccaagcccctgtcccctacgtcctacatgagggccaattcctgtccccccagcagcatggcatcgtgtgctg

SEQ ID NO: 220637 - DNA, 75 bp, Homo sapiens
aaactgtgtggggcgcggatgggatccagctgttagtcgggtccattgcaaaagaacttgcagactggcttatta

SEQ ID NO: 220638 - DNA, 95 bp, Homo sapiens
gtggaaaaacccggtactgtgcactattctttcccaggaaccattggataaggataaagcgtcatcacgtagacataaccaagaaacttcaccca

SEQ ID NO: 220639 - DNA, 75 bp, Homo sapiens
gacacactgtgatcctgcacgcccagcccgggctccaggccgacgcctccccccagggtcagctgcgggctccca

SEQ ID NO: 220640 - DNA, 75 bp, Homo sapiens
gggcatctcccggcccggccgcagcagccgccgccgccgcgcaggaccagccaccactgttgccttttcaagaac

SEQ ID NO: 220641 - DNA, 51 bp, Homo sapiens
aggggctccggctggtctgtggtgagaaatctatgacaagttcaagcagag

SEQ ID NO: 220642 - DNA, 82 bp, Homo sapiens
gggagtgttcgttgtgccagcgactaaaaagagattgtccccttggggcggaaagaagccaaggccaaggagctggtgcggc

SEQ ID NO: 220643 - DNA, 100 bp, Homo sapiens
tcgagtgtggcctgtgtggactcgcatcttgcccgaagccgggcggaggagagctcaagctaagaaatacactttcgggaaatggcctctaaatcctggc

SEQ ID NO: 220644 - DNA, 50 bp, Homo sapiens
caggattcttaaagatcggagaaaggtagaagactttttgaatctctcca

SEQ ID NO: 220645 - DNA, 75 bp, Homo sapiens
cacgctcatctgccgcgggctggactacttcagcagcctgtgggtttttgctgcagagggtttaaagcttacttc

SEQ ID NO: 220646 - DNA, 96 bp, Homo sapiens
cgtgaagattccaagttcaggagaactcgaccgtgagatgagtcagaaaccggccaaggagggtcccagactctccaaaaaccagaagtactccga

SEQ ID NO: 220647 - DNA, 90 bp, Homo sapiens
gtgctattgtgaggcggttgtagaagataatcagacagctaaatggagtctgagcagctgttccatagaggctactatagaaacagctac

SEQ ID NO: 220648 - DNA, 83 bp, Homo sapiens
ctggagtgaagaacgccgccatccagccaccattccaaggagccatgtctgaccaggacgtttggaagatcatatccatgcca

SEQ ID NO: 220649 - DNA, 82 bp, Homo sapiens
ccgagaatcaaggcgttgagcctcaaggttcactggttgaggacccagttcccatctttggatatagaggtcgatggtggag

SEQ ID NO: 220650 - DNA, 75 bp, Homo sapiens
ccccaggacctgagcaggaacctggagttttcaggacggggaagcccactggttcagctctgatgcctcacatag

SEQ ID NO: 220651 - DNA, 96 bp, Homo sapiens
gcctgcgaaggtggcggcgctgctgctcgggctgctcttggaggttttaaaatcaaagatgggaaaatcggagaaaattgcccttccccatggcca

SEQ ID NO: 220652 - DNA, 98 bp, Homo sapiens
cttcagctgctcggacagatgaagctccccaaggagctgcagattctcgctgaagtctgttaattctactttttgagtacttatgaataaccacgtgt

SEQ ID NO: 220653 - DNA, 74 bp, Homo sapiens
agccccagcttggccaagcagagctgggggggcggtggccggcaccgcagtgtcgtgaaaactacccctaaaag

SEQ ID NO: 220654 - DNA, 100 bp, Homo sapiens
atcaaatcatgaagtaatccacccccaaccactctcttctgagggctcccagacatatataatggtgagacactttgacagcccctacctgttgtaccac

SEQ ID NO: 220655 - DNA, 82 bp, Homo sapiens
tccatctcttctataaaaaacttatgtttgaacagcaaaaatcggatttgtactgtgttcgcagtgacctggggaacctgct

SEQ ID NO: 220656 - DNA, 75 bp, Homo sapiens
tgctgctggattgaactcagagaagccggggtgccaatgaactggctgtgcagaaagcaaaggcagaaatcacca

SEQ ID NO: 220657 - DNA, 100 bp, Homo sapiens
cgtggtccgtattcccaaggagcagggagttctgtccttctggcgcggctcatttgcaggggggagccaaaagggtcatcatctctgccccctctgctga

SEQ ID NO: 220658 - DNA, 75 bp, Homo sapiens
tttcagattactactatcatgcagatttcctatctgacaggatgaagttaaaggaagtagatcgtacagccatgc

SEQ ID NO: 220659 - DNA, 74 bp, Homo sapiens
gctacttcatattttggaaagcagtttttaagacaagactactataaagctttggaagatgcagatgagaaggt

SEQ ID NO: 220660 - DNA, 100 bp, Homo sapiens
gttggatgacaataaccatcttattcagtgtataatggactctcagaataaaggaaagacctcagagtgttctcaacacaatgaggcatatacatggaca

SEQ ID NO: 220661 - DNA, 90 bp, Homo sapiens
ttattgcgcgtggaacggctgcttttggaaggtgagccagccatgagagggtatcttgtggccatattcctgagtgctgtcttcctctat

SEQ ID NO: 220662 - DNA, 51 bp, Homo sapiens
tctacgtgctggacctgaagggcaaggtggaaaggagactatggaaccagg

SEQ ID NO: 220663 - DNA, 75 bp, Homo sapiens
agctcaagaacaagcatgaggcaatgatcactgacttggaagcggtgggtctcggaaaagttcattgttgagggc

SEQ ID NO: 220664 - DNA, 74 bp, Homo sapiens
cggcaggacagtcatcctctataagatttatgttgaaattgagcgtgcgcgactgactaaaacattagcaacta

SEQ ID NO: 220665 - DNA, 98 bp, Homo sapiens
ccccctcgataccaacggcaaaaatctcaagaaagaggtgggcaagatcctgtgcactgactgcgatgtgtgcaacagcaccgatcttccggaagtcg

SEQ ID NO: 220666 - DNA, 83 bp, Homo sapiens
ttgcaattccaaaatgtgtaagacgggatattctcttctgtgctgtcaaggatcggtcgcttggttatcggacagaatggaat

SEQ ID NO: 220667 - DNA, 97 bp, Homo sapiens
ccccggggagcggccaaccacgacctgacggacaccacccgggcggaactatctcagggaggttgtatgagctcatttcgatggaacagaggtggcg

SEQ ID NO: 220668 - DNA, 82 bp, Homo sapiens
cagaatcagttgttggagaaaattaaagggtttggattcaggatttgttcctagtgtccaagattttgataagaaacttaca

SEQ ID NO: 220669 - DNA, 101 bp, Homo sapiens
tttaagaaagaagatgttaactttcagggaagatcagttttcctgccatccaggctgctccctccttcagcaactcattcccacagatcttccgagacagg

SEQ ID NO: 220670 - DNA, 90 bp, Homo sapiens
cattctccagggaaaggatgacatatttttggacctgaaacagaaattctggaacacctatatggctggagtgcagtggtgcaatctcgg

SEQ ID NO: 220671 - DNA, 90 bp, Homo sapiens
ggaattaagtgagagagatgccatctacaaagaattctccttccacaattttaatcagcagtctctggtcccagcccaccccatggcccc

SEQ ID NO: 220672 - DNA, 98 bp, Homo sapiens
gggcacctcagctcggccggggccgcagtctggccacccgcttccatgcggttcgggtccaagatgatgccggagatctattgggaaactgattataa

SEQ ID NO: 220673 - DNA, 59 bp, Homo sapiens
ccctgggctggaggtaaaaccccacgaaagtgagtgagaaggttggaggagctgaagga

SEQ ID NO: 220674 - DNA, 100 bp, Homo sapiens
agacgatctgcacttcgcattttggcattgacatttaattttagggtcctttatatagaagggagaatctttgtggagttcacctctgtgtttgactgcc

SEQ ID NO: 220675 - DNA, 82 bp, Homo sapiens
ctgggcgcctccttcctgcaggccagcattttgaaagcgaagcagaagccgtagaatcagcggcgagcctgttgaaagaacc

SEQ ID NO: 220676 - DNA, 74 bp, Homo sapiens
aggagccgcacccggccggcccggccccagccccatggacctccgagcaggccactcttcacctccaccatgag

SEQ ID NO: 220677 - DNA, 90 bp, Homo sapiens
agcctcagcaccgacagccgacgcgcagatagcagagccatccttggggatatgtttgccttcatgggcagcctggataccaagggtacc

SEQ ID NO: 220678 - DNA, 80 bp, Homo sapiens
gcccagagcaacagctttcagcaacacagaaattcaggaagctgctttcaaaaggacacattcagctaacgtattttagc

SEQ ID NO: 220679 - DNA, 73 bp, Homo sapiens
cgcaggataaaaggcaaactcttcacctgatgcctgaggaagtgcaccatggagaggaggaggtggagacttt

SEQ ID NO: 220680 - DNA, 72 bp, Homo sapiens
agaaagacaaagacccagtgaacaaatccgggggcaaggccaaaaagaagacctcttcctgtgccaaaactg

SEQ ID NO: 220681 - DNA, 98 bp, Homo sapiens
gccgcgctcccgctgctcctgccgggaggaatgccagctcctgagcaggcctcattggtggaggaggggcaaccacagacccgccaggaagctgcctc

SEQ ID NO: 220682 - DNA, 99 bp, Homo sapiens
ggaggccgtcaccttcaaggccgtcagacaaggtgatgggcagaatctgtttacgaaagacgtgacagtgatcgagggagaggttgcgaccatcagttg

SEQ ID NO: 220683 - DNA, 50 bp, Homo sapiens
ctgtgtcacacagacatcactccgtctgagtaccaagttcgatccatagc

SEQ ID NO: 220684 - DNA, 75 bp, Homo sapiens
cttgggtttctttcttaaaggactgatttttagaactccacatttgaggttttgggatttgagattgacgcggtg

SEQ ID NO: 220685 - DNA, 82 bp, Homo sapiens
cggctactacaacacggctgtcaagctggcgcgccagagcggcatcgaggtggtctttgggaagaagcttcctgcctttgcc

SEQ ID NO: 220686 - DNA, 100 bp, Homo sapiens
gaaaagtcccgactgacagccatgaaaatgcaggatgagaacttggcaagtggcttgaacctctgaaaaaccttagatttgaaattaactgcatcccaaa

SEQ ID NO: 220687 - DNA, 90 bp, Homo sapiens
ccgcgacttcctggccatcgttttcttcgcctccatagaaattacagaagacatccccgtgaagactttgaatatgaagactgtgtatgt

SEQ ID NO: 220688 - DNA, 110 bp, Homo sapiens
tcagagccaagagaagaaggtcacccacaagctgcccatggctttggtgtgggaggctcgagtggtgaagcagcgcttgcagatgtacaactcgcagcaccggtcagcaa

SEQ ID NO: 220689 - DNA, 101 bp, Homo sapiens
ctgctgctcgcagcgtgccacctcgcctcccgccgctaccgagtgaaagccctgtgtaaggaatgtgtagtagaacgttgtcgcatattgcgtctgaagaa

SEQ ID NO: 220690 - DNA, 100 bp, Homo sapiens
ccgggcccgggcagcccgctgtgtggcaccgtctggaggagctctacacgaagaaggaccggaacacccgaatcctgggaagagtttcagcgcccgaggc

SEQ ID NO: 220691 - DNA, 75 bp, Homo sapiens
ttcctgtgttaactccttcctctgccactttttaccttggggacctcagggatcactgagattctgatgaacaga

SEQ ID NO: 220692 - DNA, 90 bp, Homo sapiens
caggaaaagccgttgagaggaccatcacaacctgagcagcacagctttgacagatccaaatgcttctgctgcccagcaggctgttctcca

SEQ ID NO: 220693 - DNA, 90 bp, Homo sapiens
aggcgtgagccaccacacctagctgattcaagatggaaaaggtgatgtaaccattacaaatgatggtgctaccattctgaaacaaatgca

SEQ ID NO: 220694 - DNA, 74 bp, Homo sapiens
gttaggagttgatggcagtttcaataacaggtcattgccgagaaaagataagtcagctgaggattacaattctt

SEQ ID NO: 220695 - DNA, 75 bp, Homo sapiens
ctgccctgagacggtgtcccgccgaaagtctttcccagggaactccgatgaagtgttccaacaaaatgagcgagt

SEQ ID NO: 220696 - DNA, 85 bp, Homo sapiens
cgagagcgtgaccgagagcgcgaatatcgtcatcgttagaagacggaagtgaaaatgtgacaggattggacctttcagatttccc

SEQ ID NO: 220697 - DNA, 83 bp, Homo sapiens
gaacgagtggaagattgcgtcacgacgcacataaagacgtacgaagccgtcgccaaggctggaccccaatggagaacaggtgg

SEQ ID NO: 220698 - DNA, 100 bp, Homo sapiens
gctcgagagcgtgcccggctgcagatagagattgggaagctgagggcagagttggacgaggtcaacaagaggttatgggagaagatatcccagaaaaaat

SEQ ID NO: 220699 - DNA, 76 bp, Homo sapiens
ccgccatggggacacggcactgcatgctgctgcccgccagggcccagatggtctcggcgcggaagatggccggcgg

SEQ ID NO: 220700 - DNA, 100 bp, Homo sapiens
taaatattatgctacagaatttgaggaacaacctatcttcagcactcgagctcatgtcttccaaattgacccaaacacaaagaagaactgggtacccacc

SEQ ID NO: 220701 - DNA, 98 bp, Homo sapiens
atgctcgggagggagactgttgttcccggagatgcggcgcgcaggccaagtcctgtatctgccatgtctgtggcgtccacctcaacaggctgcattcc

SEQ ID NO: 220702 - DNA, 82 bp, Homo sapiens
cgcggcggcggtggagatcgcaggtcgctcagatctatgttagcgttcctggatccaagaaggtcatccttgacctgcccct

SEQ ID NO: 220703 - DNA, 51 bp, Homo sapiens
catcacaaggctatgaacaaatatgcaagagagctaagacaccccggaaac

SEQ ID NO: 220704 - DNA, 82 bp, Homo sapiens
actcaatcaaaccagtattcttttcacacaggaaattatggaagtggaaattacaatgattttggaaattataaccagcaac

SEQ ID NO: 220705 - DNA, 75 bp, Homo sapiens
ggccggggcttcctccccggccggcagggtggacggtgggctcatggactcaccctgtcacccaggttggactgc

SEQ ID NO: 220706 - DNA, 75 bp, Homo sapiens
gcggggacgggccgtgggcccccggaacgagacctgcctagagctggaacgttacctccagagcgagccctgcta

SEQ ID NO: 220707 - DNA, 100 bp, Homo sapiens
actggaccgtcaccaacacccgcttctctgtggatgaagcactcgactatgacatcaacattgaggagattgggtgaagacatttttaaaggagtggtaa

SEQ ID NO: 220708 - DNA, 97 bp, Homo sapiens
tttgcttccaaatacaagctgtatagggtccaggtgcggaagtatggagagcagaagacgttgtttatctttcccgggctcctcccggaagcaccct

SEQ ID NO: 220709 - DNA, 50 bp, Homo sapiens
tatggactccagttatgcaaaaagagttatattccctgctcagagaggat

SEQ ID NO: 220710 - DNA, 101 bp, Homo sapiens
gatgaagaaaacttgaaactgtttgggaaatgcaacaatccaaatggccatgggcacaattataaaggtgctgggtaggccaggtttcagcatcgcagaca

SEQ ID NO: 220711 - DNA, 90 bp, Homo sapiens
gcatgaagaccctcaatgcgcatgaacactttgttacctccttggagcttgggaaagtcgaggtgacggtgtttgaccctgactccctgg

SEQ ID NO: 220712 - DNA, 90 bp, Homo sapiens
cttgctacctcttgggtgaactctagcaattacaagaacgtgctggccaaagcgctctatgacaatgtggccgagtccccggatgagctc

SEQ ID NO: 220713 - DNA, 75 bp, Homo sapiens
gaacagctggaggagttcatgacaaagctcctctggtgcaagtgtggtagctattgacaacaaaatcgagcaagc

SEQ ID NO: 220714 - DNA, 85 bp, Homo sapiens
agagcgtggagcgggctgggccagaacaaaatccagtctcatagcagaggagaatataatgtttacagcaccttccagagccatg

SEQ ID NO: 220715 - DNA, 75 bp, Homo sapiens
gtttgacaaaacataccaattcttgaatgacatccgagcgaaagagaaagaggtgctggaaacgtgcgtagcaac

SEQ ID NO: 220716 - DNA, 100 bp, Homo sapiens
acttgctacgaaacagaaatttcatgttgcaccctggtggactccattatgctggtggaagagggcttcagtgtgacgagtgtggatgccagtgacaaga

SEQ ID NO: 220717 - DNA, 100 bp, Homo sapiens
cgtgaaaaattgctccgtcttggaatttttagacaagtggatgttttgattgacacatgtcaagggtcttgctacgtacgttgcccaggttggaatgcag

SEQ ID NO: 220718 - DNA, 102 bp, Homo sapiens
gcggaaggccgcagggacctctgcctaggaaagccagggctccatggagaacgagcctgtagcccttgaggaaactcagaagacagatcctgctatggaacc

SEQ ID NO: 220719 - DNA, 100 bp, Homo sapiens
cggaggaagagccgggcagtccctggagcgggccaggcccatggacagaccttcacgttcccagatctgtttcccgagaaagacgagagccctgaaggca

SEQ ID NO: 220720 - DNA, 50 bp, Homo sapiens
cacaggggccactcagagtcgcccgagaaattgacttgatgcaaaacatc

SEQ ID NO: 220721 - DNA, 82 bp, Homo sapiens
gattttgtcagcttgtcgtcaagccctcccaggcccaatacttcaaagcatcctacctctgctcaatatatattacttggag

SEQ ID NO: 220722 - DNA, 90 bp, Homo sapiens
atcttatacaaaaaggagaaggaagaagcagatcttcttttggagcagcagagactggacggcccccaagttacatgaactacctgctag

SEQ ID NO: 220723 - DNA, 75 bp, Homo sapiens
acactgccaaccggccagaggacgagtgtgggaaaggggcgcagggagtctgaaagctccaggagcagcagaagg

SEQ ID NO: 220724 - DNA, 119 bp, Homo sapiens
cccctcggacactgcccccgccgccgccggagctctgcagcacggaaatgattttgacttggctgatgccctggatgatcgaaatgatcgagatgatggccgcaggaaaccaattgctg

SEQ ID NO: 220725 - DNA, 90 bp, Homo sapiens
gaaacaacgactggagggattaagaagaactcttaggagcagcttggcctaaagggtaagaatgattgatgttggctgatattggagtgc

SEQ ID NO: 220726 - DNA, 98 bp, Homo sapiens
aatgatgaagagcagatggaaacacatgaaagacttcctcaaggactacagtatgcacttaatgtccctgtcaactttgtagtgtgccaactctttgc

SEQ ID NO: 220727 - DNA, 98 bp, Homo sapiens
agcagcaagcacctgcctcagctgacccttgagccataacccatttggacaactagtggtttgaagagccagggccgtctgtcagtaggaagtaatcg

SEQ ID NO: 220728 - DNA, 74 bp, Homo sapiens
ctgaaccccaaggccaaccgcgagaagatgacccagagaagctggaagttctggccaaagcctacagtgttcag

SEQ ID NO: 220729 - DNA, 82 bp, Homo sapiens
ggcccgcttcctggaatggcaagcgcagcaacaacagagagcacgtggacccttgaacatctgtgaagaaatgactattctg

SEQ ID NO: 220730 - DNA, 75 bp, Homo sapiens
cccagggcaagccccgctccggccaacaaactattgcccagaagaaaagatgtttggttttcacaagccaaagat

SEQ ID NO: 220731 - DNA, 82 bp, Homo sapiens
ctgtgtccagcgctgccggagccgcctgaggctgaaactgccgccaaccggatctgtaaggtgctggctgtcaaccaagaga

SEQ ID NO: 220732 - DNA, 75 bp, Homo sapiens
acaaaagcgaaatgggcacaccacaggctcctggcatctgtttcacttgttgcttttggaatatatgattcatat

SEQ ID NO: 220733 - DNA, 82 bp, Homo sapiens
gaccggaggagacatcggcctctgcaggcttgccgaagaagggaggtttggctcagaagaaggcggccccaacagaggtgag

SEQ ID NO: 220734 - DNA, 75 bp, Homo sapiens
gctggtccgcattcttctcagagaactggagaagatgtgtcgtggaggccgaatgtttgcaccaaccaaaacctg

SEQ ID NO: 220735 - DNA, 90 bp, Homo sapiens
gaagcggcggcggcggcgccgggcccgggggtggtgacagcaggtctgaggttcagtgggaaatcccacctgtccaaacactgtgtgaga

SEQ ID NO: 220736 - DNA, 82 bp, Homo sapiens
gagaccatggctgactacctgctgtacaccctcaacaaacaccagcgctttgggttttaaaatcaaagatgggaaaatcgga

SEQ ID NO: 220737 - DNA, 101 bp, Homo sapiens
gctatgacaacctctttgctatggaggtcgagttgtgtcgtgttagcagtcaagagaagctgggcctgacagtctgttaccgaacagatgatgaagaagac

SEQ ID NO: 220738 - DNA, 100 bp, Homo sapiens
gagtccatcaccaagggagacctggagggtctctcattcatcacttttatctgctatgtggcgtcctcagcatctgccttcctcacagcgcctctgctgg

SEQ ID NO: 220739 - DNA, 90 bp, Homo sapiens
cggaactcggcggccgccatggcgtccaacatggaccgggagatgatcctggcggattttcaggagctggtcaggctcaccatcgagaag

SEQ ID NO: 220740 - DNA, 98 bp, Homo sapiens
gttgttttttcctgtatgaagcggttggcaccactgaagtgaccgaatgagctcaaatagctataactgtaccaaagacatggaagaaaccaaaagat

SEQ ID NO: 220741 - DNA, 75 bp, Homo sapiens
ggcattgagagaagctttgattctaggtctcgttccagatcatattctccagctcataacagagaaagaaaccac

SEQ ID NO: 220742 - DNA, 75 bp, Homo sapiens
ttttgatgttgaaaggaaaaagccaggtatcttgcaatatattcagaactctccctcctagtgacagcaatgaat

SEQ ID NO: 220743 - DNA, 75 bp, Homo sapiens
tgagagagctaaatgtcattactgaaactcagtgcactctagaatggatgatgaacttgttgttggacatagtgc

SEQ ID NO: 220744 - DNA, 80 bp, Homo sapiens
gacaccgacgcgctcatctgctggagcccggcaccatgactcctgtgaggatgcagcactccctggcaggtcagacctat

SEQ ID NO: 220745 - DNA, 111 bp, Homo sapiens
ctgcaggcagcaccggaggcccaggtctccgtgcagcccaacttccagcaggacaaggggtctccgtccacgtgtgcaatgagcaccgttatgggtacatgaatgtgccgg

SEQ ID NO: 220746 - DNA, 89 bp, Homo sapiens
gaaaaactggagagcttcatcaaaaatagtgatagctttgataagtcacgagaagagaatgccttctagatgcaaaatcacctccaaac

SEQ ID NO: 220747 - DNA, 101 bp, Homo sapiens
gtgacgagcggccgaagcagctttgcgaaaaagcttgcggaggctaagcaccagtacagcatcgacgagctgaagcaccaggagaacctgatgcaggccca

SEQ ID NO: 220748 - DNA, 75 bp, Homo sapiens
gggtctggagtgcgtgggggaccggctgttggcggtcaggatggctaaaggtgaccccaagaaaccaaagggcaa

SEQ ID NO: 220749 - DNA, 100 bp, Homo sapiens
caaactcccaggctcaagcaatcctaccatgtcagccttcccagtagctggaactacaggaacgggttaacttgtttggtttctggagccgattcaacgg

SEQ ID NO: 220750 - DNA, 100 bp, Homo sapiens
aagacctggttgctgctgggcgccttggaaccagcgtcagaaagaccctgctcctctgttctccgcagcctgatgatcgaagcaaagctgagatggattt

SEQ ID NO: 220751 - DNA, 100 bp, Homo sapiens
ctcccacttcatctggaaccgcacggaactcctgacccttgacccccacaatgtggactacctattggattactgatctctcattacccaactatctgat

SEQ ID NO: 220752 - DNA, 99 bp, Homo sapiens
cgccattctcatgccttggtctccttgtccttcctaaaaaaccttcgcctcatcctaggagaggagcagctagaaggtgagaaagatcagtctaaagaa

SEQ ID NO: 220753 - DNA, 75 bp, Homo sapiens
ttctttcttaaaggactgatttttagaactccacatttgagggttgaatgcaatgcagttacagaatttggctgc

SEQ ID NO: 220754 - DNA, 95 bp, Homo sapiens
tatagatattgcagatagaagtcaagttgaaccagcaacagtggcactggatggaaccctattccagaagtcaggagtgatctctggtggggcca

SEQ ID NO: 220755 - DNA, 100 bp, Homo sapiens
cttcaggaaagtctctctcaacctcagatgctaatagtttcagatattgaagaagtctgggccaacggtcacaaaagttgtcactgttgtgacaaccaaa

SEQ ID NO: 220756 - DNA, 98 bp, Homo sapiens
tgacccagggcagactggtagcaaagcccccacgcccagccaggagcaccgccgaggactccagcacaccgaggtgaactttgaggcgctgatcatca

SEQ ID NO: 220757 - DNA, 75 bp, Homo sapiens
gaggaatttggggatggctgcttgagcctcctggtgtacgaagccatcgacagcagagatggagcatcttgtgca

SEQ ID NO: 220758 - DNA, 75 bp, Homo sapiens
ggggagatgaacccaacctagtgggtgtaatacatcatgaactgcaggggctgacaggacaactggatcagtttc

SEQ ID NO: 220759 - DNA, 102 bp, Homo sapiens
cgacaagccgctggcagccgcggatctcaccgccgctcaggatggagaaggaggagacaacccgggagctgctgctgcccaactggcagggtagtggctccc

SEQ ID NO: 220760 - DNA, 75 bp, Homo sapiens
actggcagacggatatttactgaggaggacttcatccaacccagcagccgagaagaggcccagcagctgtgggag

SEQ ID NO: 220761 - DNA, 75 bp, Homo sapiens
ccaaaaacgtcaacaacagttttacgcagcagccgctcttctaaaacattcaaaccaaagaagaatatccctgaa

SEQ ID NO: 220762 - DNA, 75 bp, Homo sapiens
taggaattctgtctattgtggctcagaggaactgtgagagtgacactgaggaggacatcgccaggaggaaagccc

SEQ ID NO: 220763 - DNA, 74 bp, Homo sapiens
gtcatcttcgggagccgtggaggacagagcgggatgccaccagcttgtccaaagggaagttccaggagctcctg

SEQ ID NO: 220764 - DNA, 76 bp, Homo sapiens
cgcccagttggcccagaggatctcttctaacatccagaagatcacacagtgttgtttggcaaacatcgaaaagatg

SEQ ID NO: 220765 - DNA, 98 bp, Homo sapiens
cttttcatggattatcttacgtagataagacactgcaacagttgtctgcattcaaaagagcattctattaaagctaccttaatttggcgcttattttt

SEQ ID NO: 220766 - DNA, 75 bp, Homo sapiens
cgcggtgtgaagaagaaagcagcaaaacgaccactgaaaacaacgccgaatcactgagcttcagctcaaacttga

SEQ ID NO: 220767 - DNA, 75 bp, Homo sapiens
cctcagatccagtgataattgacaggatggagctatgacattgaagagaggaaggttccaaaacccaagtccaag

SEQ ID NO: 220768 - DNA, 75 bp, Homo sapiens
cgtacttgaagccctacgccgtggacttccagcgcaggttctggaggacacgtgccggcggcaggacttcaaccc

SEQ ID NO: 220769 - DNA, 75 bp, Homo sapiens
ctccttgaagtatttggctgaggagttttcaatcccagaacctaactctcagagaagtaatgctgaacctaacag

SEQ ID NO: 220770 - DNA, 82 bp, Homo sapiens
cttgacacatctgctctctctgttcaagggaattttgatctaaatagtattcaagtcaaacaacgttgaaatggattgggtg

SEQ ID NO: 220771 - DNA, 90 bp, Homo sapiens
cgacagggatcacttcatccgaaccctcagcctcaagccgctgctcttcggtccaggtgcaggtacagcagtctccgcaacaggtctcgg

SEQ ID NO: 220772 - DNA, 96 bp, Homo sapiens
ctcccgcccaagtccggccacctggtcttcccctcggccccggccgtctcagctgtgagccgtgagctttgaggcggtgggatgtgtcagcagaat

SEQ ID NO: 220773 - DNA, 99 bp, Homo sapiens
ctgtcttcggtggactccttcggcagtccacccaccgccgccgcctcccaggcagctctgtggccatggatatgttccagaaggtagagaagatcggag

SEQ ID NO: 220774 - DNA, 96 bp, Homo sapiens
ggcgccatttgccagtgatggaccgtgctagtgacctgactgatgccttcgtggaggctaatagctcgtcagcttgctaaaatccatgctattcat

SEQ ID NO: 220775 - DNA, 74 bp, Homo sapiens
ctcggcccgcgggggagccccgggagccgcacgctgtgatgcagatccatccgccctagcaaaatatgttctgg

SEQ ID NO: 220776 - DNA, 94 bp, Homo sapiens
tcctgctcaagatctcagagaaggaggaggtgaccacgcgcgaggtgtcgtgaaaactacccctaaaagccaaaatgggaaaggaaaagactca

SEQ ID NO: 220777 - DNA, 82 bp, Homo sapiens
cgcaccgcctgctgctgctgggctgacccagctggatgttgacagccacctggcccagtgcttggccgaaagcacagaagac

SEQ ID NO: 220778 - DNA, 82 bp, Homo sapiens
cgggaggagcagaactttgagggcgaaggggccttgtgttatccgtttgcaaagaacttcagctgccacctagtgatttcca

SEQ ID NO: 220779 - DNA, 74 bp, Homo sapiens
aggagattatagctctgtatgagaaggacaacacctacttaggtaatagcctgcagctggtgttttgagaagcc

SEQ ID NO: 220780 - DNA, 90 bp, Homo sapiens
aagacactgacagagcacctgaaggacccacgcagccacccagcctcagcactcatctgcgcagccatggaggccctgggacctgggggc

SEQ ID NO: 220781 - DNA, 100 bp, Homo sapiens
gggatgtgtatgaccttcacctcattaacagggacgcttataagaatatttgatacttcatcagggcatttaatccaggaactgcgaagaggatctcaag

SEQ ID NO: 220782 - DNA, 50 bp, Homo sapiens
gcgacccgaggaggcggaagagcggcgccgcttcgcagaatcaagaacgg

SEQ ID NO: 220783 - DNA, 82 bp, Homo sapiens
gccttggaagaagtcgcctccccagatctctaagcaggccgcgcgaccctcgagtctcaggcttgggcactgtttaaaggaa

SEQ ID NO: 220784 - DNA, 74 bp, Homo sapiens
atgttgtgattgagtttatattcaaccagctggaagtgaaggacctagatgtgaaggctggtggaggctgtgta

SEQ ID NO: 220785 - DNA, 75 bp, Homo sapiens
atacatttggcagaataaatgaaccaggaaacttttgagaagaactttgaaagagaaacccataaaataagtgag

SEQ ID NO: 220786 - DNA, 87 bp, Homo sapiens
tcattctcttggactgaacttaaatactgatagaattatatccagatcgagagacagaagattctgaaagggttcaatgaaatgaga

SEQ ID NO: 220787 - DNA, 100 bp, Homo sapiens
gggaccgagcctgggaggccggccggtgccagcacctttcggcttctgagacggcggcagcagcggcattcagatgactctggggacgacgacgaggcta

SEQ ID NO: 220788 - DNA, 88 bp, Homo sapiens
gggggcgtacaggcgcagcggccgcagcagcagcggcagtcacaggcacatcagcaaagaggaatgcttctagtcacaacagacaccc

SEQ ID NO: 220789 - DNA, 78 bp, Homo sapiens
atctaccccatcaccagaacccagcagcttgccagcatcgttgcagaagttggtgagatggcaaagcagtatatagag

SEQ ID NO: 220790 - DNA, 51 bp, Homo sapiens
accaccgggcgctggtctgctcccagccggctgaccccgcactacatctac

SEQ ID NO: 220791 - DNA, 75 bp, Homo sapiens
ttctcaaagactggtgctatgaagctgtcttggtgaagagtaacaacctgacggaccgcatcgtggtcatcccgg

SEQ ID NO: 220792 - DNA, 100 bp, Homo sapiens
tttggaagttattccgtagcataagagctgaaacttcagagcaagttttcattgggcaaaatggggttttccagggaaattttgacaatgacactcacag

SEQ ID NO: 220793 - DNA, 100 bp, Homo sapiens
gtcgttgtcgccggagcctggagccgtgaacccagccgcgccaggaaacctgtaggaagtgtcagggactctggaaagaacataatggcctcacctgtga

SEQ ID NO: 220794 - DNA, 48 bp, Homo sapiens
tccaggagtcagtttattactggaaagagtcaactgagagttcaaata

SEQ ID NO: 220795 - DNA, 75 bp, Homo sapiens
tgttccgggaagttcttccaaagcaagggcggcgactggcggcgcgatggacctgaccgggctcctgctggacga

SEQ ID NO: 220796 - DNA, 75 bp, Homo sapiens
cctgtagaggaggctggagattccacccaaatcctcttctccaagaaggtgatgtgtccaatctagatcccaact

SEQ ID NO: 220797 - DNA, 75 bp, Homo sapiens
ggcgaagatccggactctgggtgttttgctaccgtgaccgtttagcatgggtggtaaagtaccacctgctactca

SEQ ID NO: 220798 - DNA, 89 bp, Homo sapiens
ctgaagagctatggtgaaacaccactgaagcattgccaagctctaagcgaaagacatgaggcctcagcctgaaatgaggttgttttgag

SEQ ID NO: 220799 - DNA, 75 bp, Homo sapiens
acggattcatttagagctgcggaacaggacgccctctgatgcctcatgcattgtgcgtcagcagcaatgtttatg

SEQ ID NO: 220800 - DNA, 83 bp, Homo sapiens
ggtagagaacgttgtccacgaggacttccaggtcacggaggaggtgaaagcttctcctacgctggctcggtggccatcagcgg

SEQ ID NO: 220801 - DNA, 100 bp, Homo sapiens
ggatgcctttgccgccgccaagctcctggccctggccctgatcatcctgctgggcttcgtccagatcgggaagggttggagcaaaacgtcccactcactg

SEQ ID NO: 220802 - DNA, 95 bp, Homo sapiens
accactgcagcctgcggacgaggccgggacttggccgagcggatcctaataaggggaaaatggtgactgccaacagccagcccaatgtcgaatcc

SEQ ID NO: 220803 - DNA, 100 bp, Homo sapiens
aacgggctaagtttcagagcttcgtggtcacctacgtggccatgctggccaagcagtctaccagggacctggtggccttagtctttcaggtggaacggtg

SEQ ID NO: 220804 - DNA, 75 bp, Homo sapiens
gaattacgcatttccacttctaatggttttgggtctagtaatactggttctgtgtttggtcaagcagccagtact

SEQ ID NO: 220805 - DNA, 96 bp, Homo sapiens
agtagctgcagcttcgagtcacagcagaaagtgagtgagaaggttggaggagctgaaggaaccaagctagatgatgacttcaaagagatggaaagg

SEQ ID NO: 220806 - DNA, 75 bp, Homo sapiens
tgccgccatacgcgctctccctgtttaggcccgccagctcatcctgcagtatggcttgaccctcagtgatctgga

SEQ ID NO: 220807 - DNA, 82 bp, Homo sapiens
tcagctcctggggctcctgctgctctggttcccaggaagatgataagatcagatgggcgtctagatgggactatattctgga

SEQ ID NO: 220808 - DNA, 99 bp, Homo sapiens
tcgccaagttgcagcagaacacggctttggagtccgaaaggcctcaggagtgcaagtagctgatgaagtatgtcgcattttttatgacatgaaagttcg

SEQ ID NO: 220809 - DNA, 87 bp, Homo sapiens
cgtggggatcttggcagcgctgcaggaactgccattggatgtccagaatcccctgtagttgataatgttgggaataagctctgcaac

SEQ ID NO: 220810 - DNA, 49 bp, Homo sapiens
ccgacatcatgctccagttcctggataatttcactggatacagaatcaa

SEQ ID NO: 220811 - DNA, 100 bp, Homo sapiens
gggcctgcaccatgagcgtcccggccttcatcgacatcagtgaagaagatcagatgacagaaggcaggcactgccaggtgcacctcctggatgataggag

SEQ ID NO: 220812 - DNA, 75 bp, Homo sapiens
gaggccaaggcgggcggatcacgaggcgagacaacaacgaccgtggcaccgaaggttcccagtggtgtgagtgac

SEQ ID NO: 220813 - DNA, 83 bp, Homo sapiens
gccaggagtcgcctgggtccctgctggagtatgctggacaatgcagatcttcgtgaagactctgactggtaagaccatcaccc

SEQ ID NO: 220814 - DNA, 100 bp, Homo sapiens
ggtggagctggagggggagacagatcctctgctcattgccatgaaggaactcaagtatttgacaacaccccagcagccttggacggcacagtggcagctg

SEQ ID NO: 220815 - DNA, 75 bp, Homo sapiens
cggagccctggaagcagcagctcaccgaggacggggactcagcattgaatgaaatgtggaaatgtcaaaatctgc

SEQ ID NO: 220816 - DNA, 75 bp, Homo sapiens
aaagttctctcgatcagggcatacatctttcttcgacaaagggaggtgaagtgaaatctgcaagagtcctgctcg

SEQ ID NO: 220817 - DNA, 103 bp, Homo sapiens
gagatggagaaattccaagttcagattctccagttggtgcttcccgtgctgctgttgatgctggctttgttcccaatgacatgcaagttggacagacgggaaa

SEQ ID NO: 220818 - DNA, 98 bp, Homo sapiens
gccaccgtggtctatgacgacagtacagaggagaaggcagagcccccccaggctatgaatgccctgatgcggttgaaccagctgaagccagggctgca

SEQ ID NO: 220819 - DNA, 100 bp, Homo sapiens
atgacagtctccaaattcgcctccatctgtaccatgacatgcacatgatggtgtccaagccagaacagtgggtaaagccaatggctgtagcaggagccaa

SEQ ID NO: 220820 - DNA, 82 bp, Homo sapiens
taacgacggcctcagcaggcggggaagatgaaagggtgcacatgaacttgaacagatgcagctgattttagaatctattcct

SEQ ID NO: 220821 - DNA, 97 bp, Homo sapiens
gatccaatcccttgtccttaaaagttgttgacctcctgtactggagagacattaagaagactggagtggtgtttggtgccagcctattcctgctgct

SEQ ID NO: 220822 - DNA, 51 bp, Homo sapiens
gaagagggaagacacgcggaaacaggcatgaagacccccaacgcacaggaa

SEQ ID NO: 220823 - DNA, 96 bp, Homo sapiens
cccgagaccccgtcggacccatggtttccagtgcagcgcggagtgggcgatgccagcgtgccaggggttgccctgctgtcagacgtctatcctgag

SEQ ID NO: 220824 - DNA, 100 bp, Homo sapiens
accctgcagtggcgcctaaagtctgagagagggaagtcgcctctgtgctcgtgagtgcatggggtataagcatttggaaacagagccctgggctccagct

SEQ ID NO: 220825 - DNA, 75 bp, Homo sapiens
gggctccaccccgtcgcctcgacagatcacagattctgctggccatattctctactccaaagaggatgcaaccaa

SEQ ID NO: 220826 - DNA, 75 bp, Homo sapiens
tgggcacaaaaactaccattcgcctgatgaactctcagatgtctttggtggacttgggaaagaggttgctagaag

SEQ ID NO: 220827 - DNA, 101 bp, Homo sapiens
ctcacagtttgctctgctcttccaacaccagtggaagatgatcacatcccaggaatgagttggaaagggaattcttgaagctaattaattacaatatcagc

SEQ ID NO: 220828 - DNA, 75 bp, Homo sapiens
cagaggatgctttgcagaaacttcataaatatatgcagaattggcagagggggtcgatttgggaggaaaggtgtg

SEQ ID NO: 220829 - DNA, 75 bp, Homo sapiens
gttttactgaaaaaggcacctcctcagatgcaagtgctgctggaccaggcgggctgctgtatcgtgggtcagagt

SEQ ID NO: 220830 - DNA, 74 bp, Homo sapiens
ttgatcaataccacctttaccttccactgatacaagcctccactgagcttcagcaagtcatcctgatctccgtg

SEQ ID NO: 220831 - DNA, 75 bp, Homo sapiens
ggtggtcaagcgggccacgcacctcgtcaccaaggccaagacctgcctagagctggaacgttacctccagagcga

SEQ ID NO: 220832 - DNA, 75 bp, Homo sapiens
gttccctgcatcctaagactcgaaggcagcacaggacctggaaaaattacatgaaataatgcaaaaggtgtccca

SEQ ID NO: 220833 - DNA, 50 bp, Homo sapiens
cttcccagtagctgggaccacaggaaggacacgtctgccacatcccagtc

SEQ ID NO: 220834 - DNA, 83 bp, Homo sapiens
ttcatccacaagatccggcccatagccgagcagactggcatctgtaaggtgcggccgccgccgcttccccgggcgctgcctgg

SEQ ID NO: 220835 - DNA, 100 bp, Homo sapiens
gccaaatggagatgttttgatccgagaccttaattttgaagcagaaataaaacgtcttcaagaagccaataaggcagctcggaaggaaagacagctgatt

SEQ ID NO: 220836 - DNA, 75 bp, Homo sapiens
ctgctgcgtcctgctgaccttcggttggggtgactcagtgggaacgccatctgagcggggcatgacctatgacgc

SEQ ID NO: 220837 - DNA, 90 bp, Homo sapiens
aagaaactgaggcctggaatttgattaactcattcaaggttacccagttggcaaaaactgattattccaagtggaagttgccctgttatt

SEQ ID NO: 220838 - DNA, 95 bp, Homo sapiens
accgtccagcccagcgattctcagtcagtttcaccagtgatcattaaagaatgggcagcttacaaaggaaagtctcctcaaaccccggaactggt

SEQ ID NO: 220839 - DNA, 50 bp, Homo sapiens
cagtacgacctgcagggccagccctacggatggtggatgtggggggccag

SEQ ID NO: 220840 - DNA, 100 bp, Homo sapiens
ctggagaccatggagaccctcacggagctgggcgacgagctgaccctgggagacatcgacggtacctgtttcccaggcaactactgatcaggcatttctg

SEQ ID NO: 220841 - DNA, 100 bp, Homo sapiens
aagaaggacaaagagatcatagccgagtatgaaagtcaagtcaaagcagtccagagcgtgagtccattcacatcctgagtgttgatgagaagaacaagtt

SEQ ID NO: 220842 - DNA, 75 bp, Homo sapiens
gccgaagatggtggcggctactcctcctgaactgccattggatgtccagaatcccctgtagttgataatgttggg

SEQ ID NO: 220843 - DNA, 105 bp, Homo sapiens
cgttttgaagagttctgcgttttgccagtcacctctcaactgtgtgccaaaggctaccagcgccagctgacctacaagcgccaggatggctcctacagcgcgttt

SEQ ID NO: 220844 - DNA, 51 bp, Homo sapiens
tgctgcgcgacccccgcgcatggtttacaggtacatacattacacccctat

SEQ ID NO: 220845 - DNA, 74 bp, Homo sapiens
gggactgtgttcagacctacatccgtgagtggctaatcgtgaaccggaagggggacacagcgattgccacgcgc

SEQ ID NO: 220846 - DNA, 82 bp, Homo sapiens
aaaaggcaaaaatcccatctaccgcaactctcagttcgagagtaaaggtgaaagaacttgtcctggacaacagtcggtcgaa

SEQ ID NO: 220847 - DNA, 98 bp, Homo sapiens
ccagcgccaccatcgcctgtcacctggacccgcgcgtgttcgtggacggcctgtgccggttttaacttctagtcatggcgaatgatcgcaggagagca

SEQ ID NO: 220848 - DNA, 50 bp, Homo sapiens
tgctgtggaaggagtctgtccacagattttcctgagagaactgatttcaa

SEQ ID NO: 220849 - DNA, 126 bp, Homo sapiens
gggcaagtgagagccggacgggcactgggcgactctgtgcctcgctgaggccccatggctgggggttatggagtgatgggtgacgatggttctattgattatactgttcacgaagcctggaatgaa

SEQ ID NO: 220850 - DNA, 100 bp, Homo sapiens
ccgcctccgcccagggccacctaaggagcggaccccgcatcttcgccgtctggaaagatggtcatcatgggccagtgctactacaacgagaccatcggct

SEQ ID NO: 220851 - DNA, 74 bp, Homo sapiens
ctgatttctgcagctctgtgtgaagtcgacattactctgaagggacgcacagttatcgtgaagggccccagagg

SEQ ID NO: 220852 - DNA, 134 bp, Homo sapiens
gaaattgtggacctcacttgtgaatctttagagcctgtggtggttgatctgactcacaatgactctgttgtggtcacagtgctgtcgatatcaccaaggtggctagaagacatcgcatgtctccttttcctctg

SEQ ID NO: 220853 - DNA, 74 bp, Homo sapiens
gtgaagctgctggatgaattgtcccccaacacagcgatgtcaccatttctacctgccacgcatcggcgaaggtt

SEQ ID NO: 220854 - DNA, 99 bp, Homo sapiens
caacgccagagcccaggtgcccagaggactttcttccagcttctgctgtccttctttgtggagagcaaggccctagactggagctggttacagacggaa

SEQ ID NO: 220855 - DNA, 82 bp, Homo sapiens
acctacgtcccgctgccgtcgccgccgccaccatgcccaagagaaagatatttggagttcttacaacatggcagacattgac

SEQ ID NO: 220856 - DNA, 100 bp, Homo sapiens
gctcgtcatggcctacccgggatacggaggagggcagtgcctgatttgagatggggtcccaggtctcggtggaatcgggagctctgcacgtggtgattgt

SEQ ID NO: 220857 - DNA, 99 bp, Homo sapiens
gtgcgggccccgctccgcttcgaatgggaagaagttctaaaggattttgaagacttggctggaaaactcccatggtcaaaccccttaaaagtgtggaaa

SEQ ID NO: 220858 - DNA, 100 bp, Homo sapiens
ctttgcagttgtgtgcgagtgtgtacagttaattggccttggtcctcacagctccaaaaagaaacaggatctcgataagctctatgagctgaagtccaaa

SEQ ID NO: 220859 - DNA, 99 bp, Homo sapiens
tgcagatcgggagcgcaaggtcgccctcaaggccatgatcaaaacatgtggcaaaatctggcaaaggcagagaccaaacttcatacctcaaactctggg

SEQ ID NO: 220860 - DNA, 101 bp, Homo sapiens
gatcccgggcggcgcgctgcccgaggggagcaaggacagggaactgggaacagccaggtgccccaaagcaaatacgcggagctgctggccatcattgaaga

SEQ ID NO: 220861 - DNA, 99 bp, Homo sapiens
ggaggttgaggccgacatgaagaccctgggcgtcagctttgtgcaggtgaatctcatgggcaccttcaatgtgatccgcctggtggctggtgagatggg

SEQ ID NO: 220862 - DNA, 100 bp, Homo sapiens
gatgatgaccgtcaccaactggttcaagcaaatgttctgaaaaagactctgcatgggaatggcctgccttacgatgacagaaatggagggaacatccacc

SEQ ID NO: 220863 - DNA, 100 bp, Homo sapiens
tctctcagagtgttcatgtgaagcctgagaacctgcgtttggcggagggaacagattctccgtgtgaaggctgaagaagataaaattccactgctcgtcg

SEQ ID NO: 220864 - DNA, 75 bp, Homo sapiens
ccgggatgtattcgtccccgctctgcctcacccagatgaaggatttgggggcagagcacttggcaggtcatgaag

SEQ ID NO: 220865 - DNA, 87 bp, Homo sapiens
cgaactcactccgctgcgaaactttctgcaccagtggagacttcgtgtccccagggccttccccgtatcacagtcacgtgcagtgcg

SEQ ID NO: 220866 - DNA, 82 bp, Homo sapiens
agtcgcggtgggtcctcgcttgcagttcagcgaccacgcggaatagaagatgaactcaactgaattcaccgaagatgtagaa

SEQ ID NO: 220867 - DNA, 75 bp, Homo sapiens
cagtgctgtgtgacagcatcgcaacgggatctgcagaacctgaactcggagagtagttatcttgatggaattaga

SEQ ID NO: 220868 - DNA, 75 bp, Homo sapiens
gcatgggcggcaactctttgatgtactactataatgggaaagcgagcggttctggtgaggttggaaggatgcagc

SEQ ID NO: 220869 - DNA, 90 bp, Homo sapiens
caagattgtcgcaaattttgcactactggcatcgatggagccatgacaatttgggatttcaagaccctcatcctggacaactcgcctgct

SEQ ID NO: 220870 - DNA, 100 bp, Homo sapiens
gctcttcctggtgtcccgcccagtagagtgaagacatttccacctggacacctgaccatgtgcctgccctgagcagcgaggcccaccaggcatctctgtt

SEQ ID NO: 220871 - DNA, 90 bp, Homo sapiens
attcctatgataacagctatagcaccccagcccaaaggctaccaagcagtttctcgaagagattaacaagtggacagttcagtacaatgt

SEQ ID NO: 220872 - DNA, 83 bp, Homo sapiens
gagaataaagattgtgagatgcccactttagagaaaagaaaccttgtttattccctgtgaaaatgagaagatttctaaacagc

SEQ ID NO: 220873 - DNA, 101 bp, Homo sapiens
aaaagtgattaagcagagaatggagaagaaggttgattccaggacatgtcatccagtgacagtgactcggactgggatggaggcagccgtctttcaccatt

SEQ ID NO: 220874 - DNA, 90 bp, Homo sapiens
ttgggctggtacccatcctcaagggaggccgtttctaccagttggccagtcagtgctgaaagatgtaagcaaagtgaagaagctgaagca

SEQ ID NO: 220875 - DNA, 80 bp, Homo sapiens
ctgtccttggcccgcggaggggtctgcgcagtgcaggcagataccgtttgacaccaccatgcctccggagccagcgtggt

SEQ ID NO: 220876 - DNA, 75 bp, Homo sapiens
ggaaggaacagacccctgtagcggatctcccttgagtttagaaatctggctgagaaataccaaacagtgattgcc

SEQ ID NO: 220877 - DNA, 101 bp, Homo sapiens
actgcacggtgaacctggaccaggaggaggttttcaggaccaaaattgtggaaaagtcactctgagctacagagacttctgaagtggagagtctgcgacct

SEQ ID NO: 220878 - DNA, 108 bp, Homo sapiens
ggaatatgttagcgttgtatcttgggagaaagacacagtctccatcatcccagacaccattcgcttttcacccaagatgatttgatgtcttataaaactctgatgaac

SEQ ID NO: 220879 - DNA, 82 bp, Homo sapiens
ctgctggaggttccttcactgtgcgtgctgaccatgtgacagacatcacacctccagtgcaatccctgttcctaagagacaa

SEQ ID NO: 220880 - DNA, 74 bp, Homo sapiens
ggaccttaaaatacccgcaacagccccttcgtcccaagtggccagcatcgaaatgttcagccttttagtgatga

SEQ ID NO: 220881 - DNA, 96 bp, Homo sapiens
cggcgcgcagcgtgtcaggcggagagacccgccgccaggctgaagccgacgtagcttctctgaacagacgcatccagctggttgaggaagagttgg

SEQ ID NO: 220882 - DNA, 83 bp, Homo sapiens
gattaattccaaccaaatcccggggctcatctggattaataaaggggatatgagactttctactcggaatatcctgagtgttg

SEQ ID NO: 220883 - DNA, 100 bp, Homo sapiens
cagcgtggcctccgccaccgtgcacatccgaatggtggcagaaatctgaagctatcatggaacaattgaagtcttttcaaataattgctcatctaaagcg

SEQ ID NO: 220884 - DNA, 75 bp, Homo sapiens
caatatcaaaaatgactttactgaagaggaggaagcccagagcaaggcagaacgtggccataaggtccggctggc

SEQ ID NO: 220885 - DNA, 111 bp, Homo sapiens
aagactttttcagctactatcgtcattgaaactacacagaatgttcagcttaacaaagaaatgacacttgccagcaaccggagcctggcagaaggaaaccttttgtaccag

SEQ ID NO: 220886 - DNA, 100 bp, Homo sapiens
tgtggctggagacatgagcaagaaaagcctctgggagcagaagggaggctccaagacctcatcaacaattaaggcaccacctgtaatctactatgtccct

SEQ ID NO: 220887 - DNA, 100 bp, Homo sapiens
ggccgtgtacccgaaaaactgattgactgggctggcgttaactgtgcggaggcagggtcaaccggatgcacatcagtcccaacaatcgaaacgccatcca

SEQ ID NO: 220888 - DNA, 83 bp, Homo sapiens
caagaatcagatgaagaatctaggcctcaaaatgttttactcagtggtggagtagactcaacagtttgtacagctttgctaaa

SEQ ID NO: 220889 - DNA, 120 bp, Homo sapiens
attacaccctgtctatcaatgggaaggcacggaagcatggtgaaaactatagtgtggactacctgacagatgttttggcctccaagcagcatcgtcttaaacgctaccacagccagacct

SEQ ID NO: 220890 - DNA, 83 bp, Homo sapiens
gaaagaagctgcagcggaggaaggcgagccccaggaccaaattaccatcacagggtacgaaaagaacacagaagctgccaggg

SEQ ID NO: 220891 - DNA, 100 bp, Homo sapiens
tccaacgccaaccaaagatttgcatcagccatctcttagtccagcaagtcctcatagccagggtaccttctcaaaccagatttcatgaggcggcctgatc

SEQ ID NO: 220892 - DNA, 96 bp, Homo sapiens
ccaccaggacttgatgaatataatccattctcggattctagaacatgaaggaagcccatcccccagaattgagctgctgcataatattgacccgaa

SEQ ID NO: 220893 - DNA, 90 bp, Homo sapiens
ctggagggcgacctatggagacatggaaatagccctcaagatagtccaagaaatttctcccccagtgcctcagcccatttttcatttgca

SEQ ID NO: 220894 - DNA, 51 bp, Homo sapiens
gatactttgaagtagaagaagctgatgaacctgagccagcagaagagtaca

SEQ ID NO: 220895 - DNA, 96 bp, Homo sapiens
cacacctgatttaacaacatctcattatctcagatagggtctctctctctgccacccaggccagagtgcagttgacgcagggcaggggagccccga

SEQ ID NO: 220896 - DNA, 82 bp, Homo sapiens
gggccaggagagcgctcggcgggtcagcccaaggccaaccccactgtcactctgttcccgccctcctctgaggagctccaag

SEQ ID NO: 220897 - DNA, 88 bp, Homo sapiens
agagagcgagctgagtggttgtgtggtcgcgtctcggaaaccggtagcgcttgcagcatggtatcactggacaggccatggctccacg

SEQ ID NO: 220898 - DNA, 100 bp, Homo sapiens
cagcctcccaagtagctggaattacaggccatcgaggagggcacgctggaggagatcgaagaggaggtccggcagaagaaatcatcacggaagcgcaagc

SEQ ID NO: 220899 - DNA, 74 bp, Homo sapiens
cctacacaacaaggcggagtggagaaaaagctgttcatttgcaagaggagctcatagctattaattcaaaaaag

SEQ ID NO: 220900 - DNA, 95 bp, Homo sapiens
caacaagctagtgagcacaatgaaggcaagtgggactttgccttctcagcccaaagtcagcaaactatcagtgtggaccagactgtgactcaagt

SEQ ID NO: 220901 - DNA, 95 bp, Homo sapiens
ggagcggcggcggccttggactttgctgtctttcctcgcggagacaggattcaagccaaaactcgagaatttagggaacgacaagctcgagagcg

SEQ ID NO: 220902 - DNA, 98 bp, Homo sapiens
ttagcttcgctgcgtctgcccaagaggtatttgaaatatctcaccaaaaaatatttgaagaagaataatctacgtgactggttgcgcgtagttgctaa

SEQ ID NO: 220903 - DNA, 83 bp, Homo sapiens
cccggccccgctgagcgatcccaccgaagcagcgtgtcctccgtgggagcccgagacttcccaagtaagaagcggaagaggag

SEQ ID NO: 220904 - DNA, 100 bp, Homo sapiens
aatgcagacatgaatacatttcccaccttcaaatttgaaggaaaggagtgttcccaggatgaaagcacagctgctgccatcttcactgttcagatggatg

SEQ ID NO: 220905 - DNA, 98 bp, Homo sapiens
cctcgaactcctagctcatttcgacagccttgcttcctgttggataaaaaaattggagtaaatcaaccaaaacgaattgaaaatgctaaaattcttat

SEQ ID NO: 220906 - DNA, 74 bp, Homo sapiens
atttgttaaggattccaagtaactcttatttgcttcatcgcagtaggaatggcagccccatctatgaaggaaag

SEQ ID NO: 220907 - DNA, 98 bp, Homo sapiens
cagctcgtcctggagcacctgcagctggcgcctctgcagtgggtaacaacatgctgtaccccaaggaagacaaggagaaccgcattctgctctacgcg

SEQ ID NO: 220908 - DNA, 100 bp, Homo sapiens
ccgtgaccgagagcgtgaccgagagcgcgaatatcgtcatcgttagaaggatagaaaacatgaatcgggaaaggctgagacaaaagagaattcattctgc

SEQ ID NO: 220909 - DNA, 80 bp, Homo sapiens
ttgctgggctgcttggagctggtgggactgtgagcgtcgtctatatctttgactggcacagcctccaggttggcgggctc

SEQ ID NO: 220910 - DNA, 75 bp, Homo sapiens
ctgcttcctgcttccacttccgtgaccgttagggacaagacagtgaatgagttcacggtgatcaggaagaagttc

SEQ ID NO: 220911 - DNA, 50 bp, Homo sapiens
ggcaaagcccaacaccttcccccactggtttgttggcatccaaagctgtt

SEQ ID NO: 220912 - DNA, 83 bp, Homo sapiens
gagcggcggaaaggataagcctcgacttagaagctaccgagttaccctaagaaagctgatgcttttttcaaagccgctataag

SEQ ID NO: 220913 - DNA, 100 bp, Homo sapiens
tccggagtgcgccggcggtggcgcctgcggacctaactagctccaggttaggccgagctttgcgggaaagcagcgaccagagtgaactccgagcaggaac

SEQ ID NO: 220914 - DNA, 73 bp, Homo sapiens
cgttgcttgcttgcctgtgcgcgcgtgcgcggacatggcctcaaacgaggctgggaggcggcagaatgcagcc

SEQ ID NO: 220915 - DNA, 75 bp, Homo sapiens
cagagcctcgcctttgccgatccgccgcccgtccacacccgccgccaggaggaggcgtctccctattccttactt

SEQ ID NO: 220916 - DNA, 90 bp, Homo sapiens
aaacgacaggagcatcccaggaaggggttcccagaagtcagaatccaagatgggagaagtgaattcaaacggtgctggaagggtcaaggg

SEQ ID NO: 220917 - DNA, 100 bp, Homo sapiens
aaaacttcttgagagcttgatcagcccagattgtgtacttaaggtagttgggcgggtgccacgtctatgtgggcttcgtgctgtgggctgctgaatgaag

SEQ ID NO: 220918 - DNA, 100 bp, Homo sapiens
caaatctgaagatgaaacagagtatggctgcagaggatccatctgtcttagcaaggctgtcatcacagtgaatgaaaactttgccattgatttgatagca

SEQ ID NO: 220919 - DNA, 73 bp, Homo sapiens
aggtccagggcagaggaccaacatgggcattttgtttatgagcaaggttggtgactttggagatgcaatcaat

SEQ ID NO: 220920 - DNA, 75 bp, Homo sapiens
gtgaaaactgtggaatttgtagcagtatcctggtgtgaaccagctatcctccagtataggaggattgagtcttca

SEQ ID NO: 220921 - DNA, 90 bp, Homo sapiens
agtgtgaaattgaggaatcccaattgaagtttttgaggtggccacgtcttttattagaacaatagagcttggagggaaaggatatgcacc

SEQ ID NO: 220922 - DNA, 100 bp, Homo sapiens
aggtctttgtgtcccgacactctgccaccttctccagcattgtgaaaggaaggcgaccggcagcctcgggcaggggagacaggactgtatgtcagagaag

SEQ ID NO: 220923 - DNA, 100 bp, Homo sapiens
gccgcgctcagcgacaaacaagctcttgtcaggatggtgaagctgttcatcggaaacctgccccgggaggctacagagcaggagattcgctcactcttcg

SEQ ID NO: 220924 - DNA, 109 bp, Homo sapiens
gggggctgcggcctagaggtccgggcttggagttcgcctcagacgcggtggagccgccggagtctgagaagaatcgagagctccagatcatgagaaagctagatcactg

SEQ ID NO: 220925 - DNA, 100 bp, Homo sapiens
tccatcttcatgagtactccaagaagatggttcagttgactattgcaaagagggtggtggtggaaagaaaggtggcaaaaagaagggttcttctttccag

SEQ ID NO: 220926 - DNA, 48 bp, Homo sapiens
gattcgttacagccagagattggtcctcagaatggttggaatgaccct

SEQ ID NO: 220927 - DNA, 83 bp, Homo sapiens
ggacatggacatgagccccctgaggccccagaactatcttttcgcgctggccgcgcgccgaacccgagtccggcggcaccgac

SEQ ID NO: 220928 - DNA, 100 bp, Homo sapiens
acggaagccccatcctccgggacatggccttctccattgatcagcgctacctgtacgtcatgtctgagagacagcaggttccagagagattcctggaagt

SEQ ID NO: 220929 - DNA, 75 bp, Homo sapiens
gtgaagtaggaccgaattcctgtgccgaagaggcctgcagtgggagagcaggagagcccgagcccagcacattgt

SEQ ID NO: 220930 - DNA, 90 bp, Homo sapiens
cgcgcgaggaaatggccgaggagccggagccgcaggtgctggagaatctggtaaaagcaccattgtgaagcagatgaggatcctgcatgt

SEQ ID NO: 220931 - DNA, 75 bp, Homo sapiens
gaagaatccccccgaaaggaccccccagtttccaacatggctagatccatcagaaactgaagccgtggagaacgc

SEQ ID NO: 220932 - DNA, 82 bp, Homo sapiens
cggctggctgaggaaatcgcctcccgagaagaagttgaggcgctataacaccttccaccatgaccacctcagcaagttccca

SEQ ID NO: 220933 - DNA, 100 bp, Homo sapiens
gtcggaggaggacgaggacttggaaggctgagtcatcactagagagtgggaagggcagcagcagcagagaatccaaaccctaaagctgatatcacaaagt

SEQ ID NO: 220934 - DNA, 75 bp, Homo sapiens
ctccggggacccttccgtatctgcctaggcattttgctgtctcctcctaatacgtgacagaaatgttggtaaatg

SEQ ID NO: 220935 - DNA, 100 bp, Homo sapiens
gagcatccacactgcaatgatataggaatgagatttggcagctgatcggaagctctttcgtcttgtctccaatgactccttcatctctattcagccttcc

SEQ ID NO: 220936 - DNA, 50 bp, Homo sapiens
gaagctattgctgggattttgaggaggaaagaaaccttgactggttcccc

SEQ ID NO: 220937 - DNA, 100 bp, Homo sapiens
gattattgagatggcctgtctgataactgactctgatctcaacattttggctgaaattgatatcagtaaatgccattatttagtggatttggacaccatg

SEQ ID NO: 220938 - DNA, 100 bp, Homo sapiens
aagccagcccgaacacaccactgcagcatctgcaacagatctgtgctgttctggctgctgtcactgaggtgattcgctcccagggagggaaggagacgga

SEQ ID NO: 220939 - DNA, 100 bp, Homo sapiens
cagggccaggtgggcaactgctggtttgtggcagcctgctcgtcacttgcctcccgggagtcgctgtggcaaaaggtgctgtatttctctgaatccctcg

SEQ ID NO: 220940 - DNA, 83 bp, Homo sapiens
ttggagagcccagagcgacccttcctggccatcctgggcgggaactgtggctgcaccatctgtcttcatcttcccgccatctg

SEQ ID NO: 220941 - DNA, 98 bp, Homo sapiens
cgtccgcgtgtacagccagctcaccatgcagaaggccttcctggagaagtcctggagggtatttgggagccaaaaagaaaaagaagaaacagaagaga

SEQ ID NO: 220942 - DNA, 100 bp, Homo sapiens
gccaagcacttcctgccgcgggcggcgcgccgcagctgcccaggccggaccgggccgggcgcccgcagtgaagatagtgatccggggagacaggaacacg

SEQ ID NO: 220943 - DNA, 98 bp, Homo sapiens
aggctactaccactattcctactcggtggtgaggggctgcgaccgcatcgtgcccgtggacatctacatcccagcagaaaggacccaggagcgataac

SEQ ID NO: 220944 - DNA, 82 bp, Homo sapiens
ggtgaagtaggaccgaattcctgtgccgaagaggcctgcagtgggagagcagggtgtggccagtgcaagggccagcagccgt

SEQ ID NO: 220945 - DNA, 100 bp, Homo sapiens
ccaaggaagccacgtgcagacatctacaaccttcgatctcctgacgagactatttaagaaacaactgaggcatcagaccaactttccccacaagtcctcg

SEQ ID NO: 220946 - DNA, 100 bp, Homo sapiens
gccaaacctgcgcccgtggaggggcgcgcagagggcaccgggcgccgggagcaggcggcgcagcaccaggaactcgaatcatttatgacagaaagtttct

SEQ ID NO: 220947 - DNA, 83 bp, Homo sapiens
ctccactccccagctgtgaaagggtgagaattatgaagatgatgacctagtaaattctgatgaggttatgaagaaaccatgtc

SEQ ID NO: 220948 - DNA, 82 bp, Homo sapiens
atgagcaagaaaagcctctgggagcagaagggaggctccaagacctcatcaacaattaagaaaccacccaccttcaccatgt

SEQ ID NO: 220949 - DNA, 96 bp, Homo sapiens
cttcaggattgagacccggaaggcttcaaaggctgtcgcaaggaggaagatgccgaaagttcagtataaatcgaactgtaaaccatccacatttgc

SEQ ID NO: 220950 - DNA, 98 bp, Homo sapiens
ccttgagctgaacgtcttgcaacagtggccgcacgcatagaagctggcagggcggagatgctggaccacgccgtcctgcttcaggtgatcaaagaaca

SEQ ID NO: 220951 - DNA, 100 bp, Homo sapiens
tttggcaaagtctctcatcaaatcctggaaaaaattattaggttcccagtctaagtgggtgactttccaagatagaggcagatcatttctccgtcaagta

SEQ ID NO: 220952 - DNA, 90 bp, Homo sapiens
tcatcatctacttcacaggaattgccatttgtgcataaggcaaatccaatacgcaagtaccagggtctggagataaagtcaagtgaccag

SEQ ID NO: 220953 - DNA, 83 bp, Homo sapiens
gggaggtgttcgagaacgaccccgagacgccttggaccgcagttgccggccaggaatcccagtgtcacggtggacacgcctcc

SEQ ID NO: 220954 - DNA, 100 bp, Homo sapiens
attagcttgtgagattaaggttctgcacatgttccagggtcacccccgagaggacaacaggcatctggaagtgctctctcgccactctgggtgctttact

SEQ ID NO: 220955 - DNA, 100 bp, Homo sapiens
actggaggagtcccgctcgaagctagagataattgacgaccttgccaacctagtggagaacacagatgaaaaacttcgcaatgaaaccaggcgggtaaac

SEQ ID NO: 220956 - DNA, 75 bp, Homo sapiens
caggccctctacagctggccctaccacttcctgcgcaagttcggctccgacaagcaagccacccgaggggactgc

SEQ ID NO: 220957 - DNA, 95 bp, Homo sapiens
cgcgcacagctgctcccttcgccttcgccctttccacctcgcggcagttcgatgtgcactcccagcaacacccctgccacgccgcccaacttccc

SEQ ID NO: 220958 - DNA, 100 bp, Homo sapiens
gtcccacaaggccaagtggggaagcagaaacaactcagatggagttatccccagctcccactataagtaagtcaaatctcatggatgccatcagctttgt

SEQ ID NO: 220959 - DNA, 75 bp, Homo sapiens
cctacatttggagcctggacacgcagtacagcaagttccagaaacgccgctggactgcgaggtctccctgtggtc

SEQ ID NO: 220960 - DNA, 75 bp, Homo sapiens
ccgacctcagatgctcccttctgctcctgctacaaggctttggccgaccaagtgtgtaccatgctgctattgtca

SEQ ID NO: 220961 - DNA, 100 bp, Homo sapiens
aaaattcggccagggttctcgctcttgacctagaggatcaagacataatgggagcatttttagacaagccaaagatggaaaagcataatgcccaggggca

SEQ ID NO: 220962 - DNA, 90 bp, Homo sapiens
atggactcagacaagttctggaggagatgaaagctttgtatgaacaaaaccagtctgatgtgatgggtcatcagttaaggaagttgaaac

SEQ ID NO: 220963 - DNA, 74 bp, Homo sapiens
actgattggattgatgaacaatgaagcagctcagggaagagacttccaccttaggatagtgttgcctgaagatt

SEQ ID NO: 220964 - DNA, 82 bp, Homo sapiens
caataagagcagaggatggaacacttcagtgcattcaagataatctcagtgataccttgaagaagctgaagataacagctgt

SEQ ID NO: 220965 - DNA, 76 bp, Homo sapiens
ggaacatagcacgtttctctctggcctggtactggctacccttctctcgcaaggacagtcattttgtttactcatt

SEQ ID NO: 220966 - DNA, 101 bp, Homo sapiens
cgggcgcctgggccgccggctgtttaacttcgcttccgctggcccatagtgatctttgcagtgacccagatgtcaccagcacctgcctagctgtcaaggag

SEQ ID NO: 220967 - DNA, 51 bp, Homo sapiens
tcccatgaacttcccccagcaagggaaaagccgtcagtgcccagataccag

SEQ ID NO: 220968 - DNA, 76 bp, Homo sapiens
ccagaagttgttctaacgctgcctttgctttaaaacagtattacttgcgcaaaaaatcccagaagtgggatgaaat

SEQ ID NO: 220969 - DNA, 100 bp, Homo sapiens
gtagcctggacaagagagtcatcctcattttccactgtgaattctcatctgagcgtgggccccgcatggtctcacaccctccagagcatgtacggctgcg

SEQ ID NO: 220970 - DNA, 75 bp, Homo sapiens
actgaagacagctcttggtccaaagccccgcacacagttgacatcatggacatatgtgagtccatcctggagagg

SEQ ID NO: 220971 - DNA, 75 bp, Homo sapiens
cctgtttggtggtctcttcccacggacgcgcgagacaatgaggaggatacattaattgtttggtcagaagcagag

SEQ ID NO: 220972 - DNA, 97 bp, Homo sapiens
gtcacttgaaccttgggaatattgagctgtggtcgccaggacccccccagagccaagaccttctccagaaggtgacccttcccccccaccaccacca

SEQ ID NO: 220973 - DNA, 95 bp, Homo sapiens
tgaaacagattgagccagaaggaagacaatgctggtgcacagacaagatttacatttgagctgccaaatcacagattgcgttttacttcaaaagt

SEQ ID NO: 220974 - DNA, 100 bp, Homo sapiens
ggaggtgggcagtgctgagagtcagccgactccacgggaacccactccctctacacgatgtaccaggactacgagatcatgttccatgtctccaccctgc

SEQ ID NO: 220975 - DNA, 82 bp, Homo sapiens
ctggaggtgttccacccgacgcatgagtggcaggcccttcagccaggctccctggggaagggaatgcagggttgctggggct

SEQ ID NO: 220976 - DNA, 75 bp, Homo sapiens
ctggattatctactactgctcctcctggcatccgcagtggctgcgatggaagttccatacgttttgaagagctgt

SEQ ID NO: 220977 - DNA, 98 bp, Homo sapiens
tgaggatatgggatgtgaaaacagggaagtgcctcaagactttgccagctcactcggatccagtctcggccctatcagttgagggatttgcagttgat

SEQ ID NO: 220978 - DNA, 117 bp, Homo sapiens
agaaaggattctaataactcggtgtcaaagccaagacataaactcaaccccttctcttccaaaagtttgaaggatgacctctaggaagaaagtgttgctgaaggttatcatcctggg

SEQ ID NO: 220979 - DNA, 82 bp, Homo sapiens
agggtgttcgactgctagagccgagcgaagcaaaccaaggtgtatgttggtaacctgggaactggcgctggcaaaggagagt

SEQ ID NO: 220980 - DNA, 100 bp, Homo sapiens
ggagctccctggggttttactctaaagggtggcctggagcacggagaaccattaatcatctctaagtgactccaatgggatcaggtagcaatcgacctca

SEQ ID NO: 220981 - DNA, 75 bp, Homo sapiens
agagattcagccagcacactcctcgcgagcaagattgttctctggggccggactgagaaatgcctgaaggagacg

SEQ ID NO: 220982 - DNA, 71 bp, Homo sapiens
tgtgtgacgtgggtgcagttgcgggactgtgagggcttccttctcacttctgtggaagagttatcatcctg

SEQ ID NO: 220983 - DNA, 73 bp, Homo sapiens
gcccacccgacaaagggtttctctgtttagtgaaaaatgtgaggttttacaatattctgcaagggaagctcaa

SEQ ID NO: 220984 - DNA, 82 bp, Homo sapiens
cgcatcgcaaccaccgccctggccatctaccatgtgtgaaaattgctaccaaggccaatccatggattgggaactccctgaa

SEQ ID NO: 220985 - DNA, 99 bp, Homo sapiens
attcgacatgaacctattggatatgatagaagtcggaggaaatactggttcttgaaccgaagactcataatgcacggaatgttaacactggtgaattag

SEQ ID NO: 220986 - DNA, 82 bp, Homo sapiens
caaattcgttgtggtccttgatccagtatgcttatacaggtgtttgatcagtatgtaaagaccagggcagaggaagaacgca

SEQ ID NO: 220987 - DNA, 75 bp, Homo sapiens
ctcaaaccacttctcagacaagttccatcccacctttgagtcagcatggcctgtatgagaagaaaaagacctcaa

SEQ ID NO: 220988 - DNA, 98 bp, Homo sapiens
cttctggcagggagtgcccctgagccccctgcaggtggctgaaaatgtgtcctttgtggaggagtacagaactcagcctcctcccaagctccctgtgg

SEQ ID NO: 220989 - DNA, 76 bp, Homo sapiens
ggctgtgtgtgctgcaaaccgagacaagttcaccccgaagtctgccgttattttaccaagaaaatggtttgcacga

SEQ ID NO: 220990 - DNA, 74 bp, Homo sapiens
tctcgctcggctgcgggaaatcgggctgaagcgactgagtccgcgatggagatttggagcaagaggtggtggtg

SEQ ID NO: 220991 - DNA, 75 bp, Homo sapiens
gacccagctgagcgggcggtcattcgcatcgcagggagcatcgagtacagctgtccggcctccaacgagtgtgag

SEQ ID NO: 220992 - DNA, 82 bp, Homo sapiens
gagaaagagtaattcacgcagagccggctttgcagatggacttcagcagaaatctttatgatattggggaacaactggacag

SEQ ID NO: 220993 - DNA, 100 bp, Homo sapiens
cagcagcccccgctgcccgagcgggaagagactggagatgaggaggatgggagtcccatcggggttacccccagcagtgtgtgagaatgaagagtgtggg

SEQ ID NO: 220994 - DNA, 75 bp, Homo sapiens
cgagcagcaagtcagggagcttaaggggttggccggagacctacgacatgaatacctcggagcccaagacggagc

SEQ ID NO: 220995 - DNA, 100 bp, Homo sapiens
gcgaggaaatggccgaggagccggagccgcaggctacgcccaggaggaacagctgaaagaagaggaggaaataaaagaagaggaggaggaggaggacagc

SEQ ID NO: 220996 - DNA, 82 bp, Homo sapiens
gaggccgaggggcccaggcagagcccggagaaaagccacatgagctagagccggtgcaggccacgcagaacaagacagggaa

SEQ ID NO: 220997 - DNA, 75 bp, Homo sapiens
tgaaatccatcttcatcctaccgctccgcccaaggcagacggtaacaagtactccttgctggattgaacttcatc

SEQ ID NO: 220998 - DNA, 100 bp, Homo sapiens
atcacaagatgaacaatgagaagcaggcagaagattgcatcacacggccattgatgacaacatgtcccttgatgagattgagaagctcacatacattgac

SEQ ID NO: 220999 - DNA, 90 bp, Homo sapiens
gagccctgcgatactattatgacaagtgtgctggaattgatgttcgtctgtgtgatgttggtgaggccatccaagaagttatggagtcct

SEQ ID NO: 221000 - DNA, 75 bp, Homo sapiens
gtcgaccctgcacctggtcctgcgtctgagaggtggatgttcccaaggccttgattattgttgcagttcaatgtg

SEQ ID NO: 221001 - DNA, 90 bp, Homo sapiens
ggagccctcgttttcgagatcaggcctgaccgggataagctccagttttcggctttgtgagaaaccttaccatcaaacacgatggccagc

SEQ ID NO: 221002 - DNA, 82 bp, Homo sapiens
gaacgcagcccgccctccccaagtcgacgccgcaacccggggaaagcagacatcgcccactcgggctcacagtgccatccgg

SEQ ID NO: 221003 - DNA, 83 bp, Homo sapiens
gccagtggatcaccgcgctgcactacgcctttcaggacgagaaccacctgatgcctgaggaaacccagacccaagaccaaccg

SEQ ID NO: 221004 - DNA, 83 bp, Homo sapiens
agaacagaaaatcgtcttatagttgagaatttatcctcaagagtcagctggcagaccccccaaagacacacgtgacccaccac

SEQ ID NO: 221005 - DNA, 100 bp, Homo sapiens
tggacaccctgtgcccgggagcccctacacagtggaggcctcgctgccaccagatcccagcaagattcttaatgcttttcggactcctgatggcatgcct

SEQ ID NO: 221006 - DNA, 100 bp, Homo sapiens
ggttaaacttgatatggtggaggacacagaagttactccacaggatccgctgaacataggatgttgccacaaaatctacctcgtgtatttttctctttca

SEQ ID NO: 221007 - DNA, 88 bp, Homo sapiens
ccaagggtctcccttctcggtgaacgttcagctgctgcaggaccacggggaaattgccaagaaagaagctcattcacacagaagaccc

SEQ ID NO: 221008 - DNA, 49 bp, Homo sapiens
tgtgcagcagatgaagagagggccagagcctcaagctccggggaaagga

SEQ ID NO: 221009 - DNA, 100 bp, Homo sapiens
agatgatcgaccgcaacttacgggaggacggggaaaaagcggccaaagaagtgaagctgctgctactcgcattttctgcattagcaaatatcgacctggc

SEQ ID NO: 221010 - DNA, 100 bp, Homo sapiens
ctctgtgtcattgtcaacaaccacagctttacctccctgaaggacagacaaggaacccataaagatgctgattcctcagcagcgtcatgaaagcaaacca

SEQ ID NO: 221011 - DNA, 75 bp, Homo sapiens
gcgggacagcctcagccaggttctccagagatgaagacaactgttagttttgtggcttactgctgctccacccag

SEQ ID NO: 221012 - DNA, 98 bp, Homo sapiens
gtcaaatttacattaactatgagaattaagcagattctgtttctggcgtctgcatacgcaagtccccaactcgctgaggagagctgttcagctatggc

SEQ ID NO: 221013 - DNA, 83 bp, Homo sapiens
atctcctcagggaaggggcagcacagctggctacagcaaacatcattcaagatgtccagcaaagggagcagcacagatggcag

SEQ ID NO: 221014 - DNA, 75 bp, Homo sapiens
atgtggaaatagcgcggctgtgcaagtacctgccagagaacgacctgaagattactgtggcatgatcctccacca

SEQ ID NO: 221015 - DNA, 75 bp, Homo sapiens
atgaggaagtctgggggccgagaccacacagttgattccaggcgtgaattccaagaagaaccaaatgtattttga

SEQ ID NO: 221016 - DNA, 101 bp, Homo sapiens
tatggcagatttgaaaattcacccttgtagagtcattcctgcctttgagcggactcccttttaaggttggatggcaagcatgtggtgtttggcaaagtgaa

SEQ ID NO: 221017 - DNA, 99 bp, Homo sapiens
agcacaccctgccaaccccaccgccgcggctgcccccaccgggaccgaggtatctagagatcaggttctggacaatgctgcagttcaattctgtgcccg

SEQ ID NO: 221018 - DNA, 87 bp, Homo sapiens
tgggtgcctggagatgaagctggaaaggacttggatgttgtgggtgatggtatgcagtgtcctccttcacctttgctttttgatcct

SEQ ID NO: 221019 - DNA, 100 bp, Homo sapiens
tgtgcggagactgggcggccggccgacccttcctgtcgctgacggcgactgcgggaggccaggatcttacacatttgttccatggcttctcagctttaaa

SEQ ID NO: 221020 - DNA, 83 bp, Homo sapiens
cgaaattcgccccgattaaagactgtgttgcattatcagatcttgcttctgaaatatctacctgggatggagtgatagtaaca

SEQ ID NO: 221021 - DNA, 75 bp, Homo sapiens
tccctctttatgtttttcaagggacggatacaacgactagaggctgagtcatcactagagagtgggaagggcagc

SEQ ID NO: 221022 - DNA, 100 bp, Homo sapiens
tggagtcttccatcaatcatatctcacaggcctccagcttcacacccccagcttcagggggtcctcggctgccttcgatgactggtccactcctgcctgg

SEQ ID NO: 221023 - DNA, 88 bp, Homo sapiens
aacacatgatggatggagtcacgaccaggaccttctgtgggactccagattatatcgccccagaggtgttctggggcttagataagaa

SEQ ID NO: 221024 - DNA, 96 bp, Homo sapiens
ccagctccttggggtttccggctgcagggcggtaaggatttcaacatgcctctgacaatctctagtgtgcgtcctggctgagagttggagctctcc

SEQ ID NO: 221025 - DNA, 98 bp, Homo sapiens
ttctcctctccatctgctcacttcttacagattgcaaccctgtggtgctgattactatgattacggacatggactcagtgaggagacttatgattcct

SEQ ID NO: 221026 - DNA, 75 bp, Homo sapiens
ccagtagccgcgcctcaccctaggccagctctacgaactcgacggggaccccaagaggaaggaattcctggatga

SEQ ID NO: 221027 - DNA, 74 bp, Homo sapiens
gagaatggataaggcaaaacggaggctgggtgattgcccacagtgagtatcaaaagtccaaaagaatttccatc

SEQ ID NO: 221028 - DNA, 75 bp, Homo sapiens
aagtgcaacattcatttcaatcttttggatcctttgaaaaatcacatgaagggcagccattctacaaaagtggaa

SEQ ID NO: 221029 - DNA, 90 bp, Homo sapiens
ggaaggatgcttcagctcatcttaggctgtgctgtgaactgtgaacagaagcaagattttccgcagatttccagtggccccactgatccc

SEQ ID NO: 221030 - DNA, 82 bp, Homo sapiens
gagggctttactaagcctcaacaaaagctcaaagcattcagcaaaccagggttccaaggtgaatgtatagattttacagaag

SEQ ID NO: 221031 - DNA, 75 bp, Homo sapiens
tgcagctgcctcagttcttagcgcaggttacttttcacatagaaccatatagcaatcgagatgatcaaaacatgt

SEQ ID NO: 221032 - DNA, 75 bp, Homo sapiens
gtcacttctttacttggtgcaggaaggcagtctttgctacgtacagcaaaagcatttggaggctacttaagtgaa

SEQ ID NO: 221033 - DNA, 89 bp, Homo sapiens
gtccggagccagccaacgagcggctcccaccccgtggccaggtacctaggctccgtggactaccgctacaacaacttcttccaggacct

SEQ ID NO: 221034 - DNA, 83 bp, Homo sapiens
cgaatccggcgggtatcagagccatcagaaccgccaccatgaaccctcacacggacgcctggaagagccacggcttggtggag

SEQ ID NO: 221035 - DNA, 100 bp, Homo sapiens
ttgaaagctttgtcaggaagctctggatataagtttggtgttcttgctaagattgtgaattacatgaagattgtaaaccatggctgtgtggatacaagct

SEQ ID NO: 221036 - DNA, 97 bp, Homo sapiens
tggacttcccagcctccagaactgattgttaaaatgagtcttcggaagcaaacccctagtgacttcttaaagcaaatcatcggacgaccagttgtgg

SEQ ID NO: 221037 - DNA, 100 bp, Homo sapiens
tattccgtggtgtatctgtacagcagtttcctcatccctgcagctgtgtttgaacagggtactggctgtcacgctgacatgagcccccagcactcctccg

SEQ ID NO: 221038 - DNA, 51 bp, Homo sapiens
gagagccaccttccccttcagaaactgttggtgaggtaacatacgtggagc

SEQ ID NO: 221039 - DNA, 74 bp, Homo sapiens
gatcaggagcacatcaaactctggaggaggtatgaaaatgaaagtcttcagaatggaaggaagtcaactgaatt

SEQ ID NO: 221040 - DNA, 111 bp, Homo sapiens
gacctgtttgctgccatgctcctggcgtggacacacaagcaccccaataacctcaagacagatcgaggagctgctagagctgctgatgactgagatcctgcaccccagcag

SEQ ID NO: 221041 - DNA, 74 bp, Homo sapiens
tttagagaaggcaaggccggtgtgtttatctgcaagtatgacctgtcagcctctacattctctcctgacggaag

SEQ ID NO: 221042 - DNA, 101 bp, Homo sapiens
gcagccttcaccagcaagctggaaggcatgttcaaggacatggagctttcgaaggacatcatggttcatttcaagcagttaagtgggcagaccaacatcca

SEQ ID NO: 221043 - DNA, 96 bp, Homo sapiens
cagatccttgagtgataaaggagtagaggtcaaggtcagcatctcctcgacgatcaagatctatctctcttcgtagatcaagatcagcttcactca

SEQ ID NO: 221044 - DNA, 128 bp, Homo sapiens
tgagttgaaactcttggaggaagcaaccatttcagtctgcaggtcattaggttttggctacgggcctccacctccaccgccagatcagtttgcccctccgggggttcctcctccaccagccactcccg

SEQ ID NO: 221045 - DNA, 50 bp, Homo sapiens
gttctgtgccaacatcataaagttaattggccttggtcctcacagctcca

SEQ ID NO: 221046 - DNA, 118 bp, Homo sapiens
cagtcttcccgcgtccgccgattcctcctccttggtcgccgcgtccttggctggcgtagacaaattaaatgccttacgaagacataaggaaaagctggaagaaaaaatcatggatcaa

SEQ ID NO: 221047 - DNA, 51 bp, Homo sapiens
acctccaacaacatccgcgagatcgaggtgtctcaatgcttgtacctactg

SEQ ID NO: 221048 - DNA, 78 bp, Homo sapiens
tttgagccagtccagaccctgctgctgtcttcaaagaagggtgcttcaaggatgaccgcatcgtcttctggacttgga

SEQ ID NO: 221049 - DNA, 75 bp, Homo sapiens
caatgacaaaagacaatttctgctggagcgactgctggatgcagtgaaacagtgattgccattgatatcgatcct

SEQ ID NO: 221050 - DNA, 100 bp, Homo sapiens
tacaatgtcacgctcccaccagcagcgcctatgagtttgtcacctggctcgatggcattaagccaagactaaggggctgcagagcggggtggacattggc

SEQ ID NO: 221051 - DNA, 98 bp, Homo sapiens
gcggcagcacctgggcagccccgcacgccgtgcgcgtcccgagcccgcggggcagctaccgctcgccaagcaggtgtgtcctgcagagaagctgagct

SEQ ID NO: 221052 - DNA, 100 bp, Homo sapiens
agggttctaggaaagggtcacttagttctgtaacgccatctcccaccccagagaacgagcttgcactttccagtgacaagattgctgcattacgaatgcc

SEQ ID NO: 221053 - DNA, 100 bp, Homo sapiens
ttcatcacggggagacatcagctggatattgagatggaaggatgactatgagtatgagctattatagaaaccatggcccgacaacaagctcaaatacgtc

SEQ ID NO: 221054 - DNA, 100 bp, Homo sapiens
cagcaggagtggacatctctgaagcacctcagacctcttctccctgcccatctgctgacaatgctcagtgacctccaggagtctgtggccagctctcgcc

SEQ ID NO: 221055 - DNA, 100 bp, Homo sapiens
attatcccctccgacctcctaaaatgaaattcattacagaaatctggcacccaaatgcttctctccaagataaaatggcaaacccaaaagagaaaactgc

SEQ ID NO: 221056 - DNA, 100 bp, Homo sapiens
cgacgctggctccgctctatccggctttgctaggggagcctcctgacaaggtgatccgggcgggccccgcaggaattttatcccctcaccggcctcacac

SEQ ID NO: 221057 - DNA, 101 bp, Homo sapiens
ataaagcgccgctcagttgtctcctggaagacgggcgtcttccgaaaccaggtggatctgcagaatggcagcagcatgaaacctcgagccgatgtggcctt

SEQ ID NO: 221058 - DNA, 90 bp, Homo sapiens
gcggctcgggagattcagccgtgaagcaagtgcagatagatggccttttgctgatgattcctctgatcatgtcagtactttatgtctggg

SEQ ID NO: 221059 - DNA, 93 bp, Homo sapiens
cgtcagcctcccgccggccgtctccttaacaccgaacaccgacacaccagcccctcggataccacttggccactcccgctgaggccactccca

SEQ ID NO: 221060 - DNA, 82 bp, Homo sapiens
ggctgaagaagcagttctacaaggcgagccagtggtcccaggctgcacccatggcagaaggaggagggcagaatcatcacga

SEQ ID NO: 221061 - DNA, 75 bp, Homo sapiens
ctgcaagctctttgacacacagcagttcttgtcagaaaatgatgcatcctgttgccagcagtaatccagctttct

SEQ ID NO: 221062 - DNA, 83 bp, Homo sapiens
tttacctgagcatatgagaaattctttcattctccaggttctgtatgttcctgatcctgaatatgtctccagtgttgagagct

SEQ ID NO: 221063 - DNA, 50 bp, Homo sapiens
ctcacctgtgcgggatggaacaaaagcttctggaaaacatgacagaagtg

SEQ ID NO: 221064 - DNA, 74 bp, Homo sapiens
cggcgcgggatgctcctggcgcgatggtggagccagggcaagatttactgcttgctgctttgagtgagagtgga

SEQ ID NO: 221065 - DNA, 96 bp, Homo sapiens
gaagagaagcagtgaaggagtgcagaggcatcacctgaaaggcctgggcccctcactgctctctccgtactcagacgaggacactacccagcccgg

SEQ ID NO: 221066 - DNA, 100 bp, Homo sapiens
aaaaccctgcagaacggctgcctaatttacagcaaccatgagattctgaaggaagatttccattaggtaatttgtttaatcagtgcaagcgaaattaagg

SEQ ID NO: 221067 - DNA, 83 bp, Homo sapiens
cctctatctcgcttttcccctggccttctgtatcttcatggtgcggctcatcttcgagaggtgcgcgcggagccatggttatc

SEQ ID NO: 221068 - DNA, 100 bp, Homo sapiens
ctaaataccagtatggtggactgaattctggacgtcctgtcactccacctcgaacagctaatccgccgaagaaaagaccaagatcactccatggatgaaa

SEQ ID NO: 221069 - DNA, 75 bp, Homo sapiens
caagatcaagaccggcgtggtgaagcgatttgaaaaatgtgtgagtgctaaggaagctttggagactgatcttta

SEQ ID NO: 221070 - DNA, 50 bp, Homo sapiens
gcaagcggaggacctacgccggcctgggtactccaaagattcaggtttac

SEQ ID NO: 221071 - DNA, 101 bp, Homo sapiens
atggcctaattggaaagaatttcaggatcaccggtttctcctgcttcatgcttgcttccggcgtcatggctcaaagggccttcccgaatccttatgctgat

SEQ ID NO: 221072 - DNA, 100 bp, Homo sapiens
tcttcagtgactttgtgttcctggaggcgatgtacaaccagggattcatccgaaagcagtgcgggaggcagcaccgggctcttgatggacttggcagcca

SEQ ID NO: 221073 - DNA, 83 bp, Homo sapiens
ctgcagcagtcgctgcccccggaatcccagcaagtgcggtgggagcgggaacgccgagagaaggagagagaagagtgggaacg

SEQ ID NO: 221074 - DNA, 90 bp, Homo sapiens
ccggaacgatggcgaggagagcacggaccgcacgcctcttctaccgggcgccccacgggccgaagccggatctcgctctgttgcccaggc

SEQ ID NO: 221075 - DNA, 90 bp, Homo sapiens
atcaccgccctacacatcaaactccgggccacaggaggaaatagggcggctgcatcaccaagttggagaccttcatccaggagcacctga

SEQ ID NO: 221076 - DNA, 74 bp, Homo sapiens
agaagtgggcaaggtggcagagaaggaaggatggcctctggacatccgagtggaagtgacagctttgagaaccc

SEQ ID NO: 221077 - DNA, 100 bp, Homo sapiens
ctcggcctcttcctgttgcaccaggttcttcgaaaactgaagcagatgttgaacaacaagtgtatgtggtagaagaccaaagaagagatgagctaggacc

SEQ ID NO: 221078 - DNA, 82 bp, Homo sapiens
cccggaagctggtggaacagctacgcatagaagccgggattgagcgcatcaagggggcagtacccaaaggaaacgctacgaa

SEQ ID NO: 221079 - DNA, 80 bp, Homo sapiens
caggacaatggggacccgggacgacgagtacgactacctattcaaagggcgtgatggtgggcatgggtcagaaggattcc

SEQ ID NO: 221080 - DNA, 98 bp, Homo sapiens
gaggtgatagttacagtgaaggttgtctgggtcaaacagggtgctgtggaatctattgccatgaagaaccccaaagagaggacagctctatttgaaga

SEQ ID NO: 221081 - DNA, 95 bp, Homo sapiens
tgctggtggcccgggtcttccagaaggctgtagaccagagtatcgagaaggttctcctgaaaagaaagctgaacattcatctataaatcaagaaa

SEQ ID NO: 221082 - DNA, 100 bp, Homo sapiens
caacacccgcttcctggccatcgtcaccgagagcgcagggggcggctccttcctcgtcatccccctggagcagaacaatcggcgaggatctccagggggt

SEQ ID NO: 221083 - DNA, 100 bp, Homo sapiens
tggactgatctccatgtcctgttgtggggcttttacagcctttgggctttcttgatcatggatggtgaagatataccagatttttcaagtttaaaggagg

SEQ ID NO: 221084 - DNA, 73 bp, Homo sapiens
gaagggaacgcccctgacctggcctgcaacttcagcctttctcaaaatcgggagagccctggaactaagcctg

SEQ ID NO: 221085 - DNA, 88 bp, Homo sapiens
gactattggcttctggctgggattgtcctccctgaaaagcaaaggcctcatctccatggcacaggtgatgaaacaggaagactgaagc

SEQ ID NO: 221086 - DNA, 82 bp, Homo sapiens
cggctgtgcaagtacctgccagagaacgacctgaaggctcctacccagagattctacccagtgaaactcccacagcaacgca

SEQ ID NO: 221087 - DNA, 103 bp, Homo sapiens
gactacagagccggtgatatgatctgtcctgaatgtggcttggttgtaggccagaggcattgatgtgcagcaggtttctttagtcatcaactatgaccttccc

SEQ ID NO: 221088 - DNA, 90 bp, Homo sapiens
tgcatcccaaccttccttctgacaagtcccagaatgccatagcaaatgcttcaactctggctgaagtggagaggctgaaggggttgctgc

SEQ ID NO: 221089 - DNA, 49 bp, Homo sapiens
tcaaggaatgtagaaatcagggaatggaggatctttggttccataccaa

SEQ ID NO: 221090 - DNA, 100 bp, Homo sapiens
tgcaacccttccgggaagccatagctctgcatgttttcggctttgtgagaaaccttaccatcaaacacgatggccagcaacgttaccaacaagacagatc

SEQ ID NO: 221091 - DNA, 101 bp, Homo sapiens
ttgggaaagccaaatggagctcagaaagctgtatggacctctgtgtggtcaagtaagggagaattgactacgcttatacatcagcttcaagaaaaggacaa

SEQ ID NO: 221092 - DNA, 75 bp, Homo sapiens
ttaaagtaacactggcaactttgaaaatgtctgtacagccaacgtctgccatagcaactcaagtaatgcaacttt

SEQ ID NO: 221093 - DNA, 117 bp, Homo sapiens
acaccaaagagtgcctggagagggctctagctaaaaatgagcaagttaaaggcaagatcgacaccatgaaggtgcttaatttacccatttctgatgcgaggaggaaagcctatgcca

SEQ ID NO: 221094 - DNA, 100 bp, Homo sapiens
ttgtgcagataatgtagttggaaaaaggaggagtattctgatcttttcaggctgaaaaacagagtgggtactctcttctgggaagctggcaacaaatgga

SEQ ID NO: 221095 - DNA, 112 bp, Homo sapiens
ctcctgggcctcggcgggtcactcttgccggccggcttcgctgcgggtttgcactgcccggcttagaccatgctcagcctccaagcagccttgtcatcgacaaagaatctga

SEQ ID NO: 221096 - DNA, 100 bp, Homo sapiens
ggagaaatccccactcctccaagaaccaacccccaaattggctgggacagttccgcagaaagggaaccttctcatttacaccgagtttggcaagatgctt

SEQ ID NO: 221097 - DNA, 96 bp, Homo sapiens
cagaaccctgtacaatttgatagtcattcgtaatcagcaggccaaagactcagagatacagtttatgtaacttgatggaagaaaatggaattactc

SEQ ID NO: 221098 - DNA, 98 bp, Homo sapiens
atttgcctaaattcttcattgttggactattgtggttggcttctgttacgctaggaatatggcaaacgactgactgcattgcacagatgatggatatt

SEQ ID NO: 221099 - DNA, 90 bp, Homo sapiens
gtgtacaaatacccctttgaattaattatggctgaaagtggagaatgaggacatgaataaagaccagatcttgctggaaaaagaagctga

SEQ ID NO: 221100 - DNA, 98 bp, Homo sapiens
tggattcttggtctcgctgacttcaagaatgaagccacggactgtcgcgacctcgaagtagggggaaaactgcagtggaagatgaggacagcatggat

SEQ ID NO: 221101 - DNA, 83 bp, Homo sapiens
gtcaaggcttggttcaagccagatagcacctgaggacagaacatatcagggtggactccattatgctggtggaagagggcttc

SEQ ID NO: 221102 - DNA, 74 bp, Homo sapiens
aggcgctggcgtccggcctgaatgtggacgagtgctcactagcagaaaaaacctgtgtgaggaaaaacgaaaac

SEQ ID NO: 221103 - DNA, 75 bp, Homo sapiens
atgtgacatctgatgctgtggaacttgcaaatcgaaggtgccattgagaaacagaaattggtgtatattttgaac

SEQ ID NO: 221104 - DNA, 104 bp, Homo sapiens
gatatttctcttttgtctgcccctattgtaagtgcagatggaacacaacagggaggttatattcaaaagaaaaaggaactgtggggaatctgtatctttattgc

SEQ ID NO: 221105 - DNA, 83 bp, Homo sapiens
ccaccgcaggtcgaggacggtcggactcccgcggcgggaggagcctgttcccctgagctctgcttatgataatgtcaacaaag

SEQ ID NO: 221106 - DNA, 75 bp, Homo sapiens
gttgaggccggtgacatgtctgtgagctgcggaggctgcggcccccaggctgctgacttgagtaaaccaatagat

SEQ ID NO: 221107 - DNA, 50 bp, Homo sapiens
ccggtctctgttccgcaggatgttttagaaagagcgttttcgctacgtaa

SEQ ID NO: 221108 - DNA, 100 bp, Homo sapiens
acctccagaactgtgatccagaagcagtggctgggacaagctgtggaaaaagtacggatcacgctttccccaggatgacctctgccagtatatcacatca

SEQ ID NO: 221109 - DNA, 83 bp, Homo sapiens
tggaagggccgctttttttgcagagtcagcgctttgggaccaagcgccatcatgaccgggtcctataacaacttcttcaggat

SEQ ID NO: 221110 - DNA, 100 bp, Homo sapiens
gattgcccagtcagcaaaggttcagccctccaagtataactttgaaaatgcatctcagacatttgatgacctccctgcaagatttggttatagacttcca

SEQ ID NO: 221111 - DNA, 51 bp, Homo sapiens
ccagtacacggcccacgttgccagcggttgctgatgctattagaacaagcc

SEQ ID NO: 221112 - DNA, 76 bp, Homo sapiens
ttgtcagtttcttgagggctccccagccatgcttcctgtacagcctgcaaaactgccggagccctcatgacttcag

SEQ ID NO: 221113 - DNA, 98 bp, Homo sapiens
gtggttttatttggagagttacctgcgttgtctcttggacatgtatctgctttccttgatgagtatggaatgctcctttaccagaattaccgaatccc

SEQ ID NO: 221114 - DNA, 74 bp, Homo sapiens
cggccgccgcggggtccgcggcgcgcccggcccgggagagaaggaggacgaggacgaggatgtgaagaagagaa

SEQ ID NO: 221115 - DNA, 100 bp, Homo sapiens
caattctgttgttgcctccatgcgccaatccaaaccgaaagccagaagctggtgctcaagaccgaatcggctgggcttttggcctaggattagaaaggct

SEQ ID NO: 221116 - DNA, 100 bp, Homo sapiens
cccaaagctattctgggggcaacagagggtaaaggagctggaagtgcgaaaattgatgcatgtgagaggagatggaccctggtattactatgagacaatt

SEQ ID NO: 221117 - DNA, 100 bp, Homo sapiens
acatcaccacggagaaccagtaccggctgacctcgctgtacgccgagcacccaggcgactgcctcatcttcaagatcccagctctcctgttggcttcgtg

SEQ ID NO: 221118 - DNA, 82 bp, Homo sapiens
gcctgcagcgggagctggacggcgagcgcgagcggcgcgagaaagttccacgcaggcgcgggggacgacggcgggggctaca

SEQ ID NO: 221119 - DNA, 100 bp, Homo sapiens
gcctctcatcgggagaatgctcttcaggatagtatcttggccagggaactcaaacagcagatgcaggatgtgatcttcgtggtggaaagctaaattttaa

SEQ ID NO: 221120 - DNA, 75 bp, Homo sapiens
gacgccatgtcgggttattcgagtgaccgagaccgcggccgggaccgagggaattcctggtgactggaaggggga

SEQ ID NO: 221121 - DNA, 88 bp, Homo sapiens
ccggaccagcagcccccgtaacctgcgcgctgccctagggcccggccgacccgcggcccggcactacctggcagcaccatctaaacct

SEQ ID NO: 221122 - DNA, 80 bp, Homo sapiens
cgcttgatgagaaggacccacggcgtctgttcgaagcattactctactgactggcagagacaggagaggtagatgtccac

SEQ ID NO: 221123 - DNA, 88 bp, Homo sapiens
tctcttacgtctgcggaagtgcagctgcctcagttcttagcgcagagctatcagcttcccagtttgcacaattcatcaagaaattatg

SEQ ID NO: 221124 - DNA, 100 bp, Homo sapiens
ctaagagaaagtactccaagatgatagaatgattttaaagttatgggactacaacagcagccacaggaaccttgaattgtcttcgcagttttaccgactt

SEQ ID NO: 221125 - DNA, 50 bp, Homo sapiens
gtgtgacttgactcttcaaacacaaaggtctgatgcctttaccagcagga

SEQ ID NO: 221126 - DNA, 50 bp, Homo sapiens
catattttgaagtgtttacgggtgtttccaaactatcatatttatcctcc

SEQ ID NO: 221127 - DNA, 82 bp, Homo sapiens
gaagagttgtggcgaggcagatcctgccccgtggccgcggccgtctctttctgtgtttgaagaacatacgcaccttcctgaa

SEQ ID NO: 221128 - DNA, 90 bp, Homo sapiens
tgttttgctgcccgaagcttggtagatatagttgtaggtactccgggaagactagatgacttggtgtcaactggaaagctgaacttatct

SEQ ID NO: 221129 - DNA, 75 bp, Homo sapiens
acctgaagttagaaaggctcaacgagaacaagctatcagacgacctctctgcccgttgtggtgatctccaacgtc

SEQ ID NO: 221130 - DNA, 50 bp, Homo sapiens
caacggggaggccaacgtgaagaagcaccagacggcatgcagagcttgcg

SEQ ID NO: 221131 - DNA, 75 bp, Homo sapiens
agcgcagcaacgtgcggtgggaccacgagagcgttacagattatgccattgccaggcgcatagtagatttgcatt

SEQ ID NO: 221132 - DNA, 82 bp, Homo sapiens
ggcctcgcgccggctatggccgtgccctggggctgagccctcagagggccaagatgggtcgccgagctcaacaggagtcagc

SEQ ID NO: 221133 - DNA, 98 bp, Homo sapiens
ggagcagtgttacttttctacaaggatgtctcgtatctcagttggtggttggtgcagtggagatgccatttccagtgttgaacgatatgatccacaga

SEQ ID NO: 221134 - DNA, 88 bp, Homo sapiens
tttgtgcaagatgagcctcaagtgcttctgcattacagtgctggagaatctggtaaaagcaccattgtgaagcagatgaggatcctgc

SEQ ID NO: 221135 - DNA, 100 bp, Homo sapiens
aggggccatggccagcgacggggccaggaagcaattctggaagcgcagcaacagcaagctcccgggcagacccttttgaggacttctttgggaatcgaag

SEQ ID NO: 221136 - DNA, 83 bp, Homo sapiens
cttacgtctgcggaagtgcagctgcctcagttcttagcgcaggatccacctgatggctggccgagtaccccagggagctgatc

SEQ ID NO: 221137 - DNA, 97 bp, Homo sapiens
atcactactcttggaatcaaagataaatccaaatactgcatatcagaaacaacaggtgtggatgaggtcaccattgtcaacattttgaccaaccgca

SEQ ID NO: 221138 - DNA, 90 bp, Homo sapiens
cctagcaccccgagaaccgtcagtttgagccagatggactcgctgattcttgagaagagtcaaaactggagctctcaaaaaatggaccat

SEQ ID NO: 221139 - DNA, 83 bp, Homo sapiens
ggaagcgtctccgttgggtccggccgctctgcgggactctgaggaaaagctcgcaccagccacaatggtgcgcatgaatgtcc

SEQ ID NO: 221140 - DNA, 75 bp, Homo sapiens
ccggggcaggcgggcagctgtgcccgggcggcacggccagatgatatcatcaagttgaatcgaaaggaagggaag

SEQ ID NO: 221141 - DNA, 100 bp, Homo sapiens
ggcgtgagaattcctcaatgactgccctctaaaggaagagcaaagccttctagacaagctcagtggaatctgaagggcccaccccatggaggaatgctgg

SEQ ID NO: 221142 - DNA, 100 bp, Homo sapiens
gcccggggccgtggggcttccgcctcgtgggcggcaaggacttcgagcagcctctcgccatttcccgggttggaaaagagactgttcaaaccactgagga

SEQ ID NO: 221143 - DNA, 100 bp, Homo sapiens
agctgccgccgccgccaccgagccgccgcgcaaatacgccatgcgagacctagtccacaggcttccaggagggaacaacagcaacaacactgcaagcaag

SEQ ID NO: 221144 - DNA, 74 bp, Homo sapiens
gcgggcgcccgaggggccgagcgaggcagttatacttaagcatgaacattgacgacaaactggaaggattgttt

SEQ ID NO: 221145 - DNA, 75 bp, Homo sapiens
cactgggacttctcgatctctggaggcacctgttgcaagtgacagctctgggtgaaccaggaggatgaggtggag

SEQ ID NO: 221146 - DNA, 100 bp, Homo sapiens
cagagctagttcctctccagctcagccgcgtaggttaaacccatccagagtaatggctgcggccttacccaggaccctgggggagttgcagctgtataga

SEQ ID NO: 221147 - DNA, 82 bp, Homo sapiens
gctcgatctaggttctgcggcacgggatggcggaggcgcctcctgtctcagaggcgtggagctatttcctatgacagttctg

SEQ ID NO: 221148 - DNA, 103 bp, Homo sapiens
agagaagccgcaaccagagccgccgccacggtgtcccgacccaggctaagcttgagcatggctgagcaggagcccacagccgagcagctggcccagattgcag

SEQ ID NO: 221149 - DNA, 90 bp, Homo sapiens
ctactgtgcgctcgatccagcaccatggggaagcgggacaatcgggtgccctgaccctctattctgcaccctgtgagccaccgagactga

SEQ ID NO: 221150 - DNA, 75 bp, Homo sapiens
agcgacgacgcggaggcagagaagggaacgcccggcccagccccgttctaaggcccagcagctactacaaggatt

SEQ ID NO: 221151 - DNA, 50 bp, Homo sapiens
catctgcaaggtccgcttcaccaggaagcaattttggaggtggtggaagc

SEQ ID NO: 221152 - DNA, 100 bp, Homo sapiens
ccagtcaacatagagaccagtcacatgatcttcgacccctttctgacacctcttcgcatcaacacggggggcaggaagacctgtggatgaagagccagag

SEQ ID NO: 221153 - DNA, 96 bp, Homo sapiens
cagattctggaaactgtacattgaagcagagctcaacgggacccaggtggagtctgtacagctcaaagtcaacatagcccgaaaacagcccatgct

SEQ ID NO: 221154 - DNA, 90 bp, Homo sapiens
aacccaccggcccagccggcacccaatgcctggcaggtcatcaaaggtgtgctgtttagttgattatggaagattcccacaagagtacca

SEQ ID NO: 221155 - DNA, 83 bp, Homo sapiens
cggcgctggaagggatgtcgtctcagcagtgctcgggcgcagacaatgcagatcttcgtgaagactctgactggtaagaccat

SEQ ID NO: 221156 - DNA, 89 bp, Homo sapiens
agagaggaagagagaagacttggcgatagttccctttctagaaaggagacggtggctcagggagtaaaggaaggccagttgagcaaaca

SEQ ID NO: 221157 - DNA, 50 bp, Homo sapiens
tcagagcccctcccggtcatcattgtggactgcacctccagcggctggtg

SEQ ID NO: 221158 - DNA, 89 bp, Homo sapiens
gagagctcaggcccaagtggagtttgcagacataggctgtggctatggtggcctgttaggttggatggcaagcatgtggtgtttggcaa

SEQ ID NO: 221159 - DNA, 101 bp, Homo sapiens
ggagtttcatgaagagcccaaaacctattacgaactcaaaagtcaaccgctgaagagcagatgatgttgaatttgaagtatcatcggaccgacggactggg

SEQ ID NO: 221160 - DNA, 100 bp, Homo sapiens
ggcacatcctctcggtgttcccgctggcggcgggcatcttcttcgtgaggctgctcttcgagcgtggcctgattccaccaagagaaggcccaggaggaag

SEQ ID NO: 221161 - DNA, 100 bp, Homo sapiens
ggcgaggagcgagcgctgcgaggtggcggcctgaggatctgcatctccaatggatactgaggggtttggtgagctccttcagcaagctgaacagcttgct

SEQ ID NO: 221162 - DNA, 98 bp, Homo sapiens
ttacttctctggatccagaaacacacagaagtagaaacagtagaccttgtcttgaagctgaaaaataagctggatatgggccctcacattttccaaac

SEQ ID NO: 221163 - DNA, 101 bp, Homo sapiens
caggacttgagtaacagcaacatgcagcagccgctcttctaaaacattcaaaccaaagaagaatatccctgaaggatctcatcagtatgaactcttaaaac

SEQ ID NO: 221164 - DNA, 99 bp, Homo sapiens
aggaagtgggaaatctgtggctggagctcagcagtctcggaagggtgctgacctggaccgggagaagaaggctgccgagtgcaaggtggacagcatcgg

SEQ ID NO: 221165 - DNA, 75 bp, Homo sapiens
gtggaaagcgcatacaggaccctaaacagaagcacctgggttcagcaatacgtcactgattatccttcaccagct

SEQ ID NO: 221166 - DNA, 74 bp, Homo sapiens
gggcttccactgattctacattatggtgaaaggtgtagcagtcactcggcctacacccacagcatcgaccttgt

SEQ ID NO: 221167 - DNA, 100 bp, Homo sapiens
aaggatcggaaaagaattttggtgtctgtgggaggttatgtttatttgagacttctccatcgggatcgcctggtgtcaccaagtgtccactggtactgag

SEQ ID NO: 221168 - DNA, 100 bp, Homo sapiens
agaagccgtggctgctgggtttgaacggaatgctggagtcagtggaagacggagctggtcggcccgaaggttttgctgttactgctcagtgtagtcacac

SEQ ID NO: 221169 - DNA, 73 bp, Homo sapiens
aagtccttcaagcagttcgcactacagcgggagcaggagctggaggacgccaggaaagcatgtgcagatgcaa

SEQ ID NO: 221170 - DNA, 75 bp, Homo sapiens
cttggggatcctctgtacgcccgttcactggctggagcattggatttgctaaaggagcttaagaatattcctatg

SEQ ID NO: 221171 - DNA, 100 bp, Homo sapiens
tcgggctcagcctcggtgtcccccagttcggcaaagatcctaattatctcatggctaatgaacgcatgaacctcatgaacatggccaagctgagtatcaa

SEQ ID NO: 221172 - DNA, 98 bp, Homo sapiens
ccgaaggctctccatcgaaggcaacattgagtccaggcagaatataattctataaagggaactccttcagaggctgaaatctttaccaccttgagctg

SEQ ID NO: 221173 - DNA, 80 bp, Homo sapiens
tgattgaggactgccagctggcgctgcagggatctgaagggagccgagctccttctgcagaagggcgctgagaagggagc

SEQ ID NO: 221174 - DNA, 98 bp, Homo sapiens
tgttacatcgtgcgccgtggaccaggagaaccaagatccaaggtttccatggagaatggactggggccagccccaggatccccagagaaacagcctgg

SEQ ID NO: 221175 - DNA, 100 bp, Homo sapiens
cgcatcaaacagagtgaactttctgccaagatgcggtactacgacgtccccatcgccaccctggacttctcctcgctgtacccgtccatcatgatggccc

SEQ ID NO: 221176 - DNA, 75 bp, Homo sapiens
tcctggagtcccatcaggccagtgggttttataggatcacattgacaaaagtaccatggagttttatgagtcagc

SEQ ID NO: 221177 - DNA, 100 bp, Homo sapiens
gaagaagttgtccatgttcacactgggtgaaggaagctgaaaccacagacatgactgagtcctccatgaagagcttgggcactgtttaaaggaaagttcc

SEQ ID NO: 221178 - DNA, 101 bp, Homo sapiens
tacgatgatacaccaaccacttgtgctaccatctgtcaaaactttggatggccctactttcagctatccagacagagcagctaccctcagctctagctgat

SEQ ID NO: 221179 - DNA, 73 bp, Homo sapiens
ccttgttgatccttaacgagctggtccgaatcagcagcatggagggagaggaattggattcaagtacgtggct

SEQ ID NO: 221180 - DNA, 100 bp, Homo sapiens
tttgcatcccacgccggaggaggcattaacgagaccgggtaagcaggatcaaggtgaaaaggagaaccccatgcgggaacttcgcatccgcaaactctgt

SEQ ID NO: 221181 - DNA, 101 bp, Homo sapiens
ggcgagtgtggcttcaccagtcaaacagcacggccacaggccccagccacagtggggctggccttccgggcagatttggtcgtattgggcgcctggtcacc

SEQ ID NO: 221182 - DNA, 75 bp, Homo sapiens
cgatccagcctgcggagcctgtggggcaggagggagctctgacagcctttcgcaagacatatgacaaaactgtgg

SEQ ID NO: 221183 - DNA, 100 bp, Homo sapiens
cggccaggggctacgacccttgggatctgccctccgctcagctcgagcttccctcgtggccgacggaacaatgaagcaatggctgccatccggaagaaac

SEQ ID NO: 221184 - DNA, 82 bp, Homo sapiens
cagagcgccgcgcacttcgtcatgttcttcgcgccctggtacatgtcccagagcaagcacacggaggcccgggagctcatgt

SEQ ID NO: 221185 - DNA, 82 bp, Homo sapiens
gaaaatggctctcgccttccagcaattccccggagccatattggattgttcttcatgatcgaattgtgagtgtcatcagcag

SEQ ID NO: 221186 - DNA, 120 bp, Homo sapiens
ctcggacatcgcgagcctcgtggtgtggtgtatggccgtgggcatctcctacattagcgtctacgaccaccaagatcattcaacttcaagtggcacattatcttttaagcctagtcaatc

SEQ ID NO: 221187 - DNA, 96 bp, Homo sapiens
tgctgcgtgactcacaggcacattgcagagagaagctgccgctcccatgaaactggaacgccaagctgaagaagaacgaatacggaagcacaaagc

SEQ ID NO: 221188 - DNA, 100 bp, Homo sapiens
agtgaccccagcgtcctcaccgactcctcggccacctcctccgcggacgccggggagaacccaggaacttggcattagaattcctcgaccactaggacag

SEQ ID NO: 221189 - DNA, 100 bp, Homo sapiens
gttctttacgccaaagtccatatgaaagatggctccaacagggaggctgagaagacaaaactccttatagctgcacagaaacaaaaggttgtggaaaaag

SEQ ID NO: 221190 - DNA, 75 bp, Homo sapiens
gcggagtatctggcctccatcttcggcaccgagaaagacaaaatgagtctgcaggtcttaaacgacaaaaatgtc

SEQ ID NO: 221191 - DNA, 75 bp, Homo sapiens
ctgcacgacgtggacttctacaaggcccgcatggaggtattgatgtcaagctgaaccatcgtaggaagttgaaag

SEQ ID NO: 221192 - DNA, 128 bp, Homo sapiens
gaccagcctgaaatgatcttgaaggaagccattgaaaaccatcagaacatgattaagcagtttaaaggtggagctgatcagaataatgttcagcatcaaccccctggagaacctgaaggtgtacatca

SEQ ID NO: 221193 - DNA, 132 bp, Homo sapiens
gcaacgtgttggaccttccggagcttctcagaagacagagggttttcttttgagcttagaccatgctcagcctccaagcagccttgtcatcgacaaagaatctgaagtttacaagatgcttcaggagaaaca

SEQ ID NO: 221194 - DNA, 74 bp, Homo sapiens
tggaatcagcttctctcattttctttccctgcaccaactagcagaagctgaaacctatcaacactcttcaaaat

SEQ ID NO: 221195 - DNA, 104 bp, Homo sapiens
gtactggatcgaaatgtccatgagaaaaagcttggagataaagttgctttttactggtaccagcatcaagatgatttatggtaataaggtactcagtctttgct

SEQ ID NO: 221196 - DNA, 74 bp, Homo sapiens
gacgacacagagatggcttcccccaacccagacgaagatcatcagtgagttctgcctcagtcagctcccaagtg

SEQ ID NO: 221197 - DNA, 75 bp, Homo sapiens
cctggccccagtgctgcgtccttatcagccgagccggaaaagctttgccagcagaagtataatgtctcctgcata

SEQ ID NO: 221198 - DNA, 100 bp, Homo sapiens
caactgcccatgctgggccggcgccctggggccccggagaggcttgaccactatgctatcatcaagtttccgctgaccactgagtctgccatgaagaaga

SEQ ID NO: 221199 - DNA, 75 bp, Homo sapiens
accaccagacttttgctggcaaagactcgtgaagctcagcacgcagggggtgtcataaccgaagaggacttcagc

SEQ ID NO: 221200 - DNA, 75 bp, Homo sapiens
ccaagaccgtgctggtctttctcaacctcatcttctggacacgagacgacttcctgggccaggtggacgtgcccc

SEQ ID NO: 221201 - DNA, 75 bp, Homo sapiens
caaggcacaacaggctgctctgggattctcttcagccaatcttcattgctcaaggaggagtctgctactagtctt

SEQ ID NO: 221202 - DNA, 98 bp, Homo sapiens
gtaccccagctccatcaacctcacgctgcacctgggtgtcatggagaaactccagctgggcccagagattctgcagcgggaaaatccaaggcttattt

SEQ ID NO: 221203 - DNA, 75 bp, Homo sapiens
caattgatttgctcttacgtatttgtgtgacttgactcttcaaacacaaaggtgccagatgcaattaaaaagtgt

SEQ ID NO: 221204 - DNA, 100 bp, Homo sapiens
tctgtgacctgcaggtattgggagatccacagctaagactccaggaccctctggaagcctagaaatggatgttttagaagaatgtatgtctcttcccaag

SEQ ID NO: 221205 - DNA, 109 bp, Homo sapiens
ggagattcagccgtgaagcaagtgcagatagatggccttgtgcagtagacattgttgcaatcatgatcggcaatctgaaaggcacaaaaattctgcaatctattcaaag

SEQ ID NO: 221206 - DNA, 147 bp, Homo sapiens
tgcaaagctggttttgctggggacgacgctccccgagccgtgtttccttccatcgtcgggcgccccagacaccagcgcttcttcctgagcagtgcccgccaggcctgcctggcacagagtggctcagtgcctcctgccatgcagtgg

SEQ ID NO: 221207 - DNA, 82 bp, Homo sapiens
cccgagataatgactcggcggcggcggcggcgggcatcgcagtggcgcaggtaatagcctgcagctggtgttttgagaagcc

SEQ ID NO: 221208 - DNA, 124 bp, Homo sapiens
ccgccgccaccgccgcctccgccgctgcctcaggagcggaacaacgtcggcgagcggggtgctggagaatctggtaaaagcaccattgtgaagcagatgaggatcctgcatgttaatgggttta

SEQ ID NO: 221209 - DNA, 98 bp, Homo sapiens
caacatccccaactggtggcagagttatgaggacgcttactctaagcgctttatctctgtggcctgcatctcccacgtggctgccatcggggaccaga

SEQ ID NO: 221210 - DNA, 100 bp, Homo sapiens
cagccaccctcgctccctctgctcttcctcccttcgctcgcaccatggatgccggctccaggagcagcagtggaggtcgggaacgcctcattgtggagcc

SEQ ID NO: 221211 - DNA, 101 bp, Homo sapiens
tcaccacaaaagtccttctggggcaggatgaggctgaaggtgatgtggccgccctcaaccgacgcatccagctcgttgaggaggagttggacagggctcag

SEQ ID NO: 221212 - DNA, 60 bp, Homo sapiens
cctgatgatcacgcagctggctggcttcagtggaccagagtacgaccccagcaaagcgac

SEQ ID NO: 221213 - DNA, 92 bp, Homo sapiens
ccgcgtccgccgattcctcctccttggtcgccgcgtccttggctggcgtcctcctgcccgaaggccacctgaacctaacggctccctgcaac

SEQ ID NO: 221214 - DNA, 98 bp, Homo sapiens
acgagtaatcgcctgctttgattcattgaaatgtgtgcaggaacggagaataaactgagctctctctctgacctggaacagcagtaccgagccttgcg

SEQ ID NO: 221215 - DNA, 100 bp, Homo sapiens
catcctctataagcggctgaaagtgcctcctgcgattaaccagttcacccaggccctggaccgccaaacaggtcccgttcaagaagttcttccagttcgc

SEQ ID NO: 221216 - DNA, 50 bp, Homo sapiens
ctgctcgggctgaccccacctgagatgggggctccggaggtggcgcccag

SEQ ID NO: 221217 - DNA, 75 bp, Homo sapiens
attgacatttaattttagggtcctttatatagaagggagagtaggttgaagaagaggatgaacttgaatctggag

SEQ ID NO: 221218 - DNA, 82 bp, Homo sapiens
gccgccgccgccgcggccccgccaggtagctacagcaagctgggtagcaggcagatccaaaggatatcatgaagtttccagg

SEQ ID NO: 221219 - DNA, 129 bp, Homo sapiens
ctgaagatgatcagacaaggcaaagcgaaattggtcattctcgctaacaactgcccagctttgaggaaatgcttccagactgcacacttttacttagaggacagtacatcccctagagttatatccaca

SEQ ID NO: 221220 - DNA, 100 bp, Homo sapiens
aacacagttattaatggactgcttggaaatataggtgcaacattagaggaaatcaatcagcactgggactggctggaacaaaatctcctccacaccttgt

SEQ ID NO: 221221 - DNA, 100 bp, Homo sapiens
ctctgcatatcatggggagatagacgctgctgcctggagtgcctgcagggcaccatccgcaacagccaggaggcggaggtctcctgccccttcattgaca

SEQ ID NO: 221222 - DNA, 73 bp, Homo sapiens
agctcggcagtcgcgaagcagcaaccatgggttctctccccttgccaccatgagcgagtcatttgactgtgca

SEQ ID NO: 221223 - DNA, 96 bp, Homo sapiens
aacggccaacttcggcaagatccagatcgggatttacgtggagatcaagcgcagcgatggtgttgcttttgaacagggcaaaatccttcctactcc

SEQ ID NO: 221224 - DNA, 83 bp, Homo sapiens
cacagtgccatccaccctggcagaggagtttacctacaaccccttcatgagagtgagtgtactaatggtcacttgatgtgcgc

SEQ ID NO: 221225 - DNA, 75 bp, Homo sapiens
cgcgcctgccgcgcggagagataaggatgcagactcatctgagcgtatcattgctcccatgcgctggggcttggt

SEQ ID NO: 221226 - DNA, 100 bp, Homo sapiens
ctggatgaaatacatcgtgagaagagagacaagttggatggcttgaggactggtactaaaaggaaacgtgactgggaggccattgccagcagaatggagg

SEQ ID NO: 221227 - DNA, 100 bp, Homo sapiens
agcagcgatgcctggcggagcctgcgtgctggtgatcgcgctgatgttcctggcctggggggaagggttatgtaccgaaggactctaccgtgtcagcggg

SEQ ID NO: 221228 - DNA, 90 bp, Homo sapiens
cagggtgttgcccaaactggggcaccctccaaggacttgaaagaggagattgatattcgactctccagggttcaggatatcaagtatgag

SEQ ID NO: 221229 - DNA, 74 bp, Homo sapiens
gtttgaaaagcagctggcctgcaagatccagacatttaatgtggatgcaccatgccagaccgtggaagatttaa

SEQ ID NO: 221230 - DNA, 100 bp, Homo sapiens
taaagaacggcagtttgaatcggtgctgaacagaattcctagaggacctgtgcaacaacctcttgaggatcgaatcttcactcccgctgtctcagcagtc

SEQ ID NO: 221231 - DNA, 85 bp, Homo sapiens
ctaggcaagttcaagttctacagaatcttactacaacatatgaggtctacttccccagcaggacagcatcattctcctatatctt

SEQ ID NO: 221232 - DNA, 100 bp, Homo sapiens
cagtttaatgaccttgttatcagtgatggctcttctctggaagatcttgtggcagtggcgattttgacagccacataccctgtgggtcacatgccatacg

SEQ ID NO: 221233 - DNA, 74 bp, Homo sapiens
cttggcagaaatgaaggcccaggaggtggcggaattgaagaggaaattatggaagtggaaattacaatgatttt

SEQ ID NO: 221234 - DNA, 87 bp, Homo sapiens
agaagctggcaaagaacatggaagagatgtttcacaagaagtctgaggccgtcaggagtctccacagcctattggctcacttggaca

SEQ ID NO: 221235 - DNA, 82 bp, Homo sapiens
gggccgaaaggcaggaggctcagaaatggtggagtcaatgaagaaagtagcagggatggatgtggagctgacagttgaagaa

SEQ ID NO: 221236 - DNA, 85 bp, Homo sapiens
tagccaacaaatgtgatgtgaagagaatagctgaactttctgaagatgatcaggagctgctgctcaagaggtcatcaaaataatc

SEQ ID NO: 221237 - DNA, 100 bp, Homo sapiens
caaaggcacttcgtggggtcacagggttttggccaaattgggcgagggcacaaaataaccacttaccccttctcaccgaggaagagcgggagaaagggta

SEQ ID NO: 221238 - DNA, 74 bp, Homo sapiens
tgtgaaaaacctaaaggataccttagttgaaatggatgcagtcagaactgaatgttgaagaagtggtaaatgac

SEQ ID NO: 221239 - DNA, 89 bp, Homo sapiens
ttggttccccctccctcagcttccgccccaaaagatacagaagtttacggtgagttttatcccgtgccacctccctatagcgttgctac

SEQ ID NO: 221240 - DNA, 83 bp, Homo sapiens
caaaggcaagaaggcaacgacgttccatctgtggaaggacctaccaaccaggtcattgctagaatcgtggatggaagcagatt

SEQ ID NO: 221241 - DNA, 83 bp, Homo sapiens
aaacagaactttctaatttagccaaggaaggtcagcccaaggccaaccccactgtcactctgttcccgccctcctctgaggag

SEQ ID NO: 221242 - DNA, 100 bp, Homo sapiens
gccgctctgagggcgcctgctcaggtccggcctctttggcctacccccgttggctccgctgccccaggtcgatgagtcccctgtcaacgacagccatggc

SEQ ID NO: 221243 - DNA, 90 bp, Homo sapiens
aatatggacagacttcttagacttggaggaggtatgcctggactgggccaggcctctactacgtggacagtgaagggaaccggatttcag

SEQ ID NO: 221244 - DNA, 100 bp, Homo sapiens
gcagttcagaagagccaaggaataaacatgcaatgaacccaaaagggaggcaagtgaggcctatctggttggcctttttgaagacaccaacctgtgtgct

SEQ ID NO: 221245 - DNA, 75 bp, Homo sapiens
ggcgcccccgagccgccgccgctgtccggagccccacaggatgatgccaataatgacccacagtggtctgaggaa

SEQ ID NO: 221246 - DNA, 50 bp, Homo sapiens
cctcttcaagcttaaacctggcatgattatgatatgagggtggatgattt

SEQ ID NO: 221247 - DNA, 98 bp, Homo sapiens
tttaaagccctaaatgccatgcgtatctttaagaaattttatcttttgaaacacgttctgattaaccaagggtgctatacttggtagatcagaaactc

SEQ ID NO: 221248 - DNA, 75 bp, Homo sapiens
gaacttccctggtcgaacagttttttctaatggctattcaagagctgtaggtaaaacttgcctactgatcagtta

SEQ ID NO: 221249 - DNA, 100 bp, Homo sapiens
aacggcagatcgtagccagccagctggagcgatgcaagctcggatccgagactggcagcatgagcagcatgagagagatcaaccagctttcactcctagt

SEQ ID NO: 221250 - DNA, 74 bp, Homo sapiens
ggtgcccagctctgcttcgaggccagtctttgactttgaactgagcagccaggatatgaccaccttactcagct

SEQ ID NO: 221251 - DNA, 75 bp, Homo sapiens
atatagcacaccatccccagccatctgcgctcctcagaccaccggcaggtgaacagcctgatgcagaccgaggag

SEQ ID NO: 221252 - DNA, 78 bp, Homo sapiens
cgagcgccatcacgctgaacagacagcggccaccatgctgccactgggctcagagcccgccctgaatgagctgctgct

SEQ ID NO: 221253 - DNA, 100 bp, Homo sapiens
gcatggttcactccagcatgggggctccagcctcccaaagtgaaatgcctgaccaagatctggcaccccaacatcacagagacaggggaaatatgtctga

SEQ ID NO: 221254 - DNA, 100 bp, Homo sapiens
agatagtcagaaacttgacaatttcctaggagaagtcagagacaaatgggatactgtttgtggcaagtctgtggagcgacccagggccaggacctcagca

SEQ ID NO: 221255 - DNA, 83 bp, Homo sapiens
ccacaatcttcaatgagtaaacatattccttcagagcaccataacatggtgtgggaagtgaagacaaatcagatgcctaatgc

SEQ ID NO: 221256 - DNA, 100 bp, Homo sapiens
ccgcttcgtcctctgcagtcaagacgctgggcgcgtcgaggactggaaagtccttcccttctcaacatgcaacccttgctgcctttgcagctgtgtatgt

SEQ ID NO: 221257 - DNA, 75 bp, Homo sapiens
tgatttgcgccatcatcctcatcatcatcatagggtacaggcatccttcacctgctattgttgcaagaacagtca

SEQ ID NO: 221258 - DNA, 100 bp, Homo sapiens
gacagaatctgggtcctagatgacttcattgcactgctgcaactgccttctccagacctcttgccagcggagcccatcgtggtgaggcttaaggaggtcc

SEQ ID NO: 221259 - DNA, 98 bp, Homo sapiens
ccaaatatcctcggaagagcgctcccaggagaaacaagagagcgacttgcagttgtggaggtacagtgtgaacggctgaggatgctctaccgggactg

SEQ ID NO: 221260 - DNA, 83 bp, Homo sapiens
cggagacctgcggagaggcggcggccgcggcctccgcaagccgacaatgcagatcttcgtgaagactctgactggtaagacca

SEQ ID NO: 221261 - DNA, 100 bp, Homo sapiens
gccgccgctcctggcgcccctgctctgcctggcgctgctgcccgcgctcgccgcacgaggaggccccgtgtgggccgcggcccggccctcaccatggagt

SEQ ID NO: 221262 - DNA, 82 bp, Homo sapiens
gcccccgcctcctcccgcactgactccccgccaccctcccaccctctgaaagctgttcctattgctgtggctgatgaaggag

SEQ ID NO: 221263 - DNA, 82 bp, Homo sapiens
cgcgccgtgcaactgctcatcctggcctacgtcatcgggtgagaagccctaccactgcaactgggacggctgcggctggaag

SEQ ID NO: 221264 - DNA, 83 bp, Homo sapiens
acctgctgctgcttcaatgtccgcatcgcaaccaccgccctggccatctaccatgtgcggctatgtgactacgtttgtgacct

SEQ ID NO: 221265 - DNA, 100 bp, Homo sapiens
ctcttcttgcagcatggcctggccacccagagggcccttgtgtccaaggtactggtgtggcatactcggacagagaagcccaagatgaagcaggaggagc

SEQ ID NO: 221266 - DNA, 82 bp, Homo sapiens
ccgcagcccgggcccaggccccggcagcgcctgggacaagtgttttccaagcagtgaagcacttgccgtgttgaactgaatg

SEQ ID NO: 221267 - DNA, 82 bp, Homo sapiens
aatttcttgggtgaaaaatatatccgcagggttcggatgagaccaggagcgagctggacgccactgtggggctctgagagtc

SEQ ID NO: 221268 - DNA, 82 bp, Homo sapiens
cccgagaatagctccgtccagcagggggatatgagactttctactcggaatatcctgagtgttgcgtggatgtaaaacccat

SEQ ID NO: 221269 - DNA, 100 bp, Homo sapiens
aaccatgaacttcgaaacgtgataagaagcacctggatgagacatttgctacagcatcccacattaagtcaacggaggtgaagctgtcatagctctaagt

SEQ ID NO: 221270 - DNA, 101 bp, Homo sapiens
aaaacatggggtttcgagtgggacaaggattgatagaaagaattcagcaactgtttgaagaaatcctgagtaatagtaggcaactgaaatggctgtcctgt

SEQ ID NO: 221271 - DNA, 75 bp, Homo sapiens
tggacacaagcctcattttggaatattgcagggcttagctgaaaacaaaagtactttaggacctgaggaagttcg

SEQ ID NO: 221272 - DNA, 83 bp, Homo sapiens
ctcagccatggacgcgtccctggagaagggtgctttcttctgcgacctggtactcatctacctcatcaaaaagagagagtttt

SEQ ID NO: 221273 - DNA, 100 bp, Homo sapiens
tagagatgtgatgttggagaactacagaaacctcgtctccctggattgttaccagcgcttagaattcctgggagatgcgattttggactacctcataacc

SEQ ID NO: 221274 - DNA, 96 bp, Homo sapiens
gccgtctcgctctgggtctccaggcccgcgaccgtccgccagtcgtcccgaggcttcccaggtggcttcccctcttcccctgggggctgatttcca

SEQ ID NO: 221275 - DNA, 51 bp, Homo sapiens
accaggccgggaagcccatcggagtgtgtggcaggccccaacatcgccgcc

SEQ ID NO: 221276 - DNA, 100 bp, Homo sapiens
ttattcaagagctgaataattgccagatctgcatgttgacgttcgaacacgagatggaaaaggcctttgccttccaggcaagccaggacaaagtgtgcag

SEQ ID NO: 221277 - DNA, 79 bp, Homo sapiens
cagcctcccaagtccctgggactacagcttccacagcgcggcacctgtacctccggggtggcgctggggttggctccat

SEQ ID NO: 221278 - DNA, 100 bp, Homo sapiens
ttttcctcttgatcgggaactcctgcttctccttgcctcgaaatggaccccaactgctcctgctcgcctgcatcatggccagcccaagaaccaggaaggt

SEQ ID NO: 221279 - DNA, 100 bp, Homo sapiens
attatgtagaggaagaaaacattcctgctctgaaagctcttcttgaaaaatgcaaagatgtagatgagagaaatgagtgccgcagaatggaattcggcat

SEQ ID NO: 221280 - DNA, 75 bp, Homo sapiens
gacagcggcaccagcagcgctgtctccctgaagaaccgagcggccaggttggccgttgtccaatgtgttgctgtt

SEQ ID NO: 221281 - DNA, 99 bp, Homo sapiens
gtcggcagactggtgacttcacttttgagtgcaactgccttccaggtgaatctggattgggaaagtcgacattaatcaactcattattcctcacagatt

SEQ ID NO: 221282 - DNA, 74 bp, Homo sapiens
tggcctggaggctatccagcgctccaccgaggacaccgcgtccagcttgtgtggcgaggaggacacagaggacg

SEQ ID NO: 221283 - DNA, 74 bp, Homo sapiens
tgcagacgaggtggatgaggccgagggcggcgacaagaaccggttgcagatatcaagaaagtcaacaacttcat

SEQ ID NO: 221284 - DNA, 90 bp, Homo sapiens
gcacatctcaagagcaagtgtataatgactgtgcaaagaagattgttaaagaggagctctacggtgactttgaagacttggaaacagggg

SEQ ID NO: 221285 - DNA, 83 bp, Homo sapiens
agagaggacgtggctgaagacaccaaagatgggggaggggaagaaatgcgtgtactgccggaagcggatgaagaaggtgtcag

SEQ ID NO: 221286 - DNA, 101 bp, Homo sapiens
ggccggctatggtgcacagcagccgcaggctccacctcagcagcctcaacagtatggtattcagtattcaggtctaccagccacagtctctgcacgtttcc

SEQ ID NO: 221287 - DNA, 83 bp, Homo sapiens
cgcggattcgccgaggcaccgaggcactcagaggaggatgccggctccaggagcagcagtggaggtcgggaacgcctcattgt

SEQ ID NO: 221288 - DNA, 80 bp, Homo sapiens
cctcggccgccctgcccagctgcctgcccccggaggtgcccacgcagctgcctggacaaagaggctggtcatatccatgg

SEQ ID NO: 221289 - DNA, 100 bp, Homo sapiens
caggatggaggaagactcgatccgcctgcctgcgcacctgccggccctccaggcactgaagcgtaagaagaggtatgagaagcagctggcgcagatcgac

SEQ ID NO: 221290 - DNA, 74 bp, Homo sapiens
gtacatgagacgatgaagcaaaggaattggcagcaatgaaacagattctcgttaagatgcatagtaaacattct

SEQ ID NO: 221291 - DNA, 111 bp, Homo sapiens
gttctaggtcccaattctactgcaaatagtatcatggcatcttatcagcaacagaagacttcggttcctgttcttgaccattactgggacttccacccccaccacgtgcac

SEQ ID NO: 221292 - DNA, 82 bp, Homo sapiens
cgtagacaccagctccgaaatcaccaccaaggtgtggacactgccagcggctgcagccgacttggaatgacctgggagacaa

SEQ ID NO: 221293 - DNA, 101 bp, Homo sapiens
ccgctgtgtggttgcaacggagataaattcccggaaccgcgattcggcgtgtcagcatatatagcagtgacgaggatgatgaggactttgagatgtgtgac

SEQ ID NO: 221294 - DNA, 121 bp, Homo sapiens
agatgcgtcagaacttgttcactacctggtcccatcacctacagcaagccaacatccagtttgcagttaacatgtttcgaacattaccaccttcctccaatcctacgggagcggaatttga

SEQ ID NO: 221295 - DNA, 100 bp, Homo sapiens
ggaccacctggctgtcttccacctggactcggaggccagcgtgaggctcacagccgaacaggcacgcttcttcctgatcctgcagctcctgaaaggcaag

SEQ ID NO: 221296 - DNA, 88 bp, Homo sapiens
cagcgccaagtatgtgccggagagaaacgtcgtgatttggagtattaagtctttcccgagtcctggtggaggacgatgagatcatgca

SEQ ID NO: 221297 - DNA, 82 bp, Homo sapiens
ctacgcgcctctcattcagagagtgatgtcttggcattgcccattttcaagcaggaagattccagccttccattggatggtg

SEQ ID NO: 221298 - DNA, 50 bp, Homo sapiens
cagatggcagccagtcagtggtggagagattccagacattctaaatgcaa

SEQ ID NO: 221299 - DNA, 83 bp, Homo sapiens
catggaccatcctgctggtcagcactgcggctgcaagatgagaagatgaagtgaatttatggattctggtttttctgaatttt

SEQ ID NO: 221300 - DNA, 82 bp, Homo sapiens
gcagcagccgagtctgacggcgccggttcgctgcccggtccgcccgcggtgagagtgcttcaccgatatagacacattttgg

SEQ ID NO: 221301 - DNA, 98 bp, Homo sapiens
agggtatccaagggttgtatcgaggctataaaagcacagttttaagagagcttccctctgtgtgttgcagtcctgtggcattatgcatgccccctccc

SEQ ID NO: 221302 - DNA, 100 bp, Homo sapiens
gtcacggcgtacgccctcatggggaaaatctccccggtgactttcaggagcaggccgggctctcgccatgggtcactgtcgcctctgccacgggaagttt

SEQ ID NO: 221303 - DNA, 100 bp, Homo sapiens
ctgggatccacataatggagacattctgatggaatttgggtcattaagaaggcaaatgataccttaaatggaatcagtagtagttctgtttgcacagaag

SEQ ID NO: 221304 - DNA, 75 bp, Homo sapiens
aaaaggaatagtcccattagcaaaggataactgggatgacgatgatgatgaaaaaaaagaggaagcagaagtaaa

SEQ ID NO: 221305 - DNA, 82 bp, Homo sapiens
ggaggtctccgccggctcccggggggatatgagactttctactcggaatatcctgagtgttgcgtggatgtaaaacccattt

SEQ ID NO: 221306 - DNA, 136 bp, Homo sapiens
gtttgaaagcgtgctccacaaatatttacagtcggaggagtactcggtgaaatcctgtcctgaagactgtaagtgaacagagtatctgtcaggcaagagctgctgtgatggtttatgatgatgccaataagaagtg

SEQ ID NO: 221307 - DNA, 87 bp, Homo sapiens
aaaagagaatactgtgtggctgacttcaaaagagtagtggattttctgaaagagaaggtgtcaaattgagaaccaggtagatcccca

SEQ ID NO: 221308 - DNA, 83 bp, Homo sapiens
gggaaacttcaccaagagcctcggcagctccagagcgacgggaaacgaaaggtaatagcctgcagctggtgttttgagaagcc

SEQ ID NO: 221309 - DNA, 75 bp, Homo sapiens
cacgaggcggcgggctggagacatggaccgcggcgagcaagaacatccagtcatggataaaaatgagctggttca

SEQ ID NO: 221310 - DNA, 100 bp, Homo sapiens
ttagcttccgaagaactgaccattgctggcatgacgtttacaacttttgatctgggtggacatgttcaaggtgccaatgaactggctgtgcagaaagcaa

SEQ ID NO: 221311 - DNA, 100 bp, Homo sapiens
gcaagaacagctaaaatgaaagccatcattcatcttactcttcttgctctcctttctgtaaacacagacacagagattgactggaaggcctacatggccg

SEQ ID NO: 221312 - DNA, 112 bp, Homo sapiens
agtactacccgcacgtgtaccctgggcgcagggatgtaggtgcaaaaaactacagacatctctgtgctgtttattacaacaagaatcctgggtttgagatcattcatgggct

SEQ ID NO: 221313 - DNA, 100 bp, Homo sapiens
gcggcggcggcggcgcagctattgctggacggccagtgggagagcgaggcctgagcctctgcgtctaggtttcagtgtagctcagaagccatttggagcc

SEQ ID NO: 221314 - DNA, 75 bp, Homo sapiens
gcaccgccgaggactccagcacaccgaggatgtggatgagtgcgcctccagccgtggcggctgcgagcaccactg

SEQ ID NO: 221315 - DNA, 100 bp, Homo sapiens
gagatcatgaagaaaatcagggagtcttatgaaaatgatattgcttctatgaatttgctagaacctgtctgtcaccagctctttgaattctatcgcagtg

SEQ ID NO: 221316 - DNA, 74 bp, Homo sapiens
gcagagacatcccgatctggggaagttggtcaaagaaaaagtgatgtatgaaaaagaggcaaaacaacaagaag

SEQ ID NO: 221317 - DNA, 98 bp, Homo sapiens
ttatgcatcagcaacgatcgtggactatctgggcttccatcaggttggatttggtctagggagtcccagaaagaagtagaaaaagagagagaagccta

SEQ ID NO: 221318 - DNA, 100 bp, Homo sapiens
cccagattccaaggacctcacgatggtgctgaaaacctatgacaccagcttcctggactttctcagaaggtgtttggtgatatgggccctcacattttcc

SEQ ID NO: 221319 - DNA, 82 bp, Homo sapiens
ttaagcagcagaggagcacgaggatcgtgggagctaagaaagtcctgtgtatggaaactcacatgagtcagctcagtctaga

SEQ ID NO: 221320 - DNA, 113 bp, Homo sapiens
ctgggcctgcaggtctctgtcgagcagcggacgccggtctctgttccgcaggatgctagtgtcagcagtgggatacctgcgcttgaaggacatcatccaccgtgacatcaagg

SEQ ID NO: 221321 - DNA, 83 bp, Homo sapiens
atccaagagaatccctcaacatgctggtttccgccagctgtggatgcctttgacattatgaccgcagaggattccaccgcagc

SEQ ID NO: 221322 - DNA, 82 bp, Homo sapiens
attggtctacaaagacagcagtttactcctggcttgggggcattaggaagcactggaggctcttcgggaactaatggatcta

SEQ ID NO: 221323 - DNA, 75 bp, Homo sapiens
gtatttcatctgtagcattcaagacttcaaactgaccacgttgatgagcgaacaatatgcaatggaattgcccca

SEQ ID NO: 221324 - DNA, 75 bp, Homo sapiens
ggacagtggagaaggcccagccaatgaagatgaagacataggaggtggagccgccaccaaaatgcagattttcgt

SEQ ID NO: 221325 - DNA, 101 bp, Homo sapiens
cagacggacgcgcagaccttcggaaggcactgcgtaggcagcctccccggagcccacgaggctccccagcaccgaacagcagtctcagcggttagcagcac

SEQ ID NO: 221326 - DNA, 100 bp, Homo sapiens
atattctgcttcgttatttcgggcactccacagattctgttgcgaaggcagccatctttagttcgtctttcctagagagactgttcgccatggatttccc

SEQ ID NO: 221327 - DNA, 82 bp, Homo sapiens
ctttagccatgtggatacctacggagcacgagaaatacggcgtggcatatgaaacactctcagatgctaatagacgaaaaga

SEQ ID NO: 221328 - DNA, 50 bp, Homo sapiens
cacccaggaggcatttgaagttccatttcactgttacatgccttgaagtg

SEQ ID NO: 221329 - DNA, 100 bp, Homo sapiens
tatcatcaaatgtgttaccaagacatcttggatcccctgctacttcagtgcctggaatggcaaatgcagccctgaggatttggctactgcatataacaac

SEQ ID NO: 221330 - DNA, 100 bp, Homo sapiens
gtttggattgtgagctatttcagaactgttctcaggactcattattttaacatttgggagaaacacagccagaagggcgaactttctgaccaagtataca

SEQ ID NO: 221331 - DNA, 50 bp, Homo sapiens
cttgaaatcctcattaaagatactctcgaatccttgagcttgatttgatt

SEQ ID NO: 221332 - DNA, 114 bp, Homo sapiens
ctgcgccccgctctgctgtgggcgctgctggcgctctggctgtgctgcgcggcccccgcgcatggagaaaatgcagaagtctccatggacgtttccctggcttaccgtgatgac

SEQ ID NO: 221333 - DNA, 75 bp, Homo sapiens
actggccagagtgaccaggctgaccagcaccagccctgatccagttacgagaactggtcagcatgtgcatctgcc

SEQ ID NO: 221334 - DNA, 83 bp, Homo sapiens
ggagggcggtgctgtcatggctggagtaaggcccctggctcccagaggtgcaccaaactgtttgctttcacaaccaaagttct

SEQ ID NO: 221335 - DNA, 89 bp, Homo sapiens
ggaatagttgtctacactggacatgacaccaagctgatgcaggtctgaagaactgttgcccaattcaacagtgccagcattccaacttt

SEQ ID NO: 221336 - DNA, 99 bp, Homo sapiens
tccagtcatcctcctgcctcagccacccaagaagctgggaccacagcttctcacctggggcgggtgggttctgcaccaccctcccaccctccttcctcc

SEQ ID NO: 221337 - DNA, 75 bp, Homo sapiens
gggagcttccgggagggcggctcgcagattttaggtgatgggcaagtcagaaagtcagatggatataactgatat

SEQ ID NO: 221338 - DNA, 90 bp, Homo sapiens
gctccgtcgtggaagcaggactgcgccgcgtcttcctcaaggacggggaggtttactgcatcgacgcgcggttctacgggaacgtcagcc

SEQ ID NO: 221339 - DNA, 75 bp, Homo sapiens
ggtggtggctgccatgatgatttccattgtgggatctgaacagaattaagacgaacgagctttcacaattgcagc

SEQ ID NO: 221340 - DNA, 100 bp, Homo sapiens
cagcaacaccaggagaggccgggggcagccgccatcggcagcgccaggttctgcggggagtgtctccagccctgcctgcaggtgccatccccgctgtgcc

SEQ ID NO: 221341 - DNA, 73 bp, Homo sapiens
ttcagatagctccccagctgtggaaaatgagcatcctcaagcaggcaccccccgagcccagctccacacaccg

SEQ ID NO: 221342 - DNA, 100 bp, Homo sapiens
cacagatcccatcagaggcaccccagacacagtgtcgtgaaaactacccctaaaagccaaaatgggaaaggaaaagactcatatcaacattgtcgtcatt

SEQ ID NO: 221343 - DNA, 90 bp, Homo sapiens
cttgaatcctttctacaaggagtggggcagcaaggagcgcttccactggcagagccacaacgtgaagcagagcggcgtggatgacatggt

SEQ ID NO: 221344 - DNA, 74 bp, Homo sapiens
tgcatgaacatctccagccaggatcctgtgcagatcggcagggtccaacaggacaccccagggaaggtgctttc

SEQ ID NO: 221345 - DNA, 75 bp, Homo sapiens
ggattccaagtaactcttatttggcctgttacatgaacagaatatggcaaaaatgagactacttacttttatggg

SEQ ID NO: 221346 - DNA, 100 bp, Homo sapiens
ccccaggacctgagcaggaacctggagttttcaggctgtgggtgagcgtggaggatgctcagatgcacaccgtcaccatctggctcacagtgcgccctga

SEQ ID NO: 221347 - DNA, 98 bp, Homo sapiens
cgcgagtgaggaaaggaggtactgtagatgggtcatcttactctggaagactatcagatctggagtgtgaaaaatgttcttgccaatgagtttttgaa

SEQ ID NO: 221348 - DNA, 75 bp, Homo sapiens
ggccatgctctggcaaaaacgaacacatgattctgtgcagatttgcagaccagacagctgtccagctcccacccc

SEQ ID NO: 221349 - DNA, 82 bp, Homo sapiens
cggccgtgtcccgaggaagtgcaagacccgactgattcttgctattccaaatcctcttccacgttgacagcccttcagatat

SEQ ID NO: 221350 - DNA, 83 bp, Homo sapiens
ggggaggcgacgctaagttgctgatcgtggcggttcgagaacttgtcttggacaattgcaaatcaaatgatggaaaaattgag

SEQ ID NO: 221351 - DNA, 50 bp, Homo sapiens
gctgagtcaagggatgagaccgtcaccagtgaaaagttgtgcagagccca

SEQ ID NO: 221352 - DNA, 82 bp, Homo sapiens
gttcatcgcctcttcctcgggcttcgtggcgggcacagtcttttgctgagcgcctgcgcctgggaattgcagtgattcatgg

SEQ ID NO: 221353 - DNA, 100 bp, Homo sapiens
tgcagccgcagcctgtggctgtgcagggccccgagccggcccgggtcgaggtcaacgccaccgcctctgcactgccttcctggccatcatcccaggtaga

SEQ ID NO: 221354 - DNA, 100 bp, Homo sapiens
ctgacctggcctatcagcttcaggagacagaggagctggaggaggagaagtcaggcctgcagaaggagattgctgagctgcagaaggagaaggagaagct

SEQ ID NO: 221355 - DNA, 90 bp, Homo sapiens
gtaaccagcatgtcaataaggggtcataggtggaaaagacatgattctgaagggagtggtaatggaagtgaagatgcttcaaaggacagt

SEQ ID NO: 221356 - DNA, 85 bp, Homo sapiens
aaactggtgttaaaattacagttgtcgcagccaaaatgaagtttaatccctttgtgacttccgaccgaagcaagaatcgcaaaag

SEQ ID NO: 221357 - DNA, 51 bp, Homo sapiens
atgcagcaccccgtcgccggcaaaccattcctcaagaattttgtatccaag

SEQ ID NO: 221358 - DNA, 100 bp, Homo sapiens
ggcctgcggcggagggaaaaaggaagaggagaaggaaattgtcccgaatccctgcagtcttgaatccagataatagttttgaaatactggttgaccaatc

SEQ ID NO: 221359 - DNA, 75 bp, Homo sapiens
tgaggcctccccaaccatgtgcaattaaagaagatgctgatatgctacaacacggatgaacctggaggacgtggt

SEQ ID NO: 221360 - DNA, 82 bp, Homo sapiens
gcgcggccgagtcgcggaggcgcctccgctgcagtcgctgcgtctccaaggggaaggctactggccggaaagcgccgctgtg

SEQ ID NO: 221361 - DNA, 100 bp, Homo sapiens
cccaacctagtgggtgtaatacatcatgaactgcaggaatcttgcctcctggaatccttcaaatcctgaatgtctcttacttgtggtgaaggaacttgtg

SEQ ID NO: 221362 - DNA, 83 bp, Homo sapiens
ggggaaagcttcatagcctcaaccatgaaggaaaccaggtgtgctgatctgcaaaccctggacacaatgcagccaattgagag

SEQ ID NO: 221363 - DNA, 101 bp, Homo sapiens
cgaaggccgggacccggttccccggcccacagtgggggtgtgcaaacccgagagaactggcacgagtacacgagacaggattgagaaaggagagattcaaa

SEQ ID NO: 221364 - DNA, 49 bp, Homo sapiens
agccgccgcgtcccagtcccgaggacatggatttgattgacatactttg

SEQ ID NO: 221365 - DNA, 76 bp, Homo sapiens
ctctcatcgaggcccaaaccgccaaggtttccactgtatccaaaaggaggggagaagttgcagtttgattatggtg

SEQ ID NO: 221366 - DNA, 90 bp, Homo sapiens
ggagcccggaggaacattccaaaggaaaaatttcaggacttggtggcacaaaatacatctcctttgaggaacggcagtggcataacgact

SEQ ID NO: 221367 - DNA, 96 bp, Homo sapiens
gatgcgtcaagtacactgaaattcatcctgagatgagggttttgactctgggaggagggctgccttatttggagcaccttaatctctctggttgtc

SEQ ID NO: 221368 - DNA, 99 bp, Homo sapiens
tttgaccaactccagaaatattcagaatctgttgacagtgtcttgaagaggatgacaataattggtgtaattttatccttccgatcattggcacaagaa

SEQ ID NO: 221369 - DNA, 83 bp, Homo sapiens
ccggacaccgacgcgctcatctgctggagcccggtggaaatgagttctcaacagtttcctcggttaggagccccttctaccgg

SEQ ID NO: 221370 - DNA, 100 bp, Homo sapiens
gcgcagccgagaagatgtctccgacgccgccgctcttcagtttgcccgaagcgcggacgcggtttacgggactgctgagatgtcctctattcttgaagag

SEQ ID NO: 221371 - DNA, 107 bp, Homo sapiens
caaggcgcgccactcctcccggaggcgacatggggcacccggtgtaccgcggcgagaagccccagctgcactacgcggaggattctctatgggaggatgcatggcaa

SEQ ID NO: 221372 - DNA, 49 bp, Homo sapiens
actgcagcctcggcggtcagcaggtacgcatagctgctaaattcatcac

SEQ ID NO: 221373 - DNA, 101 bp, Homo sapiens
cagaagtccagagctgaggactgcctgtttgcaggtgggcgcatgatgaactgcccaaagattctccggcagttgggaagcaaagtgctgctgcccctgac

SEQ ID NO: 221374 - DNA, 82 bp, Homo sapiens
cgccccccaggaggggcgagagggagccgcagctgatgtcagtgcacctggagcagagaggggccctcccgaggaccgcgac

SEQ ID NO: 221375 - DNA, 73 bp, Homo sapiens
cctgaggacgatgagtgtgaagatgccgacaaaaggatcaaggtggcgaagcccgtggtggagatggatggtg

SEQ ID NO: 221376 - DNA, 75 bp, Homo sapiens
cctcccaagtagctgagactacagagattgccctcagtcccaataatcacgaagtgcacatctataagaagaacg

SEQ ID NO: 221377 - DNA, 83 bp, Homo sapiens
accgtagaggtaaagaactatggcaacacagtcactcctggcggcaaaccaaacaaaaccagagtcatctggggaaaagtaac

SEQ ID NO: 221378 - DNA, 100 bp, Homo sapiens
ccccctgggaatcttgatgtgcttcagtggtcgggggttggtgcggagctcggctcagtgagagcaggtgtcgtgaaaactacccctaaaagccaaaatg

SEQ ID NO: 221379 - DNA, 74 bp, Homo sapiens
ttcgcagtggtcgcttcttctccttgatggttctttggtgtcgctgtccctaacgtcacatactggttgggtga

SEQ ID NO: 221380 - DNA, 74 bp, Homo sapiens
tctggacaagatgaagtctttctgccaggccacgtgctgtacgccgacatcaagatggagaatgggaagtccaa

SEQ ID NO: 221381 - DNA, 98 bp, Homo sapiens
gcggagccaagatggggaatggaactgaggaagattataactttgtcttcaaggggaaacagtactgggagtaccagttccagcaccagcccagtcag

SEQ ID NO: 221382 - DNA, 90 bp, Homo sapiens
atcaaccacaacacccccgggctccccaagatctacatccaccgagtcggccggacggcccgtgcagacgcaaacatgcagatctttgtg

SEQ ID NO: 221383 - DNA, 82 bp, Homo sapiens
gctcggccaaatcctccttcagcctcctggcgcccatccgcagcaaggacgtccgcagcagaatagcctaacatggcagacc

SEQ ID NO: 221384 - DNA, 79 bp, Homo sapiens
ctgccaacgccccggtggagaagctgagcagcgatggattttgggtggggaagtcctccttgcggagttggcgccagct

SEQ ID NO: 221385 - DNA, 102 bp, Homo sapiens
caagacataaattgctcagtgcagaatttttggaacagcattatgatagactggcccgagataacttcttccgctgtggtgtgctgtatgaggactccctgt

SEQ ID NO: 221386 - DNA, 90 bp, Homo sapiens
tggagccccagattcaacccgtgtacgtgcctgtgcctaaatttgaagatgggatcctagacatctgcctgatccttctagatgtcaacc

SEQ ID NO: 221387 - DNA, 71 bp, Homo sapiens
cgagctagccgggagttacaccgccaccgccagccacagatccatgatgtgcagttctctggagcaggcgc

SEQ ID NO: 221388 - DNA, 100 bp, Homo sapiens
tcaaatccatcaagctcatcaaaaggttctaagctggtctatgtccatcaccttcttggagaaggagcctttgcccaggtgtacgaagctacccagggag

SEQ ID NO: 221389 - DNA, 100 bp, Homo sapiens
gttcggtgcgtgccccgacggggcgcgcgcgaagcgagcgagaaggcacggagtcgccgcggagcgcaggcaccacatacttattcggaggaggcgcccc

SEQ ID NO: 221390 - DNA, 75 bp, Homo sapiens
cctccagaatgagctggagagactgaaagaggccatttcataattctgaatcatgtctgataacggagaactgga

SEQ ID NO: 221391 - DNA, 73 bp, Homo sapiens
gacttcgcgcagtgcctggggtactacggctacagcaaggtacttcgtactggatttcgaggctggcatcctg

SEQ ID NO: 221392 - DNA, 126 bp, Homo sapiens
ccgggggtcgctggctctgctgctgccgccggcgaaggaggaggcgttgccgggtcaaaatgcagatcttcgtgaaaacccttaccggcaagaccatcacccttgaggtggagcccagtgacacca

SEQ ID NO: 221393 - DNA, 83 bp, Homo sapiens
agaccgcgcgcagggcctgcagcgggagctggacggcgagcgcgagcggcgcgagaaaagtctcactgtcgcccaggctgcag

SEQ ID NO: 221394 - DNA, 97 bp, Homo sapiens
ccagcactgcgcagccgtggtgtccagcctcctgggcagccccttgcccttggacagtctcctgggctacctgaccaagtacgactgctccagtgcg

SEQ ID NO: 221395 - DNA, 90 bp, Homo sapiens
accaatgcgagcctgcctcttaaccacctgcactggttaaacatcataatcatgtgtgttggccgaatgggaatcaccattgcaatacaa

SEQ ID NO: 221396 - DNA, 90 bp, Homo sapiens
tccgtgtttctggaaagtgacagcaggaccgtataatagacgctggccccaaaggaaactactctcgatttatgaatcacagctgccagc

SEQ ID NO: 221397 - DNA, 100 bp, Homo sapiens
ggaggccagccattcccaaatgccccaaggatgaagaacggagacgggattgtttccattgccaccctaaccgtgctggcctatgaacgttacattcgcg

SEQ ID NO: 221398 - DNA, 102 bp, Homo sapiens
tttagcagctgttgggccaactacacagaccttactccccttagaacagctgggcaagtctgtggtggccaaagtgaaaattccggaaggcaccattctaac

SEQ ID NO: 221399 - DNA, 82 bp, Homo sapiens
gtggtttatcaaaatcacgttataatcagattttgaccaagcattttgtaagaaagcacagctgagtacaagctaactggag

SEQ ID NO: 221400 - DNA, 90 bp, Homo sapiens
ccctcagctccacattgagagcaaaatctacaagatgatgcagggaggagacctcctgccccccgaggtctgcagtctcctgaacccagc

SEQ ID NO: 221401 - DNA, 100 bp, Homo sapiens
gacagaacatgatgttgacacgggctgggcgcccccagaagcccgggaacaaacctgttcgggggtcttgtctggattttggttgcctcctccaatgttc

SEQ ID NO: 221402 - DNA, 122 bp, Homo sapiens
gcaaatagcgggaagaacaaaggaaggggagcccgggacccccgggggcgcagagtgatcagcagctggactgtgccttggacctaatgaggcgcctgcctccccagcaaatcgagaaaaac

SEQ ID NO: 221403 - DNA, 82 bp, Homo sapiens
gtccggcttcggagcgggagtgttcgttgtgccagcgactaaaaagaggttcctgttgctagagcaagtattctttggctaa

SEQ ID NO: 221404 - DNA, 97 bp, Homo sapiens
tgcagccagtactctatatgaacaatccgtctggatcacggatgtaggaagtgcttagcagtgtctgcaaaaacgaatcttttcctacaacctgtta

SEQ ID NO: 221405 - DNA, 90 bp, Homo sapiens
cgcaagcccagacaatgccggtggaggaatttgtggctggctggatctctggttgttcctcaaagtcattcaagctgtactcgccgaagg

SEQ ID NO: 221406 - DNA, 82 bp, Homo sapiens
agtgacaggatttctttgcaccgagatcttggaccagacactcgacctcctgagtaatttcatctgtgccaaagcctccaga

SEQ ID NO: 221407 - DNA, 75 bp, Homo sapiens
ttcacatcttccctttgactgtgtcctgctgctgctgctgctactacttacaaaatgagatgctggaggaaggac

SEQ ID NO: 221408 - DNA, 75 bp, Homo sapiens
gattttgtcagcttgtcgtcaagagccctatgagtttgtctctctggaatggctgcaaaagtggttggatgaatc

SEQ ID NO: 221409 - DNA, 75 bp, Homo sapiens
ttctcttcactagaatatggagactgttcaatcaccagggtcaaaatgcagatcttcgtgaaaacccttaccggc

SEQ ID NO: 221410 - DNA, 50 bp, Homo sapiens
gtttttccaaatattcatctgtacagatttgcctgaagacctggataatc

SEQ ID NO: 221411 - DNA, 100 bp, Homo sapiens
ctcataggtgtcgtctcctggaagaggcctctctcccttgtggtttgcaatggtctggagcagccaaggaagcagcagcgctctgatctcaatggacctg

SEQ ID NO: 221412 - DNA, 96 bp, Homo sapiens
ctcctccgggaccctccccttggaccgagccgatcgccgcggggcagttcgggccggctgtcctggcgcggaacaatgacactgccattgaaatag

SEQ ID NO: 221413 - DNA, 89 bp, Homo sapiens
ggctttacttactgcggccgcccggctcttgggaaccaagacagcacccaagaaaacctcatttggctcgctgaaggatgaagaccgga

SEQ ID NO: 221414 - DNA, 75 bp, Homo sapiens
cactgtcttcagtccctgaggagttctttcacctcctctgaatgtccacgaatcagagatcattgatttcttcct

SEQ ID NO: 221415 - DNA, 83 bp, Homo sapiens
ctggagcttaaaaagctgcacgcaagtgttaaacttctgcagctggtgctttgaatgtaaatgtgaagaaggaaatatctagt

SEQ ID NO: 221416 - DNA, 97 bp, Homo sapiens
gaacacagtagtggaagatgtaaagcaatatttcgagcagtttggcaaggcagatcgggagcggtgccgagaaaaatttccttactagatgacattt

SEQ ID NO: 221417 - DNA, 75 bp, Homo sapiens
gacacacccaggaaaagactcaggacggacaagcacagtcttcggaagactatcggtggtccatgtcaagtgata

SEQ ID NO: 221418 - DNA, 74 bp, Homo sapiens
ctggagcctcagttggaagcagccgatccagcctgcggagcctgtggggcagaaaatatttacaccagcagctc

SEQ ID NO: 221419 - DNA, 100 bp, Homo sapiens
gggcccgcacggaccctctacttcagttgtgtggcacctaccctccctcctacaacctgaccttccactcctcccagaacgtcctgctcatcacactgat

SEQ ID NO: 221420 - DNA, 100 bp, Homo sapiens
gaccgcggcggaggacgcgcccggcgcccctgagccggccgagcggcgacggaccgcgaggcgaggattaaatccaccacacagggtgaaatctatctcc

SEQ ID NO: 221421 - DNA, 83 bp, Homo sapiens
atcaagcagaatgtgatttgcttgaagatatgagatgtgaacgattggaagaacagctaaatgacctaacagagctccaccag

SEQ ID NO: 221422 - DNA, 101 bp, Homo sapiens
gtacaagatggggacggcaggagggaagtgagaagcccaactaaagccccacatttgcagctcattgaaggaaagctgacaatggcaccatgcatctttgg

SEQ ID NO: 221423 - DNA, 82 bp, Homo sapiens
gcaggacccgaggccaggagccaggggcccagaaggtgagcgagtgctgtgctttcatgggcctcttctttatgaagcaaag

SEQ ID NO: 221424 - DNA, 98 bp, Homo sapiens
tcatgaacagaaacacctaggaagggagaactgttgattatggaagattcccacaagagtaccacgtcagagacagcacctcaacctggttcagcagt

SEQ ID NO: 221425 - DNA, 100 bp, Homo sapiens
gtaatgctgcgggccattagagatttcttctggaaaactggaaacaaggtatataccctctcagtgtctggagaccggctgattgtgggaacagcaggcc

SEQ ID NO: 221426 - DNA, 98 bp, Homo sapiens
gccggtcctactccagaagccggagtcattcaaggccctgcctctgggctcacctcgctgtgacctgaaggagaatctgctgaaggataactgtgccc

SEQ ID NO: 221427 - DNA, 90 bp, Homo sapiens
aaaaaagatggcggcgggctcggatctgctggacgaggtcttcttcaacagcgaggtggacgagaaagtgcctgacatttaccccggtaa

SEQ ID NO: 221428 - DNA, 87 bp, Homo sapiens
ggtcaatgcagacggacagtacctcttctgcaggtactggaaacccacaggcacacccaagagtgcgctggggagccgctgttcatg

SEQ ID NO: 221429 - DNA, 100 bp, Homo sapiens
acacagctcagaacagttggatcttgctcagtctctgtcagaggaagatcccttggacctacaagaacagtgaggagcttcggtctcgtattgtgtctgg

SEQ ID NO: 221430 - DNA, 75 bp, Homo sapiens
caaaaagttgtgaacacacagtgtggatatgatgtcaggattcagagtgttctgccagttctggataatccactg

SEQ ID NO: 221431 - DNA, 100 bp, Homo sapiens
gtcagaatgccaatacaagcagttgactgtttgtctgtgggatataaacgcaggaccaaaagaaggcaaaattgtggatgctaaagccatctttactggc

SEQ ID NO: 221432 - DNA, 80 bp, Homo sapiens
acatcatcgacctgcagtccatgcaccagtttcgccaggacacaggtcagcccaaggccaaccccactgtcactctgttc

SEQ ID NO: 221433 - DNA, 98 bp, Homo sapiens
aataacaatggaaaggtcatttcaacagagagagatcatcattgcctgaatttagctttgtgactgcaagagcaagaccagttcctgtctggagacga

SEQ ID NO: 221434 - DNA, 50 bp, Homo sapiens
cgcggcgtgccctgcttgtcacaggtagtaaacctattgatggcaatttt

SEQ ID NO: 221435 - DNA, 100 bp, Homo sapiens
ggaggagcggctatgagaagggaacggggccagactcagcccgacagcgggattagaggaagtggttacctggaaggaaaggagctgcagaacttgatcc

SEQ ID NO: 221436 - DNA, 98 bp, Homo sapiens
gcgagtacttcgttccaacatggacatcctgaagccaatcctgctagaacgagtaaatctgtctgcagcccagacactgagagccgctttcatcaagg

SEQ ID NO: 221437 - DNA, 50 bp, Homo sapiens
aaacatttggatttgaaattcaggttttgcaaaccgtttttcaaaaccca

SEQ ID NO: 221438 - DNA, 100 bp, Homo sapiens
atcctgaacttcaccatcctacagatcttccctttcacctatgaaagcaaacgtatgggcatcatcgtgcgggctgctttgaatgctgcatcaagtgtct

SEQ ID NO: 221439 - DNA, 51 bp, Homo sapiens
ggcctccccagccacgtgaaactgtgtgcaactgaggaacatggctcaaga

SEQ ID NO: 221440 - DNA, 83 bp, Homo sapiens
tgcctagcatttgctccatgataatctgagacagaacactgaagattctgctctcagggtgttgattgacgtctggaaggcag

SEQ ID NO: 221441 - DNA, 75 bp, Homo sapiens
gcacgtcccgccggcaggtcgcaggagccctgggagccgccgccatggccttgcccctcttgctcgccttgaaaa

SEQ ID NO: 221442 - DNA, 75 bp, Homo sapiens
gaggccgagccgggatctcaggtcctcgggggcggcggccacgccaaggacggtgtgctgctctggttggtgaag

SEQ ID NO: 221443 - DNA, 99 bp, Homo sapiens
gcagcatctcagcccaagagaagctttctgaaaaggatatgagcatgctcgaggagaggattaagcggtcagcaaagagaccctctgctgcaccaataa

SEQ ID NO: 221444 - DNA, 95 bp, Homo sapiens
cgagcgctgcgaggtggcggcctgaggtggagtctttcattttggatcaggatgatttggaaaatccaatgctggaaacagcttccaagttgctc

SEQ ID NO: 221445 - DNA, 100 bp, Homo sapiens
gcactccaatatggcaattgacctcacctcaagcacacccaatggacagcatgcctcaccaagtcacatgacaagcaattcatgcccaagcacaaaacaa

SEQ ID NO: 221446 - DNA, 100 bp, Homo sapiens
caaaatatggtgtgaaggttggcctgacaaattatgctgcagcatattgtactggcctgctgctggcccgcagggtacttcttcctgccctctctcccac

SEQ ID NO: 221447 - DNA, 137 bp, Homo sapiens
tggggctggcaggagggcacaaggagacgcgggagcggagcatgtcggagacgggcactgctgctgcccctggggcctctggaataaccccattccctgcgacatggcccagcacctgaagagccaggagcccaggc

SEQ ID NO: 221448 - DNA, 75 bp, Homo sapiens
ctccatctgggccatggatggattcactgcgtgctgtcctcacttgttctacaatgagtgccaaatctgctatca

SEQ ID NO: 221449 - DNA, 111 bp, Homo sapiens
ccacctcctgctctgggaccggaggagacatcggcctctgcaggcttgccgaagaagggagcacccctgcagtggaccatgagtcggtaatgcccactgaggacctctggg

SEQ ID NO: 221450 - DNA, 100 bp, Homo sapiens
gagggtgcctgggaatcggtcgcctggaggaccagtatttcccatggaggatttggacacctcccacactgagtccccaaccccccatgactcaaattca

SEQ ID NO: 221451 - DNA, 93 bp, Homo sapiens
cttggaggggatgtggtttccgttaagctggacaacaggaattacatgaatgacagtcttcgaaccaatgtgtttgttcgatttcaaccagag

SEQ ID NO: 221452 - DNA, 100 bp, Homo sapiens
gaggcttcagtgaaataaaggagcaagaaatgttcaaaggaacaacatctttaccatctcatctcaagaatggagggtgcagagcattgtagaccaagga

SEQ ID NO: 221453 - DNA, 96 bp, Homo sapiens
cattgctccttcaggacatggctccacgtcagcactgagaccagactcgagcacccctgtcctgtaagcgagacaaaatggcgtgtgttattttgg

SEQ ID NO: 221454 - DNA, 75 bp, Homo sapiens
ccaaacccagactaaaggctacagacgaagaatgctgttcaagctttgattgataagcaccaaagaataccagga

SEQ ID NO: 221455 - DNA, 75 bp, Homo sapiens
caagtgagagccggacgggcactgggcgactctgtgcctcgctgaggggtgcggggggcaatggcactgcagctc

SEQ ID NO: 221456 - DNA, 98 bp, Homo sapiens
gtcttgctcggccgatgaagtgcagaggtttttttctggtcccctctgagccctctcaccttgtcctgtggaagaagcacaggctcctgtcctcagat

SEQ ID NO: 221457 - DNA, 83 bp, Homo sapiens
cggagcctggcgggcgtgggaacccaggccccgccgaggcggccagagacaagaggagcagcagcggcaccgcccctcaccct

SEQ ID NO: 221458 - DNA, 105 bp, Homo sapiens
ccggggctccggcgcgcccggtgacggcggagaggcgccccccgcagcagctgtgagccgtgagctttgaggcggtgggatgtgtcagcagaatgtctcctgccc

SEQ ID NO: 221459 - DNA, 82 bp, Homo sapiens
gttttcgtacgggcggccgtgcgcgaggcgaggttactataacaacagtaccaaggtggctgtgaaaaccctgaagccagga

SEQ ID NO: 221460 - DNA, 50 bp, Homo sapiens
atgcacaaatttttatgtggagttacgccccatggtgtccatcctgccag

SEQ ID NO: 221461 - DNA, 83 bp, Homo sapiens
ctcgcctcctcgcagcagcgccatggtcgcgtggggcaggcagtggcgctgcgggccaaggccttcggcttcaacgtgctctt

SEQ ID NO: 221462 - DNA, 126 bp, Homo sapiens
gtcttcccgcgtccgccgattcctcctccttggtcgccgcgtccttggctggcgtgtgtccctggccagtgtccttccacctgtccacaagcatggggaacatcttcgccaacctcttcaagggcc

SEQ ID NO: 221463 - DNA, 75 bp, Homo sapiens
attttctttctcagaaagcagaggctcagagcttggagacagacgttcctacaacagcagccagtacccctgatg

SEQ ID NO: 221464 - DNA, 98 bp, Homo sapiens
cgcatctatttccttgaggaaagaatgcaacaggaatttcatggccccactgaacatatctacaaaactggcagcatctcatcacggcagttgctgac

SEQ ID NO: 221465 - DNA, 100 bp, Homo sapiens
cgaaaaccatttgctgaatatatttacaaacgaataaagcagcgagaccggagctcttcagaaaccaggctgctttcaggaacattgctgtggattccca

SEQ ID NO: 221466 - DNA, 90 bp, Homo sapiens
tcccacctcccatctatacttccagagcaagaattgactcgaatagggtgactctgacatcattagaagcatgccagaacagactggtga

SEQ ID NO: 221467 - DNA, 99 bp, Homo sapiens
cctcacggtcctcctggctgtgctcatatacacctgcaatgagtcggatgtggtcgagagcctggatgaaatctaccacacggggacgtttgcccagat

SEQ ID NO: 221468 - DNA, 75 bp, Homo sapiens
ccctggattatggagcggacattgtttactgtgagtttgcagatggcgtgtacctggttctgctcatgggccttc

SEQ ID NO: 221469 - DNA, 83 bp, Homo sapiens
tcttggcaaagcttctccctcagtatttagaccagcgcacaactacgggattggcgccgccgcctgcgtgtactttggcatag

SEQ ID NO: 221470 - DNA, 74 bp, Homo sapiens
ccatctccaagaacgtgctcttcgctcacctggatgacaacgagaggagacctcctgccccccgaggtctgcag

SEQ ID NO: 221471 - DNA, 128 bp, Homo sapiens
gagtctccgcggtggaggtctgcgttgctcttgcttttcctcgctggggtgtacggacctgagcactggcataaggacttccccattgccaagggagagcgccagtcccctgttgacatcgacactca

SEQ ID NO: 221472 - DNA, 100 bp, Homo sapiens
taacccctagaccggtttttagtccattgactatgcagcctaatgggaggttatattcaaaagaaaaaggaactgtggggaatctgtatctttattgcag

SEQ ID NO: 221473 - DNA, 100 bp, Homo sapiens
tgcgactggcccagtatccaggtcgaggttctgcagaaggttgtgactttagtatacaatcctgatacagctccagtgatccatggggtggacgttataa

SEQ ID NO: 221474 - DNA, 75 bp, Homo sapiens
gagacagggcgccacttactagaaaaatggctacaaacttcctagcacatgagaagatctggttcgacaagttca

SEQ ID NO: 221475 - DNA, 87 bp, Homo sapiens
ggggttggtagaaggtgttattgggaaaattcaacttcattcaggaacttataatcaaaactgtattaagctcggcaagagatgagc

SEQ ID NO: 221476 - DNA, 83 bp, Homo sapiens
atcattccttggggcaaaatgtggacaagggtagatcgacacttgagaaagctggatcaggaactggctaagtttaaaatgga

SEQ ID NO: 221477 - DNA, 50 bp, Homo sapiens
cacccaggaggcatttgaagttccaagatcctgaaggagctagacgagtg

SEQ ID NO: 221478 - DNA, 51 bp, Homo sapiens
acacgttctccaacgacgccctgaaggtggcacaagaatggctcaactctc

SEQ ID NO: 221479 - DNA, 82 bp, Homo sapiens
tgaattcctgccagacccctcagctttgcaggtagtaaacctattgatggcaattttgctgactgtggaagtgactcatcca

SEQ ID NO: 221480 - DNA, 96 bp, Homo sapiens
ccttgttgccgtcccttcgcctccttcaccgccgcagaccccttcaagttctagtcatgaagtttcaggcacctgcaagagagacctgcgtggaat

SEQ ID NO: 221481 - DNA, 116 bp, Homo sapiens
agaccgcgcgcagggcctgcagcgggagctggacggcgagcgcgagcggcgcgagaaagattatatctgtccaagatgcgagtctggttttatcgaggagcttccggaagagacca

SEQ ID NO: 221482 - DNA, 103 bp, Homo sapiens
cccctcccttgcatgatggaaacaccatggctgcggcggcccagctctctctgacacagattcaaaggattccaaggagaagaataaaatggaaatcctgtac

SEQ ID NO: 221483 - DNA, 75 bp, Homo sapiens
cctcggctttacggctgctctaacaaaactggaagatttgttgtcaaaagaaatagactggcaaccttattttac

SEQ ID NO: 221484 - DNA, 75 bp, Homo sapiens
aaagagtcaacagcagtggcaacagaaattgacattgaacgctgtgtgagagaatctatcaacctgttttgttgg

SEQ ID NO: 221485 - DNA, 74 bp, Homo sapiens
aatgaggaaggcgcttccgcggcgactggtgggcttggcgtccctccgggctcaccaaatcagatgaaagccaa

SEQ ID NO: 221486 - DNA, 80 bp, Homo sapiens
cactctttccgccctaatggaggtctccagtttagaacattctagtatgccagtagaaaaaaatatcactttagaaaggc

SEQ ID NO: 221487 - DNA, 96 bp, Homo sapiens
ggaagaacaactgacttgtccaagtacttgattctaaagctcgaaaggcctgctatagttcagaatatcacatttggaaaatatgagaaaactcat

SEQ ID NO: 221488 - DNA, 100 bp, Homo sapiens
caaagacaggagccctggaatgtgaagagacatgagaccatagccaaacccccaggccctgaagaggaaagtgaggatgactctcatctcgaaggcaggg

SEQ ID NO: 221489 - DNA, 75 bp, Homo sapiens
gcgttttcttggatgaattgcttgctttggaggccgccatggcatcagatgaaggcaaactttttgttggagggc

SEQ ID NO: 221490 - DNA, 80 bp, Homo sapiens
caaatgtctgactctgactctcggactgagaaacgcaagcggagctggagtttgttcagatcatcatcatcgtggtggtg

SEQ ID NO: 221491 - DNA, 50 bp, Homo sapiens
cgtgaaccacatgcccagcacggggggctgttgtggttccgactataaac

SEQ ID NO: 221492 - DNA, 83 bp, Homo sapiens
agtgcctgggccgctgggagccgttattggctgccgttaaggaccgttacgtttcccggggcgaactttctgaccaagtatac

SEQ ID NO: 221493 - DNA, 99 bp, Homo sapiens
ctggtttacaatgacaattgcactggagctctgtgacaggatcaatgtttatggcatggtgcccccagacttctgcagctataaggaagaccagatgga

SEQ ID NO: 221494 - DNA, 75 bp, Homo sapiens
ctggaggcttttcttagagtttgagcacctggaaatggagatggtggcagtaccagtgagacccctcagcctcct

SEQ ID NO: 221495 - DNA, 100 bp, Homo sapiens
ggaagaggctccttcactgccccaggagcagactccgtgggaaggaggcttgtttaaactacggatgcttttcaaagatgattatccatcttcgccacca

SEQ ID NO: 221496 - DNA, 101 bp, Homo sapiens
accaattttccttggaattggacagcggagtttaagagagctgtgaaagtagcaacaggacaagaactctcaaacaatattttggacactgtctttaagat

SEQ ID NO: 221497 - DNA, 50 bp, Homo sapiens
ctcaggcgtgcgcggacggtgtgcgggatttccatttaaacagggttaat

SEQ ID NO: 221498 - DNA, 100 bp, Homo sapiens
gaaagttttcagcctcatccagcaggcggtgacccgctaccggaaggccatcgccaaggaaccatcactgttgctggaggcacctgacaaatcctagcga

SEQ ID NO: 221499 - DNA, 98 bp, Homo sapiens
ggagaggtaaacagaacaccaggacatcccagagtctgggaaatgcaagagtgagccatggagctacgtgtggggaacaagtaccgcctgggacggaa

SEQ ID NO: 221500 - DNA, 75 bp, Homo sapiens
ggggctttcgcgaatcccgaggcaatctcggaggcgtttttccagaaaggaggagtcaaggaagcccttagtgaa

SEQ ID NO: 221501 - DNA, 75 bp, Homo sapiens
gcaccatgagcgtcccggccttcatcgacatcagtgaagaagatcagattgctcgctgtaagcagctcatctgtg

SEQ ID NO: 221502 - DNA, 75 bp, Homo sapiens
atgggcttcacctccccagagagactcaggaagtggcctgtgagtacggcatggtgcacgtggtctcccaggccg

SEQ ID NO: 221503 - DNA, 83 bp, Homo sapiens
ggcgcggggaagtcatgctcgcttcacggaggcaatagctagccggacactttcttcatgagcaacaaaccccaaagatacaa

SEQ ID NO: 221504 - DNA, 100 bp, Homo sapiens
cccatccccatcatcctcttcacagggttctgcatcttagcctgctgtactatactggcaattgctggagaagattttgcaattgttgcttctgatactc

SEQ ID NO: 221505 - DNA, 75 bp, Homo sapiens
aagaagacaaagtctagttcagaggagagtagatccgagatatatggtacagagccagatggactccttcggaca

SEQ ID NO: 221506 - DNA, 50 bp, Homo sapiens
gcggccaatggcacggaggcctgcgtatctcctgggaggcccccgtggag

SEQ ID NO: 221507 - DNA, 74 bp, Homo sapiens
gtcgttcttgctcttcgagggcgagaagaagacactttgccaccatcaccttgaccttcatcgacaagaacgga

SEQ ID NO: 221508 - DNA, 87 bp, Homo sapiens
agagcggcagtttcgtgagcgacctcagcagtgccgtggaggtcccagcccccgctgcggttctcggaggtccggagcccctgatgc

SEQ ID NO: 221509 - DNA, 82 bp, Homo sapiens
gcggaccggcgtccccggcgcgaagaggctggactcggattcgttgcctgagcttgcttggctcaggaacaacagaagagaa

SEQ ID NO: 221510 - DNA, 100 bp, Homo sapiens
atcgccggggaggcagcgcgggatcccagcctcaggcgtgcgcggacggtgtgcggtgccttcccagaccttccaccttaggttctgctgcaaaaagcac

SEQ ID NO: 221511 - DNA, 90 bp, Homo sapiens
agccaacggagaactcaaggtcttcatagaccagaaccttagtcccgggaaagttttttgtagcatcagatccaacagttaaaacagatc

SEQ ID NO: 221512 - DNA, 75 bp, Homo sapiens
gtttgtatccagatttccaatgattatgaagccaaagttgctatggtagctacagcaagctgggtagcaggcaga

SEQ ID NO: 221513 - DNA, 74 bp, Homo sapiens
agagaccatatatgtcattgggcagggatcagctacttccaggcctggtgtgaggttgtaagagacacgggggt

SEQ ID NO: 221514 - DNA, 75 bp, Homo sapiens
gaagaacttcttcagaattagaaaggagctgcttcccaataaggaaacaggggatatgagactttctactcggaa

SEQ ID NO: 221515 - DNA, 100 bp, Homo sapiens
tgatttggtctttggtggccgcacaggaaatgaggatattatttccagattgcagtgcaccaattccagctggacatcactgtgaaaatgggacgggata

SEQ ID NO: 221516 - DNA, 101 bp, Homo sapiens
catcaagaagatcttcgagttcaaagagaccctcggaacggggatatgagactttctactcggaatatcctgagtgttgcgtggatgtaaaacccatttca

SEQ ID NO: 221517 - DNA, 86 bp, Homo sapiens
gccgaaggcccgagcgcccgaggcgtctgggatggtgtgggaccgggttgatgataattagaagcatgctttccactgaacttccc

SEQ ID NO: 221518 - DNA, 50 bp, Homo sapiens
ccctgctgatgtcaccgaggccagagcacagtagaatatatatctgttgc

SEQ ID NO: 221519 - DNA, 50 bp, Homo sapiens
cgtgaccagctgaacgtctgtgggtccttggatgtggctgtgttgcccaa

SEQ ID NO: 221520 - DNA, 98 bp, Homo sapiens
aacaatcccaagaagcaggaatgaaagtggcgctttctccgccccagctgcatcttcctcccgtgaggctggccgagctccacgctgatctgaagata

SEQ ID NO: 221521 - DNA, 83 bp, Homo sapiens
ggttctggactttgggcgtcccattgccatgtgcctatgattacacaataccacctatggagaaagctgttgtgaaaacggac

SEQ ID NO: 221522 - DNA, 75 bp, Homo sapiens
aaggacaccaagatgcggatccgggcctttccgggccgttgctccagggagaactgcaaatatcttcatccaccc

SEQ ID NO: 221523 - DNA, 100 bp, Homo sapiens
aacggaggaagaatccattcacactccccaaaccaggtacaccaggggttggaaaaaccacactaggcaaagaacttgcgtcaaaatcaggactgaaata

SEQ ID NO: 221524 - DNA, 75 bp, Homo sapiens
cctcccaaagcgctgggattacagacaacacaggcagttctacataccggccaccccctcggacccgggaggtgc

SEQ ID NO: 221525 - DNA, 100 bp, Homo sapiens
ggaaactcatcaggacggaagcacaggggccactcagagtcgcccgagaaatatggccgcgtggaaagtgtcaaaattcttcccaagaggggatctgaag

SEQ ID NO: 221526 - DNA, 82 bp, Homo sapiens
ccgaggactacattaaagacctggaaaccaagtcatatgaagtggatgaaaatactaggaaaagtttatttaagttacgttc

SEQ ID NO: 221527 - DNA, 101 bp, Homo sapiens
ccgggggcccccagcccgcctctgtgccactttgcatcccacgccggaggaggcattaacgagaccgggttggacgtgataagtatgagcctgcagctgtt

SEQ ID NO: 221528 - DNA, 99 bp, Homo sapiens
catgagcatgaagataaaagtcctgaaacagttttgcagtcggactctacatcaacagatgatatgtggtaaaactgctcatctagccatggagtttac

SEQ ID NO: 221529 - DNA, 97 bp, Homo sapiens
accagccctcgtctcctggccgcttcaccaaggagaccacccagaagaatttcaacaatctctatggcaccaaagaaacctctgcgccatgagagcc

SEQ ID NO: 221530 - DNA, 74 bp, Homo sapiens
cgcgtcgtgcgcctgggggtgcgcgcctgcgacctgcccgcctggcctcagaaggggaagtttactcccagtcc

SEQ ID NO: 221531 - DNA, 90 bp, Homo sapiens
cttgatgatcattgtgtgtattgatcaatggaagaacaaaatctggcctgaaataaaagaccaagatcactccatggatgaaatgacagc

SEQ ID NO: 221532 - DNA, 83 bp, Homo sapiens
ctgacaacagctgtcgtctctgggactgtgaaacagtctctggatggtcgtcagatccgtgtggatcatgcaggcaagtctgc

SEQ ID NO: 221533 - DNA, 75 bp, Homo sapiens
tcccaatgacatgcaagttggacagacgggaaaaatagtagcaccagtccgaaaggctcttcggagtgcagaagc

SEQ ID NO: 221534 - DNA, 100 bp, Homo sapiens
ctgaggctgagtctcagtgttgccctgttcagtctgagatttggagcaagaggtggtggtggccttcccccgaagaaatttggtaatcctggggagcgtt

SEQ ID NO: 221535 - DNA, 100 bp, Homo sapiens
gatcatgatacagttgataaaattgttgcttcagaggatgattccgaagaagacggagaccataacaggacatttgatattgcctaacttcatataagac

SEQ ID NO: 221536 - DNA, 80 bp, Homo sapiens
tcaaaatttcaggtcttaaatctgggggcagtacccaaaggaaacgctacgaaagaatacatggagagcttgcagctgaa

SEQ ID NO: 221537 - DNA, 75 bp, Homo sapiens
tcccaaggtgcccttctgtggaccaggcgagcagtgcccaaggttgaagcaatgaataaaagactgggctccttg

SEQ ID NO: 221538 - DNA, 100 bp, Homo sapiens
actcctgcgcgccacaatgagctcccgcatcgccagggcgctcgccttagtcgtcacccttctccacttgaccaggctgatatcagttttagagaatgtg

SEQ ID NO: 221539 - DNA, 75 bp, Homo sapiens
ctggaaggaaccgctctcgcttcgtcctacacttgcgcaaatgtctccgttttcggctttgtgagaaaccttacc

SEQ ID NO: 221540 - DNA, 73 bp, Homo sapiens
ggagttcgaagagttggatactcagcgtcgctggcagccgctgtacttggatcttggcctcactactgtttgg

SEQ ID NO: 221541 - DNA, 50 bp, Homo sapiens
ctcgcgggtcctcgtggatcagactacagagaatgccacgggtgacctgg

SEQ ID NO: 221542 - DNA, 50 bp, Homo sapiens
cagaggccagtttgtcccccttcccggctgaccaactgactgaagagcag

SEQ ID NO: 221543 - DNA, 100 bp, Homo sapiens
actatcagtttttgcagacggacaaaaaagaacaggagaagtctgaacacgaagatgagaatgtgcctactgctcctgatcctccaagtcaacatttacg

SEQ ID NO: 221544 - DNA, 74 bp, Homo sapiens
tctcagcaagaacgggaacaaaactctggaccttttttctatcagtgcttatgtttatgctcagaaaccacaaa

SEQ ID NO: 221545 - DNA, 98 bp, Homo sapiens
aactggaccctgatgagaagataacatacggggatgtgatgttggagaactacagccatctagtttccttggggtcttgtaatggttggcatttccgc

SEQ ID NO: 221546 - DNA, 128 bp, Homo sapiens
tgcagaattcagagaggaagaagcgaggggcacggcgctgagacagagctggaggacccggagcgtctctgcttcatctccaccacgcttcagcccttccatgccctgctgggagggctggggaccca

SEQ ID NO: 221547 - DNA, 98 bp, Homo sapiens
agccgaccaaatttgactacctgaaggaggaggtctgctcaccaggtggccagataccgcccacgtgcccccatcattgctgtgacccggaatcccca

SEQ ID NO: 221548 - DNA, 100 bp, Homo sapiens
gtggcagtcaggtggcgaccactatctagcccaacggacctgaaggagaagaaggagaaggtggaggagaaggcaagccggaaagagcgaaagaaagaag

SEQ ID NO: 221549 - DNA, 83 bp, Homo sapiens
tgcagacttcaggtcgtggcagagaaaaccagctgagacagggcgccacttactagccaaatttgtatcctactgtggggctt

SEQ ID NO: 221550 - DNA, 82 bp, Homo sapiens
cgcaggcggggcacgcgctgcccctgctgccacaggagaaccctgaaggaggcctgtacctggctgtgaccctgttggcagg

SEQ ID NO: 221551 - DNA, 76 bp, Homo sapiens
gaagaggaggaagaaaaatctgaggttatcaatgacgagcacctttggggagttgaagacggtccgcctgccaaag

SEQ ID NO: 221552 - DNA, 50 bp, Homo sapiens
caaagtgctgggattacagatattgtgtctgcagttcaatactgccatca

SEQ ID NO: 221553 - DNA, 98 bp, Homo sapiens
cgggatggcggaggcgcctcctgtctcaggttaaacccatccagagtaatggctgcggccttacccaggaccctgggggagttgcagctgtatagaat

SEQ ID NO: 221554 - DNA, 100 bp, Homo sapiens
ccgacgaccggatcctgaggaggcagctgcggtggcagctgctgagttctcggtgaaggcaatgacatttaaccaagtaatccagacggggccagatgaa

SEQ ID NO: 221555 - DNA, 89 bp, Homo sapiens
ctattttatcttaaacttagcagagaggattttctgtcatggaaaaagcttgggttcatgaccaagaaccccaccatgcgcttgggcag

SEQ ID NO: 221556 - DNA, 100 bp, Homo sapiens
tgcaggtctcttgatgggaaggaccatttctggactacagctgagattgagaactgcttcataatcctcagctacgacttcccggccgtgctgcgctggt

SEQ ID NO: 221557 - DNA, 100 bp, Homo sapiens
ctgaggactacgacagtcaccgcaggttcgaaggtgtttgaggcagagcagtttggatgcccacagcgtgctcagaggatgaacacagccttcacgccat

SEQ ID NO: 221558 - DNA, 83 bp, Homo sapiens
gagaattttgcttgtgcaagattatttcagagcaaggtcgtgcggtgtgtgtagaagtccagaacacatattacataatggag

SEQ ID NO: 221559 - DNA, 88 bp, Homo sapiens
gagctcctgggccacccctcctttcaggtcaagatgaagatctccttcaacgacaaaagcctgcagaccacatttgagtacccttccg

SEQ ID NO: 221560 - DNA, 100 bp, Homo sapiens
gtctgagggagatggtgacaagctcaaggcctgcgagatgccttcaattaagttgcagagttctgatggagagatatttgaagttgatgtggaaattgcc

SEQ ID NO: 221561 - DNA, 100 bp, Homo sapiens
gcgattccagaaggggtctcctgatcatgagctccagcagaccataagggataacctttaccgccatgctgtgccttcttgtcgaccaggtttctacaag

SEQ ID NO: 221562 - DNA, 90 bp, Homo sapiens
aggaaattgaagctcaagaaggtgaagatgatacctttctaacagcccaattaacaagcacaagccctggctggagcccacctaccacgg

SEQ ID NO: 221563 - DNA, 75 bp, Homo sapiens
ctggaaattgccttattggaaaaacatttcttacgcctgtttaaagaagaaaacccgtatgctagatttgaaaac

SEQ ID NO: 221564 - DNA, 100 bp, Homo sapiens
atcactataagaaatatttggcaaaactcaggtctattaatccaccatgtgtgcctttctttggactggaagcaaccccaaaattagacgcaacaaaatc

SEQ ID NO: 221565 - DNA, 76 bp, Homo sapiens
gggaaagccaatgtgttttgaaaaatatgcaaatgttcaataagagctgaactagagaaacatggttataagatgg

SEQ ID NO: 221566 - DNA, 85 bp, Homo sapiens
gaacgaggcaaggagctaaagcagcgtgcgttcagccctgggtgggaatgtaagacggacttagatattgcatacaaatttggaa

SEQ ID NO: 221567 - DNA, 82 bp, Homo sapiens
aacaatgaggcctacgcagagctcatcgtccttgataagaccatcatcatgtggaaactgaccagggatgagaccaactatg

SEQ ID NO: 221568 - DNA, 100 bp, Homo sapiens
gaggaaagcaaaggagtcagggatggctcttcctcagccacaatggtgcgcatgaatgtcctggcagatgctctcaagagtatcaacaatgccgaaaaga

SEQ ID NO: 221569 - DNA, 80 bp, Homo sapiens
cggagagagaggtggagtccggcccccgaaagaggattttaacctttgagaccaagaacccgtcggaattagcagaacgt

SEQ ID NO: 221570 - DNA, 100 bp, Homo sapiens
tttcgggtcgtcatggctggctacgaatacgtgagcccggagcagctggctggctttgataagtacaagttcttcgtgccatgaaggaggacagtgaaaa

SEQ ID NO: 221571 - DNA, 96 bp, Homo sapiens
ccaagtgataaattcaaggatgatccagttggaccttttggacaggaaagtgtaacatcagttacagagaatcccagtcagaagttccagcctgcc

SEQ ID NO: 221572 - DNA, 75 bp, Homo sapiens
tgtggctgtgccgttggtcctgtgcggtcacttagccaaggttggagaaccaaaggatgtcattcgtaaagatgt

SEQ ID NO: 221573 - DNA, 146 bp, Homo sapiens
acttccctcggtctgggcttctctgaggcggcgagagatggtcaggtctggagctcgaccgggccagagctacagagacttctgaagtggagagtctgcgacctcctcggttcttcaatgaagatggagttatcagaccgtacagg

SEQ ID NO: 221574 - DNA, 75 bp, Homo sapiens
tcgcctgcacctggccaggctgcggctggaggtgtggacactgccagcggctgcagccgacttggaatgacctgg

SEQ ID NO: 221575 - DNA, 90 bp, Homo sapiens
gctaggctgtctgcctcggtacctgttactgctgctacttcctcgtttgacaccttcctggatttagatggtgctctactctcggggcca

SEQ ID NO: 221576 - DNA, 100 bp, Homo sapiens
ctggtgcacccccagtgggtgctcacagctgcccattgcctaaagaaagacccccaacacagcaggcgcaggggccacaggcggcatcatcgggggcatc

SEQ ID NO: 221577 - DNA, 90 bp, Homo sapiens
gaatgagccccagttcagtgccatcatgcagctctggtagctgaagaacatctcacagtggacgccagggtctattcctacgctctagca

SEQ ID NO: 221578 - DNA, 75 bp, Homo sapiens
cccgctgccgggcaccgaggaccagctcaatgacaggctgaagaaaaagtcccagtcggtggatattaatgctcc

SEQ ID NO: 221579 - DNA, 99 bp, Homo sapiens
gtgttttcttatttagccggagtgagaagcaagaaggccctggacacagcaatatctctgggctttcacaggtggccagcatcgaaatgttcagccttt

SEQ ID NO: 221580 - DNA, 75 bp, Homo sapiens
ggaacttctgcacaaggagctgcccagctttgtgggggttatcagtgagctgaatggaaaaaacattgaagacgt

SEQ ID NO: 221581 - DNA, 58 bp, Homo sapiens
tgccttctcatccccacatagagctatgaagacatgattggtgaggaggtgccatcgg

SEQ ID NO: 221582 - DNA, 148 bp, Homo sapiens
ataaacacagaaatagtccagaatgtcacaggtccagggcagaggaccaacatgggcattttgtttatgagcaaggtggtcttccgggatccgtatcggtttaagaagcggacggagctgttcattgccgccgagggcattcacacgg

SEQ ID NO: 221583 - DNA, 90 bp, Homo sapiens
gccagagttgtgggccgccgtcggcagcaagaacagagagagaggtggacagatctgagagatactgagcgcaagcaccaggaaatccga

SEQ ID NO: 221584 - DNA, 83 bp, Homo sapiens
gagaagttgaaccagctgtgggagaaggcccagcgagctactgcagcactggggtgtcagttgttggtccgacccagaacgct

SEQ ID NO: 221585 - DNA, 75 bp, Homo sapiens
ctgttccaaaaacagtggataattttgtggccttagctacaggagagtctcacaccattttgctggtacagccta

SEQ ID NO: 221586 - DNA, 101 bp, Homo sapiens
gaggcgcagcctcaaggaggaggagtgtccagcagacactttttcaaaaatggcaatggtatcagaattcctcaagcaggcctggtttattgaaaatgaag

SEQ ID NO: 221587 - DNA, 50 bp, Homo sapiens
gttcctctccagctcagccgcgtagaaaaatggctacaaacttcctagca

SEQ ID NO: 221588 - DNA, 98 bp, Homo sapiens
tgaagctgatggataacattgaccaggctcagctggactgggaactgatccacaatggtgcgcatgaatgtcctggcagatgctctcaagagtatcaa

SEQ ID NO: 221589 - DNA, 100 bp, Homo sapiens
acagaaaagaattatagtctaattgataaacatttgaatttatcagcaaaaaagaaagactcacatttacaagagcacttttcaggattagaagaggctg

SEQ ID NO: 221590 - DNA, 100 bp, Homo sapiens
gtgtaccaggcgaagctggccgagcaggctgagcgatacgacgcttcatggcggctgaagagatgcattggcctgtccctatgaaggccattggtgccca

SEQ ID NO: 221591 - DNA, 100 bp, Homo sapiens
tcaagataaagtgattttttgcctttgttgattaactggacaaattcagctccctgtgctgtcaggaatctacaggacttggctcgtatttacattcgac

SEQ ID NO: 221592 - DNA, 100 bp, Homo sapiens
ttggcgtggatccgctggcctgtaaccaatggtcaaggtgaaaataagatgaaaaatttacctgtgcctgtctatctcagacctctggatgaaaaagata

SEQ ID NO: 221593 - DNA, 75 bp, Homo sapiens
ccgacctcgacgtcttgcctgtgtcccacttgttcgcggcctatagaataccctctaccatctgctttggtcagg

SEQ ID NO: 221594 - DNA, 100 bp, Homo sapiens
cacccttggagaatgtgggctcatatccttttcagactacattttcctcacaactgttctttccagtctatgaaggcctagacatcatcaccaacaaggt

SEQ ID NO: 221595 - DNA, 83 bp, Homo sapiens
ttggtctagaaggccctcctgggccacccggctttccaggaccaaagcactgtaatggcgttgactggcgtcagaagctggac

SEQ ID NO: 221596 - DNA, 76 bp, Homo sapiens
tggactctcagaataaaggaaagacctcagagtgttctcagtctatgctccatcagcaagcactgccgactacaat

SEQ ID NO: 221597 - DNA, 114 bp, Homo sapiens
tgcagaaataccagtccccagtgagggtgtacaaatacccctttgaattaattatggctatcgtcagtatttaaacagatcacatcatgcgtgagtacaagctagtggtccttg

SEQ ID NO: 221598 - DNA, 83 bp, Homo sapiens
gtcttccagagcgtgaagatcaagatcgatacagatcacttggattcagtcgagtttgctttgctccgtgggaactgcaccag

SEQ ID NO: 221599 - DNA, 83 bp, Homo sapiens
cgccgagggacctcacatcaacttctaccagctggatgagacctgcacgcagtggctcacagcagcacgatttgtgacagccc

SEQ ID NO: 221600 - DNA, 50 bp, Homo sapiens
gtctgcttggtgtggagccatgaagtgataccatgtgtgggaagttgttc

SEQ ID NO: 221601 - DNA, 90 bp, Homo sapiens
ctggaacagagcgagagtatcgtggcagtagagaagagcatcacagaagttgctcaggagctgacagagctggtggaacatcttgtagac

SEQ ID NO: 221602 - DNA, 83 bp, Homo sapiens
gagatccgcatgaaggagctggagcggcagcagaaggagatttgaagaccttgcttctcatcacccactggattatgccccag

SEQ ID NO: 221603 - DNA, 75 bp, Homo sapiens
tgccaccaagacaccccttgaccagcacacactgcaaggagatcaggtggagtgtgttactcttggggctggaat

SEQ ID NO: 221604 - DNA, 100 bp, Homo sapiens
ttccatcaatcttgcaaagaatcttacaggtattatagctgcaaatgtccttgtattctgtttatggagagtaccttctctgcagcggacaatgatcaga

SEQ ID NO: 221605 - DNA, 75 bp, Homo sapiens
aggcgctcaccatgttccctggagggtgatctgcagcctgtcctggtgacgttgaaggatgcacctctctgcaag

SEQ ID NO: 221606 - DNA, 102 bp, Homo sapiens
gatgcaccgagtccagcccaggaaaatggagaggtcttgggcgtctttggtactggcttttttaggggtctgcctggggattacccttgctgtggatagaag

SEQ ID NO: 221607 - DNA, 82 bp, Homo sapiens
gcctagtaaacggggctgctggtgggccgcgtcgaagacatggaccagggctacggagggacccagacatggagctgcggga

SEQ ID NO: 221608 - DNA, 109 bp, Homo sapiens
gcctgagcgcggcggcggcccacgcgcagcgacagggagagcaaacggggattcagcgtccgatcctttggaacagggactcacgtgaagcttccaggaccagctcccg

SEQ ID NO: 221609 - DNA, 75 bp, Homo sapiens
ccaggcagcccccaaatcccggcccaggttgtctgcattcaaaagagcattctattaaagctaccttaatttggc

SEQ ID NO: 221610 - DNA, 101 bp, Homo sapiens
gagagccttgttggacactgaagaagggacggggatttctcctcctaatctgggcctcttgtcatgcagacaactaaactggtaggtggcagcagaggaag

SEQ ID NO: 221611 - DNA, 100 bp, Homo sapiens
accttgaaggccctacgcagttccgacaaaggtcgcctttgctactaccgcgactggctgctgcggcgcgaggcagacaccacccatcctttaaccaagc

SEQ ID NO: 221612 - DNA, 98 bp, Homo sapiens
taccatattgatgaagaagtgggctttgctctgccaaatccacaggcgtggattctcagatagtggaggaggacccccagccaaacagagagaccttg

SEQ ID NO: 221613 - DNA, 100 bp, Homo sapiens
aaggagagtcgtgaagcagttgagaaagaatttgagcctctgctgaattggatgaaagataaagcccttaaggacaagcaagctatagtcagcagactgg

SEQ ID NO: 221614 - DNA, 100 bp, Homo sapiens
ccttgtatatttttctcaggaggcgtcacggtggggaacataggacgacagttagctatgtttctccacagacactacccaaagcagtccttcactacag

SEQ ID NO: 221615 - DNA, 103 bp, Homo sapiens
aagagcccatcagaggaatccgcccccacgacgtccccagagtctgtgtcagggctgaccccgcactacatctacccaccagccatcgtgcagcccagcgtgg

SEQ ID NO: 221616 - DNA, 100 bp, Homo sapiens
aatgagtttcttactcgggagctggctgaagatggctactctggagttgaggtgcgggagtatgagttaagaaaaaacaacttctcagatactggaaact

SEQ ID NO: 221617 - DNA, 50 bp, Homo sapiens
gaggctgccgttcagcacccgtcgagcatattaataaggcagcggaaaga

SEQ ID NO: 221618 - DNA, 135 bp, Homo sapiens
cagtgcaccaagagcagcctcacatggtgtgggccgacatgaagagctgccagatccaacaggaatgggaaaaggacagcacaggatgccctccaaggatgagctggtccagagatacaacaggatgaataccat

SEQ ID NO: 221619 - DNA, 90 bp, Homo sapiens
gacgtgcggggcctgggcctcccggtccgcaagcagagcgcatcagcgaggaggtggggctgctgcagctccttggggaccccccgcccc

SEQ ID NO: 221620 - DNA, 75 bp, Homo sapiens
gtgggcgtaggactctccaagccaggaaaacggacgatgtattactaagctggaaaacatggggtttcgagtggg

SEQ ID NO: 221621 - DNA, 90 bp, Homo sapiens
ggcacctacggggacgtctataaggttggcgtgcagtggtgtgatctcagctcattgcaacctctgcctcccggactcaagcaatcctcc

SEQ ID NO: 221622 - DNA, 100 bp, Homo sapiens
tcaagacttttttgaagccatccgcagaaggggagacacattttatgttgtgtcatttcgaagggtgaatgaaaactttgccattgatttgatagcagag

SEQ ID NO: 221623 - DNA, 100 bp, Homo sapiens
gtggagtgtaggtcatatcgccgcggtcatcatcagatttgaaatatttaaagtggatacaaaactatttcagcaatgcagacaattaagtgtgttgttg

SEQ ID NO: 221624 - DNA, 90 bp, Homo sapiens
caagccatcctcctgcctcagcctccaagtagccaggaccacaggcacgcaccctgaggtttttggattcaaagcataaaaaccattaca

SEQ ID NO: 221625 - DNA, 82 bp, Homo sapiens
ccgcaagctgagcgagctgtcagagcccggggacggcgaggccctcatgtaccacacggccagttttgttgcatctggaaat

SEQ ID NO: 221626 - DNA, 100 bp, Homo sapiens
acccccgcacaggcgcctctgccctgcacgtggctgctgccaagggctacattgaggtgatgaggtgaaccagtgtgttattggtactgctcaggccaac

SEQ ID NO: 221627 - DNA, 100 bp, Homo sapiens
gattactcagagattatagggagcatggagattcgtcagcgaactgcagctcaaagaaacctttctccaacaccagcaagccctaaccagggccctcctc

SEQ ID NO: 221628 - DNA, 75 bp, Homo sapiens
gcgaggatgcaccttcccctgccttggaaagctgcgtttggatgaagcacaggaagcagagtgccaggttttgaa

SEQ ID NO: 221629 - DNA, 89 bp, Homo sapiens
caaatgatgaagaaactttggctgataatattgcagcattttccagtcactcaagactgcttgcaactgattgcagacagtgaaacacc

SEQ ID NO: 221630 - DNA, 82 bp, Homo sapiens
agcaccgcagccttgggcctcgcgccggctatggccgtgccctggggctgagccctcaggcggacctggtgaatgacctggg

SEQ ID NO: 221631 - DNA, 100 bp, Homo sapiens
cacaaaggaggggatacttgatcctgataaacggctgtcccttactccagagaatttaagcagaaatatgactacttcaggaagaaattaaagaaacctg

SEQ ID NO: 221632 - DNA, 100 bp, Homo sapiens
tcagcatcgtcacggacactcctgagctacagagactgaagaggactcaggagcaaatcagtaatgaggacaagtccttgaatgaccttggctgattcag

SEQ ID NO: 221633 - DNA, 98 bp, Homo sapiens
gcgaggtcaagctgctgctgctcggacaggaagataatatgacctcagtaacaaaccacttttctcaatcaaagctggactccccagaggaattggaa

SEQ ID NO: 221634 - DNA, 98 bp, Homo sapiens
ccggatgttgcggacagtatgaggcaagcgcagggggacggggaccagcagctgtcgccgccgctctcagagctcccagctcctccagcagccgacag

SEQ ID NO: 221635 - DNA, 101 bp, Homo sapiens
caccacaataatccacagccaagtattctaccttgtaaatactgttatttgtatatactgtaaatgatgacatcggtgggcactaaccgagcccggggaaa

SEQ ID NO: 221636 - DNA, 90 bp, Homo sapiens
gatggaaatcagcgcggagttaccccagacccctcagcgtctggcatctatctgagtgggacatacttttgaaggatgtgcaatgttcaa

SEQ ID NO: 221637 - DNA, 85 bp, Homo sapiens
atgctgcctggaggagatttggctgagattggagagaagggtaaaaaacttgttgctgcaagtcaagctgccttaggcttataac

SEQ ID NO: 221638 - DNA, 74 bp, Homo sapiens
cttctgcctcagtgccagagtccatgacaattagtggctttctttcagatgcaggctggtacagtgatgctgag

SEQ ID NO: 221639 - DNA, 90 bp, Homo sapiens
atttatgtttccgacgattgcatctggagggttgtgggatccaacgaagaataaaaagttgcaagaacttttcttgcaagaggtacggat

SEQ ID NO: 221640 - DNA, 82 bp, Homo sapiens
aaacaaactcaagatacgaaatgagacttttgaagtgcctttgatttctggacaatgcagatcttcgtgaagactctgactg

SEQ ID NO: 221641 - DNA, 147 bp, Homo sapiens
tcttaactagagaaggaaacgggactaaactggcgggctccgtggaagcgtggccggcagcgtcccggacgaggagtgactgtgaagtgctgaccacactcaccccagacactggccgtatcctgtccaagctacatactgtccaac

SEQ ID NO: 221642 - DNA, 88 bp, Homo sapiens
ggagcacaaagacattccccttggcatcagggctgaagtggctgcgatttatgagccacctcagtttgtgatggacgcctctgacccc

SEQ ID NO: 221643 - DNA, 101 bp, Homo sapiens
caggccgagggctgggggccagaagacaagagagacggcgaggcgcgctccctgcccggcagcgactcggagcctccacaaatgggaagtgttcctgtaat

SEQ ID NO: 221644 - DNA, 82 bp, Homo sapiens
cgcgggctccgcgcccggccggacccgggcccgaggtcttgagtcaccacgtccgaatataattcttgggttagtaatctgc

SEQ ID NO: 221645 - DNA, 75 bp, Homo sapiens
aagtaaagcccacagagatctacaaccttggagcccagagccacgtcaaaatcatcaatttctacatgaatatgc

SEQ ID NO: 221646 - DNA, 100 bp, Homo sapiens
gatgaagataccacaccatccctggtcattaaaacaccaatgaccagccagaagacatttgaatctttggtagactttagcaaagccctaggaaagcatc

SEQ ID NO: 221647 - DNA, 90 bp, Homo sapiens
tacgtttacaacggctacagcgtggtttttgtggggactaagagtggcaagctgaaaaaggtggtatcacggaaaacttgacagaacgat

SEQ ID NO: 221648 - DNA, 75 bp, Homo sapiens
accaaacccaccatcttctggtttcattgagtcctgtgtatggaaactcacatgagtcagctcagtctagaaggg

SEQ ID NO: 221649 - DNA, 90 bp, Homo sapiens
gggtgtgagaacttgatcagtttgtgtcagccaccttgttctctaaagtggcccaccctcaggaccctcaccacccatcagagaagcctg

SEQ ID NO: 221650 - DNA, 78 bp, Homo sapiens
gatggggacaacaagccaaagagaagggaatttgggaagaaatgttggctatttggcgatgagaggtggtgaacagtg

SEQ ID NO: 221651 - DNA, 100 bp, Homo sapiens
ttatgggagagaatcaaacttacagggttgccaccaggccttgacaaaattcttgaaatgtgttaattgggatctacctcaagaggccaaacaggccttg

SEQ ID NO: 221652 - DNA, 86 bp, Homo sapiens
atgccctcttggctgcactgcactcccaggtgtgagcagctgctggaagaggaggtgctcctgaagacactgcggccggcccgcct

SEQ ID NO: 221653 - DNA, 100 bp, Homo sapiens
tgaacagaagagggctcaacttagccaatattttgatgctgtcaagtggataaagcaacatttatggttggcagctatggacctcggcctgaggagtatg

SEQ ID NO: 221654 - DNA, 78 bp, Homo sapiens
tcaccaaagactacattatgaacccaccactgggcaaagaaagtatccctttaccaggtcttactctgtttgctctgt

SEQ ID NO: 221655 - DNA, 100 bp, Homo sapiens
accttcatcacgaggccacccagtcccacttcaaacattcgtctcggaaaccccgcctcttacagtcacgagggatctcaagggcatttccctttgccca

SEQ ID NO: 221656 - DNA, 74 bp, Homo sapiens
tgggtatctgtcatggagcggcccaagacttgtggagatcacccaatcaggacattcactgaacaatgccaggg

SEQ ID NO: 221657 - DNA, 83 bp, Homo sapiens
gcccagaggactttcttccagcttctgctgtccttctttgtggagagcaagctccataatgggagaagtaaagaacaaagact

SEQ ID NO: 221658 - DNA, 75 bp, Homo sapiens
atccacctggagctgaggaaccggaccccggcagctgtgatgtgtccaatctagatcccaacttctcatttgaag

SEQ ID NO: 221659 - DNA, 100 bp, Homo sapiens
taggagagtggaaaatgcttatcacatggaagcagaggtgagtgaagatggcagagaggacgtgaccagcactcacccttgtccacctgcccagtggcac

SEQ ID NO: 221660 - DNA, 96 bp, Homo sapiens
tattaacctacttagatcgacttgcaacatatgagatgatgatgtgcctgcagatatggttgcagaagaatcaggtcctggtgcacaaaatagtcc

SEQ ID NO: 221661 - DNA, 101 bp, Homo sapiens
cataacgtccctgagccaacaaactgaagcagctccagcccatgtttctgaagggttaccgctgacaagattatagcatttgatgagctgaagactgatta

SEQ ID NO: 221662 - DNA, 83 bp, Homo sapiens
ggaggtcctgccgtccatgcggaagatcgtcgccacctggatgctggaggatcatccagcagctcgtcaacggcatcatcacg

SEQ ID NO: 221663 - DNA, 82 bp, Homo sapiens
cgagaaggcacggagtcgccgcggagcgcaggaacaagcacatcatgattgacttggggactggcaacaacaacaagattaa

SEQ ID NO: 221664 - DNA, 76 bp, Homo sapiens
gttttatggtgcactcttcagagaggaaggatatggagtaatagtactaaatcccaatgaaaactatattgaagta

SEQ ID NO: 221665 - DNA, 100 bp, Homo sapiens
acaaaggagagctccgtggagagaaggtcagctggttaagatgctgctttatacagaggtaactcgctatctggattttaaagtgactgaagggagcttt

SEQ ID NO: 221666 - DNA, 89 bp, Homo sapiens
ccaaagttaaacaagcctccgtcatccgtccttggctcaggatttggagagcttgcaccaccaaaaatggcaaacatcaccagctccca

SEQ ID NO: 221667 - DNA, 82 bp, Homo sapiens
cctgccctgggctggaacgaccctgcatcaagatggtgctcatgtggaccagtggtgacgccttcaagacggcctacttcct

SEQ ID NO: 221668 - DNA, 80 bp, Homo sapiens
ggctctggatagcaccttatggacaggtacaagaaaattccccaggacacagagctggtttggagcctttctttgatttt

SEQ ID NO: 221669 - DNA, 100 bp, Homo sapiens
gcgaccaacatcgagcagatttttaggtctttcgtggtcagtaaattccgggaaattcaacaggagctttccagctctacccttctccaaaagaagagcc

SEQ ID NO: 221670 - DNA, 100 bp, Homo sapiens
attgctatcctgctctacaagaactggacagactccaccacgtccacccttaggtcctccaggcccacctggtccaccaggtcctccacctcctggtcag

SEQ ID NO: 221671 - DNA, 98 bp, Homo sapiens
gccatcaccgagcgcttgatgtgcgcggagagcaatcgccgggacagctgcaagatctgcgatgagctgggagtgaagcggccatcttctgtgaaagt

SEQ ID NO: 221672 - DNA, 75 bp, Homo sapiens
gaagtcattcgcttccagaagaatcatggcacagaaccacaccctccaagattatcagcagaagaagcagtgcag

SEQ ID NO: 221673 - DNA, 100 bp, Homo sapiens
cgggctttgcagctgtgacccaagctggactggacacgactgttctatcgggtttggacagaggagccaaaggccaaatttccactttcagcagttttat

SEQ ID NO: 221674 - DNA, 75 bp, Homo sapiens
acagtgacagcgatgctgaggatcgaggaacgttgtctgatcaaatgatgccgtttggaaaaatttcccagcagt

SEQ ID NO: 221675 - DNA, 101 bp, Homo sapiens
gtgatgctggagaattataggaacctggtctccctggattgtagaaggcatgaaacaaaaaatgtggagtattgaaaatattgccttcggttctggtggag

SEQ ID NO: 221676 - DNA, 100 bp, Homo sapiens
tccggacctattcctgctagtgcaggcctccagcgtccgtctccaagagagtatgaagagagtgcgtctgtagggcagggaagatggcggacaagcgcaa

SEQ ID NO: 221677 - DNA, 90 bp, Homo sapiens
tatgaacaatccgtctggatcacggatgtaggaagtgtgagttcaactcatgcctacccaaagctggctccatatagaccagcaggacag

SEQ ID NO: 221678 - DNA, 75 bp, Homo sapiens
cgggaattgaagacataaccgatcctgcaaaggtgcccctgggcgctgggattgctctagcctgtaagtataatg

SEQ ID NO: 221679 - DNA, 100 bp, Homo sapiens
gggcggcggagcaacgttcgcgtcatcacggacgagaactggagagaactgctggaaggagactggatgatagaattattcctggtcgggtggcttccag

SEQ ID NO: 221680 - DNA, 80 bp, Homo sapiens
agggcaacttcgcggtggtcaagcgggccacgcacctcgtcaccaaggccaaggttgttttggaaaccgaaataacaaat

SEQ ID NO: 221681 - DNA, 100 bp, Homo sapiens
cggccaaaggccagtgactaccaacgtttggaccagaaggctaaagaattacctccaaagccattgtcaagaccacagcagtcatctgcaccagtccagc

SEQ ID NO: 221682 - DNA, 100 bp, Homo sapiens
tggctccgtgtccgacccctggaagctgatgctgctggacgccactttccggggtgcacagcaagtgggccgttgctccagggagaactgcaaatatctt

SEQ ID NO: 221683 - DNA, 82 bp, Homo sapiens
attttgctaactttgcacatttcaacagtcatgcaggatattggtgctggaaaaggcaaatactatgctgtcaattttccaa

SEQ ID NO: 221684 - DNA, 100 bp, Homo sapiens
caaaaaaggccggcggcgggtggacgcggcgcgcgaggacccgagccaggcggggacaggacggcggggcgagccagactagacgcttgaagcaaagctg

SEQ ID NO: 221685 - DNA, 100 bp, Homo sapiens
aggaggacgatgacacagaacgcttgcccagcaaatgcgaaggccagtacacaacaggccggggctcctcaggagtggggcttacggcagctgtgctgag

SEQ ID NO: 221686 - DNA, 75 bp, Homo sapiens
ggaccttctccctgcctggacccctactattgcaacaagaacccagtgacttgattgtaaaaatttacagagcgg

SEQ ID NO: 221687 - DNA, 143 bp, Homo sapiens
cccggcgcgagaggcccgggagccgccggccaggacgcccccgagggtgtagaccgcgcccctggagacatctgaatgggactccgagtgccttacatccctgcagccccttcctcttcctacacccccagcagcaaatgagg

SEQ ID NO: 221688 - DNA, 90 bp, Homo sapiens
ctgcgcgcccgggatttcgatctggacctggcctggcgggtatcttgcaatatattcagaactctccctcctagtgacagcaatgaattt

SEQ ID NO: 221689 - DNA, 82 bp, Homo sapiens
gcggtgtgaagaagaaagcagcaaaacgaccactgaaaacaacgccgagttcattgtcgaaatgctggacctgtagctgtag

SEQ ID NO: 221690 - DNA, 83 bp, Homo sapiens
ctggcatctgtaaggtgcggccgccgccggctcccattgtggtgggttgtgtcaccccacaatgtcactgttgctgagccccc

SEQ ID NO: 221691 - DNA, 75 bp, Homo sapiens
gacacttttgtccatgtcactgatctttctggcaagaaggatttgatgccctggatccctttattcccatcctgg

SEQ ID NO: 221692 - DNA, 98 bp, Homo sapiens
aggctccgccccctgcatgtctttgttggcaaacagttctgggggtcgtccgatcctgcagctgagatctgtatctgtggacctgaatgttgatccct

SEQ ID NO: 221693 - DNA, 90 bp, Homo sapiens
cttcctgcgcgcgcgcctgaagtcggcgtgggcgtttgaggaagctgggttcgagaacttgtcttggacaattgcaaatcaaatgatgga

SEQ ID NO: 221694 - DNA, 83 bp, Homo sapiens
cgctcgtctacttcctcagcagcaccttcaagcaggtcaaaatgcagatcttcgtgaaaacccttaccggcaagaccatcacc

SEQ ID NO: 221695 - DNA, 75 bp, Homo sapiens
gcgcacaggccggtggaatgggtccaggccgtggtcagccgcttcgacgagcagcacctggctgagcacgcagac

SEQ ID NO: 221696 - DNA, 98 bp, Homo sapiens
gctggaagcgcttcctggatgagaagagcggcagtttcgtgagcgacctcagcagaaaaattgtatggcgacttcttgagctggaagctagaggaaac

SEQ ID NO: 221697 - DNA, 108 bp, Homo sapiens
ctggttccaacgcgaggagctcatcgggcagattagcgacatccgagtgcagaacctgcaagacaatgcagatcttcgtgaagactctgactggtaagaccatcaccc

SEQ ID NO: 221698 - DNA, 100 bp, Homo sapiens
tctaggtatttggcaccaatgtgatggtgacagtggccaagtccttcgaggcaccaataaaatattgtgaataagtggaatacagctctcattggcctta

SEQ ID NO: 221699 - DNA, 95 bp, Homo sapiens
tgagaaaaataccacctttgatacttttaaggcttctctcgtcaaaaatggtgcagaatttacgccaataatttctgaagatcagacagcagccc

SEQ ID NO: 221700 - DNA, 85 bp, Homo sapiens
cgagaccaagcgccaactagctctgcagcagaaggatgttcagcccacaagagcttactggtgaaggaatgggacaagacccatc

SEQ ID NO: 221701 - DNA, 75 bp, Homo sapiens
aatggaagacgcttgtgaggcgggctgtgaggtcgttgaaacaagtaccacaaagcctgctccacacctggatgg

SEQ ID NO: 221702 - DNA, 100 bp, Homo sapiens
gtttgcggttcaggtttggccgctgccggccagcgtcctctggccatggacaccccggaaaatgtccttcaggcccagtctatggcatgaataggcttcc

SEQ ID NO: 221703 - DNA, 75 bp, Homo sapiens
accggctgccgccgccgccgccgccagagccctggctgcccagttgccagtcctaccacggtcggaggtaacctt

SEQ ID NO: 221704 - DNA, 100 bp, Homo sapiens
tggagatgtactgggcaggactgactgtagcagtggagatgcttctcggcccagtagtgacaatgcagatgattggttgccgtggtctttactgcttttc

SEQ ID NO: 221705 - DNA, 74 bp, Homo sapiens
tttgatgaccatgatcctgtggataaaatcgtatggaaatatcggctcatcaaattggggtctcaatttgctac

SEQ ID NO: 221706 - DNA, 98 bp, Homo sapiens
tcttttttgtcttcattcactttcccccctcagtttctgaaatgattctccagaatttctcctcataaaaaagaatgtataataagatgtggcatcag

SEQ ID NO: 221707 - DNA, 80 bp, Homo sapiens
cgagctcgttggagcttgaacccattgtcacccctccggatgacgcggcatggcaagaactgcaccgcaggggccgtcta

SEQ ID NO: 221708 - DNA, 117 bp, Homo sapiens
gtggaggagctgtgcagccgcgaggaggcgcgggaggtgttcgagaacgaccccgagacgactcactgccacaacgacattgtcaaccttctcctggactgtggggccgacgtgaac

SEQ ID NO: 221709 - DNA, 101 bp, Homo sapiens
tatctggtgaaatggagaggctggtcgcccaagcaaatgaagatgtgacacagattgtggagattctccattctggacctagtaaatggaactggcttacc

SEQ ID NO: 221710 - DNA, 101 bp, Homo sapiens
cccaagaagaccattcagatgggatctttccggatcaatccagatggcagccagtcagtggtggagtctctgctggatgaaccgaatcctaacagtccagc

SEQ ID NO: 221711 - DNA, 89 bp, Homo sapiens
tccggaggcccggccacctctgagaagggagacgacgctgctgggtccgctgagcggggcgacccgagactgatttccgattctactgg

SEQ ID NO: 221712 - DNA, 80 bp, Homo sapiens
aggaaggaacgaggcaaggagctaaagcagcgtgcgttcagccctggggttgtgcagcctgactctgaagaagctggtgg

SEQ ID NO: 221713 - DNA, 75 bp, Homo sapiens
gcgttcacaagacttcatcacctctttgtacatcttctgcaattactcggaactgtggctgcaccatctgtcttc

SEQ ID NO: 221714 - DNA, 75 bp, Homo sapiens
gcggagactgcgggcccgtagctgggctctgcgaggatgccatgtgcgagactatggagcagcagctctcctcgg

SEQ ID NO: 221715 - DNA, 100 bp, Homo sapiens
tactcctcccagtgacgggtctggagtgcgtgggggaccggctgttggcggctgtccccaatctcttcatgctggaaacagtggattctgtgaagttggc

SEQ ID NO: 221716 - DNA, 82 bp, Homo sapiens
atcgagccttggcggcggacgtgcagccctgccaggagcccggaagtgggtccgcacgagacagaatagactacactcaaac

SEQ ID NO: 221717 - DNA, 74 bp, Homo sapiens
gaggcacgaggagcccaagaccatcactgacgagtttgagcagacaatgcagatcttcgtgaagactctgactg

SEQ ID NO: 221718 - DNA, 90 bp, Homo sapiens
cgggctgaagcgactgagtccgcgatggaggtattgatgaagatgaccctactgctgatgataccagtgctgctgtaactgaagaaatgc

SEQ ID NO: 221719 - DNA, 75 bp, Homo sapiens
cgccgctgccgcctccgagcagcccgccagcctcacctgagtcaccttccaagttgttccatgggctcctggctc

SEQ ID NO: 221720 - DNA, 100 bp, Homo sapiens
agttttgactagcggaagaaaagggatttcgcgttgatctgcccattaagtcggcccgttaccgaggacagtacagcagctaccccatcaaactcttcta

SEQ ID NO: 221721 - DNA, 82 bp, Homo sapiens
cagcctcccgagtggctgggattacagggagaaaagatccatgaggacatttttgacatcatagaccgggaggcagatggta

SEQ ID NO: 221722 - DNA, 106 bp, Homo sapiens
cttgatttcaggaatattacgtgttttagaaaagatgtcctcctcgcactttcttaccagccctttgcaaaatttttcttgatgaaagtgctccagacaatgtatt

SEQ ID NO: 221723 - DNA, 90 bp, Homo sapiens
tgcggagacacgggtgctgggccggaccatggccaacctggagcgcaccttcatcgccatcaagccggacggcgtgcagcgcggcctggt

SEQ ID NO: 221724 - DNA, 74 bp, Homo sapiens
gatctatatcactgcttattagaacatttgcagagaattggaggaagtgaaacctgggaagaatgtgctcaaag

SEQ ID NO: 221725 - DNA, 80 bp, Homo sapiens
gtctggatgctggtgccactaatattggccggagccctcatgacttcagtgacctgcttctgcccctctaggtctatcag

SEQ ID NO: 221726 - DNA, 90 bp, Homo sapiens
ctcgggatatcgccaatgtgatgcagaggctgcaagcacaaacatttcactgaagatattcaaacaaggcaatatcgttccttggaagtt

SEQ ID NO: 221727 - DNA, 78 bp, Homo sapiens
gacaggaaccagctcgggggccaactctgaggagtccactgcagcaggcggaattctccacgagttttgagcagcctc

SEQ ID NO: 221728 - DNA, 83 bp, Homo sapiens
cagaaaacgagaggctcaccgcagtcgtgcaggatctgaaggagaatcttccctggagaaggagagggagactcccagtccca

SEQ ID NO: 221729 - DNA, 51 bp, Homo sapiens
cgcctgggggcaccgctgccgttccgagggcagcgggtggcatgagacgtg

SEQ ID NO: 221730 - DNA, 78 bp, Homo sapiens
caacctccgcctcctgagttcaaagatcacctcctacaccactggattgccctgctggctgactgccccatcactgca

SEQ ID NO: 221731 - DNA, 89 bp, Homo sapiens
gcacttccggtcacgccatcgttgctgccttcttcgtcaagctggactgggcagcctttggggtcatgacccttccctccatcggcatc

SEQ ID NO: 221732 - DNA, 100 bp, Homo sapiens
gccggcggcggctgcgggctgagcggcgagtttccgatttaaagctgagctgcgaggaaaatggcggcgggagtattctaccttgtaaatactgttattt

SEQ ID NO: 221733 - DNA, 100 bp, Homo sapiens
ggaagccatcagcagtgccatccagcttctagaagacccattacagagggaatacctcaatagcattctccagcatgccaaggatttcaaggaatatcac

SEQ ID NO: 221734 - DNA, 75 bp, Homo sapiens
gtggctgtcgtggaagcagtgaggtccattcccgagtatcaggctgtgtgtctcagcacttgctatggatagctt

SEQ ID NO: 221735 - DNA, 90 bp, Homo sapiens
acgaggagcgattcctcaagaacagtggcaggttttaagaagcaaatggcagatactggaaaactgaacacactgttgcagagagccccc

SEQ ID NO: 221736 - DNA, 82 bp, Homo sapiens
tctttcaccagagaattactacagggacatctgcccccaggcagaagctcctcctggggtagagacagatcttattgatgtt

SEQ ID NO: 221737 - DNA, 98 bp, Homo sapiens
ttcacaacaacaagtgcatccctgagtgtccctccgggtacacgatgaattccagcaaccgcctgtcttggttagatggctctggattaggattctca

SEQ ID NO: 221738 - DNA, 50 bp, Homo sapiens
gatgcatcaaagagctgacctatcagacaccaaaggctctattccctgct

SEQ ID NO: 221739 - DNA, 96 bp, Homo sapiens
gttattagttctctatatcatgaagaaaccatcagagatgcccgagtggtaaaagacatggcaacaggaaagtctaagggatatggctttgtctcc

SEQ ID NO: 221740 - DNA, 100 bp, Homo sapiens
gaaacccccaagttctgcagccagtgcggagagaggctgcctcctgcagcccccatagcagctgagatctgtatctgtggacctgaatgttgatccctcg

SEQ ID NO: 221741 - DNA, 100 bp, Homo sapiens
gccagagtacacgctcctcacagagcgaggcctcccgcgccgcagggagtttgtgatgcagattggagctggagtgagccttccaggaattttggctgcc

SEQ ID NO: 221742 - DNA, 89 bp, Homo sapiens
ctgaagatcctgccctgccctgggaacatcgacaccctcatcgttgacgtctaccctgtgctggacacccctgccaagcaggtcctgtg

SEQ ID NO: 221743 - DNA, 90 bp, Homo sapiens
tgcgcgtaccgcgctctttggaaacgaattgaccaagaatcgccttcagccctgtctggtgcatccttggcagaaagtgaggaggaaaac

SEQ ID NO: 221744 - DNA, 75 bp, Homo sapiens
ggaaaaccagttattgaatatcaagaggaggagttgttgattatttctcaagatgaagctgacagaagagggaaa

SEQ ID NO: 221745 - DNA, 90 bp, Homo sapiens
gctgtggtacttctcgcagtccccgcgcgtggtcatccaggctggagtgcagtggcgagatctcgactcactgcaggctccgactcccca

SEQ ID NO: 221746 - DNA, 75 bp, Homo sapiens
ctgataacaccttaaacctcctctggattcaagttaaagttgatgcggcagttatatcatgaatgtacgcttgtc

SEQ ID NO: 221747 - DNA, 100 bp, Homo sapiens
tcgatctgcaaaacctcatcgactcccttcagaaagctgagtctcaggagcaggggctgcggcagaggctgctggacgagcagttcgcagtgttgcgggg

SEQ ID NO: 221748 - DNA, 75 bp, Homo sapiens
ggacgcggatttttggcctcatactctgttatagataaacaagttttatctccatctcgaagtgcaagagtccag

SEQ ID NO: 221749 - DNA, 83 bp, Homo sapiens
caggcctgcgtccgagtctccgccgctgcgggcccgctccgacgcggaaggtgaaaggtgtagcagtcactcggcctacaccc

SEQ ID NO: 221750 - DNA, 75 bp, Homo sapiens
tgatcgcctgggtggttgttggcgtgtccctgcagcgaaggatcctgatagcctgggctggaagctcttctacgt

SEQ ID NO: 221751 - DNA, 100 bp, Homo sapiens
aagagcttctctccagagtagaaagagtaagaaggcagtgctttccatcaccactggtggcagtggctccatgtactctctgcaagggatccacggggac

SEQ ID NO: 221752 - DNA, 51 bp, Homo sapiens
gttaagtcggctccaaggtgttggacggggaggtttactgcatcgacgcgc

SEQ ID NO: 221753 - DNA, 82 bp, Homo sapiens
ctacttggatgacctcacagacatggatcctgaagtggcggccctgtattttcccaaaaagatcctgcgcatccagaaagag

SEQ ID NO: 221754 - DNA, 100 bp, Homo sapiens
cgagaagaggcagcggcggtggcgccaagacgattggtgccaaacagggcagaacgcaactcagctctggggacttggaccctctgtggaacacccgagt

SEQ ID NO: 221755 - DNA, 97 bp, Homo sapiens
gtaccagccagcgccagctgcagccctggccgcgcactcgcctcagctgagcctggcctgcaggtcctggctctggcatccgagagagactggagca

SEQ ID NO: 221756 - DNA, 50 bp, Homo sapiens
gctccagcatcaagatccgtctgacagtttctctacccacatattgaaag

SEQ ID NO: 221757 - DNA, 83 bp, Homo sapiens
cccatgagccgagccaccagtggctccagtttgcctgttggaatcaataggcagcaagagtgagccatggagctacgtgtggg

SEQ ID NO: 221758 - DNA, 83 bp, Homo sapiens
ctacttcatggatgtgaaatgcccagacagaaacagtctccgccagtcaagaaaccctcaaaagtattttgccatggatatag

SEQ ID NO: 221759 - DNA, 90 bp, Homo sapiens
cagaaccagtcagcattctacaaccccagaccaccgttaatccagatcgcatcaaacaagaatcttcctcttcagtgaatacatccaaca

SEQ ID NO: 221760 - DNA, 100 bp, Homo sapiens
acaagctgtacgaaaagcggaaggtggcagcgctggagatcgagaaaacctgcacttgttgccaagtcttccatcttactagatgtgaaaccttgggatg

SEQ ID NO: 221761 - DNA, 76 bp, Homo sapiens
tgattatcttttagctctcagcactgaaagtacatgtgatgcagaaaagtcttacgaagtattactgagctttgtg

SEQ ID NO: 221762 - DNA, 80 bp, Homo sapiens
ctgggatccccgccgctctgtctacaacccgaggttcaaaatggaaagtatttattgaccaaattaacaggtctttggag

SEQ ID NO: 221763 - DNA, 51 bp, Homo sapiens
ggaaaagtgagaggtcagactcctaagctgttcgggggtcttgtctggatt

SEQ ID NO: 221764 - DNA, 51 bp, Homo sapiens
acagagatgagtttgcagtttggtattcatgggtagtttgaaatatccaga

SEQ ID NO: 221765 - DNA, 100 bp, Homo sapiens
gcgactcagcaagtttgactctgaacgcagcatcagctttatcccgccagatggagagtttgagcttatgaggtcaaaatgcagatcttcgtgaaaaccc

SEQ ID NO: 221766 - DNA, 132 bp, Homo sapiens
gaccagtgccaaggaggccatcaacgtggagcaggcgttccagacgattgcacggaatgcacttaagcagaaagaagttttcccatttccagaagttagccaagatgaacttaatgaaatcaatcagttctt

SEQ ID NO: 221767 - DNA, 100 bp, Homo sapiens
agtatccccgttcgccaccaattatgggagggctggccaacttctgctacagacgactcatttgtgaagaaatatgggaacctttttagcttggagcttg

SEQ ID NO: 221768 - DNA, 90 bp, Homo sapiens
cctttcaggaaggagccattatttatgtcatcaagaagaatgacgatgctccatttatcttaaagaaattggacagcatatgaagacagg

SEQ ID NO: 221769 - DNA, 50 bp, Homo sapiens
gctgccctgagacggtgtcccgccgaaagcatggtgttattgctacagaa

SEQ ID NO: 221770 - DNA, 50 bp, Homo sapiens
tggtggagacctcgcagattatttgcaagatgaagtctcgctctgtcacc

SEQ ID NO: 221771 - DNA, 100 bp, Homo sapiens
cccggggcaagagcaggagcccggcaccccccgccgacaaggaggagatgacggatcctttctgcgttggaggccgtcggctcccggggtccagcaagag

SEQ ID NO: 221772 - DNA, 50 bp, Homo sapiens
ccggagctcgtccagctgcgtgcctagaagcagctgacacaggatgatga

SEQ ID NO: 221773 - DNA, 98 bp, Homo sapiens
aaggagaatggctggcgtgctcgcagcgccttcaaactgctacaactggataaggaattccaactcttccaagagccctccgcgaggactggtggcag

SEQ ID NO: 221774 - DNA, 78 bp, Homo sapiens
tccagtgaaagggagaggaatccgaattctctcaattgatggtggaggaacaaggtggaagatgaaactgttttacat

SEQ ID NO: 221775 - DNA, 100 bp, Homo sapiens
cacgaccacaccgctgatgaagacaaggactcacagtggctgcaaggtagcacaggcggagtgcagcggaggcccctgccgctgccgtcatgccgttccc

SEQ ID NO: 221776 - DNA, 133 bp, Homo sapiens
gcggcctctacgaggtggatgtgacccaaggagagtgctacccggtgtactggaaccctctagccggcccggtccttggactgaaagaatgcaccaggggctcggcagtgtggtgccagaatgtgaagacggc

SEQ ID NO: 221777 - DNA, 119 bp, Homo sapiens
ctggtgtttatatctgtaaagtgaccaattcccttggtcaaagaagtgaccaaaaagtcatctacatttcaggtttgttggcatccaaagctgttggggttgatggtgctgaaaaaaag

SEQ ID NO: 221778 - DNA, 101 bp, Homo sapiens
ggcccgtaagctggtcatcattgagagcgacctggaacgtgcagaggagcgggctgagctctcagaagggaaggatggcttcctggccttccaaactagcc

SEQ ID NO: 221779 - DNA, 75 bp, Homo sapiens
tactactataatgggaaagcggctaccaagcagtttctcgaagagattaacaagtggacagttcagtacaatgtt

SEQ ID NO: 221780 - DNA, 100 bp, Homo sapiens
gcagtctctggacaagatgaccacactccaggaatgccagtgcatcttttgcacagctgcagttgtgaaaaacttcaggacaaaaatgtttcatttaagg

SEQ ID NO: 221781 - DNA, 83 bp, Homo sapiens
ccgccctggccacggggactctcttctggatggacgtgaccacgcagtctgtgatggggtttgatcctctgcctccttcggac

SEQ ID NO: 221782 - DNA, 100 bp, Homo sapiens
tttcttctgacttgagcctgcagtgtgctgtgagagatctaccactagtaataaaagactagtggccttagtgcccatgcccagtgaccctccattcaat

SEQ ID NO: 221783 - DNA, 100 bp, Homo sapiens
gtccgtgcggcagcagctccagagctttgtcaaagagttctgctccagacgagcccttaccacgttgactcactcctgcagctcagcgatgcctgccgct

SEQ ID NO: 221784 - DNA, 100 bp, Homo sapiens
ctctagtcaacttccgacttggactccgaagatcgacaatgcagatcttcgtgaagactctgactggtaagaccatcaccctcgaggttgagcccagtga

SEQ ID NO: 221785 - DNA, 75 bp, Homo sapiens
aatgttggcaagtggagcagagtcccaggacagagccaagagctgggtagagctgcaaggacaccgcctgcacag

SEQ ID NO: 221786 - DNA, 100 bp, Homo sapiens
gaagaacagctgtggaaagaagttgcaaaacactggaacattctagtatgccagtagaaaaaaatatcactttagaaaggccttctaatgtaaatctcac

SEQ ID NO: 221787 - DNA, 98 bp, Homo sapiens
tgtaaacatcaaaagaagacggtgggatcaggagatgcttactacctgcccaaggatgatgagtattaccagttctgctatgtggatgaggatggtgt

SEQ ID NO: 221788 - DNA, 75 bp, Homo sapiens
gtacaaccttcaaaacaactggaatatttagcaaggattcaaggctttcagggaggtggggaagacagggctcca

SEQ ID NO: 221789 - DNA, 95 bp, Homo sapiens
aacagcacccggacggactacgagtaccagcactccaatttgtatgccatatcagcccaggagttaaagtcactgtttgaaaaaaaatctctcaa

SEQ ID NO: 221790 - DNA, 74 bp, Homo sapiens
actttggttacctatgtacctgttaccactttcaaaagctctgaacaagaaggaacacagagggtgcgacagcc

SEQ ID NO: 221791 - DNA, 75 bp, Homo sapiens
gtgacagcgagagcggcccggacgacaaggtccctggtgctgaaccgcctgcgtccagttgccagcgggggtggg

SEQ ID NO: 221792 - DNA, 100 bp, Homo sapiens
cttacagtaatctcatattaacagcatatcgcacggatgactgccatccctgggttttgccagtagtgaagaaagtggagcagaagattgctaatgacaa

SEQ ID NO: 221793 - DNA, 83 bp, Homo sapiens
cttgcatgcacattgctgctgggagtacgttgttcagtggaataaagatccagaggccatgtggaaccaggagaggatgactt

SEQ ID NO: 221794 - DNA, 90 bp, Homo sapiens
agaaattagacaagaaacattggaaaagaaatcctgataagaactgctttggctacaacagaccaaaagcttatattgctgcccaaggcc

SEQ ID NO: 221795 - DNA, 99 bp, Homo sapiens
aggtggcagaagcaagtacgccaaaatctgctttgaggataacctctgcagaagaaagatcagcaactggagcctaaaaaaagtaccagccctaaaaaa

SEQ ID NO: 221796 - DNA, 100 bp, Homo sapiens
caaaagatcagcgaggagcagcagcagctccagcaggcgctggctcctgctcagctctgtcacctaggctggacttcagtggcacaatgttggatcacta

SEQ ID NO: 221797 - DNA, 83 bp, Homo sapiens
gtctcttctcgccctggcggggaaggagcatcagatccatgctgctgctgactcggagccccacagcttggcacaggctctct

SEQ ID NO: 221798 - DNA, 75 bp, Homo sapiens
agtgaaggctccttcctgctaaccacctgtagctggaaccactataacatgcagtacgcactagcagtttccaag

SEQ ID NO: 221799 - DNA, 100 bp, Homo sapiens
cggggaggaggatgggggctaaccagttagtggtgctcaacgtgtacgacatgccgatatttaaataaggcttttcatatctggtccaagaaagaaaaat

SEQ ID NO: 221800 - DNA, 89 bp, Homo sapiens
gaagaaacccagcttgatatgttgagctacagagacttctgaagtggagagtctgcgacctcctcggttcttcaatgaagatggagtta

SEQ ID NO: 221801 - DNA, 90 bp, Homo sapiens
ttaaaaattccgccgaaaaagagaagacgctttacccgactctttgggccgttatctcacgttaatttggagtggcccctggagtcagtt

SEQ ID NO: 221802 - DNA, 75 bp, Homo sapiens
cagggagaccaggacagaccaagagaataaggaccctaccttcacggcatggtgcaactcccacctgcggaaggc

SEQ ID NO: 221803 - DNA, 80 bp, Homo sapiens
cagcttttaatgaagatgaagatgtatattgaagcaagtcaaagattacattaaacagtgtagcaaatgccaggagaaac

SEQ ID NO: 221804 - DNA, 75 bp, Homo sapiens
ccaaatatgattacaggagcagcccagttgatcccgctcttgaactctgtagactctgataattgtggatctatg

SEQ ID NO: 221805 - DNA, 71 bp, Homo sapiens
ataatccaccatcaatatatctggagatctggagcagcaaccatttgttccccagtgcagagaaagcgact

SEQ ID NO: 221806 - DNA, 51 bp, Homo sapiens
caagtggacattttactggctcaagtagttggcaaaaaaggagaaagccac

SEQ ID NO: 221807 - DNA, 95 bp, Homo sapiens
gcctgcggaacgaaagtgaacaggagccgctcttaggcgacacacctggaagcagatattaacctggctgcagagccaaaagtgaaccgaggaaa

SEQ ID NO: 221808 - DNA, 98 bp, Homo sapiens
ggccaatgtgggatcgatgtttcaatattggaagcgctttgatttacagcagctgcaggtcatattgaacattccagatacctatcattactcgatgc

SEQ ID NO: 221809 - DNA, 75 bp, Homo sapiens
cattctccttgaaggcaaatggtggagccgccaccaaaatgcagattttcgtgaaaacccttacggggaagacca

SEQ ID NO: 221810 - DNA, 75 bp, Homo sapiens
accatgccgctcctaagcctgcacagccgcggcggcagcagcagtgagagaagtccattggaatattaagcccag

SEQ ID NO: 221811 - DNA, 100 bp, Homo sapiens
tgtcagccttcccagtagctggaactacagaatacttggctttctctgactcaagtaaatgggtttttgagcaccctgaaaccctctacgcctgggaggg

SEQ ID NO: 221812 - DNA, 100 bp, Homo sapiens
gatcccagacctttggggagaaggagcaaccgcctctggcacagcccatcagggagaaagagcagagtcagcgtgggagaaattgtaacgagaaaccaac

SEQ ID NO: 221813 - DNA, 75 bp, Homo sapiens
caacgacattgtgattggcatcctggagctgctcaagttcccagtgcccccgacaagcccctgctggtgtctcca

SEQ ID NO: 221814 - DNA, 73 bp, Homo sapiens
gccacgccgcacctgcgcaacctcgccgtggccatgtgcagccgctacgcgtcacaatgtagcagggacccca

SEQ ID NO: 221815 - DNA, 97 bp, Homo sapiens
cccttctcaccgaggaagagcgggagaaagggcattttgttcccaacatcacctttggtcaccctgtggtagaaagccttcgaaagcagctaggcca

SEQ ID NO: 221816 - DNA, 99 bp, Homo sapiens
tattaatctaaaagaatatgatccagatgatcatctgatagaagagttttctggatatgccgcagaaggatccgtgccagaagcaagcctgtgagatac

SEQ ID NO: 221817 - DNA, 95 bp, Homo sapiens
gaggctgcaaagaatgctttgaattccagggaccttgacccagcccctctcagcagacgcttcatgataggaaggactgaaaagtcttgtggaca

SEQ ID NO: 221818 - DNA, 100 bp, Homo sapiens
tgctgctcttcatcctcttctgcattgggatgctggtggatagcgaggtggtcatgctttctgcgcactgggagaagaaaaagacaagcctcgtggagct

SEQ ID NO: 221819 - DNA, 100 bp, Homo sapiens
gacatatgatcttctgtcagtcatttgccatcatggaactgcaagtaaggcggggtttcaccatgttgcccagactggtcttgaactcctgagcttaagc

SEQ ID NO: 221820 - DNA, 100 bp, Homo sapiens
catggcatcgaacagcatcttcgactccttcccgacctactcgccgaccttcatccgcggtattttgaaggtggcgtctcatctgtctacctctgggatc

SEQ ID NO: 221821 - DNA, 75 bp, Homo sapiens
ggcacatgtttccgcggagcggacccagcaatgacgttgattgatattacaggcaagaaccaggatgaatgtgtg

SEQ ID NO: 221822 - DNA, 75 bp, Homo sapiens
gaagaaagccctgtgtgtcctcgtccaacataacctgcccaggagttctgtttccgaagaaagagccagatgatt

SEQ ID NO: 221823 - DNA, 75 bp, Homo sapiens
caacaagaaaactggctctgcaaaagaatgtgatttgtgacaaatgtgaagacctcagaaagtactactacagta

SEQ ID NO: 221824 - DNA, 97 bp, Homo sapiens
tcggcgcaggcgcactctgccggcaacgccgaggcgcttctgcatctgtgggccgaggtactccaaagattcaggtttactcacgtcatccagcaga

SEQ ID NO: 221825 - DNA, 100 bp, Homo sapiens
gcaacttggaccaagaactcaaactttttgtatctcgacactctgcaagattctctcctgaagtcccagatgacattaatgctgataagaatatctcttc

SEQ ID NO: 221826 - DNA, 100 bp, Homo sapiens
aaaatgtcaacaaattgatggaattcaaggaagccttctccctatttgataaagatggcgatggcaccatcacaacaaaggaacttggaactgtcatgag

SEQ ID NO: 221827 - DNA, 100 bp, Homo sapiens
gggcgtggccgtgatacagttcgccgtcggggagcaccgagcccaggctgaagactttaagtgacaagtcaagagaagcaaaagtgaaaagcaaacccag

SEQ ID NO: 221828 - DNA, 83 bp, Homo sapiens
gaggcctcccgggctccgggaaaactacactggccaggactatacaggctccaacccaagttccagtggttgtgtctcctagg

SEQ ID NO: 221829 - DNA, 100 bp, Homo sapiens
cgcctgcgcctggagaggatggaccgcatcgagaaggagcgcaagcaccagaagtggcctgattccaccaagagaaggcccaggaggaagaagagaaaaa

SEQ ID NO: 221830 - DNA, 98 bp, Homo sapiens
tggaaacagttgatcccgagctggctgctagtggagcgaccttacccaagtttgataaagatcggcctaggaaaaactattcaagccattgcatttct

SEQ ID NO: 221831 - DNA, 75 bp, Homo sapiens
tggagatatggcgcaactgcggcgcggtgcaacaccggaggatttcagcaacctcccacctgaacaaagaaggaa

SEQ ID NO: 221832 - DNA, 82 bp, Homo sapiens
gaaagtcctctcgggagaagcagcgcctgttcccggggcagatccaggttcagacatgggaaagcggaaccaccaaaaggag

SEQ ID NO: 221833 - DNA, 90 bp, Homo sapiens
actttgcgttcgggctgggagcgtgctttccacgacggtgacacgcttccctggattggcgagaaccctctgcccacagtggagattgcc

SEQ ID NO: 221834 - DNA, 82 bp, Homo sapiens
ttggactgagtcctgcaggacacaggtgcctgtggcatttgatgatgtctccatctacttttccactccagagtgggaaaaa

SEQ ID NO: 221835 - DNA, 82 bp, Homo sapiens
gctgaagcgactgagtccgcgatggaggtacttcgtactggatttcgaggctggcatcctgcagtattttgtgaatgagcaa

SEQ ID NO: 221836 - DNA, 83 bp, Homo sapiens
gagcaagaagcagcccaaagtcgaatgattcagacttgcaaggcaaaagatgtgattgaagagcatggtccttcagaaaaggc

SEQ ID NO: 221837 - DNA, 74 bp, Homo sapiens
tggacgccggtggagacgcaggcgagatatcagtagctgatcttccgggtttaatagaaggagcacatatgaac

SEQ ID NO: 221838 - DNA, 75 bp, Homo sapiens
cttgccatcctgaccacctcctttgtttctatcagaagtggaaacagaaacagaaaattgatgatcgtgactcgg

SEQ ID NO: 221839 - DNA, 82 bp, Homo sapiens
ctctagctattgccttattttttctcatggatgttcttcttcgagtatttgtagaagggaaccactcgttttgactattatt

SEQ ID NO: 221840 - DNA, 75 bp, Homo sapiens
ggacattttggaccagggagccctacagcgtctcttcaaaaagagatgggggtttcaccctgttgcccaggctag

SEQ ID NO: 221841 - DNA, 83 bp, Homo sapiens
tggctgactacctgctgtacaccctcaacaaacaccagcgctttggaatgagtctgcaggtcttaaacgacaaaaatgtcagc

SEQ ID NO: 221842 - DNA, 98 bp, Homo sapiens
gagattggaagtggcggcggcggcaggcggcagaggggagcatcttcatgatacagttaagaggaatcttgacagcgccacttcccctcagaatggcg

SEQ ID NO: 221843 - DNA, 122 bp, Homo sapiens
ccgagatgtctcgctccgtggccttagctgtgctcgcgctactctctctttctggcctggaggctatccagcggaccagaagcgcaggcccgctcaggaggaattacaacttcatcgccgcg

SEQ ID NO: 221844 - DNA, 100 bp, Homo sapiens
ggactctgagtcgtcttggtcccaggagccagtagtgaaggcaacagtctgcccacctgtggacaccagtggtttgctaagaaggccattttcaactctc

SEQ ID NO: 221845 - DNA, 75 bp, Homo sapiens
tcagttggaagcagccgatccagcctgcggagcctgtggggcaggcaatgcatgaaccattgcaaacttggcaag

SEQ ID NO: 221846 - DNA, 50 bp, Homo sapiens
ggtggtctggggcaacgcggaagcttcgagagctgtgcccaggagtgaac

SEQ ID NO: 221847 - DNA, 100 bp, Homo sapiens
atccttaagttcgtcgtcttcatcgtcgcggttctgctgccgatgatgaggagtctgatgaggaagctgtgaagaaaaccaacaaatgtgtactagtctg

SEQ ID NO: 221848 - DNA, 75 bp, Homo sapiens
acctgtcgcctgccagctctgcgacagggtctcactgtattgcccaggttggtctcgaactcctggcttcaagcg

SEQ ID NO: 221849 - DNA, 83 bp, Homo sapiens
cgcgggtctgtcatcatgtcgcgttacgggcggtacggaggagacaagcagaatgatgtggagatcccatctcctacccagaa

SEQ ID NO: 221850 - DNA, 75 bp, Homo sapiens
cgggggacccgcccgccatggccaccaagacctgcctagagctggaacgttacctccagagcgagccctgctatg

SEQ ID NO: 221851 - DNA, 119 bp, Homo sapiens
tttgtattctgcaataaaacccagagtaaactcttagataaaatgacgacgtccttctggaagaggcgaaactgaattttgatttggctgctgggctgctaccttgaaatccaagccct

SEQ ID NO: 221852 - DNA, 82 bp, Homo sapiens
agaagattggtggagcttgatctgaaggctgggagtcctccgtcagcatcagctccggctccggtgtcctccttctctcgca

SEQ ID NO: 221853 - DNA, 98 bp, Homo sapiens
caagactggtccacggagtgtatgaccacaaacagccatcaaggatttgggggttctttcatggcgccttccccatctccagtgactccagctcagaa

SEQ ID NO: 221854 - DNA, 83 bp, Homo sapiens
tgaaagcagaaccaactcggatattgttgagacaatgcagatcttcgtgaagactctgactggtaagaccatcaccctcgagg

SEQ ID NO: 221855 - DNA, 90 bp, Homo sapiens
cgcgcgacgtacccgccgccgccgttggctggagatgaagaaagttctcctcctgatcacagccatcttggcagtggctgttggtttccc

SEQ ID NO: 221856 - DNA, 75 bp, Homo sapiens
ctgcacattaggttgcagtatgtggccagttatttgcctcagtaaaagaggctcaagggttcttgttgatgcacg

SEQ ID NO: 221857 - DNA, 88 bp, Homo sapiens
tcccatgacctgcttgtgaacctggcccgggacctgcagtgccccaagaagtctatgggtcttttggacaagaagagtttgaagatct

SEQ ID NO: 221858 - DNA, 82 bp, Homo sapiens
ggaaaatggctccgagcagggaccgcctgctgcactttgggttcaaggcgacattacagaatgtctgaaggggacagtgtgg

SEQ ID NO: 221859 - DNA, 100 bp, Homo sapiens
gagaacgtcccgctggatctgacccgaggatctcctgtatcgaaggtctaggtcactagtggattatgaaaatgctaataaagcactggataaagcaaga

SEQ ID NO: 221860 - DNA, 95 bp, Homo sapiens
aaccaaaggccgaagtacaagatctaaggctcttgtctggaaagtccatcagcttgataatggaggagaacaatgactccacggagaacccccaa

SEQ ID NO: 221861 - DNA, 74 bp, Homo sapiens
taataatgacaatctcctcagggaaggggcagcacatggtctcacgtgtgaaacatggctacagattggctggg

SEQ ID NO: 221862 - DNA, 83 bp, Homo sapiens
catgccgctcctaagcctgcacagccgcggcggcagcagcagtgagagcttggtttatggcagctccaggacctcgcaccccg

SEQ ID NO: 221863 - DNA, 56 bp, Homo sapiens
ggaccatctatttcaaaaggagttagcggcccagctagacaaaaagcgggatgact

SEQ ID NO: 221864 - DNA, 97 bp, Homo sapiens
aagacggctgagcagacagccagcagatatgaggcttttctctagggtgaaggtacactcgagcgtggtcattgaggacaagtcgacgagagatccc

SEQ ID NO: 221865 - DNA, 99 bp, Homo sapiens
gccaatcaaactgctacaagacaacaccctgatctggcatggacatgatgtgaacctgaagatgccccggaacaaccagctgctgcacttcgccttccg

SEQ ID NO: 221866 - DNA, 74 bp, Homo sapiens
gttagagcctacgttcctgcactgcagatcaagcttcaggagtctccggaagacatgcctgcagggcagacacc

SEQ ID NO: 221867 - DNA, 98 bp, Homo sapiens
agtgggacgcgcactggtcggtgccggctcaggagccggggatgaaggtgaccaagcagcaagtgttgaagagctggaaaaacagattgaaaaactga

SEQ ID NO: 221868 - DNA, 90 bp, Homo sapiens
gaacgaaactttccggaagtttgtgggcaacctggagctcatcgttggctggtataatgaggaggcaagtgaggcctatctggttggcct

SEQ ID NO: 221869 - DNA, 100 bp, Homo sapiens
cacggtccaagtcccagcccaagaaagaaatgaaggctaaatcacgttctaggtagatatagttgtaggtactccgggaagactagatgacttggtgtca

SEQ ID NO: 221870 - DNA, 74 bp, Homo sapiens
gtatcctggaggacaacctacttaccctagtcagagttgaagtattgataacaccaaggaactctatcacaatt

SEQ ID NO: 221871 - DNA, 87 bp, Homo sapiens
taaggattccaagtaactcttatttgaaacgtgttcagttgatcatcaaatacttaaaggaccttgaaagcttgtctggctctaatt

SEQ ID NO: 221872 - DNA, 104 bp, Homo sapiens
cccctcaacacggaccgcgcccgccgggcacacaagaatggtcactatgcaaataatacggcactccgaacagacactaaaaacagctctcatctcaaagaacc

SEQ ID NO: 221873 - DNA, 100 bp, Homo sapiens
gacaatgatggggctcttccccagaactacaggggctctggccatcttcgtgaggcggggtttcaccatgttgcccagactggtcttgaactcctgagct

SEQ ID NO: 221874 - DNA, 83 bp, Homo sapiens
cccgagaacgtgcgggaagagaagatcatcgagcatttcaaacgattttgcaagaacgaggctcaaggatgtgagggacacag

SEQ ID NO: 221875 - DNA, 83 bp, Homo sapiens
gcctcggcggccgctctgcctgcgcgctgctcctgctctgctacctgggacctcaggatggaaaccagcagcctgcaccgccc

SEQ ID NO: 221876 - DNA, 83 bp, Homo sapiens
gtttacaccaaaagctcccacttgaaagcacaccagcggacgcacacagacacagccgccagcccaaacagcagcggcatggg

SEQ ID NO: 221877 - DNA, 98 bp, Homo sapiens
ggagactgtgccgtggagggcctcgccatgtcctgctgcccgattgaaaaggaagatcaggccaaccccaaagaagaagtgaccaaggaggagtttaa

SEQ ID NO: 221878 - DNA, 99 bp, Homo sapiens
agctgcgcccgctgccagcacacgactacttcgagttcttcgccgccgacctgaggtatgagttgccttttgataggcacgattggatcataaaccgtt

SEQ ID NO: 221879 - DNA, 75 bp, Homo sapiens
gttatatcctccaggaatactggccaggacttggcagatgaacttgctcttgttgatgtcatcgaagacaaattg

SEQ ID NO: 221880 - DNA, 100 bp, Homo sapiens
gaaactagtgccttgttaatactggaaaagataacagatagaaacctcatcaatgcaaccaacgcagccttgcaaactttgactgtgaaacatctaggtt

SEQ ID NO: 221881 - DNA, 51 bp, Homo sapiens
tgcgagggagcgatgcggtgcagcgcggagcgtgaggatcatccccggaga

SEQ ID NO: 221882 - DNA, 97 bp, Homo sapiens
gcgcccctccgagctggggttggacgctgccagtttgcacagcagcaggtattagaaaactactcggatgctccaatgacaccaaaacagattctgc

SEQ ID NO: 221883 - DNA, 101 bp, Homo sapiens
tctcccggctgtgggggccccactgagtatgtcggaggagagcgacatggacaaagccatcaaggtactaggttttgacaagcttgcatcatgcgtgagta

SEQ ID NO: 221884 - DNA, 100 bp, Homo sapiens
gtattcctccatcatatgctgaccttggcaaagctgccagagatattttcaacaaaggatttgccccgtgctgatcccattccaatatgtagcttctgtt

SEQ ID NO: 221885 - DNA, 83 bp, Homo sapiens
ctccagaaaatcttgtggacaaatccaggggaaggatgaaatctttgacatggtaaaaccaaaggatcctttgaaaatctctc

SEQ ID NO: 221886 - DNA, 50 bp, Homo sapiens
attttggctgctgcaggagccattttagacggatgtttccagtcctaaag

SEQ ID NO: 221887 - DNA, 98 bp, Homo sapiens
gcttccttctcaactgtgacaagtgcagatttcagagacaactgtctgaaccctgccaccccttccctcctcagccaggagttcctggagataatcgc

SEQ ID NO: 221888 - DNA, 100 bp, Homo sapiens
gccccccaggctgagtgcggcatgatctccatcaccgaatggcagagttgaaggtcgaggagctggaaggcgagcggagtcggctggaggaggaaaagag

SEQ ID NO: 221889 - DNA, 75 bp, Homo sapiens
tagtgaatatgatcaagttctcgtggagtcagacaatgagcatttcttctgaggccctgaagaagtatcaagtgg

SEQ ID NO: 221890 - DNA, 100 bp, Homo sapiens
taattttagggtcctttatatagaagggagagtagatacgtaggtaacctttccagagatgtgacagaagtccttatacttcagttgttcagtcagattg

SEQ ID NO: 221891 - DNA, 75 bp, Homo sapiens
ccggctcatggcatcaagtggcatccatcataagattgttgaacagataaatacgaaactgccatcatcatttgt

SEQ ID NO: 221892 - DNA, 90 bp, Homo sapiens
gacttcgtgctgatggacaccgtctccatgcccgagttcatggccaacctcaggctcaggtcgagctgtgtttagagtgcatcgaatggg

SEQ ID NO: 221893 - DNA, 75 bp, Homo sapiens
tcaaggcatcatctggaagcggcccacggatgcggagatctctgcctttgagctgcagaccatcctgagaagggt

SEQ ID NO: 221894 - DNA, 148 bp, Homo sapiens
ctgtgattgggtggaagatggcgctggccggatggaaatcctaatgacagtctccaaattcgcctccatctgtaccatgatggacggggagtccgaggaggagcaggagtccgtggacaccggggaggaggaggaaggcggtgacgag

SEQ ID NO: 221895 - DNA, 75 bp, Homo sapiens
cgaatatttaacttatatctgcctgtcagctccagtcagcccggtcaagcatgacagcaactcaaactcggcaaa

SEQ ID NO: 221896 - DNA, 100 bp, Homo sapiens
gttcttggagaagatcaataaaaactgctggaggatcaagaagggcttcgtgcccaacatgcaggtaaatgagctggatggtatcccgttgatcctggac

SEQ ID NO: 221897 - DNA, 75 bp, Homo sapiens
cggcactggcctttgacgcaagtggaactaaacttgccacggcttcggagaaggacctgaaggagaagaaggaga

SEQ ID NO: 221898 - DNA, 55 bp, Homo sapiens
gtcgcggaggagcgttgccattcaagtggccagcattggctgtggattggtttga

SEQ ID NO: 221899 - DNA, 50 bp, Homo sapiens
ggagattctgcggcgaatacgccaggttcaacagagtttggaaaagattt

SEQ ID NO: 221900 - DNA, 101 bp, Homo sapiens
cgcctccttgcccgtgaccgtcgctagaactcagttgtgcgttgcggccagtcgccactgctgtaggaatgaattgatagccagatacatcaaactcagga

SEQ ID NO: 221901 - DNA, 100 bp, Homo sapiens
ctgtattatacggttactataatatggaatgtgcagatgtcccactattaactccaagcagcaaagaaatgatgtctcaagcattaaaagctactttcag

SEQ ID NO: 221902 - DNA, 100 bp, Homo sapiens
acacccctgaagccgagaaatggtggcaagtgggatgatactggtcatggctttctttctcatcacctacacctttcattcaacctgggtgaccagtgag

SEQ ID NO: 221903 - DNA, 75 bp, Homo sapiens
ggccactgtctgtgaagcagccgccctggagaaacagatcggagagaaatatgaacttcacgcgggaacagagtc

SEQ ID NO: 221904 - DNA, 75 bp, Homo sapiens
tgctggaaaaaatgacatccagcgacaaggactttaggaaactttgagggaaattttgagtcactggaccttgcg

SEQ ID NO: 221905 - DNA, 100 bp, Homo sapiens
gtgaatcatcaccaggctgcttactggaaactggatgcagcaaggaaataggatttaaccgctctctgcctcccaggttcaggttcttcggaatgctgga

SEQ ID NO: 221906 - DNA, 82 bp, Homo sapiens
caggacgaaggccctactgggcaagttgattatggaagattcccacaagagtaccacgtcagagacagcacctcaacctggt

SEQ ID NO: 221907 - DNA, 75 bp, Homo sapiens
ctgacggtggaggttcgcggctctaacggggctttctacaaggagctcgaggccatgagcagatataccagccca

SEQ ID NO: 221908 - DNA, 100 bp, Homo sapiens
tggaggcgcaagctgcttgcccagaagtaccatgacaacgcccaattaatcacagaggacatgtactcccaggattccatagatctccttgctaactcag

SEQ ID NO: 221909 - DNA, 89 bp, Homo sapiens
gtcagagcctcatggagtacggtcctcttcctgatggatgggaacaagccatgactcaggatggagaaatttactatataaaccataag

SEQ ID NO: 221910 - DNA, 97 bp, Homo sapiens
ccgtcttccttcccctcccttgcatgatggaaacaccatggctgcggcggcccagctctctctgacacaggccaaagaggtgctgaaaaaatatttg

SEQ ID NO: 221911 - DNA, 73 bp, Homo sapiens
cggctccctgctgttcgagtacctgcccagaggggcccactcgctgtccctccagaatgacagggtccagaaa

SEQ ID NO: 221912 - DNA, 82 bp, Homo sapiens
agggattctggcatcagggaggctttcagccggagaagcgagtttcagctggtgactattatatggttaaaaagattttgga

SEQ ID NO: 221913 - DNA, 75 bp, Homo sapiens
tcctccatgataaaggaatcatctatagcttgcagaacacagagaagtacggcatacctacagcctggagtccct

SEQ ID NO: 221914 - DNA, 100 bp, Homo sapiens
atcctagtaatctctttgtggtttcttctgatttctgccattggggtatatgactgatgggatgttacttcgtgaagctatgaatgatcccctcctggag

SEQ ID NO: 221915 - DNA, 96 bp, Homo sapiens
aaccacctacatctatgacttcccggaaatgttcaggcaggcagcctggcatcctcgctacaacctcattgttgtgggccgatacccagatcctaa

SEQ ID NO: 221916 - DNA, 75 bp, Homo sapiens
ggtcttctgatagcaactttaatgtggaggtaactgagttctatgttcaaaatgaaaattcagtggacaagtggg

SEQ ID NO: 221917 - DNA, 100 bp, Homo sapiens
cgcagcttgcggtcaccatgggcttcacggggttcggtttttagaacttcagccataaaaatgggcagaattttccttgatcatatcggtggtacccgtc

SEQ ID NO: 221918 - DNA, 75 bp, Homo sapiens
gagagcaagcagggaaagagagcgccaggtgcttagcagatcaagatattttggaaactatattgatagacagct

SEQ ID NO: 221919 - DNA, 83 bp, Homo sapiens
gtgaaaaataccacgacaaaaccaccctaggtgttggaactcgccataaggcattgatcaggattatggtttcccgttctgaa

SEQ ID NO: 221920 - DNA, 87 bp, Homo sapiens
gtggaactgggcgagctgcggctgcgggtgcggcgggtcctggccgaaggaccaagaatcgccttcagccctgtctggtgcatcctt

SEQ ID NO: 221921 - DNA, 80 bp, Homo sapiens
ctccttcggcagtccacccaccgccgccgcctcccagacaggtgatttggcttctgcacagttaggaggagcaccaaacc

SEQ ID NO: 221922 - DNA, 98 bp, Homo sapiens
ctcctgcctcagcctcctaagtagctgggactacagggaccgcagatgttcatggactgcagcccacaggccctgcccatcgcatcagaggacaccac

SEQ ID NO: 221923 - DNA, 90 bp, Homo sapiens
ccggccggcagggtggacggtgggctcgtaaccatggagaaagagctgcggagcaccattcttttcaatgcctacaaaaaggagatattt

SEQ ID NO: 221924 - DNA, 82 bp, Homo sapiens
gcggatggccccaggtgtaagcgcagaaagcaggcgaacccgcggcgcaataacgatgtgaagttcatttccaatccgccct

SEQ ID NO: 221925 - DNA, 95 bp, Homo sapiens
cactgttcctggaggaatccgagaagagcagagcggagggagccccagacacgagaatctcgatgctggcctggagcagaaactgagctggacca

SEQ ID NO: 221926 - DNA, 100 bp, Homo sapiens
ggcaaacactccagccacgaagtcaaggctctgggggccatgtggaaactacataagctgtcaaagctcgaaaaacagcagcagaggaaagaaaagacca

SEQ ID NO: 221927 - DNA, 82 bp, Homo sapiens
ccacgggcagacacctgcacagagataacgaaggaggcccaacttcattcaataaggagcctgacggatttatcccagacgg

SEQ ID NO: 221928 - DNA, 90 bp, Homo sapiens
ctagatgttgagcctgataatgatttggccaagggaggtcttcacttcagaaatccaagactcatattcatccagcttggtgtcaagtgg

SEQ ID NO: 221929 - DNA, 98 bp, Homo sapiens
agatgtccaacatcacagtcacatacagagatggccgagtggcacagctggagcaggatgcagatgggaaagcgatggcaatcgccagtgactaaaag

SEQ ID NO: 221930 - DNA, 87 bp, Homo sapiens
cgcctccaggccaagagggatccttcacccgtgtctggacagagcgggatgccaccagcttgtccaaagggaagttccaggagctcc

SEQ ID NO: 221931 - DNA, 82 bp, Homo sapiens
ttacaacccccatactgtaccaggcaaggttcagcggcagtggatctgggacagaattcactctcaccatcagcagcctgca

SEQ ID NO: 221932 - DNA, 83 bp, Homo sapiens
aggttgcaacttagctgaaccagaagtagctgggcattggagtcatgggaaaattaagttctctgcaggtcactagtttcccg

SEQ ID NO: 221933 - DNA, 75 bp, Homo sapiens
ggagggctcggtcaacggcttcatcagcaccttgggatccttgccagcacattacagaatatttttgttgaacct

SEQ ID NO: 221934 - DNA, 106 bp, Homo sapiens
gaccccggagcccctttagccatgtggatacctacggagcacgagaaatacggcgtgggactttttttatgaagacatggagtccttgacgcagatgcttagggcc

SEQ ID NO: 221935 - DNA, 51 bp, Homo sapiens
atactctttccatcagtctcaacatagaaactgtagactccactccacttt

SEQ ID NO: 221936 - DNA, 97 bp, Homo sapiens
gccacagcctgcagcggagcccacgagaggcagcgccatggcggagcagacctactcgtggactcaagcacagagggttcggaaaccgcgttgctgc

SEQ ID NO: 221937 - DNA, 90 bp, Homo sapiens
cctgaaatgtccatccacttatccagacccaatggaacatcagcaatgcttctggaagttctacagactttgaccaagttttgtttcccc

SEQ ID NO: 221938 - DNA, 74 bp, Homo sapiens
cgagggtactgtatttatggagaccgctgcagggcctgcagttgccatcacccactgcaaccagccagctcccg

SEQ ID NO: 221939 - DNA, 100 bp, Homo sapiens
atgcagatgccctgctggtcacaaacagagtgaaactactcagaaatgtgaagctgccactgcagagccccgccatggaagacacgccgttggtgatatc

SEQ ID NO: 221940 - DNA, 100 bp, Homo sapiens
ggctgggcagcctgagtcccagtgatgcaatgatagtaagaaatgctaaagatacagctcatacaaaagcagaacggaatattctggaggaagtaaagca

SEQ ID NO: 221941 - DNA, 74 bp, Homo sapiens
cagcttcctgggtagctgggattacagcaatcccacagagtattgatgaggaaactgaagtttggagcgatcac

SEQ ID NO: 221942 - DNA, 75 bp, Homo sapiens
cagaaatcgatcagatcaacaaggtgttcaaggaagcgttggagtctctgtcccaaagcctcagagatcagtacc

SEQ ID NO: 221943 - DNA, 101 bp, Homo sapiens
ccgggaggggccgcgccgccaccgtctgaactaggatgtcccgacatgaagctacctggaccagccctgccttgagaccgtcaaccgcatcaagttgtaca

SEQ ID NO: 221944 - DNA, 99 bp, Homo sapiens
ccggcccccgctggggcaatgctccccggggccgcgggatgagccagggacccccaggccccactggacccaaaggaatctctggccacccaggagaga

SEQ ID NO: 221945 - DNA, 83 bp, Homo sapiens
aacgatgaaaatcggcggacttaccagaatcttgtcattgagaaggatggttcaaatgaagttgtagctccagtagaaaaaac

SEQ ID NO: 221946 - DNA, 96 bp, Homo sapiens
cacttccctcggtctgggcttctctgaggcggcgagagatggtcaggtctggagctcgaccgggccagatgggggactcaaggagatttcaccacc

SEQ ID NO: 221947 - DNA, 88 bp, Homo sapiens
gaaggcagaggctgcgcagagaatggagagctgtgtctgaggagccttggaacattcacccaggacacatgctaaccaagagtgagaa

SEQ ID NO: 221948 - DNA, 98 bp, Homo sapiens
gcagatgctggctcacgttcgaaccctggagaatacgctgccatcaactccatgctggaccagatcaactcctgtctggaccacctggaggagaagaa

SEQ ID NO: 221949 - DNA, 83 bp, Homo sapiens
cctcaggacgccaaaggcggcggcagcagcacggtgcagcgctccaagggtgctgttggcccaaaggttgccctgaagccccc

SEQ ID NO: 221950 - DNA, 96 bp, Homo sapiens
agcttttccggcctgacaacttcatctttgtcctggaggctggaagtgcaaaaggaaggtgtcggcaagatcgtttttttctgagagctctctcct

SEQ ID NO: 221951 - DNA, 75 bp, Homo sapiens
gctcggagccctggaagcagcagctcaccgaggacggggactcacggaatcagtccccaatgcctggaaattcct

SEQ ID NO: 221952 - DNA, 98 bp, Homo sapiens
ggggaaaagggaagtgaaaagagatctgttttcagaaaacgttgtgtgacgtgatcctcatggtccaggaaagaaagatacctgctcatcgtgttgtt

SEQ ID NO: 221953 - DNA, 98 bp, Homo sapiens
catagctttgcgttcaagtttagagtggaattcgtgtgttgtacagacccttaaggatttttacctcctataactccaccagaaaagttttttctttc

SEQ ID NO: 221954 - DNA, 90 bp, Homo sapiens
aaagaggactggtgatctacgtgtgctttttcaagggagctgataaagaacttcttcccaaaatggattactcaacaagaactggatact

SEQ ID NO: 221955 - DNA, 98 bp, Homo sapiens
ggggttatcaccatgcaagctttgtcggaagaggaccggaggctctggatggaagccatggatggccgggaacctgcctccggtgtggctgtctctga

SEQ ID NO: 221956 - DNA, 82 bp, Homo sapiens
gagtcttctggcaaacagtgtttgcctctggttcagctcatacaacagcttcttagaaccactcacgaattcttgtttggtg

SEQ ID NO: 221957 - DNA, 100 bp, Homo sapiens
ggccttagctgtgctcgcgctactctctctttctggcctggaggctatccagccgtgagtgcatctccatccacgttggccaggctggtgtccagattgg

SEQ ID NO: 221958 - DNA, 78 bp, Homo sapiens
tgacatcattgcaatcaagtcacctgacacatttgtgagaactatttatgcagggggcagtacccaaaggaaacgcta

SEQ ID NO: 221959 - DNA, 75 bp, Homo sapiens
caagccaaacatcaagcagaatgtgatttgcttgaagatatgaggatgctgaaaacgccattcaacagatgggtg

SEQ ID NO: 221960 - DNA, 100 bp, Homo sapiens
gagcaggaagctaaagctgtttctgaatgagacccaaacgcagggtatcagcattttctacctgggagaaagaattacacaaaatcgtgtttgacccacg

SEQ ID NO: 221961 - DNA, 100 bp, Homo sapiens
aagacaacagtgatgaggaaagctgtgaaagttctcaagatgaggaaactgaggtccagagaagttgaagttttcccaaggtcacacagcagagctggaa

SEQ ID NO: 221962 - DNA, 97 bp, Homo sapiens
ggtgtgctctctggtgatcaagatacaggtgcccaacatggaggtgacgcatgtgtcacagctgacttgggcgcggcatggtgaatctggcagcatg

SEQ ID NO: 221963 - DNA, 82 bp, Homo sapiens
gtcagtgacgcgatggagcgggcaaggaatactcccccagttgcaagaggcgcaggaccgtggaagacttcaacaaattctg

SEQ ID NO: 221964 - DNA, 100 bp, Homo sapiens
agagagccagcaatgcctccatgaacaatctcacccaattactctgctcaggggcagaaagcgttttgtaagcgaaggagatggaggtcgtcttaaacca

SEQ ID NO: 221965 - DNA, 50 bp, Homo sapiens
cagcctcctgagtagttgggactacagctagctcacctcaggaaattcct

SEQ ID NO: 221966 - DNA, 73 bp, Homo sapiens
ccagaggtcgtggaggtggccgtggaggcagaggtggcatggggtatctagaagagcagaagacagagaatgg

SEQ ID NO: 221967 - DNA, 100 bp, Homo sapiens
ttttaaagaaaaccggaggattttcaaaactgtgcccctacaaaggcttcagagtagatatctctgccaacatgaggacagaaggactggtgcgaccccc

SEQ ID NO: 221968 - DNA, 74 bp, Homo sapiens
gcaaaccacagctctcaacaagcgagtagaagccatgaaacagcaatttccagtttatgtactaccaaaagtag

SEQ ID NO: 221969 - DNA, 75 bp, Homo sapiens
gagttcgaagagttggatactcagcgtcgctggcagccgctgtacttgactctcagcgttctcatctctcttcct

SEQ ID NO: 221970 - DNA, 100 bp, Homo sapiens
cccctcctcagatgcccctgccggagatccctcagccctggctggagatctattgggaaactgattataaccactcgggcaccatcgatgcccacgagat

SEQ ID NO: 221971 - DNA, 75 bp, Homo sapiens
cagacagaacagttaatcctcaatttaagcctgatctaacccctagaaacagggtcactcagctgccgcaaggag

SEQ ID NO: 221972 - DNA, 76 bp, Homo sapiens
caaatacccctttgaattaattatggctgtgtagaatgagccaaggagactcaaacccagcagctattccgcatgc

SEQ ID NO: 221973 - DNA, 75 bp, Homo sapiens
gtgtggtcgcgtctcggaaaccggtagcgcttgcagcatggaagctgccacttttgctagagagcaaggctttga

SEQ ID NO: 221974 - DNA, 82 bp, Homo sapiens
ggccctgctgcacatcctgtgcaaccttggtctggagggcagtatgagctttttgctgtgattgcgcacgtgggaatggcag

SEQ ID NO: 221975 - DNA, 100 bp, Homo sapiens
gggcacatgtacgggaaggacaaagtgggtactccaaagattcaggtttactcacgtcatccagcagagaatggaaagtcaaatttcctgaattgctatg

SEQ ID NO: 221976 - DNA, 75 bp, Homo sapiens
tggttctggtgggaacccaggatcttagcaaagcaatgtctcaagatggtgcttctcagttccaagaagtcattc

SEQ ID NO: 221977 - DNA, 75 bp, Homo sapiens
cagacgtgagctgagggcgcagaggcaggcagacaggggcaagtgtccgagtggtgaatcagctacttacagaga

SEQ ID NO: 221978 - DNA, 83 bp, Homo sapiens
cactgctgctccgtggagatcgtcccgcgcctgccgccaaaacagagtggagtacgagaaaagggtccgagcacaagccaaga

SEQ ID NO: 221979 - DNA, 89 bp, Homo sapiens
gggctttgaccaggagctgaacgtggactggcgagatgagccagaggtttcttcctgaacgcgcctcagcgattttaaatcgtatgcag

SEQ ID NO: 221980 - DNA, 90 bp, Homo sapiens
cgtcgcggcggcggtggagatcgcaggtcgctcaggaagacagagatgtcaatgaccccatgcccaaccgaggcggcaatggactagctc

SEQ ID NO: 221981 - DNA, 78 bp, Homo sapiens
gacaacagcatcatgaccttcaacctcagtcaggaccctgatgctcccataagacagaaaatgccccttgatgatctg

SEQ ID NO: 221982 - DNA, 83 bp, Homo sapiens
cgaaacaataaagaccggaagctgagtttttatccgctttcaccagttctcaggatgcccatagggatgggtgaagcctgcct

SEQ ID NO: 221983 - DNA, 100 bp, Homo sapiens
tattggagtagcgaggaatctgattccaagcaaaaaccaggtggagttggcatgaacttaacagcagcagatactgtgatttttgttgacagtgacttta

SEQ ID NO: 221984 - DNA, 100 bp, Homo sapiens
caccacaagacccccctgtgttgaggacctgcaccgccaagccaagctcaacctcaaatcagtactgagggagcaaaggcacaacaccacttgctccacc

SEQ ID NO: 221985 - DNA, 75 bp, Homo sapiens
agagggtctggaggagccttctcaagaacagaggaagggaaaaggccgaggcatcagcgtgtgaagaccgcaaag

SEQ ID NO: 221986 - DNA, 96 bp, Homo sapiens
catggcggatggccccaggtgtaagcgcagaaagcaggcgaacccgcggcgcaataacgtgaacagagtatctgtcaggcaagagctgctgtgatg

SEQ ID NO: 221987 - DNA, 89 bp, Homo sapiens
cttcaccgaacagcacctcaggagcaggtggagccccctgagctgcccgctgatctgcagcactggatctcctacaacgaggccagcag

SEQ ID NO: 221988 - DNA, 100 bp, Homo sapiens
ccgccgcgggggctgcggccgcgggcgatgccaaaaacgaatttcgctaaggagtttgtgatcagtgatcggaaggagctggaggaagatttcatcaaga

SEQ ID NO: 221989 - DNA, 49 bp, Homo sapiens
ccggacagagcccgtggtcgcgcagacattgcctaagatactgagccat

SEQ ID NO: 221990 - DNA, 100 bp, Homo sapiens
aggagcatcccaggacctaccagaatctgtaatctatgccagcaattatgacaatgttagcagaccatgcagctcgtcagctgcttgatttcagccaaaa

SEQ ID NO: 221991 - DNA, 100 bp, Homo sapiens
cgcgtcctgctgaccccagccggcgccgagggcttggaatctcgagcgggaaaaggggctatcaacagcaggacgcccatgaattcatgcgctacctttt

SEQ ID NO: 221992 - DNA, 75 bp, Homo sapiens
tgaagcgactgagtccgcgatggagtgagtttatggtcgaggagcacgagctgcggaaggagaggatccaggagg

SEQ ID NO: 221993 - DNA, 100 bp, Homo sapiens
tctcaagtatacaggaatattgttattagatcgcgctagcgagcttttatgaggacggaggggatgaagacattgtgaccatttcgcaggcaacccccag

SEQ ID NO: 221994 - DNA, 49 bp, Homo sapiens
cgagccgccgacccgccgagcaaaatgtggctgagaaaccctggccccc

SEQ ID NO: 221995 - DNA, 50 bp, Homo sapiens
ttagaagaactcgtgagccggattgatgctcaaagcttggattctgccgt

SEQ ID NO: 221996 - DNA, 110 bp, Homo sapiens
gaagcggcaagcagagaaaacctgccaatcaagatgagtatggagcctgatttgaaaaagcggatccgtgtgcacttgctcaatgcccatggcctggatgaagctggcat

SEQ ID NO: 221997 - DNA, 50 bp, Homo sapiens
cagcatttttgataggtgcctatgcagggcgagaggtcaatgatcttaaa

SEQ ID NO: 221998 - DNA, 129 bp, Homo sapiens
gcggcgttagtattggccgtgtacccgaaaaactgattgactgggctggcgttaactgtgcggaggcaggtgctggagaatctggtaaaagcaccattgtgaagcagatgaggatcctgcatgttaatg

SEQ ID NO: 221999 - DNA, 122 bp, Homo sapiens
ttatgtttggctgaaaaggaaaatctgcaaagaactttcctgcttacaacctcaagtaaacgtttgctgccaattgatggggcaaatgatctcttttttcagccacctccactgactcctac

SEQ ID NO: 222000 - DNA, 78 bp, Homo sapiens
ctgcatcatgtcccggacctgtcttgccgtggatggcataccattctcatcgttgaagggacaatggagaacattgca

SEQ ID NO: 222001 - DNA, 50 bp, Homo sapiens
tccccatcaagggaatgaacttcacagaagctgccacttttgctagagag

SEQ ID NO: 222002 - DNA, 100 bp, Homo sapiens
ctgcgtcgcccgaggcgaggaggagcgctggcggaacgagtctttgggaacgtggtccacccagggatgtaaaactgtgcttaccgatgcatcccatacg

SEQ ID NO: 222003 - DNA, 100 bp, Homo sapiens
ggcgctgaacggcggagcgggagcggccggaggagccatggactgcagcctcgtgcggacgctcgtgcacagatacgccagggagctggagagcagagag

SEQ ID NO: 222004 - DNA, 75 bp, Homo sapiens
tcgggtccaggtggcagaacatcctagttcatcagagaagatatgaaatataaagatgctactaataaacacagc

SEQ ID NO: 222005 - DNA, 100 bp, Homo sapiens
tgcagccttactatttgaaacatccctcacattgaaatatgtctcagaccagtatccttcaggggttctcttactctgatttgcggaaatttggcatcgt

SEQ ID NO: 222006 - DNA, 90 bp, Homo sapiens
cgaacattcacattagggataagcaccatcaaacaggatgactttaccgctcgtctctttgacatccacaagcaagtcctaaaagagggc

SEQ ID NO: 222007 - DNA, 74 bp, Homo sapiens
gctgctgatcatcggtggattcgagggtcatcacactgaaacggtgttcaaccgggttttgccagggcctattg

SEQ ID NO: 222008 - DNA, 75 bp, Homo sapiens
cgtggttcacccgctgccgggcaccgaggaccagctcaatgacagatcctgtttgaccaaactcagagatcaatt

SEQ ID NO: 222009 - DNA, 75 bp, Homo sapiens
gcatgaaccaaacccacttcgttcaagacaggtgtttaagcaaaacccgcctagtgccaagcaaccctccaagat

SEQ ID NO: 222010 - DNA, 75 bp, Homo sapiens
gttctaccgctggacctggtccatcgcagcggaagaagtccctatagaaccatacaacatcccactgtcccaggc

SEQ ID NO: 222011 - DNA, 83 bp, Homo sapiens
aatggacccaatgaacatctgggatgacatcatcacaaatcggaaaaatgaggaagctgtgagtaccagtggaaggaacgagc

SEQ ID NO: 222012 - DNA, 75 bp, Homo sapiens
ggacgtgcggggcctgggcctcccggtccgcaagcaggccacggcgtatgcctccaaggacggggtcctgaccga

SEQ ID NO: 222013 - DNA, 100 bp, Homo sapiens
gcagggagaagagccatgggtcctcgacctgcagggagcagaggggacagaggcaccaaggacctccaagacaggacacattcagctaacgtattttagc

SEQ ID NO: 222014 - DNA, 50 bp, Homo sapiens
ctcgccatgtcctgctgcccggtgtgatcccctgggcccgtttgttgtcg

SEQ ID NO: 222015 - DNA, 100 bp, Homo sapiens
caattgatcccaagttgtcgacgaccgacagggtggtgaaaggtggattctccacagttttcctcgtgcgtactcacggtggaatccgatgtgcattgaa

SEQ ID NO: 222016 - DNA, 100 bp, Homo sapiens
ctggcaatgatagatacatcagtgtgggaagccaagcagatacaaagtactgggatttaatgaatttgtctgaaaaacatgataagataccagaaatctg

SEQ ID NO: 222017 - DNA, 74 bp, Homo sapiens
aatctggggtgggcttaggccccggaggagttttctcgggtccgggaggaggtaccactggaattggttgaagc

SEQ ID NO: 222018 - DNA, 100 bp, Homo sapiens
tggagctggagatgcatttgttggaggaaaaccagcattggaatcagctgattcaggatgctcagaagcgtggtgccattattaagacctgtgacaaaaa

SEQ ID NO: 222019 - DNA, 90 bp, Homo sapiens
aaaggagtcaacagctatcccagcctcttcatttttcggtctggaatggtacagcagggaagaactggaaactcagagaaagaaactgcc

SEQ ID NO: 222020 - DNA, 82 bp, Homo sapiens
ggcgtcgcagagcggagctagctggatgcgtccggactcctgcagtactatactggcaattgctggagaagattttgcaatt

SEQ ID NO: 222021 - DNA, 75 bp, Homo sapiens
gtagcgggagtgatgtctgtggggccgccggcggcccggcttcaggctaaccttgccgcgggccgagccctgcct

SEQ ID NO: 222022 - DNA, 90 bp, Homo sapiens
tggaaacatatggagtggatcctcacccatgtaaggctttccttaaagtttcccatgtctcaatggactcctgaatataacgagctctac

SEQ ID NO: 222023 - DNA, 75 bp, Homo sapiens
tggaggtcgggccacccgaggtgctggacaccctgtcgcagcttctgaagaattatatccagatcgagagacaga

SEQ ID NO: 222024 - DNA, 100 bp, Homo sapiens
gctcctgcacaccgaggagacctatgtgaagcggctgcacctgctggaccagcagtggaagacaggaagctgtttattggtatgatttccaagaagtgca

SEQ ID NO: 222025 - DNA, 51 bp, Homo sapiens
aagcaacaggggatatcaaagtgacaggttttacagacatttcaccagagg

SEQ ID NO: 222026 - DNA, 90 bp, Homo sapiens
cttgctgcaacagatcctgtatggcaggaactacattaagaggtgctggctgccagctgctgcgccccccatgtagaaggtgcacctcct

SEQ ID NO: 222027 - DNA, 82 bp, Homo sapiens
gccggaggaaagatggaagactaccaggctgcggaggaggtctcggcgcggaagatggccggcggcgtggacggccccatcg

SEQ ID NO: 222028 - DNA, 90 bp, Homo sapiens
gagtggcctcaagatggatgaagacggcggcggcgagggtggtggcgtgctttctcctgctcaagacagccacacgaacacggatctccc

SEQ ID NO: 222029 - DNA, 83 bp, Homo sapiens
ctacttcgtgctgtgcgggatcgacgcggacagcgggctggagcctgacgagctggcgggatgtagtggcctccttggagcac

SEQ ID NO: 222030 - DNA, 90 bp, Homo sapiens
tgtatctttagtaaggatgggaccttgtttgcctggggcaatggagaaaagaatttggataaagagagggcagtgctactacaacgccgg

SEQ ID NO: 222031 - DNA, 97 bp, Homo sapiens
ccattcttgattatcataatcaagttcggggcaaagtgttcccaccggcagcaaatatggaatatatggttgatccaactaatggaagaaataatgg

SEQ ID NO: 222032 - DNA, 75 bp, Homo sapiens
aatgactgaatctgatacagcttcagttaatgaaaatgggctagatcagggagcagagaaacatgaaggcacagg

SEQ ID NO: 222033 - DNA, 89 bp, Homo sapiens
tgagaaactggaccaccatcctgaatggtttaacgtgtacaacaagcatacttccacaggctgcactcgaggagatccacaaattctca

SEQ ID NO: 222034 - DNA, 82 bp, Homo sapiens
tgacagtagaaactactccatcactattcggcaggagatagagtacttgaagtttattgagttgcccttgactcagagaaag

SEQ ID NO: 222035 - DNA, 75 bp, Homo sapiens
cctgtacagcctgcagaactttgtcgagatgtccacagaaggaggatttggtggtactagcagcagtgatgccca

SEQ ID NO: 222036 - DNA, 90 bp, Homo sapiens
gcatcccaggacctaccagaatctgggattaaagcctgtggtttccacagaagcaccacctatcatatttgccacaccaactaaactgac

SEQ ID NO: 222037 - DNA, 90 bp, Homo sapiens
cgcctccggaagaggggaccggagaccgcggggacctcggagggagcccggcggcttcggttacatcttccggcccagctgtactcgcct

SEQ ID NO: 222038 - DNA, 90 bp, Homo sapiens
ttagaaaaacacgatcagctcttagacagtaatgaagccagctgccaattacatcctcccaacagcactttggtctgtggactgctgtgt

SEQ ID NO: 222039 - DNA, 100 bp, Homo sapiens
acctgcttggccagcgacagatcctttgctgctctgtctgccggttcttgagagtccgtgcgtcctggtgcctcctacaaacggcagaatgaaggaaatc

SEQ ID NO: 222040 - DNA, 100 bp, Homo sapiens
ttgcagagaggtgcctaccaccctgaaggaatgcatccaggagcccagttctgtttcacagacaaggattgctggtatccgttacagcactgatgtgagt

SEQ ID NO: 222041 - DNA, 100 bp, Homo sapiens
agtacgaatctgctctgagggcggatggaaacctgttttcacaccactgaggaggccaggcatgcttgtaccaaagcagaatgtttcacctccagatatg

SEQ ID NO: 222042 - DNA, 100 bp, Homo sapiens
gctacaaccagatggacgacctgctggccgacttcgactcgccctgtgtgatggactgcaagatgggaatcaggatctgcagtgaggacatcgagtgcag

SEQ ID NO: 222043 - DNA, 74 bp, Homo sapiens
gcatttctgctgtttcagttgtactactacaagcactatttatcaacaaaggtgtgttccagagaacaagcctt

SEQ ID NO: 222044 - DNA, 100 bp, Homo sapiens
ggttaagctggctgtcctgaaatattataaggtggtggtaaatggaaatcccttctatgagtacgggcaccggcttcccctacagatggtcacccacctg

SEQ ID NO: 222045 - DNA, 100 bp, Homo sapiens
agattgtgtaccgtgatctcaaggaaagaaaggagaggctatccaaatttgaatctattcgtcattcaattgctggaataattaggtctccaaaatctgc

SEQ ID NO: 222046 - DNA, 99 bp, Homo sapiens
gtacgcgatcatcgggactgggagctgcgagctgctcacggcggttgttagtagatgtgaactttgtccccataaggatggagctttaaaaagaacaga

SEQ ID NO: 222047 - DNA, 74 bp, Homo sapiens
ttctcatggatgttcttcttcgagtatttgtagaagggtcctccagcagcctgacctgagtgggttagtgatcc

SEQ ID NO: 222048 - DNA, 100 bp, Homo sapiens
ctcggcccagcccacagccatcccaggcacagactgtggggctcccagtgaccatgcattcaccgaacatgaggctgctgcgatctgccctcctccccca

SEQ ID NO: 222049 - DNA, 50 bp, Homo sapiens
aaaggccaatgttggtgctggcaaaaagggaggcaaatacatgcaggcgg

SEQ ID NO: 222050 - DNA, 50 bp, Homo sapiens
ctcatatatttaacccccctccaaaaattctgggaaatgccagtgcaaag

SEQ ID NO: 222051 - DNA, 75 bp, Homo sapiens
ggaattgagtggtggtagattgaaggtatgcatccatgtggaaaggatgtctgacactttatactggaaggggtg

SEQ ID NO: 222052 - DNA, 95 bp, Homo sapiens
gatattctagaagcaactgaggagtttctacaaacattttggaaattacaggcctcatgcattgtgcgtcagcagcaatgtttatggtgaaaaat

SEQ ID NO: 222053 - DNA, 75 bp, Homo sapiens
ctcgaccagctgctggacatgtcctatgccatctccctcttctacgagctctcggagaatgacttgaacttcatc

SEQ ID NO: 222054 - DNA, 98 bp, Homo sapiens
tgtcgccagaaggaagatggcggatctggaggagcagttgtctgatgaagagaaggagttcatgatcaagtgttgcccacaccaaatgcttcatccag

SEQ ID NO: 222055 - DNA, 50 bp, Homo sapiens
caccgctgccgaaatgaagtataagttgcagaatgaagaagagtctggag

SEQ ID NO: 222056 - DNA, 90 bp, Homo sapiens
ggactattttcacgttttaatgccgagaggtctctgtgacgattttgttggcgagctttagcccctctcctccttctccgtaccctacca

SEQ ID NO: 222057 - DNA, 100 bp, Homo sapiens
atggcaacccacacattgatcacggggctagaagagtatgtgcgggagagttttggtttctccaaggacatcaaggtgcccaagagccgctacctgggct

SEQ ID NO: 222058 - DNA, 100 bp, Homo sapiens
ggaagaggagcattgaggaccgtgttcaagaggaagcccgctgccttgtggaggagttgagaaaaaccaaggatgtgaactatgaagactttactttcac

SEQ ID NO: 222059 - DNA, 76 bp, Homo sapiens
aagcccttccattcaccagacattgtttccaactaatagctcttcaagtctgcaataaaaaatggcctccaacaaa

SEQ ID NO: 222060 - DNA, 75 bp, Homo sapiens
agcaccggggccaccaggagggagggacagaagatgagcctgtcggtcctggagggtatggggttccgtgtgggc

SEQ ID NO: 222061 - DNA, 101 bp, Homo sapiens
cccgcggagtctcgggccccggagacgggcgaggagcacggcagcagccaggttgcagtattttacagagctagcccaaggcacaagatgaaaattattaa

SEQ ID NO: 222062 - DNA, 74 bp, Homo sapiens
atttggaaatgtcatccgatggcacaatcagatctcccttgagtttagaaatctggctgagaaataccaaacag

SEQ ID NO: 222063 - DNA, 95 bp, Homo sapiens
ttgaatctacagcctatgttggtgttaacccaggtctcttagagtgtgttaacagggcacaaccattatgtgatgtgtgctcagttccaccccac

SEQ ID NO: 222064 - DNA, 50 bp, Homo sapiens
gtctgcgagccaggattcccggctgatcagctgaccgaagaacagattgc

SEQ ID NO: 222065 - DNA, 100 bp, Homo sapiens
attattttaacatttgggagaaacacagccagaagggcactgtgtttagtcttgagtcagaggaggaggaataccctggaatcactgcagaagatagcaa

SEQ ID NO: 222066 - DNA, 90 bp, Homo sapiens
gcaatcaccatggcaccatgcaaggggggcactacacaggcaagaaattatagagcagcttctatcaaatattttccacaaggagaaaaa

SEQ ID NO: 222067 - DNA, 100 bp, Homo sapiens
gtagtggccttgatctactgcaggaaaaagcggatttcagctgccagttttgagacgctgcagtgtgagggacctgtctgcactgaggagagcagctgcc

SEQ ID NO: 222068 - DNA, 100 bp, Homo sapiens
cgcaaggcgtggagtcgacggctggagagaagccgggagcgagcccaggcggcagtgagcttaaacaggccaaagtgagcacagtcatggataccgttgg

SEQ ID NO: 222069 - DNA, 75 bp, Homo sapiens
ttttggcattgcagctaaatatcagttggatcccactgcttccatttcttggtggtgaccgcggtggcttcaaaa

SEQ ID NO: 222070 - DNA, 82 bp, Homo sapiens
gggcccgggtggcagagttgccaaccccagagctgccgagcaaggatgcctgagacaaccatgtccaagggacctgcagttg

SEQ ID NO: 222071 - DNA, 90 bp, Homo sapiens
aaaagagtagcctgggctgtctggaaatctgaggcctagccgcccgtgactctcacactgtctcctgcatgacgggtggcgcctcccgca

SEQ ID NO: 222072 - DNA, 100 bp, Homo sapiens
gaaacctttgagctgcggaccccgagtccagcgggcggcgggaggggctgtgtcacctgctccccaatcatccagccgcctgcaaccccccttcagcccc

SEQ ID NO: 222073 - DNA, 75 bp, Homo sapiens
gaaatgatcagtctgttggatggcttggcaactcttgtgaaatttcatagatctcgtcgcttactgggagtctgc

SEQ ID NO: 222074 - DNA, 75 bp, Homo sapiens
aaagcggccagaagaacgagtgaaggttgacttccccagaaatctggccaagtctgtaactgtggaatgaggctg

SEQ ID NO: 222075 - DNA, 75 bp, Homo sapiens
cagcgccggcctcctcagtgcgaagaagctgcagccgcacctggccaaggatggtatagctgcatgctgggaaag

SEQ ID NO: 222076 - DNA, 100 bp, Homo sapiens
gctcactgcaacctccgcctcccgggttcaatattcacaggcctccactgggctctcagtaggtgggatttgtcagcagttctcattgcctgagaacatc

SEQ ID NO: 222077 - DNA, 82 bp, Homo sapiens
gcgcaggatgccacacgaagagctgccgtcgctgcagagaccccgctatggctgccaaaaagcaaatggatttccacctgac

SEQ ID NO: 222078 - DNA, 51 bp, Homo sapiens
atggaacagcatgtctccttcaaggtgaccaaaagccagccccactgtgag

SEQ ID NO: 222079 - DNA, 83 bp, Homo sapiens
agagccatccctgacacccggcatgaccaggatcatagacggtatttctatgtaaacgaacagtcgggcgagtctcagtggga

SEQ ID NO: 222080 - DNA, 95 bp, Homo sapiens
attttacaagaaaagccatacttgttttctctggggtatgattctaatatggccatggtaggggaggagtgtgtaggtgccatcgtttgcaagtt

SEQ ID NO: 222081 - DNA, 90 bp, Homo sapiens
ctacgtcccgctgccgtcgccgccgccaccatgcccaagagaaaggactcgctcagcagcagcctgaaaacttgctacaagtatctcaat

SEQ ID NO: 222082 - DNA, 76 bp, Homo sapiens
ccatgatgaagaagatgcagttgccagaactgcccaaggacatcaggtgtgagttcttgatacgaatgaaaggcca

SEQ ID NO: 222083 - DNA, 100 bp, Homo sapiens
gccgcgtcggcggccacggcagcgcccacggccactcccgccgcgcaggagtcgggcaccatcccaaagaagcgacaccccatcacagagggtacagttt

SEQ ID NO: 222084 - DNA, 90 bp, Homo sapiens
acaactggctggaatattgcaggtgcctttagaggcctccccatggccacccatggaccagtcggcattcacttcctcccttctgcggcc

SEQ ID NO: 222085 - DNA, 74 bp, Homo sapiens
ggacagcatgcctcaccaagtcacatgacaagcaaatagcctaacatggcagaccagagacagcgctcactgtc

SEQ ID NO: 222086 - DNA, 75 bp, Homo sapiens
gtaaaattggacaatggctctttagagagttatctgagtttcctcagcactttgtttgcccccttaaactttgtc

SEQ ID NO: 222087 - DNA, 75 bp, Homo sapiens
gccaaccaccgctacgtctctgtgcggcaagctggcagagaggctgatgacatcgtgaactggctgaagaagcgc

SEQ ID NO: 222088 - DNA, 75 bp, Homo sapiens
ccttttgccacctttccctttatttccggaggtcaaaatgcagatcttcgtgaaaacccttaccggcaagaccat

SEQ ID NO: 222089 - DNA, 100 bp, Homo sapiens
aggacccgcttcagcacaaggaatgtcatcaagatgatgatgtgcctgcagatatggttgcagaagaatcaggtcctggtgcacaaaatagtccatacca

SEQ ID NO: 222090 - DNA, 80 bp, Homo sapiens
cgataccatcggacaggatttctccgcctcagcccaacggggagcatgatgccttcttctgtagagtgggcgctttgcag

SEQ ID NO: 222091 - DNA, 75 bp, Homo sapiens
gtaaagtcctgggcacaagccagcgtcacccatggagcacatggagatgctcctattaaggaaccaaaaaagttg

SEQ ID NO: 222092 - DNA, 100 bp, Homo sapiens
gtcacttgtacagcgccggtcaacatcgcggtcatcaagtactttaagtgggcagaccaacatccacctcagcaaaaacttcttcctgacgaatcgcgcc

SEQ ID NO: 222093 - DNA, 90 bp, Homo sapiens
agaatacagagagaaaattgagacggagctaagagatatctgcaatgatgtactggaaactaaatatattttgccaactttggaaaaaga

SEQ ID NO: 222094 - DNA, 95 bp, Homo sapiens
agcgagtctcggagaagatgtggtggcttccgtttgttggtggaggaggtggcaggcctcggcgcatttgacattgtgcagcaaagaaatggtta

SEQ ID NO: 222095 - DNA, 80 bp, Homo sapiens
tccaacaccaaagtcctggagatcccactcctgccggagaacagcatgcgagccgtgcataatcaccagcaacacccggg

SEQ ID NO: 222096 - DNA, 100 bp, Homo sapiens
aatgagaggtttcttacaggaaggggaccttatcagtccctgaaaagcaaaggcctcatctccatggcacaggtgatgaaacaggaagactgaagcccag

SEQ ID NO: 222097 - DNA, 50 bp, Homo sapiens
tggaggaaaacaacttcgagggcagaatgaaggatttgggggcagagcac

SEQ ID NO: 222098 - DNA, 100 bp, Homo sapiens
tgataacccatcaaaatattgtttcaaatgctgctgcctttctcaaatgtgtggaggcagtatccagtctgatagcagtgggtacatctcatggattggc

SEQ ID NO: 222099 - DNA, 101 bp, Homo sapiens
caacatcgaccacaagttccacaggcacctcattgggaagagcggtgccaacagaatgggtaccacagaccatgtcatcgtcctggcgtccacgaaccgag

SEQ ID NO: 222100 - DNA, 83 bp, Homo sapiens
agaaactccaatgagagaacgttttaggaatctagatgaatttggaccattttcagaaaaatgtgatattactacagcccctg

SEQ ID NO: 222101 - DNA, 50 bp, Homo sapiens
gactttgtttttcctgggaactgcagggctcattgtcatccccaagccag

SEQ ID NO: 222102 - DNA, 75 bp, Homo sapiens
gccaattgcagtttgaggctgtctatgaaaattatcctacttatgatttaactgaaagaaaagatttcataaaaa

SEQ ID NO: 222103 - DNA, 75 bp, Homo sapiens
gagggactgggagtcgttagtgagatatgtaactggttcatcaatgcccggcggcggcttctcccagacatgctt

SEQ ID NO: 222104 - DNA, 74 bp, Homo sapiens
ccatggctctcgccgtccgagtcgtttattggccctgtgcaccaaggtgccggaactgatcagaaccatcatgg

SEQ ID NO: 222105 - DNA, 75 bp, Homo sapiens
gttggagccgtctgcaaagtgtccccggcaagaagatttgcctgaagacctggataatctccatttttgtcatgg

SEQ ID NO: 222106 - DNA, 82 bp, Homo sapiens
cggagcgtgtggatttgagccgccgcattttttaaccctagatctcgatgcttcaggactgccccaaggcccgcagggaggt

SEQ ID NO: 222107 - DNA, 100 bp, Homo sapiens
tgacaaaggctttgccgcagttcatcttcctccctgtgtactttccatttgccttcctgggtgtgatgaatgcagactctgctaccattttggctgtttg

SEQ ID NO: 222108 - DNA, 83 bp, Homo sapiens
ggactgagtcctgcaggacacaggaagctgttttaggttatgtgaaagagatgtttcctcatctctaaggcttaccagaagct

SEQ ID NO: 222109 - DNA, 75 bp, Homo sapiens
acccgatgaatgtgggaagactgagattctccgggcccaaagccgaagtgcaagtggaaggaagatctctgaaaa

SEQ ID NO: 222110 - DNA, 101 bp, Homo sapiens
gcacgtctgccgctgccaccggcgcgcccgagtgatgcagaagatggggaagaatatgatgacccttttgctgggcctccagacactatttcattagcctc

SEQ ID NO: 222111 - DNA, 110 bp, Homo sapiens
tggttcacagaccgagttagcaattgtcaccgcagactttgttaaggtactgggaacagcttttgatcctttcttaggaggaaaaaacttcgatgaaaagttagtggaac

SEQ ID NO: 222112 - DNA, 75 bp, Homo sapiens
taagcctgtaccacctccttccaaggattttaaactgtctacggttcttaacctcatctgttaagttcccatgcc

SEQ ID NO: 222113 - DNA, 119 bp, Homo sapiens
attgagcaagaacaaggtgacacatattctgtctgtccacgatagtgccaggcctatgttggagagcaacttgctggatgtgaatcagatcatcaaggacttggcctccatggtgtcag

SEQ ID NO: 222114 - DNA, 75 bp, Homo sapiens
gttacaaatttttgtacacggggagagcttacgggtcctgatccggttccccatgcagaggaacttggtggtgat

SEQ ID NO: 222115 - DNA, 100 bp, Homo sapiens
cgcctcccgggagtgccgtgcgccgcagcccgggcccaggccccggcagcgcctgggacaagggctaagttctaaaaacatcagttcatctccaagcgtt

SEQ ID NO: 222116 - DNA, 101 bp, Homo sapiens
atctacaggaacttggtagtagtcaatcagcaggccctttgtaccccacgatgtatgaatggtggactttgtgtgactcctggtttctgcatctgcccacc

SEQ ID NO: 222117 - DNA, 82 bp, Homo sapiens
gccaggggaccaagctggagatcaaacacctagaggatcaagacataatgggagcatttttagacaagccaaagatggaaaa

SEQ ID NO: 222118 - DNA, 98 bp, Homo sapiens
tgctgaagaacagattaaggtgctggaggtgacggaggaaaatgtgccagaggaacttcaagaaccattttacacagatcagtatgaccaggaacaca

SEQ ID NO: 222119 - DNA, 100 bp, Homo sapiens
gtattcgttgacagagctttgatagtcgtaccatatgcagaaggtatgtaactgctctgcgcctgacacgggcaacatggagctgctggtgaggtatggc

SEQ ID NO: 222120 - DNA, 75 bp, Homo sapiens
tagcctttgccatcactgccattaaggtcaagtctggcaccatctttgacaacttcctcatcaccaacgatgagg

SEQ ID NO: 222121 - DNA, 100 bp, Homo sapiens
gcggctgctgtcgcccagcgccgccccgtcgtcgtctgccttcgcttcacggcgccgagccgcggtccgagcagcacaacaagattcgcagcgtggaggg

SEQ ID NO: 222122 - DNA, 74 bp, Homo sapiens
cagatttacaaactggccaagaagggccttactccttcacagatcgctttatttgaaggtagacgcatcgaatt

SEQ ID NO: 222123 - DNA, 100 bp, Homo sapiens
gtggtgtgaactcattgttaagcacaagttcacgaaagcctacaaaagtgtggagaggttccttcaggaggatcaggtgtgtcaaggatgccacaatgcc

SEQ ID NO: 222124 - DNA, 83 bp, Homo sapiens
cacagattcaaaagttaaattaaagtatcagcatttaataacaaatagctttgtagagcctgagttctaccaagtatgccaca

SEQ ID NO: 222125 - DNA, 100 bp, Homo sapiens
acatcctggccaagttgggcaagcaccagtacctgcaccggcaccggcaccatgagattcgggcaagtccaccactactggccatctgatctataaatgc

SEQ ID NO: 222126 - DNA, 100 bp, Homo sapiens
ggcaggatattgtttcctttgttcacgagaacattgagacatttctttcgcctcaatatcatcctaatatccatcccagccagccccggtggcatcctca

SEQ ID NO: 222127 - DNA, 100 bp, Homo sapiens
gcggtgctcctcgggcgccaagcggccatcaactccaccctcctgaagcatgaacagacgctggagactttcaaactgttgaactcaacaaacagggaag

SEQ ID NO: 222128 - DNA, 74 bp, Homo sapiens
aagtagaaaatgactttctgccggtagaaaagaagtctggcaagttgatgagcagatagatcactacaaggaaa

SEQ ID NO: 222129 - DNA, 83 bp, Homo sapiens
gactgagcgcgtccaggcctgacagctctgcggctcgggccctgaggctcttgatggaaatgtgtatgatcatctcaaggatt

SEQ ID NO: 222130 - DNA, 50 bp, Homo sapiens
gagagggagccgcagctgatgtcaggtacaaacacaagtgcgccttgcaa

SEQ ID NO: 222131 - DNA, 83 bp, Homo sapiens
cattggaggacactggaagatgggaagaaagaagcagctgccaggtttttggattcaaagcataaaaaccattacaagatata

SEQ ID NO: 222132 - DNA, 100 bp, Homo sapiens
cgacggccccgcccccttggccagccaactggacagcggagcacgatgattgatagaaatgactgctgtccatgcaggcaacataaacttcaagtgggat

SEQ ID NO: 222133 - DNA, 92 bp, Homo sapiens
tcggcagagcaaggggcttacgcagaaggacctggccacggttttgggatttgagattgacgcggtgaactctgtccagttttcaaaccaca

SEQ ID NO: 222134 - DNA, 83 bp, Homo sapiens
gggacacgcagtgacgagcggccgaagcagctttgcggccgaatacatcaagcaatggtaacatctttaaatgaagataatga

SEQ ID NO: 222135 - DNA, 50 bp, Homo sapiens
gtgaaacaccactgaagcattgccaaggctattcagcttgaccctgaaga

SEQ ID NO: 222136 - DNA, 88 bp, Homo sapiens
ccaagatgaacacgagttcaacgcccacctggtttgtcgcatgtgctgtatggaaatgagccgtcagactgctacagcattacctacc

SEQ ID NO: 222137 - DNA, 74 bp, Homo sapiens
atcaatttttacaccactgggatgtaacagagggtctttttggagttcctgagctgagtgccccagaaggattt

SEQ ID NO: 222138 - DNA, 98 bp, Homo sapiens
attgtccaggcctgcagaggtgttggtcgcattatgtttcagctcttctcagacatatgtccaaaaacatgcaaaaacttcctttgcttgtgctcagg

SEQ ID NO: 222139 - DNA, 90 bp, Homo sapiens
ccaagatgtctctaaatgagcgatcctaagtgtgaacgtgaagtccccagccctgctgctgagccagttgctgccctacatggagaacag

SEQ ID NO: 222140 - DNA, 100 bp, Homo sapiens
cagctacacagttccaggctacatgcaggacttggaggtggagcaggccctgactccaggatgtttcgtctgaactcactttctgctttggcagaactgg

SEQ ID NO: 222141 - DNA, 101 bp, Homo sapiens
gccaaatggagctcagaaagctgtatggacctctgtgtggggagaagatgtcaaccggacactagaaggtggaaggaaacctcttcattatgcagcagatt

SEQ ID NO: 222142 - DNA, 75 bp, Homo sapiens
gtgtccgcagaagcaaggggctgaaaagatctgaagagttgaaactggttgacaaccattaacctgggttgcaac

SEQ ID NO: 222143 - DNA, 100 bp, Homo sapiens
agtctggaaagctttaggagttcacagtatcgcttgggctttaaacaaaggtgtaaaaacagaatacaaacaattctgggatgtggatcttggagttaca

SEQ ID NO: 222144 - DNA, 76 bp, Homo sapiens
gaaaggaaagggctccaaaggctgcaagaggtgatggtgtttcttagagagaagatcactgaagaaacttctgctt

SEQ ID NO: 222145 - DNA, 98 bp, Homo sapiens
ctcctagaaagtgggacttatgaaggtttttcgttggaatatacgttgcacatttatggcgattctgagtgtgagggcagacttctgccaggctcagc

SEQ ID NO: 222146 - DNA, 99 bp, Homo sapiens
aatcctaccatgtcagccttcccagtagctggaactacagataaagcccccaccctctgctgtcacacagcgcaacaaacagccttggcatccagatga

SEQ ID NO: 222147 - DNA, 75 bp, Homo sapiens
atagcaaaagcttatgctgcaaagatggatactatgatgctgaatgtgcggaatctgtttgagcagcttgtgcgc

SEQ ID NO: 222148 - DNA, 75 bp, Homo sapiens
agaagatcatcgagcatttcaaacgaatgttgtaccatctttgggtaggcagacttccctgacgacatcagtgat

SEQ ID NO: 222149 - DNA, 74 bp, Homo sapiens
ggcccatttccctttcatctgacattacctgttgattcttgggcaaggcccagaatttggtggacatacttaaa

SEQ ID NO: 222150 - DNA, 82 bp, Homo sapiens
tggagcggggtagagaccgccgggtctcggcccgcaccaggagcggaacaagattgatgaggagcttctgggagatggacac

SEQ ID NO: 222151 - DNA, 123 bp, Homo sapiens
tgaaacagaacctgtccaggagctggcatgacgtgcaggtctctagcgcgcagcctgcttctgcaaagtggtacgatcgaagggactatgtcttcattgaattttgtgttgaagacagtaagg

SEQ ID NO: 222152 - DNA, 100 bp, Homo sapiens
aaagaggtccgagtgacagccagtgagaagaatgagtataaaggatgggttttaactacagacccagtctctgccaaatggagtttcactcttgttgccc

SEQ ID NO: 222153 - DNA, 100 bp, Homo sapiens
ggcgtgactgctacgccatccgtgtcgccaccgccctcacgctgatgaccgggctttaccaggtggagtttgtccatatgctcaatgctaccatgtgcgc

SEQ ID NO: 222154 - DNA, 98 bp, Homo sapiens
cgatggccgggatcctggagcactcggtcatgtacccggtggactcggtgaaggttgtactggtcagtggacatctggacagctgggatgttgggcag

SEQ ID NO: 222155 - DNA, 100 bp, Homo sapiens
gcggtcgcagagccaggaggcggaggcgcgcgggccagcctgggccccagcccacaccttcaccaggttcggagcgaccttggccgttggcctgaccatc

SEQ ID NO: 222156 - DNA, 101 bp, Homo sapiens
agaatctggaacagttatattctgtgatgttttgccaggaaaagaaagcttaggatattttgttggtgtggacatgatttatgtgatcagtttggctgaac

SEQ ID NO: 222157 - DNA, 100 bp, Homo sapiens
cgacgacaccttctgcgaggcctgcaagtccaccgtggactgcctgcgctgctgacttaaggccccaacaccaaacacagaagcaacagccttacacaga

SEQ ID NO: 222158 - DNA, 100 bp, Homo sapiens
ggagggggcagtcccgggagaacctgcggcggccggagcggaggaattttgttgtcagagaataaaaggaggttgtccataattgactttaagcagcaat

SEQ ID NO: 222159 - DNA, 83 bp, Homo sapiens
ggacggcgagcgcgagcggcgcgagaaagttctgggccggagaaggggcgacgttcgggcaccccccgaatggacaatctttc

SEQ ID NO: 222160 - DNA, 75 bp, Homo sapiens
agcagcattggtgtccagtcagatgaaattgatttatcagatgtcctttcagagagtggatctttcctacaattg

SEQ ID NO: 222161 - DNA, 100 bp, Homo sapiens
gatgaagcagctgcagccgcagccgcctccgaagatgggggatttctacgacccggagcacccgacccctgaaataccctgaagatgtagctcctactgt

SEQ ID NO: 222162 - DNA, 82 bp, Homo sapiens
ggacatctttgatatgttttttggaggaggaggaaggatgcagagagaaaggagaggtgtatagaaaggatccatatcccga

SEQ ID NO: 222163 - DNA, 74 bp, Homo sapiens
gctggagtagcaaggatcttcaacactagaagatatttgctgcagcctttagggtgattctgaagagggtctgg

SEQ ID NO: 222164 - DNA, 81 bp, Homo sapiens
gcggaggcagaggtggaggcgctttgaaagacttaattcagtgcacaaatgagatgaatgtgaacatcccacagttggcag

SEQ ID NO: 222165 - DNA, 73 bp, Homo sapiens
gggaaatggatgctaaagaggctggaagtgtgaacatggctacgcctcttcattcccgtccatgccgagcccc

SEQ ID NO: 222166 - DNA, 100 bp, Homo sapiens
ggtcaactatgcaactaactcagattttgagactggattatggacagaacttggaaatattgagaataatttcttaaagccacttcatataggacttaat

SEQ ID NO: 222167 - DNA, 83 bp, Homo sapiens
gagacgggagtattatgaaaagatcagatcatcgacgagtacatcaaggagaacggcttcggcctggacgggggacagccggg

SEQ ID NO: 222168 - DNA, 82 bp, Homo sapiens
gtaaagtcgagtatctggtgaagtggaaaggatggcccccaaagtgcccgtggttgacacgagctgtgtccccagctgttcc

SEQ ID NO: 222169 - DNA, 100 bp, Homo sapiens
acttgggcccagtttatggcttccagtggaggcattttggggcagaatacagagatatggaatcaggggtcaccagtcgttggcacaccaagaagctgcc

SEQ ID NO: 222170 - DNA, 74 bp, Homo sapiens
gtggatctccagcttgtagctgcatcagcccctcctcctttctcagatgacagatttgaagatctggaagaggc

SEQ ID NO: 222171 - DNA, 99 bp, Homo sapiens
gccagccgggccaggaccaaagccggtgatctccgagatacaggtgaagattgtccccagtggatggtccctatcacaatctctactagtgaagacccc

SEQ ID NO: 222172 - DNA, 73 bp, Homo sapiens
caagaccatcactgacgagtttgagcaggagaacttgccgggctggaactacaccttctggcagtggtttgac

SEQ ID NO: 222173 - DNA, 90 bp, Homo sapiens
accagctttggctagatgatgctcagggtgatgaattagaagacaatggaaagaatttctacgaatctgatgatgatcagaaggaaaaga

SEQ ID NO: 222174 - DNA, 116 bp, Homo sapiens
ttgagaagagagaaccactaaagggcagagcaaagactccagtaacactcaagcaaagaagagttgagcacaatcaggtttgtatttcagcagtcagaaaaatttgcaaaggtgga

SEQ ID NO: 222175 - DNA, 96 bp, Homo sapiens
gtcttcggtggactccttcggcagtccacccaccgccgccgcctcccagcctcccgcgacgatgcccctcaacgttagcttcaccaacaggaacta

SEQ ID NO: 222176 - DNA, 100 bp, Homo sapiens
cggaccatggccgacgacgacgtgctgttcgaggatgtgtacgagctgtgcgaggtgatcggaaaagttcacatgagactctgaatatagtggaggagaa

SEQ ID NO: 222177 - DNA, 75 bp, Homo sapiens
taaatgcagcatctgcgatgtgaggaaaggcacctccaccaggttgtcctttgtggagggtcttctcgaatccca

SEQ ID NO: 222178 - DNA, 75 bp, Homo sapiens
cgatccagcctgcggagcctgtggggcagctctttcaccatgcctggatcacttcctttgaatgcagaagcttgc

SEQ ID NO: 222179 - DNA, 100 bp, Homo sapiens
gtgggagggacagatcaacggcaggagaggtttgttccctgacaactttgtaagagtgcccctgggcgctgggattgctctagcctgtaagtataatgga

SEQ ID NO: 222180 - DNA, 96 bp, Homo sapiens
gatgaagtgcagaggtttttttctggttatcaatactctggctgaccatcatcatcgtgggactgactttggtggaagtccttggttacatgtcat

SEQ ID NO: 222181 - DNA, 100 bp, Homo sapiens
catcttatgaaatggacaagaggaaatggatgaaaagaggctgctggatccagggttgaaggttcataaaggcctctgggattatactctgaagaacccg

SEQ ID NO: 222182 - DNA, 75 bp, Homo sapiens
gttttgtcaaagggcagttccatgagtaccaggagagcaccattggagcctgccctgcagtagccgttctcagga

SEQ ID NO: 222183 - DNA, 100 bp, Homo sapiens
cagcagtgcatggaggagctggtgagcctcatcacacaggatccgcccctggacatggaggagaaggtccgcttcaaagctgccacgaaggccgctgccc

SEQ ID NO: 222184 - DNA, 100 bp, Homo sapiens
cagggtgtctgagctaaacttcaccaaataatagctgtttgtattttggctgctgcaggagccattttagggatttatcaaagatgttcatgaagactcc

SEQ ID NO: 222185 - DNA, 100 bp, Homo sapiens
ctcccattcacaaggcagctcgctctgggagcctagaatgcatcagtgcccttgtggcgaatggggctcacgtcgatattggtaaaggttttcaaggtgt

SEQ ID NO: 222186 - DNA, 100 bp, Homo sapiens
cgcgccggaggggcccagtgtggacggggccaccggctggagcggatcccacacctccggaccgagggacgcgggtacatgtcccagagcaagcacacgg

SEQ ID NO: 222187 - DNA, 74 bp, Homo sapiens
ccagattccatgccattcagggattgtatgtgacactgcttttagcccagactgcagagtcccagacccccacc

SEQ ID NO: 222188 - DNA, 75 bp, Homo sapiens
caggagctgttggagctttgcagctgacctacatctcgaagggtctgacaatgaatcagatgaagaagttgctgg

SEQ ID NO: 222189 - DNA, 50 bp, Homo sapiens
taggaccatggtggatcgggcagaggcgcctgtcctcctcggtacacatg

SEQ ID NO: 222190 - DNA, 88 bp, Homo sapiens
cttcactgtctggatcattggaggaggcacgacacccatgttgtcatggcttaacatcaggaaaatgtttataggaggccttagctgg

SEQ ID NO: 222191 - DNA, 82 bp, Homo sapiens
caggaatgacaccaaggaagatgtatttgtacaccaggatcaaagttctgatcgtaccagtctttcttcagtgggagcccag

SEQ ID NO: 222192 - DNA, 98 bp, Homo sapiens
cagcatctcagcccaagagaaggtacaacataagaggtatgatgcaattcttaagcgtttgcattgtcaggtgaacaagcttcagtcaaatagacgac

SEQ ID NO: 222193 - DNA, 100 bp, Homo sapiens
atgtttgagtacccggagtatcaggttctggcctataggaacaagacattttcagtaatggaagaaggagcttccaggctggggaagatcatcatttcca

SEQ ID NO: 222194 - DNA, 75 bp, Homo sapiens
gatgatcgtgtgtcggatgaggagaaggtgtctgaacacacacaattaagttggatcctttcctgcatggtcaga

SEQ ID NO: 222195 - DNA, 100 bp, Homo sapiens
cagaaagtgaagctgtttcgggccagcgacccgctgctcagcgtcctcatgtggggggtaaaccactcgtactatactggcaattgctggagaagatttt

SEQ ID NO: 222196 - DNA, 100 bp, Homo sapiens
tgcctccattcacctgtgggacctgctggaagggaaggaaaaacctgtatgtggaaccacctggaagaaggagaaagggccaacccctgaagaagcaata

SEQ ID NO: 222197 - DNA, 74 bp, Homo sapiens
gggcccgtagctgggctctgcgaggaattccatatttaaatcaggaagaagaaagacagttaagagagcagtat

SEQ ID NO: 222198 - DNA, 74 bp, Homo sapiens
gctcatctaccacaaagtgacggcagccgagctgcagaaacctgctcctccaaagccagagcccaagcctaaaa

SEQ ID NO: 222199 - DNA, 87 bp, Homo sapiens
cactgggacccccaggaggtgaccctgcagcataagcagtactataatggatgtagacagcacaatttccagtgggcgttcaactcc

SEQ ID NO: 222200 - DNA, 100 bp, Homo sapiens
gcgagttatggcgacgaaggccgtgtgcgtgctgaagggcgacggcccagtgcagggcatcatcaatttcgagcagaagcttcgaaaggcaaggaggaag

SEQ ID NO: 222201 - DNA, 88 bp, Homo sapiens
tgggggcagcagagcttctgggagccccccaagatgaacccagtggtggagccactgtcctggatgctgggcacctggctgtcggacc

SEQ ID NO: 222202 - DNA, 100 bp, Homo sapiens
gccgagggcttcgtggatgccctgcaccgggtccggcagtgtgacaacatctggggtgatggaaagtatgaagaaagtcaagaaggtgaccaacggctcc

SEQ ID NO: 222203 - DNA, 74 bp, Homo sapiens
gacagttaccttattcaaacatcaacaacagggaccagtgccggtggtggtgtgcacattgagccccggtatag

SEQ ID NO: 222204 - DNA, 100 bp, Homo sapiens
ggagttggtgggcagcaggggagacaatagcgaacatgctgtgtgggctcagccgggagacccctggagaggcggctacctgaacgacctggagcgtatt

SEQ ID NO: 222205 - DNA, 82 bp, Homo sapiens
cttttgcgggtggcggcgaacgcggagagcacgccatgaaggcctcgggcacgatgtggacgagtgctcactagcagaaaaa

SEQ ID NO: 222206 - DNA, 75 bp, Homo sapiens
cgacttgtctttcaagaaaggagagaagatgaaagtcctggaggatgacaaccatgagtggaaaaaactaattat

SEQ ID NO: 222207 - DNA, 112 bp, Homo sapiens
ctcagcgccagcggcactggctccgccgcccaagagtcaagtaaagaacagtttgccagtacaaacattgctgaagagctagtaaaactcttcaagaaacaaatagaacatg

SEQ ID NO: 222208 - DNA, 100 bp, Homo sapiens
gggagctggacggcgagcgcgagcggcgcgagaaagtcatgatgatgggcagcgcccgagtggcggagctgctgctgctccacggcgcggagcccaactg

SEQ ID NO: 222209 - DNA, 75 bp, Homo sapiens
agagctgttaacacttcctagataacgggaagatgatccctatgatcttgaagatgtttctgcacagaaatgagg

SEQ ID NO: 222210 - DNA, 107 bp, Homo sapiens
ccggatctcttcgtctttgcagcgtagcccgagtcggtcagcgccggaggaatgggaaaaggacagcacaggatgccctccaaggatgagctggtccagagatacaa

SEQ ID NO: 222211 - DNA, 75 bp, Homo sapiens
aatcaatctcagggctacaaccagtggcagcagggtgtgtatgcaacagcgttattgcaacaggctaacgaaaac

SEQ ID NO: 222212 - DNA, 73 bp, Homo sapiens
tccacgggaggcaaggcctgacaggctgaagtcacctggaaggggaccgactgtgcagcgcattgctgagtct

SEQ ID NO: 222213 - DNA, 90 bp, Homo sapiens
aaccctgagactctgctgggggagatggaggcgaagacaagagagctcattgctgtgtgttctcatttcacccaaaacctttggacagtg

SEQ ID NO: 222214 - DNA, 75 bp, Homo sapiens
cgggagatgatcctggcggattttcagataagaaggctgactgcacaatcacaatggctgactcagacttcctgg

SEQ ID NO: 222215 - DNA, 88 bp, Homo sapiens
cagtcacttctatcccttcagtgagcaatgctttaaactggagagaattcagttttattcagattcaaccctatgaaaagataaaggc

SEQ ID NO: 222216 - DNA, 54 bp, Homo sapiens
cagcacttcatccagcagtgcacaggccctcgggaccaaggatcacgtcatgac

SEQ ID NO: 222217 - DNA, 83 bp, Homo sapiens
aatcacttcttccatttcgatggcaccatgactcctgtgaggatgcagcactccctggcaggtcagacctatgccgtgcccct

SEQ ID NO: 222218 - DNA, 50 bp, Homo sapiens
ggcggacagtgcggaactaaaggccactgcagaacaaattagacttgcac

SEQ ID NO: 222219 - DNA, 100 bp, Homo sapiens
tccacatcggtcagaaaaagattctgaccagtgcacaggacttcagggcttcctggtgttccacagctttggtgggggcactggctctggcttcacctca

SEQ ID NO: 222220 - DNA, 83 bp, Homo sapiens
gatcaacctcaacccgctcaaggagccactcggcttcatcaaggtcctcgagtggatgcagagtttgcggggtggtacagaag

SEQ ID NO: 222221 - DNA, 100 bp, Homo sapiens
ctcctcggttcttcaatgaagatggagttatcagaccgtacaggttgagggatgggactggaaatcaaatgttacagacctggaatggccaaatatcaag

SEQ ID NO: 222222 - DNA, 101 bp, Homo sapiens
ttcaggagtacctggaggctcaacggcagaagcttcaccacaaaagcgaaatgggcacaccacaggcattcagatttgggagaagtagccccagaaataaa

SEQ ID NO: 222223 - DNA, 100 bp, Homo sapiens
tgatcttagtcaaggaccaaatccagacttccaggacaccgagtttccaggtgtggttgcaagacccattggagaattcaggagcaatgctgactatcaa

SEQ ID NO: 222224 - DNA, 100 bp, Homo sapiens
aaattacagagaacctaagtctgtttgcaaagcacctgaactgggagcacgccaggatacgaaggtgaaggagaaggtgacaagaacatctccaggaagc

SEQ ID NO: 222225 - DNA, 100 bp, Homo sapiens
gttgctaatacccatctttactggcatcctaaagcacttttccagccattaactccaggctctcgagaatttgaagatgttgtaaatattctccattctt

SEQ ID NO: 222226 - DNA, 80 bp, Homo sapiens
ttctagtcaagaagaaagccagaggaagccattgcccactgctgccgcccagtgttgtgttcctgcatgaagccaccgtg

SEQ ID NO: 222227 - DNA, 100 bp, Homo sapiens
gtatggtcaacattgatggaaaacaaatcaaactgcaaatctgggatacggggcggatgtccacgcgagggacccccgccgtgggatgtcgccgcaggag

SEQ ID NO: 222228 - DNA, 75 bp, Homo sapiens
gaagaagttcatcttcctgtagaaaaagtagatgttatcatatctgagtggatgcacccaccaaggctccggatg

SEQ ID NO: 222229 - DNA, 50 bp, Homo sapiens
cttgtgaccctgcagctcctcaaaatttaacggagctccctataggagta

SEQ ID NO: 222230 - DNA, 100 bp, Homo sapiens
tttctgttctctgttctgtttcccaatgcagaaaagaaggggcaaatgttctgaaaaagactctgcatgggaatggcctgccttacgatgacagaaatgg

SEQ ID NO: 222231 - DNA, 75 bp, Homo sapiens
ccttagcttccaagaatgctgaggttacagctttctctcctttgaaaacactaagaataatgtcactgcatcagt

SEQ ID NO: 222232 - DNA, 75 bp, Homo sapiens
ggataagtcgaaggggaaggcgcctgaagaggacgaaggagagaaggctcttatgaccgatacctacgaatggat

SEQ ID NO: 222233 - DNA, 90 bp, Homo sapiens
aagatggctgcttctatttcagctccctgtgctgtcaggaatctacaggacttggctcgtatttacattcgacgcacacttagaaatttc

SEQ ID NO: 222234 - DNA, 82 bp, Homo sapiens
gacaagaccatgctggcaagtctgaaggtcaacaaacggggattcagcgtccgatcctttggaacagggactcacgtgaagc

SEQ ID NO: 222235 - DNA, 100 bp, Homo sapiens
caaggaaggcagctacctagtgcggctcagtgagaccaacccccaggactgctccttgtctctcaggttacgaagtgacagtgctggtgcgggactcctc

SEQ ID NO: 222236 - DNA, 101 bp, Homo sapiens
gttcagtggacccttggagccatcctctacaggacccgctttctaccattaaggtgaatgaaaactttgccattgatttgatagcagagcagcccgtgagc

SEQ ID NO: 222237 - DNA, 74 bp, Homo sapiens
ttcagccatgtccatgatgcctaccctgtgaagatctctcaccatccaaaaaaacacagcaggatgccaatgcc

SEQ ID NO: 222238 - DNA, 100 bp, Homo sapiens
ggaagacaacaaaaacaactgcattgtgtacagcaaagacatgtgcattgccattgcgatttctcttctcatgatcctgatatgtgctatggctacttac

SEQ ID NO: 222239 - DNA, 74 bp, Homo sapiens
gaccacttgccgtgcagttttgaatcctttatggaaccggcgaatatttggcttgttgatgggtacccttcaaa

SEQ ID NO: 222240 - DNA, 102 bp, Homo sapiens
acatgcaaaacttgcagattttggggtagcaggtcaacttacagaaatggctagtgatgagctgaaagagatgcggaaaaacttgaccaaagaagccatcag

SEQ ID NO: 222241 - DNA, 100 bp, Homo sapiens
gaagtctataagctttgcaacagaattacagagtatgatggctactacaaagttctgggaaagggaaagctcccaaagcagcctgtcatcgtgaaggcca

SEQ ID NO: 222242 - DNA, 98 bp, Homo sapiens
gccccgggcaacgatcggaactcggacacggttgaaatcacaaagattagacacctttttagataggtgttcttcagcaccactgacaacacggttct

SEQ ID NO: 222243 - DNA, 100 bp, Homo sapiens
ccaccccttccacgtcatccgcatcaacaagatgttgtcctgtgctggggctgacagctgcagcttatcttctggtgtcccttataccaagcaattcatt

SEQ ID NO: 222244 - DNA, 75 bp, Homo sapiens
gcggctcccagccacaccaagttcagggggacttgatctcatcttcatgccaggccttgggtttgacaaacatgg

SEQ ID NO: 222245 - DNA, 90 bp, Homo sapiens
atctgttctatcttcccatcataaaaaacctagatattatcctactgaagatgtgcctcgaaagctgttgagccacggcaaaaaaccctt

SEQ ID NO: 222246 - DNA, 83 bp, Homo sapiens
cattctacagtgtttcagatgacaatgctccctctccttatatgatgtggaagatgtgaaatttgtcatcaattatgactacc

SEQ ID NO: 222247 - DNA, 100 bp, Homo sapiens
gaaaacatcaaagaggtctagcaaaggaaggttgtgcaggaccagcgttccctgtgcaggcgccactgcgtttcctgcagattccgaccggcactgcaac

SEQ ID NO: 222248 - DNA, 100 bp, Homo sapiens
tggaattcagttatcaagctttagagcctggctactcacagttgaagcctgattgcaggctcagcttgtcaatcggaaacagaaattagagtctgtggaa

SEQ ID NO: 222249 - DNA, 100 bp, Homo sapiens
ctgctgctggttctgcccctgctgcaggcaacttgttccagcgatggcatgttcctctagaactccagatgacaagacaaatggctagctctggtgcatc

SEQ ID NO: 222250 - DNA, 100 bp, Homo sapiens
cctgggccagtattatcaggcatggagatgctactgatgtcagggcaagaaaattggatgtatattttgaatatgaagaaaaaataatgagcaaaactac

SEQ ID NO: 222251 - DNA, 83 bp, Homo sapiens
ccccctcctcttcattccgcagcagcactccgacaggaaggaacagcttctacatgggcacttgccaggatgagcctgagcag

SEQ ID NO: 222252 - DNA, 95 bp, Homo sapiens
ttgacttcaaagtcctaccccaggaagctgaagaggagcgatgtgcaagaagtaggctggcacgacgtggccggctggttggggcgtggtggctc

SEQ ID NO: 222253 - DNA, 83 bp, Homo sapiens
cagcaagaacagagagagaggtggacagatctgagagatactgagcgccggcatcggccgcacaggcaccatcattgtcatcg

SEQ ID NO: 222254 - DNA, 96 bp, Homo sapiens
aaccgcagccaggagaaggagttcgtgcaggcgtacgaggatgtgctggagcggtacaaagttacttgctggacagaagaaaagctcccccttctg

SEQ ID NO: 222255 - DNA, 98 bp, Homo sapiens
caccaacattcaaggaaacaaatcaactaaaaacaaaattgccagaaaatctttcctctaaagtcaaactggtggagccagggcgtgtgatgggagca

SEQ ID NO: 222256 - DNA, 101 bp, Homo sapiens
ggagtgttaacagtgtagggaaaatagagtgtgtatcagcagagaccaccgaagactgcatcgccaagatcatgcccatcatcttcgtttcggacagagca

SEQ ID NO: 222257 - DNA, 75 bp, Homo sapiens
gtactttccatttgccttcctggaagcctaaagaaactgttccaactcttgctccaaaaactctttcagtagcag

SEQ ID NO: 222258 - DNA, 100 bp, Homo sapiens
ccacaggtgctaaagagagcagtaccctgatggagtcccttgcagggaaagcaggcaggatgggagagtcgccgatagaaccacctcttccctgcctcct

SEQ ID NO: 222259 - DNA, 82 bp, Homo sapiens
gggtggcttacagacgctgccagcatcgccgccgccaggagaaccaggtgcatcagcgcattgcggagctgaggaaagcagg

SEQ ID NO: 222260 - DNA, 83 bp, Homo sapiens
acgtgaggatcaagaagccggactacaaggtcgcctacgtgcagctgatgtgaagttcatttccaatccgccctccatggtgg

SEQ ID NO: 222261 - DNA, 82 bp, Homo sapiens
attaccgcaaagccatcttcatcttcatcagcaccagcagaaccaaaatcgtgtgtggtggcagatcctcctcttcctgcac

SEQ ID NO: 222262 - DNA, 90 bp, Homo sapiens
agcaagttttcattgggcaaaatggggttgaaggtcgaggagctggaaggcgagcggagtcggctggaggaggaaaagaggatgctggag

SEQ ID NO: 222263 - DNA, 101 bp, Homo sapiens
aggatatctttggtaggcatcatgttctgtttacttgaaccagtgagaagatggccgagcaagcaaggataagtgttatggagcacatgggacttaaagcc

SEQ ID NO: 222264 - DNA, 74 bp, Homo sapiens
atctctcctgcatttttacatttgaataaagcacatcagccaaatttgtatcctactgtggggcttcaaacacc

SEQ ID NO: 222265 - DNA, 100 bp, Homo sapiens
aggacagctgttccttggccatcccaaagctattctgggggcaacagaggcctctcttctgtggaaactctgaagccgaccagttgggcaaaatctttga

SEQ ID NO: 222266 - DNA, 82 bp, Homo sapiens
ctcctcggcgggagccctcgcgacgcgcccggcccggagcccccagcgcagcggccgcggttgggttaacggcatggagaac

SEQ ID NO: 222267 - DNA, 100 bp, Homo sapiens
agagtctccgcggtggaggtctgcgttgctcttgcttttcctcgctggggtgtacgattcatttctggcttccagtcctgaaaatgattaggaagaagca

SEQ ID NO: 222268 - DNA, 100 bp, Homo sapiens
cggagatagctaagatgccgcgcaggagcagcaagatgaagagcgacgtcggcagctgagagagagagctcgtcagctaatagcagaagctcgatctgga

SEQ ID NO: 222269 - DNA, 110 bp, Homo sapiens
gtgccacaggaggctgtgcgggccccgctccgcttcgaatggaagaaaaagtcagcactttttgaagtgtctgaggttataccagtcatgacaaataattatgaagaaaa

SEQ ID NO: 222270 - DNA, 75 bp, Homo sapiens
cggtttggtgttgcggcgcccaccttcgggaggatcagttcactgagacttttttgacggagagggacaaacaat

SEQ ID NO: 222271 - DNA, 100 bp, Homo sapiens
gagtccccgtacgcctacagtaacgtgtctttggtgcaacactaacaaggcttgtctggactacccagttacaagcgtcttgccaccggcttccctttgt

SEQ ID NO: 222272 - DNA, 100 bp, Homo sapiens
gcacggtccttcatcagccggcacagccaggggcggaggagagaagatgccctgtcctcaggaagatggagagttggaagaaggtgaattggaagatgat

SEQ ID NO: 222273 - DNA, 50 bp, Homo sapiens
tggccagggcacgtcactgcaggccaggcactgaacttcccagccctgcc

SEQ ID NO: 222274 - DNA, 80 bp, Homo sapiens
gacacgccccacaggtcttgggaggattaagtgaggggacatgaggcctgacctctcgggacacacccagccctgtggac

SEQ ID NO: 222275 - DNA, 90 bp, Homo sapiens
agaaaagacatgaaaaacatactattcctttggtagtccagaaagaaacatcaaactgtgaagtcatccaaaggtggtcccggatcagcg

SEQ ID NO: 222276 - DNA, 82 bp, Homo sapiens
tgatatctacagcacctatcacttgttccctccaagacaactgaatgcaaccatgtccaagggacctgcagttggtattgat

SEQ ID NO: 222277 - DNA, 83 bp, Homo sapiens
gaaggaacgaggcaaggagctaaagcagcgtgcgttcagccctgggatcggatcaacatcaagaggaagggagcgtggccctc

SEQ ID NO: 222278 - DNA, 110 bp, Homo sapiens
ggaagctattgaacgtttaaaggatattgtacctgtggatgcatcttatgaagtaaaagaactatatgtgccagaaaataaacttcatttggcaaaaacagatgcggaaa

SEQ ID NO: 222279 - DNA, 83 bp, Homo sapiens
gcacacccggctccccggacgcctcggcctttggacaagcacacacaaaccacaagaaggtggctgctgacggagagagccgg

SEQ ID NO: 222280 - DNA, 100 bp, Homo sapiens
gtgctgcaggcacagcccgagaaaccgcagcactacacaatagcctaacatggcagaccagagacagcgctcactgtctacctctggggagtcattgtac

SEQ ID NO: 222281 - DNA, 96 bp, Homo sapiens
gacgcgccccgcctcccccgtccggtccctctctccacggtaaggggaaggaaaagctgatgcgatgctctcagtgccgcgtcgccaaatactgta

SEQ ID NO: 222282 - DNA, 82 bp, Homo sapiens
gccgagccggcggccgctcccttccccgcgcagccccgcacggcccgggcccacgttttgggatttgagattgacgcggtga

SEQ ID NO: 222283 - DNA, 76 bp, Homo sapiens
ccggcatcgtctttccgtcctctgaggcgacggccgcggctgcacagtctgcgctcctcagaccaccggcaggtga

SEQ ID NO: 222284 - DNA, 88 bp, Homo sapiens
gcaactacgactaaagccattttaccttgtacccaagcatgcaaaggaaggaaatggtttccaagggagaactaatgccgacgtgatg

SEQ ID NO: 222285 - DNA, 50 bp, Homo sapiens
cgagcttgttttgtcccggactcgagccgatgatgagcaccccacctcct

SEQ ID NO: 222286 - DNA, 129 bp, Homo sapiens
ttcgtggagacactgtggaaagtctggaccgagctcttggatgttcttggacttgacggcaccagtctgctgagtggcggtcgtgaatctgtacttgtagagtggcgcgatgcaacagagaagaataag

SEQ ID NO: 222287 - DNA, 90 bp, Homo sapiens
cagggtccggacagcttctatttggggcactgtccggggagccacgggcatcttccctctctccttcgtgaagatcctcaaagacttccc

SEQ ID NO: 222288 - DNA, 93 bp, Homo sapiens
catggaccgaagtctggacatcaatgcctttagggagggcagtggctcagagatgcccttcacctcccatgatcaatctgatctcggttgggg

SEQ ID NO: 222289 - DNA, 76 bp, Homo sapiens
cctgaatcaactgcgccaggcgccctcagtctccgaggaggatctcaaggtcctgttttccagcaatgggggcgtc

SEQ ID NO: 222290 - DNA, 88 bp, Homo sapiens
acaaagaaaacagttacaggacatagcaactctggctgatcaaagaagagcagcccatgctgataccccaatgtccttctttgacttt

SEQ ID NO: 222291 - DNA, 101 bp, Homo sapiens
ggaatttatgcaggatattttgattggaaggactgcctgcctccaacagattatgatgcatcattatcacagaagaaattcgtgtctatagcttttaagga

SEQ ID NO: 222292 - DNA, 50 bp, Homo sapiens
tgtaaaccctgccaaaaaggagtggaactgtcaccgctgttcccagacac

SEQ ID NO: 222293 - DNA, 82 bp, Homo sapiens
cgcccgcagtccagggcggcgcgcaccgcctcgctggcgctcagagacaatgcagatcttcgtgaagactctgactggtaag

SEQ ID NO: 222294 - DNA, 76 bp, Homo sapiens
tgccatgactcccacctacatggacagcccacgaaaggcttattgcagtatattatatctaaagccaagaatgcag

SEQ ID NO: 222295 - DNA, 80 bp, Homo sapiens
gtctctggagacatcttcagcaggagaatggggtactaagagaaaagcacgaagctgtggatcatagttcccagcatgag

SEQ ID NO: 222296 - DNA, 101 bp, Homo sapiens
caaatgcagtcggcttgtcctggctcttgccctcatcctggttctggaatcctcagttcaaggtacaaattctgagctgtctaacccctctgaaacggaat

SEQ ID NO: 222297 - DNA, 75 bp, Homo sapiens
gcgactccggagacagcccaaatatcctcggaagagcgctcccaggagaaacaaagcagcccgacggccatggag

SEQ ID NO: 222298 - DNA, 101 bp, Homo sapiens
gcgtgtgcggggtgcgtgggtgcctggagatgaagctggaaaggctcctgggtaaacagactggtctgactcctgatatgccgtacttggacccctgccta

SEQ ID NO: 222299 - DNA, 74 bp, Homo sapiens
tggcgtcggaggggccgcgggagcccgaaagcgagggcaccatgccggtggaaaggatgcgcatgcgcccgtgg

SEQ ID NO: 222300 - DNA, 82 bp, Homo sapiens
ttgcactgagctggacaatcacttggggatcaacgacaaggaccttgtttccccctttctagggtgaggatggttctacaca

SEQ ID NO: 222301 - DNA, 100 bp, Homo sapiens
ggagccccctggccaggaagcccgagtgcagagctggaaggaggaggagaagaaacctcaccttcagggcaaaccagggtgattctgggggcccacttgt

SEQ ID NO: 222302 - DNA, 89 bp, Homo sapiens
cttttgatttattaaatttaaatagattagtaactggcatagacaactatgggcaggtgcttcagaactgggccctttttcagacccca

SEQ ID NO: 222303 - DNA, 75 bp, Homo sapiens
aacctcactgagttagaatcagagagcctctgttgagttcccttctgaggaggatgccagaattagagactctgg

SEQ ID NO: 222304 - DNA, 97 bp, Homo sapiens
agaaattccccccgaagaagactcccccacatctggggggatatgagactttctactcggaatatcctgagtgttgcgtggatgtaaaacccatttc

SEQ ID NO: 222305 - DNA, 100 bp, Homo sapiens
aggaactgtctttatctgctgtcaaggatcttgtgtgctccatagtttatcaaaagtctgcaaaatgaatgttcaccgtcgatgtgagaccaacgtggct

SEQ ID NO: 222306 - DNA, 100 bp, Homo sapiens
ggtggaaggctgtttccctgcgaaatgcatcttctgcagacaccgggttaagagggtctctggagcctgcatccagtgttcctacggtcgctgcccggcc

SEQ ID NO: 222307 - DNA, 90 bp, Homo sapiens
catcagcccggcctacctcttcctctggcccgaagccttcctttatcgctttcagggggacttgatctcatcttcatgccaggccttggg

SEQ ID NO: 222308 - DNA, 82 bp, Homo sapiens
ggccacgacctacagcagtggcaaccagaatgagaagcagatcgcgctgatcccgctggccctggaaggcacggacgtgggg

SEQ ID NO: 222309 - DNA, 75 bp, Homo sapiens
ctgaaattggcagatacccatttaagacacccccaaaggatggatttgtaatcgctgacgttcaactagttacaa

SEQ ID NO: 222310 - DNA, 100 bp, Homo sapiens
gcccagcgcagcgcttgcaaagagggtgtttctgtggcctgggactggttagcaccaacaagtcctgctcgatgccacccatcagtttccaggaccttcc

SEQ ID NO: 222311 - DNA, 75 bp, Homo sapiens
atcctcggcggcggtggccgctagctccaaggaaggacagagcgggatgccaccagcttgtccaaagggaagttc

SEQ ID NO: 222312 - DNA, 76 bp, Homo sapiens
agcttgaacagggctgacaacatttttccttttccgggtgccttcaccagggatggaagaggcaggctgcagcaga

SEQ ID NO: 222313 - DNA, 82 bp, Homo sapiens
ccaggaggatgggcccgttgtggtgcagacgccagaagtgagatttcagcagcagctggagcagctcaactccatgggcttc

SEQ ID NO: 222314 - DNA, 82 bp, Homo sapiens
attgatttgctcttacgtatttgtgtgacttgactcttcaaacacaaaggattggattcagcatcaaaatacatctactcat

SEQ ID NO: 222315 - DNA, 101 bp, Homo sapiens
ccgcttcgagggttacaagctctctcttgagccgctgccttgttaccagctggagcttgacgcagcatgttggcagataaattgaacatgactccagaaga

SEQ ID NO: 222316 - DNA, 100 bp, Homo sapiens
gtactttggctcattgttcaaactcaaggagatgcctacatagaagagtgacagcagctagactaaatgtttaactgctgaactagttcctcaggtatcc

SEQ ID NO: 222317 - DNA, 83 bp, Homo sapiens
ctaaggaattcccggcccctcagggccacggctttagcggtgtcttttgcgccagcgtcccatgctcggtggccccagaaaag

SEQ ID NO: 222318 - DNA, 90 bp, Homo sapiens
cagctacatccaggagagaatgctgacagtcctgcaggtgtggatgaggtcaccattgtcaacattttgaccaaccgcagcaatgcacag

SEQ ID NO: 222319 - DNA, 75 bp, Homo sapiens
ctcactccctttcctctgctgccgctcggtcacgcttgcttcagaatggcagaagatgatccatatttgggaagg

SEQ ID NO: 222320 - DNA, 100 bp, Homo sapiens
aggtggtcggcaatggaacctacggacaggtgtacaagatgggagcagcctcccagagtgggtgacagacaacgctgggaccctgcattttgcccgggtg

SEQ ID NO: 222321 - DNA, 82 bp, Homo sapiens
ctcggagcgcgacacggagactaggtggcaggtcaaaatgcagatcttcgtgaaaacccttaccggcaagaccatcaccctt

SEQ ID NO: 222322 - DNA, 80 bp, Homo sapiens
tggaaccctggggactacgacgtccctcaaaccttgcttctaggagataaaaaggctttccatctgatggtcccctggtg

SEQ ID NO: 222323 - DNA, 100 bp, Homo sapiens
gagcgccccaggtagaatttcaaaggactgttgacatttagggatgtggccatagaattctctctggaggagtggcaacacctggacattgcacagcaga

SEQ ID NO: 222324 - DNA, 100 bp, Homo sapiens
ctatgccctgcaactgcaccagttacaggtatatgaatgacctaaaggtacaaataaagacggagagagaacagtgccaactgggagcagggcaagaatg

SEQ ID NO: 222325 - DNA, 89 bp, Homo sapiens
gcagcagccgagtctgacggcgccggttcgctgcccggtccgcccgcggtgagaggtgctgctgctaacatctgcagaagatttggact

SEQ ID NO: 222326 - DNA, 101 bp, Homo sapiens
acaggtagagtacctgttgttgcagagttattttctgagtcagtttcagggccgttgctccagggagaactgcaaatatcttcatccacccccacatttaa

SEQ ID NO: 222327 - DNA, 101 bp, Homo sapiens
cagctttggagcaagtggagagccagaaaaggatccagaactggagtggaagaaagaacacccaggttaatgcctgataaagaaagcatgtattacccacg

SEQ ID NO: 222328 - DNA, 90 bp, Homo sapiens
gggcttctctgaggcggcgagagatggtcaggtctggagctcgaccgggccagctccagggtttgagccacaatgtgatcttcaccttgg

SEQ ID NO: 222329 - DNA, 74 bp, Homo sapiens
tgcaaaacttgcagattttggggtagcaggtcaacttacagtgtctttcctgaagactatcttcccgtctcaaa

SEQ ID NO: 222330 - DNA, 103 bp, Homo sapiens
cggcagtcctgatggcccggcatgggttaccgctgctgcccctgctgtcgctcctggtcggcgcgtggctcaagctagtagagacggggtttcgccatgttgg

SEQ ID NO: 222331 - DNA, 100 bp, Homo sapiens
actcagacatcaccatcatgtttgaggcaccacctacctatgatgccgtggtacagatggagtaccttgacatggtggtgaatgaaacactcagattatt

SEQ ID NO: 222332 - DNA, 76 bp, Homo sapiens
agagtcaccacaaggccaaggcagatataatttctacagtagaatttaatcattctggagaattactagcaacagg

SEQ ID NO: 222333 - DNA, 100 bp, Homo sapiens
acctgtcgtttgtcatgcttttggctgccctgagctggcagtacctgaccactctctcccaggggctttgttatgcacctaaagccatattggaagctcc

SEQ ID NO: 222334 - DNA, 101 bp, Homo sapiens
tggggttccttccagctccctggattgctgaactttggcgagtttaagattcttctgatgtagagcgactggaaagattcttcgactcagaagatgaagac

SEQ ID NO: 222335 - DNA, 50 bp, Homo sapiens
ctactggctgaccatgtttcgaatcagggaaccttctgaccagcctcatg

SEQ ID NO: 222336 - DNA, 100 bp, Homo sapiens
agttgtcaccactctggagagcacagatgaggagagcatcctgactctgttgacatcccgaagtaatgctcagcgccaggaaatctctgcagcttttaag

SEQ ID NO: 222337 - DNA, 98 bp, Homo sapiens
tccgcgctcccgggaccatgtccgcgctggcggatgaagtggaaagggaaggacctctttgatttggtgtgccggactctggggctccgagaaacctg

SEQ ID NO: 222338 - DNA, 100 bp, Homo sapiens
ctgctgtggtcgctgctgctgctgctcggagtcttcgccgccgccgccgcggccccgccagatgccagcacgagccgccgcttcacgccgccttccaccg

SEQ ID NO: 222339 - DNA, 122 bp, Homo sapiens
gggcagaagatgcctctgattggtctgggtacctggaagagtgagcctggtcaggctctattccgttcgctggttcgccacctcaggggaacgatggccatggagtccacagccactgccgc

SEQ ID NO: 222340 - DNA, 98 bp, Homo sapiens
tcatgttctgcacctcaggagggaattcagcctcagtgatgtccatgagggcaaggactctccctctaagcagagccctggggagtccacgaagaagc

SEQ ID NO: 222341 - DNA, 100 bp, Homo sapiens
ctgaagttcatcgccaggactgtgatggtacaggaagggaacgtggaaagcgcatacaggaccctaaacagagggagctggatgagctgaaaccatggat

SEQ ID NO: 222342 - DNA, 100 bp, Homo sapiens
tcttcctgtttacgttcttgtcagaactcgtgccttttgagtctccccggtacctgcaggttgttttctgcatggaccgtgccctagaatttgcccctgc

SEQ ID NO: 222343 - DNA, 133 bp, Homo sapiens
ctgaagcaggccaaggagatcgaggacgccgagaagtactccttcatggccaccgtcaccaaggcgcccaagaagctgttcgggggtcttgtctggattttggttgcctcctccaatgttcctctacctctac

SEQ ID NO: 222344 - DNA, 74 bp, Homo sapiens
gtcttcctcttcagccatccaggaaaaggccaaagttgttgagcccctggactatgagaatgttattgcccaaa

SEQ ID NO: 222345 - DNA, 97 bp, Homo sapiens
aaattcctgtgcagaaggcatcgtcgtcttccggacagactatggtcaggtgtcatggagaaactccagctgggcccagagattctgcagcgggaaa

SEQ ID NO: 222346 - DNA, 100 bp, Homo sapiens
ttcttatatgtgatgccattccagcactggactcatggaggctgagcatttattcaggcccggaggctgtttgatgtcctgcacgagcccttcttgaaag

SEQ ID NO: 222347 - DNA, 80 bp, Homo sapiens
accagatcatccgcgtgaagcgggtgataaaagaaaatgtggctgaagttacccgaagttcagcttgcagtgtaattcag

SEQ ID NO: 222348 - DNA, 100 bp, Homo sapiens
cccactctttccgccctaatggaggtctccagtttcggactgagcagggggaggaacatttaagctgatggaagtggaagtggaagttgctgtacattgg

SEQ ID NO: 222349 - DNA, 83 bp, Homo sapiens
tctttctggcctggaggctatccagcttgagaagctgatgtctcctcgacttccaactggaaccttgaacccccacatttctg

SEQ ID NO: 222350 - DNA, 75 bp, Homo sapiens
gaactgaggcctcccaccaaaaccaagcactgacatgccactcatggggaaacactactatgaagtatcctgtca

SEQ ID NO: 222351 - DNA, 82 bp, Homo sapiens
agcccctgcgtcgccgggaccctcgcgcgcgaccgccgaatcgctcctgcagcagaggtggtctttgggaagaagcttcctg

SEQ ID NO: 222352 - DNA, 80 bp, Homo sapiens
catagaagaggcacaaaggagttacatcttaacacagaatgatatggaacctagcaaagctgttccactgaatgcatcta

SEQ ID NO: 222353 - DNA, 100 bp, Homo sapiens
tcttggatgaattgcttgctttggagatcctgaggaggatgaaggggctggccctggaggccgagagtgagctggagagacaagacgaagccctggatgg

SEQ ID NO: 222354 - DNA, 100 bp, Homo sapiens
cttttttcgaaagctgggtttcccgggagatcccaggcggtgacagagtggagccatggctagaggcgaacctcttcccggccgctctggtgcacttggg

SEQ ID NO: 222355 - DNA, 90 bp, Homo sapiens
aaaaggcctaagaattttggcattgaaatgggacgtcggtcatcagatactgaagaagaaagcagaagcaagagaaaaaagaaacaccgt

SEQ ID NO: 222356 - DNA, 100 bp, Homo sapiens
ctcaagagctcagtcctgtgtctctcatggaggcgtctctaaccaggtaagctgtgctagaacaaaaatgcaatgaaagaaacactggatgaatgaaaag

SEQ ID NO: 222357 - DNA, 82 bp, Homo sapiens
gaagagccggggccgtggctgacatggagcaggtttggtgcacctcgatttggaggaagtagggcagggcccttatctggaa

SEQ ID NO: 222358 - DNA, 101 bp, Homo sapiens
caaaatcttcgtgaaaagatctgctgcaaggaactgatagcttatggttctccattgtgatgaaagcacatggtacagctcatttagaggcgagttttgag

SEQ ID NO: 222359 - DNA, 100 bp, Homo sapiens
aggagcgtgaagcaggtgaaaggcaccatgcggcccgtgcggcgcaacttctacgacccgtcgtcggcgccgggcaagggcatcgtgtgggagtgggaga

SEQ ID NO: 222360 - DNA, 105 bp, Homo sapiens
gtgagtgtggtctacgagctgtttctcatctttatactcttccagcggcctgccatttccccagagaacttcctctccgcatcctggacgccctggttcagccct

SEQ ID NO: 222361 - DNA, 90 bp, Homo sapiens
gatttattgaccagattgatggaatagttcattttgaaatacttcctcgcgtattgctaaaggaggagttgaccacaccaaaatgagtct

SEQ ID NO: 222362 - DNA, 80 bp, Homo sapiens
ggggagttctctgtgtctgtgaagtttggtgcacctcgatttggaggaagtagggcagggcccttatctggaaagaagtt

SEQ ID NO: 222363 - DNA, 83 bp, Homo sapiens
ccagtacccccttgccatggcagcaaaggggatatgagactttctactcggaatatcctgagtgttgcgtggatgtaaaaccc

SEQ ID NO: 222364 - DNA, 75 bp, Homo sapiens
gcaacagcaagcacatgcagaagaatcccccagggcccagaggtgtgatccctcacatccacaaatctctgattg

SEQ ID NO: 222365 - DNA, 99 bp, Homo sapiens
gttgggtgcccgcggccacttttgccttcccggggacgatgatgacattaatgatgttgcatcgatggctggagtaaacttgtcagaagaaagtgcaag

SEQ ID NO: 222366 - DNA, 100 bp, Homo sapiens
gaaccgcaaggagagaagttcttatgactcctccatgtctccagcacaaatggacccccgaggcctatctcccagacaaagtaaaagtgacagtgatgat

SEQ ID NO: 222367 - DNA, 96 bp, Homo sapiens
aggacgacgaggagcagggcctgactgcgcaggaaaaccagtagattcccagacatcgcgaagtgaatctgaaattgtgccaaaagttgctaaaat

SEQ ID NO: 222368 - DNA, 74 bp, Homo sapiens
caattcttatagccattcttatagttgtaaggtgcaaatatatacagagcttcataatcagcccaagaccacat

SEQ ID NO: 222369 - DNA, 90 bp, Homo sapiens
gtttaagagaagctcaaggccgaagccgagcagaggatctaaatacaagagtggcctattgttggtgtaatacggtgcccagtatgccgc

SEQ ID NO: 222370 - DNA, 82 bp, Homo sapiens
atcgtctcctgtgtggcgatggtcttcctgctggggctcatgtttgagtactgccaaatctgtcgaaagggagataatgaag

SEQ ID NO: 222371 - DNA, 75 bp, Homo sapiens
cagcggtggcaggggctgcaggagcaagtgaccaggagcaggactggggacagctgtgcctttgccaacaccccc

SEQ ID NO: 222372 - DNA, 90 bp, Homo sapiens
acctcatacggctgcttctggagaaggcgttggagaccagggccagccctggccacaccccaggctgtgtcaccttcgtcctgaatgacc

SEQ ID NO: 222373 - DNA, 88 bp, Homo sapiens
tttgtcaaggaactgagagaagagccccatctgtgacttcctagaactccagcgccgttaccgcagcctcctggtcccctcagatttt

SEQ ID NO: 222374 - DNA, 75 bp, Homo sapiens
agagccacactttcaagtaaaccagcacatgattaagtaccggtacatcccgttcacacatgggaagagaaggta

SEQ ID NO: 222375 - DNA, 82 bp, Homo sapiens
aacattcccaacagccaccaccaccaccagatgccgttggacataccagatggtcgaagagctccacttcctgctcattacc

SEQ ID NO: 222376 - DNA, 100 bp, Homo sapiens
agggtaaacttcacaacatgatagttgatctggataatgtggtcaaaaaggtggtggagtttgacaccccatcggtccttctgtccaacgacagttcccg

SEQ ID NO: 222377 - DNA, 75 bp, Homo sapiens
actgaagatactcccacaggggctcagcagggccctcatctttgtgtcccatggagccggagagcacagtggccg

SEQ ID NO: 222378 - DNA, 75 bp, Homo sapiens
atgcgtcacactacgacagtgagaaaggagctcttggagataaaatcgtgagggatattcgccctggagctgcct

SEQ ID NO: 222379 - DNA, 102 bp, Homo sapiens
tctgagagcagtgaggaggaatcagacagtgaggaagcagctgcatctccagcacagaatgctgaccccctgaaggtgtacccgccactgaaggggagcttc

SEQ ID NO: 222380 - DNA, 74 bp, Homo sapiens
aaacgttttgtcaaagacctggtgaaattaaatggtggcagacatgtccaaggaatattgcggggatttgatcc

SEQ ID NO: 222381 - DNA, 75 bp, Homo sapiens
ccgcggcgcccctcggcctcggagcaacgagcgcagcgccggttgctgcttttgctcagaggacatccatgaccc

SEQ ID NO: 222382 - DNA, 75 bp, Homo sapiens
gaggacccgggctgggctttcctcacccggcaccagatactgctacaccatctcatcggcatggacctatatgtg

SEQ ID NO: 222383 - DNA, 82 bp, Homo sapiens
gtcggcttcaaagagaaaaggcaacatcctgtcacaggccatgctctggcaaaaacaacatatgctgtcaggaggataagag

SEQ ID NO: 222384 - DNA, 100 bp, Homo sapiens
ctcaggagggaattcagcctcagtgatgtccatgagtgacagacatcacacctccagtgcaatccctgttcctaagagacaaagctccatatttgggggt

SEQ ID NO: 222385 - DNA, 83 bp, Homo sapiens
atggaaccctccttttactcctctcggaggccctggcccttacccagacctgggcggacctagaggatcaagacataatggga

SEQ ID NO: 222386 - DNA, 83 bp, Homo sapiens
cccgggtggcttacagacgctgccagcatcgccgccgccagctccaattaaggaacagctatatcctgcttccttctgtaagc

SEQ ID NO: 222387 - DNA, 100 bp, Homo sapiens
cagcggctgaggaggggccccagcagcccccgaaggccctatcaggacatggagtatgaaagacgtattggtaaaggttttcaaggtgtcatgaaaagat

SEQ ID NO: 222388 - DNA, 74 bp, Homo sapiens
cagcatctcctgggaattatgtagtggataagattgtggaccagctgcagcagttaatgcaggtgtatgacttg

SEQ ID NO: 222389 - DNA, 75 bp, Homo sapiens
agagaggggaaaccccgtaaagtggttggttgcagttgtgtagtagttaaggtgctactgaaattgttcagttac

SEQ ID NO: 222390 - DNA, 87 bp, Homo sapiens
aaaaggtgctggaggatcagctcacccagacagccctgcacctggcagccatcctgggggagacatccacggtggagaagctgtacg

SEQ ID NO: 222391 - DNA, 83 bp, Homo sapiens
ctgaggccggcgcgctggcgggcgaggagcggcggcggtggcggccgctgggcttggcactgctgcaccaccaaaggcaaact

SEQ ID NO: 222392 - DNA, 83 bp, Homo sapiens
cagcagggggaggatccacttgactggacagtctctgctttctatccgtcaagatgataaagtcgtgtgcccgagaaccaaag

SEQ ID NO: 222393 - DNA, 100 bp, Homo sapiens
tcaaaaacttgtcaaaactcagcatgcttagcattcgagagaacaaaattaaacaactacctgctgaaattgatgccttcaattaagttgcagagttctg

SEQ ID NO: 222394 - DNA, 124 bp, Homo sapiens
ggactaccgcatggagcgcccagaaggctgcccagagaaggtctatgaactcatgcgagcatgaagagagaagggcacagttacctaagtatcaacgtaatcttcctcggccaggacaggcccc

SEQ ID NO: 222395 - DNA, 100 bp, Homo sapiens
tgctatctccatgagtgccattgccactaatggagtggtgccaggtctgtccagggttttggtggctggcgaagctgagggcgtgtcagcaggcctttcg

SEQ ID NO: 222396 - DNA, 50 bp, Homo sapiens
gttcacgatgtgacagtggatgcagacagcctgcctagggtagttaaaag

SEQ ID NO: 222397 - DNA, 95 bp, Homo sapiens
ctccaatgggcctttccagcccgtggtccttctccatattcgagggaacagaaagaacagcttcaaaagatgaaagacttcgggtctgagccaca

SEQ ID NO: 222398 - DNA, 100 bp, Homo sapiens
ccatctcctcgctcagcagcctgagccccaaggccctgtgcaccaaggtgccggaactgatcagaaccatcatgggctggacattggacttcctccggga

SEQ ID NO: 222399 - DNA, 82 bp, Homo sapiens
ttcagtatctcaggcggcaccctgtccccgaggaggggaccatgacacaccctgaaggatggctgccatattgggagacacc

SEQ ID NO: 222400 - DNA, 74 bp, Homo sapiens
tgcttcacggagggcaagagccggagggtctcagaggacagacagtgccagtactatactggcaattgctggag

SEQ ID NO: 222401 - DNA, 75 bp, Homo sapiens
catccacccggccaggttcccaggaagcttacaaaacactacacagcaaaataatgatctgctagactgctaacc

SEQ ID NO: 222402 - DNA, 73 bp, Homo sapiens
ggccacagagaacatcatcatggccatggtcaaagctggaggtagccgccagctgttggagacacagttgcag

SEQ ID NO: 222403 - DNA, 75 bp, Homo sapiens
agtgaagattggcaatccagtgccctataatgaagagccgtacacggtgcgtgaggcccgcatccacgtgcgcca

SEQ ID NO: 222404 - DNA, 98 bp, Homo sapiens
cctttcgtccttaaatattgccgatacttgacctacgcaagagacaatgtcatgtgattcagcctaatatctcaaatgatgccaatgggtggaatgat

SEQ ID NO: 222405 - DNA, 97 bp, Homo sapiens
agcctccggagtagctgggattacagcctgaaaacagcctcctgtcatccccccagcccagcgagcccctcgtgctgctggcggctgagcagaccag

SEQ ID NO: 222406 - DNA, 101 bp, Homo sapiens
gttcaaacagcactgccaaatagcagaagaataccatgaggtcaaaaaggaaatcaccctgcttgagcaaaggaacagttggaattgatcacaccttttca

SEQ ID NO: 222407 - DNA, 100 bp, Homo sapiens
accaactacctggtggtggctgccatgatgatttccattgtgggacaccctgtagaccttgaatctgcagaaagcagctccgagccccagaccagctctc

SEQ ID NO: 222408 - DNA, 101 bp, Homo sapiens
ccactggaaagtgaggaattttgaagtacaccgtggtgacattgtatcattggtcaacgcacctcttgctttttcctccaaagtatgttatgttaagtttc

SEQ ID NO: 222409 - DNA, 101 bp, Homo sapiens
gttccaggggctctgggagtggctgccagcgtttagtcacatcaagaaatagaacagaattcagccatggccccaagaaagagaggtggacgaggtatttc

SEQ ID NO: 222410 - DNA, 96 bp, Homo sapiens
tctacatctcaagctcatattttgaagtgtttacgggttgttcctcaaagtcattcaagctgtactcgccgaaggagcccccgaacggcaacgcct

SEQ ID NO: 222411 - DNA, 100 bp, Homo sapiens
gaccttggaaatgactgagctcacggaccctcatcacaccatgggagactacaaagggacatttttgaagaagataattacagccccatccctgttgtca

SEQ ID NO: 222412 - DNA, 96 bp, Homo sapiens
ggaacttaagagtcttaggagtcagttggatgtgacacataaggagacctcccagtgccaagtgtataagcgtgtccagaattggtgggtctcact

SEQ ID NO: 222413 - DNA, 101 bp, Homo sapiens
cgcggcggggctgaggcggccgcggggcccgagcgcagcatgtccggcatgatttcgggtggcaacaaccccttgggaactcccggcaccagcccctcgca

SEQ ID NO: 222414 - DNA, 100 bp, Homo sapiens
gcctgggagtgggaggatgcgcaggggttttctgcacttctacactcaggtgaagaagctaagtctcagaaagataactcacccaagaggacacaaggat

SEQ ID NO: 222415 - DNA, 108 bp, Homo sapiens
ggacggctgccggcctgtgtggtggactgtggcacgggttggttgaatctggcgatgtggaacccatggatatggagggctgactatatacaccatgttttttcctgg

SEQ ID NO: 222416 - DNA, 100 bp, Homo sapiens
taaagaacagtaggatccttgctggggacgtggagacccatgtgtgaatcatggcaatacagtgaaagacagtgatttactgcttttgagggcgtgcatg

SEQ ID NO: 222417 - DNA, 100 bp, Homo sapiens
aggaacatcgcctctttccatcgaacattccgagaatgcgagagaaagagcctccgtcaccacataatcctcctggccaacttcttggcccagacagagg

SEQ ID NO: 222418 - DNA, 75 bp, Homo sapiens
cgaagagatgaggcggcagcagaagctaaagcaggccaagaaaccacagcttctccaaggagtctatgccatggg

SEQ ID NO: 222419 - DNA, 100 bp, Homo sapiens
actttgtatgcggtgtcaagttgcctaattctgaggacttccaagttaaacacagtgggaatatcacttttgatgagattgtcaacattgctcgacagat

SEQ ID NO: 222420 - DNA, 100 bp, Homo sapiens
gctctcctcttcagctggaaagcgctccctagttgtggaaagtaaaaatgtagccctaccaaaaggaactattgtactggcttctccaggctggacaacg

SEQ ID NO: 222421 - DNA, 95 bp, Homo sapiens
ctcctgagtagctgggattgcagatgttgttattcatgaggaccaatggattggcgagacagtactacaatcaacatttagcagtcagttattaa

SEQ ID NO: 222422 - DNA, 82 bp, Homo sapiens
tggctgcgccggaggcctgactctgggagcacgcagccacgtgctgtacgccgacatcaagatggagaatgggaagtccaag

SEQ ID NO: 222423 - DNA, 74 bp, Homo sapiens
aaagatgcccctgggactggagaggaggctcaggattcttacagaagcagagattgatgctcaccttgttgctc

SEQ ID NO: 222424 - DNA, 80 bp, Homo sapiens
tggaagtgtgagtgcgcgaagatgcgaaaggtggttttgatcaccggggctagcaggaagtgggaaaactcttgcctttg

SEQ ID NO: 222425 - DNA, 50 bp, Homo sapiens
ccaagatgcggatccgggcctttccgatgtacctgtgtggtctaagctgg

SEQ ID NO: 222426 - DNA, 75 bp, Homo sapiens
cggaagaggaccggaggctctggatggaagccatggatggccgggaacctgctggacgtaaagaaagaagtgatg

SEQ ID NO: 222427 - DNA, 82 bp, Homo sapiens
acctggcggtgcccgaggagtagtcgctggagtccgcgcctccctggacccttcttatgactcagtcagaagaggagcttgg

SEQ ID NO: 222428 - DNA, 100 bp, Homo sapiens
ctccacctcagacctgatcccagccccacctctgagcaaggtccctctgcagcagaacttccaggacaaccaaaaacctgctcctccaaagccagagccc

SEQ ID NO: 222429 - DNA, 75 bp, Homo sapiens
attacttcaagggcgtgctcagtatctacaaagacccaggtgtgagatcaaccatgagttccgttgcagttttga

SEQ ID NO: 222430 - DNA, 60 bp, Homo sapiens
cggctgccggcctgtgtggtggactgtggcacgggaagtcaatgaaaggattctattttg

SEQ ID NO: 222431 - DNA, 100 bp, Homo sapiens
ggctcttctgattggccggtgtacttcagtttccgtccaaggtccgcctcctacctccttctgcttcgggcgcatattaaatttcctattgactacccct

SEQ ID NO: 222432 - DNA, 82 bp, Homo sapiens
gtgatgtccaggaaggaggaggaataatatttatggagcatatattatggaacacagggtggcactgaatcaacaagacaag

SEQ ID NO: 222433 - DNA, 83 bp, Homo sapiens
tggaaacaccatggctgcggcggcccagctctctctgacacaggtgaccaagaatatggcccaggtgaccaaagccctggaca

SEQ ID NO: 222434 - DNA, 96 bp, Homo sapiens
atcagcaggctccgggctgaagattgcttctcttctctcctccaagctgggacgatgccggagtgtgaaggagtttgagaagctgaaccgcattgg

SEQ ID NO: 222435 - DNA, 98 bp, Homo sapiens
cgccctggagctgctagagatccggaagcacagccccgaggtgtgcgaagccaccaaggatatcagtatgaacaacattactcagttgccagaagatg

SEQ ID NO: 222436 - DNA, 50 bp, Homo sapiens
tattcacgctctgtgcttgtgccaaggcagcgctgcagccactgccagcc

SEQ ID NO: 222437 - DNA, 49 bp, Homo sapiens
attttcacaaccttcaagaaattcgggttctcagaggcactgtgactga

SEQ ID NO: 222438 - DNA, 82 bp, Homo sapiens
attgtgactactgcgatacatacctcacccatgactcttggaaattgatgacttgaaaaaaattaccaattcactgactgtg

SEQ ID NO: 222439 - DNA, 83 bp, Homo sapiens
gccgatccagcctgcggagcctgtggggcaggtcccttcaccgatgttgtcaccaccaacctaaagcttggcaacccgacaga

SEQ ID NO: 222440 - DNA, 75 bp, Homo sapiens
cggcgtgggcaagtcggcgctcaccatccagttcatccaggaggcagtgtcgcattgccctgaagaaggccaact

SEQ ID NO: 222441 - DNA, 90 bp, Homo sapiens
tcgcggacccagcgctcccggccggacgtcaccccccagtggtgctggggactttgaacatgtcggggatcgccctcagcagactcgccc

SEQ ID NO: 222442 - DNA, 80 bp, Homo sapiens
ccaaggccgtcgccgaccgctacgctgtctactggaacagcagcaaccccagactgctctggcccatttagagtctcttg

SEQ ID NO: 222443 - DNA, 51 bp, Homo sapiens
gcctgagcatcgttgggaaacggtatgagacagagttgaacctgcgcatga

SEQ ID NO: 222444 - DNA, 101 bp, Homo sapiens
gggagtcccactggtctagaacccggctctgagggcactggcctagttcccgacttgtttctcaggaggagatgttaaagtaacccatcttgcaggacgac

SEQ ID NO: 222445 - DNA, 76 bp, Homo sapiens
tgagagctgggttctattttccctcctcaaactgactttgcagccacggagaggatttctctctgatcaaacggac

SEQ ID NO: 222446 - DNA, 98 bp, Homo sapiens
cacagagtcggggtcttcacgaagaggactgtcagaaggacgtagaaggcacggttttactgtgaggagcaaagattctttacctacgcattttacaa

SEQ ID NO: 222447 - DNA, 83 bp, Homo sapiens
caggactgcgccgcgtcttcctcaaggctttgaagacaagattcccaaaaggagattctctgagatgcaaaatgaaagacgag

SEQ ID NO: 222448 - DNA, 100 bp, Homo sapiens
cagagaccgagagagggacttcaaggacaagcgtttcagggtggtgatctttgtgaagtctgtgcagcggtgcattgccttggcccagctactagtggag

SEQ ID NO: 222449 - DNA, 82 bp, Homo sapiens
ctactcgggacgctgcacctcccgcgccgcacggtggacgagctgggatggaaattctatgatgctgatgattatcacccgg

SEQ ID NO: 222450 - DNA, 98 bp, Homo sapiens
aacctttggagctaaacctggcagaactacaggatctgctgtgtcaggccaaggccacactggtgtgtctcataagtgacttctacccgggagccgtg

SEQ ID NO: 222451 - DNA, 90 bp, Homo sapiens
aagcagtcctaccatgtcagccttcccagtagctgggaccacagcaagacagatcggcttgccaaaggatcagaatgttaccaaaagagc

SEQ ID NO: 222452 - DNA, 51 bp, Homo sapiens
ccagatatcttgaaaagctgccagaaaggccaagctataacatcagaaatg

SEQ ID NO: 222453 - DNA, 98 bp, Homo sapiens
cgacggcgtcgggagagcgcgcctagccggctcgcgagccgaatacatcaagcaatggtaacatctttaaatgaagataatgaaagtgtaactgttga

SEQ ID NO: 222454 - DNA, 97 bp, Homo sapiens
ttcaagctgataggctgcgctaccggaatgtcatccagcgagtgattaggagagattaaacagattctagaaaatgaacttcagatacctgtgtcca

SEQ ID NO: 222455 - DNA, 82 bp, Homo sapiens
gcccgggccatggccgccgccgatgccgaggttatcaatactctggctgaccatcatcatcgtgggactgactttggtggaa

SEQ ID NO: 222456 - DNA, 100 bp, Homo sapiens
ctcagcccttcggaattttcccaacttcagaaatatgctgagtccttcatctcctcgtcctccaggcagcacaagccattgtggaatctccaccaggtgt

SEQ ID NO: 222457 - DNA, 97 bp, Homo sapiens
ctcggagcctgagcgggaggtgcgagacatggcccatgaacatggacatgagcatggacatcataaaatggaacttccagattatagacaatggaag

SEQ ID NO: 222458 - DNA, 99 bp, Homo sapiens
aagaacttgtacagagatgtgatgttggagaactatagcaatctggttttcttgggtgttctctcaaaaattggcagaagtggtgagaatccgtatgcc

SEQ ID NO: 222459 - DNA, 100 bp, Homo sapiens
gtacgagatctccgaccagtctgggggcgctggcggcctgcgcagccacctcaagtggcaccctgtgctgcgcacactaaagaaccgcattgaagagaac

SEQ ID NO: 222460 - DNA, 90 bp, Homo sapiens
gtcgccgcagccccccaatgcggccgcgagaagcagcgggggggcaggcgatcgaagatgagctccgacaagaaatgctggatgatgtac

SEQ ID NO: 222461 - DNA, 100 bp, Homo sapiens
cttactgctgcaaagcagtcaatgaccttgggacagtggagattgaatgcaaactggaggtgaaaggtggccaagactaagcagcagattgaggagcagc

SEQ ID NO: 222462 - DNA, 100 bp, Homo sapiens
cggcattgctctaccaccaacagggaccgagtggggtcaatcttctggtgctgcctctccaggtctcttccaggccggtcatagacgtactccctctgag

SEQ ID NO: 222463 - DNA, 90 bp, Homo sapiens
gaacctcactgaaaattggtattgttggattgccaaatgttggtgccggtggtggtgtgcacattgagccccggtatagacagttccccc

SEQ ID NO: 222464 - DNA, 100 bp, Homo sapiens
gataaaaagctgaggccagatattggaagtaacgggacactgattggcgcgtcggcaaacgtcgtgtgtgcagggattgcagaacagcatggatatgggt

SEQ ID NO: 222465 - DNA, 100 bp, Homo sapiens
acacgctgggccgaccccagagcggcgctggacagatctcaggaaacaggctcgacagctggaaaatgaacttgacctgaaactagtttccttcagcaaa

SEQ ID NO: 222466 - DNA, 98 bp, Homo sapiens
gccgagaggagcaggacggcgggaagaggagtgcggaacccgcgggagttctggcataaagcatgcttccattgcgagacctgcaagatgacactgaa

SEQ ID NO: 222467 - DNA, 98 bp, Homo sapiens
tggaccgcggggcgctaaccctggagagcccaggagcgggcgggacatgaataccctctaccatctgctttggtcagggtgccgctcgaggatttaaa

SEQ ID NO: 222468 - DNA, 80 bp, Homo sapiens
agctgtgctcgcgctactctctctttctggcctggaggctatccagcgtttcagccatgccacagagctccggcagtcat

SEQ ID NO: 222469 - DNA, 51 bp, Homo sapiens
cgggactccctggaaacctagaaatggtgaacctatgggtcgtggaacaaa

SEQ ID NO: 222470 - DNA, 97 bp, Homo sapiens
tgtctgtgcacaggagtcagagagggggaaccgccgtcccaacatcacaaaaaggttgatgccggcccaggatggatcagacctgtgaactacccag

SEQ ID NO: 222471 - DNA, 75 bp, Homo sapiens
ctaccaagctgtacaagaggctgtagaggatcgtcaacaacatctagagaatgtggccataaaatgcagtaaaaa

SEQ ID NO: 222472 - DNA, 75 bp, Homo sapiens
aatgaagtaattgaagctgcaaatgaagcattacttactaaagaactggcgctgaagaccctggggacagatggc

SEQ ID NO: 222473 - DNA, 95 bp, Homo sapiens
gcggcggcagcggagagcgagagaggggagcaggatgacagtgatgggattccgtggtcagaagaacgggtggtacgtaaagtcctttatttgtc

SEQ ID NO: 222474 - DNA, 100 bp, Homo sapiens
ggagtgggctggcgcctcgggagagcgaatcgagggcggcgggacatagatctgattgacatcctttggcgacaggatattgatctgggggctgggcgtg

SEQ ID NO: 222475 - DNA, 75 bp, Homo sapiens
cgacatcctgacctagagcccatcctaaggaaactggccaagaagcggaaagagaccatgagcagcacccgacag

SEQ ID NO: 222476 - DNA, 100 bp, Homo sapiens
cgccggttcctcaccctcggggagcaacatgggtgcagctaaatcaagtccagcagctaaaccaggatccacaccttctcgaccctcatcagccaaaagg

SEQ ID NO: 222477 - DNA, 82 bp, Homo sapiens
cggtggcggcggcagcggcggcccaggctcttttccacaatggcccccctgaccagcgcgtcgaccgcggccgcgctcctga

SEQ ID NO: 222478 - DNA, 90 bp, Homo sapiens
ggaagagggcatcctcaggcggctgaagaagtatgacaactgccccacagagcaggtgttgccaatgctgcggttcgtgcagaagcgggg

SEQ ID NO: 222479 - DNA, 90 bp, Homo sapiens
tggacgaagccttcaaatccatcaagctcatcaaaagggtcatcgagcagctcggtgggaagcagctggtcatgaaccacatgcatcatg

SEQ ID NO: 222480 - DNA, 96 bp, Homo sapiens
ccctcgcctcctctcctaggtgccggccgggagggcggccgcagcaggtggctgtgaaaaacaatatcgatgtcttctacttcagctgcctcatcc

SEQ ID NO: 222481 - DNA, 96 bp, Homo sapiens
caagactaaaaactaaaggcctgggcctgagaactgaatcagctgtggtcgatttgcttcaggaattaacagatatagacaccctccatgagagtg

SEQ ID NO: 222482 - DNA, 100 bp, Homo sapiens
gagaactagtcctcgactcacggaggagtatttgaagacttctgagcggaggagtcgcatgtcagagctgtccttcagaaagataaatcaggcagtgctg

SEQ ID NO: 222483 - DNA, 75 bp, Homo sapiens
atttgacaagactaaaaacacttctctcagaaacagaggtaccagaggtttgaaaaggcatttctcctagctgtt

SEQ ID NO: 222484 - DNA, 98 bp, Homo sapiens
gccatggaggagggggcgccgcggcagatcgagacgctccctccggagctcttccagtgccggaagctgcgggccctgcacctgggcaacaacgtgct

SEQ ID NO: 222485 - DNA, 101 bp, Homo sapiens
gttgagagacgcggctttcggcaagaactggattcgtggcgccacaagctcattcactgtgtaggtactccaaagattcaggtttactcacgtcatccagc

SEQ ID NO: 222486 - DNA, 75 bp, Homo sapiens
gtcaaacgcagaaggactgcctcactgagcaaccaagaaatcctcactatggatgggctcattgaggacattaag

SEQ ID NO: 222487 - DNA, 97 bp, Homo sapiens
cctcacatggtgtgggccgacatcaagagctgcgagatccaacaggtgaccaagaatatggcccaggtgaccaaagccctggacaaggccctgagca

SEQ ID NO: 222488 - DNA, 74 bp, Homo sapiens
cggcgacggaggagagcagctcctcactgtcaagcacgagctgcggactgaaacatgccaagggacaagtgtta

SEQ ID NO: 222489 - DNA, 96 bp, Homo sapiens
aacctcttgaggatcgaatcttcactcccgctgtctcagcagtctacagcacggcagtatttggcagtcgtattcagagataaacccctggagcta

SEQ ID NO: 222490 - DNA, 100 bp, Homo sapiens
gatgaagaacgggatcctctgctgcatagtttcggtcatctaaaggaggttttaaacagtataacagggggaagttgctgaagttatatttgtaggtgct

SEQ ID NO: 222491 - DNA, 75 bp, Homo sapiens
cctcgccagcagccgtccggagccagccaacgagcggcctctgtgtcctttgtcccaatagtaacaactccctcc

SEQ ID NO: 222492 - DNA, 74 bp, Homo sapiens
aattctccattgagaagagagaagaacattctcgaatacctagaatgggggtcccgggattcttgagctgtgcc

SEQ ID NO: 222493 - DNA, 76 bp, Homo sapiens
ggctggaacttgccctgtctcctcgcagatgagatgttccatttaagcagacctcttccatagctgtagctggagc

SEQ ID NO: 222494 - DNA, 75 bp, Homo sapiens
tggccatttaggagctctgctcaaagccagacgattcaaccctatgaaaagataaaggccaggggcttgcctgat

SEQ ID NO: 222495 - DNA, 89 bp, Homo sapiens
gaaagccctaccacaagaagcggaagtatgagttggggcgcccagctgccaacaccaaggaaggcagcaacaactcatctccagtggat

SEQ ID NO: 222496 - DNA, 51 bp, Homo sapiens
aggtcttgtagcagcgcctcctcgttcatccatgagctcggatttcccaca

SEQ ID NO: 222497 - DNA, 96 bp, Homo sapiens
gtgtgtctatgtgcttagtggggctttctcctgtttctcagaggatttatcaattatgcaaaagttcggaagatgccagaaactttctcaaatctc

SEQ ID NO: 222498 - DNA, 75 bp, Homo sapiens
taaccgtccccgccagtcagaagttgagaaaaacgttgacctcttggcgagaatgcaaagaagggaacgcttgct

SEQ ID NO: 222499 - DNA, 98 bp, Homo sapiens
agagcaaccagcccgaccgggcgctccgcttcctggagaaggcacagcggctgtatccgacgccgcgagttcgcgggcttcaagatgggctgcgctcc

SEQ ID NO: 222500 - DNA, 74 bp, Homo sapiens
ctataattgcactatctttgcgtgaagctgtacttcacaaaaacagtagaggagccgtcaaatccagaggctag

SEQ ID NO: 222501 - DNA, 91 bp, Homo sapiens
tctctggtgagacatttttcttccttctgtcacatcacacccaatgatggcgtcccatgtagagtgccgtcctctgggagtgtttgagtgt

SEQ ID NO: 222502 - DNA, 50 bp, Homo sapiens
ctgcaggactacatgctgacgacttgtctttggacaaaattgagaagaac

SEQ ID NO: 222503 - DNA, 100 bp, Homo sapiens
tcttacaacatggcagacattgacaagtgcaagaaagcctttgaggtgaaggtgtatgaaagtcatcataacagatgttttccaaaaacttgtagaaggt

SEQ ID NO: 222504 - DNA, 100 bp, Homo sapiens
actgtcttcgtgatgaataaaaacatttcaactccctacagttgtgccatgcaaaggagaatcacttgaacccaggaggaggaggttgtggtgagccgag

SEQ ID NO: 222505 - DNA, 90 bp, Homo sapiens
ctccgcgttcccgccggccccagctccagccccgcagcccaccgcatgctcatgcacattcatctggatacttcatcactcaagactctg

SEQ ID NO: 222506 - DNA, 74 bp, Homo sapiens
aaagaagcaggatgcattctacaaagaacagctggctagactggaggagaggcaaccgcctccacgtttgataa

SEQ ID NO: 222507 - DNA, 98 bp, Homo sapiens
cagaacggcccccgggacagagcgacgcggaaccccgggcgcctgggtccccagcatgatcctcgatatttctccctcgagtggctgggaaacttggc

SEQ ID NO: 222508 - DNA, 100 bp, Homo sapiens
cggggacccagaccctggagcctcagttggaagcagccgatccagcctgcggagcctgtggggcaggaagttctccagcagctgattgtaatgaatttgc

SEQ ID NO: 222509 - DNA, 90 bp, Homo sapiens
gctgtccccaccactgcagccatgatctccttaacggacacgcagaggctgtgggttccttgagggaggaattttgtcctgcaggctgtg

SEQ ID NO: 222510 - DNA, 101 bp, Homo sapiens
aaatgtttttctgttttgcctgaatacatgatttaaacaagagatttccacagaagaaagttcaggagccctggaaaggagaaggaataagacggcaggag

SEQ ID NO: 222511 - DNA, 82 bp, Homo sapiens
cgatgtctgcgggaataggacctatggcgtggtggcccagtactaccggcccctgcatgtaaggggcctggataccaagaag

SEQ ID NO: 222512 - DNA, 78 bp, Homo sapiens
cggtttctcggcgaatgacagcacaggtgacagagttagtccttgataattgcctgtgtgtcaatggggaaattgaag

SEQ ID NO: 222513 - DNA, 82 bp, Homo sapiens
atcaattcggaaccgaagattaaaaaactggagccagtccttttgccagtgcaactgcagatagaagacctgactcgtaaac

SEQ ID NO: 222514 - DNA, 80 bp, Homo sapiens
ctaaattattccatttgcaacttatccccaacaggtggtgctctagaaaagttcgagatttatggtggcagggaatccct

SEQ ID NO: 222515 - DNA, 123 bp, Homo sapiens
tttgcctcatttgaggagtgggaacaggcttcggcgaacacaaaggggctgataacatccggaaatactggagccgctactaccaaggatctcaaggggtaatatttgtattagacagtgcct

SEQ ID NO: 222516 - DNA, 75 bp, Homo sapiens
cgcggcgggaggagcctgttcccctgaggtatccaaaccttgaaacctttgctctagatgtcaggcttgtttttg

SEQ ID NO: 222517 - DNA, 100 bp, Homo sapiens
gatgctccagtttgagaaacctggatctgcgatctgtttgtgatgcagagcaaagcggcagtccccggacagggatgggctctgaccaggaggacagcaa

SEQ ID NO: 222518 - DNA, 74 bp, Homo sapiens
caaatcgagtgcacctgggatgacaaaaagtcatagtggtgtgacaaaaatatggacagacttcttagacttgg

SEQ ID NO: 222519 - DNA, 100 bp, Homo sapiens
caatgtctctgctgtggacaagagtacgggaaaagagaacaagattactatcactaatgacaagggccttgtatgaagcaggagaaaggagaaaggggac

SEQ ID NO: 222520 - DNA, 101 bp, Homo sapiens
ggcagccctcgctgtcatcctcattgctactgccctctgcgctcctgcatctgcctccccatgttttgtacagtgttagaatactgtgaaggcaatgactt

SEQ ID NO: 222521 - DNA, 100 bp, Homo sapiens
ggtatcaaccgggctcccagccctagaccagctcttaggtggagtttgtccatatgctcaatgctaccatgtgcgccactacccgtaccatctgcgccat

SEQ ID NO: 222522 - DNA, 90 bp, Homo sapiens
tggactactatgactctgaacaatcacccggaagttcaggctgaattctgaaggcaaacttgagcagacggtctccatggcaaccacgac

SEQ ID NO: 222523 - DNA, 101 bp, Homo sapiens
attcagcaattcaacaaccaggccttctcagtgggacaacagcttacaggacaaattgcagaaaatcttggagaagaagagcagttggtccaaggcttatg

SEQ ID NO: 222524 - DNA, 75 bp, Homo sapiens
tggaaaactgggccaaagcagtgaaacgctccatgaattggtcggagcagagcatggacatgggaacgagtgctc

SEQ ID NO: 222525 - DNA, 100 bp, Homo sapiens
ttcatcaaagacgtaatcaaagacggcaacgcgcttatcagcgctatgagaaactacagtggtagtggaggccgaagcggcgggaacagctacggctcag

SEQ ID NO: 222526 - DNA, 75 bp, Homo sapiens
agcagcgactttggggcccgtcaccctcagggacagagcagaatgggctgatatagatccggtgccgcagaatga

SEQ ID NO: 222527 - DNA, 97 bp, Homo sapiens
tgaaatccaaaggtgaatcttttggttggtgattttgatgatagccacaaagcaagcagggatgttttcactccagaatgcaaattcaaggaatctg

SEQ ID NO: 222528 - DNA, 100 bp, Homo sapiens
agtctggcagatccagtcttgctcagctctcacaggagagggcgttcaggccggatcacctcaacagtcacgtcagacaagtgcactcaacagaacggcc

SEQ ID NO: 222529 - DNA, 83 bp, Homo sapiens
cccaaagacccctggagacatggtgaggctccaggttgggctctatgctgtgtaccttctggactggctcagcgtttttgaca

SEQ ID NO: 222530 - DNA, 75 bp, Homo sapiens
gcaagaagcaccagttcaagtggccctcagggcatccccgttttcggcctgtccatcgtcatgggggctgtgctg

SEQ ID NO: 222531 - DNA, 101 bp, Homo sapiens
ccagtgcttaggctttggaagtggtcatttcagatgtgattcatctagtgagagcacagtaaggactattgctatggatggtacagaaggcttggttagag

SEQ ID NO: 222532 - DNA, 90 bp, Homo sapiens
atgtagaagttgatgaatcaagaggaatgcacatctgtgaagatgctgtaaaaagattgaaagctgtgagaagttattatttgctaaagg

SEQ ID NO: 222533 - DNA, 100 bp, Homo sapiens
acgtttgacacctgctttctggtgctacaagtggaccttctagtgcagttgttcctaatacctcatctcggaaaaagaatataactagcaaaacagaaac

SEQ ID NO: 222534 - DNA, 82 bp, Homo sapiens
taagcctgcacagccgcggcggcagcagcagtgagagactccgtgggaaggaggcttgtttaaactacggatgcttttcaaa

SEQ ID NO: 222535 - DNA, 50 bp, Homo sapiens
taaactctctgttaaaccaaatgtcctaaacgatgctatatttgatgaag

SEQ ID NO: 222536 - DNA, 50 bp, Homo sapiens
tgtggaggaaaacaacttcgagggcagacgtctgttcctcacacaccccg

SEQ ID NO: 222537 - DNA, 90 bp, Homo sapiens
cctggccgagcaggaggcgccatcatggagaagtacagcatcggggagcccacagtgccatccaccctggcagaggagtttacctacaac

SEQ ID NO: 222538 - DNA, 75 bp, Homo sapiens
atacaagacacaaatgtaacttctgaggacaaaaaggagaatgtactactcatcacctcccacctgtgaaagccc

SEQ ID NO: 222539 - DNA, 96 bp, Homo sapiens
gctcggccgggccgtcccggcctgcgcagcctgaggtacagcccacgcttgatggaaaaaattctccaaatggctgaaggtattgatattggggag

SEQ ID NO: 222540 - DNA, 133 bp, Homo sapiens
gctacaaggactcgccctccgtctgggccgccgtccccgggaaaacgttcgtcaacatcacgaggaagccagatcgctgagggtccggtctccagtttgcctcctgctatatccattggaagagaaaagtttg

SEQ ID NO: 222541 - DNA, 97 bp, Homo sapiens
acttcggttcaggcggaggcatccttaccaaggaatctgcttttcaagtatgccaccaacagtgaagagttgcttttgccaagagtaagttatttga

SEQ ID NO: 222542 - DNA, 82 bp, Homo sapiens
gcggtggagcgggacacgaacgtgaaaatgatgcatcctgttgccagcagtaatccagctttctgtgggcctggcaagcctt

SEQ ID NO: 222543 - DNA, 82 bp, Homo sapiens
atgcccgggcctgcggccgcttcttccagaagggccaagggacttgcttttatttcggtccactggtgtgtcctccccttcc

SEQ ID NO: 222544 - DNA, 100 bp, Homo sapiens
gccatctgttctgccctggctgcctcagccctaccagcactggtcatgtctaaaggtgtcgtgaaaactacccctaaaagccaaaatgggaaaggaaaag

SEQ ID NO: 222545 - DNA, 80 bp, Homo sapiens
cagacccagggccgggaccgactcttcaggattctggttgatctgaaaaatgaagtttggtatcaaaaatgtcatgaccc

SEQ ID NO: 222546 - DNA, 83 bp, Homo sapiens
tcccccagggcctcggcggccgctctgcctgcgcgctgctcctgctctgctacctggaacaagcacatcatgattgacttggg

SEQ ID NO: 222547 - DNA, 100 bp, Homo sapiens
gaggagccctcgttttcgagatcaggcctgaccgggataagctccagggggtgaagccagccagttttgacaaagtagcaattcctgaagtgaaggaaat

SEQ ID NO: 222548 - DNA, 101 bp, Homo sapiens
ctggatcaacaccggggagtctgcggggattgagtgttgctatagtgggacccacgtttcaagatttggcaacaaacgtgaaccgaaatatcagtagtctg

SEQ ID NO: 222549 - DNA, 100 bp, Homo sapiens
ggagggccgggcgcggcggcggcggcggtggaggagccggagcataatggggcctttacaacaactaaacggacaggcattccagccccacgggaatttt

SEQ ID NO: 222550 - DNA, 76 bp, Homo sapiens
tgtaatgacaccagcgcagctctcttgatttcacacattgtgcaatgatgtacagttacccagcacgtgtacctcc

SEQ ID NO: 222551 - DNA, 100 bp, Homo sapiens
acagaggcaagcaggggcgccgtgggtgccagagaggcggaagaggaggcctgatgggtttgcgtgtgaacttggacatgggcaaagcggtgtatggatg

SEQ ID NO: 222552 - DNA, 100 bp, Homo sapiens
gcagaacctgctgcagcagaagagacagagggagttacaaagcgtttggcagaaaagaatgactttgtgatcttcctgtttacattgatgacaagtaaga

SEQ ID NO: 222553 - DNA, 75 bp, Homo sapiens
ggcagcccagtctggtgtttggaatgacgacagtatgattttaggtgatgggcaagtcagaaagtcagatggata

SEQ ID NO: 222554 - DNA, 100 bp, Homo sapiens
ttgcatatgagtgctgctgcagcttcccgagacatcaccttgcttcaggcgtcactcctgtgtaatgaagagaccagaatgtcagcctgtgaagatcatc

SEQ ID NO: 222555 - DNA, 96 bp, Homo sapiens
gcttcagccctaaccgctactggctgtgtgctgccacaggccccagcatcaagatctggggtgtccgcaatgttgccagtgtctgtctgcagattg

SEQ ID NO: 222556 - DNA, 73 bp, Homo sapiens
aggaatgacaccaaggaagatgtatttgtacaccagaccaaactgcagctggaatacccagtacagttctgct

SEQ ID NO: 222557 - DNA, 82 bp, Homo sapiens
gacactgagggaacaaacacttctggatgcatccgtgaaaggaaagcaagccaggatggatatttacgacactcaaaccttg

SEQ ID NO: 222558 - DNA, 83 bp, Homo sapiens
gtttgctgccatgctcctggcgtggacacacaagcaccccaataacctcaagctacgagttccagggagctctgtcctggtga

SEQ ID NO: 222559 - DNA, 74 bp, Homo sapiens
cctggaccagcctcttctgaaacactgggacatgcgtcgggatgtccaggaaatttttcgcatgaccccccacg

SEQ ID NO: 222560 - DNA, 100 bp, Homo sapiens
tcccatccagaatgatctgcttgagtatttcagcttggtacattttgttaattccggcatcctagatgatgattattctccaccgtctaagagaccaaag

SEQ ID NO: 222561 - DNA, 83 bp, Homo sapiens
atctatgcaaatatgaggatggttcatatacttacatcagttgttacagctgaggatgccaaggacttcttcaagaggaagat

SEQ ID NO: 222562 - DNA, 100 bp, Homo sapiens
caagtacagtctggactgagaatattattggaggctgctccactgccagattttcctgctttagtgctgtggatctttccattgatgagtccagcttgac

SEQ ID NO: 222563 - DNA, 50 bp, Homo sapiens
cggacagtttgcaatagaactggttctggagatatatcttcagattctat

SEQ ID NO: 222564 - DNA, 100 bp, Homo sapiens
ccgcgggatccgagtgcgggcgcgggcgcgggcgctcccggcgagccacggaggccccgtgtgggccgcggcccggccctcaccatggagtccatgttcg

SEQ ID NO: 222565 - DNA, 100 bp, Homo sapiens
gtccctgtttcgccacagttcctaccttatgagctcggttttcttatgcttataagagtggaacagggatggagcctatagaggtgcctcttgaggaaaa

SEQ ID NO: 222566 - DNA, 100 bp, Homo sapiens
tctcgacgtggggcggccagcgatgaagccggatgtcttcatcacattttgccagtcgacacaggaaggatataagtactgaaatgattagaactaaaat

SEQ ID NO: 222567 - DNA, 74 bp, Homo sapiens
gtgtcgccatgggccgccgccccgcccgttggcgaagaaagcgaggtatagacaaggagccgagctgaaacact

SEQ ID NO: 222568 - DNA, 50 bp, Homo sapiens
gcgcctcattgactccatgacaaaacaaagtgttgttcgctgcctgtggc

SEQ ID NO: 222569 - DNA, 76 bp, Homo sapiens
ataaatctcgcccaaacaggaaaggacatggatttgattgacatactttggaggcaagatatagatcttggagtaa

SEQ ID NO: 222570 - DNA, 128 bp, Homo sapiens
tcgcggttagcccgtcagtccctgctctgtgcgcgcctccatctgggccatggatggccatacacactgctgctatggatatgctgggaggacctggtatcgaaagccagtgtagaaaagttgatatc

SEQ ID NO: 222571 - DNA, 118 bp, Homo sapiens
agtttttgcctgtgtttagaagggtattactacaactcttctacatgtaagaaaggcttatggctatgggccatacggtggtgcgtacccgccaggaactcaagttgtctacgctgcg

SEQ ID NO: 222572 - DNA, 144 bp, Homo sapiens
acacacgatctctccagtttccatatgttgagattctacttattcatcagtttgttgtgcttgtcaagatcaggtgtctgacttccagcaactgctggcctgtgccagggtgcaagctgagcactggagtggagttttcctgtg

SEQ ID NO: 222573 - DNA, 75 bp, Homo sapiens
attgccctgcgcatcgatgaggatgagaaaggttgtttttcaccattcagaacattgcctgaagcaggtccacca

SEQ ID NO: 222574 - DNA, 100 bp, Homo sapiens
cacgctgcgctcggagctggagctgacgctgggcaagctggagcaggtccgcagcctgtctgccatctacctggagaagccactgtgggctcgagtaggg

SEQ ID NO: 222575 - DNA, 100 bp, Homo sapiens
ctcgcttgcagttcagcgaccacggtcagcccaagactaccccgtcggtcattctgttcctgccgtcctgtgaggagccccaagccaacaaggccacact

SEQ ID NO: 222576 - DNA, 96 bp, Homo sapiens
tagagccggccgagctgaggcggtcgcggccatgaagctgggagtgtccactcgccttccaccagcatggcaacgtcttcacagtaccgccagctg

SEQ ID NO: 222577 - DNA, 75 bp, Homo sapiens
attacatactgttagagaccactggattagcagaccctgggtgtccgcaatgttgccagtgtctgtctgcagatt

SEQ ID NO: 222578 - DNA, 50 bp, Homo sapiens
gcaactctcagttcgagagtaaagtgccggtggtggtgtgcacattgagc

SEQ ID NO: 222579 - DNA, 74 bp, Homo sapiens
tgcttgtatcgaatgcacgctggaactttatccaccacagatttggaactgtatctgtatggaaacaacaggta

SEQ ID NO: 222580 - DNA, 75 bp, Homo sapiens
cagaagaggagagaactgctgtgcgtctgaagtgatggcggaggaccgtgtgtatgtacaacaaaataatgtgga

SEQ ID NO: 222581 - DNA, 83 bp, Homo sapiens
agcgagtcgtcgtgagcgcggtcggcggtgtcgtgaaaactacccctaaaagccaaaatgggaaaggaaaagactcatatcaa

SEQ ID NO: 222582 - DNA, 144 bp, Homo sapiens
tcggctgagccgcgccgcaccatgcccgccgtggacaagctcctgctagaggaggcgttgcaggacagcccccaggacccattccaacaatctcgtaaaacatggtggattactatgaagttctaggcgtgcagagacatgcct

SEQ ID NO: 222583 - DNA, 100 bp, Homo sapiens
ggccagagcatccggaggttcacaacctctgtggtccgtaggagccactatgaggagggccctgggaagatcatatctgaagatattagtgagctacaaa

SEQ ID NO: 222584 - DNA, 98 bp, Homo sapiens
atatgccttgttgccatgggatacctgttcatgtgttttggaggcaccgtctctccctgggaccaggcagtgaaatcaactgtgcagaccatcactgt

SEQ ID NO: 222585 - DNA, 96 bp, Homo sapiens
gaaagacacgactttgaactggaaggaaggttgtgcaggaccagcgttccctgtgcaggcgccactgcgtttcctgcagattccgaccggcactgc

SEQ ID NO: 222586 - DNA, 75 bp, Homo sapiens
atcacattcattttaattttgccggaatatttcaagacaccgaaaggtcttagaaaaataccccaatacacccat

SEQ ID NO: 222587 - DNA, 129 bp, Homo sapiens
aatttacaatgaatggacacagtgatgaagaaagtgttagaaacagtagtggagaatcaagtctttcccagggaactccgatgaagtgttccaacaaaatgagcgagtgaaccaagaagaggatgacat

SEQ ID NO: 222588 - DNA, 100 bp, Homo sapiens
cagcacttccggtcacgccatcgttgctgccttcttcgtcaaggctggcaaagcacacaggctgagcgctgaggagagggaccagctgctgccaaacctg

SEQ ID NO: 222589 - DNA, 82 bp, Homo sapiens
ggatcatgtctgcgagccaggattcccgagacgtctcccacaacctgctccgggcgctggacgttgggctcctggcgaacct

SEQ ID NO: 222590 - DNA, 87 bp, Homo sapiens
ctgggcagctacaaaatcaatggccggacgaaaaaatgcactcggtgatggaaagagagccactattctgaagaacacttggccaaa

SEQ ID NO: 222591 - DNA, 100 bp, Homo sapiens
gaatcagaggccacctcagagagagtgttggagacccggtgagcctccattgataaaaggttggcttccttatcttggagtggtcctgaacttacgaaaa

SEQ ID NO: 222592 - DNA, 100 bp, Homo sapiens
ttgcggccctcagcggccgcgaccgagtcatggctgagacctacggtctcacagatttcaagcctggctactggattggtgtccgctatgatgagccact

SEQ ID NO: 222593 - DNA, 90 bp, Homo sapiens
gacagatcgcgagcggctgcggaccatttataaccgcgacttcaagatcaggcattttgttcccaacatcacctttggtcaccctgtggt

SEQ ID NO: 222594 - DNA, 75 bp, Homo sapiens
gggaatgatccttactaaccacgaccatcaaatccgtgtcggagtccttacagccaaaacagagtggagtacgag

SEQ ID NO: 222595 - DNA, 100 bp, Homo sapiens
agaaaagacatgaaaaacatactattcctttggtagtccagaaagaaacatgtgatgtggaaacagctgtaaaatttgcaactcagcttattgacctggg

SEQ ID NO: 222596 - DNA, 98 bp, Homo sapiens
tgcactttgggttcaaggcgacagtctcggcgcggaagatggccggcggcgtggacggccccatcgggatcccgttccccgaccacagcagcgacatc

SEQ ID NO: 222597 - DNA, 50 bp, Homo sapiens
catcgtcccctggactctctcaaacaatgcagatcttcgtgaagactctg

SEQ ID NO: 222598 - DNA, 100 bp, Homo sapiens
acgaggtgtgggagatcgtgggcgagctgggcgacggcgccttcggcaaggtttacaagggacaagaatccttcaagaaacaggaaaaaactcctaaaac

SEQ ID NO: 222599 - DNA, 98 bp, Homo sapiens
ctgcagcgctgaagacttcaaggtggaatacctggaagcaattcaccatctccatgaggagtggctcatcaaaggcagccttttccccatggcagccc

SEQ ID NO: 222600 - DNA, 75 bp, Homo sapiens
cccacctttcgatctgactgaatgttcattcaagaaatctgaaatagagtactatgctatgttggctaaaactgg

SEQ ID NO: 222601 - DNA, 89 bp, Homo sapiens
aggtttcagggagcagcaagacaatcactgcagagataccagaacatcgatatattgaactcttcttgaattctactcctggaggcggc

SEQ ID NO: 222602 - DNA, 100 bp, Homo sapiens
cagcgggagctggcccaggaggacagcctcaacaagctggcgctgcagtatggctgcaaatgtcatcttgcattacaacatataagaagacaccacctcc

SEQ ID NO: 222603 - DNA, 88 bp, Homo sapiens
cccgcggccgcaccttcccgccttctcaggacctcagcagccatgtcgaagccccatagtgaagccgggactgccttcattcagaccc

SEQ ID NO: 222604 - DNA, 98 bp, Homo sapiens
ctttcttaaaggactgatttttagaactccacatttgagagcctggcccaactagagaatctgtgcaaacagctgtatgaaaccacagacacaaccac

SEQ ID NO: 222605 - DNA, 50 bp, Homo sapiens
aagaagtgaagctgctgctactcggtggcacaagaatggctcaactctcc

SEQ ID NO: 222606 - DNA, 126 bp, Homo sapiens
agatgaagataagcgcttaggcagtgcagtggattactactttattcaagatgacggaagcagatttaaggacacagcattgttggttttgccatgtactattttacctatgacccgtggattggc

SEQ ID NO: 222607 - DNA, 100 bp, Homo sapiens
ggaaaagcagttgctcgaagaactcgagcgacagagacaagctgagcttgccgcacaaaaagctagagagaaactaattctgaagcaagcccttatagtt

SEQ ID NO: 222608 - DNA, 100 bp, Homo sapiens
agcggttaatgcggaaggttaagaaactgcgcctggacaaggagaacaccggaagttggagaaggccaatccggagccggcaacaactgggcaaaggggc

SEQ ID NO: 222609 - DNA, 75 bp, Homo sapiens
ttcgctgtcaaaatccgtgagctgctggcgttgcagacggggcgtgaacccccacccatctggcgagtccagaag

SEQ ID NO: 222610 - DNA, 88 bp, Homo sapiens
aaaacggcgagagtgggcgagaacgtccactgcgggccggcgaaagctgtggaatcaactatgaaattataatcatagatgatggaag

SEQ ID NO: 222611 - DNA, 83 bp, Homo sapiens
agaagaccaagtacctgcagatcctgacctctctgatgagatggatcggctctgacgcccgctctgcggcttcggtgtttgaa

SEQ ID NO: 222612 - DNA, 108 bp, Homo sapiens
ccgagtggaggcgactgggggctgaagagcgcgccgccctctcgtcccactttccagggggatatgagactttctactcggaatatcctgagtgttgcgtggatgtaa

SEQ ID NO: 222613 - DNA, 80 bp, Homo sapiens
tgatgttctggtggattatggatcagatccaaatcaggagtttgaggacatcaccaatgcgagctttcatctggacatgt

SEQ ID NO: 222614 - DNA, 74 bp, Homo sapiens
tcgaggggacgattggaatgacagtgccttcgtgcatcgctgcggtcgcacagctcgcattggccacgggggca

SEQ ID NO: 222615 - DNA, 100 bp, Homo sapiens
atccgaagtgccgcggaaagtggagttggttgaatctggcgatgtggaacccatggatatggagggctgactatatacaccatgttttttcctggcacat

SEQ ID NO: 222616 - DNA, 90 bp, Homo sapiens
ggcaacagaggatgtcaacaattttttggaggatagcactataatatgcagaaatctacaaattctgatacttccgtggaaacactgaat

SEQ ID NO: 222617 - DNA, 90 bp, Homo sapiens
gacagagctactggatctcagccttgtcaaagatgccagatgtgggagacacgccaaagctcccaagtgaaatgcaaaatggaggacgat

SEQ ID NO: 222618 - DNA, 75 bp, Homo sapiens
ttaactggcacccagtgctcatggtcaccggcttcgtcttcatccagggcatcgatttatcagcaagactgttga

SEQ ID NO: 222619 - DNA, 75 bp, Homo sapiens
agagtatgcctgggtcccgccgggtctgaagcctgaacagggatcgcctccggaccaccaccaacgtactgggag

SEQ ID NO: 222620 - DNA, 75 bp, Homo sapiens
gccatgtccgcgcacaatcggggcaccgagctcgtgttcaagagacctatgaagccaaaagacatgagttccatg

SEQ ID NO: 222621 - DNA, 82 bp, Homo sapiens
ttgctccggactcagccaagttccccaacggctccccgtcgtcctggtgctgcagcgcttcgagagctgtgcccaggagtga

SEQ ID NO: 222622 - DNA, 100 bp, Homo sapiens
gcgggagcagcgggtcactggtgtgctcatcgccagcctcgtggagatggacagagacgtatgtgcgttggtctcctaagggcacctacctggctacctt

SEQ ID NO: 222623 - DNA, 96 bp, Homo sapiens
ggaatctgtctcctgatcatcattcagaagatgcaagtggaccaggaggaaccacatgttgaagagcaacagcagcagacaccagcagaaaataag

SEQ ID NO: 222624 - DNA, 126 bp, Homo sapiens
ccgccgaagaagcatcgttaaagtctctcttcaccctgccgtcatgtctaagtcagagagagaagcgaagggcaatcattccttctcacttggcctatggaaaacggggatttccaccatctgtcc

SEQ ID NO: 222625 - DNA, 75 bp, Homo sapiens
ttgtatagggatgtgatgttagagaactatggaaacctggtctccttggggaccattgacatttatggatgtggc

SEQ ID NO: 222626 - DNA, 80 bp, Homo sapiens
ccgcgagcacagagcctcgcctttgccgatccgccgcccgtccacacccgccgccagggaaccctactctggaaactgtc

SEQ ID NO: 222627 - DNA, 49 bp, Homo sapiens
gaaagctggtcttcctggaaagactggcaggggcagccttccaccacgg

SEQ ID NO: 222628 - DNA, 82 bp, Homo sapiens
ggcagccgaggccgcgaactgcatcatggagggacccagacatggagctgcgggaagaagcctggtctccggggccgctgga

SEQ ID NO: 222629 - DNA, 48 bp, Homo sapiens
agcaccaggcccaccgtgaaaggaaaatgtttataggaggccttagct

SEQ ID NO: 222630 - DNA, 90 bp, Homo sapiens
cgaggccgtcggccgccgtcagcgagggcgccgagcaacttcggtcctcagaatggttggaatgaccctccagctttgaacagagtaccc

SEQ ID NO: 222631 - DNA, 82 bp, Homo sapiens
tgaagagcgacaagccgctggcagccgcggatctcaccgccgctcagggaggctactcacagtcgaactacaactccccggg

SEQ ID NO: 222632 - DNA, 80 bp, Homo sapiens
acctggccctgcagaagtcctgcctcaccaaggctggctcctcaagaaagaagtgtactaatggtcacttgatgtgcgct

SEQ ID NO: 222633 - DNA, 98 bp, Homo sapiens
ggtctcccagcagccggaggacagccagcaggacctgcctggggagctcctcctgcaaggagaatccttttaaccggaagccatcacctgcagcgtcc

SEQ ID NO: 222634 - DNA, 100 bp, Homo sapiens
cctgagggctgagttctgcacccagtcaagctcaggaaggccaagaaaaggatcagctgctgctctctgaaaagccacagttgtgtcagctatgccagga

SEQ ID NO: 222635 - DNA, 75 bp, Homo sapiens
cgaatatcgtcatcgttagaagattgtgttcacctattgaaaattaaaaagacattttgtttatgtaaaagatta

SEQ ID NO: 222636 - DNA, 131 bp, Homo sapiens
tttgaagtcaacattcgatttattggaggcctacttgcagcatattacctatcaggagaggaggaggaggtgcgccagtctgtaactcctgccgagccagtccagtactatttcacgctggctcagcaacc

SEQ ID NO: 222637 - DNA, 100 bp, Homo sapiens
aaaaggtgatctggacaaaggaacaggtatctcaggaagaaggaccatggaaatctcagttatcttcaacaaaatctaaaaaggtggtagaagtatggat

SEQ ID NO: 222638 - DNA, 129 bp, Homo sapiens
gagagaggcaccgggatcgtgaccgagaccgtgaccgagagcgtgaccgagagcgcgaatatcgtcatcgttagaagatccacttcctcatgatactgtcttctaactgggcttacttaaaggatgcga

SEQ ID NO: 222639 - DNA, 100 bp, Homo sapiens
tcagaaatctgttctacaggaagatgctgagaaactgcggaaagaattgcatgaagttgctgaacctgtttgcatgagttgctcctgacggccctttagg

SEQ ID NO: 222640 - DNA, 75 bp, Homo sapiens
tcacccctgctggccacgggccagcctgcgggatctgaagacctcaccaagggactttgaacatgtcggggatcg

SEQ ID NO: 222641 - DNA, 146 bp, Homo sapiens
gttttggacttgtctattatgtccttgttggcctaactgtgctgagccaagtgccaatggatggcaggaatgaaaatatttacaccagcagctccagttcataccaataaagaagatcctgctacccaaactaatttgggatttat

SEQ ID NO: 222642 - DNA, 51 bp, Homo sapiens
cccgttcctggagattctgattgagcttcggaaccaaaaagaagcttccca

SEQ ID NO: 222643 - DNA, 100 bp, Homo sapiens
ctctgccacctgcacagtctgccaaagacccttcccaggggaggacattcggcaccgtatgtgccctgaaattgcccgccttttgaccccccacatttac

SEQ ID NO: 222644 - DNA, 75 bp, Homo sapiens
gaagtgaaaatgtgctgcctcgagagccgctggctggatcaggtgcaacaccaccataaggaagagtggattcgg

SEQ ID NO: 222645 - DNA, 100 bp, Homo sapiens
gagacacattttatgttgtgtcatttcgaagggaggaggagaacggggctgaggaggaagaagaagaaactgccgaggatggagaggaggaagatgaagg

SEQ ID NO: 222646 - DNA, 100 bp, Homo sapiens
tgacaacgtggatcgttgttttgaaactggctttgaagcgtatgttgaatttcaatgtgcctcatattaaaaacagcacaggagaaccagtatggaaggt

SEQ ID NO: 222647 - DNA, 78 bp, Homo sapiens
acagtcctcgtcagcactgactttcagctatggaatcgggaaatattagtcgtcaagaagctgttagcatgatcccac

SEQ ID NO: 222648 - DNA, 100 bp, Homo sapiens
acggcggcgacaagggtgttcccgaactagagtgggccatttcataattctgaatcatgtctgataacggagaactggaagataagcctccagcacctcc

SEQ ID NO: 222649 - DNA, 97 bp, Homo sapiens
tgtagaaataagaagaagcaactgtacaaaccattgagaaagatcagtctaaagaaaaggagaagaaagtgaaaaaaacaattccttcctgggctac

SEQ ID NO: 222650 - DNA, 75 bp, Homo sapiens
cgccaccctgcgctgccgccgctctgaggagttaaaggtcatgtttactggtgaaaatattcctgttcatcctca

SEQ ID NO: 222651 - DNA, 100 bp, Homo sapiens
ggaaggctaatttatactggcaatatggcccgagcagtgtttgcaaacttccttgataacatgcttttgcgaagtgcaggaaaattaaatgtgggcacca

SEQ ID NO: 222652 - DNA, 83 bp, Homo sapiens
tgttggcgtgtccctgcagcgaaggatcctgggaacttaggctgcggaactatgtcccggaggatgaggacctgaagaagagg

SEQ ID NO: 222653 - DNA, 80 bp, Homo sapiens
ggcatatatgaagaaggcatttctattttagaaagcagttcggctatcttagcggcacagagacgaggagaagatgtgga

SEQ ID NO: 222654 - DNA, 106 bp, Homo sapiens
cctcagccaggcagcctctgcccagaaggaacgtgccggtacatgtactggacagactggggtgagacgccccggattgagcgggcagggatggatggcagcaccc

SEQ ID NO: 222655 - DNA, 98 bp, Homo sapiens
agcagagcgcccactgcctccagcagtctaacaaagtgccagtggtgcagcaccctcaccatgtccaccccctcacgcctcttatcacgtacagcaat

SEQ ID NO: 222656 - DNA, 100 bp, Homo sapiens
atgtgtacagagggtgcccagcagggtcttctacagtggctgttgaagaggctgaagccctcaagggaacaaagccgatgacagccggatgagcttgttg

SEQ ID NO: 222657 - DNA, 100 bp, Homo sapiens
acctttttctccaagaaggacaagcccctgtgtgggaatgatggttagatgctgccgaacatacgaagaagtgtgcgaaggtgatgtgatgttggcaaag

SEQ ID NO: 222658 - DNA, 80 bp, Homo sapiens
aagaagcagttccatcttccacaaggagcacaggaccaagagtccaggacccaggaagtttgtgtgtatgttacagcccg

SEQ ID NO: 222659 - DNA, 75 bp, Homo sapiens
acgcggtgaggcggcgacgggctccgggagatatacgactaaggggtcagacgggggttcgtgctgaacgccgtg

SEQ ID NO: 222660 - DNA, 100 bp, Homo sapiens
ctacactttgcctcatgcaatggcaatgaccagattggggtcaccagtcgttggcacaccaagaagctgccccgcaagacccaccgaggcctgcgcaagg

SEQ ID NO: 222661 - DNA, 124 bp, Homo sapiens
cttcattctctcatgtctgtggtatcagcattacaaagtgctcccatcttcaggctgacaaaaacctgggctaacaagttgaaatcatcgcagaaggataaagttcgtcagtttatgatcttca

SEQ ID NO: 222662 - DNA, 74 bp, Homo sapiens
accctaccgaattacaagatcaggaaggatttttactgggagaggtaagacaagaggaaacgtttagcatcagt

SEQ ID NO: 222663 - DNA, 83 bp, Homo sapiens
cgaggcagatattcctccccagcatgtcagcatgaccaagcgcctctactacctctggatgtctctggattaatcgaattaca

SEQ ID NO: 222664 - DNA, 75 bp, Homo sapiens
gagcggagcagtggtcggagatgtggcgaccgatctgcagcctcatgagagggggcattgctgagcgagggggcg

SEQ ID NO: 222665 - DNA, 88 bp, Homo sapiens
cagcagttcgtgaagtctgtgaggaggagcttggaccccgattggctgcaatgctgaactttaatcttcagcaactttgtggccccaa

SEQ ID NO: 222666 - DNA, 50 bp, Homo sapiens
gtccagagcattgtccagactggaactttatattgctgttggaatatctg

SEQ ID NO: 222667 - DNA, 98 bp, Homo sapiens
cttggcattacttctatagaaatggctgaaggaaaacctccttatgctgatatacatccaatgagggttgtactggtcagtggacatctggacagctg

SEQ ID NO: 222668 - DNA, 75 bp, Homo sapiens
cggcgggcgactggacggccggacagagttaaagttctcatcagactactgaaggacttgaggattcgttttcct

SEQ ID NO: 222669 - DNA, 82 bp, Homo sapiens
cagcaggcgggcctggagccctactttgacttcatcatcaccattgggcactcgaggctgttatctccagaagaagaagaga

SEQ ID NO: 222670 - DNA, 75 bp, Homo sapiens
ctgactccacctttacttttacctacgttggcggccccagaaggagacaaggacggcagcaaggtgacaacagtg

SEQ ID NO: 222671 - DNA, 74 bp, Homo sapiens
gcaaagcgaggtgtttgtgtccaatgtgcaggtgatggtcctaccagtgtgtctgttgaggtcacccgtcctaa

SEQ ID NO: 222672 - DNA, 75 bp, Homo sapiens
gctgttctctcggattatgaaagtgcagaagactcggaattttttgtagcatcagatccaacagttaaaacagat

SEQ ID NO: 222673 - DNA, 97 bp, Homo sapiens
tttctcaaacgagagtcagcctttaacgatggagtttcactcttgttgcccaggctggagtgcaatggcgtgacctcggctggctgcaaccttcacc

SEQ ID NO: 222674 - DNA, 98 bp, Homo sapiens
ttcatccctcgtcgaaaggattggattggcatctttagaatccagatgcagaggtgtgccttcatgtactgaggcttgtccagtctgtggttctggaa

SEQ ID NO: 222675 - DNA, 89 bp, Homo sapiens
gtttgagaaacctggatctgcgatctgtttgtgcatgtagagcgcatgaagtacaggacaataaagcttcctacacatatcaccaggag

SEQ ID NO: 222676 - DNA, 100 bp, Homo sapiens
caagtccagcttatagacccaatcaaaaaagaaactagcaaactttttaatgaggaaattatgtctactttgagaattcctccagcaacccatacctaat

SEQ ID NO: 222677 - DNA, 75 bp, Homo sapiens
cgccagacacgccgccgccgcagggaagtcgagataacatgagtattgtactagtttgcttttcaaatgctccca

SEQ ID NO: 222678 - DNA, 100 bp, Homo sapiens
agcggccgggctggatcaggatgagaaatgaaagctcattagcatctacactgaagacgctcctgttcttcacagctttaatgatcactgttcctattgg

SEQ ID NO: 222679 - DNA, 100 bp, Homo sapiens
agacaacaggatcgtctcgtccaaggtctatgttaacaatgaatgggcaaccagtgttggggaaggagggagctttggagaacttgctttgatttatgga

SEQ ID NO: 222680 - DNA, 100 bp, Homo sapiens
accgggccctctgcgacctggggccctgggtgaagtgctccgccgcccttgcctccagtgcctccagaatgagttgagaagataaatggatcagattgaa

SEQ ID NO: 222681 - DNA, 82 bp, Homo sapiens
tggcgtgcactccgcacctcggggacattattgcgcgtggaacggctgcttttggaagttcaaatctgaacatcaatgatgt

SEQ ID NO: 222682 - DNA, 101 bp, Homo sapiens
agttaaagaacatggcgacgtctaatctgttaaaggaattgattatggattaagtttaccacttggagaagactatgaacggaagaaacataaattaaaag

SEQ ID NO: 222683 - DNA, 83 bp, Homo sapiens
ctgaccacccctaaaagcacctggccccgctacagcaaaccagacggcaacgggggcctctactgcgcgctggaggaccacaa

SEQ ID NO: 222684 - DNA, 100 bp, Homo sapiens
ccgccgccgggctcggggcctccgcagcgacaacatggaggccgtgaagaccttcaatagcgagagacttgcagccaatacaggaagcaaacagcgtagt

SEQ ID NO: 222685 - DNA, 90 bp, Homo sapiens
gagatgtggctgtagctgtgcaccccaaagataccagataccagcacctgaactcctggggggaccgtcagtcttcctcttccccccaaa

SEQ ID NO: 222686 - DNA, 100 bp, Homo sapiens
gtgaattttggcacaaactgggctgctgtgtggtagagaaaccccagccggtggtgaatgacaagattgtggccagcaacctcgtgacaggtctacccaa

SEQ ID NO: 222687 - DNA, 100 bp, Homo sapiens
attttggaatcacaaatcttgttgaacatccagcccagctcaatcctccagagacccactgctaaggagttattgaagcacaagtttatactacgcaatg

SEQ ID NO: 222688 - DNA, 75 bp, Homo sapiens
atgaatggagagagactgcatggggagcttctcgtgtttcaggcctcacctgaagatcatgaaaaatacggtggg

SEQ ID NO: 222689 - DNA, 75 bp, Homo sapiens
gggccagggattgggaaaatctcttcagggttatgatgtgattgctcaagcccaatctgggactgggaaaacggc

SEQ ID NO: 222690 - DNA, 82 bp, Homo sapiens
ccgcaggtcgaggacggtcggactcccgcggcgggaggagcctgttcccctgaggcaagtgaaccggagcaaacgacttccg

SEQ ID NO: 222691 - DNA, 99 bp, Homo sapiens
tgcaggaggacgcagacggataaccacgaccatgcctgcatcgcctgtcggatcatctatcggtcagacgagcaccaccctcccatcctgcccccaaag

SEQ ID NO: 222692 - DNA, 96 bp, Homo sapiens
gagaccagtgcccatgaaggtcagactgaggattgcccccgcgatgttacgccaggcatcctatggcaccatcaagataggcacttaccagagctt

SEQ ID NO: 222693 - DNA, 75 bp, Homo sapiens
ccaatccccggcagctctctcagtgcttttggctgcccgtattcagacatgaacttgaaaaaggaggcaacactt

SEQ ID NO: 222694 - DNA, 100 bp, Homo sapiens
gccatggcgcggctcgcggactacttcgtgctggtggcgttcgggccgcacccgcgcggtcagttcaccgggacctggaggcccagattgcgatcgtgac

SEQ ID NO: 222695 - DNA, 50 bp, Homo sapiens
caccacttacgaaatcagggtcaaggaagctgcagtaaaggaagatgaag

SEQ ID NO: 222696 - DNA, 100 bp, Homo sapiens
aggcgatccgcaatgatgagacagggctgtggcagtgccccttctgtcagcaggacaatttccctgaactaagcgagggcaagtgtccagagaatggctg

SEQ ID NO: 222697 - DNA, 83 bp, Homo sapiens
cggggaccaagccggggactaaggcgagccggagaccgagcccgaacagcagcccgtggaccgggagcccgtggaccgggagc

SEQ ID NO: 222698 - DNA, 102 bp, Homo sapiens
gaaagctttgtactgggatgtgatgttggagaactacaggaacctggtcttcctggacatatggaaagttgatcatgtgctggagcgcttgcagagtgaaag

SEQ ID NO: 222699 - DNA, 80 bp, Homo sapiens
tattggggagaaaatcttcagagggcgtctctggccgagcctctttttgtggaaaacgacagcagcagcagtggcctgga

SEQ ID NO: 222700 - DNA, 75 bp, Homo sapiens
taacactattatttgtgatcttcagcctcaacagtgccggtggtggtgtgcacattgagccccggtatagacagt

SEQ ID NO: 222701 - DNA, 80 bp, Homo sapiens
gtggtgaaaaatgaccctgaactggaccagcaggcattgccagtggacctgagcaacagtggtatcagaagtcatggaag

SEQ ID NO: 222702 - DNA, 75 bp, Homo sapiens
cgcgagtgaggaaaggaggtactgtagcctgtgcctactacactggcacaagtggatagagaaaagatctatcag

SEQ ID NO: 222703 - DNA, 75 bp, Homo sapiens
tgtacaaaggagagtttaaacagccaaaacagttcattcatattcagcgcctcggcaagacgcgcaggaagacca

SEQ ID NO: 222704 - DNA, 75 bp, Homo sapiens
agacaccagcaggaagaatagtggctgactgcctaacagattgttatcagctgctggagccagttctgcttctcg

SEQ ID NO: 222705 - DNA, 90 bp, Homo sapiens
cgggcgctggtctgctcccagccggggaacgcccttttgcttgtgactggcagggctgcgacaagaagttcgcccgctccgacgagctgg

SEQ ID NO: 222706 - DNA, 97 bp, Homo sapiens
ggacagacgcacagacacctgcaggtgctgttccagaattcaaagaagagaaactgcagctgcaaccaaaaccacgttctggagctgtggaagaaac

SEQ ID NO: 222707 - DNA, 101 bp, Homo sapiens
cccagatgagcccattttagaatttagcttagaatatgtgctttccgaagattgaggtcatctcgagcttgagtgatgacagtgaccctgaactggactac

SEQ ID NO: 222708 - DNA, 75 bp, Homo sapiens
ttcggggtctgggttctggtgccgcgcagctttccccgtgctgctcacggccgtgaactgctacagcgtgaaggc

SEQ ID NO: 222709 - DNA, 75 bp, Homo sapiens
ggaagcagggattccagtgccaagctccaggggagctggaaatgcacaggaggagtcagaagacctgggttcgag

SEQ ID NO: 222710 - DNA, 98 bp, Homo sapiens
tgctcagtatgacgcttctgagctaaaagcttccatgaagggcctggggcttgcaggagatccgggactgtctgattgaggacagtgacgacgaggcg

SEQ ID NO: 222711 - DNA, 100 bp, Homo sapiens
gcagttgaaattcttaaggatgctttcaaatcaaatgactcacagcagcgtttgtccaatggttctatagactcaaccgatgaaactagtcaaatagttg

SEQ ID NO: 222712 - DNA, 101 bp, Homo sapiens
cagcagcgagtgggacggtcatgaggagctgaaggccatcgtatggcatccgcacttccactaatagccaagtagacaagctgaccctgtcagggagtgac

SEQ ID NO: 222713 - DNA, 100 bp, Homo sapiens
agacatgtctgagactcctgctcagtgtagcattaagatctgagtgggacatacttttgaaggatgtgcaatgttcaatcataagtgtgacaaaaactga

SEQ ID NO: 222714 - DNA, 100 bp, Homo sapiens
cgcggtgacggtggcgccgcccggggcgaggcagggccagcagcaggcgggagacttaattcagtgcacaaatgagatgaatgtgaacatcccacagttg

SEQ ID NO: 222715 - DNA, 83 bp, Homo sapiens
cctggatcttcgaacttttgacacggctttggaaacgacgtcatgtgttaggctactgcagcactggggtgtcagttgttggt

SEQ ID NO: 222716 - DNA, 89 bp, Homo sapiens
cgccgctgagccgtcgcggagccgcgcagccctcggagcacgttggagtgcctcaagcttattgcctctcaaaaatttacagacaaacg

SEQ ID NO: 222717 - DNA, 101 bp, Homo sapiens
ggagtgtacaagtccgcggagcagggggaggtggctattttcaaaatgatcactcccgaggacgtgaagctccttccagacgatgaaaacacgccggaaaa

SEQ ID NO: 222718 - DNA, 87 bp, Homo sapiens
ctgtgccaggtggcctccttggtatgccaggccaagtttcttcctaacagtggtgattctactctggccatgtgtgcccgtgacggg

SEQ ID NO: 222719 - DNA, 75 bp, Homo sapiens
gaagaagtaggcatcaatactgagcatgctacaagtgaaaactgatgagaaactgaatgtgtctgatgagaatac

SEQ ID NO: 222720 - DNA, 75 bp, Homo sapiens
tgaccgagagcgcgaatatcgtcatcgttagaaggatctcccagccatccagccccggctagtggcggtcagcaa

SEQ ID NO: 222721 - DNA, 74 bp, Homo sapiens
ctgtaccagaacgcagaaagcaacaaccaggagctccgcacgcagccatctgtgagaaagacacactgcagtgg

SEQ ID NO: 222722 - DNA, 75 bp, Homo sapiens
aggatctggggatcttcgcactatcccaaggaaaatggcaaatgcacgacagcggcctcctgaacatcaccaagg

SEQ ID NO: 222723 - DNA, 74 bp, Homo sapiens
actctttagaagatggccagaccttggggaccaagaaaagcagcagccctgggaggagcggggacactgaggac

SEQ ID NO: 222724 - DNA, 75 bp, Homo sapiens
caactgggccatgagagggaaggaaacaagccagagtttaacaactcctttgtggatgcattgggttctgatgag

SEQ ID NO: 222725 - DNA, 75 bp, Homo sapiens
aaaatggcagagaatacaaatttgatgtttcgtcagagttactagagatttgcttgctgaaaatggtcgattaag

SEQ ID NO: 222726 - DNA, 82 bp, Homo sapiens
cagggcagcacggaccaccgcggggtccccggcaagaatgccacccagaggatgtttgaaattgactatagccgggactcct

SEQ ID NO: 222727 - DNA, 75 bp, Homo sapiens
gtctcttctcgccctggcggggaagggatgatggcgccacttcctcagtttcggcactcaagcgcctggaacgga

SEQ ID NO: 222728 - DNA, 49 bp, Homo sapiens
ttgagtatgctccatgtagatcacgttttgctgttactgctcagtgtag

SEQ ID NO: 222729 - DNA, 100 bp, Homo sapiens
tgaggatggatctttataagagaggaattccccctgctaggatttgtacacacagatatgacgaaagacttgaaagaagaacatttaaagaaaaatattc

SEQ ID NO: 222730 - DNA, 145 bp, Homo sapiens
gagaagtacagggagcgagagctggagaagctgggattggagattccacccaaacttgctggtcactgggaggttattcagcttctcaaggctggaaaagcgaaggaagtttcctacaatgcactagcctcacacataatctcag

SEQ ID NO: 222731 - DNA, 100 bp, Homo sapiens
ttcgagaagtatgtaccaaatacatttataataggagtccagctattgctgctgttggttgaatcaagggattctttgaatagcatagccctgaagtttg

SEQ ID NO: 222732 - DNA, 75 bp, Homo sapiens
ctgaggagccattttgagcaatggggaacgctcacggactgtgtgtatgccgagattttgctgtcctggaggacc

SEQ ID NO: 222733 - DNA, 75 bp, Homo sapiens
tgtgtggcgatggtcttcctgctggggctcatgtttgaggtcttgccccagaagctgcgggcacatccacgcctg

SEQ ID NO: 222734 - DNA, 75 bp, Homo sapiens
tgatggctcagggactgtcagcctctgctctggaagtcatccttagtgtcgtggttctcaacctgcaccaccgct

SEQ ID NO: 222735 - DNA, 75 bp, Homo sapiens
gtccgccgccaccacccactccggacacaggcaggtgacagcagggacatgtctcgggagatgcaggatgtagac

SEQ ID NO: 222736 - DNA, 75 bp, Homo sapiens
tcctgcggtaccagccaccccctgagtatggggtaacgaggctcttataatgaatggagcaaatctgacagccca

SEQ ID NO: 222737 - DNA, 75 bp, Homo sapiens
ctgctgcccgcgtccgaggctcgcgggcggcgggcccggactgtgccctgtccacggtgcctcctgcatgtcctg

SEQ ID NO: 222738 - DNA, 100 bp, Homo sapiens
ctgcagcatctgatcagctctgcaaggaagagagcttcacgtctctggtcaggacacagcaggccaggaaagatacaggactatcaccacagcctattat

SEQ ID NO: 222739 - DNA, 98 bp, Homo sapiens
tatgtgctatgggctttgataggagccaagattttcttcttcactcctcgcttggtggctcccagccagaggccggcagtggtgggaggctcgctctg

SEQ ID NO: 222740 - DNA, 83 bp, Homo sapiens
ggatgagggagcctgccctcgcatggtggccagggcacgtcactgcaggccaggccactcttcacctccaccatgagcctgga

SEQ ID NO: 222741 - DNA, 90 bp, Homo sapiens
cgggtgagctcaccgcccagcccaaaccaggagattgcgagggagcgatgcggtgcagcgcgacttccttgccgtccaggaagggatttc

SEQ ID NO: 222742 - DNA, 50 bp, Homo sapiens
tttacgttattatcaacacaggaccagcaaagccttctagacaagctcag

SEQ ID NO: 222743 - DNA, 90 bp, Homo sapiens
gaccttctgagtaccagactattccacttaataaaatagaagattttggtgtacactgcaaacagttggccgttgtccaatgtgttgctg

SEQ ID NO: 222744 - DNA, 100 bp, Homo sapiens
cagtacaaggccagcctgcaggagctgctgggccaggagaaggcccgaatggaagtggatgcagatggaaatggtgctaagatatttgcctatgcctttg

SEQ ID NO: 222745 - DNA, 75 bp, Homo sapiens
gaacggctccagcatcaagatccgtctgacagattacctctctagtgacccttcagctgttaaccctggttggcc

SEQ ID NO: 222746 - DNA, 74 bp, Homo sapiens
ccagttccaaagtgtcttaaagatagggatgaggaagaaatgaccaaacgagatgacaaaagagatatcaacag

SEQ ID NO: 222747 - DNA, 90 bp, Homo sapiens
ggtccgtcaaaatctttgatgtgcgcaatggagggcagatccttatcgccgacctcagggggttcatctctaacaagtatttagtgaaac

SEQ ID NO: 222748 - DNA, 83 bp, Homo sapiens
cccgagtccgcgggaagatggcggcgccgctcatccccctctcccagcagacagagtttcactcctgttacccaggctggagg

SEQ ID NO: 222749 - DNA, 100 bp, Homo sapiens
ctctgtggtgactacagactagaggaatgctctatggaccccctggcccaggtgactcagctattccgggaacatctcttagagcgagcactgaactgtg

SEQ ID NO: 222750 - DNA, 98 bp, Homo sapiens
gagccatgcccatcgcagccgccccgaaggagccaggttatattaatgaaagtgggcacctcaacttacctcgatttgagaaataccttgtgaaacta

SEQ ID NO: 222751 - DNA, 101 bp, Homo sapiens
ctggtggagagagtgttgctggtatcactgcaatatctggcaagccgggtgacaagacagtgggagtagctcaccgttacccaagtatgcttcatctccca

SEQ ID NO: 222752 - DNA, 74 bp, Homo sapiens
ttccccttacctcctctctctggctcgggagctgggttgtgcccacgtgcctcagggccttggtagaaatggcc

SEQ ID NO: 222753 - DNA, 82 bp, Homo sapiens
caaagcggatcagagagggctaccttgtgaagaagaatgagagaagacagtgctagagtctatgaaaacgtgggcctgatgc

SEQ ID NO: 222754 - DNA, 87 bp, Homo sapiens
gaaatccggcccctgcagcagcagtagcgacagcgacagcggagacgagggcgtgttcgaaatccgcaccactgatgacctcactga

SEQ ID NO: 222755 - DNA, 83 bp, Homo sapiens
ctgcaggaagggggatgtgggccgagtgcggtgttcaggcgcttcgtggaggttggccgggtggcctatgtctcctttggacc

SEQ ID NO: 222756 - DNA, 100 bp, Homo sapiens
acagctcttgttcccgctgatcctgcagcccagtggatggagtccagaatctacagacctgccaggcaagaattgtcagacagtattggctccctgttcc

SEQ ID NO: 222757 - DNA, 100 bp, Homo sapiens
tgaatgtcttctatgaggaaagtgtgcattttgacagagatcttccagaatttggctctttccaacaactgatcctgtgggtactttgctccaagttcca

SEQ ID NO: 222758 - DNA, 74 bp, Homo sapiens
tactgtatctgtaaaacgccttatgatgaatctaagttgcagtgagagcagatgctggcaagaagcacttacca

SEQ ID NO: 222759 - DNA, 100 bp, Homo sapiens
cttcaagaatgaagccacggacccttgcggagatcatgcacgccctgaagatgacctggcacgtgcactgctttacctgtgctgcctgcaagacgcccat

SEQ ID NO: 222760 - DNA, 99 bp, Homo sapiens
gcggagccgaacaagaccgaaatccagactctttttaagaggcttcgcgcagttccaaccaacaagttttaacagtgtatgccagggaacacacattct

SEQ ID NO: 222761 - DNA, 98 bp, Homo sapiens
gctcatcatgatattgtacgatttctggtacagttagatgactacaggagtgctaacaggaatgaatgaaacttctgctgtaatcattgctgcaccac

SEQ ID NO: 222762 - DNA, 74 bp, Homo sapiens
agaagtatttggggagaatgactgaggagccattgatgtgtgttcatactttggaaacaaaagagcttatgcag

SEQ ID NO: 222763 - DNA, 98 bp, Homo sapiens
acaaatagaatctgtacgatttcgttctctgccacccacacagaatatgcctatgggtcctggagggatgaatcagagcggccctcccccacctccac

SEQ ID NO: 222764 - DNA, 100 bp, Homo sapiens
agcagaggtgtccctggatacagcagttccaagagcctctgagttcctgccttttttcatctctgaatccccaccattggcctacattgggagtggggcg

SEQ ID NO: 222765 - DNA, 97 bp, Homo sapiens
gctgtggtcagcacccctgcagatcatcctggcgatctacttcctctggcagaattccttcgacaatcctgagtggttttatcggcatgtggaagca

SEQ ID NO: 222766 - DNA, 75 bp, Homo sapiens
agcggcggcgaacatgcgcttttgacacattggagccgccgccatgtctgcgcatctgcaatggatggtcgtgcg

SEQ ID NO: 222767 - DNA, 90 bp, Homo sapiens
gggagaggatgatgactcacacccctctgagatgagactgaacccttctctgaagcaacagctcttctcctacgccattctgggctttgc

SEQ ID NO: 222768 - DNA, 98 bp, Homo sapiens
ccttcatcgacttgagacaaatgccaaagggacaattcgggaaattgtcctgcctaagggcctggacctggaccggcccaagcggacacgtacatcct

SEQ ID NO: 222769 - DNA, 75 bp, Homo sapiens
ttacatttaggaaagtgaggcaaacaccttgtaactgtaaggaagaaaagtatgcctttgtcaactggataaaca

SEQ ID NO: 222770 - DNA, 100 bp, Homo sapiens
tcaacaggggcaaatcgaagtagagagcgaaaccatcttcaagttagcagcgtttattttacaggtgtctgacttccagcaactgctggcctgtgccagg

SEQ ID NO: 222771 - DNA, 101 bp, Homo sapiens
tggaaccggatatttaagtacaatggtgggcttaattttagacacgatgaggcgagtggtacgacagagcaagtttcggcatgtatttgggcaagcggtga

SEQ ID NO: 222772 - DNA, 87 bp, Homo sapiens
caaagtcagtcgccagtcagtgttgtgtggaagccagaacatcgttctcaatggcaaggaattgaatgatctggcacgggaccctcc

SEQ ID NO: 222773 - DNA, 50 bp, Homo sapiens
tctgctcttcagtacaatcctatgggcctttgggtccccgaggattagct

SEQ ID NO: 222774 - DNA, 82 bp, Homo sapiens
ggaatcacgctcggaaacaatggcatcatcggctggttcgtgcgaagcttcaagtacttttacgggctccgcttcgaggtgc

SEQ ID NO: 222775 - DNA, 90 bp, Homo sapiens
gttggagaactacagaaacctggtctccctagattttatttggagagaagcaagcatctttgcctctttggagtaggaaattcagacttg

SEQ ID NO: 222776 - DNA, 83 bp, Homo sapiens
caagctcggatccctgaatttgatccagttttatggctacctgtcccagcagcagaacatgatgcaggactacgtgcggacag

SEQ ID NO: 222777 - DNA, 100 bp, Homo sapiens
tctggagtcccaactcatgaaatttagagttcaagcaagcaagatacgagagcttttagcagagaagggattaaagcctgtggtttccacagaagcacca

SEQ ID NO: 222778 - DNA, 97 bp, Homo sapiens
gaaacaccagatcacatatcttattcatcaggtctgctcaccaggtggccagataccgcccacgtgcccccatcattgctgtgacccggaatcccca

SEQ ID NO: 222779 - DNA, 130 bp, Homo sapiens
ctggattataaggatgtcatccccatggctgatgcagcaggcatcatccgctatgcaattggggtggtcctggctctgccatatgacacccccgtgcccggctacatgaataacactgtcaacaccatgc

SEQ ID NO: 222780 - DNA, 101 bp, Homo sapiens
ttaaaagacctgctgcatttggacacggcactgaggcaggaaaagcatatggatagtgaatattacaactctttgaaatggatcctggagaatgaccctac

SEQ ID NO: 222781 - DNA, 127 bp, Homo sapiens
ggaaattaatgttgctcacctgaagaccacagcggcccacacacagtcattcaaacagccgtgaccttggagaaggtgctgggaattacagtgtctggaggcagaggacttgcctgtgacccccgat

SEQ ID NO: 222782 - DNA, 113 bp, Homo sapiens
tcaagggcgtgcacagcgtgcggtacctctgcatgggcgccgacggcaagatgcaggggctgataatgctcggaatatttttcaatgtccattccgctgtgttgattgaggac

SEQ ID NO: 222783 - DNA, 75 bp, Homo sapiens
aggtggaattgaagaattcaaacctcctgaggtccagcatgtctggcttgcacctagtaaagcagggccgagaca

SEQ ID NO: 222784 - DNA, 100 bp, Homo sapiens
tggaaagggagatggcttttcgcactgaaatgtgatttaaagggagtgatagtcactctgagtgatgatggtcacttgcagtgttcatacctggggacag

SEQ ID NO: 222785 - DNA, 100 bp, Homo sapiens
acaacgccctgcgggctgctgccggcatccagccgccaggtttaacaatgcatgcatcaattcttgcatatatgtttaatttggttgaagaaggaaaaat

SEQ ID NO: 222786 - DNA, 50 bp, Homo sapiens
taatcagtatgtcatatggatgtacaaaattggacagctgtacatgatca

SEQ ID NO: 222787 - DNA, 136 bp, Homo sapiens
tacctttcagctgcgccggccgcgaggccacggagagctcgccttggagagcccaggagcaggggagacatgctggagtcctgacctctctcttctctctccgccacctctccccgccctggcttggtggcagtcg

SEQ ID NO: 222788 - DNA, 96 bp, Homo sapiens
tgagcaccctgtggctggtgggggccggccccggcctggtcctggccccggagctgttgctggacccctggcaggactgagggagctggccgtgcg

SEQ ID NO: 222789 - DNA, 100 bp, Homo sapiens
tgcggagtcgccgatcccgccggaagcgccaggacaatggggacccgggacgacgagtacgactacctattcaaaggaggccaacggtcctgctgatggc

SEQ ID NO: 222790 - DNA, 90 bp, Homo sapiens
acggatgaaaatgaagacgacattcagtttgtcagtattattataagtataggcctcatgttttatgtagttcatcgagctcaagtggaa

SEQ ID NO: 222791 - DNA, 87 bp, Homo sapiens
cggggcacggagggcggtggcggcgggctcctgcgagaagcaagcggaacttcctgagagagctgcttttgcacattttcctgaact

SEQ ID NO: 222792 - DNA, 50 bp, Homo sapiens
actcacaagactcttcgaggggccaggtcctggtgcttgatggtcgaggc

SEQ ID NO: 222793 - DNA, 96 bp, Homo sapiens
gtagctgcagctggagcagtggcgtttggaggagactcgagctgggcctccagaagagaggatgctgtctggtgctgggctacatggccaaggaca

SEQ ID NO: 222794 - DNA, 100 bp, Homo sapiens
ggcagatggagaacctgatcgaacttcgcacaaccagtgtctctgaagaagatgtctcaagtagatattctcgaacagatagaagtgggttccctagata

SEQ ID NO: 222795 - DNA, 75 bp, Homo sapiens
ccagctacctgattacttgttacccatttgtgcaggaaaaccagtccaatagggaataaccagcaagtacctgtc

SEQ ID NO: 222796 - DNA, 100 bp, Homo sapiens
gggagactctggctctggcccctgagccagagcccctggagaaggaagcttgtgagaagtggaagaggcccttcagatgttggagtccggggtgacctgg

SEQ ID NO: 222797 - DNA, 71 bp, Homo sapiens
tgtacatcagccctgaggagttcaaacccattgctgagaagctaacagggagccatggctgccacgtactc

SEQ ID NO: 222798 - DNA, 96 bp, Homo sapiens
gaggacctgtgcagggcagagcaggaggccccccgagtttgctggcctagacctgaactcttcagataatcagagtggaggaagtacagccagcag

SEQ ID NO: 222799 - DNA, 75 bp, Homo sapiens
actgaaatgaggcatagatgagaagctgagaaatgatctcctgaatattattcgagaaaagaacttggcccatcc

SEQ ID NO: 222800 - DNA, 83 bp, Homo sapiens
cgctgaagggcaccatcgacccgaagttgcggattgcagccgagaacgagctcaaccagttttgtaccaatggctagaagcag

SEQ ID NO: 222801 - DNA, 50 bp, Homo sapiens
cccgcaccgccgcccgcgccctcaccagttccagggtctccctccactgc

SEQ ID NO: 222802 - DNA, 100 bp, Homo sapiens
tgcaacactccccgtacctcctccccccatgcccgtgccttggctcactatgataacgttatctgtcaggtacgtagagaatacaggaaattcttcagag

SEQ ID NO: 222803 - DNA, 74 bp, Homo sapiens
gtttctgcgatacctgcctgcaggagttcctcagctgagatctgtatctgtggacctgaatgttgatccctcgc

SEQ ID NO: 222804 - DNA, 99 bp, Homo sapiens
ggactcccatcaagtctccacacagctagcagccacgtggggcacttctccaggagaaggaagccaacatccttttggagccatgaatattgtccgaac

SEQ ID NO: 222805 - DNA, 100 bp, Homo sapiens
tggctcgagaacgaagtaggccgtctcgctctgggtctccaggcccgcgaccgtccgccagtcgtcccgaggtttaaacttacacgaatcgctttctgga

SEQ ID NO: 222806 - DNA, 83 bp, Homo sapiens
gaagaatgccattaacatgaaagatgtaaaagacttagggaagacgatgaaagatcagattaatttcttggactggaagaaag

SEQ ID NO: 222807 - DNA, 74 bp, Homo sapiens
gcgctctcgcttcagtcagtcgggccgcgccgcgcctcagctctgtttccatagcaaggcgtgtacaagatcca

SEQ ID NO: 222808 - DNA, 75 bp, Homo sapiens
gagtgcgtcaaggactccccgcgcttcagcacaggaagtcctggagaacctgaaggaccgctggtaccaggcgga

SEQ ID NO: 222809 - DNA, 97 bp, Homo sapiens
cctggcctcgcgggccgtgtctccggcatcatgtgtggtgttggtgtctgtccagtcccttatattagtagctgagccttattttaatgaaccggga

SEQ ID NO: 222810 - DNA, 74 bp, Homo sapiens
cgccagtaagaacgaggaggatgaaggaggaccattcttagtggcactggggaaatcttggcacccagaagaat

SEQ ID NO: 222811 - DNA, 74 bp, Homo sapiens
gtaacactctacaagatgggttttccggaagccgccaggcatacttttttgatgcaccagagatggaccatctc

SEQ ID NO: 222812 - DNA, 98 bp, Homo sapiens
ttggcggcggcgctagcttcggagtctcccgcgcgcacctcagccgcctcctagcggcgcggcgctcgctcctacgcaaaagctgatgaagcattgaa

SEQ ID NO: 222813 - DNA, 75 bp, Homo sapiens
ggatggccttggatgaatttttagtgaaaaatgatccctgccgagatctgaccctggctgtgcccatctgtaact

SEQ ID NO: 222814 - DNA, 82 bp, Homo sapiens
gaaaacctaaccatgaagacttgaacttaatacagcaagaaagaccatcaagtttaccattttgtaccaatggctagaagca

SEQ ID NO: 222815 - DNA, 75 bp, Homo sapiens
cgtcaacaagatggtgagcatgatggagggtgtcatccagagtttgtacaaatgatgacagcaaagtgaagacct

SEQ ID NO: 222816 - DNA, 50 bp, Homo sapiens
cttagccagcccgagcaagtaaagattgctcaaagttatgaagtttcagg

SEQ ID NO: 222817 - DNA, 95 bp, Homo sapiens
cgggccctcgtgtcaccgctctgaagtcaaggaggtgggtggagccgctgactgccgagggcagagcctcgcttcggtgcccagcagcctcccgc

SEQ ID NO: 222818 - DNA, 74 bp, Homo sapiens
gtccaatctgagcgtgctgcggacggcgctgcggtacatccagcgtctgcttctgcgctttgcctgggagaggc

SEQ ID NO: 222819 - DNA, 98 bp, Homo sapiens
gctcaatgacagtcaagtggaaacaactgtctggactgactgcattgcacagatgatggatatttacgtatgtttgaaacgaccatcctggatggtgg

SEQ ID NO: 222820 - DNA, 101 bp, Homo sapiens
gaaatgcatgcgaccgatccccttctcccggaccccaggagccggcgcccccgccctgtagatgatgctgtgtatctggacaatgagaaagaaagagaaga

SEQ ID NO: 222821 - DNA, 101 bp, Homo sapiens
atctagaaccacgtgtccctatgacgcgtttagaacgggtcacgtgagcgcctcgcctggatgtgagtttcagccagacagggtctggctctgtcacccag

SEQ ID NO: 222822 - DNA, 100 bp, Homo sapiens
ttcgcattttggcattgacatttaattttagggtcctttatatagaagggagagtagcttgcttggctcaggaacaacagaagagaataaagaaaatgac

SEQ ID NO: 222823 - DNA, 90 bp, Homo sapiens
ccggacccaaaccatgttccctgtgaaggtgaaagtggagaaatcaggtgatgcgtgaatgggccatggcagacaaccagtccaagaacc

SEQ ID NO: 222824 - DNA, 100 bp, Homo sapiens
tcgaaggcttttggacaagtgggtggagctgagggttgcacagagcattgaggatcaccatcaggaagtgattggtttctgcagagagaatggtttccat

SEQ ID NO: 222825 - DNA, 75 bp, Homo sapiens
cccgggacccacttcactccagtgcctccgacgcctcctgatgcgctgtgcttcgccgtgagccgctcgctgctg

SEQ ID NO: 222826 - DNA, 102 bp, Homo sapiens
ttgctccggactcagccaagttccccaacggctccccgtcgtcctggtgctgcagcggtggagctcatgaaggacttcagcatttgggtccttttggcaaca

SEQ ID NO: 222827 - DNA, 75 bp, Homo sapiens
cagaaaaaaaagaattcttggagccagatagctgggaggtggagtgtgttactcttggggctggaatgagcatgg

SEQ ID NO: 222828 - DNA, 80 bp, Homo sapiens
atcgacatcagtgaagaagatcaggtctcctctgagcctccggcctccataagacccaaaacagatgacacctcttccca

SEQ ID NO: 222829 - DNA, 82 bp, Homo sapiens
cctcagctccgagtccagggcgagcccgaccctgcccgccctggactggcagctgccgtcccactcaggcccgtatgagctt

SEQ ID NO: 222830 - DNA, 111 bp, Homo sapiens
taacgatcaggtcattgccagcggttcagaggactgcacggtcatgcaatattttggtgtttaagcttggaggaacatccttatctctcagcgtcatggaagttaacagtg

SEQ ID NO: 222831 - DNA, 75 bp, Homo sapiens
cacagacagaatccctgctaccatgcacgatctgattttctggagagatgtgaagaagactgggtttgtctttgg

SEQ ID NO: 222832 - DNA, 80 bp, Homo sapiens
catgtactcgggagccggccccggtactaggttttgacaagcttgcatcatgcgtgagtataagctagtcgttcttggct

SEQ ID NO: 222833 - DNA, 74 bp, Homo sapiens
gccgcccggggcagggctcgggagagcggggacagaagatgagcctgtcggtcctggagggtatggggttccgt

SEQ ID NO: 222834 - DNA, 83 bp, Homo sapiens
cccggcggccaaaggccagtgactaccaacgtttggaccagaagacctgtcgcgaaatcgcctttcagaaattcctatagaag

SEQ ID NO: 222835 - DNA, 83 bp, Homo sapiens
aagcagccgatccagcctgcggagcctgtggggcaggtgatgatgtaaaatctaaagattacattgttgcactacagcaccct

SEQ ID NO: 222836 - DNA, 100 bp, Homo sapiens
tggccttcggagcctttgaccagtggtgggagagcaaggaggagaaggccaagcaaaaaagggagacgctgtccccgctgtgcctcatccccatggtgac

SEQ ID NO: 222837 - DNA, 75 bp, Homo sapiens
gctaaccaccgccgagaacgagctgggagtggtggtagcccacagtgagtcaggattgtcagtggcttcgccccg

SEQ ID NO: 222838 - DNA, 75 bp, Homo sapiens
cagctagctgcttatggctataaaattacaggacattacctgttgattcttgggcaaggcccagaatttggtgga

SEQ ID NO: 222839 - DNA, 82 bp, Homo sapiens
tctgaggtcatcggggatgtggacgaaggggccgacctcctagttggaatcgaagcctcttaaaatggcagatgacttggac

SEQ ID NO: 222840 - DNA, 90 bp, Homo sapiens
ctatggatgatcgagaggatctggtgtaccaggcgaagctggccgagcaggctgagcgatacgacggaatctctgtcagcagcctgagcg

SEQ ID NO: 222841 - DNA, 100 bp, Homo sapiens
gtttgaggatgcagatgttgatcactgaaaatgatttatgcaagtttaaggatgtctggagccaggattgttggtcatttgactcatgccttgaagcaag

SEQ ID NO: 222842 - DNA, 90 bp, Homo sapiens
agcccatcgtgtgaactatagagtttgtggacagatttatattgggtgataaaagaaaatgtggctgaagttacccgaagttcagcttgc

SEQ ID NO: 222843 - DNA, 51 bp, Homo sapiens
gagctggggcacggagctgtggctgactacacagacttagtcttctccact

SEQ ID NO: 222844 - DNA, 96 bp, Homo sapiens
gaatatacagatggaggaatcctggatccagatgatgtcttggcagatgttgttgaagataaagacaagctttaccgatttgttacaactcaagca

SEQ ID NO: 222845 - DNA, 75 bp, Homo sapiens
gattacttctgtgccatgttcactagtgaggtagaagatgtgttacaacgttgtcgagaatatttaattaaaaaa

SEQ ID NO: 222846 - DNA, 83 bp, Homo sapiens
ccggcgtgttcatgcccccgggatatggctcgtggacagcagaaaattcagtctcagcagaaaaatgccaaaaagcaagctgg

SEQ ID NO: 222847 - DNA, 100 bp, Homo sapiens
gattgactgagatgccaagaggaaaatttatctgcaatgaatgtcgcacaggaaaatgtttataggaggccttagctgggacactacaaagaaagatctg

SEQ ID NO: 222848 - DNA, 85 bp, Homo sapiens
gtcccaggtggcccagcaggccagtgaaaattctcgactggctgctgaggtttacaaagacatgccggaaaccagctttactcga

SEQ ID NO: 222849 - DNA, 90 bp, Homo sapiens
gacgcggtggagccgccggagtctgagaagggttgaatgcaatgcagttacagaatttggctgcactagctgctgcagctagtgcagctc

SEQ ID NO: 222850 - DNA, 82 bp, Homo sapiens
ccggaaggaacagacccctgtagcggacaatgcagatcttcgtgaagactctgactggtaagaccatcaccctcgaggttga

SEQ ID NO: 222851 - DNA, 120 bp, Homo sapiens
ctgagatcgccacctaccgccgcctgctggaagatggcgaggactttaagccatctggctgctgtgcacaggcgctcgtgaggctgccttccggaacattaagaccattgctgagtgcct

SEQ ID NO: 222852 - DNA, 100 bp, Homo sapiens
ggacccacttcactccagtgcctccgacgcctcctgatggtcgcaatggaagaagagatcgccgcgctggtcattgacaatggctccggcatgtgcaaag

SEQ ID NO: 222853 - DNA, 100 bp, Homo sapiens
ttaagtcccccaaagatgagatttacctgtgagatgtttcatcccaacagttttgatgatgatggttcagaatttcatgaacatatatttctggagaaac

SEQ ID NO: 222854 - DNA, 118 bp, Homo sapiens
ctcagacgcagcgtctagtccctggccatagctccgccgctgcccggaactgcaagcacatgttgaccagataactgaaatggcagcagtaatgaggaaagccattgaaattgacgag

SEQ ID NO: 222855 - DNA, 100 bp, Homo sapiens
ccctgctccggaggctggtgcagaggtgtgctctgaacaagccgagacggggccgtgccgagcaatgatctcccgctggtactttgatgtgactgaaggg

SEQ ID NO: 222856 - DNA, 100 bp, Homo sapiens
tcttctaaaaggatatgtgttgctaatacccatctttactggcatcctaaaggagcagcatggacctgtcagcaactaaggaacaaaagtaatgaagatt

SEQ ID NO: 222857 - DNA, 100 bp, Homo sapiens
gtttttggctcctgactttgatcgttggctggatgaatctgatgcggaaatggagctcagagctaaggatatgggccctcacattttccaaacctgtcca

SEQ ID NO: 222858 - DNA, 98 bp, Homo sapiens
aaaattaccattttatgatttactggatgaactgataaaacccaccagtctaggtaatggtttttacaaaggaccaaacagaaaaggaaatagatgaa

SEQ ID NO: 222859 - DNA, 51 bp, Homo sapiens
caatcagacagaaaaccagcgaggtgcaggctgttcggctcttgaatccca

SEQ ID NO: 222860 - DNA, 75 bp, Homo sapiens
cctaacgctggccgacaacagcctggcgtccgccacgagatgtggtatggtgtattcctgtgggcactggtgtct

SEQ ID NO: 222861 - DNA, 97 bp, Homo sapiens
gtcatttctactggacttcatgcttagatacatgtataacaagatggtagttagtattgctgaagatcttttacgaactgctgcccaaaatagcagg

SEQ ID NO: 222862 - DNA, 100 bp, Homo sapiens
agcgccgaggaggctttcctgctggtggcaaccgcctacgagacactcaagggggtgaagccagccagttttgacaaagtagcaattcctgaagtgaagg

SEQ ID NO: 222863 - DNA, 51 bp, Homo sapiens
gcagaaagtgcctgtgcatcagggtatttgaagtataccatacaactgttt

SEQ ID NO: 222864 - DNA, 80 bp, Homo sapiens
atcagtcccgacgtgctcagcgatgaagctactgaatctttacatcaaacgtgcacaaacaggttctggaggagctgatc

SEQ ID NO: 222865 - DNA, 97 bp, Homo sapiens
agagaactcagcgaggattctgaggtacatgtcccagagcaagcacacggaggcccgggagctcatgtactcgggagccctgctcttcttcagccat

SEQ ID NO: 222866 - DNA, 82 bp, Homo sapiens
cagggcctgccctgctcctggtggcacccagtggcctgtactactgaacatggtccaagacaattcctgggaaagttcagtt

SEQ ID NO: 222867 - DNA, 82 bp, Homo sapiens
ccaggaggctttggagcggctaaaaacctgtatcacctcttctgggctcaagatggacaacaagaagcgcctggcctacgcc

SEQ ID NO: 222868 - DNA, 100 bp, Homo sapiens
acgtgtcatcgaaggcagcctgtctcccaaagagagaactcttctcaaagaggaccctgcttactgaagaagcctgggaagtttataaacagataaagac

SEQ ID NO: 222869 - DNA, 100 bp, Homo sapiens
acagatgatacgtttgatccagaacttgcagcaacaataggtgcgtcctggctgagagttggagctctccagcaacatgcctgagcagagtaacgattac

SEQ ID NO: 222870 - DNA, 50 bp, Homo sapiens
ggccactgggcgagcgtctggcaggccaaacaccagagcaccctagaagg

SEQ ID NO: 222871 - DNA, 100 bp, Homo sapiens
gggaatgctgagaaaacagacagatttgtcatgaagaaactcaatgatcgtgtcatgagagtggagccgccaccaaaatgcagattttcgtgaaaaccct

SEQ ID NO: 222872 - DNA, 98 bp, Homo sapiens
ggatgctcctgggatttcggagaggccgcaggagtcatttcgtggtaaattcactccagcagcaacctcaggctgcatccccttcagtaccagagccc

SEQ ID NO: 222873 - DNA, 101 bp, Homo sapiens
ttggaagattttgctgaagatggtgagaagaagattaaattgcttactggtaaacgcgttcaactggcggaagacctcagactcctgatagttcaggatgc

SEQ ID NO: 222874 - DNA, 75 bp, Homo sapiens
gccgccgctacgggaccgcctgagctttctacaccgggccttgtacagctccatcaagaatgagaagctgcagtg

SEQ ID NO: 222875 - DNA, 75 bp, Homo sapiens
ctcatcgaggcccaaaccgccaaggtgactcggaggaggaggacatggggctcctggaggtcagcgtttcggaca

SEQ ID NO: 222876 - DNA, 100 bp, Homo sapiens
tcattgtcatccttgtgctgttggtcatcgtctctgttggatgaacccaatcccaatagtccagcaaacagccaggctgctcagctgtaccaggagaaca

SEQ ID NO: 222877 - DNA, 76 bp, Homo sapiens
aacaaattcagtcccttctccatgaaatggtacacgcagaacatgtaggagagaagtttgctgaggaatgccttca

SEQ ID NO: 222878 - DNA, 100 bp, Homo sapiens
tggataagttctattttgaagaactggggaagtacgacatgatgatggatgtgtggggaggagagaacctaggaggaacaaccatgtcatcagaatcgag

SEQ ID NO: 222879 - DNA, 115 bp, Homo sapiens
cagcgactcggaagattcgaggcggcgggggacaagtcggcgccccagagcggacgaggctgaccggttccctgatgtgttacctgcttctgctactgatccaaactgcagaact

SEQ ID NO: 222880 - DNA, 50 bp, Homo sapiens
aacaaatctgcaattataacggaggctggagtgcagcggcgcgatctcgg

SEQ ID NO: 222881 - DNA, 101 bp, Homo sapiens
gtggattcgaacaacaaggagttatctattgctatccgtggatatggactttttgcaggaccacaagtatatggttatgatgacttgcagatgcttcagac

SEQ ID NO: 222882 - DNA, 100 bp, Homo sapiens
gtgcccctcacctcagggaatggccctttgaccctgcatgagggccaggactttccacacgggggttctacaagctgcacgagcggaggtgtgagcccat

SEQ ID NO: 222883 - DNA, 75 bp, Homo sapiens
tgcaattcaagatatccgaaggttcaattatgtggtcaaagagtcggatggtcagggctgccctttctgtcgttg

SEQ ID NO: 222884 - DNA, 100 bp, Homo sapiens
cctttgggttggcttcgtggctccacgacttactctctacccttggcagacgctgaccggaaaggagattgagattgacattgaacctacagacaaggtg

SEQ ID NO: 222885 - DNA, 122 bp, Homo sapiens
ctgcatacagatgtaggtgatattaaaattgaagtcttctgtgagaggacacccaaaacatgtgagctctgtcagtcagggatccttaaactcttcaaaaccaaatgctagaacacgttgct

SEQ ID NO: 222886 - DNA, 87 bp, Homo sapiens
ggaatcccctgcgttcagtagccccgctctcccctgtcccgaagagacgagttgtactgctgtcacaggaaatggacgctggattac

SEQ ID NO: 222887 - DNA, 78 bp, Homo sapiens
ttcaccctgccgtcatgtctaagtcagaggagcctctttcagaattcttcaagccagaagaatgatgtttttcacttg

SEQ ID NO: 222888 - DNA, 98 bp, Homo sapiens
ttgctcaacaagggcctgccgcttgcttcgagagctgtgcccaggagtgaacaaccagccctacctctgtgagagtggtcactgctgcggggagactg

SEQ ID NO: 222889 - DNA, 100 bp, Homo sapiens
ccgttatctgcaggtattgggagatgcacagctaagatgccaggaccacctggaagcctagaaatgactgactgaacatgtgcaagataaaagcaagctg

SEQ ID NO: 222890 - DNA, 83 bp, Homo sapiens
agacaaaaatatcttcatgaggaagagaagatcgtcaagaagttgtgtatccatatattcctgcacatattacaaagcctaag

SEQ ID NO: 222891 - DNA, 98 bp, Homo sapiens
gcgaggcagctgtactaggactgggaacgggttacctacctgggcaaagtctccaccactggcatgcagtttttgtcaggctgcacagaaaagccagt

SEQ ID NO: 222892 - DNA, 97 bp, Homo sapiens
gaccagtacaagcaaatctgtttttgagcctgaagattcttcaatagtagataatgagatgcccagcctacagagtctgagaaggaaatttataatc

SEQ ID NO: 222893 - DNA, 100 bp, Homo sapiens
caggcgggaccggatgctgcgcacactgtatgaacaggagattgaggtcaagattgtcgaggctgtggatggaaaattcacaatgacatcctttcaagaa

SEQ ID NO: 222894 - DNA, 100 bp, Homo sapiens
tatttacatcccattccctgaagatgattctaattcaacaaatcataacttgaaagctgatgtcctgaccactggagctggtaacccagtaggagacaaa

SEQ ID NO: 222895 - DNA, 75 bp, Homo sapiens
cctgttcctatatctgccagcactgcctcgtccaccttggagacattgtaactctcgaagtgataaaagctgttt

SEQ ID NO: 222896 - DNA, 124 bp, Homo sapiens
cccaggcgagggcgccgcacccacaccgcgctgcgcagttttgttctgctccagctgttcgaaggtgatccaggaagtaacagctagcagtcgccactatgttgacaggctatttgaccctgat

SEQ ID NO: 222897 - DNA, 75 bp, Homo sapiens
tggacaccctgacagcccagatcactgaaagaggcagaggagtcgtttgaatttgtggtggtgtccctcactggg

SEQ ID NO: 222898 - DNA, 74 bp, Homo sapiens
tggatccggatcgcatggaagacgcagcctggccgcgctctcccagctaataataagccagagatcgaagcggc

SEQ ID NO: 222899 - DNA, 97 bp, Homo sapiens
acgggcagacacctgcacagaggttgagaataggatttttaactggtccaaaacccttaatagagagagttattttacacatacaagtttcaacatt

SEQ ID NO: 222900 - DNA, 100 bp, Homo sapiens
tgacagggtccaacagggcctggtccgtgtccggtcccccaaatctgtcgtccctgcccccaggaaacagcacttcttctcagtctcagacaagtactgc

SEQ ID NO: 222901 - DNA, 75 bp, Homo sapiens
ccggagtctcgccgccttcccgcgccccgcagcgccccgcagagcagtcgaggaatgtatcctgtcaggtataat

SEQ ID NO: 222902 - DNA, 89 bp, Homo sapiens
gctggctgcacccgcctccgcgctcgtcaggaaagaccacagcaagattctttcattcgtctcctcctagcctgggggaccaggctcga

SEQ ID NO: 222903 - DNA, 100 bp, Homo sapiens
aagctccggaaatacatcgtcgccaggactcagcgggccgcaggccaacatgcaaaagtcttctgtaccaagacctcggacaccgtgtgtgactcctgtg

SEQ ID NO: 222904 - DNA, 90 bp, Homo sapiens
gatatttctcttttgtctgcccctattgtaagtgcagatggaacacaacagccagagactgctgctactttgaaacgtacgatagaggcc

SEQ ID NO: 222905 - DNA, 74 bp, Homo sapiens
ccagagctacccttcttggagcccacagggcgacgagtagaacagcccctctatggtttagatggcagtgctgc

SEQ ID NO: 222906 - DNA, 100 bp, Homo sapiens
ccggacatgatcctctccgcctctcgagctgaaccttcacctagccccaggattacaaggaaaagcaccaggcaaaccaccatcacatctcattttgcaa

SEQ ID NO: 222907 - DNA, 100 bp, Homo sapiens
ccgtggctgctaagacacagcttggccggtgcttccaggaaaccattgggtcacaggacatggatttgattgacatactttggaggcaagatatagatct

SEQ ID NO: 222908 - DNA, 75 bp, Homo sapiens
ccatgattgtaaatttcctgaggcctcctcagccctgcagaacttgcacgatctgattttctggagagatgtgaa

SEQ ID NO: 222909 - DNA, 100 bp, Homo sapiens
tgaactggagtgtgcggcccgataagcgctttcgcttggcgctgggcagcttcgtggaggagtacaacaacaagaacctcaaccagaaccctcggacttt

SEQ ID NO: 222910 - DNA, 74 bp, Homo sapiens
ctcccatcattgatgtggtgcgatcgttggtacgccttattacatgtctccagagagaatacatgaaaatggat

SEQ ID NO: 222911 - DNA, 88 bp, Homo sapiens
cggaacccgccagggtccagggtccaggttccagcgcccggcggcccaggacctcagcagccatgtcgaagccccatagtgaagccgg

SEQ ID NO: 222912 - DNA, 51 bp, Homo sapiens
ttctggcctggaggctatccagcgttggacgtgataagtatgagcctgcag

SEQ ID NO: 222913 - DNA, 51 bp, Homo sapiens
caagttggttggagatgtggattttgaagacaaccagatgttccaatattt

SEQ ID NO: 222914 - DNA, 75 bp, Homo sapiens
gcctcggcagccttgcgctgctctaatggtccggacttccgtgtgagctggaagctatcaaagctcgagtcaggg

SEQ ID NO: 222915 - DNA, 75 bp, Homo sapiens
actgggtggatgggcgccagaacatcaagcgagccaaggacgacgggacccaggtcctgctggttggggcagaca

SEQ ID NO: 222916 - DNA, 100 bp, Homo sapiens
acgttcccacacctggaaaggtgcaggtgcaggcctctcagctttcctccctgccacagaatgtaattgaccggaaaccataccctgatgatgaaaattt

SEQ ID NO: 222917 - DNA, 75 bp, Homo sapiens
tcgtctccgccatcagctcggcagtcgcgaagcagcaaccatggatgataatgaagataattcaaatgatgggac

SEQ ID NO: 222918 - DNA, 75 bp, Homo sapiens
aaatggccacagggctcctgagagccaaaaaagaggctgaccggttccctgatgtgttacctgcttctgctactg

SEQ ID NO: 222919 - DNA, 102 bp, Homo sapiens
aggacctcctggtggccggagcctccacagcagtgcagtggcagccacctacactcctgggcaacgtgctggtctgtgtgctggcccatcactttggcaaag

SEQ ID NO: 222920 - DNA, 50 bp, Homo sapiens
gttgggggcaaggagaagatcctgatgctgagggttggaaaagcaaaagc

SEQ ID NO: 222921 - DNA, 100 bp, Homo sapiens
ttgctagtaacgtcatggaggatgaacgacagaacctaaaggcagacccagaagagctttttacaaaactagagaaaattgggaagggctcctttggaga

SEQ ID NO: 222922 - DNA, 100 bp, Homo sapiens
cttggcgaggcctttcaccaagtccatggtgaggctgctgtcagaaaggaacttttacacagtttgccttcagagacagtctatcggcatgttgtagagt

SEQ ID NO: 222923 - DNA, 75 bp, Homo sapiens
gcagcaccgggaccccgcgtcggctgggcgccccacaagaattaaacaaccaccatgtcgagcaaaaaggcaaag

SEQ ID NO: 222924 - DNA, 74 bp, Homo sapiens
gacagccgacgcgcagatagcagagccatccttgggccgtgcagtcggaggtccttgtgcatgaagacagattt

SEQ ID NO: 222925 - DNA, 75 bp, Homo sapiens
aagaacatttcctctagtttctggataatgagcaggcacacagggcaagtgtccagagaatggctgggatgaaag

SEQ ID NO: 222926 - DNA, 102 bp, Homo sapiens
caactgtgaagttagaaaagccctgtcaaagcaagagatggctagtgcttcatccagccaaagagcctatgtgcttcccaagctgtatgtgaagctacatta

SEQ ID NO: 222927 - DNA, 100 bp, Homo sapiens
ggcagcctgaacggagtgtgcgacggattgggagggtggtgacttcacacgccataatggcactggtggcaagtccatctatggggagaaatttgaagat

SEQ ID NO: 222928 - DNA, 75 bp, Homo sapiens
ggacctctgcattgatcaggctgtggtcttcatcgaagatgctattcagctggtctcttgtggctcagcgccgtg

SEQ ID NO: 222929 - DNA, 100 bp, Homo sapiens
cttctgcacgacgcactggcccaggacctgcacaaggtcttggtcttgatgccaagtttgggaaaggagctaagaagacatcccactaggaagagagaga

SEQ ID NO: 222930 - DNA, 100 bp, Homo sapiens
ttgagcgatccctctatcccgggtcgctgctgtgttctggaaaggcacattgtaccctggatgcagcaggagtctccccaggacagtgctatcacccggg

SEQ ID NO: 222931 - DNA, 51 bp, Homo sapiens
tacttcgtctatgtggcgcccggcataggcaaagaacagagcagttcacca

SEQ ID NO: 222932 - DNA, 95 bp, Homo sapiens
agtaaccctcactggagaatccagaggtgcctccgaagaagccctaagtgccgtggccccaagggaccttgaagcatcctctgaaccagagccca

SEQ ID NO: 222933 - DNA, 75 bp, Homo sapiens
cttcaagcttaggaccacccaccatgcctatccaggttggtgttcgaggaagagacattgttgttcttggtgtgg

SEQ ID NO: 222934 - DNA, 98 bp, Homo sapiens
cctgctcatggagatgttggtgagcggagacttaaatgccgtccatggagccatgcgtgtgctgacagactctggctcctcctcctcctcagaagatg

SEQ ID NO: 222935 - DNA, 101 bp, Homo sapiens
acaagatgttgtcctgtgctggggctgacagacaatgcagatcttcgtgaagactctgactggtaagaccatcaccctcgaggttgagcccagtgacacca

SEQ ID NO: 222936 - DNA, 90 bp, Homo sapiens
tgggtgaaaatgagaaagatgaagaaacttatgagacctttggaagaaggagagacgaccatcttgcaactagaaaaagatttgcgcacc

SEQ ID NO: 222937 - DNA, 82 bp, Homo sapiens
cccttcgcgtcccctgcaccatgagctggggcaccgagctctgggtctcctccgggctggggctgagcaagccctcggagtg

SEQ ID NO: 222938 - DNA, 100 bp, Homo sapiens
ttagagattgtgaagaagaatttcgatctccgccctggggtcattgtcaggcgtgcaatggaattgagttttgccctggtaaatgggaataatatccgag

SEQ ID NO: 222939 - DNA, 75 bp, Homo sapiens
ttcgcgggcaggcccccgcccagggctgaaatctctttaatgatggagggaagcaggcagacgcgagtgtctcgg

SEQ ID NO: 222940 - DNA, 100 bp, Homo sapiens
tgcatggccaacacgaagcctggcttattcacaagacaacgaaatgagtaacccgaagcccctagaggagtggtcacctgcctgagggcacttctgtccc

SEQ ID NO: 222941 - DNA, 82 bp, Homo sapiens
agcagtggcagtccatcgaggggaccaaactctccatcacccagggtcagtgacttcctgtcgggccgttcgccactgacac

SEQ ID NO: 222942 - DNA, 100 bp, Homo sapiens
ctaagctgaataaagctgttttggaactgtcaggtacctcaaagcctttcctcattggaaaaggctggatttggaggtgttcttctgtatatcgatcctt

SEQ ID NO: 222943 - DNA, 95 bp, Homo sapiens
gaagtgggctttgctctgccaaatccacaggctgcctgctgtttcccggggagatcatgaaacgaggtcgccttcccagcagcagtgaggattct

SEQ ID NO: 222944 - DNA, 100 bp, Homo sapiens
ctgcctttcccacatcaatgatctctgcaagtgctccagtagccggcagtacctgcggtacctgggccagctggacgacagtgagtttgagagagccctg

SEQ ID NO: 222945 - DNA, 96 bp, Homo sapiens
ggggagatgaacccaacctagtgggtgtaatacatcatgaactgcagggatgtggagagcatcttgtgcgcaccatactggctagagaatgttcac

SEQ ID NO: 222946 - DNA, 82 bp, Homo sapiens
tggagcgctctgggcccagcgaaggatcatgttctaattgagctcacccaggctggattgaaaggctccacagagggaagtg

SEQ ID NO: 222947 - DNA, 74 bp, Homo sapiens
ctggggaatttaagatgccaaagcagctcattcacatacagcggaaatgctccaaggctggaattttctacgac

SEQ ID NO: 222948 - DNA, 96 bp, Homo sapiens
taaaggagcaattctccaatacttacagtaatctcatattaacagacaagttggatggcttgaggactggtactaaaaggaaacgtgactgggagg

SEQ ID NO: 222949 - DNA, 139 bp, Homo sapiens
cttagccaccatctttctggcggttgtgatggccttattgagcctgcactgcttagcagcctttaaggacttaaagcccagtaatatagtagtaaaatctgattgcactttgaagattcttgacttcggtctggccagg

SEQ ID NO: 222950 - DNA, 51 bp, Homo sapiens
gttacccagtatcttggtgttgctgaagagttattctacctatggaaatcc

SEQ ID NO: 222951 - DNA, 75 bp, Homo sapiens
ggaggctgtggcctgcgacaccgaaggcttcgtgccaccaaaggtcatgccctcctacagtgatattgctgccaa

SEQ ID NO: 222952 - DNA, 95 bp, Homo sapiens
ctggcgattcgtgttcgtgagggccttttctgatgacaacggcaacacgacaagaagtccttggcctctaccgcagcattttcaggcttgcgagg

SEQ ID NO: 222953 - DNA, 83 bp, Homo sapiens
agtgagaggtcagactcctaagaacgacaaatcctccacccctgggctcaagtccaacacaccaaccccaaggaacgacgccc

SEQ ID NO: 222954 - DNA, 99 bp, Homo sapiens
gttcctgaatgaaagaagtcagtctctgagatatgataccagctgttttgtggagtattttgccttggatctcctgatagagaacagggagtgccgtgg

SEQ ID NO: 222955 - DNA, 107 bp, Homo sapiens
tcagaagagccaaggaataaacatgcaatgaacccaaaagggcttcagctctggcggcatggactatggcatggttggtgggaaggaggctggaaccgagtctcgct

SEQ ID NO: 222956 - DNA, 80 bp, Homo sapiens
attgcctcccctgggtgctcttcatcttgggattcactccttctccagttgcacagccacacccttcagctggccttaat

SEQ ID NO: 222957 - DNA, 75 bp, Homo sapiens
gcccggcctacctcttcctctggcccgaagccttcctttatcgctttcagatctttgtagaatttgatggctgta

SEQ ID NO: 222958 - DNA, 90 bp, Homo sapiens
caggtggtctatatccatccttccagtgccctcttcaacagacagccagaatggttttaggagaagttttagcacaacttctgcttcttc

SEQ ID NO: 222959 - DNA, 101 bp, Homo sapiens
tttccaaggtcctagaactcaggaagagtgatgtggttttggataagccctttgaggtggacctttctcacgtgtatcttgcctatactgaggagagtctg

SEQ ID NO: 222960 - DNA, 90 bp, Homo sapiens
attcgcagtggtcgcttcttctccttggcctggcatgcgtgggcagtgatgaacttcgaagctgtgctacactacaaacatcagaaccaa

SEQ ID NO: 222961 - DNA, 82 bp, Homo sapiens
gatagcaaggatgaagaagtcaaggttgcccccaggcggtccttcctggttcaaatctgaacatcaatgatgtactagggaa

SEQ ID NO: 222962 - DNA, 95 bp, Homo sapiens
ttgcatgggaaaatcatggaagttgattactcagtctctaaaaagctaaggttgggtatctacagccattggttgctgttcaggtcagctttgct

SEQ ID NO: 222963 - DNA, 83 bp, Homo sapiens
tcgccgtggcgccatgggtgttgtccgcagccgcaggtcttgggcgtctttggtactggcttttttaggggtctgcctgggga

SEQ ID NO: 222964 - DNA, 82 bp, Homo sapiens
tgaagaaggtcagtgtgcttgcttggagatcaggacgcaaagtacctggagtagaacagaaaaattattatgtctgtgttcc

SEQ ID NO: 222965 - DNA, 128 bp, Homo sapiens
cagtgtggctcataagccacgaaccgggaactccactttgtggcaccgtgagattctccagacttcccagactcccggccagccatcgaggacctcaagtactgcctggagaggacggaccagaggca

SEQ ID NO: 222966 - DNA, 80 bp, Homo sapiens
ctagacctgaactcttcagataatcagagtggaggaagtacagccagcaggcaagatcacctgttgcctgaagcagaaga

SEQ ID NO: 222967 - DNA, 80 bp, Homo sapiens
tggttccagctgcagcacgtggacgctgactcggaagtgcaggaagctcttcgtgggcggtcttgactggagcacgaccc

SEQ ID NO: 222968 - DNA, 90 bp, Homo sapiens
acagcggccccgaagcgggcggcctgcactcgggttcatcatgcctagtggcgtataagaagaccccgccaccggtccctccacgcacca

SEQ ID NO: 222969 - DNA, 122 bp, Homo sapiens
gtgttcatccacgctggccacaacctacagcagcggggagtcctacgataagaaaatccatgttgacatagcggctttattgataaaatacaacacgtgtgtaaatgcaacagataagtggg

SEQ ID NO: 222970 - DNA, 98 bp, Homo sapiens
agaccctctcctttccctttgagaccgtgaagagaaagatgcagcagacaactaaactggtaggtggcagcagaggaaggaattcttcagattgatgg

SEQ ID NO: 222971 - DNA, 98 bp, Homo sapiens
ggagaacttgttggagtgctggtgaatcatttcaagaggatatggctttagttgcccctgaagctccttcagaacaagccagaagagtttttcaaacc

SEQ ID NO: 222972 - DNA, 100 bp, Homo sapiens
ggaatatgcaccacttggaacagtttatagagaacttcagaaactttcaaagtttgatgagcagagaactgctactggaaatttgaacacagagacatac

SEQ ID NO: 222973 - DNA, 98 bp, Homo sapiens
cctggagtagttgggactacaggctcatgctaccacacctgatggtgtcggacggcatgacaggcagcaatcctgtgtcccctgcctcatccagttcc

SEQ ID NO: 222974 - DNA, 75 bp, Homo sapiens
aaaaaagaaccagatgtcaaaactgatttcagaaatgcatagttttatccagtgtgacccaaatcttcaggtgtt

SEQ ID NO: 222975 - DNA, 90 bp, Homo sapiens
tcaatcttaccagagggccctcaggaacattttagtggacaaaccaaatgaccaatcttcaagatggtcttcagagagcaactatcctcc

SEQ ID NO: 222976 - DNA, 90 bp, Homo sapiens
ttctgggacctggcactaagggagcacgccgcggtcaaccagacgaagttatacggaagcgtctcctcattgatggagatggtgctggag

SEQ ID NO: 222977 - DNA, 100 bp, Homo sapiens
cagaaacgaggatgcagtcaatcagatggccgttactccctttccagtgccatcaagttctccatcttctattgaggctgaaactgtacacgggcttgat

SEQ ID NO: 222978 - DNA, 82 bp, Homo sapiens
ctagcacctcctcaggccagccacccctgcaggacatgcttggcctggacaatgctggaaagacaaccatcctgaagaagtt

SEQ ID NO: 222979 - DNA, 124 bp, Homo sapiens
cccggacggtacttctgccactgctgctccgtggagatcgtcccgcgcctgccggaagcaggtcctggggaccaaggtggacgcggagcgtgacggcgtgaaggtgcccaccacgctggccgag

SEQ ID NO: 222980 - DNA, 75 bp, Homo sapiens
attttcatgcaccttacaaacttccatacaagaaccaaacttgttttctcatgatgcagttgtgagagaaatgcc

SEQ ID NO: 222981 - DNA, 75 bp, Homo sapiens
gctcggtcaacggcttcatcagcaccttgggtatgaatgacccatattaaatcgcccttggtgaaagaaaattct

SEQ ID NO: 222982 - DNA, 100 bp, Homo sapiens
ggcgtcctacgtagataacagcttccgccaggcggtgatgaagaatccccccgaaaggaccccccagatttgataatgggctgcattaaaagtaaagaaa

SEQ ID NO: 222983 - DNA, 98 bp, Homo sapiens
agagattccagggtcaacaaaaggagtttctgggagatcctttcccggagttcagttatgggtgtgagaggtttgcaaggatttgtgggaagtacctg

SEQ ID NO: 222984 - DNA, 83 bp, Homo sapiens
cggctccagccccagctgcgtgcccagggagaagatacccattatcagaaaaaaaaattatgcactatatgtaccagttatgt

SEQ ID NO: 222985 - DNA, 80 bp, Homo sapiens
ggtgattcttgtcgccttttgtggagaaatttgcccgctaacaggccatctgtgtgagggtggcccagttgaaatccttc

SEQ ID NO: 222986 - DNA, 73 bp, Homo sapiens
ccggagccgctgccgccgcccccagctcccccgcctcggggagggcaccagatacttggtgttagatgaagct

SEQ ID NO: 222987 - DNA, 82 bp, Homo sapiens
gcggtccggcccggggccccgggatctcggctgtccttcctcccgccatgtcaaaatctgccgtgaagatatccttggactt

SEQ ID NO: 222988 - DNA, 100 bp, Homo sapiens
gaacaaccgggagacagcatgtgagattcctggatttgtcacactcagccggtaccagagggaagcagaacaaagtaatgtggcccttcagagagaggag

SEQ ID NO: 222989 - DNA, 100 bp, Homo sapiens
ggctggtgttcctgtgcgctgtgggtgtggggagtgatgctgaagaaggggattcagagtctgaaattgaagatgagacttttaatccttcagaagatga

SEQ ID NO: 222990 - DNA, 100 bp, Homo sapiens
tctgggtttttgaaatccatttcaaatgtctctggcaaagatattcagccgttaataaagcagtgggtcatcgagagtaaacatgaggttacgatcctgg

SEQ ID NO: 222991 - DNA, 95 bp, Homo sapiens
ggaagctggaccagaggccgggaggcgaggaaaccgtgatttctctatgaatcatcatcaagaactctgggagaacttttgaattcataaccaag

SEQ ID NO: 222992 - DNA, 51 bp, Homo sapiens
ttcgatgccatcgtgatggcggatgagagaaccactcacgaattcttgttt

SEQ ID NO: 222993 - DNA, 100 bp, Homo sapiens
agaatgggtaccgatccctctgtgaacagtattttcatctcagcctagtgacgatgaatcaagtagtgatgaaaccagtaatcagcccagtcctgccttt

SEQ ID NO: 222994 - DNA, 83 bp, Homo sapiens
ccgcgcgctgagggtctcggggcgggcgccgcgggacctctccgggccatgggttttgagcaaaattttggactgtgaagcaa

SEQ ID NO: 222995 - DNA, 75 bp, Homo sapiens
taccagctggccgatactctttgaatgtcacatacagaactacatattgtccataagtgcttcatcaggactcat

SEQ ID NO: 222996 - DNA, 100 bp, Homo sapiens
ctgcccactggtcagccttcagggaccctgagcaccgcctggtctctttcctgtggccagcccagacaccaatgggaatcccaatggggaagtcgatgct

SEQ ID NO: 222997 - DNA, 100 bp, Homo sapiens
cacaaaccagggctcgccatgaagccaggagaactacgatgacccgcacaaaacccctgcctccccagttgtccacatcaggggcctgattgacggtgtg

SEQ ID NO: 222998 - DNA, 75 bp, Homo sapiens
ctcaaccttgtgggatgtgaaaactctgttactgaagtttccaagccagcgccctactgggaaggaacagctgtg

SEQ ID NO: 222999 - DNA, 82 bp, Homo sapiens
cggcggcggcgagcggttccttgtgggctaggttgtggcagcactgcctgaaggtatgagaccagattctaatctttatggt

SEQ ID NO: 223000 - DNA, 51 bp, Homo sapiens
gctcaaccatgaccaagtgcagaaggactgatcctttgaaatactccagcc

SEQ ID NO: 223001 - DNA, 76 bp, Homo sapiens
ccactgtctctgctcacagtgccaaggttccggaatgaggactacaccatacatgtgcagctgaatgactacgtgg

SEQ ID NO: 223002 - DNA, 88 bp, Homo sapiens
agaagccttttccgttgccggtgccggcctagcgtcctggaattacttcaatcaagtctgaatttcctgctgctgttcacaaagatgc

SEQ ID NO: 223003 - DNA, 90 bp, Homo sapiens
ctagccggctgcggtgtgagaatggagtgggcaggaaagcagcgggactttcagatgcctgtgaggagccaccaacatttgaagctatgg

SEQ ID NO: 223004 - DNA, 75 bp, Homo sapiens
cggtggtggactgcagaggactgttagaaaatgaagggagtctcgctctgtcgccagactggagtgcagtggcac

SEQ ID NO: 223005 - DNA, 90 bp, Homo sapiens
catcttctcaattggacagtacatctgtggacaaagcagtacctgaaacagaagatgtgcaggcttcacttaaaggacaagaagcgattt

SEQ ID NO: 223006 - DNA, 50 bp, Homo sapiens
ggaagtaatgggatctataaagtttgaaattggcacaatggaagaagctg

SEQ ID NO: 223007 - DNA, 76 bp, Homo sapiens
ttgaatgactggaaactgattggaaactctttgggaaagccactcgaaaagatccctgcatgtcactgagtccacc

SEQ ID NO: 223008 - DNA, 87 bp, Homo sapiens
agcacaaagcatggagaccctccctccaggttcctcatgccatgcacctgctgtcacccagcatgcaccctattttaagggtacagc

SEQ ID NO: 223009 - DNA, 82 bp, Homo sapiens
gtctgcttgcagtgttgatggtggtggtgctggtcatcaatgttactcaggtagagctattcaggattatgaaactgctcag

SEQ ID NO: 223010 - DNA, 58 bp, Homo sapiens
catggaaatggagggcatcttcaaccacaaaggtagctacagcaagctgggtagcagg

SEQ ID NO: 223011 - DNA, 75 bp, Homo sapiens
agtgagaagcccaactaaagccccacatttgcagctcattgaaggaaagctgaaggaagaggatcaccttccaag

SEQ ID NO: 223012 - DNA, 110 bp, Homo sapiens
ggttactgcctcgagccctgagctgccgggacaggctctggccactgaactctaaactggaataagcaggagggtgtgaagacagagaatgaccacatcaacctgaaggt

SEQ ID NO: 223013 - DNA, 97 bp, Homo sapiens
gtcttcccgcgtccgccgattcctcctccttggtcgccgcgtccttggctggcgtgtgaaaggtgtagcagtcactcggcctacacccacagcatcg

SEQ ID NO: 223014 - DNA, 96 bp, Homo sapiens
tctatgtgattgatcaaggagagacggatgcctggtgactcgactccggtatccagtttgttttgggaggcagaaagccccagttacagcagggct

SEQ ID NO: 223015 - DNA, 75 bp, Homo sapiens
gtttgtggaagatggcgcctgttgtgacaggaatgacagcccatatcaaggcggtgtattctttttgacaattca

SEQ ID NO: 223016 - DNA, 100 bp, Homo sapiens
agagcatggctcttccagcatctcacaaatgaaactagtgatcgagaagatggcctccccaaaggacatcatgtgacagactctgagaacgatgagccct

SEQ ID NO: 223017 - DNA, 75 bp, Homo sapiens
gctgctggacaaatattttggaaatgatgctgagtatctacatggatacattaaatatatttatgcgagttgcaa

SEQ ID NO: 223018 - DNA, 95 bp, Homo sapiens
gaaggagcagatttacaaactggccaagaagggccttactccttcacagatcggtattggcaagcttgccagtgtacctgctggtggggctgtag

SEQ ID NO: 223019 - DNA, 100 bp, Homo sapiens
gacacttactacagctgctcagaagcaccactggaaactcagggatctggacaactctcctctgtccccaccttcaccaaggaccaaaagcagaacgcat

SEQ ID NO: 223020 - DNA, 76 bp, Homo sapiens
cataggagacatggacgaagccttcaaatccatcaagctcatcaaaagattcatgatgttgctatcaaaagttgag

SEQ ID NO: 223021 - DNA, 75 bp, Homo sapiens
aaggactcattgatgaaatttatggcattcagaacatggcagaaatctgaagctatcatggaacaattgaagtct

SEQ ID NO: 223022 - DNA, 100 bp, Homo sapiens
gaagtatagtaaatttggttcgttaaattgtgaaggcgctggaattacatgaacataccaccctagtaaagtgagattacgtactataggtgaactttta

SEQ ID NO: 223023 - DNA, 49 bp, Homo sapiens
ctgaaaactcctgatatagatggccttcgtggtgcaatggcatttgcct

SEQ ID NO: 223024 - DNA, 75 bp, Homo sapiens
ctatctccaaaactggagccatgtcatactccctgtcacaaactccagctgaactaacttggaggaggatcttcc

SEQ ID NO: 223025 - DNA, 75 bp, Homo sapiens
gggccacagccactcagctcctgcaggaattacatgaacgacagccttcgcaccgacgtcttcgtgcggttccag

SEQ ID NO: 223026 - DNA, 51 bp, Homo sapiens
accccgcagaaagtgcctgtgcatcagcttagaacagcgaaacttgacttt

SEQ ID NO: 223027 - DNA, 100 bp, Homo sapiens
cgctgcgccagcgcctgggctacgggcgaggatctgtgccagttcagaagcaggcgagcctcttccctgatgaaaaagaagataacttgctgggtaccac

SEQ ID NO: 223028 - DNA, 98 bp, Homo sapiens
tagagataaaaataccagaaacatacccatttaatccccctaagagctctcaacgaaatgtggaagtgtcagaacatgcttcggagccatgtacgcga

SEQ ID NO: 223029 - DNA, 83 bp, Homo sapiens
actccatcgtgggactcagcagccttggtgctcaggtgccagatgcaaagttctggatgcgggtacccttggtggcaccagag

SEQ ID NO: 223030 - DNA, 51 bp, Homo sapiens
gtggagttcttgaagcaactaaggtggaaaaccatgaattccttgtaaaac

SEQ ID NO: 223031 - DNA, 98 bp, Homo sapiens
ggaagaaaagctttggatgaaggagcttcaaacccaaagaggactactggctctctctcctctacaagcgcctgatcggccccaaagtcttggctgtg

SEQ ID NO: 223032 - DNA, 88 bp, Homo sapiens
tgtctgtgaatgtccgcaaaacattgaagatgaagtcctcagtacattctgaagaagatgattttgttccagagctacatagaaatgt

SEQ ID NO: 223033 - DNA, 100 bp, Homo sapiens
tctcgccgagcgcacgccttgccgccgccccgcaggtggagaaggaacgtgataaagaagtaagcgatgatgaggctgaagaaaaggaagacaaagaaga

SEQ ID NO: 223034 - DNA, 75 bp, Homo sapiens
aatacagaagttaagatttattgtcaaccaagaatgccgggacattctgcttcctgtcatcaccaaagagctgaa

SEQ ID NO: 223035 - DNA, 49 bp, Homo sapiens
tttggaacctgaaggccctattgtatcctactcagtacatgtatctgaa

SEQ ID NO: 223036 - DNA, 98 bp, Homo sapiens
gagggcctcgccatgtcctgctgcccgcctccatccctgtgagatcactgccctgagccaatccctacagcccttacggaagctgccttttagagcct

SEQ ID NO: 223037 - DNA, 100 bp, Homo sapiens
gagccgtctaccagatcaacgtcctccgggaccggagtcagaaccctccgcagagtaaagggcgtctctggccgagcctctttttgtggaaaacgacagc

SEQ ID NO: 223038 - DNA, 98 bp, Homo sapiens
ccagactgagaaaggtggtcccagagcagctggtcagtgagaaggtcggaggggccgaggggaccaagctggatgatgacttcaaagagatggagaag

SEQ ID NO: 223039 - DNA, 100 bp, Homo sapiens
agcagattgaattagatctaaaagccacccaggccttggtcctagcacccactcgagaattggctcagcagggaatgggtactgttcaaaaaggaatgcc

SEQ ID NO: 223040 - DNA, 101 bp, Homo sapiens
attctgccaattcgttttcaggagcatctccagagataattgacgaccttgccaacctagtggagaacacagatgaaaaacttcgcaatgaaaccaggcgg

SEQ ID NO: 223041 - DNA, 75 bp, Homo sapiens
ctaaaatctccgcagctctggttcctgttgcggccggaggatcccttttcccccagaaattactcaatgctgaaa

SEQ ID NO: 223042 - DNA, 75 bp, Homo sapiens
gatggaaatcctaatgacagtctccaaattcgcctccatctgtaccatgccactgaggcggctcccagctgcgtt

SEQ ID NO: 223043 - DNA, 83 bp, Homo sapiens
cccgacgcaaaccaaggatctggggatcttcgcactatcccaaggtgttgacttcaaaatcaaaactgtagagctaagaggaa

SEQ ID NO: 223044 - DNA, 75 bp, Homo sapiens
tagaatctgaaagaaaacgaatatttaaagattttatgcatgtgcttgagattcaattagcagagcctcacagac

SEQ ID NO: 223045 - DNA, 126 bp, Homo sapiens
agttacggtgcatgtgaagcaatggtatgggaaaattgtttgcagaaggatgaaaaggctttattgccaaactgtggctttctttcagatgcaggctggtacagtgatgctgagaaagtttttctg

SEQ ID NO: 223046 - DNA, 83 bp, Homo sapiens
cgctacggaccttaaaatacccgcaacagccccttcgtcccaaaatgagtccctggaacgccagatgcgtgaaatggaagaga

SEQ ID NO: 223047 - DNA, 75 bp, Homo sapiens
acccaagcctgagccggttcctgttcaaaagcaaacttccttgataacatgcttttgcgaagtgcaggaaaatta

SEQ ID NO: 223048 - DNA, 75 bp, Homo sapiens
ctgcttgactttgaaaatgatttaattgaatcaagctgcaaagtaactaggctttaaaggagatagatgaagttg

SEQ ID NO: 223049 - DNA, 97 bp, Homo sapiens
cattgctcagcgcggacctagacctggaatcgcccaagtccctctactcgcgagcttccccgggcgctgcctggacaggcctgcctgcgtgctggga

SEQ ID NO: 223050 - DNA, 89 bp, Homo sapiens
ctcaactggtgtcgagaagtccggaagcttgtggcgctgaaaacgaacgattctggaaaccaaaatggaggaaatgatgataagactaa

SEQ ID NO: 223051 - DNA, 75 bp, Homo sapiens
ccgcagcgcgagttgccgccgctgctgcccggggccgggtgagcatgggtttatgcgtcttaggcattattgtga

SEQ ID NO: 223052 - DNA, 75 bp, Homo sapiens
tagaagatcctcataaagccaaagcaaaatatgctgtgaattccatcaagaagaaagtcaacgacaagaacccac

SEQ ID NO: 223053 - DNA, 49 bp, Homo sapiens
gccgaggactccagcacaccgaggggcaagctggggcgcatcggacctc

SEQ ID NO: 223054 - DNA, 100 bp, Homo sapiens
aggcaaaaactatggacctcagataactgtaaagaggatatcaaccagggatttgtcttggctgttactatgacacgggaagcaattgatgaatttcggc

SEQ ID NO: 223055 - DNA, 82 bp, Homo sapiens
ccactttcgccagcccgtgccgcgagcgcggcctgcaggagattcttcgctgctgctgccttaccgccgagaaccaccaccc

SEQ ID NO: 223056 - DNA, 89 bp, Homo sapiens
cgtcatcctaaggaacatcgacgaccctgatgcttggtgtgacctgagtaaatttgacctccctgaggaaccatctgcagaggacagta

SEQ ID NO: 223057 - DNA, 83 bp, Homo sapiens
ctctcccagccgcgccagcctcctcactggcctgccccaggggcggaccgcggaacccgaggccatgtcccatgaaaagagtt

SEQ ID NO: 223058 - DNA, 82 bp, Homo sapiens
gccatgccggcccggcggctgctgctgctgctgacgctgctgctgcccggcctcggggcagcccttggctggtccctgcgag

SEQ ID NO: 223059 - DNA, 98 bp, Homo sapiens
gaagggcggcagaagatccgggaagagaaggataagagcaaggaactgcatgccattaagcaatatccagattattatgcaataattaaggagcctat

SEQ ID NO: 223060 - DNA, 90 bp, Homo sapiens
acaagaaggactgcggggacctggtggccatcggctccctacacaccttttctcactgaattgatgtaccagaatctaaaggtgctgatt

SEQ ID NO: 223061 - DNA, 74 bp, Homo sapiens
gaagagatcaatcttaccagagggccctcagtttccagccagagacgacactcttccatggcccggatacattc

SEQ ID NO: 223062 - DNA, 100 bp, Homo sapiens
gtttctttgctggagcacttgagccacgtgcatgaaccaaacccacttcgttcaagacaggtgtttaagcttttcagcattgcaaataacaatctcagct

SEQ ID NO: 223063 - DNA, 75 bp, Homo sapiens
catgaggatgctgaggctgtcctgtcctcgtccgtctcatcaaaggcgtccgagctgggccacagcctgaacgag

SEQ ID NO: 223064 - DNA, 50 bp, Homo sapiens
cttttatgattaccattttaatgagtgttctaagaacggaagcatctggg

SEQ ID NO: 223065 - DNA, 90 bp, Homo sapiens
gagcgatcgagcgagcgcgcgcgcgaaaactccgggcaggcccctccagccagcgtcaggtgcagaatggcccctctcctgatgagatgg

SEQ ID NO: 223066 - DNA, 74 bp, Homo sapiens
aaagtgtcccttcttcaggatctgaaggacttctttcaaaaatttgttcccgacaaggagttttctggttcaga

SEQ ID NO: 223067 - DNA, 104 bp, Homo sapiens
tttacacaggcaaactgtcagaaaagagtagcctgggctgtctggaaatctgagacaatgcagatcttcgtgaagactctgactggtaagaccatcaccctcga

SEQ ID NO: 223068 - DNA, 75 bp, Homo sapiens
tcaatgaaggttgatttcatcagactaaaaagttacagggcacctgaatggacagaagaggacctcagccaactg

SEQ ID NO: 223069 - DNA, 98 bp, Homo sapiens
cagcggcgaggagaacgtcccgctggatctgacccgagacctcctcaactgatgcaggtccagctgaggaatttcctgaacctgaggaaaatgctgca

SEQ ID NO: 223070 - DNA, 83 bp, Homo sapiens
tatccagggctgccgatgggaaatcccaggctgccgcggctcctgtgtgctttgaagctttgtgtccctggtgatgttggaac

SEQ ID NO: 223071 - DNA, 90 bp, Homo sapiens
ttcggagtgtttggcgatggggcagcgcgagatgtggaggctcatgtcgagaaactgccagaggcatgcagcattggtgatggaaagccc

SEQ ID NO: 223072 - DNA, 100 bp, Homo sapiens
tggggaggacgcctatgccatgaagcgggacctcactcagatggccgacgaggtgaccaagaatatggcccaggtgaccaaagccctggacaaggccctg

SEQ ID NO: 223073 - DNA, 90 bp, Homo sapiens
gaattggagcaaaaagaggttgattacagcggcctcagggttcaggcaatgcaaataaggtcatttgattgcccgcctcagaacgatgga

SEQ ID NO: 223074 - DNA, 82 bp, Homo sapiens
tgctcaggttgcagcaggagagagttgatattcactgatggactccaaagaatcattaactcctggtagagaagaaaacccc

SEQ ID NO: 223075 - DNA, 51 bp, Homo sapiens
ccgagacccagcacatcgccgaccaggatgaagaagatgatgatgactatg

SEQ ID NO: 223076 - DNA, 75 bp, Homo sapiens
ttgggaacctactgatgaaccttgtgggaaaggggaacctgtgactgaactcagctggcactcctgtcggcagct

SEQ ID NO: 223077 - DNA, 75 bp, Homo sapiens
ggactttcttcgttgccatgaggaaagaattctccgagaacaacatagacgtttgtcctgaatgtggtcacctga

SEQ ID NO: 223078 - DNA, 82 bp, Homo sapiens
ccggggagtccctcgccacctgcaagagcctgcagcagtcgcttctccgcaggtcaaaatgcagatcttcgtgaaaaccctt

SEQ ID NO: 223079 - DNA, 75 bp, Homo sapiens
cgggcatccgcgtggcccatttcctgagactggcccagacgctgcggcactatggctacttgcgctttgatgcct

SEQ ID NO: 223080 - DNA, 118 bp, Homo sapiens
taattgctatcaatgcgaatgatcctgaagcctcaaagtttcatgaacaactgtcaatctattatatatttgtacaatctggtattaaaatgctttccccaaaagatattctgcgaaa

SEQ ID NO: 223081 - DNA, 75 bp, Homo sapiens
tgatgcattgtcagaccctaaaggatcaaccctctgcatacagtaaagttccaatgattcttgttggtaataagt

SEQ ID NO: 223082 - DNA, 74 bp, Homo sapiens
agggaagtcgcctctgtgctcgtgagtgcatggggtataaggatgctgtatgattatgttgaaaggaaacgaaa

SEQ ID NO: 223083 - DNA, 83 bp, Homo sapiens
tggctacttcatattttggaaagcagtttttaagacaaggtcactcagctgccgcaaggagcaaggcaagttctatgaccatc

SEQ ID NO: 223084 - DNA, 100 bp, Homo sapiens
agaaggacaaggacagaatcaccagcactggctgaagtttctgatgttccgagggacctggaagttgttgctgcgacccccaccagcctactgatcagct

SEQ ID NO: 223085 - DNA, 106 bp, Homo sapiens
attgctgggcggttcttgccggaagcggagagcggctgatcgcagtccggaggtgaggcggaactctgaggcctgaagtgttagaagattcacctctggttcccca

SEQ ID NO: 223086 - DNA, 75 bp, Homo sapiens
aagacaaagagtggacatttgtcatagaaaatgtcagacatatttccaacatttgggtcaaaaccttgtccaaca

SEQ ID NO: 223087 - DNA, 95 bp, Homo sapiens
gctcttgctaaagaggtagcaagaaagaaaattagagtgaatgtagttgcaccaggaaaatggcaaatgcacgacagcggcctcctgaacatcac

SEQ ID NO: 223088 - DNA, 50 bp, Homo sapiens
aagacggcaggaggaagagagagagaggcaatgcctcctgcaccaccaac

SEQ ID NO: 223089 - DNA, 101 bp, Homo sapiens
ggaggtgtcagtgttaaaggaacctctacaacgaaggtgaagccacggaagataagagacaagaggagcagcagcggcaccgcccctcaccctggagggtc

SEQ ID NO: 223090 - DNA, 75 bp, Homo sapiens
ctctcctctctcatccgcacgcacaatatcgggcagaaagataatcacgggccgcgatgggcctcttggaacatt

SEQ ID NO: 223091 - DNA, 58 bp, Homo sapiens
gagttgccgccgctgctgcccggggccgggatgctgatgtaccagcaccagagggtgt

SEQ ID NO: 223092 - DNA, 97 bp, Homo sapiens
gagcaggggaaggaactttgggtcctgaatcttctgggagctgaggaaccagatatcttgaaaagctgccagaaagctatcagttgagggatttgca

SEQ ID NO: 223093 - DNA, 83 bp, Homo sapiens
gagggctacccgctctttgccgtgacaacaccgttcccccagccgggctggtgcccgtggttgacacgagctgtgtccccagc

SEQ ID NO: 223094 - DNA, 90 bp, Homo sapiens
agagcagatggaaacacatgaaagacttcctcaaggactacagtatgcacttaatgtccctctctggattaatcgaattacagctgctag

SEQ ID NO: 223095 - DNA, 130 bp, Homo sapiens
aaaggatctgctctggctgcgttgcactgtggaagaccacctgagtcaccagttaactatggtagcccacccagcattgtctccagagaatacagagggcaaagatggatccaaagtaactaaacaggag

SEQ ID NO: 223096 - DNA, 100 bp, Homo sapiens
atctacctggaacccttgaaggatgcaggtgatggtgttcgatacttgctcaggtgattatcctgaaccatccaggccaaataagcgccggctatgcccc

SEQ ID NO: 223097 - DNA, 75 bp, Homo sapiens
gcggctggagagcctgttggagaaacacaaagagaaaccaatagagccatggcgactccctctgctgccttcgag

SEQ ID NO: 223098 - DNA, 85 bp, Homo sapiens
gacaaagctgttgtctcagggagcacagaagcctagaatatcctgcagtggtagagtttgctccattccagaagatagccaaaaa

SEQ ID NO: 223099 - DNA, 100 bp, Homo sapiens
cgggaagagctgatgagaatgctggcggaggacgagctccgggatgctgtactccttgtctttgcaaacaaacagccctgcagcctctgaaacactctga

SEQ ID NO: 223100 - DNA, 82 bp, Homo sapiens
gatccgggagcacgtcatctccatcgaggggggatatgagactttctactcggaatatcctgagtgttgcgtggatgtaaaa

SEQ ID NO: 223101 - DNA, 75 bp, Homo sapiens
acaaatctggaacgggtggccgattactgcgagaacaactacatacaggtggagtaactaatacggcacaatatc

SEQ ID NO: 223102 - DNA, 83 bp, Homo sapiens
atactgattggatgctgctcaaaatcagcctacatgccatctttggttggactccatgaaagaattgcacaaaacaaatcgac

SEQ ID NO: 223103 - DNA, 90 bp, Homo sapiens
caaaagatggcatctggctggttcagatgtttctttctcagcaaaatagaggagaagcttacccctcttccagaagataatagtatgaat

SEQ ID NO: 223104 - DNA, 96 bp, Homo sapiens
atgtctttacctcagagaaagcaaaccaggaggaggacatccctgtgaagatcccaggtggaaagaagtttgattctgtggttgtcaatggctttg

SEQ ID NO: 223105 - DNA, 98 bp, Homo sapiens
ctgtccatcaaccccctggccagctgcaagaccgatgtgctcgtcacggaagaccctgcagatgtcaggtgtctactgcagatatttcatcaaataag

SEQ ID NO: 223106 - DNA, 90 bp, Homo sapiens
ggggatggcgcatcacacaccaaagctgctcctgctaaggccaagccggctgaagctcctgctgctgcagccccaaaagcagaacctaca

SEQ ID NO: 223107 - DNA, 100 bp, Homo sapiens
gttccaagatggtttgcgggggcttcgcgtgttccaagaactgcctgtgcgccctcaacctgctttacaccctcttttgaaacagatggtcaccatgttt

SEQ ID NO: 223108 - DNA, 87 bp, Homo sapiens
aggatttgtcacgaatgggaagccaagtgccatcttcaaaatttcaggtcttaaatctgaacagctttgctgagccatcaaggtcta

SEQ ID NO: 223109 - DNA, 75 bp, Homo sapiens
tttgccaaccacttctacagtcattgatggcagtcgtatcagtctccctgaaggtgtggacccctcttttctggc

SEQ ID NO: 223110 - DNA, 100 bp, Homo sapiens
gggctaccccctgttccccggggagaatgaggtggagcagctggcctgcatcatggagcccatggatgacagtctcattgcatttcgaacgcgttctaag

SEQ ID NO: 223111 - DNA, 88 bp, Homo sapiens
gagcatcccggctggagcagagccagtgctgggctttgacaaacttcctctgtggggtaccatcctcatctcggtgggatgtgcagtt

SEQ ID NO: 223112 - DNA, 75 bp, Homo sapiens
gagagatgcttaaaaatcaccagttactttaatgagtgaatcaggtctaggaaaatcgactctcataaacagcct

SEQ ID NO: 223113 - DNA, 100 bp, Homo sapiens
agcaaccaacgttcagagcactctatgaagcaatacgggatagtaacagttacccctcaatgagcgacccctacctgtccagctattacccgccgtccat

SEQ ID NO: 223114 - DNA, 98 bp, Homo sapiens
tgctgggacttcccgtccgcggcgtggagggtatccagctcacatagaagacattgactacgaggaaggaaaagtactcatccatttcaagcgttgga

SEQ ID NO: 223115 - DNA, 100 bp, Homo sapiens
tcttcccgcttcagcctcctgcctgagcctcccaagtagctaggactagaggattttatgggcagctgcagaagttctgtcccccacactaccccgattc

SEQ ID NO: 223116 - DNA, 100 bp, Homo sapiens
gtcctcgacggggaggagatcccggtgcagaagaacatcctggcggcggccagcccgtacatcagcttccttcaaaatgtctactgttcacgaaatcctg

SEQ ID NO: 223117 - DNA, 82 bp, Homo sapiens
tgtcctcacctggtctctggctgtccagagttgcttcctgttgacgacagctctcctcagaccatggcaaaagttataacca

SEQ ID NO: 223118 - DNA, 83 bp, Homo sapiens
atttcaagagaggacaaaataactaccccgaaaacagaggtgtcagagccagggtgttgatgatgccttctatacattagttc

SEQ ID NO: 223119 - DNA, 100 bp, Homo sapiens
tgtcccttcaggaggccccgtgccatcgccacagacctacaggtttgtaaccccagatcagaagtactccatggacaacactccccacacgccaaccccg

SEQ ID NO: 223120 - DNA, 134 bp, Homo sapiens
gtcaccgccatggctgccccgtgtttgctgcggcaaggacgagccggggcgctgaaggttcagaacttggcagtaaggaatcaacaggcctcagctcaaggacctcagatgcaaggctccactcagaaggccat

SEQ ID NO: 223121 - DNA, 100 bp, Homo sapiens
cgcaaacctgaacggaagccttcagatgaggagttcgcgtcccggaaaagaaggaaaggaggtgagctggcctcagctgtccacgcctacacaaaaacag

SEQ ID NO: 223122 - DNA, 82 bp, Homo sapiens
cagccgggagacagatgcgaggcggcggtcagttgtaatttagattcgagaagtggtttatcctttgactggaaaagaaaag

SEQ ID NO: 223123 - DNA, 100 bp, Homo sapiens
gctggtgatccgcaattacggccccgaggtgtgggaagacatcaaggccaaggagattaagatcaagttgggaattctcctccagaagccagactcagtt

SEQ ID NO: 223124 - DNA, 115 bp, Homo sapiens
tccccggagctgggccgcgaacacctcactattgatggtgtagcgctttaggggaaggaaggtgggagtcaatcattttgacaagtctcctgaaaggaacagctagcaggaactg

SEQ ID NO: 223125 - DNA, 100 bp, Homo sapiens
ctagcaatacagaacattgctgaaaacatagaacaggatttccccaagcctgaaatgctagatctacattgtgataagatctctctactttagttagaag

SEQ ID NO: 223126 - DNA, 118 bp, Homo sapiens
tcgggctggggctggaggaggccggacccaaggagagcagtgaggaaggtgctgggcctcgtgcgggtcccgctgtacacccagaaggaccgagtcggaggcttccccaacttcctga

SEQ ID NO: 223127 - DNA, 76 bp, Homo sapiens
caccctggccctcgcggtggctgcctttaaagcctccccagctttctgaggatgatatctggctaaaaagcgaggg

SEQ ID NO: 223128 - DNA, 90 bp, Homo sapiens
atccagtatctgagtaatttgcagtactttgctgtgaccaacaacaatgctgcattgcgtcagattactgataaagctcgtgaatttgga

SEQ ID NO: 223129 - DNA, 98 bp, Homo sapiens
tgtgcgttgcggccagtcgccactgctcttttcatgcaacacccaacacttataagcggaagaacacagaaacagctctagacaacaaaccttgtgga

SEQ ID NO: 223130 - DNA, 50 bp, Homo sapiens
tccatttccttctatgatggggtctccaccagctcctggccgggttcgag

SEQ ID NO: 223131 - DNA, 98 bp, Homo sapiens
gaaaccgtccctgctacagagcaggagttgccgcagccccaggctgagacaggtgtcatggagaaactccagctgggcccagagattctgcagcggga

SEQ ID NO: 223132 - DNA, 82 bp, Homo sapiens
ttagctgtgctcgcgctactctctctttctggcctggaggctatccagcgtaagaatgattgatgttggctgatattggagt

SEQ ID NO: 223133 - DNA, 75 bp, Homo sapiens
aagaacggagcttgaagcaaagctgcaggttttaaaggttcaaaccttgtactactcagctgatcacaagctgct

SEQ ID NO: 223134 - DNA, 98 bp, Homo sapiens
tgcacctgctccagagcggggccgtggaccgcgtgttgcaagtggcgggccaatccgagcctacatccttgcccacaaggatgccatccagctctgga

SEQ ID NO: 223135 - DNA, 82 bp, Homo sapiens
acagagcacctaggattaaattggtttcctaaagtcctgccaaatatcacaaaacctagatattatgaaggagaaagaaaat

SEQ ID NO: 223136 - DNA, 82 bp, Homo sapiens
ttcaagaagcctgctgagttcaccacaggcctgttgcagtctccaaggcaccatgaatgccatcgtggctctctgccacttc

SEQ ID NO: 223137 - DNA, 76 bp, Homo sapiens
tatgaagaaatggggaaagtcaagaaaatagatgcttctaaatctgttgatgaaagtgatcagcagctggactgtg

SEQ ID NO: 223138 - DNA, 137 bp, Homo sapiens
tttatttacctctgtttatccaacgctctctcagcagcttccaagagaaccaatggaatggagaaggcatccgtgtacaagatttgcagagaaatgtatgacgatggagtgggtttaccctttcaaagtcagcctga

SEQ ID NO: 223139 - DNA, 72 bp, Homo sapiens
catcaggacaccgggagtgggagagattggactgggagactcagcaggacatggatttgattgacatacttt

SEQ ID NO: 223140 - DNA, 50 bp, Homo sapiens
tgaagatccaagatgttctacagagtcactttgtggcatgtatgacagcc

SEQ ID NO: 223141 - DNA, 75 bp, Homo sapiens
atcgtgagttgtgggtgcagcgactgaaggaggaatatcagtcccttatccgggaatgtatcctgtcaggtataa

SEQ ID NO: 223142 - DNA, 74 bp, Homo sapiens
ccgccatccgggaggcccagggaagatgagtgaccgaggaggtggcgttcctttgaggaaaattgacagacttt

SEQ ID NO: 223143 - DNA, 83 bp, Homo sapiens
gtttctcccagctccaagtccccctgggtggagtccgaatacctggattacctttttgaagctcacgcccctgaggacccctc

SEQ ID NO: 223144 - DNA, 76 bp, Homo sapiens
caataaaccacactggtgaaaaagaagttctagcaacagcttgaagaagaggcagctaaacctcctgagcctgaga

SEQ ID NO: 223145 - DNA, 82 bp, Homo sapiens
caggcggtgacagagtggagccatggctagagggaaccctactctggaaactgtcagtcccagggcactggggagggctgag

SEQ ID NO: 223146 - DNA, 100 bp, Homo sapiens
cattacccccgggaccattctgatcatcctcactggacgccacaggggcaagcatttttcagttgaaggacagttggaattcagagcccttctatttgtc

SEQ ID NO: 223147 - DNA, 96 bp, Homo sapiens
tgtcggtatctttccaaggtcctagaactcaggaagagtgatgtggttttggataaggctaaagaattacctccaaagccattgtcaagaccacag

SEQ ID NO: 223148 - DNA, 101 bp, Homo sapiens
ctgggagcccgaagccgtccccgagtcgctcctaggtcactggcgcgatgcgggccgtcctctcggctgatgctctaaagcccaaatttgcagaatctacg

SEQ ID NO: 223149 - DNA, 100 bp, Homo sapiens
ggatgaccctgcccactgagatgaaggaggcagccagtgaggggatgcgaaaacaaggcttatttcaatggctcgattctcttcagattgataacctcac

SEQ ID NO: 223150 - DNA, 75 bp, Homo sapiens
ataacaatcagtgccgagcaattgtgatgagatattctgctgagtggaagagatagagctgcctgctttgctatt

SEQ ID NO: 223151 - DNA, 50 bp, Homo sapiens
ctttatgaagatattcttgagggcatgggtagcaagaaactaaaacgagt

SEQ ID NO: 223152 - DNA, 97 bp, Homo sapiens
aaaaagaaggccctgagtcaaagaagatgcctcgaactaaacaaattcatcccagaaatctaagagctgtgttggagtagaagaacatcatgctgtt

SEQ ID NO: 223153 - DNA, 75 bp, Homo sapiens
tgaagttgttaccaatggtgaaactacatgttcagaaagcacttctggatccagctgtgtgatagccgcactagg

SEQ ID NO: 223154 - DNA, 51 bp, Homo sapiens
ctgatggaagaggagctccagcagcagcagagatgtggtctcactgtgttg

SEQ ID NO: 223155 - DNA, 88 bp, Homo sapiens
ttatctattatataagcacacagcaagcaccttctgagactctgttacggcatggtgcaaatccagatctgagagatgaagatgggaa

SEQ ID NO: 223156 - DNA, 75 bp, Homo sapiens
ccacaggatggacccagctgagcaagctcctggagctgacagggccaactgtggactgtggcattcctgaatcca

SEQ ID NO: 223157 - DNA, 100 bp, Homo sapiens
cttgacctcacaagacgtgggctctggcaccagcaataacagccaagcctgtgcccagctttgtgtccctggtgatgttggaacattaatgatggaacat

SEQ ID NO: 223158 - DNA, 75 bp, Homo sapiens
caagaggcagaagtacggggttgagagatcgatgtcttattgtgatgagtctcgactgtcatatcttcttcggag

SEQ ID NO: 223159 - DNA, 90 bp, Homo sapiens
caccattgcatttgcatttgtttgccacccgtcagtcctgccaatttacagtgagcttaaagacaggctatggaactcagtcaactcccc

SEQ ID NO: 223160 - DNA, 112 bp, Homo sapiens
gtggcactgaggctctggaacttctgcccagctctccttgacgttccatcctcagagcagcctgaactgttcctaaagaaacttcagcagtgctgtgtcatttttgacttca

SEQ ID NO: 223161 - DNA, 100 bp, Homo sapiens
gccctcgcgacgcgcccggcccggagcccccagcgcagcggccgcgatgacagtcatgtccctttccagggacctcaaggacgactttcacagtgacacg

SEQ ID NO: 223162 - DNA, 153 bp, Homo sapiens
cgggcgtccgcggagcagcttccccccgcgcctctcttcgcctcgcctcgggacccgcggtccccgctcttgctgatttctgcattgctatgaaccatggcccaactgtactacaaaaaggtcaactactcaccgtacagagaccgcatcccc

SEQ ID NO: 223163 - DNA, 90 bp, Homo sapiens
gcggagcagtggtcggagatgtggcgaccgtttgtttcgacgccggaccgcgtaagagacgatgatgttgggcacggaaggtggagaggg

SEQ ID NO: 223164 - DNA, 101 bp, Homo sapiens
ctctggcctcgccggtcttggggggatggttccatcatggcgtcaatgcagtgtatgggtttcgacagaccatgatgaaattgagaatgtggccaaacaat

SEQ ID NO: 223165 - DNA, 97 bp, Homo sapiens
gaaactacctgtgcagctccagagagctatggctgcagaagcagaagcgtcccgcgaggcccgcgccaaggcctatattcacacacgtatgcgggcg

SEQ ID NO: 223166 - DNA, 100 bp, Homo sapiens
ctgggagataacttcgaaggattttgcaacaaattcgagctgtccgactctgagaatgggtatttgaagtataccatacaactgttttgaaaatccagcg

SEQ ID NO: 223167 - DNA, 98 bp, Homo sapiens
gccagtcagtgggtcccgcagtcgcccgcaaccggggcgaatcatggcggccgccaagccaacaagtcccaaatttggaaaagctgactcatatgaaa

SEQ ID NO: 223168 - DNA, 98 bp, Homo sapiens
gagtgcagaggcatcacctgaaaggcatccgtgtcattctggaccttactcccaactaccggggtgagaactcgtggttctccactcaggttgacact

SEQ ID NO: 223169 - DNA, 74 bp, Homo sapiens
gcatgggcaaaacttgatgtggtgccaaaagaacatcttttagtctcgattcctctcttgattaatcatcttca

SEQ ID NO: 223170 - DNA, 90 bp, Homo sapiens
gctcagcttcaccatcgtcagcctcatgtacttcgcctttaccaggctttacttactgcagtaacatcacaacacatagaaattcatgaa

SEQ ID NO: 223171 - DNA, 90 bp, Homo sapiens
gaaaaacaagaattacagcagccaacctatgttgccctgagttacataaataggttctgaatgatgactgacgcgggtttgggtgatacc

SEQ ID NO: 223172 - DNA, 90 bp, Homo sapiens
tccctgaagaaccgagcggccagcccccattcactggggagaatagaaagaaaacaattgacaaaatcctcaaatgtaaactcaatttgc

SEQ ID NO: 223173 - DNA, 83 bp, Homo sapiens
cgggagctggacggcgagcgcgagcggcgcgagaaaggaactactggagaccacgtgccgcctggccaacacgctgaagaggc

SEQ ID NO: 223174 - DNA, 82 bp, Homo sapiens
gccaagccatgggagacaagaagagccccaccaggttttaaaatcaaagatgggaaaatcggagaaaattgcccttccccat

SEQ ID NO: 223175 - DNA, 83 bp, Homo sapiens
cacttttggaccaaaggcctgtgtgctgcagaacccccagaccatcatgctccccacaggtgcaggaagccgccgcccagcca

SEQ ID NO: 223176 - DNA, 76 bp, Homo sapiens
ggcaagagtaagacagctggaggaagaaaatcgcatgctgccccagatttattgctaaacatgggtgcatttttgg

SEQ ID NO: 223177 - DNA, 125 bp, Homo sapiens
ctggtcacctgtctggagcaaataaaagagccctgcaatttgaagatacatgagacagcagccaaacccccaggttgatgaggtaatgctgactctgaaacaggccttcagtacggcggctgccc

SEQ ID NO: 223178 - DNA, 90 bp, Homo sapiens
aacatcccagtccttaaggccaaactgacagaaatgcgtggcatctatgccaaagtggaccggctagagtgacgaggaattgacaatggc

SEQ ID NO: 223179 - DNA, 75 bp, Homo sapiens
ttagagccaaactgtccaaggctttggcaccatctgtgagaaagacacactgcagtggaaggaaacacaaagaga

SEQ ID NO: 223180 - DNA, 100 bp, Homo sapiens
tgcagatattggcaatttggagcattagatgaactaattacaacgttaacctaaggaacagtgtggaatgcagtagccctctgggcctgggatattgtgg

SEQ ID NO: 223181 - DNA, 98 bp, Homo sapiens
aactcctggagttccagctggcactcaaggggaagctggaagatgggacagagtttgacagcagcctgccccagaaccagccctttgtcttctccctt

SEQ ID NO: 223182 - DNA, 97 bp, Homo sapiens
ttgatctccaagaccgttcagaccctcggcagcctgtccaagtccaaatctagtgtgaacatggctacgcctcttcattcccgtccatgccgagccc

SEQ ID NO: 223183 - DNA, 96 bp, Homo sapiens
gagaactgtcagtgtcccttccgagggtcagtttcccgagtacccaccagagggcgccactaaactgggcacacaaaccaatggtctggactttca

SEQ ID NO: 223184 - DNA, 50 bp, Homo sapiens
catggacctgaaggagaagcacctgctttaatgaagcaccagttgagatt

SEQ ID NO: 223185 - DNA, 129 bp, Homo sapiens
ggagacctcagcactcaagcagcaggagcagcccgcggcgaccaagatcaggaacctgccctggtggtggtcggtatgttccgggctcttcgggatcttctaacacactacccacagcagatcctttta

SEQ ID NO: 223186 - DNA, 83 bp, Homo sapiens
gtgcgctgctcaaggacacggtctacaccgacttcgacgccctgggcgctgcctatggcacagccaagagcggtaccggcatt

SEQ ID NO: 223187 - DNA, 100 bp, Homo sapiens
ccatcaccactaccaccacgggtggttcgtcatgattgcaactgggtgggtcaaagggttttcagagaaagatgctgatgaggtgaaaggaatttttgta

SEQ ID NO: 223188 - DNA, 75 bp, Homo sapiens
atttcatccattatgctggctgttatgtacgcaggaggagagcgaagacctggagaaacagaacgcggctctacg

SEQ ID NO: 223189 - DNA, 93 bp, Homo sapiens
cgaggcgctagggaagatcgcaccgcggacgcccgctgagcttggcgcacgggccgaccagcggggatctgacgagcttttctctacttgtgt

SEQ ID NO: 223190 - DNA, 83 bp, Homo sapiens
gtgcgtgaggagtttaaggagctgaaagcgcggatgtccttggtgaggattttgaaaatttgatcttcacaagagttgcctgg

SEQ ID NO: 223191 - DNA, 73 bp, Homo sapiens
acgatgccctgccaaagcaggagggcacagccagtgtgtgaccgcaacaagggaaaacatggcttatactgtg

SEQ ID NO: 223192 - DNA, 101 bp, Homo sapiens
gccggcacctgacggcgtgaccgacccgagccgttcctccgtgtcacaaagcagtacctgccccacgtggcgcgcctctgtctgatcagcaccttcctgga

SEQ ID NO: 223193 - DNA, 100 bp, Homo sapiens
aagcagaaaatgtgtggcggattactgggacagatggagccctctggcacaaatggaagaagaaagaagggagcaagtagctaaaattaagaagatggag

SEQ ID NO: 223194 - DNA, 83 bp, Homo sapiens
tctctgctcctctagaagatttcacagcaatgctggactgcagtgactatgttctagtttgcaatggattttggataaacaag

SEQ ID NO: 223195 - DNA, 101 bp, Homo sapiens
tggcaatggaacaggcttgagaaacagagttttccgtctgatgaaggttggccatttgcaaagtatcttggagcttgtggaagaatggtggctgtaaatta

SEQ ID NO: 223196 - DNA, 100 bp, Homo sapiens
ccagccagatgaactgtccttccaacggggtgacctcatccgtattctgagcaagaatccagcaactatcacaagaatactccttagccacttcaattgg

SEQ ID NO: 223197 - DNA, 83 bp, Homo sapiens
ctactctctctttctggcctggaggctatccagcgctgtctgtccccagaccccagagcacgtccggcaccaccatgactggg

SEQ ID NO: 223198 - DNA, 98 bp, Homo sapiens
ttggatttaaaagacagtcctcgtcagcactgactttcagctatggaatcgatttgaggcttaagcaacttcttccggggaagagtgccagtgcagcc

SEQ ID NO: 223199 - DNA, 97 bp, Homo sapiens
cctcaaccctgagctgcgtgagaacccgcccatgaagccagatttctcccagaacacagcccacttggatcagtttgaacgaatcaagaccctcggc

SEQ ID NO: 223200 - DNA, 100 bp, Homo sapiens
ggtgagatgatcgaagccccttcccaggtcctcaactttgaagagatcgactacaaggagatcgaggtggaagagttaccctgaagaatgctgctatgct

SEQ ID NO: 223201 - DNA, 83 bp, Homo sapiens
ggattccaagtaactcttatttggccgttaattaaggaaaagttgagccagggcgtgaccctcgtcgtggacagatacgcatt

SEQ ID NO: 223202 - DNA, 100 bp, Homo sapiens
tctctgcacctcctctgtgctgtctctttaagagcgcccggcagaatggcgggaaggtgaggcacaagcggcaggccctgcaagacatggcgcgacccct

SEQ ID NO: 223203 - DNA, 90 bp, Homo sapiens
gtgaaatgcaaagactgtgaggagaggcgaatctttctgcattgaatttgaagatttctgaacagaaggaaatattaataaaagaattag

SEQ ID NO: 223204 - DNA, 74 bp, Homo sapiens
gaaactctgcattctcgcttcctggaggaagagagaagggcacagttacctaagtatcaacgtaatcttcctcg

SEQ ID NO: 223205 - DNA, 100 bp, Homo sapiens
ttcccagctttggttggaagacctattatcagatcaaccaccaaagtgggaaacattgaaatcaaggtggtattggaatgctatgtaagaaaggacttgg

SEQ ID NO: 223206 - DNA, 100 bp, Homo sapiens
gttccggttggcgagtgacaccactgatgacgatgatgcactcgccgagtcgtccggaaatccattgcccgtgttctcacagttattaaccagactcaga

SEQ ID NO: 223207 - DNA, 99 bp, Homo sapiens
cagcaggacaccaggacctggcctgaagacatttcctctcctcccctctggatttctcagaggtgctgctggtgagtagcagccggtacccagaccagt

SEQ ID NO: 223208 - DNA, 111 bp, Homo sapiens
gcagaaattgcttgcggagtttgcttcacgacagaaaagctttatggaaactgcaatggatgttgggcccgaaagatccccatcatcattcgccgttacctgccagatggg

SEQ ID NO: 223209 - DNA, 100 bp, Homo sapiens
ctatgttttccagaaatgacttcagtatctggagcatcctcagaaaatgtattggaatgtcttatgcagggaaatatgtgccagccattgcacacctcat

SEQ ID NO: 223210 - DNA, 75 bp, Homo sapiens
ccgcactgtcgctgcccgcctgccctgaggagtccccgctgcttgatgacctgtgtagaaaaagcaggaacagat

SEQ ID NO: 223211 - DNA, 100 bp, Homo sapiens
agaaaatccagtttgcttaaaaagtcacttcccaaaagctgcacatctgtgtcaaagcaggagtctagcaaaggaagtcataggactggaggacaatgtc

SEQ ID NO: 223212 - DNA, 76 bp, Homo sapiens
tgggagttcagtcaggacgtctacctgtccaccattgtgaccgaggaatcatcggaatccttcaccatggcatcca

SEQ ID NO: 223213 - DNA, 75 bp, Homo sapiens
tggcaatatgatactcagtgttcactggcaggagctttgtgtccctggtgatgttggaacattaatgatggaaca

SEQ ID NO: 223214 - DNA, 100 bp, Homo sapiens
cggcccacgcgcagcgacagggagagattttctccaaaggaacatccggtgcttgccctgccaggagccccagcccagttccccgtcctagaggaacaca

SEQ ID NO: 223215 - DNA, 100 bp, Homo sapiens
cgggggacgtggataccttggcctttgacgggcggacctttgtcgagtacctcaacgctgtgaccgagagggggtccactggacggggcctgagctacaa

SEQ ID NO: 223216 - DNA, 98 bp, Homo sapiens
acaggtgcatttcacagcactctgggcgaaaattggatgtgaaaatgaagccagaccgagaaccttttgcccagagtagcagccaaacttgaggttgc

SEQ ID NO: 223217 - DNA, 100 bp, Homo sapiens
gctgaccaggggcttgagagctgggttctattttccctcctcaaactgactttgcagccacggagagcacctgtggaatcctctcaagaggaacagtcat

SEQ ID NO: 223218 - DNA, 74 bp, Homo sapiens
ggacctcgccccgggacagcgaggagctgagggaccctgtcaaaatgcagatcttcgtgaaaacccttaccggc

SEQ ID NO: 223219 - DNA, 83 bp, Homo sapiens
gaggtcagaggccctttcatcatcagagccgagactgtctgaagctgggcccacctgctgagggagaagtcgtccaagtcaag

SEQ ID NO: 223220 - DNA, 100 bp, Homo sapiens
gctggttgacccgggcagcggagagaggagtttcttataggcggggccactaaccaaagtgactatatgcaaagacagagaaggaaagccaaagtctttt

SEQ ID NO: 223221 - DNA, 98 bp, Homo sapiens
ttgtatttttcagttattacaggaagcagggaatgggtcttgtaaatcacgtctttactgaagacaatttgaaaaaattatatgtttcaaatcttgga

SEQ ID NO: 223222 - DNA, 75 bp, Homo sapiens
attacacacagcaagttcctgcttctgggacagctctactgacgatgttccatttaagcagacctcttccatagc

SEQ ID NO: 223223 - DNA, 100 bp, Homo sapiens
gttctccttagatgagtgccgcagcttggtggctctgatggaaatctccatccagttcctggtgtacaggcgcagcaccgccgcctcggagcttgagccc

SEQ ID NO: 223224 - DNA, 75 bp, Homo sapiens
gtccagagctgaggactgcctgtttgcagggagagacaaaggcagcgctgccctcgggggagtattggccctggc

SEQ ID NO: 223225 - DNA, 90 bp, Homo sapiens
cgtgacccacctggtacatcgcctcagggcattcatttcaggctccttctaaatggccaagttaagtgggcagaccaacatccacctcag

SEQ ID NO: 223226 - DNA, 51 bp, Homo sapiens
cgaaagggcagtacagactttggcagaaatcgagctatagcagattatctt

SEQ ID NO: 223227 - DNA, 82 bp, Homo sapiens
gagaggttacagcttagcttccaggatgatgaaattcagaaggagctggcggacatcactttagaccctccacctaattgca

SEQ ID NO: 223228 - DNA, 75 bp, Homo sapiens
ttttccttaataagccgatgcttgccgatgttgtcttcgaaattcaaggtttgccatctgcaaatctggccgcac

SEQ ID NO: 223229 - DNA, 75 bp, Homo sapiens
atcgaggcgagccagagcctgcagtcccacacgggtgtcgaagtgcagacagactacgtgcccctgctgaactcg

SEQ ID NO: 223230 - DNA, 74 bp, Homo sapiens
attgatcctccagaattagacactcacatgttaacagtgatctttgcagagctgtttcaacttccagcaccccc

SEQ ID NO: 223231 - DNA, 83 bp, Homo sapiens
agaaaagaggcaaagcaagcgagaagtcgcgggcccagcccacagcagggatgaatttttagatgtgatctactggttccgac

SEQ ID NO: 223232 - DNA, 75 bp, Homo sapiens
tgccgctcctaagcctgcacagccgcggcggcagcagcagtgagaggccttgtacagctccatcaagaatgagaa

SEQ ID NO: 223233 - DNA, 88 bp, Homo sapiens
ctacaagttgaaaattcctaagaatccagaacttgtgccacagaactacacccatctgctggcaaggctaagattagaacagctcata

SEQ ID NO: 223234 - DNA, 50 bp, Homo sapiens
cgacgagaagtcaagaactatgtaaccacatggtggatattggggatatt

SEQ ID NO: 223235 - DNA, 100 bp, Homo sapiens
gaaagtttgaggaactactacgaacaatggggaaagcttacagactgtgtggagctgtaccagcccagtgcagagagcttgcgccagcaagaagaacgca

SEQ ID NO: 223236 - DNA, 82 bp, Homo sapiens
tgagctggagctgcccggctcggcagcgggaagtggtattggaaggaactggccctgggcctctggaggcagcagtattctg

SEQ ID NO: 223237 - DNA, 118 bp, Homo sapiens
tggatgacaagaagacgtccaatctgagcgtgctgcggacggcgctgcggtacatccaggtctcctctgagcctccggcctccataagacccaaaacagatgacacctcttcccagtc

SEQ ID NO: 223238 - DNA, 100 bp, Homo sapiens
ctcagtccgaccgggctagctttggcgaggggacggagccggatcaggagccgccgccgccatatcagcctcccctggtgaagacacaaactgtcaccat

SEQ ID NO: 223239 - DNA, 90 bp, Homo sapiens
gaaaaacatcttgatctggagaaaaactggatgttggtagaaaaagcaagagtttgttatatagcatgaaatcccattctctggctggag

SEQ ID NO: 223240 - DNA, 99 bp, Homo sapiens
caaggacctgtggaatatgagtgatgacaaaccctttctatgtactgcgcctggatgtggccagcttaaagaaagtggttattgtacaggtcatgaacc

SEQ ID NO: 223241 - DNA, 75 bp, Homo sapiens
gcaggcgagattgcctgacccaggcctgctcggccctcacaggcaaacggggattcagcgtccgatcctttggaa

SEQ ID NO: 223242 - DNA, 97 bp, Homo sapiens
ccgttcaccaccctgaagccccacgtcgggatcgtccactacgaaggccacctacaaatagcagaaaaagcttgtggtgaaggggggcaaaaaaaag

SEQ ID NO: 223243 - DNA, 100 bp, Homo sapiens
ggacctgctgacagagcagatggcctggagattcatgacaaaatcatggagaaaatcctgagcgagcagctctgtactttgtttctggcgtgtgcatcgg

SEQ ID NO: 223244 - DNA, 100 bp, Homo sapiens
cttcgtcctccggttgcgggggcggtgcgggcaaacctcgcgaggagaagaggacggccctgagcaagcatgcaaatcaagaggttccaatcttcgtgtt

SEQ ID NO: 223245 - DNA, 100 bp, Homo sapiens
tgctctagaaacttgcttgaaaatccgtgaacaggaacttaagagtcttaggagtcagttggatgtgacacataaggagatcaagcttctgaaattcagg

SEQ ID NO: 223246 - DNA, 99 bp, Homo sapiens
tggacaccttgaagcagaggagcagcaggaccagtgtttacgaaaatggggttacagaagatgtgaagatatttgttggattaaaaccaataaaaacaa

SEQ ID NO: 223247 - DNA, 109 bp, Homo sapiens
gcgggctgtcgtcacgacgacgtgcggacgcagcggcgggggcttcacagaagaaaagcttggccaggctgagaagacagaattggatgctcacttagagaacctcctt

SEQ ID NO: 223248 - DNA, 75 bp, Homo sapiens
ctccaacatggaccgcctgggggactcggaactccctggcctctggtggaaccctgccccttaccagccttgatg

SEQ ID NO: 223249 - DNA, 75 bp, Homo sapiens
gcgtgatcacggccagcgaggacaggggaacgcccttttgcttgtgactggcagggctgcgacaagaagttcgcc

SEQ ID NO: 223250 - DNA, 100 bp, Homo sapiens
ctgccgccgaacgacaggacgttggggcggcctggctccctcagaacattctagtatgccagtagaaaaaaatatcactttagaaaggccttctaatgta

SEQ ID NO: 223251 - DNA, 100 bp, Homo sapiens
agttatttgcctcagtaaaagagaagtctgcggtcttgcagttcttcagactgctttaataaagtgatgccaccaaggaaaaagagaagacctgcctctg

SEQ ID NO: 223252 - DNA, 78 bp, Homo sapiens
cgatatatgttctctaggccttttagaaaacatggcttagcgcagatatgaatgctgatgtggtatgtcacactctgg

SEQ ID NO: 223253 - DNA, 100 bp, Homo sapiens
ttcattttatgtgggaggatgttcagcagcgcggcagagtcatggggtgtgacccaaatcttcaggtgttcaatgttttcattgataacctcgatactcg

SEQ ID NO: 223254 - DNA, 100 bp, Homo sapiens
acatggcgtctgccctggagcagttcgtgaacagtgtccgacagctctcagctcaaggtgctgttgggaacacagaggaagtgactggctgggggttcag

SEQ ID NO: 223255 - DNA, 76 bp, Homo sapiens
aggaaatctggccgccgccgccgcgagcgctcccggtgctccaatattacctcaaggattacagcctgaacaacag

SEQ ID NO: 223256 - DNA, 100 bp, Homo sapiens
gaaaattggccccataacacccttggagttttacagggaacatgtcaagccactcttcaatatggaagataaggaaccttcagccctcaagattccaaca

SEQ ID NO: 223257 - DNA, 50 bp, Homo sapiens
cctggggttgggtacctggaagctagtgagacctgcaacgacttccaccc

SEQ ID NO: 223258 - DNA, 83 bp, Homo sapiens
atctggcctccatcttcggcaccgagaaagacaaaagtccattggaatattaagcccaggagttgctttggggatggctggaa

SEQ ID NO: 223259 - DNA, 90 bp, Homo sapiens
tcaagctctcagtcaagatccaaacagtctttcaaacctagatcagacgccgggaggctctgctcccgcccaggtggtgcacacccagcc

SEQ ID NO: 223260 - DNA, 100 bp, Homo sapiens
tcctgcagtctctctgtgtggctgtaacttacgtgtactttaccaacgagctgaagcaggttaatttggagtggcccctggagtcagtttcctacaccat

SEQ ID NO: 223261 - DNA, 75 bp, Homo sapiens
ccggagccgaaacaccggtaggagcggggagttacagaatgtctgaaggggacagtgtgggagaatccgtccatg

SEQ ID NO: 223262 - DNA, 100 bp, Homo sapiens
gcactccggcgtctggaggaggaggaggcagcctggcatcctcgctacaacctcattgttgtgggccgatacccagatcctaatttcaaaagttgtaccc

SEQ ID NO: 223263 - DNA, 50 bp, Homo sapiens
gtaatttctgggaaacaagaaggatctcatagatcagaacatactggagc

SEQ ID NO: 223264 - DNA, 83 bp, Homo sapiens
ctgcatgtgaagctcaccgagacggcgatccgggcgctcgagacttaccagagccacaagagtggagcctttcaggctggcat

SEQ ID NO: 223265 - DNA, 90 bp, Homo sapiens
gctcgcagcaactgtgctactcctcaccatctgcagccttgaagaaactccaagaggaggaggaggagagcaacaccagcaaagtgccca

SEQ ID NO: 223266 - DNA, 100 bp, Homo sapiens
acatgatacaatctgcaaatgacttcacagagaatgcagttgtcttgacttcaggtctgtctgttctgttggcaagtaaatgcagtactgttctgatccc

SEQ ID NO: 223267 - DNA, 75 bp, Homo sapiens
ctggaccctgccaagaagtcgcccatcgcagcagctcggtaaggctggcctctctgcagtcagaggtctgagctc

SEQ ID NO: 223268 - DNA, 100 bp, Homo sapiens
ggagctgttgtattacctgggaatgatatggaacctagcaaagctgttccactgaatgcatctaagcaagatggacctatgccaaaaccacacagtgttt

SEQ ID NO: 223269 - DNA, 100 bp, Homo sapiens
tgggaatcctattttttattatgttgcacggagccctggcctcccacgactacatcctgaagattgtgcccacggtttatgaggacaagagtggcaagca

SEQ ID NO: 223270 - DNA, 75 bp, Homo sapiens
acagtgggacctagacaaagggagagggtgaccgacatcccaactaggtgtatgtgctcaagaggccttatgtgg

SEQ ID NO: 223271 - DNA, 100 bp, Homo sapiens
ctccggggaggtcacctgacgaggagacatctcgagatctggcgtgttttatacagtttgaaaatgtcaacatttactatgggactcagcataaaatgaa

SEQ ID NO: 223272 - DNA, 83 bp, Homo sapiens
ctcatcctggttctggaatcctcagttcaaggctgctgcagagaagttggtgcaagccttaatggaaagaaattcagaattac

SEQ ID NO: 223273 - DNA, 75 bp, Homo sapiens
gcagatcttcactgtattagtgaatccgataagttggatcacaaggacgagtcataagttttgaggtacgaaaag

SEQ ID NO: 223274 - DNA, 82 bp, Homo sapiens
caaataccaggctaccatggtctacaagactctcttcgctctttgcatcttaactgcagcacaggaagtcctggagaacctg

SEQ ID NO: 223275 - DNA, 99 bp, Homo sapiens
tcgtggtgaaggtccggggcttgccctggtcttgctcggccgatgaagtgcagaggtttttttctgcctgactcaattatgaatgcttcatggcctgtg

SEQ ID NO: 223276 - DNA, 100 bp, Homo sapiens
ggtgaagtggcaggaggaggaggaggggctccggctggtctgtggtgaggattggggagtcagaggactgtgcaggaatcgtgtccttcctgtgctctcc

SEQ ID NO: 223277 - DNA, 51 bp, Homo sapiens
ggattccaagtaactcttatttgggtttcatcaccttaaatggttttgaac

SEQ ID NO: 223278 - DNA, 76 bp, Homo sapiens
ggaatatcaagattcatctttttcactaattgtggcattcacaatatttggagttcttacaacatggcagacattg

SEQ ID NO: 223279 - DNA, 50 bp, Homo sapiens
tctttcttcactcctcttcacttcttcaagttactgaaagctctcgaaat

SEQ ID NO: 223280 - DNA, 88 bp, Homo sapiens
ctgttggatccctcctgaatggagttctgggaaatcgttcattcatttacagatgaacagaaaagactcttcttgcagtttacaacgg

SEQ ID NO: 223281 - DNA, 71 bp, Homo sapiens
ccgaatagatgggcaggacatttcacagggagcagatcaaacgggtgaaggactcggatgacgtgcccatg

SEQ ID NO: 223282 - DNA, 82 bp, Homo sapiens
gctgctgtggaccctgggaaagagcctgtgcttcctgagccagtgcggggcctggcatggaatagcctgggctggaagctct

SEQ ID NO: 223283 - DNA, 74 bp, Homo sapiens
aacaataaaggaccgagggtgccgagcgggagtggcctcgttggtgctgaaggtcgccatcctggctgagaagt

SEQ ID NO: 223284 - DNA, 87 bp, Homo sapiens
gaggagccagacgacaagcacacactatggcgctgaaacggattaataagtattggatgaacgaatatacctcatccattggaattg

SEQ ID NO: 223285 - DNA, 76 bp, Homo sapiens
ccgggacccccaggacgacgtgtacctggacatcaccgcacccttacccttctgaagaacagaaaaagcagttggc

SEQ ID NO: 223286 - DNA, 83 bp, Homo sapiens
cttcatccttgtttaatgactttggtgccctcaacatctctcagagacgaaaggaaccttttgaggatggctttgcaaatggg

SEQ ID NO: 223287 - DNA, 115 bp, Homo sapiens
aggaggacaggtgccggagcagctcgtgcagctaagcagccaactgcagaaacgtcagatagaagatggtgagatttttgcaagtattaaccagaaggacggtatggtcagtttc

SEQ ID NO: 223288 - DNA, 100 bp, Homo sapiens
cgacgaggatatcgtgtctggagcagtggagcccaaagacccctggagacatggcttcaccatcatcatcgagccctttgacgacagaaccccgaccatt

SEQ ID NO: 223289 - DNA, 98 bp, Homo sapiens
tttgtcttcttctacacccgactggtcctctttcccacccagatgatcctagtgctccccacaaaatccaggaggttctcaagtcctgcctgaaagag

SEQ ID NO: 223290 - DNA, 100 bp, Homo sapiens
gctctgaaagctagaagaaaaggtgtacttgcaagaaacctcaggacttgagtaacagcaacatgacccaacatgagtgaagtttcctgcaagaaacggg

SEQ ID NO: 223291 - DNA, 74 bp, Homo sapiens
ctttctatgtactgcgcctggatgtggccagggagttggtctctcagtccatgggcaatttcgagtggctacag

SEQ ID NO: 223292 - DNA, 90 bp, Homo sapiens
tacctggcactcctggacaggatggattgccagggcttcctggcccgaaaggagagcctgtgacaatctccaatagacttgtgtcttcac

SEQ ID NO: 223293 - DNA, 75 bp, Homo sapiens
gacttctcgtgggcagcctcccctcggaactcgggcatcatggcctcaggtcctgatccggttccccatgcagag

SEQ ID NO: 223294 - DNA, 88 bp, Homo sapiens
ggagggggaccaccgtggagagcgcggtcccagcccggccactgcggatccctgaaaccaagcactgccgccctgcactgtagcagat

SEQ ID NO: 223295 - DNA, 100 bp, Homo sapiens
ctgtgaaacgtacatctgattttaaaaacttcggatgagaaagaaagtaaaagatgtcattgtgagaaagatcagtctaaagaaaaggagaagaaagtga

SEQ ID NO: 223296 - DNA, 73 bp, Homo sapiens
aaaataataattacatctgcaaagaccttatttccagggcattcttggctcaggttttgcattaaaagtacaa

SEQ ID NO: 223297 - DNA, 100 bp, Homo sapiens
tggcacggagccacgggttgctgcccaagtgcatcatgcaggccacggacatcatgcggaagcagtgtaccaagatctccaaggggagaggctccctacc

SEQ ID NO: 223298 - DNA, 100 bp, Homo sapiens
gttcattccatctctcttcctttctcatgttttggctttggggctaggtgagaaagatcagtctaaagaaaaggagaagaaagtgaaaaaaacaattcct

SEQ ID NO: 223299 - DNA, 100 bp, Homo sapiens
gccgcggccgccgcagccatgaccgtggagttcgaggagtgcgtcaaggactccccgcgcttcaggtgctgtggctgtagctgacctctttggaccggga

SEQ ID NO: 223300 - DNA, 50 bp, Homo sapiens
gagcgaagccaagccgggcggcagttggtctcttcccatggcgatgtcca

SEQ ID NO: 223301 - DNA, 100 bp, Homo sapiens
tccgggcccgcccccggcctatgcccccactaacggggacttcacctttgtctcctcagcagacgcggaagtagccggatcgagctgggagatgtgacac

SEQ ID NO: 223302 - DNA, 100 bp, Homo sapiens
gctgccgcctgctccccggaaaagggcactcgtctccgtgggtgtggcggagcgcgcggtgcatgtttccctgaaacctgggctcttgaagacgcatcac

SEQ ID NO: 223303 - DNA, 80 bp, Homo sapiens
ccgagcggctccctaacaggcccgcctgtctgctcgtggccagcggcgccgccgaagtaagactttgaccccgacgcagg

SEQ ID NO: 223304 - DNA, 100 bp, Homo sapiens
gggctcggctgcagacttggccaaatggacgggactattaaggaatgtatcctgtcaggtataatgtcagtgaatggcaagaaagttcttcatatggatc

SEQ ID NO: 223305 - DNA, 100 bp, Homo sapiens
gtacagtcagaaacagagtgggctctgatcagtgcctgttgcgtctaaacgttgtccctcctgtggaggaagatgcagagtcagaagatgaagaggagga

SEQ ID NO: 223306 - DNA, 100 bp, Homo sapiens
gccgtgacaactttcgtttccctctgagggaattgggaggtcggcggccccaaaagtgtccggctttgctggcccagcaagcctgataagcatgaagctc

SEQ ID NO: 223307 - DNA, 50 bp, Homo sapiens
cattaacaccctggagactcggggaggaggtacaggagaactgtgtgcgg

SEQ ID NO: 223308 - DNA, 83 bp, Homo sapiens
atccagaagctgactgcacagatccagtcttgttactacagctataattcaaagaggaactttaagaaaaggctctgttctgg

SEQ ID NO: 223309 - DNA, 98 bp, Homo sapiens
ggccagaggtccatctcgctgagatacgaagggagggtgtaccattacaggatcaacactgcttctgatggcaagcacctttggggagttgaagacgg

SEQ ID NO: 223310 - DNA, 82 bp, Homo sapiens
atctgggcttggcttccggctccccccatctggctggaacacacatcagtcacctatgttagatactaaagaaggcttcccc

SEQ ID NO: 223311 - DNA, 98 bp, Homo sapiens
aagactcgatccgcctgcctgcgcacctgcttggaattaacgacctctggaaagatgccttttatgttaccaggacaacagggccaagctccgaaggc

SEQ ID NO: 223312 - DNA, 75 bp, Homo sapiens
agatgatgtttgagaaaggtgaaccaactcaaactaaggaaatgaaaccaatttctacaacataggaatgatttc

SEQ ID NO: 223313 - DNA, 75 bp, Homo sapiens
caacatgctggtgtacagaaaggtatggcatttcaaatatagatacaaccattgaaggaacgtcagatgacctga

SEQ ID NO: 223314 - DNA, 75 bp, Homo sapiens
tccagaatgtcatgacctacctcaccagcatccccagggttattttggagctgttggagcactccttgagctgtt

SEQ ID NO: 223315 - DNA, 83 bp, Homo sapiens
gccgaggaggttgggatcttcttcactgcctctggcatggatgagatgatgattattccccaccttctaagagacaaagacca

SEQ ID NO: 223316 - DNA, 82 bp, Homo sapiens
gccgagcgaggcagctctgagccgcgcgtatttaggtcagttaacgtccataccaggatacctgaatccctccagtaggact

SEQ ID NO: 223317 - DNA, 90 bp, Homo sapiens
cagtaatctagaagaagagatgaggaagatccgagaaatcgtgctcagttacagttatattgccatggaaatctaccactgtcgaagaca

SEQ ID NO: 223318 - DNA, 98 bp, Homo sapiens
gaagatggaccagcaataaggaatgggaggatgagggtttttcgttggaatatacgttgcacatttatggcgattctgagtgtgagggcagacttctg

SEQ ID NO: 223319 - DNA, 52 bp, Homo sapiens
gacggggtttcaccatgttagtcaggatggtcttgatctcctgacctcgtga

SEQ ID NO: 223320 - DNA, 116 bp, Homo sapiens
ttcataacaataattttgaaaatgctttgtgcagaaaggaatcaaaagaatatttagaatgcaggatggagagggaaggcagcctctggagtgttctggtggctggggattggatg

SEQ ID NO: 223321 - DNA, 100 bp, Homo sapiens
ggggaaatctggcacaacggctgggagaggaaacttgatgcttctgggccaccatttgccagggcctcgctcgagaacatgacctttgacctgccatcag

SEQ ID NO: 223322 - DNA, 73 bp, Homo sapiens
ccaggtgcactgctataacagcaacttcccaaaaggcggaccgagacagtgcagaagctgtgcccaggggggc

SEQ ID NO: 223323 - DNA, 100 bp, Homo sapiens
cctggcaagattcttctgaattgtgctgccttggccaaaagagaccttcacggcatggtgcaactcccacctgcggaaggcaggcacacagatcgagaac

SEQ ID NO: 223324 - DNA, 50 bp, Homo sapiens
cggcgaccacagccaaagcgggcggcatcattcagaagatagtggacagt

SEQ ID NO: 223325 - DNA, 75 bp, Homo sapiens
cagcggcaggagagtccggccgcgacaggacgtacagtacgggtggctggcaagatggccgaataggaagagctc

SEQ ID NO: 223326 - DNA, 75 bp, Homo sapiens
aatctaagaaggatttcagcaaatttggagcagggaactgtggctgcaccatctgtcttcatcttcccgccatct

SEQ ID NO: 223327 - DNA, 74 bp, Homo sapiens
ctttgtctttcacaggctgaaaataaaacagatattacctaccatttacaaaatttgagttctgtgaacctgca

SEQ ID NO: 223328 - DNA, 75 bp, Homo sapiens
gagctgtacctgggcctgctctaccccacggaggactacaagtgagtgagatcattggccgagacctgagtggct

SEQ ID NO: 223329 - DNA, 76 bp, Homo sapiens
gtacactctttgtaaggaggatttagagagtatggacaaagaggccaatttaacctttgacccagctgctctactg

SEQ ID NO: 223330 - DNA, 88 bp, Homo sapiens
tacgacgcgctggtgcacttcgcgctgattctgattttagatgaagccacagctgccatggacacagagacagacttattgattcaag

SEQ ID NO: 223331 - DNA, 75 bp, Homo sapiens
caagaaacagttctctcaatacataaagaacagcgtaactccagacatgttctcaaaagtctatggtcctgtgtt

SEQ ID NO: 223332 - DNA, 50 bp, Homo sapiens
tttgagaaaacccacctagagcatcatgccggtggtggtgtgcacattga

SEQ ID NO: 223333 - DNA, 74 bp, Homo sapiens
agattcgcagtggtcgcttcttctccttgttctactcctttcaataaagaagagttatcagccattttaaagtt

SEQ ID NO: 223334 - DNA, 95 bp, Homo sapiens
actacaggaacctgctttctctcgatgaggataacatccctccagaagatggcccaagtctgttttggtggtctgagaggaaaaaagatgagctt

SEQ ID NO: 223335 - DNA, 83 bp, Homo sapiens
caatttcatagccatttattaccatgcttcaagagccattccttttggaacaatggggttgcagatggtgtaggaggctggag

SEQ ID NO: 223336 - DNA, 75 bp, Homo sapiens
tttacctgcttcccaatcccactgatgaggatcagcccatgatgtcctggagaacatgatggagccaccacagcg

SEQ ID NO: 223337 - DNA, 100 bp, Homo sapiens
tgcacttcgcattttggcattgacatttaattttagggtcctttatatagaagggagagtaggtcggatcatgctaaaaggagataatattactctgcta

SEQ ID NO: 223338 - DNA, 75 bp, Homo sapiens
taagatggatgatccaacagtaaattggagcaatgagagatattttatgacctggtcagacagataaataggaaa

SEQ ID NO: 223339 - DNA, 107 bp, Homo sapiens
cggcgctctcctggctcccttctgccccagctccgtctcggcggcggcgggtgcaacacgcaggactacatctggcacaaggggatgcgctgcgagtccatcatcac

SEQ ID NO: 223340 - DNA, 50 bp, Homo sapiens
tttaaccttgttcaccaggcttatgaaggagacagtcttgctctgttgcc

SEQ ID NO: 223341 - DNA, 100 bp, Homo sapiens
ggcggagctgacggtggaggttcgcggctctaacggggctttctacaaggtatgtaggaaaccttcccagaatatttgactactcgcctttagatccaac

SEQ ID NO: 223342 - DNA, 100 bp, Homo sapiens
agggtcccggacggcagccacagcgtccgactcgactcggagggtttctgtgagagacaaattgcttgttaaagtgtggaaaagccactggcagtgattc

SEQ ID NO: 223343 - DNA, 51 bp, Homo sapiens
ggagaattatgggagcgcatttccccagggaaaaagtattgggggacgtgg

SEQ ID NO: 223344 - DNA, 75 bp, Homo sapiens
ttttacctacgttggcggccccagaagggttacacatcattttggaatgactgtatatcatctggattacgtggc

SEQ ID NO: 223345 - DNA, 75 bp, Homo sapiens
ctttgttcttaagctacctccttatgacatacctggcggtctatgcttgcttggtgcttatgctgacagtgatga

SEQ ID NO: 223346 - DNA, 100 bp, Homo sapiens
cggagtcctgttccaccttcagagcgtcacggcgtacgccctcatggggaaaatctccccggtgactttcagcatcctgaggttagcattacacttctcc

SEQ ID NO: 223347 - DNA, 97 bp, Homo sapiens
tcaccctggtcaacaagaagaacgctctcatccggaggcaggaccagctgcagctgctgcctcaggcccaggcccaaggccaagtgagagagcccag

SEQ ID NO: 223348 - DNA, 98 bp, Homo sapiens
gtttgctctgctcttccaacaccagtggaagatgatcacatcccagttgtatcacggactgattcaccgagcccaaccgtactcaactcacatatttc

SEQ ID NO: 223349 - DNA, 51 bp, Homo sapiens
ctgaatgcaaaggcctgtgtgcacaagaacctaaccctcctattgatgaag

SEQ ID NO: 223350 - DNA, 75 bp, Homo sapiens
ctagaagtctactaatggacagttagtcacccacctacatgttgagccgggaagatttccagaggattccagaac

SEQ ID NO: 223351 - DNA, 75 bp, Homo sapiens
ccgacaaccttcccagaaagtccaagctcgtgggtttctatgttgcactgagactggtggcctgtgcacagagtg

SEQ ID NO: 223352 - DNA, 82 bp, Homo sapiens
taccatcttcaccagtcctgtcactccagaggagctactgtatacagacacatgttcaaagagcataattaactttttaaaa

SEQ ID NO: 223353 - DNA, 51 bp, Homo sapiens
gcgctggcggcctgcgcagccacctcaagcccggtggttctttattcatta

SEQ ID NO: 223354 - DNA, 100 bp, Homo sapiens
aacttcacaatcaagaaatgcagaaacgtaaagaaatgcaattgagatgaaatcagacatcactgaaggagttgatattccaaagaaacctagattggag

SEQ ID NO: 223355 - DNA, 90 bp, Homo sapiens
gggccagggccgcactccggagactcgcggttgctacgcgcaccatggctggaggatggatagaatgacagaagatgctcttcgcttgaa

SEQ ID NO: 223356 - DNA, 71 bp, Homo sapiens
gggagtggttcgctacctttctgtttgtgcagctgctgccctggcctctcgccaccctgacatcaacaacc

SEQ ID NO: 223357 - DNA, 96 bp, Homo sapiens
ggagtactcggtgaaatcctgtcctgaagactgtaaggaaaatggttctcctgaagaacatgcaatctatgtttgggatcatttcatagctcaggc

SEQ ID NO: 223358 - DNA, 75 bp, Homo sapiens
aaacatttttcagggacgtagccatccagagcggacaaggcaaaatctcagcaagttcggacctctagtacaata

SEQ ID NO: 223359 - DNA, 100 bp, Homo sapiens
cgccgccgccgccgcggtttgtcgccagaaggaagatggcggatctggaggagcagttgtctgatgaagagaaggttgaagaagcctcagcggaggcgat

SEQ ID NO: 223360 - DNA, 98 bp, Homo sapiens
ccagaggcaggtggtgctgaccctgtaacccaaaggaggaaacagctggctaagctcatcattgttactggtaagaatgattgatgttggctgatatt

SEQ ID NO: 223361 - DNA, 82 bp, Homo sapiens
cggaaatgtccggcaagatcgagaaagcaggtatgccattttgaagactgagacgttggagttttatcctagaggataaagg

SEQ ID NO: 223362 - DNA, 117 bp, Homo sapiens
tattaattcttccactgatatctcaaaaggtgatctggacaaaggaacaggtatctcagtgcacgatctgattttctggagagatgtgaagaagactgggtttgtctttggcaccac

SEQ ID NO: 223363 - DNA, 100 bp, Homo sapiens
tctgcgggtctattatgtgcaagaagtgtatggagctcatcagccttcccttggcaataagactttgaccccgacgcaggcttcagtgattgccgcggat

SEQ ID NO: 223364 - DNA, 100 bp, Homo sapiens
agaccctggtgaaggaggtcgtacaggctggagtgcactgttgtgatcttggctcactgcgacctctgcctcctggttcaagcgatcttcccacctcagc

SEQ ID NO: 223365 - DNA, 96 bp, Homo sapiens
gtcagccatgtgactgtagtccacatggagctctcagcataccgtgcaacagaacaggtgggattgttcctccagcagctcaacagcttcacagag

SEQ ID NO: 223366 - DNA, 89 bp, Homo sapiens
ggaaaatagaacctacgctgaaattttgggggcaggttctcttgctagtttataggcaagcaataaacagcaagatgtttgaggtggat

SEQ ID NO: 223367 - DNA, 99 bp, Homo sapiens
gtaaagtggaattgcatgggaaaatcatggaagttgattactcagtctctaaaaagctaaggtaaagtgaatgccgaagacagaagatttggatgatac

SEQ ID NO: 223368 - DNA, 75 bp, Homo sapiens
aaagcacagctttgacgtggctctccaaagatgaggttatgggtgatggtgaaagtgcacatgattctccccgtg

SEQ ID NO: 223369 - DNA, 74 bp, Homo sapiens
agattcgcagtggtcgcttcttctccttgctggtggagctgtctaaggctcaagatatagaagcaggagatggc

SEQ ID NO: 223370 - DNA, 82 bp, Homo sapiens
atttgcaacagctcacgggagcaagaacgagctagagccggtgcaggccacgcagaacaagacagggaagtatgtgccgccg

SEQ ID NO: 223371 - DNA, 96 bp, Homo sapiens
cgttgctgccttcttcgtcaagcattttctgcattagcaaatatcgacctggctttagaacaaggagatgcactggccttgttcagggctctgcag

SEQ ID NO: 223372 - DNA, 100 bp, Homo sapiens
ctgacagcgcgcacttcacccgcagttggtgtccctggccagtgtccttccacctgtccacaagcatggggaacatcttcgccaacctcttcaagggcct

SEQ ID NO: 223373 - DNA, 100 bp, Homo sapiens
gaagaatttctctttagttctttgcaagaagagtgcagagctgaacaaggaggtgtctaccaacactgccatgattcagaccagcaagacagagatcacg

SEQ ID NO: 223374 - DNA, 51 bp, Homo sapiens
cgcttgaaccccggaggtggaggctacaactgaggctgatgtgaatccaaa

SEQ ID NO: 223375 - DNA, 83 bp, Homo sapiens
cagtttctcacgacgggccgagcctgccactactgtttcagactccaagccagatttgtcactccagctgatcttctttgatg

SEQ ID NO: 223376 - DNA, 97 bp, Homo sapiens
tcaaatgataaactgcgaggacagagccactggtataaatcaaagccattctgtgaaaaactgctttcctgggtgaaaagcagtggctgtgccagag

SEQ ID NO: 223377 - DNA, 99 bp, Homo sapiens
accctgccagcccccacatcgtgttttccaagcagtgaagcacttgccgtgttgaactgaatgcactactggagaatgttctgggtccaagatgctctt

SEQ ID NO: 223378 - DNA, 98 bp, Homo sapiens
caagaccagcgcgagggccctgggcaaggcccgacaggaatttttggaatttcgtaaggcaagaagtgacatgcttctctccaggaagaatcagctcc

SEQ ID NO: 223379 - DNA, 90 bp, Homo sapiens
ctgctgatggaggcggtggccgtgctcgtcgggcccccttcgggagaagcagcagtccgcggcgtgcggcaggcccaggcagaagacgcg

SEQ ID NO: 223380 - DNA, 87 bp, Homo sapiens
agctggaactatagtcacacgccaccacacccggctgaggtgaacctgaacaccatcaagcgctgcctcctcatcgactacaacccc

SEQ ID NO: 223381 - DNA, 82 bp, Homo sapiens
gcagccttgggcctcgcgccggctatggccgtgccctggggctgagccctcagtaaaatgtttattggaggcttgagctggg

SEQ ID NO: 223382 - DNA, 75 bp, Homo sapiens
cagtctataataaagagatgttgatagaggccttgggggtcctggaaccccggggatcacctgtgccctggcacg

SEQ ID NO: 223383 - DNA, 51 bp, Homo sapiens
aagaaaggcagcgaggtggagagcgctgtatgcaggagctattcttgaagt

SEQ ID NO: 223384 - DNA, 51 bp, Homo sapiens
agaaaggagagacaattatgttcctgaggaaggccgggacatggcgaaccg

SEQ ID NO: 223385 - DNA, 75 bp, Homo sapiens
accaagtcctcgctggactgctcagggtgccagacctcatcgtgtgatccctcacatccacaaatctctgattgg

SEQ ID NO: 223386 - DNA, 50 bp, Homo sapiens
ctggataaactctctcctcaagggaaggaccatcgagacctgttcttgaa

SEQ ID NO: 223387 - DNA, 100 bp, Homo sapiens
gctgcaaaacgggcggcccgcgcggaggctcgcgagatccgcatgaaggagctggagcggcagcagaaggaggtggtccccatgcttcccaggctgctgt

SEQ ID NO: 223388 - DNA, 100 bp, Homo sapiens
ttggcgtccctccgacacgccaagtggttccagatgtgtcgtggaggccgaatgtttgcaccaaccaaaacctggcgccgttggcatcgtagagtgaaca

SEQ ID NO: 223389 - DNA, 75 bp, Homo sapiens
cgcaaacccaaagatccccgttcctggagattctgattgagcatcatcggctggttcgtgcgaagcttcaagtac

SEQ ID NO: 223390 - DNA, 83 bp, Homo sapiens
ccggacccaggccctggatgggactgtctatgatgtcatgtttgtcagcacagatggtcagtaggacagaaggtaacattgat

SEQ ID NO: 223391 - DNA, 75 bp, Homo sapiens
acttggcagcaagatacctgtgcatcccaacgatcatgttaataaaagccaggttcttctttgcggtccagttgg

SEQ ID NO: 223392 - DNA, 75 bp, Homo sapiens
gtcaggccagtgaaattctgggagaaaaactacaaggccgttgctccagggagaactgcaaatatcttcatccac

SEQ ID NO: 223393 - DNA, 97 bp, Homo sapiens
gaaaggagcacggcctgaagccggtggtgggcgaagtgtacgatcaaggcatcaagcagatcctgccacaccagatgaccacggcagggcccgtgct

SEQ ID NO: 223394 - DNA, 75 bp, Homo sapiens
gcctgagtctgttcaaccatataccagaatccgtagaagctagccctgtggtagttgagaaatccaacagttatc

SEQ ID NO: 223395 - DNA, 100 bp, Homo sapiens
ccggtggttgctgttgcttggcctggtgggcccagtcctcggtgcggcgcggccagagccaatgaagagattgctcaggttcgaacaaaagcaaaggctg

SEQ ID NO: 223396 - DNA, 100 bp, Homo sapiens
gtctccagccttggtctgagtggactgtcctgcaggtgcttgaggaatccaaagccctcgtgcgctgcaacatgaagatggagctggagcaggccaacga

SEQ ID NO: 223397 - DNA, 50 bp, Homo sapiens
gcacacctgcatagcaggcatttttaaggagtccaatgtgctgattgctg

SEQ ID NO: 223398 - DNA, 88 bp, Homo sapiens
gcaactggtctattatatcatttaaaccacatggctatctaaagaggaaggtgggagtcaatcattttgacaagtctcctgaaaggaa

SEQ ID NO: 223399 - DNA, 73 bp, Homo sapiens
agatgtgcaacaaagtgcgatggttgtctgcattcaaaagagcattctattaaagctaccttaatttggcgct

SEQ ID NO: 223400 - DNA, 89 bp, Homo sapiens
ggccaacagccagggacctgtatggctttcatctgagtggcacagtaactgagctggccactgcctctgaaccagcagtgacttataaa

SEQ ID NO: 223401 - DNA, 102 bp, Homo sapiens
tcaagatcctcaagaagaagaagttgcgaaggatccccaacggggaggccaacgtgaagaacgtccagcctgcatgccgtgcggactgcacccaccagcaag

SEQ ID NO: 223402 - DNA, 51 bp, Homo sapiens
aggccttggaggacaagagtggaaccatcactgttgctggaggcacctgac

SEQ ID NO: 223403 - DNA, 76 bp, Homo sapiens
cttaaatgaagccactgattagcaatttaaagatcctctccaagtgagtgttgcagagagctgctggacacagtgg

SEQ ID NO: 223404 - DNA, 101 bp, Homo sapiens
ctaagaaaccctggcaactgactgcttgctttcaccaggaatagggacctttttctgaatttcctgccctcaggtaaaaatgtctccatcgtatcatcagt

SEQ ID NO: 223405 - DNA, 75 bp, Homo sapiens
ctttggattgaggctgctgtgcacaggaatatggaagcctccccagctttctgaggatgatatctggctaaaaag

SEQ ID NO: 223406 - DNA, 89 bp, Homo sapiens
cgaggaagaagaggacgacgacgacgaggaagaggaggtttctgagccaagagtcgaagctaaaccagaagttcaatctcagccacctc

SEQ ID NO: 223407 - DNA, 100 bp, Homo sapiens
ctgagtcggagctcggcaggaagtgggaccggtgtctggcggatgcggtcgtgaagataggtccagtggtttacgtcttggatcttgcagatagactgat

SEQ ID NO: 223408 - DNA, 89 bp, Homo sapiens
gcggccgggggctcggccgggccgtcccggcctgcgcagcctgaggcctccgaccagggagaccttccatcctcctccacctgttccac

SEQ ID NO: 223409 - DNA, 77 bp, Homo sapiens
cctggctccacgccctgctgggtcctacctgtcagagccccaaggtaagaattgtgacaaaggccagtcttttttca

SEQ ID NO: 223410 - DNA, 98 bp, Homo sapiens
tcccaacacagaggagatcttcaatatgttaaccaaagaaacaccagagaccttctacattggatgacgacagatatgagcaggcgagtgacgtccgg

SEQ ID NO: 223411 - DNA, 117 bp, Homo sapiens
atgtctgacagccctgtgtgacaccaagataagtaacgaggagccattggatgaaagctcagtgaagaaaatgatcctcacatttgaaaagagatcatataaaaaccaagaattgcg

SEQ ID NO: 223412 - DNA, 82 bp, Homo sapiens
aaaattcactcactttgcaatggaagtttcaccagtgatcattaaagaatgggcagcttacaaaggaaagtctcctcaaacc

SEQ ID NO: 223413 - DNA, 100 bp, Homo sapiens
agctgatgccctcctgtatagagccaccatgattcttacagttggtggtaaggcctttggaatgtttgaaggttggccttgccatcaaaccaggaacctc

SEQ ID NO: 223414 - DNA, 142 bp, Homo sapiens
aagcaaacagcctggcttcatctggtcctcataatcttacttatcctctaggtcccaggaatgaagggcccagcgtgtgaggcggccgataccagggtcagatcagaccacaacgatgagtgggggggaaggagagcccggg

SEQ ID NO: 223415 - DNA, 80 bp, Homo sapiens
cagtctcatcaggaaatatgtgtctcagtattatcctaagcttagagtggacatcagtcatgttggaagcctctgcagag

SEQ ID NO: 223416 - DNA, 76 bp, Homo sapiens
tggttccatgccgcagtaggacagcaggcccaagtctgcacatcccagatttacgggcaatgtcaagctcaaaggc

SEQ ID NO: 223417 - DNA, 80 bp, Homo sapiens
catctttacgattccaggacaagcttttgtccccaaaccagagattacaggagcttattaatcataagaaggctgaggac

SEQ ID NO: 223418 - DNA, 83 bp, Homo sapiens
aacgacgcggacatggtcatgagctttgtgaacctgggtctattctggataagcaggttttgtgaagacatttattctttctt

SEQ ID NO: 223419 - DNA, 74 bp, Homo sapiens
tctccagcgggcctggactgtgggctggtgtgtggaactggaacagcatatgccatatatgagctggctgtggc

SEQ ID NO: 223420 - DNA, 100 bp, Homo sapiens
gaaaaatcgagcagaaagaatgtctttcagcagtctctggtcccagcccaccccatggcccctcccagtcccagcaccaccagcagtaataacaacagta

SEQ ID NO: 223421 - DNA, 82 bp, Homo sapiens
cgccgccgctcaccgcagccccctcctggcgacccgcaagccccaggcatggaagagctgatatgggaacagtacactgtga

SEQ ID NO: 223422 - DNA, 100 bp, Homo sapiens
gccagcttccagggcatcgtggatgcctacggcgtgggccgctaccaggaggtcaaccccgcactgccatctccccacaccctccaggaagttcaggtcg

SEQ ID NO: 223423 - DNA, 98 bp, Homo sapiens
caccgctactggactctcttccctgtagccaccagtgaagactataagctcctggaaaatatgaataaactcaccagcttgaagtatcttgaaatgaa

SEQ ID NO: 223424 - DNA, 101 bp, Homo sapiens
cggaagtgcgcgcggccccgcccccgccggttcgcgtctctctgctgcggcgcggggaccgctgtgctctcgggactttgaacatgtcggggatcgccctc

SEQ ID NO: 223425 - DNA, 75 bp, Homo sapiens
aggacactaaaggtttctccacctggctgaaactcaataagaagcttaatcgaaccctgaagaagatgggacaga

SEQ ID NO: 223426 - DNA, 90 bp, Homo sapiens
ggctatgggcagccaggaggtgctgggccacgcggcccggctggcctcctccggtctcctcctgcagccggatccagagcaatgtagaag

SEQ ID NO: 223427 - DNA, 100 bp, Homo sapiens
gaacaagaaggagggtatctgcttcacggagggcaagagccggagggtctcagaggacagacagtgccagaaccagactaccaggtgtacctgaatgctt

SEQ ID NO: 223428 - DNA, 100 bp, Homo sapiens
gcgtgccctacttcaaggataagggcgacagcaacagctctgccggctggaagcatttgacattgtgcagcaaagaaatggttatggagaagcccagtcc

SEQ ID NO: 223429 - DNA, 97 bp, Homo sapiens
ggattacaggtgcctgccaccacacccaggccaagactaaggggctgcagagcggggtggacattggcgtcaagtactcggagaagcaggagcggaa

SEQ ID NO: 223430 - DNA, 74 bp, Homo sapiens
agagggtgttcgactgctagagccgagcgaagcggactttgaacatgtcggggatcgccctcagcagactcgcc

SEQ ID NO: 223431 - DNA, 98 bp, Homo sapiens
ccctgagcccatggcagctccagcctctgcctcccagaaactcagccccctggctccccgtgtgctccatggttgtccagtacgcctcccagatcccc

SEQ ID NO: 223432 - DNA, 82 bp, Homo sapiens
cggacccggcaggtgactttgggcgtgatggtgggcatgggtcagaaggattcctatgtgggcgacgaggcccagagcaaga

SEQ ID NO: 223433 - DNA, 97 bp, Homo sapiens
aatgatgatagtgaagagcatgatgatggaggatacagaatcacagatgatggcgctgattgtttgcctggagtacaagaagatcatcctattatgt

SEQ ID NO: 223434 - DNA, 109 bp, Homo sapiens
gcgggaggacggagagaaggcggcgcgggaggtgaagttgctgctgttgggctgtctgtccccagaccccagagcacgtccggcaccaccatgactgggctgttgaaga

SEQ ID NO: 223435 - DNA, 75 bp, Homo sapiens
acggaggagcttgtaccaccggaactggcccatctcgggcagaagctggcagtggtgggcctggcttcaccttca

SEQ ID NO: 223436 - DNA, 100 bp, Homo sapiens
ggaggaccggtagctcccagcaaagcggcccagcgggtggacctcccccacacggcgatccaggaagcctccaacaagaagaaattcgaggatgccttga

SEQ ID NO: 223437 - DNA, 75 bp, Homo sapiens
attccttggggcaaaatgtggacaaggaatgtccctcttccagtggaaagcccaaccatgcagacatcttgctca

SEQ ID NO: 223438 - DNA, 111 bp, Homo sapiens
cggagaaacaggcgccgcgggctccgcgcccggccggacccgggcccgaggtcatcatcagatttgaaatatttaaagtggatacaaaactatttcagcaatgcagacaat

SEQ ID NO: 223439 - DNA, 97 bp, Homo sapiens
ctcctacagcaagctgctgtgcggcctgctggccgagcgcctgcgcatcagcccggacagggagaagaaatgggtgaccgttggtgacacatcccta

SEQ ID NO: 223440 - DNA, 101 bp, Homo sapiens
gagcatgcagttatatgaggtgcagcctgaaaaggtgatggcaaagcagatggagttcctttgcaaccaagctggctatgagagactgcagcatgccgaga

SEQ ID NO: 223441 - DNA, 98 bp, Homo sapiens
cgcttgccgcagccgcctcagaacccgaccaacatccagaacttccagctgcccccagaaatgagccgtcagactgctacagcattacctaccggtac

SEQ ID NO: 223442 - DNA, 75 bp, Homo sapiens
gcctgcctctccaggatgtctacaaaattggtggtatacaaaactaggatatgctggaaatacagaaccacagtt

SEQ ID NO: 223443 - DNA, 50 bp, Homo sapiens
cgccgccaccatgcccaagagaaaggccaccagcttgggctccccacgga

SEQ ID NO: 223444 - DNA, 87 bp, Homo sapiens
tgggtgaactttcacggacaacctcagaggacaacgaagtgttcggcagaagaaatccttagacaagagctggagaaaaaagaaacg

SEQ ID NO: 223445 - DNA, 80 bp, Homo sapiens
agccagcgcagcgacggggcgctgcctggcccaggcgcacacggaagtgggagtaccctgacttctaccggaagctctac

SEQ ID NO: 223446 - DNA, 82 bp, Homo sapiens
gccccgaacggccggcgccacacggtgaaggtgacgccgagcaccgtgctgcttcaggtcaaaatgcagatcttcgtgaaaa

SEQ ID NO: 223447 - DNA, 83 bp, Homo sapiens
ggcggcggcggcggcggcgctgctcccgggggcgacgggctgaaggtgatgtggccgccctcaaccgacgcatccagctcgtt

SEQ ID NO: 223448 - DNA, 50 bp, Homo sapiens
gccggcgccctggggccccggagagagcaaacatgaacgttggagttgcc

SEQ ID NO: 223449 - DNA, 101 bp, Homo sapiens
agtagtagcagcagctgccttcttggacgcctttcagaaagtggctgacatggccaccaacacacgtgtgaagtacatgcgagaagccacgccctatgtga

SEQ ID NO: 223450 - DNA, 50 bp, Homo sapiens
tgctttcagatcctggattgctgcagatgttcctcctgctgatcaagaga

SEQ ID NO: 223451 - DNA, 99 bp, Homo sapiens
gcatgatgcagtcactaagccagaatcctgaccttgctgcacaggttcaaaccttgtactactcagctgatcacaagctgcttgatgggaacctactag

SEQ ID NO: 223452 - DNA, 75 bp, Homo sapiens
ctttattttacatcattcaacatcttacctttccaaagtgaaactgatgagatttgatgatccactgttggggcc

SEQ ID NO: 223453 - DNA, 118 bp, Homo sapiens
atggattcatctcactgactgaaacctgagttttgattcaccaggtaaagtgttgagagaggagaaccagtgcattgctcctgtggtttccagccgcgtgagtccagggacaagacca

SEQ ID NO: 223454 - DNA, 75 bp, Homo sapiens
cagtgtgtcttggcggatgagttgttgcaggaagaggcagaggaagaggaagaggaagaggacgtggccgtggca

SEQ ID NO: 223455 - DNA, 100 bp, Homo sapiens
ctaaatgtggtaagagcgctcagaatccttgcagcctttcctggaagcctgtagcaactctttattttttcgtacttgctctgtgctgcttcgagcccct

SEQ ID NO: 223456 - DNA, 100 bp, Homo sapiens
cctcctgctgctcactgcccttcagctctgtgaccagatgtgcactcccagcaacacccctgccacgccgcccaacttccccgatgcgctggccatgttc

SEQ ID NO: 223457 - DNA, 74 bp, Homo sapiens
gaagaccagcaaggaggaagagagttctggcctcaagaggatctaagcctttcccacgttatggttataaaccc

SEQ ID NO: 223458 - DNA, 50 bp, Homo sapiens
accgaagcgttcgtatctggaaggtgactgcaaggagcctgacaagtgct

SEQ ID NO: 223459 - DNA, 75 bp, Homo sapiens
ccttttgctcatccagatcttaatgatgccacaacccttacgcaaaggaagcccgaaagatgagatcaatacagg

SEQ ID NO: 223460 - DNA, 88 bp, Homo sapiens
ccgcggctggggttccctcctccgtttctgtatccccacgaggtttattgttggccaaaaccaggctttgattgaaccaggatgaatg

SEQ ID NO: 223461 - DNA, 75 bp, Homo sapiens
accaaagcccgggccggagaggggcaggttcgactagtgatagtggatggtattgcttttccatttcgtcatgac

SEQ ID NO: 223462 - DNA, 74 bp, Homo sapiens
aaatgcgctcgggctggaccagcagcgggagatacagatgacccaccaagaattactcagaaccctgtgatcaa

SEQ ID NO: 223463 - DNA, 73 bp, Homo sapiens
tcaaatccaagggcggtgttgtgggcatcaaggtggggaacgccaagcacaacgtgcatgtcatgaacatctc

SEQ ID NO: 223464 - DNA, 100 bp, Homo sapiens
tgtttttctaagccctttttgtgccaggtgtcccgttaacgtctctgttagttcagagaaacaacgagttttcgtcgttcgaatcaggttgactggtcct

SEQ ID NO: 223465 - DNA, 87 bp, Homo sapiens
acgggtgaatgctgctaaaaacaagactggggctgctcccatcattgatgtggtgcgatcggcgaaggaggtggaggagaccatcga

SEQ ID NO: 223466 - DNA, 87 bp, Homo sapiens
gccactgtggccttctgcgacgcgcagtccacgcaggagatccatgagaagcatcaagatggtgctcatgtggaccagtggtgacgc

SEQ ID NO: 223467 - DNA, 90 bp, Homo sapiens
ggagaacatgaagccagtcctgacaatgggcagaacgaattcagtgatatcattaagtccagatctggtttcctgaaatgcagtttttcc

SEQ ID NO: 223468 - DNA, 74 bp, Homo sapiens
cctgctcggggctctgttcccagtctctcagcaaacctgctgggcgacagcggactcagatgccttctggaatg

SEQ ID NO: 223469 - DNA, 100 bp, Homo sapiens
cgcctgatggagcgttggctgtgaggagacagagcatcccagatttacactgactgggccaaccactacctagcaaaatcaggccacaagcggctgatca

SEQ ID NO: 223470 - DNA, 75 bp, Homo sapiens
cgggatctcaggtcctcgggggcggcggccacgccaaggacggagcccataggcagcatgtcatccatggaagtg

SEQ ID NO: 223471 - DNA, 89 bp, Homo sapiens
caaatattacattcaaaatggcattcagagttttatgcagatcaagcttcaggagtctccggaagacatgcctgcagggcagacaccac

SEQ ID NO: 223472 - DNA, 90 bp, Homo sapiens
ggcgatgagctaagacgctgtttcagagcgtttgggtcctctgaggccccttgaccaggccaaatcctacatccagtccctgccacagac

SEQ ID NO: 223473 - DNA, 102 bp, Homo sapiens
gccaaccgcaaccattgacgccatgtcgggttattcgagtgaccgagaccgcggccgggaccgagggaaggagtcaagactgagaacaacgatcatattaat

SEQ ID NO: 223474 - DNA, 75 bp, Homo sapiens
aacttctgcgggatcttcaaccacctcgagcggctgctggacgaagttgtattccctgaatgactataaaccacc

SEQ ID NO: 223475 - DNA, 100 bp, Homo sapiens
agaagtacggaggccccaaccaccacctgccccttccagacaactggaaaagtcagaagccaagtacaagaagctggagaagcgatgagaaacttatttc

SEQ ID NO: 223476 - DNA, 82 bp, Homo sapiens
gttcagcgtagagtcgctggagcgggcggagctgtgcgagagcctcctcacttgggtgagcgagtgctgtgctttcatgggc

SEQ ID NO: 223477 - DNA, 50 bp, Homo sapiens
tgggacactcctgaagtcgggaaatggttagcatggcctcattgaaagaa

SEQ ID NO: 223478 - DNA, 82 bp, Homo sapiens
gctacagtctgcggaacggagcagtatttcaatgtggagatattatcactacctatactcccattacctgccagccagcctg

SEQ ID NO: 223479 - DNA, 76 bp, Homo sapiens
agcctgcggagcctgtggggcagaaattcccttgtttcatgtcttaaatgcacggattacatttggaaatgttaat

SEQ ID NO: 223480 - DNA, 100 bp, Homo sapiens
ggtctactctgatgtcaatcttgagggctagatgccattctaaatatggtgaatattgctgctaatattctgggagcaaaaactgaagacctgacagaag

SEQ ID NO: 223481 - DNA, 100 bp, Homo sapiens
ttgtggataagacagtcccacagtccaggcatgtcggggaaaccagcacgatgtgccagtcattcctttggatgtagtagataatcagacagagaagttg

SEQ ID NO: 223482 - DNA, 82 bp, Homo sapiens
catcaacgtgtatccacacaagcaggcctgagacctgggaggaagctggagaaaagatgccctctgaatctttgtgtttggc

SEQ ID NO: 223483 - DNA, 100 bp, Homo sapiens
ggagagtctgccggcggagaatataaggcaatgcatgaaccattgcaaacttggcaagatgcaccatacatttttattgtacatattggcatttcatcct

SEQ ID NO: 223484 - DNA, 75 bp, Homo sapiens
ggaactgtttgtagccctcgtccagacgccccaaacaaacagaagttctccagcagctgattgtaatgaatttgc

SEQ ID NO: 223485 - DNA, 87 bp, Homo sapiens
ggaacctgggcgagcagcggcgggggcccgaggggatggatgagggagatgctgcaatcatgcatcccggggtcgtgtgcatcatgg

SEQ ID NO: 223486 - DNA, 95 bp, Homo sapiens
ctgatttcctgcttctccttttcatgagtgttcctgtggtctctgcacctcctttctatgtattgctgtccttgaatattagcccatttgaaaac

SEQ ID NO: 223487 - DNA, 98 bp, Homo sapiens
cgagcaggaagctgcggctgagtcgagttgtggaaagtaaaaatgtagccctaccaaaaggaactattgtactggcttctccaggctggacaacgcac

SEQ ID NO: 223488 - DNA, 50 bp, Homo sapiens
gacactctccgcttatatcgagatttcctcgtcctgtgactgtggagccc

SEQ ID NO: 223489 - DNA, 75 bp, Homo sapiens
cggacctaactagctccaggttaggccgagctttgcgggaaagcagcggagaatgacatcttcctgggctgggaa

SEQ ID NO: 223490 - DNA, 74 bp, Homo sapiens
cattgacatttaattttagggtcctttatatagaagggagagtagcaggaagaaccggacccggcgaacctgga

SEQ ID NO: 223491 - DNA, 75 bp, Homo sapiens
tcctgtgcgccatgtacaagcgagggctggtgcaggtccgtttattaatggttagtcgaatggctaaaccagagg

SEQ ID NO: 223492 - DNA, 98 bp, Homo sapiens
atggtgcagatattaatgggagcatatatgatgaggtagatggcacaaaccttcagggttttactaatcagcaagcagtagaggtattgcgacataca

SEQ ID NO: 223493 - DNA, 50 bp, Homo sapiens
gagggacaccgcagtatgaggcagagtcctgtgcctcctgattgctgagt

SEQ ID NO: 223494 - DNA, 90 bp, Homo sapiens
gctggacggagaggaaagcggtgcgtgaggcgggcggccagggcacggttataaacaacttgtgaaatgagtgatttggaagatgatgag

SEQ ID NO: 223495 - DNA, 97 bp, Homo sapiens
catcgatctctccatcccttccgaggcccgacttcggatgctttaatctggatcccaatagagttttggatgtcattttagaagtgtttgaatgcag

SEQ ID NO: 223496 - DNA, 98 bp, Homo sapiens
gaggagcggagcggagaatgccaagttccagaagaaggcttcttattgggatgtgtgtttgcaattgcggattatccagagcagatgtctgataagca

SEQ ID NO: 223497 - DNA, 90 bp, Homo sapiens
aggccatgaagagtcctgaccacaatggggaggacaacttcgcccgggacttcatggtaggagatcaaatcattgaaatcaatggggaaa

SEQ ID NO: 223498 - DNA, 50 bp, Homo sapiens
gggaaacaaggcttccagtgccaagggaagcagagactttcaaggaacaa

SEQ ID NO: 223499 - DNA, 110 bp, Homo sapiens
gaaaaatcagattgaaagactgacccgtcctggttcctcttacttcaatttgaacccatttgaggacatcttcaacgctgtgatcaaggagcacccggggctagtgcagc

SEQ ID NO: 223500 - DNA, 80 bp, Homo sapiens
tcagtgagcaaggcatcaacgagtttctcagatttgagttctgtgaacctgcatttgttgttggtaattgcctccagata

SEQ ID NO: 223501 - DNA, 82 bp, Homo sapiens
ggcggtgcctgcaccgagccctgagcactcgagcccgagcgtgcggctgctgccctcagacaatgcagatcttcgtgaagac

SEQ ID NO: 223502 - DNA, 98 bp, Homo sapiens
aaagctgaactgaatgagtttcttactcgggagctggctgaagatggctactctggagttgagttacaacagcggcacctgtgtggatggagacaact

SEQ ID NO: 223503 - DNA, 100 bp, Homo sapiens
gatggtagctagaggggagatagcaagattctggagtctggaaagccttcacttgggaatatattaaaggaatctgtgaacctgaactagaagaaagaga

SEQ ID NO: 223504 - DNA, 90 bp, Homo sapiens
ctgaccaagaactgcaaggctgctgtgctgtgcaagcatctgcagaacatcagaaaagacttcaacagttcttggagttcaaagaatagt

SEQ ID NO: 223505 - DNA, 100 bp, Homo sapiens
gggcgctgagtccctagaggtgttggctgagcgatgactgccaggggcatgaaggggatgtgcttccagggcatttgctggcagggcgtctcgtgatctc

SEQ ID NO: 223506 - DNA, 90 bp, Homo sapiens
agaaaaacgagccatttctccgtcgattaaagagccatctgtggtgccaattgaagcaaaccagtccagctacgggggcccagccagcca

SEQ ID NO: 223507 - DNA, 82 bp, Homo sapiens
ctcggggcgggcgccgcgggacctctccgggccatgggttgacatcatggacatatgtgagtccatcctggagaggaagcgg

SEQ ID NO: 223508 - DNA, 83 bp, Homo sapiens
ccagatgtcactcagttaactcccccatcccacgatttaaatagggtcccaacaagcatcagagtgctgtgacctgtttacag

SEQ ID NO: 223509 - DNA, 100 bp, Homo sapiens
ggctcatcctgtccatcgtgtgcctgatgatcacgcagctggctggcttcagtggaccatccctctccaagatcctggatgtggccagtttggaggtgct

SEQ ID NO: 223510 - DNA, 98 bp, Homo sapiens
gcagctggaagccgtggctgcgctctcttccctctgctgggcgtcctgttcttccagggccttggacaagattcgctatgagagcctgacagaccctt

SEQ ID NO: 223511 - DNA, 76 bp, Homo sapiens
gacatcctacaggaaccacccctccagttaaggaaaggaaacagattcattgtctgtctgaggatgagttaagttc

SEQ ID NO: 223512 - DNA, 140 bp, Homo sapiens
attttggaagagggagtcaccactggacctccaaggaagccacgtgcagacatctacaaccttcgatctcctgacgataacaaatgtggcaattattttggatctatcacctgtcatcataactggcttctgcttgtcat

SEQ ID NO: 223513 - DNA, 100 bp, Homo sapiens
ctctttttctcgcttgtggactccgatatattgcccttcttcccttagaagaactgctgaaccgactctgagaaatttgagaccacaccgctgttccaga

SEQ ID NO: 223514 - DNA, 98 bp, Homo sapiens
ttacaccaagatctgtgctgaccacaggaattggatctactagtgcagcctgagaaatgccagtggcctgacagcagcagacattgcacaaacccagg

SEQ ID NO: 223515 - DNA, 90 bp, Homo sapiens
ccggtccgcccgtcggtctgcagcgcggctgagctccgggaagcagtttgttcgctatataaacatgttgataaacgacacgacgttttt

SEQ ID NO: 223516 - DNA, 84 bp, Homo sapiens
gttagccccgcgcagccgccggcgtcgccgccatggacctagtctctggcgaacatagacgaagtcgtgaacaaaattaggctg

SEQ ID NO: 223517 - DNA, 89 bp, Homo sapiens
atgaaggctacttagaaaaggacggctccttatttcactccactactatactggcaattgctggagaagattttgcaattgttgcttct

SEQ ID NO: 223518 - DNA, 101 bp, Homo sapiens
gcgatgctgaggatcgaggaacgttgtctgatgaggacggggacttggttgccttttccagtgacgaggaattgacaatggccatgtcctacgtgaaggat

SEQ ID NO: 223519 - DNA, 100 bp, Homo sapiens
cattgaagtagactcagactgggtggaggagttggcggtggaagaggaagattcccaggctgaggattcaatttccacaagacggcaccctatgtcgtca

SEQ ID NO: 223520 - DNA, 78 bp, Homo sapiens
ccaggaggccaggggtgtcgccatggatgatgatgacgacatgggagaggatgaagatgaggacgatggtttctttgt

SEQ ID NO: 223521 - DNA, 100 bp, Homo sapiens
tttggaagcaattacttgaggacagttcatatagcatctggacagtcaacacgggcaccatgaagcacttcctgagttgttgacctcctgtactggagag

SEQ ID NO: 223522 - DNA, 75 bp, Homo sapiens
acaaaggcaaaattgtttattcttctctggatctagaccaggcactcttaaaagacccattttacatgggcttgt

SEQ ID NO: 223523 - DNA, 75 bp, Homo sapiens
ctgatggtcatcttttccaactgcctgtggaggaaccgattgtgtccacagatgaggtcatcttcccactcaccg

SEQ ID NO: 223524 - DNA, 82 bp, Homo sapiens
aacaagagacacttcagtaatgcagactggtcgaattgacaaatcttaccctacagtatgtggccacacaggaccagtgctg

SEQ ID NO: 223525 - DNA, 90 bp, Homo sapiens
ggagcggcggccgagttctccagcctgctgcgcaggataaaaggcaaactcttcacctgagagaagtggagatcctgatgtttctcagtg

SEQ ID NO: 223526 - DNA, 101 bp, Homo sapiens
agggtgtacaaatacccctttgaattaattatggctctttctacaagttctgattaaagtcagaaatagacacaatgatgtggttcctacaatggcacaag

SEQ ID NO: 223527 - DNA, 98 bp, Homo sapiens
ctcagctagacagtgacagacaacagtggaacttctggaatgctttgtgtggaaagcttcagtgtgagaatgtacaagagatacctgtatttggaatt

SEQ ID NO: 223528 - DNA, 75 bp, Homo sapiens
gcgtgccctacttcaaggataagggtgacagcaacagctcggcgggctggaagtgacagccccaatgctgttcat

SEQ ID NO: 223529 - DNA, 74 bp, Homo sapiens
ggcatccagggctcgtacttctgctcgcagctgcaagctttcttcctggtggcagatgacatcatggattcatc

SEQ ID NO: 223530 - DNA, 75 bp, Homo sapiens
tgtcaggcggcggccgagggcgtcgcggactctccccgcgatgatgccggggctatcaacagcaggacgcccatg

SEQ ID NO: 223531 - DNA, 100 bp, Homo sapiens
cgagagactcacgggacgcgacgcgccccgcctcccccgtccggtccctctctccacggtaagggggaggaaataatgctggccatacagttgttgtgga

SEQ ID NO: 223532 - DNA, 75 bp, Homo sapiens
catgtccctgcttgtcagggctgagagcgacgaacccagcttagactagaaagtctagaagacacacacataatg

SEQ ID NO: 223533 - DNA, 100 bp, Homo sapiens
ccggccaccagcaattgtccggtaaaattgcggagttgctctctccgggctcagtggatccattgacaaggctggttctggtgaatgctgtctatttcag

SEQ ID NO: 223534 - DNA, 74 bp, Homo sapiens
aatcaggcagttttgtgtccatgtgaacaactgtgcgagcccctatggttaatccaacattaggtgttcatgaa

SEQ ID NO: 223535 - DNA, 100 bp, Homo sapiens
acggaccgcgcccgccgggcacacaagaatggtcactcaagagtgagccatggagctacgtgtggggaacaagtaccgcctgggacggaagatcgggagc

SEQ ID NO: 223536 - DNA, 58 bp, Homo sapiens
cctcactctctccgatactttctcccaagatgaaacagtttcttctactttattggat

SEQ ID NO: 223537 - DNA, 101 bp, Homo sapiens
tcctcgatcgaggacgacttcaactatggcagcagcgtggcctccgccaccgtgcacatccgaatgggtacctagtcgatagtcgctggttcaaacagtgg

SEQ ID NO: 223538 - DNA, 106 bp, Homo sapiens
ccaccccgcgggatacgcctcagcgcggtactccaaagattcaggtttactcacgtcatccagcagagaatggaaagtcaaatttcctgaattgctatgtgtctgg

SEQ ID NO: 223539 - DNA, 75 bp, Homo sapiens
cgggaggagctagggctggagcctctccagcctcccgcgaagatgctgtctttgcaggtgccatgcctacaatgg

SEQ ID NO: 223540 - DNA, 141 bp, Homo sapiens
atttgttgccataatcatagaggcaagtgggggaggagcgttccttgtcctccctctgcacaaggtgtcagttgtacccgaggcgttctcagcagcagcaagtacctgtggtggatttccaggctgaactgaggcaggcat

SEQ ID NO: 223541 - DNA, 83 bp, Homo sapiens
gctgcacgcaagtgttaaacttctggtgaacctgagcaaggtgggcgagtattggtggaacgccatcctggagggagaagagc

SEQ ID NO: 223542 - DNA, 98 bp, Homo sapiens
ttgaacagctatgcatgctgcttttgatgtctgacaacgtggatcgttgttttgaaacgggaacgcccttttgcttgtgactggcagggctgcgacaa

SEQ ID NO: 223543 - DNA, 75 bp, Homo sapiens
agtatttctactggaaaaaccattttcagttaaagcaggactccctggaggaaaagcggaagcggcagcggtctg

SEQ ID NO: 223544 - DNA, 98 bp, Homo sapiens
ctcgtgctgctccacggcgtgtgcatggctggagacagtgaagatcatgacggagaaggaactcctggccgtggcttgtgagcagtttctgggtaaga

SEQ ID NO: 223545 - DNA, 82 bp, Homo sapiens
gttggaacttcgttgcttgcttgcctgtgcgcgcgtgcgcggacatggcctcaaacggtttgttccaagatgaagattcatg

SEQ ID NO: 223546 - DNA, 74 bp, Homo sapiens
gttcatctacccggagaagcaggagccctactcggcaggtccctgtgcgttttattgcgacctgccggtgggaa

SEQ ID NO: 223547 - DNA, 82 bp, Homo sapiens
tggggtcctctggctgttgttcttttcttttccatgatatcattatatggacagtttaggctcattgctatggacagtgcta

SEQ ID NO: 223548 - DNA, 118 bp, Homo sapiens
ccgggaggaaggaacgaggcaaggagctaaagcagcgtgcgttcagccctgggggactttgaacatgtcggggatcgccctcagcagactcgcccaggagaggaaagcatggaggaaa

SEQ ID NO: 223549 - DNA, 98 bp, Homo sapiens
aaaaatgtctctctatccatctctcgaagacttgaagacatcgctattgcggttccgaggcagtgggaagagatgcggcccctggacatcgtcgagct

SEQ ID NO: 223550 - DNA, 80 bp, Homo sapiens
cttcggcagtccacccaccgccgccgcctcccagttcctccgtgtcacaaagcagtacctgccccacgtggcgcgcctct

SEQ ID NO: 223551 - DNA, 96 bp, Homo sapiens
tgaggactttccttacctgtttttccagctcacccactgccagcagaggatggggtcgtccccccagtaatctggaaaacagttacagcaacaggc

SEQ ID NO: 223552 - DNA, 98 bp, Homo sapiens
ggttcttggcaggaatatggaagacagctatcagaggactcctgaaacctggagagctacctgctgtataaaggctggcctgagggcatttgctgaac

SEQ ID NO: 223553 - DNA, 148 bp, Homo sapiens
ggactctcatattacatgggccagcactgcttcatccgggaagtgcttggggatggagtgcctccaaaggttgctgagcttggctgaagaggaaataaaaacagaacaggaggtggtagagggcatggatatctctactcgctccaaa

SEQ ID NO: 223554 - DNA, 89 bp, Homo sapiens
gcagtagaaaaggtggcgtggctggcgattcgtgttcgtgagggccttttctgagttgtctgctggttctcagcttgaagaagattctg

SEQ ID NO: 223555 - DNA, 89 bp, Homo sapiens
agaaaatgggaagatgatcttaaaaaaaatagctcagttaatgaaggatcaacgtatcataaaaggctctcccctggacaagttggtgt

SEQ ID NO: 223556 - DNA, 100 bp, Homo sapiens
aggcgccgggaccctcaggctcagatcagtggccgaggccccagagagacgtctcagagaggctgtgcagctgctggaggactataagcatgggaccctg

SEQ ID NO: 223557 - DNA, 75 bp, Homo sapiens
cgcaggagtcgggcaccatcccaaagaagcggaaatctactttcttcaatgtgttaaccaatagtcaggcttcag

SEQ ID NO: 223558 - DNA, 83 bp, Homo sapiens
gtcctgcttctcctatgacatcctaccaggctgcaaggccagccggtacaggtaatagcctgcagctggtgttttgagaagcc

SEQ ID NO: 223559 - DNA, 75 bp, Homo sapiens
cgaggacgacgtggaggcggagtggcgcccggcgaggtagcgccaggcgagggctgtcacatggtgactgaagaa

SEQ ID NO: 223560 - DNA, 101 bp, Homo sapiens
actgaagacctacatttcccggaaggttaacagcccccttctcagttttcctggtcggatccgcacaagacggcaaagctctgggagtgccaccaacgtcg

SEQ ID NO: 223561 - DNA, 83 bp, Homo sapiens
ggtggcggcgctgctgctcgggctgctcttggagggcaccgcgtccgtgctgcagcgccggtcccccaatgaggagtacgtgg

SEQ ID NO: 223562 - DNA, 100 bp, Homo sapiens
tgcagaagaggagtcctttaggaagatggtcagtaggacagaaggtaacattgatgactcgctcattggtggaaatgcctccgctgaaggccccgagggc

SEQ ID NO: 223563 - DNA, 100 bp, Homo sapiens
ctctggagtcccaactcatgaaatttagagttcaagcaagcaagatacgagagcttttagcagagaaggccccttcacagatgtagtcactacaaatctt

SEQ ID NO: 223564 - DNA, 85 bp, Homo sapiens
tggacggactcactgccctgcaccagccacccacacagaatatgcctatgggtcctggagggatgaatcagagcggccctccccc

SEQ ID NO: 223565 - DNA, 80 bp, Homo sapiens
ctcggaagaattaaagaaggaattagaaaaatatcaagggctgcagcagcaatggaatgcagtagccctctgggcctggg

SEQ ID NO: 223566 - DNA, 100 bp, Homo sapiens
tccctcctcaaactgactttgcagccacggagagttcctggtccagaactttacacagaaaaggtgctcaaaggatatttgtttaatgaatgtggtatgc

SEQ ID NO: 223567 - DNA, 75 bp, Homo sapiens
atcacgggaggaggcagctgcggcggggccgggctggttgatatgtgaagagccaacctgtcgcaatcgaactcg

SEQ ID NO: 223568 - DNA, 100 bp, Homo sapiens
acgagctggctttaatcctgaaagccatgcagcggtaataatttttcaccatgcatcggaaaaaggtggataaccgaatccggattctcattgagaatgg

SEQ ID NO: 223569 - DNA, 138 bp, Homo sapiens
taccctggccaagatccgcaaggccgcccgggaactgctgacgcttgatgagaaggacccacggcgtctgttcgaaggtgtgcctaccgcatgttgccgctgctgtttctgctgggacgtctgactccagttccttct

SEQ ID NO: 223570 - DNA, 100 bp, Homo sapiens
ggagaaaaagagtttccccagtgcctggacttgccatgaggtgttgaagccttgtttcactgagttggagagactggacctaaatggcgcagcatgactt

SEQ ID NO: 223571 - DNA, 83 bp, Homo sapiens
ctttcgctgtgtattctctttggaaaaccgatgtgatgacttgggaccctggaggactgacgctgctggcctgggcgtcccct

SEQ ID NO: 223572 - DNA, 90 bp, Homo sapiens
ctgccgcctgaagtgcgggcgcagctggcggagctggagctggagctctcggaggatataattgaccctgcaatcctgcgcccgggccgc

SEQ ID NO: 223573 - DNA, 75 bp, Homo sapiens
cttcggctgccccaatccccggcagctctctcaggtactaggttttgacaagcttgcatcatgcgtgagtataag

SEQ ID NO: 223574 - DNA, 100 bp, Homo sapiens
tggacagatggacttcaaatgctgtttgtattccagagactaggtgtcagttgtacccgaggcgttctcagcagcagcaagtacctgtggtggatttcca

SEQ ID NO: 223575 - DNA, 100 bp, Homo sapiens
ccgtgaggagctcatgaggatgctggccgaggacgagctccgggatgctgtcctcctggtgttcgccaacaagcaggcatcaccccccagtggactcggg

SEQ ID NO: 223576 - DNA, 88 bp, Homo sapiens
ttaggcagcagcagccgcggagcagtagccgccgtgggagggagccatgaagcattacgaggttcacgcctacatcatcagctccctc

SEQ ID NO: 223577 - DNA, 98 bp, Homo sapiens
ggagagatggccacggtcccagcaccggggaggactggagagcgcgcgctgccaccgccccatgtctcagccaggtccagaggtgtccttctaaagct

SEQ ID NO: 223578 - DNA, 100 bp, Homo sapiens
cttcaagtggctgcaaaaaagtcttccatatattttgattctgagcgtcaaacttgttatgcagcatataacaggatgccaaccctgtggtaattgagcc

SEQ ID NO: 223579 - DNA, 100 bp, Homo sapiens
agccgcatcgtgggtgccctggagcgcattgggggggccgccctcagcccccatgcccagcacatctcagtggaattcttcagatcttgttgctccttct

SEQ ID NO: 223580 - DNA, 100 bp, Homo sapiens
gaagtagtcatacattcagctgatgcatttgcacctgtggcttatctacgctttttagaattgcacttggaggacaagccagagactgctgctactttga

SEQ ID NO: 223581 - DNA, 82 bp, Homo sapiens
tccttcggcagtccacccaccgccgccgcctcccaggcgggcgtctaaaattctgggaagcagaacctggccggagccacta

SEQ ID NO: 223582 - DNA, 100 bp, Homo sapiens
cctggatgggaagttcaagtttactgcgaagtccacccagcgttccggagggcgaccattgacgaggtggagacggacgtggtggagattgaggccaaac

SEQ ID NO: 223583 - DNA, 129 bp, Homo sapiens
cttttcgtaaagggaagtcatttctactggacttcatgcttagatacatgtataacaaggttcacttatgtagttcccatttgttacttcgacgagcagctgtggcatgtcttcggcaacttgcacaaa

SEQ ID NO: 223584 - DNA, 82 bp, Homo sapiens
gctagatacgctggatagaacagcctatgtgcttcccaagctgtatgtgaagctacattactgtgtgagttgtgcaattcac

SEQ ID NO: 223585 - DNA, 82 bp, Homo sapiens
gcgctgtcgcaagagaaaacttgactgtatacagaatcttgaatcagaaattgagaagctgagacaaggtctcgccatgttg

SEQ ID NO: 223586 - DNA, 100 bp, Homo sapiens
gagctgctgaatcagatggatggatttgatcagaatgtcaatgtcaaggtaattaatgatcctatccatggccacattgagctccaccctctcctcgtcc

SEQ ID NO: 223587 - DNA, 75 bp, Homo sapiens
gtttttatcaccacacgactgggtatatttcctctctggctctgcttgaccccctcataggcctgctgtgttctg

SEQ ID NO: 223588 - DNA, 83 bp, Homo sapiens
gtgaaattttccaaagttttaacaaaagataacgaaggaggcccaacttcattcaataaggagcctgacggatttatcccaga

SEQ ID NO: 223589 - DNA, 75 bp, Homo sapiens
cccaaatatcctcggaagagcgctcccaggagaaacaagtgtgatccctcacatccacaaatctctgattggaaa

SEQ ID NO: 223590 - DNA, 75 bp, Homo sapiens
ccttctagaagacttggagcttgatttatcaggacaacagctctttagtgcaatccaagatttttccaaaaacgg

SEQ ID NO: 223591 - DNA, 83 bp, Homo sapiens
ggaaaatgcgctcgggctggaccagcagtctatccttcactggagtctgatgatgatgaccctgctttgaaatctcgacccaa

SEQ ID NO: 223592 - DNA, 51 bp, Homo sapiens
gaaagatgagttttttaaacttctgcaggcaagagggcacattgggagatt

SEQ ID NO: 223593 - DNA, 75 bp, Homo sapiens
gagagaactattcattcttatcaagggcaggcttgtgtagtaaaacgtgaatttaagaaggcagaacagttaatt

SEQ ID NO: 223594 - DNA, 51 bp, Homo sapiens
ctccatgataaaggaatcatctataggtaccagcatcaagatgatttatgg

SEQ ID NO: 223595 - DNA, 98 bp, Homo sapiens
ggcgatatgatgatcctgaagtacagaaagacatgatgtacagttacccagcacgtgtacctcctcctcctcctattgctcgggctgtagtgccctcg

SEQ ID NO: 223596 - DNA, 74 bp, Homo sapiens
ggatgctgttcccagccatgctttgcaagatgggctttgcggtactactaggcacatctctgatccaggacatg

SEQ ID NO: 223597 - DNA, 90 bp, Homo sapiens
ggcaccaggaagcgaaggctgcatttaaatcaaacggtattgagatggattgggttatgaaacataatggtccaaatgacgctagtgatg

SEQ ID NO: 223598 - DNA, 100 bp, Homo sapiens
tcaaatcctggttgatgtcgggcaagacagatatggaggctaaaaatatgtactacgaagccttggaggttgtaggtggcctagatatccacaaaaagat

SEQ ID NO: 223599 - DNA, 90 bp, Homo sapiens
gaccagcacaagccaaaggtgctcctatcagtgccctcggctagcatgacccgcctgatgcggtcccgcacagcctctggttccagcgtc

SEQ ID NO: 223600 - DNA, 75 bp, Homo sapiens
cttggttaacttgggagaaagtttcatctgtggatggagtattgataaacaggggtcacatgacgacagaagcca

SEQ ID NO: 223601 - DNA, 95 bp, Homo sapiens
catggaaaacaaggaaaatggctctgtcggtgtaaaaaagtcgcttatgatgaagctacagatgaatttgcttcttacttcaacaaacagacttc

SEQ ID NO: 223602 - DNA, 100 bp, Homo sapiens
aggcactcagctcaaatacacacacctgttgccattatagagctggaattaggcaaatatggacagatgccttcaattaagttgcagagttctgatggag

SEQ ID NO: 223603 - DNA, 83 bp, Homo sapiens
ccatcagtgacctggacctctcgggggcccggctgctcgggctgaccccacctgagcaaattgtggctactaatttgccccct

SEQ ID NO: 223604 - DNA, 75 bp, Homo sapiens
aaaaaagttggaagaaagggtgtcatcacagtaaagaaaatggacccaagtggggtcaaagtgctggaaacagca

SEQ ID NO: 223605 - DNA, 90 bp, Homo sapiens
tgttcctattcggccatcttggctcctccacaaaggatgtactgagtaaagatgctggggaatgtgcaatatgccttgaagaattgcagc

SEQ ID NO: 223606 - DNA, 83 bp, Homo sapiens
attttgtcttctgtgtggattcttcagaaagtgaacttggcattttagatctaattcaacactttgatatgcctcatgatatt

SEQ ID NO: 223607 - DNA, 106 bp, Homo sapiens
tatacaagtaaccacatttggaaattatttgagaacttcttggtggatatggcaagggaatgtatacaaagactatcgcttccttgagctggcatgtgattcccag

SEQ ID NO: 223608 - DNA, 50 bp, Homo sapiens
cagtctcttcgtaacagaacacccatgcagaatgccaccaagtatggcaa

SEQ ID NO: 223609 - DNA, 101 bp, Homo sapiens
gtggtgtgaaacctggtgtgatgatgaatccaaacaaagagccaaaacaattgatctggtgctggagaatctggtaaaagcaccattgtgaagcagatgag

SEQ ID NO: 223610 - DNA, 73 bp, Homo sapiens
gctcaccaccaatcagatgtctgtctgccggctataatggatttccagttcttaggaacaatttatttgaaag

SEQ ID NO: 223611 - DNA, 75 bp, Homo sapiens
cccacccattcctttaaatccggagggggaaaaaatcccaaggtctgcaaaggcatcagaacacaccatgatggc

SEQ ID NO: 223612 - DNA, 75 bp, Homo sapiens
ggagaattatagcaacttactttcagtggggcgactctggcggccccctggtctgccaaaaggatggagcctgga

SEQ ID NO: 223613 - DNA, 117 bp, Homo sapiens
cagccgcgttctcctccgccgctcctccgggcttgccctggagccctcaggtagatttcgggcagacaacttgaacaagctgaagaacctatgcagcaagacaatcggagagaaaat

SEQ ID NO: 223614 - DNA, 100 bp, Homo sapiens
cgagtacctcaaccctgagctgcgtgagaacccgcccatgaagccagatttctcccaggtagacaagggcgtggtccccctggcagggacaaatggcgag

SEQ ID NO: 223615 - DNA, 83 bp, Homo sapiens
cctgtgcagaagtgcagaggtcaatctttatgtacagggccacccgttcatcgtgcagttcaatgatggaaatgccgccgtgg

SEQ ID NO: 223616 - DNA, 98 bp, Homo sapiens
gccactgcattccagcttaagagacagcgagaatctgttgtctgaaacccctgacctggagcagctggagccgtctttggaagatgtggaaagcatga

SEQ ID NO: 223617 - DNA, 83 bp, Homo sapiens
gtcgccttcgcctcctaatccctagccactatgggacctcaggatggaaaccagcagcctgcaccgcccgagaaggtcggctg

SEQ ID NO: 223618 - DNA, 97 bp, Homo sapiens
cccccagccagggtcaccatcaaaatggaatgtaaccctagccaggtgaatggctcaaggattctggctcttcaggaaaacttccttctccaattta

SEQ ID NO: 223619 - DNA, 95 bp, Homo sapiens
tctggctcagagctaggaaaaaagctgaaggcaactatggatgctgggaaactgtaagactttgaccccgacgcaggcttcagtgattgccgcgg

SEQ ID NO: 223620 - DNA, 100 bp, Homo sapiens
ctaacttggacacatgtggttccatcagtcaggtcattgagcagttacctcagccaaacaggacaagcaggaggggcaacccccttcatttatctcgtga

SEQ ID NO: 223621 - DNA, 101 bp, Homo sapiens
gtggccttggtggaggattggcaccgagagaccaggactgcaggacagtcggtgggacgctcgtccctgctggtggggaatctcaagaagaagtatgcaca

SEQ ID NO: 223622 - DNA, 85 bp, Homo sapiens
acaccaagatgcggatccgggcctttccggtctcttgatggtcgtctccaggtatcccatcgaaaaggattgccacatgttatat

SEQ ID NO: 223623 - DNA, 76 bp, Homo sapiens
gctacacatttccagcaggctgcagatacgagtggacaagtggagctgatcagaataatgttcagcatcaaccccc

SEQ ID NO: 223624 - DNA, 75 bp, Homo sapiens
gcgggtgacgctgggcctgcagcgcggagcagaaagcagaacccgcagacaatgcagatcttcgtgaagactctg

SEQ ID NO: 223625 - DNA, 83 bp, Homo sapiens
attttctgtacaccaatggaaagtgcgtcatcctaaggaacatcgacgttattcagcttctcaaggctggaaaagcgaaggaa

SEQ ID NO: 223626 - DNA, 50 bp, Homo sapiens
cctcaccttgctgagtgacattgacttcgacccccaccacttctggcagt

SEQ ID NO: 223627 - DNA, 50 bp, Homo sapiens
tctgcatcacggcgaaccccaggagatgctcaaccaaatcccgggagatg

SEQ ID NO: 223628 - DNA, 90 bp, Homo sapiens
ctcgtatgcaacctcaggcttcagccagactatgagagtaaattgcaggccttgcagaagcaggttgaaacccgatctctggctgcagaa

SEQ ID NO: 223629 - DNA, 75 bp, Homo sapiens
cctcctgtatctggagctgggagacaagcccgcgcccaacaccttctatgtagccactgaggcggctcccagctg

SEQ ID NO: 223630 - DNA, 100 bp, Homo sapiens
caaagagccggaaggcgtatgtgcgcattgcatattgttacagagcagcaaactgggcagaaaatccagattgtgacagcacttgatcataatacccaag

SEQ ID NO: 223631 - DNA, 100 bp, Homo sapiens
cgacagcttgccgtgtttcctgtgcctgtagctccctggttggcttcaaggagacaacctggaagaaaggacagaagagtcactaccaatactccattct

SEQ ID NO: 223632 - DNA, 75 bp, Homo sapiens
accttggtggggggccattgctgcatagacgagttgtactgctgtcacaggaaatggacgctggattacaagcat

SEQ ID NO: 223633 - DNA, 82 bp, Homo sapiens
cgtcgcagctccattaatgcaactaccattacactaaggtatggacgacaaaggcgacccgagcaatgaggaggcacctaag

SEQ ID NO: 223634 - DNA, 82 bp, Homo sapiens
agcaggctgagcgatacgacgagatcttcgctttaacagaatcagagagatccaacctggggcattcaggcggctgaggaac

SEQ ID NO: 223635 - DNA, 74 bp, Homo sapiens
ttggagcccagagccacgtcaaaggttctccaaaaaatgtggaatcctttgcatctatgctgagacattctcct

SEQ ID NO: 223636 - DNA, 100 bp, Homo sapiens
cctaggagatttccttgtagctgtcaatgagtatcaggaggcaatggaccagtatagtatagcactaaggaagttaaatgaagttcgaaagagattgaat

SEQ ID NO: 223637 - DNA, 98 bp, Homo sapiens
tgcaagcactattggcagctgcagagccagatgatccacaggatgctgtagtagcaaatcagatatcacacttcagtggcttattcagcattcaaaat

SEQ ID NO: 223638 - DNA, 73 bp, Homo sapiens
gctcctaccagttcctcgtgcccatcgccacgtatcttctgtatgacgtcaaccccccggaaggcttcaacct

SEQ ID NO: 223639 - DNA, 97 bp, Homo sapiens
aaagactccagtaacactcaagcaaagaagagttgagcacaatcaggatgggtcatcagttaaggaagttgaaacctaccaccggacacgtgcttta

SEQ ID NO: 223640 - DNA, 90 bp, Homo sapiens
gccggcggcgcccgacggagcagttttttgctccactcaagcctgttagaatcaccatggaatacagctccagtgggaaggccactggag

SEQ ID NO: 223641 - DNA, 101 bp, Homo sapiens
ttgaatttctctctgtaaaggaggtgctgtacttctttgcagtatacaaggactagcagttaatattgacccaatcttatatacgtggctcatctatcagc

SEQ ID NO: 223642 - DNA, 114 bp, Homo sapiens
cagcagtggtggctatgaacccagaggtcgtggaggtggccgtggaggcagaggtggcatggggctgattcaccccaagagtggccgttcctaccacgaggagttcaaccctcc

SEQ ID NO: 223643 - DNA, 100 bp, Homo sapiens
agaagctaaaaatgaaagaacgggaagaagcatgggttaaaatagaaaatctagccaaagccaatccccagaggacgtcggtgatgaaggagaagaagaa

SEQ ID NO: 223644 - DNA, 103 bp, Homo sapiens
cctgtactggctgctgctgccctgcgcgctgctggctgcgagggcggcactgctcacaggacggctacccatccgcaatggcttctacaccaccaacgcccat

SEQ ID NO: 223645 - DNA, 80 bp, Homo sapiens
tcaacagagtgggacctaatggtgagagggaatggatccaattacacgtcaagtaggacaacatattgaaatggaaccag

SEQ ID NO: 223646 - DNA, 82 bp, Homo sapiens
tgaatcattagtatcggacacagaaacggccaaatccttgtagctgtcttcttgccccggtcagtgccagccgtactattca

SEQ ID NO: 223647 - DNA, 97 bp, Homo sapiens
tggggctgagaggagtcttctggtgcagtcttattttgaaaagatgccagtatggacagaatagcttatgatgcttatccccacccaccacttccga

SEQ ID NO: 223648 - DNA, 98 bp, Homo sapiens
gagacaccctgaggcagtggcacaaacggagaaccaccaaccggaccatcccctctgtggacgacttccagggtcttgctgtgtcacccaggctggag

SEQ ID NO: 223649 - DNA, 100 bp, Homo sapiens
tccgcgaagatggcgggccgggttcgactagtgatagtggatggtattgcttttccatttcgtcatgacctagatgacctgtctcttcgtactcggttat

SEQ ID NO: 223650 - DNA, 50 bp, Homo sapiens
gcctccccagccacatggaactctccaacagacagaagcagagctcagga

SEQ ID NO: 223651 - DNA, 83 bp, Homo sapiens
ccaaattcgcctccatctgtaccatgatcctgataacttaagtgactctctcttttccggtgatgaagaaaatgctgggactg

SEQ ID NO: 223652 - DNA, 83 bp, Homo sapiens
ccaagaagatcatcattaaggacggaggcacgaccccaagggcctgccagggacccggcgcgtcctcggtttctcgcctgtca

SEQ ID NO: 223653 - DNA, 83 bp, Homo sapiens
gtggatgtcggcgaagccgcgggcgagggggatatgagactttctactcggaatatcctgagtgttgcgtggatgtaaaaccc

SEQ ID NO: 223654 - DNA, 100 bp, Homo sapiens
cagggaggctccgggcgttgtacctgccaccacggggtaggtctggaagtcctggctgagcaaggttggaagccctagttctcgcattgaccgcacaaac

SEQ ID NO: 223655 - DNA, 83 bp, Homo sapiens
aatttggagtcagtccaaaagtatagtcgtctccccctccaccacggcaagtcctgcagagggaaccagctctgacagttgtc

SEQ ID NO: 223656 - DNA, 144 bp, Homo sapiens
ccggtctcggtgtagctgccgtggttgccaggagagctgcgccggcgagaagcggccgagccagcagcagatctccaagaggtttgtctcattctccttgggctgtaaaaaagattaatcctatatgtaatgatcattatcgaa

SEQ ID NO: 223657 - DNA, 83 bp, Homo sapiens
gaaagaagttgcaaaacactggggagacactgaagcctgggatgttcaagttcatgaccagaagataaaagaagctactgaaa

SEQ ID NO: 223658 - DNA, 100 bp, Homo sapiens
ggaagccagagccacacacaccatcatggtcctggccaggagtggtggctcacacctgtaatcccagctctgggaggccaaggccagtggattgcttgag

SEQ ID NO: 223659 - DNA, 51 bp, Homo sapiens
cactacatggtgctggaatatgtggatctgtccctgtgggccttgctcaga

SEQ ID NO: 223660 - DNA, 100 bp, Homo sapiens
ctttccttcgctgcgctaaggaatgaaacccttccagctcgatctgctcttcgtctgcttcttcctcttcagtcaaggcatacacatccctgtgatcatg

SEQ ID NO: 223661 - DNA, 101 bp, Homo sapiens
cgggtagagattggcttcgggctgagctagcagtgagcaccttttggcccaatgaatatcaggcagttgaagatgactttgtggaaatgcggaagaacgac

SEQ ID NO: 223662 - DNA, 80 bp, Homo sapiens
aatatctgtcttcggtggactccttcggcagtccacccaccgccgccgcctcccagctggattactgggccagttacagg

SEQ ID NO: 223663 - DNA, 75 bp, Homo sapiens
tcctcttggggaaggctgtgtgggccagcccagccatgccgagagggtgacctctctgggcaaggactggcatcg

SEQ ID NO: 223664 - DNA, 100 bp, Homo sapiens
ccaagaggaccaatacgggcgggcttccgagtggacctgccaatcaagtcggcccgctaccgtggccagtacaacacctatcccatcaagctcttctata

SEQ ID NO: 223665 - DNA, 75 bp, Homo sapiens
ctccgactccaggggagccgtggcctcctctccgccctagcgctgaggttcgagaacttgtcttggacaattgca

SEQ ID NO: 223666 - DNA, 100 bp, Homo sapiens
gaatcttctggagtactcttattttgaaaaggcatgatgacctgaaggagatgctggacaccaacaaggattctctcaagctggaggccatgaagaggat

SEQ ID NO: 223667 - DNA, 50 bp, Homo sapiens
aagtcccggggctatggatttccgcttacaaacacgcagatggcaagaag

SEQ ID NO: 223668 - DNA, 75 bp, Homo sapiens
aaaaacagtgctcggaaagcatctattgtgaaaaacctaaaggataccttaggttttggtaagactagtctgaat

SEQ ID NO: 223669 - DNA, 90 bp, Homo sapiens
ctgcaaagtgctgagaaggaagaggatcttatggttggtgatgaggcaagtgaattacgatcaatgttagaagttaactaccctatggaa

SEQ ID NO: 223670 - DNA, 75 bp, Homo sapiens
tagaaagtgaaatcagaggagatgtaactatcggggtctcgccaactcctgggctcaagtgattctcctgcttcc

SEQ ID NO: 223671 - DNA, 100 bp, Homo sapiens
agttgaaatattggatgatgacagaattcagatccttcagtcatttactgcagtggaaacagaggcccagcagcaaagaaacctggataacatcgtcttg

SEQ ID NO: 223672 - DNA, 90 bp, Homo sapiens
gagcaaatattaataagtctcttacaactttgggcaaagtcatttcagccttggccgaggtgttggttcgactatgcaatgagggcgccc

SEQ ID NO: 223673 - DNA, 80 bp, Homo sapiens
ggagattaagcagcggctgaaagaggagcagaggaagcttcgggaggagaaatatgaacagggattcatcacagaccctg

SEQ ID NO: 223674 - DNA, 82 bp, Homo sapiens
agatcccccacgtggtgcggctcaagaaataaggatctggcatgtcaacacaaacataggaagttgaggcagtcaaagggaa

SEQ ID NO: 223675 - DNA, 100 bp, Homo sapiens
ctcaccagtaacaggagactgcagcagacccaggcccaggtggatgaggtgaggccagagacaggcagacagcagatgtattgcagggagctggatgaca

SEQ ID NO: 223676 - DNA, 100 bp, Homo sapiens
aggccttttgccatcgacatggcagatggccctgctgtggcaccagtgaccaacgggaacacaacggtgccacccctgaacgatgatctggacatctttg

SEQ ID NO: 223677 - DNA, 100 bp, Homo sapiens
atcctctgcttccaggacaagtcctgcgcttggggatcctctgtacgcccgttcactggagccaaaaacctgtatatcatctccgtgaaggggatcaagg

SEQ ID NO: 223678 - DNA, 90 bp, Homo sapiens
ctggggctcccagaggccatttcataggactgatcccgttgagaacacatatgtatggaacccgagcgtcaagtttcacatccagtcacg

SEQ ID NO: 223679 - DNA, 100 bp, Homo sapiens
tggattaaggaacagcgagctgtttgacccctttgacctcttcgatgtgcgagactttggaaagggcagagcggcttgggtaaatccaccttaatcaaca

SEQ ID NO: 223680 - DNA, 101 bp, Homo sapiens
cgaagaagtgcttcagcgggccaggaagcgcatccaggagtgaggagaaggaggaagtgaccatggacacaagtgaaaacagacctgaaaatgatgttcca

SEQ ID NO: 223681 - DNA, 75 bp, Homo sapiens
gctactacaaccagagcgaggccgatataatgaagatctggaacttgaagatgccattcatacagccatcttaac

SEQ ID NO: 223682 - DNA, 75 bp, Homo sapiens
gcagactacagggaccccattgcgcacgcaggagatggccaccctgtgggagagtgtgctccggctgtggagtga

SEQ ID NO: 223683 - DNA, 83 bp, Homo sapiens
ggacgagcagcaagtcagggagcttaaggaagccagttgagggaagttctccatgaatgtacgtcacaatgatgatgaccgac

SEQ ID NO: 223684 - DNA, 90 bp, Homo sapiens
aaagaggtccaggagatgaggaacaagatctacctgcacaaccacctctcattcatcctttactatcatcgggaggacatggaagaggac

SEQ ID NO: 223685 - DNA, 75 bp, Homo sapiens
ttatataggatttaatggttggatgaagcctgctgggagcgtgaatgacatggccctggatgccttcgacttgga

SEQ ID NO: 223686 - DNA, 75 bp, Homo sapiens
gagcagcatggcatttcagtcactggtttgcagagtccagctggctccaaggctgcatctctccactggactagc

SEQ ID NO: 223687 - DNA, 82 bp, Homo sapiens
cgagaggctgctggagctcgtgtttggacgcgaatgtatcctgtcaggtataatgtcagtgaatggcaagaaagttcttcat

SEQ ID NO: 223688 - DNA, 83 bp, Homo sapiens
ttctccacccctacttcttggaccagtctggaactgccattggatgtccagaatcccctgtagttgataatgttgggaataag

SEQ ID NO: 223689 - DNA, 101 bp, Homo sapiens
gcccgaggaggcagccaagctcgtagcctgccactccgatgaatttacaggaattgaacccttgagcgaggatgccattatcacaggcttcagaaatgtaa

SEQ ID NO: 223690 - DNA, 75 bp, Homo sapiens
ggcaaaggggaggttacgcagcaaaccatccagaaggacggggaggtttactgcatcgacgcgcggttctacggg

SEQ ID NO: 223691 - DNA, 100 bp, Homo sapiens
aggaagtattggatctctttgaaaaaatgatgatggagtttcactcttgttgcccaggctggagtgcaatggcgtgacctcggctggctgcaaccttcac

SEQ ID NO: 223692 - DNA, 100 bp, Homo sapiens
ccagttatgtggacgagctgttaaaccagccacagacccctttgcttctgtttttgggaatgaatcatttggaggtggatttgctgacttcagcacattg

SEQ ID NO: 223693 - DNA, 76 bp, Homo sapiens
aggtattcctggaagcagagtaaataaagctcatggcccaccagctagaaaggacgatttcctgttcagtgtctcc

SEQ ID NO: 223694 - DNA, 100 bp, Homo sapiens
caaatgtttccttaaagtgcctcgatctaaggatgaccctggaaagaagatgcagcacactgtcaaaatatccggagacgccagcaccaaagcccacaga

SEQ ID NO: 223695 - DNA, 102 bp, Homo sapiens
aactgaggcctggaatttgattaactcattcaaggttacccagttgtttctgtagaaaatgtttcctgactgcaatgagggaaagcggagcacattgtcccc

SEQ ID NO: 223696 - DNA, 117 bp, Homo sapiens
cccagaccctggagcctcagttggaagcagccgatccagcctgcggagcctgtggggcaggctaactatatgtcagaaagcatcagcttttctcgatggacccattcatctaatgaa

SEQ ID NO: 223697 - DNA, 90 bp, Homo sapiens
cgcccttcgagatgctgatgcaggacatccgggcccggaactacaagctgcgcaaggtcatggagctcttgtccctggcaaagcgaaagc

SEQ ID NO: 223698 - DNA, 83 bp, Homo sapiens
ctccttagtagctgggactacagcattttgaaagcgaagcagaagccgtagaatcagcggcgagcctgttgaaagaacccaca

SEQ ID NO: 223699 - DNA, 75 bp, Homo sapiens
ggcagaggtggaggcgctttgaaaggagcgagaacccgagcagcgccatgagcaacactaccgtcgtccccagca

SEQ ID NO: 223700 - DNA, 90 bp, Homo sapiens
agcagttcagaagagccaaggaataaacatgcaatgaacccaaaagggagtctgcagtttctgggagcagtgaacggtgcccccgtccag

SEQ ID NO: 223701 - DNA, 101 bp, Homo sapiens
actggaagatgattttcttaaggctaaatcctggaataaaaagttctatgattatgaagcaaacatgccagacaggagattacctggggcaattgatgtta

SEQ ID NO: 223702 - DNA, 96 bp, Homo sapiens
tgagtggaaaggtgaccaagcccaaagaggagaaagatgcttctaagggtatcagcggcagggaaggaggctttgccatcttggctgcactgggac

SEQ ID NO: 223703 - DNA, 119 bp, Homo sapiens
ccggagaggacgaggtggaccacctgatcctgctggccctcatgacagtggtcatggccgtgtgctccctgcctctcacgttaagtgggcagaccaacatccacctcagcaaaaacttc

SEQ ID NO: 223704 - DNA, 75 bp, Homo sapiens
cagggtgggggctacggaggtggttatgacaactatggaggaggagaagtaccagttctaaatgtcagttataag

SEQ ID NO: 223705 - DNA, 100 bp, Homo sapiens
gctctgcctgccaaggattctgcctggccctgggaagagaagcctagatatctggcagttgcagtggtgcagaatggctgacctcagtcttgcagatgca

SEQ ID NO: 223706 - DNA, 75 bp, Homo sapiens
cctggcttggctactcactcttctgttaacagggtcctggcaggagccctccctaaggcatatcctgataatcat

SEQ ID NO: 223707 - DNA, 100 bp, Homo sapiens
attatggctaataacacaacaagtttagggagtccatggccagaaaacttttgggaattccttgatctatgaacttttctctgttatggttcattctggg

SEQ ID NO: 223708 - DNA, 75 bp, Homo sapiens
gacgcagccgtagacaccagctccgaaatcaccaccaaggacaagcagctgcggatctttgaccccagaacaaag

SEQ ID NO: 223709 - DNA, 51 bp, Homo sapiens
ttgccaggtgtttgttaccttgacgcagaagaaacatgtccttcattcacc

SEQ ID NO: 223710 - DNA, 73 bp, Homo sapiens
ggacaccatgcagtcggatgatgttcctcatgagagtgctggactcctacggggatgactaccgggccagcca

SEQ ID NO: 223711 - DNA, 98 bp, Homo sapiens
ggcagctcccggggcgtctggatcaggatcctcatgaccagccaaagagaagaagaattaggaagcataaatcaaagaaaaaatttaaaaatcccaat

SEQ ID NO: 223712 - DNA, 95 bp, Homo sapiens
tcccgcccgcgccctccgccggccctcagctaaaagatggcggcaaggcagcccaggcaaatgtaagaataggcgatgtggttctcagcattgat

SEQ ID NO: 223713 - DNA, 75 bp, Homo sapiens
aacacctacatcacctattaaaaagttggctcttcgaaatgaggaggcagaaaatgaaaacagcaaattaagaag

SEQ ID NO: 223714 - DNA, 75 bp, Homo sapiens
tccgtaaagacccatttctctatgaggaccaacttggaggccttgcagaagaagctggaggagctagagcttgat

SEQ ID NO: 223715 - DNA, 82 bp, Homo sapiens
ctcatgaagcccaggacgattcagattagaaatgatatttgccaaatttgatgaagtgcaaagttcaggcggtatgattttg

SEQ ID NO: 223716 - DNA, 127 bp, Homo sapiens
tcctggcctcaaacgatcctcccaccttggcttctcaacgtgctgggattatagggatgctcccataatactctcagatagtgaagaagaagaaatgatcattttggaaccagacaagaatccaaag

SEQ ID NO: 223717 - DNA, 50 bp, Homo sapiens
ctcgcttgcagttcagcgaccacgcaaccatgtccaagggacctgcagtt

SEQ ID NO: 223718 - DNA, 83 bp, Homo sapiens
cggggttcgggtgtctcgtgtgtgaacatcacagatcgccatggatcggatgaagaagatcaaacggcagctgtcaatgacac

SEQ ID NO: 223719 - DNA, 105 bp, Homo sapiens
aacgcctttcaccattaagaggaaagcgatggaggagctgagcgctgatgaggccttcctgggctatgtgctgtatggagagtgccaggaggtcttgtggtgggg

SEQ ID NO: 223720 - DNA, 75 bp, Homo sapiens
aggaagctactgtggtttatctagctgaagatgggtcaaaaattgcatgttcaaacaaaaggaggcaaagtgatc

SEQ ID NO: 223721 - DNA, 75 bp, Homo sapiens
caagtatggcaacatgacagaggaccatgtgatgcacctgctccagatcattgagaagcagccaggccacattcg

SEQ ID NO: 223722 - DNA, 75 bp, Homo sapiens
atcaagctaatgagcgagtaaaggatgccaggttcgctgtgatcctgagattcaagaactgcgtcagtggcagaa

SEQ ID NO: 223723 - DNA, 80 bp, Homo sapiens
cgtcccgctcgctgggagagaggtacctctccttttccctctccctttccctaaggttaaacccatccagagtaatggct

SEQ ID NO: 223724 - DNA, 107 bp, Homo sapiens
cagaagatctgggtgcccgtggaccacaggccctcgttgcccagatgggagcttttggaagagtcccagatggaagcgaccaggctccggcagaaggcagaggagct

SEQ ID NO: 223725 - DNA, 101 bp, Homo sapiens
ggctccctgcagtaccctttaacgtacagtacgggtggctggcaagatggccgaataggaagagctccagtctacagctcccgcagagatcaacgcagaag

SEQ ID NO: 223726 - DNA, 95 bp, Homo sapiens
ctgtctctgcggcttctggttctcacttgtcggagaagagatcaactttgggaaacttatcacaaagccttcagaaggaacaactttaagggtag

SEQ ID NO: 223727 - DNA, 82 bp, Homo sapiens
ctggacccaaggacatggtggtcgggatttttagactctgaggagcagttggagctaatccacattatggaaatggaaacca

SEQ ID NO: 223728 - DNA, 75 bp, Homo sapiens
attctctttgtgatggccttcctgctctctgttgcagtatccagtttattgggaccatctcgagttctgtgatgg

SEQ ID NO: 223729 - DNA, 76 bp, Homo sapiens
gcgctgagcgatttcttcgaggtggagtcggagctgggacgatgggagacctttaactctgaaggacatatgggaa

SEQ ID NO: 223730 - DNA, 119 bp, Homo sapiens
ggctttcaaggatatgctgtattcagctcaggaccaggcaccttctgtggaagggaagaggaagaacgtctgagaaataaaattcgagctgatcatgagaaggccttggaagaagcaaa

SEQ ID NO: 223731 - DNA, 100 bp, Homo sapiens
ccacctgcatcatctggggttccaatgcagcttcagaggatgattccgaagaagacggagaccataacaggacatttgatattgcctaacttcatataag

SEQ ID NO: 223732 - DNA, 100 bp, Homo sapiens
cctcctccctgggaacggcgttcacacagcatcaccgacctgtcattacaggacccagagccacagacccctttgcttctgtttttgggaatgaatcatt

SEQ ID NO: 223733 - DNA, 90 bp, Homo sapiens
ccatcaggtttcctgatgtgagcaggcttacggagttcctatgctagtcagcatagtcagcttgggcaagaccttcgttctgccgtgtct

SEQ ID NO: 223734 - DNA, 83 bp, Homo sapiens
cgttgctgcggccgtggtccgcgcccttcctcggcgggccggactgcactgtgacttctgccgtgttcaccgtgggagacaac

SEQ ID NO: 223735 - DNA, 83 bp, Homo sapiens
acaaggcactgctttttcatgacgcatttgacattgtgcagcaaagaaatggttatggagaagcccagtccgctgcttgtagg

SEQ ID NO: 223736 - DNA, 82 bp, Homo sapiens
agctatcgccgctgactgtgcccctgtggaaggagaaaaaggagaagcgggctctagggaactggaagttgctggccaaagg

SEQ ID NO: 223737 - DNA, 98 bp, Homo sapiens
ggcttttgcttccaaatacaagctgtataggtgagttcacagaggaagagattgagttcctggaagccaggggtcaccacgtggagaaagtagatgtc

SEQ ID NO: 223738 - DNA, 100 bp, Homo sapiens
cgccgcttctcgccagcgccgttgctgcgggggattgtgggagtctccgcgtcccgctcgctgggagagagatgatatcatcaagttgaatcgaaaggaa

SEQ ID NO: 223739 - DNA, 96 bp, Homo sapiens
tgctggcagcccttaaaaaaggaataattggaggagtcaaagttcatgtggatcgtctacaggtttcttgagtacaggcgatcaggctgcaaaggg

SEQ ID NO: 223740 - DNA, 96 bp, Homo sapiens
ctcggtcccgcgctgcgcatccccgcggacgccacagcgctcggggatctgacgagcttttctctacttgtgtcactaacggaccgtttatcatga

SEQ ID NO: 223741 - DNA, 75 bp, Homo sapiens
aagaaggcaaggagagaatgtatgaagaacagtcacaggacaggtgaggtctgccataaatcctatactcagttt

SEQ ID NO: 223742 - DNA, 100 bp, Homo sapiens
gcctctcaatattgcctggacgattgcttagaggagtatttcctgaactgtgtgggaaagaccacagcaagattctttcattcgtctcctcctagcctgg

SEQ ID NO: 223743 - DNA, 50 bp, Homo sapiens
ccaggcatctggccatcccacaaaagcaaagtacccacgtttgttcgaat

SEQ ID NO: 223744 - DNA, 74 bp, Homo sapiens
gtaccttgtgacagaatatgccaaaaatggagaaatttttgccctgtgtactgtgttgcatctgacagagagac

SEQ ID NO: 223745 - DNA, 90 bp, Homo sapiens
gtggcaccgcatgttcgcgccctgtggcgatggttctacagcaggagaaagttgaagagtctcgctctgttgccaggctggagtgcagtg

SEQ ID NO: 223746 - DNA, 73 bp, Homo sapiens
agttgttgtgtgtggcttgtatacatgctgttatactggtatccagtcggaattctttattaacaccacccga

SEQ ID NO: 223747 - DNA, 96 bp, Homo sapiens
tcaagatttaacattccaacacataaaaattatttatccaacagctcctcccagggccaaggagattaagatcaagttgggaattctcctccagaa

SEQ ID NO: 223748 - DNA, 75 bp, Homo sapiens
ccgagagtcaccacaaggccaagggcaagtgatttgacagatggtgaggtctacagctttgggactcttccctgg

SEQ ID NO: 223749 - DNA, 87 bp, Homo sapiens
gtcagcatcacggagggtgtcaccgagaggtttaagtattccactgaactgaagaaactctactgccaaattgcaaagacatgcccc

SEQ ID NO: 223750 - DNA, 100 bp, Homo sapiens
atagcaaacgatccagacggcagggagtgcatcaaaggtgtgaacacagataaccagttcaggatgtccatcctggaacgactggagcagatggagagga

SEQ ID NO: 223751 - DNA, 90 bp, Homo sapiens
ggggtgaccagagagcccaacgcctggtgctcaagactttctccgaggcagaggtggaggagacactgaagcgactgcagagccagaagg

SEQ ID NO: 223752 - DNA, 74 bp, Homo sapiens
ggccgctatcatcccagcagtggagttcagcccactactctgaaccagatgggggctccggaggtggcgcccag

SEQ ID NO: 223753 - DNA, 75 bp, Homo sapiens
ctgcgccagcagctccgctcggcgcgagagggcgccaatgcttcggcattagagaaagagattggtccagaacag

SEQ ID NO: 223754 - DNA, 74 bp, Homo sapiens
tctgctggactcctggactcccacaatgacaaatcttcctattttcaagctgaaagaatctactgttagaagaa

SEQ ID NO: 223755 - DNA, 50 bp, Homo sapiens
ccccgccgctctgtctacaacccgagaccttcacggcatggtgcaactcc

SEQ ID NO: 223756 - DNA, 98 bp, Homo sapiens
gaggagcgggcgagaagctgccgccgaacgacaggacgttggggcggcctggctccctcaggtgcaccctttgctcccgggctcatccaccatcatga

SEQ ID NO: 223757 - DNA, 75 bp, Homo sapiens
agggagccgcgcgcctttgtgcgcgcgccgagactgtgccctgtccacggtgcctcctgcatgtcctgctgccct

SEQ ID NO: 223758 - DNA, 100 bp, Homo sapiens
acgaagaagcagaagcgtctgctcaggttgcagcaggagagagggtttgtggatgcacttagatgtttgcaatgagcactgtggctggcatgccccagtg

SEQ ID NO: 223759 - DNA, 90 bp, Homo sapiens
gctggattctgagctgatggacataactaagatcgaccttcagaagatgcccttggggaagctgagcaaaaggcagatccaggccgcata

SEQ ID NO: 223760 - DNA, 75 bp, Homo sapiens
agccccggaggcagagcggctgccatggttgaaatcacaaagattagacacctttttagataggtgttcttcagc

SEQ ID NO: 223761 - DNA, 96 bp, Homo sapiens
ggcggaagaaaatacaaatcacacgcataatggatgaaaggaaccgacagagcgggaacagcttccacgtgttcgaccagggccagtttgccaagg

SEQ ID NO: 223762 - DNA, 100 bp, Homo sapiens
gaagcactggatccaaagcatgtctgcaacccagccattttcaggggctcacaacgaagtaagacagtagatgacaattctgcaaagcagactgcgcaca

SEQ ID NO: 223763 - DNA, 100 bp, Homo sapiens
aaaaggagcttcatctttcaagataacccgtggaattgaagcagttggtggcaaattaaggaattccatatttaaatcaggaagaagaaagacagttaag

SEQ ID NO: 223764 - DNA, 100 bp, Homo sapiens
tttaaagaagcattaatactcatcttgtccagaactctgtcaaatgaagaacactttcaagaaccaggtggagaactccacgctgagttcccagagcgca

SEQ ID NO: 223765 - DNA, 74 bp, Homo sapiens
tgcagtcaatgcattatggcctaaaacaggtatgcaaccactcatgtattcggttcaggaagcattaaatgcca

SEQ ID NO: 223766 - DNA, 75 bp, Homo sapiens
ggaatatcgagagcgtcatgaacccgagctatagagaaaggagatgaggacatatccaatgatgatgatgacatg

SEQ ID NO: 223767 - DNA, 90 bp, Homo sapiens
cgacctacctcaggttgaaacttttggctttcggggggaagctctgagctcactttgtgcactgaggattgccaaggatccaagatttga

SEQ ID NO: 223768 - DNA, 83 bp, Homo sapiens
ggattaaaagcagcgaacctcgagaccaacgtggaggagctgtgggtggaaggtacaatgactcttcttgcttttcacctaag

SEQ ID NO: 223769 - DNA, 90 bp, Homo sapiens
cctcaagaagaagaagttgcgaaggatccccaacggggaggccaacgtgaagaagtgcagaccatgaattacgtggggcagttagccggc

SEQ ID NO: 223770 - DNA, 80 bp, Homo sapiens
gaaatggggtgaatcatttgacaaactgctttcccatagaggtcccagtagggatggcacaatcagcgaggacaccatcc

SEQ ID NO: 223771 - DNA, 98 bp, Homo sapiens
gggcaggggcggaggcggaggcagaggtggaggcgctttgaaagccgcccatgccaacttccgttcccatcaaccatgcagcagcacagccccatgtc

SEQ ID NO: 223772 - DNA, 101 bp, Homo sapiens
cccatggtggactacctggtgcctctagtgaaaagaacaagaagtcttaccctcaggtcaaactgttccatttcctccaagtcaccggcttacagcaaaag

SEQ ID NO: 223773 - DNA, 74 bp, Homo sapiens
ccacactggccgtcccggccatctcgctgcccgacgatgtccgcaggcgggggggccctcagcctcttggcctt

SEQ ID NO: 223774 - DNA, 83 bp, Homo sapiens
aacttgccaggttccagactctatgacatctgctgcctggcttcagggatgacttcttagggggcaggggaggtagtcgccca

SEQ ID NO: 223775 - DNA, 100 bp, Homo sapiens
gctgcccgagaaggtggacgtgctggtgtctgagtggatggggacctgcctgctgctacaagagactgtgaaaaggaagttggaaggagctcgatcacca

SEQ ID NO: 223776 - DNA, 98 bp, Homo sapiens
tgtgagccactgcgtctggccccaagtaactttttaacacagttcttcaactgcataccttcaatctaagggtgtactctgtgtgaccgcgcctatcc

SEQ ID NO: 223777 - DNA, 99 bp, Homo sapiens
ctttcggtctctcagcggccggtttctgcgtccgctgccgcaggttccaccgcgctccagggagagcgcgcggcggacgcgcccgggacgcgcggcggc

SEQ ID NO: 223778 - DNA, 82 bp, Homo sapiens
ctggaccgtgtccctgagtctcgtgtgtcatgaggtcccgtttccctctgtgcggcggccggcgggaccataagggcttaac

SEQ ID NO: 223779 - DNA, 71 bp, Homo sapiens
catctgccctgaaaaataagaagaagatgcagaaacgtgcagggtgtaggaagtgtgcccagaatagccag

SEQ ID NO: 223780 - DNA, 100 bp, Homo sapiens
ctggccttctctgtggaactgctctggcagtcatcgtgcctgaaggagtacatgccctttatgaagatattcttgaggtgtccgagctgcaggaggaggg

SEQ ID NO: 223781 - DNA, 100 bp, Homo sapiens
tgagtatgcctacctcaaagccatcatcttctttgacccaggcttcagcaaccaggagggattgactgagatcttaacaacagcagcaacgatacatcag

SEQ ID NO: 223782 - DNA, 98 bp, Homo sapiens
ggcgcccggatgggcagctgaggaatcggatggcataagtgattaaggtggtattgaggatttctgaagcctatgaaaggtagaaactcaaccatgat

SEQ ID NO: 223783 - DNA, 125 bp, Homo sapiens
aagggaaggaaatcatgtcaagcgaagccttgaaaaagctgccctgagacggtgtcccgccgaaagaacccagtgacttgattgtaaaaatttacagagcggaatcatatgctggtctccaagag

SEQ ID NO: 223784 - DNA, 100 bp, Homo sapiens
tctttcagcactgctctttatgggaaacttctgaaactccccacatgctgccccattgacaaaccttcagattctctcagtatagggaacggtgataatt

SEQ ID NO: 223785 - DNA, 82 bp, Homo sapiens
aggaattcaccctgttcgtctatgtcccaggggcagccactggcctcccagcccccggtcgtcgacccctacgacatgccgg

SEQ ID NO: 223786 - DNA, 90 bp, Homo sapiens
gaagatgattccaacgccaccaattccaacctgccctaggggacctctttctcctggacattgaagatatggccctttggaggtgaccca

SEQ ID NO: 223787 - DNA, 75 bp, Homo sapiens
cccatgaattcacctttgattccagtgtgaactgtcaatcataagatgaacagcacagccagtactccaagttgc

SEQ ID NO: 223788 - DNA, 75 bp, Homo sapiens
cctgaagataatgttaaagaagcaccacgagaagcggaaacatcagccagcagcccttctggacactgcatgatc

SEQ ID NO: 223789 - DNA, 80 bp, Homo sapiens
aacacagtggaaaggaaccgttctggatcaggctgttccacctcccaacttcgagatgccagtctccatcccagtgtcca

SEQ ID NO: 223790 - DNA, 88 bp, Homo sapiens
cttttgtctgcccctattgtaagtgcagatggaacacaacaggtgttagtaaaatggcctttcgccatttaattgagttcacatatac

SEQ ID NO: 223791 - DNA, 82 bp, Homo sapiens
cgaccggctcctgctcaagatctcagagaaggaggaggtgaccacgcgcgagttacagaatgtctgaaggggacagtgtggg

SEQ ID NO: 223792 - DNA, 75 bp, Homo sapiens
cggagaaggtggtctaccggcgcttcaccgagatctacgagttccatgtacgagtggctgctttacagaatctgg

SEQ ID NO: 223793 - DNA, 75 bp, Homo sapiens
cgctcgctgggagagaggtacctctccttttccctctccctttccctaagattgggctaatggatactacagaca

SEQ ID NO: 223794 - DNA, 82 bp, Homo sapiens
agcgctgactggcccggctgggcagggtgtcgtgaaaactacccctaaaagccaaaatgggaaaggaaaagactcatatcaa

SEQ ID NO: 223795 - DNA, 51 bp, Homo sapiens
atgtgccagaaggagttcgcccccagctggagaagaagcaggcgctccctc

SEQ ID NO: 223796 - DNA, 87 bp, Homo sapiens
acctcacagcacttcattatgcagctaagcaaagccttctagacaagctcagtggaatctgaagggcccaccccatggaggaatgct

SEQ ID NO: 223797 - DNA, 83 bp, Homo sapiens
cggacgggcactgggcgactctgtgcctcgctgagggatgcagcagtctcggccctggctgctctatgcagtgaatattacat

SEQ ID NO: 223798 - DNA, 75 bp, Homo sapiens
tatccgccagtcaataggaagtacgagtgttgattcttcaccacactgaaaccattaggaaaaatccttgtggtt

SEQ ID NO: 223799 - DNA, 90 bp, Homo sapiens
ccgcgcaggagcctcccggagctgaaccccccaaagtgtccctgatgccagcaacccttgcacgggccgccccaggggaggcacccccgg

SEQ ID NO: 223800 - DNA, 96 bp, Homo sapiens
cgcggaggccgacaggattcgttggctgccgtccccgctgctgtgcattgggagtcggagaggatggcaggggccggaggccagcaccaccctccg

SEQ ID NO: 223801 - DNA, 100 bp, Homo sapiens
aacggaccaatggactgcgaagaactcctaaacaggtggatccaggtactagcaaaggccagacgtcttactcaacaacttccctgccaccacctccacc

SEQ ID NO: 223802 - DNA, 98 bp, Homo sapiens
cgggcagcgcttccattccgcggagctgcaggaggatgcattagcacaacaggcctttgaagaggctcggagaaggacacgcgaatttgaagatagag

SEQ ID NO: 223803 - DNA, 130 bp, Homo sapiens
gagctcggaggggcgctgtgtgtacatcacccccatggaggccctggcagagcagggtgtccgcaatgttgccagtgtctgtctgcagattggctacccaactgttgcatcagtaccccattctatcatc

SEQ ID NO: 223804 - DNA, 75 bp, Homo sapiens
tggagctgctgttgcagcacttgttccccaaacaagtgctcctacattctggtgctggagaatctggtaaaagca

SEQ ID NO: 223805 - DNA, 100 bp, Homo sapiens
ctatgtctgtgtagcaaggaattaccttggagaggctgtgagccacaatgcatcgctggaagtagccagttttcaaaaccctcggcacagatgtcgtgaa

SEQ ID NO: 223806 - DNA, 98 bp, Homo sapiens
gtctggactctagggaccctgctgaatagctggggctacaggcgtgtgtcactgcgcccaggtagttcttcctttgccagcaaacccaccacaccaac

SEQ ID NO: 223807 - DNA, 100 bp, Homo sapiens
ggactaatggttgcaactccagctcagacgcttaccgacactcttgatgacctgatagcagaccccaagactgcttctgagacagaaacagatatctgtg

SEQ ID NO: 223808 - DNA, 98 bp, Homo sapiens
caagtacctccttttcagctacaacatcatcttctgggtgctggaggtggtgagagccaactatgacacgctcacgctgaagctgcaggatggcctgg

SEQ ID NO: 223809 - DNA, 83 bp, Homo sapiens
ccagatgcgcgcgatgctggaccagttgatgggcacctcccgggacggtcaaaatgcagatcttcgtgaaaacccttaccggc

SEQ ID NO: 223810 - DNA, 75 bp, Homo sapiens
agcttcggaaaggagccaatgaggggaagcttcctgcaggatccgcctgttccgatgtacacatggcgttgtgtg

SEQ ID NO: 223811 - DNA, 152 bp, Homo sapiens
cactgccctggggcagctgaactgagcgtatgtgccacgccgcccaggagacccctctgctgcaccacttcatgattgatgaggacatgactgcccgaattagcatggctgatgtcaagttctctttccaatgtcctggtcgcatgtatgca

SEQ ID NO: 223812 - DNA, 51 bp, Homo sapiens
cagtactgccctgacccttacatccagcggccaccaccacctatcatgaca

SEQ ID NO: 223813 - DNA, 96 bp, Homo sapiens
gaaaaattggtcaatgagcacaagtgcctgtgtcagatagcacagagcatggagaatgatgaacttccgtcagcggatgggatggattggagtggg

SEQ ID NO: 223814 - DNA, 100 bp, Homo sapiens
gaaactcagcctccagaaacggtccagaactggattgaattacttagtgtagagacaagttttcaccgtgttagccagaatggtctcaatctcctgacct

SEQ ID NO: 223815 - DNA, 88 bp, Homo sapiens
ggcattcatcattttctaatcatcagcatttacatgacagaaatcacctatgtttacagcgacagcttatggaaaagtatttctagtt

SEQ ID NO: 223816 - DNA, 100 bp, Homo sapiens
taatttgttgccccgcttggctgcattccgaccttctgccttcacagttgctctatatgcaatcagtgctgtctactttgctggagtgatggtgcgactg

SEQ ID NO: 223817 - DNA, 100 bp, Homo sapiens
tggacatctgctgccggaaggggtcccgaagccccctgcaggaactctacaacccaatccaggacaatgtgttgaacatcattaaccagatcatggatga

SEQ ID NO: 223818 - DNA, 73 bp, Homo sapiens
tttgaagcacctacactggcaacattagatccacctcatacagacgctatgtccagcaaaggctccgtggttc

SEQ ID NO: 223819 - DNA, 100 bp, Homo sapiens
gccctcgccccctccgatgtcatcacctcacccgggttccttaccgtcttcatttgcaccttgaaacaaagagtcctcttcgtggaaaagaaaaaaatac

SEQ ID NO: 223820 - DNA, 75 bp, Homo sapiens
acaagaggggacaagtacctttatgaaccagtgtatcccaagctcaagtggtcctgtcgaagtatttatcactga

SEQ ID NO: 223821 - DNA, 100 bp, Homo sapiens
gccaggtgtggcagtgacagggaggttgcatcataaatacaaaggactgaagttataaaagagaaaagagaagtttgctgctaaaatgaatctgagcaat

SEQ ID NO: 223822 - DNA, 100 bp, Homo sapiens
ggccggccacctcggccccgcaatgagctctgtgccaagtatagcaaggaatatggcaagctatgtaggaccaaccagattggaactgtgaatgacaggg

SEQ ID NO: 223823 - DNA, 100 bp, Homo sapiens
tgtcctcctccgtcatcgagcagctcttcttcgtccgtttggtgaccctggcagcaaccccaacaaacgccagaggcagccccctctcctgggagatcac

SEQ ID NO: 223824 - DNA, 80 bp, Homo sapiens
cacgtctctaccgagcacaaactccacgaagccaacgcccagaataccctctaccatctgctttggtcagggtgccgctc

SEQ ID NO: 223825 - DNA, 100 bp, Homo sapiens
ggctgcccttctgggtgtggagcgagtgggaaatatgagtgagcatgtgagaacaagatcccaatcctcagaaagaggaaatgaccaagagtcttcccag

SEQ ID NO: 223826 - DNA, 82 bp, Homo sapiens
gatatttagagatggtgaagaagcaggtgcttatgatggacctaggactgctgggactgctgagatgtcctctattcttgaa

SEQ ID NO: 223827 - DNA, 98 bp, Homo sapiens
tcacttctgagaaattcctggtcatggcttcagaggatgggttcccttctggagaagagtcaccgggtttggttctgtttcccctttctgctcgacac

SEQ ID NO: 223828 - DNA, 95 bp, Homo sapiens
agaaccgggcccagcagcactggggaggaggcctcggtggtaccagaagaggaggggctgatgtgaacatccggcattcaggccgcgatgacacc

SEQ ID NO: 223829 - DNA, 76 bp, Homo sapiens
tgatttgcctcagcttgtactcccaccttgggacaccttgactccaagcccagcagtaagtccaacatgattcggg

SEQ ID NO: 223830 - DNA, 90 bp, Homo sapiens
cacacaagtgtgaggagttgctaaatgctcaggtgagtcatcatccccctgctgctgcgcaccatgctgagtccaaaaatggctggacat

SEQ ID NO: 223831 - DNA, 74 bp, Homo sapiens
tcacagtttgctctgctcttccaacaccagtggaagatgatcacatcccagatacctgatcagagaagcagttt

SEQ ID NO: 223832 - DNA, 83 bp, Homo sapiens
ctaccaatcgtgaaaactatattcacagggcttcctactatgagatttcagttgatgatggtccatgggaaaaacagaagagt

SEQ ID NO: 223833 - DNA, 74 bp, Homo sapiens
ttttcggcaaccgctgctggcagttttgccaggtgtttgttaccttgcatgattatgatatgagggtggatgat

SEQ ID NO: 223834 - DNA, 98 bp, Homo sapiens
cacccatctgaagggaggaaatagtggcaggtgacagtctgcatgtgcagttttcagttctgggaggtgatcagtgatgaacatggcatcgaccccac

SEQ ID NO: 223835 - DNA, 128 bp, Homo sapiens
gccaggcgtggggcaccggcgagaagaaggggcgcacgtgtgaggaatgcaacttcaaggtcaagatggtggacgagcttaagagaggattctgtcaactgaatctgccatctggaaagtttcctcgg

SEQ ID NO: 223836 - DNA, 101 bp, Homo sapiens
attatagcctcaaactcccaggctcaagcaatcctaccatgtcagccttcccagtagctggaactacagattatggatgattggccagggtatgacttgaa

SEQ ID NO: 223837 - DNA, 75 bp, Homo sapiens
ctacgtcgtgtggaaatccgagagctccttaataagcatttatagtcagtttttggcagcaatagaatcactaaa

SEQ ID NO: 223838 - DNA, 90 bp, Homo sapiens
gaggaggtcatgaaggacctgagcctgacgcgggccgcgcgggttcttgggtgtctctggggagtccctgggccagaccttcctccagac

SEQ ID NO: 223839 - DNA, 100 bp, Homo sapiens
ctgctgcgactctaggggtcctttgcctgggattagtagtgaccattatggtgctgggcatgcaatttggccagttctacttcttaatccggaagagaat

SEQ ID NO: 223840 - DNA, 85 bp, Homo sapiens
accttgaaatcttcaaccttcctaatgtggagatcagcaaagggtaaaatccagtacaaggaatatatcattgaaggatttgaaa

SEQ ID NO: 223841 - DNA, 82 bp, Homo sapiens
tcaaggacacggtctacaccgacttcgacgatgatatcatcaagttgaatcgaaaggaagggaagaagcagaattttccaag

SEQ ID NO: 223842 - DNA, 50 bp, Homo sapiens
tggagcctgacgagctggcggacgagctcatctgcgcctttgtttagaac

SEQ ID NO: 223843 - DNA, 98 bp, Homo sapiens
atcatcgcctttctggtgggaggcttgattgcaatgtctcaggctgtgcagacaaacggaactcaaccattaagcaaaacatgggaactcagtttata

SEQ ID NO: 223844 - DNA, 98 bp, Homo sapiens
aacctgggaagtggaaccggatatttaagtacaatggtgggcttaattttagctgactcaggtgttgacaccttggcagtgtttatggccagcagcgg

SEQ ID NO: 223845 - DNA, 78 bp, Homo sapiens
cagcaggcgctcaccatgttccctggaggagcatcaccctgcaccaccggatccggcaggcccccaacccttactcgt

SEQ ID NO: 223846 - DNA, 100 bp, Homo sapiens
tgctgctgaagtaatgcaatggtctcaatctctggaaaaacttcttgccaaccaaaggttcagaatctcccatgatgattggtgagttgagaagtgacct

SEQ ID NO: 223847 - DNA, 87 bp, Homo sapiens
tgaatacatgatttaaacaagagatttccacagaagagctggtggagttgagatctataatggagatcgtaaaataaaggtttccaa

SEQ ID NO: 223848 - DNA, 82 bp, Homo sapiens
ggaaacgcgttcatcgtgtctgccatccccatctgaaatctgaaatagagtactatgctatgttggctaaaactggtgtcca

SEQ ID NO: 223849 - DNA, 75 bp, Homo sapiens
gagactacttctggcatcctttaagaatgagggtgccgaaccagatctaatcagctcaccagcgactggaaccag

SEQ ID NO: 223850 - DNA, 83 bp, Homo sapiens
ctgcaatctggcctggctggtggccaaagcctttgggacagaaagcataaaggatgttattggcagaaagataaaaatttcag

SEQ ID NO: 223851 - DNA, 100 bp, Homo sapiens
gccctgcgcttcatcttcagtgccccgggggtcacttcctggcagtacaccctcctccagctccagggttatgggacccacctgatgaaccacctgaagg

SEQ ID NO: 223852 - DNA, 100 bp, Homo sapiens
caatatttggtatactgggcacaatccatctggtggcagaggccccacagtatcaaatatccgcctggctggattagagtatgttctgcacttcactgca

SEQ ID NO: 223853 - DNA, 101 bp, Homo sapiens
tgtatgtgatggacagagcacaaatggacctctctggaagagggaatcccatcaaagtcagccgtgtggggtctgcaatgctccagcggcgccatgagcaa

SEQ ID NO: 223854 - DNA, 74 bp, Homo sapiens
gcgtacgccctcatggggaaaatctccccggtgactttcaggtgagtcctgcaaatgttaagtgatttgctcaa

SEQ ID NO: 223855 - DNA, 99 bp, Homo sapiens
cacacattatggcaaggtttatttacttgatgtccaggggaacatcactcagaagtttgatgtaccgaatatgtgggagtccatgtcctgcagtgtggc

SEQ ID NO: 223856 - DNA, 112 bp, Homo sapiens
cttcgaaagcatcatccacgagttcgacccgtgtatcccttttactattcagcgactatgtgaattgttaacagatccaaggagaaactatacaggaacagacaaatttctc

SEQ ID NO: 223857 - DNA, 50 bp, Homo sapiens
tcggatatctgcggctgatcctgccagggaagaaggagaaagggccaacc

SEQ ID NO: 223858 - DNA, 100 bp, Homo sapiens
aagaaatgaggacatatcagtatcgtgccttgctttccatgacatttcccctcaagcaccaacacattttctggtgatacccaagaaacatatatcccag

SEQ ID NO: 223859 - DNA, 100 bp, Homo sapiens
ctaccataaacacatcaccttgatttttaatcccacgatcctaagtgtgaacgtgaagtccccagccctgctgctgagccagttgctgccctacatggag

SEQ ID NO: 223860 - DNA, 90 bp, Homo sapiens
gaaactattatcatcagtgatagtgatgattcagaaacacaaagctgttcttttcaaaatgggaaccattggcactggcaagtggggctc

SEQ ID NO: 223861 - DNA, 50 bp, Homo sapiens
ccggcagggcggagcctcccctcgcagatgccttcaattaagttgcagag

SEQ ID NO: 223862 - DNA, 74 bp, Homo sapiens
gacgccacagacagcagcgcagtaccaccttccagagatgaaaagaagatttttcagatcccctggatgcatgc

SEQ ID NO: 223863 - DNA, 98 bp, Homo sapiens
gatgagccccggcacccccggaccgaccatgggcagatcccagaactttgcagaaaacaccatgaatgaactccttggctggtatggctatgataagg

SEQ ID NO: 223864 - DNA, 98 bp, Homo sapiens
aaggctctgtgcaatcctcacattcaagctgataggctgcgctaccggaatgtcatccagcgagtgattaggatgaccatgaaagctgtggttctaat

SEQ ID NO: 223865 - DNA, 50 bp, Homo sapiens
gccaaagcagctcattcacatacagcctatgctaagaaggaatctgatct

SEQ ID NO: 223866 - DNA, 80 bp, Homo sapiens
aacgtaacctcggcgccggtgacgtccctcccgctggtcaccactccggcaccaggtcgcaatggaagaagagatcgccg

SEQ ID NO: 223867 - DNA, 80 bp, Homo sapiens
gatctctgcagttacaggaacatcgtctgcttcatggttccctggcttcaaggaagtacgtctggtaccagggaggcatg

SEQ ID NO: 223868 - DNA, 101 bp, Homo sapiens
caaaacggttcgattcatcaaaaagatgctgtaaatgatgatgattttgagccatacttaagtagccagacaaatcagctgtttgcagacaaggtcccaaa

SEQ ID NO: 223869 - DNA, 75 bp, Homo sapiens
gaagaattttccaaatgaatttgcaaaacttactgtagattcaccagaccagagcacttgggcagcagcgccaag

SEQ ID NO: 223870 - DNA, 101 bp, Homo sapiens
cagcaacagcagcaactgccgcacccttgaaaggaggcccctgccgtgtggacccgtaaaataaaatgggtggccgtggagatcctggaaggagagtcggt

SEQ ID NO: 223871 - DNA, 75 bp, Homo sapiens
cacttctgatgacacctttattttaaaagctgatgttccaagattttgatccaaacaatatcttcaaggcattct

SEQ ID NO: 223872 - DNA, 82 bp, Homo sapiens
taaagcattgaacagaagcagtcaccgtgattttcatgtgagacggtttaagcggaagcatcttactgccattgactgccag

SEQ ID NO: 223873 - DNA, 101 bp, Homo sapiens
aagtggctgacatggccaccaacacacgtgagatccgtgctcagctcacagagcagatgaaatgcctggaccagcagtgtgagcttcgggtgcaactgttg

SEQ ID NO: 223874 - DNA, 95 bp, Homo sapiens
gactgacaactgtgagacatgcacttgctacgaaacagaaatttcatgttgcaccctccgtgagacacacaaaatcgcagtgttttacattgctg

SEQ ID NO: 223875 - DNA, 101 bp, Homo sapiens
ctctgcaggacgtgtctttcactgtgatgcctggacagacacttgccctgggaggcatgcatctccccatgtgctatgatgctggctctggtgtacattga

SEQ ID NO: 223876 - DNA, 100 bp, Homo sapiens
tggccatcgctggaaacaagtgcgacctctcagatattagcaattcacagaagctgtgagtccttcagtgctacccccttcagctttgccactggacctg

SEQ ID NO: 223877 - DNA, 114 bp, Homo sapiens
tgccgcgtctccgcgttcccagcccgggtccccgcgttcacagccccagcgcagggggatatgagactttctactcggaatatcctgagtgttgcgtggatgtaaaacccattt

SEQ ID NO: 223878 - DNA, 101 bp, Homo sapiens
ctctgagcattctggggaaaagaaactacagtcatcacaatggtctggatggaactggcatttgatccatatgaatcgtatgctcgagatattttgcgacc

SEQ ID NO: 223879 - DNA, 50 bp, Homo sapiens
ctcggtcactgaagccatccaagcgtgcaagctggcccaggccaatggtt

SEQ ID NO: 223880 - DNA, 102 bp, Homo sapiens
gattcagcttgctttactctttcattgttgggacatgtatattgtgactgtgaagtgctgaccacactcaccccagacactggccgtatcctgtccaagcta

SEQ ID NO: 223881 - DNA, 88 bp, Homo sapiens
tgatggcgataagtcattaccacagattattcaggacagaatattcaagcacatatcacgtaacagtttaatatggaacaaacatcct

SEQ ID NO: 223882 - DNA, 100 bp, Homo sapiens
ccctcgccatgggcgagaaccagaggctgcggggcgagctggacaggtgcaatggatgagcttcatagtctggatccaagaaggcaagagttattggaag

SEQ ID NO: 223883 - DNA, 98 bp, Homo sapiens
gtgaaaaggagaccaagaaacttatgcagagggagatgtccatggatagtgctgagcagatcactgcactgtgcaggagttttaacgacagtcaggcc

SEQ ID NO: 223884 - DNA, 100 bp, Homo sapiens
agattcgcagtggtcgcttcttctccttggctcatcagattcaagagatgtttccccaggttccataccatctggtactgcaggacctccagctgacacg

SEQ ID NO: 223885 - DNA, 74 bp, Homo sapiens
gattatggacccggccgaggcggtgctgcaagagaaggcactcaagtttatggcagcacacttctgcttttgtt

SEQ ID NO: 223886 - DNA, 90 bp, Homo sapiens
tctagctattgccttattttttctcatggatgttcttcttcgagtatttgtagaaggatatgagggaaggcaccattggagatatggcta

SEQ ID NO: 223887 - DNA, 87 bp, Homo sapiens
ccgtcttcccggcgagtccgcgacggtcgccgcccacggcgagctatttccttcgtgctaccatcagccgccgcctcaatgatgttg

SEQ ID NO: 223888 - DNA, 83 bp, Homo sapiens
gccgcagcgcaggcagcccagcagattttgcaagaacgaggctcaaggatgtgagggacacagtattgacagctgaagaaatg

SEQ ID NO: 223889 - DNA, 101 bp, Homo sapiens
gaaaacttgttgaagagattggctggtcctatacagcatttaaatcaaacggtattgagatggattgggttatgaaacataatggtccaaatgacgctagt

SEQ ID NO: 223890 - DNA, 75 bp, Homo sapiens
caagtgtgaggagttgctaaatgctcagcagaagatgactcaagaccggcctctgcttgccgtgcaggaggcgct

SEQ ID NO: 223891 - DNA, 96 bp, Homo sapiens
gaaaaaggaaaggaaggagatgcgggccgggtatgactttgcaactgaagctgaaggagtcttttctgacaaattcctcctatgagtccagcttcc

SEQ ID NO: 223892 - DNA, 73 bp, Homo sapiens
tggatacaaataaatcaagatttgttgattttcaaaaggttctgccattacaggaccagtagcaaaggagtgt

SEQ ID NO: 223893 - DNA, 48 bp, Homo sapiens
tttcccaacacccgccaccagcagtcccagttgtgacatgatggaact

SEQ ID NO: 223894 - DNA, 75 bp, Homo sapiens
ggacaagcttttgtccccaaaccagagtacttgattctaaagctcgaaaggcctgctatagttcagaatatcaca

SEQ ID NO: 223895 - DNA, 74 bp, Homo sapiens
agttccgcatcccattttttatgtccacagatctattccagaggggagcttcaccacttcattgacggctttaa

SEQ ID NO: 223896 - DNA, 98 bp, Homo sapiens
ccagccggaaagtacgagtcggctcagcctggaggccatttacaagatggtttcgtccgtgatgaagatgccggaggacgagtcgaccccggaaaaga

SEQ ID NO: 223897 - DNA, 100 bp, Homo sapiens
gcaaggaatccaaatgcatcattcagatgcaaggcaactcgaccatttggcaatgaggagcagcagctggcgtgggccaagcgggagagcgagaaggcgg

SEQ ID NO: 223898 - DNA, 119 bp, Homo sapiens
agaagatgtcttgggggatgagagtcagacaaccccaaatcgaggacctcaagcaatgatagaaggcccttcattgcactctgtctttccaatgttgcttttatgcttccctggcaatt

SEQ ID NO: 223899 - DNA, 101 bp, Homo sapiens
agggactgaggagtcgccgccgccccgagtcccggtactccaaagattcaggtttactcacgtcatccagcagagaatggaaagtcaaatttcctgaattg

SEQ ID NO: 223900 - DNA, 100 bp, Homo sapiens
cgggaggagggtacgagtggccgaccacggatttgcattgccgaggacgggaccccagggcagcgaagcaggtgctggagaatctggtaaaagcaccatt

SEQ ID NO: 223901 - DNA, 100 bp, Homo sapiens
gccgtctccgccatcgagcgcccctccgagctggggttggacgctgccagtttgcacagcagcaggaactgtggctgcaccatctgtcttcatcttcccg

SEQ ID NO: 223902 - DNA, 97 bp, Homo sapiens
gggacaacattcagacccatttccagtcatgagcccagaataaagagaccagtgttttagctgctgcaaaagtgattgacactaaatctgaagaaga

SEQ ID NO: 223903 - DNA, 100 bp, Homo sapiens
tgtcagtgtgatgaagattggcacccaggtttacccaaggtccagcctagcccctaggcaccatgtcggacagtgatctaggtgaggacgaaggcctcct

SEQ ID NO: 223904 - DNA, 100 bp, Homo sapiens
acaatgtgctctttgcccctattatggagaaaggtgttccctagtgtctcaggatgatacataccggtttttaactttggtgtcatcaaatgcaattgca

SEQ ID NO: 223905 - DNA, 79 bp, Homo sapiens
ccacctactttgactatgcggcctcactgcctgaggacgacgtggactacagaagctcttcgtgtggtgaagatcttac

SEQ ID NO: 223906 - DNA, 100 bp, Homo sapiens
gcccaggtgcccagaggactttcttccagcttctgctgtccttctttgtggagagcaagctgtgccctcctggctgaagaagccccaagacagccagctg

SEQ ID NO: 223907 - DNA, 89 bp, Homo sapiens
ctcctgttgccccgtggtggtcctcccagacaccttgctagagacatgacctaacaccctgatgaccactctcagggaccttgagtgac

SEQ ID NO: 223908 - DNA, 100 bp, Homo sapiens
cacgtccaagcaaaccgggaaaggagaggatcccggagccgtgtgaacgtggcatcactgacacaatcagaaattcgagacatcatcctgggtatggaga

SEQ ID NO: 223909 - DNA, 100 bp, Homo sapiens
catggatatctctactcgctccaaaggagccagcaccgctctttgaccttgccatgcttgccttagatagtccagagagtggctggacagaggaagatgg

SEQ ID NO: 223910 - DNA, 100 bp, Homo sapiens
tttgaagacaatcgtcacttatacagcgaccgtggcagccatgtattacagctactacatgctaccggacggcacttactgcctggcgccgccccctccc

SEQ ID NO: 223911 - DNA, 90 bp, Homo sapiens
cagatgaacccatcaaagagtgcgcttacagaatgaagaacccctgccagaaggctgggaaattagatatactcgtgaaggtgtaaggta

SEQ ID NO: 223912 - DNA, 82 bp, Homo sapiens
gttttgagcctcatctctacgtgtatatcgaatcccaagacaacaaatgcagccctgaggatttggctactgcatataacaa

SEQ ID NO: 223913 - DNA, 82 bp, Homo sapiens
acctgcgggaggagatcctcagcggcgccttgcggagggaccccaatctccagtctatgtgctgaagaagcagcagcccaag

SEQ ID NO: 223914 - DNA, 100 bp, Homo sapiens
ctgcttaaaggcagatggcaaaggagtacttcccaggaaacttagaaaactcaatgtgagtagtgacactgtccagcatggtgtggaaggattaacgtat

SEQ ID NO: 223915 - DNA, 123 bp, Homo sapiens
ctcgttcaggaggaaccccaggcccttccagcggtggccacacgtcacacagtggggacaacagcagtgagcaagattcaaccctatgaaaagataaaggccaggggcttgcctgataatata

SEQ ID NO: 223916 - DNA, 101 bp, Homo sapiens
aagttttcacttatcatctattccaccgtgttctggtggtgccaccgaacatcgcagaactgaagaatttggaggtgctcaacttttttaataaccaaatc

SEQ ID NO: 223917 - DNA, 101 bp, Homo sapiens
gccctccggctccgcgggcggcccacggcgagggctctgccagcagacagccttggcacacaggcacaagggctggagcccagagatgagagtgcccaagg

SEQ ID NO: 223918 - DNA, 100 bp, Homo sapiens
cgacaagagtgactggaaggtcgtcaggaaggctctgacagtcattgatttcaccgaggatgaagtggagctcagcattgccaagaaacatgacccgctg

SEQ ID NO: 223919 - DNA, 80 bp, Homo sapiens
tgtcttcggtggactccttcggcagtccacccaccgccgccgcctcccaggtcacagaagatgtgaattcaagtatcaag

SEQ ID NO: 223920 - DNA, 75 bp, Homo sapiens
gccatacgcgctctccctgtttagtgacaaatggcctacagctgtgagagcaaatggacatctcctcctgaactc

SEQ ID NO: 223921 - DNA, 100 bp, Homo sapiens
aagtgggggaggagcgttccttgtcctccctctgcacaaggcatagaatgtcaagctaaccaggcgtccgctacttcagaagagtgtactgtcgcatggg

SEQ ID NO: 223922 - DNA, 90 bp, Homo sapiens
gtgaccgagaccgtgaccgagagcgtgaccgagagcgcgaatatcgtcatcgttagaagagccagttcctgtgcttggccgtgcaagaag

SEQ ID NO: 223923 - DNA, 100 bp, Homo sapiens
gtagtttcctgacctctgacacgtattgtctcaagattaaagcttcagctttagctgcagctgcctctgttcagccacttgcaacacaatgtttccaact

SEQ ID NO: 223924 - DNA, 90 bp, Homo sapiens
gagagcctaaaggagacatttgacccagagaaggagacagtccactggtctccacataatgaaactattctggcttcaagtggtactgac

SEQ ID NO: 223925 - DNA, 83 bp, Homo sapiens
caggcgcggcggcacccccaggccaggggcacctctggtggggcagaaggtgtggatgaggtcaccattgtcaacattttgac

SEQ ID NO: 223926 - DNA, 100 bp, Homo sapiens
cggaggcggcggtgcagcgctccgaggaggtggccaagttggagaagcacttgatgcttctgcggcaggagtatgtcaagctgcagaagaagctggcgga

SEQ ID NO: 223927 - DNA, 74 bp, Homo sapiens
tatgatttgcaaaaagaagtactagatctattaatgagatgaagcggttggaagaaatgtcaaatatgtttcag

SEQ ID NO: 223928 - DNA, 100 bp, Homo sapiens
tcttgattggaatgttctccctgcagcagtcagcccaaaggaagcaagtctggaaaagtttgaaattccagtaaaaattcgtttgagtcctgaaccgtgg

SEQ ID NO: 223929 - DNA, 83 bp, Homo sapiens
gtgcctgccgatatgcctacagaatcatctggccgcgatgggcctcttggaacattggtgtgttcatctgcattcgatgtgct

SEQ ID NO: 223930 - DNA, 95 bp, Homo sapiens
ctcaatctgaccaagcgaccagcagcaaacatgtcttgacggaagacatagtacaccgggaggtgacccctgaccagaaactgctgtcccggcga

SEQ ID NO: 223931 - DNA, 122 bp, Homo sapiens
cccagctggcccgtgctttcactatggactgtattactttggaagaatgtctactagagtccttttagccactctttccatccctattactcctgagcgtacggatattgctcgacttctgg

SEQ ID NO: 223932 - DNA, 75 bp, Homo sapiens
tgcctcatcccagccatgtcatcttatctacgaaatgattcaggcttctccagggaaagtgaccgaggcagtgaa

SEQ ID NO: 223933 - DNA, 99 bp, Homo sapiens
aggccgaaccagcgcgggggtcgaggctcttcagagtaacctgaggtactccttgttgccaagacggctcctcatcagcaaaagattagctcagtgttt

SEQ ID NO: 223934 - DNA, 96 bp, Homo sapiens
ctgttttcgacaggtgtgcaggtttcggcacatggagattgatagatcgcggattcaggtgtggctctatgagcaagtgaatatgcggatagaagg

SEQ ID NO: 223935 - DNA, 75 bp, Homo sapiens
gtcaaagcagcctctgaacttctcatgaaactctcagatgacttcaaacctgcttctattgacacttcttctgaa

SEQ ID NO: 223936 - DNA, 50 bp, Homo sapiens
gtctttgtgcacatttacatcaaggctcgtggaggagttcatgctcttgg

SEQ ID NO: 223937 - DNA, 54 bp, Homo sapiens
ctagagcattcagcacaagcatggaggctggagtgcaatgttgttatcatagct

SEQ ID NO: 223938 - DNA, 100 bp, Homo sapiens
acaaggaggaaccagtcactcctactagtggagggggtccaatgtcaccccaggatgatgaagcagaagaggaccattcctcaagaattttgtatccaag

SEQ ID NO: 223939 - DNA, 151 bp, Homo sapiens
ttaaataacaacctgttacgagttctaccttttgagctgggaaaactgtttcagttgcagactttaggcctgaaagtgtcttctccccgggtttggtggcctgcttctggagtggtcagttctgctgccgacatgcccacccagctcgaga

SEQ ID NO: 223940 - DNA, 74 bp, Homo sapiens
tgggagcagaagggaggctccaagacctcatcaacaattaagattggatttgaggctcctcccctccagggaca

SEQ ID NO: 223941 - DNA, 46 bp, Homo sapiens
gccaagcgcttcgccatcgacatagccagctgaggtgggtgtcctg

SEQ ID NO: 223942 - DNA, 101 bp, Homo sapiens
aaggagccaccgccaagttcgaagggcggactttttaaaactgtggacttaaatgttctgcaaagtcttacacaaaagcccaatacagtacatgaactacg

SEQ ID NO: 223943 - DNA, 122 bp, Homo sapiens
gcacaggccgtcgctatgagcgggaccaccctgggcacagcaggcatcggaggaacgcctttttacccaagtcagccggtgtatcagtcagcacctatcatagtgcctacgcagcaacagcc

SEQ ID NO: 223944 - DNA, 50 bp, Homo sapiens
caaccttcgatctcctgacgaaccagtgtgcttttcttggagaaagaaga

SEQ ID NO: 223945 - DNA, 100 bp, Homo sapiens
caggattttcactcaggaacctttggtggcatccttcatgaaccaatggctgatctggttgctcttctcgtcttccacctggaagccctctctggctaag

SEQ ID NO: 223946 - DNA, 100 bp, Homo sapiens
cgccaaggggggcaagggttcggccgtgccctccgacagccaggcccgcgagaagagaagctcggcacagtgacagaggcacccagggctcagcaagctc

SEQ ID NO: 223947 - DNA, 96 bp, Homo sapiens
aagcgccttagaggagccatttttccagctgatgtttgagccagcatgtcgcggaggaagcaagcgaagcctcaacatttccaatccgaccccgaa

SEQ ID NO: 223948 - DNA, 99 bp, Homo sapiens
tcccatcaccatcacagagagcgatctgccactgcagagccccgccatggaagacacgccgttggtgatatcgaagcagaagacggaggtggtgtgcgg

SEQ ID NO: 223949 - DNA, 100 bp, Homo sapiens
tgaaactcttgaaaaaggatccaggaaacgaagtgaagctaaaactctacgcgctatataagcagaaaaatgtaaggggtgaattcacttattatgaaat

SEQ ID NO: 223950 - DNA, 100 bp, Homo sapiens
caccataggagacatggacgaagccttcaaatccatcaagctcatcaaaaggtctctaattaacagaagatggcaaagcccagccacagcagctatgtcc

SEQ ID NO: 223951 - DNA, 96 bp, Homo sapiens
cgtcccgaccctggccgccccgagcggagcctggagccggaagaattaacctcgagtctgcacgcttttaagaacaaggcctttaaaaaatccaaa

SEQ ID NO: 223952 - DNA, 75 bp, Homo sapiens
atgttcatgaaatttgtaagtgaagatcttcatcggtgtgcacttttaacagctaaatttcaacagtgccacttc

SEQ ID NO: 223953 - DNA, 101 bp, Homo sapiens
gaacgactacacgcacgccctgctccgccacgaccccctgggaactaccactgctggaatgaagcatggatgacaaggcctgaccttcctgttggatttgg

SEQ ID NO: 223954 - DNA, 75 bp, Homo sapiens
agggctgtgaagacgcacggtgccaggaccaagtatctgaggttgacggatatattcagacgttacgacacggat

SEQ ID NO: 223955 - DNA, 75 bp, Homo sapiens
caagaggaagcggaaaccagtggccacagcatctttgtctagccccagtgcaggcaagagtttcaccttgaccat

SEQ ID NO: 223956 - DNA, 98 bp, Homo sapiens
gaagattacctcatccagagaaggtatccatcacgaattgaaaaaattgactatgaggagggcaagatgttggtccattttgagcgctggagtcatcg

SEQ ID NO: 223957 - DNA, 73 bp, Homo sapiens
gtgaggggtggcaaacagctgctccacagcccattctttaagggcgacttcttcgtgcacttcatggacctcg

SEQ ID NO: 223958 - DNA, 75 bp, Homo sapiens
attttttgcctttgttgattaactggacaaattcaggaggccagcaagcgcatctccagccacatccctttgatc

SEQ ID NO: 223959 - DNA, 83 bp, Homo sapiens
ggaggtcatgaaggacctgagcctgacgcgggccgcgcgggaacaagatcactcaaggtgaaggataatctactaataccagc

SEQ ID NO: 223960 - DNA, 83 bp, Homo sapiens
ctacgacgtccctcaaaccttgcttctaggagataaaaaggccaaaggtgtccaaactatacagacccacagaatctaacaac

SEQ ID NO: 223961 - DNA, 74 bp, Homo sapiens
catgcggggtccgagcggggctctgtggctgctcctggctctgcgcaccggacggggaggtttactgcatcgac

SEQ ID NO: 223962 - DNA, 100 bp, Homo sapiens
tttcttctgcatggtgggtacccccatgctgtggcacggcttcagggtatatttacttctggcacatgggaagagaaatcagatgaaatttcctttgctg

SEQ ID NO: 223963 - DNA, 100 bp, Homo sapiens
gtgaggggcgcgcgcctgcccagctttgcagcccccgaacgcggcctcgcacaggctttgaacttggcctactccagcatttacggcagctaccggaact

SEQ ID NO: 223964 - DNA, 98 bp, Homo sapiens
tgccagtgcttaggctttggaagtggtcatttcagatgtgattcatctagaatagcgggttttgcagcaattgttgcatatggattatataaactgaa

SEQ ID NO: 223965 - DNA, 100 bp, Homo sapiens
gtgtgttgcatgaatttctaaggagtcacagatgctgggaagtatggcccgaaagaaacctcgaaatacctcaaggttgcccctggctttaaaccccctg

SEQ ID NO: 223966 - DNA, 75 bp, Homo sapiens
gcgggcgcgcaggccgcggggagcacctgggtggaaaaggattattcatacctgaaggagatatgtgatcaccaa

SEQ ID NO: 223967 - DNA, 75 bp, Homo sapiens
cagggtccctgaagagggaagacacgcggaaacagattggcacttctctgtttgatgaagagggagccaagattg

SEQ ID NO: 223968 - DNA, 75 bp, Homo sapiens
cgacacgcctgccactcctgcccccaggttgaaatcacaaagattagacacctttttagataggtgttcttcagc

SEQ ID NO: 223969 - DNA, 75 bp, Homo sapiens
ggcctggcgacccattcaggcacttatggccatttcagccactaaaactgagcaagaggttgacattatattgcc

SEQ ID NO: 223970 - DNA, 80 bp, Homo sapiens
agccacccaggccttggtcctagcacccactcgagaattggctcagcaggtttcctccagcctggtggtgccctgtcctt

SEQ ID NO: 223971 - DNA, 114 bp, Homo sapiens
gcatccttctctggccaggaggatctgtgtccaaaactccacgttttctgctacctggaaccgagtgaagtgcgccacaagcaaaccagctttctttgcagagaagcttcatca

SEQ ID NO: 223972 - DNA, 124 bp, Homo sapiens
ccggcgccgcggcctcttcggctgcggaccctgccattccggaggagagatgagcatcaggattttatggatgagcaaaaacgactaaagaagcttcgtggaaaggagaaaccaaagaaaggag

SEQ ID NO: 223973 - DNA, 53 bp, Homo sapiens
atgctcagtattccttcaggctctggattggcccggatcctcgttcgcctgcc

SEQ ID NO: 223974 - DNA, 100 bp, Homo sapiens
agaactggatcttaccttgcccaccaacttcagagatttgtccaagaaattgcatctgatggtctcaagggtcgtgtgtttgaagtgagtcttgctgatt

SEQ ID NO: 223975 - DNA, 100 bp, Homo sapiens
aaagtgcaggccgaactagatgagaccaaaatcattctgattggtgctgaagacatggacggcttccaggcagacacggaggaggaggaagaggaggagg

SEQ ID NO: 223976 - DNA, 90 bp, Homo sapiens
ctgaaacaatgggacccatgggttgatcacgagctgctcaggcaagagctgaacacgcggtttctggtgcagagcgccgagcggcctggc

SEQ ID NO: 223977 - DNA, 76 bp, Homo sapiens
ggacgagccctcaccagtccccaatgtagaagaggtgacacttcccaaaacagtgcacagccagagaacaacacat

SEQ ID NO: 223978 - DNA, 51 bp, Homo sapiens
gcgcgagtgaggaaaggaggtactgtagtgaccatgaaagacaccaggttg

SEQ ID NO: 223979 - DNA, 82 bp, Homo sapiens
tgcttatggcggcgctggagagggggcgctgagctgttgggactaatagggatgccaaaggaaaaatatgatcctccagatc

SEQ ID NO: 223980 - DNA, 100 bp, Homo sapiens
ctgagccagcggagctgcttgcggaagaagtccctatagaaccatacaacatcccactgtcccaggccgaagtcatacaggaagggagtgatgttactct

SEQ ID NO: 223981 - DNA, 75 bp, Homo sapiens
aaaccaactcagaatgcttctgagaaggtgaaaaatcacatgtggatttttgtaaatgccttaattgaaaaccca

SEQ ID NO: 223982 - DNA, 75 bp, Homo sapiens
gcagaacttacgctgcgggaccccgggcactgttgctgctgcgggagaagcagcgtcccctctcacagtatgtcc

SEQ ID NO: 223983 - DNA, 90 bp, Homo sapiens
ggatgatgtgagaaacaggcagcaggatgtgcggcggagtttaagagagctgtgaaagtagcaacaggacaagaactctcaaacaatatt

SEQ ID NO: 223984 - DNA, 100 bp, Homo sapiens
tgagcctgcagagcgcgcagtacctccgacagtgggagtagctcaccgttacccaagtatgcttcatctcccaaaccaaacaacagctacatgttcaaac

SEQ ID NO: 223985 - DNA, 80 bp, Homo sapiens
tggaaaaggtggaagagcagtgccatccattgaatgggttgaacttttcacagacatgcacatgatggtgtccaagccag

SEQ ID NO: 223986 - DNA, 100 bp, Homo sapiens
aaagagcttctctccagagtagaaaggttgctccttgagggcaggacagttcttatggctttatccgttgcgtaagcacagagaggtctgcgaggtcaaa

SEQ ID NO: 223987 - DNA, 75 bp, Homo sapiens
gcgcagcccacgctcatgatcgacttcctcacccgcgcctgcgacctcgggtcctcactgagcagcgagtcgtcc

SEQ ID NO: 223988 - DNA, 74 bp, Homo sapiens
gactacggagcataggaggaaaattcatcatctggtggaaaggagactatggaaccaggatccagcagtacttc

SEQ ID NO: 223989 - DNA, 83 bp, Homo sapiens
gtgatttgtgacaaatgtgaaggaagaggagatcccagaactggagattgacgtggatgagctcctggacatggagagtgacg

SEQ ID NO: 223990 - DNA, 105 bp, Homo sapiens
tcgctttggaaacgctttcctgaatcgtgattcgcctttgccagtctcatctcgtgtctgctttgttaagttccatgatccagactcagcagttgtggcacagca

SEQ ID NO: 223991 - DNA, 136 bp, Homo sapiens
cccgaaaatggcacagaaatggtatcaagaaaccccgatcacaaagatacgaatctcttaaggggagccggccaggttgcagcgcggacacactcgcaggtcgctgtggccccagcctcgcctgacagaatgagcg

SEQ ID NO: 223992 - DNA, 100 bp, Homo sapiens
cgcgcgcgctcgcgcaccacgcgccccgcgcggcccgcccggatcgtggcctctcgagagcaagtgtaatgttcaagctcagaaatgccttatgtggatc

SEQ ID NO: 223993 - DNA, 98 bp, Homo sapiens
gtggatcaagcaggttttaaatcaagatttaacattccaacacataaaaattatttatccaacagctcctcccagcggacaaggcaaaatctcagcaa

SEQ ID NO: 223994 - DNA, 82 bp, Homo sapiens
aagaactgagtgtggacagagcacctgtcctcgccagcgcccagctggaagctgaggctggagtgcaatggcatgatctcgg

SEQ ID NO: 223995 - DNA, 87 bp, Homo sapiens
aatatgtggatactccatttggcaaggcttgctatcagaggaagtggagaatgtgccttcctgaatgacaatggagtcaacagtggc

SEQ ID NO: 223996 - DNA, 101 bp, Homo sapiens
ggacgtagcccggcttgtattgggtgacagagctgaatgaacctctctccaatgaagatcgaaatctcctctctgtggcctacaagaatgtggttggtgcc

SEQ ID NO: 223997 - DNA, 90 bp, Homo sapiens
ctctctggccctgctccctccgagcgctccgccgttgcccgcctggcccctacgggcgtctacggtgacgtgcagcgcgtgaagatcctg

SEQ ID NO: 223998 - DNA, 80 bp, Homo sapiens
cggcaacctctacaaggccaagttcatctcctccgtcaccagccacatctaccagggtcggcactcttcaccctcccgag

SEQ ID NO: 223999 - DNA, 83 bp, Homo sapiens
actgggaacagacaaagaaacactctccttctgccacatttgttttgagctaaatattgaggagtatttgatttctgacactg

SEQ ID NO: 224000 - DNA, 101 bp, Homo sapiens
gcctctgccggggagcggcccgcggatgcgcaccccgccagctctcgggagccagatttggtcacacaccagtacaagcaagactcagctgcctggccaag

SEQ ID NO: 224001 - DNA, 101 bp, Homo sapiens
aagagacctttgcgttcctctggggtggcactttccatagctgtaggactgctggaggtacatcaggaacgtctctatcaagaatacaatttcagcaaggc

SEQ ID NO: 224002 - DNA, 100 bp, Homo sapiens
tttcctctcgggaagagatagatcatgcagagtattacctttacaaatcgcagtggtcatgggctcctgcaccgcaggaggagcctatgtgcctgccatg

SEQ ID NO: 224003 - DNA, 50 bp, Homo sapiens
aaagaaactcctgtatatattcaaacaacagtttcactcttgttgtccag

SEQ ID NO: 224004 - DNA, 100 bp, Homo sapiens
gctaatggagacatcagaagcttaaaggaagcagaaaatgtgtggcggattactgggacagatggagaatttttggaaaaggtacgacagaagaaaaaac

SEQ ID NO: 224005 - DNA, 83 bp, Homo sapiens
gagcgagctgagtggttgtgtggtcgcgtctcggaaaccggtagcgcttgcagcatggatccttcatctgtacctaatgcaga

SEQ ID NO: 224006 - DNA, 100 bp, Homo sapiens
ggccgctctgggatcccggccaccagcaattgtccgcccgtgttcccaagaaaatcctcaagtgcaaggcagtgtctcgagaacttaatttttcttcgac

SEQ ID NO: 224007 - DNA, 101 bp, Homo sapiens
ccgccttctctgtcagctctttccccgtcagcatcccagccgtgctcacggagcatcagatccatgctgctgctgactcggagccccacagcttggcacag

SEQ ID NO: 224008 - DNA, 98 bp, Homo sapiens
cagctttgaagtgggagcccagttggaagcccgggaccgtttaaaaaactggagatagtggagcaaaccatgcggaggaggcagcggcgagagtggga

SEQ ID NO: 224009 - DNA, 109 bp, Homo sapiens
aaatcccggatctcaagctcgctatggagaattacgttttaattgactatgacaccaaaagccggcacagtcttcactaccgtagaagaccttggctccaagatactcc

SEQ ID NO: 224010 - DNA, 137 bp, Homo sapiens
gttggtctccctggactgaagagagggagaatagaagcccaagactaagattctcaaaatgaacaaagtgttcatctaccgcgggaaggaatatgagcgaagagaagatttccagatgcagctgatgacccagttcc

SEQ ID NO: 224011 - DNA, 112 bp, Homo sapiens
tgcccggccaagaggcaaaggggaggttacgcagcaaaccatccagaaggattttttatcaagcagaaatgcatcgaacaacgagaatcaagatcactgagctaaatcccca

SEQ ID NO: 224012 - DNA, 96 bp, Homo sapiens
gttcagcacaccagtggggcagtgcctcgattgtgaaaactgctgagagagacttgcaatccagtcacataagtataataaagaaatattggtcct

SEQ ID NO: 224013 - DNA, 100 bp, Homo sapiens
gaaaacaacagtgacaagaacagtgggccacaggggccccgaagaactcccacaatgccacaggaggaggcagcagctcgccctcccctacctgcggaag

SEQ ID NO: 224014 - DNA, 100 bp, Homo sapiens
tggcaacgagagtgtgaagatcttggatccacatctcaaagaagtggggcttcaccaagttcaatgctgatgaatttgaagacatggtggctgaaaagcg

SEQ ID NO: 224015 - DNA, 95 bp, Homo sapiens
tttctgagagcaaatgttacttgttccacgtttcttccatgtcagttttgattacgaagatgcaggctaccagactgcagaacttgtaaaaatgg

SEQ ID NO: 224016 - DNA, 82 bp, Homo sapiens
aggcagcggaggagcccgaccgacccggtactaggttttgacaagcttgcatcatgcgtgagtataagctagtcgttcttgg

SEQ ID NO: 224017 - DNA, 90 bp, Homo sapiens
gaaaaagcaagagtttgttatatagcaattgcttgcacacatttagatgtggatttagtctgcataactgtaacagagaaactaccattt

SEQ ID NO: 224018 - DNA, 100 bp, Homo sapiens
cctcgccagcagccgtccggagccagccaacgagcggtggcgacatgtctaagaatgtgagccagtcacagatggcaaaattgaaccaacaaatggccaa

SEQ ID NO: 224019 - DNA, 75 bp, Homo sapiens
ctcgactcttggcgccaccgcctcatgcactgtgtagtctgcatgaagaaatcagtgatttttatgaatacatgt

SEQ ID NO: 224020 - DNA, 82 bp, Homo sapiens
atgacaaaacttcaagccaaacatcaagcagaatgtgatttgcttgaagatatgagcagcgggcgggcactttgcactggaa

SEQ ID NO: 224021 - DNA, 100 bp, Homo sapiens
gaaacgcagtggattatagctctgttttcttctttccaaaactgtgcacccctggatgaaatgtgctggaattgatgttcgtctgtgtgatgttggtgag

SEQ ID NO: 224022 - DNA, 51 bp, Homo sapiens
cgccttcaacctgctcttctgggagctggagttcctacgcgtggccaagaa

SEQ ID NO: 224023 - DNA, 80 bp, Homo sapiens
tgatgagagacatttacagcatgcacattttccttactgaaaggaaactcactgttggttatggaggttttgatgactat

SEQ ID NO: 224024 - DNA, 83 bp, Homo sapiens
ggaaaagaaagcttaggatattttgttggtgtggacatgaaatgagccgtcagactgctacagcattacctaccggtacctcg

SEQ ID NO: 224025 - DNA, 103 bp, Homo sapiens
tcgtagcgcagaaagtgaagctgtttcgggccagcgacccgctgctcagcgtcctcatgtggggggtaaaccactcggtgctggagaatctggtaaaagcacc

SEQ ID NO: 224026 - DNA, 100 bp, Homo sapiens
accttgagctccaggagttcgtctcttacgtctgcggaagtgcagctgcctcagttcttagcgcaggaatgtggttcctgttttaacgtagtacatgtca

SEQ ID NO: 224027 - DNA, 74 bp, Homo sapiens
ctggataacccggtggtgcagctgggcctgaccaacccgaaaacattgctagatgagcagcaccagcagtaaga

SEQ ID NO: 224028 - DNA, 50 bp, Homo sapiens
ggcttccaggtctcaaaggcagaagatgtccagctcgccgctgtccaaga

SEQ ID NO: 224029 - DNA, 101 bp, Homo sapiens
cccattgcagcatctgtgacaactgtgtggctgatgaaaccaaggccctgaaaggttcaccaagttgccagggtcgtgcagatcaacaaactgcagaagca

SEQ ID NO: 224030 - DNA, 75 bp, Homo sapiens
tgccagacacttgtagagagaggaggacagttcgacgaggtgctttataaatcatctcaggactttcaacccagg

SEQ ID NO: 224031 - DNA, 75 bp, Homo sapiens
gtccccctgccccgttcacaatttgatggagaaccttgtgacctgtctttgaatataacctggtatctgaaaagc

SEQ ID NO: 224032 - DNA, 100 bp, Homo sapiens
ggacgggaaggcgggagacgagaagcctgaaaagtcgcagcgagctggagccgccggaggtggtcgtcggttttctgagggtacttcagctgacagagag

SEQ ID NO: 224033 - DNA, 83 bp, Homo sapiens
ccacatctcggaggagctgaccacaactacagagtgactttccagcagatctgtaaggatgtgcatctggtgaagcaccaggg

SEQ ID NO: 224034 - DNA, 100 bp, Homo sapiens
ggccgggtcatcgtcacctccttccagaaagccaacatgctggaccagcatcacaccgacctgatcttaaagaagcctccccagctttctgaggatgata

SEQ ID NO: 224035 - DNA, 75 bp, Homo sapiens
ctccgccaccgtcttcaggccagctgcttttctaacccaaactgtatgtcttgatgacactacagtaaagtttga

SEQ ID NO: 224036 - DNA, 100 bp, Homo sapiens
acaagagagaaagagtggatttcagcctgcacggatggtcttgaaacacaaatggtttttgactaagaaaaatggctttgtcagcccaacagatacccag

SEQ ID NO: 224037 - DNA, 74 bp, Homo sapiens
ggggctgctcccatcattgatgtggtgcgatcgagagacaagagagacacctccaacttcgacaaagagttcac

SEQ ID NO: 224038 - DNA, 100 bp, Homo sapiens
gaatgatgccaagatcctcaatgatgtgcaggatcgctttgaggtcaaaatgcagatcttcgtgaaaacccttaccggcaagaccatcacccttgaggtg

SEQ ID NO: 224039 - DNA, 98 bp, Homo sapiens
ggtgggggaagctggtaggcacgggcggctccgcagtgaccggactcgggggagtaagtacaaatggatcctaggtgaagaaccggtggagaaacgaa

SEQ ID NO: 224040 - DNA, 98 bp, Homo sapiens
tcagcgcctacccgagtgtgcgaagctagccaagggaataggattgtgatgggcaagaaccacgttttccgcttcaaccacccggagcaggcaaggct

SEQ ID NO: 224041 - DNA, 75 bp, Homo sapiens
ccgcagctgccaggatttgggccgccaggcttgggctggggctggggacttccttccccgcggttcaggaatcgt

SEQ ID NO: 224042 - DNA, 98 bp, Homo sapiens
aggaaaataagatggtgaatatgtatcattatctctgtcacacttaacgatgatttcagttgcagggaccgaaggctccggtggcacccgggctattt

SEQ ID NO: 224043 - DNA, 73 bp, Homo sapiens
ctacttggcccctaccttgttttcatggcatccaccatcaatggcttagcagtgtctgcaaaaacgaatcttt

SEQ ID NO: 224044 - DNA, 100 bp, Homo sapiens
catgtcatctttgccaggactgatgcagatgcccctcctccaccagaggactgggaggagcatgtcaacagatcctaaatgcccaggagatgttgatttt

SEQ ID NO: 224045 - DNA, 76 bp, Homo sapiens
cctctcccacctgaacttgttgagcagtttggacctatgttcaatgggcagtttttatttgatagacctatgcatg

SEQ ID NO: 224046 - DNA, 75 bp, Homo sapiens
tgtcagcgtttggcttaacagatgatcaggtttcagttggctggggaacagaccagggaattggtggatttggag

SEQ ID NO: 224047 - DNA, 100 bp, Homo sapiens
atggtaaccactatgctactttctgtctctgtgaatttgactactctaagtgcctcagaataatccagaatggctactctgatctatgttgataaggaaa

SEQ ID NO: 224048 - DNA, 142 bp, Homo sapiens
ctggaagtcagcagagctgctcaaagattataagccaggagataaagtcctcctgcttcacctcgaggaaggaaaggacttaaccaccaccatgtcgagcaaaagaacaaagaccaagaccaagaagcgccctcagcgtgca

SEQ ID NO: 224049 - DNA, 97 bp, Homo sapiens
caaggacatggagaagatgttcaagcaatatggccgcgtggaaagtgtcaaaattcttcccaagaggggatctgaaggaggagtggctgcctttgtg

SEQ ID NO: 224050 - DNA, 88 bp, Homo sapiens
gatgagccaagtagcccccagcctgtcagccctaattggggaagcggggacaactgtgggaaggctgggaaggttaagaaacaacaga

SEQ ID NO: 224051 - DNA, 75 bp, Homo sapiens
gctcagaactgagaagctgtcaccacagaatctgaattatccagaacagaaagttgtgactgttggacagttcaa

SEQ ID NO: 224052 - DNA, 90 bp, Homo sapiens
cctgtacgagctttcgccaaagagcttttcctaggcaaaatcaagaaggataagcacattgaagaagtgcggaagaacaaagaatccaaa

SEQ ID NO: 224053 - DNA, 75 bp, Homo sapiens
cttcggatgaggataaacttaaaattgctgatgaaggctatgagggcactggccggtcactgtccctcaagctaa

SEQ ID NO: 224054 - DNA, 99 bp, Homo sapiens
agggagcgagccagcaagcggaagctgcccttcaccgcgggcgccaatggggagcagaaggactcggacacaggtccttatgtcgtcagaagatcgaga

SEQ ID NO: 224055 - DNA, 100 bp, Homo sapiens
cttcaccaagacctaaaaaaccccaacaacagctcccttaggtcatgcaagacaagataatctgccttccgaaaagagtgcagcctgctcagaaccactc

SEQ ID NO: 224056 - DNA, 100 bp, Homo sapiens
ctcctgagtagctgggattgcagacagggtctcactttgttgcccaggctggagtgcaatggcacaatcatggctcactgcgccctccacctcccaggct

SEQ ID NO: 224057 - DNA, 83 bp, Homo sapiens
ctctgtgtgctgagcgttctaaaggaaggcgtccgttggccttcgtacccgtcttgattgagttaataaaggtatccatggag

SEQ ID NO: 224058 - DNA, 100 bp, Homo sapiens
ccgccgggatctccggcgccaactgccagggggaccagaccgccttgcaccgggccacagtggtggggaacacggagatcatcgcggcgctcatccacga

SEQ ID NO: 224059 - DNA, 82 bp, Homo sapiens
ggggaggtcctccatgcgcagtcatgagtcgcttcaagtttatcgacaatgcagatcttcgtgaagactctgactggtaaga

SEQ ID NO: 224060 - DNA, 98 bp, Homo sapiens
gtggacggtggaagcgtgattctgctgagtgtcagtttacccctcactggagtcagatgaagacaaccccatctttaagtcccggtcgaagaaaagga

SEQ ID NO: 224061 - DNA, 75 bp, Homo sapiens
cgtccccctgccccgttcacaatgttgcacactgggccacagaggatccagcaaggatgaagaaatggagcagca

SEQ ID NO: 224062 - DNA, 90 bp, Homo sapiens
caaaaatatggaccagtggtatctctacttgttccaaaggaaaatcctggcagaggacaacacttttcaggattagaagaggctgtgtat

SEQ ID NO: 224063 - DNA, 83 bp, Homo sapiens
ggtggcatccagtggtggccagtagaggaggaggtgaacaaggaggaggtgagccagtggtacgagctggtggtgtttacagc

SEQ ID NO: 224064 - DNA, 100 bp, Homo sapiens
cgagtcgccgctgcagccctagtgactgcggcctgcatcccgcctagggactccacgtaccccagctgggtctcattgttccagaactgcattagttaag

SEQ ID NO: 224065 - DNA, 50 bp, Homo sapiens
cacgaagccagtatgtttgcagacggaaatccgaacgccagcagatctga

SEQ ID NO: 224066 - DNA, 75 bp, Homo sapiens
tgctgtgggcgctgctggcgctctggctgtgctgcgcggcccccgcgcatgaacattctagtatgccagtagaaa

SEQ ID NO: 224067 - DNA, 83 bp, Homo sapiens
cctcacacaccggcctcagcccgcaccggtttttagaacttcagccataaaaatgggcagaattttccttgatcatatcggtg

SEQ ID NO: 224068 - DNA, 82 bp, Homo sapiens
cagtgctcaaactcaccgaccaggaacaagctgaaagctggatacctaatgtcagtggagtcttctgagtgtttcctggaag

SEQ ID NO: 224069 - DNA, 100 bp, Homo sapiens
agtcgtccccctctccgccccccaggaggggcgagagggagccgcagctgatgtcaggaatagccaggccagaagaaggaaggcctgtggtgagtgggac

SEQ ID NO: 224070 - DNA, 101 bp, Homo sapiens
gagagcctgttggaacatgctttcttcaagatggaacaaagactgttgagtatgctccatgtagatcacgatggtgccatgacaatggtgtgaactacaag

SEQ ID NO: 224071 - DNA, 82 bp, Homo sapiens
cagagaatgaaggagaatgcaaagcatcggaaccagtacaagttcctcctgcttgagaacgtggtgcaccacttcaagtacc

SEQ ID NO: 224072 - DNA, 75 bp, Homo sapiens
tgccatgaccgagatccatgagtacaatcaggacctgatccgcaaggggcacaaatccttttgccactgtcaagc

SEQ ID NO: 224073 - DNA, 92 bp, Homo sapiens
cttcgccaactccgctgcctttgccgccaccatgcccaaaacgctgatcactggagattccatcgttagtgctgaggcagtatgggatcacg

SEQ ID NO: 224074 - DNA, 100 bp, Homo sapiens
gttgatggagattacctttgggtcttgggcgtctttggtactggcttttttaggggtctgcctggggattacccttgctgtggatagaagcaactttaag

SEQ ID NO: 224075 - DNA, 76 bp, Homo sapiens
gggtgttacgtataggctcactcaagtctcaaaccatgaattatgtgggacagctggctgggcaggtgattgtcac

SEQ ID NO: 224076 - DNA, 48 bp, Homo sapiens
aaactttctgacatgcctttaaaaagtgagccaagccccccgagaggc

SEQ ID NO: 224077 - DNA, 88 bp, Homo sapiens
ccagagggaaaccactgtagtctgggacaagataactggagagcctctctacaatgctgtgggttgttcctcaaagtcattcaagctg

SEQ ID NO: 224078 - DNA, 80 bp, Homo sapiens
gagctcgtccagctgcgtgcctaggatgtcggaggagatcatcacgccggtgtactgcactggggtgtcagcccaagtgc

SEQ ID NO: 224079 - DNA, 90 bp, Homo sapiens
cgaaatttacatgatgccttatcaggacatacttccaacaatatttacgaggcagtcaactctggcaggctgccctgagcacgctcaacc

SEQ ID NO: 224080 - DNA, 74 bp, Homo sapiens
gctgggatcccccgggctcggggcgcagggtaatctacagttgctgcagaactgcctggcagtgttaaatggag

SEQ ID NO: 224081 - DNA, 98 bp, Homo sapiens
tgccaaatatggccctggaacagaacacggagagttcctggctctggatcttggagggaccaacttccgtgtgctttgggtgaaagtaacggacaatg

SEQ ID NO: 224082 - DNA, 51 bp, Homo sapiens
ttcctccaaaatatagggaactattggctgcgggatgtagctcattttggg

SEQ ID NO: 224083 - DNA, 98 bp, Homo sapiens
aagtagaaagtctcagcagacccttcctgagggccgagcaacagtgtagtggcgtattccacatagcaaacagacgcaagatggctgtcctctctaag

SEQ ID NO: 224084 - DNA, 90 bp, Homo sapiens
ggatgggagaggccatggcaaaggtgaaaagccatacaagtgtacctgggaaggctgcgactggaggttcgcgcgatcggatgagctgac

SEQ ID NO: 224085 - DNA, 140 bp, Homo sapiens
ctaagagacccaggggaagacccaaaggcagcaaaaacaagagtccctctaaagcagctcaaaagattgacgagatgcctgaggctgccgtgaaatcaacagccaacaaataccaagtcttttttttcgggacccacgag

SEQ ID NO: 224086 - DNA, 51 bp, Homo sapiens
caggtcttgagtttggcaacacaggtgattgaagatagtactggagtccgc

SEQ ID NO: 224087 - DNA, 100 bp, Homo sapiens
aaccgccttgtggcaacatggctcaccctacctgtggtggtggaggtggatacagcagtcggagaacatctggcagagacaaatacggaccacctgttcg

SEQ ID NO: 224088 - DNA, 97 bp, Homo sapiens
gagcgcatcgaggatttggcgctgcagaaccagatccgggagcacgtcatctccatcgaggaatgtcgtactctcaggaggctccaccatgttcagg

SEQ ID NO: 224089 - DNA, 82 bp, Homo sapiens
cagcagccggctgcaggccagagagggcctcgggaagagatgcgaggatgacaagatgccaacgtccggcggtacctccagc

SEQ ID NO: 224090 - DNA, 83 bp, Homo sapiens
gagcctgtttctggggcaaaaacattcaagaatgagagcgagaacacctgtcaaggctgagtttgagaaagctgcagaggagg

SEQ ID NO: 224091 - DNA, 90 bp, Homo sapiens
cgtctcctgtggctgggacaagctggtcaagaccccagagggtataagtgaagaacagagatctcaggagttggctgcaatggaagaaac

SEQ ID NO: 224092 - DNA, 75 bp, Homo sapiens
tcagcacctgcttgtttggaagagttactggaggtgaactgtttgaagacatagtggcaagagaatactacagtg

SEQ ID NO: 224093 - DNA, 100 bp, Homo sapiens
aagacgcggtgggccgcccctccggatcccatggtccattattgcctttaccaagtcgttacagaatgggctctcgagatacacctgaacttgttgctta

SEQ ID NO: 224094 - DNA, 100 bp, Homo sapiens
ccaataaaaataaactgcttgaacatcctttgactggttagccagggcggcgactggcggcgcgatggacctgaccgggctcctgctggacgaagaaggc

SEQ ID NO: 224095 - DNA, 75 bp, Homo sapiens
caaaatagccaggacatgaggcagatcagtgacgggaaagcattaacttttgagctacgtccagaatagcatcat

SEQ ID NO: 224096 - DNA, 100 bp, Homo sapiens
ggcttccccagccacgtggaacttaatcaacaagatgccacatcagtagcaactgagtcttcagaatcaagcacttcagatttgccttcattcgaagttg

SEQ ID NO: 224097 - DNA, 100 bp, Homo sapiens
cccacaaaaccaagcgaggccaggccgctctggaccgtctcaaggtgtttgacggcatcccaccgccctacgacaagaaggtggcccggaccatcggcat

SEQ ID NO: 224098 - DNA, 98 bp, Homo sapiens
gaaacaaatgcctattggaggagatgttccagccttacagctccagtatgaccattgtaaggcggagtacgtccagcttgttactgaacttcgaatga

SEQ ID NO: 224099 - DNA, 75 bp, Homo sapiens
ctgtaacgctgacagtccccagacatacgatgggagagttgcagtgtggtcactgtcaaagattaacaccagaat

SEQ ID NO: 224100 - DNA, 90 bp, Homo sapiens
tgagatgattgccaaacccccagtacaacacctcaggtattgagccccactattacatctcccccaaacgcactgcctcgaagaagttca

SEQ ID NO: 224101 - DNA, 99 bp, Homo sapiens
gggcgtgggagatacgggcatagaggatgcaaacgctgtcaggggttcagcctctcagggtaacctgactgagtcctgggcagatgataacccccgaca

SEQ ID NO: 224102 - DNA, 75 bp, Homo sapiens
cagaagcacaagaaggaccttcacccattgtttgatgagacctttgaattgtatctgctgtgcgtttcagtcaac

SEQ ID NO: 224103 - DNA, 95 bp, Homo sapiens
ggtgcagatgcagtgtggctctggatagcaccttatggacagcatataggttgctgtagatgaatgttcttagctgtcatgtttaaaaatacttc

SEQ ID NO: 224104 - DNA, 95 bp, Homo sapiens
agcgagtacacctgcaccatccagcctgtgcctactacactggcacaagtggatagagaaaagatctatcagtggatcaatgagctgtccagtcc

SEQ ID NO: 224105 - DNA, 75 bp, Homo sapiens
ctgtttctctccgccgcgctctcgctctggccgacgagtggagaaagttcgccatcggtggtgtgaactcattgt

SEQ ID NO: 224106 - DNA, 100 bp, Homo sapiens
caatgccaccattgcagagcatgccccggttggacactgctttctgcaggttctgagatgcagtaaaatcgctggtgtgaaagtagcagaaattacagag

SEQ ID NO: 224107 - DNA, 98 bp, Homo sapiens
ttatctctaacgttggaaaacgggtctcggattgcgagctggctgccgagtttttcggttgaagtgatgcacaccaccaacattcttggcattacgca

SEQ ID NO: 224108 - DNA, 100 bp, Homo sapiens
gaactgctcagattggccatgtctatcctgcaatcgggctggtggtcatcctggcttccacggtggtggccatgtcggccgtggcccagctgtgggagga

SEQ ID NO: 224109 - DNA, 51 bp, Homo sapiens
ttcataggctatcccatcaccctttatgtcagatgtaccaacagtaccagc

SEQ ID NO: 224110 - DNA, 100 bp, Homo sapiens
atgaagattctgaagaaagaagtcattattgcaaagtgaagctgtggtctaccaatctagacaactcagtggcaagcattgaggcaaaggctaatgtgtg

SEQ ID NO: 224111 - DNA, 83 bp, Homo sapiens
cgagctggttaggaggcacagggcgtcggacctgcacgagctgtctgggaaagcaggcaggatgggagagtcgccgatagaac

SEQ ID NO: 224112 - DNA, 100 bp, Homo sapiens
gtgcgcgcgaaggagcggaagaatggcagtgctcaaactcaccgaccagcttccaccaacactttcttccaaatatcctgaagatgacccagactactgt

SEQ ID NO: 224113 - DNA, 100 bp, Homo sapiens
ctagccaggaacatggactgaagtatccagcgctcattgggaatttagttaagtggaatgcagtagccctctgggcctgggatattgtggttgataactg

SEQ ID NO: 224114 - DNA, 101 bp, Homo sapiens
accttgcctctctaaaggaaaatatgaaagtctgattgaagaggaaactgggcagaagaagatttaaatccattgggccagaaggaatgaccattactaac

SEQ ID NO: 224115 - DNA, 111 bp, Homo sapiens
acagcagcagcacctgcttccagactcagagtgtgagaaaaaaataaactcctatttgtttatggcaagagccgacagttagaatcagaaactgggaccacagaggagcac

SEQ ID NO: 224116 - DNA, 96 bp, Homo sapiens
aactgagccaggattgaatacttggaccccaggtgtgtcaaggatgccacaatgccatcgacccagaagtgcagcgggtgacctataacaatttca

SEQ ID NO: 224117 - DNA, 50 bp, Homo sapiens
cttctctgtcgaacacactgtgtttctggtccagttacaacacagggatc

SEQ ID NO: 224118 - DNA, 83 bp, Homo sapiens
cagggacccggtgacagcgtgagaggttcgcagagagcggtggtgccccccccgggcacggggccatgtacaacgggatcggg

SEQ ID NO: 224119 - DNA, 50 bp, Homo sapiens
tgaaaatgatttatgcaagtttaaggtggataattactgtaccttcctca

SEQ ID NO: 224120 - DNA, 90 bp, Homo sapiens
gccatggagacctcagcactcaagcagcaggagcagcccgcggcgaccaagatcaggaacctgccctgggctgtaaagtgagggaccaca

SEQ ID NO: 224121 - DNA, 118 bp, Homo sapiens
gaaatagaagccatgtgtcttcagaagcaattatttgggtgtctaacaaatcaggtgcactaggccttccaatgagggggatgagcaacaatacccctcagttaaatcgcagcttatc

SEQ ID NO: 224122 - DNA, 103 bp, Homo sapiens
ggtccttgcgtccttccggctccgtcgtggaagcaggactgcgccgcgtcttcctcaaggaccatggccaacctggagcgcaccttcatcgccatcaagccgg

SEQ ID NO: 224123 - DNA, 83 bp, Homo sapiens
gaaccaggcgttgcagaggcgcttcgccaagggggtgcagtacaacagattttttatcaagcagaaatgcatcgaacaacgag

SEQ ID NO: 224124 - DNA, 98 bp, Homo sapiens
gtggctgggagcagcgcagcctccggaggaggaggcggaggccgaggacccctcgtccagtcattgtggaacccatggagcagtttgatgatgaagat

SEQ ID NO: 224125 - DNA, 82 bp, Homo sapiens
gcggtgatgaagaatccccccgaaaggaccccccaggtagctacagcaagctgggtagcaggcagatccaaaggatatcatg

SEQ ID NO: 224126 - DNA, 51 bp, Homo sapiens
ctccccagccatgtggaactatcatgtatcagttggaggacttggagacag

SEQ ID NO: 224127 - DNA, 100 bp, Homo sapiens
cccggcctggcgcccgtcaacttctgcgacgaagaaaaaaagagcgacgagtgcaaggtgtctttaaaggattgccatttaatgccattcaagatctact

SEQ ID NO: 224128 - DNA, 75 bp, Homo sapiens
ctgattcaagtgttggcggatggaagggaggagactcctgaccctcagaatgctggtgccgacaagaaagccgag

SEQ ID NO: 224129 - DNA, 75 bp, Homo sapiens
ggatctggccaacaccaccggcacagtgacggcttcagaggacgccgggaggctctgctcccgcccaggtggtgc

SEQ ID NO: 224130 - DNA, 98 bp, Homo sapiens
ttttttgccatggtggattttgatgaaggctctgatgtatttcagatgtctcacaccattttgctggtacagcctaccaagaggccagaaggcagaac

SEQ ID NO: 224131 - DNA, 90 bp, Homo sapiens
caagaacctgaacagctgcctccagcagctcaagttttcctttggaatatggataaatacaccatgatacggaaactagaaggacatcac

SEQ ID NO: 224132 - DNA, 75 bp, Homo sapiens
catcctgcgggtgcctttgaaaatcaacgacaacttgagcacagtgagacggtttaagcggaagcatcttactgc

SEQ ID NO: 224133 - DNA, 132 bp, Homo sapiens
actatgtatctgggagctcctcaggcttccaggggggccagatcacactcagcatgcagaagatggctcttcttaaggccaataaggatctcatttccgcaggattgaaggagttcagcgttctgctgaatc

SEQ ID NO: 224134 - DNA, 100 bp, Homo sapiens
aaggcatcctgataggcatccagcacactgggaccccaaagtttttacagcttatgacgtatttcgagtaagtctaatcacatccgagcttattgtacag

SEQ ID NO: 224135 - DNA, 78 bp, Homo sapiens
catatcacagtatcccagatgccaaatggatttttgcacgagaacatggatcaaataagaaattggcagcacagtcct

SEQ ID NO: 224136 - DNA, 89 bp, Homo sapiens
aagcacctctccagcggggacctgctccgggacaacatgctgcggggcacaggtaaaacagaaaggggctcatactcatcttatgggag

SEQ ID NO: 224137 - DNA, 49 bp, Homo sapiens
ccgacctccaagggcagcctgcttttctgggagaagaggctacaaggac

SEQ ID NO: 224138 - DNA, 100 bp, Homo sapiens
ctgtcagcgacagacccctcggggtgtccatcacaaaagccgagatgagaaacctggatgagtgtgaggtgtgccgggacggaggggagctgttctgttg

SEQ ID NO: 224139 - DNA, 83 bp, Homo sapiens
gggaaccctggtcaccgtctcctcagggccaccagatgcctccacccagaaaggtcagatgtgggagagttccagagtcattc

SEQ ID NO: 224140 - DNA, 82 bp, Homo sapiens
tttagagctgcggaacaggacgccctctgatgagccttcacgtaaatgggtccagtcatgcctcccagtaagaagccagaaa

SEQ ID NO: 224141 - DNA, 100 bp, Homo sapiens
gttctcagaagacgttctgtatttcagcttcctgctatgtgccctctttgttcctaaagcaattcacagaagctgtgagtccttcagtgctacccccttc

SEQ ID NO: 224142 - DNA, 74 bp, Homo sapiens
aggaacttgcagaaatcacattggaccctcctcccaactgtagtttgcagctctccacccatccacatgaaggt

SEQ ID NO: 224143 - DNA, 50 bp, Homo sapiens
aagagcaagatgcagtcagtggagtggctgacaagattttgaaaaagaaa

SEQ ID NO: 224144 - DNA, 82 bp, Homo sapiens
agccgatccagcctgcggagcctgtggggcagaatggatgatgaacttgttgttggacatagtgcaagatcagacatctcca

SEQ ID NO: 224145 - DNA, 75 bp, Homo sapiens
tggccgcgcgctgctgtgttctggaagggctcattgtacagtcaaggcggcagagactaatagacaagtcacgag

SEQ ID NO: 224146 - DNA, 80 bp, Homo sapiens
cggcagcgtcccggacgaggagaattgcaaccttgccaatggacctgatcggttttggttatgcagccctcgtgacattt

SEQ ID NO: 224147 - DNA, 80 bp, Homo sapiens
tttcctctcagaagagtggagggagcgaatcgccaacacgagacctagtcaccgacttggacttctcgccctttgatgac

SEQ ID NO: 224148 - DNA, 90 bp, Homo sapiens
cgggatttgggtcgcagttcttgtttgtggatcgctgtgatcgtcacttgtgaagtaagaactctgctagagaggaaatggctgcttcat

SEQ ID NO: 224149 - DNA, 83 bp, Homo sapiens
gcttggaatcacaaacattacaggaagttgaggagctggtttcacctgaggacctgctggagtggctgcggcctttctgtgct

SEQ ID NO: 224150 - DNA, 97 bp, Homo sapiens
cgagactccgtgggcgtaggaccctccgagccaggctgaagggtatgtgattggcagctgtattaaacacattccaatcgcaggacgagatataaca

SEQ ID NO: 224151 - DNA, 75 bp, Homo sapiens
cgggaagaacctcatcgctgcgacgaaaagtaattatgaggaattagaaaactcaggagatacaactgtggaatc

SEQ ID NO: 224152 - DNA, 100 bp, Homo sapiens
gctgcggcgcccacctggtgactctggagctgcacagcgagggcaccaccgtcctgctcttccagttcgggatgctcctgacccctgaggattaccagcg

SEQ ID NO: 224153 - DNA, 82 bp, Homo sapiens
ttctgttctggtggctcgatcttcattgctttcctctggactttatccggagttactcgtggcttcctataacaacaatgaa

SEQ ID NO: 224154 - DNA, 100 bp, Homo sapiens
tggatttgaacccagctgctctgtactgcacttagaatgatgtaatattccaggatgctgctgcagggtgctgataagactgtgaaaggcccagatggac

SEQ ID NO: 224155 - DNA, 82 bp, Homo sapiens
cagccaccacagcatctttctgaagccgggagagggcctgtagggcggagctggagtttgttcagatcatcatcatcgtggt

SEQ ID NO: 224156 - DNA, 100 bp, Homo sapiens
ccgagagccagagagatgtcggatttcgacagtaacccgtttgccgacccggatctcaacaatcccttcaagtttcatctctgtgccaacttttttcaag

SEQ ID NO: 224157 - DNA, 100 bp, Homo sapiens
ccgccgtcggcagcaagaacagagagagaggtggacagatctgagagatactgagtctgaaatggttgtgacaaataatctcttggatctgccgcccccc

SEQ ID NO: 224158 - DNA, 74 bp, Homo sapiens
gccgctgagggcgcgtctcccctccgccatgttcatcaatggtgctaaggaaatttgctatgctcttcgagctg

SEQ ID NO: 224159 - DNA, 75 bp, Homo sapiens
tccccaacgcatcatgccagggagccaagcgtcctgcccggccgtgtgatcccctgggcccgtttgttgtcgggg

SEQ ID NO: 224160 - DNA, 76 bp, Homo sapiens
ggctgatggagagctgaacattactcttccagaagaggatctcaaagatttcatgagacaagctggggaagtaacg

SEQ ID NO: 224161 - DNA, 50 bp, Homo sapiens
ccgctgccgcccagcacgtccagatattaggttgaaaaagctggttgatg

SEQ ID NO: 224162 - DNA, 50 bp, Homo sapiens
gtttccaggaagttcagagagaacagagtggagactgctgcacggactct

SEQ ID NO: 224163 - DNA, 101 bp, Homo sapiens
cgccgccgaagaagcatcgttaaagtctctcttcaccctgccgtcatgtctaagtcagaggtggctacagtttcagaaaagtcacgtataatggaactgga

SEQ ID NO: 224164 - DNA, 100 bp, Homo sapiens
gaaggccggaacctggttgtccgagatcgctgtggtataatgggtctctcccaaatggcgatagaggaaggaggaaaagtaggtttgctttgtttaaaag

SEQ ID NO: 224165 - DNA, 75 bp, Homo sapiens
ctctgaaatagaagatcttgcaaggttcacaaagatgtccaaaactaatggcttatcagaagatttgatatggca

SEQ ID NO: 224166 - DNA, 78 bp, Homo sapiens
gcagccgctctgagggcgcctgctcaggggtctgtcctccagcctcagcagatgagacttttacgcatcatcttcagc

SEQ ID NO: 224167 - DNA, 100 bp, Homo sapiens
aggagcgtcctgagactaaggaaagagcctggaaaatggagcagacctggacgaggtaacatttgtcgatcacccattgcagaagcagttttcaggaaac

SEQ ID NO: 224168 - DNA, 75 bp, Homo sapiens
aaacaagttcagggctcccactgattctacattatgacactggcttcatgtcctattgaccgtaaaccttttcag

SEQ ID NO: 224169 - DNA, 100 bp, Homo sapiens
gatgcgattttagtggaggactacagagccggtgatatgatctgtcctgaatgtggcttggttgtaggtttttttaacatgtggggatttggaagagtca

SEQ ID NO: 224170 - DNA, 82 bp, Homo sapiens
ctgttttagtgctttttatttttccccaattcagcagagaatattttcaagggggagccaaatctcctcagccacctgttga

SEQ ID NO: 224171 - DNA, 82 bp, Homo sapiens
tttgtggatcgctgtgatcgtcacttgttttcggctttgtgagaaaccttaccatcaaacacgatggccagcaacgttacca

SEQ ID NO: 224172 - DNA, 98 bp, Homo sapiens
cacaaagcgaggggcacacctgaaccggggctggcgggaagagaatatgcttttaaggctattaaccagggtggccttacatcagtagctgtcagagg

SEQ ID NO: 224173 - DNA, 75 bp, Homo sapiens
aagagctctcctccttcttcctcaactatctcgctgacacgcaggctgatcagctgaccgaagaacagattgctg

SEQ ID NO: 224174 - DNA, 100 bp, Homo sapiens
acatgactcctgaagtcgtcggcgagcaggaaaatcctgccttgcttcgttgggcctatgcaagaacaataaatgtctatcctaatttcagacccactcc

SEQ ID NO: 224175 - DNA, 75 bp, Homo sapiens
gcaaatggagcaacagcagcaactgcagcagcggcagtttgtcctgaagaattatggagagaacccagaagccta

SEQ ID NO: 224176 - DNA, 90 bp, Homo sapiens
ctgcagccattcagacctcaggagctgtgtctaccatcagagggagatctctgccccctggggctgagagaccccaacctttccccaagc

SEQ ID NO: 224177 - DNA, 74 bp, Homo sapiens
ccaactaaagccccacatttgcagctcattgaaggaaagtgtgaagcagtattctggaaagtttttctaagact

SEQ ID NO: 224178 - DNA, 75 bp, Homo sapiens
tcgaagaccagttcattcttagtgtcttctgaaataaaattagaagacttgcactatctgccagatgctgcttcc

SEQ ID NO: 224179 - DNA, 51 bp, Homo sapiens
caatcaaaacttaactcctggatacaggttttagctaaagaagatactgag

SEQ ID NO: 224180 - DNA, 100 bp, Homo sapiens
cttgtggtgcggcctcaccatacaggaacagggcagacgttagcgtgagtgatcactctcaatcccggatgtttcagaaagaacaagtggatcctcttca

SEQ ID NO: 224181 - DNA, 82 bp, Homo sapiens
tgtgtgacaagaaggctccctatgaatctcttatcattgatgggttttttggaacgaagtggatgatgttcctcgctgtggg

SEQ ID NO: 224182 - DNA, 90 bp, Homo sapiens
tcgcgggacgtggtataccgcgacatcaagcttggaatgcactccctccacctccaaccagagctccccacaactgaccctgccttcttc

SEQ ID NO: 224183 - DNA, 75 bp, Homo sapiens
ggggaaactaggtcgatggtcggcggcgcccggatgggcagctgaggtcatgtacgtagaagggactgcagttgt

SEQ ID NO: 224184 - DNA, 75 bp, Homo sapiens
ttgtttctgctgaccgcgggccctgccctgggctggaacgaccctgacctgcctagagctggaacgttacctcca

SEQ ID NO: 224185 - DNA, 131 bp, Homo sapiens
caacgagggacctgggtctacgataacgcgcttttgctcctcctgaagtgtctttggtccaacgttgttccaggaccgtataatagacgctggccccaaaggaaactactctcgatttatgaatcacagct

SEQ ID NO: 224186 - DNA, 100 bp, Homo sapiens
gagcagatttacaaactggccaagaagggccttactccttcacagatcgtttctccttggaccaagatgactgatggaaaactctccacctctacaaatg

SEQ ID NO: 224187 - DNA, 106 bp, Homo sapiens
cggagtcagtcattttactgtcaagacatttcttcggcattctgcaacaggctgacaactgcagtctccagtttagaataaatattccatagtggtgacatgtcag

SEQ ID NO: 224188 - DNA, 75 bp, Homo sapiens
cctgcaagtactagctctgataacttgggttctttacaacacctcaggcaagtaggagtggctggaaagtttgtt

SEQ ID NO: 224189 - DNA, 101 bp, Homo sapiens
aagaaacaaggggccagggcagagggcacctgagcggctggagagcctgttggagaaacacaaagagatccctcatgtccatgatccggaaacgatcccac

SEQ ID NO: 224190 - DNA, 82 bp, Homo sapiens
aatgaaatagaggatgcccgctggttcactagagaacagaaaatatatcgctatcgtctcctatgagcaacgccagaattat

SEQ ID NO: 224191 - DNA, 75 bp, Homo sapiens
ctctctttctggcctggaggctatccagcgagctttcaagttgtggatggaataaaaaagaaaaatatagttctg

SEQ ID NO: 224192 - DNA, 114 bp, Homo sapiens
ccggcgcacgcaccacgacggcgccatcaccgagcgcttgatgtgcgcggagagcaatcgccgggacagctgcaaggaagctcttcgtgggcggtcttgactggagcacgaccc

SEQ ID NO: 224193 - DNA, 90 bp, Homo sapiens
tctcgctgtgacagagacaacaccgagtatgagaattctgccaaggaaagagaaaataccttttaatcccagggaaaggattgcaatcac

SEQ ID NO: 224194 - DNA, 100 bp, Homo sapiens
ggaagccaaggactgtctgaacgtgctgaacaagagcaacgaggaagctcgccaacccccgtggactgctggctctcaaggcggccgctagcccagctcc

SEQ ID NO: 224195 - DNA, 82 bp, Homo sapiens
gtacccgaaaaactgattgactgggctggcgttaactgtgcggaggcagaaaaatccagttacactcttaaaggaattgtca

SEQ ID NO: 224196 - DNA, 83 bp, Homo sapiens
ctgaaggctgcgagggactaagagcagaacaatgcagatcttcgtgaagactctgactggtaagaccatcaccctcgaggttg

SEQ ID NO: 224197 - DNA, 74 bp, Homo sapiens
ccagagcgctactacaaagaatctgagggtaaaccagacttgaatacaacattgccaattagacaaacagcatc

SEQ ID NO: 224198 - DNA, 100 bp, Homo sapiens
ctttatcctggtgcttcagaatatgatcaggtaaactactaccagagataaaagaagaaagagatgttcagagagagcttcggatagagagactttctgg

SEQ ID NO: 224199 - DNA, 74 bp, Homo sapiens
cctgccgcctcgctgtccctgcggcttctggggccaaagggaaaggacagtcccaaaccagagtgaatattaat

SEQ ID NO: 224200 - DNA, 100 bp, Homo sapiens
ctgaaacacagtcgaaaagaatactgtgaattatgcaagcacagatttgcttttacaccaagacattgcacttatcttaccaagctcttctgaaggttct

SEQ ID NO: 224201 - DNA, 74 bp, Homo sapiens
gaagaacaaagacacaggtcactcaaataggcaggttctgtacagagtaatgagatgtgtgacggctgcaaacc

SEQ ID NO: 224202 - DNA, 100 bp, Homo sapiens
aatactttgtttatggagctgcctgttccgaggttgaaatagactgcctgacgggggatcataagcttgatcctctcccagaaaaggttttacagcaaag

SEQ ID NO: 224203 - DNA, 98 bp, Homo sapiens
aggagcctgccccgccctggggacgaagagctgcagctcctcctgtgcgggaggagctgacaagcacaagtgtggaacacatcattgtcaatcctaat

SEQ ID NO: 224204 - DNA, 74 bp, Homo sapiens
gcgttttggttcccggttggtgcttcctgttcgcagctgcggcacggggatctgatgagcttctttcttctggc

SEQ ID NO: 224205 - DNA, 76 bp, Homo sapiens
gcgagttggtcggtcccggggtcacccgctacgggaagcaggcctcgccacagatttatggacaagaagttatcat

SEQ ID NO: 224206 - DNA, 90 bp, Homo sapiens
tctcagttctggaattattctccttttggagaatctggtcgagaagtgaactgaaggagccagcgccggcagccaccatggcgtcacgca

SEQ ID NO: 224207 - DNA, 100 bp, Homo sapiens
gttccgtccgctaggagtctgcgtgcgaggttactagtattggaatctactgctccatcaggagacctcacccgcccacaccacattgcatcagttgttc

SEQ ID NO: 224208 - DNA, 100 bp, Homo sapiens
tcgtgtccatgctggaaaccttcggctccaaagacgatgacaagatggtctttaagacaggttcaaaaaggcatttgaatctgagccaacactacagtca

SEQ ID NO: 224209 - DNA, 75 bp, Homo sapiens
catagggaggacggcggaacatctggaggctgggaaatgcctgcaatgtgtggtacttgaactctgtggagatgg

SEQ ID NO: 224210 - DNA, 100 bp, Homo sapiens
atgaccaggtcaaccttttaaaggctgggacttttgaggtcgacgtgttgatgcccaatgttggtgagattgtgggaggctcaatgcgtatctttgatag

SEQ ID NO: 224211 - DNA, 74 bp, Homo sapiens
aatttttagtggagttgccatctatgttaatggatacacagcggaagatccatccaaaagctatgtgaaattac

SEQ ID NO: 224212 - DNA, 50 bp, Homo sapiens
gctggaggatgcgttccctggggtccggtcacccacaaaagctgtatata

SEQ ID NO: 224213 - DNA, 108 bp, Homo sapiens
cttgtgctgagtgggtgtctctctcaaaggccaggattgtagaatatgagaaagaggatggagatgaagatgaggaagctgagtcagctacgggcaagcgggcagctg

SEQ ID NO: 224214 - DNA, 80 bp, Homo sapiens
agaggagcatgtagggtcccagacctttgtcaatccacatgtgtcatccttccaaggtggcccatcccctgcacccctgc

SEQ ID NO: 224215 - DNA, 82 bp, Homo sapiens
ccgcccctgttgcgatggcgcagaaaccccgttgacaaggcactgctttttcatgacgtaaaatgtttattggaggcttgag

SEQ ID NO: 224216 - DNA, 100 bp, Homo sapiens
gcagattatatcgcatcctatggctcaaagaaagatgattatgaacctgaagggccgagaagtcctgctgtgtttggtgccatcatctcttactttgaac

SEQ ID NO: 224217 - DNA, 97 bp, Homo sapiens
cagcgctcggacccccctacccacgctgaacgagagggacacggagcagccagagcctaagcctggagacctgattgagatttttcgccctttctac

SEQ ID NO: 224218 - DNA, 100 bp, Homo sapiens
attgacaaaattcttgaaccacctgaaggccaagatgaaggtgtgtggaagtatgaacatttaagatgctgggctcttgcactgtttggtggaaatggtg

SEQ ID NO: 224219 - DNA, 74 bp, Homo sapiens
gttggcgacgccgccccgccgggccccagatcaggcgaacctcttcccggccgctctggtgcacttgggagccg

SEQ ID NO: 224220 - DNA, 90 bp, Homo sapiens
caactggcaaagaatgcaaaaaccagcagcaatgggctgtgaggacatcgtgagggtgatatccatggaccgggattatcactttgagtg

SEQ ID NO: 224221 - DNA, 75 bp, Homo sapiens
cccatttcagaacctgagaaagtagagactggaagcagacacctctcactcccgacaggacatgctggagtctgg

SEQ ID NO: 224222 - DNA, 100 bp, Homo sapiens
catagcccatttccagacactcgatgccaagaggactcagactgtggaacttccgtgccccccaccctcaccaagggtggctgtgccagtgtcattgtgt

SEQ ID NO: 224223 - DNA, 75 bp, Homo sapiens
aaaaacttaaattgtggaatgaatacagattctgttcatcttgctctgaaattaaataattctgaactcatgggg

SEQ ID NO: 224224 - DNA, 90 bp, Homo sapiens
ggccctaatccaagatttaatcaactactgtctgagctacattgcgaaaattaaactcccgaagaagagcttcagaggatgattccgaag

SEQ ID NO: 224225 - DNA, 96 bp, Homo sapiens
gttgaaagcgacaagtggaggcgccgctctagcggccgggactctgaactatggcggttatcaatactctggctgaccatcatcatcgtgggactg

SEQ ID NO: 224226 - DNA, 75 bp, Homo sapiens
agaactttgcctctactttctgctcagtgcctacaccaactaatgttacaattgaatcctataacatgaacccta

SEQ ID NO: 224227 - DNA, 97 bp, Homo sapiens
aatcttcaagcgctatgccaagaagcgaaatgtgctcattggccattcctacgggtctggtgctccgtccgcacacctgagagctcccacgaaggcc

SEQ ID NO: 224228 - DNA, 75 bp, Homo sapiens
ctcagccgaggtcaccatccaggccataggaaaaggatacagagtagagtttcatgaacctgaaacttggtggaa

SEQ ID NO: 224229 - DNA, 100 bp, Homo sapiens
tacctatcactcaagagactcttcatttagattggattctgaatatcaggcctactgaacttgacgcactggtatttggccatctatacaccattcttac

SEQ ID NO: 224230 - DNA, 98 bp, Homo sapiens
gtgtatagcctgcagcccccctctgcgctgagcggcggccagccggcaggctcttgcagccaatgccggaacaggatttgctgttgctgagcctcaaa

SEQ ID NO: 224231 - DNA, 98 bp, Homo sapiens
cttcggtggactccttcggcagtccacccaccgccgccgcctcccaggttttgggatttgagattgacgcggtgaactctgtccagttttcaaaccac

SEQ ID NO: 224232 - DNA, 82 bp, Homo sapiens
cttaaaatggatatgaaaagtgaagaaagtgatcataggagaaaaccatttcagaacactcgtgaaactgctcaggccatca

SEQ ID NO: 224233 - DNA, 83 bp, Homo sapiens
taatgcaacaatatctaacatactatccgagcttcggtcatttgtatgcatcggtttggtcctataccccttggttccttggg

SEQ ID NO: 224234 - DNA, 75 bp, Homo sapiens
agtaaagaaaacaaggaagttattcaagagctgaataattgccagctgagatctgtatctgtggacctgaatgtt

SEQ ID NO: 224235 - DNA, 90 bp, Homo sapiens
tggcttttagctgaactaaggagaaagtcctacaacagtttggcgtgcaacatggggcttgagaaagggagaccagtatgatgtctgtgc

SEQ ID NO: 224236 - DNA, 82 bp, Homo sapiens
caacagaggatgtcaacaattttttggaggaactgtggctgcaccatctgtcttcatcttcccgccatctgatgagcagttg

SEQ ID NO: 224237 - DNA, 100 bp, Homo sapiens
ggccgcggggccaggaagtcggagtttgagccccggaggcagagcggctgccatgtgggacacagcaggccaggaaagatttcgaacaatcacctccagt

SEQ ID NO: 224238 - DNA, 100 bp, Homo sapiens
ttgcggctctgcatagaggcagacctccagaactacctgtaaattatgtgaaacctccaaatgtgggtgtatgcaacagcgttattgcaacaggctaacg

SEQ ID NO: 224239 - DNA, 98 bp, Homo sapiens
accccaactcagccttcctgcataccctggaccagcagaaacctagagtgacttatacaagcactagcaacaactctatatctggatcattgaagcgc

SEQ ID NO: 224240 - DNA, 88 bp, Homo sapiens
cctgtcacgtgggagggaggctcggcgctcaggttgtggcagcactgcctgaaggtatgagaccagattctaatctttatggttttcc

SEQ ID NO: 224241 - DNA, 100 bp, Homo sapiens
actgaatgaacggcttgcaaaactttcagatggagtggctgtgctgaagcttctcaataggtttggcatggacaagatctatgaaggccaagtggaggtg

SEQ ID NO: 224242 - DNA, 100 bp, Homo sapiens
tctctgttcgtcaggaacgtggccgacgacaccaggaagccagcagacctgcagaacttggctcccgggacccacccaccatttataactttcaacagtg

SEQ ID NO: 224243 - DNA, 83 bp, Homo sapiens
cgagccagccgctgttttgccggaggagcccctcaggccgctgaaggtgatgtggccgccctcaaccgacgcatccagctcgt

SEQ ID NO: 224244 - DNA, 83 bp, Homo sapiens
aggattttattactggcagcatgtatatcttttttgtggacatcggatacccaaggagacgaagctgaagcaggagaaggagg

SEQ ID NO: 224245 - DNA, 100 bp, Homo sapiens
tgggggcgccgcccgcgcccgggaccgacccctctgctcgcggccgcgcctttgagtctgagtaccactatgagtacacggcgtgtgacagcacgggttc

SEQ ID NO: 224246 - DNA, 83 bp, Homo sapiens
acaccagacctacggagggagctggaaattcctgacgttcattgatctggaacctgattctgaacagcagcccttaaaacaac

SEQ ID NO: 224247 - DNA, 97 bp, Homo sapiens
ttcttgaaggagagcttgaagcaagggaccttgttatagaagccttaaagactatctgtcaaaaaacacctaaggactctccgaagtatgaagtctg

SEQ ID NO: 224248 - DNA, 100 bp, Homo sapiens
agagctcttcaaagcatttgttcagatcttcagtactggccaggtggctttcttcctccagaagaaataaaagaaagatttgacagcaactgtattacac

SEQ ID NO: 224249 - DNA, 75 bp, Homo sapiens
ctagctgcttatggctataaaattacaggactaccgaccagactcccggaaatcatgttggtaggatcccagtct

SEQ ID NO: 224250 - DNA, 100 bp, Homo sapiens
tctgaaatatgtgctggggctgaaaagattggatcaggaccatgtgaggtggcctatcctagagaatgttttctgagctcttgggaagagtgtgtctcct

SEQ ID NO: 224251 - DNA, 122 bp, Homo sapiens
aagttcaacagaaggcaaatacgaagacgaggcaaagcacccagctttcttcactcttccgagaagatgcaaccagttttgccattttccaagtcacaaacggacgtctataatgacagtac

SEQ ID NO: 224252 - DNA, 75 bp, Homo sapiens
aaaattatccgactcctcggaccagcaggacaggaagcagtcaattatagatttcttcaaaccagcttcaaaaca

SEQ ID NO: 224253 - DNA, 87 bp, Homo sapiens
aggagttcgtctcttacgtctgcggaagtgcagctgcctcagttcttagcgcagatgtatcggcaagcagtgtaaacggaggacttg

SEQ ID NO: 224254 - DNA, 110 bp, Homo sapiens
gtggtgtttttctcaggtgaaaggagcagtagatgatgatgtagcagaagccttgcctccccgattgaaagagatgaaaagccaggaatcggctgcaggttccaaactag

SEQ ID NO: 224255 - DNA, 75 bp, Homo sapiens
gcccaagccccagccccctgtggctgaggctacaccccggagccaggagggcactatgtcgtccgaggcccagag

SEQ ID NO: 224256 - DNA, 83 bp, Homo sapiens
ccgagcgcaaggacagcgcgaggtccgcgcagcccagcgcagccatcttcgagagctgtgcccaggagtgaacaaccagccct

SEQ ID NO: 224257 - DNA, 100 bp, Homo sapiens
gcgtcccgccaccggccgcttctgtcctcggctggaggcaaagctggaaaggacagtgggaaggccaaggctaaggcagtatctcgctcacagagagctg

SEQ ID NO: 224258 - DNA, 97 bp, Homo sapiens
aaacggtaacatcgcagtgctgctcgcgggtctggctagtcaggcgaagtttgcagcttatgttcctgaggaagaattgaaggcagcagaaatagat

SEQ ID NO: 224259 - DNA, 75 bp, Homo sapiens
cggaggaaggtggcccgctggaacaggaggaggcaaaacagattcagaatctgcagaaagcaggcactcgtacag

SEQ ID NO: 224260 - DNA, 82 bp, Homo sapiens
attttctgcaggccccacgagtgggaggtgctgagccgctcaggtccctggtgctgaaccgcctgcgtccagttgccagcgg

SEQ ID NO: 224261 - DNA, 99 bp, Homo sapiens
tattcgacatgaacctattggatatgatagaagtcggaggaaatactggttcttgaaccgaagactcataatagatgcccgagtggtaaaagacatggc

SEQ ID NO: 224262 - DNA, 90 bp, Homo sapiens
gcctggagctcccagggccgagctcttagaacaagctctggtgattgaggaacagctgcgccgggctgcttacttgaacatgtcagaaga

SEQ ID NO: 224263 - DNA, 82 bp, Homo sapiens
ctggagagagaccagacctgcaagctctttgacacacagcagttcttgtcaggaatttggataaagagagggcagtgctact

SEQ ID NO: 224264 - DNA, 100 bp, Homo sapiens
tccttcgaaggccctcagcctgcggatgtgaggctgatgaagaggaaaacagttccagggccctgcgaaccagaagacctcatcgacgggatcatctttg

SEQ ID NO: 224265 - DNA, 101 bp, Homo sapiens
ctactggatctcagccttgtcaaagatgccagatgtgggagacacgccaaagctcccaagatccaacttagaaataatgtttcattcaagataaggctcgt

SEQ ID NO: 224266 - DNA, 100 bp, Homo sapiens
cctcaacgagatcttgggcaccgagagggactacgtgggcaccttgcgcttcttgcagtcggtgtcgtgaaaactacccctaaaagccaaaatgggaaag

SEQ ID NO: 224267 - DNA, 75 bp, Homo sapiens
ctgtggtgtgtttgctgttcccaggccctgccctgggagaagccctgccacacgtcgtgcccacgctgagggcct

SEQ ID NO: 224268 - DNA, 82 bp, Homo sapiens
ccggatgtgaggcgatccgctggcgctagtctgaccctccgccaggcaaaaggaagggtttgccttcccggattgggcctac

SEQ ID NO: 224269 - DNA, 80 bp, Homo sapiens
gtccgcttcacactccgccgccatcatggtgaagctcgcgaagacctgcctagagctggaacgttacctccagagcgagc

SEQ ID NO: 224270 - DNA, 125 bp, Homo sapiens
acagcatcaccagccaggagagcaaggagcctgtgttcattgcagcaggggacatccgttgtccaaccaaaatctagtactttgctattcaaaagtgtctggggaccagcagcatcagcatctca

SEQ ID NO: 224271 - DNA, 97 bp, Homo sapiens
cgccgctccccgcctagtccacggagctcaatggcggcagtcgcgctgagggactcggctcaggtcctggctataagtcaccatggcacagcaagct

SEQ ID NO: 224272 - DNA, 75 bp, Homo sapiens
gaccccgacccggcccggtcaggccccatactcagggcagcgggtggcatgagacgtgggaacatgggccacctc

SEQ ID NO: 224273 - DNA, 99 bp, Homo sapiens
gttcgtgctgctgggattcgcgctgctgggcacccacggagcctccggggctggtccgcgggagagctgtggggcttggtgagtgtttcgtggcctctc

SEQ ID NO: 224274 - DNA, 76 bp, Homo sapiens
cttcggtgaagttcttttgtacttccaaatgtcgcaggcaggaggaagagcgcaggcgccgtgaagaagagatgcg

SEQ ID NO: 224275 - DNA, 88 bp, Homo sapiens
aaacatgggccagtctgtggacattagtgggcttcagttagccttggccggaacaggaaatatagtggtcattatgattagctatcca

SEQ ID NO: 224276 - DNA, 82 bp, Homo sapiens
aactcactttgttggagggatgtataggccacgccgtggcactgacccgagactctgagcggctgctggaggtgcggaagcg

SEQ ID NO: 224277 - DNA, 82 bp, Homo sapiens
gtggcggcggcgccatggcagggcttgcaggccaacgagtgcatgcgaatcaagatcctcggcgactgctactactgtgtat

SEQ ID NO: 224278 - DNA, 123 bp, Homo sapiens
gaggtcgcgggctgggagccacatctcctccaatcgagcgtatgattttctgtacgtccaagaggcccagaagcaaacctggaggtgagacccaaagaaagctggaaccatgctgactttgta

SEQ ID NO: 224279 - DNA, 75 bp, Homo sapiens
cggtgtgggctgaatgaagagctgccagatcccacaggaacttacaatgtctcagaaaaatggtgggaatgttct

SEQ ID NO: 224280 - DNA, 98 bp, Homo sapiens
gaggatcagcagtgcagccccaggatgcctcgcagctccggaccaaaatttaacagtgccatccgaggaaagattgggttgcctcatagcatcaaatt

SEQ ID NO: 224281 - DNA, 75 bp, Homo sapiens
ttccccaatggtactatccagggaaccaggaaagaccacagccgatttgatgatttgtcattaattcggaagaac

SEQ ID NO: 224282 - DNA, 98 bp, Homo sapiens
cgaacaccctatgggatgccatatcttggatgttttctggcaaaggccttcctgcatttatgaattctctctcaagaagcaagagaacacctgcagga

SEQ ID NO: 224283 - DNA, 100 bp, Homo sapiens
tgtccaacagaacgacctagtatttgaatttgctagtaacgtcatggaggatgaacgacaggaagctgatctggatgcagaattagaaaactgccatcat

SEQ ID NO: 224284 - DNA, 83 bp, Homo sapiens
cagcggccgagcgggcggcttcctggcctgggcgctccggtggcggcggaggttgtgaccgagattcccgacgagagagactg

SEQ ID NO: 224285 - DNA, 100 bp, Homo sapiens
gggcaactgaagacggaggtgcccaaggtcagaaggaagcaccacacagagaacactcgtgaaactgctcaggccatcaagggtatgcatatacgaaaag

SEQ ID NO: 224286 - DNA, 92 bp, Homo sapiens
cccgcccgaccccgtcccgaccctggccgccccgagcggagcctggaggtgtggacactgccagcggctgcagccgacttggaatgacctgg

SEQ ID NO: 224287 - DNA, 98 bp, Homo sapiens
caaggtggatattgatgaccacacagacctcgccattgagtatgagtttttcagaagaagtgaagtcaagatgaagaaccatttgcttttctggggag

SEQ ID NO: 224288 - DNA, 83 bp, Homo sapiens
tgatggaaaacacaaaggatctggttttgaacgaagaatgtgatcagaactggtacaaggcagagcttaatggaaaagacggc

SEQ ID NO: 224289 - DNA, 82 bp, Homo sapiens
gagcgcgtccaggcctgacagctctgcggctcgggccctgaggtactccaaagattcaggtttactcacgtcatccagcaga

SEQ ID NO: 224290 - DNA, 83 bp, Homo sapiens
cctgtgaacagtacgcagtgaatgttgaaaccactgattgcttgtgtggagaaacagctattaggagaacatttaacagcaat

SEQ ID NO: 224291 - DNA, 59 bp, Homo sapiens
atttctgaagcgagcgtcttcgatgaagcaaaacggacaagtcggtttttaagtggcat

SEQ ID NO: 224292 - DNA, 100 bp, Homo sapiens
gtgtacccgcagcccagaaccctgaggacctccgcatgtttgccagggcgtctctggccgagcctctttttgtggaaaacgacagcagcagcagtggcct

SEQ ID NO: 224293 - DNA, 105 bp, Homo sapiens
gcgagctgagtggttgtgtggtcgcgtctcggaaaccggtagcgcttgcagcatggcttgggcactgtttaaaggaaagttccgagaaggcatcgacaagccgga

SEQ ID NO: 224294 - DNA, 88 bp, Homo sapiens
ggcgagtcactcagttacagctgaagatccagcaggagactggtggctcagtgaatggtaccaaaccaccactggatgcagatgtaaa

SEQ ID NO: 224295 - DNA, 75 bp, Homo sapiens
tcatttcagcagcgctccacaagtgatacttggtgttagatgaagctgatcggatgttggatatggggtttgagc

SEQ ID NO: 224296 - DNA, 100 bp, Homo sapiens
ccgatctgcccgttgtgtttgtgaaacagagaaagataggcggccatggtccaaccttgaaggtatatgactgatgggatgttacttcgtgaagctatga

SEQ ID NO: 224297 - DNA, 85 bp, Homo sapiens
aaggcaggagggcggcgccgccgaggcccagatgcgccagatgatgtctttctacctaaagatattgacctagacagtgtggata

SEQ ID NO: 224298 - DNA, 50 bp, Homo sapiens
agacggtggcccacgccggaatgttttgccagcccagcgggtggcagctg

SEQ ID NO: 224299 - DNA, 125 bp, Homo sapiens
gaacatggtccagaaaacattgtaatggccatcgctggaaacaagtgcgacctctcagatattaggtactaggttttgacaagcttgcatcatgcgtgagtataagctagtcgttcttggctcag

SEQ ID NO: 224300 - DNA, 90 bp, Homo sapiens
aagaagaccattcagatgggatctttccggatcaatccagatggcagccagtcagtggtggagaatatggtgcacctgaagattgggaac

SEQ ID NO: 224301 - DNA, 101 bp, Homo sapiens
ccccgaccgcgagccggacccctgctctgaccgcaggctcacagaacatttcctgcctgttgctcacactctgttgtccacagcatacccgcaccctagat

SEQ ID NO: 224302 - DNA, 100 bp, Homo sapiens
cgcagcaccagcaccagccgccccgtcgccgccgccgccgccgccgcccggaccccggcgcgctgaatgcagggcatccgcttcgatcctgaaattccgc

SEQ ID NO: 224303 - DNA, 100 bp, Homo sapiens
gtgccaggaggatgggccaactcaaaatctgaagcctgatttgctctttacccaggactctgaaggttatggaaacaaaggacatgctttacatcgtcac

SEQ ID NO: 224304 - DNA, 100 bp, Homo sapiens
cgggctccggctccggcttctgctgttgctcttctccgccgcggcactgatccccacaggtgtggagggcgcagctttccagagccgacttcctcatgac

SEQ ID NO: 224305 - DNA, 75 bp, Homo sapiens
agctggaggtcatcttctcactctttgacagtaaagagaaccggccaatcagatggagcagctatcagatgaaga

SEQ ID NO: 224306 - DNA, 89 bp, Homo sapiens
cctcacagcctgggcatcctccatgcctcctacagcgtcagtgtcgaccctaacgaccagaagaagacagcctgttacgacatcgatgt

SEQ ID NO: 224307 - DNA, 75 bp, Homo sapiens
cagcagcgctgccgccgcgtcctcagccaccgctccctcttcccacgtgccctggctggtgctcagcgagatctt

SEQ ID NO: 224308 - DNA, 90 bp, Homo sapiens
ctccttttccctctccctttccctaagaaaagaatggtttgtcattcattgaaacttcggccctagactctacaaatgtagaagctgctt

SEQ ID NO: 224309 - DNA, 100 bp, Homo sapiens
gcgaggagcgcactccgtggccccgatggagcggtacaaagaggctgggaggcggcagaatgcagccagaggagggcacaggctggctgctggagctgct

SEQ ID NO: 224310 - DNA, 100 bp, Homo sapiens
actcttaacatcaatgggcaaatccccacaggagaaggaaaatgaccatggttgacacagagatgccattctggcccaccaactttgggatcagctccgt

SEQ ID NO: 224311 - DNA, 100 bp, Homo sapiens
aggaggttcttcagtgtatgcctgatccatcttcggttgtgaatccggcccggaatgcagccaccccttagagcaaccccccttgctgctcgtgccctgc

SEQ ID NO: 224312 - DNA, 97 bp, Homo sapiens
gttccacattttggtctgttacagagtgaacttagcccacccatgttgatagaacaccctcttagatgtcttgttctgtgtgcccaagtacatgccg

SEQ ID NO: 224313 - DNA, 100 bp, Homo sapiens
catggtggaatgtatccgggaggtcaacgaggtcatccagacagcacttttaaacatcgtgttaagagactcatttgcagctcccgaaaaagatattttc

SEQ ID NO: 224314 - DNA, 100 bp, Homo sapiens
ccgggatcattaagaagcagatcctgaaacacctgtcccggagacagggtctggctatgttgcccaggttggagtgcagtgatgcagttatagctccctg

SEQ ID NO: 224315 - DNA, 75 bp, Homo sapiens
gagagtcacgtcccggcgctagcccagcccgacccagcgttacatccttactattcaaagtgccatccacagacc

SEQ ID NO: 224316 - DNA, 105 bp, Homo sapiens
cgggaggaaggaacgaggcaaggagctaaagcagcgtgcgttcagccctgggggactggtgattgcagctggaagtgcccatgaccgagctggcgtcctccgggg

SEQ ID NO: 224317 - DNA, 101 bp, Homo sapiens
ggtcataaatcctagtggtggactgatttcaaagggacacccactaggcgctacaggaaatgtgactggaaacagtaactccacgttcatctccagcgggc

SEQ ID NO: 224318 - DNA, 100 bp, Homo sapiens
ttcagtttagctcatcgtcctgtcagactagacttaattcagtgcacaaatgagatgaatgtgaacatcccacagttggcagacagtttatttgaaagaa

SEQ ID NO: 224319 - DNA, 98 bp, Homo sapiens
cttatctaacaggaggagaaggagcatatctttattccagcaatctacagtcctggcctgaggaaggctgcttctgatgcttggaagatatcctctca

SEQ ID NO: 224320 - DNA, 75 bp, Homo sapiens
tggaagcaggactgcgccgcgtcttcctcaaggttcacaaaaaggattctggcttttggcgagattttggctttg

SEQ ID NO: 224321 - DNA, 60 bp, Homo sapiens
cttctggagagctgaccaaacactaagggtctcacttgccctggaacctctgtcagaaac

SEQ ID NO: 224322 - DNA, 97 bp, Homo sapiens
gattttttaccatgaaatatgaggagtcgatggatggagatgaaaaggaactagagagcagcgaagagggaggctcagccgaggagcggagactcga

SEQ ID NO: 224323 - DNA, 100 bp, Homo sapiens
gcggtagaggcggcggcgaggactggcgacggcgaggagtaagactttgaccccgacgcaggcttcagtgattgccgcggatcagaagcctgagcacttt

SEQ ID NO: 224324 - DNA, 82 bp, Homo sapiens
ccatcccagacgaagacagtccctggatcaccgacagcacagacagaatccctgctaccaatgacttcaaacctgcttctat

SEQ ID NO: 224325 - DNA, 75 bp, Homo sapiens
ggcgccgagaggccgtgcgggacgcgggcgccaggaccggccgaacgcagagcaaacggggattcagcgtccgat

SEQ ID NO: 224326 - DNA, 87 bp, Homo sapiens
tggtggacaaaattttgtggcgctctgcgtcccctgaaggttggcagtggcaatgacccctggtcagcctggagtgcctccaaatct

SEQ ID NO: 224327 - DNA, 101 bp, Homo sapiens
gtggctgcgtggtgtctcccctcagtcctgctctgaagatcctgccctgccctggaacctcaagaaggcatgaagccagcccctgcagtgccgtccacccg

SEQ ID NO: 224328 - DNA, 50 bp, Homo sapiens
accctgctgctgtcttcaaagaaggagtgttggaggaagcagaattttac

SEQ ID NO: 224329 - DNA, 83 bp, Homo sapiens
ctgctgctacttcctcgtttgacaccttcctgggacttgggaccctggaggactgacgctgctggcctgggcgtccccttccg

SEQ ID NO: 224330 - DNA, 82 bp, Homo sapiens
gccgcagccactcaggactgtcaaagccgaggtgctcggtggagtcatggcagtgccctttgtggaagactgggacttggtg

SEQ ID NO: 224331 - DNA, 82 bp, Homo sapiens
gggggcgccatggcgaccggagcgaacgccacgccgttgggttgacatcatggacatatgtgagtccatcctggagaggaag

SEQ ID NO: 224332 - DNA, 75 bp, Homo sapiens
tgcaatggatccagcaggacagctcagcccagagagttgatagcacttttctgtagaaggtcagttggaattcag

SEQ ID NO: 224333 - DNA, 96 bp, Homo sapiens
ctcccggcagctctggagactcctgctgtcacgtcacctggcccctcaccatcaccatcctcatctctcttgggacagaagttaatcgcatccctt

SEQ ID NO: 224334 - DNA, 75 bp, Homo sapiens
acagatttgcttttacaccaaacaccaactctacaacattacctgtcatatactgaagaatctcttcttccagtt

SEQ ID NO: 224335 - DNA, 100 bp, Homo sapiens
cctggcgctcagcaccgctgcccaggccgaaccggtgcagttcaaggactgcgttttcaggtgctccaaaccttccagtctatgttgtagattgcagtag

SEQ ID NO: 224336 - DNA, 100 bp, Homo sapiens
cgaaggtcgacgtgggccagcagatttctctatgaatcatcatcaagaactctgggagaacttttgaattcataaccaagccaacatctccagacatgta

SEQ ID NO: 224337 - DNA, 98 bp, Homo sapiens
tccttgcggcctcctcttcccttcgctccggcccggtgaaactgaacttataatcgtcactggattgtacatgtcccagagcaagcacacggaggccc

SEQ ID NO: 224338 - DNA, 82 bp, Homo sapiens
aagaggaggaagccatgcgtaggctcattatcaaattatagtgatttgaagaaagagtctgctgtgaacctaaatgctccta

SEQ ID NO: 224339 - DNA, 51 bp, Homo sapiens
cctccattttacaggagttacaggtgctatgcttacatttgaaaagatttc

SEQ ID NO: 224340 - DNA, 82 bp, Homo sapiens
ggccagtcagtcaccattgtggcccagtacagacctgaaggctcttttccacaatggcccccctgaccagcgcgtcgaccgc

SEQ ID NO: 224341 - DNA, 50 bp, Homo sapiens
tacgcggcactcagcggccagaaagacttggagtccaggtgtgagaaatt

SEQ ID NO: 224342 - DNA, 75 bp, Homo sapiens
accacattttacagaaagcacagtgtttccaaggatgcttggttaccaagtaaaggattccaaagtggagcagca

SEQ ID NO: 224343 - DNA, 83 bp, Homo sapiens
gcctggcccacacacgtggtctgtagcgacagcggcttggaagtgctctaccagagttgcgtcagccatcgctcccagcccca

SEQ ID NO: 224344 - DNA, 100 bp, Homo sapiens
cggagtcgggcagccgggcctccctggcccccccggacccccgggacctgtggtctacgtgtcggagcaggactgcctgagatctgaaggcagaaggaag

SEQ ID NO: 224345 - DNA, 50 bp, Homo sapiens
gtggaggttaacagctatctttctgcttgctatcagaggaagtggagaat

SEQ ID NO: 224346 - DNA, 100 bp, Homo sapiens
gtcagtgccaagtaccgaggtgccttctgtgaggcaaagattaagactgtgaaaaggctggtgaaagttaagaatgtatgacaacatgtccacaatggtg

SEQ ID NO: 224347 - DNA, 102 bp, Homo sapiens
cacctacagaaacaaaatgtcaacaaattgatggatcgatgctatagaagacaaacaagggaaggttttttttccttttgcatcatggctcaatttggagga

SEQ ID NO: 224348 - DNA, 100 bp, Homo sapiens
ccggatctcagctccgacgcccgaggagaaggaggagtggattaagtgcattaatgatcagggccaaagcggtcagtgagaaggaagtggactctggaaa

SEQ ID NO: 224349 - DNA, 50 bp, Homo sapiens
ctctgaggaaaagctcgcaccaggaagaagaatttggacttgatgaagaa

SEQ ID NO: 224350 - DNA, 90 bp, Homo sapiens
tctcatctacttccgggattccagcttcctcagattgtctacaacctgttgtctctgcgcttcaactcacggatccgtgtgaagacctac

SEQ ID NO: 224351 - DNA, 100 bp, Homo sapiens
ccaccaggccgattatgtccattgttctcttggagcagctggtcatcatgcctaccgtatgtgaacgggagctgtgtgtgtttgcttttcaaaccctggg

SEQ ID NO: 224352 - DNA, 75 bp, Homo sapiens
atatgaaccagttcctgatgatgatgagcaaaacaagctatcgatcagggaagatctccagttataatagataac

SEQ ID NO: 224353 - DNA, 100 bp, Homo sapiens
caagaaacctcaggacttgagtaacagcaacatgtttcagaagaggagccccgccgaggcatgagggccgtgctccccccagaggaagggatggttttcc

SEQ ID NO: 224354 - DNA, 99 bp, Homo sapiens
tttggtagagaagaatgaacattgtattgagaacaatatagatttgcagggagatgcagttaaagacttgatgcttcgctttctgggtgaaaaagctgc

SEQ ID NO: 224355 - DNA, 100 bp, Homo sapiens
tctgcgactcattcatcgccctccagaaccttctgataacttaagagagattctccaaaatgtggccagattgcagggagtatcaaatatgagaaagcta

SEQ ID NO: 224356 - DNA, 80 bp, Homo sapiens
agaagaggctgcagaatatgctaaacttttggccaagagaatgaagggcagccccgagaaccacaggtgtacaccctgcc

SEQ ID NO: 224357 - DNA, 108 bp, Homo sapiens
ggcgaaggtggagcaggtcctgagcctcgagccgcagcacgagctcaaattccgagcaaatggttatgagccttagagtttctgaactccaagtactgttgggctacg

SEQ ID NO: 224358 - DNA, 100 bp, Homo sapiens
gcgtcacggcgtacgccctcatggggaaaatctccccggtgactttcagagaacctgtggagtacgtacgcgcacgcgggggcgtttgtggagaagaaag

SEQ ID NO: 224359 - DNA, 90 bp, Homo sapiens
cgagtccgccctcgtcccgcgcccccggggctcgcggagccagcaccccccggggaaagacattttctgctcccaccgagttggcagggc

SEQ ID NO: 224360 - DNA, 88 bp, Homo sapiens
cctcttcggccatggaagctgccggcagccctgcggctacggagacaggatttcaaatatgcgtgcattagagaatgattttttcaat

SEQ ID NO: 224361 - DNA, 100 bp, Homo sapiens
cgggccgcccgcacaggccgccgcgtgtcgagtccgcgcggggagcgcacgcggggcgggcggcgacagcccgtggaacacagagcattcctaatgacag

SEQ ID NO: 224362 - DNA, 100 bp, Homo sapiens
gcacccctacgggaacccacgaccattatatgctggaatggttccttgtcatcatcctgaaccacccggggcagattagcgccggctactccccggtcat

SEQ ID NO: 224363 - DNA, 97 bp, Homo sapiens
ccaaaggtgaatcttttggttggtgattttgatgatagccacaaagcaagcagggaacatctggattatgagattatccagtctctaaatcctgaat

SEQ ID NO: 224364 - DNA, 100 bp, Homo sapiens
agggccgttaccattacgatccatctccgattcctccattgcatatacaccaaatcctactgcaagcgagtttattcctaaaggaggatcaacctccagg

SEQ ID NO: 224365 - DNA, 101 bp, Homo sapiens
aaggggaggcaccctgaggccagagggagcatggccccggggactgagcatccggctcagagcggcttggcagaggccaagactaaggggctgcagagcgg

SEQ ID NO: 224366 - DNA, 80 bp, Homo sapiens
tcgtagatacaaatttttggatgatgatggatccatttctcctattgaggagtcaacgacagcaacccctttgatgccac

SEQ ID NO: 224367 - DNA, 101 bp, Homo sapiens
ccgctggccgcctcgatgcaggaggacgaacaggtgggaagaagagcgctatcctgaaggcatcaagtggaaattcctagaacataaaggtccagtatttg

SEQ ID NO: 224368 - DNA, 101 bp, Homo sapiens
ggacctgttcgagatcagccagccgaccgagtgcttatcagattgttgtggaagaactgcacccacaccgaaccaagagagaagccggagccatggaatgc

SEQ ID NO: 224369 - DNA, 100 bp, Homo sapiens
cagcagccggccagccggggggcactgcccgcccgggctctgcttttctgggagaagaggctacaaggacttagtgcatcagatgtaacagaacaaatta

SEQ ID NO: 224370 - DNA, 101 bp, Homo sapiens
cacgtggattctccagacgagaggaccttttaccaatttgaggctgcgtgggacagctccatgcacaactctctcctgctgaaccgggtcaccccttatcg

SEQ ID NO: 224371 - DNA, 90 bp, Homo sapiens
aagctggtcctctggcttctgtccctgctcagtcggccaagaagccctgcccagatcagtcgcatcgaatacattcattcaaagaacttc

SEQ ID NO: 224372 - DNA, 75 bp, Homo sapiens
cgcctggcagaaatcatcgacgattgtgtggaaaaaggcctgtgtcatatcaacacttatctaacagcatggcac

SEQ ID NO: 224373 - DNA, 129 bp, Homo sapiens
ctgtgaatgctgagacaattcgagaagtatgtaccaaatacatttataataggagtccagctattgctgctgttggacgttccagcggtagaaatcacccacaccttctgggaaaggaacctgccctct

SEQ ID NO: 224374 - DNA, 89 bp, Homo sapiens
gctgagggaaaggagcgggactccggacctccaggaggtggcctgtttgtaccggaagcaaagtcagattcagaaccaacaaggcgagg

SEQ ID NO: 224375 - DNA, 100 bp, Homo sapiens
atttcggctcagctggaggaggccagctctacaggcgagctttcattgttgaggttcctcagtgctgaactaacaagagggtacttccttgaacataatg

SEQ ID NO: 224376 - DNA, 74 bp, Homo sapiens
agagctgcacaaccaagaggtgcaaaaacgaaagcaactggagctcagacctatgaggaccagcacagcagtga

SEQ ID NO: 224377 - DNA, 50 bp, Homo sapiens
ctggctgggaggccgctgcagctcatggctatgattaaaagtttcatgga

SEQ ID NO: 224378 - DNA, 80 bp, Homo sapiens
actgaaaatcagtagaagaaatacgccacatttattctaccggggaagacagtggtgatttgccttcaaggaaactgggg

SEQ ID NO: 224379 - DNA, 100 bp, Homo sapiens
gagaagctatgtttagcatcttctgtcatgagaagtggcgatcaaaattggcctgaattattggaacaactttggaaagccagagctgaaaaaaagaaac

SEQ ID NO: 224380 - DNA, 83 bp, Homo sapiens
tcttcaatgagtaaacatattcctatgatatcatcaagttgaatcgaaaggaagggaagaagcagaattttccaagactaaat

SEQ ID NO: 224381 - DNA, 111 bp, Homo sapiens
ttcgttgcttgcttgcctgtgcgcgcgtgcgcggacatggcctcaaacgttgagaagctgatgtctcctcgacttccaactggaaccttgaacccccacatttctggacct

SEQ ID NO: 224382 - DNA, 100 bp, Homo sapiens
aggaggccgccaagatgccgcagtccaagtcccggaagatcgcgatcctgggctaccggtctgtgggcattgaatgccccagaggagcccgaaacctccc

SEQ ID NO: 224383 - DNA, 101 bp, Homo sapiens
aagcttgccctgtatgaacagcccccatcttcccatgcttgtcaaaaatcagaggcaactaacactgcggcttcctgagtagagacgggggttcaccatgt

SEQ ID NO: 224384 - DNA, 100 bp, Homo sapiens
agcaactgaggcagcggcaggctcaggtgcagccgctggcaagtgaaccggagcaaacgacttccgatccagtctgcgctgttgcggctcccgtttggga

SEQ ID NO: 224385 - DNA, 75 bp, Homo sapiens
ctggggcaaagggaccacggtcaccgtctcctcaggccgggctctcgccatgggtcactgtcgcctctgccacgg

SEQ ID NO: 224386 - DNA, 100 bp, Homo sapiens
tggttatagatggacaagagacgatcattctgcaagcaggcaacctgaatacaggctgcaagctgggctccccccttactccccagtgttcaaatcctgg

SEQ ID NO: 224387 - DNA, 82 bp, Homo sapiens
gcagaataagagactggacgctgtgaggcaagaaattatagagcagcttctatcaaatattttccacaaggagaaaaatgag

SEQ ID NO: 224388 - DNA, 104 bp, Homo sapiens
gccttgggcccccatttcttctgagaaggacagagccaatctactcctcctgggttatgctcaaggaagactagagattcaaccctatgaaaagataaaggcca

SEQ ID NO: 224389 - DNA, 98 bp, Homo sapiens
gacgcgccacccgccgacgcctcagccgcttggggcccgcacggaccctctacttcaggccagatgcagatggctggagatgggtgcagatcccaggg

SEQ ID NO: 224390 - DNA, 82 bp, Homo sapiens
gctgaagacatcaagaagatcttcgagttcaaagagaccctcggaacgtttggtgcacctcgatttggaggaagtagggcag

SEQ ID NO: 224391 - DNA, 82 bp, Homo sapiens
acatcatctatgtctacaagattggagaagattggctttcttctagtcaagatgagtgataaaccagacttgtcggaagtgg

SEQ ID NO: 224392 - DNA, 75 bp, Homo sapiens
gcacacagtctactatcaccgacagacggtgggcaagagcagcaagatgctgcagcatattgattacaggatgag

SEQ ID NO: 224393 - DNA, 88 bp, Homo sapiens
ccatctcgctgcccgacgatgtccgcaggcgatacgagatcctgacacccaatgccatccccaagggcttcatggatgggaagcaggc

SEQ ID NO: 224394 - DNA, 50 bp, Homo sapiens
tgggaaggacaggcagagctaaacaagacaaggcgcctctgtcgaagagc

SEQ ID NO: 224395 - DNA, 83 bp, Homo sapiens
gaacgggttgcttcccccgctgcgagcagcccctgtcaaagggaacaggaagcagtccacggagggtgacgccctagacccac

SEQ ID NO: 224396 - DNA, 82 bp, Homo sapiens
ctgctgctgctgctgctgctgaattcaaggaagccttctccctatttgataaagatggcgatggcaccatcacaacaaagga

SEQ ID NO: 224397 - DNA, 100 bp, Homo sapiens
tggtgagaagggccggcggattcgggaactgactgctgtagttcagaagaggtcgtcatacctcagaagaaaggcaagaaggctgctgcaacctcagcaa

SEQ ID NO: 224398 - DNA, 90 bp, Homo sapiens
cttcttctcctggggctgggaatacagcaaggaaggggacaggacaacgtctgacatgagccgagtgttctgctcacactgtgggaacaa

SEQ ID NO: 224399 - DNA, 74 bp, Homo sapiens
ttcctcccttcgctcgcaccatgaggctgggaggcggcagaatgcagccagaggagggcacaggctggctgctg

SEQ ID NO: 224400 - DNA, 90 bp, Homo sapiens
gtcatcgactgtgtcctactggagtgtgggcacatggttacctgcaccaagtgcggcaagcgcatgaactgcaataaggtcactgatcag

SEQ ID NO: 224401 - DNA, 75 bp, Homo sapiens
aatgcagaaactccctctggtgatgatttcagatgagcagcagctgctcagggctgagcagggtcctggtggccg

SEQ ID NO: 224402 - DNA, 82 bp, Homo sapiens
agttggaagcagccgatccagcctgcggagcctgtggggcaggcgctttgacttccgtccaaaacctgatccttattgtcaa

SEQ ID NO: 224403 - DNA, 75 bp, Homo sapiens
ctcggccttccttcagttcaactggaaggcggacgtggtggagtcctggatcgattcatgctggtcctggccagc

SEQ ID NO: 224404 - DNA, 88 bp, Homo sapiens
cagccaccactgggccgtgggagtcaagcacaacgccctcaaaacaaggccggggcaaaccctccttctctcggggcactttcccaga

SEQ ID NO: 224405 - DNA, 100 bp, Homo sapiens
tgtcggtgtggtgtgcagcgacaaaaggattcctgggttcaaatttgacaattcgttgatcaaccagatagaggttcagattcagaacaagaaagtggac

SEQ ID NO: 224406 - DNA, 83 bp, Homo sapiens
ttttccagctcacccactgccagcagagagctgccaggaactcgtggcatcccgggagccgccacagctggacgctgatggag

SEQ ID NO: 224407 - DNA, 82 bp, Homo sapiens
tatgatacagatgtattcaaatggatcttcaaagttacatcatgctgatgacagcttcctggtcctcaccacagatggaatt

SEQ ID NO: 224408 - DNA, 100 bp, Homo sapiens
cgcgtccgccgattcctcctccttggtcgccgcgtccttggctggcgtgccctgtgcaccaaggtgccggaactgatcagaaccatcatgggctggacat

SEQ ID NO: 224409 - DNA, 100 bp, Homo sapiens
gcttctagtccaatgccaagtgtgtgacctgtggccaccataccatttacatcggagtccatgtgccgaagagttacaggagaaggagacgtcacaagag

SEQ ID NO: 224410 - DNA, 129 bp, Homo sapiens
ttttggaacacatccaggaaaagataactttcgacacacctgtagacgttcgccaggtaaagggtcccgggattcttgagctgtgcccagctgacgagcttttgaagatggcacaataaccgtccagtg

SEQ ID NO: 224411 - DNA, 88 bp, Homo sapiens
gcggcccggtcgcgggcgccgccaccgccgccgctgccaggctctttggtgtaacgggaaactgcgctgcctgtagtaagctcatccc

SEQ ID NO: 224412 - DNA, 89 bp, Homo sapiens
cgctgcagaaccagatccgggagcacgtcatctccatcgagggtactccaaagattcaggtttactcacgtcatccagcagagaatgga

SEQ ID NO: 224413 - DNA, 85 bp, Homo sapiens
aaaatacaaatcacacgcataatggatgaaaggaaccgacagaggctgggaggcggcagaatgcagccagaggagggcacaggct

SEQ ID NO: 224414 - DNA, 75 bp, Homo sapiens
aagtgccgccacgaccagtggcaaaccagtccagctacgggggcccagccagccagcagctgagtgggggttacg

SEQ ID NO: 224415 - DNA, 75 bp, Homo sapiens
caggagtgctgccagaaatttgaacaactttccgaatctgcaaaagaagcattgcagtgtcgagatggctatgaa

SEQ ID NO: 224416 - DNA, 51 bp, Homo sapiens
aagccagcgttacagtaatgttccaggacatggatttgattgacatacttt

SEQ ID NO: 224417 - DNA, 100 bp, Homo sapiens
catgatagaaaaacttctttcacatggtacaaatattgaagaatgcagcaagagctcaggccccggggcctccagcggcaccagcggagaccacggtgag

SEQ ID NO: 224418 - DNA, 83 bp, Homo sapiens
ggagccggagctgggcgcggattcgccgaggcaccgaggcactcagaggagaacgtgctggccaaagcgctctatgacaatgt

SEQ ID NO: 224419 - DNA, 99 bp, Homo sapiens
gggagcagcaagacaatcactgcagagataccaggatgcctttgtggaactgtacggccccagcatgcggcctctgtttgatttctcctggctgtctct

SEQ ID NO: 224420 - DNA, 130 bp, Homo sapiens
cagataaatacctttgatctaagggttcagcctttcaatgtgacacaaggaaagtattctacagatattgatgatgttaagaagttcaaaccgggttacctggaagctactcttaattggtttagattat

SEQ ID NO: 224421 - DNA, 75 bp, Homo sapiens
ttctggagatgcttccgaactgtgggcaaaaatggcgcgagttgaagaatttctcagcaaagatatcagttatct

SEQ ID NO: 224422 - DNA, 75 bp, Homo sapiens
cccatcgtggattccaagacatccctgctgagagagccaaggagcaggggagagaagacagaagaggttggagag

SEQ ID NO: 224423 - DNA, 75 bp, Homo sapiens
caggtcctggcgatcagcaccaagaacccactgcaggtgttcagtggaaagcgactggaggctgagttcccacct

SEQ ID NO: 224424 - DNA, 100 bp, Homo sapiens
ccggagccggagccgacgggcggtggccgcactgggaccccggaatcccgcgcgctgcccacgattcgcttctgagcccatgaaacccctgaaggccacc

SEQ ID NO: 224425 - DNA, 76 bp, Homo sapiens
ccgccctgcgcttcgtgcaccggggcggtccgttgccaaagccaggaattgaatgatctggcacgggaccctccag

SEQ ID NO: 224426 - DNA, 98 bp, Homo sapiens
ccgacatggaacagggactcactgggggttcgctttgtgaacagcacatggatatttgggaagggcatgtgccatgtcagccgctttgcccagtactg

SEQ ID NO: 224427 - DNA, 101 bp, Homo sapiens
tctccttctgccacatttgttttgagctaaatattgaggggttacacatcattttggaatgactgtatatcatctggattacgtggctgtatgttaattga

SEQ ID NO: 224428 - DNA, 73 bp, Homo sapiens
ccgccgctgccgctgccgctgccgcacctccgtagctgactcgcatttaaatcaaacggtattgagatggatt

SEQ ID NO: 224429 - DNA, 90 bp, Homo sapiens
agctctgctgccccgcaggcaccttcgggccctcctgccttcgtgtggtggctggaggtggccgaattgacaaacccatcttgaaggctg

SEQ ID NO: 224430 - DNA, 96 bp, Homo sapiens
gaaagacacttagccacaatctccttgtttcagaagtgtacaaccagttgaaatttccagtaaagttccgccatggagtcatagttgcagctgact

SEQ ID NO: 224431 - DNA, 82 bp, Homo sapiens
gacaagcgcgacgcccggcgcgagctcaagctgctgctgctcgggtggatgtgaacactgaccggaagatcagtgccaagga

SEQ ID NO: 224432 - DNA, 50 bp, Homo sapiens
aggcctccccagccatgtggaactaactgataaatttcaaacggaagaga

SEQ ID NO: 224433 - DNA, 90 bp, Homo sapiens
caaggaccagaagaaactgcaccggaaatgtgcctaccagatggcccactgcgtgaccttggttcagctgtccatttcctgtgaccatct

SEQ ID NO: 224434 - DNA, 76 bp, Homo sapiens
ggcatactggcctgacgtaattcactcgtttcccaatcgcagccgcttctggaaaatgtttcaacgtgcgcaagag

SEQ ID NO: 224435 - DNA, 83 bp, Homo sapiens
gagcccagcgagcatcccgggcaagcactaccaggctgtgggtctgcacctctggaaggacggggaggtttactgcatcgacg

SEQ ID NO: 224436 - DNA, 82 bp, Homo sapiens
gccgccgaacctgcctggctagccggcgacttgagtgacgacctacagacctggtacctggatttttgcccgagatgattcc

SEQ ID NO: 224437 - DNA, 101 bp, Homo sapiens
cggacgcgcagcatggcggtggaggacgaggggctccgggtcttccagagcgtgaagatcaagatcgcaaagccacaacacttgagaaaacctatggacct

SEQ ID NO: 224438 - DNA, 82 bp, Homo sapiens
tgccgcttcagttctcccggtgtggccacgagtcgggtgctccatacttgcttgcagtgcctacgtggctctggctttgggt

SEQ ID NO: 224439 - DNA, 83 bp, Homo sapiens
cgttgacaaggcactgctttttcatgacggctcttactctctgtcagtccgcctcagccgccctgcatcctgggaccggatca

SEQ ID NO: 224440 - DNA, 75 bp, Homo sapiens
cgaggagtcagaaactcagccactggttgccttggtaggcaataaaaatcatgaatcggttcagtggtgttatga

SEQ ID NO: 224441 - DNA, 98 bp, Homo sapiens
agcaggagctgacggccgccaagaagcacggcaccaaaaacaagcgcggttggagagaatggggctgggaagtctaccatgctgaagctgcttttggg

SEQ ID NO: 224442 - DNA, 90 bp, Homo sapiens
gaacctggagcccaagtataaagaacttggcgagaagcaaatacttccctggacaagaaagccagatgaaactgatctaccagggccgcc

SEQ ID NO: 224443 - DNA, 101 bp, Homo sapiens
tggacagtcgccctgagatccagcgcctggacacgtggatcatccatgccatggagtatgaacttcagatccgtggcggagacaagccagccttggacttg

SEQ ID NO: 224444 - DNA, 100 bp, Homo sapiens
tttgaagttacttttgaagcaaaacgtggatgtcgaagcagagggctacagagttatagaagagaaacttccagttatcaggtcagaagaagaaaaagtc

SEQ ID NO: 224445 - DNA, 74 bp, Homo sapiens
taacttttgatgatcatgatacagttgataaaattgttgctccccctcatgagctgactgaagaagaaaagcaa

SEQ ID NO: 224446 - DNA, 132 bp, Homo sapiens
cagaaaacaccatccaagcagccaggcagtatcgggagcaggaaagccagtgttgtggaccctagcacagaggtacttcgacctggtgtcctgtggtttctaaggaatttgaatgatccagatttcaatcca

SEQ ID NO: 224447 - DNA, 82 bp, Homo sapiens
ccgcgtccgccgattcctcctccttggtcgccgcgtccttggctggcgtaattactgggagatgtactcaaagatcggcccc

SEQ ID NO: 224448 - DNA, 100 bp, Homo sapiens
acccagcaggaaatgcgggctttccctgccttcctgggcactgaggcctccagctcagcctacgaggacaagcagaaactcaagcggaccgagatcatca

SEQ ID NO: 224449 - DNA, 51 bp, Homo sapiens
gtcgacagtgaccactaaagtgaccctgaatatattaaaggaatctgtgaa

SEQ ID NO: 224450 - DNA, 75 bp, Homo sapiens
cggcgatcctgggctgcgggcaaggcgaaggagaacttatggattgtgatggaaaatcagaatctagtcctgagc

SEQ ID NO: 224451 - DNA, 117 bp, Homo sapiens
ctgcatatctgaagcggctcccagtccctgaaagcattaccgggttcgctaggctcacagacaatgcagatcttcgtgaagactctgactggtaagaccatcaccctcgaggttgag

SEQ ID NO: 224452 - DNA, 78 bp, Homo sapiens
tgcaactgaaaatgacattgctaatgtttcattgtttgcggaacttttcaacgaaatgcttcaaagagattttggtgt

SEQ ID NO: 224453 - DNA, 96 bp, Homo sapiens
agatgacttacttcacaagttggtgaatctgtctctgtcatcaagcacactgatcccgtccctgacccacgagctgtcaaccaagataaaaagaac

SEQ ID NO: 224454 - DNA, 98 bp, Homo sapiens
ggaaggacccccagcggtgcacgctgctggtcagccagttccgctcctgtcaggtctctgtcgtgtctccagaccacgtgagcgacagcaccgtctct

SEQ ID NO: 224455 - DNA, 98 bp, Homo sapiens
gtcaggactattttcacgttttaatgccgagagatgactctggggacgacgacgaggctaccaccccagccgacaagagcgagctgcaccacaccctg

SEQ ID NO: 224456 - DNA, 50 bp, Homo sapiens
ctttgttccctgcagccctcccacgataaagactatttcctgattgtgat

SEQ ID NO: 224457 - DNA, 50 bp, Homo sapiens
cttggtttggtctctaaaagtaaaggcattagtgccagcagtagttccca

SEQ ID NO: 224458 - DNA, 90 bp, Homo sapiens
ccctgatggaggggacggaggcaacggtggacacgtcattctgagagatgcttgctctgtcaaggcacagcctattgtctcctttgctca

SEQ ID NO: 224459 - DNA, 100 bp, Homo sapiens
gttgccacgttcaaacaagcagctttttgaattactttgttatgcagaaagtggtgaaatccgagctacagctttcaatgagcaagtggacaagttcttt

SEQ ID NO: 224460 - DNA, 89 bp, Homo sapiens
gtgtggctttgcaaaaacgaacaggtcatggaaaatggaagatttgcaaaatacaaatattttacccatgtcatgatcaataagacaga

SEQ ID NO: 224461 - DNA, 52 bp, Homo sapiens
ccttgaacaaggcaaatatggttttggtattgttgcagcatctggcagtgag

SEQ ID NO: 224462 - DNA, 96 bp, Homo sapiens
gatttctccaaggatctgctgaaagaattctcacactcaagaaagcaaatgaacttcttctgagcacaggcatgcccggcagttttctcatccgag

SEQ ID NO: 224463 - DNA, 80 bp, Homo sapiens
gaattatgcacctgacagcatctattacctttgccttggaatacaggaggcaccaccttccatggtcaataatgaacaac

SEQ ID NO: 224464 - DNA, 100 bp, Homo sapiens
ccatcaccttcaatccgctctactggaatgtggtgtccctggccagtgtccttccacctgtccacaagcatggggaacatcttcgccaacctcttcaagg

SEQ ID NO: 224465 - DNA, 74 bp, Homo sapiens
aacagttaatcctcaatttaagcctgatctaacccctagaaacaggcaacatattgctgaacgttctgattcca

SEQ ID NO: 224466 - DNA, 100 bp, Homo sapiens
caagcctggaggacctcttcaacttctgctccaggaaattcagcctcaaaaccgtcctgctgcttgctgaccaaatgagatggagtttcactgtgtcagc

SEQ ID NO: 224467 - DNA, 90 bp, Homo sapiens
cggaactcgaccggatccaacccagttagttacttcctgtctagagttgtagcttccacctggtttgcatcgccagcttctatatattac

SEQ ID NO: 224468 - DNA, 98 bp, Homo sapiens
atctggcctacaatagtctgaagctgtgtattcttattacaaccaaggcattttaccagagcaaggcatacaagattcattcaaaaaagcaacactgg

SEQ ID NO: 224469 - DNA, 80 bp, Homo sapiens
agtgcccgggaggagccttaacaagcgcacggagccctcaaggcaatcctttatcacaggatattctcaacttataccag

SEQ ID NO: 224470 - DNA, 74 bp, Homo sapiens
ggcgcaaggcttcaggcgacccgtactgggcctactctggccaactgagctgcatttccttcccacctaaggaa

SEQ ID NO: 224471 - DNA, 78 bp, Homo sapiens
agctggtgctttgtgtgctcagaaggaactcgctttgaacgcttgcttatgagaataggacatcaatcaaagaatgcc

SEQ ID NO: 224472 - DNA, 82 bp, Homo sapiens
cgagaggtgcggcgaaggaggcagaggcacttatgcttgtcaggaagaattcctttggctaccggaagaaaagggaggagaa

SEQ ID NO: 224473 - DNA, 100 bp, Homo sapiens
gctgcagcccaggagcctcaaggcggcccggcgggcgactggacggccggacaggttaatttggagtggcccctggagtcagtttcctacaccatccgag

SEQ ID NO: 224474 - DNA, 98 bp, Homo sapiens
tggcaatcgagttgagtacttggatagacttatacctcaggcagcttggatcttaaaagcaagagcgctaacagaaatggtatacatagatgaaattg

SEQ ID NO: 224475 - DNA, 75 bp, Homo sapiens
tcggagaggtgctcggattctcgtagctgtgccggaccagcatctcagacatgtcgaaaaagatgttttgatccc

SEQ ID NO: 224476 - DNA, 96 bp, Homo sapiens
ggaacttggttccccctccctcagcttccgccccaaaaggttttaaaatcaaagatgggaaaatcggagaaaattgcccttccccatggccagctt

SEQ ID NO: 224477 - DNA, 75 bp, Homo sapiens
ttggagtccggacatctgaaacttgctgaggagtacctgtcatttgcctttgagcattgtcaccgttctagtcag

SEQ ID NO: 224478 - DNA, 99 bp, Homo sapiens
ggtgtctggaccctgctggccttgatcctttgcccaggccccgacagcccggtctccccaatgaaggagctgacccatgcagtgcacaagcagcagagg

SEQ ID NO: 224479 - DNA, 100 bp, Homo sapiens
ggggacctcatgtccctgtgggacacaatgcccccaagttccgatgaagttaaattccgtcaagatttaatgaatattgcgggcacaacattatcctcaa

SEQ ID NO: 224480 - DNA, 100 bp, Homo sapiens
tgccatgatgcctggtgccccattacaacccgtggagagagccaggagctgcctgacatacctggtgagccaactggccaacatggagcattcgtttcac

SEQ ID NO: 224481 - DNA, 98 bp, Homo sapiens
ctaaagccacagtcttcaagagcccacggacaccacctcaacggtctcctaaaaacccagaacagaagatcattaagagagtgattgctcttgaagga

SEQ ID NO: 224482 - DNA, 100 bp, Homo sapiens
tgctgctgctgctgctgctgcatgtctaccaggagaggagggaactgcggagcggaatcgagagctccagatcatgagaaagctagatcactgtaacata

SEQ ID NO: 224483 - DNA, 83 bp, Homo sapiens
atgaagcaaccgcccattcagtctacggctggggccgtcccagttcgcaatgagaaagaatacttcagagagtcagagttgtg

SEQ ID NO: 224484 - DNA, 100 bp, Homo sapiens
cctcttcctcttacaaggaaatcctaccttgcatggattgggttttcagctgaagaatgcagtaatagtggccttgtcttcaaaatcatgggatgtagag

SEQ ID NO: 224485 - DNA, 73 bp, Homo sapiens
gatcatttgaagaatatttaaagcgtttggaaaatccacagaggtgttatgaacataaacagtatagaaatgg

SEQ ID NO: 224486 - DNA, 75 bp, Homo sapiens
gctgcgtcgcttcgatgccgcgcaggtccctacagttcagtccccccgccttctgctcccccaccaaagaagtct

SEQ ID NO: 224487 - DNA, 80 bp, Homo sapiens
gtttcttttccggccctgggatgtcacggagatgtcccaaacaggaaggaagaggaaccggaggaagtcccaagagccaa

SEQ ID NO: 224488 - DNA, 104 bp, Homo sapiens
gccagcggccgagcgggcggcttcctggcctgggcgctccggtggcggcggaggtgtccttaagtttgctcgcttggtcaagtcctacgaagcccaggatcctg

SEQ ID NO: 224489 - DNA, 82 bp, Homo sapiens
gcggcgtgcggcctagcgtctcaggacggaaccgctggactccaggttccttgcctgggagtaggagaaatccacctgctgg

SEQ ID NO: 224490 - DNA, 83 bp, Homo sapiens
cccgtgccgcgagcgcggcctgcaggagaataccctctaccatctgctttggtcagggtgccgctcgaggatttaaaagcaac

SEQ ID NO: 224491 - DNA, 90 bp, Homo sapiens
ctgctatagtatacatgcatcgattctacatgattcagtccttcacacagttccctggaaatgatcaagtcttccataccagggaccagg

SEQ ID NO: 224492 - DNA, 100 bp, Homo sapiens
tgctgctggcaagacaaccattctgtataaactgaagttaggggagatagtcaccaccattcctaccattggtttactcctggcttgggggcattaggaa

SEQ ID NO: 224493 - DNA, 97 bp, Homo sapiens
acgtgagttcaagtacagatcacacgcccactaaagcccagaagaatgtggctaccagcgaaggacctccaaggtgaaattgaagctcacacagatg

SEQ ID NO: 224494 - DNA, 101 bp, Homo sapiens
tggggtcttaagttgtggtctgacacacactgctgtggttcccctggatttagtgaaatgccgtatgcaggtggaccccaagttcctgaggaacatgcgct

SEQ ID NO: 224495 - DNA, 87 bp, Homo sapiens
acaaattgtacatttgcccattctcaggaagagcttgaaaactcatgtctgcagggctctgagaggaggaagcctggggcaggacct

SEQ ID NO: 224496 - DNA, 101 bp, Homo sapiens
agtgcgctactcaggcgctggagaaatacaacatagagaaggacattgcggctcatatcaagaagacaatgcagatcttcgtgaagactctgactggtaag

SEQ ID NO: 224497 - DNA, 84 bp, Homo sapiens
gaaggactctatccaacctattatatcaattctgtggtgttcttggtcacacatttatggagtttctgaagggcagtggagatt

SEQ ID NO: 224498 - DNA, 135 bp, Homo sapiens
agggcccatctccttctctaagagatgcctgcagcctgccatgggacgtggggtccaccggtacaggtacatgtcccagagcaagcacacggaggcccgggagctcatgtactcgggagccctgctcttcttcag

SEQ ID NO: 224499 - DNA, 90 bp, Homo sapiens
tcgagctgcggctgcacctcatctacctgatcaatgacgtgctgcaccactgccccactccacagcgccgaccggtgtccagcatacacc

SEQ ID NO: 224500 - DNA, 74 bp, Homo sapiens
ttttgaggggtaatgatgagactattggatttgaggatattcttaatggacgccaggaaagcatgtgcagatgc

SEQ ID NO: 224501 - DNA, 90 bp, Homo sapiens
caccgatgccgagaggagacacgtggccatggtggaggtgcagctggagagtgaccacgagtacccaccaggcctgctggtggccttcag

SEQ ID NO: 224502 - DNA, 104 bp, Homo sapiens
agcagagcgacaaaacagaccagtttctagtgacagacagcggcaggacagtcatcctctataagagcaagtgcaccggcacctggaccaacacgaagtgagat

SEQ ID NO: 224503 - DNA, 156 bp, Homo sapiens
ttgagtgacatctatctgaacaatgtgattatgcggttcatgcagataagtgaggattctaccaggatgtttaaaaagctcttgcccctgttctttgcttctcgttttgttggtgaagatatcacagtgatgtctgcattcaacctgctgcatttg

SEQ ID NO: 224504 - DNA, 100 bp, Homo sapiens
aacacattagtttatacaatgtggcctgaaagtttccctcctctttccaaatcaaccataatattctgagatcagccaaatggccgatgacacagtggca

SEQ ID NO: 224505 - DNA, 82 bp, Homo sapiens
catagtacctacagcagcactccagggggatatgagactttctactcggaatatcctgagtgttgcgtggatgtaaaaccca

SEQ ID NO: 224506 - DNA, 100 bp, Homo sapiens
cccctttccagagagccagaaagaagatttttttcccaggaagccatcccgtcagaggggttcaagtgatgaaagttggcaaactgcagctacatcaagg

SEQ ID NO: 224507 - DNA, 127 bp, Homo sapiens
tctcaatatctgtcttcggtggactccttcggcagtccacccaccgccgccgcctcccagctggtaggtgagtgctgtcctcggctcactttcctcaagctctccggctgccacggtgtgactgctg

SEQ ID NO: 224508 - DNA, 75 bp, Homo sapiens
ggcagaaggggctgtggatgccatgctgctgcacggacagggttctcaccctgtggccaaatacttggggtcagt

SEQ ID NO: 224509 - DNA, 83 bp, Homo sapiens
catcctctctaaccaaggtaatcgttctatccttcactggagtctgatgatgatgaccctgctttgaaatctcgacccaagaa

SEQ ID NO: 224510 - DNA, 98 bp, Homo sapiens
cctgaatgtgactgtggacgtgcaggcatccgtgtcattctggaccttactcccaactaccggggtgagaactcgtggttctccactcaggttgacac

SEQ ID NO: 224511 - DNA, 80 bp, Homo sapiens
ttctggcacagacaggctgtgtgcatgcaccaaaggccatggtaggggaggagtgtgtaggtgccatcgtttgcaagttg

SEQ ID NO: 224512 - DNA, 75 bp, Homo sapiens
tagtgagaagaatgaaccagaagttcaatgaattcgacaccaaattttggaacttaaaaagaagattcttaaaac

SEQ ID NO: 224513 - DNA, 83 bp, Homo sapiens
gagcctgcttgttgcagctgtgggtgaggacggctctagctaggtgagcggctccggccagatcacaaaatttgtccaggata

SEQ ID NO: 224514 - DNA, 75 bp, Homo sapiens
gccaggccgatcccgacctggactcagacaaggagtgtggccatctggggccgtgtggtatttgccactcaggag

SEQ ID NO: 224515 - DNA, 74 bp, Homo sapiens
acagagatgacatgccagcccagactttcatgagctgtggcgcggggccttccaggagtctgagctatgagtgg

SEQ ID NO: 224516 - DNA, 100 bp, Homo sapiens
gatgacgaggaggtcgaaggatgggcagaggctgtggagcccgaggagatgctggatgttaaaatggaggacatcaaggggctacgtgggcaccgggcgc

SEQ ID NO: 224517 - DNA, 74 bp, Homo sapiens
cccaggccccggcagcgcctgggacaagaaatcatgttgttgatgtcagtgttgcggtcagtactcctgcagga

SEQ ID NO: 224518 - DNA, 82 bp, Homo sapiens
gacagattcgcagtggtcgcttcttctccttgggaaagccaccagggtgggtggcgagcctgggatcaccagagctgtgatg

SEQ ID NO: 224519 - DNA, 83 bp, Homo sapiens
atttaccagagataattgataacaccctgtaacagctgatgctcctcgtcttcctttgcctgggggtcttccttctatggaag

SEQ ID NO: 224520 - DNA, 51 bp, Homo sapiens
ggcgtctgctagtagggtcgttcagaatggtttcacgccattgtatatggc

SEQ ID NO: 224521 - DNA, 98 bp, Homo sapiens
cgacatcatccaccactggaacgccaaccggctggacctgttcgagatcagccagccgaccgagccccatctgctttgatatgattgaagaagcatac

SEQ ID NO: 224522 - DNA, 90 bp, Homo sapiens
gaaacacggaaactaggaagaggaaattaactatctgtacttataagccttacccctcgtgaattcaactcttacggagctcgaagaggt

SEQ ID NO: 224523 - DNA, 98 bp, Homo sapiens
ggcggcccaagcggtttcaaacggcttagagcaggccgcttggttctgacccagctgagggaccctccattttccatatccaggaaaatgtgatgcgc

SEQ ID NO: 224524 - DNA, 75 bp, Homo sapiens
cagagctcctggaccaatgcatcttcccaccaccttaaaccactggggataaaaacattcagatggcagatcaca

SEQ ID NO: 224525 - DNA, 74 bp, Homo sapiens
cttctcacttggcctatggaaaacggggatttccaccatctgtcccagcaggggaaatgctgtctgtagctgag

SEQ ID NO: 224526 - DNA, 83 bp, Homo sapiens
gctgaaggctgcgagggactaagagcagaaaaatgtgccagaggaacttcaagaaccattttacacagatcagtatgaccagg

SEQ ID NO: 224527 - DNA, 98 bp, Homo sapiens
gaggatcctgtaattattgaaagagctttgattactttgggtaacaatgcagccttttcagttaaccaagtggattcaccaatgaacttgaagcatcc

SEQ ID NO: 224528 - DNA, 82 bp, Homo sapiens
aagacttgaacttaatacagcaagaaagaccatcaagtttaccagactacaatgatgaaattcgtcaggaacaactacgtga

SEQ ID NO: 224529 - DNA, 95 bp, Homo sapiens
tattctacgacttatttatcaaggacgatttctacatggaaatgtcacattaggagggttttgactctgggaggagggctgccttatttggagca

SEQ ID NO: 224530 - DNA, 107 bp, Homo sapiens
ctttgagaaggccagcaaggtcaagctggcacctgagaggattgccgatggcaccatgttattcaagcggagaaatgttgctacagcagaagaagaaacagaagaag

SEQ ID NO: 224531 - DNA, 75 bp, Homo sapiens
tctccagggagtgctctgttcacggctccatcgctgttattcaaggagcagggacaagttacaggaatgttctcc

SEQ ID NO: 224532 - DNA, 90 bp, Homo sapiens
cggggccgggacgccatgtccatggaggaccccttctttgtggtgaaaggatcaggatcctcatgaccagccaaagagaagaagaattag

SEQ ID NO: 224533 - DNA, 82 bp, Homo sapiens
aggaaggaacgaggcaaggagctaaagcagcgtgcgttcagccctgggagtaacagttacccctcaatgagcgacccctacc

SEQ ID NO: 224534 - DNA, 74 bp, Homo sapiens
agcatccggggacagctgagctggcatcagaagacctacgccttcagacaatgcagatcttcgtgaagactctg

SEQ ID NO: 224535 - DNA, 100 bp, Homo sapiens
cgtggaagctgtgagcgcccccatcccggaggtctccgccggctcccggccatcagaaaaaattcggattgagatcatagctctaagccttaatgattct

SEQ ID NO: 224536 - DNA, 107 bp, Homo sapiens
gtctggatggaacctgagctgggtctctgactcacttctgactttaggtgctggagaatctggtaaaagcaccattgtgaagcagatgaggatcctgcatgttaatg

SEQ ID NO: 224537 - DNA, 100 bp, Homo sapiens
agaagagccaaggaataaacatgcaatgaacccaaaaggctccagagaagccttgggacaccaagagaagctaaaagctgagcaccgtcacagagcaaag

SEQ ID NO: 224538 - DNA, 83 bp, Homo sapiens
cggagctaagagatatctgcaatgatgtactgatctattccagaggggagcttcaccacttcattgacggctttaatgaagag

SEQ ID NO: 224539 - DNA, 100 bp, Homo sapiens
ctcggactgtggcggcttcggcggctcaggttgtggtagaggcggaggctcaggcagcttgaggtgcacaaatggagtccagaggaggctgtaagagcca

SEQ ID NO: 224540 - DNA, 75 bp, Homo sapiens
cccccagccaccagctcgaccacagcaagctcctggggggttatggttttgtgaaattcacagatgaactggaac

SEQ ID NO: 224541 - DNA, 100 bp, Homo sapiens
attggattcagccagtccgcggtcctgaagcctggaatggtcccccctccgccgggagaagaaagccagacggtcatccttccacctggctggcagagct

SEQ ID NO: 224542 - DNA, 88 bp, Homo sapiens
ctgcacttcgcattttggcattgacatttaattttagggtcctttatatagaagggagaattggtgctgaagacatggacggcttcca

SEQ ID NO: 224543 - DNA, 90 bp, Homo sapiens
tgactcagctgaaatccagcctattgggaactgtgaaaagaatgggggtatgctacagccacctcttgtgccctataaggactgccaggc

SEQ ID NO: 224544 - DNA, 50 bp, Homo sapiens
gccgcccaggccaccccctctcatgtctggtcttctctcgtctgagccct

SEQ ID NO: 224545 - DNA, 90 bp, Homo sapiens
ggctgttgccatgaggcgaggctagggaggacctcacttccccggggtgtaataatgttaactgaggagagaacattgaaagtattctct

SEQ ID NO: 224546 - DNA, 83 bp, Homo sapiens
cacgcaccgactatgtcgcctgccaccgagccgggcccacctccccaccaaggaagggactttgaacatgtcggggatcgccc

SEQ ID NO: 224547 - DNA, 100 bp, Homo sapiens
gacaagaaactagagcaaataaccgttttgaaattgcaaactcagctttcaccagacccaggtgtcccagcgcctggccaccgacctgctatccctcatg

SEQ ID NO: 224548 - DNA, 83 bp, Homo sapiens
gttcggggccaagctggagggaagcatttgccatctatcaatcgctgccttattttgaatcatttggcacttattccaccaag

SEQ ID NO: 224549 - DNA, 100 bp, Homo sapiens
gcgaagtccacccagcgtttctgaggtccccagtctatgtgaggatctcctgtcttctgttgaccagccactgaaaattgccagagacaaggtggtggga

SEQ ID NO: 224550 - DNA, 97 bp, Homo sapiens
tgctgcagagctcggaggggcgctgtgtgtacatcacccccatggaggccctggcagagcaggagaaggaagccaacatccttttggagccatgaat

SEQ ID NO: 224551 - DNA, 82 bp, Homo sapiens
gggcgaacgaatggcggttggcaaactttgaggaaagcaggcaggatgggagagtcgccgatagaaccacctcttccctgcc

SEQ ID NO: 224552 - DNA, 98 bp, Homo sapiens
tcacggcacacccactacagcctttcccacactgtgacactggagctggtgagtcaaagtccccagtcccaagcggaagttggaagaaccagttctgg

SEQ ID NO: 224553 - DNA, 75 bp, Homo sapiens
catacaaacaacctggaggtgaggagaaccatggagtctggcagtaccgccgccagtgaggaggcacgcagcctt

SEQ ID NO: 224554 - DNA, 104 bp, Homo sapiens
tgcaggccgagaagcgggcagccgagaaggtgtccgaggcccgcaaaaacaatgcagatcttcgtgaagactctgactggtaagaccatcaccctcgaggttga

SEQ ID NO: 224555 - DNA, 78 bp, Homo sapiens
gcttcttcatggaccatccaccagcactcctttaaagtgggcactgcaaaagtgattgagtttgtgacgggcaccaaa

SEQ ID NO: 224556 - DNA, 100 bp, Homo sapiens
cacaataaaagagacctctacttagctcagcaattcttaccttgaatggcaaaactctattcagaagaatgcaggacttgcatttattgagctcatcaat

SEQ ID NO: 224557 - DNA, 90 bp, Homo sapiens
cggtgacagagtggagccatggctagaggcctgaccgccgctgcctacagagtcacactcaatcctccgggcaccttccttgaaggagtg

SEQ ID NO: 224558 - DNA, 75 bp, Homo sapiens
aaaattgccagaaaatctttcctctaaagtcaaactgaatatgtttcgacagcaacaaaagattcttcaacaatc

SEQ ID NO: 224559 - DNA, 102 bp, Homo sapiens
gtgggcacagacaaggagctcagtgacctcctggacttcagcatggcctccggtgtggctgtctctgatggtgtcatcaaggtgttcaacgacatgaaggtg

SEQ ID NO: 224560 - DNA, 100 bp, Homo sapiens
gaggagaggagccgctgtttttcactgagctgccataccccgaaaggtgtgaagcttacactctctgctctggtagatgggaagagcattaatgctggag

SEQ ID NO: 224561 - DNA, 75 bp, Homo sapiens
gccgcgcacttcgtcatgttcttcgcgccctgcctgcctgctccgcttcagcggactctcgctggtctacctgct

SEQ ID NO: 224562 - DNA, 100 bp, Homo sapiens
gaatacaaagacagatgtatggctgacaagacgctcccagagtgttcaaaattacctcccactttccttgtggaactgtccagagtgctggcaaatccag

SEQ ID NO: 224563 - DNA, 51 bp, Homo sapiens
tgaagattgtgaagcaatagcctaagacatgcacatgatggtgtccaagcc

SEQ ID NO: 224564 - DNA, 101 bp, Homo sapiens
cctctgccgccgccgccgcgttggcctcgccgcccctgctcgggtggccttgtgcacatttgccgtctacgtgaccattgacgagaacaacatcctggatg

SEQ ID NO: 224565 - DNA, 100 bp, Homo sapiens
agagcgtcacggcgtacgccctcatggggaaaatctccccggtgactttcagaaaaatggctacaaacttcctagcacatgagaagatctggttcgacaa

SEQ ID NO: 224566 - DNA, 100 bp, Homo sapiens
gacgccgcagagcgccgaggaggctttcctgctggtggcaaccgcctacgagacactcaaggtgcgcccacctcgtccacatgttgttaagagaccaaag

SEQ ID NO: 224567 - DNA, 100 bp, Homo sapiens
tctgcgttgctcttgcttttcctcgctggggtgtacggctgggagtcctccgtcagcatcagctccggctccggtgtcctccttctctcgcacttctatc

SEQ ID NO: 224568 - DNA, 75 bp, Homo sapiens
cacaccttcagaacctatacattgcatcgtttgggcaaagtacttgttcaagagaaatccagcggtcgcaccgcc

SEQ ID NO: 224569 - DNA, 100 bp, Homo sapiens
ctgaattatataatcagctgaaatttccagtaaagggaatgaattttatagcaggatatctgattcttataacaaataatgaagaagaatctttttggct

SEQ ID NO: 224570 - DNA, 90 bp, Homo sapiens
gttttccagcgtgcctcagcaaaatggaaacactatggagatgaccgccatggccacggaggacccccagagcgccacggccgggactcc

SEQ ID NO: 224571 - DNA, 100 bp, Homo sapiens
ggaatgtctttcctaccatctaaaatacgaaggtttctggctgggttatgatggagggtggtcgcagcaaagggtttggttttgtatgtttctcctcccc

SEQ ID NO: 224572 - DNA, 75 bp, Homo sapiens
gacaggaggcagtagccaaacacccaggttctccagagagcgggcatccagagaggagtcctgggagagcgggcg

SEQ ID NO: 224573 - DNA, 100 bp, Homo sapiens
cctgtttcttgactttcaatatctttgactggttgggccggagcctcacagctgtattcatgtgggagacggtggctcagggagtaaaggaaggccagtt

SEQ ID NO: 224574 - DNA, 100 bp, Homo sapiens
ttgaaagggaccatggtgcggcctgtgaggtcacggtctagatcacattctcgatccagaggaaggcgatactctcgctcacgcagcaggagcaggggac

SEQ ID NO: 224575 - DNA, 90 bp, Homo sapiens
tgctattgctctgagggagtatcgaaagagttggcagtgccacagtaaagccacaagtgactttgcatttattacctcttcaagtctagt

SEQ ID NO: 224576 - DNA, 101 bp, Homo sapiens
ccgaaattcatctgtcacctggaaaatttgaggaatatcttatcaaattaggcaatacagaatgtcatcctgaacagtttttggaaagaagatcaaaatta

SEQ ID NO: 224577 - DNA, 82 bp, Homo sapiens
agaagccggactacaaggtcgcctacgtgcagctggcgtcttggctgcccacaagataatggctagctccccagacatggac

SEQ ID NO: 224578 - DNA, 80 bp, Homo sapiens
gaaggagggcgtccgagtcaacaaccgcttcgagctggtgtggacactgccagcggctgcagccgacttggaatgacctg

SEQ ID NO: 224579 - DNA, 100 bp, Homo sapiens
ccaggcgctggaggccgagcggcaggccctgcggcagtgccagcgtgagaaccaggagctcaatgcccacaaccaggttctgcggcatgaggaatttgaa

SEQ ID NO: 224580 - DNA, 75 bp, Homo sapiens
ccgacttcagggaggatccggacccccgcaaggtcaacctgggagtgggagacaatgggccctgcttgggatata

SEQ ID NO: 224581 - DNA, 96 bp, Homo sapiens
cctccacctcggccgccctgcccagctgcctgcccccggaggtgcccacgcagctgcctggacaaatgatgaataaggtatttggaggtactgtgc

SEQ ID NO: 224582 - DNA, 97 bp, Homo sapiens
gtgtcagcagattcagcggtactggtgtataatagctgttgaaaatggacagatagatgtgttaaggctgttgcttcaacacggagcaaatgttaat

SEQ ID NO: 224583 - DNA, 83 bp, Homo sapiens
gagtccggacatctgaaacttggacttgaactgccatgtcctctgaagaaggaaagctcttcgtgggagggctcaactttaac

SEQ ID NO: 224584 - DNA, 121 bp, Homo sapiens
gctagtggcattgactgggaccatggtctacagcatcactaacaacttcccattcagacacctggatttcattagcatcatgacctacgattttcatggagcctggcgtgggaccacaggc

SEQ ID NO: 224585 - DNA, 51 bp, Homo sapiens
ggagatgcacacggcactcgagtgtgagtaatctatgccagcaattatgac

SEQ ID NO: 224586 - DNA, 75 bp, Homo sapiens
ctgccagctcgtaatgtctgagaaggaggccatgatgatggtggagccacaccgcggtcaagaagcagatcgaga

SEQ ID NO: 224587 - DNA, 89 bp, Homo sapiens
ctggattctaaaatttgaatatctattaatgagatgaagcggttggaagaaatgtcaaatatgtttcagagctctggagtccagcacca

SEQ ID NO: 224588 - DNA, 100 bp, Homo sapiens
cgactgatgacttcagggatgctacacctttctctcctgcctgggcaagcctcggaacatctaaaggcctttgatgatgaaatcaatgcttttttggaca

SEQ ID NO: 224589 - DNA, 73 bp, Homo sapiens
gaagatccggactgctcgggaagctccatccgaatgtgtctgccccccagggagttttgaaaaataaatggtc

SEQ ID NO: 224590 - DNA, 100 bp, Homo sapiens
tcttgactggaggaggagaaggaaaagttgagcacattgccaaccggagttccccaagcacccgacagacgtggactacagggtcatggccaccttcacc

SEQ ID NO: 224591 - DNA, 75 bp, Homo sapiens
caaaagaagagttaaatgccctcaagtcgacaggggatgggaccctaggtcgagatttaatttgcatccagtcta

SEQ ID NO: 224592 - DNA, 74 bp, Homo sapiens
ctgtttggaaagacccaggagaagccgcccaaagaactggatgctttgcgtgtgggatggaaaatggattccga

SEQ ID NO: 224593 - DNA, 98 bp, Homo sapiens
ggaggaggaggagccgagaggagctgagcgagcgcggaagatcagaatgaaggatttcattgccgggaagaatgccggattcttggccactctgacag

SEQ ID NO: 224594 - DNA, 100 bp, Homo sapiens
gattatttagccttcaaacgtcagcagacatttgaagacagtgatttgttccatttgattggtgttatctgtggcttagcaatttataattgtaccattg

SEQ ID NO: 224595 - DNA, 100 bp, Homo sapiens
ttccagatgctccagttagcctggtacggttttggatcacaggcctgcgacttttgctcaaaggtgaagaacaccatctactgcaacgtggagccatcgg

SEQ ID NO: 224596 - DNA, 75 bp, Homo sapiens
cgcgagaggtgcttcattccattcctgtctgactaaagggacctcaaaaaggagggaaaatggcttctgagtctg

SEQ ID NO: 224597 - DNA, 117 bp, Homo sapiens
tgtgggggccccactgagtatgtcggaggagagcgacatggacaaagccatcaaggaactgcaagcacatgttgaccagataactgaaatggcagcagtaatgaggaaagccattga

SEQ ID NO: 224598 - DNA, 75 bp, Homo sapiens
ccacggccgcctccggagcccgacgcgggcttccgttacaagatgaggtctgtgtatgctcacttccccatcaac

SEQ ID NO: 224599 - DNA, 82 bp, Homo sapiens
ttgaaagtgcctgccaaagccaagctcaccaaactgaagatgccttctcagtcagttgagttaagggaagaaagtcggaggc

SEQ ID NO: 224600 - DNA, 83 bp, Homo sapiens
ccgttgccgccgtccgcgctcggcccccgcggagagaggcccccagaatgagaagtgacaacaaggaaaatccacaacaggaa

SEQ ID NO: 224601 - DNA, 75 bp, Homo sapiens
cgtcggcggcgccctgcaccgcgcctcgcaaagaaatgggtcctgatgaatatgaagagatggaagaagaggagg

SEQ ID NO: 224602 - DNA, 99 bp, Homo sapiens
gcctctccagcttctgcagtgcattgttgatgaggtggaatggctgaaaaatgaagagcccattgactctgaacaagacgagaacattgacaccagggc

SEQ ID NO: 224603 - DNA, 75 bp, Homo sapiens
cctggggcactgtgtcaggcattggtggtctttgggaagaagcttcctgcctttgccaccatccccatccaccag

SEQ ID NO: 224604 - DNA, 75 bp, Homo sapiens
gcggcgagggcttctgctcctgggggtcttcttaatcttgctggaaaaggctccaagtagctcctctaactgtcc

SEQ ID NO: 224605 - DNA, 83 bp, Homo sapiens
aaatcaccgaactgaagtttccatcaataaatcatgactgatcttgtagcagtaatcaagtcagaggattatatgacttttat

SEQ ID NO: 224606 - DNA, 98 bp, Homo sapiens
acattacagaccggtggatcctgtccttcatgcagtctctcattggcttctttgagactgaaatggcagctgtgttggggtggaagaggaggaggcgc

SEQ ID NO: 224607 - DNA, 82 bp, Homo sapiens
taccagctgaagagcgacaagccgctggcagccgcggatctcaccgccgctcagggtgtggatgaggtcaccattgtcaaca

SEQ ID NO: 224608 - DNA, 100 bp, Homo sapiens
gccagagcctggagtctgcgaaggccgggacccggttccccggcccacagtgggggtgtgcaaacccgagagaactggggctggccctggccttccacga

SEQ ID NO: 224609 - DNA, 98 bp, Homo sapiens
gattgcattgctgggcgtctggacatctgtagctgtcgtttggtttgatcttgttgactatgaggaagttctagtggaaattgatgacttgaaaaaaa

SEQ ID NO: 224610 - DNA, 50 bp, Homo sapiens
tgtgcaaacccgagagaactgggctgtattcatcaccaaagaaaaaactt

SEQ ID NO: 224611 - DNA, 100 bp, Homo sapiens
actcgatgactgcgtgcagactgatgaggactcggccatcctgatttacctgagctgtaagtaccagacgccggaccactggtatccatctgacctgcag

SEQ ID NO: 224612 - DNA, 98 bp, Homo sapiens
ctgaattgtgctgccttggccaaaagaggttggtgttcgaggaagagacattgttgttcttggtgtggagaagaagtcagtggccaaactgcaggatg

SEQ ID NO: 224613 - DNA, 85 bp, Homo sapiens
gggttggaaagtcttgccttcttcttaggtttgcaggaacgtgctcagtcactttcaatgggcaccaggagaaaggttttggttc

SEQ ID NO: 224614 - DNA, 109 bp, Homo sapiens
tacacaatgcgttgcctggctccacgccctgctgggtcctacctgtcagagccccaagtttcttggaaaggctgtccttccctactccaagcccctcccctcactcccc

SEQ ID NO: 224615 - DNA, 98 bp, Homo sapiens
atgggatccggctcctccagctaccggcccaaggccatctacctggacatcgatggacgcattcagaagaccaagatcactccatggatgaaatgaca

SEQ ID NO: 224616 - DNA, 90 bp, Homo sapiens
ggtcaccgaaggcctagatgtcttgcggcaaattgaggcccagagcaagagaggcatcctcaccctgaagtaccccatcgagcacggcat

SEQ ID NO: 224617 - DNA, 96 bp, Homo sapiens
gagaagctgcatgactcggtggtcatggtcacccaggagagtgacagcagctttctggtcaagggccttggtgtaccttgttgtagtgtttgaaaa

SEQ ID NO: 224618 - DNA, 100 bp, Homo sapiens
cccaggtgtaagcgcagaaagcaggcgaacccgcggcgcaataacgcccccaggctccgctcttgccagagggacaggagccatggctcagaaaatggac

SEQ ID NO: 224619 - DNA, 73 bp, Homo sapiens
agtctggtgtttggaatgacgacagtatgtcattgaaattatgagactatcattcaaatggaagcattatagt

SEQ ID NO: 224620 - DNA, 82 bp, Homo sapiens
ttgcttcctgttgacgacagctctcctcagcaagagtgagccatggagctacgtgtggggaacaagtaccgcctgggacgga

SEQ ID NO: 224621 - DNA, 83 bp, Homo sapiens
gggatgacaaaaagtcatagtggtgtgacaagtatattgaagcaagtcaaagattacattaaacagtgtagcaaatgccagga

SEQ ID NO: 224622 - DNA, 101 bp, Homo sapiens
tagggagtccatggccagaaaacttttggggagttgcgggagcttcaggacgagaaggcagagctgcagaagatctgcgaggagcaggaacaagccctcca

SEQ ID NO: 224623 - DNA, 98 bp, Homo sapiens
gacagaggagcagaaggagcacgaggccatgaagctggtgaccatgtttgacaagctctccagaaaccagcctggacaccaagtctgtgtcagaaggc

SEQ ID NO: 224624 - DNA, 75 bp, Homo sapiens
tgggagaagatttccaatattaacacgccatcgtagtagaagcagggagcggaagaagtctcgatccaggagtag

SEQ ID NO: 224625 - DNA, 98 bp, Homo sapiens
gccaggaacccctggaagcctagaaatggaagaccctgttcccaatggcctccgggcactcccagtattctatgctgctaccatagcaatcaatgtct

SEQ ID NO: 224626 - DNA, 75 bp, Homo sapiens
gttccccggctcgcggggcccggcgaagggcaggaataaataccttacgtacactttagatgatcaggaaatctg

SEQ ID NO: 224627 - DNA, 75 bp, Homo sapiens
cttcatcacctctttgtacatcttctgcaattactcggccaagcaatggggctggacacaaggtcggtggcccaa

SEQ ID NO: 224628 - DNA, 50 bp, Homo sapiens
gaaagagtcaacagcagtggcaacagagaggatttcgtttccgttatgta

SEQ ID NO: 224629 - DNA, 100 bp, Homo sapiens
ggatttgatccctgtgaatgtgtttgctctcatgaacatgcaatgagaagactgatcaatctggccctggccaacgtcaacattgggagcctcatctgca

SEQ ID NO: 224630 - DNA, 100 bp, Homo sapiens
ccaggactgaccgctgccgcccagcacgtccaggtcttgtcaacggaaaggggtccctatccagaccccaagagagcattcttggatctcttgcaagaaa

SEQ ID NO: 224631 - DNA, 100 bp, Homo sapiens
ggaaatctcagactgtgcttcttgtgcaagtaatcagtctttgacaagtgatgagaagctgtcggagcttcccaagagttcgcagtatgtgcagtgcgtg

SEQ ID NO: 224632 - DNA, 83 bp, Homo sapiens
gcggggcgcagagccaggcagcgcagagatgtttgggatttcaatcacaagtgtgaggatattggacattactgcataatggg

SEQ ID NO: 224633 - DNA, 82 bp, Homo sapiens
cgggaccggctgccatcttagtctagggactgaggagtcgccgccgccccgagtcccgatcgcaccccctccctccctggcg

SEQ ID NO: 224634 - DNA, 74 bp, Homo sapiens
tacctgcagaaggtctctggagacatcttcagcaggtatctacgagaccccagcaggcaccatcctttaccatg

SEQ ID NO: 224635 - DNA, 100 bp, Homo sapiens
gaaaagaccactgaatctagaaatgaggacatggatttgattgacatactttggaggcaagatatagatcttggagtaagtcgagaagtatttgacttca

SEQ ID NO: 224636 - DNA, 76 bp, Homo sapiens
gaaaggataagcctcgacttagaagctaccgagttaccctaagaaaggcaatcctttatcacaggatattctcaac

SEQ ID NO: 224637 - DNA, 75 bp, Homo sapiens
ttgtgttttgtgatggaatatgttaatgggggcgaggtatcacatcggtatcctcgaattcaaagtatcaaagta

SEQ ID NO: 224638 - DNA, 76 bp, Homo sapiens
gtttacagccaggtgaggaagtggagatagctgagctcactacagtgcccttggtttctagaatatgcccaaatga

SEQ ID NO: 224639 - DNA, 78 bp, Homo sapiens
ctcactcctgaacagacttctgggaaggaacacccatatctctttagtcagtgccagagtttacccctcaatcccaaa

SEQ ID NO: 224640 - DNA, 97 bp, Homo sapiens
ccgggactagtggaccagctggtgaaggcagacagcgagtggcgacgatggaagaggaagaacgtctgagaaataaaattcgagctgatcatgagaa

SEQ ID NO: 224641 - DNA, 98 bp, Homo sapiens
tgcaaaatcgttaaaatcttcaagggctgttgataatcaggtgtatgtggccacagcctctcctgcccgggatgacaaagcctcctatgttgcctggg

SEQ ID NO: 224642 - DNA, 75 bp, Homo sapiens
ttccagtcacctgataaagcagaaacccagcgtggagacccgtctgttatttctctgaacaaaaggttcatcctc

SEQ ID NO: 224643 - DNA, 116 bp, Homo sapiens
ctgaagagcaactttctgagctacaggagtacgtggaccagcacctgggcaggaactgtggctgcaccatctgtcttcatcttcccgccatctgatgagcagttgaaatctggaac

SEQ ID NO: 224644 - DNA, 100 bp, Homo sapiens
tgccaactccgtgcttgttgagtagtgattcttgatcagtcatacgggaagagagagtaagaggcctccaagactgcagagaatgccaccagtggggaaa

SEQ ID NO: 224645 - DNA, 97 bp, Homo sapiens
tggggacctgctgtgtgttggacctttatacgtattgtaaagggctcttggtggtatcgctcaatacgctatagtggagaccagattctaatacgca

SEQ ID NO: 224646 - DNA, 100 bp, Homo sapiens
tcggcggctgatttagaaggaggttcaggctacggtgagccgaagatgtgttctgagctggatgccgggttccagaatcgctgcacagttccaacaggac

SEQ ID NO: 224647 - DNA, 80 bp, Homo sapiens
ggacggctctgtaggaaggaacttggttccccctccctcagcttccgccccaaaagtttccgttactatggcaatgacgg

SEQ ID NO: 224648 - DNA, 98 bp, Homo sapiens
cggacccgccggcgacatggccagctccggagagggccggccaaggattgcgaaaaggaccaattccagtgccggaacgagcgctgcatcccctctgt

SEQ ID NO: 224649 - DNA, 50 bp, Homo sapiens
ctaccgcgactggctgctgcggcgcgagcgtctgttcctcacacaccccg

SEQ ID NO: 224650 - DNA, 120 bp, Homo sapiens
ggaggaggttttcaggaccaaaattgtggaaaagtcactctggccaagcttggtggtgagatcctggactacagggacttggcagcccttcctaaaagtaaggccatctatgacatcgac

SEQ ID NO: 224651 - DNA, 100 bp, Homo sapiens
aaaaggatgtcatcagaagaccaacatttgtgcctcagtggtatgtgcagcagatgaagagagggccagacaaaactgttcattgtagaatcaaactctt

SEQ ID NO: 224652 - DNA, 51 bp, Homo sapiens
caggatgaggcgtgcaggcctggatattgatgatgttaagaagttcaaacc

SEQ ID NO: 224653 - DNA, 49 bp, Homo sapiens
cggaaatgcccttacagcagcaggaagcatgagtgggaaaagcatggga

SEQ ID NO: 224654 - DNA, 50 bp, Homo sapiens
ttaccagaagtagatggagcagatgatggccatgccacttcattttttgg

SEQ ID NO: 224655 - DNA, 83 bp, Homo sapiens
ttttgccacacttaacagatgtccaaaaagactcctgactgctgaggtagatgacattaatgctgataagaatatctcttctg

SEQ ID NO: 224656 - DNA, 100 bp, Homo sapiens
gtggagtgtccgctgtgcccgggcctgcaccatgagcgtcccggccttcatcgacatcagtgaagaagatcagtctgaagatgatgagaaactgaaaaag

SEQ ID NO: 224657 - DNA, 83 bp, Homo sapiens
ccacagtcaccttcactgggatgatgcgctgcagccagctggcccccagggccctgcagcaattctgtggtgttcttggtcac

SEQ ID NO: 224658 - DNA, 50 bp, Homo sapiens
gaggggattttgtcagcttgtcgtcaagcacatggattaattgatgtatg

SEQ ID NO: 224659 - DNA, 99 bp, Homo sapiens
ggcagcggcggaggcgacggtggcggctctcggagccggcgcgaatccggcccccgcagcgggacccgggaatggccaacctgctgacgggccccaaac

SEQ ID NO: 224660 - DNA, 75 bp, Homo sapiens
acccacttcgagtcctttattgtggaggcagctgacacacaagagttcaggaccaaactgcacaaagtatttcgt

SEQ ID NO: 224661 - DNA, 83 bp, Homo sapiens
cgatgtttcccttggtcaaaagcgcactaaatcgtctccaagcaattctgtggtgttcttggtcacacatttatggagtttct

SEQ ID NO: 224662 - DNA, 96 bp, Homo sapiens
caaagctccctgctgcataagaccttgtcagagaatcctcactatggatgggctcattgaggacattaagcatcggcggtattatgagaagccatg

SEQ ID NO: 224663 - DNA, 100 bp, Homo sapiens
acgtggtgacacggtactaccgggcgcccgaagtcatcctgggtatgggctacaaagagaacggtaaatttcatctgatttccaagttaggaagagtgga

SEQ ID NO: 224664 - DNA, 99 bp, Homo sapiens
aataatgacaatctcctcagggaaggggcagcacaggatcatagacggtatttctatgtaaacgaacagtcgggcgagtctcagtgggagtttccagat

SEQ ID NO: 224665 - DNA, 98 bp, Homo sapiens
cggggtcctcttctgcaaggtccggctgctggatggaggggattttgtcagcttgtcgtcaagagcactgacacggctcccgggacctcggcaggatg

SEQ ID NO: 224666 - DNA, 101 bp, Homo sapiens
accatatccgtggggccaagagtgagatcttgtacattcgcaccaatgcttcaggtgacttcatggtcatgacgattttcttcaatgtgagcaggcggttt

SEQ ID NO: 224667 - DNA, 82 bp, Homo sapiens
gctccaggctgccccataataagaatgggtaccacagaccatgtcatcgtcctggcgtccacgaaccgagctgacattttgg

SEQ ID NO: 224668 - DNA, 100 bp, Homo sapiens
ccggcagcacgtgttcctggtttcaggttgcccgaagctcagcagagagtcggaggctgctttttaaacctgatgccacagatgaaaaccctgtacctca

SEQ ID NO: 224669 - DNA, 100 bp, Homo sapiens
acattgacattcaaccgtacccgccaagctgtcatcacaaaagagttgattgaaattatctctggtgctgcagctctttacatccttaatgttcagtcaa

SEQ ID NO: 224670 - DNA, 50 bp, Homo sapiens
atggaacgctctacaagctgcacccgcgcctctaccgcctctgccagccg

SEQ ID NO: 224671 - DNA, 100 bp, Homo sapiens
ggagactgactgcctatgaatttgctaaacttaaaagcaagctggttctctgggatataaataaggctatggagttactagtagagaaagcaatcagcag

SEQ ID NO: 224672 - DNA, 74 bp, Homo sapiens
agccagctaagaagtattctgatgtttcaggtctgcttgaacgactaccaaaatcactacaatcccaatgactt

SEQ ID NO: 224673 - DNA, 147 bp, Homo sapiens
tgggatgtcttcttcggcttcgaggagaataagtgcagtatgagctacatgtttgagtacccggagtatcagcaacagccaactcagtttataaatccagaaacacctggctatgttggatttgcaaacctccccaatcaagttcac

SEQ ID NO: 224674 - DNA, 100 bp, Homo sapiens
cagacattgtcctcaacgaccagcgacgttggacctctcgaacaaccagctgagcgagatccctgcagagcttgcggactgccccaagctcaaggagatc

SEQ ID NO: 224675 - DNA, 76 bp, Homo sapiens
cgcgggagaggtaaacagaacaccaggacatcccagagtctgggaaatggtttggtgcacctcgatttggaggaag

SEQ ID NO: 224676 - DNA, 100 bp, Homo sapiens
ttgtattttaggcgccattttcgagtgaaggacccggagccgaaacaccggtaggagcggggagatgatctatctggtggtgaaagcagccgtcggactg

SEQ ID NO: 224677 - DNA, 110 bp, Homo sapiens
aacaagtagcactctctcagaagatcagatgagccgtcttgccaagccaaaccaaacaggaagcttacttttctctacctagccaatgatgtcatacagaacagcaagag

SEQ ID NO: 224678 - DNA, 95 bp, Homo sapiens
gctgatggcggatcaggatcggaagcctgcgtaactttctcccttgatccgggagtctttccactggcacccccccaggcagcagcagcagtttt

SEQ ID NO: 224679 - DNA, 50 bp, Homo sapiens
cgcgcttgtgcgtacagttcggttcaggactaccgaccagactcccggaa

SEQ ID NO: 224680 - DNA, 100 bp, Homo sapiens
atattggggataacattacgtcagcgtgatgctgaggtgactcgactaagagaattaaccagaacgatctggaaaaattttcaaaaggtattggcaggtt

SEQ ID NO: 224681 - DNA, 105 bp, Homo sapiens
tcacggccacggcgctggtcaccggggtctgcctgggctttatcctgtggataaacgcagagtgaacgagtttggggagtcctacgaggagaaggccacgcgggc

SEQ ID NO: 224682 - DNA, 100 bp, Homo sapiens
aagctacccttggggcatctgatcctaattcccttgctgatgatattggtgttcctccaagaaaagctggttatattgaagacctggttttgatgctgcc

SEQ ID NO: 224683 - DNA, 129 bp, Homo sapiens
aattcaagaaacggaaagaacaaggactggtgggaaagtaccctgcgaagaacaccacaattgccctacaggtgacctgcaaacatagacctgaatatctcgtcaagctacggaacccctggggaaagg

SEQ ID NO: 224684 - DNA, 82 bp, Homo sapiens
aaaccttagtttttgaacaaagaaaatcagatggagttcacacgaggttgttcataaggagcttactaactgtggtttgcac

SEQ ID NO: 224685 - DNA, 75 bp, Homo sapiens
ggaagagctgaatgactcaagtctggacctgggacccactgcagctgtccctttccccccaacacatcgcttgac

SEQ ID NO: 224686 - DNA, 116 bp, Homo sapiens
agaggaggccgtccagcagatggcggatgccctgcagtacctgcagaaggtctctggagacatcttcagcaggtaaaaaagagtgtcaagtggacatgcaaagcttgtggagagaa

SEQ ID NO: 224687 - DNA, 133 bp, Homo sapiens
ctgcagatcaccgggggcgccctggaggagtccctgaagatctatgctcctctgtacttggagaaggaagccaacatccttttggagccatgaatattgtccgaactccatctgttgctcagattggaatttc

SEQ ID NO: 224688 - DNA, 100 bp, Homo sapiens
ctgagcttggcgcacgggccgaccaggccaagactaaggggctgcagagcggggtggacattggcgtcaagtactcggagaagcaggagcggaatttcga

SEQ ID NO: 224689 - DNA, 101 bp, Homo sapiens
ggcagtgaaatggggtgaatcatttgacaaactgctttcccatagagatatttgaatggtggtacttccataagcatggcacatcttttattgagcaagta

SEQ ID NO: 224690 - DNA, 83 bp, Homo sapiens
ccttagctgtgctcgcgctactctctctttctggcctggaggctatccagcacgagctggagccggtggtgcaggatgggcag

SEQ ID NO: 224691 - DNA, 100 bp, Homo sapiens
tttggaaggagacaaaatcctcaccactagtccatcagatttctttaaaagccatagttatcgactgcatttgcctccagacttgtcagacacagtgagc

SEQ ID NO: 224692 - DNA, 100 bp, Homo sapiens
gggaactcttagctgagcaggcgagagggtgaggtggctttgaccccgggttgcccggccagcacgaccgaggaggtggctggacagctggaggatgaac

SEQ ID NO: 224693 - DNA, 115 bp, Homo sapiens
ttagatgaagatgaagatgcacatgtctgggaggataattgggatgatgacaatgtagaggatgacttctctaatcagttacggtttagcagtttccttacagctattgcacgga

SEQ ID NO: 224694 - DNA, 75 bp, Homo sapiens
cttaaacctgacttaaggattgtctttgtacataacaagccagagactgctgctactttgaaacgtacgatagag

SEQ ID NO: 224695 - DNA, 100 bp, Homo sapiens
aaacagctgggctcccttggagacagagcgccatgggaaaccgggtctgctgcggaggaagctggggccatctaccctgataacaccacagattttcaaa

SEQ ID NO: 224696 - DNA, 83 bp, Homo sapiens
cggtggactccttcggcagtccacccaccgccgccgcctcccaggtggatccataaagaacccagccaacccgcagagggagg

SEQ ID NO: 224697 - DNA, 98 bp, Homo sapiens
cagaaagcaggcgaacccgcggcgcaataacgttcataattggacccttgaagacactcttcagtggttgatagagtttgttgaactaccccaatatg

SEQ ID NO: 224698 - DNA, 73 bp, Homo sapiens
gcttttgctacgacctcattttctgctggaactgatgaatgaagaaatgctgtgccaagaatttggaagattt

SEQ ID NO: 224699 - DNA, 78 bp, Homo sapiens
atggttgccggctcccctctcaggacaacccagatgtgcaacaaagtgcgatgcgggagatacagatgacccaccaag

SEQ ID NO: 224700 - DNA, 75 bp, Homo sapiens
tgcttggttcaggccagtttggcatcgtttatggagcaagattaccttatgctggctactttggatgagaatgag

SEQ ID NO: 224701 - DNA, 82 bp, Homo sapiens
gggagcgcaaggtcgccctcaaggccatgatcaaaacgtcctctccacccggatcctggccatgaaggcctcgctctgcaag

SEQ ID NO: 224702 - DNA, 83 bp, Homo sapiens
tgcgcatcgtctgcaagaccgcgaggcgagacctcttacaatgcagatcttcgtgaagactctgactggtaagaccatcaccc

SEQ ID NO: 224703 - DNA, 130 bp, Homo sapiens
tctggcggggtgcagaactgagcccaggccacagtaccctattcacgctctgtgcttgtgccaaggaagatgtcttcaggaaatgctaaaattgggcaccctgcccccaacttcaaagccacagctgtta

SEQ ID NO: 224704 - DNA, 96 bp, Homo sapiens
agccctgtgtgacaccaagataagtaaccatggtaagtttagcgatggctgttcttgcggaaatctagttttgcgttcctggaataactcaaccca

SEQ ID NO: 224705 - DNA, 101 bp, Homo sapiens
gttccgggccgcgctgcgagactacgagacgaccaagatcactccatggatgaaatgacagctgtggtgaaaattgaaaaaggagttggtggcaataatgg

SEQ ID NO: 224706 - DNA, 100 bp, Homo sapiens
tctgagcacagcatcatcaaggacttcaccaagcagcttcgagagctgtgcccaggagtgaacaaccagccctacctctgtgagagtggtcactgctgcg

SEQ ID NO: 224707 - DNA, 82 bp, Homo sapiens
gcctgcaacctgtccggggatcccagggaggcgtccgagctgggccacagcctgaacgagaacgtcctcaagcctgcgcagg

SEQ ID NO: 224708 - DNA, 98 bp, Homo sapiens
cttgactggtcttacattgctgcatcaagaaacccaagctgctgagctgagatctgtatctgtggacctgaatgttgatccctcgcttcagattgaca

SEQ ID NO: 224709 - DNA, 101 bp, Homo sapiens
gcggaaaatgccttcaaatcagggtcccaagcaagacagaactgcagaagggcaagcactaagtgaagcaagaaagcatttaaaagaagagacacaattac

SEQ ID NO: 224710 - DNA, 75 bp, Homo sapiens
ctgacttcaagttctacgccaagccatactttctcaggagttccatctggaatatgacaaattagaagaacggcc

SEQ ID NO: 224711 - DNA, 90 bp, Homo sapiens
caagaatgaagccacggaccctcgcggacctgaaggagaagaaggagaaggtggaggagaaggcaagccggaaagagcgaaagaaagaag

SEQ ID NO: 224712 - DNA, 98 bp, Homo sapiens
gcatattaaagatcgcatagaggctgtgttatatgcaggaagctgaatatggtgggcatgatcagatagatttgtatgacgatgtcatatctccatct

SEQ ID NO: 224713 - DNA, 100 bp, Homo sapiens
gcctctcccccagccccaccactccctgccgaagcccagcccctgatgtcccagcagggggggctgtcggggggctgttaggtgcctggatgacaagtgg

SEQ ID NO: 224714 - DNA, 100 bp, Homo sapiens
gctgccagatgtccgtcactccccagggcggcatcgtcgtctatgggggctactcgaaacaggctgaaggggatgctaagggagataaagcaaaggtgaa

SEQ ID NO: 224715 - DNA, 90 bp, Homo sapiens
gcgcagggcggctgggcagctatgtcatcaacgggcgcaccaaggtagacgaagagcggcggagtgcagcgggcagtgagaaagaagaag

SEQ ID NO: 224716 - DNA, 100 bp, Homo sapiens
gccacttttgcaagggcgaggtcagccccaaactaccgaaactaatggcagatcccggaaatccagacttgtatcatgtattaagtgttatctggcaatt

SEQ ID NO: 224717 - DNA, 75 bp, Homo sapiens
ctcaagtcagagggcttttactcctacctgtgtaccgagccaggagtcaaggaattgagcaagaagctggtgatt

SEQ ID NO: 224718 - DNA, 100 bp, Homo sapiens
aagacttcccagcattcctacagatataaataggaaaccactatcagcggcctgaccccggagaccacctactccgttactgttgctgcctataccacca

SEQ ID NO: 224719 - DNA, 100 bp, Homo sapiens
gccgcgaccacggcgtcctggacgccctgcacgtgctcgagggcctcttccgcaccgaccccgaggccaagtgcccttccagctgtcactgaaatggctt

SEQ ID NO: 224720 - DNA, 98 bp, Homo sapiens
taccttaacaggaaacgcaccggcattcgagaacagcttgatgcggagctccttcgctattctgagaggcagtgctcggaatgtgaccaggcagggag

SEQ ID NO: 224721 - DNA, 100 bp, Homo sapiens
ctttgttctgaattactccaaagccattagtgaccagaaggatcccaaggatcgaatggttcaggttgtgaaatggtacctctcagcctttcatgcggga

SEQ ID NO: 224722 - DNA, 90 bp, Homo sapiens
ttaaatccggagggggaaaaaatcccaaggtctgcaaaggtattgttgcagcatctggcagtgagactgaggatgaggacagcatggaca

SEQ ID NO: 224723 - DNA, 88 bp, Homo sapiens
cccccttgagcctgtcccaagccctggtgccaggtgtccatccccgtgctgagtgaggtctgccagtctttagtgaaacacagctctg

SEQ ID NO: 224724 - DNA, 90 bp, Homo sapiens
gcaaccattgacgccatgtcgggttattcgagtgaccgagaccgcggccgggaccgagggaaccccatgggccgcacaggactgcgtggg

SEQ ID NO: 224725 - DNA, 100 bp, Homo sapiens
gaacttccaaaagaaaactggctaaagatgctgtgtcgacatgtagctaacaccatttgtaaagcagatgctattactttctatgaagacaaaaattttc

SEQ ID NO: 224726 - DNA, 89 bp, Homo sapiens
gcagtatttaaaggacaaggaaccaaagaatatgaaattcatcatggtgcttttgaagatgatgatatcacgcacgttgaaggaagtgt

SEQ ID NO: 224727 - DNA, 73 bp, Homo sapiens
gcttcaccatggacaagctggtgcagaacattgcgcggcaggtgaccaggcattgatgcacccccaggaaggc

SEQ ID NO: 224728 - DNA, 82 bp, Homo sapiens
ccgtcccccgcgggtctgctctgtgtgccatggacgggctaaccttgccgcgggccgagccctgcctcgccatggaccagga

SEQ ID NO: 224729 - DNA, 82 bp, Homo sapiens
gaatgagcaagaatggaagatcaagctgcaagtgcttgaattcctggaaaactcaagcaattcgtatttgacttacattctg

SEQ ID NO: 224730 - DNA, 75 bp, Homo sapiens
gaaggagagaaggtgttttggatgcattctagaacacaggtaaatccatttcggatggccactcgtggcatgttc

SEQ ID NO: 224731 - DNA, 78 bp, Homo sapiens
cacctggacacccctaaaccatcagctattgaatgaccggttttccagttctcaagatgaggaggagattgatatgga

SEQ ID NO: 224732 - DNA, 60 bp, Homo sapiens
cagccctcagtttctggagctgttccgagtgggagccaagaagaaaggtttgctcccggg

SEQ ID NO: 224733 - DNA, 50 bp, Homo sapiens
caacaagcccccgcctcccaacactgaaaaatatggtgttatccctaaga

SEQ ID NO: 224734 - DNA, 90 bp, Homo sapiens
ctatgataagctgagcagagccctgcgatactattatgacaagtattctaccttgtaaatactgttatttgtatatactgtaaatgatga

SEQ ID NO: 224735 - DNA, 100 bp, Homo sapiens
gacatggggaagatcgaggagatggagaagatgctgaaagaggctcatgcagagaagaaccggctcatggagtcgagggacttatcaaactggtttcaaa

SEQ ID NO: 224736 - DNA, 82 bp, Homo sapiens
ctcctttgacatccccaacaaagagttgctggatttgtgcgactcggtgaaggatgatgcccggagggtgatctcgaccttt

SEQ ID NO: 224737 - DNA, 75 bp, Homo sapiens
gcttcatccgtgagagagaataagcaacctgaaggtttggaattaaaacaagggattaatgaaaatcaagttcca

SEQ ID NO: 224738 - DNA, 82 bp, Homo sapiens
ccagaccgccggctgcgccggagctgggggccttagatgtgacaagccgaggcggtgagccgggcaggaggaaggagcctcc

SEQ ID NO: 224739 - DNA, 100 bp, Homo sapiens
agtgttttcttatttagccggagtgagaagcaagaaggccctggacacagcaatatctctgggctttcacaggtgaccaagaatatggcccaggtgacca

SEQ ID NO: 224740 - DNA, 100 bp, Homo sapiens
ggcccccaggagctggtgacgcaggcgcttgctgtcctcctggagtgcctcgagagccccggctccagccccacgggcttcctgaggctgcggtggtcac

SEQ ID NO: 224741 - DNA, 50 bp, Homo sapiens
gacctttcaagttcagtggctccagctagagtaccgtggcacaatctcag

SEQ ID NO: 224742 - DNA, 97 bp, Homo sapiens
aggaagaacccatcgggcagctacacatcttgaaagagaagctcttcctgtgaggaggaagaagacctggcggcaggtgtgggccgcagccgagttc

SEQ ID NO: 224743 - DNA, 75 bp, Homo sapiens
catttcagtgtaaaggtaaatggaatcctctccacagagatctttggtcctcccgagagctggatgacagcagca

SEQ ID NO: 224744 - DNA, 98 bp, Homo sapiens
gctgttctggacagctgcgacggcgcgctgggctggcgcggcctgggtggtcttcaagctgacagagaagctgacggaacagaaggagtggatgaaga

SEQ ID NO: 224745 - DNA, 75 bp, Homo sapiens
cagtcggaaagttggaacctctgacaagaccaagtactaccttcaagtacctggagtagaacagaaaaattatta

SEQ ID NO: 224746 - DNA, 82 bp, Homo sapiens
aaaaagacagtgacgacaaaacaccagatgatgaccctgagcaaggaaaatctgaggattctcagagagagttcaacagcag

SEQ ID NO: 224747 - DNA, 82 bp, Homo sapiens
acacgttggatcaaccagctgacgccggagcagctcctaacccagtgttcaaagcttctttcagacaccagtgttattcagt

SEQ ID NO: 224748 - DNA, 75 bp, Homo sapiens
gaatccactgatagaaatcatttccatcaataccggcttactggaggttttggctctgcgtgagtgtggtctacg

SEQ ID NO: 224749 - DNA, 100 bp, Homo sapiens
cactttttggctgttctgaagagtgttactgtgaacattcatgcacaaatttttatgtggagctgctcgactgatccaaaacatggatgccaccactgag

SEQ ID NO: 224750 - DNA, 50 bp, Homo sapiens
aagttttgtgcagattgccagtctaaagattgcaaaggtcgactgcaagg

SEQ ID NO: 224751 - DNA, 98 bp, Homo sapiens
ttaaaacatttcagggcaagccaattatggctccttctcctgaaaaagccgaggaggagagtgagaggcttctgagggaactctatttgtttgatgtt

SEQ ID NO: 224752 - DNA, 98 bp, Homo sapiens
tccggacagcacatacagcgagagcttcaaggacgcagccacagagtgagaaagatcagtctaaagaaaaggagaagaaagtgaaaaaaacaattcct

SEQ ID NO: 224753 - DNA, 101 bp, Homo sapiens
accgtctggtgtctaaaccgcctcggcagaaatgatggaagaattgcatagcctggacccacgacggcaggaattattggaggccaggtttactggagtag

SEQ ID NO: 224754 - DNA, 100 bp, Homo sapiens
acacctatgaacagtctggccacctctgtattcagcatagctattcctgttgatggtgatgaagacagtcaggtcaattcagtgaagatatgatacccac

SEQ ID NO: 224755 - DNA, 76 bp, Homo sapiens
tcaggagtcatttctgttccgcacaggcctgctgaactgggtgctttatataggtcacggaacagcaaatttctga

SEQ ID NO: 224756 - DNA, 90 bp, Homo sapiens
gacttctccctctccctcaagaaagaccacagcaagattctttcattcgtctcctcctagcctgggggaccaggctcgaactgaccctgg

SEQ ID NO: 224757 - DNA, 75 bp, Homo sapiens
tcaggatacagcagaagcattagcaggtccacctcattcatttaaccgagatgagacaataatcattgctttggc

SEQ ID NO: 224758 - DNA, 76 bp, Homo sapiens
ctttggatgattctgccaaaaagagtttcactctatcacccaggctgtagtgcagtggtgccatctcagctcactg

SEQ ID NO: 224759 - DNA, 90 bp, Homo sapiens
gagtgaagaacgccgccatccagccaccattccaagctgtgtcagcgtgttatgatgccgtcccgtaccaacctggctactggaatcccc

SEQ ID NO: 224760 - DNA, 82 bp, Homo sapiens
aagctttggatcagacttttgtgttgcagttcggcagaaaaatatggctcaggagactaaccagaccccggggcccatgctg

SEQ ID NO: 224761 - DNA, 100 bp, Homo sapiens
gctgtcaattttccaatgagagatggtatagatgatgagtcatatgggcagatatttaagcctgcctactgaacttgacgcactggtatttggccatcta

SEQ ID NO: 224762 - DNA, 75 bp, Homo sapiens
ctcctcctgctccccatcgccatcccctatgcaggtacggttcctggagcagcagaacaagatgctggagaccaa

SEQ ID NO: 224763 - DNA, 87 bp, Homo sapiens
cgtgggtaggagatggagaaattccaagttcagattctccagacctctcacttgactatgcctctcagccagcaaatcttcagttcc

SEQ ID NO: 224764 - DNA, 75 bp, Homo sapiens
tatctgatgacaagcatgattgggagcagagagtaaatgctacgccacaggtcatcatctggatcatcccattct

SEQ ID NO: 224765 - DNA, 75 bp, Homo sapiens
aagaacagagagagaggtggacagatctgagagatactgaggcagcggaggaggagaaagagatggacctcccgg

SEQ ID NO: 224766 - DNA, 100 bp, Homo sapiens
atttgctggatattgatgcgccagtcactgcagtatcctggtgtgaaccagctatcctccagtataggaggattgagtcttcagagttctccacaaccag

SEQ ID NO: 224767 - DNA, 87 bp, Homo sapiens
tttttgatgctgaggagctcctggtcgatgaagaggatgatgtttttggtgaaggctttcatgagaaggacaagaagccatattgcc

SEQ ID NO: 224768 - DNA, 101 bp, Homo sapiens
aaatatgggcagcacccaccagacgcggtgcccaggtccgcatggtggacatgcagaagctgacccatggcgtcctgcataccaagttctgggtggtggac

SEQ ID NO: 224769 - DNA, 78 bp, Homo sapiens
gggactccatgcaggctgcgcggaaactgccctgtggacatcttttccacaaccgtgctggtatagaggactctaaga

SEQ ID NO: 224770 - DNA, 50 bp, Homo sapiens
gcctgcccaggctgcggacacatgtccagaggtgaagatggtgggcctgg

SEQ ID NO: 224771 - DNA, 100 bp, Homo sapiens
atcttcatgccctgggttctgcccgcacggacccccatgtctcctctgagcctccggcctccataagacccaaaacagatgacacctcttcccagtcccc

SEQ ID NO: 224772 - DNA, 104 bp, Homo sapiens
tctccgcctggctgcactgcgtgtgtgtggtgggcttcgacctggagctgggccaggccgtggagggttatatcctgtgttgtgacctcatggtttaagtggga

SEQ ID NO: 224773 - DNA, 82 bp, Homo sapiens
ttttgccggaggagcccctcaggccatctctggaaacatggctacagaacatgttaatggaaatggtactgaagagcccatg

SEQ ID NO: 224774 - DNA, 88 bp, Homo sapiens
tgagactgctccagaagtggagaccagcagaactccaccagtgtgaagcctcagtttaggtcatctggtggttcagaacactcaacag

SEQ ID NO: 224775 - DNA, 100 bp, Homo sapiens
tccatctgcaccacggtgctgatttatacctaaaactggaagatgtgacccataaatttaataagccctgtataatggatgtaaagatagggcaaaaaag

SEQ ID NO: 224776 - DNA, 98 bp, Homo sapiens
gccaaggacctggccgacatcgcggccttcttccgatccggagctatgcctgttccagaccagccttcatcagcctcagagaagacgagttccctgag

SEQ ID NO: 224777 - DNA, 71 bp, Homo sapiens
cacactgggcctgtgcttgatgtctgctggagtgacgcgcgggtttaagtggacgccaggtgcaccggaca

SEQ ID NO: 224778 - DNA, 75 bp, Homo sapiens
cgaacctgcactgtggacttttcggttcctaaaagtaaagctctagaggccgtcaaattggcaatagaagccggg

SEQ ID NO: 224779 - DNA, 98 bp, Homo sapiens
ctgcctccgccggctacagcgggaagagcgtgaagatagtgatccggggagacaggaacacgggcaagacagcgctgtggcaccgcctgcagggccgg

SEQ ID NO: 224780 - DNA, 100 bp, Homo sapiens
aaagaatattagaagaaattaaagcagaaagaaagctgcggcctgtatcaccagaggagattagacgtagcagattagattcagaccaggatgtagcact

SEQ ID NO: 224781 - DNA, 80 bp, Homo sapiens
ttccattttatggtaaaccaatgctggttaataatccactagcaagtcaggctgcagcggctgcagcagccatgagctcc

SEQ ID NO: 224782 - DNA, 100 bp, Homo sapiens
ctccggcctcgccatgaggctcttcctgtcgctcccggtcctggtggtggttctgtcgatcgtcttggaaggcagctgctcccaaccccagaacctttgc

SEQ ID NO: 224783 - DNA, 89 bp, Homo sapiens
ttttcgtaaacatctgggtgtatatcaaacggcaagatgtccagtaatgtcccggcggatatgaattctgcttggtcagaatcgtgatg

SEQ ID NO: 224784 - DNA, 100 bp, Homo sapiens
cagaaggccaagaacccccaggagcagaagtccttcttcgccaaatacacctgcctagagctggaacgttacctccagagcgagccctgctatgtttcag

SEQ ID NO: 224785 - DNA, 75 bp, Homo sapiens
ctcaaatctgaatttaatgagcctgcaacttgagttggtggaaccaagtggctggattcatgttcccttaactga

SEQ ID NO: 224786 - DNA, 83 bp, Homo sapiens
ggcatttacagaaagagtcaacagcagtggcaacagaaaatgtcttctgaggctgatctggtgtctcacatctgtaatcccag

SEQ ID NO: 224787 - DNA, 73 bp, Homo sapiens
aagggatcctgcgggcatttatcaggcacagggtcagcttctggaggttggttggaacaatacggcaagtgct

SEQ ID NO: 224788 - DNA, 99 bp, Homo sapiens
caggcgtgctggccggcgtggagagccgccagggctctatcaaggggctggtgtactccagcaacttccagaaagatgtagcacttaagcctcaggaac

SEQ ID NO: 224789 - DNA, 99 bp, Homo sapiens
aaagtggtcttcagaatcttctttggtacaaactgtgggtggacacctgctctgagatgtttggcggcctggacatctgtgctgtcaaagctgtacatg

SEQ ID NO: 224790 - DNA, 75 bp, Homo sapiens
accaagtctgtgaaaatcctgatggacaggataaggaagcctgtgtgggtaccaacaatcaaagctacatctgtg

SEQ ID NO: 224791 - DNA, 98 bp, Homo sapiens
atgtgagtagtgacactgtccagcatggtgtggaaggattaacgtatctcctcactgagagctcaaagctcatggcattttccccaatacatctctgc

SEQ ID NO: 224792 - DNA, 83 bp, Homo sapiens
tcataggattagatgatccaagtcaccaagaaattactgtctcaagtgatacgaaggggtagaagagccatccaaaaaacgag

SEQ ID NO: 224793 - DNA, 100 bp, Homo sapiens
ttgtatcgcaaagaatgaagcaggagtggatgaagacatctcttctctttttgtggaagactctgctagaaagacccccagaaacgtttgagcatctttt

SEQ ID NO: 224794 - DNA, 90 bp, Homo sapiens
tagctgaatccagtaccaaaaacgtcaacaacagttttacggtatctcaacacccagtttattaaaaagaataaattaacagaagcggac

SEQ ID NO: 224795 - DNA, 100 bp, Homo sapiens
gcgctggagctggagaacgaccggctcctgctcaagatctcagagaaggaggaggtgaccacgcgcgagggtgtcaaattgagaaccaggtagatcccca

SEQ ID NO: 224796 - DNA, 75 bp, Homo sapiens
aagaagttaaccaagtaaaacagcatcggaacaccaggacacatgttcaaagagcataattaactttttaaaaga

SEQ ID NO: 224797 - DNA, 100 bp, Homo sapiens
ggccaaggcaggcggatcacaaggtgtgagccaccgcacctggccagaagccactaactaaaataggcacacatgacacagcatgtggttaatagctgtg

SEQ ID NO: 224798 - DNA, 100 bp, Homo sapiens
ctggggcagctgaactgagcgtatgtgccacgccgcccaggagacccctctgctgcaccacttcatgacagccgctccgaccgctggtcccagatgccag

SEQ ID NO: 224799 - DNA, 75 bp, Homo sapiens
cgagcgcggcccggcccgcagcgtggggccccgagcgcggcaagttgctccctgagctgctccaaccttatacag

SEQ ID NO: 224800 - DNA, 74 bp, Homo sapiens
tggccacctacagaaacaaaatgtcaacaaattgatggcctggcatcctcgctacaacctcattgttgtgggcc

SEQ ID NO: 224801 - DNA, 101 bp, Homo sapiens
gagacaccctctgggggtcctctctgagtcaaatccagtgtaatgggggcctagcagacatcttcacggtctttgccaagacaccagttacagatccagcc

SEQ ID NO: 224802 - DNA, 134 bp, Homo sapiens
tctggtttccctgtgacctgcaggtactgggagttacatagctaagatgccaggacaccccgaaagccggaaaacgcatctgggctgatgggccgtaccctgcaccgtgagccacccgcaggagaccaggaggg

SEQ ID NO: 224803 - DNA, 78 bp, Homo sapiens
ccagctctgcagccacatactatccgtttgttcaggaaccaccagtgacagagactcagaattcatgattgaagaaat

SEQ ID NO: 224804 - DNA, 76 bp, Homo sapiens
agttctttgtggatggacttgattctgatgagaggtcgttccaggggtagaggaggcatgaaggatgaccgtcggg

SEQ ID NO: 224805 - DNA, 82 bp, Homo sapiens
cctaaagaccattgcacttcgtgcccgaaacgccgaatataatcccaagcgtctgggagtatattttgatgaatattcagga

SEQ ID NO: 224806 - DNA, 100 bp, Homo sapiens
tacgcgtgtgaattatgcgggaaaccttttaaacacccaagcaacttggagcttcacaaacggtctcatacagaggaggctgcggaggaggaggaggaag

SEQ ID NO: 224807 - DNA, 100 bp, Homo sapiens
ggatgactacgtgcacatttcactcccccaggccacagtcacaccccccaggaagggagtaagccctgaaccaattcatcttaagattttttcacccaac

SEQ ID NO: 224808 - DNA, 83 bp, Homo sapiens
gccaacgtgaacctggcatatctgggcgccaagccgcggagcctccagacgggtgctcctggagctgttggtgggaatatacc

SEQ ID NO: 224809 - DNA, 76 bp, Homo sapiens
ccctgattgcctgtgtggcaaacagtgatatcttcagcgaaagtgaaaccaggggtaccgtgagggttttctctgg

SEQ ID NO: 224810 - DNA, 125 bp, Homo sapiens
cacatcaggtgatggataggagcaaccctgtaaaaccagccttagactatttttcaaacaactgggctggcttagatgaagatgaagatgcacatgtctgggaggataattgggatgatgacaat

SEQ ID NO: 224811 - DNA, 100 bp, Homo sapiens
ggcccgggagcgcgatgtggagcgcttctttaagggctacgggaagatcctggaggtggatctgaagaacgggccgagacgcatccagagctttcgtgac

SEQ ID NO: 224812 - DNA, 100 bp, Homo sapiens
taaattcccggaaccgcgattcggcgtgtcagggtatgttagagcccaccaaggaaccactgaaaccactttctgctgcagaaaaaatagcttccatcgg

SEQ ID NO: 224813 - DNA, 83 bp, Homo sapiens
cagcagcccgacgcaaaccaaggatctggggatcttcgcactatcccaagatcaatgtccgagttaccaccatggatgcagag

SEQ ID NO: 224814 - DNA, 97 bp, Homo sapiens
ttgccggggcaggggcggaggcggaggcagaggtggaggcgctttgaaaggatatgttcaaggaatgagtgatttactttcccctcttttatatgtg

SEQ ID NO: 224815 - DNA, 100 bp, Homo sapiens
ggtgtggctggctgcggccagaatcggagccccaaccgcgctgccggttccctctcccagcctgtgctgactcagccatcttcccattctgcatcttctg

SEQ ID NO: 224816 - DNA, 82 bp, Homo sapiens
agtcatcaccctcagctttggctactacacaaaggagctggcaaacagccctgactgtccccagatgtgtgcctataagctg

SEQ ID NO: 224817 - DNA, 100 bp, Homo sapiens
cgtcctctcgcggccctcagggcacagcccaaggctgtcagcctcccggcccagcaatacgagaattggagacccaaccagccagacagcttcttttctg

SEQ ID NO: 224818 - DNA, 100 bp, Homo sapiens
ctactgtgcgctgtgctgggcgctgtcatgatcgtgatggtgccgtcgctcatcaagcagcaggtccttaaggctcttgcagccaatgccggaacaggat

SEQ ID NO: 224819 - DNA, 94 bp, Homo sapiens
cctgcgagcaccagctcccttctcctcgccactccaaggttgcagacgaagcagctctcctgccacagctcctcaccccctgaaaatgttcgcc

SEQ ID NO: 224820 - DNA, 90 bp, Homo sapiens
ggccactccagtcggtgttgagcacggcgagcagtctcaggcctttagtgatgatggagctcttgtccctggcaaagcgaaagcgcagtg

SEQ ID NO: 224821 - DNA, 87 bp, Homo sapiens
gaggtttgcaggggtgcagtgtgtctggtcttatgaggcaaacgaatgcacgtgcagttgtccaccagccggcttaggactgcgccc

SEQ ID NO: 224822 - DNA, 75 bp, Homo sapiens
aattcaatcaattctttgtgactcctcgatcttcagttgaggctgctctttggcgtaaattgcaatcgattaggg

SEQ ID NO: 224823 - DNA, 100 bp, Homo sapiens
ggaagcagcaggatgcgccgctccactgtcggtagcaacaaggacctgacatgaaacgcagatctagtggcagagaggaagatgatgaggaacttctgag

SEQ ID NO: 224824 - DNA, 75 bp, Homo sapiens
gaaaggtcaaaatcaagactatagaggtggaaagaatagcacttggagtgatgctgatggaaagttaagcgtgaa

SEQ ID NO: 224825 - DNA, 75 bp, Homo sapiens
ggttggggatggcgtgcagcgcaaccacgagacggccttccaagttggctggggaacagaccagggaattggtgg

SEQ ID NO: 224826 - DNA, 101 bp, Homo sapiens
cacggacttcctgtgggacaagcgcacgggcctcgccgccagaacgtataaatcaaagccattctgtgaaaaactgctttcctgggtgaaaagcagtggct

SEQ ID NO: 224827 - DNA, 100 bp, Homo sapiens
ctcagtttgagccaatagtttctcttcctgagcaagaaattaaaacactggaagaagatgaagaggaactttttaaaatagtcttgctctgttgccctgg

SEQ ID NO: 224828 - DNA, 75 bp, Homo sapiens
aggacgaggagtcggaggagccgcgggcggcgcggcccagctcgttccaggtctggccgtgggcctgggcttcgg

SEQ ID NO: 224829 - DNA, 73 bp, Homo sapiens
tggccgccgatattcaccaagcgcttcgctacaaggtaacaaatatactctggagactagaccaaaccaagaa

SEQ ID NO: 224830 - DNA, 90 bp, Homo sapiens
ccgactcttcccactcaaaatccgttgccgggctgacctggtcagattgcccctcaggatggaacatggagctgatccaggacacctccc

SEQ ID NO: 224831 - DNA, 100 bp, Homo sapiens
tcggaggagtactcggtgaaatcctgtcctgaagactgtaagattctgacaatggagatattaattatgattatgttcatgaattgtcattggaaatgaa

SEQ ID NO: 224832 - DNA, 100 bp, Homo sapiens
tgcctggcccaggcgcacacggaagtggttggacgtgataagtatgagcctgcagctgtttcagaacaaggtgataaaaagggcaaaaagggcaaaaaag

SEQ ID NO: 224833 - DNA, 90 bp, Homo sapiens
ctgaaattgatgacagcagcaactgcgacgcaactgtggtgctacttaagaaagaccatgctcgacagctgaccaaggccatgatgcgaa

SEQ ID NO: 224834 - DNA, 90 bp, Homo sapiens
atctgaaggaggggcttctggttagcccaggttaatttggagtggcccctggagtcagtttcctacaccatccgaggccccacccagcac

SEQ ID NO: 224835 - DNA, 101 bp, Homo sapiens
caaagtgggaaacattgaaatcaaggtggcagcaaatgcacacattcctccagactacctccttaaaatttgtgagagaattggtcctttactagataaag

SEQ ID NO: 224836 - DNA, 100 bp, Homo sapiens
ggcatcggaaaagccatcgtgaaggagctcctggagctggggaaggacaccactggtaccagctgcgccaggctctgaaccagcggttgctgaagccagc

SEQ ID NO: 224837 - DNA, 97 bp, Homo sapiens
gcagatggcggatgccctgcagtacctgcagaaggtctctggagacatcttcagcaggttatcaatactctggctgaccatcatcatcgtgggactg

SEQ ID NO: 224838 - DNA, 100 bp, Homo sapiens
atgttgtggctgttccaatcgctcctgtttgtcttctgctttggcccaggaccctctttgcaagttcagtgcttaacctgaccgaactggctgcccttcg

SEQ ID NO: 224839 - DNA, 82 bp, Homo sapiens
agaataaccgaaaaattgcagaagcacaagccaaactggaaaaggccaaagttgttgagcccctggactatgagaatgttat

SEQ ID NO: 224840 - DNA, 132 bp, Homo sapiens
ctgatgtccaggagtcagtgggtccactggtagcccccacccctctccgtccatggccccagatgacacttcaggtgaatggcatagatgttgttcagatttactttgaaagaatcaagtatgtgaatggat

SEQ ID NO: 224841 - DNA, 100 bp, Homo sapiens
accagcaaggcctctagacccatactaactgggtttgaatcaaggtcccgtcccttgctgattgtatcaccttggctcttgcagttcaatcctctggaac

SEQ ID NO: 224842 - DNA, 100 bp, Homo sapiens
gtgaaaggccaatttcatgaatttcaagagagtaccattggggatcctgataacttaagtgactctctcttttccggtgatgaagaaaatgctgggactg

SEQ ID NO: 224843 - DNA, 101 bp, Homo sapiens
aggactttcttccagcttctgctgtccttctttgtggagagcaagggaaatcctcattgacgattcaatttgttgaaggccaatttgtggactcctacgat

SEQ ID NO: 224844 - DNA, 89 bp, Homo sapiens
aaggagcggaagaatggcagtgctcaaactcaccgaccagggccggtgcataaacttctcccgagttccatctcagtaaaagggaagca

SEQ ID NO: 224845 - DNA, 97 bp, Homo sapiens
gccagtaatgaagatcacaaaatcgcttatgacccttctttgtcttcgcacccacgacagcccaaccctgactggcgttactctgcctccctgagag

SEQ ID NO: 224846 - DNA, 75 bp, Homo sapiens
cattttactgtcaagacatttcttcggcattctgcaacagtgagaaagatcagtctaaagaaaaggagaagaaag

SEQ ID NO: 224847 - DNA, 100 bp, Homo sapiens
gggagtcagactctctcattctacattgctggagataatgatctctttcaccatgcctggatcacttcctttgaatgcagaagcttgctggccaaaagat

SEQ ID NO: 224848 - DNA, 80 bp, Homo sapiens
cagggcctgccctgctcctggtggcacccagtggcctgtactactgacaatgcagatcttcgtgaagactctgactggta

SEQ ID NO: 224849 - DNA, 101 bp, Homo sapiens
gcccggagcccccagcgcagcggccgcgaaaacctcggatcaattctcagctggtggcacaacaagtggcacaacagtatgccaccccaccaccccctaaa

SEQ ID NO: 224850 - DNA, 73 bp, Homo sapiens
cggcccacagtgggggtgtgcaaacccgagagaactggctctgggagggtctcacggaactagtgacggcgac

SEQ ID NO: 224851 - DNA, 52 bp, Homo sapiens
cctcgatatcagtctatgagaagggacctgcttcacaccaccaagcatcagg

SEQ ID NO: 224852 - DNA, 95 bp, Homo sapiens
gaaaggccagccaccagttcaggagcacttgggagtgatctagatgaaaggttgtatcaaagttcttaaggaccaacctcctaatagtgtggaag

SEQ ID NO: 224853 - DNA, 100 bp, Homo sapiens
ggaattgtctacttatgcagctggaagaagccacccgcttaacatcctacctccagtcccagttaaaaaggcactgttggcatctgaaccaaagaaaggc

SEQ ID NO: 224854 - DNA, 82 bp, Homo sapiens
aaagtgcgattgtggaagctgctcggggcttccgagtggacctgccaatcaagtcggcccgctaccgtggccagtacaacac

SEQ ID NO: 224855 - DNA, 82 bp, Homo sapiens
ttcgagctgattcagcgcatcggcagcggcacctacggcgacgtctacaagtggccaacagtgttgcaaacaggaacccgag

SEQ ID NO: 224856 - DNA, 98 bp, Homo sapiens
gcccgggatcgccgagcccgacctcgggcgccccgccggtcacctccgcgcggacaccagctcatgatggagcagtccaagaagtcctccctcatggt

SEQ ID NO: 224857 - DNA, 80 bp, Homo sapiens
tatgacaggggtaacacccttccagatgatttttgaggtgctggagaatctggtaaaagcaccattgtgaagcagatgag

SEQ ID NO: 224858 - DNA, 100 bp, Homo sapiens
gctgtaggcctctggtgtctgtgcgcgcgcggcaggggcggcggcggcgacggccggaggtgtacggctggagcagccctacttcagcgccaacgcccag

SEQ ID NO: 224859 - DNA, 100 bp, Homo sapiens
ttgaaaataagatggaacccatccacataaggctgtattcatcaccaaagaaaaaacttacaccaatgcagaaatcggttagtccattagtttggtgcag

SEQ ID NO: 224860 - DNA, 101 bp, Homo sapiens
tcctgcacacagccacgatttgcaaagacttaattcagtgcacaaatgagatgaatgtgaacatcccacagttggcagacagtttatttgaaagaactact

SEQ ID NO: 224861 - DNA, 75 bp, Homo sapiens
caagatgtccatcttctcatgaccaactgtatcaagaagtgtgggttgctgaccgaggaaataaaagaatccaag

SEQ ID NO: 224862 - DNA, 100 bp, Homo sapiens
cttttttgtcttcattcactttcccccctcagtttctgaaatgattctccagaatttctcctcataaaaaaggtcatttgattgcccgcctcagaacgat

SEQ ID NO: 224863 - DNA, 75 bp, Homo sapiens
caacgaccatgagaaggtggagctcacggcactcaggtgctcttacagcctgttccaagtgtggcttaatccgtc

SEQ ID NO: 224864 - DNA, 95 bp, Homo sapiens
ccggagatgcctgacgcatctgtctgaggagcggtcagtgacgcgatggagcgggcaaggctgaccccgcactacatctacccaccagccatcgt

SEQ ID NO: 224865 - DNA, 85 bp, Homo sapiens
aaccgctgaggcttatttgggaaagaagctgaataccactagaaacatacctgtaaccagagacagctgattatagctttctgca

SEQ ID NO: 224866 - DNA, 90 bp, Homo sapiens
gtggaagttttggaactgtctatctggtttcagacaagaaagccaaacgaggagaggaatttagccggatcgagctgggagatgtgacac

SEQ ID NO: 224867 - DNA, 97 bp, Homo sapiens
cgtcggggggaatctcgcgagggttggagttttggcgagagtttgtggaagatggcgcctgttgtgacaggggcgccctgcgtccggcagaggaggc

SEQ ID NO: 224868 - DNA, 100 bp, Homo sapiens
tcccagaatgctcttggtgctgttcctgctgctgcctatcttgagttctgcaaaagctcaggttaatccagatggtatacctcaagtttactatttcggc

SEQ ID NO: 224869 - DNA, 90 bp, Homo sapiens
ggcgccgctggagatcctttcctgcttttggtttccctggcaggggttgaactgtggagtgtgtggttttaagataaaattggctgcagc

SEQ ID NO: 224870 - DNA, 50 bp, Homo sapiens
aactcattcaaggttacccagttgattctggctacattggagattggttg

SEQ ID NO: 224871 - DNA, 90 bp, Homo sapiens
gtggacatcgtcttcagcaagatcaaatggagtgtttggaaggtgccagaaggttccggcaatggacttttaccgctacgaggtgtcgcc

SEQ ID NO: 224872 - DNA, 100 bp, Homo sapiens
aaacatgttttatcaatgcagctaagggcacacgtgtttcacgttgacaggtttgcttgggacgctagtaaccatgggcttgctgacttagccaaagaag

SEQ ID NO: 224873 - DNA, 100 bp, Homo sapiens
ggggcaacccagacgtgcaacaaagtgcgatgccgccaagctgagccaccaaagaaggaggctgccaccacggggccgcaggtgaagagagcagatgagt

SEQ ID NO: 224874 - DNA, 75 bp, Homo sapiens
gaagaggatggcaaaggtggctaaggacctcaacccaggagttaaaaagatccagacaaagacggtagctcagtg

SEQ ID NO: 224875 - DNA, 100 bp, Homo sapiens
cgggaaccgagcgtcggcggggaggccgcctctccgcaccaaggctaagtcgaaatgtggcccaaccttcttcccctgtgccagcggcatccattgcatc

SEQ ID NO: 224876 - DNA, 90 bp, Homo sapiens
cgacgatgaggtgacagtcacgatgcagcagcttttttatgagaattacgagcagaacaaaaaggggtacattagagatctccataacag

SEQ ID NO: 224877 - DNA, 101 bp, Homo sapiens
ggggagctgggccgcctcgtcaacaggaacttagctgagctttttggtgcggtccaggtgactcctctgagctctggctatgcccttgggagctccaactg

SEQ ID NO: 224878 - DNA, 50 bp, Homo sapiens
caaagcaacaggggatatcaaagtgacagcccagtcagaacaatggtcca

SEQ ID NO: 224879 - DNA, 82 bp, Homo sapiens
gcgtgctgcgcctccgcggctgccctgcgccagctccatgtccatccgctggccgggccgccccctcggaagccatgcctgg

SEQ ID NO: 224880 - DNA, 97 bp, Homo sapiens
gtccagcagatggcggatgccctgcagtacctgcagaaggtctctggagacatcttcagcagcatcaacaacagcaacttgtgattggcggtgaccg

SEQ ID NO: 224881 - DNA, 90 bp, Homo sapiens
gcgggagaagagcggagcagtggtcggagatgtggcgaccggtaccaggatcatctatgaccggaaattcctgatggagtgtcggaactc

SEQ ID NO: 224882 - DNA, 83 bp, Homo sapiens
ggcgggcttccctgtcgccgttcgctgcgctgccggggtttccaggcctgaggtgcccgccctggccccaggagaatgaacca

SEQ ID NO: 224883 - DNA, 50 bp, Homo sapiens
gctgatcccgagcagcgtcatgtacccctaattctcaatcacaatcctct

SEQ ID NO: 224884 - DNA, 100 bp, Homo sapiens
ctggacagtgcactccgggccgcagttactcttcagggatgtgctggaaccctctggatattgatgcctcgggtgtggttggactgtcatttagtggaca

SEQ ID NO: 224885 - DNA, 100 bp, Homo sapiens
cacagttcagcacttagaggaagcttcagaacttgatgatgatgttccaaaagcaaactgcctctccactgaaagcactgacactccgaaggcccctgtc

SEQ ID NO: 224886 - DNA, 100 bp, Homo sapiens
ggtgaagccgatgatcagagtagaacagcagccagattatcgcaggcaagaaagcagtaccacttccgctgtcacggtaaagtccgccatcagaagactg

SEQ ID NO: 224887 - DNA, 82 bp, Homo sapiens
aacgaggcaaggagctaaagcagcgtgcgttcagccctgggtgtcttgggacaaggtgcgcattcctggtgtgctgcagcga

SEQ ID NO: 224888 - DNA, 91 bp, Homo sapiens
cgcttcccctttccagagagccagaaagaaggaaatcctcattgacgattcaatttgttgaaggccaatttgtggactcctacgatccaac

SEQ ID NO: 224889 - DNA, 96 bp, Homo sapiens
aagagattcagccagcacactcctcgcgagcaaggagcttctcaaaacagaagtcaggcacaatattaaatacttgttgaatgatcacagaagtac

SEQ ID NO: 224890 - DNA, 101 bp, Homo sapiens
ggcgttgtttgtgaagaggtcagcttcttcttggcacaatcctgaactgggcagaacgtccttcccaaactcgcggaagacaaatggctcctgtgacaccc

SEQ ID NO: 224891 - DNA, 50 bp, Homo sapiens
ctcgctgccatggatgccaccaagctggtagttgatgtcacttggcgata

SEQ ID NO: 224892 - DNA, 75 bp, Homo sapiens
gaaagtcacgattaggactgacaataagatcacaaaatttgtccaggatagacatagagctagaagaaacagact

SEQ ID NO: 224893 - DNA, 100 bp, Homo sapiens
gctctaacttcctcggccgagccgggccgcgccgccgctgccgccgccgcgcgcggtcaaagaagtttggcagagatcacggagctaattcatattgctc

SEQ ID NO: 224894 - DNA, 98 bp, Homo sapiens
aaaatgggattgcccaccacgataatgcagttcttattactagtgacatgtcgattcacgatgtttcggtgagtgcagctgagacacaggcgattgta

SEQ ID NO: 224895 - DNA, 100 bp, Homo sapiens
gatggcaaagtagaaaaacactatctcttctatgacggagaatccgtttcaggaaagataatcagacagctaaatggagtctgagcagctgttccataga

SEQ ID NO: 224896 - DNA, 110 bp, Homo sapiens
ggtattggatgattggtagctaagactcccgaatacttcagaagtggggaaatgacaatgcagatcttcgtgaagactctgactggtaagaccatcaccctcgaggttga

SEQ ID NO: 224897 - DNA, 89 bp, Homo sapiens
aaagcatgcttgaatggcagcaataaacccaacatgagtgaagtttcctgcaagaaacgggacgactatttggaatggccagagtattt

SEQ ID NO: 224898 - DNA, 100 bp, Homo sapiens
tggacgccgagatggagttcaattgcgaggtgatcatggagctcagcttggtctccatggggctggtggtgatggaatacatgatgacacagcaggtgga

SEQ ID NO: 224899 - DNA, 87 bp, Homo sapiens
ctccatctcgtctcatggcattgctgggacagactgtgaatgaaagctggaatgccttagcaaccccatcagataagctgtttttct

SEQ ID NO: 224900 - DNA, 100 bp, Homo sapiens
ctcaaagtgattcctcgagatcggaaaacattcctcttctctgccaccatgaccaagaaggatgactcactggttgtgtggaaggaagtcgatttgaccc

SEQ ID NO: 224901 - DNA, 90 bp, Homo sapiens
ggcgaggtcagccccaaactaccggaacggaaaacagttcttccttcaaagcatgcagtacctgaagtaatagaagactttctctgcaat

SEQ ID NO: 224902 - DNA, 74 bp, Homo sapiens
ccatttcgagctcctcaaggttctgggccagggatcctttggcaaagtcccgcagcccccggaagccaatagac

SEQ ID NO: 224903 - DNA, 100 bp, Homo sapiens
tgtaattgctgaacttaaaaagcagtctaaacctgtgaccacccctgaagaaattgcacaggcttacagatactttttacactcttacaaaatgttgcac

SEQ ID NO: 224904 - DNA, 100 bp, Homo sapiens
gcctccttcccagccgcgcggcttcctccagacctctcggcgcgggccaaccaagccctcgagcagttattcccatgtcctgtataaccaatggaagtgg

SEQ ID NO: 224905 - DNA, 82 bp, Homo sapiens
ggccgccgccagagcgatgttcccgcagagccggcacccggactggagactgatgcatgagggggctacggaggcgcaggag

SEQ ID NO: 224906 - DNA, 90 bp, Homo sapiens
gccgggacctggcacccgaatccggcctgccgggtgctgactgggttacttttttaaacactaggaatggtaatttctactcttctggac

SEQ ID NO: 224907 - DNA, 100 bp, Homo sapiens
acccagaagatgacatatgcaaaaaagaggcacagttagatgaagaaggacagtttcttgtcagaataatatatgatgactccaaaacttatgatttggt

SEQ ID NO: 224908 - DNA, 90 bp, Homo sapiens
ccgtatccttcgagataccagtgggaccagcagaggtgttggctttgcaaggcttctcgtcagtgcctcgcaggatggtaaacttatcat

SEQ ID NO: 224909 - DNA, 90 bp, Homo sapiens
gagttgcggcggcgggaacgattgggctgagcagaggacgacatgttgcttttcgtggaggttcttgggtgtctctggggagtccctggg

SEQ ID NO: 224910 - DNA, 98 bp, Homo sapiens
cctattgaagacacctgctcagtatgacgcttctgagctaaaagcttccatgaaggtacctgtggaaaagtgaaaagccactctactactcatttgtc

SEQ ID NO: 224911 - DNA, 74 bp, Homo sapiens
tggactcagcagcagcaactgtgggactttttgactacaattctcaacaacagcattccaggatgccttgaaga

SEQ ID NO: 224912 - DNA, 100 bp, Homo sapiens
aacagctatctcgggagaaacaacaactgctacatctgttggaggagccaactagcatggaagtgcaggtgtgggcccatcgctggatggatctgtcaga

SEQ ID NO: 224913 - DNA, 75 bp, Homo sapiens
agctggccttggcagtttcggtgcatagaaaatcaggtacaggtttgcagattccgccagcagcacagcaagctc

SEQ ID NO: 224914 - DNA, 51 bp, Homo sapiens
agctgaacattactcttccagaagagtttttttccactaactgaaggcaat

SEQ ID NO: 224915 - DNA, 100 bp, Homo sapiens
cggaaactaggaagaggaaattaactatctgtacttataaggtcctgcatctccagtatggaatgtatgtttggccctgtgctgtggtcctggcccagta

SEQ ID NO: 224916 - DNA, 100 bp, Homo sapiens
gctgctcgcacaggactcggccacctgcccttcctgcaccgactggccagatcccacccatgagggcacagcagagggcatggagaacatggcagatgct

SEQ ID NO: 224917 - DNA, 82 bp, Homo sapiens
ccggaagtggatggcgtggagatatggcgcaactgcggcgccaggatgatgggcaggacagggagaggctgacctacttcca

SEQ ID NO: 224918 - DNA, 141 bp, Homo sapiens
tccgggccccctctccagccggccccccacctccccccggagccaggctggtttcggaaatgcccttacagcagcaggtctgccatcatggatgttctcgcagaagcaaatggcacctttgccttaaaccttttgaaaacg

SEQ ID NO: 224919 - DNA, 99 bp, Homo sapiens
cggcaccctcgtctccttcaccgccgacttcaagaagtctcacagaaagttctccgctcccagacatgggtccctcggcttcctgcctcggaagcgcag

SEQ ID NO: 224920 - DNA, 75 bp, Homo sapiens
atgatgagaggatgtggtggtctactctgatgtcaatcttgagggctaggttatgatgtgattgctcaagcccaa

SEQ ID NO: 224921 - DNA, 73 bp, Homo sapiens
tcgtttgttttgctacagcctacttaaagaagattttccagcaaataacattgtgaagttcctggtaggcttt

SEQ ID NO: 224922 - DNA, 75 bp, Homo sapiens
gaaaatagcctttgccatcactgccattaaggagaccctcctgttcttaactgtgggcgatgagaaaggtggtgg

SEQ ID NO: 224923 - DNA, 74 bp, Homo sapiens
ggtgaccgagcacccgcctccgggcatcttcaactcttatgttcctgaggaagaattgaaggcagcagaaatag

SEQ ID NO: 224924 - DNA, 90 bp, Homo sapiens
catccaggaccagctaaagaagcgctttgcttacctgtccgatccacaagaaggtgctgtggtggttctccctgcagactctcagcagcg

SEQ ID NO: 224925 - DNA, 75 bp, Homo sapiens
gaacatttgtagcattgatttcccggatctggtaacatggcaaaagatccagtggaatcctgaagggcttcgacc

SEQ ID NO: 224926 - DNA, 50 bp, Homo sapiens
atctgagataattctgaaaaagaaaaatgccagctgtgggacaaggagtg

SEQ ID NO: 224927 - DNA, 100 bp, Homo sapiens
ggcctgagggggcctggcggagcccgagcgcggcccggcccgcagcgtggggccccgagcgcgggctgacaggacaactggatcagtttcattaaaaagg

SEQ ID NO: 224928 - DNA, 75 bp, Homo sapiens
agctgaaataacccttgatcctcctcctaattgcaggccctgagacgggagttaaaggagaaagaatattctgtc

SEQ ID NO: 224929 - DNA, 139 bp, Homo sapiens
cttcaggctgcaacaaggagaagagccatggaaacaggaggaagaattcccaagccaaagctttccaggtagttcctgaaatgactgagatattgaagaaaaaatgaatcaggatcatgccttaaaaagaaaacttttg

SEQ ID NO: 224930 - DNA, 51 bp, Homo sapiens
catggcctgctcagcctcagcggtcttagtggtgcaatggctagtataagc

SEQ ID NO: 224931 - DNA, 100 bp, Homo sapiens
gccggcgtttgggctacggttgttgttggcgactgtgcttcaagcgaaagttgtacaagggattgatttaaaccaaattcgaggacttgggtttgatgcc

SEQ ID NO: 224932 - DNA, 90 bp, Homo sapiens
ggatatgccttgtcagatctgctacttgaactaccctaactcggaaccatgctgccagttttctgtgtggtggaacattatgaaaacgcc

SEQ ID NO: 224933 - DNA, 75 bp, Homo sapiens
gtcccagtttttccctgaggccatttctttcatagactttctgctgctgaagtaatgcaatggtctcaatctctg

SEQ ID NO: 224934 - DNA, 100 bp, Homo sapiens
ggcaagatccagatcgggatttacgtggagatcaagcgcagcgatggtgcaaatatatacagagcttcataatcagcccaagaccacatagagcaaacat

SEQ ID NO: 224935 - DNA, 87 bp, Homo sapiens
gagggaacttgccccacattggcggtggccatatccccctcggcctgcgcccaccaccttcttgctgttcagccagaaatctgccat

SEQ ID NO: 224936 - DNA, 100 bp, Homo sapiens
ggggggaaaatggagcccttcaccaatggaatccaggtaaaaatggcttgtctaatagctgcattttgttagataaatgtccacctccaagaccaccaac

SEQ ID NO: 224937 - DNA, 100 bp, Homo sapiens
cctgggcgctccggtggcggcggagattctgaaagtcaagaagacatcatccggaatattgccaggcacctcgcccaggtcggggacagcatggaccgta

SEQ ID NO: 224938 - DNA, 100 bp, Homo sapiens
aagtccactactacaatgagatcagtgtttccatcgcttgtggcatcctgctagctgccctgcagggaatgtgcagcaatcagttaaccgcaaacagagc

SEQ ID NO: 224939 - DNA, 74 bp, Homo sapiens
ccagctaggttcctggtgctttgggggtcatcatcagatttgaaatatttaaagtggatacaaaactatttcag

SEQ ID NO: 224940 - DNA, 100 bp, Homo sapiens
cccaatccgcatgagcgtcctttcgtgatgctattgctgagattagagccatttgtattgaagaaattggagtatggatgaaaatgtatagtgatgcctt

SEQ ID NO: 224941 - DNA, 98 bp, Homo sapiens
gtactgtccaaatgaattatgtcagcaacgtatccaagcagttaggacttcaggaattatttcctcaaggtcatagctgtgctgtttgtggtaaagtg

SEQ ID NO: 224942 - DNA, 100 bp, Homo sapiens
ttcagagacccagaaaatggtgcttaccaactacatgttccctcaacagccaaggactgaggatggaggtagatgacttctttgagcaagagaagaactt

SEQ ID NO: 224943 - DNA, 75 bp, Homo sapiens
ccagggactgggcatccacccggccaggttcccaggaagtgtcaggggaagctgatggagaatcgagctctggat

SEQ ID NO: 224944 - DNA, 100 bp, Homo sapiens
gttctatgcactctgtgaccagctggagctgtgcctggtccttatgtcgtcagaagatcgagaagctcaggaggatgaattgctggccctggcaagtatt

SEQ ID NO: 224945 - DNA, 100 bp, Homo sapiens
gacaagggcttccagtttttttcagaacagaaaacgttgtgtgacgtgatcctcatggtccaggaaagaaagatacctgctcatcgtgttgttcttgctg

SEQ ID NO: 224946 - DNA, 100 bp, Homo sapiens
cagaattcggccatgagccgctacatactcatcatggggctcctgtacaagcaaaatgatgcttcaacacccaggccaggtctctgcctcggaagtgagt

SEQ ID NO: 224947 - DNA, 98 bp, Homo sapiens
ctcagtccggcacaggaaaaacagccaccttcagtatctcagtcctccagtgtttggatattcaggaagccagttgagggaagttctccatgaatgta

SEQ ID NO: 224948 - DNA, 98 bp, Homo sapiens
gctggtggtcgtcggcgagatcgtgaccgaggagcacctgcggcgtgccatcggcaacatcgagctcggtttgtgggtaacattgaaattacttcctg

SEQ ID NO: 224949 - DNA, 83 bp, Homo sapiens
attgggaagaaactcttagcgcaatggaattacatgaacgacagccttcgcaccgacgtcttcgtgcggttccagccagagag

SEQ ID NO: 224950 - DNA, 100 bp, Homo sapiens
ttcctcttccaatggaagtgtttaaggtatgaacgctgccgtccgtgccgtggtgcgcatgggtatctacgtgggggccaaggtgtacttcatctacgag

SEQ ID NO: 224951 - DNA, 100 bp, Homo sapiens
actgcttttgctgtcttggatcaagaccagaaagaaattattgataccaatggagctggagatgcatttgttggagggcaggacacgtcctcacagaaaa

SEQ ID NO: 224952 - DNA, 143 bp, Homo sapiens
cctggatgagcagtttgaacctcagaagactctgttcatccagtgcgatgtggctgaccagcaacaactgagagataccctgcagtgcactgtagaacagaagataagaacttttctctgaatttgggtcttctagactttgg

SEQ ID NO: 224953 - DNA, 75 bp, Homo sapiens
gtgcaggaaaaatgttcactgcaggagcacgtgaattgcctctgcttacgttcaggccctgtcctaaacccagcc

SEQ ID NO: 224954 - DNA, 82 bp, Homo sapiens
cgccgcgtgcccggccgcgcccagcaggcttcttccccgggagctcgcagggctgcgacgccttcctgcggcataagatgac

SEQ ID NO: 224955 - DNA, 51 bp, Homo sapiens
gctacatgtttgcttagcgattaaaaagaatacagattctgttcatcttgc

SEQ ID NO: 224956 - DNA, 75 bp, Homo sapiens
ggtggctctacccagaattcaattaaagtggctcagttgaagactaggctttggaggttttcaaagcagacggtg

SEQ ID NO: 224957 - DNA, 75 bp, Homo sapiens
gaaattgaattgaagaaaattgcacgtaatcacccaaatgccaacttattctaccagattccatgaaagtattgc

SEQ ID NO: 224958 - DNA, 82 bp, Homo sapiens
gggaaccctggtcaccgtctcctcaggccgccatggcatcagatgaaggcaaactttttgttggagggctgagttttgacac

SEQ ID NO: 224959 - DNA, 75 bp, Homo sapiens
aggaggaggtggagttgctgcccttccggagtccgccccgtgaggagaatgtgcacctatgatatgtgttttaga

SEQ ID NO: 224960 - DNA, 75 bp, Homo sapiens
ccagagctgaggactgcctgtttgcaggatagtaatgatgacactgaagatgtttcactgtttgatgcggaagag

SEQ ID NO: 224961 - DNA, 127 bp, Homo sapiens
cagcctgcattgccaatccaaccagaaggtacaagggtcgtgtgtgggcactgtggaaacacattcctgtatggaacctcaaagtctttgtgacaatggaaaccaaaaaattaattggtaaaccgct

SEQ ID NO: 224962 - DNA, 75 bp, Homo sapiens
tttctggcctggaggctatccagcgcatctcgtccccggtgaagaagacagagatggacaagtcaccattcaaca

SEQ ID NO: 224963 - DNA, 98 bp, Homo sapiens
tctgacatggaggatgatttcatgtgcgatgatgaggaggactacgacctgatgctggcaaccagtcgctatgcagtgatgaccacccagctaagaca

SEQ ID NO: 224964 - DNA, 100 bp, Homo sapiens
acaggagctgtagagaggaccccggtacatctgaaagccgggaaatggtccccgttctccgtgtcctgctgtccgctgacctgaaggggttccagtactt

SEQ ID NO: 224965 - DNA, 82 bp, Homo sapiens
ccgaccccgtcccgaccctggccgccccgagcggagcctggaggaggctgtgcagaaggtatcctgcagaccatgaactgag

SEQ ID NO: 224966 - DNA, 100 bp, Homo sapiens
gtaagaaagaacttttgcagagctgtgatgttttggggattccactctccagtgtaatgattattgacaacagcactgctcagcacgcaggcatgtgagg

SEQ ID NO: 224967 - DNA, 100 bp, Homo sapiens
cagagactgcccacatgagtgtccgaaaatccaccggtgattcccagttgactggtctgagtgtctccaatggaaaggaccaacttgtagtgttccatac

SEQ ID NO: 224968 - DNA, 83 bp, Homo sapiens
ctagcagcaagtcatctggtgaccttgttgatctgtttgatggcaccagccagtcaacagctgtccctttccccccaacacat

SEQ ID NO: 224969 - DNA, 75 bp, Homo sapiens
agcctcggctcctgctgctgtgaactcctctgcttcagcaggtttccttcaagcaggatggtacctttccacttt

SEQ ID NO: 224970 - DNA, 75 bp, Homo sapiens
tggatgcctcccttatctccctcattgaggattttgggagccttggagagattgacgcgtcatgccttacgtggg

SEQ ID NO: 224971 - DNA, 75 bp, Homo sapiens
ttgggaaaaggagaactcctgactgattagcattcacaccagaataccctgaagatgtagctcctactgttggat

SEQ ID NO: 224972 - DNA, 50 bp, Homo sapiens
gaagacttggaagctcatggacaaagtgaggaatttgcccagagtgccat

SEQ ID NO: 224973 - DNA, 100 bp, Homo sapiens
tgacatagacctggaccagccagaggacgcgggctctgaggatgagctggaggaggggggtgaggtggctttgaccccgggttgcccggccagcacgacc

SEQ ID NO: 224974 - DNA, 109 bp, Homo sapiens
gggactaagagagccgaggtcgctccccatccactctcacaagctatcatggtgaacttacttcagattgtgcgggaccactgggttcatgttcttgtccctatgggat

SEQ ID NO: 224975 - DNA, 100 bp, Homo sapiens
tttaacaaagatgatgagcagcatctcctggaaagatgtaaatctcccaagtccaaaggcattgcagtgtcgagatggctatgaaccctgtgtaaatgaa

SEQ ID NO: 224976 - DNA, 75 bp, Homo sapiens
cccaaagcaagaaaattactaaagaggagtttgccaatgaatttctgattgaagacccggaagaaccagacccca

SEQ ID NO: 224977 - DNA, 90 bp, Homo sapiens
gctcttcgttttgggaagcgcgtcgctctgggtcctggcagaaggagctacagcctccgcttggcgtcccgatgctctccaccagcggcc

SEQ ID NO: 224978 - DNA, 82 bp, Homo sapiens
cagaatcctccaaaaccagtcatgaccactagacccacagctgttaaagcaacaggtcagcccaaggccaaccccactgtca

SEQ ID NO: 224979 - DNA, 82 bp, Homo sapiens
gatttatagatcagaatctcagtccaacaaaagttttaatcgcctggacctgccaccatacaagagctatgagcaactgaag

SEQ ID NO: 224980 - DNA, 86 bp, Homo sapiens
cacagaaagcggtagcatctctcaaggcaaatggcgtgcaggcacagatggctaaggaacctaactctcagagaagtaatgctgaa

SEQ ID NO: 224981 - DNA, 75 bp, Homo sapiens
tgtatgaccttcacgcagtcaagaacgacttccagtatgcagatctcaatcgccacgtggatgccttgaatgcgt

SEQ ID NO: 224982 - DNA, 99 bp, Homo sapiens
gtttacccaaatgtgccttggagtaaatcacattcacaagaaacgtgtgctacacagagatatcaagtccaaggatggtaagcggatgtttggcaccta

SEQ ID NO: 224983 - DNA, 123 bp, Homo sapiens
attggctagatcaggaagcctatgtcaactatggaacaacaacttgcagctcatctctattgatggtgcttttcagtgggaagaattggaagaagatatcaggaagaagttgaaagattctgg

SEQ ID NO: 224984 - DNA, 80 bp, Homo sapiens
gaattaaaaagaagcaacagcagcaggttcatcaggtgtacatcagggcaggaagaaaaaatgctgggcatcttggtgca

SEQ ID NO: 224985 - DNA, 83 bp, Homo sapiens
gccgccgctacgggaccgcctgagctttctacaccggacttcccaagtaagaagcggaagaggagccgctggaaccaagacac

SEQ ID NO: 224986 - DNA, 105 bp, Homo sapiens
cacagctgaactttcttctaagtgccacagtgaaagtgaattactggaactgaaacggcagcagcaagagcaagaaagagccaaaatccaccagactgaacacag

SEQ ID NO: 224987 - DNA, 100 bp, Homo sapiens
gctcggcccgcctctttgagaggtctcgcattaaggctctggcaggccctgggaggagcggggacactgaggacctctctccaaattggcctctcaactc

SEQ ID NO: 224988 - DNA, 75 bp, Homo sapiens
gccaagagctagagcagactcagaatgagctcaccagggagctgaaactcaaagatggggtttcgccatgttgcc

SEQ ID NO: 224989 - DNA, 100 bp, Homo sapiens
tagttatggaggaggtgatggtggatataatggatttggaggtgatggtggctttggtggcagccgtggtggtggtggatatggtggcagtggggatggc

SEQ ID NO: 224990 - DNA, 97 bp, Homo sapiens
aggagttcgtctcttacgtctgcggaagtgcagctgcctcagttcttagcgcagggatagctgggagtatggccaccctgctccacgatgcggtaat

SEQ ID NO: 224991 - DNA, 90 bp, Homo sapiens
atttacagtgtttgacatgtcaggtcaaggaagatacagaaatctctgggaacactattataaatgatgaagaagttacaccagcaagag

SEQ ID NO: 224992 - DNA, 75 bp, Homo sapiens
agaacatttccccagaggagctcaaaatggagttgccggagagacagcccagggtgaggtggctttgaccccggg

SEQ ID NO: 224993 - DNA, 100 bp, Homo sapiens
agggaaatatgtcatgtatcccatagctgtgagtggcgatcacgagaacaataagattttagtccatggagaacagaatgaaatggccagattgaaagca

SEQ ID NO: 224994 - DNA, 143 bp, Homo sapiens
cagcagttcatccagcagaccggggctgcgctgccaccgcccccacggcctgacaggggccctcctggcactcagagggcctgagctgcatgaataaggatcacggctgtagtcacatctgcaaggaggccccaaggggcagc

SEQ ID NO: 224995 - DNA, 75 bp, Homo sapiens
ctgacttcaagaatgaagccacggacccttgcggcgttgacccggacgacacctataatgagaccccctacgaga

SEQ ID NO: 224996 - DNA, 83 bp, Homo sapiens
gacctagacctggaatcgcccaagtccctctactcgcgaggccccagtgcagagagcccacggccatccagtgcctacaatgg

SEQ ID NO: 224997 - DNA, 100 bp, Homo sapiens
ctgagagtttgatcccaggctttcaatcaacccaaggtgatgcttttgctacgacctcattttctgctggaactggtttgatctgtggatgaaatgaatc

SEQ ID NO: 224998 - DNA, 100 bp, Homo sapiens
ggaccttcaggactaaatagtattaaggccaagtcctgtatctgccatgtctgtggcgtccacctcaacaggctgcattcctgcctctactgtgtcttct

SEQ ID NO: 224999 - DNA, 89 bp, Homo sapiens
cggattcccccactctttcctcagaagcgtgtccacttgcgaaagcagcattcctatattgagcaaggcaagaaatgccgttactgtga

SEQ ID NO: 225000 - DNA, 89 bp, Homo sapiens
gcattatatactctccgccgcacaggaaacttatagaaccattggcctatattgggttggatctattattatgagtgttgttgtttttg

SEQ ID NO: 225001 - DNA, 75 bp, Homo sapiens
agaagagcttcagaaacagagactggctcttgcagccaatgccggaacaggatttgctgttgctgagcctcaaat

SEQ ID NO: 225002 - DNA, 75 bp, Homo sapiens
ttttcagggaacgcttaccaatgaaactcgatgcttgaactgtgaaactgttttcctcctccaccaggcgctcca

SEQ ID NO: 225003 - DNA, 80 bp, Homo sapiens
cgacagcaacagctctgccggctggaagcctgggctggaagctcttctacgtcacaggctgcctgtttgtggctgtgcag

SEQ ID NO: 225004 - DNA, 103 bp, Homo sapiens
ttccacaagcacaaactgaccaagcacagagtcaccagtttccatatgtaatgcaagggtatgatgaagccagcagggcctttgggggccaccgccactaggg

SEQ ID NO: 225005 - DNA, 82 bp, Homo sapiens
acgacaggcactacaacagcagggcccctgtggcactgcagatcgcagcctgcagctgagcgcatgggagagcagcatcgtg

SEQ ID NO: 225006 - DNA, 99 bp, Homo sapiens
gaagcagcaacttcgaaaggcgatgttggaaaaagacggaaagctgcacacatacatgtaagagaagcaaaaatgtcagatgatatcaggaaaaggttt

SEQ ID NO: 225007 - DNA, 75 bp, Homo sapiens
ccgggtcctcagcttccacagcgtgtctgggcgcaagtcccgcaaaaagaaatccaaggccacacagctgagtcc

SEQ ID NO: 225008 - DNA, 75 bp, Homo sapiens
caactccacgtgcttcagtccaaactgcagggacctcaggatggaaaccagcagcctgcaccgcccgagaaggtc

SEQ ID NO: 225009 - DNA, 101 bp, Homo sapiens
aaaggagcaagagcaagatcaccgtgacatccgaggtgcctttctccaaaagatactagagtaaaaggatggtttcttctggacaattatatacccacatt

SEQ ID NO: 225010 - DNA, 74 bp, Homo sapiens
gaattttgaagtacaccgtggtgacattgtatcattggtgactctgtctactagtgacgatgtcgaagacaggg

SEQ ID NO: 225011 - DNA, 83 bp, Homo sapiens
aagagggtgttcgactgctagagccgagcgaagctcactgatcccaagaaccataccgtaatgtttgacacacttaaggactg

SEQ ID NO: 225012 - DNA, 98 bp, Homo sapiens
tttgtctctgatgagctgagaaacaaagccacccagccaatgaagaatagcctaacatggcagaccagagacagcgctcactgtctacctctggggag

SEQ ID NO: 225013 - DNA, 90 bp, Homo sapiens
ctcctgagtagctgggattacagcccaaggaatgcctaggactcctggaatgtatgtatgcaaacctccagcttcagacccagctcgccc

SEQ ID NO: 225014 - DNA, 95 bp, Homo sapiens
tcccgcaacccgataccatcggacaggatttctccgcctcagcccaacggggaggggttcggtccgagcccggtgggaggctcccggagcgcagc

SEQ ID NO: 225015 - DNA, 52 bp, Homo sapiens
cacgaattggccttattaatgatatgattcttcctggaataataagtattca

SEQ ID NO: 225016 - DNA, 100 bp, Homo sapiens
aagagactgaggcaagttttagggcaggagtggaaggcaagaattgatgttgctgcagacctgtacggatttgctgctgtactatactggcaattgctgg

SEQ ID NO: 225017 - DNA, 71 bp, Homo sapiens
tcttttcctgccatggggatatgacattagccaggtgctgtccagaccaaaacgaagaagacgttagccaa

SEQ ID NO: 225018 - DNA, 50 bp, Homo sapiens
ctggcgagcgccaccgcatgggaatgtgggtgccggcaggacaggcgatt

SEQ ID NO: 225019 - DNA, 83 bp, Homo sapiens
acaaaaatgggtggagtacagatctctgcagttacaggaacatcgtctgcttcatgccatcactggtgcaagctatatttaac

SEQ ID NO: 225020 - DNA, 90 bp, Homo sapiens
gccggcgccgcgcccatagccggacggggatctgagctggcagaactgaatgacttcatcatccagcttgatgaagaagtagagggtatg

SEQ ID NO: 225021 - DNA, 101 bp, Homo sapiens
cgggtggcggctcgggacggaggacgcgctagtaaccaccgggaggaactgggccattctaacacccgttgctaccatgctggccacccgcctctccagac

SEQ ID NO: 225022 - DNA, 100 bp, Homo sapiens
cgagatctagaatcaactgagagagatgcttaaaaatcaccagttactttaatgagagtggaagctggacacactatgtgacttgtatgaaaccctgacc

SEQ ID NO: 225023 - DNA, 89 bp, Homo sapiens
agggagacgctgctgcagctccgggacacctggggccgccgaggcaaagctccaaagacaacaggccctccctctgccctcccgtctgt

SEQ ID NO: 225024 - DNA, 101 bp, Homo sapiens
agcccctggaccccctgatggcccccaccttcccatccagattatgtttgagaccttcaacaccccggccatgtacgtggccatccaggccgtgctgtccc

SEQ ID NO: 225025 - DNA, 75 bp, Homo sapiens
gagcgtggttgctgaccagttgaaaggcccttggactggacagtgccaatgagaaaggcttgtataggaggggtg

SEQ ID NO: 225026 - DNA, 100 bp, Homo sapiens
gcgcgggtacagcttttcgctgactacattcagtgtgtaaatatgttgctgtggagctgaagtcagcctttgaggaaaccggcaagaccaaggaggtgat

SEQ ID NO: 225027 - DNA, 100 bp, Homo sapiens
ccaatttctgttaaactgctgtgagccagggacaattcctgatgcctccatcctagcagctgccttggatctagtgtgactgcacagaaaagttacaaaa

SEQ ID NO: 225028 - DNA, 75 bp, Homo sapiens
gggacggggaccagcagctgtcgccgccgctctcagcatcatggataccgacttatatgatgagtttgggaatta

SEQ ID NO: 225029 - DNA, 102 bp, Homo sapiens
cgagtgcagaagatctgggtgcccgtggaccacaggccctcgttgcccagatataacgaaggaggcccaacttcattcaataaggagcctgacggatttatc

SEQ ID NO: 225030 - DNA, 90 bp, Homo sapiens
ctcagtctgacgacattgaagctagccgaataatgccagctgatgaagaccgagaggccgcgacccaacacctttgtcatacgctgcctg

SEQ ID NO: 225031 - DNA, 100 bp, Homo sapiens
atgaatttgttagtgctgtgtgctggagggcactaccagatgggtcactgtgtgcccagtattctgcagacaaacgagaagatgagaagatgtgtgatca

SEQ ID NO: 225032 - DNA, 75 bp, Homo sapiens
cgtgcctgctatcgccgagttctacaacacggtttgtggtaaatatgccagctctagaacacatgaatcagattt

SEQ ID NO: 225033 - DNA, 83 bp, Homo sapiens
ggaacagcgagctgtttgacccctttgacctcttcgatgtgcgagactttggaaagagacagggtcttgctatgttgcccaga

SEQ ID NO: 225034 - DNA, 97 bp, Homo sapiens
gaacacaggtccatggaacaatcacaggttatgggtgctacatgtgtgctttcagagcagtagtgtgaggaagcttggagtgggatggcaggacggc

SEQ ID NO: 225035 - DNA, 109 bp, Homo sapiens
gagaattctgggcttccacacaactccagtgctaactcaacagacaagactacttttgcttaaaaatctgttatgtaaacaaggaagtccattgacccaaaaagaacta

SEQ ID NO: 225036 - DNA, 74 bp, Homo sapiens
gatcccccaagagccacagagcctgtccagcctagggtgaatgtttccccctccaagaaggggcccttgcagca

SEQ ID NO: 225037 - DNA, 73 bp, Homo sapiens
ccattactgatgatgtggaggttaacagctatctttctgcgtcgacattccagatggctatcctgcttcagta

SEQ ID NO: 225038 - DNA, 80 bp, Homo sapiens
tcatcctggttctggaatcctcagttcaagcatgttggcagataaattgaacatgactccagaagaagctgaaaggtgga

SEQ ID NO: 225039 - DNA, 98 bp, Homo sapiens
ggatcatcaactcgcgggtcctcgtggatcagactacagctaaacctattcgtcccgggcaacatccagcagcttctccaactcacccaagtgcaatt

SEQ ID NO: 225040 - DNA, 88 bp, Homo sapiens
gaagaggtcatctcgctcggagcttcgctcggaagggtctttgttccctgcagccctcccacgacgccgaagtcgcgggcgctcatgg

SEQ ID NO: 225041 - DNA, 51 bp, Homo sapiens
gcctgatctaacccctagaaacagttgcttgtatcatgggatactttgctg

SEQ ID NO: 225042 - DNA, 84 bp, Homo sapiens
ggctttctatggggtctaggtgatcatggagactgccaggtggacgtattggtgaccacagctggcggcgtggaggaagacctc

SEQ ID NO: 225043 - DNA, 75 bp, Homo sapiens
agccaccgcccccgcccgaccatggccgagggtgtggatgaggtcaccattgtcaacattttgaccaaccgcagc

SEQ ID NO: 225044 - DNA, 75 bp, Homo sapiens
ataaagagttctgattcccagagacttaattcagtgcacaaatgagatgaatgtgaacatcccacagttggcaga

SEQ ID NO: 225045 - DNA, 80 bp, Homo sapiens
gcggtggcggcggcggcagctgcagtgacatgtccagcatgaatcccgaatattgccaccttccagagaagaggtacgag

SEQ ID NO: 225046 - DNA, 124 bp, Homo sapiens
cgccggttcgcgtctctctgctgcggcgcggggaccgctgtgctctcggtggaagcagggaaaggcctggagatgaggaagctggttctctcggggttcttggccagcgaagagatctacatta

SEQ ID NO: 225047 - DNA, 100 bp, Homo sapiens
tgtaaatacgaatctttccaaaggagatgcccgaatgttgctgcgggatgtaaaagctcttaccctccactatgaccgctataccacctcccgcaggctg

SEQ ID NO: 225048 - DNA, 100 bp, Homo sapiens
ccggacactttgttattggagaaacatgcagattatatcgcatcctatggctcaaagaaagatgattatgaggagttggatttgtcttctagttctcaga

SEQ ID NO: 225049 - DNA, 100 bp, Homo sapiens
ctcaagtgaagcaaaagccttccatgattacggtcaaaaattgcatgttcaaacaaaaggaggcaaagtgatctgtctgggaacagtttatggaaatata

SEQ ID NO: 225050 - DNA, 50 bp, Homo sapiens
ggagcacctgaagagatgccagcagggcgcaccctacgacgcgcacacca

SEQ ID NO: 225051 - DNA, 74 bp, Homo sapiens
ccagacgacaagcacacactatggcgctgaaacggattaataaggtgtatgcaacagcgttattgcaacaggct

SEQ ID NO: 225052 - DNA, 83 bp, Homo sapiens
ctacctcgcccacgagagtcggagagaagaagctggaggagttctccgtggaagaggccgaggtgctacagatcctcacacag

SEQ ID NO: 225053 - DNA, 100 bp, Homo sapiens
cgagcactgggtgaaggacctgggcagcctcaatgggagggggacctacctgccgcagacgtacatcatccaggaggagatggtggtcacggagcatgtc

SEQ ID NO: 225054 - DNA, 83 bp, Homo sapiens
acggggccctgacacggccaccctactgcctggaggccggggagccgacgcctggtgtccagtgatttggagaatattgacac

SEQ ID NO: 225055 - DNA, 100 bp, Homo sapiens
tgctcgcagataagcatgctaactaagaaaaatggctttgtcagcccaacagatacccagatggtttaactcagttaagttgaggagcctcattaatgct

SEQ ID NO: 225056 - DNA, 85 bp, Homo sapiens
cacagctcctccagataccagcacatgcagcccatctgctgacattgggactactactgagggattaatgaaaatcaagttccat

SEQ ID NO: 225057 - DNA, 101 bp, Homo sapiens
caaggagctgtcctttgttttggattacataaaccagtcacccaagtgcattgcctttggaaacgaggtatggcagatcccagaaaatggactcacccttt

SEQ ID NO: 225058 - DNA, 100 bp, Homo sapiens
gaacagaaaatcgtcttatagttgagaatttatcctcaagagtcagctggcagacgcaaacatgcagatctttgtgaagaccctcactggcaaaaccatc

SEQ ID NO: 225059 - DNA, 75 bp, Homo sapiens
gaagaacaattccgccaagcggctacgagttccagggagctctgtcctggtgaccgtgcccgggttatgacgact

SEQ ID NO: 225060 - DNA, 100 bp, Homo sapiens
gtaactatggccggcctgcggaacgaaagtgaacaggagccgctcttaggcgacacacctggaagcagattcgaaatcagagcaaagcctctgggtctgg

SEQ ID NO: 225061 - DNA, 90 bp, Homo sapiens
tcctgagtctagatcttcagatagttctgttattgttcagcctttttctaaaccttaacaacatgctgtaccccaaggaagacaaggaga

SEQ ID NO: 225062 - DNA, 74 bp, Homo sapiens
acacgggcgagaagccctacgagtgcaacatctgcaaggtccgcttcaccaggctgttcggctcttgaatccca

SEQ ID NO: 225063 - DNA, 87 bp, Homo sapiens
cgccgatattcaccaagcgcttcgctacaagcttcctgcctgacacagctcacttcaagaagtgcacaatgtcagaacgtggaatta

SEQ ID NO: 225064 - DNA, 75 bp, Homo sapiens
tctgcaactgtgtctgatggcgacatgcaagaaagcacttcagccaagcagaagggagccagctggacgaggtgc

SEQ ID NO: 225065 - DNA, 50 bp, Homo sapiens
gggctccgcctctgctgctgaagagtggatcagtgactacgcagactctg

SEQ ID NO: 225066 - DNA, 75 bp, Homo sapiens
agcccagacactgagagccgctttcatcaagaaccatgtgcagaggagaaaattccatccttggacagttaaaag

SEQ ID NO: 225067 - DNA, 83 bp, Homo sapiens
gcaactcatccgatgcaagtatttcatacacctactgtgatctgactgcagccatgagcagcaatgagtgcttcaagtgtgga

SEQ ID NO: 225068 - DNA, 51 bp, Homo sapiens
cgcacaaaccagggctcgccatgaagccagacaatgcagatcttcgtgaag

SEQ ID NO: 225069 - DNA, 75 bp, Homo sapiens
tctcgggcctcctctgggagctcattaggaccatggtggatcgggcagaggcattgctcatttagaaagtggatg

SEQ ID NO: 225070 - DNA, 100 bp, Homo sapiens
cagcccgggaaatctccaagtcagaaagttgcctgtgtccctggagtgttacacagtgcctcctgaagacaacctggccctccttcagctctacttccgg

SEQ ID NO: 225071 - DNA, 50 bp, Homo sapiens
tccacatcggtcagaaaaagatgtttaccgacaagactgtgaaactttcg

SEQ ID NO: 225072 - DNA, 51 bp, Homo sapiens
gggaatgtggccagaacgagaaagggagaagaaatgggtgaccgttggtga

SEQ ID NO: 225073 - DNA, 54 bp, Homo sapiens
tgtggacagaaccctggatctcacagaaggagcaacacacagtgagcatcgagc

SEQ ID NO: 225074 - DNA, 98 bp, Homo sapiens
tcttcttctgcaacacggccactgtgtacaagatatgtgcctggatgcagctcacctccggtgcaaagttccccatcaagtggacggcccccgaggca

SEQ ID NO: 225075 - DNA, 78 bp, Homo sapiens
ttgaaagaaaaaggctacaaagctgctttcattggaataggtacctttgacaggagcgtgaccctgctggaggtgtgc

SEQ ID NO: 225076 - DNA, 98 bp, Homo sapiens
ggaccaagagaacaatgggaaccagtctttcaaaatagaagagcaagttagtaccttgtaccaaaacatcaaccttgtggagccaagattaattcagc

SEQ ID NO: 225077 - DNA, 100 bp, Homo sapiens
tggtcccaagaagacctatatcacagatcctgtttcagccccctgtgcgccaccattgcagccaaaggacatatttgacagtgattggtacacttctcga

SEQ ID NO: 225078 - DNA, 100 bp, Homo sapiens
catctttatgcaaagccagcgttacagtaatgttccaggtgtggtggccgagcctggagcctgtgctgctctgccggtggaggagacactgccagagccc

SEQ ID NO: 225079 - DNA, 96 bp, Homo sapiens
gtgagcgaggagtcagaaactcagccactggttgccttggtaggcaataaaaggcactgtttgaagaagcaaacatggtagcatcaagcattcctt

SEQ ID NO: 225080 - DNA, 98 bp, Homo sapiens
ttggagtttaatgagaggaatatactcatcatcagtctatttagaagaggtgaaatcgccatgcttggtggtgtgggagaagagaatgagaaactgtg

SEQ ID NO: 225081 - DNA, 75 bp, Homo sapiens
caccaatcagcatgctgtgtctagctcaaggaatcctatgaggatggttgtgaggattatcctactctatcagaa

SEQ ID NO: 225082 - DNA, 140 bp, Homo sapiens
tggagtctgcgaaggccgggacccggttccccggcccacagtgggggtgtgcaaacccgagagaactgggtgcaaagttccccatcaagtggacggcccccgaggcagccctgtacgggaggttcacaatcaagtctgac

SEQ ID NO: 225083 - DNA, 75 bp, Homo sapiens
atcctgatggtggagatcaggaaactgcaaagactgggaagttcttaaaaagagtgttgcggagataggaacatg

SEQ ID NO: 225084 - DNA, 82 bp, Homo sapiens
ctccttttcgtttccggaaacatgtgtggacgaatgtggaacctcgctctgtggctgtgttcccttggcactccttagtccc

SEQ ID NO: 225085 - DNA, 100 bp, Homo sapiens
gagtccctccggaactcacactccagggaggacatgtatgcccaggactctatagagctactaacaacatctggtatccagtttaaaaaacatgaggagg

SEQ ID NO: 225086 - DNA, 77 bp, Homo sapiens
ggccgagcaggaggcgccatcatggtgcgctcccaggccctgctgttcatcaaacgcatgtatgagaaggagcagct

SEQ ID NO: 225087 - DNA, 100 bp, Homo sapiens
gtttgctggtggcttcccactggcgaagagaagctacaaaatatgctcgatggatagcattcactggaagtggaaaacgaagctcattcccaacgtgcaa

SEQ ID NO: 225088 - DNA, 75 bp, Homo sapiens
gagactccctgcatccaggacagtctggatgaagatgagctggattcccacaccatggtgaagactagtgtggag

SEQ ID NO: 225089 - DNA, 100 bp, Homo sapiens
tgggaacagacaaagaaacactctccttctgccacatttgttttgagctaaatattgagggtacctatggagttgtgtataagggtagacacaaaactac

SEQ ID NO: 225090 - DNA, 74 bp, Homo sapiens
ctcttacgtctgcggaagtgcagctgcctcagttcttagcgcaggtggagccgccaccaaaatgcagattttcg

SEQ ID NO: 225091 - DNA, 100 bp, Homo sapiens
gggacgggaggcgagcaagatggcgcagacgcagggcacccggaggaaagtctgttactactacgacgcctactcgacacccagcacctcccccgcaaac

SEQ ID NO: 225092 - DNA, 75 bp, Homo sapiens
caacgagtttgatacagttgtggaagacgggagtctgccccaggtgtcagaaactatttaaaagaagcactggtg

SEQ ID NO: 225093 - DNA, 86 bp, Homo sapiens
ttgagtcaaaaatccctctaaatatggaggagcctcccgtggaggaaccggattaaactgcaaatatctcatgaagctgctgcctg

SEQ ID NO: 225094 - DNA, 98 bp, Homo sapiens
ccgggacccggttccccggcccacagtgggggtgtgcaaacccgagagaactggttacagaatgtctgaaggggacagtgtgggagaatccgtccatg

SEQ ID NO: 225095 - DNA, 82 bp, Homo sapiens
cgcgcgtgcgcggacatggcctcaaacgcgtgagtgcatctccatccacgttggccaggctggtgtccagattggcaatgcc

SEQ ID NO: 225096 - DNA, 80 bp, Homo sapiens
aagagtgttttgaacaacagacatatagtgaagatgctggaaaaatacctcaagccatgccagtgacggtaacccgcacc

SEQ ID NO: 225097 - DNA, 90 bp, Homo sapiens
acgaggcactcagttggaagagtccagcaagaaggacagaataacgggctcccagattcacaagccccaccaagaggatcaccccaggaa

SEQ ID NO: 225098 - DNA, 90 bp, Homo sapiens
aactgaactgaatgacagtccagttcccctagaacttgagcgctgcaagtctcctacctcagatatttggagttcttacaacatggcaga

SEQ ID NO: 225099 - DNA, 88 bp, Homo sapiens
gaagaagagcccagctagcaccttcgccctctccagccagcttcgagagctgtgcccaggagtgaacaaccagccctacctctgtgag

SEQ ID NO: 225100 - DNA, 51 bp, Homo sapiens
gtgacactcaacaggattcccgatattaataaggcagcggaaagaagaaat

SEQ ID NO: 225101 - DNA, 75 bp, Homo sapiens
ggtggacgttcggccaagggaccaaggtggaaatcaaacgtccttgaatgggcaagagggcacatgaagtacggc

SEQ ID NO: 225102 - DNA, 91 bp, Homo sapiens
gctggaaaggaatgaggagttacagagggccgagaaggacaggatcagtttggtgccctggttgtcagatgttggaaagcagtaggacgga

SEQ ID NO: 225103 - DNA, 75 bp, Homo sapiens
cgttgtctaaatttcggtagccatggcacaagaatatatgagaaagatcagtctaaagaaaaggagaagaaagtg

SEQ ID NO: 225104 - DNA, 105 bp, Homo sapiens
gctggagccaagaattcataagatagccatcctgggtcttggcagcagcattgggactcctccagaaggagctgatgaggatgtagagagtccagagctgacaac

SEQ ID NO: 225105 - DNA, 99 bp, Homo sapiens
cttcaaacttacaaccaccaccaccactaccacctccaccttattcctgtgatccaagcggcagtgatttgcctcaagaacatcatcaagaaggtgatc

SEQ ID NO: 225106 - DNA, 98 bp, Homo sapiens
acaaaagatatacaagaaggagatacattaaatgcaatagcccttcagtactgttgtacggtctcctctgagcctccggcctccataagacccaaaac

SEQ ID NO: 225107 - DNA, 100 bp, Homo sapiens
gtccaagtcaaacgcagaaggactgcctcactgagcaaccaagacaagtgaacaatggcctcaccctcagtgaccttcctctgcacatgctgaacaacat

SEQ ID NO: 225108 - DNA, 83 bp, Homo sapiens
gagcggacttccgcgacgcgggcatggaagaggagatggttcgtgttacgcagtggccgtttaactggagatccagatgtttt

SEQ ID NO: 225109 - DNA, 101 bp, Homo sapiens
cggagcggcggatctggacacccagcggtctgacatcgcgacgctgctcaaaacctcgctccggaaaggggacacctggccgagacgcatccagagctttc

SEQ ID NO: 225110 - DNA, 100 bp, Homo sapiens
agagagctgactagaggcctgtgttcagtggtaagcatccgtggcattcaagacgaagatccccctgacgcccagctcctgaggctggataacatgctgc

SEQ ID NO: 225111 - DNA, 100 bp, Homo sapiens
cgagctgtatgacgatgtggaacccagagatgactccagccccagccccaagggcagagagctggagccggagccagagctggagccccctaccccacag

SEQ ID NO: 225112 - DNA, 100 bp, Homo sapiens
cagacgtgcagcggcaacatccagcggatcagccaagccagttttatgacttacctagtggagcctttatttacagaatgggccaggttttccaatacaa

SEQ ID NO: 225113 - DNA, 93 bp, Homo sapiens
caccagggcgacctggacgtagccaagcgcatgatccgcatggccaagacctgcctagagctggaacgttacctccagagcgagccctgctat

SEQ ID NO: 225114 - DNA, 74 bp, Homo sapiens
agtacttgaagatttgcataaagccaacattcgcaccgtcatggtcacagctctggatgagggggatattgcct

SEQ ID NO: 225115 - DNA, 75 bp, Homo sapiens
ctgtagagactgatttgcaacccttccgggaagccatagctctgcatgcacctgtggaatcctctcaagaggaac

SEQ ID NO: 225116 - DNA, 100 bp, Homo sapiens
atgagttcctgcagaagaagcacgcagaggagccctgggtccacctgcattactatggcctgaggtctatccagaagttaaaggagagattgctcgtaaa

SEQ ID NO: 225117 - DNA, 100 bp, Homo sapiens
atatgcaatgtcacttacaacattaatcagatactgcatttaagcgccacacagattttatactactgtgaggcccagaacatctgacaagccacacatc

SEQ ID NO: 225118 - DNA, 100 bp, Homo sapiens
ctgtgaacagcagcgattcaaagagctgactccactggaacccattctctgtacacaacatacaaagattatgaaattatgttccatgtttctaccatgc

SEQ ID NO: 225119 - DNA, 90 bp, Homo sapiens
atggacctaatgaacgggcaggcaagcagtgtcaatattgcagctactgcttctgaggtcaatgatgccttccttcatgtgatacagggg

SEQ ID NO: 225120 - DNA, 74 bp, Homo sapiens
ccgcgcgcgccagcaagaagatcctgctgcccgagcccagctcaggcgctcaggactgccaggacccagaggat

SEQ ID NO: 225121 - DNA, 97 bp, Homo sapiens
ccgctgcgcgcatgggcctgttcctggcccgcagccgccacctacccagtgaccatgatagacaacatctggggaagatgtacgagacttcacaaag

SEQ ID NO: 225122 - DNA, 97 bp, Homo sapiens
ccctgacacggaaatggaggaggagacagagttccttgagctcggaaccaggatatcaagaccaaatggatccatttgaaccacagcgacgtctccc

SEQ ID NO: 225123 - DNA, 83 bp, Homo sapiens
cccagaggcgcctcctccacaccccccgccgcagcagcaccggcgacaggtgtccctggccagtgtccttccacctgtccaca

SEQ ID NO: 225124 - DNA, 75 bp, Homo sapiens
tccattcaagagcagcattcataaatttccaggacacaactcagatgggaagttcatcgcccgggcacagcggat

SEQ ID NO: 225125 - DNA, 100 bp, Homo sapiens
tcctcttctgcctcctcatagagcaagctctgatccgtacaggtttacagcaccaaataatctggccctgtcagcccagctgtgttcctctggatgaaaa

SEQ ID NO: 225126 - DNA, 80 bp, Homo sapiens
gaccaggacagtcgcgaggttcgagtgttgcagagcctgcggggcaagatctgttcgtgctggccgtgggcagcgccgtc

SEQ ID NO: 225127 - DNA, 82 bp, Homo sapiens
caacaccaggagaggccgggggcagccgccatcggcagcgccaggctaccggctctctgaccagttccacgacatcctcatt

SEQ ID NO: 225128 - DNA, 75 bp, Homo sapiens
ctcccgagtggaggaagcaatacatccagtatgagaagctttgcatcgtccctatggttgtgatgttgaacccca

SEQ ID NO: 225129 - DNA, 100 bp, Homo sapiens
gcaaaagtgactcagctgcctgcaagacaaaggtagctggatccgtagaggttaaccccaaagattggctttccttggagtgaaatcaggaacatctctt

SEQ ID NO: 225130 - DNA, 100 bp, Homo sapiens
ctcatgtccaactttgagcagctgctccgaggggtctggaagccagagaccaacgagatcctgcacatgtctttagagagcaggagattcggatgggtca

SEQ ID NO: 225131 - DNA, 74 bp, Homo sapiens
accaggtcaagcccgaccaatacactgaggccctggcccagagggacaaggagtctgaagatacagtattgctc

SEQ ID NO: 225132 - DNA, 101 bp, Homo sapiens
agaaacactttccagagttccctgcaacccgtgcttatgcagatagttactattatgaagatggaggaaaacggacgatgtattactaagctggaaaacat

SEQ ID NO: 225133 - DNA, 100 bp, Homo sapiens
gagaggaagggttggaggtcgggccacccgaggtgctggacaccctgtcgcagcttctgaagccggagcggttgcagggcacacattactcggtgcagtc

SEQ ID NO: 225134 - DNA, 89 bp, Homo sapiens
ggcggcggccggagcttctctcagccggtgtggtcactcacctgtctaccactcccgtgaaatggcagctcgtgccttggtcccatttg

SEQ ID NO: 225135 - DNA, 100 bp, Homo sapiens
ctgcagccttgaacgtctggactctagggaccctgctgaatagctggggctacaggcgtgtgtcactgcgcccagaatggccaaagttttctggtcttgg

SEQ ID NO: 225136 - DNA, 101 bp, Homo sapiens
gctccctcattaccgtcgccagcggagcgaacccgagagcgtggagcgggctgggccagacttcctgctatatcctgatcatcactattgcaaatattgca

SEQ ID NO: 225137 - DNA, 100 bp, Homo sapiens
ttttaccagtgtgcagaagttctcgaatcattctttgtacagaaattgaaaggcttcaaagctagcaggattgatttccagagacttatgttacttgagg

SEQ ID NO: 225138 - DNA, 90 bp, Homo sapiens
cggggcagggcaagcacgggaagaagcagctggacccgctcaccatctacggcatccggtggtttccaggcctgaggtgcccgccctggc

SEQ ID NO: 225139 - DNA, 75 bp, Homo sapiens
tggaaaggagattgacagtcacaattttgtaataaggaacttagtgatttggcccgtgaccctccagcacaatgt

SEQ ID NO: 225140 - DNA, 84 bp, Homo sapiens
ctgggtcagtccgccgctcaccccgcggccgcaccttcccgccttctcaggttgaaatcacaaagattagacacctttttagat

SEQ ID NO: 225141 - DNA, 100 bp, Homo sapiens
ccggaaggggcaagacgggttcagttcgtcatggggctgtttggaaagacccaggagaagccgcccaaagaactggtatattacagctaatactgacaca

SEQ ID NO: 225142 - DNA, 76 bp, Homo sapiens
gaggaccagctttcgctttctgaccagcaggttccaatgattcttgttggtaataagtgtgacttggaagatgaaa

SEQ ID NO: 225143 - DNA, 76 bp, Homo sapiens
cgagatccgggccgtgaacgaaagcagtgacggaggagcttgtaccaccgcaatatgttaaggatacctgtaagaa

SEQ ID NO: 225144 - DNA, 100 bp, Homo sapiens
gggaagaagtagaggactgttattgctgctaaaattgattcaattcctcacttgaataattccacacctctagtggacccctcagtatatggatacggag

SEQ ID NO: 225145 - DNA, 74 bp, Homo sapiens
attctgccaaagctttcccttcttcataactgatcaccctttccatatgcagagaattctcttatccaacatca

SEQ ID NO: 225146 - DNA, 99 bp, Homo sapiens
gtgtggcctgtgtggactcgcatcttgcccgaagccgggcggaggagagctcaagctaagcttttctgggagaagaggctacaaggacttagtgcatca

SEQ ID NO: 225147 - DNA, 82 bp, Homo sapiens
gtcggcttgtcctggctcttgccctcatcctggttctggaatcctcagttcaagtcaactgcttggaccagcatgttcggaa

SEQ ID NO: 225148 - DNA, 105 bp, Homo sapiens
ctctggcctcgccggtcttggggggatggttccatcatggcgtcaatgcaggaaactactaaagttcctggggaagcaaagtagaatttcataagaacaaaatgg

SEQ ID NO: 225149 - DNA, 83 bp, Homo sapiens
tctggctgtgctgcgcgacccccgcgcatggccagctgcgggccgtccagcggctgtgccacttctacagcgccgtcatgccc

SEQ ID NO: 225150 - DNA, 90 bp, Homo sapiens
agaaaacaaagaaaaacatactccagaattcctaatagaacacaattcggaaaaattttagacgtggagatcatttttaacgagcggggc

SEQ ID NO: 225151 - DNA, 149 bp, Homo sapiens
tcagaaatcgcccagagaatgtttgtgggagtcagccaggaaggtgtagagtgaagcagcgttctaaagggaagcatttcacgctatggatacattgtatagacacagctatgatttgagcagtgccattagtgtcttagtaccactcg

SEQ ID NO: 225152 - DNA, 100 bp, Homo sapiens
ggaaagtgaagaaggcattgaagatgactattttttggagaggcctgatgcccgaatttcagaacatacggtccctaatgagcacagagaagaccaaggg

SEQ ID NO: 225153 - DNA, 75 bp, Homo sapiens
gcggaggtttgaccacatgcagcagcattcaggcctcaggcccaggcccaaggccaagtgagagagcccaggcca

SEQ ID NO: 225154 - DNA, 100 bp, Homo sapiens
agctgcctcagttcttagcgcagatttcttcagaggccccacagtatcaaatatccgcctggctggattagagtatgttctgcacttcactgcactgaat

SEQ ID NO: 225155 - DNA, 100 bp, Homo sapiens
gttatctccagatgccgcgcaactgtctgatctcagttcatgataaaccgagaaaactggtgtacaatagagccatgccctgatgcagcatctcttctgg

SEQ ID NO: 225156 - DNA, 75 bp, Homo sapiens
cgcggagctggaatgactggcaacccagtaagactttgaccccgacgcaggcttcagtgattgccgcggatcaga

SEQ ID NO: 225157 - DNA, 100 bp, Homo sapiens
cagcatgggagagtacatgagacgatgaagcaaaggttatgaagacagtatggagtttccagaccatagtagacatttgctacagtgtctgagcgagcag

SEQ ID NO: 225158 - DNA, 100 bp, Homo sapiens
cgtggaggcaaacgctgtgttatcctctttgcagaccatcccagaatttgcagagactctagaacttattgaatctgtgcaaattgagcatgacccagaa

SEQ ID NO: 225159 - DNA, 90 bp, Homo sapiens
ggggctatgatgatcgggactactatagcagatcatacagtcgcccaaaatgtgtggatgaagttgctttccaggaagaagtggttgcag

SEQ ID NO: 225160 - DNA, 87 bp, Homo sapiens
ctcattgctcagcgcggacctagacctggaatcgcccaagtccctctactcgcgagggctggaccccaatggagaacaggtggtgtg

SEQ ID NO: 225161 - DNA, 75 bp, Homo sapiens
gtgagggtgtacaaatacccctttgaattaattatggctgcagaggcaaggctggcagcaaaacgggctgcccgg

SEQ ID NO: 225162 - DNA, 75 bp, Homo sapiens
acaaagaagtaaaagtggtggctaatgccactaaagatgctggccagatatctggactgaatgtgcttcgggtga

SEQ ID NO: 225163 - DNA, 100 bp, Homo sapiens
gagtgaagtcccagggatattctgtgctgcccatctgctggcaaggctaagattagaacagctcataggagagtcatgattttgaatcacccagataaag

SEQ ID NO: 225164 - DNA, 103 bp, Homo sapiens
ctcgggtctcgggggccgctctgggatcccggccaccagcaattgtccggtgacttaagagattaaaattaatttggttgctgttggttctgaacaaataatg

SEQ ID NO: 225165 - DNA, 98 bp, Homo sapiens
ctttcctaccatctaaaatacgaaggtttctggctggataacaacgaacttgatgcaagtgataggtttgccaaggtcagacctctcatcatccggat

SEQ ID NO: 225166 - DNA, 83 bp, Homo sapiens
tgctatgcagcgaagaaatactcctacgggtatcgaaggatgatcgcagtgatgtggagagcagctcagaggaagaagatgtg

SEQ ID NO: 225167 - DNA, 50 bp, Homo sapiens
ggcttttcctctcctgtcccaggagtttggatcataatacaagagaagca

SEQ ID NO: 225168 - DNA, 98 bp, Homo sapiens
attcgtaatcagcaggccaaagactcagaggtggcacgcactacccttcttcctggcctcctgaagaccatagcagcaaatcgtaagatgccccttcc

SEQ ID NO: 225169 - DNA, 100 bp, Homo sapiens
gcgggtggcggcgaacgcggagagcacgccatgaaggcctcgggcacgaaccttcaacaactagtactgcttcaaattatccagatgtgttaacaaggcc

SEQ ID NO: 225170 - DNA, 101 bp, Homo sapiens
acgtttctggagaatattgttcggcggtccaatggactcacaccacccggcaagaactgctcactacggctccctgccccagaagtcacacggccggaccc

SEQ ID NO: 225171 - DNA, 90 bp, Homo sapiens
ggccggagtacgtcgttcccgctgcgctaggggaagcgggcagctgagctgactgctgcccactttggaggaggcggtgggctccttcac

SEQ ID NO: 225172 - DNA, 51 bp, Homo sapiens
attccagaatatctcagatgagcaggatcttatggttggtgatgaggcaag

SEQ ID NO: 225173 - DNA, 75 bp, Homo sapiens
gcgctgaggtgctgggacagccatggtttcagacgctcaccagaacaagctagaagaaatgatcaatgagctagc

SEQ ID NO: 225174 - DNA, 88 bp, Homo sapiens
ggagatcatgtaaactcacttttggagatagcagctgtggaaatacaaagaactctgaatcaacttggaacacctcaagattcacctg

SEQ ID NO: 225175 - DNA, 98 bp, Homo sapiens
gggtttctgcgtccatgtgaagcatcctcataaggtgggcccatctggggcagggaagagcacaattttgcgcctgctgtttcgcttctacgacatca

SEQ ID NO: 225176 - DNA, 116 bp, Homo sapiens
tctaccacctttggtgctttcagaatcatgactctcaatgttgaagaatgggctactgcatggaagggaaatcctcattgacgattcaatttgttgaaggccaatttgtggactcc

SEQ ID NO: 225177 - DNA, 83 bp, Homo sapiens
ccgcaagctgagcgagctgtcagagcccggggacggcgaggccctcatgtaccacacggaaattgcaagacctaacatggctg

SEQ ID NO: 225178 - DNA, 76 bp, Homo sapiens
cttaccctgaagtagttagaatgaaaatgacagatggcgagacctggacaggaaatgccctcttcagattgaccaa

SEQ ID NO: 225179 - DNA, 76 bp, Homo sapiens
gtgcaccttccttgactacatcaaaggaggagagcctacgactagatttgcatctttacgtcctgcgcggaggctg

SEQ ID NO: 225180 - DNA, 82 bp, Homo sapiens
ggagaatattggctgcagccaacatgcctgtccagaaatcaatgtggactgaacataaatcacctgatggaaggacttacta

SEQ ID NO: 225181 - DNA, 96 bp, Homo sapiens
gatgttgccaacaacggctcttctcaagcctgggcaatatttaagggaaagtataaggagggggacacaggaggtccagctgtctggaagactcgc

SEQ ID NO: 225182 - DNA, 98 bp, Homo sapiens
agggcgtgctcagtatctacaaagacccagatgagctgcttcagaaagagcaaaactattcagatgacgtcttggccaacatgattagtgaaccaagg

SEQ ID NO: 225183 - DNA, 90 bp, Homo sapiens
atgtaatgagtatcacagtcagaaacaataggattatcatgagaatggagaagaaaaagtcagcactttttgaagtgtctgaggttatac

SEQ ID NO: 225184 - DNA, 74 bp, Homo sapiens
cagaccttcaagatagacattgaccccgaggagacgctttggaggaattttttacatcacttgtgaagcaagaa

SEQ ID NO: 225185 - DNA, 100 bp, Homo sapiens
agaaccctacttgcctaaatgaggaatgtctttcctaccatctaaaatacgaaggtttctggctggcttttcactgagtatggcagactggcaatggagg

SEQ ID NO: 225186 - DNA, 82 bp, Homo sapiens
gcgccgggccaaggccaaggccagccggactaaaacaaagccaagtatcttcaagaccttctcatggagagtgtgaattttt

SEQ ID NO: 225187 - DNA, 100 bp, Homo sapiens
gtcggatttctgtccttggtacatgaccttgcctcatagtattcgatcagattcagaagatatctgtttatttacgaaggatgaacccaattcaactcct

SEQ ID NO: 225188 - DNA, 75 bp, Homo sapiens
ctgactatcttctcttcaccagctcttcagatcaatatgatatttggagttcttacaacatggcagacattgaca

SEQ ID NO: 225189 - DNA, 90 bp, Homo sapiens
ctttgtgttcacataatgctgtcaggaactgtgaccaaggtgttggggatgtcctttgcactgaccctgaactgccagattgacaaaacc

SEQ ID NO: 225190 - DNA, 75 bp, Homo sapiens
gatggccgacttcgatgatcgtgtgtcggatgaggagaagactcaagaatgaacaatccgtcagaaaccagtaaa

SEQ ID NO: 225191 - DNA, 97 bp, Homo sapiens
tcctgagtacctgggactacagaaccccttgttcgtggaggctgaggagaaagtctcctacaactgctgccgccagggcactgtctgtttgcaaatc

SEQ ID NO: 225192 - DNA, 88 bp, Homo sapiens
ctcaatatcagtccaccactgaacctaaatccagtttggttcaaacagcactgtgtgttaaattgaaatactctgatgtccaaactgc

SEQ ID NO: 225193 - DNA, 100 bp, Homo sapiens
tggaggatgtgcggggtgcgccggcagaggatccagtgttcaccatcctggccccggaagctctctgatgtaaaggatggagtaaatcaagcagcacctg

SEQ ID NO: 225194 - DNA, 80 bp, Homo sapiens
tgaacccaaaggagaagctcaaaccttttcaaaggagcgtttgctgaggctaaacactatcatgccaagttggtgaatat

SEQ ID NO: 225195 - DNA, 100 bp, Homo sapiens
gagaacccgaagcacctcccggcgccgggacgcttcttctagagctggattgaaagatgtctcaacgaaagtgaaaacaaacgttattccagccacacat

SEQ ID NO: 225196 - DNA, 75 bp, Homo sapiens
cctcgttttggtacaccattgtcaccatgaccacactgggcaggaactcagggagtgagctacaagtgtattatg

SEQ ID NO: 225197 - DNA, 74 bp, Homo sapiens
cttcgatgtgcgagactttggaaaggggtcatgtctgcgtacgccatgtgtgtccgctatgatggcgtcgaggt

SEQ ID NO: 225198 - DNA, 108 bp, Homo sapiens
cgccgaggcgcggcggcaggacgggaaccacgcgagctgcagccaggtgctggagaatctggtaaaagcaccattgtgaagcagatgaggatcctgcatgttaatggg

SEQ ID NO: 225199 - DNA, 100 bp, Homo sapiens
gtgccgccagtgtttccgtcagtacgcgaaggatatcggtttcattaagatcccagacttggaacttgaacttcatcctctggttatttctgtatgagag

SEQ ID NO: 225200 - DNA, 74 bp, Homo sapiens
agaagctggtgcctctctcttctttattccctgtaatagaagcattcctctgaatattgatttgctgaatagcc

SEQ ID NO: 225201 - DNA, 83 bp, Homo sapiens
caggggcacagagagatggagagagacctagttaggccattgaacacccagttcgaaccaatcagattccacgtcagattcct

SEQ ID NO: 225202 - DNA, 100 bp, Homo sapiens
tgtgatgctcgggagggagactgttgttcccggagatgcggcgcgcagggaaaagaagatctcccggagcagtgccctgaaagtgctggaccatgccatg

SEQ ID NO: 225203 - DNA, 83 bp, Homo sapiens
cctgagcgaagccaagccgggcggcagaccgagtgtgtcagcagccaggactttctctctgggtccccttccaaaacgcagcc

SEQ ID NO: 225204 - DNA, 83 bp, Homo sapiens
ccgggatttgggtcgcagttcttgtttgtggatcgctgtgatcgtcacttggtaatactgcattgcatgattgtgcagaatct

SEQ ID NO: 225205 - DNA, 100 bp, Homo sapiens
cccaagaaggctgtggagaagcagcagcctgtggaaagcagtgaagacagcagtgatgagtctgtcgaccagaaacctccttcctctggttcaccaaccc

SEQ ID NO: 225206 - DNA, 106 bp, Homo sapiens
gttccttgtggagccggagctgggcgcggattcgccgaggcaccgaggcactcagaggagcagcccctgtcaaagggaacaggaagcagtccacggagggtgacgc

SEQ ID NO: 225207 - DNA, 99 bp, Homo sapiens
cgagaactgcgcagacctggtggaggtgttaaatgaaaaatatgacagatacctagcatctagcaaaataatggcagctgcttaccttgaccccaactt

SEQ ID NO: 225208 - DNA, 115 bp, Homo sapiens
aagatgcagttttttgatgctgaggagctcctggtcgatgaagaggatgatgtttttggtgaagtgatcctgccatgaagcagtttctgctgtacttggatgagtccaatgccct

SEQ ID NO: 225209 - DNA, 100 bp, Homo sapiens
ggaccccagcgttaccatgcatcctgccgtcttcctatccttacccgacctcagatgctcccttctgctcctgattggcaagttatgtgcccattctcaa

SEQ ID NO: 225210 - DNA, 75 bp, Homo sapiens
acaagacgacgacacagagatggcttcccccaacccagacgaagacttcttggacacttaatgattgttggcaag

SEQ ID NO: 225211 - DNA, 90 bp, Homo sapiens
catggattgtgagctgaagctttctgaatcaggccataggaaaaggatacagagtagagtttcatgaacctgaaacttggtggaaatttg

SEQ ID NO: 225212 - DNA, 75 bp, Homo sapiens
ctgagcttggcctcggcgtcctcgggaaaacagttcctcctgaggatttcagagaagagctggacttcctggctg

SEQ ID NO: 225213 - DNA, 82 bp, Homo sapiens
aaaaacttgatggtggaatagaaccatatcgacttccagagatgcagcagcttttttatgagaattacgagcagaacaaaaa

SEQ ID NO: 225214 - DNA, 100 bp, Homo sapiens
gtctttatgtccttacaccagatttgccaccaccttcatcatctagtcatgctgggattggattcagcatcaaaatacatctactcatattgagagctgt

SEQ ID NO: 225215 - DNA, 100 bp, Homo sapiens
gccccctcaccctgctgaccaaaaagcttatagtgatttaggatactacattatcaataaactgcaccatgtggacgagtcggtggggagcaagacgaga

SEQ ID NO: 225216 - DNA, 75 bp, Homo sapiens
tctggaggagatgactataagattaagctagggaagatgcgcctgactgtcccttgtcgtgccctcacctgcgcc

SEQ ID NO: 225217 - DNA, 101 bp, Homo sapiens
ccgagaggtgatgctggagacctgtgggcttctggtttcactagattggaattccaccagcccctcgtggagttcctcagattgaagttacatttgacatt

SEQ ID NO: 225218 - DNA, 75 bp, Homo sapiens
caccgttaccattacgggaatcctctccaaagaaggaggagactgtagcaattctctgtggacattgactcggag

SEQ ID NO: 225219 - DNA, 100 bp, Homo sapiens
gggtttgtcacatatgccactgtggaggaggtggatgcagctatgaatgcaaggattacaaggcagaggaagacccagcaaaatttaaatctatcaaaac

SEQ ID NO: 225220 - DNA, 75 bp, Homo sapiens
gagtagtcgctggagtccgcgcctccctggagtgcctggaagagctgggatgtctggttgagtcctatggcatga

SEQ ID NO: 225221 - DNA, 74 bp, Homo sapiens
cggcggtgtgggcgcgtcaggccgcgacgagggcgctgagatgcagtgcaagctgtttgtctttgacaagacct

SEQ ID NO: 225222 - DNA, 100 bp, Homo sapiens
agtgacgggtctggagtgcgtgggggaccggctgttggcggaacccagcgggtgccgcttctccacccgaggcttccacctccaacgagccatgttccag

SEQ ID NO: 225223 - DNA, 89 bp, Homo sapiens
tgtattcagaagagggcaaaggcgtgtttgactgcaggaagaacgtgctgggtcacatgcagcagctgtcccctttcctccaacccaac

SEQ ID NO: 225224 - DNA, 82 bp, Homo sapiens
ccatggctgactacctgctgtacaccctcaacaaacaccagcgctttggagcctggcccaggccccccactgcctgcagctc

SEQ ID NO: 225225 - DNA, 96 bp, Homo sapiens
aaaatctcaggaatctggtctcattgggttatggccattgcaccaacccattatatctggcaaagagaacgttctgttcatcacagtggagctgtc

SEQ ID NO: 225226 - DNA, 74 bp, Homo sapiens
caccgtcaaggccaacatcacgcccttcggcgccgaccagttcttggccaggctgactgagagatttgtgctgg

SEQ ID NO: 225227 - DNA, 50 bp, Homo sapiens
ctcatggaggctgagcatttattcagcgctccattagcttccgcagtgag

SEQ ID NO: 225228 - DNA, 74 bp, Homo sapiens
atatgggagataagaagtatgaagacatggaaggctgaccagtgcaccggtcttcagggcttcttggttttcca

SEQ ID NO: 225229 - DNA, 82 bp, Homo sapiens
ctctttgagactttttaaagaaggtcagcccaaggctgccccctcggtcactctgttcccgccctcctctgaggagcttcaa

SEQ ID NO: 225230 - DNA, 75 bp, Homo sapiens
gggaagagaaagtctttatttacagcttcatggagacctggtcagacagcaaatcaaaaggcctccagtggataa

SEQ ID NO: 225231 - DNA, 80 bp, Homo sapiens
tcgggccagcgacccgctgctcagcgtcctcatgtggggggtaaaccactcggtgtgatcccctgggcccgtttgttgtc

SEQ ID NO: 225232 - DNA, 82 bp, Homo sapiens
aagagtctggagtttatctggagtgaggtggccggttcttggtgggatctgagcagcttcctgggtctgcaggtccagccgg

SEQ ID NO: 225233 - DNA, 117 bp, Homo sapiens
ccatggcgaccgggctcggggagccggtctatggactttccgaagacgaggactcacaccacccggcaagaactgctcactacggctccctgccccagaagtcacacggccggaccc

SEQ ID NO: 225234 - DNA, 90 bp, Homo sapiens
gtgaacttaaaggatcagtagcaatttggagcggtaagcccccaatatgtgaaaggacttgcaacaaagcattgccagagaacctagtgc

SEQ ID NO: 225235 - DNA, 100 bp, Homo sapiens
actaacacggtttttattgacagagctctgatagttgttccttgtgcagaaggtataattgacagcactgtctcagaccaacgccaggttgtagctgtaa

SEQ ID NO: 225236 - DNA, 74 bp, Homo sapiens
gctgcaggcgccgccgccggacgtcggcaacggagaaggaattatccagactgccttgccactagatgaatgga

SEQ ID NO: 225237 - DNA, 90 bp, Homo sapiens
cttcgacagctacacaaatctggaacgggtggccgattactgcgagaacaactacatacaggtatattacagctaatactgacacagaag

SEQ ID NO: 225238 - DNA, 90 bp, Homo sapiens
ccggacactttgttattggagaaacatgcagattatatcgcatcctatggctcaaagaaagatgattattctgcgctcctcagaccaccg

SEQ ID NO: 225239 - DNA, 100 bp, Homo sapiens
catcgtcaagaccatcatcactttcattgtctcggacgtgcggggcctgggcctcccggtccgcaagcaggatgtttcaccaaggaaatattgagagaga

SEQ ID NO: 225240 - DNA, 74 bp, Homo sapiens
cagctgcggaatttgcggctttggcagtgaagtaagaactctgctagagaggaaatggctgcttcatcatcatc

SEQ ID NO: 225241 - DNA, 54 bp, Homo sapiens
tgcttgggaatctattgtggaaacccaggtcatccgtactttagatcctaaaca

SEQ ID NO: 225242 - DNA, 75 bp, Homo sapiens
cagaggacacgaggcggcgggctggagacatggaccgcggcgagcaagggcttcctgaagaatgagaaggacaat

SEQ ID NO: 225243 - DNA, 97 bp, Homo sapiens
ttccaagtacattctcaggtggagacctttccaagatgagatgggattctccaacatggaagatgatggcccagaagaggaggagtgtgtagctgag

SEQ ID NO: 225244 - DNA, 75 bp, Homo sapiens
atgaatggagcaaaatggcggatcatgtgcagaccattgtggccgccatgagcaacctggtgccccccgtggagc

SEQ ID NO: 225245 - DNA, 104 bp, Homo sapiens
ggcggtggtgtgctcgagcaaccagaaccggagcatggaggcgcacaacatcctcaggtgagcgagtgctgtgctttcatgggcctcttctttatgaagcaaag

SEQ ID NO: 225246 - DNA, 97 bp, Homo sapiens
ctacaaaggctccaccttccacagggtgatcccttccttcatgtgccagacaatgcagatcttcgtgaagactctgactggtaagaccatcaccctc

SEQ ID NO: 225247 - DNA, 82 bp, Homo sapiens
gcgccgcgcacttcgtcatgttcttcgcgccctgaacaagttgaaatcatcgcagaaggataaagttcgtcagtttatgatc

SEQ ID NO: 225248 - DNA, 82 bp, Homo sapiens
gagacatcggcctctgcaggcttgccgaagaagggagccctgggcgctgcctatggcacagccaagagcggtaccggcattg

SEQ ID NO: 225249 - DNA, 75 bp, Homo sapiens
catcaagttgcaagagattccaaccttccagccccttttgaaaggtttttgattggtcaaggagcacatgtaggg

SEQ ID NO: 225250 - DNA, 50 bp, Homo sapiens
ggcactcatgagctcatcgtgcataagccaacaaatggaattttcttgag

SEQ ID NO: 225251 - DNA, 51 bp, Homo sapiens
ggcttcctggcccgaaaggagagcctgaaggaccatcgagacctgttcttg

SEQ ID NO: 225252 - DNA, 96 bp, Homo sapiens
gcagagggtgtgtaataaaatacagatgttccatttaagcagacctcttccatagctgtagctggagcggtaattggagctgttcttgcccttttc

SEQ ID NO: 225253 - DNA, 100 bp, Homo sapiens
aaatcaataaaaatgttatgtcagcgtttggcttaacagatgatcaggtttcagctctgctgtagctgccactgagaagaaggcggtgactccagctcct

SEQ ID NO: 225254 - DNA, 114 bp, Homo sapiens
gggagatggcggcgcgatggagcagcgaaaacgtggttgtagagttccgtgactcccagacaatgcagatcttcgtgaagactctgactggtaagaccatcaccctcgaggttg

SEQ ID NO: 225255 - DNA, 75 bp, Homo sapiens
ccaggacatgtgtgcaaccattggcgtggatccgctggcctcccccattcactggggagaatagaaagaaaacaa

SEQ ID NO: 225256 - DNA, 100 bp, Homo sapiens
gatagtccaaaaactgaagaagatggtggataagcccacccagggcttttttccagacttcaagctcccattccaacagtaagagcttcttccacatcac

SEQ ID NO: 225257 - DNA, 75 bp, Homo sapiens
gtgaattgttctcagtttctcggtttatgtgctcttccagggttgattgtgaaagaaattgggtcttccacctcg

SEQ ID NO: 225258 - DNA, 55 bp, Homo sapiens
gccgaggctgttgctgttgatctgtggagaaagttctgccactaatgaacccagg

SEQ ID NO: 225259 - DNA, 83 bp, Homo sapiens
gcagcgacggggcgctgcctggcccaggcgcacacggaagtgcaaaatgatgcttcaacacccaggccaggtctctgcctcgg

SEQ ID NO: 225260 - DNA, 90 bp, Homo sapiens
cttgccgctatcatacgccagctgagcagtctgaggaacagcggatgaaagagcacccctcattcgaacctaaacattgcctttgcttgg

SEQ ID NO: 225261 - DNA, 100 bp, Homo sapiens
ggcttttccacccctccaggccggctctccatgatgtccttcatcctcaacgccctcacctggtgggaagaagagcgctatcctgaaggcatcaagtgga

SEQ ID NO: 225262 - DNA, 76 bp, Homo sapiens
gaaggcctgttttgaagagaaggggaataagactgcatctgttcatatgaggatctatctggttcaatagatgacc

SEQ ID NO: 225263 - DNA, 75 bp, Homo sapiens
aacatggtagagtggctaagagctaaagatcgaattcagtattatcaactagatgaagtctttgtttttccatat

SEQ ID NO: 225264 - DNA, 116 bp, Homo sapiens
ccagaaggaagatggcggatctggaggagcagttgtctgatgaagagaaggtacttcgtactggatttcgaggctggcatcctgcagtattttgtgaatgagcaaagcaaacacca

SEQ ID NO: 225265 - DNA, 107 bp, Homo sapiens
cagaatggtcaggaagagttgttcctagacaatgagatgagtcttcctctggaaaacacaagggtacacatctttctggaatgactgcatatcatcaggcctgcgag

SEQ ID NO: 225266 - DNA, 100 bp, Homo sapiens
acttctatgagcttgtggaagacacaaaagatggcatctggctggttcagcccctcacaatctcctcaactgtttcatgatgacacccattcaagaatag

SEQ ID NO: 225267 - DNA, 51 bp, Homo sapiens
ctgttacatacatttcagaaacagactgccttccgggaaaatctggatgct

SEQ ID NO: 225268 - DNA, 80 bp, Homo sapiens
gctgggtctggagacgccgtggcagcctgaacggagtgtgcgacggattgggaggctgatcagctgaccgaagaacagat

SEQ ID NO: 225269 - DNA, 87 bp, Homo sapiens
cgggtgcatccagtttctgcgcccaggtctgagcagagggcggggtgcaggcggaatggccctcgtgccctatgaggagaccacgga

SEQ ID NO: 225270 - DNA, 98 bp, Homo sapiens
cggagcccttgatgacgagggccacagtgggattaaaaagaccactgaggagcaggtgcaggccctgctgctcctgggggccgccgccctggcctgcc

SEQ ID NO: 225271 - DNA, 124 bp, Homo sapiens
ccgaactccgcctcgggccaggacccagggggccgccggagggcctgggccgagctgctgggtgctggagaatctggtaaaagcaccattgtgaagcagatgaggatcctgcatgttaatgggt

SEQ ID NO: 225272 - DNA, 80 bp, Homo sapiens
tttgtagaagtggctttgtggaatattcccatctcctgcctcctaatagctttgaggtgtactaatggtcacttgatgtg

SEQ ID NO: 225273 - DNA, 75 bp, Homo sapiens
caaggaagtgactcaaactgtgagaacttcaggtcctcagaatggttggaatgaccctccagctttgaacagagt

SEQ ID NO: 225274 - DNA, 100 bp, Homo sapiens
agaggaggcagctgttgcaatcaaggccatggcaaaataactggctcccagctctcctgccacagctcctcaccccctgaaaatgttcgcctgctccaag

SEQ ID NO: 225275 - DNA, 98 bp, Homo sapiens
acacctggaaggttgctcacctgaaggacgagattgaggagctgcgggccgagatgctggagatgcgggacgtctatatggaggaggacgtgtatcag

SEQ ID NO: 225276 - DNA, 83 bp, Homo sapiens
gtcctggctcttgccctcatcctggttctggaatcctcagttcaagattactgtggcatgatcctccaccattcacactctac

SEQ ID NO: 225277 - DNA, 75 bp, Homo sapiens
aaatcggctggccctactgcaatctactgcactcgagcctcttgttgctgtaccacatagaattcactcaacaag

SEQ ID NO: 225278 - DNA, 98 bp, Homo sapiens
gccagcgagcccaagtactattctcagcccattctcgtgaaggaaatcataggaacgagtctttgggaacgtggtccacccagggatgtaaaactgtg

SEQ ID NO: 225279 - DNA, 150 bp, Homo sapiens
ctcagaggcccggagaacgatgaccaacgcccttcgcaaggcccctcagcacacagctgtcggcttcaaacagacgggtctgaatccagggaaagctattgcagagatcaagaaaatgatggcaacctataaggagaagaaagcttcagt

SEQ ID NO: 225280 - DNA, 100 bp, Homo sapiens
tcctgtgggttcccaaacactaacttgtttccctgggaatttggaggtgggttcgaaaaaccaaggaagtatcgcctggggatgctggaggagaggctag

SEQ ID NO: 225281 - DNA, 101 bp, Homo sapiens
ggctggtagctcggaggtggactggtgcgaggacaactacaccatcgtgcctgctatcgccgagttctacaacacgctttttcctgaaaccaagtacctct

SEQ ID NO: 225282 - DNA, 101 bp, Homo sapiens
gcggagccatggccgaggtgttgcggacgctggccggtttttcgttggaatatacgttgcacatttatggcgattctgagtgtgagggcagacttctgcca

SEQ ID NO: 225283 - DNA, 82 bp, Homo sapiens
agtagcaaaggcaagaaggcaacgacgttccatctgtggaaggacctaccaaccagcgtttgcctcagcatggagggcgggg

SEQ ID NO: 225284 - DNA, 101 bp, Homo sapiens
cgaagttggaagtgtctcttagcagcgcgcggagaagaacggggagccaggtgagaagccctaccactgcaactgggacggctgcggctggaagtttgcgc

SEQ ID NO: 225285 - DNA, 75 bp, Homo sapiens
tggcacttcattggccacctacagaaacaaaatgtcaacaaattgatgggcttcttctcatatcggtaattccac

SEQ ID NO: 225286 - DNA, 98 bp, Homo sapiens
gccccggcctttgccccaatcttgtgtgggcactgaagggggactacaggttcgagagatcaggagaaggtctggggaaaataatccagagatttcca

SEQ ID NO: 225287 - DNA, 83 bp, Homo sapiens
ctcaatatctgtcttcggtggactccttcggcagtccacccaccgccgccgcctcccagcatgtagagcgcatgaagtacagg

SEQ ID NO: 225288 - DNA, 90 bp, Homo sapiens
ttaagaaatctgccccaaagtcttagaactgccccccaggttcgcctaatagtcttggctacttccctacagctgctaatcttagcggtg

SEQ ID NO: 225289 - DNA, 80 bp, Homo sapiens
acgtctgcggaagtgcagctgcctcagttcttagcgcaggcctactctgtgtatgatgaagacattgggtactgtcaagg

SEQ ID NO: 225290 - DNA, 75 bp, Homo sapiens
cacaactcatggcaccgtgcacgtggtcgtcaacaaccagaggcctaacatcgtgtcccagctcagccaagcctg

SEQ ID NO: 225291 - DNA, 100 bp, Homo sapiens
caaatgcgacgtggtcgtggtggggggcggcatctcaggaccaggaactaccaagacgaccaagtcatctgctgtgcccccaggcctccctgtgtatttg

SEQ ID NO: 225292 - DNA, 100 bp, Homo sapiens
gcggggttcgggcgatgctgcagggtacagcagttgcaaggagtttacagtttacaggaacagcacttctggactttatgttctgacgtttatgttggga

SEQ ID NO: 225293 - DNA, 82 bp, Homo sapiens
tcctgagagcccgagcgcccagcgccgcgccgggagggctctgccagcagacagccttggcacacaggcacaagggctggag

SEQ ID NO: 225294 - DNA, 82 bp, Homo sapiens
gttcttgtttgtggatcgctgtgatcgtcacttgaaggatatggccctgaagccacatgagcggaaggagaagtgggagcgt

SEQ ID NO: 225295 - DNA, 80 bp, Homo sapiens
tgggcaagggcaacttcgctgtggtgaagctggggcggcaccggatcaccaagacggagtcgtgagatggagaataaaga

SEQ ID NO: 225296 - DNA, 58 bp, Homo sapiens
tgacaagttcgataaaagtgtgcagaccaaggacatggatttgattgacatactttgg

SEQ ID NO: 225297 - DNA, 74 bp, Homo sapiens
gctctccgggttccccggctcgcggggcccggcgaagggcaggattgaaagaaggtggcaagaggaagaagcag

SEQ ID NO: 225298 - DNA, 100 bp, Homo sapiens
acaagaacaatgggaagttagacatggtggtctgctgggaataaaatatgctttggcagtccgtcagctggcagagaggctgatgacatcgtgaactggc

SEQ ID NO: 225299 - DNA, 100 bp, Homo sapiens
ctgggagcctgaaaactgtgaatggcagggaacgtggtgacaggagaaatggtagaagagcttattctttccggagcagatatcatcaaagtgggagttg

SEQ ID NO: 225300 - DNA, 101 bp, Homo sapiens
acctacaaccacagagctgtcatggctgccatctctacttccatccctgtaatttcacagccccaggaaaggcagcaacaggtggaagctgttgagttgga

SEQ ID NO: 225301 - DNA, 101 bp, Homo sapiens
ctgaggctggccacgcatccgtcctgcaacaatgagcatgtgataaatgagtccctggaacgccagatgcgtgaaatggaagagaactttgccgttgaagc

SEQ ID NO: 225302 - DNA, 100 bp, Homo sapiens
caagttgtaaacctggatccagcagcagaacacttcaactactccgtgatggctgagtggagactgctgcacggactctggaaccatgaacatatttgat

SEQ ID NO: 225303 - DNA, 100 bp, Homo sapiens
ggccaacgacctgtttgagagtgggaacatgacgcaggtgcaggtgtctcttctcgccctggcggggaaggactcagaattcatgattgaagaaatgcag

SEQ ID NO: 225304 - DNA, 123 bp, Homo sapiens
ccaggcttggcaccagcgctgtcactagcgccgcctgctcccgcgggcccgcggacccagctgtcaggcaagcatctacaaatctgaaggacaaaacatggttcaagcatctgggcacaggcg

SEQ ID NO: 225305 - DNA, 51 bp, Homo sapiens
cacggccagatctgccctccagtggccagcatcgaaatgttcagcctttta

SEQ ID NO: 225306 - DNA, 50 bp, Homo sapiens
tatgtcctaaagtaaggtttcaggtttctgggtgtctctggggagcccct

SEQ ID NO: 225307 - DNA, 112 bp, Homo sapiens
aggaccagaagcctttcgcggagaaaaggctgacatgcccgtcctatatgacaggaagatattcctcgtcagcttgtctacattggtctttacctcttccacattgctggag

SEQ ID NO: 225308 - DNA, 75 bp, Homo sapiens
ccaactcagccttcctgcataccctggaccagcagaaacctagagtggcaagccaaaattccttccggatagaat

SEQ ID NO: 225309 - DNA, 100 bp, Homo sapiens
ctcaggtgtaactccacagcgacaagttgtacagactccaaacacagttctctctactccattcagatcctgataacttaagtgactctctcttttccgg

SEQ ID NO: 225310 - DNA, 113 bp, Homo sapiens
ttttgtccctttgcctcatcccaggttgccttggaaaatgccaacgccgtgtctgaaggcaaatgaagaggattcttccagttctctagtgaaggatcacctttttcagcaag

SEQ ID NO: 225311 - DNA, 100 bp, Homo sapiens
cctcagaatatgactctctgcctgaaaatagcgagacaggcgcattctacattctaaaggggagctcagtgaagatagacataaacagtatgaggaattt

SEQ ID NO: 225312 - DNA, 144 bp, Homo sapiens
cctgcctccctccttgtggccctgggaggaagccatggactctaccaagtctgaacccctgaagggatcaccagaggtgctggagaatctggtaaaagcaccattgtgaagcagatgaggatcctgcatgttaatgggtttaat

SEQ ID NO: 225313 - DNA, 100 bp, Homo sapiens
cgctagaactcagttgtgcgttgcggccagtcgccactgctgtacccattcctggcccagtgggtaacaagagaatggttcatttttccccggattctca

SEQ ID NO: 225314 - DNA, 87 bp, Homo sapiens
aggactttaaaacagatctgcgcttccagagcgcagctatcggtgctttgcagattatctgactccagaaaaagaacgcgtacagga

SEQ ID NO: 225315 - DNA, 100 bp, Homo sapiens
ctcctgatctggcctcatctgttccagggaggtgggattgaagttccccaccaccaagttagagatgactgctgtggctgacattttcgaccgagatggg

SEQ ID NO: 225316 - DNA, 101 bp, Homo sapiens
gcggggcggggacctccaaacaaccgactcctttccagttgccaccttccagagaagaggtacgagatgacaagacaaccataaagtgtgaaacctccccg

SEQ ID NO: 225317 - DNA, 73 bp, Homo sapiens
gggaatcgtagtcttcctaggagttgtttttcgttggaatatacgttgcacatttatggcgattctgagtgtg

SEQ ID NO: 225318 - DNA, 83 bp, Homo sapiens
ctcttctgcctcttgatctccgccaccgtcttcaggccagcttccgccctgcgctgccagtctcctacctgcaggccgagctg

SEQ ID NO: 225319 - DNA, 75 bp, Homo sapiens
aagagcgtgactgggttctaaatgtacgtgagggaccagggcgccatgaccgaccagctgagcaggcggcagatc

SEQ ID NO: 225320 - DNA, 83 bp, Homo sapiens
gcaaatactcctgtaaatttgagtgtgagtgacctccattgcagacaggctgaatgtggactttgccttgattcacaaagaac

SEQ ID NO: 225321 - DNA, 73 bp, Homo sapiens
ttttagggtcctttatatagaagggagagtaggaagagcagcgaagaggcacaaaaagagaggagaaggatat

SEQ ID NO: 225322 - DNA, 83 bp, Homo sapiens
ctactgaagagcttatcagagctctacttgggaaagaagaagtttcttgcccaaatgcctggatgtgtctgcttgactttcag

SEQ ID NO: 225323 - DNA, 58 bp, Homo sapiens
tccccaacggggaggccaacgtgaagaacttcaaggactgcatcccgcgctccttccg

SEQ ID NO: 225324 - DNA, 90 bp, Homo sapiens
atctgtaattacagctactccagcaacatcttgtccataaggctgaaccggcaactacgagtcctcggcggaaatcctgcctcatacccc

SEQ ID NO: 225325 - DNA, 50 bp, Homo sapiens
tgtccccagcgacgccttgctaacaaagtgtgctggagaagagaaacgag

SEQ ID NO: 225326 - DNA, 73 bp, Homo sapiens
tgctggacaagaggggtgcggtggatactgacctttgctccggcctcgtgattacaagggccagaagctagct

SEQ ID NO: 225327 - DNA, 100 bp, Homo sapiens
caggcccgccactacctcctggctgccgtgaataggcagcctaaagctactgatctacttcttgcctggaatcccatttgtttggggttggtagaaggtg

SEQ ID NO: 225328 - DNA, 98 bp, Homo sapiens
gatgattgcagaattcacatatttgctcaacaaaatgatcagcctgctgttcatgtacaaggtcaggaacctttgactgcttccatgttggcatctgc

SEQ ID NO: 225329 - DNA, 75 bp, Homo sapiens
cacagtgatgaagaaagtgttagaaacagtagtggagaatcaagatggaaaatggttgatcattatgttagccgt

SEQ ID NO: 225330 - DNA, 98 bp, Homo sapiens
agcctctctcctctgcaacctgataggatttggctacccagcctacatctcctattgacctgaaaagtggttctggaaaagtgtaccaaggccctgca

SEQ ID NO: 225331 - DNA, 90 bp, Homo sapiens
ctggacttggcttccctcaagtctatccgagagtttgcagcaaagatcattgaagattcaagtcaatctgaaagtcccagccagccaagt

SEQ ID NO: 225332 - DNA, 100 bp, Homo sapiens
tggacatagtcagcgagtacacacactatgaagagaagaaagcttctcccagtcactcaggagctaatgacagtttttcaactgctacactggaatggca

SEQ ID NO: 225333 - DNA, 82 bp, Homo sapiens
attaacctggagttaaggaacagatccccggaggagctgagcgggctttggacaccatgaactttgatgtgattaagggaaa

SEQ ID NO: 225334 - DNA, 80 bp, Homo sapiens
ctcggcgctctggttttcggtgggtgtgccctgcacctgcctcttcccccattctcaaacaagttgaaatcatcgcagaa

SEQ ID NO: 225335 - DNA, 100 bp, Homo sapiens
cgcgtgggcacgctgacgcaagacgttcagaggttctctgaggtgcgtcctggctgagagttggagctctccagcaacatgcctgagcagagtaacgatt

SEQ ID NO: 225336 - DNA, 96 bp, Homo sapiens
acggacagactcatggggaagggccaggtccagctccagcagtacccgcggctacgggaggagatggagcgcatcgtgaccacccacatccgggag

SEQ ID NO: 225337 - DNA, 100 bp, Homo sapiens
ggccgcccgcccaacctggtccgctgcctcttcggccatggaagctgccggcagccctgcggctacggagacagggcaccatgccggtggaaaggatgcg

SEQ ID NO: 225338 - DNA, 75 bp, Homo sapiens
agcacctggatgagacatttgctacagcatcccacattaagtcaacggtaaacctagcctttaagcaacctggaa

SEQ ID NO: 225339 - DNA, 100 bp, Homo sapiens
ccccagccgaccttgagctccaggagttcgtctcttacgtctgcggaagtgcagctgcctcagttcttagcgcaggcacctgaaggagatctcggagctg

SEQ ID NO: 225340 - DNA, 100 bp, Homo sapiens
tgatggatccatttctcctattgaggagtcaacgcctccccatggccacccatggaccagtcggcattcacttcctcccttctgcggcccataaaagccc

SEQ ID NO: 225341 - DNA, 75 bp, Homo sapiens
atctacgttccaattggggccgtaccatggcggagaagactcaaaagaggaatactcccccagttgcaagaggcg

SEQ ID NO: 225342 - DNA, 90 bp, Homo sapiens
ttacgtctgcggaagtgcagctgcctcagttcttagcgcagcaggaggccactgtctgcagctcccgtgaagatgtccactccagaccca

SEQ ID NO: 225343 - DNA, 98 bp, Homo sapiens
aagaagtatttgatgtcttagagaaacttggagaaggaccagcatctcagacatgtcgaaaaagatgttttgatccctaaaataatgagagaaaaggc

SEQ ID NO: 225344 - DNA, 96 bp, Homo sapiens
tgacatttaattttagggtcctttatatagaagggagagtaggtggagtgcagcaacaaagacctccattctggggtgtacgggggctcggtgcat

SEQ ID NO: 225345 - DNA, 108 bp, Homo sapiens
ccagagcccaggtgcccagaggactttcttccagcttctgctgtccttctttgtggagagcaaggatgaaaactttcggaagagaaagttgcctgtggtaagttcagt

SEQ ID NO: 225346 - DNA, 100 bp, Homo sapiens
ttgttttaggggccagcagatgcaggaaaatttcgatattgaagtgtcaaaatccatagatggaaaagatggacattctgagcatgtgagacctgaggac

SEQ ID NO: 225347 - DNA, 100 bp, Homo sapiens
gacttcccctccgtggtgacagcctctgggtcctcggtcggtacagtctctgcacctcgcgccccagcagtgatgctacaggacgaagaggaatggataa

SEQ ID NO: 225348 - DNA, 100 bp, Homo sapiens
gccatggcccctgtgctcagtaaggactcggcggacatcgagatctttaatctcatgaagtacgacagctacagccgcttcttaaagtctgacttgtttt

SEQ ID NO: 225349 - DNA, 100 bp, Homo sapiens
cggcaggagccgcggagccggcgctgagaggggctgcggccggagcgggcggctgagacaaaggcgacgaatcacccgaagggataccatttgagttctg

SEQ ID NO: 225350 - DNA, 71 bp, Homo sapiens
aggaatgtggtttatgccatagcattcaacaatccttacgggtacttgctgttctatcacaaacagttcct

SEQ ID NO: 225351 - DNA, 75 bp, Homo sapiens
gcgtccggagtccccgtggccaggaaacctgtccagtttaagtcgtcttggtctgagatataacagactgtcagc

SEQ ID NO: 225352 - DNA, 82 bp, Homo sapiens
agaggatccagtgttcaccatcctggccccggaaggattttttatcaagcagaaatgcatcgaacaacgagaatcaagatca

SEQ ID NO: 225353 - DNA, 100 bp, Homo sapiens
ctgatgagataaagagcacactggaaactgggaatgctttgatggaaattctgcaagtaatggacgctctggctgagtggattttctcaacctgaaaatc

SEQ ID NO: 225354 - DNA, 100 bp, Homo sapiens
tctttgcagtatttatgggagtatgggcatctattgttggggtgatcggacctaacaccaggttgtggggacaacgaagtccagaagagtgaaaggaatg

SEQ ID NO: 225355 - DNA, 100 bp, Homo sapiens
caggcactgaggaggccgagagatgaggccggagcccaccaagttctgggaaggaggagctgtgtattgggaagcaatgcagaaaacaagcctattaaaa

SEQ ID NO: 225356 - DNA, 100 bp, Homo sapiens
cgagaactcccatcagtttctgtatagtgtaaaagatccaggatgagaagactgataaaagaagaagctagctgaacagctgtaaaatgcccaaatctgg

SEQ ID NO: 225357 - DNA, 112 bp, Homo sapiens
ggaagtgcaggcaaagccggctgttaccctgcacagccgtcaccctcaactttcccttcagtccaagtggtaagaagttcagaagcaagcctcagttggcaaggtacctggg

SEQ ID NO: 225358 - DNA, 75 bp, Homo sapiens
gctctcagggatgctggtctggcagtcaggtatttgagagacagctgcagctggctgtgtctctaaagaagccct

SEQ ID NO: 225359 - DNA, 100 bp, Homo sapiens
cagatatacagatgtggagaagaccattaaaaatctcaagtgacgactttgggaaactctggttatccttcgcaaatgatgtgaaacaaaatgtaaaaat

SEQ ID NO: 225360 - DNA, 75 bp, Homo sapiens
aaggccgagaagctctacccactgccctcggcccgcgattctgaagactactttgaggtcaacattccaacagac

SEQ ID NO: 225361 - DNA, 75 bp, Homo sapiens
gcaccttcaaggccaaactatgcaggccaagtataaggagcgagggacggtcttggctgaggaccagctagccca

SEQ ID NO: 225362 - DNA, 90 bp, Homo sapiens
atggccggggacacccagtggtccaggaacccaagacagaccaggatgaggagcattgccggaaagtcaacgagtatctgaacaaccccc

SEQ ID NO: 225363 - DNA, 98 bp, Homo sapiens
tccagggaaggaagcaaagcaaatggagaatggcatgctggtgacggacagtgcagggaagcaactgcagagcagcccactcacccagtgtacaacat

SEQ ID NO: 225364 - DNA, 80 bp, Homo sapiens
agaatttccaaatgaaaatcaagtagtgtttgccagagttgattgtgatcagcactgcattgcggcctcatttgctgtca

SEQ ID NO: 225365 - DNA, 97 bp, Homo sapiens
gtttgcgactcgcggaccggcgtccccggcgcgaagaggctggactcggattcgttgcctgagggccactgctctccaggaagataaggcttttaaa

SEQ ID NO: 225366 - DNA, 89 bp, Homo sapiens
cggctggccctactgcaatctactgcactcgaggttgaaatcacaaagattagacacctttttagataggtgttcttcagcaccactga

SEQ ID NO: 225367 - DNA, 75 bp, Homo sapiens
aaattaaagaacttcagcaaaggcttggagaagtccagggcgacaacaagttgcagaatgaagaagagtctggag

SEQ ID NO: 225368 - DNA, 100 bp, Homo sapiens
gagtttggtcaaagcaaccgaaaaggagagtttcctgaaagttgaagttgatggtagtttaagtgatagccacgtatctcctccagccaaacgcactttg

SEQ ID NO: 225369 - DNA, 83 bp, Homo sapiens
tcgtctccgtgtggcaccgcgagctccgcaaaggcaagtgaaccggagcaaacgacttccgatccagtctgcgctgttgcggc

SEQ ID NO: 225370 - DNA, 76 bp, Homo sapiens
aaggaatcgattgaaatgccgtatatgaagcaacagcatgtcatagaaaccttgattggcaaaaagcaacagatat

SEQ ID NO: 225371 - DNA, 100 bp, Homo sapiens
gattgctactgcacggtgaacctggaccaggaggaggttttcaggaccaaaattgtggaaaagtcactctggctgaccaactgactgaagagcagattgc

SEQ ID NO: 225372 - DNA, 50 bp, Homo sapiens
ctctgttccaaatgctttgctgaaaagagtctcatcgtggaaggcaagag

SEQ ID NO: 225373 - DNA, 100 bp, Homo sapiens
ccagctccagcgccaccttaactccgccctcccccagaaaaaaccgggaagatcctgacggagttcctccagttctatgaagaccagtatggcgtggctc

SEQ ID NO: 225374 - DNA, 132 bp, Homo sapiens
tctacagccaaacatgcaggactctagtaacccgcgaaatgatgggatagcgttgcaaatccttaaaagagtcttaacgttaattggccttggtcctcacagctccaaaaagaaacaggatctcgataagct

SEQ ID NO: 225375 - DNA, 100 bp, Homo sapiens
ggactggcggctgcaactgcctgccgcgccgagggaccgccgggcggcggaaagcagttgagacatttgggaaatgatgaagtgcacattgtttggtcag

SEQ ID NO: 225376 - DNA, 100 bp, Homo sapiens
ggaaacatgctagaattacctggaacttcatcatcatctacttcacaggaattgccatttatgatgattattctccaccgtctaagagaccaaaggccaa

SEQ ID NO: 225377 - DNA, 74 bp, Homo sapiens
gatgtggatgccctcaagtcctggctggccaagttactggagccgatgtgtggaaacaggaagagaactagaac

SEQ ID NO: 225378 - DNA, 90 bp, Homo sapiens
aactgaggacaatggacctgcctgggcatagacttccttaagggaagacttcctgtcccaaaggaagtgaaccgcaagaagaacgatgag

SEQ ID NO: 225379 - DNA, 87 bp, Homo sapiens
gcattactggctatcagaagacagtaccaaagcattgttccagcactttatgagtacacaaggtgacgcatccaaagaagacattga

SEQ ID NO: 225380 - DNA, 101 bp, Homo sapiens
atgttccggattccctggaaacatgcaggcaagcaggacttccgggaggaccaggatgctgccttcttcaagacaatgattgaagctcacgttgatgtcaa

SEQ ID NO: 225381 - DNA, 75 bp, Homo sapiens
agatgatgtgcctgaatctataatgctggagatgaaaggatcgacgagaacgtgctaggagcccagctggacgtt

SEQ ID NO: 225382 - DNA, 100 bp, Homo sapiens
aacagtttctttctgaaacagagaaaatgtcccctgaagacagagcaaaatgctttgaaaagaatgaggcgtccaggtgatcccccaaacagcatgtgct

SEQ ID NO: 225383 - DNA, 100 bp, Homo sapiens
ttagaagggctacccctaataaagcgactcattgagcaggaagtggcggtgcgagggctgctgcacagcgagcggagccgcggtccggacggcagcgcgt

SEQ ID NO: 225384 - DNA, 98 bp, Homo sapiens
ttccatgatgggaagtgacatggtgctgtacttctttgcagtatacaaggactagcagttaatattgacccaatcttatatacgtggctcatctatca

SEQ ID NO: 225385 - DNA, 75 bp, Homo sapiens
gagggagctactctcaggctgcagagatttggaccaggcaagcatggaagcagtagtttcacttctagctggtct

SEQ ID NO: 225386 - DNA, 100 bp, Homo sapiens
ctgtaccctcccccgggagagcaagccgggcggcctgccccgccggagcagcatcatcaagtcaggtcaattcagtgaagatatgatacccacagtgggc

SEQ ID NO: 225387 - DNA, 50 bp, Homo sapiens
gccgagtcgcgcggaggcggaggcttgggcctcgccgctcctgctatttg

SEQ ID NO: 225388 - DNA, 75 bp, Homo sapiens
tggcattgacctctcagatcccaaacaactggcagaatttgctagtactaaggctcgtacgtctgcatcgattat

SEQ ID NO: 225389 - DNA, 88 bp, Homo sapiens
cggagcccagagccggttcggcgcgtcgactgcccagagtccgcggccggggcgcgggaggtatgagaagatgatcagtggtatgtac

SEQ ID NO: 225390 - DNA, 134 bp, Homo sapiens
gaaggaactttgggtcctgaatcttctgggagctgaggaaccagatatcttgaaaagctgccagaaaggcctccccatggccacccatggaccagtcggcattcacttcctcccttctgcggcccataaaagcc

SEQ ID NO: 225391 - DNA, 82 bp, Homo sapiens
cgccaccggccgcttctgtcctcgggagttgaccacatttggccatttcccagaagggccccaccccaagggtgagtggcca

SEQ ID NO: 225392 - DNA, 100 bp, Homo sapiens
cgctacaacgcctacccctcagagcaggagaagctgagcctttctggacagaccaacctgtcagtgctgcaaggtgaggtggctttgaccccgggttgcc

SEQ ID NO: 225393 - DNA, 74 bp, Homo sapiens
gctggctgaagatggctactctggagttgaggtgtattccagagcaaatgaaaaagagccttgctgttggtggt

SEQ ID NO: 225394 - DNA, 75 bp, Homo sapiens
gtttgcagaatctgtcacagagggagatgtcaggtgggagaaagggaccgtttggagggagccattcacctacag

SEQ ID NO: 225395 - DNA, 75 bp, Homo sapiens
ggtgtgaatgatgatgaaagtccaagcaaaatttttatgttacaatgccatcaagtcatataaaacagaaggaag

SEQ ID NO: 225396 - DNA, 90 bp, Homo sapiens
tcctgtagcttccgagtcctggtggtgtcggccaagttcgaggggaaaccgctgcttcagagacacaggcactttgaggtgaatgaccgg

SEQ ID NO: 225397 - DNA, 98 bp, Homo sapiens
ttctggaaggtttcctgtggagatagccaaataaccttctgttcggtgatgaaattatcactaatggttttcattcctgtgaaagtgatgaggaggat

SEQ ID NO: 225398 - DNA, 100 bp, Homo sapiens
tagcttgccaaaccaggttgcatttcctgaaggggaagagcaagatgcagtcagtggaggaatgtcgttgtctgctgggtcttcccctcttcattccccc

SEQ ID NO: 225399 - DNA, 100 bp, Homo sapiens
tactccagtccttttccatgcactggaggagagacaccaaatggattgcttctgactccgagtccactgctctccagcatacatttctggagcagcctta

SEQ ID NO: 225400 - DNA, 100 bp, Homo sapiens
gtctctatgaatgtgactaccctggttacctcatatgttttgcactgattgcaaaaataaagtcctccgagcatacaatatccttattggtgaacttgac

SEQ ID NO: 225401 - DNA, 98 bp, Homo sapiens
caaggtacccaatgcctgtttattcaccatcaacaaagaagaccacacactgggaaacatcattaaatcggccatgaagcccccaggaggagaatcga

SEQ ID NO: 225402 - DNA, 98 bp, Homo sapiens
ctggagaacaaacactcgccctctaccaggtgcaaagcgtagaaggttttcctccaaaccagttgtactcacagaagcccagaaacaacttatgatat

SEQ ID NO: 225403 - DNA, 75 bp, Homo sapiens
atgacaccagcgcagctctcttgatttcacacattgtgcaatgtctctaattaacagaagatggcaaagcccagc

SEQ ID NO: 225404 - DNA, 113 bp, Homo sapiens
aaggaaaagatccctggaatatgaagagacacagtatggtagccacacccccaggtgccagcgagatttcagattcctgtaaacctctaaagaaaaggagtcgcgcctcaact

SEQ ID NO: 225405 - DNA, 90 bp, Homo sapiens
tggaccccgcgagcaccagagtcggcgtaactatcgcctgacagggtttaccaaagatgcaggtcattaggaactattctggaacaccac

SEQ ID NO: 225406 - DNA, 80 bp, Homo sapiens
acatcctgtcacaggccatgctctggcaaaaacgcctggtctccaagtcctctcctaagaagcctcgtggacgtaacatc

SEQ ID NO: 225407 - DNA, 83 bp, Homo sapiens
tgagctggagctgcccggctcggcagcgggaaggctggcgcccatgcggctctacacgctctccaagcgccactttgtcctcg

SEQ ID NO: 225408 - DNA, 100 bp, Homo sapiens
agaaaacagttacaggacatagcaactctggctgatcaaagaagagcagcccatgggtgaagcaagaagcatttcatttgcacatctttcttggacttgg

SEQ ID NO: 225409 - DNA, 50 bp, Homo sapiens
gttcagccccgggtcactccacttggccaaacgtaccaagaaagtcggga

SEQ ID NO: 225410 - DNA, 90 bp, Homo sapiens
gtatcaaggcaaaacggagaagcacgagtcccagaaagggtgtcgtagtcattcttcagcacaattcttaattggagaccaagaaccctg

SEQ ID NO: 225411 - DNA, 88 bp, Homo sapiens
cacttcatagcttcggggatggtcaatcaggaaagtaatggaccagtgaaggtgtggggaagcattaaaggactgactgaaggcctgc

SEQ ID NO: 225412 - DNA, 83 bp, Homo sapiens
ctaaactctgaaaccagcacaaaggacttgaaagaggagattgatattcgactctccagggttcaggatatcaagtatgagcc

SEQ ID NO: 225413 - DNA, 75 bp, Homo sapiens
agcggagctgacacagccaatgatcctggtggagggattgaaatgtctgagttcatccgagaggccacaccccca

SEQ ID NO: 225414 - DNA, 100 bp, Homo sapiens
ggcccgagcagcgattctgtcctgcagagtacagttgtgaatttggctccgcgaagtattatgcactgtgtggctttggtggggtcttaagttgtggtct

SEQ ID NO: 225415 - DNA, 100 bp, Homo sapiens
ctcccctgagtaagagtcagccagccgcggatggggagcgtgagtggcgagaaaatggtgtgaatggaacattaacttcaaatgtagcagactctccccg

SEQ ID NO: 225416 - DNA, 90 bp, Homo sapiens
ctggatagtcgccgtcaggcactgaggaggccgagagatgaggccggagcccaccaagttctgggaactctgctttcccagcacgctgcc

SEQ ID NO: 225417 - DNA, 100 bp, Homo sapiens
acaaatttgacaaagaagaatataggaaaaaaattaaggcaaagcatcggggtgtgggccgaagatatgctcatgtggtgttgaggaaagcagacattga

SEQ ID NO: 225418 - DNA, 76 bp, Homo sapiens
atgtgcatactcacagagttagagagagggatggtgcttagcagtgtctgcaaaaacgaatcttttcctacaacct

SEQ ID NO: 225419 - DNA, 90 bp, Homo sapiens
cacgggccgccgcatccacagctaccgagtgtacagctgcagctatcaaggctataagagaaagtggaatgaatctgaacccagaagtgg

SEQ ID NO: 225420 - DNA, 74 bp, Homo sapiens
gcgaagaggctggactcggattcgttgcctgagacctgtcgcgaaatcgcctttcagaaattcctatagaagca

SEQ ID NO: 225421 - DNA, 100 bp, Homo sapiens
agaagctgcagccgcacctggccaaggaccccttcttcaggagcgcccagccctggatcgcggccctggcagggaccctgcctatctcgttgctgcttct

SEQ ID NO: 225422 - DNA, 83 bp, Homo sapiens
cgctgagtggtttttcggatcatgtctggtggctccgcggattataacagctgaagtggtgtgcttgggtcgctgtctactgc

SEQ ID NO: 225423 - DNA, 50 bp, Homo sapiens
ggccgatgcgttgctgcgaacagcataggattaaagcaaggagagccaat

SEQ ID NO: 225424 - DNA, 75 bp, Homo sapiens
tgccggcacctcaaccagatgaggaagtacaactttgagttgctgaacctgtttgcatgagttgctcctgacggc

SEQ ID NO: 225425 - DNA, 100 bp, Homo sapiens
aagaagattaccccaaatttggacttttggatcaggttggtacagaggatataccctccaaaataaatctaaaaaggtatgacttatcattcacttttta

SEQ ID NO: 225426 - DNA, 51 bp, Homo sapiens
gaaatgtcatccgatggcacaatcagagtacatccaagccattatgatgat

SEQ ID NO: 225427 - DNA, 51 bp, Homo sapiens
accgcatgatggtacccaaagtcagatacatcgagatatttccaagcagaa

SEQ ID NO: 225428 - DNA, 82 bp, Homo sapiens
gagggtccccgctcagctcctggggctcctgctgctctggctcccaggtttaatgatcacctctgctgcaatctaccatgta

SEQ ID NO: 225429 - DNA, 98 bp, Homo sapiens
gaaaagctgcaggccggtgctcttgcaactgacgcagtcactgcagcactggtggaacttgagatggagaacttaatgttctggatgatattttaact

SEQ ID NO: 225430 - DNA, 90 bp, Homo sapiens
tggaagcaggactgcgccgcgtcttcctcaagcggggccttttccgaagtggttttagctgaagagaaggcaactggcaagctctttgct

SEQ ID NO: 225431 - DNA, 101 bp, Homo sapiens
cgagcggcgagccggagcgcggagcccggctcccgcaccatggaggaggacgacagctacggtgacaacatccgggaattcttgctgagcctcagatactt

SEQ ID NO: 225432 - DNA, 83 bp, Homo sapiens
agtgagaaatgaacttcaactggttgatcttccaacagttaagtgggcagaccaacatccacctcagcaaaaacttcttcctg

SEQ ID NO: 225433 - DNA, 83 bp, Homo sapiens
atcgcaactgggcccgcgcgcaggtttctgagtcccttcaacatgatcctgggaggaatcgtggtggtgctggtgttcacagg

SEQ ID NO: 225434 - DNA, 74 bp, Homo sapiens
ctgtgatttgctttctcggagcaaaagtgaggataagatcaatgccctcattaaagcagccggtgtaaatgttg

SEQ ID NO: 225435 - DNA, 100 bp, Homo sapiens
aagacgggttcagttcgtcatggggctgtttggaaagacccaggagaagccgcccaaagaactggtcatcctgtacagttctacagcatgaataggcctg

SEQ ID NO: 225436 - DNA, 100 bp, Homo sapiens
aaagctagaagaaaaggtgtacttgcaagaaacctcaggacttgagtaacagcaacatggaagctaaagccaagcaggaaaaggtgtctgctcagtacct

SEQ ID NO: 225437 - DNA, 100 bp, Homo sapiens
cgcctggcacaacctcactgtgctggctacagagctcggatgccggaccagatctctgtctcggagttcatcgccgagaccaccgaggactacaactcgc

SEQ ID NO: 225438 - DNA, 82 bp, Homo sapiens
gagcgcaaggtcgccctcaaggccatgatcaaaacccgcggcgagtcctttgcacatgttggcaacacacgcatccgcatcg

SEQ ID NO: 225439 - DNA, 100 bp, Homo sapiens
tgacttggtggtggagtgtagagatatagttggcaacctcactgagttagaatcagaggctgatctcggctcactacagcctctgcctctctggtccaag

SEQ ID NO: 225440 - DNA, 98 bp, Homo sapiens
ttcggcactgcctatgcccactacctcctcgtgctcagcctggcgccggagctgaaacacgacgtgaaggagtggcaaaattctattcagaagaatgc

SEQ ID NO: 225441 - DNA, 98 bp, Homo sapiens
cgctgaatatcttcaggaaaatgggttccatgagaagtgacatcctcctcgaatcaaaaggaagatgagaatgtgcctactgctcctgatcctccaag

SEQ ID NO: 225442 - DNA, 100 bp, Homo sapiens
ttgcctttagtgcactcttctccttcacagtaaagtggctggtgcctgtggtagccatattgggttcaggtgggggtttccgagccatggtgggattctc

SEQ ID NO: 225443 - DNA, 100 bp, Homo sapiens
gagagtcggagagaacgacggttacatggaaccatatgatgcacagcaaatgataacagcaaaccagtccagctacgggggcccagccagccagcagctg

SEQ ID NO: 225444 - DNA, 100 bp, Homo sapiens
gccaggggctgggggcccacacgccatggagcccgactcccttctggaccaagacgactcctacggctgtacatccttttgaaatcccagagatcttcag

SEQ ID NO: 225445 - DNA, 75 bp, Homo sapiens
ttggagaactacagaaacctcgtctccctggatacactgcctctaggactgggacagatagccactgagtacctg

SEQ ID NO: 225446 - DNA, 100 bp, Homo sapiens
ctacaggaagactcccactccctgaaatctggagtgaagaacgccgccatccagccaccattccaagtcaggacagctgaatgagtacacagaacggaag

SEQ ID NO: 225447 - DNA, 75 bp, Homo sapiens
atgagatcctgttagccaacaaaaaagacttggaggaggcagagggtatctgtaattcttgcccaccaaacaagc

SEQ ID NO: 225448 - DNA, 98 bp, Homo sapiens
ggcggccgagcggggtcagttctctgtagtgtttgccaatgttggagccgtctgcaaagtgtccccggcaagaagccttcaggaggagaactccgtta

SEQ ID NO: 225449 - DNA, 109 bp, Homo sapiens
cgtgaagtgctcgtcaccgccccctcctgccccttcatgcatgcgcggaggccgcctgctagcaagcgggtattcccctacatctcagccatggtgaacaacggctccc

SEQ ID NO: 225450 - DNA, 101 bp, Homo sapiens
ctggcattgacccatagcctggtcctgcattacggtctctataagaagatgatcattgagatggccatcctgcggttcccttacgagtcctgggggacccc

SEQ ID NO: 225451 - DNA, 90 bp, Homo sapiens
gccagttggggcctgccgagcgggccaagaaagtagaggacatgatgaagaagctgtggggtgacaggcaaaggccaggatggaattggt

SEQ ID NO: 225452 - DNA, 88 bp, Homo sapiens
ggtgaatcagtatgttgtgcaagaggtactgtccatcaaacatcttccaccacagcttagagtcttaggaaaagtcctcagtgctgtg

SEQ ID NO: 225453 - DNA, 103 bp, Homo sapiens
ggctggggcccgaggctagcatctctcgggagccgcaaggcgagagctgcaaagcaataggagtgaaacatccacatctgataacacagaaacttaccaagag

SEQ ID NO: 225454 - DNA, 75 bp, Homo sapiens
aaaaccgacctgaggtttcagagcgcagccatcggtgcgctgcagagacaaagcatggaggacacaagaatggga

SEQ ID NO: 225455 - DNA, 50 bp, Homo sapiens
gccgagttgcgtctccctcgcgcgagggccaattcctgtccccccagcag

SEQ ID NO: 225456 - DNA, 75 bp, Homo sapiens
ctgttccttggccatcccaaagctattctgggggcaacagaggtgctcctgacctctgataaagctgcagccaat

SEQ ID NO: 225457 - DNA, 98 bp, Homo sapiens
gagctggcggacatcactttagaccctccacctaattgcagcatggccgaaacagaagccctgtcgaagcttcgggaagacttcaggatgcagaataa

SEQ ID NO: 225458 - DNA, 90 bp, Homo sapiens
gcaaggggcactttgggctaatactctaggttctctgggttctcactctgtcgcccaggcttagggtgcagtggtgccatcacagcttac

SEQ ID NO: 225459 - DNA, 90 bp, Homo sapiens
atgatttcgatgatgatgatcctgaggtgcccctgggcgctgggattgctctagcctgtaagtataatggaaaagatgaggtctgcctga

SEQ ID NO: 225460 - DNA, 83 bp, Homo sapiens
tagacctggaatcgcccaagtccctctactcgcgaggtgtcgtgaaaactacccctaaaagccaaaatgggaaaggaaaagac

SEQ ID NO: 225461 - DNA, 114 bp, Homo sapiens
tgaggatgaagattcaccaaataagctatatactttggttacctatgtacctgttaccactttcaaaagttatgatgtgattgctcaagcccaatctgggactgggaaaacggc

SEQ ID NO: 225462 - DNA, 80 bp, Homo sapiens
agaaatgctggataatttacctgagcatatgagaaattctttcattctccagttacagcaattggaacttgcacagatac

SEQ ID NO: 225463 - DNA, 75 bp, Homo sapiens
gaacagtgctagtgaaagaatgttattctgtcttcacaaatcgaagggtgaacacacaggatttcagaggattag

SEQ ID NO: 225464 - DNA, 101 bp, Homo sapiens
gacgcaggggggatatccacagttcgatcaaggcagttcaattaacctccagaagatggctgaacctgcaggaataccagagcaagaaactgatgtctgac

SEQ ID NO: 225465 - DNA, 74 bp, Homo sapiens
ggcattctcttcaatcatgagagtcccagaagaggcataatagtggatccttgaatgttgaagatgtccttacc

SEQ ID NO: 225466 - DNA, 80 bp, Homo sapiens
acaggtcgcgggagtcgtagggaggacgccgggacacctggaagccgagaaatggaatgccaagcaagatgtcgatgatg

SEQ ID NO: 225467 - DNA, 100 bp, Homo sapiens
cggacaacgagaaactggacaaccaacggctcaagaatttcaagaacaaaggccgcgacttggagtgagtctgccaaaaaagaggtggttgctgaagtgg

SEQ ID NO: 225468 - DNA, 87 bp, Homo sapiens
cagcctgctggacatcatcgagaaggtcatactttaaggagcccaagagctttataacataacaaaagaaactgaaatgtctaataa

SEQ ID NO: 225469 - DNA, 75 bp, Homo sapiens
tggctacatctcccggtgcttcacgcggaaatacactctgcgctcctcagaccaccggcaggtgaacagcctgat

SEQ ID NO: 225470 - DNA, 75 bp, Homo sapiens
cgactcggtgattgaggacaagaccatcgagctcatgcgtcgtctcggagatgcagccaagaaagccatcagtaa

SEQ ID NO: 225471 - DNA, 75 bp, Homo sapiens
ccgcgcccgctggcgtcctcttgttctcttccaggcaaactaggcgtggcaactgctggctgcgtgaatgaagtt

SEQ ID NO: 225472 - DNA, 100 bp, Homo sapiens
ctagtagaaaaagttcttgggacaaacttcatttgaagcctggctacagataagggaccaaaatgactgactcaaaatatttcaccacgaccaagaaagg

SEQ ID NO: 225473 - DNA, 83 bp, Homo sapiens
ctttgagctgcggaccccgagtccagcgggcggcgggagggggacggcaaaacagaacagaaaggcggagataaaaagagggg

SEQ ID NO: 225474 - DNA, 90 bp, Homo sapiens
gaagaatctagacagacaggcctttctaggaattgaatgatctggcacgggaccctccagcacagtgttcagcaggtcctgttggagatg

SEQ ID NO: 225475 - DNA, 50 bp, Homo sapiens
acgcagaccaccagcatcgacatgtgcttttccagaagcctgttaaaagc

SEQ ID NO: 225476 - DNA, 100 bp, Homo sapiens
gcggcggcgcagctcggaacccgccagggtccagggtccaggttccagcgcccggcggcccagattggtttttcagcagcagatgctgtaacaggactga

SEQ ID NO: 225477 - DNA, 98 bp, Homo sapiens
aaatctcgaaggggacctcatgtccctgtgggacacaatgcccccaaggctggctacagcaaacatcattcaagatgtccagcaaagggagcagcaca

SEQ ID NO: 225478 - DNA, 88 bp, Homo sapiens
gaggaggccatcatcatgaaggacgtgcccgactggaaggtcataaaaccccggcgtaagttggcgttccgctcaggagaggcccgcg

SEQ ID NO: 225479 - DNA, 75 bp, Homo sapiens
aggaaagtgtaacatcagttacagagacctctttgtttttagacatgaattggccataatgagactagcagcctt

SEQ ID NO: 225480 - DNA, 90 bp, Homo sapiens
cattgtcactgagattgcttgtggacgcttcctgcctgacacagctcacttcaagaagtgcacaatgtcagaacgtggaattaagtgggc

SEQ ID NO: 225481 - DNA, 80 bp, Homo sapiens
ttgcatgaagctgacgccctcctcttctggctcagcagctaacaggcctcacctcttccattccggagatgatccttgga

SEQ ID NO: 225482 - DNA, 50 bp, Homo sapiens
ggctcccactgattctacattatgacacgaatgcagagtttgagtccaga

SEQ ID NO: 225483 - DNA, 100 bp, Homo sapiens
tcctaggtgccggccgggagggcggccgcagcagatgatgtgatgccagccacttactgtgaaattgatttagataaagaaaagagagatgcatttgtat

SEQ ID NO: 225484 - DNA, 101 bp, Homo sapiens
gaatgaacagcagccctctcttcctgcactatgtgctcatccccatgctgccagcctttgaacctggcacagcggatttcggcctggcccgggcctatggt

SEQ ID NO: 225485 - DNA, 74 bp, Homo sapiens
gagaaacatgcagattatatcgcatcctatggctcaaagaaagatgattataccagtactaacacaagccaaac

SEQ ID NO: 225486 - DNA, 50 bp, Homo sapiens
agcctcggaaaagacaccaccagcccttctattatcctcccagtccacaa

SEQ ID NO: 225487 - DNA, 75 bp, Homo sapiens
agcaagatggcggacgagaaggacagggaaggtgaaatgacaatggatgctctgttggctcgattgaaacttctg

SEQ ID NO: 225488 - DNA, 74 bp, Homo sapiens
aggacggcgcggcagagtccccgtacgcctacagtaacggcaaactcagctttcaccagacccaggtgtcccag

SEQ ID NO: 225489 - DNA, 74 bp, Homo sapiens
acagctgcaagctgaaaagtgcctgcaatttgccatttatttgtaataaggtcctcagaatggttggaatgacc

SEQ ID NO: 225490 - DNA, 100 bp, Homo sapiens
cagaggcccaaattgaggcgcaatgatgagaggatgtggtggtctactctgatgtcaatcttgagggctaggtttttcgttggaatatacgttgcacatt

SEQ ID NO: 225491 - DNA, 75 bp, Homo sapiens
gtgccagagcctttattactaaaagatctttaagcaagcgacaatgaaggcattgcggaaaaaatctgttttgct

SEQ ID NO: 225492 - DNA, 90 bp, Homo sapiens
tgctggactacttcttgcggcgcctcggctcctcccaggtggcctcccgcgtgctggccatgaagcggctccagcaggagaaccatgagc

SEQ ID NO: 225493 - DNA, 116 bp, Homo sapiens
gccaaggaaaaactggagagcttcatcaaaaatagtgatagctttgataagtacaaacccgtagtgctgatgaaccaatgacaacatttgttgtctgtaatgaatgtggaaatcga

SEQ ID NO: 225494 - DNA, 75 bp, Homo sapiens
gcccgctcacctgcgctgtgatgcctgcagagctgtggcttaccaggagtggacgcttctcttgtgagccagctg

SEQ ID NO: 225495 - DNA, 107 bp, Homo sapiens
tgctaacaccagatagtggaaagaaaccatgtgctgaaatgtttgacgacactgatggtttggtaacttgggtttttactcctgtaacaactgaaataacaagtctt

SEQ ID NO: 225496 - DNA, 101 bp, Homo sapiens
cttcggcaccatcggcatgcggcccaacgccaagaacaacgacctgaaggagaagaaggagaaggtggaggagaaggcaagccggaaagagcgaaagaaag

SEQ ID NO: 225497 - DNA, 100 bp, Homo sapiens
actgctcatgagcccccgctgctctatgacctgtccaaggaccctgttcccgtgggagccatgaagctgaacgagaggagtgtagcccactatgcactca

SEQ ID NO: 225498 - DNA, 100 bp, Homo sapiens
cgccgcagcctctgcggagccgggctcgggtcgccggagccgcgccccaccccgccagctccagagccacacctgcagccagttacctactgcgagccgg

SEQ ID NO: 225499 - DNA, 100 bp, Homo sapiens
gcatggcttggagcacttcctattccactggattgggaaagaccatggcagtgctcaagtaaagctctttgtgacagggcttttcagcttaaatcaagat

SEQ ID NO: 225500 - DNA, 100 bp, Homo sapiens
aattttccttgatggtcaaaagattaagtgctcaagtaaagctctttgtgacagggcttttcagcttaaatcaagatattcctgctttcaaggaacattt

SEQ ID NO: 225501 - DNA, 50 bp, Homo sapiens
tggaactgatgagacagaggagcactcaagtctggaaaagtttgaaattc

SEQ ID NO: 225502 - DNA, 100 bp, Homo sapiens
caccaggccgccgggggcctgctgcgcccgggacaaccctccatatgataagggagccttcagaatcgaaatcaactttccagcagagtacccattcaaa

SEQ ID NO: 225503 - DNA, 90 bp, Homo sapiens
gctgccctttatccaaatgattatgcttttcatcatgttctactccaaaaatgtgaaccgggtttatgtgattttcgatctgcctaccac

SEQ ID NO: 225504 - DNA, 90 bp, Homo sapiens
atgaccaccaccctcgtgtctgccaccatcttcgacttgagcgaagttttatgcaaggtctctaattaacagaagatggcaaagcccagc

SEQ ID NO: 225505 - DNA, 87 bp, Homo sapiens
gccccggcgggccgcgcctggtgatcggctccttaccagctcacctctcaccgcgcatgtttggagaacctgctaaggctgcctcag

SEQ ID NO: 225506 - DNA, 83 bp, Homo sapiens
agagcctcgcctttgccgatccgccgcccgtccacacccgccgccagccattcaaactcctccccacgacactctgaagcagc

SEQ ID NO: 225507 - DNA, 80 bp, Homo sapiens
ttaaaagatggtcatcagagctcccatggagacattttttcacagtgcagaaatgtctattactgtggtccagagtgcca

SEQ ID NO: 225508 - DNA, 101 bp, Homo sapiens
gaagaggccttagccatcagccccacccacgtgaagagcatgcagcgactgacaattcctcctcgcttcaagaagatgaagaagtagagatggaggccatc

SEQ ID NO: 225509 - DNA, 75 bp, Homo sapiens
gacctggccaattctgacgccctcaaggtcgccaaggaggtggacccccaggatttgatccaggctaccaacgag

SEQ ID NO: 225510 - DNA, 75 bp, Homo sapiens
acttccggtcacgccatcgttgctgccttcttcgtcaagaaaccgaaacttcattgccccttcaatgtgggaatc

SEQ ID NO: 225511 - DNA, 98 bp, Homo sapiens
cgtgctgcccagaatgcccttcgggagcgcaacctctgctccctgcctcgcctcccgcgcgcctaggtgcctgcgactttaattaaagggccgtcccc

SEQ ID NO: 225512 - DNA, 75 bp, Homo sapiens
gcttcagccatcacgaggatgatttcggaacctggagaaaatatgtatcggcaagcagtgtaaacggaggacttg

SEQ ID NO: 225513 - DNA, 75 bp, Homo sapiens
gcctcagccccctgagtagctgggattacaggcacgcgccaccactcccaggcagaaatactcagtgtcctcagt

SEQ ID NO: 225514 - DNA, 75 bp, Homo sapiens
acgatcgggcctacagcagcttcggcggcggcagaggggggtgaagccagccagttttgacaaagtagcaattcc

SEQ ID NO: 225515 - DNA, 100 bp, Homo sapiens
acccgtggattggcaagttattgtatcttgaggacttcttcgtgatgagtgattatagaggctttgctacaacaggaaaggccaatcagaaatagtgttg

SEQ ID NO: 225516 - DNA, 83 bp, Homo sapiens
ccagcagaaacccaatcacatccaaagagtggtactggaaccagggtgactgttggatctgtatggaactcatgtctacctcg

SEQ ID NO: 225517 - DNA, 90 bp, Homo sapiens
ccgagatctcaggggatttggctgacgcctcacaaacctccacattgctgaagaaaaggtgactggtctcatgagccctgaagaatgaac

SEQ ID NO: 225518 - DNA, 100 bp, Homo sapiens
ctccatgaagcagttcctggacttcgacatgccaccactgctctttgaggtgtcatccctggagaatgcttttcagattggaggccatccttggcactac

SEQ ID NO: 225519 - DNA, 100 bp, Homo sapiens
acatagaagaggcacaaaggagttacatcttaacacagtgagatggaagattttcgaggtatagcagaagaatcatttccaagctttctcaccaattcat

SEQ ID NO: 225520 - DNA, 75 bp, Homo sapiens
gctgaagagcgagaaggagcagcgccggcggctggaggattctgtttcactgaggccatctatccgatttcaagg

SEQ ID NO: 225521 - DNA, 100 bp, Homo sapiens
gcaagttcatgaccacattcagtcagctccgaggcttgggaacaatgggccgaggcattgtcatttcttttgcaagggccaggattcctgtgattgctgt

SEQ ID NO: 225522 - DNA, 75 bp, Homo sapiens
ctaagttcctggacattgatccggaggaggattcgcagttcaacatcaaggtgcagagcattgtagaccaaggag

SEQ ID NO: 225523 - DNA, 100 bp, Homo sapiens
tgcttgtcagccagctccgggcccagggagaggcctgtgtgcagttccagcaaatcgctttcaaaaacctggtacagagaaatcgacaaaatgagcagca

SEQ ID NO: 225524 - DNA, 119 bp, Homo sapiens
ctttttcattgcattggcaatttgcaacacagtagtggtttctgctcctaaccaaccccgacaaaagggtggtgacttcacacgccataatggcactggtggcaagtccatctatgggg

SEQ ID NO: 225525 - DNA, 102 bp, Homo sapiens
accagccggcagctccggagctgcccgcgccatgtccgcgcacaatcggggcaccgagctcggtgctggagaatctggtaaaagcaccattgtgaagcagat

SEQ ID NO: 225526 - DNA, 76 bp, Homo sapiens
ccgagcggccgcgagcagagccgcccagccctgccagctgcgccgggacgatgccatggacaatattaccaggcag

SEQ ID NO: 225527 - DNA, 50 bp, Homo sapiens
gtggagccttctcagacccacaggtcctgactctagatcctacgttacac

SEQ ID NO: 225528 - DNA, 75 bp, Homo sapiens
acaggtgaatttaaaggagcagccctggtgtcacctatcagtaaaagtgttcagactgcatcacagtgcttccga

SEQ ID NO: 225529 - DNA, 101 bp, Homo sapiens
ctcagatgcgctgaagctagctaaagaagttgatcctcaaggatgacgtagctttgccaaagacttagaagctaagcagaaaatgagcttaacatcctggt

SEQ ID NO: 225530 - DNA, 75 bp, Homo sapiens
ctcagtttcccacagctatgaatggctcttgcagaccaatttgaagataaaactacatctgtattggaacgcctg

SEQ ID NO: 225531 - DNA, 95 bp, Homo sapiens
aactacctgcactttggggagcctaagtcctggaaacatgccctgaactgtcacagaatgaaaccagcgctcttcagcgtcctgtgtgagatcaa

SEQ ID NO: 225532 - DNA, 90 bp, Homo sapiens
cgctgagactgagcagacgcctccaggatctgtcggcagctgctgttctgaggtgcaggagaacccggggaggaggcccaggctctgctg

SEQ ID NO: 225533 - DNA, 96 bp, Homo sapiens
tcggcttcatgctgtgcagcaagaacccgggcaactgtactcctgatgatattggtctgtgaaaccccgtatggctgctatgttctccaccaaaag

SEQ ID NO: 225534 - DNA, 100 bp, Homo sapiens
cagcagagactgatctttgctggcaagcagctggaagatggacgtactttgtctgactacaatattcaaaagaagttaaaatgcattttgctaatcagtc

SEQ ID NO: 225535 - DNA, 50 bp, Homo sapiens
gcgacatccgagtgcagaacctgcaagcttctggagctatttgacagcga

SEQ ID NO: 225536 - DNA, 101 bp, Homo sapiens
tgctgcccggcgagctggccaagcacgccgtgtccgagggcaccaaggcggtcaccaagtacaccagctcgaagcttcaacgtggaaaccgtggagtacaa

SEQ ID NO: 225537 - DNA, 100 bp, Homo sapiens
tgtcaagcgaagccttgaaaaagctgccctgagacggtgtcccgccgaaagaggagcccaaggtgggcatcaagaccatcaaggtgtactgccagcgcat

SEQ ID NO: 225538 - DNA, 82 bp, Homo sapiens
ccgtgccgcgtctccgcgttcccagcccgggtccccgcgttcacagccccagcgcagtgtggacgaatgtggaacctcgctc

SEQ ID NO: 225539 - DNA, 75 bp, Homo sapiens
tccaacaatggaggccagtggctggtctcaggagcttactccacgggaacagcctctagataatctgagttgttg

SEQ ID NO: 225540 - DNA, 95 bp, Homo sapiens
aatacactaaggatgttggatccaaaagtcagttagtgacagctaatcccagcataattcggcaaagaactatcgtaccatggaaagtattcaga

SEQ ID NO: 225541 - DNA, 74 bp, Homo sapiens
aggatggcgctgtccatgatcgaatgtggacgagtgctcactagcagaaaaaacctgtgtgaggaaaaacgaaa

SEQ ID NO: 225542 - DNA, 100 bp, Homo sapiens
taaagagacacataccaaattggatctatccagcaattaatggatgcctcgaagttgacgtacatatatattcagaaatgttttgccacctgagacctat

SEQ ID NO: 225543 - DNA, 75 bp, Homo sapiens
gccagcgccagctgcagccctggccgcgcactcgcctcagctgagcctggaaagtgaaattcgttattctacatg

SEQ ID NO: 225544 - DNA, 74 bp, Homo sapiens
agaaagtgaacttggcattttagatctaattcaagagtcttttagtcctgctatacagctgcaccttgtacatc

SEQ ID NO: 225545 - DNA, 74 bp, Homo sapiens
ggatgttcaagattaagattagagtcaagttgtgtgattaagacagatgcatatgaaacagccaagatgctgtg

SEQ ID NO: 225546 - DNA, 100 bp, Homo sapiens
ccatggttattagagaaagagaaaggatttctaagcaggaactccccaggcaactcatgcagcaattccagaaccccgacttcccacccgaagtagagga

SEQ ID NO: 225547 - DNA, 100 bp, Homo sapiens
tagagcaggccatgattggaccatcccccaatcctctcatcttgtcctacctgaagtatgccattagttcccaggcttttaaggataccggaaaaacacc

SEQ ID NO: 225548 - DNA, 100 bp, Homo sapiens
gaagcaggaggctaagaaagtggtgaatcccctgtttgagaaaaggcctaagaattttggcattgatatcaacaagtttctttggatggtccggattgga

SEQ ID NO: 225549 - DNA, 75 bp, Homo sapiens
gacagaaagctcatggtgcaaattgttatttccagtggactaaagaggatggacatagaacttccacctctgctg

SEQ ID NO: 225550 - DNA, 96 bp, Homo sapiens
aggaaatgagagatgggaggcctctcacaggtgaatctctcctttcttcattccatggacagcaataaggttaccctgaccacatggtgttttccg

SEQ ID NO: 225551 - DNA, 50 bp, Homo sapiens
gtcatcgagtgtgacgtggtgaaagtgtaaacaggaacatcgataagtag

SEQ ID NO: 225552 - DNA, 87 bp, Homo sapiens
cctgtgcagggcagagcaggaggccccccgaggtcagaatgaaggaacgatttccgtagttgaaggagaaacattgtatgtcataga

SEQ ID NO: 225553 - DNA, 98 bp, Homo sapiens
gacggtaacccgtgtgactttgactgggttacaactgatggaaaaccaaaaatcgttgatatcattgatacaacaggaagtggcgatgtgaatactgc

SEQ ID NO: 225554 - DNA, 101 bp, Homo sapiens
gccgcagtaccagacctgggaggagttcagccgcgctgccgagaagctttacctcgctgaccctatgaagaccattgacttcctgaacgacaacattcgaa

SEQ ID NO: 225555 - DNA, 100 bp, Homo sapiens
tcccagaaccttttcactccaaaacaggaaattcaggagtagaggtttaccactcttaggtgactaagcagtatcacaaataaaccctccagcaagttta

SEQ ID NO: 225556 - DNA, 50 bp, Homo sapiens
cgtggaacggctgcttttggaagatatggatcagaaactttcgaagttgg

SEQ ID NO: 225557 - DNA, 98 bp, Homo sapiens
ccggacgcaaagctgtcatcgtgaaggtagatgatgagctggagatcaaggcctactatgcaggccacgtgctgggggcagccatgttccagattaaa

SEQ ID NO: 225558 - DNA, 75 bp, Homo sapiens
cagcatcatgtttggcagctgagtattggagccaggagcctgccatgagatgcctgaggaagtgcaccatggaga

SEQ ID NO: 225559 - DNA, 98 bp, Homo sapiens
ccgcttcgtcctctgcagtcaagacgctgggcgcgtcgaggactgggcggcttacagggagaacacagttggcctccaccgtttctgccccacagaaa

SEQ ID NO: 225560 - DNA, 98 bp, Homo sapiens
ctttagaattaagagttaaaactgtgaaatactttaaaggcatggaagaggagatggttcgtgttacgcagtggccgtttaactggagatccagatgt

SEQ ID NO: 225561 - DNA, 75 bp, Homo sapiens
ccggcaacggctccctctcgggcgactggtaccgcaggaaccaggttccttgtagcttggaatactgggatgaac

SEQ ID NO: 225562 - DNA, 100 bp, Homo sapiens
tacaaagaagtgatgctggaaaatctcaggaatctggtctcattggccctgccaaggtaaccctgctggggtcagttatcttcacattccagcacaccca

SEQ ID NO: 225563 - DNA, 83 bp, Homo sapiens
cgggcgggacatccagcgccaggacctcagtgccattgcccgaaccctgcaggaatgtaatctcaggggcgatataatcaatg

SEQ ID NO: 225564 - DNA, 51 bp, Homo sapiens
gcccaggaccgggaggagatgaagggccatccaggttatgcactagtacat

SEQ ID NO: 225565 - DNA, 76 bp, Homo sapiens
tggcatttacagaaagagtcaacagcagtggcaacaggtggtattaaagataatcaaacattatcaagaagaagga

SEQ ID NO: 225566 - DNA, 82 bp, Homo sapiens
ggagacagcccaaatatcctcggaagagcgctcccaggagaaacaatgaattgccagtttcctatctggaaccgaagctcca

SEQ ID NO: 225567 - DNA, 75 bp, Homo sapiens
cttcaacttgggcttctcgggcaagttctatcatactgtgcctccggagccagcgtggtggccatagacaacaag

SEQ ID NO: 225568 - DNA, 57 bp, Homo sapiens
ctgcgctgttccacctcattcaacttcaggatgctgatgtaccagcaccagagggtg

SEQ ID NO: 225569 - DNA, 100 bp, Homo sapiens
ggagctggaaactttcccggcaggactatctgctgccaaactcttgactgaatatggcgttagtgttttggttttagaagctcgggacagggttggagga

SEQ ID NO: 225570 - DNA, 100 bp, Homo sapiens
ctgaactcttcagataatcagagtggaggaagtacagccagcactcaacgggacccaggtggagtctgtacagctcaaagtcaacatagcccgaaaacag

SEQ ID NO: 225571 - DNA, 82 bp, Homo sapiens
aatgattgaatctggtgttatcaacttaaaagatgccacctctaagttactatgcgagtcagaagaaaacatttgaaattaa

SEQ ID NO: 225572 - DNA, 75 bp, Homo sapiens
gatgaaatagatctctcggctctgaggctggtgaattctatagccaagacgtatgttggaacaaatgcttatatg

SEQ ID NO: 225573 - DNA, 75 bp, Homo sapiens
tgggattctggccgaccctcgccttccttctctgcagcttccccgcagaacaccttccaccatgaccacctcagc

SEQ ID NO: 225574 - DNA, 90 bp, Homo sapiens
gagctatttcagaactgttctcaggactcattattttaacatttgggagaaacacagccagaagccagagactgctgctactttgaaacg

SEQ ID NO: 225575 - DNA, 97 bp, Homo sapiens
ctcagaagcatgtgtcttccccagctctgcagccacatactatccgtttgttcaggaaccaccagtgacagaatccctttgatttgaatcataatct

SEQ ID NO: 225576 - DNA, 100 bp, Homo sapiens
cgagaagatgagctcagaggtggtggattcgaatccctacaggagcaggacatcgagactttacatggctctgttcacgtcacgctgtgtgggactccca

SEQ ID NO: 225577 - DNA, 101 bp, Homo sapiens
ggaggcaggacgtgcccggccccgcgtcgtctggcgccgccgccgccagcgcggaatcctatccatcttcttcaccgatatggtttgtggattctgaagac

SEQ ID NO: 225578 - DNA, 100 bp, Homo sapiens
cctcagtgcattgggtacttcaggaatccaggtgcacccaattcaaggcctgccgttggctatagcaaatgccccaggcttgagtttgaagaaacagaag

SEQ ID NO: 225579 - DNA, 50 bp, Homo sapiens
gggcgtgttccaggctgctctctatgtggaatcccccaaagaaggtaaag

SEQ ID NO: 225580 - DNA, 100 bp, Homo sapiens
cgcgtggctggaagacatggccactccagtcggtgttgagcacggcgagcagtctcaggcctttagtgatgatgtgctcttaaagttccgtacagataaa

SEQ ID NO: 225581 - DNA, 80 bp, Homo sapiens
accttccggagcttctcagaagacagagggttttcttttgagaaagccttgagccgggccatgcttctcacatcttacct

SEQ ID NO: 225582 - DNA, 50 bp, Homo sapiens
aacatagaacctattatgctctatcagcaaagccttctagacaagctcag

SEQ ID NO: 225583 - DNA, 90 bp, Homo sapiens
ggccgcgaaccgcagtatcatgctggccaagaagatcatcattaaggacggaggcacggtaaggaagtggaggattaaatgatttgccca

SEQ ID NO: 225584 - DNA, 100 bp, Homo sapiens
aacattacaaaggaggatgttaaaagttacctgtttcggaatgcttttgtgctgctcacagtcaccgctgtcattgtggtttcacaagactgtaatcagg

SEQ ID NO: 225585 - DNA, 83 bp, Homo sapiens
ctcgctggcaccccgaacgggttgcttcccccgctgcgaggtttttggaagaagctgaccgcctgaaaagaaattataaaaca

SEQ ID NO: 225586 - DNA, 51 bp, Homo sapiens
ggcggcagagagcggggcggcggcaggtgtgaccatgaagctcatggatga

SEQ ID NO: 225587 - DNA, 83 bp, Homo sapiens
tgcgctcttactatgagaccagcaagatgaaagtcctcaagtttgcctgcaagctcgggttcatgacgctctcgatattcctg

SEQ ID NO: 225588 - DNA, 84 bp, Homo sapiens
tgttcgactgctagagccgagcgaagcgtcatcatcagatttgaaatatttaaagtggatacaaaactatttcagcaatgcaga

SEQ ID NO: 225589 - DNA, 99 bp, Homo sapiens
gccagaccagatgggccgcccagctctctcgggactaggcagcttgtacatgcagtggccatgcaaatatctgtcatctgcacacaggaaaatgtttct

SEQ ID NO: 225590 - DNA, 100 bp, Homo sapiens
tcagacctctcatctgccagaatcagaaagaattcatcacactgtcatttaaatcaaacggtattgagatggattgggttatgaaacataatggtccaaa

SEQ ID NO: 225591 - DNA, 99 bp, Homo sapiens
gccaccgccgggaggctgctgtacgacatgctttaacaacaccgagagaacatgtgataaagagtttattatacggagaacggctaccaatcgagttct

SEQ ID NO: 225592 - DNA, 51 bp, Homo sapiens
atcctataacaatgcagtgtataaaggtgctggaaacatgcatgaagagct

SEQ ID NO: 225593 - DNA, 75 bp, Homo sapiens
cccctgaacaacttcttccaaaagaagtcttatctgagatgcctgaggaagtgcaccatggagaggaggaggtgg

SEQ ID NO: 225594 - DNA, 85 bp, Homo sapiens
tggagacttaaatgacaccaagcaaagcctacttagtttagatctccagctgcagaaccttggcctgaaaatgctacattatatc

SEQ ID NO: 225595 - DNA, 100 bp, Homo sapiens
ccgtactgcacatcgtggtggtcggatttcaccacaagaagggctgccaggtcgtggagtcagatttgagtgatgatggcaaagcatctttggtgagcga

SEQ ID NO: 225596 - DNA, 80 bp, Homo sapiens
actcaaaagtcaaccgctgaagagcagcatgtagagcgcatgaagtacaggacaataaagcttcctacacatatcaccag

SEQ ID NO: 225597 - DNA, 100 bp, Homo sapiens
ataaatgttaaactcggagggatcaataatattcttgtacctcatcaaagagccataagtgtgatccttggtgacaggtggaagaaaatgaagaatgaag

SEQ ID NO: 225598 - DNA, 100 bp, Homo sapiens
ctgaaagagtaccggatctgcatgccgctcaccgtagacgagcccgtgatgctgatgagcgagagaagtggatccatgccttagaagaaacaattcttcg

SEQ ID NO: 225599 - DNA, 101 bp, Homo sapiens
gtcgaggattggcactcacagcggcagcgatcaagcaggcagcgggctttgccagcaaaaccgaaacagtccagcacatcctttaaccgggacgctgtgaa

SEQ ID NO: 225600 - DNA, 75 bp, Homo sapiens
aaccatcgcagttggaagcccatggggcagcaatgcaggcggggaccttataactaagacggctcttgacttttg

SEQ ID NO: 225601 - DNA, 100 bp, Homo sapiens
aaagtcatttcccaggctggcggagacatgtatgctctatacaatccataacacttatgatgacattgaaaataaagtcgttgcagatctaggatgtggt

SEQ ID NO: 225602 - DNA, 100 bp, Homo sapiens
tgttggagaactacaggaacctgctttctctcgatgaggataacatccctccagaagatggcagggcctggtcactgaccaagtctcactgcacgtgcta

SEQ ID NO: 225603 - DNA, 75 bp, Homo sapiens
tcaacaaaatggtccacaaaccaagtgggcaaataatggcagttaaaacgtaaaattcatcctgatcagaaaaat

SEQ ID NO: 225604 - DNA, 75 bp, Homo sapiens
ccgagcccatcaaggtgtacggacagatgctggacgagaaccaccacctgatccagtgcatcctggagtaccaga

SEQ ID NO: 225605 - DNA, 102 bp, Homo sapiens
gcagcgcgggaggcaggttccgcacgccacagaccccgcacctggaggaggacttgaaggaggtgctgcgttctgaggctggcatcgaactcatcatcgagg

SEQ ID NO: 225606 - DNA, 75 bp, Homo sapiens
atccagcctgcggagcctgtggggcaggagattatttggtagcaattgaagagaaaaacaaagctacatttctac

SEQ ID NO: 225607 - DNA, 75 bp, Homo sapiens
tgatgctgtggaacttgcaaatcgaagattccaactccacagagtgaccagagagaggacgtggctgaagacacc

SEQ ID NO: 225608 - DNA, 59 bp, Homo sapiens
agacatagacgagggcctttactcccggcagctacctcagaaagtactactacagtaaa

SEQ ID NO: 225609 - DNA, 74 bp, Homo sapiens
gacgacccccattgctgagccagcggagctgcttgtattggtaaaggttttcaaggtgtcatgaaaagatgggg

SEQ ID NO: 225610 - DNA, 100 bp, Homo sapiens
ctggtgttatcaacttaaaagatgccacctctaagaagtctgggccaacggtcacaaaagttgtcactgttgtgacaaccaaaaaagcagttgtggattc

SEQ ID NO: 225611 - DNA, 105 bp, Homo sapiens
attggatttaaaagacagtcctcgtcagcactgactttcagctatggaatcgacggccgaagccctgcagcccacgctacagccggagatgcagctcgagcacgg

SEQ ID NO: 225612 - DNA, 98 bp, Homo sapiens
ctccgcatggtcagtgccatttcgcctttatcgtggtggagtccaccctggctgtgggtttggaaatcccttgtctccaggttgctgggattgacttc

SEQ ID NO: 225613 - DNA, 82 bp, Homo sapiens
ctctttgcatccggagagtggacaagaaatgtgtgctgtatttatggagtttaaagattaatcatcccaaaacattgtttct

SEQ ID NO: 225614 - DNA, 98 bp, Homo sapiens
gttcaccagatcctaaacatgcgaggaagctccatcaaaattgtcaggcatatcatcaaggacttcacagagaatgcagttgtcttgacttcaggtct

SEQ ID NO: 225615 - DNA, 100 bp, Homo sapiens
caagaagcagccgccagttgggatcaaatgtgagcctatggatcaaggacctttattgggcttgaggtcacttcagggcatgcccagttcctggacctgg

SEQ ID NO: 225616 - DNA, 98 bp, Homo sapiens
tcgcgggtccgggagcgcggcggagacgatgcctgagatcagagtcacgcccttggaaacgcttcgttaagggactcaggcagtacgggaagaacttc

SEQ ID NO: 225617 - DNA, 98 bp, Homo sapiens
tgtacaacttccccgcaggcggcgtgggcatgggcatgtacaacaccgacgagataaaccgagactactccttccttgactacatcctgggaggctgc

SEQ ID NO: 225618 - DNA, 83 bp, Homo sapiens
ctccccttggaccgagccgatcgccgcggggcagttcgggccggctgtcctggcgcgttacatgagcatgcagcataccttgt

SEQ ID NO: 225619 - DNA, 100 bp, Homo sapiens
gttacacacccccagctcgaaccgcagcaccccagaaaacccgcctagtgccaagcaaccctccaagatgctagttatcaaaaaagtttccaaagaggat

SEQ ID NO: 225620 - DNA, 101 bp, Homo sapiens
actattcccagcccattttgtaggtggaatgaggtaccatctactgtctccagaggaccgagaagaacttgtagatggcacaagacctagaagaaagaaac

SEQ ID NO: 225621 - DNA, 75 bp, Homo sapiens
tacaaacccatttcagaccaatgccagaggagcaacagcctttctgagaaaagtctacagcattctttctctgca

SEQ ID NO: 225622 - DNA, 89 bp, Homo sapiens
caaacatcacgggacttcgttaaatcagtgcttcggggcacttagcacagcgcctggcgcaaggaagctattttgccagccacttcatt

SEQ ID NO: 225623 - DNA, 100 bp, Homo sapiens
ggccatggcccctcggccccgcgcccgcccaggggtcgctgtcgcctgctgctggctcctcactgaaggacagaataacgggctcccagattcacaagcc

SEQ ID NO: 225624 - DNA, 100 bp, Homo sapiens
cagcagcgtggcctccgccaccgtgcacatccgaatgggtgcccagtcccctggaaggcagtgaaggggacggagacactgactgaggcgatgggagctg

SEQ ID NO: 225625 - DNA, 75 bp, Homo sapiens
cttcacccccaccattgaggcccgcacagcccagtccagctacgacttcccggccgtgctgcgctggttcgcgga

SEQ ID NO: 225626 - DNA, 50 bp, Homo sapiens
caagaaatgggagatgaaaatgcggagcttatcaaatatggagttattag

SEQ ID NO: 225627 - DNA, 101 bp, Homo sapiens
agggtctgcaaagcagctaccaaatgcttattttctgcttccaaaggtccagagcattcagctgtctcaaatgcaggtgcatcatttctggcatggcttca

SEQ ID NO: 225628 - DNA, 100 bp, Homo sapiens
cacacagccatttcctgacttctgctgcatgtgcctgggggagaccagtgtaaatttgatcatgatgcagagatagaaaagaaaaaggaaatgtgtaagt

SEQ ID NO: 225629 - DNA, 83 bp, Homo sapiens
atctggtgaagtggaaaggatggcccccaaaacagtactactggtatgacgagcgggggaagaaggtcaagtgcacggcccca

SEQ ID NO: 225630 - DNA, 75 bp, Homo sapiens
caatgctgaggtccactactccctcctgaaaggtgaaaaaccatttcgctgtgatgaatgtggtatgagattcat

SEQ ID NO: 225631 - DNA, 100 bp, Homo sapiens
tggcagctatttgctgagggacagcgagagcgtgccaggcgtgtactgcctatgtgtgctgtgaatactgctatgcatgaggcaaaacttatggaagaat

SEQ ID NO: 225632 - DNA, 100 bp, Homo sapiens
agattcaaaagttaaattaaagtatcagcatttaataacaaatagctttgtagagacccctcagatatgtgaggaatcaagccataaatgtgcatttgct

SEQ ID NO: 225633 - DNA, 100 bp, Homo sapiens
tgaccaagtacctcaccccaaagacatccacgacagcgatggcagttccagcagcagccaccagagcctcaagagcacagccaaatgggcggcatccctg

SEQ ID NO: 225634 - DNA, 50 bp, Homo sapiens
tcgctctggccgacgagtggagaaactcctgccctccactgactccagag

SEQ ID NO: 225635 - DNA, 51 bp, Homo sapiens
gccatcgtgaaggagctcctggagctggaaacaaagggtcatcctttctag

SEQ ID NO: 225636 - DNA, 100 bp, Homo sapiens
acggcggcgccgcgccgagccacccgcccgcccaaggtctctcgcgggcgggagaacggaaaactcccaacttcctgatcactgtgtccactactatgat

SEQ ID NO: 225637 - DNA, 74 bp, Homo sapiens
agtaaacctaattctgcccttgatgtcacaggatctcttgaaggttgacgccctacgagtggtacagcccacac

SEQ ID NO: 225638 - DNA, 75 bp, Homo sapiens
cctcctctggccaaatgtacctctcacagatacattgataactccatttgtgggtttaatagaccacaacttcca

SEQ ID NO: 225639 - DNA, 98 bp, Homo sapiens
acatacagcactttgtggagaaagtcgtcttccacttgcacgaaagctttcctaggccaaaaagaggccggaaggtggtggtcgtacgctgtgaaggc

SEQ ID NO: 225640 - DNA, 117 bp, Homo sapiens
gttcgtcctcggcggccccggcgccggcaaggggacccagtgcgcccgcatcgtcgaggtttttcgttggaatatacgttgcacatttatggcgattctgagtgtgagggcagactt

SEQ ID NO: 225641 - DNA, 74 bp, Homo sapiens
caagggcgcccttcccctggatacggtcactttctacaaggtacaggtttgcagattccgccagcagcacagca

SEQ ID NO: 225642 - DNA, 100 bp, Homo sapiens
ctgtgaccacccctgaagaaattgcacagatccacaagaaggtgctgtggtggttctccctgcagactctcagcagcgtttggttcagcttgtatatttc

SEQ ID NO: 225643 - DNA, 100 bp, Homo sapiens
gctccgcgcgcctggcggctacatggagagtgtcaggtccttgctgcgaaagtgctcaaccttgtgctgccaaacttgtccctcgggcccatcgactcca

SEQ ID NO: 225644 - DNA, 74 bp, Homo sapiens
ccgccgagggcgagcaggagcgagagtgtgtcgaccgcggcgagtcctttgcacatgttggcaacacacgcatc

SEQ ID NO: 225645 - DNA, 82 bp, Homo sapiens
aaaactggcactgattcaaattcaacagaatcctctgaaacttccacaggtgcggctctatgagtggacaacagagaaggag

SEQ ID NO: 225646 - DNA, 95 bp, Homo sapiens
gcgcagtcggcgccgctgcccatggagggagtggacatcagccccaaacaggacgaaggcgtgctgaaggtggacagcatggaggatgaggtgca

SEQ ID NO: 225647 - DNA, 98 bp, Homo sapiens
gttcctattgggccatcttggctccaccaccctgggtggctacggaccacaacatggataacacgtcaactgtgctgcgggagtggctggtggccgtg

SEQ ID NO: 225648 - DNA, 90 bp, Homo sapiens
gctgctgctgcatgtctaccaggagaggagggaactgcggagcggtttggcagtaatcagtccaaaccagagttcacagtggacctcaag

SEQ ID NO: 225649 - DNA, 96 bp, Homo sapiens
ggcgcgatgcccttcaggaaagggatacccacccaccatcccagggtctacaacatccacagccggaccgtcacccgctatcctgccaactctatc

SEQ ID NO: 225650 - DNA, 101 bp, Homo sapiens
gccgccgagtcgcgcggaggcggaggcttggggtggtggtcggtatgttccgggctcttcgggatcttctaacacactacccacagcagatccttttacag

SEQ ID NO: 225651 - DNA, 75 bp, Homo sapiens
ctactacctgctcctcggctggggtctgagagtcactggagctaccagaagcatcatggggccctggggagagcc

SEQ ID NO: 225652 - DNA, 100 bp, Homo sapiens
tcccggctggtggggaagcctctgcgccgccggcaccatgaggaaaatgtttataggaggccttagctgggacactacaaagaaagatctgaaggactac

SEQ ID NO: 225653 - DNA, 74 bp, Homo sapiens
cattagcctggctcaatatctaatcaatgtcaggccgccacaaaggattttgtggagtcgccccaggcctgacg

SEQ ID NO: 225654 - DNA, 98 bp, Homo sapiens
ggaggagcagtgcttggctccctgcagtttggctacaacactggagtcatcaatgccccccagaagattactgatctctcattacccaactatctgat

SEQ ID NO: 225655 - DNA, 76 bp, Homo sapiens
ggcccggcaccgttccgcggacgtgctcgttgtggaagaaggactctgggaaaatggcctttcctatgaatgtagg

SEQ ID NO: 225656 - DNA, 75 bp, Homo sapiens
gataaagatgcgcctctgcgatttgcaggcaatactgaacactgcgcagcttgcagaggtctcctggcagccctc

SEQ ID NO: 225657 - DNA, 75 bp, Homo sapiens
tgagcgccatggctcactccccggtgcagtcgggcctgcccggcatgcaggtgaagctttgttctaagaatattt

SEQ ID NO: 225658 - DNA, 103 bp, Homo sapiens
cggacagccgcgcgctgagggtctcggggcgggcgccgcgggacctctccgggccatggcttcgagagctgtgcccaggagtgaacaaccagccctacctctg

SEQ ID NO: 225659 - DNA, 90 bp, Homo sapiens
tctctgttccaaatgctttgctggaagtgcacggctgtctataacgtgctgccgggtctcaggatggaggagtgaagtctcctgtcgccg

SEQ ID NO: 225660 - DNA, 74 bp, Homo sapiens
tctgttccaaatgctttgctgggggaaatttgcagtggtgagaaaatgtataaagaaagattctgggaaagaat

SEQ ID NO: 225661 - DNA, 100 bp, Homo sapiens
actctccagaaaggagcaaatcatactctttccatcagtctcaacatagaagtgcttttgaagatgatgatatcacgcacgttgaaggaagtgtagatcc

SEQ ID NO: 225662 - DNA, 111 bp, Homo sapiens
agaagtaccacaacagggacacctggttccagctgcagcacgtggacgctgactcggaagtgcaggtggctattatcatggaaaactaatttttcccagagaatttccttt

SEQ ID NO: 225663 - DNA, 98 bp, Homo sapiens
tgtcaaagacttagcttttaaattaaaaaggaagctattcaccattgaggaagacagagatgtcaatgaccccatgcccaaccgaggcggcaatggac

SEQ ID NO: 225664 - DNA, 76 bp, Homo sapiens
tgggagacagctgccatccactgactcgtaaaatgatgattattccccaccttctaagagacaaagaccaacgagc

SEQ ID NO: 225665 - DNA, 106 bp, Homo sapiens
gctgtcctcccctcacaccagactggggagttcaggatgtgtggtcttctcttcgactacccagtggaaaattgcctaagaattatgacccaaaagttaccccaga

SEQ ID NO: 225666 - DNA, 87 bp, Homo sapiens
ggaggtgaatttccatgtcaacatagtcctgattagaagcccaggacccaggaaggagacacaggaaatttattcaaagtccccacg

SEQ ID NO: 225667 - DNA, 96 bp, Homo sapiens
gcaaaagactgttccaaataaagcctttgaattgaagaatgaacaaacattgagagcaggttggtcaaagaaaaagtgatgtatgaaaaagaggca

SEQ ID NO: 225668 - DNA, 143 bp, Homo sapiens
tgcgtgttgtccacccaagatggagttcctcctggggaacccgttcagcacaccagtggggcagtgcctcggatctcatctggccaccgcgttctggaagaggcgagagggagagcgtgcgcgagaggagagagacggcgggg

SEQ ID NO: 225669 - DNA, 100 bp, Homo sapiens
aacacctgatgtgacacagaactcagagccaagggctgaaccaactcagaatgcattgccattttcacatagatgtgttcagagcaacattgttttgttg

SEQ ID NO: 225670 - DNA, 71 bp, Homo sapiens
tgaccccaaagttgcatttcctcgtcgagcgcaacccaaggtgattgcagtggtcatggacgtgttcacag

SEQ ID NO: 225671 - DNA, 73 bp, Homo sapiens
gatacgaaatgagacttttgaagtgcctttgatttctggcatcttcatgatacagttaagaggaatcttgaca

SEQ ID NO: 225672 - DNA, 82 bp, Homo sapiens
ctgtcgccttccgctacttccgggagctctttgggatccggccagatgattacttggcttcgaacctaatgaacaatcccca

SEQ ID NO: 225673 - DNA, 100 bp, Homo sapiens
cttcagatgatgttgataaagccttacaaaactctccacggttaatgcatgctagaaacacaggttaacctcaccctacagatgaagataatagagcaag

SEQ ID NO: 225674 - DNA, 75 bp, Homo sapiens
gcttaatgaagataaacccaaagaaaccaagtctgaagagaccctggatgagacctaatctgggagcctgcaagt

SEQ ID NO: 225675 - DNA, 90 bp, Homo sapiens
aaaacctggaacagcagcatcattgtcaaagaccgaagccaggacagcacagccgtagcactctcagactctagctcaacgcaggacttc

SEQ ID NO: 225676 - DNA, 51 bp, Homo sapiens
accacggcctgtcagcacgtgtaaaaatgttgtacatcagctctcagtaac

SEQ ID NO: 225677 - DNA, 100 bp, Homo sapiens
ttacagaaagagtcaacagcagtggcaacaggcgtgagattcaacattttggggtgaaaatcagcatagttgaacctggctacttcagaacgggaatgac

SEQ ID NO: 225678 - DNA, 142 bp, Homo sapiens
ccggggccgccttcagccaagcggcctaaactctcatctccggccctctcggcgtccgccagcgatggcacaggtatgggcactaggaaaagacttcttccatcaagcttaattgttttgttattcatttaatgactttccc

SEQ ID NO: 225679 - DNA, 74 bp, Homo sapiens
gccgcagcaacaccaggagaggccgggggcagccgccatcggcagcgccaggactcctcctattttgaggactt

SEQ ID NO: 225680 - DNA, 96 bp, Homo sapiens
tttgaagtatttgacgaaaatagactggttcgagaacttgtcttggacaattgcaaatcaaatgatggaaaaattgagggcttaacagctgaattt

SEQ ID NO: 225681 - DNA, 100 bp, Homo sapiens
tcttccaagtctaatagacctaaagccacagtcttcaagagcccacggacaccacctcaacgattcacagtctgagaatgaggcttcaccagtaaaacgg

SEQ ID NO: 225682 - DNA, 100 bp, Homo sapiens
cctctgctcaagaggaacggcacatgacccaggcctatgccaatcagcatttcacattcctcatggttggttcaaagagagcacgttttcaatatcatag

SEQ ID NO: 225683 - DNA, 82 bp, Homo sapiens
tgacgatcctcaagttcccaagtagaggagaggaagcggcagagggaggcttgggcactgtttaaaggaaagttccgagaag

SEQ ID NO: 225684 - DNA, 90 bp, Homo sapiens
caggctccactaactggggctacgactctgatgggcaggagtcctccctcctgaacctgatctcctatagagcgcagtccatccacccgg

SEQ ID NO: 225685 - DNA, 75 bp, Homo sapiens
taccctcggacgtagcccggcttgtattggtatcaaaggtgcagaatctgggacaagttgcatgaagagcatatc

SEQ ID NO: 225686 - DNA, 101 bp, Homo sapiens
ggaagatgctttctggagagggtgagaccaaggaccaggtagctaactcagcctttgtggaacgtcttcggaaacatggcttagaagtgatctatatgatt

SEQ ID NO: 225687 - DNA, 74 bp, Homo sapiens
tgggcgaagcccaagcccctgtcccctacgtcctacatgagccgtgcagtcggaggtccttgtgcatgaagaca

SEQ ID NO: 225688 - DNA, 90 bp, Homo sapiens
cccgctgcccctgccggcccggccgggtcgggcggcccaggcaaacagaccttgctgactgaaggcaaagactcctccatcccacctgcc

SEQ ID NO: 225689 - DNA, 100 bp, Homo sapiens
aatgctgctgctatgaatatgggtcgaccattccaaaaaaatcggtagccctggtttaccccaacaatgatccagtcatgtttatggtggctttctatgg

SEQ ID NO: 225690 - DNA, 134 bp, Homo sapiens
gggaaggctcaagatggcgtgcttgttggagaccccaatccgcatgagcgtcctttcggctgttgtacagtggcctgattatagctcactgtagcctcgaaattctgggccgaaatgatccgcctgcctcagcc

SEQ ID NO: 225691 - DNA, 100 bp, Homo sapiens
gctgctggacgacacggtgccgctgacagcagccatcgaggcgagccagagcctgcagtcccacacggtcagtcatatgaaattcggatgctggataatc

SEQ ID NO: 225692 - DNA, 100 bp, Homo sapiens
gaaagagaaacccggagggcgccggggtggctattatcatggaaaactaatttttcccagagaatttcctttcaaacctcccagtatctatatgatcact

SEQ ID NO: 225693 - DNA, 100 bp, Homo sapiens
ccatcccttctgctaatccagcaaagaccatgcagggcagtgagaattctgcttggtcagaatcgtgatggcattgtgttcagcactgatgactattttc

SEQ ID NO: 225694 - DNA, 74 bp, Homo sapiens
gcccctcaaggacaacctcggcctgagacaccggaggaccgggttgatgataattagaagcatgctttccactg

SEQ ID NO: 225695 - DNA, 87 bp, Homo sapiens
tgcagagattcttagaagaggaggtgtatcccctgttaaaaccatatgaaagcgtgatgaaggtttactcatttggggagatgccgt

SEQ ID NO: 225696 - DNA, 100 bp, Homo sapiens
gagagttacataattgattctgactttggctgttggtcaacagtgtcataaggtaaaataagccacctggtttccatcgggcctatagttccccactcta

SEQ ID NO: 225697 - DNA, 97 bp, Homo sapiens
tctctccaaatctgaggcctgtcaacgagaaggcctcgaaggagctccagcaagcccagacaaccagaccagaatcgacacaaatccagcctcagcc

SEQ ID NO: 225698 - DNA, 74 bp, Homo sapiens
cgagaacgtgcgggaagagaagatcatcgagcatttcaaacgggaaggctacaacaatccccccatctcaggtg

SEQ ID NO: 225699 - DNA, 97 bp, Homo sapiens
gaggctctgggaaactcagcctgtgaccccagcgtgggtgaagataggatcaagatggccatgtggcagggcctgccgaggaggaactgaagacgaa

SEQ ID NO: 225700 - DNA, 100 bp, Homo sapiens
cacgcggttcctttttgcgagctttccgagtgccaggcgccggccggctgcgaagacgcggtgggccgcccctccgatctttaaatggatgagatggcta

SEQ ID NO: 225701 - DNA, 75 bp, Homo sapiens
tactgttgctgtccgtaaactggaacctctgttcactcaagatgcaggacaagtactccaaaagtggcattgctt

SEQ ID NO: 225702 - DNA, 100 bp, Homo sapiens
gtccacgacaccggctacttctcagctttaccatccctggaggagacctggcagcagggaagcagctcgagagtgtcgtagaaagaagaaagaatatgtg

SEQ ID NO: 225703 - DNA, 75 bp, Homo sapiens
attgtagaacttctctctctgactggaagctgaccctgatcaccagggtgggactggcgctgtcactcttctgcc

SEQ ID NO: 225704 - DNA, 75 bp, Homo sapiens
gtgagaaatcagcatggctcaggtcatgcttcaccccttcctccatctgctgcacctaccactgattctacagat

SEQ ID NO: 225705 - DNA, 98 bp, Homo sapiens
ccagacccctcagcgtctggcatctgatgaaacactagtgcattgtagtctaaatgagctagaagatgcagcacttacttttccagtccttttccaag

SEQ ID NO: 225706 - DNA, 98 bp, Homo sapiens
ttgggtttctttcttaaaggactgatttttagaactccacatttgagcgttacagtgtttctgccacctctgtacaaaagacaattttacttgtgtga

SEQ ID NO: 225707 - DNA, 100 bp, Homo sapiens
gtggggctgcctcgccgcgtctcgccacggtgaaatgacaatggatgctctgttggctcgattgaaacttctgaatccagatgaccttagagaagaaatc

SEQ ID NO: 225708 - DNA, 80 bp, Homo sapiens
agcaagcaactttgagctgcacgttgcacaagatcccagctctcctgttggcttcgtgcttggggtagatcttcttcaca

SEQ ID NO: 225709 - DNA, 82 bp, Homo sapiens
gcaaaggccggggcagacctcctagaaactggagcacccatcctaactgatgatgttagcctgcaggtgttcatggaccatt

SEQ ID NO: 225710 - DNA, 98 bp, Homo sapiens
gggtctcggagtgggagacgtggagtgcaggatccacctctgatgttcactgaagagtaccagaaaagtctgctagagcagtaccatctgggtctgga

SEQ ID NO: 225711 - DNA, 82 bp, Homo sapiens
cttggactgagtcctgcaggacacagatgatgataattccgaagaaggcttccacactattcattcaggaaggcatgaatat

SEQ ID NO: 225712 - DNA, 117 bp, Homo sapiens
ctgggcctcggcttttggtggggagataaaatccattgctgctaagtactccggttcccagcttctgcaaaagttggttcgactatgcaatgagggcgcccggaagatggaaaggac

SEQ ID NO: 225713 - DNA, 100 bp, Homo sapiens
ctcatttcgagtgaccattccaacagatttgattgcctccagtggagatatcatcaaggttgtggagcatggcctgtttgtcaagcactgcaaagtcgag

SEQ ID NO: 225714 - DNA, 75 bp, Homo sapiens
caatcgtgaaaactatattcacaggtgacatcccggaaccgagataatgaccccaatgactacgtggagcaggat

SEQ ID NO: 225715 - DNA, 100 bp, Homo sapiens
ggagtggattgcacagggagattactacgccaagcaccagtgctggaaggaggatttgttggtattgaggaaaacggtgaaatcctttttggctgtttgc

SEQ ID NO: 225716 - DNA, 98 bp, Homo sapiens
gaagactgccctcatccacgatggcctagcacgtggaattcgcgaagctgccaaagccttagacaagctgtgggtgagcgtggaggatgctcagatgc

SEQ ID NO: 225717 - DNA, 83 bp, Homo sapiens
atggacctgtacagcatcaactacctgcactttggggagcctaagtcctgatggactcaccctgtcacccaggttggactgca

SEQ ID NO: 225718 - DNA, 87 bp, Homo sapiens
tggagcccctggaggaagcagccggtccagcctgaggagccggtggggcagggtcctgggcccagtctgccctgactcagcctgcct

SEQ ID NO: 225719 - DNA, 100 bp, Homo sapiens
accagatgttttcccattgttcaaggacaaaggtggcccagaattttccagtgccctgaaaaatagtgtttcccattaaacactaccaggacaaaatcag

SEQ ID NO: 225720 - DNA, 76 bp, Homo sapiens
ctcccccggctcttagactaaggcggggtttcaccatgttgcccagactggtcttgaactcctgagcttaagcaat

SEQ ID NO: 225721 - DNA, 118 bp, Homo sapiens
cgctgtcgggctggccatggcgaggggtgcacggcggccacctgagtggcgcggcggtgtcagagttgcatgctgagaatttgaaaaatgaagatgatgtagacactggactattagg

SEQ ID NO: 225722 - DNA, 80 bp, Homo sapiens
ggagtcatcggacgccagaatctggatgaccgagtgggagacagcagcaccagcggtggcagagaccccagacatcaagc

SEQ ID NO: 225723 - DNA, 100 bp, Homo sapiens
gattttaagatcaaggttccttgatgccaggttcaagggcagacggggtttttgaggaggattcgcaaattgacatagccacagtacaggatatgcttag

SEQ ID NO: 225724 - DNA, 50 bp, Homo sapiens
tgatcctccacttcagagaacagggagacggggtttcgccatgttggcca

SEQ ID NO: 225725 - DNA, 101 bp, Homo sapiens
caacttctgaagacttcaacaaggtggaatatgtgatcaagtgtgacatgtcagctctgcagaagattctgtatcgccatatgcaagccaaggggatcctt

SEQ ID NO: 225726 - DNA, 73 bp, Homo sapiens
ttatgtcatcaagaagaatgacgatggtgagaattatgaagatgatgacctagtaaattctgatgaggttatg

SEQ ID NO: 225727 - DNA, 119 bp, Homo sapiens
gcccgccgcgcggagcgccccttcgcgtcccctgcaccatgagctggggcaccgagctctggacaatgcagatcttcgtgaagactctgactggtaagaccatcaccctcgaggttgag

SEQ ID NO: 225728 - DNA, 74 bp, Homo sapiens
cttaaaagaccctgggaagatgcatgacgacagagatgatggtgtggattattgggccaaaagaggaagaggtc

SEQ ID NO: 225729 - DNA, 88 bp, Homo sapiens
tgggtggtctgtaagccgcggagctaattggagatggtttcacagcacgcagtggcttcgggggggcttggagtacccataatacagt

SEQ ID NO: 225730 - DNA, 102 bp, Homo sapiens
ccggttccccggcccacagtgggggtgtgcaaacccgagagaactgggtgcatgcaatcaagatgattggatcagtgcagtaaggcctgtcatagaaaaaag

SEQ ID NO: 225731 - DNA, 75 bp, Homo sapiens
gggagatcccaggcggtgacagagtggagccatggctagagatgaggagcgggaaggcctcctgcaccctggaga

SEQ ID NO: 225732 - DNA, 113 bp, Homo sapiens
gttggcttcttcatcatccgggccagccagagctccccaggggacttctccatctctgtcaggaactctaatgaatcattgattgaccagcactattttaccagttggaatga

SEQ ID NO: 225733 - DNA, 75 bp, Homo sapiens
ggaaatatacccctgtttcttatatgaattagtaagctgtgtgggctggactactgctgaagagctgtattcatg

SEQ ID NO: 225734 - DNA, 98 bp, Homo sapiens
aagaccatcacctccgtggccatgaccagtgctctgcccatcatccagaagctagagccgcaaaggaaatcctcattgacgattcaatttgttgaagg

SEQ ID NO: 225735 - DNA, 82 bp, Homo sapiens
gtttcctgaaagacttgaggtgacccgcaggaaacaaagttttaaaatcaaagatgggaaaatcggagaaaattgcccttcc

SEQ ID NO: 225736 - DNA, 75 bp, Homo sapiens
cgaaaggggaattagaagtgcttttagaagctgctattgatcttagtaaaaaggtcttatgatgtaatcagcgcg

SEQ ID NO: 225737 - DNA, 100 bp, Homo sapiens
atggacccgccaaatccagaggaggtgaaaacgcctgaagaaggtgaacatgtcaaaccttttaagccagagaaagcaaaagaaattatcatgtctttac

SEQ ID NO: 225738 - DNA, 100 bp, Homo sapiens
ggaattatgtcatccagaaaatcggcgacctcctggttcagcaggactgtccaacccattccggggtctcatgaagctgggcaccgtggagcggcggggg

SEQ ID NO: 225739 - DNA, 75 bp, Homo sapiens
gttgcaagtgacccttattcaagaatatcccaggaaggcccataagatggcctggcctttccttgaaccagtaga

SEQ ID NO: 225740 - DNA, 90 bp, Homo sapiens
cagagagcagcgaaagcagtgaaacttgcagggtcctgatgaagaagctgttgtggatcttggcaaaactagctcaactgtgaacaccaa

SEQ ID NO: 225741 - DNA, 74 bp, Homo sapiens
tctgaacccagaagtggaagggacgctaattcgggtacccattccccagcatgtaatgaatttactacacatgt

SEQ ID NO: 225742 - DNA, 101 bp, Homo sapiens
ctgtgtgggaagaagatttgtaaagaaaactcttaggatgatgatgctgaagctatccttgctgcagacttcgaaattggtcactttttacgtgagcgtat

SEQ ID NO: 225743 - DNA, 74 bp, Homo sapiens
gatcccagacgtggctgcattgtccatgggcttctctgtgaaagaagtgcaggtgatggtcctaccagtgtgtc

SEQ ID NO: 225744 - DNA, 101 bp, Homo sapiens
cttgagcatgaccagaccatgttagataaacttgtggatggacttgctacctcttgggtgaactctagcaattacaagaaaaagcttgtggtgaagggggg

SEQ ID NO: 225745 - DNA, 100 bp, Homo sapiens
gttctaaaggaaggcgtccgttggccttcgtacccgtcttgattgagcacttttccagccattaactccaggctctcgagaatttgaagatgttgtaaat

SEQ ID NO: 225746 - DNA, 100 bp, Homo sapiens
cgtgaccgagagcgcgaatatcgtcatcgttagaagaagaagcagactacagtgcctttggtacagacacgctaataaagaagaagaatgttttaaccaa

SEQ ID NO: 225747 - DNA, 82 bp, Homo sapiens
aaagatttggaatttcagctccatgaaccatttcttctgtatagaaatgcaagcttcttaggaaaagtcctcagtgctgtgg

SEQ ID NO: 225748 - DNA, 100 bp, Homo sapiens
caagagtggcccaaaagagagaatttatctagaggaaaacccagagaaaagtgaaacaattcaggacactgtgaccaagaatatggcccaggtgaccaaa

SEQ ID NO: 225749 - DNA, 51 bp, Homo sapiens
tgggagcgggagctgcggaaagattcaaccctatgaaaagataaaggccag

SEQ ID NO: 225750 - DNA, 101 bp, Homo sapiens
gccctgtgcacccatccaggctgcccagaccaggagagcacaggtcagccggacacatgatgaacgacaaatcctccacccctgggctcaagtccaacaca

SEQ ID NO: 225751 - DNA, 75 bp, Homo sapiens
tgcgggcccgggccatggccgccgccgatgccgagatgtaaaaaaagattggtctgaccatgctctctggtggga

SEQ ID NO: 225752 - DNA, 100 bp, Homo sapiens
tgaagttgaggttcaggaaggattcctgagattccaggaggaagtactggcgaagtgctccatgggtgattttgtagacagaggttactatagtttggag

SEQ ID NO: 225753 - DNA, 101 bp, Homo sapiens
agcacacgcttcttgccaaaaatgctcaacagaagaagagcttgagtttggggccttctgcagctgaaatcaatcaaggtccggtgtctaaaagactatgg

SEQ ID NO: 225754 - DNA, 57 bp, Homo sapiens
aacagagcagcagctacgggcagcagaacccttcttatgactcagtcagaagaggag

SEQ ID NO: 225755 - DNA, 100 bp, Homo sapiens
aacaatatgtccttacaagatgctgaatggtactggggagatatctcgagggtacctatgccaccgtctacaaaggcaaaagcaagctcacagacaacct

SEQ ID NO: 225756 - DNA, 82 bp, Homo sapiens
tcagttggaagcagccgatccagcctgcggagcctgtggggcagcgaagggagcaatctgaccccagcacatcactacccag

SEQ ID NO: 225757 - DNA, 90 bp, Homo sapiens
acagaatggagtggaaaacatgatgttgtttgaagttgttaaaatgggcaagagtgctatgcagactgtctgcaactttacagatggtgc

SEQ ID NO: 225758 - DNA, 92 bp, Homo sapiens
ccgaattcctgtgccacctcctcctttagaaaactgatcttaatacaggtgcgtcagcaatttcctgctcctcttggttggtcaggcactga

SEQ ID NO: 225759 - DNA, 75 bp, Homo sapiens
gaattcgtgtgttgtacagacccttaagacacagcaggatgccaatgcctcttccctcttagacatctatagctt

SEQ ID NO: 225760 - DNA, 100 bp, Homo sapiens
tgaagagcttgaagacacttggctcccttatctgacccccaaagatgatgaattctatcagcagggtttgtgtttagtgaatcagagggatctgcattag

SEQ ID NO: 225761 - DNA, 97 bp, Homo sapiens
ctgggatcggttcctccaggagaagttagcttcagagttctttgtggatggacttgattctgatgagaggaatgatccaggccctgggaggcttctt

SEQ ID NO: 225762 - DNA, 97 bp, Homo sapiens
attgaggattctagtaatcaagcagcagccagagaatgggagtttgcaggtcgaagtaagaaggaaaccaaatattctcttaaggctgtcgaagaca

SEQ ID NO: 225763 - DNA, 83 bp, Homo sapiens
gacatatttttggacctgaaacagaaattctggaacacctatatgtgttcagaatcaagtggatgaagttattgatgtcatgc

SEQ ID NO: 225764 - DNA, 75 bp, Homo sapiens
gccgacaacagcctggcgtccgccacgccttcacctgcatccaagttcatccagggatacctgggagctgtcatc

SEQ ID NO: 225765 - DNA, 100 bp, Homo sapiens
cagacagttccaggaagtgaacaagtccaagaggaccttctgattagtccacagtcttcctctataggtgctggagaatctggtaaaagcaccattgtga

SEQ ID NO: 225766 - DNA, 139 bp, Homo sapiens
gacagtgcctgaacaggtacaagaaaatgcaagacacggtggtactggcccaaggtaaaaaagagcacagtagaatatatatctgttgcagcactatccaaaatatttgctgtcgcagcaacatacccatatcaagtcg

SEQ ID NO: 225767 - DNA, 74 bp, Homo sapiens
agaaactacctcgtctagcatttccaggcattatggatgggacacgagtgggtttggctggattctgaacaaga

SEQ ID NO: 225768 - DNA, 100 bp, Homo sapiens
tagctttaaagcaaagggggctccccctcgagatggaaaagacattccacttcttccatctattacatctctgagtctaaatgaaaatgaagagaagacc

SEQ ID NO: 225769 - DNA, 82 bp, Homo sapiens
ttcctgagccagtgcggggcctggcatggagtgaccctggcaaagatgagagtgcacatttcgtcctgcctgaaggtccagg

SEQ ID NO: 225770 - DNA, 100 bp, Homo sapiens
agcagctataacagtggggagaggagaagatttgacttctgaacatcctttgttagcttcaaaagcagtggactgtcttttggattcaaagtgggcaaag

SEQ ID NO: 225771 - DNA, 75 bp, Homo sapiens
attcagccacgaggaaatcatctacttctgcctggtgtcgaaggtggtgggcagatgccgggcctccatgcctag

SEQ ID NO: 225772 - DNA, 98 bp, Homo sapiens
cgccgctctagcggccgggactctgaactatggcgatgcttctgatgagcagaattcacagtcctcgatggaacattcgatgaacagctcagagaaag

SEQ ID NO: 225773 - DNA, 100 bp, Homo sapiens
gcttgtgcaaagagggttgtccgtgatccacaaggcattagagcatggctttccttaaagtttcccatgtctcaatggactcctgaatataacgagctct

SEQ ID NO: 225774 - DNA, 98 bp, Homo sapiens
aaaagttgaatgatgtatttgatcctgattctacccaagtacatatgatttcagctgcaatggcagtgtatcctactcagtacatgtatctgaagatt

SEQ ID NO: 225775 - DNA, 100 bp, Homo sapiens
gaggcaggcagacttcacagctgagaagtttccagatgaaaagcatcagtgtcattccaggacgtgactgtggaattcagccaggaggagtggcagcaca

SEQ ID NO: 225776 - DNA, 100 bp, Homo sapiens
gctcccacaatggacaagtgtgggatccccagtgtgctccccgaaaggacaggcaagcacatctgggcttcttgtggaggggaaggtagagtgaaagaaa

SEQ ID NO: 225777 - DNA, 71 bp, Homo sapiens
actaggagagtgtccccatccggtgagactttgcagacggtctggaggcggctggtggaaatccaattccc

SEQ ID NO: 225778 - DNA, 78 bp, Homo sapiens
tggaagcgccttagaggagccatttttccagtattcaactccctggacatgtcccgctctgtgtccgtgacggcagca

SEQ ID NO: 225779 - DNA, 101 bp, Homo sapiens
ttggccctcgccggtggcccaccagcttttcctccgcaaccatgtctgacaaacccgatatggctgagatcgagaaattcgataagtcgaaactgaagaag

SEQ ID NO: 225780 - DNA, 95 bp, Homo sapiens
gactgatgaagggaaggaaatcatgtcaagcgaagccttgaaaaagctgccctgagacggtgtcccgccgaaagcacccgacagctacaaagtgc

SEQ ID NO: 225781 - DNA, 82 bp, Homo sapiens
tcgcgtctcggaaaccggtagcgcttgcagcatggtctggtgagctgtaccttctttctggcagtgaatggtctgtattcct

SEQ ID NO: 225782 - DNA, 74 bp, Homo sapiens
caaatattctggtcctgaagatgatgctgctatcagcctggtgatctgtgaaaatggttcgctattcacttgac

SEQ ID NO: 225783 - DNA, 96 bp, Homo sapiens
cagtacctggatctcatcaaaaaggacaccagcaagctgttcaatgaggagcaccacaccccactctggccggagcacgccaagcagctccccatc

SEQ ID NO: 225784 - DNA, 82 bp, Homo sapiens
ccaaggaatttaagagaatacatggttgaaaaaatttacccacaaatacctggacagtcattttgtttactcattcagccct

SEQ ID NO: 225785 - DNA, 100 bp, Homo sapiens
agggaccatgggacactattacgcaacagtctttgaccttctcccatcttccagtcagaggctaaacccaggcgctctgctgccagtcctgacagacccc

SEQ ID NO: 225786 - DNA, 80 bp, Homo sapiens
ctgatgagtcccaggagacgtgctgtgaagtcagcactgtgcttaagctggataacacagtggtggggcagacgtcttgg

SEQ ID NO: 225787 - DNA, 85 bp, Homo sapiens
aactgaatttgcaaaaacatgtgttgctgatgagtcagctgaaaattgtgacaaatcacttatggagtttcactcttgttgccca

SEQ ID NO: 225788 - DNA, 83 bp, Homo sapiens
gaaccaggagaagtttttatcaacaaaggcaaaggattcggatttattaagcttaatgagtccctggaacgccagatgcgtga

SEQ ID NO: 225789 - DNA, 78 bp, Homo sapiens
aagtcaccattggagctcatcagactgaccgtgtcttacatcagttcagagaggtgccgtggccagcacagaagtgaa

SEQ ID NO: 225790 - DNA, 100 bp, Homo sapiens
agagaggcttgtgggaccgtggtgaccaggtgactccgtgcgtgggccaaggcctggcgctggtgccgaggaagctctgtgcccactacacttgggatgc

SEQ ID NO: 225791 - DNA, 97 bp, Homo sapiens
ccgaattcttcccaatctttatcttggctgccagcgagatgtcctcaacaaggtgcgttccatggatgaactgaatcatgattttcaagcacttgct

SEQ ID NO: 225792 - DNA, 97 bp, Homo sapiens
tgcgctgtcttcccgcttgcgtcagggacctgcccgactcagtggttggatggcaagcatgtggtgtttggcaaagtgaaagaaggcatgaatattg

SEQ ID NO: 225793 - DNA, 75 bp, Homo sapiens
gaaaaagaagcgtatggactactatgactctgaacagtttggaattcacccagttgcaggccgaatgcctggtca

SEQ ID NO: 225794 - DNA, 90 bp, Homo sapiens
aagaactatccaccttggcaacataccaccctgtctgttctacgtaaacactttgaggtctatggtaccgttgcttcaggtgatatccag

SEQ ID NO: 225795 - DNA, 98 bp, Homo sapiens
ggggcggcgctgcggccacccggcagcccacaactggagttttatataaagaagataattatgtcatcatgacaactgcacataaagaaaaatataaa

SEQ ID NO: 225796 - DNA, 109 bp, Homo sapiens
gggaagaagcagttcaagtatgggaaccagttgaccaaaatccacacccttatcacagcccagtgccaatggagtccagacggaaggacttgactatgacaggctgaag

SEQ ID NO: 225797 - DNA, 82 bp, Homo sapiens
gagaagcagcgggggggcaggcgatcgaagatctgagtgggacatacttttgaaggatgtgcaatgttcaatcataagtgtg

SEQ ID NO: 225798 - DNA, 98 bp, Homo sapiens
tgcagccgcacctggccaaggggactgctgagatgtcctctattcttgaagagcgtattcttggagctgatacctctgttgatcttgaagaaactggg

SEQ ID NO: 225799 - DNA, 89 bp, Homo sapiens
ccaatggacagcatgcctcaccaagtcacatgacaagcaaaatgggacgtcggtcatcagatactgaagaagaaagcagaagcaagaga

SEQ ID NO: 225800 - DNA, 110 bp, Homo sapiens
cttggctgctctcagcccccaagctggttcccgctgtagcaaacgtccgcggcctctcaggcctgcacagctgaccacagttgggaaacgttgctgtctttggattcagg

SEQ ID NO: 225801 - DNA, 98 bp, Homo sapiens
accccctggtgctgctcagtgtggtggatcatttcaaccgactgtacaatttgttcaaggaatttttgtagaaaaatacgatcctacgatagaagatt

SEQ ID NO: 225802 - DNA, 73 bp, Homo sapiens
cttgactccgctgctcgccatgaaaatatttacaccagcagctccagttcataccaataaagaagatcctgct

SEQ ID NO: 225803 - DNA, 75 bp, Homo sapiens
gggaacccaggccccgccgaggcggccaggttagtgcagcaggtgctggagaatctggtaaaagcaccattgtga

SEQ ID NO: 225804 - DNA, 100 bp, Homo sapiens
caaaaagcataggcggaccatgataatttccccagagcgtcttgatccttttgcagatggtattgttgcagcatctggcagtgagactgaggatgaggac

SEQ ID NO: 225805 - DNA, 96 bp, Homo sapiens
cggcggcgggacaggcttgctgcttcctcctcctcggcctcaccctcttgtagtgagatttctgaccaaacggttcatctgggaatatgatcccac

SEQ ID NO: 225806 - DNA, 50 bp, Homo sapiens
gcagggtggacggtgggctcacgcaaacatgcagatctttgtgaagaccc

SEQ ID NO: 225807 - DNA, 100 bp, Homo sapiens
ttttcagcaagcctatatcacatgtttatgttctatgctccctaatgaagatgctattaaggagatccagctccaggtcccacaggggctcttcttcccc

SEQ ID NO: 225808 - DNA, 90 bp, Homo sapiens
gcgcgagctgcgggcgcgcgagttcagccgcctggcagctttgggccagattatgttgtatgtggatggaatgaatggagtaataaaccg

SEQ ID NO: 225809 - DNA, 50 bp, Homo sapiens
ttgagcaagtcttgaatacgcagaattatatccagatcgagagacagaag

SEQ ID NO: 225810 - DNA, 74 bp, Homo sapiens
ctcgcaagtgttctggtcctggtcgccacacctttttcgtctccccagccttggggccggtgcctcttccgggc

SEQ ID NO: 225811 - DNA, 98 bp, Homo sapiens
aattggaggtatgatgccaccacagccaggcatcccacagcaacaaggaatgagacccccaatgccacctcatgagtgctgatggcagagattggtga

SEQ ID NO: 225812 - DNA, 80 bp, Homo sapiens
cacgatgcacacgccggacttcgcaggcccagacgacgcgcgcgcaccctgggcgctgcctatggcacagccaagagcgg

SEQ ID NO: 225813 - DNA, 51 bp, Homo sapiens
tttaatgtggttggaacaactgagagtacaggggctcaggtccaggtggca

SEQ ID NO: 225814 - DNA, 50 bp, Homo sapiens
aaaatcttcgaagacttttcagtcctcgaggccacacgggttaatcgaag

SEQ ID NO: 225815 - DNA, 154 bp, Homo sapiens
atcaggtcttgtactccaccagtggtgagaatgcatctggaaaatactgtgggaaaacccaaaccatctttctgaagggctggatccagcagggccgtgcttccaggatgaacctgaggaggttcggttggatccatctgacgccgtgtttgtg

SEQ ID NO: 225816 - DNA, 100 bp, Homo sapiens
ggggagttctctgtgtctgtgaagtggctttgtacaagtcagtgccaacgcgcttgctgtcacgggcctggggtcgcctcaatcaggtggagctgccaca

SEQ ID NO: 225817 - DNA, 100 bp, Homo sapiens
gggctccatgagatgcacatcaaatacatgggcagccacatccctgcatgtttgtgtcattagtgaaactggaaaagcaaaatacaaagcctaagatgag

SEQ ID NO: 225818 - DNA, 75 bp, Homo sapiens
ttctcagaggacgccttcaacaccaccttcatctccaccatcgattctggctgtgactcagtcactgacactgag

SEQ ID NO: 225819 - DNA, 58 bp, Homo sapiens
taacccttgatcctcctcctaattgcagaaggacagaataacgggctcccagattcac

SEQ ID NO: 225820 - DNA, 83 bp, Homo sapiens
agtgctttttatttttccccaattcagcagagaatattttcaagggggataacgaaggaggcccaacttcattcaataaggag

SEQ ID NO: 225821 - DNA, 100 bp, Homo sapiens
ccgcgcccggccggacccgggcccgaggcatcaagcagatcctgccacaccagatgaccacggcagggcccgtgctgggtgagggccggggctccgatgc

SEQ ID NO: 225822 - DNA, 79 bp, Homo sapiens
cactcggctcctgtcgtccgttctctcaggctcccgttcaggtgcccgtggttgacacgagctgtgtccccagctgttc

SEQ ID NO: 225823 - DNA, 97 bp, Homo sapiens
ctctgaagcgcacgacctccgactactttctccttcaagggcctcggcttcacaggatggggctgccagtgtcctgggcccctcctgccctctgggt

SEQ ID NO: 225824 - DNA, 98 bp, Homo sapiens
cgtctcggaaaccccgcctcttacagtcacgagaatctgatgttccagcagaaatccaggtgttaaaagaacccctacaacagccaaccttccctttt

SEQ ID NO: 225825 - DNA, 101 bp, Homo sapiens
ggggcagaagggaggatgcagagggagaaacaggtgaggaagaggatggagatgaagatgaggaagctgagtcagctacgggcaagcgggcagctgaagat

SEQ ID NO: 225826 - DNA, 75 bp, Homo sapiens
gaaaaggcaacatcctgtcacaggccatgctctggcaaaaaccctcctttggaaaatctggcaactgtggaagag

SEQ ID NO: 225827 - DNA, 88 bp, Homo sapiens
agattcgcagtggtcgcttcttctccttgttggagtgcttagtgcagttggtgagagcgggagccacactcaacgtctccaccacacg

SEQ ID NO: 225828 - DNA, 76 bp, Homo sapiens
gcactgtcgctgcccgcctgccctgaggagtccccgctgcttgtctccaaacgtccacaactatcccgatatggaa

SEQ ID NO: 225829 - DNA, 100 bp, Homo sapiens
ttcggcgaccacaacatccagtaccagttccgcacagagacaaatggaggacagtcggtcctgaccgccagcctgtcgtacatggtggggatgatcgcca

SEQ ID NO: 225830 - DNA, 98 bp, Homo sapiens
tagactcactgttgtatgtgatccacacgtgtgtgaacacatccgattacgacagcaagcaaacgacagtgatctacccatggaggagggcatggcat

SEQ ID NO: 225831 - DNA, 88 bp, Homo sapiens
accacagaagtagcagatgatgaggttactgaggggactgtgacacagatacagataaactgccagggagaagaatgagaagacagga

SEQ ID NO: 225832 - DNA, 80 bp, Homo sapiens
ggcgacgcgagatggcggcagcttcagcggcggcgatctcaggtgacttaagagattaaaattaatttggttgctgttgg

SEQ ID NO: 225833 - DNA, 50 bp, Homo sapiens
accagcacttcatccagcagtgcacaggttacctgggcttgtatgtgttc

SEQ ID NO: 225834 - DNA, 97 bp, Homo sapiens
ggggcggaaccagcctgcacgcgctggctccgggtgacagccgcgcgcctcggccaggtgtcatggagaaactccagctgggcccagagattctgca

SEQ ID NO: 225835 - DNA, 101 bp, Homo sapiens
aatgaactaaacatagttttggaactagcagatgctggcgacctatccagaatgatcaaggcacgcttaaaaaggcctcttaagagccttgatggtgctct

SEQ ID NO: 225836 - DNA, 74 bp, Homo sapiens
ccactcgttgctgacagtcagaaaaagaagcctgtgaggaggagatatgagccgtatgggatgtattctgacga

SEQ ID NO: 225837 - DNA, 73 bp, Homo sapiens
gattgcacatcactggcagagaactgaggtccaaaattctgcttggtcagaatcgtgatggcattgtgttcag

SEQ ID NO: 225838 - DNA, 82 bp, Homo sapiens
gaagcttctgaaccatccacacatcataaagctttaccagcttttgtctggtcctctgagccccagtgagagtttcctgagg

SEQ ID NO: 225839 - DNA, 100 bp, Homo sapiens
cgagcactcaggggctgttgtggtggccaggatcatgcgaggaggcgcagcagacaggagcggtctgtggctcaggacatccccaagctgcagaaactag

SEQ ID NO: 225840 - DNA, 100 bp, Homo sapiens
tttagttctggggagcgcctcgtcgacatgagtgatgtggaggaaaacaacttcgagggcagaaaaaatagtagtctagtcattcaagtgaaaggtccaa

SEQ ID NO: 225841 - DNA, 74 bp, Homo sapiens
cgcgtgctgcgggtctgctcgggggtctacttcgagggctttatcctgtggataaacgcagagtgaacgagttt

SEQ ID NO: 225842 - DNA, 100 bp, Homo sapiens
gggggagcgactcatggagctgccgtaagttttcggctttgtgagaaaccttaccatcaaacacgatggccagcaacgttaccaacaagacagatcctcg

SEQ ID NO: 225843 - DNA, 75 bp, Homo sapiens
taaagatccaacatcaagtaatgatgacagtaaatctgctcatcatatgcccgaagctcagtggttacggctgtg

SEQ ID NO: 225844 - DNA, 74 bp, Homo sapiens
gccacacctgtcccgtgaccaagagcatccgaagggtggatgaggagcacgagcagcaggtggacatgcaggtc

SEQ ID NO: 225845 - DNA, 84 bp, Homo sapiens
aactagtgatggaaccagaatagaaagggatgatgcaagtacgtttactgactaaactgaaacattagctcttcctggattttg

SEQ ID NO: 225846 - DNA, 83 bp, Homo sapiens
gccgccgtttctggcagggagacaccttccatcggggcagcgacaagatggaatgggtaccacagaccatgtcatcgtcctgg

SEQ ID NO: 225847 - DNA, 74 bp, Homo sapiens
tttggagttcttacaacatggcagacattgacaagggacttgtctttgacacactgtatggaaatcttttgaaa

SEQ ID NO: 225848 - DNA, 51 bp, Homo sapiens
agtactcattcctgtaatagctgtggagcttgaagaaatccgcaaatgtgg

SEQ ID NO: 225849 - DNA, 90 bp, Homo sapiens
tcaaaatcaactgcaagcagccatcatcagtttggaagaagctttgggaaggaagagagaagggcacagttacctaagtatcaacgtaat

SEQ ID NO: 225850 - DNA, 100 bp, Homo sapiens
aagtaagaatgataatggcaaaccagattctgtgggactcctgccgcagaatggaattcggcattgttcctacacagcttctcggcaacatctctatgtt

SEQ ID NO: 225851 - DNA, 100 bp, Homo sapiens
actcagcaaccagctagctactcgagaggtgacttcacttcatgctgcattagaacaagaaagatctaaagtgaaagtattacaagcagagttagccaaa

SEQ ID NO: 225852 - DNA, 49 bp, Homo sapiens
gggactgccttccattgtgaagtctgtaccaaagcagtcagactcacag

SEQ ID NO: 225853 - DNA, 100 bp, Homo sapiens
ctgacattgacagcaaacagagattcgggttctgccgcttatcttcaggagcgaagagctgcttctgtatcttaagtggggacgccctactacatgtcac

SEQ ID NO: 225854 - DNA, 82 bp, Homo sapiens
tggcatccatgtggtttatccagttttctgaaaattgcagatctgatctcttctgaacacctcatcgtgtctccatccctgg

SEQ ID NO: 225855 - DNA, 100 bp, Homo sapiens
aaattcctatcactaaaggatttcctgtcaacaaaaatctctcatttacttcaccaccagcagtttcctcacaacagtctaagttaaagcagtcaaacat

SEQ ID NO: 225856 - DNA, 99 bp, Homo sapiens
gaaagattatgagaaattgcagcagtcacccaaacctggggagaaggtgaccaagaatatggcccaggtgaccaaagccctggacaaggccctgagcac

SEQ ID NO: 225857 - DNA, 100 bp, Homo sapiens
atggaccagcgagagcccctgcctcccgctcctgcaggcctccggtgtggctgtctctgatggtgtcatcaaggtgttcaacgacatgaaggtgcgtaag

SEQ ID NO: 225858 - DNA, 74 bp, Homo sapiens
aagaatatgatccagatgatcatctgatagaagagggggctcgaatggttcgtgaactctttgaaatggccaga

SEQ ID NO: 225859 - DNA, 96 bp, Homo sapiens
atccgtgccatggctggggaccacagcaagtaactggcagaagttttggtgataaagattttcggacaggtttagaaaatggaatcctcctctgcg

SEQ ID NO: 225860 - DNA, 75 bp, Homo sapiens
gtcgcctctgtgctcgtgagtccagggatctaaggcataatcaccagcaacacccgggacaataatacgggggcc

SEQ ID NO: 225861 - DNA, 80 bp, Homo sapiens
aagagcgccttgggacagggggatttggaaatgtcatccgatggcacaatcaggcttagagtgggacctgaatgtgcggc

SEQ ID NO: 225862 - DNA, 96 bp, Homo sapiens
tctttagtttcatctctctataaagttatccaggagccacaaagtgaggatttaagaggggtgcagatcccggaatgcctgaaccaactgttttga

SEQ ID NO: 225863 - DNA, 100 bp, Homo sapiens
acatctctcagccctctcagctgcaccggaccaccaacaggttcatctgcagaagccagcggacgcctctgttcaacttgtgggttacctggctcatgag

SEQ ID NO: 225864 - DNA, 51 bp, Homo sapiens
gtcggcgctcaccatccagttcatccaggttggtgttcgaggaagagacat

SEQ ID NO: 225865 - DNA, 101 bp, Homo sapiens
catgttgtggagggaccctgtggaaggaagtggcagtttttgtctttgataaaaaactgattgacaagtatcaaaaatttgaaaaggatcaaatcattgat

SEQ ID NO: 225866 - DNA, 88 bp, Homo sapiens
agcctaatcaagttcctgtacaaccagaagcgacacaggcatgtgctgataagttgaaaagagaaatagagctgtatggttgcccccc

SEQ ID NO: 225867 - DNA, 90 bp, Homo sapiens
ccaaaattgaaaaaatggttgacctcacccagcttctcagatgaccaagatggtgctgcagatggtgctgaggatggagaacccaccaag

SEQ ID NO: 225868 - DNA, 50 bp, Homo sapiens
ctgtactccttgtctttgcaaacaaacagtattggatgaacgaatatacc

SEQ ID NO: 225869 - DNA, 87 bp, Homo sapiens
gccaagaccagcgcgagggccctgggcaaggcccgacaggtggcgacatgtctaagaatgtgagccagtcacagatggcaaaattga

SEQ ID NO: 225870 - DNA, 100 bp, Homo sapiens
ctgcctatgaccagcaagaggatggggccctggatgagggggaagggcctcaaagccagaaggattggctaaaagatgtgtgtgaaaagaataagtggag

SEQ ID NO: 225871 - DNA, 100 bp, Homo sapiens
aagaaaaggaatcctggaagaagacatgtacaacccagcatcagttacccaagagaatggatcttggagaatgtctgaaagtccatgacctggctttaag

SEQ ID NO: 225872 - DNA, 100 bp, Homo sapiens
tacacccactagtgcctcaggtgcccggccctgtgactgcagccatggccacaggcttagctgttaacgggaaaggactggttgccataaaggaagccca

SEQ ID NO: 225873 - DNA, 75 bp, Homo sapiens
tgccaagcctttaagttttaaggtcggagtaggcaaagttatcagaggagctggagtgcaatggtgcgatctcgg

SEQ ID NO: 225874 - DNA, 80 bp, Homo sapiens
ttccctaagaaggtctgcccaggactcagggttgtgagtcccggcccagcccctccacccccctgcccccccgatgcgac

SEQ ID NO: 225875 - DNA, 100 bp, Homo sapiens
accggccgtggaagcggccaccgactactgtcagcagctgtgccagctgtatgcaggagctattcttgaagtttgtggatgaaaattgggaaggttccct

SEQ ID NO: 225876 - DNA, 98 bp, Homo sapiens
tgccataaaggagttatcatcagaggacaagtccccagagtatttctatgtgggtttgtggcccgcaggtgtccaggatgcaggtgtaaatggacagt

SEQ ID NO: 225877 - DNA, 100 bp, Homo sapiens
aaggttccgcgccgggcgtggacggtgtggggcggtcccggccccgcagggacctcaggatggaaaccagcagcctgcaccgcccgagaaggtcggctgg

SEQ ID NO: 225878 - DNA, 100 bp, Homo sapiens
ctacagaaacctgatcttccttgagtatcctgagctccagctggaccctaaattggatcctcttcctgctgagagtcccctaatgaacattgaggttgtt

SEQ ID NO: 225879 - DNA, 85 bp, Homo sapiens
aaatcatttccatcaataccgggcagcaaatatgaagtctatggaccctgcctcaggttattcaaataacatcctcaccattgat

SEQ ID NO: 225880 - DNA, 101 bp, Homo sapiens
cggaacttttgagaatgccattacaggaaatcagagatggtggttctctcaaaatgattcactttggtctggtgtaaacattaagaaaaaaagaaaactgc

SEQ ID NO: 225881 - DNA, 75 bp, Homo sapiens
ctgagaatgagcggagccgccaaaaatatgctgaggaggagttggagcagtggtatcctgaggtgcggcaccact

SEQ ID NO: 225882 - DNA, 90 bp, Homo sapiens
gcgtccaacatggaccgggagatgatcctggcggattttcagagctggaagtcgagtgtgctactcaactcaggagatttggagacaaac

SEQ ID NO: 225883 - DNA, 100 bp, Homo sapiens
aggcgcctgcttgaagggaggcggcagaagaagacgaagaagcagaagcgtctgctcaggttgcagcaggagagaggatctctctaggagctgacactcg

SEQ ID NO: 225884 - DNA, 90 bp, Homo sapiens
tcagccttccaattttttaagaagcggagagacaagagagacacctccaacttcgacaaagagttcaccagacagcctgtggaactgacc

SEQ ID NO: 225885 - DNA, 89 bp, Homo sapiens
tcatcctgggcatcctcatcgtgctgagagggactcagaggctgccccgttgtctgggggtggccctggcgaaggagctcatcttcacg

SEQ ID NO: 225886 - DNA, 100 bp, Homo sapiens
ccaagacatacaactgaagacaagtgagccagatttcacctctgcaaatatgagagattctgcagaagatatggccgcgtggaaagtgtcaaaattcttc

SEQ ID NO: 225887 - DNA, 100 bp, Homo sapiens
cggagacgggcactgctgctgcccctggggatatgatgcttcctggtgtgtttagtggttggtgccattccaattttctgtgctgaaatcattctgaaaa

SEQ ID NO: 225888 - DNA, 96 bp, Homo sapiens
aggaaacatggcggcggcgggtgttgtgagcgggaagaatctgtcactgcgaaggggatgaagagagccccctcatcacaccctgtcgctgcactg

SEQ ID NO: 225889 - DNA, 99 bp, Homo sapiens
ggggcccccagaagtgatcgctcagctggagaacgcggctaaagttctgatgcttgttctaaagacgaaggggaactccctagtgctacaggctgtttc

SEQ ID NO: 225890 - DNA, 100 bp, Homo sapiens
cggcagtcggatagacaataccacaacaacacattttgcagaggagtctccccaggacagtgctatcacccgggatattaaccgaacattcccagcccat

SEQ ID NO: 225891 - DNA, 80 bp, Homo sapiens
ctaaactctcatctccggccctctcggcgtccgccagcgatggcacagagagatggctgcccaaagattgtcaatctggg

SEQ ID NO: 225892 - DNA, 101 bp, Homo sapiens
gcggcagccctcgctgtcatcctcattgctactgccctctgcgctcctgcatctgcctccccatatgataacaccctatgcccattgtcctgatctgaaaa

SEQ ID NO: 225893 - DNA, 100 bp, Homo sapiens
gatccgcggggagaccttgggcatcatcggacttgacatgcaagaaagcacttcagccaagcagaagggagccagctggacgaggtgcgccaggccatgg

SEQ ID NO: 225894 - DNA, 75 bp, Homo sapiens
tccaagaacaactcctactccttagctttcctggcagggtgtgactgcacagaaaagttacaaaacaaatttgac

SEQ ID NO: 225895 - DNA, 100 bp, Homo sapiens
caggagctgtagagaggaccccggtacatctgaaagccgggaaatgtggagcccacagtgaccatctccccatccaggacagaggccctcaaccaccaca

SEQ ID NO: 225896 - DNA, 98 bp, Homo sapiens
ttattagctttagtgaaatgggctaataatgctggcaaagtggaaaaatgtgcggaggagatgttaaagtaacccatcttgcaggacgacattgaaga

SEQ ID NO: 225897 - DNA, 100 bp, Homo sapiens
tggagatgaagaagaagattaacctggagttaaggaacagatccccggaggaggagaaggccatcagcatttgggagtcaaagaatttcttttttgaact

SEQ ID NO: 225898 - DNA, 100 bp, Homo sapiens
ccagcggctccccgactccttcaaggactactgttttccaaagtgaagttgcagtcactctgccgaggcccggacgaggcactgctgacttgtaagcaca

SEQ ID NO: 225899 - DNA, 110 bp, Homo sapiens
agttaaataaattgcagaagttacttattcttttaagaggtctgcctggttctgggaaaacaacattgtctcggggtagaaatatttctgtcatggctcattcaaagact

SEQ ID NO: 225900 - DNA, 98 bp, Homo sapiens
cccgggtcctcctagaaattccccccgaagaagactcccccacatctggactacagtgactatggtgggaagcttctctccaagacactcaaagtgca

SEQ ID NO: 225901 - DNA, 74 bp, Homo sapiens
gttattcgagtgaccgagaccgcggccgggaccgaggattgagatggccatcctgcggttcccttacgagtcct

SEQ ID NO: 225902 - DNA, 100 bp, Homo sapiens
tccgccgagatgtccggctgcagcagcaagtcccatcggaggacctccctgccctgtataccgagggaacagagcctggtacgtggatggccgcgttctg

SEQ ID NO: 225903 - DNA, 75 bp, Homo sapiens
ctcggatccatctcactgcaatgttttgttccagtctcatcagattttccatgtcctggtggtggcagcagcctt

SEQ ID NO: 225904 - DNA, 82 bp, Homo sapiens
cattctcttgcactctcaaaaggtgcaaagaatcagattcacctcatgctgttactgtatatatgctagagcctcactcctg

SEQ ID NO: 225905 - DNA, 100 bp, Homo sapiens
aaatagaattttctacagaagtcaaggcagtcaagctgcggcgagataggttgcaatgaggtgtcgctgcagcagcatgcacttcttggtagcagaatgg

SEQ ID NO: 225906 - DNA, 72 bp, Homo sapiens
gcgaaggcaacagcttccataaatcctgcttcctgtgcaacagaacaatggcagcccgagtacttataattg

SEQ ID NO: 225907 - DNA, 82 bp, Homo sapiens
aacgcctcttattgatggaagaagactcaagtatagattaaatgattttgaaaaatctctgctcaaagaattcaagcgtctg

SEQ ID NO: 225908 - DNA, 75 bp, Homo sapiens
ggaaaaggcaaaaatcccatctaccgcaactctcagttcgagagtaaagctacgagttccagggagctctgtcct

SEQ ID NO: 225909 - DNA, 75 bp, Homo sapiens
tagtatcggacatgatcctcatcttttatacactcttagtgctgtccaggacacagcattgttggttttgccatg

SEQ ID NO: 225910 - DNA, 75 bp, Homo sapiens
aagatgttgctttaggaaaaccacggaagctgaaggtcttggtgttggtgacctgaaacatatcacgaagctgaa

SEQ ID NO: 225911 - DNA, 98 bp, Homo sapiens
cctcggtcgagcatgttcaccagggcccagagtgtgaacatggctacgcctcttcattcccgtccatgccgagcccccgactgcagcattcaaagccc

SEQ ID NO: 225912 - DNA, 80 bp, Homo sapiens
tcagttgtccatgaccctgaaggtccaggagtacccgaccctcaaggtctcaccaacggctttgggggtgcgaggagcga

SEQ ID NO: 225913 - DNA, 88 bp, Homo sapiens
gggccgggaaaagtggcactgaggctctggaacttctgcccagctctccttgttttggcaagcgttctgcaggaagttttaggcgtgg

SEQ ID NO: 225914 - DNA, 75 bp, Homo sapiens
attgcttggagaacttcatacacttcgagatcagcatcttaacaattcatcatgaaaaggcattaatagctgctc

SEQ ID NO: 225915 - DNA, 75 bp, Homo sapiens
cttgtccagttactctaacaagtctggagggaccagttactctccacaagaaaattcacacaaccacagtgctct

SEQ ID NO: 225916 - DNA, 101 bp, Homo sapiens
gctgaatagctggggctacaggcgtgtgtcactgcgcccagggctcacacagtcgacaaaagaaaacgtttttcttgggagatgggcagaagctgaaggac

SEQ ID NO: 225917 - DNA, 100 bp, Homo sapiens
tgctcacggccattcactgcccatgctgagcgcctctcacacagcagacggttgatgatgaagcgccggccgtgtaaatgaagatcgggtgaggagcagg

SEQ ID NO: 225918 - DNA, 96 bp, Homo sapiens
atttaacctgtcatcaagacctgggattttggtggactgatcctttgaaatactccagccatgactaaaagagaagcagaggagctgatagaaatt

SEQ ID NO: 225919 - DNA, 83 bp, Homo sapiens
atcggataaagtcatcaataaccgagagtgcctcatctacagcagggtgtcgtagtcattcttcagcacaattcttaattgga

SEQ ID NO: 225920 - DNA, 100 bp, Homo sapiens
tcttggtccgagatgcctcaacaaaaatgcagggagattatactttgactttgcgatcggcttcagctccccaggaatatgattgaaaacagcatgtttg

SEQ ID NO: 225921 - DNA, 51 bp, Homo sapiens
aggtgtccatccccgtgctgagactatgccagttactaccagggcctatgg

SEQ ID NO: 225922 - DNA, 82 bp, Homo sapiens
cagacggattcatttagagctgcggaacaggacgccctctgatacagagattgcgaagagactgaacacaattttagcacag

SEQ ID NO: 225923 - DNA, 101 bp, Homo sapiens
ttgtggagaaagtcgtcttccacttgcacgaaagctttcctaggccaaaaagaggtccctccagctacaaggtgggcaccatggcggagaagtttgactgc

SEQ ID NO: 225924 - DNA, 98 bp, Homo sapiens
aaagaacaggctaaattagaaaagggagtattttgtcaaagttgaagagtgtgaacatggctacgcctcttcattcccgtccatgccgagcccccgac

SEQ ID NO: 225925 - DNA, 118 bp, Homo sapiens
cacaattgcagcagatgaagatccattggtaaattgatcaggatttttggcctaccctccaaagaaaaggtgagccagccatgagagggtatcttgtggccatattcctgagtgctgt

SEQ ID NO: 225926 - DNA, 100 bp, Homo sapiens
ggaaagcaccatgacgtccatccatttcgtggttcacccgctgccgggcaccgaggaccagctcaatgacagattatctcaactttggtctcctgggacc

SEQ ID NO: 225927 - DNA, 75 bp, Homo sapiens
acgaatctgcccacccctcctgtaacccagcctgtttcacttcttgatctattaatgagatgaagcggttggaag

SEQ ID NO: 225928 - DNA, 50 bp, Homo sapiens
ggtttggtctctaaaagtaaaggtgatgatgatgatgattttgatgatga

SEQ ID NO: 225929 - DNA, 101 bp, Homo sapiens
tcctttttgctgacgtgtcatttctaagtactttctcctactccataaagacttcaagatctagtgaaaagccatttgatgtatgcggtcagagaagaagt

SEQ ID NO: 225930 - DNA, 100 bp, Homo sapiens
ggaggggggagcggcgttggaggccaccgtttccaggcctgcactgcccaaagtcttggaaacttgctggatatgatgtaccgggagccagcacgatggt

SEQ ID NO: 225931 - DNA, 87 bp, Homo sapiens
agagctggcagacgagcaggacaaggagacggtcagagtccaaggtccgggtatcttaccagtttccaggaatatggatctactgga

SEQ ID NO: 225932 - DNA, 75 bp, Homo sapiens
caaggatgaagcctcacttcaggatgtgcccgatattccagatctccaacgttacaggcgagaacctagatctgc

SEQ ID NO: 225933 - DNA, 75 bp, Homo sapiens
gccacgcgggcgagcggctgtgtggatgtcggcgaagccgcgggcgagaacactctgctccagccaaggtggtga

SEQ ID NO: 225934 - DNA, 82 bp, Homo sapiens
cggaaacaaagttattttgctcggttgttggaagaggagcctttggagttgtttgcaaagctaagtggagagcaaaagatgt

SEQ ID NO: 225935 - DNA, 75 bp, Homo sapiens
gccacgctcagctcgccaggcggcgcagggacacaggttgaacatcacggcggagaacgactgccggcggctgca

SEQ ID NO: 225936 - DNA, 100 bp, Homo sapiens
ggcggagctgacggtggaggttcgcggctctaacggggctttctacaagtcttccgtgtgtgctaagatcgtgcagctcctggggcagaatgaggtggac

SEQ ID NO: 225937 - DNA, 90 bp, Homo sapiens
tttactttttgtttggttgaggtttcacgctagaaggtggctcagatgagcccattattgaagagccaagccgcctccaggagtcagtga

SEQ ID NO: 225938 - DNA, 75 bp, Homo sapiens
ttgtgacggaggtgaaagaggagccttcctccaaaagggagcatcagaaaaggaagaccagtgtctcatgcctga

SEQ ID NO: 225939 - DNA, 102 bp, Homo sapiens
ccggacaatcctgcagcacctcagtgaagcctggcgctgctggaaagccaacattccctggaaggcaagcacgaggagcggcaggacgagcatggctacatc

SEQ ID NO: 225940 - DNA, 100 bp, Homo sapiens
agacgatggctacattgaccttcaggagtctactcttcatcttgtgttgagacttcgtggtggtgctaagaaaaggaagaagaagtcttacaccactccc

SEQ ID NO: 225941 - DNA, 100 bp, Homo sapiens
ctgcggagccgcgggccggcgagcgcgtcgccaccatgtaatcaagatgattaccaactggttcgaaaacttggtcggggaaaatatagtgaagtatttg

SEQ ID NO: 225942 - DNA, 100 bp, Homo sapiens
gcaccttccatttgaagggggaagtctcttgcaaattccagtcaaggccctaaaatataggttatcaatactctggctgaccatcatcatcgtgggactg

SEQ ID NO: 225943 - DNA, 97 bp, Homo sapiens
agaaccaaaggctattggatcagctcagcaggactgtggcacgtttcaggcaggattcctccttcattcaaactgcatcacccaggagtctgcaaat

SEQ ID NO: 225944 - DNA, 98 bp, Homo sapiens
ggagaggggttgttttataaactgcctggccgaatcagccttttcacgctcaagacaaatatggtctctttagaaggccttaccaaagtagttgatcc

SEQ ID NO: 225945 - DNA, 82 bp, Homo sapiens
cagtccacccaccgccgccgcctcccagagatgtggtactggatcttcctctgggctctcttctcttctctgtttgtccatg

SEQ ID NO: 225946 - DNA, 75 bp, Homo sapiens
tgttaatgatggcagtacagtcagacattgggtttgcctatcacagatgaacaaatccaggagatgaaatcaaac

SEQ ID NO: 225947 - DNA, 99 bp, Homo sapiens
cagaacagagcagaaatcaaattgaagagagcagttgaagaagtgaagaaattattggtacctgcaacctcgaagtagggggaaaactgcagtggaaga

SEQ ID NO: 225948 - DNA, 100 bp, Homo sapiens
ggacccgctgggccaggaacacctgggccatgctcgccatcttcatcctggtgatggcaaatgtcgtggacatggtttttagaacttcagccataaaaat

SEQ ID NO: 225949 - DNA, 75 bp, Homo sapiens
aagtttatcgatccattctgcaaaattgctgcgaagacgaaggagctccatctgcagggctgaacctgaggctgg

SEQ ID NO: 225950 - DNA, 98 bp, Homo sapiens
catctgtgtgcaaaccagaacaggtggccaaacaaattgttaaagatgccatagaggttcaaaatggaagactgtttaggctcctagcaaaattggga

SEQ ID NO: 225951 - DNA, 74 bp, Homo sapiens
agaaccttagcaaagaggagctgatagcggagctgcagagtctcgaatccacctcacgggaacaaaagaaagct

SEQ ID NO: 225952 - DNA, 74 bp, Homo sapiens
gccagcagcccgccagccgccgggagggattttttgccaggtggtaggagagattatacagtccaagttcagtt

SEQ ID NO: 225953 - DNA, 88 bp, Homo sapiens
cacctcagcgactgtgagcacaacccgaagcggcctgtgacctgtgaacagggctgtgggatcccaggagggcactcatggtggttta

SEQ ID NO: 225954 - DNA, 97 bp, Homo sapiens
ccacaatatctttaagagagatggctctgatgtcatttatcctgccaggatcagcctccgggaggcgttcccgttgcccgctctctcccggaagcag

SEQ ID NO: 225955 - DNA, 102 bp, Homo sapiens
gcacagagcctcgcctttgccgatccgccgcccgtccacacccgccgccaggtattgatgtcaagctgaaccatcgtaggaagttgaaagccttagaaagag

SEQ ID NO: 225956 - DNA, 98 bp, Homo sapiens
agaagaccacccttgccttggataaacagctggccaaggagaagccgggctcacagaacatttcctgcctgttgctcacactctgttgtccacagcat

SEQ ID NO: 225957 - DNA, 50 bp, Homo sapiens
agctgccctgggaggacggcagattactcttgtctctgctgctcctggga

SEQ ID NO: 225958 - DNA, 100 bp, Homo sapiens
cgccgcccgggtgtccccgcggcgcaggaggcggtggagcgcagagcgggcgagcgcgcgagtaaccagctcataaatcacatcgaacagtttttggata

SEQ ID NO: 225959 - DNA, 74 bp, Homo sapiens
ttcccttggtcaaaagcgcactaaatcgtctccaagtgctgggattacaagcgtgagctaccacacccagcgag

SEQ ID NO: 225960 - DNA, 148 bp, Homo sapiens
cttcgtctccgagtttgcgactcgcggaccggcgtccccggcgcgaagaggctggactcggattcgttgcctgaggctacaaccactagcacggctgacgatggccctttctgcggagaccgagtcacacatctaccgagctctgcgt

SEQ ID NO: 225961 - DNA, 100 bp, Homo sapiens
gaggaagagaagaccagtgccaaccctgagactctgctgggggagatggaggcgaagacaagagagctcattgtcttaggaaaagtcctcagtgctgtgg

SEQ ID NO: 225962 - DNA, 100 bp, Homo sapiens
cgtccccgaccttgcctgaacaaggacttggaaaaggagagtgacacacccctccagcaagtatccattgaagaaattctagaagaacaaagggtggaac

SEQ ID NO: 225963 - DNA, 82 bp, Homo sapiens
ccctggaaagtttgcagaagtggaaggagcagaacgtgagggtgtaacttacaaaaaggctccataaaaatacagactcacc

SEQ ID NO: 225964 - DNA, 98 bp, Homo sapiens
tcgaggttctgcagaaggttgtgactttagtatacagatccatttaaagagaaacttctagaaataatgacaaggattcaaacttattgtcaaatgag

SEQ ID NO: 225965 - DNA, 124 bp, Homo sapiens
tgcaaacgacgctcatcaaacagagacctcctcctcccaagtcaaggacaataagggctgccacccaggagctggcccttctcatctcccgcatgcaagccaacgccgaccaggtggagcggga

SEQ ID NO: 225966 - DNA, 83 bp, Homo sapiens
ccctggacggcattcagtgttttggctacctggggtacaccagtggtctctctctgacctgcatgctgtttttccttgtttcg

SEQ ID NO: 225967 - DNA, 83 bp, Homo sapiens
cgggatttgggtcgcagttcttgtttgtggatcgctgtgatcgtcacttggttgaaccatgattccggtgacagagctccgct

SEQ ID NO: 225968 - DNA, 100 bp, Homo sapiens
caccagcttcagaaaaacatggcagctggggaagtggtttggacatgcacaccaaaccctgggttagagcaaggtaatggaaaaggtggagaatcaattt

SEQ ID NO: 225969 - DNA, 100 bp, Homo sapiens
atttgggacttcagatacgctttaacttgaaatcaaggaatgtagaaatcaggctccgccgcatgcaagagatgattgcaaggatgcaggcgcagatgca

SEQ ID NO: 225970 - DNA, 83 bp, Homo sapiens
ctgcggtggcgtctccacacggtcgtggagggcccccaagacccaacagagggatgccgcaaatgaacactcagcaagtgaat

SEQ ID NO: 225971 - DNA, 100 bp, Homo sapiens
tttacagaaagggaacaaaccctgcaggttctaagaagactcttcccggttgatcgtggattatttgagtttcatgttagggtcttacagtgtgaatgac

SEQ ID NO: 225972 - DNA, 100 bp, Homo sapiens
agcccctgctgctggttctgcccctgctgcagctgtggaggaagatgcagagtcagaagatgaagaggaggaggatgtgaaactcttaagtatatctgga

SEQ ID NO: 225973 - DNA, 95 bp, Homo sapiens
ccaagatgggccaagtggtgtatgtgccggtcaagacgggctcggggacggcaaaacagaacagaaaggcggagataaaaagaggggtgttaaaa

SEQ ID NO: 225974 - DNA, 100 bp, Homo sapiens
aaagaagaagaggagaggagacgggcagaagaagaaaagaggagagttgaaagagaacagaccaagatgaagagacgagctgtggggatctggcactgtg

SEQ ID NO: 225975 - DNA, 100 bp, Homo sapiens
agaaccagcacttctgggacgcacagagaccgtgaagattccaagttcaggagaactcgaccggccatttcataattctgaatcatgtctgataacggag

SEQ ID NO: 225976 - DNA, 82 bp, Homo sapiens
cagccacatactatccgtttgttcaggaaccaccagtgacagagttatcaatactctggctgaccatcatcatcgtgggact

SEQ ID NO: 225977 - DNA, 100 bp, Homo sapiens
cgggcgtccgcggagcagcttccccccgcgcctctcttcgcctcgcctcgggacccgcggtccccgctcttgctgccatccgcagagccatcctgtgcaa

SEQ ID NO: 225978 - DNA, 75 bp, Homo sapiens
tggacggcgagcgcgagcggcgcgagaaacactccttgctcaagacccctccccagtacctacccttccaggccc

SEQ ID NO: 225979 - DNA, 90 bp, Homo sapiens
taaaagtgcgacgaagtggggaagaaggatgtggctgtctgcatggacctggatacccggaccacctcgtccctgtggaaagacaaggca

SEQ ID NO: 225980 - DNA, 80 bp, Homo sapiens
gccatgtaacgcctgtggtgaccagtgccctgggttcgccttgcataaatggaggtgacttaagagattaaaattaattt

SEQ ID NO: 225981 - DNA, 75 bp, Homo sapiens
tcgagagcccggacatcaagtacccgctgcggctcatcgaccgggagatgtctttggtggacttgggaaagaggt

SEQ ID NO: 225982 - DNA, 100 bp, Homo sapiens
cttcagtgcaggaatatgttagcgttgtatcttgggagaaagacacagtctccatcatcccagaacagatctcggcccctttccaaacactcctgatgcc

SEQ ID NO: 225983 - DNA, 100 bp, Homo sapiens
aaatgttctagattgaagagtacttgtatttatggaggtgctcctaaaggtccccagattcgagacttggaaagagtggaatgcagtagccctctgggcc

SEQ ID NO: 225984 - DNA, 100 bp, Homo sapiens
ccctgcgcgggctcgagagctcgccccgaacgggggtcttcctcctccgccgttgacaggtttactggatgtgggcctaaggtacaggcgtagtccaaga

SEQ ID NO: 225985 - DNA, 99 bp, Homo sapiens
cttggaaagacgtttcttctcttggcaagagagctctgcatcaatgcgccggccatagatgtgaagttcatttccaatccgccctccatggtggcagcg

SEQ ID NO: 225986 - DNA, 50 bp, Homo sapiens
tttgcatccggagagtggacaagaaaccacagaatatattactgagcagc

SEQ ID NO: 225987 - DNA, 100 bp, Homo sapiens
gagcaaggaagaaaacctttgaccatgaagagaaatgagatgatagccaaaccctcagggactgctgagatgtcctctattcttgaagagcgtattcttg

SEQ ID NO: 225988 - DNA, 74 bp, Homo sapiens
gtccggataagccgggcgggagcccctcggccaggtgagcccgtggtagcagcagaagcaggcattatgggata

SEQ ID NO: 225989 - DNA, 82 bp, Homo sapiens
tctctgtcgacggctatgacagttctgcaaattgtggctactaatttgccccctgaagatcaagatggctctggggatgact

SEQ ID NO: 225990 - DNA, 100 bp, Homo sapiens
tcggctgggtcttcgcccaggtggccggcgcttcagtggatgattcaacagccacacaaagcagcaacattttttggatgcattgggatagataaatttg

SEQ ID NO: 225991 - DNA, 83 bp, Homo sapiens
aaggaaagtgcggcggccctggaacctggatatcgcgcgaggttttaaaatcaaagatgggaaaatcggagaaaattgccctt

SEQ ID NO: 225992 - DNA, 96 bp, Homo sapiens
cttcgaccgcaaaagacgaagtgaccccaacttcaagaacaggcttcgagaacgagagcgacttgcagttgtggaggtacagtgtgaacggctgag

SEQ ID NO: 225993 - DNA, 101 bp, Homo sapiens
gtgcagccaccctcgctccctctgctcttcctcccttcgctcgcaccatggttaatttggagtggcccctggagtcagtttcctacaccatccgaggcccc

SEQ ID NO: 225994 - DNA, 50 bp, Homo sapiens
ggcagctgtactaggactgggaacgggggtcaggagagtgctggtattgt

SEQ ID NO: 225995 - DNA, 95 bp, Homo sapiens
tggtcttccctgaccccgcggccggacgacccaagcccgctgagcaggatgaggtttaactcggctgctaagcagctgatagaatgggataagcc

SEQ ID NO: 225996 - DNA, 100 bp, Homo sapiens
ctttccctcccccttctttcgatcagagatcggcggagaccctcgaagtgcgcaaacttgacactcaccctgaccggttaatacaatctgttggaatgac

SEQ ID NO: 225997 - DNA, 90 bp, Homo sapiens
cagatcgagagcacagagacttcttgccatggctgccgtaagaatcaacttgaaaacagtctgaatgaatttggtgaaaagtgggagtta

SEQ ID NO: 225998 - DNA, 101 bp, Homo sapiens
aacggatcaccaaattgatgtgtctgacgtcatcaggcttgttcaagacacaccggaggcgacggccatggccacagcctcgaagcggaggatccctgtgt

SEQ ID NO: 225999 - DNA, 90 bp, Homo sapiens
cgccatgaccccatcgaggcttccctggttgcttagctgggtctcggccacggcgtggagagcggcaatgttatccaagataaattctgt

SEQ ID NO: 226000 - DNA, 87 bp, Homo sapiens
gcagccccgggccaggccgcggccggggcaggagcgcaggcaagaaaattggatgtatattttgaatatgaagaaaaaataatgagc

SEQ ID NO: 226001 - DNA, 82 bp, Homo sapiens
tttcacgatggccagcaccgccttcaacctgcaggtggccacccctggggtacatccagacactgaaggaccacaggccccg

SEQ ID NO: 226002 - DNA, 90 bp, Homo sapiens
tgagccaagtgctgttccaccaactagtcccgttgcaggtgaaatgcaaagactgtgaggagaggctgaaggagccctggcccaacagtg

SEQ ID NO: 226003 - DNA, 100 bp, Homo sapiens
cattgcctgagggcctccctccaactctgcagccagaatacctgcaggcagaatatcctccgaatcctaaatctagagctccaaggatgctggtcattaa

SEQ ID NO: 226004 - DNA, 82 bp, Homo sapiens
cggacgcgaccaggggaggcagaagaaatgagccgtcagactgctacagcattacctaccggtacctcgaagtgtccaccat

SEQ ID NO: 226005 - DNA, 74 bp, Homo sapiens
tctggcttgaatctcgtgccgggagagcagatttactatgctgggcctgtcaataatcctgaatttactattcc

SEQ ID NO: 226006 - DNA, 82 bp, Homo sapiens
tccggcgagtagctggcggtcccgggtgctgctggagcaggccgggctctcgccatgggtcactgtcgcctctgccacggga

SEQ ID NO: 226007 - DNA, 72 bp, Homo sapiens
tgaagtatttgacgaaaatagactgaaaggtgactcttttgatggtgggacttgataatgctggtaaaaccg

SEQ ID NO: 226008 - DNA, 101 bp, Homo sapiens
cttcagggaatgcctggtgaacgtggtgcagctggtcttccagggcctaagggtgacagataagcgatacgaatcccagcttcgggatcttgagcggcagt

SEQ ID NO: 226009 - DNA, 75 bp, Homo sapiens
aaattataaaggattatacttggcaggaattactgaaccttcaacatgcctactataaactaaacagacaatacc

SEQ ID NO: 226010 - DNA, 100 bp, Homo sapiens
atcgaaaggagcaagagcaagatcaccgtgacatccgaggtgcccagcaggagggcataggtggcctctgcagaggggacctcagcctgtcactggccct

SEQ ID NO: 226011 - DNA, 90 bp, Homo sapiens
agagattcgggttctgccgcttatcttcaggagcgaagagctgcttctgtatcttaagagatgtgtgcacagacccaggccatgcagata

SEQ ID NO: 226012 - DNA, 75 bp, Homo sapiens
gactgtggaataatatggaagaagatggaaaaaacttgtttaatggggatcatagacggtatttctatgtaaacg

SEQ ID NO: 226013 - DNA, 100 bp, Homo sapiens
tggagaactacagcaacttactctcactggcttccacagcgcggcacctgtacctccggggtggcgctggggttggctccatgaccaagatctatggggg

SEQ ID NO: 226014 - DNA, 83 bp, Homo sapiens
ccgttgacaaggcactgctttttcatgacggagtgtacctcacagccttctaggatctccagagtggacaggaatctcacttg

SEQ ID NO: 226015 - DNA, 100 bp, Homo sapiens
ccaggcggaggcgtcgcgggagcctttggggcaccacagagatgcggaaggacagaataacgggctcccagattcacaagccccaccaagaggatcaccc

SEQ ID NO: 226016 - DNA, 106 bp, Homo sapiens
gggagatccacagctaagacaccgggacctcctggaagccaaaaatgctgtcttgtcgacggtctcactgatgcctcttctgcattcaaagttcctcgacccgggc

SEQ ID NO: 226017 - DNA, 100 bp, Homo sapiens
cggatctgcatgccgctcaccgtagacgagatgatttcacaaaagttcatcttcattgcagatacctgcctttctttctaggttgtatctcccacttcac

SEQ ID NO: 226018 - DNA, 83 bp, Homo sapiens
aggagaggagcactttgaggacatggcctccgacgaggacatgaccaagaatcgccttcagccctgtctggtgcatccttggc

SEQ ID NO: 226019 - DNA, 98 bp, Homo sapiens
cttttttttaggagagttagagaagtgccttgaagatccagaaaaactaggatccctttttgttaaacacgtgtgcttcctcctgggatggacttgag

SEQ ID NO: 226020 - DNA, 76 bp, Homo sapiens
gatatccttctcaaccttgtgggatgtgaaaactctgttactgaaggtaagaagacaagaggtttcttctcctaga

SEQ ID NO: 226021 - DNA, 101 bp, Homo sapiens
agcccgaggcggagcccggctccccacagaagctcatccgcaaggtgtccacgtcgggtcagatccgacagaagggaaatcctcattgacgattcaatttg

SEQ ID NO: 226022 - DNA, 95 bp, Homo sapiens
ctagaagatatttgctgcagcctttagacttaattcagtgcacaaatgagatgaatgtgaacatcccacagttggcagacagtttatttgaaaga

SEQ ID NO: 226023 - DNA, 76 bp, Homo sapiens
ggccaacttactgcttcctgaactgggcagtgccttctatgacatggccagattggaccagaccctgaattcttct

SEQ ID NO: 226024 - DNA, 73 bp, Homo sapiens
caagtgatcttcccaccacagcttcacaaagcactgggatggattacaggccatggagagtaagttgcttgtt

SEQ ID NO: 226025 - DNA, 75 bp, Homo sapiens
gcggtcgcagtctccacggcgcaggcccacggtagcgcagccgctctgagatgtccagaaggcttcttgggggaa

SEQ ID NO: 226026 - DNA, 101 bp, Homo sapiens
ccagccctgagcggttcttcatgcccctgtacaagggctgcagcggagacttcaagacctcctgccccccgaggtctgcagtctcctgaacccagcagcca

SEQ ID NO: 226027 - DNA, 50 bp, Homo sapiens
ggactctttcaggttctgaagtgatgagacaaaccatgcttctgccacat

SEQ ID NO: 226028 - DNA, 115 bp, Homo sapiens
ccggttcttggtgcccctgggcatcaccaacatagccatcgacttcggggagcaggtgtcatggagaaactccagctgggcccagagattctgcagcgggaaaatccaaggctta

SEQ ID NO: 226029 - DNA, 101 bp, Homo sapiens
tgtgtactcctcgccatggctcagctccaaacacgcttctacactgataacaagaagttcccagtagctgcagcagtgaaagacagtgattggctccagtg

SEQ ID NO: 226030 - DNA, 100 bp, Homo sapiens
cagcagaggcggcagcctggagagtcgaagcagcagctctcgctccagaagcttcactttggacactggggttgggaaatcaagcatcgtgtgtcgattt

SEQ ID NO: 226031 - DNA, 74 bp, Homo sapiens
ggaaatgtgtcatcgaaagccaggcattgaatgccccagaggagcccgaaacctcccaggcttggtgcaggaag

SEQ ID NO: 226032 - DNA, 97 bp, Homo sapiens
gaggatggggccctggatgagggggaagggcctcaaagccagaagatgtacttgaaggatataatggaacaatatttgcatatggacaaacatcctc

SEQ ID NO: 226033 - DNA, 51 bp, Homo sapiens
ctgatcaaagaagagcagcccatggtcttcaaagcttcacctttctccaaa

SEQ ID NO: 226034 - DNA, 75 bp, Homo sapiens
gcaccctggatggtgaagagagagctgacaaaaggcttgtgctcaggttctctgggtgccctgcagacctttgga

SEQ ID NO: 226035 - DNA, 98 bp, Homo sapiens
cttgagaactgtccttacgtgacctaaagctggagtattttgagattggagaattaagtatctccagaggcagttggatttttgtcagctgttggggt

SEQ ID NO: 226036 - DNA, 51 bp, Homo sapiens
tggagtccggacatctgaaacttgcatgttggcagataaattgaacatgac

SEQ ID NO: 226037 - DNA, 96 bp, Homo sapiens
gacttcaaggatttctacctttccatagcaggtgaagatggagctggaaaaacaagcttaataagaaaaattcagggaatagaggagtataagaaa

SEQ ID NO: 226038 - DNA, 83 bp, Homo sapiens
tcccggaggcgtccgcagctgctggctgctcatttgccggtgaccggagacccgggaaaaggagaagatgaaggaagccaagg

SEQ ID NO: 226039 - DNA, 82 bp, Homo sapiens
cagtgccatttcgcctttatcgtggtggagtccaccctggctgtgggagtgcatccgccccaacccttttccccctcgtctc

SEQ ID NO: 226040 - DNA, 100 bp, Homo sapiens
ctcattaccgtcgccagcggagcgaacccgagagcgtggagcgggctgggccagtggctgcctccgggtgatgatggctgtgtgaacgactgccatggcc

SEQ ID NO: 226041 - DNA, 75 bp, Homo sapiens
cagccaagccccgccgatcgcgggcaccggagccagccccgcagcggacaatgcagatcttcgtgaagactctga

SEQ ID NO: 226042 - DNA, 90 bp, Homo sapiens
ttgagagattacctgaagttgcactcaaaagcaagatatactactaactttgaaatggaataagagtacagttgtgaatttggctccgcg

SEQ ID NO: 226043 - DNA, 82 bp, Homo sapiens
tcagagccctcctaccttgccgcagccaccactgccgtctatgaggccatgactgcagaagtcccgggcccagagcccggcc

SEQ ID NO: 226044 - DNA, 100 bp, Homo sapiens
acctttgaatatctgcacacaaattcgtatcccacgttcatcgatgccctgcgggacctggacgatgccctctccatgtgcttcctgttttccaccttcc

SEQ ID NO: 226045 - DNA, 74 bp, Homo sapiens
agaggatgaggaacctccaaggaagactgcttcaccagtttttctactggctccttctttgaactggatggacg

SEQ ID NO: 226046 - DNA, 137 bp, Homo sapiens
ggacgcgctacctgcctccgggcgcctgggcttcaggatgaaggaccgtctggagcagctgaaggccgcccttggactggacagtgccaatgagaaaggcttgtataggaggggtgaagcccagctgctcatgaacg

SEQ ID NO: 226047 - DNA, 98 bp, Homo sapiens
gtccgccgattcctcctccttggtcgccgcgtccttggctggcgtctctacgaactcgacggggaccccaagaggaaggaattcctggatgacttgtt

SEQ ID NO: 226048 - DNA, 75 bp, Homo sapiens
ctgaaggccgtcttaaagttacgttgttagaatgtagcaggacagcaacccctttgatgccactgcagggtatcg

SEQ ID NO: 226049 - DNA, 98 bp, Homo sapiens
tggatggtgcgttgcgtgccctacttcaaggataagggcgacagcaacagctctgccggctggaagctgagatctgtatctgtggacctgaatgttga

SEQ ID NO: 226050 - DNA, 50 bp, Homo sapiens
ggcaggaatggatgtgagctgtcaagaattacatgaacgacagccttcgc

SEQ ID NO: 226051 - DNA, 75 bp, Homo sapiens
cagcatgctgtgtctagctcaagggtgctggaaatgtaaacaagaatagactgttcattcctgatggcttttagt

SEQ ID NO: 226052 - DNA, 82 bp, Homo sapiens
cgacgtccctcaaaccttgcttctaggagataaaaagcaaaatgatgcttcaacacccaggccaggtctctgcctcggaagt

SEQ ID NO: 226053 - DNA, 75 bp, Homo sapiens
ccgggcggcacgcacgcggtgcagggtaacatggcggatgcggaagcttccatgaggcaggctgaacctgcagat

SEQ ID NO: 226054 - DNA, 100 bp, Homo sapiens
ccacgaaaggcagccgcggatcgccgcgctcagcgacaaacaagctatttgctttctagaagagaaggccaagcagggtctcctgaaaagcctctctccg

SEQ ID NO: 226055 - DNA, 90 bp, Homo sapiens
gcggaagaatggcagtgctcaaactcaccgaccagcggtcttgcgagtggctggttccctgcagaagagcacagaagtgatgaaggccat

SEQ ID NO: 226056 - DNA, 83 bp, Homo sapiens
tggctgtgggaagactctgctggcgaaggtctcttcagcagatccaggactgccgcagctctctgaacaagcgtgcacttact

SEQ ID NO: 226057 - DNA, 83 bp, Homo sapiens
ttttcatcagtttcacagctggccacagactttattcagagccttttagtaaaaaatccagacttttctgaagctcagcagca

SEQ ID NO: 226058 - DNA, 51 bp, Homo sapiens
tcccgccgccccggcccggcgcgcagtgtatcctactcagtacatgtatct

SEQ ID NO: 226059 - DNA, 98 bp, Homo sapiens
ctgcgttgaggatctttgctcttccatccgcctttgatcgtcttcctcttcagccatccaggtactatgcctttgatgaggcctttgttcgggaggtg

SEQ ID NO: 226060 - DNA, 50 bp, Homo sapiens
tcccagcactttgggagcccgagtggagacggagtttcaccgtgttagcc

SEQ ID NO: 226061 - DNA, 138 bp, Homo sapiens
atgatcgccgcgcagctcctggcctattacttcacggagctgaaggatgaccaggtcaaaaaggtactccaaagattcaggtttactcacgtcatccagcagagaatggaaagtcaaatttcctgaattgctatgtgt

SEQ ID NO: 226062 - DNA, 100 bp, Homo sapiens
tgaacatgccaacaaattgattgaggctgcaaggtgtgactgttgtaaatctcaaggaactcttaaagagcgagttcagtggcgtggggaaatgaaacat

SEQ ID NO: 226063 - DNA, 100 bp, Homo sapiens
tgataatcaaccaactgttacaatcaaggtctatgaaggatacttatccgctttttccccttggagtcctggcagattggcaagatagggacggtcatga

SEQ ID NO: 226064 - DNA, 101 bp, Homo sapiens
gcagattgctaccaaactccgagggggtctagctcttgctgctttcctgggcctggtcctgtggctgtctctggacacctcccagcggcctgagcaactgg

SEQ ID NO: 226065 - DNA, 100 bp, Homo sapiens
acgacttcgtggccaactgcaccatccagtttgaggagctgctgcagaacgggagccgccacttcgaggactggaacactctgctccagccaaggtggtg

SEQ ID NO: 226066 - DNA, 76 bp, Homo sapiens
gcaggcgaacccgcggcgcaataacgcaccggcagctgctgaaggacagcttcatggtggagctggtggagggggc

SEQ ID NO: 226067 - DNA, 75 bp, Homo sapiens
ccaccaccttcaagggagtcgaccccaacagcaggaatagctcccggaacaagatcactcaaggtgaaggataat

SEQ ID NO: 226068 - DNA, 82 bp, Homo sapiens
cgaggaggtcatgaaggacctgagcctgacgcgggccgcgcgggtgctcttacagcctgttccaagtgtggcttaatccgtc

SEQ ID NO: 226069 - DNA, 74 bp, Homo sapiens
aaaagggctatgaacgattaaaagaagaactcgcaaaagctcagaggatgccttcaattaagttgcagagttct

SEQ ID NO: 226070 - DNA, 93 bp, Homo sapiens
aacggggctgctggtgggccgcgtcgaagacatggaccagggctacggaggtttacccaaggtccagcctagcccctaggcaccatgtcggac

SEQ ID NO: 226071 - DNA, 100 bp, Homo sapiens
catataaatgtgaactttgtccttactcaagttctcagaagactcatctaactagacatatgcgtactcattcagaattcggttccctcaaaattataaa

SEQ ID NO: 226072 - DNA, 75 bp, Homo sapiens
tgtgacctgtggagacacggccagatctgccctccaatggctcccgcaaagaagggtggcgagaagaaaaagggc

SEQ ID NO: 226073 - DNA, 111 bp, Homo sapiens
ctattcctgtaacggtcaagcgagagcctgaagagttggaccagttgtacctggatgacgacaatgcagatcttcgtgaagactctgactggtaagaccatcaccctcgag

SEQ ID NO: 226074 - DNA, 75 bp, Homo sapiens
gctggagctgttccgggccgcgcagctgccgaacgacgtggtcctacaggaaaaccagtagattcccagacatcg

SEQ ID NO: 226075 - DNA, 97 bp, Homo sapiens
attgaaactgttatctctgatgaagaagtgattaatggtggacttgctttgtgaagagacagttcatgaacaagagtctttcaggacctggacagtg

SEQ ID NO: 226076 - DNA, 82 bp, Homo sapiens
ccaagctcgtagcctgccactccgtgcgtttgatctgtggatgaaatgaatcatgattttcaagctcttgcattagaatctc

SEQ ID NO: 226077 - DNA, 86 bp, Homo sapiens
gccctgaagaagtgcaagagcagaggccttctctagaccttgccaagatggcacaggaacaagatcactcaaggtgaaggataatc

SEQ ID NO: 226078 - DNA, 100 bp, Homo sapiens
cgctccggggcccggcgagaggatgcgcaaggtggagagccgcggggaagggggcagagagggtagatatggattcccagtttctccagcggccagtgct

SEQ ID NO: 226079 - DNA, 102 bp, Homo sapiens
gacagactcccatccactggggtcagggaccggaaaggcgacaaaccctggaaggagtcagatattctaaagggaaggactgagaccctgaagccagacccc

SEQ ID NO: 226080 - DNA, 74 bp, Homo sapiens
gcaagaacaagtaccgccccgacctgcgcatgttttcagatagaaccattcccactgataagcatgttgacctc

SEQ ID NO: 226081 - DNA, 82 bp, Homo sapiens
ggactcagccaagttccccaacggctccccgtcgtcctggtgctgcagcgaaatattgctgacactgctgaagccagttgct

SEQ ID NO: 226082 - DNA, 100 bp, Homo sapiens
ttttctacctccttaggattcgaagaccagttcattcttagtgtcttctgaaataaaattaggtgaagctcgtgtgtggagtgccacggtacaatcagac

SEQ ID NO: 226083 - DNA, 75 bp, Homo sapiens
cttgggatgagggaatacaagtgtcatgtctgtgggtcatttggatccaggattcctagcaagtgacaaaacatc

SEQ ID NO: 226084 - DNA, 90 bp, Homo sapiens
tgaaaggagacgtcagaacgtggcttatgagtacctttgtcatttggaagaagcgaagaggggaggagccccagccccgcgacgaggagg

SEQ ID NO: 226085 - DNA, 50 bp, Homo sapiens
agaagtttctaggaaaggccggacaccagttccaagaggtggtttttgaa

SEQ ID NO: 226086 - DNA, 90 bp, Homo sapiens
acgtgatagtgtgggatctggcaagaggagtcaaaatacgatcttatttcaatatggctttcatagaaaccatgttcaccagtaaagccc

SEQ ID NO: 226087 - DNA, 83 bp, Homo sapiens
gtaaatacgaatctttccaaaggagatgcccgaacattaaccaggtggtatttgttggaaatttcttgagaattaatacgatc

SEQ ID NO: 226088 - DNA, 50 bp, Homo sapiens
ggaggagaggttcaaccgcgccctgggtgagcttgtcggccacagactgc

SEQ ID NO: 226089 - DNA, 75 bp, Homo sapiens
gttccttgactggagacaacctgcagcctcctggcaccaaaggttttaaaatcaaagatgggaaaatcggagaaa

SEQ ID NO: 226090 - DNA, 75 bp, Homo sapiens
gaggaatcagaaacctgaagttagaaaggctcaacgagaacaagctatcagatcacaaaatttgtccaggataga

SEQ ID NO: 226091 - DNA, 100 bp, Homo sapiens
tggccgccgcctgtgcgcctctgctgagtcgacatggtctgctatacagctcagactctcgtccgaatcctctcacatggtggctttaggaagatccttg

SEQ ID NO: 226092 - DNA, 75 bp, Homo sapiens
aaagtcaaaagaagtttgtattaccattttcaatagcagtataaaaggtgagcgacctgtgagagtttatgccga

SEQ ID NO: 226093 - DNA, 83 bp, Homo sapiens
ccaagagacaccaatggagatctgcctcaatggaacccctgctctggcctacctggcgctgctacaggagctgagagacccta

SEQ ID NO: 226094 - DNA, 88 bp, Homo sapiens
ctggtccatcggagtgattgcctacatcttagtttccaacatatggttttaactgtgaatttggctggggctctcacaagaccttctg

SEQ ID NO: 226095 - DNA, 90 bp, Homo sapiens
cggctggagcggatcccacacctccggaccgagggacgcggaaatgtagacaaccaatttcctgggcaagctgctccacctggattccca

SEQ ID NO: 226096 - DNA, 74 bp, Homo sapiens
cagagcgccgcgcacttcgtcatgttcttcgcgccctgagccccacagtcttcgttacaacctcatggtgctgt

SEQ ID NO: 226097 - DNA, 100 bp, Homo sapiens
ttattgtgaacaggtagagtacctgttgttgcagagttattttctgagtcagtttcaggggttatggttttgtgaaattcacagatgaactggaacagaa

SEQ ID NO: 226098 - DNA, 100 bp, Homo sapiens
cccaggggatatgtgtgtgtcgctgcagacccatcccggaagccggccgggaggtccccagtcccaagcggaagttggaagaaccagttctggagttcag

SEQ ID NO: 226099 - DNA, 100 bp, Homo sapiens
gcagcccaaacgcaccttcaccacagtccggaccccaaaggacattgcatcagagaactccatttccagacggtgtgaagggagacctgctgattgacat

SEQ ID NO: 226100 - DNA, 89 bp, Homo sapiens
aaagtttcatctgtggatggagtattggtcccttaatatggactttgaaaatcaagataaggagaaagacagtaatagttcttctgggt

SEQ ID NO: 226101 - DNA, 95 bp, Homo sapiens
gccgtgcgccgcagcccgggcccaggccccggcagcgcctgggacaaggtttcccggtcctctggcgaggatcctccaaggcgtctcacatgaac

SEQ ID NO: 226102 - DNA, 50 bp, Homo sapiens
gtggaaaggatggcccccaaaaagctccaccatgaggcgaggtggatgga

SEQ ID NO: 226103 - DNA, 100 bp, Homo sapiens
ccacagctaagatgccaggaccccctgggaagcctagaaaaatgcagcagtgttgtactgctacttctataaacggacagccgtaagactaggcgatcct

SEQ ID NO: 226104 - DNA, 51 bp, Homo sapiens
gagaaattctcgcagagcttacagatgccagtgacagtgggcgttcttata

SEQ ID NO: 226105 - DNA, 88 bp, Homo sapiens
gaaaacccatatatccgaatggaccctgaaccatcaatatgactacacatttgattggacaatgttaaagcagaaagcagcacagcag

SEQ ID NO: 226106 - DNA, 100 bp, Homo sapiens
aggtggcaccggtcggctggcgtccctcttcagttctctggagccccagattcaacccgtgtacgtgcctgtgcctaaatggcttgttgtcagaggcccc

SEQ ID NO: 226107 - DNA, 90 bp, Homo sapiens
cggtttttagtccattgactatgcagcctaatggcgggattaaggacactgcatgacattgggccagaaatccggcgtgctatatcgtgt

SEQ ID NO: 226108 - DNA, 88 bp, Homo sapiens
gaacttggttccccctccctcagcttccgccccaaaagatatgattctataacagactcttccagaaatgatatgaagaggaaatttg

SEQ ID NO: 226109 - DNA, 88 bp, Homo sapiens
agagctctcctccttcttcctcaactatctcgctgacacgcagagcattggggagtcagcaatgtccgttgtgttaaatcagctgctg

SEQ ID NO: 226110 - DNA, 50 bp, Homo sapiens
gtccggctcgtcggtgtcctccgatggagtcttgctctgtcaccaggctg

SEQ ID NO: 226111 - DNA, 50 bp, Homo sapiens
ggcacccacggagcctccggggctgggctgggttacgacccctacaaccc

SEQ ID NO: 226112 - DNA, 100 bp, Homo sapiens
ccgcggatctacgtgggcaacgcgtttggaataccttgtagcaggacatgaggatataagaacaggcaaactaattgtgaatatgaaaagctttgtccag

SEQ ID NO: 226113 - DNA, 100 bp, Homo sapiens
ttttcttatttagccggagtgagaagcaagaaggccctggacacagcaatatctctgggctttcacaggacatggtctgctatacagctcagactctcgt

SEQ ID NO: 226114 - DNA, 89 bp, Homo sapiens
acagaaacaaaatgtcaacaaattgatggggtttctatcttactaaaggatatttcagaaaatctatattcactgaggaggatgataat

SEQ ID NO: 226115 - DNA, 100 bp, Homo sapiens
gaaacaaggtcgacaactactcagacagttgaaatcggctcgagatgttgtatctaggactggtcattcattggctcttggttgtttgcatcgttatgtt

SEQ ID NO: 226116 - DNA, 83 bp, Homo sapiens
cccaggatttcttgcgtgcagtttgtgaagaaaaaattaggtacctgccgtgggcagatctgagctttcttcttggacacccc

SEQ ID NO: 226117 - DNA, 100 bp, Homo sapiens
aggaatccgagaagagcagagcggagggagccccagacacgggctatggcatttcctctgtgccatctgcttccaattctaaatccataaaagagaatag

SEQ ID NO: 226118 - DNA, 90 bp, Homo sapiens
acaagtacttcgacgaacactacgagtaccgggtctcactgtgtcacccagcggtggagtgacacggagtgtcagcggtgcaatcacggc

SEQ ID NO: 226119 - DNA, 100 bp, Homo sapiens
ctcagtttgatgcgtcacactacgacagtgagaaaggaggatttgctcgaatatttgggtacccagtaggtatcgttggaaacaacggagttctcttttc

SEQ ID NO: 226120 - DNA, 100 bp, Homo sapiens
gtccaaaacaaaaaatggcatcacctgtcaaaaatggagttccacttctccccgcagacctaggttcctcatgccatgcacctgctgtcacccagcatgc

SEQ ID NO: 226121 - DNA, 50 bp, Homo sapiens
ttcggccatcttggctcctccacaaggcgtcatcgttgtattggggaaaa

SEQ ID NO: 226122 - DNA, 100 bp, Homo sapiens
caggccccacaagtggccccagcccaggaacgaatctctcaggctgcatcaggatgaatgatgacccaagtatggaagaatcctttgtgcattgaagact

SEQ ID NO: 226123 - DNA, 75 bp, Homo sapiens
agacaaaggaggattcatgtccaaagggaggtggggaagacagggctccagctaccacaggacgggctctgggta

SEQ ID NO: 226124 - DNA, 100 bp, Homo sapiens
cccagggccgggaccgactcttcagttcagccagtgctacccctgaatttgaaggtagaggaggtgatgaccttggcaccgagatcgctaacaccctcta

SEQ ID NO: 226125 - DNA, 98 bp, Homo sapiens
cactgtccaccaggggagaatctacgtccttgagccccagtttgagggacagcgggatatccaccatgctgctgtgagactcgggcagttgtgactgg

SEQ ID NO: 226126 - DNA, 100 bp, Homo sapiens
atcgaccgcaacttacgggaggacggggaaaaagcggccaaagaagtgaagctgctgctactcgcgatccggaggaaggagaatggctggtacgatgaag

SEQ ID NO: 226127 - DNA, 137 bp, Homo sapiens
acatgattgggattgggccagtcttaaatatctacccatggaataaagagctgtatttgatcaggtaccctcacctgagtcccaagtacaaggagtcttttgatgtgggctgtaacctctttgccaagttttctgca

SEQ ID NO: 226128 - DNA, 83 bp, Homo sapiens
gctcagatatcgggctgaacggtcaaagacattcacaacatggatgaaccaaaaacttttgctagaaaatcagcttttacgag

SEQ ID NO: 226129 - DNA, 100 bp, Homo sapiens
atcacgctgccccccgacgagatcttccgcaacctggagaacgccaagcgcttcgccatcgacatagggcccccagatgccgacggccctctctacctcc

SEQ ID NO: 226130 - DNA, 48 bp, Homo sapiens
gggaaatctgtggctggagctcagcagctcaaaagccaaaagtctctg

SEQ ID NO: 226131 - DNA, 74 bp, Homo sapiens
aaaacaaaattctgaactcaggacttggcaaacgaacagcctacacctacaaccccgagcctcagatgtacgcc

SEQ ID NO: 226132 - DNA, 100 bp, Homo sapiens
tcttccccagctctgcagccacatactatccgtttgttcaggaaccaccagtgacagaggattatcttgaacacataacctccattggccccaggactac

SEQ ID NO: 226133 - DNA, 71 bp, Homo sapiens
gaacatctcaccaattttaaatcagtctgcagatctccaggggagcccaccagcctagtcaacatggcctc

SEQ ID NO: 226134 - DNA, 82 bp, Homo sapiens
ccggcttcggagcgggagtgttcgttgtgccagcgactaaaaagaggaaagctccaaccatggccatggggctcttccgcgt

SEQ ID NO: 226135 - DNA, 100 bp, Homo sapiens
gccatcaggtaggctgcgttgaggatctttgctcttccatccgcctttgatcgtcttcctcttcagccatccaggctggtggttcgtgagcacttctgag

SEQ ID NO: 226136 - DNA, 75 bp, Homo sapiens
agcgtgaccgagagcgcgaatatcgtcatcgttagaagggagaagttatagcactggataaaatcttcaacaaag

SEQ ID NO: 226137 - DNA, 78 bp, Homo sapiens
gccatcgccctgccggaccgcgcctcaggctcccccagggctggtgaattaccagatctctgtcaagggcagtaacct

SEQ ID NO: 226138 - DNA, 74 bp, Homo sapiens
caagctcctacttccagaaaaagtgctcctgggactccaggataccagtgagcaagaagaacccatcaggtgat

SEQ ID NO: 226139 - DNA, 82 bp, Homo sapiens
cagaagtcgcgtgtctaggtgagtcgcggtgggtcctcgcttgcagttcagcgaccacgacacagaatgttcagcttaacaa

SEQ ID NO: 226140 - DNA, 141 bp, Homo sapiens
cacctctgcggcgtacgtgggagtggggggggcctggatgcttctctctgctctgccctggctgggccactacaggtaatagcctgcagctggtgttttgagaagccctactgctgaaaacttaacaattttgtgtaataa

SEQ ID NO: 226141 - DNA, 82 bp, Homo sapiens
ttttcttctgcacttctgtctggagagtaagactttgaccccgacgcaggcttcagtgattgccgcggatcagaagcctgag

SEQ ID NO: 226142 - DNA, 100 bp, Homo sapiens
cttcggcaagatccagatcgggatttacgtggagatcaagcgcagcgatggcaatgaatcgctccctggctaatgtgattcttggaggctatggcaccac

SEQ ID NO: 226143 - DNA, 50 bp, Homo sapiens
cgggattcgcggcccggagctcgggaccgtaacccgtgtccatgccgccc

SEQ ID NO: 226144 - DNA, 100 bp, Homo sapiens
tgcccgaccgctttccgggagactggagtcgaaggccgtgaggaaataatgcaaaaggtgtcccaaggctcctgaccagtgaacaaagatttgagaaaga

SEQ ID NO: 226145 - DNA, 82 bp, Homo sapiens
tcaggagccatagtacctacagcagcactccagaaccctggggttattagtaaaacgattggagaaaggtggtaaagctgaa

SEQ ID NO: 226146 - DNA, 98 bp, Homo sapiens
cggctgcaggatgggggactccaaagtgaaagtggcggtgcggatacgacccatgaaccggcgaggtgctggagaatctggtaaaagcaccattgtga

SEQ ID NO: 226147 - DNA, 96 bp, Homo sapiens
tgttcccggacgcagtagatcctggagatgtggttacacagcttgaattggtgttcgtccatttggagtttctttacttatttgtggttggaatga

SEQ ID NO: 226148 - DNA, 73 bp, Homo sapiens
tgctgtcctgttcaccactctacctccagcacagaatttggcttatgtggatgattcaacagccacacaaagc

SEQ ID NO: 226149 - DNA, 74 bp, Homo sapiens
ggacgcacgccactttttctctgctgatccagaatgaaaatgcggttcttggggttggtggtctgtttggttct

SEQ ID NO: 226150 - DNA, 74 bp, Homo sapiens
taacccaaaggaggaaacagctggctaagctcatcattgttactggtcttcaaagcttcacctttctccaaagg

SEQ ID NO: 226151 - DNA, 75 bp, Homo sapiens
gcaaacatgacagcttctggaacttgaaaatgtggacacagacttgccaggcagcctggggcagagtgaagagaa

SEQ ID NO: 226152 - DNA, 97 bp, Homo sapiens
ccgaaggggagccatggcggctgacagtcgggaggagaaaggtacagcagggaagaactggaaactcagagaaagaaactgcccttccatctacaaa

SEQ ID NO: 226153 - DNA, 82 bp, Homo sapiens
aaataaatccctacattctccaccttctggaaatgtattgacaatgcagatcttcgtgaagactctgactggtaagaccatc

SEQ ID NO: 226154 - DNA, 75 bp, Homo sapiens
ctggtgtaccaggcgaagctggccgagcaggctgagcgatacgacggacgagtctcgaattaaggccactgtgat

SEQ ID NO: 226155 - DNA, 98 bp, Homo sapiens
ctgccctcagccgcccgctggccgggagcggagcccctgtgggactcgctcagcagcagcctgaaaacttgctacaagtatctcaatcagaccagtcg

SEQ ID NO: 226156 - DNA, 90 bp, Homo sapiens
ccgaattcttataaagctgtcatcaacctgggaaggaattcaggctggaaagaacaggcctttgagagcagccagaagtacaaagagggg

SEQ ID NO: 226157 - DNA, 90 bp, Homo sapiens
cgagggcgcgctcgagacgctcctgagaaacttttcagcattacctaagaagcaaaggctcaattttggctgcttcattcttatctcttc

SEQ ID NO: 226158 - DNA, 100 bp, Homo sapiens
gcgcagatagcagagccatccttgggctgtcgcctggttgggcccggaaatgggacgtcgcgctttctcagggagcgtagaagcagccagggcctctcca

SEQ ID NO: 226159 - DNA, 76 bp, Homo sapiens
agcacttgtcttttctccacagcagaaaccctggggacacatatggaggacaagatgcagtcactgaacaggcagg

SEQ ID NO: 226160 - DNA, 74 bp, Homo sapiens
ggcaacctccagatccatcacgtggggcaggacggtcaggtgctggagaatctggtaaaagcaccattgtgaag

SEQ ID NO: 226161 - DNA, 95 bp, Homo sapiens
atggattgggaagaaagaagcaagaatggtgttgtaaaagatcagccttcagatcaaagggattatatctgtgaatattgtgctcgggccttcaa

SEQ ID NO: 226162 - DNA, 100 bp, Homo sapiens
aggacccaaagtcatttcccaggctggcggagagaatggcggcgctagatagtaaggcatcagggaagatgggaatgcgagctgtagtctattatatgac

SEQ ID NO: 226163 - DNA, 51 bp, Homo sapiens
agagaagattggacagcaggtcgacaatgtatcggcaagcagtgtaaacgg

SEQ ID NO: 226164 - DNA, 100 bp, Homo sapiens
aagtgggggttatggtgggaggagccgatactgagcttcttcctatttgccatgggccctacatcattcgaggaatggcgcccccgacgacgccctgcag

SEQ ID NO: 226165 - DNA, 101 bp, Homo sapiens
ctcccctctgtactcggtgaagtcttttgaagagcttcggctaaagtggtggagagagagctggatgctcttttggaacagcaaaacaccattgaaagtaa

SEQ ID NO: 226166 - DNA, 100 bp, Homo sapiens
ctcggcgggctgcagcgagaagcacctgctggacaagcccttctacaacgacttcgagcgtggcgcgttctggccgggaatgattcaaacagggcagcca

SEQ ID NO: 226167 - DNA, 100 bp, Homo sapiens
ggagctcaatgcccacaaccaggcgggatgtagctcattttgggatacgagtctccatcgtggagcctggcttcttccgaacccctgtgaccaacctgga

SEQ ID NO: 226168 - DNA, 80 bp, Homo sapiens
gaaaaaactattaatcagcaaagaattcatgctacatgacagtgatatatcagcatatacttacgagcgcactttgatga

SEQ ID NO: 226169 - DNA, 98 bp, Homo sapiens
ctgaaatggactggcccccttgagcctgtcccaagccctggtgccaggtgtccatccccgtgctgaggtcttcagaactactagcagataatttgggg

SEQ ID NO: 226170 - DNA, 92 bp, Homo sapiens
tctctctttctggcctggaggctatccagctttggtaactctcattcgacatccatctgaactaatgaatgttcctcttcagcaacaaaaca

SEQ ID NO: 226171 - DNA, 82 bp, Homo sapiens
cctacatagagtcgcagggagcccaccgggcgggcctggccaaggtacatgtcccagagcaagcacacggaggcccgggagc

SEQ ID NO: 226172 - DNA, 51 bp, Homo sapiens
gggaagctattgctgggattttgaggagccggatcgagctgggagatgtga

SEQ ID NO: 226173 - DNA, 100 bp, Homo sapiens
ctggacgtgcagatggagacctgccgccggctcatcaaaggctccgcagacagatcccacttccagccgggcccctcatgtatccactggccgaccgcag

SEQ ID NO: 226174 - DNA, 82 bp, Homo sapiens
ccccctaaacaggagcacctgctggcgctaaaagtttcagctgtgagttcaacatggaggcaaatcagtgccccctggttgt

SEQ ID NO: 226175 - DNA, 82 bp, Homo sapiens
gcaagtacctgccagagaacgacctgaaggtgatccgcaggggctggctgaccatcaacaacatcagcctgatgaaaggcgg

SEQ ID NO: 226176 - DNA, 96 bp, Homo sapiens
ctggaaaggactggaattgatttgggaacaactggtcgtcttcagttaatggcaagacttgcagagggttggtcaaagaaaaagtgatgtatgaaa

SEQ ID NO: 226177 - DNA, 75 bp, Homo sapiens
ccatgcccttctgcttcaaacagagttttgcggcctccaggtggtggatccaatttttcattaggttttgatgaa

SEQ ID NO: 226178 - DNA, 75 bp, Homo sapiens
ctgctcctctagaagatttcacagcaatgctggactgcagtgactatgttctagatggaacagattaaaagggcc

SEQ ID NO: 226179 - DNA, 75 bp, Homo sapiens
atcccaagtggcccagcatgtggtatatgtttaaggaagaaatctctaaacgttttaaatcacatactgaccaac

SEQ ID NO: 226180 - DNA, 101 bp, Homo sapiens
ccgccagcaaggcgcagcgctaccgtgcccaggcaccccttggagctcatgcagctgaaccacaatctctacgaggtgatgagcaaactggagaagcaaca

SEQ ID NO: 226181 - DNA, 75 bp, Homo sapiens
tggtggcagtggggatggctataatggatttggtaatgatgtacaaggattttggccaaatgggatttagactgg

SEQ ID NO: 226182 - DNA, 100 bp, Homo sapiens
ccggccgcgaggccacggagagctcgccttggagagcccaggagcaggggagacatgacaaaactgtgtggagttttatcctatattcataattacattg

SEQ ID NO: 226183 - DNA, 100 bp, Homo sapiens
ctgctgagccccggcactgcctggctgcgagcacatgatggcgatacgggagctcaaagtgtgccttctcggggacttaaccaccaccatgtcgagcaaa

SEQ ID NO: 226184 - DNA, 84 bp, Homo sapiens
ctgtatgagctctcagcaagcaactttgagctgcacgttgcacaaggccacactggtgtgtctcataagtgacttctacccggg

SEQ ID NO: 226185 - DNA, 75 bp, Homo sapiens
cccgcggcgaccaagatcaggaacctgccctggttgggtatctacagccattggttgctgttcaggtcagctttg

SEQ ID NO: 226186 - DNA, 98 bp, Homo sapiens
gaaaaagaatgaaattcttcatctgaaattacctctcagactttctgtaaaggaaaacaaggagccttcacgtaaatgggtccagtcatgcctcccag

SEQ ID NO: 226187 - DNA, 98 bp, Homo sapiens
atgcctgtgggctctactacaagcttcacaattcacccacaaaagctgtatataatgccagacattggaatcatccagattcagaagaactgcctggg

SEQ ID NO: 226188 - DNA, 100 bp, Homo sapiens
tgcacgtactacgagacgtgtgctacatacgggctgaatgtggagagggtcttccaggacggctctgtgtgctccgggatggagcaggtgtgcagagggt

SEQ ID NO: 226189 - DNA, 100 bp, Homo sapiens
gaactcaaaagtcaaccgctgaagagcagattttgagaagagggggaaaaaggaagtttgtcctgtcctggatcagtttctttgtcatgtagccaagact

SEQ ID NO: 226190 - DNA, 83 bp, Homo sapiens
gcgggcagcctcctgtacagcccgccgcccctgcaggaaggagtcaagactgagaacaacgatcatattaatttgaaggtggc

SEQ ID NO: 226191 - DNA, 98 bp, Homo sapiens
ggtgcttttgaaccactggaaagtgaggaattttgaagtacaccgtggtgacattgtatcattggtgcatggaagaggagatggttcgtgttacgcag

SEQ ID NO: 226192 - DNA, 105 bp, Homo sapiens
agagccccggccgccgccagagcgatgttcccgcagagccggcacccggtctcctctgagcctccggcctccataagacccaaaacagatgacacctcttcccag

SEQ ID NO: 226193 - DNA, 50 bp, Homo sapiens
gaacttgcagttgaaggagtataacacagaatttgcaccatcctgggatt

SEQ ID NO: 226194 - DNA, 97 bp, Homo sapiens
aggcctcaaaagggcaggaccagcaccctcttctacggaggaaggaacgggcacagcagggctgtgggacagatgatgtctaccatgttctacccac

SEQ ID NO: 226195 - DNA, 75 bp, Homo sapiens
cgtcttccacctggagggcatgactacatctgtcatggtgaaaggtgtagcagtcactcggcctacacccacagc

SEQ ID NO: 226196 - DNA, 90 bp, Homo sapiens
cccgccccgcccggagccccggcccccacagtagccacgatggaggtgatgaacctgatggagcagcctatcaaggtgactgagtggcag

SEQ ID NO: 226197 - DNA, 111 bp, Homo sapiens
agacttgtctcttatttagttctggggagcgcctcgtcgacatgagtgatgtggaggaaaacaacttcgagggcagagtaagaatgattgatgttggctgatattggagtg

SEQ ID NO: 226198 - DNA, 99 bp, Homo sapiens
atgggcattactatgttagttggaataactggactcttttacactcaactaattggcatcatcacagtcaacggcagagacttatccagagcaactcat

SEQ ID NO: 226199 - DNA, 93 bp, Homo sapiens
ggagcgggggctgcaggctgagtatgagacgcaagtcaaagggagtgcatccgccccaacccttttccccctcgtctcctgtgagaattcccc

SEQ ID NO: 226200 - DNA, 83 bp, Homo sapiens
ctgccacaaacgccgcaccaggtcttgtagcagcgcctcctcggtgagcgagtgctgtgctttcatgggcctcttctttatga

SEQ ID NO: 226201 - DNA, 97 bp, Homo sapiens
aggcagcaaaaacaagagtccctctaaagcagctcaaaaggttgacctgacagttcaagaaaaggagaaatatcttaatgtgtctcgctggttttgt

SEQ ID NO: 226202 - DNA, 100 bp, Homo sapiens
ggatgtcgtctcagcagtgctcgggcgcaggggaacgcccttttgcttgtgactggcagggctgcgacaagaagttcgcccgctccgacgagctggcccg

SEQ ID NO: 226203 - DNA, 100 bp, Homo sapiens
tggcatcattaacggaccttttaccatgaatagttctactccttctacaggtgtgtatgtgtgtgatccagtcttgggtgacaagtgggacggcgaaggc

SEQ ID NO: 226204 - DNA, 87 bp, Homo sapiens
ttccaacgctgtaaaaaaggacagaggctgttccctatggcaggtgacttcatggtcatgacgattttcttcaatgtgagcaggcgg

SEQ ID NO: 226205 - DNA, 83 bp, Homo sapiens
tctcaggatatgacaggggtaacacccttccagatgatttttgaggatcaagtcttccataccagggaccaggccaaaaccag

SEQ ID NO: 226206 - DNA, 51 bp, Homo sapiens
caggcgactgcctcatcttcaagggcaccgcgtccgtgctgcagcgccggt

SEQ ID NO: 226207 - DNA, 98 bp, Homo sapiens
aggcttgtccatctgtaacttcattaaggtatcatgatattagctggtttgacatcaagtcatttgtgagtcatcagatcttctcctgaaaatgggag

SEQ ID NO: 226208 - DNA, 96 bp, Homo sapiens
gtgatcagtgcggtgcacagttttcgaaggaggatgccctggagacacacaggcagacccatactgaagggctgaactgatggaaggaatgctgtt

SEQ ID NO: 226209 - DNA, 75 bp, Homo sapiens
gagaaaaataggctgccagcaaacagtcttccgcaggaaggagatgtggaagggcgtgcccttcgacggagcctg

SEQ ID NO: 226210 - DNA, 100 bp, Homo sapiens
aaggcggctcgggctcgggctccgccccactgtgttctccttgcctcaaaagaaaactcggcacctgttaaacttggaggctttggggtagctattcaat

SEQ ID NO: 226211 - DNA, 99 bp, Homo sapiens
gtgagcgataatggcggatatggaggatctcttcgggagcgacgccgacagcgaagctgagcgtaaagtcatcttatcccatgcgtgtgaacagatgca

SEQ ID NO: 226212 - DNA, 100 bp, Homo sapiens
ctggcccggccctccttcagtttagttgaggataccacattagagccagaagcattgttggaaactgttactacatttttactggaaatactattattca

SEQ ID NO: 226213 - DNA, 80 bp, Homo sapiens
cgctgccagtttgcacagcagcagcaaaatgatgcttcaacacccaggccaggtctctgcctcggaagtgagtgcttctg

SEQ ID NO: 226214 - DNA, 100 bp, Homo sapiens
cttgctaaagagaagaattttggtttgggataaatttatgtggatcttcgctttggtgccataaaggggatggcctttacccttgaagaaaggctgcagc

SEQ ID NO: 226215 - DNA, 109 bp, Homo sapiens
agcaggtagcgccgctgctgaagagtttccaaggagagtgcaactgcagatagaagacctgactcgtaaactgcgcacaggagacctgggcatcccccctaaccctgag

SEQ ID NO: 226216 - DNA, 75 bp, Homo sapiens
gcctgtctcgtcccgaggccgtggctgaggtgaagagcttgtccacaatctgcaggagctccggcgaagtgcctc

SEQ ID NO: 226217 - DNA, 99 bp, Homo sapiens
tggccacctgtctgtctacagaaaacccaagtggaaccaccttgtccacaaattcgtcattggccacttaaaggagaagaaggaagttgtggaagaggc

SEQ ID NO: 226218 - DNA, 82 bp, Homo sapiens
gtctccctgtacgccgagggctccgtcaatggcttcatcagcactttggggcttgggcactgtttaaaggaaagttccgaga

SEQ ID NO: 226219 - DNA, 82 bp, Homo sapiens
ggggagcaaggtgcaagagtccacaaagggacctgatgaagcgaagatcaaggtagttgatgtcacttggcgatattcctgc

SEQ ID NO: 226220 - DNA, 88 bp, Homo sapiens
tgatggatacgaatatgcctacctgaaggcaatagtactcttcagtccagctcatcatgtcactacagtgaacagtacaaattgtaag

SEQ ID NO: 226221 - DNA, 75 bp, Homo sapiens
gagaagatcatcgagcatttcaaacgtctggctcttgctgattgaattcctttggtgcagtttagcatgttcctc

SEQ ID NO: 226222 - DNA, 75 bp, Homo sapiens
ggtccctgaagagggaagacacgcggaaacagttccagaaagctgagtctgatctggattacattcaatacaggc

SEQ ID NO: 226223 - DNA, 76 bp, Homo sapiens
ctccgagtcgaatgaaaatgagccacaccttccacatggtttgaaagagaagatagtgaggagctttgaagtctcc

SEQ ID NO: 226224 - DNA, 87 bp, Homo sapiens
cttgaattttctaaggtgtcattagcgggacgaccctgggacagtctccactggggcagatccagctgaccatccggcacagctcgc

SEQ ID NO: 226225 - DNA, 51 bp, Homo sapiens
ctcagagctggaggatgaaggatcggttttgacgaagtatattatgggcag

SEQ ID NO: 226226 - DNA, 75 bp, Homo sapiens
ccgccgagagccggaggcaatggatgaacagagcgtggagaccatctcagaaagttcttcctgtccaagctgtgg

SEQ ID NO: 226227 - DNA, 90 bp, Homo sapiens
gacgcctcagtctctggaaaacctgacaatgtcagtgcctactgcctgcatattgctgaggatgatggggaggtggacaccgatttcccc

SEQ ID NO: 226228 - DNA, 87 bp, Homo sapiens
gccccgcgcagcccccggccgcagcgcaggcagcccagcaggtgtctcccagtctgctaaagccctaaggccatcaccatggacttc

SEQ ID NO: 226229 - DNA, 98 bp, Homo sapiens
cggactgcggttggggcgggaagagccggggccgtggctgacatggagcagaagctgtgaataaggtgaaaattcaggccatgtcagaagtacagaag

SEQ ID NO: 226230 - DNA, 82 bp, Homo sapiens
gtcgaatccagtagaaaactggtcaaggaagctgtgaccaagaatatggcccaggtgaccaaagccctggacaaggccctga

SEQ ID NO: 226231 - DNA, 110 bp, Homo sapiens
agttgtttcctatccttattgctggtggctgctgtggtatggaagatcaaacaaacttgttgggcttctcgacggagagagctgtgactaatactactgtagaggatgag

SEQ ID NO: 226232 - DNA, 75 bp, Homo sapiens
tccattatttgagatgagttacatcttggagctagtgtcagcagtgggatacctgcgcttgaaggacatcatcca

SEQ ID NO: 226233 - DNA, 51 bp, Homo sapiens
tggacaagcgaatttcagtcagttcttgtgattcgtggtgataaagacgag

SEQ ID NO: 226234 - DNA, 80 bp, Homo sapiens
gccggcgcctcctcggagtccttggggacggagcagcgcgtcgtggggcgagcggcagacctccttgaggcccgccgccc

SEQ ID NO: 226235 - DNA, 100 bp, Homo sapiens
gacatctgcgggccggggacctgcatgtgtgtgcgcgcgaaggagcggaagaatggcagtgctcaaactcaccgaccaggcatcattcttaacaaagaag

SEQ ID NO: 226236 - DNA, 74 bp, Homo sapiens
ccagaaacacaggctagactggaagctttactagaagctgcaggagtccaaaactacttacctggaagaccttc

SEQ ID NO: 226237 - DNA, 88 bp, Homo sapiens
aagttttggaactgtctatctggtttcagacaagaaagccaaacgaggagaggaattactcacagatgaatgcttctcacccggaaac

SEQ ID NO: 226238 - DNA, 75 bp, Homo sapiens
aagtcccccaaagatgagatttacctgtgagatgtttcatcccaacagagtggacgcttctcttgtgagccagct

SEQ ID NO: 226239 - DNA, 100 bp, Homo sapiens
tctgtatcagcgtctgtcgcgctgggacccacactggcttttaaggaggacacccggacacctggaagctgggaaatgagtctcgctctgtcgcccaggc

SEQ ID NO: 226240 - DNA, 100 bp, Homo sapiens
atacaaatgaaccaagcacacgtgtccgaatatttggagtctgggagtgatccttttcatgttggtgtgtgggcagccgccctttcaagaagccaatgac

SEQ ID NO: 226241 - DNA, 74 bp, Homo sapiens
taagctgaacattatggcagccaaaagacaacaggctgactgtgctgtcctgattgttgctgctggtgttggtg

SEQ ID NO: 226242 - DNA, 83 bp, Homo sapiens
gatcttctcatattcgggaaggagctaaggcccgctacaacttcatccgaagcatggccgcctacagcctcctgctgttcctg

SEQ ID NO: 226243 - DNA, 126 bp, Homo sapiens
gttcggtccttccgaggaagctaaggccgcgttggggtgagaccctcacttcatccgggagaactaatgccgacgtgatgaccgccctgtcccagggctacaggatgccccgtgtggagaactgcc

SEQ ID NO: 226244 - DNA, 75 bp, Homo sapiens
acctggagcagcaagtgcaattttacgaaacgaagtaagcatttttcctgtggaagaacagcaggaagtaccacc

SEQ ID NO: 226245 - DNA, 74 bp, Homo sapiens
ttcttgtgcagttcacttcacaaggaaccacaataactttgtagccatcctggatctgccggaaggagagcatc

SEQ ID NO: 226246 - DNA, 88 bp, Homo sapiens
agtaggggtgcacctcagcactatcccaagactgctggcaacagattaatgacctctgagtttttgaagaaatctagttctaaaagga

SEQ ID NO: 226247 - DNA, 100 bp, Homo sapiens
atgcaatgtcacttacaacattaatcagatactgcatttaagacagagggataaattggaagaaatcttgcggggattaactccaaggaaaaatgatatt

SEQ ID NO: 226248 - DNA, 100 bp, Homo sapiens
atggactcggagattggctgcctcatccgcttctatgcaggttcgatacaagaggctgttttcctagcgtggcttgctgcctttggtaagaacatgtcgt

SEQ ID NO: 226249 - DNA, 98 bp, Homo sapiens
ccgggacagggatgtctacctggtaatagaggacttgaagcagaaagcaagtgaatacgagtcagaagatacatactgccatgaaagaaagctcacct

SEQ ID NO: 226250 - DNA, 100 bp, Homo sapiens
gggacctattgttcagttacaagagaaactttatgtgcctgtaaaagaatacccagatgtaaaagaatgtcacatgtcagcatttgtacctgaagtcagc

SEQ ID NO: 226251 - DNA, 100 bp, Homo sapiens
gttcatttcaacagccagggagaaagcctggatgctcaagccttggggctctattttgcggaattggaatttcttagctgtgacacatccaggttacatg

SEQ ID NO: 226252 - DNA, 100 bp, Homo sapiens
tcggagatccctgcggtcccgcgggacggcgcggcagcagctgacctcgcagctccttcgagaactcatagaacggaagaccagctccttggatcccaac

SEQ ID NO: 226253 - DNA, 98 bp, Homo sapiens
ctccacctggacctgccccatggaggtgctgcgggatcacctcctcggcgtgagcgacagcggcaaaacaaatttacatgtattggagaccagaccag

SEQ ID NO: 226254 - DNA, 75 bp, Homo sapiens
gtcctcatgtggggggtaaaccactcggtcacagtaatgaaaggcagtaatagaaataaggatcattcagcagaa

SEQ ID NO: 226255 - DNA, 90 bp, Homo sapiens
gtgacatacctgccaggcccattgtgtccatcgctctcagagcagctggggattgtgtgtttaactgctgaagagatcttttcccttcat

SEQ ID NO: 226256 - DNA, 100 bp, Homo sapiens
gccgcgccctcggcctgcacggaatggcttattcagaagagcataaaggtatgccctgtggtttcatccgccagaattccggcaactccatttccttgga

SEQ ID NO: 226257 - DNA, 100 bp, Homo sapiens
cgcacttcctgcagtgggcattagccacgtccagattgaagcactgaagtcattctcaaaatcagacctggtcaactggttcaaggcccatagagggcca

SEQ ID NO: 226258 - DNA, 75 bp, Homo sapiens
tgaggacttccttagtggtttccagaaacggtgggagcccagagtatatgagatgtcttcagaggctcatctaac

SEQ ID NO: 226259 - DNA, 83 bp, Homo sapiens
cgacaagccgctggcagccgcggatctcaccgccgctcaggctgtcccctttcctccaacccaacggcttactttcaaggaag

SEQ ID NO: 226260 - DNA, 100 bp, Homo sapiens
ccctcaggagcgggagttcaccacagctgtatcaagtcctgggggccagtctgttgtgctaggaagttatgacagatatgtgttgattgacacacctgga

SEQ ID NO: 226261 - DNA, 74 bp, Homo sapiens
atctgatgctgtggaacttgcaaatcgaagtgaagctgtggtctaccaatctagacaactcagtggcaagcatt

SEQ ID NO: 226262 - DNA, 88 bp, Homo sapiens
aacaagaagactctttgtttgaagaaatgcttcaagttgctaatgctataatctgacaggatggcatctgatgactttgacatagtga

SEQ ID NO: 226263 - DNA, 82 bp, Homo sapiens
ctccattggatttaaaagacagtcctcgtcagcactgactttcagctatggaatcgtctgatcatcggatatcatggagtct

SEQ ID NO: 226264 - DNA, 124 bp, Homo sapiens
caggaggaagcgatggcttcagacagcatatttgagtcatttccttcgtacccacagtgcttcatgagaggtggagccgccaccaaaatgcagattttcgtgaaaacccttacggggaagacca

SEQ ID NO: 226265 - DNA, 75 bp, Homo sapiens
ctcagccaggggcagccggctctggtgctcccagaagaggtgtgatgaatgcagactctgctaccattttggctg

SEQ ID NO: 226266 - DNA, 82 bp, Homo sapiens
gcgcggctactacaatcagagcgaggccgggtctcttctggggtctacgagccagttgtgattgaaagccattgaggagcag

SEQ ID NO: 226267 - DNA, 101 bp, Homo sapiens
gtctccaaggggaggctcctcagagtgcactgagatcccaggaggatggccacatccccccgggctacatctcacagtctacatcagcatcagcatctgcg

SEQ ID NO: 226268 - DNA, 76 bp, Homo sapiens
gacgaggaagaggaggtttctgagcatcagcgagagctttctaactgtcaaaggtgctgccctttttctaccacgg

SEQ ID NO: 226269 - DNA, 100 bp, Homo sapiens
cctgtttctctccgccgcgctctcgctctggccgacgagtggagaaagttctctacttaaaagacaatgactactgatgaaggtgccaagaacaatgaag

SEQ ID NO: 226270 - DNA, 100 bp, Homo sapiens
ccgaagctgcatcctggtctccattgcgggcaagaatgtcatgctggactgtggaatgcacatgggcttcaatgacgacctaccagccctgcttcgtcct

SEQ ID NO: 226271 - DNA, 75 bp, Homo sapiens
acgcactgactcgcctcaagcacctgcgcatcgtcatcgtggccaatccgccatggtatagttgaagattgggac

SEQ ID NO: 226272 - DNA, 88 bp, Homo sapiens
ggccagcggagccctgggctggggcaggagccggtatagccgagaccatgtggtggaaggggaaccgtatgctggttatgatagacac

SEQ ID NO: 226273 - DNA, 100 bp, Homo sapiens
aacaatccaatccttacatggttttagatatagaattctggatgaaattgaagaacataacatcaaaatctatcacttacctgatgcagaatcagatgaa

SEQ ID NO: 226274 - DNA, 100 bp, Homo sapiens
atgaaggctagtttggatgtggaggggaatagactccatctatccatatgagcccttgaaggtagtggacccagatcatcccctcgcagcacttgttcgt

SEQ ID NO: 226275 - DNA, 83 bp, Homo sapiens
ttgctgtacgagagcaagctctataagattcttcaaggtggggttggcatcccccacatacgacaatgcagatcttcgtgaag

SEQ ID NO: 226276 - DNA, 100 bp, Homo sapiens
ccttccgcgaggcttcggccaagctaaccacgctggtggatgccgacgccgaggccttcaccgcctacctgccacacccactcgcccgggtctatggcca

SEQ ID NO: 226277 - DNA, 98 bp, Homo sapiens
tcgcgtgtcaggcggttgctaggctccggccgcgcgccccgcccttgcgctcagcgccctctcaccgcccgaaaattggcaacttctccatcgtgcgg

SEQ ID NO: 226278 - DNA, 50 bp, Homo sapiens
ttcgtctatgtggcgcccggcataggtattctcatgggagcagttataaa

SEQ ID NO: 226279 - DNA, 100 bp, Homo sapiens
tgtatctcaacaccctgagtgcggatttctgctatgatgacaggcaatctttggcagccagacactacctaactccaatttatggacaatgaataatggt

SEQ ID NO: 226280 - DNA, 100 bp, Homo sapiens
ctccagcgggcatcaggagcaggacacagaactgggcagtacccacacagcagatcttctggtgaccccacttctcgctgctcatgccgctgggactggg

SEQ ID NO: 226281 - DNA, 87 bp, Homo sapiens
cagctccagacatgtggctcttcttcgggatcactggattgctgacggcagccctctcaggttgaaaggattgttgacaaaaggaaa

SEQ ID NO: 226282 - DNA, 100 bp, Homo sapiens
aagcggtttcaaacggcttagagcaggccgcttggttctgacccagctgagatcagcccggaggaagaggagcgccgccgagtaaggcgcgagcggaaca

SEQ ID NO: 226283 - DNA, 89 bp, Homo sapiens
cgcgcgtcagctggtcaggtgcccagcttcgcagaatcaagaacggctatgtgcgtttaaagatccgtatcagcaagaccttgggatag

SEQ ID NO: 226284 - DNA, 75 bp, Homo sapiens
attatgtgggacccctacaccggcgaaaggctgaggtcactccacaaaatctacctcttccaaagaggcagaatt

SEQ ID NO: 226285 - DNA, 80 bp, Homo sapiens
aaaaacgtcaacaacagttttacgttattgccttgtctgtcaagatccgcagttatgaagaacacttggagaaacatcga

SEQ ID NO: 226286 - DNA, 123 bp, Homo sapiens
ttgtggagacaacgccttaacccaaggaagtgactcaaactgtgagaacttcagaattctggggagacattgccaaggaattttactggaagactccatgccctggcccattccttcggtaca

SEQ ID NO: 226287 - DNA, 102 bp, Homo sapiens
ctcgatcttgggacccaccgctgccctcagctccgagtccagggcgaggtgctggagaatctggtaaaagcaccattgtgaagcagatgaggatcctgcatg

SEQ ID NO: 226288 - DNA, 51 bp, Homo sapiens
cccagaggcgagccctggtggaggaagaggcaattaagttggaatatgcaa

SEQ ID NO: 226289 - DNA, 75 bp, Homo sapiens
atgtgagtggaagccatgaggccaaaggcagttgtattggaatggaagttggatacactttgtgacttgtacgag

SEQ ID NO: 226290 - DNA, 75 bp, Homo sapiens
gaagttccctcacattagccagtgtgaagacctccgaaggaccatagagaccgtccaggctggacttgaactcct

SEQ ID NO: 226291 - DNA, 82 bp, Homo sapiens
aagcaaacatctttgaaggagagatgattgctgtggctcgctgagaagccaggcatggaagaggagatggttcgtgttacgc

SEQ ID NO: 226292 - DNA, 75 bp, Homo sapiens
caagcacttgctctggagggaagagcgatgggagagtgtgggccaaactgaaattgcagaaggcttcagaacgat

SEQ ID NO: 226293 - DNA, 100 bp, Homo sapiens
ctcgtctacttcctcagcagcaccttcaagcagaggcacagagctttggcctgctggatcccaaactctgctacctgctggatggaatcctcttcatcta

SEQ ID NO: 226294 - DNA, 122 bp, Homo sapiens
cccggtatgagcgggagcagtatgccgatcgggcgcggtactcagccttttaaagcttgaggcaaccggtgaccaaaaacactttcaggcagtatcgagtgctaggaaaagggggcttcggg

SEQ ID NO: 226295 - DNA, 98 bp, Homo sapiens
agaaaagggggaaaatgcccaggaggaagcaggagcagcccaagcgccttccctcacaatgaagagcttcgaaacttgtctttgtctggccatgtggg

SEQ ID NO: 226296 - DNA, 82 bp, Homo sapiens
cgaagatgcagtacaattcataagacagccaagatcaaggctcgagatcttcgcgggaagaagaaggaggagctgctgaaac

SEQ ID NO: 226297 - DNA, 100 bp, Homo sapiens
ccgccgccgccgcaggccgggaggagccgcagcgccgggcgaccccgcccgggcctcgggctatagaaagcgcaattggtggtaacgcttatcaacacag

SEQ ID NO: 226298 - DNA, 99 bp, Homo sapiens
agaaatgagatccgcttcctgcccaacgccaagaagtatgatgcgtttttggcctcagagtctctgatcaagcagattccacgaatcctcggcccaggt

SEQ ID NO: 226299 - DNA, 83 bp, Homo sapiens
aagagtcagcctgacatggccattatggccgtcaacacctttgtgaagcatttcaccaaccagagggaagaatttgagggcac

SEQ ID NO: 226300 - DNA, 100 bp, Homo sapiens
tccctacactgaactgctagtactgaaggctcatcatgatattgtacgatttctggtacagttagatgactacaggagcatccccccggtccttcagaat

SEQ ID NO: 226301 - DNA, 75 bp, Homo sapiens
ggattgactgctgctggggctgggctcgccagtcttggggacagtgtcagcgagcagtgaggagaatgaatacct

SEQ ID NO: 226302 - DNA, 75 bp, Homo sapiens
cagaggacgccttcaacaccaccttcatctccaccatcgtttgtgaatagcacaatggaagaagctggactttgt

SEQ ID NO: 226303 - DNA, 73 bp, Homo sapiens
cgcagtggtcgcttcttctccttggaaaaccaattctgtgtcctcggaggaccacagcccagttgggccccag

SEQ ID NO: 226304 - DNA, 82 bp, Homo sapiens
tttctttgtcatgtagccaagactggagaaacaatgactgcagcattccagaaatagagcttttcccacaatctgacccagc

SEQ ID NO: 226305 - DNA, 90 bp, Homo sapiens
gggatgtcatgggaagccagtgaggtagtcaggtgctggagaatctggtaaaagcaccattgtgaagcagatgaggatcctgcatgttaa

SEQ ID NO: 226306 - DNA, 74 bp, Homo sapiens
cctatagaagatcctgatcctgaggttatggcaaagctttccagagtgttgaatcttccaccagaaaacttgat

SEQ ID NO: 226307 - DNA, 75 bp, Homo sapiens
gttctgcctcacacggctcaagtcaccaccgtgaacaaggtggaatcaagctggcctgcacttcatgtacctttg

SEQ ID NO: 226308 - DNA, 101 bp, Homo sapiens
gagttcttcagcgaggagaacagtccgaaatggcggggactgttggtctcggccctgcggaagctgactacacagacttagtcttctccactccgtgttcc

SEQ ID NO: 226309 - DNA, 121 bp, Homo sapiens
gccgagaagcggcacacacgggactccgaagcccagcggctccccgactccttcaaggatggcttctgggaggccctgggcgggaaggctgcctaccgcacatccccacggctgaaggaca

SEQ ID NO: 226310 - DNA, 88 bp, Homo sapiens
gaccgagaccgtgaccgagagcgtgaccgagagcgcgaatatcgtcatcgttagaaggtttttcgttggaatatacgttgcacattta

SEQ ID NO: 226311 - DNA, 88 bp, Homo sapiens
ggaactattttgttcgtgataaactggatcctgatatggctctttgccgaaatgctagagaaatgaattggcagagggggtcgatttg

SEQ ID NO: 226312 - DNA, 100 bp, Homo sapiens
cctggctttgacgccgagagctacacgttcacggtgccccggcgccacctggagagaggccgcgtcctgggcagaggtggaggtggaggaagcgtccctg

SEQ ID NO: 226313 - DNA, 74 bp, Homo sapiens
taaagttacaaatatgggatacagcaggacaagaacgattcaggggatgttcgtctaaccccagaagactttgc

SEQ ID NO: 226314 - DNA, 82 bp, Homo sapiens
aggcaaccccaaagccgcgcgagcagtgggaggagcaatgagaggcaatcctggtgaaaagttcggaccctttgctggagag

SEQ ID NO: 226315 - DNA, 74 bp, Homo sapiens
tggcaagtggagcagagtcccaggacaggccgcaaaagataagtaccgtgaattggctgtggaagggatgcaca

SEQ ID NO: 226316 - DNA, 74 bp, Homo sapiens
aacctttccaagcaagcatgggacaccaagaaggaagaggagttgtacgcatgtcagagaggttgcaggctgtt

SEQ ID NO: 226317 - DNA, 96 bp, Homo sapiens
gacagatctgagagatactgaggatattttgctcatcaacctcattatagaacatatgatttgtgatacagatcctgaacttggaggagcagtcca

SEQ ID NO: 226318 - DNA, 90 bp, Homo sapiens
caaagtctcgcttctgccgaggtgtccctgtgctcttaaagttccgtacagataaaggaagagatcccagttctgatacatatgaggaag

SEQ ID NO: 226319 - DNA, 98 bp, Homo sapiens
ttgtgttcaagcggaaaaccaattggtttaaaagaagagccagcttgctagagaagttttggatgttgctgccggcatgattaaaccaggtgtaacta

SEQ ID NO: 226320 - DNA, 80 bp, Homo sapiens
ctgacataccaggactgcctgagacaagccacaagctgttgtcgagatgtccacagaaggaggatttggtggtactagca

SEQ ID NO: 226321 - DNA, 83 bp, Homo sapiens
caaggataagggcgacagcaacagctctgccggctggaaggatttttagactctgaggagcagttggagctaatccacattat

SEQ ID NO: 226322 - DNA, 100 bp, Homo sapiens
gtttctccatagtggtgcttccgtcctccagattgcttccaagtatgatcatcaggcagaagaagatcttcgcaattggatagaagaggtgacaggcatg

SEQ ID NO: 226323 - DNA, 98 bp, Homo sapiens
gccacgtgtaccagtgtgtgttgatcttggcttgattcagtctgccttgtaacaggcagaagctcctcctggggtagagacagatcttattgatgttg

SEQ ID NO: 226324 - DNA, 103 bp, Homo sapiens
tgagaacatggtgtctggagttaaagtctcacagaaagttctccgctcccagacatgggtccctcggcttcctgcctcggaagcgcagcagcaggcatcgtgg

SEQ ID NO: 226325 - DNA, 51 bp, Homo sapiens
gacatggaccagggctacggaggttgggcccgaaggcatcctgcagaacgg

SEQ ID NO: 226326 - DNA, 101 bp, Homo sapiens
gtccccctctccgccccccaggaggggcgagagggagccgcagctgatgtcagattgaaaaggaagatcaggccaaccccaaagaagaagtgaccaaggag

SEQ ID NO: 226327 - DNA, 80 bp, Homo sapiens
aggaggaagacgaatcgttaaacatctgaaagggtcagcgtctgttcctcacacaccccgcccaaggacgtgcctggcag

SEQ ID NO: 226328 - DNA, 92 bp, Homo sapiens
aggtccggggcttgccctggtcttgctcggccgatgaagtgcagaggtttttttctgatcctaatgtggctcttacttttctggaaaagact

SEQ ID NO: 226329 - DNA, 100 bp, Homo sapiens
accttcagaaacagtgctgaagcctttaaatgcagcatctgcgatgtgaggaaaggcacctccaccagacatatgtagagtgtgtcggtcagaaggaaca

SEQ ID NO: 226330 - DNA, 82 bp, Homo sapiens
ccggacgtgtccgcgaagatggcgggccggacgccatttggaatgaacaggaaaaggctgaactttttacagataagttttg

SEQ ID NO: 226331 - DNA, 120 bp, Homo sapiens
tttgaccttctgccatgattgtgaggcctccccagccacgtgaaactatgccgacaaaaggatcaaggtggcgaagcccgtggtggagatggatggtgatgagatgacccgtattatctg

SEQ ID NO: 226332 - DNA, 80 bp, Homo sapiens
cggggagcgcccccggcgcgatgcccttcaggaaagcgccatcatgaccgggtcctataacaacttcttcaggatgtttg

SEQ ID NO: 226333 - DNA, 75 bp, Homo sapiens
ccgctactttgtaatccggatccaggatggtactgggaatatccccggctcggctgtgctggtgtttgacatcca

SEQ ID NO: 226334 - DNA, 78 bp, Homo sapiens
cccccaagtgatgggcagaaggagagaaggtgttttggatgcattctagaacacagagcagcccgacggccatggagg

SEQ ID NO: 226335 - DNA, 100 bp, Homo sapiens
agagtcttgttatttcttctttgagaaaaacctgaaagatgtctcagtcgctgaaaattttgttccccctctgttggatgcagttctcattgattatcag

SEQ ID NO: 226336 - DNA, 50 bp, Homo sapiens
ggtgccggcgccggagacgatgccgttcaattctgtggtgttcttggtca

SEQ ID NO: 226337 - DNA, 101 bp, Homo sapiens
ctggaccggatcctccgtgccaacctcaacggcagcaacgtggaggaggttgtgtctactgggctggagagcccagatgagaacagcttagttcctcctgc

SEQ ID NO: 226338 - DNA, 75 bp, Homo sapiens
gaaaatggagcccttcaccaatgatcaagcgctcgtccatccggaagggcatggtgatggtttccccacgtttga

SEQ ID NO: 226339 - DNA, 82 bp, Homo sapiens
ctggcctgccatgtccgggagaagacagtgagaagccctaccactgcaactgggacggctgcggctggaagtttgcgcgctc

SEQ ID NO: 226340 - DNA, 80 bp, Homo sapiens
attatacagaatgttggctcatgaggaggcaagtgaggcctatctggttggcctttttgaagacaccaacctgtgtgcta

SEQ ID NO: 226341 - DNA, 101 bp, Homo sapiens
tggagttggagacaattcctggttcagaatttaaacatctttctagggaggttcccctgaaggatgctaaggaatacgctgaatccataggtgccatcgtg

SEQ ID NO: 226342 - DNA, 100 bp, Homo sapiens
tggatcaagcaggttttaaatcaagatttaacattccaacacataaaaattatttatccaacagctcctcccagcacaagtgcatacaccttgatagcac

SEQ ID NO: 226343 - DNA, 100 bp, Homo sapiens
tgctactgtgcgctcgatccagcaccatggggaagcgggacaatcgggtgggcgccctgcgtccggcagaggaggcgagcatcccgctcaggtgatgagg

SEQ ID NO: 226344 - DNA, 75 bp, Homo sapiens
cttcgcctcgccccgccggttcctcaccctcggggagcaacatggtttccaacatggctagatccatcagaaact

SEQ ID NO: 226345 - DNA, 100 bp, Homo sapiens
cggggtcacccgctacgggaagcaggcctcgccacagcatgttggcagataaattgaacatgactccagaagaagctgaaaggtggattgtaaatttgat

SEQ ID NO: 226346 - DNA, 75 bp, Homo sapiens
ctctctctccagtccttgctgaagagactttccgttacatgacatgcttttcacttccactgcatctctcgctgg

SEQ ID NO: 226347 - DNA, 98 bp, Homo sapiens
tggaattctgtggggctggttctctccaggacatctaccaaggatccagtttgtgtgttctctgtgcaaataccggaccttctatgaggacgagatgg

SEQ ID NO: 226348 - DNA, 90 bp, Homo sapiens
catgagcattggatttgatcacatgggtgctgtgacatgtatatggatgaatgaacagtgtagcagtatcatcacaggaggggaagacag

SEQ ID NO: 226349 - DNA, 74 bp, Homo sapiens
atattcaccaagcgcttcgctacaagacttgtcagcttgtgggaaagtgacatcagcgtccacccgctaaccct

SEQ ID NO: 226350 - DNA, 95 bp, Homo sapiens
ggaatttcttcctttcctctctgattcttgctgtactttgcaccaactgtatcttcagatacacagacaaagaagtatgctgatgtgatcatccc

SEQ ID NO: 226351 - DNA, 83 bp, Homo sapiens
cgcggcggcagcagcagtgagaggagccttcacgtaaatgggtccagtcatgcctcccagtaagaagccagaaagctcaggaa

SEQ ID NO: 226352 - DNA, 98 bp, Homo sapiens
agcggccggtactgttgaaagcgacaagtggaggcgccgctctagcggccgggactctgaactatggcggttgggcccgaaggcatcctgcagaacgg

SEQ ID NO: 226353 - DNA, 100 bp, Homo sapiens
cgagcccggtcgtcggggcggtagaacctggaagcgggagagtggtctgacctcctgccccccgaggtctgcagtctcctgaacccagcagccatctacg

SEQ ID NO: 226354 - DNA, 83 bp, Homo sapiens
agtggagcccaaagacccctggagacatggcgtccgagctgggccacagcctgaacgagaacgtcctcaagcctgcgcaggag

SEQ ID NO: 226355 - DNA, 90 bp, Homo sapiens
aaagctcaaaatgacaactccaagctacagattccaatacctcattccctaagacttcaccatgatcatgatgctatggactcctactac

SEQ ID NO: 226356 - DNA, 83 bp, Homo sapiens
ctttattattggaaatcttcaagttcaggaaaggaatttgctgattcccttggaattccgtttttggaaaccagtgctaagaa

SEQ ID NO: 226357 - DNA, 90 bp, Homo sapiens
cggaccagaagtcgccgaacgttctgctgcagaacctgtgctgcaggatcctgggcaggagcgaagacaatgcagatcttcgtgaagact

SEQ ID NO: 226358 - DNA, 50 bp, Homo sapiens
tggatcgctgtgatcgtcacttggcccagggccccggccagtgcccagcc

SEQ ID NO: 226359 - DNA, 75 bp, Homo sapiens
aaaatcgctgcatagtaatattgcgtgaaatatctgaatctacccccgtggaatgcacgagcatagctgtgtctc

SEQ ID NO: 226360 - DNA, 98 bp, Homo sapiens
tttacggaagtgtaacgttgaggcccttcttgtgtatctggagaaaatagagataatgctctaccacaagaaaatggcctctcacctggggccattgc

SEQ ID NO: 226361 - DNA, 98 bp, Homo sapiens
cagatgcgggccctgctggaccagctcatgggcacggctcgggacggattttttatcaagcagaaatgcatcgaacaacgagaatcaagatcactgag

SEQ ID NO: 226362 - DNA, 80 bp, Homo sapiens
aaaggaggtgctgaagcaatgttagttgtcaataacagtgtcctagtcaccctcgtcgactgaaagtgaaacctgattct

SEQ ID NO: 226363 - DNA, 100 bp, Homo sapiens
caagagtcataggattagatgatccaagtcaccaagaaattactgtctcaagtgatacgaaacagcacttcttctcagtctcagacaagtactgcctcca

SEQ ID NO: 226364 - DNA, 50 bp, Homo sapiens
gtggtccagggcagggccactccagacaaatttacatgtattggagacca

SEQ ID NO: 226365 - DNA, 83 bp, Homo sapiens
gaaaagaagaggaggaattaaattttaatgaagatattctgtgtccacatggaatgccatatggcagccgagagaactccctc

SEQ ID NO: 226366 - DNA, 75 bp, Homo sapiens
ctcgctgggagagaggtacctctccttttccctctccctttccctaaggacaccatgtaaaattgaacctagtat

SEQ ID NO: 226367 - DNA, 100 bp, Homo sapiens
cccggaccctgtactccagcgcgtctcggagcacagacttgtcttacagtgaaagcttcttcaccaaaggacatggatgaaaatgaaagcaaccagtctc

SEQ ID NO: 226368 - DNA, 90 bp, Homo sapiens
cggacacgccagaggaggaggccggggaatggccgcggtgtggcagcaagtcttagcagtggacgcgagtgctacagcctgctgtcgagg

SEQ ID NO: 226369 - DNA, 93 bp, Homo sapiens
ggggaaactaggtcgatggtcggcggcgcccggatgggcagctgaggatttttagactctgaggagcagttggagctaatccacattatggaa

SEQ ID NO: 226370 - DNA, 98 bp, Homo sapiens
cgacgcgcggcgtttacccagcgcagcgttccaccgctcgggtttggctgggaactttatattgctgttggaatatctggagccatccaacatttagc

SEQ ID NO: 226371 - DNA, 74 bp, Homo sapiens
gcaagcgctgtcccccagcagaggtgtccctggatacagtgccggtggtggtgtgcacattgagccccggtata

SEQ ID NO: 226372 - DNA, 100 bp, Homo sapiens
catggggctggcctgcggcgcctgggcgctctgaggtgtggatgtggaagcagccaagcgggcagaagaggaattgctccttcatgacacgaggtgctgg

SEQ ID NO: 226373 - DNA, 90 bp, Homo sapiens
ttttgcacttgtgtttaaaagtgttcattttcccgggcaagcagttggcacaagggagaagagaagtttacctttattgagaaatgtaac

SEQ ID NO: 226374 - DNA, 89 bp, Homo sapiens
aaggatgcaaattctccagaatttcaagcacaaccccaaaattaacaccatcttcatatccaaggtccggcccggagcggccatgtccc

SEQ ID NO: 226375 - DNA, 75 bp, Homo sapiens
gttcaagcgaaaacatgaccgctgagcccatgagtattctgacaagtccctgtacacccagctgtgcttttaccg

SEQ ID NO: 226376 - DNA, 100 bp, Homo sapiens
atttggcccagctgtgttgagcttttcatggattatcttacgtagataagacactgcaacaggaattcggcaccggttgagaggtagtgccaatgctgtg

SEQ ID NO: 226377 - DNA, 112 bp, Homo sapiens
ccatcatcctcttcacagggttctgcatcttagcctgctgggaactctaatgatccaggacaaagaagttaccctggagtatgtatcaagcctggatttttggtactgcaaa

SEQ ID NO: 226378 - DNA, 75 bp, Homo sapiens
caaccaggcaatgctggatagataccgaattcttatcacaaaggctgaccggttccctgatgtgttacctgcttc

SEQ ID NO: 226379 - DNA, 101 bp, Homo sapiens
ttgcagagtatgggatatgtcaatggatgagatacatgactgatggtggacttggcctctatacccgtcgcctgaaccggctccctgatgggatggctgtg

SEQ ID NO: 226380 - DNA, 82 bp, Homo sapiens
aaaaaagaggaattccagaagggccaccccgacctccaagggcagcctggtgtgggccatgtttgaggattgccccagcatt

SEQ ID NO: 226381 - DNA, 74 bp, Homo sapiens
tgttcagattcacttccttctcatccttttccaccagctaaagtaatctatgccagcaattatgacaatgttag

SEQ ID NO: 226382 - DNA, 50 bp, Homo sapiens
ggccctgcaggagcagccaaagatgtgggaaggcaaagaggaaattgtga

SEQ ID NO: 226383 - DNA, 75 bp, Homo sapiens
ggatgcagaggatcagaaccggtacctggatggcatgcggagctggagtttgttcagatcatcatcatcgtggtg

SEQ ID NO: 226384 - DNA, 129 bp, Homo sapiens
gcaaccgcagagagctcttcattgctgctgtctgcatcatctcctacctgatcggtctctctaacatcactcagatgggatgtaatgaccgaatttccccaagaaagaagctccatcagtttggtcagc

SEQ ID NO: 226385 - DNA, 99 bp, Homo sapiens
aaacttgaaaaggagaagagaggagcagtattgacaacaacacaatatgggtgtacctgaaggaaatcttaaaagaaattggtgttcagaatgtaaaag

SEQ ID NO: 226386 - DNA, 75 bp, Homo sapiens
tgttcatcatgggggtactgtggacaagcccagggctgctgggaaaaagacctcgatgaagttctgcagacccac

SEQ ID NO: 226387 - DNA, 75 bp, Homo sapiens
acaagacgggcacgctcaccaccaatcagatgtctgtctgccggaacccccttggtcctgattataagggctgcc

SEQ ID NO: 226388 - DNA, 80 bp, Homo sapiens
cggttaacagcctatgggtgaaatttggctttcattcatgaatgagttggattggatgctgctggcaagacaaccattct

SEQ ID NO: 226389 - DNA, 97 bp, Homo sapiens
gacaggggagtaaggaaagcaatcgaagaccttatagaagcagcagccgctcttctaaaacattcaaaccaaagaagaatatccctgaaggatctca

SEQ ID NO: 226390 - DNA, 75 bp, Homo sapiens
tcctcaacgacgcggacatggtcatgagctttgtgaacctgggaggaccccgttctggagcgttatttcaaaggc

SEQ ID NO: 226391 - DNA, 75 bp, Homo sapiens
tcttctccaagctcatgtctgtgtgcgtcatgttcaccaactgcatgcagatctctcacttcaagattccgaagt

SEQ ID NO: 226392 - DNA, 80 bp, Homo sapiens
ccgccgtctaaccgctacgagacgctgctgaagcagaggcatgtgcaggtaattaatgtggacctgattcatattgaaaa

SEQ ID NO: 226393 - DNA, 100 bp, Homo sapiens
cgcggtgcagggtaacatggcggatgcggaaggaatgggtaccacagaccatgtcatcgtcctggcgtccacgaaccgagctgacattttggacggtgct

SEQ ID NO: 226394 - DNA, 75 bp, Homo sapiens
cttctatgtttccacatcggtcagaaaaagatttgcagagcttgaagtgaaaaccagagaaaaattagaagctgc

SEQ ID NO: 226395 - DNA, 75 bp, Homo sapiens
gctgcgtgctgtgcgcctgcgaggcgaaattccgggatttctttaatcaaaatgaaaccagtgatccagcaaggg

SEQ ID NO: 226396 - DNA, 74 bp, Homo sapiens
ctgtatttggagaagaatggaaagagaagactgatagagacttcgttaaggaacttcattctccaacagtgaaa

SEQ ID NO: 226397 - DNA, 75 bp, Homo sapiens
tccgcacaggcctgctgaactgggtgctttatatagggcgtttgttgagaattatccacagttcaagaaaatgtc

SEQ ID NO: 226398 - DNA, 98 bp, Homo sapiens
gacgaatcttctggatgtccctggattgaagacctctgccctacccccactggactggcctctgcccagccaatatgagcagctggagctgaggatcg

SEQ ID NO: 226399 - DNA, 75 bp, Homo sapiens
caacgcgggagacttccacggcctgcaggcaggaggaagagcgcaggcgccgtgaagaagagatgcggcggcagc

SEQ ID NO: 226400 - DNA, 100 bp, Homo sapiens
tgccaaaatatggtgtgaaggttggcctgacaaattatgctgcagcatattgtactggcctgctgctggcccgcaggaaggtgacatttcaaaaggcccg

SEQ ID NO: 226401 - DNA, 100 bp, Homo sapiens
agcctcggtgcggcggcgagcgcggtcgagatcgccatgcctacccagacggtctcgccacattgcccagactggtctgaaagtcttgggctcaagagat

SEQ ID NO: 226402 - DNA, 75 bp, Homo sapiens
ggcgccgacatcatccagctgcctcaaatcgtcgtagtgggaacgcagatgtgaactatgaagactttactttca

SEQ ID NO: 226403 - DNA, 83 bp, Homo sapiens
agaacttcacaatcaagaaatgcagaaacgtaaagaaatgcaattgagatattgatgatgttaagaagttcaaaccgggttac

SEQ ID NO: 226404 - DNA, 88 bp, Homo sapiens
tctccaaccacagggccacagagctggagtggatccaaacttctacagcaaaaacttacttcttttaggaaagacatacttgaaacta

SEQ ID NO: 226405 - DNA, 83 bp, Homo sapiens
cgtccagaagcctgtaggaaagcggaagcggcctggcaggggaaggatcgaggcattgaagttgatatcgatgtggagcacgg

SEQ ID NO: 226406 - DNA, 100 bp, Homo sapiens
gcgcacgctgtaggaaaactgggatgttcgtctaaccccagaagactttgctagagctcagaagtactgcaaatatgctggcagtgctttgcagtatgaa

SEQ ID NO: 226407 - DNA, 95 bp, Homo sapiens
ttcttcctgtgcctgaacctctctttcgcttttgtggaactactctacggcatctggagcaactggactgggccaggcccctggccatctgtcgg

SEQ ID NO: 226408 - DNA, 101 bp, Homo sapiens
gagagaggcaccgggatcgtgaccgagaccgtgaccgagagcgtgaccgagagcgcgaatatcgtcatcgttagaaggggccgttgacatttagggatgtg

SEQ ID NO: 226409 - DNA, 82 bp, Homo sapiens
gtcgttctgcaccagcgccttgatcgagtacttgaggactggcattgcggactgacctccagggagaggcccagatctgatc

SEQ ID NO: 226410 - DNA, 75 bp, Homo sapiens
ccgcaacccgataccatcggacaggatttctccgcctcagcccaacggggaggtgtggacactgccagcggctgc

SEQ ID NO: 226411 - DNA, 100 bp, Homo sapiens
ctaaatttgaaaaggagaaaatgaatgccaaatgggacacgcatagtggtaaaatggatgaaaacagatttgtggcagttaccagcacaaatgcagccaa

SEQ ID NO: 226412 - DNA, 73 bp, Homo sapiens
gccgcctccttgacagtcttcggcaggaagatatttggatttgacctgcattttggaatttatctacacttaa

SEQ ID NO: 226413 - DNA, 82 bp, Homo sapiens
agaagtttgttcaaaacaagtggctgattgaggagggtgtgaagacagagaatgaccacatcaacctgaaggtggccgggca

SEQ ID NO: 226414 - DNA, 74 bp, Homo sapiens
tggcctgggggcccgagaagcttcctctcagaaggggaaactgaggcccaaggaaattgagtatctctgcaaag

SEQ ID NO: 226415 - DNA, 83 bp, Homo sapiens
aggatgacatcatctacactcaggacttcacggtgcccggctggagtgcagtggcgagatctcgactcactgcaggctccgac

SEQ ID NO: 226416 - DNA, 83 bp, Homo sapiens
cttggtttcgggatctcggtgctgcagacggcgagacctcctgcacaggtttccagccaatggattctggtcaactggtggag

SEQ ID NO: 226417 - DNA, 111 bp, Homo sapiens
ctcagtcagcctggggaatgagacccaaactgctcatacagaattacgcatttccacttctaatgcttttctccatggaatccttctgtacatgatgaagccagagaaaag

SEQ ID NO: 226418 - DNA, 100 bp, Homo sapiens
cttattggatgaagaaaggaaggaacctgggatggttgtgagggaagggacaagaagatactgccctggccactgcagaacaaattagacttgcacagat

SEQ ID NO: 226419 - DNA, 100 bp, Homo sapiens
accgctacccgcccaagtccggtacctgaaagaattccgcacagagcagtgcccactctttgtgcaacacaaatgcacgcagcatcggccctacacctgc

SEQ ID NO: 226420 - DNA, 50 bp, Homo sapiens
cagcctcccaagtagccaggattacagatggagtctcgctctgtcaccca

SEQ ID NO: 226421 - DNA, 99 bp, Homo sapiens
tcctgcccctcgttgatgagagcattcgaagtgacctcagcagggcatccaggttatgcctccgcctcgttgccctgaaagccgcagcgacagcgaaaa

SEQ ID NO: 226422 - DNA, 83 bp, Homo sapiens
ccatggtggtttgctgcacctattgacctatcctgtatcatgatattagctggtttgacatcaagtcatttgtgagtcatcag

SEQ ID NO: 226423 - DNA, 128 bp, Homo sapiens
ccgcagtcggcaaggagagacgtcgctgaggggcttgcctgaagcgagggcactattcctgatcagagaactccagttgcttcaacacacagtatcagtagtgcagccaccccagatcgaatccgctt

SEQ ID NO: 226424 - DNA, 75 bp, Homo sapiens
cagctcatcttaggctgtgctgtgaactgtgaacagaagcaagatggtctgtcttctgctgatcccaactctgat

SEQ ID NO: 226425 - DNA, 100 bp, Homo sapiens
gacaggcaaggtgtaccagctggaggtgatgctgaaacagctgcacactgacctgcagaagctggaaaacctcatgctggacaaagatggccacatcaag

SEQ ID NO: 226426 - DNA, 99 bp, Homo sapiens
ctctcgtgaacatagctttaataggaatgtgaaaacctttgcatcttctgatagtctagccaaggtccaagaagtagcaagctggcttttggaaatgaa

SEQ ID NO: 226427 - DNA, 49 bp, Homo sapiens
catattcttcctcacaagacgatggagtccttcaataatgttaaacagt

SEQ ID NO: 226428 - DNA, 75 bp, Homo sapiens
agttggagagggaagaaaagctttggatgaaggagcttcaaacccaaagagagatggggtctcgctatgttgccc

SEQ ID NO: 226429 - DNA, 82 bp, Homo sapiens
ccatggttctcactaaaatgaaagaaaccgctgaggcttatttgggaaagaaggagctcgaggccatgagcagatataccag

SEQ ID NO: 226430 - DNA, 76 bp, Homo sapiens
gtaattgaagctgcaaatgaagcattacttactaaatcttctaataggttgtctcaacattcatggccagaggaat

SEQ ID NO: 226431 - DNA, 82 bp, Homo sapiens
acgaacatgagaatgaatcgaaacatgaagaactggcagggtcctgcagttctgagcttgggttccctttgcctggacacca

SEQ ID NO: 226432 - DNA, 98 bp, Homo sapiens
gaataatttctttctcgctgatcgcctaacttctactgacgaagcttggaagttgcagaagctgtgatgcagatccatccgccctagcaaaatatgtt

SEQ ID NO: 226433 - DNA, 74 bp, Homo sapiens
cgtcccgccggcaggtcgcaggagccctgggagccgccgccatggattgagaggatccagaatccagatctctg

SEQ ID NO: 226434 - DNA, 50 bp, Homo sapiens
gtagattggactaccacttttccttttaaagattggtgcctggccagaaa

SEQ ID NO: 226435 - DNA, 100 bp, Homo sapiens
tcttcctcctctgccgagtggatcgcctgcctggataaaagacaggtgatttggcttctgcacagttaggaggagcaccaaaccgatgggaggttttgtc

SEQ ID NO: 226436 - DNA, 82 bp, Homo sapiens
tgccgacatggggcttaagatgtcctgcctgaaaggttggatttggtctagggagtcccagaaagaagtagaaaaagagaga

SEQ ID NO: 226437 - DNA, 51 bp, Homo sapiens
gcgcgagtgaggaaaggaggtactgtaggaaattatggaagtggaaattac

SEQ ID NO: 226438 - DNA, 80 bp, Homo sapiens
caaacatccatatcataagtggaattttggagatattcaaaggtgaactgtcacccctacaactcagcttgcaaccagcc

SEQ ID NO: 226439 - DNA, 74 bp, Homo sapiens
gctactctctctttctggcctggaggctatccagcgcattcctgcatcgcatccggcagaacgtggccgactca

SEQ ID NO: 226440 - DNA, 90 bp, Homo sapiens
cgcagaagtcgcgtgtctaggtgagtcgcggtgggtcctcgcttgcagttcagcgaccacggtttaactatagatcaacacatcatcttg

SEQ ID NO: 226441 - DNA, 82 bp, Homo sapiens
gttttccagaccaaggctctgtcccacatataggtggattaactgtctggcaaaggcaggaactgtggctgcaccatctgtc

SEQ ID NO: 226442 - DNA, 90 bp, Homo sapiens
ctctatcagcatgggaaacttacactgctgcataatggagaacctctctacattccagtaacccaggtggacccccaaaagtacaagggc

SEQ ID NO: 226443 - DNA, 103 bp, Homo sapiens
ggcggagtgcgtggaggaggtccagtgtaagcccagggacagccaggcagcacccaactggtcagctaactttgatgtcccaatggaaacaacccacggtgct

SEQ ID NO: 226444 - DNA, 90 bp, Homo sapiens
atccaacatctaccacaacttcccagaacagaggactctaattgttactcattccaatcagtactatactggcaattgctggagaagatt

SEQ ID NO: 226445 - DNA, 104 bp, Homo sapiens
gaaaagtcagaccgctcatcacgaacatcatcgtctgatgaagaagaggagaaactggaggcgaccagtgcccagaatatcgagttcctacaggtgattgccaa

SEQ ID NO: 226446 - DNA, 90 bp, Homo sapiens
gaagactgcatttcaacttcaagaatggctctagaccaagatagaacagcccttcagaaagtgaagaagtctgtaaaagcaatatataat

SEQ ID NO: 226447 - DNA, 74 bp, Homo sapiens
ctgaacctgaccattggggtcacggtgtttgccgtggggaagtgatctgtgaaaatggttcgctattcacttga

SEQ ID NO: 226448 - DNA, 90 bp, Homo sapiens
gcgcggggaccgctgtgctctcgatcgttctgaagtctccagcctgagttcagaggcccctgagacccctgagagcctgggcagtccagc

SEQ ID NO: 226449 - DNA, 92 bp, Homo sapiens
tggattctgaggaccagcagatggccagtcacgagaacccaggtgagaagccctaccactgcaactgggacggctgcggctggaagtttgcg

SEQ ID NO: 226450 - DNA, 76 bp, Homo sapiens
aataagctatatactttggttacctatgtacctgttaccactttcaaaaagaacaggggccccattctgctcccct

SEQ ID NO: 226451 - DNA, 90 bp, Homo sapiens
gttttcgactccactgctaacaaagataagttgcttcgcttgaagttaggatcaggaaaagtcatcaagatgaacacagtatagagcatg

SEQ ID NO: 226452 - DNA, 87 bp, Homo sapiens
agaaactagcaaactttttaatgaggaaaatgtgacagtgatgataacatgggtgccaaaaatacttcaataggagaagaatttata

SEQ ID NO: 226453 - DNA, 100 bp, Homo sapiens
ctgaggaagagggcggcgacggtggtggtgactgagcggagcccggtgacaggatgcctgtggacatctctacagcaatgagtgaacgggcacttgctca

SEQ ID NO: 226454 - DNA, 51 bp, Homo sapiens
catcttgccaatttcaaatcggggaggaggtacaggagaactgtgtgcggt

SEQ ID NO: 226455 - DNA, 75 bp, Homo sapiens
aaatcatggaagttgattactcagtctctaaaaagctaagctcatcaaggtgctgtacaagaccagccataccag

SEQ ID NO: 226456 - DNA, 107 bp, Homo sapiens
attaaccagttcacccaggccctggaccgccaaacaggatatgggccctcacattttccaaacctgtccatctgctaactattttgactgcagagccatgtccattg

SEQ ID NO: 226457 - DNA, 87 bp, Homo sapiens
aatattggtacttcaaacatgcaagttggaatgtcaccttcaggccattcagaggaggaaagagaggggaatatgaagtcagccaag

SEQ ID NO: 226458 - DNA, 75 bp, Homo sapiens
tgcaatgtcaccttgaactctgcacagcaagcccaggctcattatcagatgaggaaactgaggccttggactaga

SEQ ID NO: 226459 - DNA, 100 bp, Homo sapiens
ttgcattgtcttggctgttgagtgaagaaaaagagcaggaagtcattacatgttggtagctggcagtgttgtgatggcttttgaagaagtatgcccggac

SEQ ID NO: 226460 - DNA, 98 bp, Homo sapiens
ctggatgaaatagatctctcggctctgaggctccctagatctttagcttctactcccactgctcctaccactccagcaacgccagataatgcatcaca

SEQ ID NO: 226461 - DNA, 101 bp, Homo sapiens
atttggagtgtgcgtgcgcgccgagcgacttcccaagtaagaagcggaagaggagccgctggaaccaagacacaatggaacagaagacagtgattccagga

SEQ ID NO: 226462 - DNA, 100 bp, Homo sapiens
tcagtgaaaaatgtactctgacctgaatcctgaattttccttgatggtcaaaagattaaggtggaccctgaggtatttgctgcccttcctgctgaacttc

SEQ ID NO: 226463 - DNA, 87 bp, Homo sapiens
tggctaagctcatcattgttactgacaatgcatgcccactctcagttctgcatgagtggggaccacacgttagaagggacagaacat

SEQ ID NO: 226464 - DNA, 50 bp, Homo sapiens
tcccgagtagctggggttacaggccaaaggtgtccaaactatacagaccc

SEQ ID NO: 226465 - DNA, 96 bp, Homo sapiens
tctacctgagagagctaaatgtcattactgaaactcagtgcactctagatatttattagagggaggatctaccaagtgcagacctgtgctgggtgt

SEQ ID NO: 226466 - DNA, 51 bp, Homo sapiens
cgccatgggtgttgtccgcagccgcagagtttatgtggccgaggcagacaa

SEQ ID NO: 226467 - DNA, 75 bp, Homo sapiens
tgaacagtacgcagtgaatgttgaagcccagaacctcatggccctcaccaatgtggacaccccattgaaaggtgg

SEQ ID NO: 226468 - DNA, 75 bp, Homo sapiens
gagcctcaggctttaggaactgaagaggttttataggatcacattgacaaaagtaccatggagttttatgagtca

SEQ ID NO: 226469 - DNA, 60 bp, Homo sapiens
acggccaacgccttggcactagggtggtgtgcagatcctgccttactaaactgtttgaag

SEQ ID NO: 226470 - DNA, 83 bp, Homo sapiens
gcaccgtcctttcctttctccctcgcgttaggtcggcagcttcactcccgagggtgccgcgagcccaggcggcgaacacccgg

SEQ ID NO: 226471 - DNA, 100 bp, Homo sapiens
tgaatttagatgcccctgaagacaaggacagccctttcgaagaaagctgtggtgattcgtcacttgtataatgaagataatgttgacatttctgaggata

SEQ ID NO: 226472 - DNA, 78 bp, Homo sapiens
cgacgttccctcagcctctgcccaaagaaagaaggagactgtagactccactccactttcagttcacacaccaacctt

SEQ ID NO: 226473 - DNA, 121 bp, Homo sapiens
tggaatggtgagaccaacatccgtgacacctggactctttcaggttctgaattaacaagcacaagccctggctggagcccacctaccacggcatagtcacagagaacgacaacaccgtgct

SEQ ID NO: 226474 - DNA, 98 bp, Homo sapiens
gaagctgaagtcgttttttaaagagtatggacaaatagaatctgtacgatttcgttctctgggattaatgaaaatcaagttccatcctcagacaagag

SEQ ID NO: 226475 - DNA, 75 bp, Homo sapiens
gccggagatgcctgacgcatctgtctgaggagcgcttccccgggcgctgcctggacaggcctgcctgcgtgctgg

SEQ ID NO: 226476 - DNA, 75 bp, Homo sapiens
catcattgatgtggtgcgatcgataagtatgctgttcgcttcatccctcatgagaatggtgtccacaccatcgat

SEQ ID NO: 226477 - DNA, 81 bp, Homo sapiens
aaggaaaaagcccgtgaggatgcagcccgggaaagagctaggtatctgtaccacgttttgaccaaaaacaccacagtcaca

SEQ ID NO: 226478 - DNA, 49 bp, Homo sapiens
gtcgaggggacgattggaatgacaggggaaccaacggaagccgaagcca

SEQ ID NO: 226479 - DNA, 49 bp, Homo sapiens
ccggcgccgtcgcgccactcctccgaggatcaacgagcaagggctgtat

SEQ ID NO: 226480 - DNA, 83 bp, Homo sapiens
ctgggtcagtccgccgctcaccccgcggccgcaccttcccgccttctcaggttctgggccggagaaggggcgacgttcgggca

SEQ ID NO: 226481 - DNA, 100 bp, Homo sapiens
tggggagacccatctggactaccaaggagaagctatagactacttctactccaccaggaagacaccattcgcttttcacccaagatgatttgatgtctta

SEQ ID NO: 226482 - DNA, 74 bp, Homo sapiens
ggaatttcagaattttgaacaaatctttgagaaactggcgatggaatatgagaggagccctctggaaagaaaag

SEQ ID NO: 226483 - DNA, 112 bp, Homo sapiens
aagtacagactctggagccagactgcctgggtttgaattgtgcggtttcaggaataagtttgtggagtttgacatgaagccagtctgtaagaagtgctatgagaaatttcca

SEQ ID NO: 226484 - DNA, 82 bp, Homo sapiens
cttaaatgccgtccatggagccatgcgtgtgctgacaggttgccaagctgttctgcctttctggaatggtgcatggagaata

SEQ ID NO: 226485 - DNA, 100 bp, Homo sapiens
ctccatcgacctcaaggacatcaacttccggccgcagatgtcccagctcgccatggccaaacagctgcaggcccgaaggctagacgggatcgactacaac

SEQ ID NO: 226486 - DNA, 75 bp, Homo sapiens
gagagcaacaaagcaggcgactacagccacgtgaagatatgatgcttcctggtgtgtttagtggttggtgccatt

SEQ ID NO: 226487 - DNA, 100 bp, Homo sapiens
gacaatgtccctcacaccccttccagctacatcgaaacagtattgggaaagggtcgttgtggtgcatagacccagagtatagacaaaatctaattcaggc

SEQ ID NO: 226488 - DNA, 75 bp, Homo sapiens
ccacctagactggatgcagagcatggtcatagcctgcagtgctacaactgtcctaacccaactgctgactgcaaa

SEQ ID NO: 226489 - DNA, 75 bp, Homo sapiens
cgagccagtgatttacaatagagcaaggagccctctggcacaaatggaagaagaaagaagggagcaagtagctaa

SEQ ID NO: 226490 - DNA, 80 bp, Homo sapiens
caagtttaaaggaggaaactgcttattggaaggaactttccttgaagtataagcaaagatcctccccggcgtgaaggtca

SEQ ID NO: 226491 - DNA, 74 bp, Homo sapiens
tcgcagtggtcgcttcttctccttggcgtggtggaagtggaggagggcgaggtgaacgggcaggagctgtgcat

SEQ ID NO: 226492 - DNA, 75 bp, Homo sapiens
ggggaggtggtgaccctccgcgtccttgagagttctctcaactgcagtgcgggtctgtgcagacttttgcagaca

SEQ ID NO: 226493 - DNA, 98 bp, Homo sapiens
atctgatcctaattcccttgctgatgatattgatttgagagggaagatctgatctcctagaattagagttggtacagaaaccatttcagctccaaaaa

SEQ ID NO: 226494 - DNA, 80 bp, Homo sapiens
cttcctttccgtgcataagaagccgaatgatcctgaggaggatgaaggggctggccctggaggccgagagtgagctggag

SEQ ID NO: 226495 - DNA, 97 bp, Homo sapiens
tgaccacctgaaggatctctggaatgatggggtgattctgggggtccacttgtctgtaatggtgtgcttcaaggtatcacatcatggggccctgagc

SEQ ID NO: 226496 - DNA, 83 bp, Homo sapiens
tgctgcggcgcggggaccgctgtgctctcgtgtccacaggatgaaatgtccgagtcaggccagtcctcggcggccgccacacc

SEQ ID NO: 226497 - DNA, 88 bp, Homo sapiens
gagtccagaggacagctgggtctccaagtggcagcgagtcagaaacaagcctccaggtctgcttccccgcaaaggactatacatggca

SEQ ID NO: 226498 - DNA, 101 bp, Homo sapiens
gggcgcggggaagtcatgctcgcttcacggaggcaatagctagccggccaggagtggtggctcacacctgtaatcccagctctgggaggccaaggccagtg

SEQ ID NO: 226499 - DNA, 125 bp, Homo sapiens
tccaagtctaatagacctaaagccacagtcttcaagagcccacggacaccacctcaacgaagaatcctgcaaaaatgtctctctatccatctctcgaagacttgaaggtagacaaagtaattcag

SEQ ID NO: 226500 - DNA, 100 bp, Homo sapiens
cgtgtggcatctccacctcaaggatattgatgatgttaagaagttcaaaccgggttacctggaagctactcttaattggtttagattatataaggtacca

SEQ ID NO: 226501 - DNA, 50 bp, Homo sapiens
cggggaggcagcggaaggcggcagatgccatggacaatattaccaggcag

SEQ ID NO: 226502 - DNA, 75 bp, Homo sapiens
atgatcgattggcacagcttgcaggaaggaccattacgacctgttcttgaatacattgatctggtcagcagtgat

SEQ ID NO: 226503 - DNA, 100 bp, Homo sapiens
gctgcactgctgaacaggctcttcagtgcgagttcctccgagatgtggaaccctcaaaaatgcctccaccagagtttggtgcacctcgatttggaggaag

SEQ ID NO: 226504 - DNA, 75 bp, Homo sapiens
gcagcctgggaacttcagccggctggaggaatgggtaccacagaccatgtcatcgtcctggcgtccacgaaccga

SEQ ID NO: 226505 - DNA, 75 bp, Homo sapiens
gtaaaaacaatagctcaaggaaacctttccaacacagatgtccaagctgccaatccacagaatcttaatcagagg

SEQ ID NO: 226506 - DNA, 98 bp, Homo sapiens
aacaccttttccctgagcttgttgatgattttcagatgaacgactttcgaagtaaaatgcaatcaatatttccaacaattcccaagaactccgaatcg

SEQ ID NO: 226507 - DNA, 100 bp, Homo sapiens
ccaccatctctgtgagtggcattaatcacggcgtgaagacaggaattggtggagagaaggcgcaccatgatggaagatttccggaagtaccggaaaatgg

SEQ ID NO: 226508 - DNA, 89 bp, Homo sapiens
tacttcaaggataagggtgacagcaacagctcggcgggctggaaggctagcttgtcactttctgcaaaggtttccctcagggagcctcc

SEQ ID NO: 226509 - DNA, 90 bp, Homo sapiens
cacatctacaagtgttcaggcatcacagagcattggaggttccagtgctttcggatttggtacagcagggaagaactggaaactcagaga

SEQ ID NO: 226510 - DNA, 83 bp, Homo sapiens
caagggcctagatgacgacacgcctttgcacgacgctgccaacaacgggcactacaaggcagttgcagtggtgcagaatggct

SEQ ID NO: 226511 - DNA, 83 bp, Homo sapiens
agcaagcggaggtgctgggagcgagttggctggctgaagctcagggccctgtctgctctgtggactcaacagtttgtggcaag

SEQ ID NO: 226512 - DNA, 80 bp, Homo sapiens
aggtcccattaccccactctttccgccctaatggaggtctccagtttaggtttatggttggctgtgggagatgtgatgac

SEQ ID NO: 226513 - DNA, 100 bp, Homo sapiens
aggtgtatttcaccgcgacctcacatccaaggctacagaacagctggtgaatgatatcctgagacaggctttggcagttggataccagacagcttctcac

SEQ ID NO: 226514 - DNA, 110 bp, Homo sapiens
tcctggactttgtggtggtcgttggcgcattggtggcctttgctctggcttctggagaccagaaggccaaaatcaaaagtatgggcaggcttgatttctttagaagactc

SEQ ID NO: 226515 - DNA, 100 bp, Homo sapiens
gtcgccatcccactggctgcaggcctcctgctgctcctgtttgtgggggtccccacggagtctggaccatggaggagcgaggtctggcccccaagttcga

SEQ ID NO: 226516 - DNA, 90 bp, Homo sapiens
gggctcagagatccaagtgcgcgccctggcgggtccggaccaagatgccatggacaatattaccaggcagaaccaattctacgataccca

SEQ ID NO: 226517 - DNA, 111 bp, Homo sapiens
cagaaattccagtgactagtaatggagaagttgatgactctcgtgaacatagctttaatagggtcagagttgcctctgaagctgctgccgctaaatatatcccaagccctg

SEQ ID NO: 226518 - DNA, 74 bp, Homo sapiens
ccggggccctctcagcaagaacgggaacaaaactctggatattcagtcggagctggtcattttcggagccagca

SEQ ID NO: 226519 - DNA, 121 bp, Homo sapiens
ggctccccgccccacccggcctgataaagcgcgccgactgggctacaaggccaagcaaggtcgtcctcccctgtaacctgctgcggatgatctggaatgctcagaaaatcttccacatcaa

SEQ ID NO: 226520 - DNA, 76 bp, Homo sapiens
gctcgaccaagctttatggatttaccaaaggcagtaacagagaagaattttgaaacaaaagattttcgagcctctc

SEQ ID NO: 226521 - DNA, 100 bp, Homo sapiens
tgcaataactcgagaaagccacacacatagggatcggccatcacaacagcagcctcttcgaaatcagttatttctcaaactctgaggctgcggagttcac

SEQ ID NO: 226522 - DNA, 96 bp, Homo sapiens
gagcggcggcggcggcagcgggtcttgggtcctccgagagcagcagcggagctcgaggccatgagcagatataccagcccagtgaacccagctgtc

SEQ ID NO: 226523 - DNA, 90 bp, Homo sapiens
acgccctcaaggtcgccaaggaggtggacccccagggcctactgaacttgacgcactggtatttggccatctatacaccattcttaccac

SEQ ID NO: 226524 - DNA, 75 bp, Homo sapiens
cgacgcggaggcagagaagggaacgcccggcccagccccggatgggcgtgttttgggcgtgctagaggtgtcacg

SEQ ID NO: 226525 - DNA, 75 bp, Homo sapiens
cgcgagtgggagcaccaggatctcgggctcggaacgagactgcacgagatgcatctacaaagaaggctaatgtca

SEQ ID NO: 226526 - DNA, 101 bp, Homo sapiens
gaagattccatccctgaatgtagattgtgcagtgctcgactgtgaggatggagtggctgcaaacaaaaaggatgatgactttgagttcactggcagccacc

SEQ ID NO: 226527 - DNA, 100 bp, Homo sapiens
ttcacattccagaagaggcgtccttctttgcacgaagatggcagtgaacgtatactcaacgtcagtgaccagtgataacctaagtcgacatgacatgctg

SEQ ID NO: 226528 - DNA, 131 bp, Homo sapiens
gccagagcctggagtctgcgaaggccgggacccggttccccggcccacagtgggggtgtgcaaacccgagagaactggccattcaaactcctccccacgacactctgaagcagcgacggcacagcgggaag

SEQ ID NO: 226529 - DNA, 83 bp, Homo sapiens
tttttcccaggagagagatgtcttatcaggggaagaaaaatattccacgcatcacgaatcttatggcaagggccttatatgac

SEQ ID NO: 226530 - DNA, 100 bp, Homo sapiens
cctttaaccatgccaatggtctcacactggtttctcgtgcccaccagcttgtaatggaggaacgtactaatgtggccaacttccctggccactcgggccc

SEQ ID NO: 226531 - DNA, 100 bp, Homo sapiens
gagtcgacttcccatcctgagttggttgacctgacagttcaagaaaaggagaaatatcttaatgtgtctcgctggttttgtcacattcagcattatccag

SEQ ID NO: 226532 - DNA, 100 bp, Homo sapiens
catcagtgtgggaagccaagcagatacaagcatgttatgttacccagagaactttccaaacaagtacctaaaactcatctgatgtctgaagaggagtgga

SEQ ID NO: 226533 - DNA, 98 bp, Homo sapiens
cggagcagaggaaccacacgctgatcatggtctgctgagaacagacccagtccctgaggaaggagaagatgttgctgccacgatcagtgccacagaga

SEQ ID NO: 226534 - DNA, 100 bp, Homo sapiens
tgagacatcagcatatatgtcaactctaccatgtgctagagacagccaacaaaatattcatggttcttgaggttgaggaacaggttagcaccactgagag

SEQ ID NO: 226535 - DNA, 100 bp, Homo sapiens
cggctccaccccttccacgtcatccgcatcaacaagatgttgtcctgtgctggggctgacaggtgttggagcgggccggagagaagtagagtgggctgcg

SEQ ID NO: 226536 - DNA, 88 bp, Homo sapiens
cagaggaggagcgcagcccggcctcggataaggaagcctgtgtgggtaccaacaatcaaagctacatctgtgacacaggacactgctg

SEQ ID NO: 226537 - DNA, 88 bp, Homo sapiens
cggcgtccccggcgcgaagaggctggactcggattcgttgcctgagggcagagatggccctcctggactccctggaacccctgggccc

SEQ ID NO: 226538 - DNA, 50 bp, Homo sapiens
acgccgggagctggtacacagcctcagatggagtctcgctgtgtcaccca

SEQ ID NO: 226539 - DNA, 73 bp, Homo sapiens
tcgtctcgcctcccgcgcgccggtagactgacttccttttggtagtactgcgtgatgttgttcaggcttatcc

SEQ ID NO: 226540 - DNA, 89 bp, Homo sapiens
aagcagccgatccagcctgcggagcctgtggggcagcatcttcctcacggcaattctgggcctgcccgaagccctgatccctgtgcagc

SEQ ID NO: 226541 - DNA, 74 bp, Homo sapiens
gacggcttgacagccctgcaccaggtgaataatgctacagcacgtgtaatgaccaataagaagatggtcacacc

SEQ ID NO: 226542 - DNA, 74 bp, Homo sapiens
agcctgcgaaggtggcggcgctgctgctcgggctgctcttggaggacctgccgctgccaagccagacttgatct

SEQ ID NO: 226543 - DNA, 100 bp, Homo sapiens
tgttcctgaatgcccggaaggagctacagtcagacttcctcaggttctgccttggtgaggtaacatacgtggagctcttaatggacgctgaaggaaagtc

SEQ ID NO: 226544 - DNA, 98 bp, Homo sapiens
cgaggacgaggacgaggacgagatggacctggagcccaacggtggacgacatccttggagaaggcagcgacgacagcgacagcgagaagaggaggcct

SEQ ID NO: 226545 - DNA, 90 bp, Homo sapiens
gaaaataattaaatattcttaccgagatctatgcagttagatcagttgttcccaacaaaagcaataatgaaatagtcctggtgctccaac

SEQ ID NO: 226546 - DNA, 96 bp, Homo sapiens
cttcctcggcgcccccggccgctaccgctcaggtgctgcaggcacagcccgagaaaccgcagcactacactgcgccgcgtggctcctcgtttctcc

SEQ ID NO: 226547 - DNA, 100 bp, Homo sapiens
ccaaaacaaggagaaggtgcaagactgtccgtgtggaccctgactcacaggaattgcgaaagcccagctacgcagagatttgtcagagaacgagtaaaga

SEQ ID NO: 226548 - DNA, 83 bp, Homo sapiens
aacgaatcatccacgcacctgcagctctgctgagagagtgcaagccgtgggggtgatgttcaccaggcactaattgttcttca

SEQ ID NO: 226549 - DNA, 74 bp, Homo sapiens
cttcctgagtgcttctttcttggagctgaccatgggcaatgtgtatgtgaagtgcccatcaattgctgcagcta

SEQ ID NO: 226550 - DNA, 97 bp, Homo sapiens
ccgcgagcacagagcctcgcctttgccgatccgccgcccgtccacacccgccgccaggatgatcggctgaatgtaacagaggaactaacgtccaacg

SEQ ID NO: 226551 - DNA, 100 bp, Homo sapiens
gtaaaaacaacaactactagtcggccgaactccaagcgtgaccagctttctgttgggaacactcaaaggaagtcaaagtgaattgggcaacaacccctag

SEQ ID NO: 226552 - DNA, 83 bp, Homo sapiens
aagccactgattagcaatttaaagatcctctccaaggttgaaatcacaaagattagacacctttttagataggtgttcttcag

SEQ ID NO: 226553 - DNA, 100 bp, Homo sapiens
agatggggttccttccaaagtgcagcgctgtgcagtggcaatttgaatcaacccatagaagtgacagcgctgtattcatttgaaggacagcagcctgggg

SEQ ID NO: 226554 - DNA, 78 bp, Homo sapiens
acgcatccatccagatgaacgtggccgagagcaattgggtgccacgccgaggggatcagggtcccaagaccattgacc

SEQ ID NO: 226555 - DNA, 98 bp, Homo sapiens
ctgggtgtggaatcagttctttgtgctggaggaatacatgggttcagaccccctctatgtaggaaagatcgagctgggagcattagtacccttgattc

SEQ ID NO: 226556 - DNA, 75 bp, Homo sapiens
ggccggcactgagtacatggacctgcagaatgacctaggccaggaaactggagaggcgtggctggaccaagacct

SEQ ID NO: 226557 - DNA, 83 bp, Homo sapiens
aaaacagctcattctcctaatgttttccttcagcaaggacaaagtgaatgatttgggaggggacttcaaaggagttggtaaag

SEQ ID NO: 226558 - DNA, 126 bp, Homo sapiens
cttccccaactaccaccaagtcctctccatctgatcccatgaccacctccagagctaatcaggttagcatggcctcattgaaagaactagatcaaagactctttgaaaattacatcgagttgaaag

SEQ ID NO: 226559 - DNA, 80 bp, Homo sapiens
caacccaactttcaagctgcagacgccccagggcaagcgaaagagatggacagagacgtatgtgcgttggtctcctaagg

SEQ ID NO: 226560 - DNA, 100 bp, Homo sapiens
ccttacctgtttttccagctcacccactgccagcagaggggttcatgtgtcacacaagtaggccttctggaaagcgtgtatgaaatgttcaggaaggatg

SEQ ID NO: 226561 - DNA, 100 bp, Homo sapiens
atccaataaagagaggcagcttggaagtctgtgcagacttttgcagacaaatcaaaacaagaagctctgaagaatgacctggtggaggctttgaagagaa

SEQ ID NO: 226562 - DNA, 100 bp, Homo sapiens
ttctgttagaacttagtattttttccactgccggtcaccaggacttctcacaggctatgaccagggccagagcactcagatctcagtcagaggagtctgc

SEQ ID NO: 226563 - DNA, 76 bp, Homo sapiens
aacccatgctaggagttatacataagccattttccgaatatacaggatataagtatccagtatatggtgtccagtg

SEQ ID NO: 226564 - DNA, 75 bp, Homo sapiens
agtaggctccgggccccggacctaggaattgaatgatctggcacgggaccctccagcacagtgttcagcaggtcc

SEQ ID NO: 226565 - DNA, 89 bp, Homo sapiens
gaacgacaggacgttggggcggcctggctccctcagatttgaaagaagccaacactaaaccacaaatatacaacaaggccattttctca

SEQ ID NO: 226566 - DNA, 102 bp, Homo sapiens
tctgaatcccattctcgatcaagatcaaaatccagtccagcctggacctgtttctgggaggtgagagcagcccagaacccctggacaacatcttgttggcag

SEQ ID NO: 226567 - DNA, 82 bp, Homo sapiens
agcctcccgagtagctggggctacagagatcatcttcagacaccaacgaaagtgaaataaagtcaaatgaagagccactcct

SEQ ID NO: 226568 - DNA, 100 bp, Homo sapiens
tatcgttctggtgaaacagttccgaccaccaatggggggctactgcatagagttccctgcagaaactaatctggattcactccctctggttgatacccac

SEQ ID NO: 226569 - DNA, 75 bp, Homo sapiens
acccggccttcaccaaactcccttgttctaagaacggaagcatctgggctggatggaatttagcatcaagcagag

SEQ ID NO: 226570 - DNA, 95 bp, Homo sapiens
caactacctcattggcgggaaccgcctgaaacagcctccggagtgtatggaggacgtatgcgggatttccctttgtttctaggacagggaaaacc

SEQ ID NO: 226571 - DNA, 100 bp, Homo sapiens
ggtctgtggagctggtcaacgaccgcggggcgcagatcaatgtccgagttaccaccatggatgcagagctggagtttgcaatccagccaaatacaactgg

SEQ ID NO: 226572 - DNA, 100 bp, Homo sapiens
aagggagagagaaagggaaatgaggaggagtagtggtttgcgagcaggttctcggagggaccgggatagaatgtcaaaactggaccaatggggccaggct

SEQ ID NO: 226573 - DNA, 101 bp, Homo sapiens
gtgggcttcttcaggtgctggtggatccctcaggatggattcctgccagctcccaggggctttggttatagaagtgaagtggactaaatacggatccctgc

SEQ ID NO: 226574 - DNA, 50 bp, Homo sapiens
cccagacaccagccccccaccatggtctgaatgccattcatctagccatg

SEQ ID NO: 226575 - DNA, 100 bp, Homo sapiens
cggagagagagggaaggacggggcctggcccccgggactccctgtgccttgcttggagctgacgccgacggggctggctgtgtgaactgctccgctggaa

SEQ ID NO: 226576 - DNA, 100 bp, Homo sapiens
gagaaccagtttatggacagccgtatgcagctggccaaactctgctatgacccagattttgtacttgttttggctccaacaagggaactggcaaaccaag

SEQ ID NO: 226577 - DNA, 83 bp, Homo sapiens
tctacgggaagaagtacgaggcggacatgtgcgtgaggaacccaagacagaccaggatgaggagcattgccggaaagtcaacg

SEQ ID NO: 226578 - DNA, 113 bp, Homo sapiens
cctcaaaggagattctggtcccaaaggtgaaaagatcctgtgcattcacctaaagcgctttcggcacgaggtgatgtactcattcaagatcaacagccacgtctccttccccc

SEQ ID NO: 226579 - DNA, 100 bp, Homo sapiens
gctggttctgcggtgtgcggccagccatggagcgctctgggcccagcgaagtgacaggctcagacgcatcgggaccggacccgcagcttgcggtcaccat

SEQ ID NO: 226580 - DNA, 83 bp, Homo sapiens
agggaccatggaatccagagctgagtgtgaaagtccaaatacagtctcttaatggtgaacacctgcacatccgggagttccac

SEQ ID NO: 226581 - DNA, 100 bp, Homo sapiens
aatatccaagaagcagtagagggtgccatgcacattcagggtgataaaagaaaatgtggctgaagttacccgaagttcagcttgcagtgtaattcagaag

SEQ ID NO: 226582 - DNA, 80 bp, Homo sapiens
tcccagccatctcactgtacaagagctgcacggtggttctaactttgatggtttgagaccaaatgggaagggagtgccta

SEQ ID NO: 226583 - DNA, 101 bp, Homo sapiens
ttctggatgccccaggcggcgggagcgtgctggtgatggagcacatggacatgaggcatctgagcaggccaagtcctgtatctgccatgtctgtggcgtcc

SEQ ID NO: 226584 - DNA, 100 bp, Homo sapiens
tcagtttacagccactgcagtatcacagccaggacgctgccaaggtctgcagagaattcaccgagcgtgagcaaggagaagtccgcttctctgccgtggc

SEQ ID NO: 226585 - DNA, 82 bp, Homo sapiens
cattgctccggactcagccaagttccccaacggctccccgtcgtcctggtgctgcagcgtactatactggcaattgctggag

SEQ ID NO: 226586 - DNA, 100 bp, Homo sapiens
tggagcggtacatcgcctcggtgcagggctccaccccgtcgcctcgacaggaatttgagagcgtattttgcggtaaaactggccgaaggctaaagctgac

SEQ ID NO: 226587 - DNA, 80 bp, Homo sapiens
cttcagcgggccaggaagcgcatccaggagatgaagttggagcccttgtttttgacattggatcctatactgtgagagct

SEQ ID NO: 226588 - DNA, 98 bp, Homo sapiens
gtgaattaaaatatggaggctttgttgtgagaagaactactgaattaactgttacaggccagggaaatggaaagcgagaacagaacagtgataagaga

SEQ ID NO: 226589 - DNA, 51 bp, Homo sapiens
gcaggattgagatttgtgtctctgactgatttcaggtatgctgctgaaagt

SEQ ID NO: 226590 - DNA, 75 bp, Homo sapiens
tgacaggccaagtgcaggggccagaagacaaagtcaattccatggtgatttcacctggaacagcatgtcaggccg

SEQ ID NO: 226591 - DNA, 100 bp, Homo sapiens
tttctgctttcgacttagaaaaaagaaccagatgtcaaaactgatttcagaaatgcatagttttatccaggattttttatcaagcagaaatgcatcgaac

SEQ ID NO: 226592 - DNA, 100 bp, Homo sapiens
ggagctgctcaggaggtgggaggtgaggggcaggaggccacaacagccggaacttgctactaccagcaccatgccctaccaatatccagcactgaccccg

SEQ ID NO: 226593 - DNA, 100 bp, Homo sapiens
cggatcaccaaattgatgtgtctgacgtcatcaggcttgttcaagacacaccggaggcgacggccatggccacagaaatggtggagtcaatgaagaaagt

SEQ ID NO: 226594 - DNA, 101 bp, Homo sapiens
gatttgttaaggattccaagtaactcttatttggaaattcgaaatgagtcccatgactatcctcatagagtggccaagtttccagaaaacagaaatcgaaa

SEQ ID NO: 226595 - DNA, 80 bp, Homo sapiens
accctggtcaacaagaagaacgctctcatccggaggcaggaccagctgcagctgctagcgtgccccggagcggcgcgacg

SEQ ID NO: 226596 - DNA, 74 bp, Homo sapiens
aaccacagcctgacactgagtgcccgctggccccggaagctacagtgatccccccaggggtgcccgatgcccac

SEQ ID NO: 226597 - DNA, 100 bp, Homo sapiens
gaaagtggagatttggggacggcacccgatgaggccgtgagggccccactggactgggcgctgccgctttctgaggcccctggccccaacatggcccgtc

SEQ ID NO: 226598 - DNA, 100 bp, Homo sapiens
gtttaagctcatctgctcagagctgaatggccgctacatcagcaacgaatttaaggtggaggtaccattgttggatactggtgacatcatcattgacgga

SEQ ID NO: 226599 - DNA, 100 bp, Homo sapiens
cagacagaaagcataacatacactcgccaggaagagcctttgcctgactcagggcagctcagagtgtgggggagtggaggatgccttctacacgttggtg

SEQ ID NO: 226600 - DNA, 50 bp, Homo sapiens
cggacggccagcttcttcactacagtattctaccttgtaaatactgttat

SEQ ID NO: 226601 - DNA, 94 bp, Homo sapiens
tatctggtgaagtggaaaggatggcccccaaaatgtgaagttcatttccaatccgccctccatggtggcagcggggagcgtggtggccgcagtg

SEQ ID NO: 226602 - DNA, 100 bp, Homo sapiens
ttttcaggataagaggaatctttatctaatcatggaatttctccctggaggtttggatgcatctgctcagactacttctcatgaactcaccattccaaac

SEQ ID NO: 226603 - DNA, 90 bp, Homo sapiens
cggcgcccaccttcgggaggatcagcttgccaatgcaacggccacagtaaatgcatcaatcagagcatctgtgagaagtgtgagaacctg

SEQ ID NO: 226604 - DNA, 100 bp, Homo sapiens
aggaatctatgatgctgatggtgatggagattttgatgtggatgatgccaaagttttattagcattatctaaaaatgaagtgttatatgacggagaaaac

SEQ ID NO: 226605 - DNA, 100 bp, Homo sapiens
cctgagtttttcaagtctgccctgcaagcgataggagtggaagcccaccaggagtacatcgatgcccaccctgagaccatcgtcctggacccgctccctg

SEQ ID NO: 226606 - DNA, 124 bp, Homo sapiens
tttcagatttcagatactctgactccacctttacttttacctacgttggcggccccagaagaacattctagtatgccagtagaaaaaaatatcactttagaaaggccttctaatgtaaatctca

SEQ ID NO: 226607 - DNA, 96 bp, Homo sapiens
gctttagtgaaatgggctaataatgctggcaaagtggaaaaatgtgcgcaggtgtcttctgcggaggtgcgcatcgggcccatgagactgacgcag

SEQ ID NO: 226608 - DNA, 90 bp, Homo sapiens
ggaacggccatgagcactgcagcgattgcgagaatgaggaggacaacagctacaaccgggggctgattcaccccaagagtggccgttcct

SEQ ID NO: 226609 - DNA, 83 bp, Homo sapiens
caacaaggaggagacccctgcgactgagagtcccctccggggaaccttgtacaacaccggccgacatgtctccttcctgcctg

SEQ ID NO: 226610 - DNA, 82 bp, Homo sapiens
caggaggtgccgcgcggctcggagccctggaagcagcagctcaccgaggacggggactccacatgattaagtaccggtacat

SEQ ID NO: 226611 - DNA, 75 bp, Homo sapiens
gtcaacccagacccagttgcactagatagtgagacacagctccgtagagacatggttttctgccagactcttgtg

SEQ ID NO: 226612 - DNA, 89 bp, Homo sapiens
tcgccgaggcaccgaggcactcagaggaggtgatgtgtccaatctagatcccaacttctcatttgaaggcaccaaactggatgtgggga

SEQ ID NO: 226613 - DNA, 97 bp, Homo sapiens
agaagtggccatacaaacaactgggctgttctggtcaaaatgcagatcttcgtgaaaacccttaccggcaagaccatcacccttgaggtggagccca

SEQ ID NO: 226614 - DNA, 98 bp, Homo sapiens
ggattccaatgctggtcaccccagctcctcagcagcatgaagaagaggacctggatgatgatgtcatcctgacagaaatcatgtttgagaccttcaac

SEQ ID NO: 226615 - DNA, 83 bp, Homo sapiens
ggagcacaagctccaccgcgcatgcgcacacgccccagacccaggctcagacaacaaaggaggctttgaaaatgttttagaag

SEQ ID NO: 226616 - DNA, 75 bp, Homo sapiens
tgggaatcggtcgcctggaggaccagtatttcccatggaggattgggaaaatgaggtacgttagtgttcgcgatt

SEQ ID NO: 226617 - DNA, 100 bp, Homo sapiens
cagaattttacgggatcactccattagtggaagtatgcgagacttaagagctcaagtgactagtggtctcctgccatttccagaagtgactcttcaagcc

SEQ ID NO: 226618 - DNA, 75 bp, Homo sapiens
cttagtgatcaggtggcacctactgacattgaagaagggatgagagtgggtgagaaggacgttgaagagtgggct

SEQ ID NO: 226619 - DNA, 80 bp, Homo sapiens
aagggacaatggtcaccgtctcttcagagatgcagaggatgctatttatggaagaaatggttatgattatggccagtgtc

SEQ ID NO: 226620 - DNA, 76 bp, Homo sapiens
tccctggtctctgttggtgtagaagccaaaatcagctatttccttcgtgctaccatcagccgccgcctcaatgatg

SEQ ID NO: 226621 - DNA, 80 bp, Homo sapiens
agattcgcagtggtcgcttcttctccttggaaagtggagaatgaggacatgaataaagaccagatcttgctggaaaaaga

SEQ ID NO: 226622 - DNA, 75 bp, Homo sapiens
aaaagatccgatggcagcaccacttcgaccagcttcatcctcagacaggcagcagtgaggatgccagagttcatg

SEQ ID NO: 226623 - DNA, 50 bp, Homo sapiens
tgtccctgctggaggagcgcttccggcttcagcgcctgctcctggtcatc

SEQ ID NO: 226624 - DNA, 75 bp, Homo sapiens
gggactcctctctcaagagaagctgcaagagcaacatctttcctcaccccaagggacacgcatgaaatttggtgc

SEQ ID NO: 226625 - DNA, 149 bp, Homo sapiens
cgaccaggcaagaagctcaagaaggtgaagcttcggaagttggagaggcctccagaaacgccaacagttgatgtgctgtctgctccaacctcccttatgcctcctggtttgagtctttctgccagttcactcactaccgttgctccaac

SEQ ID NO: 226626 - DNA, 75 bp, Homo sapiens
gtcgattgcactttactgggggatttgcctcagatggagttacagggggcagctggcattttatgctatgtggga

SEQ ID NO: 226627 - DNA, 100 bp, Homo sapiens
catggtcatcctgctgccggatgacattgaggacgagtccacgggcctgaagaagcatggcacattacacttctgtggatttaaagtccttgcccctcag

SEQ ID NO: 226628 - DNA, 98 bp, Homo sapiens
agtgaaaagagatctgttttcagagatcatcgacgagtacatcaaggagaacggcttcggcctggacgggggacagccgggcccgggcgaggggctgc

SEQ ID NO: 226629 - DNA, 75 bp, Homo sapiens
aaagctcattgacgatcaagatatcaggtcatcacactgaaacggtgttcaaccgggttttgccagggcctattg

SEQ ID NO: 226630 - DNA, 75 bp, Homo sapiens
aaggagtgaattgaaagctaaggaggggctcaggaagtgggaaaactcttgcctttgccatcccaatgattcatg

SEQ ID NO: 226631 - DNA, 51 bp, Homo sapiens
gtggaattttggagatattcaaaggatctcatagatcagaacatactggag

SEQ ID NO: 226632 - DNA, 100 bp, Homo sapiens
gccgactatgtgggcagattttctgcagtcgttgctgtaatcaagaaatccctggaaaatttatgggctatacaggtacatattctcagctcctaaggac

SEQ ID NO: 226633 - DNA, 100 bp, Homo sapiens
gccgtggtgggcggccagagcgccggcaagagctcggtgctcgagaacttcgtgggcaggtggtggcagaagtgggatccaaagtagagcttctcgtaac

SEQ ID NO: 226634 - DNA, 100 bp, Homo sapiens
agcgcttcgatcctgagaccaattccgacgatacagtttatgtaacttgatggaagaaaatggaattactccaaaaagacaagtgctcaagcagcaaaat

SEQ ID NO: 226635 - DNA, 74 bp, Homo sapiens
tttgcccaatgttttgatgattggcagagacccactgtctgggattgtcaatgaggcagatcagattccgattt

SEQ ID NO: 226636 - DNA, 74 bp, Homo sapiens
tcagcaccgacagccgacgcgcagatagcagagccatccttgggatgtgaagttcatttccaatccgccctcca

SEQ ID NO: 226637 - DNA, 82 bp, Homo sapiens
cggaactcgggcatcatggcctcagggaaatcctcattgacgattcaatttgttgaaggccaatttgtggactcctacgatc

SEQ ID NO: 226638 - DNA, 75 bp, Homo sapiens
gcttcctggagagccacctggatgacgccgagccctacctcctcacgggcgtctctggccgagcctctttttgtg

SEQ ID NO: 226639 - DNA, 90 bp, Homo sapiens
cagacagtgagtgctaaaggcccccctgaaaaacggatgagacttcagccctccctatcctgaagacattagctgagagtctggcacctt

SEQ ID NO: 226640 - DNA, 100 bp, Homo sapiens
agatgtaccggaccctgttcttcagtgaccaaagacttgaccactcaaagtccagctccccagaacactgctcgacatggacaccggtgtgattgaaggt

SEQ ID NO: 226641 - DNA, 87 bp, Homo sapiens
gcatcaacggcaaagttttgcagatcttcaacaagaggacccaggagaaattcgccctcaaaggtctggtggttccagtcatcagga

SEQ ID NO: 226642 - DNA, 101 bp, Homo sapiens
attttctcacatatacaacacgattcttctaatggatgggaacatggggttactcactataaacaatatccacccaacacaagcaaagtttattcctactt

SEQ ID NO: 226643 - DNA, 90 bp, Homo sapiens
cccgtggcagccctggcggacgcaggagcgatggcagcgaccgatatagctcgccaggtgaaaaggcgacggcggattgacagaagtatg

SEQ ID NO: 226644 - DNA, 90 bp, Homo sapiens
ggcggcccagccatcagttattcagtctccacaagtccaaacagttcagcataaacacttcacggaagacatccagacgcgtcagtaccg

SEQ ID NO: 226645 - DNA, 100 bp, Homo sapiens
gctttcactaactttacatccagacaagaataaagatgaaaatgcagaaactcagtttagacaagcagttgaagatgactttgtggaaatgcggaagaac

SEQ ID NO: 226646 - DNA, 100 bp, Homo sapiens
tctaagcccaagagtgttattctcaaggctttaaaaggtcgtactctttcagatgtcagcaatatttccaacataaatgcaagttgcgtaagtgaatcaa

SEQ ID NO: 226647 - DNA, 100 bp, Homo sapiens
ctgagtaccgcggcgggcgcgagcgaggcgccctagacatcttctccctcccttgcctcagcaagtctggaaaagtttgaaattccagtaaaaattcgtt

SEQ ID NO: 226648 - DNA, 100 bp, Homo sapiens
aagctcttctcaagcatctgctcagtttgtcccgctggctggaagcctggcagtgacacgattaagcccaacgtggatgacagcaaggaatatttctcca

SEQ ID NO: 226649 - DNA, 99 bp, Homo sapiens
atcagacaaggcaaagcgaaattggtcattctcgctaacaactgcccagctttgagacaggggcaagtgtccgagtggtgaatcagctacttacagaga

SEQ ID NO: 226650 - DNA, 80 bp, Homo sapiens
ccaagcaacttagaatgcagcttcagcagaggctgcagggccagcagtggagaccatcctgggcctcacaggagcgacca

SEQ ID NO: 226651 - DNA, 101 bp, Homo sapiens
gggaaaatggcggacgggaaggcgggagacgagaagcctgaaaagtcgcagcgagctggagccgccggagctgcagaaccttggcctgaaaatgctacatt

SEQ ID NO: 226652 - DNA, 100 bp, Homo sapiens
cagctctgtgctgatccccaccgacaattcgaccccacacaaggaggatctaagcagcaagttgtgggttggagagaggatgcctttggcaacttccacg

SEQ ID NO: 226653 - DNA, 119 bp, Homo sapiens
aggctccggaggcggcgggacagagcgcctgcgaccccagtcggtgctccggggaggtcacctgacgaggagatggtcagcaagaggatgaagccagtaaaattgaagctctgcacaag

SEQ ID NO: 226654 - DNA, 50 bp, Homo sapiens
ccctatcctatccgcaaacagtgttcatgaaaaaaatgcacaaaatcctg

SEQ ID NO: 226655 - DNA, 100 bp, Homo sapiens
aagtccatgatcgaaattagccggacccaggatgaagaggttggagatgggaccacatcagtaattattcttgaccttcacggcatggtgcaactcccac

SEQ ID NO: 226656 - DNA, 82 bp, Homo sapiens
cgcccagcgtcccagggcccaggccgagcagggctctctactggcttctggccgcgctccgcgccgcgcctcctctggattg

SEQ ID NO: 226657 - DNA, 75 bp, Homo sapiens
ctggattccatgaacagcaagggctgcaagctcgggttcatgacgctctcgatattcctgtgcagaaacctggac

SEQ ID NO: 226658 - DNA, 96 bp, Homo sapiens
cgccggcgccggcccagcagctgcagccgcagcctgtggctgtgcagggccccgagccggcccgggtcgaggctcttgcagccaatgccggaacag

SEQ ID NO: 226659 - DNA, 82 bp, Homo sapiens
ttggatgcctgcaaagcgaggctgaagaaggccaaggctgcagaagccaaagccacgcggagctggagtttgttcagatcat

SEQ ID NO: 226660 - DNA, 74 bp, Homo sapiens
aaggccctagaggcagcccatgggcctgggcaggccaaccaggagatgatccctactcaagtgcagagccccat

SEQ ID NO: 226661 - DNA, 100 bp, Homo sapiens
catgatttcccaattcttcattctgtcctccaagggggacccgctcatctacaaagactctctgtgacctgcctgctgcctccctcaacgaccagttgcc

SEQ ID NO: 226662 - DNA, 101 bp, Homo sapiens
tctgtgggtgggggaaggcaggactgacgcagagtgttgaagcacaacgggtcatccgagattctcaacaaactgtatgacacggccatggacaagttgga

SEQ ID NO: 226663 - DNA, 75 bp, Homo sapiens
gtcttgggggttttgatcctgtcactgtgaacaatttcatcaacctcagcttcctccgcctctttcgagctgcgc

SEQ ID NO: 226664 - DNA, 90 bp, Homo sapiens
agaagaccacacactgggaaacatcattaaatccgggacgaccctgggacagtctccactggggcagatccagctgaccatccggcacag

SEQ ID NO: 226665 - DNA, 83 bp, Homo sapiens
cgctcctctggccaccgcccctgggaagcccttttggaaaggaaaaacgtggtcttcgagaaatgcgagttcttgaaaatttg

SEQ ID NO: 226666 - DNA, 100 bp, Homo sapiens
tgcagagctccagggagctgcgtaggtctcaggattacctgtcctgcgagaggccgctacctgtctgaggaacccgagccctacctggcagtctacctgc

SEQ ID NO: 226667 - DNA, 99 bp, Homo sapiens
cattcattctggattggtggatctgaagtacaaaatattttccagagctaatgtcaaaccccgaaattccacaccacctagtttggcaagaaatcctgc

SEQ ID NO: 226668 - DNA, 101 bp, Homo sapiens
ttaacaagttggcgacgtccctgggcgcgtcagaacaggcgctgcggctgatcatctccatcttcctgggctgctgatactttggctgtgaggcaaaaaag

SEQ ID NO: 226669 - DNA, 90 bp, Homo sapiens
gttaaggattccaagtaactcttatttgacataattcaagacatttcctgagtgccttctgtgtgggccgaatgctgtagctgctgggat

SEQ ID NO: 226670 - DNA, 116 bp, Homo sapiens
ctggtggtgttgtcgtggccggagcggcccgcgcctgggctgccggcacttcgcggcagcaattctgtggtgttcttggtcacacatttatggagtttctgaagggcagtggagat

SEQ ID NO: 226671 - DNA, 75 bp, Homo sapiens
aagagttgtatttactcaagaaatcaagtacttcagtaagagatgggaaagtgaatggcttggaggaaggcgtgg

SEQ ID NO: 226672 - DNA, 83 bp, Homo sapiens
gatttggcccttttggggaacacaccgtgaacgccagttggattgcagttcaggaaggcaacagcccccaggggagcaaccag

SEQ ID NO: 226673 - DNA, 75 bp, Homo sapiens
gataatgagtgtgttgcacagacatggtttcgctttttacacatgttaaggttccctctcccagcctgtgctgac

SEQ ID NO: 226674 - DNA, 96 bp, Homo sapiens
tttgacaggacatgctgagaaggtgggaatagaaaattttgagctcctgaaggtcctaggaactggagctgctctcccgtctcaaggggaacttgg

SEQ ID NO: 226675 - DNA, 75 bp, Homo sapiens
gcggcagtggcggcgcgtaggaggcgccctgggcgctgcctatggcacagccaagagcggtaccggcattgcggc

SEQ ID NO: 226676 - DNA, 100 bp, Homo sapiens
ggaggccggcagctggcgctggggatccctgctcttcgctctcttcctggctgcgtccctaggctgaccccgcactacatctacccaccagccatcgtgc

SEQ ID NO: 226677 - DNA, 96 bp, Homo sapiens
tgtggccccgtgtcctgcaggtattgggagatccacagctaagacaccgggacctcctggaagccaaaaatgatagcagaccccacgttagctgaa

SEQ ID NO: 226678 - DNA, 100 bp, Homo sapiens
ttgatcaggagaaagaagacagccatcatttgaaagcactctggcccccagaagcttctccacattgcccaggagctcctgcacaccgaggagacctatg

SEQ ID NO: 226679 - DNA, 51 bp, Homo sapiens
cactatgattaccaccaggagattgcaaggcctgatcttttggccagaagg

SEQ ID NO: 226680 - DNA, 100 bp, Homo sapiens
aggcatgatggtcgactacaagaagagggcggagcggagacgggagtattatgaaaagatcgccactgcagaacaaattagacttgcacagatgatttcg

SEQ ID NO: 226681 - DNA, 90 bp, Homo sapiens
ataaacaaggagataaatcaaaggaaaataccagaaagatttttagtggccccaaacgggcggtaaatgactcgtgctaccagaatgatg

SEQ ID NO: 226682 - DNA, 95 bp, Homo sapiens
ctcctggccctggccctgatcatcctgctgggcttcgtccagatcgggaaggagcgccatgctgcactgcccctactggaacaccttctcgctgc

SEQ ID NO: 226683 - DNA, 74 bp, Homo sapiens
gtcgcgattgtagatgttattgatcagaacagggctttggtcctcttagatgtcactcctgaccagtcaatggt

SEQ ID NO: 226684 - DNA, 100 bp, Homo sapiens
gccataaacgcccccaatttcccagctgctaaaggaagaggaagatcctggccaatttggagcaaggcttagcagaagacggcggcatgagcagcgtgac

SEQ ID NO: 226685 - DNA, 87 bp, Homo sapiens
ggagggcagcagtagaatcacttgggttcattctattcaggaaatctactttcttcaatgtgttaaccaatagtcaggcttcagcag

SEQ ID NO: 226686 - DNA, 100 bp, Homo sapiens
ctgtcttcggtggactccttcggcagtccacccaccgccgccgcctcccaggccaaacgtaccaagaaagtcgggatcgtcggtaaatacgggacccgct

SEQ ID NO: 226687 - DNA, 83 bp, Homo sapiens
ggaaatttggcttgcaattcatcactttgaaaaggttggatggcaagcatgtggtgtttggcaaagtgaaagaaggcatgaat

SEQ ID NO: 226688 - DNA, 83 bp, Homo sapiens
cgggacggctctgtaggaaggaacttggttccccctccctcagcttccgccccaaaaggcagttcaattaacctccagaagat

SEQ ID NO: 226689 - DNA, 98 bp, Homo sapiens
aggaggtggactacagcgactcactgacggagaagcagtggctcaagcccaccttgggacaccttgactccaagcccagcagtaagtccaacatgatt

SEQ ID NO: 226690 - DNA, 100 bp, Homo sapiens
gccttgttttcttgctctggggctcttatgctcagaagaagggcagtgccattgatagggatgtgtactctggcacacccaccaaggtgagacacatgga

SEQ ID NO: 226691 - DNA, 75 bp, Homo sapiens
ctcgccaggacaacaaagttgttattggatttgttcccttagcagaaattatgcaacacagtcactcctggcggc

SEQ ID NO: 226692 - DNA, 98 bp, Homo sapiens
tgtctcctgtgaaaacagctccactctttagcaatgacaggttgaaagcactcaggaggccttgaagagcgggcactttgtcaacgtcctgagcatcc

SEQ ID NO: 226693 - DNA, 100 bp, Homo sapiens
atacaatgcagttccttaaaagctgcttccagtgggaatccacattaagaagtacaatagcattcgcggttgtaaagaagaaagttctaccctttctgtc

SEQ ID NO: 226694 - DNA, 83 bp, Homo sapiens
gggacagcgcccgccggaccctgcagcccagactcaagcgttcccacagctgtgcagaacttagcgccacgcgctgctgttgc

SEQ ID NO: 226695 - DNA, 75 bp, Homo sapiens
tgtgccctgcacctgcctcttcccccattctcaaatggcaccttgaaaattatcgaccggaaaaagcacatattt

SEQ ID NO: 226696 - DNA, 100 bp, Homo sapiens
ctcgggcgccccgccggtcacctccgcgcggacaccagtttttggctttcacccccaaccagtgaccaaagacttgaccactcaaagtccagctccccag

SEQ ID NO: 226697 - DNA, 100 bp, Homo sapiens
ctttcgtattcgttgttctcggcgggctgtggggcctccgcgccgcggccgttagtcatgtcggtctgcgggccaggcatcgacatccgcaacgactatc

SEQ ID NO: 226698 - DNA, 90 bp, Homo sapiens
aggccctgagtcaaagaagatgcctcgaactaaacaaattcatcccagaaatctaagagcacactttcatattccccatcacattggctg

SEQ ID NO: 226699 - DNA, 90 bp, Homo sapiens
gcatctgacaaacactgtattcgttgacagagctttgatagtcgtaccatatgcagaaggaggagatgttaaagtaacccatcttgcagg

SEQ ID NO: 226700 - DNA, 100 bp, Homo sapiens
cctcatggagggagcaccccagggccctgtggcatgaggaagctgggggcatcttctccccaggtgtcagtggtaactggatcgagatcgcctatggtac

SEQ ID NO: 226701 - DNA, 74 bp, Homo sapiens
tcaggcctctggtgccaaatacattgtcttaacttccaaacatcatgaaggtcctgtccctgctatcagtgggg

SEQ ID NO: 226702 - DNA, 98 bp, Homo sapiens
cgctggtggagattctcatccccgacgtgctgaggccggtccccagaatactcccccagttgcaagaggcgcaggaccgtggaagacttcaacaaatt

SEQ ID NO: 226703 - DNA, 100 bp, Homo sapiens
gcactgcagcagacagctccctgggcaccaggcagctaacagccactgaggcggctcccagctgcgttggcgacatggccgacacccccagagatgccgg

SEQ ID NO: 226704 - DNA, 75 bp, Homo sapiens
gatccagacctctacaagcaaatggagaagttcaggaagcagatcgccaaactgaggcagcaactacaacgcagt

SEQ ID NO: 226705 - DNA, 100 bp, Homo sapiens
cgggacccccaggacgacgtgtacctggacatcaccgtttgaccttgtctgtgtcaatgcgtggatgctggacctcacccaagccatcctgaacctcggc

SEQ ID NO: 226706 - DNA, 98 bp, Homo sapiens
cctggtgcgggccctctggaccctggagtacaccccgcagcacagccgcgacttcaaggtgtcatggagaaactccagctgggcccagagattctgca

SEQ ID NO: 226707 - DNA, 97 bp, Homo sapiens
catgaagcaactgccagtcttggaacctggagacaagcccaggaaagcaacatggtactacttagtgggcgtgcaggagcagcaatgcgttgatggg

SEQ ID NO: 226708 - DNA, 132 bp, Homo sapiens
ctaaggcaaaggagtggaagtttgagagaagtttaagagaagaaatggacatgattgcctaaatcagccaaacacagggttgctgaaaagccaggagtcaaaatgactgagcgctttgactgccaccattgc

SEQ ID NO: 226709 - DNA, 75 bp, Homo sapiens
agaagtcattttaaactatggacgactccgaggaacattgagaacacacatgcaggacttgaaagatgttactaa

SEQ ID NO: 226710 - DNA, 98 bp, Homo sapiens
ccttcaagtaatgaacctagagaatgaattttcaccattgaatatattagaaccattctgccttggcattgtgtccagatctggcaccctgacttatg

SEQ ID NO: 226711 - DNA, 99 bp, Homo sapiens
atgtaccgtgctgcagatgaaatagaaaaggagaaagaattgcttatacatgaaagaggggcatcaggcaaaggcagctcgagcatctcatctgacgtg

SEQ ID NO: 226712 - DNA, 100 bp, Homo sapiens
ggtgctcctggagaccctggcctgcagggtgaggttggtcagcaaggttctcctggacccaccctgttggtagagccacctgacttttgtctctataaag

SEQ ID NO: 226713 - DNA, 87 bp, Homo sapiens
cggaaggcctcccggcgctcttcctcccggagtatgatgcacccactgggcctatgtaataacaatgacgaagaggacttgtatgaa

SEQ ID NO: 226714 - DNA, 90 bp, Homo sapiens
atttgccagtggagtagaacagattattcttggagctggaccagtacttgaggtcatcatcagatttgaaatatttaaagtggatacaaa

SEQ ID NO: 226715 - DNA, 90 bp, Homo sapiens
ctctgagctgttcctcccagctacgagctgccccaggatcttcaagatgaagttcaaagggagaatactaatctgcaaaaactacaggcc

SEQ ID NO: 226716 - DNA, 100 bp, Homo sapiens
cgcacatcactcccgagtggaggaagcaatacatccagtatgagggccaaggagattaagatcaagttgggaattctcctccagaagccagactcagttg

SEQ ID NO: 226717 - DNA, 100 bp, Homo sapiens
caagatcctcgacgagagcagatggctgcagcagctgccagacctattaatgccagcatgaaaccaggctcccacatcaggacgagaaggagccctcgag

SEQ ID NO: 226718 - DNA, 90 bp, Homo sapiens
ttctgggccaccatttgccagggcctcgctcgaggaacgaatgcaggaatttgggaactgagctgtgcaagtgctgaagaaggagatttg

SEQ ID NO: 226719 - DNA, 107 bp, Homo sapiens
catcaagacaagccagcagctcgctcagtacaagaggtactaggttttgacaagcttgcatcatgcgtgagtataagctagtcgttcttggctcaggaggcgttgga

SEQ ID NO: 226720 - DNA, 100 bp, Homo sapiens
agttttttaagaagggacaaaagatggcttccggaaagtggtccacatcgagcagggcggcctggtcaagccagagagagacgacacggagttccagcac

SEQ ID NO: 226721 - DNA, 83 bp, Homo sapiens
cacacaccctcgtattctcctgcccttccccagaggctgtggccaggccagctgggctcggggagcgccagcctgagaggagc

SEQ ID NO: 226722 - DNA, 92 bp, Homo sapiens
agctgtgctcgcgctactctctctttctggcctggaggctatccagcgtgcacattcaggttcccgagcacaaacatcaagataacgttcac

SEQ ID NO: 226723 - DNA, 51 bp, Homo sapiens
gctcaatcagtggtgcaatgtggtgggaaaaaatgcatttttcaaagacct

SEQ ID NO: 226724 - DNA, 76 bp, Homo sapiens
caaacagtacagggtgaagcgccagcaggagagggtacactgaggaggggacggctccgtcttcacattgtgcaca

SEQ ID NO: 226725 - DNA, 96 bp, Homo sapiens
cgtcactcgctgggctgctcttcctgaggttttcctaagccatcccctggcggaaccgcccccaggggtgctgtgcctaccagacagcctgaatct

SEQ ID NO: 226726 - DNA, 50 bp, Homo sapiens
agacggcggcagcagcggcattcaggtctgggacgaggccaatctgaggg

SEQ ID NO: 226727 - DNA, 75 bp, Homo sapiens
atatagccatgaatggagaaggttacctctacccatcaacaaggcgcctctgtcgaagagccttctgctggtccc

SEQ ID NO: 226728 - DNA, 74 bp, Homo sapiens
gtcctgtgatccatcactcggattggcaggacctggggccaaaagccaaggtgacaaggcaactgtatgagcca

SEQ ID NO: 226729 - DNA, 75 bp, Homo sapiens
accaaagatttgcatcagccatctcttagtccagcaagtcctcatagccagggtgaagcatatatgcgtttaagc

SEQ ID NO: 226730 - DNA, 100 bp, Homo sapiens
aggcggagatccgctacgagggcatcctctacaccatcgacaccgaaaactccaccgtagcccttgccaaagtgctacagttgaaactccagcagcgccg

SEQ ID NO: 226731 - DNA, 100 bp, Homo sapiens
aggtactggtgttgggagactcaggtttgagaagatgatcagtgggatgtacatgggggagctggtgaggcttatcctggtgaagatggccaaggaggag

SEQ ID NO: 226732 - DNA, 90 bp, Homo sapiens
caagttcagggctcccactgattctacattatgaggcggggtttcaccatgttgcccagactggtcttgaactcctgagcttaagcaatc

SEQ ID NO: 226733 - DNA, 100 bp, Homo sapiens
atgaatgcaagaggcgtttctataagaattgtgcttgatgaagccaccagtgccctgacagaggaagtggagagcgagctctatcgcatcggccagcagc

SEQ ID NO: 226734 - DNA, 100 bp, Homo sapiens
ggcgcgctctgaggccggctacgggcccttcggccaggaacatcacagccagacccaactggatgagctgctgcccaaagggagcaaggaggaacagcgg

SEQ ID NO: 226735 - DNA, 75 bp, Homo sapiens
aggaggagtacaaggacatcctgcgcaaggccgtgcagaagtgtactaatggtcacttgatgtgcgctggctgtt

SEQ ID NO: 226736 - DNA, 90 bp, Homo sapiens
cgttggagtccaacctatgatgtgtcttccattctaacatccatacaggcccgtgtatttaatgaaactcccatcaaccctcggaaatgt

SEQ ID NO: 226737 - DNA, 100 bp, Homo sapiens
aggccgtccagcagatggcggatgccctgcagtacctgcagaaggtctctggagacatcttcagcaggtcagaatggcggcagtggagcatcgtcattct

SEQ ID NO: 226738 - DNA, 75 bp, Homo sapiens
cggggatgctggtgcttttctttgccctgcatgtgtgtgatgaggtaatcaaagacctaaagggctcggactaca

SEQ ID NO: 226739 - DNA, 75 bp, Homo sapiens
ggttctggaatcctcagttcaagagtgcctggtgaagaatgtgatgggatcactagcatgtctgcggagagcggc

SEQ ID NO: 226740 - DNA, 104 bp, Homo sapiens
ggacaagaagattatgacagattacgccccctatcctatccgcaaacagttatctaccttgcctgctcctatgccacagtgtacctgatctacctgaaatttaa

SEQ ID NO: 226741 - DNA, 100 bp, Homo sapiens
agtactacagattttatacaccaccaaactttgttcttgctcttgttttgccctcaattgtaattctggttgattacagacatagtgaaaccagtgcaac

SEQ ID NO: 226742 - DNA, 75 bp, Homo sapiens
cgcgagtcgcatctgctcaacgacgaggacctgacgcaggaagagttttatggaagaaaattggttgttgctgat

SEQ ID NO: 226743 - DNA, 100 bp, Homo sapiens
agtcatcgcgtctctccacagagccatccagcgaggcttcctgttacctgaaacagggcaaatatgctgaggctgagacactatacaaagagatcctgac

SEQ ID NO: 226744 - DNA, 82 bp, Homo sapiens
cgcggagagcaatcgccgggacagctgcaaggtgagaagccctaccactgcaactgggacggctgcggctggaagtttgcgc

SEQ ID NO: 226745 - DNA, 75 bp, Homo sapiens
gtcaagtcagccaaaaacacgcgggtcatccccaagccccagagagaatgctgaccccctgaaggtgtacccgcc

SEQ ID NO: 226746 - DNA, 50 bp, Homo sapiens
ctcactgccttggtggatgggcagatcttcgtgaagactctgactggtaa

SEQ ID NO: 226747 - DNA, 113 bp, Homo sapiens
tgatgctggagaactatgggaacctggtctcagtggattctggagttctggagacaagtgcttctggatccctcttcccttcccttttgctcctctaaagagtatggagacat

SEQ ID NO: 226748 - DNA, 50 bp, Homo sapiens
cctcccaagtagctgggaccacagattcaactagcctatcaaaaatcttg

SEQ ID NO: 226749 - DNA, 100 bp, Homo sapiens
ggtttggcagatggagaacctgatcgaacttcggctcaccttgtagcagcttttgaaaagagcttagggaatatgactggccgattgcaaagtctaacta

SEQ ID NO: 226750 - DNA, 96 bp, Homo sapiens
acacctactttatagtcctgattcaagtgttggcggatggaagggaggagactcctgaccctcagaatgatgggaatttcttagccataggctcac

SEQ ID NO: 226751 - DNA, 100 bp, Homo sapiens
cctcctccatttcttccacctcctccgactgtcagcactgctccacctctgattccaccaccggagcattggggagtcagcaatgtccgttgtgttaaat

SEQ ID NO: 226752 - DNA, 75 bp, Homo sapiens
ggaaaacagagaaagaagtgataggagggctctgtagaggctgaggggatctggcggtggagcgctaggatcaga

SEQ ID NO: 226753 - DNA, 120 bp, Homo sapiens
ttcagtccccgccgagccgccaccgcaggtcgaggacggtcggactcccgcggcgggaggagcctgttcccctgaggtttggtgcacctcgatttggaggaagtagggcagggcccttat

SEQ ID NO: 226754 - DNA, 98 bp, Homo sapiens
ctcactccctttcctctgctgccgctcggtcacgcttggagccaaaaacctgtatatcatctccgtgaaggggatcaagggacggctgaacagacttc

SEQ ID NO: 226755 - DNA, 82 bp, Homo sapiens
ggttacattgtcaaatcacagcactcagcacaatgttagaggtgttgtatctatggctaataatggcccgaacaccaatgga

SEQ ID NO: 226756 - DNA, 83 bp, Homo sapiens
atcggcgtcctgaccagcggcggcgacgcgcaagggggatatgagactttctactcggaatatcctgagtgttgcgtggatgt

SEQ ID NO: 226757 - DNA, 98 bp, Homo sapiens
gctactgtctactttagggatcgtctttcaaggcgaggggcctcctatctcaagctgtgatacagggtcaaaatgtgggtacagctcctgattcccag

SEQ ID NO: 226758 - DNA, 101 bp, Homo sapiens
ccgctgccgtcgccatgacccgtactccaaagattcaggtttactcacgtcatccagcagagaatggaaagtcaaatttcctgaattgctatgtgtctggg

SEQ ID NO: 226759 - DNA, 98 bp, Homo sapiens
ttcgtcgctgttgctgccgccatacgcgctctccctgtttagaaatcttcccaaggctgcagacaccgacggatttgctttgggagccagagtagctg

SEQ ID NO: 226760 - DNA, 83 bp, Homo sapiens
tacagacctaccggtctgtcagtgagatggcttctaacaaggaaaacgggccttactatacatcatatcccccatcaccagat

SEQ ID NO: 226761 - DNA, 100 bp, Homo sapiens
cagatgaagacagtagttctttggaatcaggacctacaagaacagtgaggagcttcggtctcgtattgtgtctggaatcatcacacctatccatgagcag

SEQ ID NO: 226762 - DNA, 51 bp, Homo sapiens
agatggacggtcactcagcctatggagtatgcaaccgaggatggacttata

SEQ ID NO: 226763 - DNA, 110 bp, Homo sapiens
ttattgaatccatgttgaaaaatctatccaggattcatcccgtgtcaacaatggtaaagacagccaccgcactgtgttcctgacacgtacagcaacgccacgctctggta

SEQ ID NO: 226764 - DNA, 100 bp, Homo sapiens
gattgaggaggaagatcggaagcatacctggatggaggatgctgacagtgtggctgggagcccgagccccacacctgccgggcagcaggtgctggacgtc

SEQ ID NO: 226765 - DNA, 75 bp, Homo sapiens
ccttggaggcctactgcaagcacaagtacccagagcagccgggaaggaagctcttcgtgggcggtcttgactgga

SEQ ID NO: 226766 - DNA, 95 bp, Homo sapiens
accaggctaccatggtctacaagactctcttcgctctttgcatcttaactgcaggcaatggacctcatcatgaccgttgctgtacttacaatgaa

SEQ ID NO: 226767 - DNA, 100 bp, Homo sapiens
cctcccccatgtaccacacctgtgtggccttcgcctggatgtctttggtggacttgggaaagaggttgctagaagcagcaagaaaaggccaagatgatga

SEQ ID NO: 226768 - DNA, 82 bp, Homo sapiens
cttcacaggaattgccatttgaaaaggggaagatagtgatgtactcagtataaatgcagatgcttatgacagcgacatagaa

SEQ ID NO: 226769 - DNA, 75 bp, Homo sapiens
tggaaaaggtcttcactgcaattacaaagggtgagtcagatgattccattctccgattggccaaggccgatggca

SEQ ID NO: 226770 - DNA, 83 bp, Homo sapiens
cgtatttgtgtgacttgactcttcaaacacaaagattctcctgcccctgaagcttctgccctttcccaggaagagaacccaag

SEQ ID NO: 226771 - DNA, 100 bp, Homo sapiens
tgtaccttaatcttgtggctgtgcgcagggacttctgtgggagaggcatttcatccttcatgaagccattcaggattttgaattgcatatgagtgcttgg

SEQ ID NO: 226772 - DNA, 100 bp, Homo sapiens
caccgccgccttcttggcgcgaccccaacccagccccacatgtagagcgcatgaagtacaggacaataaagcttcctacacatatcaccaggaggatctc

SEQ ID NO: 226773 - DNA, 74 bp, Homo sapiens
agcttcgcggagcgactggagagccagagcaggttcaggagaagtggcacctggtggaggacctgtcgcgactg

SEQ ID NO: 226774 - DNA, 85 bp, Homo sapiens
tgtgaatcgcttctccaaacaattgcttccaagtatgatcatcaggcagaagaagatcttcgcaattggatagaagaggtgacag

SEQ ID NO: 226775 - DNA, 98 bp, Homo sapiens
caaggacttactgggtccggttcactactccactggaagccagtgggagtcaacagtagtggcatgggcaagaaggacgaccccaagctgatgcagga

SEQ ID NO: 226776 - DNA, 90 bp, Homo sapiens
aaagcctactgaccactaacctccctcacagcagaaactagacgtcaggtatggaacccttcagatcaaagcttaccaataaattcagta

SEQ ID NO: 226777 - DNA, 88 bp, Homo sapiens
ggatctggaggagcagttgtctgatgaagagaaggtagaggaaggatggtgggaaggtgttctcaacgggaagactggaatgtttcct

SEQ ID NO: 226778 - DNA, 98 bp, Homo sapiens
ccatcatcgccagctgcacactcttggggctctacctctttttcaaagctcacattgtccttgaagttcctccatatcataacccagcagttacagct

SEQ ID NO: 226779 - DNA, 51 bp, Homo sapiens
ggcagaggtggaggcgctttgaaaggcagtagcagaatcccatggtagcca

SEQ ID NO: 226780 - DNA, 75 bp, Homo sapiens
atctgggaagcaccgagactctagaagaaatgccctccgggtcacaggataagatttctcgaatgctggcagcca

SEQ ID NO: 226781 - DNA, 99 bp, Homo sapiens
ccgagagcgtgaccgagagcgcgaatatcgtcatcgttagaagtacctaagactaatgctttctgtggacaccactgagctctgcctcaactccaccct

SEQ ID NO: 226782 - DNA, 90 bp, Homo sapiens
gaggaatatgatagcatcaaaaacaacattgaagaggaggaaaaagaggttggctcagggtgtctgatgccatcaagtgttgcaggagaa

SEQ ID NO: 226783 - DNA, 83 bp, Homo sapiens
cggctggcgcacctgggcgtgcaggatttttagactctgaggagcagttggagctaatccacattatggaaatggaaaccacc

SEQ ID NO: 226784 - DNA, 100 bp, Homo sapiens
cgcaagagaaaacttgactgtatacagaatcttgaatcagaaattgagaagctgctacctggaacgggcaggaaagaaaaatgcagataagaaaattaaa

SEQ ID NO: 226785 - DNA, 74 bp, Homo sapiens
gtcgccttcgcctcctaatccctagccactatgtgcctccggagccagcgtggtggccatagacaacaagatcg

SEQ ID NO: 226786 - DNA, 50 bp, Homo sapiens
ggccgctttggcgccaaatcctgaggttccgaggtgcaccgattataccc

SEQ ID NO: 226787 - DNA, 100 bp, Homo sapiens
gctggttccccaacatgcctcaccctcatctatatcctttggcagctcacagccacggagaccgcccagcagttgaagcggagcgccggggtgcccttcc

SEQ ID NO: 226788 - DNA, 80 bp, Homo sapiens
ggcgcgatgcgtcaagtacactgaaattcatcctgagatgaggcttgtttctggtgcaggtgacatcaaactcaccaaag

SEQ ID NO: 226789 - DNA, 74 bp, Homo sapiens
gcgccggcagaggatccagtgttcaccatcctggccccggaagacctcctgccccccgaggtctgcagtctcct

SEQ ID NO: 226790 - DNA, 98 bp, Homo sapiens
ttgactacggattccagaggctacagaaagtcattcccagacaccccggagaccccgagaggctgcccaagtaagactttgaccccgacgcaggcttc

SEQ ID NO: 226791 - DNA, 100 bp, Homo sapiens
cgggacaggaagtggccgtagcggcttgttggataaggaattgaagccattttttatgaaggaagttggcagtcactttgatgattttgtgaccaatctc

SEQ ID NO: 226792 - DNA, 82 bp, Homo sapiens
gatgtttgcctggtctatagttggaaagaatacccacctcatgtccaaaaagttgaaattaatcctgtaaggttaagtcggc

SEQ ID NO: 226793 - DNA, 101 bp, Homo sapiens
tcggaatgcactacaacaggaaaatcatattatagatggagtaaagctctcaaaggtctatggccctgtgttcactctgtattttggcctgaaacccatag

SEQ ID NO: 226794 - DNA, 83 bp, Homo sapiens
ccgtggccttagctgtgctcgcgctactctctctttctggcctggaggctatccagcgggatgaacgtagggcacttagcttc

SEQ ID NO: 226795 - DNA, 100 bp, Homo sapiens
tgaaattttcaccagaaagtgttgcagcgtttatagcagtccttggcattctttccattattgcacaggactcatctgatgatgtgagaagagttcagag

SEQ ID NO: 226796 - DNA, 75 bp, Homo sapiens
tggcggacatcactttagaccctccacctaattgcaggctgaccggttccctgatgtgttacctgcttctgctac

SEQ ID NO: 226797 - DNA, 100 bp, Homo sapiens
cagtattcccatgtcttggaacgaattcatcctttggaaactgaacaggcaggattagaatcatggaccacacatccccgacctacatgcttgctaactt

SEQ ID NO: 226798 - DNA, 75 bp, Homo sapiens
acatgcatgagtgcttcgagagggtgttctgcgagctcaagtggagaaaagagagtacccagtactatgacatgc

SEQ ID NO: 226799 - DNA, 76 bp, Homo sapiens
agcccggaccacgtggtgaacgcggtgatgctggtcccaaaggtgctgatggctctcctggcaaagatggcgtccg

SEQ ID NO: 226800 - DNA, 50 bp, Homo sapiens
cagatgctcccttctgctcctgacacttggcatttcacctgaagaaaaat

SEQ ID NO: 226801 - DNA, 51 bp, Homo sapiens
ccatccaggactccctgactcgatggtctgccctacttgagagaatgcctg

SEQ ID NO: 226802 - DNA, 100 bp, Homo sapiens
aaggatttaccccgtgatatccagtttgatagtgaaaaaggagtggactttgttctgaattactccaaagctacctcaacatgctaaggacttgtgaggg

SEQ ID NO: 226803 - DNA, 100 bp, Homo sapiens
aaagaaagctgcgttaatgtttgcaaatgcagaggaagaatttttctatgaggcccttatgttagctatgggatatcatgagaagggcagagctttcctg

SEQ ID NO: 226804 - DNA, 50 bp, Homo sapiens
ggtgacagtctgcatgtgcagttttcagaacctatgaacgggaagccctg

SEQ ID NO: 226805 - DNA, 90 bp, Homo sapiens
tcgtcgaaaggattggattggcatctttagagcttcacaggctgctcaagaagccgagatcaatgccagaaaagccaaaaactctgttac

SEQ ID NO: 226806 - DNA, 75 bp, Homo sapiens
ttataagaccaagcgagtcctccctcccaattggaaatagaaaatggctttgtaaagaagtttgaacctaaatct

SEQ ID NO: 226807 - DNA, 98 bp, Homo sapiens
ctacacctgccaggagatcctgaatgtgactcagtggttccaagtgtggctgcaggtggccagaatggacaatcagaccgttctggctgtccagtcat

SEQ ID NO: 226808 - DNA, 78 bp, Homo sapiens
caagcatcccattacagatagaagaggaagttggaaatctgtatgacatgttccacactcgcaactctttacaccgta

SEQ ID NO: 226809 - DNA, 105 bp, Homo sapiens
cacgcacgggatccagagcgccgcgcacttcgtcatgttcttcgcgccctggagcaggccgggctctcgccatgggtcactgtcgcctctgccacgggaagtttt

SEQ ID NO: 226810 - DNA, 75 bp, Homo sapiens
cttaccgagagtttgaaagtgcgattgtggaagctgctcggaaagaagttttcccatttccagaagttagccaag

SEQ ID NO: 226811 - DNA, 100 bp, Homo sapiens
caggactgagtgaagaagaacagctcgagagagcattacaagccagcctctgggaccgaggtatgactgattttcccaaaatattttgtgaaacttctca

SEQ ID NO: 226812 - DNA, 74 bp, Homo sapiens
tactcataaatcaagtgataataaactagaggagctctggatgagggggatattgccttgttgaaaacttatgt

SEQ ID NO: 226813 - DNA, 100 bp, Homo sapiens
tccatgtcctgttgtggggcttttacagcctttgggctgattcaccccaagagtggccgttcctaccacgaggagttcaaccctccaaaagagcccatga

SEQ ID NO: 226814 - DNA, 101 bp, Homo sapiens
aagttcttccttgaagaaatacagcttggtgaagagttactagctcaagagggagaaccgaagattacaggaggccagcatgaggttggaacaagagaatg

SEQ ID NO: 226815 - DNA, 100 bp, Homo sapiens
ctgacaacgtggatcgttgttttgaaacattttgtggaagtataatactttgtcattatgagatgtcgtctctcggtgcctcctttgtgcaaattaaatt

SEQ ID NO: 226816 - DNA, 75 bp, Homo sapiens
ttggacgccggtggagacgcaggcgagaagtgcatcagcagaggggagctccaggtgtctctgtcatatcagcct

SEQ ID NO: 226817 - DNA, 83 bp, Homo sapiens
gggaagtctataagctttgcaacagaattacagagtatgattacggactccagaattcctcagcagcatcctttcatcaacct

SEQ ID NO: 226818 - DNA, 95 bp, Homo sapiens
gaaacactgggaaaaaaaaaaagtctcaagtgcgcccgaggcgcagggggcagattgctgtcgtggctgtgatgtgcaaaccccacagatgtcca

SEQ ID NO: 226819 - DNA, 82 bp, Homo sapiens
gccaaggaaaaaaagcagagaggagcggggagcaatgcagacaatgcagatcttcgtgaagactctgactggtaagaccatc

SEQ ID NO: 226820 - DNA, 89 bp, Homo sapiens
tgcacgcttcgctccaactcctgcagagctgagccggaggggaatccggaagggacacgctgaacagaacctgggccctttcctgggat

SEQ ID NO: 226821 - DNA, 82 bp, Homo sapiens
gccgtagcggcttgttggataaggactcagtggtctttgaggatgtggctgtgaacttcacccaggaggagtgggctttgct

SEQ ID NO: 226822 - DNA, 74 bp, Homo sapiens
gaacatggcggatcggctcacgcagcttcaggacgctgtgaattcgtctctggctgatgaacttgctcttgtgg

SEQ ID NO: 226823 - DNA, 80 bp, Homo sapiens
gtctccgcagcagatcagggaccggctgctgcaggccatcgacccccagagcaactactatactggcaattgctggagaa

SEQ ID NO: 226824 - DNA, 154 bp, Homo sapiens
gtgtgggccggctagaggaagaggcgttgcggcgaaaggaacggctgaaggccctacgggagaaaaccgggcgcaagggcttatttcaaaacctttgtccctcagttccaggaggcagcatttgccaatggaaagctctaggaaacaccagtct

SEQ ID NO: 226825 - DNA, 97 bp, Homo sapiens
ttcagcgtcacagctgaggactggcttcgtggtccctgatgggagagcatgaacaggtggttcctttgcccaaagactcaacaggtgcagcagatcc

SEQ ID NO: 226826 - DNA, 90 bp, Homo sapiens
ctttatatagaagggagagtagaaaaactaagacgcagtcttccaaacctgtcccgaacatctaatacacaagttgactcagtgaaaagc

SEQ ID NO: 226827 - DNA, 90 bp, Homo sapiens
gggggatccgatgcgcgccgctgccgctgcgtgggggtgaggggatcagccgttggacataccagatggtcgaagagctccacttcctgc

SEQ ID NO: 226828 - DNA, 74 bp, Homo sapiens
tggatattgagccggatagacctattggatatggagcctttggtgttgtctgccagcagccagcttcgggtgta

SEQ ID NO: 226829 - DNA, 50 bp, Homo sapiens
ggaggaggtggcggcggcgggaagataactgttccccctcatcttcccgg

SEQ ID NO: 226830 - DNA, 88 bp, Homo sapiens
gcggcgctggaggagcgaggcagctgtactaggactgggaacggaaatgggcaagttcatgaaacctgggaaggtggtgcttgtcctg

SEQ ID NO: 226831 - DNA, 83 bp, Homo sapiens
gcctgcggtgcctgagctgagtgaggccgaggccgggaggccgtgcccggagcaaattgtggctactaatttgccccctgaag

SEQ ID NO: 226832 - DNA, 75 bp, Homo sapiens
ctgccgtccatgcggaagatcgtcgccacctggatgctggaggtgagaatgagatggtgatcatgagacctggaa

SEQ ID NO: 226833 - DNA, 75 bp, Homo sapiens
gccacacctttgcactatgctgctcagagtaactttgctaatgcatacacagccacagctatcaacagcaccaac

SEQ ID NO: 226834 - DNA, 100 bp, Homo sapiens
atcttattccactgcatgtatttgtgttgttactgatgcagagatacagcaaaagagtctacataggtatcaatataagtgatgaggattttcttttgct

SEQ ID NO: 226835 - DNA, 101 bp, Homo sapiens
ctcccgagtagctgggaccacagggacacagcagtctctgaatttcatgctctcctctttgatgtgaagaaaatgaaaagctgaacagttgtggaactgtg

SEQ ID NO: 226836 - DNA, 100 bp, Homo sapiens
ctttcccaagagatgttggcaaggggcctttggaagttgcccaggtttttctgtctgaaatacctagtgacccaaagctcttcagacatcataataaact

SEQ ID NO: 226837 - DNA, 82 bp, Homo sapiens
ggctgtgtttggctcagacctgcaagagaagctgggcaagcagaagtatttcctgagggccgggcctgcgcggtggtctttg

SEQ ID NO: 226838 - DNA, 149 bp, Homo sapiens
cccttccccttccctgcccccttcccccacccccgactcgggcttggcgcggcggccagaggaaccccgaggactcacaccacccggcaagaactgctcactacggctccctgccccagaagtcacacggccggacccaagatgaaaac

SEQ ID NO: 226839 - DNA, 90 bp, Homo sapiens
catcctccccgccccatcggttgttgtctgggcgggaggaagataccaactagagataaaaataccagaaacatacccatttaatccccc

SEQ ID NO: 226840 - DNA, 82 bp, Homo sapiens
tgacagttcacataagaagttcttcgatgtatctaaacttggcaccaagtatgttttgctgctgcagcccattgagagtgac

SEQ ID NO: 226841 - DNA, 154 bp, Homo sapiens
cgacagtctcgccagcgtctcctctgccaaaacccagggctggaagatgtggcagccggccacggagcgcctgcagtgaatggtagtgtctagaaagggtatgtcccttcaagagagaggtgccaatgtccaaccggcctaataacaatccagg

SEQ ID NO: 226842 - DNA, 100 bp, Homo sapiens
tattttgcaccactggatgttgtttactggtgagtgctccagttgtaacatctaccactcaggaaaagccgaaggatagcgatcagtttgaatgggtgac

SEQ ID NO: 226843 - DNA, 100 bp, Homo sapiens
tgcgcatccaccccgacggccgagttgacggggtccgggagaagagcgaccctcacagggaagatggtgaaaggaatgggaggtgctatggatttagtgt

SEQ ID NO: 226844 - DNA, 75 bp, Homo sapiens
ccaagctccgagaagaccggcggccaatcacagtccactttggacagggcatcgggttcccaaaccagagttggt

SEQ ID NO: 226845 - DNA, 74 bp, Homo sapiens
cacaaggccaagggcaagtgatttgacagggcggcgactggcggcgcgatggacctgaccgggctcctgctgga

SEQ ID NO: 226846 - DNA, 75 bp, Homo sapiens
gttaattcgaaagtcttgtggaagatctggaagaaacagtgagcatgtttttgaacacattaacaccgaagttct

SEQ ID NO: 226847 - DNA, 117 bp, Homo sapiens
aaagatggcggcttcctagtgagtcggcggctgatttagaaggaggttcaggctacggtgagccgaagacctttgggctcttggatgcataatataccagcttgtggcaggactccc

SEQ ID NO: 226848 - DNA, 88 bp, Homo sapiens
gcacgcggcgatatggaagaggagggcaagaagggcaagaagcatcacaggacatggccccctcagccacctagctggggcccatcta

SEQ ID NO: 226849 - DNA, 100 bp, Homo sapiens
gcggtctttctgccgagcctcggtcccggcccccatcctccccgccccatcggttgttgtctgggcgggagtgaaacacaaatcttttctaacggctgag

SEQ ID NO: 226850 - DNA, 101 bp, Homo sapiens
ggacgaagccggagtgtaggcggcagaggattcgctcccagagcagctgcggccaggggtcccttcagtgttgtacgacgatgtatcaacagagaaactgg

SEQ ID NO: 226851 - DNA, 82 bp, Homo sapiens
actacagctggttcttgaagctgctggtgcagtatgcagaattgaaactctgcagcagccacagccccctgcggaagaagcg

SEQ ID NO: 226852 - DNA, 83 bp, Homo sapiens
gtctcaatatctgtcttcggtggactccttcggcagtccacccaccgccgccgcctcccaggccaagaagcttgagagaagaa

SEQ ID NO: 226853 - DNA, 100 bp, Homo sapiens
caccgaagaggccagacaaggaaatctcttgctgatataagatttgatgaaattaaacttgtccagataaaactatctgctctatgcaagcacttagaca

SEQ ID NO: 226854 - DNA, 75 bp, Homo sapiens
tgaaaatggtgaaactaaagctgaagagttttctggatatgccgcagaaggatccgtgccagaagcaagcctgtg

SEQ ID NO: 226855 - DNA, 98 bp, Homo sapiens
tgctgccgccccttcccaggacagcggaggtggaacttcgtcgcgctgcaacccccggctcggggtcatcatcaaatccacagcaaatttccagtttt

SEQ ID NO: 226856 - DNA, 76 bp, Homo sapiens
tgaccgaacagaaacccctcctcccctagcttcactcaatgttagtaaggtccccgtgggcacgctggtgaaggag

SEQ ID NO: 226857 - DNA, 74 bp, Homo sapiens
actgtgacctgctgctggctcggtttggccttatccagtctatgaagaacgaatgcaggaatttgggaactgag

SEQ ID NO: 226858 - DNA, 82 bp, Homo sapiens
gaagcgagactcatacgcaacctcaatggcctcagtggctttagaggatgtggctgtgaacttcacccgagaagagtgggct

SEQ ID NO: 226859 - DNA, 99 bp, Homo sapiens
tggcagcgacacaattgtctgtgacagtaacagtacttgggatcccccagttccaaagtgtcttaaagcttttaatctagacaacgagcaaccagatta

SEQ ID NO: 226860 - DNA, 98 bp, Homo sapiens
ggaggggcggcgctgcggccacccggcagatgaaaccgtcgtgccaccagatgttccaagctacctctcttctcaggggaccctttctgaccgacaag

SEQ ID NO: 226861 - DNA, 95 bp, Homo sapiens
gcgagggcaccatggaggtgaatgcagatctgcgatttccttctggttggctgtcctgcgtgggtgccaagttccacacatgatttaatgaataa

SEQ ID NO: 226862 - DNA, 124 bp, Homo sapiens
gtcccaccctttcaggtgaacggccaggcccggtgacgtcacttcctgccaggcctcaggcccaggcccaaggccaagtgagagagcccaggccacaggacatgctgccattctgccaagagag

SEQ ID NO: 226863 - DNA, 82 bp, Homo sapiens
atcctgccgtccttctccactttcgccagcccgtgccgcgagcgcggcctgcaggagatccggaagaccacggccagccagg

SEQ ID NO: 226864 - DNA, 98 bp, Homo sapiens
ctttaccgcaattatggcatcctggccgatgccacggagcaagtgggccagatacactctgtgcagttttagagagagacacactcagtattcgagaa

SEQ ID NO: 226865 - DNA, 87 bp, Homo sapiens
aatctttccaaaggagatgcccgatatgatgcttcctggtgtgtttagtggttggtgccattccaattttctgtgctgaaatcattc

SEQ ID NO: 226866 - DNA, 83 bp, Homo sapiens
tacatccaaggcatcaacctcgtccagcaaacggggattcagcgtccgatcctttggaacagggactcacgtgaagcttccag

SEQ ID NO: 226867 - DNA, 100 bp, Homo sapiens
atctcttccttactagatgggcatgcttgggaacaagaactgcacagccatctgggaagcctttaaagtggcgctggacaaggatccctgctccgtgctg

SEQ ID NO: 226868 - DNA, 82 bp, Homo sapiens
tcctggaggagaggcagcggttccaggaagagaggcagaaactcactgcccagggtgctgttggcccaaaggttgccctgaa

SEQ ID NO: 226869 - DNA, 101 bp, Homo sapiens
ggaaataaggaaagttgactgaaaatggggcggaagaaaatacaaatcacacgcataatggatgaaaggaaccgacagttggacatgatataggtcgtgga

SEQ ID NO: 226870 - DNA, 100 bp, Homo sapiens
aagaactaatttttgaagagactgctagattccagccaggatacagatcttaaatttgtcagctgcagaagaaagatcagcaactggagcctaaaaaaag

SEQ ID NO: 226871 - DNA, 75 bp, Homo sapiens
ctcccaaggtgctgggattacagagcttcttcgagacaccttcacttccctgggctatgaagtccagaaattctt

SEQ ID NO: 226872 - DNA, 76 bp, Homo sapiens
gattcatgtatgacagttttgacaacacctatcagtccagttacaacacagggatcacaacaaacacaaccgccac

SEQ ID NO: 226873 - DNA, 75 bp, Homo sapiens
ggttgccactcacctgaggatggacttcttgcctcgaggatctggcattgtcacccgacgtcccctggtcttgca

SEQ ID NO: 226874 - DNA, 74 bp, Homo sapiens
tgctcaatgggcctccacagttcagcaccgccccagaaatcaaggcctcgaaggagctccagcaagcccagaca

SEQ ID NO: 226875 - DNA, 75 bp, Homo sapiens
ggacgagctgatggcttcgctgtcggatttcaaggaactctgcgaccttcaagtcgtttgaggaccgagttggga

SEQ ID NO: 226876 - DNA, 51 bp, Homo sapiens
acacgcggtgaggcggcgacgggctccggctttacattcagcccatgatgg

SEQ ID NO: 226877 - DNA, 75 bp, Homo sapiens
ttctcattattataggctccctcctgctgtcaggctacatcagcaaagggcctgcagaattttcttcctgcccct

SEQ ID NO: 226878 - DNA, 75 bp, Homo sapiens
aggcctgcagcctgtcatgcaggagttggcatacattggataagcacattgaagaagtgcggaagaacaaagaat

SEQ ID NO: 226879 - DNA, 90 bp, Homo sapiens
atggctaaggctcaagaaactggacacctagtgatggatgtgaggcgctatggaaaggctgggacccaagtctgaaaagaagaaacgcag

SEQ ID NO: 226880 - DNA, 50 bp, Homo sapiens
ggaactggtgctgcagcgagaggccaaacgtaccaagaaagtcgggatcg

SEQ ID NO: 226881 - DNA, 88 bp, Homo sapiens
aggctgcgagggactaagagcagatgtgttgttggtggctgcaatgccagctttgcttctcagggagggctagctcgtcatgtaccca

SEQ ID NO: 226882 - DNA, 74 bp, Homo sapiens
atcgtgctctatgactgccaggagggcaagtgtcatggagaaactccagctgggcccagagattctgcagcggg

SEQ ID NO: 226883 - DNA, 75 bp, Homo sapiens
tcgcctaacttctactgacgaagcttggaagttgcagaagcactggaagaagtacgacatctatgagaagcaaac

SEQ ID NO: 226884 - DNA, 75 bp, Homo sapiens
aaaacgtgtgggtacgaccttggtacttcctcctccagctggttatgttcctattcgaactccagctcgaaagct

SEQ ID NO: 226885 - DNA, 80 bp, Homo sapiens
tacacctgttgtttgaaagctctcagcgggacaatgctgacccagacaatgcagatcttcgtgaagactctgactggtaa

SEQ ID NO: 226886 - DNA, 98 bp, Homo sapiens
gacgaggatgatgcggaaattaaccccaaggtttggtgcacctcgatttggaggaagtagggcagggcccttatctggaaagaagtttggaaaccctg

SEQ ID NO: 226887 - DNA, 100 bp, Homo sapiens
gaggaatctcagtagggacaacaggcaggagaattatgggagcgcatttccccaggattacacacactccgcctgcaggaatacttatcagggctttaat

SEQ ID NO: 226888 - DNA, 110 bp, Homo sapiens
cgagtccgcaactccaaacatcgcgattaataggagcgtttgctgccaattgatggggcaaatgatctcttttttcagccacctccactgactcctacctccaaagttta

SEQ ID NO: 226889 - DNA, 87 bp, Homo sapiens
taatgaccacaacaagcaagcatgcagcttactgcttgaaagacatatctgaagagatggattaagaatgctttggattaaggattg

SEQ ID NO: 226890 - DNA, 75 bp, Homo sapiens
cggcgcgcggactccgcatcccgcaccccgatggtagccgaggagctgggggtgaagccagccagttttgacaaa

SEQ ID NO: 226891 - DNA, 100 bp, Homo sapiens
ccccttggaccgagccgatcgccgcggggcagttcgggccggctgtcctggcgcggcgaaccctcctggtgtactggcccttttggatgaagaatgctgg

SEQ ID NO: 226892 - DNA, 100 bp, Homo sapiens
agatcagggacatgttgctggccaataaggcacctgaatggacagaagaggacctcagccaactgacaagaagtatggttaagttcccaggagggactcc

SEQ ID NO: 226893 - DNA, 82 bp, Homo sapiens
caagaaggcaacgacgttccatctgtggaaggacctaccaaccagttatctccagaagaagaagagaaaaggagaatccgaa

SEQ ID NO: 226894 - DNA, 74 bp, Homo sapiens
aacatcaaccacgcccggctgatgactgcaaaattcaaaatggggctcaaggtattcgtttcatctacaccaga

SEQ ID NO: 226895 - DNA, 100 bp, Homo sapiens
tggcaacggcggtggcgcccggagcccgaggtttattacccagaactctttgtctgggtcagtcaagaaccatttccaaacaaggacatggagggaaggc

SEQ ID NO: 226896 - DNA, 75 bp, Homo sapiens
tgcttttggacccaaacatatacagctatgctaagaaggaatctgatcttaatggcgcccagatcaagcttcgag

SEQ ID NO: 226897 - DNA, 100 bp, Homo sapiens
tgaatgacaacgtgacttccctgctcaatgcctcctccgacaagtttgtggccgacctgtggaaggacgggagtttatagcatctgtggattttggtacc

SEQ ID NO: 226898 - DNA, 100 bp, Homo sapiens
ccgactgtgagccaggaagtgctcttggggagcccaggccaagccatccattcttgggtcctttggagaactcccccactggaaaggattctgaaagaaa

SEQ ID NO: 226899 - DNA, 98 bp, Homo sapiens
ttttttgcctaagacgaatgcatagagctgttatccagcaggttattatcgcactgagagagataagggcacacagtatgaactcttttttaagaaag

SEQ ID NO: 226900 - DNA, 100 bp, Homo sapiens
cccggagcacccgacccctgaagtgcttgtgatttcacgtatttttgctgaactcgtaaaagagacacttggatggtggattaaccagaacactaacatt

SEQ ID NO: 226901 - DNA, 99 bp, Homo sapiens
gattttgccttttggtaatgctgtttctgcttaagttggcaagacactccaagtttggcatgaaagagaaagtctattcgtgtgaccaggagaggcaga

SEQ ID NO: 226902 - DNA, 75 bp, Homo sapiens
gcaaagtaaacagggtgccttgtggaaccgggtggtgtgatccctcacatccacaaatctctgattggaaagaag

SEQ ID NO: 226903 - DNA, 75 bp, Homo sapiens
tgaggactgccagctggcgctgcaggctggaggctctcaggtcatttttaccaacccattggagatagtgaagat

SEQ ID NO: 226904 - DNA, 83 bp, Homo sapiens
gaacgaggcaaggagctaaagcagcgtgcgttcagccctgggcagccattgtttgatgtcctgtgactgagaaaccaggcttt

SEQ ID NO: 226905 - DNA, 97 bp, Homo sapiens
cagtaatactgaatttgagaagtttgtgaactcaactggctatttgacagaggtaaaataccatgaagattttgaaaaaacaaaggggagaggcttt

SEQ ID NO: 226906 - DNA, 100 bp, Homo sapiens
ccagtggctcatgacactaagaagtaaaattacgaactcactgagctggaagtcattcaacgggaattgaataggattttaaaatacccagtaatacaac

SEQ ID NO: 226907 - DNA, 82 bp, Homo sapiens
aaaattctcttcattctcttggactgaacttaaatactgatagatccccgtcgaggtcaagatcaagatccaggtctatttc

SEQ ID NO: 226908 - DNA, 75 bp, Homo sapiens
tctgaaagttcatcctgaacaggaaaaggggccttggacaagttgttactgactatgttcatggggatgccttgc

SEQ ID NO: 226909 - DNA, 100 bp, Homo sapiens
gagacggtgacagattctagccgctactttgtaatccggatccaggatggtactgcaaatcagccggcaccaggagcagttcatccagatgctgaacgag

SEQ ID NO: 226910 - DNA, 51 bp, Homo sapiens
cacaagaaaatacctgccagtcaacaggtatcttgtcaaactccgggcccc

SEQ ID NO: 226911 - DNA, 100 bp, Homo sapiens
ggattagagtatgttctgcacttcactgcactgaatgggaagatttactttcgaagctataagtcttgggcgtctttggtactggcttttttaggggtct

SEQ ID NO: 226912 - DNA, 73 bp, Homo sapiens
tctcggaaaccccgcctcttacagtcacgaggcctgctgaaaatgactgaatataaacttgtggtagttggag

SEQ ID NO: 226913 - DNA, 83 bp, Homo sapiens
aagcagccgatccagcctgcggagcctgtggggcaggtcttgggcgtctttggtactggcttttttaggggtctgcctgggga

SEQ ID NO: 226914 - DNA, 100 bp, Homo sapiens
ttcgcgcccctgggagggaggtgggaggctctaggctccaagacgccgtcgcttgaggtctgggataaaagtgaaagtggtgattggcattgtactgcta

SEQ ID NO: 226915 - DNA, 100 bp, Homo sapiens
gccttccttgcagccgcgcctcggccccatggacgccctgtgcggttccggggagctcggctccaagttctgggacgtagacaagtttggcaacgagatc

SEQ ID NO: 226916 - DNA, 75 bp, Homo sapiens
atccagatggcagccagtcagtggtggaggttgctgaaaagccaggagtcaaaatgactgagcgctttgactgcc

SEQ ID NO: 226917 - DNA, 100 bp, Homo sapiens
tccaagggttgtatcgaggctataaaagcacagttttaagagagaatggcagttcggaaaaccctcattcctcctcagcctcctgatgttgctagtcctc

SEQ ID NO: 226918 - DNA, 96 bp, Homo sapiens
aaaagttcttgggacaaacttcatttggacgggctctacgagtgcattctctgtgcctgctgtagcaccagctgccccagctactggtggaacgga

SEQ ID NO: 226919 - DNA, 74 bp, Homo sapiens
ccggtgcaagaggcgcaaacaagccaatcccaggaggaaaaacggaacatcatttacagcgagcaatttcagca

SEQ ID NO: 226920 - DNA, 75 bp, Homo sapiens
tggaactcagacatctgcaaatcatggaccgtgtgtatgtacaacaaaataatgtggagaacgtctacaatttgg

SEQ ID NO: 226921 - DNA, 83 bp, Homo sapiens
ttcatgacaacccccttacagatgagaataaagaacacgaagctgatacagattcgagtggtgaatgcatttcgtagttcttt

SEQ ID NO: 226922 - DNA, 98 bp, Homo sapiens
aaggctatctcaatttcatgggaaaatggcaaatgcacgacagcggcctcctgaacatcaccaaggtatccttctcagaccgaggtaaatacacgtgt

SEQ ID NO: 226923 - DNA, 80 bp, Homo sapiens
ctgctctcaactacaacatcgtttcagggccaggagtggtggctcacacctgtaatcccagctctgggaggccaaggcca

SEQ ID NO: 226924 - DNA, 100 bp, Homo sapiens
taaaaattcatcagagagcattttactactgagctgcaaaggtaaagtgttgagagaggagaaccagtgcattgctcctgtggtttccagccgcgtgagt

SEQ ID NO: 226925 - DNA, 90 bp, Homo sapiens
gtaatacattactgcagagaaacacggaaactaggaagaggaaattaactatctgtacttataaggataaaagaatcagagtgtctcaac

SEQ ID NO: 226926 - DNA, 75 bp, Homo sapiens
tgataatgaagagcccatatcagaagttcaagaagtagagaaccttcttaacagccctgccaaggtaaccctgct

SEQ ID NO: 226927 - DNA, 101 bp, Homo sapiens
cgcagcccacgctcatgatcgacttcctcacccgcgcctgcgacctcgccacacccactcgcccgggtctatggccacggtcggagagtggtcctgtgtgc

SEQ ID NO: 226928 - DNA, 50 bp, Homo sapiens
gtttccatctcttcagagatgaaccagaagctccaccatgaggcgaggtg

SEQ ID NO: 226929 - DNA, 71 bp, Homo sapiens
gtacaagaggctacttctactaggaatttgctcgccctgatacatcgaatgatagagtttgttgtacgtga

SEQ ID NO: 226930 - DNA, 75 bp, Homo sapiens
cttgctccgagagggagtcctcgcggacgtcagccaagggcacactacaaagagtatcttgtgagcctcatcaat

SEQ ID NO: 226931 - DNA, 100 bp, Homo sapiens
gcaccatgagctggggcaccgagctctggtcatcagtgagttctgcctcagtcagctcccaagtgaggacgcagtcacctttgaagactccggaggctga

SEQ ID NO: 226932 - DNA, 100 bp, Homo sapiens
gcggagcgccccttcgcgtcccctgcaccatgagctggggcaccgagctctgggatgatgtgaggcataaagttcatctgaacacctttggcttcttcaa

SEQ ID NO: 226933 - DNA, 87 bp, Homo sapiens
aacccgcgctgcagggaacagcggggcaaacagttattcagcttctcaaggctggaaaagcgaaggaagtttcctacaatgcactag

SEQ ID NO: 226934 - DNA, 96 bp, Homo sapiens
atgggattctaaacatgaggcagaagcacttcccctgctggtaagagttattcagtctgcggattctaagaccaaagaaaatgtcaatgctacaga

SEQ ID NO: 226935 - DNA, 60 bp, Homo sapiens
gccgaatctggactgtggatgattatcgattacggaaaccgaccagagggcaaagtgttg

SEQ ID NO: 226936 - DNA, 49 bp, Homo sapiens
cggaccgcagtgccccaagagaggtactccaaagattcaggtttactca

SEQ ID NO: 226937 - DNA, 100 bp, Homo sapiens
gccggggacgaaacaataaagaccggaagctgagtttttatcctgggagattttgataagatctggcgagaacactgtgaggatgaagaaactctttgtg

SEQ ID NO: 226938 - DNA, 97 bp, Homo sapiens
gccagccgcaccatgccgctcctaagcctgcacagccgcggcggcagcagcagtgagagctgtgccacgaccgtggctatctggtgacccaggacga

SEQ ID NO: 226939 - DNA, 76 bp, Homo sapiens
aatctggactctttgcctgtttggatagtccagttacaacacagggatcacaacaaacacaaccgccacagaagca

SEQ ID NO: 226940 - DNA, 97 bp, Homo sapiens
ctgctcttcggcagtctagccggcctgggtgcttaccagctgtatcaggatccaaggaacgtttggggtttcctagaggcagaggaggtggacacgg

SEQ ID NO: 226941 - DNA, 98 bp, Homo sapiens
tcgttttgcctccggttggggctgctgtttctcttcgccgacgggtgaggacgcttgagcggaagttagaagcaaaaatgatcaaggaggaaagcgac

SEQ ID NO: 226942 - DNA, 106 bp, Homo sapiens
cttcggcaagatccagatcgggatttacgtggagatcaagcgcagcgatgcctctgaagagccaatccattcaggatgggaaaccacgcaggcaaacgagaattaa

SEQ ID NO: 226943 - DNA, 75 bp, Homo sapiens
tactactccaagttccaggcagggaatggctcatggggatatccggtggagccgccaccaaaatgcagattttcg

SEQ ID NO: 226944 - DNA, 75 bp, Homo sapiens
agcctcatcacccggctgctggaggtagcaggacccagtgctccataaaggataatagtttccagtacactatcc

SEQ ID NO: 226945 - DNA, 98 bp, Homo sapiens
gcaggaagaagaagggacacctttcacagctatcagggaagctgtatttaaacttgaaacagatagaagtatatggcccttgataagaatctatcggg

SEQ ID NO: 226946 - DNA, 100 bp, Homo sapiens
ccctgtgcaggcctgctcctccgtttgcaagatgtgtcttgctgaatcagggctctcttatccctgccatcgacttacagtgggaagaagatcttcacct

SEQ ID NO: 226947 - DNA, 100 bp, Homo sapiens
gcagctcccagcctcagttctgcaatgcagcatgttagccgcttgcaagacccttcaagaagtaacacagctatcacaagaagcacagagaatagttgag

SEQ ID NO: 226948 - DNA, 90 bp, Homo sapiens
aaggaaaagacaatcattgcttcaagaatgctgacccttgtagaatgtggcaaaggagcagagaactttgacaagttcttcacacgagga

SEQ ID NO: 226949 - DNA, 82 bp, Homo sapiens
aaagacaaggctaaggacttcatgcccgccagcaaaggcgatcagtgggtgaccgcggctgcgagggactttgtcatccgtc

SEQ ID NO: 226950 - DNA, 100 bp, Homo sapiens
gattggatattattggcctagctggagaatggctgacatcaacggccaataccaacatattgcaggcgagaagaaatctgctcagtggcgcacagtggag

SEQ ID NO: 226951 - DNA, 82 bp, Homo sapiens
cgggagctggacggcgagcgcgagcggcgcgagaaattatcgccagtgtgacccttcagaacgaaagttatatggaaaatca

SEQ ID NO: 226952 - DNA, 90 bp, Homo sapiens
atttgttaaggattccaagtaactcttatttggctggtccctgcagacggcttcccatttttatgaccggatgctgggaagcctgctggt

SEQ ID NO: 226953 - DNA, 100 bp, Homo sapiens
agaaatgaagaagaaaactgtatgtaccctaaatatgggagataagaagtatgaagacatggaaggtattagtgatagaacagaaaaatgaagatggaac

SEQ ID NO: 226954 - DNA, 100 bp, Homo sapiens
ccctgtgtcctgtcaagatgaaccatttagagatcctgctgtttggccaccccctgttcctgcagaacacaggtacggcggcgaagtgctaaaagggaac

SEQ ID NO: 226955 - DNA, 95 bp, Homo sapiens
gatatttgggcctttggacttgttttgtgggaagtggccaggcggatggtgagcaatgtgttatagttttgccgctggactcttccctcccttcc

SEQ ID NO: 226956 - DNA, 76 bp, Homo sapiens
cccagacactgagagccgctttcatcaaggccaatggaagcactgttgtgaagaacttatgaaaattgagattatg

SEQ ID NO: 226957 - DNA, 101 bp, Homo sapiens
cagaactcgcctgtgacccaggatggcatccaggagagcccatggcaggaccggcacggcgaaaccttcaccttcagctacagcctccgcttggcgtcccg

SEQ ID NO: 226958 - DNA, 82 bp, Homo sapiens
ttcgctacacagcaatgcatcgaggggatcatcgtcttgctcttcttttatctcagtttgtgggtagccagtcagtccggga

SEQ ID NO: 226959 - DNA, 100 bp, Homo sapiens
gaggagcagctttacactgatgaagtgttagacatcgagatcaatgaacctttagatgaatttacagttaaaggaagatggaagtggaagtgcttatgac

SEQ ID NO: 226960 - DNA, 95 bp, Homo sapiens
caatgaaccagacctggcacccagagcacttcttctgctctcactgcggagaggtgtttggtgcagaagatgatgattattctccaccgtctaag

SEQ ID NO: 226961 - DNA, 113 bp, Homo sapiens
ggccacaaagtgaccaagaacgtgagcaagcccaggcacagccgacgccgcggggaaggtgctcgggtcttcggggcactgggtcccatcggtccctcctcacctgggctcac

SEQ ID NO: 226962 - DNA, 100 bp, Homo sapiens
ggggtccgggcgtggatcccggcacgcgagcccgggcgttcgcaggggaggagttcgcagtatgtgcagtgcgtggccgggtgtttgcagctgatgctcc

SEQ ID NO: 226963 - DNA, 100 bp, Homo sapiens
gtacaggctcagtctgcggccaagactccgtcctgcaaggtgcctgtggcatttgatgatgtctccatctacttttccactccagagtgggaaaaattag

SEQ ID NO: 226964 - DNA, 82 bp, Homo sapiens
cctttcagccaaatgccagactgattgtcatgctcagggaccctgtggagagggactggtgattgcagctggaagtgcccat

SEQ ID NO: 226965 - DNA, 49 bp, Homo sapiens
ggggagccccgggagccgcacggaagccattaatttgctagaaccaatg

SEQ ID NO: 226966 - DNA, 100 bp, Homo sapiens
ctcggaggcccaacaggtgaattgggaggaagccgttctcagccagaatcacaaaggacaagaatccttcaagaaacaggaaaaaactcctaaaacacca

SEQ ID NO: 226967 - DNA, 100 bp, Homo sapiens
caaggggacgtctgcagctgaaagtcctggagggtatttgggagccaaaaagaaaaagaagaaacagaagagaaaaaaggagaaaccaaattccggaggc

SEQ ID NO: 226968 - DNA, 74 bp, Homo sapiens
ggatcatgtctggtggctccgcggattataacagtctgcgctcctcagaccaccggcaggtgaacagcctgatg

SEQ ID NO: 226969 - DNA, 75 bp, Homo sapiens
gtttgtaaattctccttttaccaagttccccctgcagtggtttggagtccctgccattctgaaaggctggtttga

SEQ ID NO: 226970 - DNA, 98 bp, Homo sapiens
gtcacagacaagttgaagatgaccttgagttgtctgctggttctcagcttgaagaagattctgcagtccttattgatcctttttcttggcgttaccat

SEQ ID NO: 226971 - DNA, 100 bp, Homo sapiens
attcgacacggagcccgacgagttctctgactttgaccgactccgcacggcactgccgacctccgggagcagcgcagattactccaaaggtttcggcggc

SEQ ID NO: 226972 - DNA, 75 bp, Homo sapiens
ggaatcattctcaccttgtatgctttacggcacctggacgatgacggattaccgcacgggttctgcacagtcacc

SEQ ID NO: 226973 - DNA, 83 bp, Homo sapiens
cgcacctctgcgggcccggcggcgtggaccacctcccggtgaagatcctgcagccaggtgattttacaacgagatgctgctct

SEQ ID NO: 226974 - DNA, 110 bp, Homo sapiens
gaaagaggaggggaggaggaggaggattcagggaataggagctggggagcccttctgcgccacaggtttaactatagatcaacacatcatcttgcatctcatgggttcta

SEQ ID NO: 226975 - DNA, 100 bp, Homo sapiens
cctttaaaaaatccaaagtgtgtggagtttgcaaacaaattattgacggtcaaggtatttcatgccgaggctggaggcaaagctggaaaggacagtggga

SEQ ID NO: 226976 - DNA, 80 bp, Homo sapiens
gtgcgcctgggggtgcgcgcctgcgacctgcccgcctgggaagttctactacatcaccctgctacgagaccccgtgtccc

SEQ ID NO: 226977 - DNA, 100 bp, Homo sapiens
gttaaaacctgacacttttaacagtcccagtcggtacctccttttccacctggtgaagtacatctttgctgtggctcacagattgttcctcccattcccc

SEQ ID NO: 226978 - DNA, 100 bp, Homo sapiens
ccagctcaagctgcagttcgaggagctcgaggtggactatgaggctatccgcagcgagatggagcagctcaaggaggatctatcttgggatcccatggct

SEQ ID NO: 226979 - DNA, 119 bp, Homo sapiens
gtacccttaacaggtatctgctcctcatggcgcaggagcatctggagttccgcctgccgttgctctaggtcgtaaccagcctttgaaaaaggagaaaccaaaatggaaaagcgattatc

SEQ ID NO: 226980 - DNA, 100 bp, Homo sapiens
tagcgaggaagaacagaataaagattatcaagactgtagcaaaaccacttcattgtgcgcaggaccctcaggtctaaggcttcttggcataggaagaaac

SEQ ID NO: 226981 - DNA, 53 bp, Homo sapiens
tcagcctccagaggagctgggaccacaggtatgtgccaccacacctggctaat

SEQ ID NO: 226982 - DNA, 75 bp, Homo sapiens
atccggaagcagcacatggtgaatgccacacccttcaagattgctcgaggccagcttcctagcataaaccctagt

SEQ ID NO: 226983 - DNA, 75 bp, Homo sapiens
cggcagataaactggactgtcctctacagaaggaagcacaaaaagggacagtcgtatatcctttcgggctctgat

SEQ ID NO: 226984 - DNA, 101 bp, Homo sapiens
ggccaaactgaagtctcatattcagaatcctagtgctgcagatttggttcactttttgtttactccattaaatatggccgaagactgtactatggaagtta

SEQ ID NO: 226985 - DNA, 100 bp, Homo sapiens
cgtgctttcggtccccgccgaagtcaccgtgatcctgttagatatcgaaggtggaatccatagagctccccatggacaacaagaccaataagaggcgtgg

SEQ ID NO: 226986 - DNA, 100 bp, Homo sapiens
tctctgctgcaccgacctcgacgtcttgcctgtgtcccacttgttcgcggcctatagggagaggctagtggtaacaggccgagctggatggatgggtatg

SEQ ID NO: 226987 - DNA, 97 bp, Homo sapiens
acccgcctggctgcgagatatgaagccgagatcccccgcgaggtgatcgagaggctggcccgcagtcagatccacagcatccgggacctccagcgac

SEQ ID NO: 226988 - DNA, 88 bp, Homo sapiens
gaagcgtcgggattaggtgaaatgtactaatggtcacttgatgtgcgctggctgttttatccacctactagcagatgcccggctgaag

SEQ ID NO: 226989 - DNA, 100 bp, Homo sapiens
tttagccttgcgactggcccagtatccaggtcgaggttctgcagaaggttgtgactttagtatacattgcctttccccatcttcctggttctgctccttc

SEQ ID NO: 226990 - DNA, 100 bp, Homo sapiens
acatcagaagatccgaatgtccctggtagaaccacaggctgctgaaaatatgacaagctgactttctggagaaattctgatgagatatgtcaagctctgc

SEQ ID NO: 226991 - DNA, 100 bp, Homo sapiens
caaaacttcaagccaaacatcaagcagaatgtgatttgcttgaagatatgaggagccaaccccctgcagaggaatgaaatgggacacacacccttggatt

SEQ ID NO: 226992 - DNA, 75 bp, Homo sapiens
aaacaaggttctggaaacaactgggcatatggctttttttctcaaggtgcaatgaaagccttccacactttctgt

SEQ ID NO: 226993 - DNA, 50 bp, Homo sapiens
ggattccaagtaactcttatttggtgctgggggcccgacatctgccaaag

SEQ ID NO: 226994 - DNA, 100 bp, Homo sapiens
aattatgaatctcaggaacaccaccttctgtcagctggccaactcagccaatccgcacatttagctctccaactaccatacaacgtgcttggtttaggtc

SEQ ID NO: 226995 - DNA, 100 bp, Homo sapiens
gccagatgtacatcaaggcctccggcagctatgcaggacatggatttgattgacatactttggaggcaagatatagatcttggagtaagtcgagaagtat

SEQ ID NO: 226996 - DNA, 97 bp, Homo sapiens
cgtgtacaagatccattagctgagctagtgaaaattgagccaaagcacattggagttggaatgtatcaggttatcaatactctggctgaccatcatc

SEQ ID NO: 226997 - DNA, 90 bp, Homo sapiens
agctcctcaagaatctcgtgctcaccggtttctcccacatcgacctggtccaactggcccaccttcaacactccctctaagcacccagac

SEQ ID NO: 226998 - DNA, 98 bp, Homo sapiens
ggaagcagagcaatcgccatggagtttgtgatgaagcaggctctaggaggcccgatgagagaaagggaaagttaaggatgctggagcagaacaatgga

SEQ ID NO: 226999 - DNA, 75 bp, Homo sapiens
tgtcgccccgctgggagaagtgaccctcctgcgcctggaagtggcagtttttgtctttgataaaaaactgattga

SEQ ID NO: 227000 - DNA, 100 bp, Homo sapiens
tcggaagagcgctcccaggagaaacaatgataatatgcagcatgcatactgggaactgaagagagaaatgtctaatttacatctggtgactcaagtacaa

SEQ ID NO: 227001 - DNA, 100 bp, Homo sapiens
tgataactgactctgatctcaacattttggctgaagtgtatgcccacgcaggcgcgacgctggaggggaagatgtatatcacctgcggccgcagagggga

SEQ ID NO: 227002 - DNA, 97 bp, Homo sapiens
cactctcttcggacctacgacatcgcggcttctctggcgttggccagtcagccacagaattgctgagtactcctatgggcatcaaaagaaatcaagc

SEQ ID NO: 227003 - DNA, 74 bp, Homo sapiens
gccgtggaggcttcgccgcctaggatgctcgtcagaagttccgctctgttctggttgaagcaacggtgaaactg

SEQ ID NO: 227004 - DNA, 71 bp, Homo sapiens
gcagagcgggacagccaggaggaagggcagcttggcagagcctcaggatgaccagtgtcccagtgaaggaa

SEQ ID NO: 227005 - DNA, 88 bp, Homo sapiens
gagccgccgaggatgataaacacccaggacagatggagtcccctgtttccacaccagcagtgctgccaatacaccttttggtgccagt

SEQ ID NO: 227006 - DNA, 74 bp, Homo sapiens
aatcatccacgcacctgcagctctgctgagagagtgcaagccgtgggttctgccggaggcctctccagattgtg

SEQ ID NO: 227007 - DNA, 100 bp, Homo sapiens
ttacagcaagatggttcatcttttgccctagagcaattgaaggcttgcttccggcgtcatggctcaaagggccttcccgaatccttatgctgattataac

SEQ ID NO: 227008 - DNA, 75 bp, Homo sapiens
taataaaataaccgtccccgccagtcagaagttgagagcactggcctcaggggaagctagtatggaggatctgca

SEQ ID NO: 227009 - DNA, 75 bp, Homo sapiens
gaggcaactggacatggagttgatctctctaaaacgtcagatttgggatgtgagaactaaagccagtgtacacac

SEQ ID NO: 227010 - DNA, 98 bp, Homo sapiens
acagccccacctacctcctcattggcaccaagcatgaaaaggctcatcatctccaagaaggagcgcatgctgcagaagggctccggcttccacctgga

SEQ ID NO: 227011 - DNA, 100 bp, Homo sapiens
gtgggatttgtgctgctggaagcttcgtcctggttgccttttctcattctgtggggaccagcctgtgtggtaactatggccaagatcaatcctccatgag

SEQ ID NO: 227012 - DNA, 83 bp, Homo sapiens
accatgcactagagcatctacctgggtattgttgcagcatctggcagtgagactgaggatgaggacagcatggacattccctt

SEQ ID NO: 227013 - DNA, 83 bp, Homo sapiens
gtgtgcctcgggtcggtgcaccgtccgggattttatccaccggcactgccaagatcagtcgactcctttacatctagcagcgg

SEQ ID NO: 227014 - DNA, 130 bp, Homo sapiens
ctttttaatattggccaatcatcaagacaagccagcagctcgctcagtacaagaggacccagatgatgtggtaccagttggccaaagaagagcctggtgttggtgcatgtgctttggactagcatttatg

SEQ ID NO: 227015 - DNA, 100 bp, Homo sapiens
tgtattctcctccgaaccccttcatgcccaaatcccggaaactccagcgtgtctccagccgtgatggtcatcatgggccagtgctactacaacgagacca

SEQ ID NO: 227016 - DNA, 80 bp, Homo sapiens
ggaagctctttgccacaaatcacccagaatgcctgcaggaggatttgttggtattgaggaaaacggtgaaatcctttttg

SEQ ID NO: 227017 - DNA, 141 bp, Homo sapiens
ctgtcatgaatcttgacaaattgagatttgctgatggaagcataagaacatgagaactgcgactcagcatgcagaaggggatgccaacagacagatcagcgacctcaaatttaaacttgcaaaatctgagcaagagataac

SEQ ID NO: 227018 - DNA, 100 bp, Homo sapiens
ctacagaatatcatctataacccgcttaagtggagcatcccctttcctgggagacacgaagcaggaaacactggcaaatatcacagcagtgagttacgac

SEQ ID NO: 227019 - DNA, 89 bp, Homo sapiens
attacgaaggcagtccaattaaagtaacactggcaactttgaaaatgtctgtacagccaacgaatatcatcacccttgcagaaactggc

SEQ ID NO: 227020 - DNA, 100 bp, Homo sapiens
tcaatcagagcgtcctgtgcgcaattctgtggtgttcttggtcacacatttatggagtttctgaagggcagtggagattactgccaggcacagcacgacc

SEQ ID NO: 227021 - DNA, 97 bp, Homo sapiens
tggaggttgactgtgctgtctgtaggttcagctgcagcccggaaagaaatcataagaaacaaaattcgagcaattggcaagatggcaagagtcttct

SEQ ID NO: 227022 - DNA, 100 bp, Homo sapiens
ccagttcaggtcaccactggatatcagttgcctgtatacaattatcagctctacattaatcatactcctccaccactgtccaagagtaaggagagagaaa

SEQ ID NO: 227023 - DNA, 78 bp, Homo sapiens
cgagggttggagttttggcgagagtttgtggaagatggcgcctgttgtgacaggccctgccaggagcccggaagtggg

SEQ ID NO: 227024 - DNA, 100 bp, Homo sapiens
ctcacttatccccacggcctttgtcagcacctggaagcacctgcccgcgtgaggagcacctgctgagcccagccaggctggagcttctgcaggggcatct

SEQ ID NO: 227025 - DNA, 100 bp, Homo sapiens
cgccttacccaggagatgctagagaatgatcttctgcaaagccatgaactcatgcaggattagaactaagaggacacaccagcatcggagtgtattaagc

SEQ ID NO: 227026 - DNA, 100 bp, Homo sapiens
tgggagatgctggtgatctggattctgacgctggctctccggctctgcgcgtccgttactacagtgacaccagatctttgccgccgttcattatcagaag

SEQ ID NO: 227027 - DNA, 118 bp, Homo sapiens
ttattggcactaataggaagtacttcaccaactgcaagcagtggtaccaaaggaaaatctgtggcaaatcaaccctcattagaaagaaggctgctgggctggaatcagcagctacgat

SEQ ID NO: 227028 - DNA, 100 bp, Homo sapiens
tggatatggcagtggacgtggatttggggatggctataatgggtatggaggaggacctggaggtagcagcaccgcctgcattgtggtgctggacagaacc

SEQ ID NO: 227029 - DNA, 90 bp, Homo sapiens
gttgccttctggcctgccctgagtctcctcaaataacaacaggtggagccgccaccaaaatgcagattttcgtgaaaacccttacgggga

SEQ ID NO: 227030 - DNA, 80 bp, Homo sapiens
agctctatcagcagaaggagatggctttgcaaaagtggacttagtagttttaagcagaaccatgaaaacctctgtgacaa

SEQ ID NO: 227031 - DNA, 100 bp, Homo sapiens
ttgctgaacttaaaaagcagtctaaacctgtgaccacccctgaagaaattgcacagattgatcagggaccatgaaaagaaacttgtgcttcaccgaagaa

SEQ ID NO: 227032 - DNA, 74 bp, Homo sapiens
ttctaaaggaaggcgtccgttggccttcgtacccgtcttgattgaggaacgtcaaggtcgtgggaaataaaagg

SEQ ID NO: 227033 - DNA, 100 bp, Homo sapiens
gaagtaatggggctgtgcataggggaggacagtcattttgtttactcattcagccctgttgcaggtcccaataaactcttcataaggttgacagaagcac

SEQ ID NO: 227034 - DNA, 100 bp, Homo sapiens
ggcccggccctgagcttcccttgcccagcatccctgcctggactggtcctgagattcctgaatcaggcatccgtgtcattctggaccttactcccaacta

SEQ ID NO: 227035 - DNA, 96 bp, Homo sapiens
gagctcagccaggggcagccggctctggtgctcccagaagaggttttgtggtctttgcaacccttgtggtcattgtggccttgatattaatcttcg

SEQ ID NO: 227036 - DNA, 75 bp, Homo sapiens
gcatcttgttcctgtaatagaaatgtgggcagatcaactgacatccttaaagcctgctataactgcggtagaggt

SEQ ID NO: 227037 - DNA, 100 bp, Homo sapiens
aataaatcaacaagctcagcttcaggagtttggtcaaagcaaccgaaaaggagagtttcctgagcgcttcgaccatcactgcccctgggtggggaattgt

SEQ ID NO: 227038 - DNA, 75 bp, Homo sapiens
aaatcgcttggttaaaacctgacacttttaacaggggatgttcgtctaaccccagaagactttgctagagctcag

SEQ ID NO: 227039 - DNA, 100 bp, Homo sapiens
tctctgctgcggcgcggggaccgctgtgctctcgtgtactatgaggggctgcaggacaagctggcacagatccgcgatgcccggggggcgctgagtgccc

SEQ ID NO: 227040 - DNA, 90 bp, Homo sapiens
tcgcgcgtgggtcccggaggcgccgctccgggcgtgcgttggattggatgctgctggcaagacaaccattctgtataaactgaagttagg

SEQ ID NO: 227041 - DNA, 100 bp, Homo sapiens
cccaaactgtcacagaaagagctgttaacacttcctagataacgggtgcagaccatgaattacgtggggcagttagccggccaggtgtttgtcaccgtga

SEQ ID NO: 227042 - DNA, 75 bp, Homo sapiens
acattgatctggtggttcagaggacacagaactacatgcaggagctcatgccttgcctatgttccgtgagccccg

SEQ ID NO: 227043 - DNA, 100 bp, Homo sapiens
gatttgtctttctcagcaccttggcgaagccttgggtttctttcttaaaggactgatttttagaactccacatttgaggccgggtgagagcaaaactttc

SEQ ID NO: 227044 - DNA, 82 bp, Homo sapiens
aggcaggcctgggcacttggcggtcttgctcagtgtgcagaactctgctggcagctgagaggggaagccggaaagaggcaag

SEQ ID NO: 227045 - DNA, 102 bp, Homo sapiens
cggcgctcaccatccagttcatccaggatgtacagttacccagcacgtgtacctcctcctcctcctattgctcgggctgtagtgccctcgaaacgtcagcgt

SEQ ID NO: 227046 - DNA, 87 bp, Homo sapiens
ctcactgacgtcaagaatgaagctgcggaccctcgtgccatctgtgaggtccatgccagcctggacccctcgctcagcctcttctgc

SEQ ID NO: 227047 - DNA, 83 bp, Homo sapiens
ccagcagcggattcaccatctcaaaacctcaattctgtggtgttcttggtcacacatttatggagtttctgaagggcagtgga

SEQ ID NO: 227048 - DNA, 75 bp, Homo sapiens
aaatcctcaaaaaatcttcttggttctgctacaagcagagaacatttataatgatgaagaccctgaaggaagcgt

SEQ ID NO: 227049 - DNA, 90 bp, Homo sapiens
aagaaatgtaaagaaggttctctttgtgtgagtaagcaagaacctgacttgccttcaaggtgtgcaagtaaggacttatctccagaaaag

SEQ ID NO: 227050 - DNA, 74 bp, Homo sapiens
aaggattccaagtaactcttatttggcagtatttggcagtcgtattcagagataaacccctggagctatgggat

SEQ ID NO: 227051 - DNA, 82 bp, Homo sapiens
ctgaatagctggggctacaggcgtgtgtcactgcgcccaggtgtgatgaatgcagactctgctaccattttggctgtttgga

SEQ ID NO: 227052 - DNA, 75 bp, Homo sapiens
ccgaaaatggtttcagcacctgtgtcagggttcatagtggcgtcatgcacgcagactcctgcaagttcccctaag

SEQ ID NO: 227053 - DNA, 89 bp, Homo sapiens
agcagccatgagggccgggcccagtcaccgaccgcttgaccactatgctatcatcaagtttccgctgaccactgagtctgccatgaaga

SEQ ID NO: 227054 - DNA, 131 bp, Homo sapiens
cagggatgtctacctggtaatagaggacttgaagcagaaagcaagtgaatacgagtcagaagggctgttgataatcaggtgtatgtggccacagcctctcctgcccgggatgacaaagcctcctatgttgc

SEQ ID NO: 227055 - DNA, 75 bp, Homo sapiens
ggcttgtccttgctggtgcatgcgtcgtcggcctctgggcagcagattggtgtctccgctgtgcctggctccgta

SEQ ID NO: 227056 - DNA, 75 bp, Homo sapiens
ccccatctccgcatcaggaccaagatcatggaagggaagtggttgctgtgtatgttactggtgcttggaactgct

SEQ ID NO: 227057 - DNA, 80 bp, Homo sapiens
acctggctctaccagggtgagggtgcccaccacatcatgcgtgccatccgccagaggcgtattttggggtcaaagcagag

SEQ ID NO: 227058 - DNA, 100 bp, Homo sapiens
gctctgagctatgacaagagaggaaacaaaaagttaaacaagcaagcctgccataagtgagaaggtccaagtgggttccccggggcgactacatcgcctc

SEQ ID NO: 227059 - DNA, 101 bp, Homo sapiens
gatgtcctcatcatcccgtcagagctgaggtacttcgtgaagctccctggaattcccatgccaccaccacctttgggactcccccctctgcagcctcctcc

SEQ ID NO: 227060 - DNA, 100 bp, Homo sapiens
agtcaaggacacccacggactcaacaccgcgaccagattggaaaaggtcgcacgtaccgggtgccgaaggaggtccgcgtggagcctcagaagttcgcgg

SEQ ID NO: 227061 - DNA, 75 bp, Homo sapiens
gaggacacagcctcgctggaggcagtttctggatattagaaatggctactccccagtcaattttcatctttgcaa

SEQ ID NO: 227062 - DNA, 100 bp, Homo sapiens
atggatcgactggcagtacctacagaatgctgccaagctcttggccaaggatggccaggccatgttatgggatctcaacgaaggcaaacacctttacacg

SEQ ID NO: 227063 - DNA, 100 bp, Homo sapiens
cggggacccacagacacagccggggtcgggagccgcccggggcagggctcgggagagcgggaatgtatcctgtcaggtataatgtcagtgaatggcaaga

SEQ ID NO: 227064 - DNA, 75 bp, Homo sapiens
ccatttagtaacttctttgcaagcaaggaaatttcaacagttcccttggctcagatgggtacatgctctcggccc

SEQ ID NO: 227065 - DNA, 100 bp, Homo sapiens
gaggaggccgtccagcagatggcggatgccctgcagtacctgcagaaggtctctggagacatcttcagcagattggttgtgatcgtagccaaaaccttgt

SEQ ID NO: 227066 - DNA, 75 bp, Homo sapiens
aatagagttgagcctgtgggacacttcggagggtctcaacgcagactacgtgaagggagagaacctggaagccgt

SEQ ID NO: 227067 - DNA, 100 bp, Homo sapiens
gctcacccaaaccaggttgcagaagatctggattccacacagcagcggcagcagcaggctgcaacggagaaggggctgcccagaggcagagctacacaac

SEQ ID NO: 227068 - DNA, 80 bp, Homo sapiens
cgagagcgcgaatatcgtcatcgttagaaggttccagcaacagatagaaatgctttaagttcactctggggaaagctggc

SEQ ID NO: 227069 - DNA, 98 bp, Homo sapiens
cgcagtggtcgcttcttctccttgattgaggaaacttgaatatttttgtatcctgaagggagaaatggatgaagaagaaatggatgaagaagaccgaa

SEQ ID NO: 227070 - DNA, 100 bp, Homo sapiens
acccgagctggagctgaagcgcaggctgcggggcgcggagtcgggaggaatgtgatgagcagccaggaagttgtagatttcattcaatcaaagatcagcc

SEQ ID NO: 227071 - DNA, 75 bp, Homo sapiens
ttcaactacagatactttgaagtagaagaagctgatgaggactttggatttaagcatcgtctctgggtatattct

SEQ ID NO: 227072 - DNA, 75 bp, Homo sapiens
aaatgcaaaaaaggaggccaaagactttgtgtggcatgcagcattttggaaggaaaattgaagacgtgttcaaga

SEQ ID NO: 227073 - DNA, 74 bp, Homo sapiens
tctggttctgttgatgaccctcttccagctggtcacctgacttttgaatgccgcaattttctccgagtagaccc

SEQ ID NO: 227074 - DNA, 99 bp, Homo sapiens
tgctgacttcggattggcccgattgatagaagacaatgagtacacagcaagacaaggggggattgacggtgaagatgctaatacctgcccagcatcgac

SEQ ID NO: 227075 - DNA, 82 bp, Homo sapiens
gaactgattgagaagcatgctgagcctggcccaggccccccactgcctgcagctcccttccggacattctgggtggtcagtg

SEQ ID NO: 227076 - DNA, 82 bp, Homo sapiens
cttcaatccagttccaaggactccacggggtcaaaatgcagatcttcgtgaaaacccttaccggcaagaccatcacccttga

SEQ ID NO: 227077 - DNA, 74 bp, Homo sapiens
cgccggcctcctcagtgcgaagaagctgcagccgcacctggccaagggtgtgtcaaggatgccacaatgccatc

SEQ ID NO: 227078 - DNA, 100 bp, Homo sapiens
ggggtatggagaggaaggaagaggggttgccctgctgtcagacgtctatcctgagaaaatcttgccggacttgttggctcaatatgacagcagcaaagac

SEQ ID NO: 227079 - DNA, 76 bp, Homo sapiens
actttgcttaataaagatacaagtttgcagaagattggtgctgaagacatggacggcttccaggcagacacggagg

SEQ ID NO: 227080 - DNA, 90 bp, Homo sapiens
aagatctcgactaccagccaacactgctgacatttctcagagatttcaaatcatgaaggttgatagggttgccttggaaaatgccaacgc

SEQ ID NO: 227081 - DNA, 75 bp, Homo sapiens
gcgacctgggcaccagcaggacccgaggccaggagccaggggcccagaaggtagcccacctgggaggaattttcc

SEQ ID NO: 227082 - DNA, 51 bp, Homo sapiens
atttattaaaggaagcacacctaaggctgttcttgccttagctgcatcttg

SEQ ID NO: 227083 - DNA, 74 bp, Homo sapiens
cagtggggcattcgtcttggtaaacttggtatctctatttcaaatgagaccaaagatctgcttctggcagctgt

SEQ ID NO: 227084 - DNA, 100 bp, Homo sapiens
gtctgggtcttccgaggccaggagcttgcctttccgaggagaaggcagagcccccccaggctatgaatgccctgatgcggttgaaccagctgaagccagg

SEQ ID NO: 227085 - DNA, 96 bp, Homo sapiens
tgaaccctgctgatgaaagcacacggagaagtgatgagagcctatttacaacagctaaggcaagagactggactgagactttgtgagaaagttttc

SEQ ID NO: 227086 - DNA, 125 bp, Homo sapiens
gctgtacagtctgacattcctgttgtctcgtcgtcatcgtcatcttcctgtcagtctgcagctactcagatctgtgacttcctccgcggagccacagtccatagaatcctcggccagcaggtccc

SEQ ID NO: 227087 - DNA, 73 bp, Homo sapiens
cagccaccactattctagcatccgtgaaggagcagcaattctgtggtgttcttggtcacacatttatggagtt

SEQ ID NO: 227088 - DNA, 87 bp, Homo sapiens
aaagagcctccgtcaccacatactacggagccgagatggctctgagtacctgatccagcacgactcggaggccatcatcagcacctg

SEQ ID NO: 227089 - DNA, 100 bp, Homo sapiens
ggaggtgtcagtgttaaaggaacctctacaacgaaggtgaagccacggaagataaggtatagacacgtgtggccgtttacgctgtaggatcctcattccc

SEQ ID NO: 227090 - DNA, 82 bp, Homo sapiens
ctctctggccgctatcatcccagcagtggagttcagcccactactctgaaccagtgtttgaagatactgtggaggagcgtgt

SEQ ID NO: 227091 - DNA, 80 bp, Homo sapiens
ttcagcccctcagagcaggacctgcggctgcaggcgcgaagacctcctgccccccgaggtctgcagtctcctgaacccag

SEQ ID NO: 227092 - DNA, 88 bp, Homo sapiens
gggcgctgacggtcccgcacgtctgccgctgccaccggcgcgcccgaagagatggctgcccaaagattgtcaatctggggagctctaa

SEQ ID NO: 227093 - DNA, 75 bp, Homo sapiens
gacatttcttcggcattctgcaacagaggtgttatgaacataaacagtatagaaatggattgaaattctgtaaac

SEQ ID NO: 227094 - DNA, 75 bp, Homo sapiens
gtccctgctcttccacttcaaggagacaacggccacacactgtgggggccatgaagcccccaggaggagaatcga

SEQ ID NO: 227095 - DNA, 100 bp, Homo sapiens
gcaacttcttatggacagcctcccactggtaatcgtgctgtccacacgactcctgaagccacttaacattcctgagctgttatttgcaactgaccgactg

SEQ ID NO: 227096 - DNA, 50 bp, Homo sapiens
tggcttgtagaattctatgctccatgtatttgcaaccacgtggcttcacg

SEQ ID NO: 227097 - DNA, 51 bp, Homo sapiens
atgaaccggccatcaaatgtagcacatgttcgagaaagtgatcccagtgac

SEQ ID NO: 227098 - DNA, 98 bp, Homo sapiens
tccaggaaaccgcgagtgcctaggagcccctccccaccttttccggggaagccctggtcggagcgagccgggtcctgacttgtcctgggcaagccaag

SEQ ID NO: 227099 - DNA, 101 bp, Homo sapiens
ccagtctgcagctcccagcgtgatcgacgcagaagacaggtgatttctgcatttccgactgagcacgacttcagcctggagaggacggcactcttctgggt

SEQ ID NO: 227100 - DNA, 74 bp, Homo sapiens
tccacagggcatgcttgtgcagccaggaatgaaccttccccacccaggtccgctctgcagtgtgtgcgtgaacc

SEQ ID NO: 227101 - DNA, 154 bp, Homo sapiens
accgaactctatcagtatttactacagccattccgagacatgagagaacttgccatgctacgaagacagcagatcaagatatggcataatccacgctggtggggtagggaaatatctcagtgactggatcctgcatggagaacctccttttgat

SEQ ID NO: 227102 - DNA, 74 bp, Homo sapiens
ccccagcgtgggtgaagataggatcaagatggccatgtggcaggggaccagacaactgtatccagtgtgcccac

SEQ ID NO: 227103 - DNA, 100 bp, Homo sapiens
agttcggggcagcaggggttaacagcatgcttttcacttccactgcatctctcgctggctcaaaacacgacaggtgtgtccattggacaacagagagtgg

SEQ ID NO: 227104 - DNA, 90 bp, Homo sapiens
gacggtcggactcccgcggcgggaggagcctgttcccctgagaatatgcttttaaggctattaaccagggtggccttacatcagtagctg

SEQ ID NO: 227105 - DNA, 82 bp, Homo sapiens
ccggcctggagcgcgccgccaaggcggcgcgcgagctggagcactcgcgtgtcgtgaaaactacccctaaaagccaaaatgg

SEQ ID NO: 227106 - DNA, 72 bp, Homo sapiens
tttactgtgcctgataccagagaacttcccagcatacctgagaatgagtctccccaggacagtgctatcacc

SEQ ID NO: 227107 - DNA, 100 bp, Homo sapiens
tctgcagggcatgtgctaactaccagacgatgaaagaacatttcctctagtttctggataatgagcaggcacacaggtgacatttacaaagaggaaattt

SEQ ID NO: 227108 - DNA, 100 bp, Homo sapiens
gttttacttcaagcaggggctgatttagtacactgcatcagcacagaatttactccacggaagcacggaggtgaaaagggagtgccctttaggatccagg

SEQ ID NO: 227109 - DNA, 100 bp, Homo sapiens
tcagaatgccacagcagtcccaaatgggaaaaagattgccaggaattgaatgatctggcacgggaccctccagcacagtgttcagcaggtcctgttggag

SEQ ID NO: 227110 - DNA, 100 bp, Homo sapiens
ccatgtggtgaggaattcaagagctgaaggacaaacactggttcaggcctactgaacttgacgcactggtatttggccatctatacaccattcttaccac

SEQ ID NO: 227111 - DNA, 75 bp, Homo sapiens
atagccaatgagactgtgaacgtgctgtggaatatatgtgatgatgatgatgattttgatgatgaggaagctgaa

SEQ ID NO: 227112 - DNA, 100 bp, Homo sapiens
cggggagcaagatggccactgtcatccctggccccctgagtcacgccgatgatggagctgaagcccaacgcaggtagcgaccgtgcctgggtctggaaca

SEQ ID NO: 227113 - DNA, 87 bp, Homo sapiens
aggatccgcgggagctgcccggcagggcggagcctcccctcgcagggcagcagaagaagcctttgtaaatgacattgacgagtcgtc

SEQ ID NO: 227114 - DNA, 100 bp, Homo sapiens
tagcagcgactcatgagagcgcggccggaggacaggtatctcaacacccagtttattaaaaagaataaattaacagaagcggaccttcagtatggctatg

SEQ ID NO: 227115 - DNA, 100 bp, Homo sapiens
cctggatttgaagtaaacagatgagaattctaggtgaacatgtcaaaccttttaagccagagaaagcaaaagaaattatcatgtctttacaacaacctgc

SEQ ID NO: 227116 - DNA, 83 bp, Homo sapiens
ctggctacagcttcagaagaccgaagcgttcgtatctggaaggactgcctccgggcctgccaggagcagatcgaagccctgct

SEQ ID NO: 227117 - DNA, 89 bp, Homo sapiens
aacttcgagtcacaccagaattataaggcattgggatcccgtggcagttgcagcactgaagtggagaaggagacccaggagaagatgac

SEQ ID NO: 227118 - DNA, 83 bp, Homo sapiens
gtcttgtcatgctagcactgcattaagtgatgcatacaggtagctacagcaagctgggtagcaggcagatccaaaggatatca

SEQ ID NO: 227119 - DNA, 101 bp, Homo sapiens
ctggatctttgctagaaagagaggtgtggccgacgacgatgccctcgctgaggagcgcatgcggagaggccagaacgccctgccagcccagcctgccggcc

SEQ ID NO: 227120 - DNA, 100 bp, Homo sapiens
ccgcgcgcgggcctcgcacagatcgcctgctttgggccttccatgtcgtcagattgtaatgtagcagacccagccatggcggccccacagctgggtcccg

SEQ ID NO: 227121 - DNA, 98 bp, Homo sapiens
agcgcagcggcgttggcggcggcggcggcggcagcggcagcgcggcggggccggtactatactggcaattgctggagaagattttgcaattgttgctt

SEQ ID NO: 227122 - DNA, 100 bp, Homo sapiens
cgagcccggcgggaccatgttcaccagcaccggctccagtgggctctgtgtacgaagccatcgacagcagagatggagcatcttgtgcagagttggtgtc

SEQ ID NO: 227123 - DNA, 75 bp, Homo sapiens
cgccgcgcaggagtcgggcaccatcccaaagaagcgatcagaccccaacaccaacaagattcttgaaaaactgtg

SEQ ID NO: 227124 - DNA, 100 bp, Homo sapiens
ggtactctttcctcgtggaatttgaagattctacagataaatcaggtggcaagtgcaggcagctgtcccggttatgccggaatcgttgcaggtgagtcca

SEQ ID NO: 227125 - DNA, 96 bp, Homo sapiens
acggaggttgagccgggcacagaaacacagcagcgggagcagcaacaccagcactgccaacaggggctatcaacagcaggacgcccatgaattcat

SEQ ID NO: 227126 - DNA, 98 bp, Homo sapiens
gggagggctccgggagggagtgcctggccaggccggcctgtctgccgcgatggatgacagtaaggtggataactcctcgctcactggtgaatcagaac

SEQ ID NO: 227127 - DNA, 80 bp, Homo sapiens
ccgagaccgcggccgggaccgagggagtcagaaataccatcagaggaggggtactgtgactttaatagtaggccaaatga

SEQ ID NO: 227128 - DNA, 50 bp, Homo sapiens
cccaggagtcatcggacgccagaatctggctgaccaactgactgaagagc

SEQ ID NO: 227129 - DNA, 82 bp, Homo sapiens
aagcctcaggaccatccaagaaaacagcaaaacttcacgtagcggtgaagccatccaacatattctttacaatggatgatgt

SEQ ID NO: 227130 - DNA, 100 bp, Homo sapiens
cgcccgccgccgccgccgccgccgcccctgttgcgatggcgcagaaaccccgttgacaaggcactgctttttcatgacgaaaaacacaccttgactttag

SEQ ID NO: 227131 - DNA, 76 bp, Homo sapiens
gtctctgcacctcgcgccccagcaggatggaggtttgcttctgaataacccttcggcattagctatgcatgagtgt

SEQ ID NO: 227132 - DNA, 75 bp, Homo sapiens
caccgccctctccggcttgggtcctgtgactgcggcgggagagaggagcaagcaagagtgagccatggagctacg

SEQ ID NO: 227133 - DNA, 75 bp, Homo sapiens
ctacacctcagtcctaactgtagggaaggaagccttgctgagatctgtatctgtggacctgaatgttgatccctc

SEQ ID NO: 227134 - DNA, 98 bp, Homo sapiens
gggagcagcaccgctttgaaaagctgatggaatatttccggaatgaggacagcaacatcgacttcatggtggcctgccatgggtatccatggtgacaa

SEQ ID NO: 227135 - DNA, 97 bp, Homo sapiens
gaggcaacccaacataaatctccagtgccccaagagtcacaagagagaggttgcaaaagcttctcatttcagagagatgccaggatcctaagtgcct

SEQ ID NO: 227136 - DNA, 80 bp, Homo sapiens
actacagaaacctcgtctccctgggtatctcgggggagctttgtgccttgatggatcaagttcatcatatgcagcactca

SEQ ID NO: 227137 - DNA, 90 bp, Homo sapiens
cgctgcttcatcaacaggatgtgtaacagttttccttcaccatccaaataaccagcttcacgaggctgacattgtggtcctaggctcacc

SEQ ID NO: 227138 - DNA, 75 bp, Homo sapiens
ccgcccagggcaaaggtgacagaattgaagaggagctgggcagcaaggctaagtttgccggcaggaacttcagaa

SEQ ID NO: 227139 - DNA, 100 bp, Homo sapiens
ggaggggaatagactccatctatccatatgaggagttgtggagtgtatggcagctggcacaattatccttgcacacaattcggggggcccaaagcttgac

SEQ ID NO: 227140 - DNA, 75 bp, Homo sapiens
tgagaaccgtgcaaatttctgatctagaggccaaacgtaccaagaaagtcgggatcgtcggtaaatacgggaccc

SEQ ID NO: 227141 - DNA, 75 bp, Homo sapiens
tacaagaaaatccacaagaacgcactttcctcccaggtactccaaagattcaggtttactcacgtcatccagcag

SEQ ID NO: 227142 - DNA, 96 bp, Homo sapiens
cgacagcagtggcagaaacgtcaggccgtagccgaagcctcggaaggagcggcccacggcaaagagacggcgttttgcaacgttgaccaggctggt

SEQ ID NO: 227143 - DNA, 75 bp, Homo sapiens
atttggtaccaggattactgacaatcatgactactgggaaagaggactactgagcccagccaggctgtatgccat

SEQ ID NO: 227144 - DNA, 100 bp, Homo sapiens
atatcagcatcaggggcaccccggcggctccctgggttcatgatcaagagggcccaaggacggaagcgctttgggatgaagaattttaagaagagatggt

SEQ ID NO: 227145 - DNA, 61 bp, Homo sapiens
cgggctgtgtgccccttctccacccagagggggtcctgatgacaacttaattgaaggtgga

SEQ ID NO: 227146 - DNA, 100 bp, Homo sapiens
aaagaaacaaaagttcacctctgcgaagaatcggtcgaggtggacggtttggccgtaaaggtgtggctattaacatggtgacagaagaagacaagaggac

SEQ ID NO: 227147 - DNA, 94 bp, Homo sapiens
gtccctggcattttaggtgtcggttgggtaggagcccagcagccggggccgccctattacaccgacccaggaggaccggggatgaaccctgtcg

SEQ ID NO: 227148 - DNA, 82 bp, Homo sapiens
gagacttaccatacggccgcctctacccttggcagccaaggtgctggagaatctggtaaaagcaccattgtgaagcagatga

SEQ ID NO: 227149 - DNA, 101 bp, Homo sapiens
cctgcaggcagcaccggaggcccaggtctccgtgcagcccaacttccagcaggacaaggattacatgcagaacatccacggcaaggagattgacctgctgc

SEQ ID NO: 227150 - DNA, 96 bp, Homo sapiens
tttgcctggacaggaggaacccttgacactctgaacatcgtggcatcagatcaccggcctttcaccacaaagcagaaagctatgggcaaggaagac

SEQ ID NO: 227151 - DNA, 97 bp, Homo sapiens
gaacgggagccgccacttcgaggactgggaagctgaagtcttcagcagaaccctgacctaggtagggagtctcaatggccctgggtgaagaaaaggc

SEQ ID NO: 227152 - DNA, 100 bp, Homo sapiens
cgggggcgaggttcgggctggttgttccgttgcgagctgcagctgcgatctctgtggtaggcccaggtggctagaggtgcaggtagctaatttaacaagt

SEQ ID NO: 227153 - DNA, 74 bp, Homo sapiens
ctccgagaactcagccccgacatcgcccacctggcctcgctcaaggtctcctctgagcctccggcctccataag

SEQ ID NO: 227154 - DNA, 83 bp, Homo sapiens
agccagcaatgcctccatgaacaatctcacccaattactctgctcaggagttggcccatggattaagtgaactcttatcacat

SEQ ID NO: 227155 - DNA, 100 bp, Homo sapiens
ggctccacttttcccaggagaatcaattaaagccattggatctggggactttgatgattttaacctggaggatgcagtgaaagaaacttcctcagtaaag

SEQ ID NO: 227156 - DNA, 100 bp, Homo sapiens
aaattcccgtaccaatgtcagtgctaggcctctgcctgtgagtttctggatattgtagagctgctgctccagtctggtgctgaccccactctccgagacc

SEQ ID NO: 227157 - DNA, 100 bp, Homo sapiens
tctgggagcgctgcccgcggaaggagtgcgcaggcgcggaatctccgacttgccatggtcgtctttgtctgccgcctgaactctttgcttccggaatccg

SEQ ID NO: 227158 - DNA, 96 bp, Homo sapiens
gggcgatggcggcggcggcggccggagcttctctcagccgagtgttgttcgctgcctgtggcatccaaagctgaaccagatcatggttggaactgg

SEQ ID NO: 227159 - DNA, 100 bp, Homo sapiens
aatgtcgtaatgaaatgatgaccatgactgagctgctgtaagtaaagatgattccattatttcaagtcttgatgtcactgatattgcaccaagtagaaaa

SEQ ID NO: 227160 - DNA, 100 bp, Homo sapiens
gcttggactatgacaacagtgagaaccagctgttcctggaggaggagcggcggatcaatcacacgattttgcaagaacgaggctcaaggatgtgagggac

SEQ ID NO: 227161 - DNA, 75 bp, Homo sapiens
caggagctggggtccgcggtctggggccgcccgtggaccgggagcccgtggaccgggagccggtggtgtgccacc

SEQ ID NO: 227162 - DNA, 88 bp, Homo sapiens
tcaatgagaagactttttcagctactatcgtcattgaaacttataatgcttcatcccagcagcaaagagaaataattaaaagtaggag

SEQ ID NO: 227163 - DNA, 83 bp, Homo sapiens
ctgatcacttggagtgctgtcccttggaacaggaggagtaagattgagagttgatctctctaatgtattagatcttcatgcct

SEQ ID NO: 227164 - DNA, 100 bp, Homo sapiens
ctgagctgttcctcccagctacgagctgccccaggaacagcatatgccatatatgagctggctgtggcttcatttcccaagaagcaggagtgacttcagt

SEQ ID NO: 227165 - DNA, 95 bp, Homo sapiens
aaagccaggcaagctgcaaagacggaaatagagaagcttcaggtaaagtaatctcacaagctgccaaagaacacatcccaagcagtaatcacaga

SEQ ID NO: 227166 - DNA, 49 bp, Homo sapiens
ctggtgctgtggattgcaaccttgaatgatctcactctgttgcccaggc

SEQ ID NO: 227167 - DNA, 75 bp, Homo sapiens
caagttttctactcttacaaaggaactgtccacactgctgaaaaatctgcttttgaggaacttgaaaaagctttg

SEQ ID NO: 227168 - DNA, 87 bp, Homo sapiens
tcagttggaagcagccgatccagcctgcggagcctgtggggcagttgctgatgtatattcaagatgagtggattaggagaaaacttg

SEQ ID NO: 227169 - DNA, 100 bp, Homo sapiens
gccgattcctcctccttggtcgccgcgtccttggctggcgtttttcggctttgtgagaaaccttaccatcaaacacgatggccagcaacgttaccaacaa

SEQ ID NO: 227170 - DNA, 51 bp, Homo sapiens
ggtattgctttcactgacctaccgaaagcgaaattattattgacgatggac

SEQ ID NO: 227171 - DNA, 50 bp, Homo sapiens
cgagaaccgtcagtttgagccagatgatgaagactcttaagatgacagaa

SEQ ID NO: 227172 - DNA, 82 bp, Homo sapiens
caagatacgaaatgagacttttgaagtgcctttgatttctggaactacagtctttggaacagcaattagaagaagcccaaac

SEQ ID NO: 227173 - DNA, 76 bp, Homo sapiens
agccccgccctgccgccagccagatgagccccgctagggccgccccgcgctgagagcccagccccgccgctgcccg

SEQ ID NO: 227174 - DNA, 76 bp, Homo sapiens
gggagcagaaggactcggacacagcatccttcggaaagctctggacaagatcgcggaaatcaagtctctgttggaa

SEQ ID NO: 227175 - DNA, 50 bp, Homo sapiens
gcggagcctggaagagccccgagccggagctccctgggtcctcagcagtg

SEQ ID NO: 227176 - DNA, 75 bp, Homo sapiens
gctcagccgcaagtacccgtccatcatagtcaactgcgtggaagagaaggaaaggcagcaacaggtggaagctgt

SEQ ID NO: 227177 - DNA, 100 bp, Homo sapiens
acttttgggttacaaaaatccagaccagaacttaaagcagcagtattacacaggatacacagagaatgaagtattggaagtcatgcagcacatggccaag

SEQ ID NO: 227178 - DNA, 100 bp, Homo sapiens
accccacagatgtccacacatcagttttacaggaaatatatgtgtgtatgaaaatgaaagtcttcagaatggaaggaagtcaactgaatttccaagaaaa

SEQ ID NO: 227179 - DNA, 82 bp, Homo sapiens
tcagacaccgagcttcagcaagctctctccaacgattgggaaaatgaggtacgttagtgttcgcgattttaaaggcaaagtg

SEQ ID NO: 227180 - DNA, 97 bp, Homo sapiens
cagacctggccaacctcagtgcagccaaccatgatgctgccatctttccaggaggctttggagcggctaaaaacctagtcttgctctatcgcccagg

SEQ ID NO: 227181 - DNA, 98 bp, Homo sapiens
agaggaagatggacagctgggaattgctgaattagaactgcagaggttcctctacagcaagagacgagttgtactgctgtcacaggaaatggacgctg

SEQ ID NO: 227182 - DNA, 100 bp, Homo sapiens
cggagaccctcgaagtgcgcaaacttgacactcaccctgaccggctatagaaagcgcaattggtggtaacgcttatcaacacagcaaagtgaaccagtgg

SEQ ID NO: 227183 - DNA, 141 bp, Homo sapiens
gctccgagtgccagtgggagcggatccctgagctcgtcaagcagctgtcggccaagctcatcgccaacgctcaccatggatgatgatatcgccgcgctcgtcgtcgacaacggctccggcatgtgcaaggccggcttcgcg

SEQ ID NO: 227184 - DNA, 74 bp, Homo sapiens
aatcagtgattctacatctcaagctcatattttgaagtgtttacgggaatgaatctgaagtctgctgcagtaaa

SEQ ID NO: 227185 - DNA, 97 bp, Homo sapiens
ctggccccggaagcccccacgggctctacctgaccctgcagtgggctcgggatgagtttgaaggcctcttcaagcagccagcagaaaatgtcaacca

SEQ ID NO: 227186 - DNA, 90 bp, Homo sapiens
agatgtaccatcctgcctactgggtcgtcttctcggcgacaactgccctgctcttcatcccagaagtcagtccagctctcaacaacctac

SEQ ID NO: 227187 - DNA, 50 bp, Homo sapiens
ctgcgtcctcatcgggcttatgttcgaggctatgtggttgatgttgcaga

SEQ ID NO: 227188 - DNA, 90 bp, Homo sapiens
tcgaatcattctttgtacagaaattgaaaggcttcaaagctagcagagaaaagaaaccttgtttattccctgtgaaaatgagaagatttc

SEQ ID NO: 227189 - DNA, 100 bp, Homo sapiens
ctaatgtcaaagccatgtctattgaagaatcttccaatgggagtctctcagtagaatttcgacatttgtttcagtggtagaagatggtggattaagctgg

SEQ ID NO: 227190 - DNA, 100 bp, Homo sapiens
aggacaaatgaacttcaatgcagattctagccaacataaaggattgatattgctgatgatattattaatgccagtgaaagtaacagagactgttcaaaac

SEQ ID NO: 227191 - DNA, 100 bp, Homo sapiens
gggaccgcaaataccaggactggggctgggagattctgcagagcttcagccgattcacacggaggcgggatgtggtaacagagaccaagactgtggagtt

SEQ ID NO: 227192 - DNA, 75 bp, Homo sapiens
aacaactacacagcggtcttcctgggcacggtcaacgggaggcttctcaaggagccggacctacgacatgatcca

SEQ ID NO: 227193 - DNA, 100 bp, Homo sapiens
tgacctggggatcgctacggaccttaaaatacccgcaacagccccttcgtcccaaaaggacagaataacgggctcccagattcacaagccccaccaagag

SEQ ID NO: 227194 - DNA, 50 bp, Homo sapiens
cgagagggagccgcagctgatgtcagggatcgcttacacctgagacgaac

SEQ ID NO: 227195 - DNA, 98 bp, Homo sapiens
aaaagcgtcaagaagaggaggaagccatgcgtaggatgcggttcatgctattattcagccggcagggaaaactgcggctgcaaaaatggtacctggcc

SEQ ID NO: 227196 - DNA, 82 bp, Homo sapiens
acaacattaatcagatactgcatttaagaatttaattccttttcgaccttcaatccagttccaaggactccacggggtgagt

SEQ ID NO: 227197 - DNA, 74 bp, Homo sapiens
aacacgtctctgttcgtcaggaacgtggccgacgacaccagaacaccttccaccatgaccacctcagcaagttc

SEQ ID NO: 227198 - DNA, 90 bp, Homo sapiens
ctgcaaagcatatcgggatctggcctttgagaaggggatcaaaactccagaaatctcccgattctcctgaaggggacgtccgatgatgat

SEQ ID NO: 227199 - DNA, 50 bp, Homo sapiens
acttgaaaatttgctatatctactgaaatcgccaagagattgaatacgat

SEQ ID NO: 227200 - DNA, 74 bp, Homo sapiens
tctggccgcctctgccgcagctggagaaataccgctaccaagatgaagacacgccccctctggagcacagcccg

SEQ ID NO: 227201 - DNA, 75 bp, Homo sapiens
caaggatctggggatcttcgcactatcccaagtgcagagcagagcgggcggaggaccccgggcgcgggcgcggac

SEQ ID NO: 227202 - DNA, 74 bp, Homo sapiens
aattttagggtcctttatatagaagggagagtagcttctcaataggtttggcatggacaagatctatgaaggcc

SEQ ID NO: 227203 - DNA, 75 bp, Homo sapiens
gggtcgtatcccagactggaccccccaggcctacgacccactggacgtgctggtttggggacgacatccctggaa

SEQ ID NO: 227204 - DNA, 73 bp, Homo sapiens
tgatgtaccctcgcccttcaaccatcgaccagggcagctgctttcctttgacattggtgaccagccagtcttt

SEQ ID NO: 227205 - DNA, 75 bp, Homo sapiens
gccttcttgctgccaattaaaactgtaggtgtgcagctttgcaaaaaactgggtggctcatgtgttacagccctg

SEQ ID NO: 227206 - DNA, 101 bp, Homo sapiens
tcgaagctctagaaatgaatgtttccatctcttcagagatgaaccagcctctgaagagccaatccattcaggatgggaaaccacgcaggcaaacgagaatt

SEQ ID NO: 227207 - DNA, 96 bp, Homo sapiens
cggagaggcgcacagcgcggcacagcgaggcgccggcccagactccactccccagctgtgaaaggtgtccacaggatgaaatgtccgagtcaggcc

SEQ ID NO: 227208 - DNA, 75 bp, Homo sapiens
acctggtcatgagcttcgttaacatgggatttcagatgcatgccaggtttccactgattgccagaactcgagatc

SEQ ID NO: 227209 - DNA, 98 bp, Homo sapiens
aacaaggcagaaatacagtcctctatcggcagagtatgatggatacagtagtgaagcatcaatagatgaagtgccaaatctttggagtgttgatggag

SEQ ID NO: 227210 - DNA, 50 bp, Homo sapiens
ctcactgcagaggtgctggagctggcagaataatccagaatggctactct

SEQ ID NO: 227211 - DNA, 100 bp, Homo sapiens
tccaagaaagtcacctttgggctgaacagaaacatgactgccgaaatccaccatggagagtaaggatgaggtcagcgacaccgacagtggcatcatcctg

SEQ ID NO: 227212 - DNA, 100 bp, Homo sapiens
tcccgcaggctgaggacctctatctcgcttttcccctggccttctgtatcttcatggtgcggctcatcttcgagaggtgccagtcacgaattgcccgaac

SEQ ID NO: 227213 - DNA, 75 bp, Homo sapiens
tattatttgatgaagaatttcctggagggttaacaataagatgacatttgatccagaaatcttcttcaatgtttt

SEQ ID NO: 227214 - DNA, 96 bp, Homo sapiens
ccctgccgaggcaggcgcccaccgccggcggtgatgcggctgtgaagccctagtcgatgctttttcacggatgcctctcatgaatggccttattgg

SEQ ID NO: 227215 - DNA, 96 bp, Homo sapiens
gaccctgacgtgggaagccatggagcagatacggtggatggaagcatgcctaggggaagatctgcctcccaccacagaactggaggaggggcttag

SEQ ID NO: 227216 - DNA, 100 bp, Homo sapiens
aatatttatggagcatatattatggaacacaagtccttactggaaggaagcccttaacatattaaagctggtggtgtcacgctctgcgagtcttgtcgta

SEQ ID NO: 227217 - DNA, 83 bp, Homo sapiens
agccttcacctacagcatcgtgggcgccggctcccagtttggaggctcggggtggtctgggggcccctccgctgcagtctgcc

SEQ ID NO: 227218 - DNA, 88 bp, Homo sapiens
tttttctcccgaaggaagattatttcaagtggaatatgccattgaggctatcaagggatccagattagatgatcaaagatgtgctcca

SEQ ID NO: 227219 - DNA, 124 bp, Homo sapiens
gtttggggctggccaggcctgtcaggccatggggaacctctaccatgacacatgcttcacctgtgcagcttgcagcatatcacacctgaaaaattttatgtggaagcttgtgatgatggagcag

SEQ ID NO: 227220 - DNA, 100 bp, Homo sapiens
aagcctggatacaggactcagactcttactgctgcttttctaacccaaactgtatgtcttgatgacactacagtaaagtttgaaatatgggatacagctg

SEQ ID NO: 227221 - DNA, 73 bp, Homo sapiens
ggatcgtttacaggaagttccacatgagggccttgaagttattgaatctacaaatttaaaatacttcacaaaa

SEQ ID NO: 227222 - DNA, 82 bp, Homo sapiens
gtgaaccagccttccctcatcaccattggaaggaggaaacaccagtaagacacgaaagggttactcactataaacaatatcc

SEQ ID NO: 227223 - DNA, 90 bp, Homo sapiens
aagaaaccgaagggaaagctcaggtgctggagaatctggtaaaagcaccattgtgaagcagatgaggatcctgcatgttaatgggtttaa

SEQ ID NO: 227224 - DNA, 90 bp, Homo sapiens
aggaccccaaggtgctccagtcctactattatgccgtgtccgacttctctgtgggcggcagtgatacccagcgccgcaaccctcatcatt

SEQ ID NO: 227225 - DNA, 142 bp, Homo sapiens
aaatcatgaatcctgtttatagtcctggatcttctggggttccctatgcaaatgccaaaggaattggttatccaggcacccagattggctgaaaacttctgtgtctgccatttagctactggggacatgctgagggccatgg

SEQ ID NO: 227226 - DNA, 49 bp, Homo sapiens
gaaagataaagcccttaaggacaaggtatgcagaatctgtgggagcaaa

SEQ ID NO: 227227 - DNA, 98 bp, Homo sapiens
ccaggtcctggcggcccccagccgccgcccacgcagcagggacagcagcagcgctcctttaccctcatcgtggaggcctgggactgggacaacgatac

SEQ ID NO: 227228 - DNA, 118 bp, Homo sapiens
tatacttggagttggagacaggcacctggataaccttttgctaacaaaaacaggtgaccaagaatatggcccaggtgaccaaagccctggacaaggccctgagcaccatggacctgca

SEQ ID NO: 227229 - DNA, 101 bp, Homo sapiens
ggggtagtagaatgcttgaggcctggaatttaaacctgagccactatctgaaggggcttgtgttattgaccgtgatggacgtctatttaaataccttttgg

SEQ ID NO: 227230 - DNA, 100 bp, Homo sapiens
ggaggcctctcatttttagttaatcacgatttctctcctcttgagcaacaggataagacctcgtctaacctacatgaagctgcttcggactgtgtatgct

SEQ ID NO: 227231 - DNA, 100 bp, Homo sapiens
tgtgcttctccccaggtccagccaatgcattcagaagccaaaatgcaggccagggagctggagagcagagaggcagagctaagacgccgtgacaccttct

SEQ ID NO: 227232 - DNA, 51 bp, Homo sapiens
atgaatttaacagtaatgctgttttctcataagattcaccttgaaactatg

SEQ ID NO: 227233 - DNA, 75 bp, Homo sapiens
gaggcgctcatcatcccccccgacgccgtcgcggtggactgcaaggtgccagtcattgaaatcccaggttttgga

SEQ ID NO: 227234 - DNA, 83 bp, Homo sapiens
ggaggccggtgactttcacttccagccagctgtgaagaagacacgatgaggcgagtggtacgacagagcaagtttcggcatgt

SEQ ID NO: 227235 - DNA, 74 bp, Homo sapiens
gcggagggacaagaccctgaagatctgtgccaaccactacattttacatgtggcacccataaaagatgaggctg

SEQ ID NO: 227236 - DNA, 107 bp, Homo sapiens
caggacgaggtgtcggcgcgggagcagcacttccacagccaagtgcgggagtccacgggccgagaactactggtggcgtggccagaacacacggacgctgtgtgtgg

SEQ ID NO: 227237 - DNA, 83 bp, Homo sapiens
gcgcttccgcaccatcacctccaccttcatcgcagtaggaatggcagccccatctatgaaggaaagacaggtctgctgggggg

SEQ ID NO: 227238 - DNA, 75 bp, Homo sapiens
tagccggcgacttgagtgacgaatttggagcaagaggtggtggtggccttcccccgaagaaatttggtaatcctg

SEQ ID NO: 227239 - DNA, 80 bp, Homo sapiens
acattccgaaactgtcaagattggcaagataaagcttcaccaagaaggttgcccaggaaacgggcacagaagagatcagt

SEQ ID NO: 227240 - DNA, 89 bp, Homo sapiens
gctgactgccatcttccgtctgcagtctgctcaccaggtggccagataccgcccacgtgcccccatcattgctgtgacccggaatcccc

SEQ ID NO: 227241 - DNA, 100 bp, Homo sapiens
taagaaagtggacaaagagaggagtcaggtgcagtcagcctcagtttccaaagccggaaaaggatcctctagtagccacggtgtggcagctgctctgaac

SEQ ID NO: 227242 - DNA, 75 bp, Homo sapiens
ggacgagttcgatgacttcgtcacctatgagcatgcttttcacttccactgcatctctcgctggctcaaaacacg

SEQ ID NO: 227243 - DNA, 100 bp, Homo sapiens
tacatcatggccgagatctgcaatgccaatgtcccccagccctgttcacagagacaccccatgacatgacagcacggacgggcgaggacgtggagatggc

SEQ ID NO: 227244 - DNA, 73 bp, Homo sapiens
tgatagaccacctggttaccatgaagatcagccactgggatgggccctcgggaccaaggatcacgtcatgact

SEQ ID NO: 227245 - DNA, 83 bp, Homo sapiens
gtttctgtagatggaaaagaagtctggtcagaaggggatgaacgtagggcacttagcttcttccaccagaagggcctccagga

SEQ ID NO: 227246 - DNA, 51 bp, Homo sapiens
agtggctgtagtggggaaaataaagctcatgctgaagattcggttatggac

SEQ ID NO: 227247 - DNA, 75 bp, Homo sapiens
aagaggtttagtgccctcctgagtgactgcgtcaggcatctcaatcatggtcagcccaaggccaaccccactgtc

SEQ ID NO: 227248 - DNA, 73 bp, Homo sapiens
taccatctaaaatacgaaggtttctggctgggagaaagccaaagctgaaggactttggaaccttttcctaccc

SEQ ID NO: 227249 - DNA, 76 bp, Homo sapiens
ggagcttctcagaagacagagggttttcttttgagaaagtgaagtcactgcttttgctgtcttggatcaagaccag

SEQ ID NO: 227250 - DNA, 100 bp, Homo sapiens
cctgacggaccaccgggcccaccgctgtcctggaggtggagagtatagtgaagatgatgtaaatgaattagtgaaggaagatgaagtggatggtgaagag

SEQ ID NO: 227251 - DNA, 90 bp, Homo sapiens
ccgggacacgcaggaacggctccagcatcaagatccgtctgacagccaacaagtcccaaatttggaaaagctgactcatatgaaaagctg

SEQ ID NO: 227252 - DNA, 75 bp, Homo sapiens
gcggtgtctacagtgttctcgacttcgtcgctggatatgatggatgatatctgtcaggagcaatttctagagctg

SEQ ID NO: 227253 - DNA, 101 bp, Homo sapiens
cttctccgtgcatgacaatcggcacagcttggagaactctggatgctaccttgactccgctctctttttgcctgctgccatccatgtaagacgcgacttgt

SEQ ID NO: 227254 - DNA, 100 bp, Homo sapiens
aaccagtcatgaccactagacccacagctgttaaagcaacaggacagtcattttgtttactcattcagccctgttgcaggtcccaataaactcttcataa

SEQ ID NO: 227255 - DNA, 100 bp, Homo sapiens
tcttcagaccgtggacaatgtgctctttgcccctattatggagaaaggtgttccctagaaaatttcccaggaacgagaaaaatttgctgatgaaggcagt

SEQ ID NO: 227256 - DNA, 90 bp, Homo sapiens
cgcaaccgtcggtgggtcggggatcggtcgcctgagagcttcggaaccaaaaagaagcttcccagagccggggccaggagccccaagcgc

SEQ ID NO: 227257 - DNA, 82 bp, Homo sapiens
ggcagaactgcaggacatctgcaatgatgttctggaagtaccaccaagaacagggaaggacaagccagaggctggaggaaga

SEQ ID NO: 227258 - DNA, 100 bp, Homo sapiens
catgagctcttcaaattggcccagatctttttcaacgggcctgaggagcgatgcgacaggcatgatggaggtcgagtcctcctactcggacttcatctcc

SEQ ID NO: 227259 - DNA, 100 bp, Homo sapiens
ttttctgaagttgttcattaagacttcccagcattcctacagatataaataggctctgaaagtgttccagctgaaatttcagatcggacagactcgctgc

SEQ ID NO: 227260 - DNA, 71 bp, Homo sapiens
tggaccctgccaagaagtcgcccatcgcagcagctcgccatcgactacagtgacagcgccatgctccaagc

SEQ ID NO: 227261 - DNA, 75 bp, Homo sapiens
atgttggagaactacagaaacctggtctccctaggcagttgtgaaaaacttcaggacaaaaatgtttcatttaag

SEQ ID NO: 227262 - DNA, 50 bp, Homo sapiens
ccttcgggccctcctgccttcggccctgtttgattacgacaagaccaagg

SEQ ID NO: 227263 - DNA, 50 bp, Homo sapiens
gaaactgcaccggaaatgtgcctaccaggaggaagaacgtgcaaaacgtg

SEQ ID NO: 227264 - DNA, 82 bp, Homo sapiens
cggacatcaagtattcaccagttaatagcaccagctcctgttcgacacagtggagaccatgggaaaagactatttgtcatca

SEQ ID NO: 227265 - DNA, 82 bp, Homo sapiens
ccagatggcagccagtcagtggtggaggtacaaacccgtagtgctgatgaaccaatgacaacatttgttgtctgtaatgaat

SEQ ID NO: 227266 - DNA, 101 bp, Homo sapiens
acctcaccgcgcccgtggccgccgtgcaggcggccgtcagcaacctcgtccggcactattcctgatcagagaactccagttgcttcaacacacagtatcag

SEQ ID NO: 227267 - DNA, 90 bp, Homo sapiens
atcaagatgaatatgaccctatggaagcagaagaagctgaggatgaagaagatgatgcttgctttaaatcgagtaacagcatcgcaccca

SEQ ID NO: 227268 - DNA, 75 bp, Homo sapiens
ctcacgggcccggctgccggcccccgctctgccctggagagattaaacagattctagaaaatgaacttcagatac

SEQ ID NO: 227269 - DNA, 80 bp, Homo sapiens
ctgcgctggtggcggagcccggggcccggagccggcgcccccggcgcgggtaatcattaccaaatgaggaggaaaggacg

SEQ ID NO: 227270 - DNA, 50 bp, Homo sapiens
cccagcgccccggtttgcaaagcaggttatgaagacagtatggagtttcc

SEQ ID NO: 227271 - DNA, 113 bp, Homo sapiens
gtgacgctcacagtgctgggaaggaatctatccaagatgtccctggtagatttgggaaagaagcttttagaagcggcacgagcaggtcaagatgatgaagttcgtattttgat

SEQ ID NO: 227272 - DNA, 98 bp, Homo sapiens
aagaacttaacttttgtggcacctatctatggtgcagatattaatgggagcatatatgatgagattctggacaatcaggaagtccaagccacaatgat

SEQ ID NO: 227273 - DNA, 100 bp, Homo sapiens
ctggcagagctgtggctcgaattcccagagttcgaggtggtgggactcaccgctctggccagggtgcttttggaaactgctactagaaaatagtggtatc

SEQ ID NO: 227274 - DNA, 100 bp, Homo sapiens
cagcgcggctacctgctgacacggaaccctcacctcaacaaggtaaagtcagtgataaatcttttgtttgctgcatatactggagatgtgtctgcacttc

SEQ ID NO: 227275 - DNA, 90 bp, Homo sapiens
acctcctcggtcctggacaccatctgcactctgtcagccagatgccatggacaatattaccaggcagaaccaattctacgatacccaagt

SEQ ID NO: 227276 - DNA, 100 bp, Homo sapiens
ttcgatgtatctaaacttggcaccaagtatggtggataaccgaatccggattctcattgagaatggagtagctgagcggcaaagatctctctttgttgta

SEQ ID NO: 227277 - DNA, 75 bp, Homo sapiens
gtgaccgagagcgtgaccgagagcgcgaatatcgtcatcgttagaagattgatcagggaccatgaaaagaaactt

SEQ ID NO: 227278 - DNA, 51 bp, Homo sapiens
aatcaaacttggacagctctctatgagttctatatgaagggaaagaacggc

SEQ ID NO: 227279 - DNA, 50 bp, Homo sapiens
tatcagctatgtgcattagctatcaacgttttgatgatgatggttcagaa

SEQ ID NO: 227280 - DNA, 51 bp, Homo sapiens
gtggaaaggaaccgttctggatcagagacctgtcggccatggagcctaatg

SEQ ID NO: 227281 - DNA, 75 bp, Homo sapiens
aatgtgatttgcttgaagatatgagagtcctgttcgatttgatacctttgatagcctttcactaagtattccagc

SEQ ID NO: 227282 - DNA, 82 bp, Homo sapiens
aactcattggtaaccatcctgatgtcctccctcacttatataagaagaaccttgatgtgaccaagatccggaagggaaagcc

SEQ ID NO: 227283 - DNA, 85 bp, Homo sapiens
ctctacaccctcaacaagcctttgctcagtggtactccaaagattcaggtttactcacgtcatccagcagagaatggaaagtcaa

SEQ ID NO: 227284 - DNA, 82 bp, Homo sapiens
gccctggttgctgaagaggaggcggaagccaagcaaccgttccttcagagttgatacagcgaagctccagcacaggtaccag

SEQ ID NO: 227285 - DNA, 100 bp, Homo sapiens
tttagagcttctgttcctgaggagtcacagccaagtttggtgccctggttgtcagatgttggaaagcagtaggacggaacatactcttcgtggttgtgta

SEQ ID NO: 227286 - DNA, 100 bp, Homo sapiens
agaactttgctcttggcaaaggtgatgaagaagtaatttcaacactccactatttttccaaagtggtggatgaggtcgatgaaacaggtgtagaagttaa

SEQ ID NO: 227287 - DNA, 100 bp, Homo sapiens
ctttaattgtaatgtatgggacacgctaaaaggagatcgtgcagatgccacttcaaatgaacaacaagagcttttctgtcagaagttgcagcagtgttgt

SEQ ID NO: 227288 - DNA, 96 bp, Homo sapiens
cggaaatccttgggtttgaagatgatgttgtgattgagtttatattcaaccagctggaagtgaagattttccccaagaacgctgtcccgtggtgct

SEQ ID NO: 227289 - DNA, 152 bp, Homo sapiens
aaaacatgatccctgacacggaaatggaggaggagacagagttccttgagctcggaaccaggatatcaagaccaaatggcttattttgggagaggccagccgccatgtcatgaagacactcaagaagccctgtgaagaggaagcaaggcctg

SEQ ID NO: 227290 - DNA, 75 bp, Homo sapiens
aaggattccaagtaactcttatttggtgaatcaacggaatgtaccaggtattgacagtgcatacctggccatgga

SEQ ID NO: 227291 - DNA, 89 bp, Homo sapiens
ctgaagagctatggtgaaacaccactgaagcattgccaagcgcccgggggctggagaaggccaggcagcagctgcaggaggagctccgg

SEQ ID NO: 227292 - DNA, 82 bp, Homo sapiens
gagagcggaggccgcactccagcactgcgcagggaccggtgacttaagagattaaaattaatttggttgctgttggttctga

SEQ ID NO: 227293 - DNA, 88 bp, Homo sapiens
caacttaagaaccagattcgaaatctgaattatccagaacagaaagttgtgactgttggacagttcaaaattggtctgatccatggac

SEQ ID NO: 227294 - DNA, 75 bp, Homo sapiens
gacaaccagggcattctctatgaagaaatcttcccaaggctgcagacaccgacggatttgctttgggagccagag

SEQ ID NO: 227295 - DNA, 100 bp, Homo sapiens
tgtcgcctgcgctatgccctgctgtagtcacaggagctgtagagaggaccccggtacatctgaaagccgggaaatggttcatctgcagaagccagcggac

SEQ ID NO: 227296 - DNA, 99 bp, Homo sapiens
caagatttggggggaattacctacaaagatgtaagattgtaaaccatggctgtgtggatacaagctcagcagctccaaggagaagcccttcatcagatg

SEQ ID NO: 227297 - DNA, 100 bp, Homo sapiens
ggaaccatttgtttttaactaccgggaagatttacacagatggaaccagaaaagatacgaggctctaggagagcttcatgattgtatccaaaaaaccttg

SEQ ID NO: 227298 - DNA, 100 bp, Homo sapiens
gcctcacgggaacaagcaaggagtcatatatccttcatatgatccatcttagtgaagaattaggatacagatggttatgtccttcggagttacctagcgg

SEQ ID NO: 227299 - DNA, 75 bp, Homo sapiens
cccgccgggtctgaagcctgaacagtcaggtcaattcagtgaagatatgatacccacagtgggcttcaacatgag

SEQ ID NO: 227300 - DNA, 90 bp, Homo sapiens
cggcgggagcttccgggagggcggctcgcagcatttttgaaacgttggggttgttggagtggttggattttccctggaattgagtgagaa

SEQ ID NO: 227301 - DNA, 100 bp, Homo sapiens
ctttctccccagggagagcgcgcggcggacgcgcccgggacgcgcggcggcaccgggaggccgggccgagcgaacctaaaggcagacccagaagagcttt

SEQ ID NO: 227302 - DNA, 98 bp, Homo sapiens
gtccatgggattggaccagcttgtgatctccgctttcgaagcattgtacagtgtggttgtggaaaatgcccttaaagtgaacccaatactaggtccac

SEQ ID NO: 227303 - DNA, 83 bp, Homo sapiens
ctgccccagcccatcctctctaaccaagaacttcagcgagagggaagcatcgagactctgagtaacagctcaggctccaccag

SEQ ID NO: 227304 - DNA, 100 bp, Homo sapiens
cgcttggcccttcatggaacctgtgaagagaacagaagctccaggatattatgaagttataaggttccccatggaggaagtatcattctgcaaaggaggc

SEQ ID NO: 227305 - DNA, 75 bp, Homo sapiens
ccgtgattcagtataacctagaccagtcctgtttgcctcatgatatcaggctggagtgcaatggtgcaatctcgg

SEQ ID NO: 227306 - DNA, 100 bp, Homo sapiens
agacagaagtacaacgtgcgatccatgcccatccgaaaggatgatgaagttcaggacctcagcaatggagaatatccccatcatcacaactgtcatcact

SEQ ID NO: 227307 - DNA, 75 bp, Homo sapiens
ttgcttttggaatgaatttggaatcttcccttgaagaggacctgaaggagaagaaggagaaggtggaggagaagg

SEQ ID NO: 227308 - DNA, 50 bp, Homo sapiens
ggaggaaggactcctcgctctatatagtggctgcttcaacccccaactcc

SEQ ID NO: 227309 - DNA, 75 bp, Homo sapiens
gtatgaagcggttggcaccactgaagtgaccgaatgagagttgtctgctggttctcagcttgaagaagattctgc

SEQ ID NO: 227310 - DNA, 90 bp, Homo sapiens
gcagattttaatttcagtgactgaattaaaaggtgtcaagaagctcagaatgtgttatagttttgccgctggactcttccctcccttccc

SEQ ID NO: 227311 - DNA, 80 bp, Homo sapiens
gcaattatgaaagaagtcattccttttttgaagggtctcagcttcttggaagtgaaagaccagctgctgctcatgtacct

SEQ ID NO: 227312 - DNA, 90 bp, Homo sapiens
attttgatccacctttttggagccacctcatgtgaaagatggatgagaccttcgtcagcaaacctgggtcccgctctgtcacccaggctg

SEQ ID NO: 227313 - DNA, 73 bp, Homo sapiens
ggcctgcagaggctgttctacaggggcaaacagctggtcagtgagaaggtcggaggggccgaggggaccaagc

SEQ ID NO: 227314 - DNA, 100 bp, Homo sapiens
gctttcatggagttcacagaagagtcgaggaggtctgccgcaaattccgagacgaagccacgtgcaaggacacctgccccccactcatgctctacaaccc

SEQ ID NO: 227315 - DNA, 82 bp, Homo sapiens
gtacgtggccgagttcctcgagtgggctgccaatggctctaatgaagatagaggagaggttgcagatgaagataagagaatt

SEQ ID NO: 227316 - DNA, 82 bp, Homo sapiens
tgcttcagcagccacttttcatggcgatggtgggacccctgaaaggagagcccttctgggcctgaaacaaccagagagctac

SEQ ID NO: 227317 - DNA, 74 bp, Homo sapiens
cctgcaatttgccatttatttgtaataagaatttaattccttttcgaccttcaatccagttccaaggactccac

SEQ ID NO: 227318 - DNA, 74 bp, Homo sapiens
aaacattcaagaatgagagcgagaacacctgtcaagcttcttggacacttaatgattgttggcaagaaatgtgc

SEQ ID NO: 227319 - DNA, 90 bp, Homo sapiens
agaacgttcgagatctcgtgggtcgaaatcaagtatggtatttggaagtcaactggatatccattcaggtgggatagatttagcttttcc

SEQ ID NO: 227320 - DNA, 101 bp, Homo sapiens
atatttgatgaggtggatctgacagatgccagcgtagctgaatccagtaccaaaaacgtcaacaacagttttacggcctcattgctacgatttcagagtac

SEQ ID NO: 227321 - DNA, 90 bp, Homo sapiens
gctttggactaacatggctatctcttcagtagcagaattcaggttttgggatttgagattgacgcggtgaactctgtccagttttcaaac

SEQ ID NO: 227322 - DNA, 100 bp, Homo sapiens
tgtaacaaaaattgctgaaaatgggaaaaaggttcggtcagcagcaaggacaagatggagtaaaagtccagcaagctactatagctcctgtaactgtagc

SEQ ID NO: 227323 - DNA, 50 bp, Homo sapiens
gccgggcgtcttctgagagtcagtgcctggatcaaagtggaacagctgaa

SEQ ID NO: 227324 - DNA, 76 bp, Homo sapiens
gatccatccagatgaggatatatccctgatgatgctgaataatcccctatttgctggaaatcctcagcttcaagaa

SEQ ID NO: 227325 - DNA, 96 bp, Homo sapiens
cagcatgcctctgaagatgcaaggaagaccataaaccagtgggtcaaaggacagacagaagatgcccagcctacagagtctgagaaggaaatttat

SEQ ID NO: 227326 - DNA, 75 bp, Homo sapiens
ctcttgtatcatgagcattggatttgatcacatgggtaacaactccaagtttcctttggataatacacctgttcg

SEQ ID NO: 227327 - DNA, 51 bp, Homo sapiens
ctacagacccagtctctgccaaggtcaaattattatgtgaccaaaaaaaga

SEQ ID NO: 227328 - DNA, 100 bp, Homo sapiens
agccagagttgctccgggccattgtcgactgtggctttgagcatccgtcagaagacgcaaacatgcagatctttgtgaagaccctcactggcaaaaccat

SEQ ID NO: 227329 - DNA, 90 bp, Homo sapiens
gccagcacgctcaaggggctgcactccgagatcaggcggctgcagcagcactgcacaggctcccagccaacctctgataaaccctcccag

SEQ ID NO: 227330 - DNA, 100 bp, Homo sapiens
ccccgtcctcgcccgggactccttacccggggaacctagaccagtttgcagacctgacagacgctgctgcccgcaacgcggagctgctccgccaggccaa

SEQ ID NO: 227331 - DNA, 74 bp, Homo sapiens
cggcccgtagtgtggaagcagcttcaggcggctgagccagaggccaactgcagaggaactggaacagaggaaca

SEQ ID NO: 227332 - DNA, 82 bp, Homo sapiens
agccgcgaggaggcgcgggaggtgttcgagaacgaccccgagacggttcgtgctggccgtgggcagcgccgtctttgatgcc

SEQ ID NO: 227333 - DNA, 50 bp, Homo sapiens
aatgacatctcgctgtaatgcagtgggagctcttgcaagcttaggatatg

SEQ ID NO: 227334 - DNA, 101 bp, Homo sapiens
ctactgagaagcccggcgacggaggaacgcaggtctgctgccaggtcgctacccacaggagaacaagggaacctacatcccagtgcctatagtctcagagt

SEQ ID NO: 227335 - DNA, 125 bp, Homo sapiens
caatttctagctttgtaggagcatggcttggagcacttcctattccactggattgggaaagaccatggcagggtggagagcccgacttgcagactgtgggtaagatggtcctcaatgactggcag

SEQ ID NO: 227336 - DNA, 96 bp, Homo sapiens
gaaggagagcccttcagcgaggaagctacacttttcaccaaggaactggtgctgcagcgagagtggagtcattgggcgaagctgggccatgctgtt

SEQ ID NO: 227337 - DNA, 117 bp, Homo sapiens
gtacatgtgtcgtatcatagttcattttatgtgggaggatgttcagcagcgcggcagagtcatgggggcattttctctgtatgaagatgaaatcagcgattccaaagcacagctagc

SEQ ID NO: 227338 - DNA, 83 bp, Homo sapiens
ctttctgctgctgaagtaatgcaatggtctcaatctctggaaaaacttcttgccaaccaaacgtttagtcacatcaagaaata

SEQ ID NO: 227339 - DNA, 100 bp, Homo sapiens
tggtgtgctgagctccattgggaagattttcaaagaggaagggctgctgggattcttcgtacggcaccgaaagcgaaggaagctcctgctcctcctaaag

SEQ ID NO: 227340 - DNA, 97 bp, Homo sapiens
tcagcacacagaggatgatgctgactttgatgaaggtacttcgtactggatttcgaggctggcatcctgcagtattttgtgaatgagcaaagcaaac

SEQ ID NO: 227341 - DNA, 118 bp, Homo sapiens
actgccgagcggacggaggctccgggcacccccgagggccccgagcccgagcgccccagcccgggctaccggctctctgaccagttccacgacatcctcattcgaaagtttgacaggc

SEQ ID NO: 227342 - DNA, 100 bp, Homo sapiens
gaagagtccgtgttcatcgacgccgaggagctctgcagtgggggcgtaaaggctggcagcctccccgggtgcctccgcgaaagcagaagccactggagaa

SEQ ID NO: 227343 - DNA, 101 bp, Homo sapiens
gccgcgccgagcggaggaggaggaggaggcgaggaggagagactagagacaagagagacacctccaacttcgacaaagagttcaccagacagcctgtggaa

SEQ ID NO: 227344 - DNA, 75 bp, Homo sapiens
agacagaacagttaatcctcaatttaagcctgatctaacccctagaaacaggaccctgatgcttggtgtgacctg

SEQ ID NO: 227345 - DNA, 100 bp, Homo sapiens
tgatagcgagtgattctcaccgtcctgaagtcaaactcaaaatggcacctgttcctcttgatgattctaacagatgtaaacagtgttctagtttgagatc

SEQ ID NO: 227346 - DNA, 134 bp, Homo sapiens
aggggcgtgttggccccgcacagattgagccgagttgtcgccccgctgggagaagtgaccctcctgcgcctggtttttcgttggaatatacgttgcacatttatggcgattctgagtgtgagggcagacttctg

SEQ ID NO: 227347 - DNA, 100 bp, Homo sapiens
gcagccttggtgctcaggtgccagatgcaaagtgtgtagcccacaatgccctggagtgtgcacgagccatctacgcctacgccctgcaggtgttccccag

SEQ ID NO: 227348 - DNA, 75 bp, Homo sapiens
aggccgcgggcgcgcgggcgcgactcggcggcggcgtcttttagccacctgagctgaagattcccttgagaacaa

SEQ ID NO: 227349 - DNA, 100 bp, Homo sapiens
catattggagactacaatatggatggctatccagacgctctggtcatactaaagaacacatctggaagagagattcccctggagcttcagcgccttgttc

SEQ ID NO: 227350 - DNA, 100 bp, Homo sapiens
tgtctcgggaaacctccatctggaaggatatccaatatgccacaagtagccttgcttcctgttttacatcacaaatctaaaaaaggacccccccgtcaag

SEQ ID NO: 227351 - DNA, 74 bp, Homo sapiens
ccgactatgtcgcctgccaccgagccgggcccacctccccaccaaggaagagaatctggacgaggctagagaac

SEQ ID NO: 227352 - DNA, 121 bp, Homo sapiens
gcttcccgggcacaccagggatgcagggaccccctggggaacgagaaatcatgagtggaggatctcaagtccacattttttggggtgctccaattgctccactgaaaatcacagtatcaga

SEQ ID NO: 227353 - DNA, 74 bp, Homo sapiens
cggtagcgcctgctgcccccaccaggactggaagcaaccccaaaattagacgcaacaaaatctggggaggacag

SEQ ID NO: 227354 - DNA, 74 bp, Homo sapiens
ctggtctcggcttccagctcgcgggttcagggaaggagctgtggctaaaggaagtggaggggccgtgggatgcg

SEQ ID NO: 227355 - DNA, 75 bp, Homo sapiens
tactcacagagttagagagagggatggtgagagagttcaagtggatggccttgaggacttgaaaagctgagatat

SEQ ID NO: 227356 - DNA, 75 bp, Homo sapiens
accaatcagagtccagtggagaaggggcaagattcttgccaagagaattaatgtgcgtattgagcacattaagca

SEQ ID NO: 227357 - DNA, 75 bp, Homo sapiens
gccaccggctggagcggatcccacacctccggaccgagggacgcgggtaagaatgattgatgttggctgatattg

SEQ ID NO: 227358 - DNA, 108 bp, Homo sapiens
gatgatcggtttcccagacggggtgatgactcaagacctggtccttggagaccattagtcaagccagagaccctcatggacacaaaatgggtaacatctgagttggcg

SEQ ID NO: 227359 - DNA, 94 bp, Homo sapiens
ccaaccatgctcaacttcggtgcctctctccagcagactgcggcttgggcactgtttaaaggaaagttccgagaaggcatcgacaagccggacc

SEQ ID NO: 227360 - DNA, 115 bp, Homo sapiens
cgagcagcgccagcggccgagcgggcggcttcctggcctgggcgctccggtggcggcggagcaattctgtggtgttcttggtcacacatttatggagtttctgaagggcagtgga

SEQ ID NO: 227361 - DNA, 50 bp, Homo sapiens
cgtgggcatcattggcttcttcaagatactggataaactactagatggcg

SEQ ID NO: 227362 - DNA, 95 bp, Homo sapiens
aatatgtggagagggccattgaatatcgacttcatgagatggacagacaggaaagagcatctacggtgagcgcttccccgatgagaacttcaaac

SEQ ID NO: 227363 - DNA, 100 bp, Homo sapiens
ctggggactcagaggagtacttcgccacttactttaatgagaagatctccattcctgaggaggagagcaatttgtgatctaccaggttggcttgatcccc

SEQ ID NO: 227364 - DNA, 90 bp, Homo sapiens
cgcagtggtcgcttcttctccttggatgtcctgggctgcaatgtctcaccagtgcctgggttccagccccaagacgagagtctggtgtat

SEQ ID NO: 227365 - DNA, 100 bp, Homo sapiens
tcatcgaacagctggagcaaggcgacgaaccttggagagaggagaacgaacatcttctggacctttgtccagaaacctctgtagaggagcaggatgcaac

SEQ ID NO: 227366 - DNA, 75 bp, Homo sapiens
gcttcactggggcagtctctgcatatcatggggagatagacgctgctgcctaacatggacttcccgtgcctctgg

SEQ ID NO: 227367 - DNA, 83 bp, Homo sapiens
gtggaaacatctagatgtaacagccatgatcgccaaactgaggcagcaactacaacgcagtaaacagagtagtcgtcacagta

SEQ ID NO: 227368 - DNA, 100 bp, Homo sapiens
cctccttcttcctcaactatctcgctgacacgcagggctccctgcggactgccgtggccgctgggagagcttcgtggaggagacgctgacggagacgaac

SEQ ID NO: 227369 - DNA, 83 bp, Homo sapiens
gaccaaggtggaaatcaaacattcatctgaaaactacattaagatgaagacctttgaaggtttctgtgctttgcatctcgctg

SEQ ID NO: 227370 - DNA, 87 bp, Homo sapiens
catttgaagtatatgttgaagtggcctatcccaggacaggtggcactctttcaggaagaggcatctccctacactttggtcaacatc

SEQ ID NO: 227371 - DNA, 100 bp, Homo sapiens
ttagagtgcatcgaatgggccaagtcagagaaaagaactttcttacgccaagctttggaggtgtggcatgcagcattttggaaggaaaattgaagacgtg

SEQ ID NO: 227372 - DNA, 102 bp, Homo sapiens
aggcataaattgattattcctcgcccacatctgtgccagggcagtgggtaacaaagtttgactccagaaagacttccctcgaggatttctacttggatgaag

SEQ ID NO: 227373 - DNA, 75 bp, Homo sapiens
cggaagcccagcgcggagccggccgcggccccctgttgtgttgctgcggagagccttgataaatttgctgaagtt

SEQ ID NO: 227374 - DNA, 80 bp, Homo sapiens
cgccgacctggtcatgagcttcgttaacatgggtattttcaaatcaaagaagtttgaacacttaaaaacaagtcaaattg

SEQ ID NO: 227375 - DNA, 98 bp, Homo sapiens
tgcagtgttgatggtggtggtgctggtcatcaatgttactcaggtagaggcctccctattccctgagacacaacagtattgaaattgggccaattaat

SEQ ID NO: 227376 - DNA, 73 bp, Homo sapiens
tttattccacgaggaggagtacctggaaattaggtcgatgaaacaggtgtagaagttaaggacattgaattgg

SEQ ID NO: 227377 - DNA, 100 bp, Homo sapiens
ttcacagaattattccagggtttatgtgtcaggaagcagtggccggagcagcggtgctgggtaccctgggcacacctggactggtgtccccagcactgac

SEQ ID NO: 227378 - DNA, 100 bp, Homo sapiens
cccgggacgcgcggcggcaccgggaggccgggccgagcggtctcgtctacagaggactggtctttcaatagcaagttttcacttcatcgacaacatcacg

SEQ ID NO: 227379 - DNA, 50 bp, Homo sapiens
caccacaataatccacagccaagacaacagcagttctgtagagagtttaa

SEQ ID NO: 227380 - DNA, 82 bp, Homo sapiens
ttctaagctgaataaagctgttttggaactgtcaggtacctcaaagcggtgataaaagaaaatgtggctgaagttacccgaa

SEQ ID NO: 227381 - DNA, 101 bp, Homo sapiens
gtggccacagcggcgcctcctgccctttagccgccgctggcccaacggtttccccagcagtagcctctgcgaccagctgaagctgaagaagatggggacct

SEQ ID NO: 227382 - DNA, 100 bp, Homo sapiens
taaatcaagatttaacattccaacacataaaaattatttatccaacagctcctcccaggatttccagatgtgacttgcactcagaagatcagtggtcaac

SEQ ID NO: 227383 - DNA, 100 bp, Homo sapiens
ggataacaagttttgtgcagattgccagtctaaaggacacagcattgttggttttgccatgtactattttacctatgacccgtggattggcaagttattg

SEQ ID NO: 227384 - DNA, 50 bp, Homo sapiens
ccacagaaggagcaaatacttcttcatgcacattgcaagcaacccgtgcc

SEQ ID NO: 227385 - DNA, 88 bp, Homo sapiens
gacatccagtagcatcgtttttccacttattctttcgagtcagtgcaatcatcgtctatcttctctttgcaggaccagctctgccccc

SEQ ID NO: 227386 - DNA, 82 bp, Homo sapiens
gtggcggtgcgagaatctcctcagctggctgagctatgttaccagaatagctgaaacctttggacttcaagaaaattatatc

SEQ ID NO: 227387 - DNA, 50 bp, Homo sapiens
tgcagacactgaacgaggagccagtggatgggcaacactccagattcagc

SEQ ID NO: 227388 - DNA, 101 bp, Homo sapiens
ctggccattctcaaagggatttttggtagcagtgcagtacctcagtctgcgctcctcagaccaccggcaggtgaacagcctgatgcagaccgaggagtgcc

SEQ ID NO: 227389 - DNA, 74 bp, Homo sapiens
gctcctgtcgatacgcagcccaagcaaggagaacttcaacaatgtcccggacctggagctcaaccccatccgat

SEQ ID NO: 227390 - DNA, 106 bp, Homo sapiens
aattccttttcgaccttcaatccagttccaaggactccacgggcatgtcagtgaaaaaaccagtgaatcgccttccaaaccaggagaaaagaaaggatcagatgag

SEQ ID NO: 227391 - DNA, 138 bp, Homo sapiens
ccatcatcgagcagatgcgcaagaagaccatgaagaccggtttcgacttcaacatcatggtcgttggacttcctcgttctgcccatcttcctaacaaggctatggctgataacagcagtgatgagtgtgaagaggaaa

SEQ ID NO: 227392 - DNA, 100 bp, Homo sapiens
ggatgacctgacatcatggatagcttacaactctggaaaccaggagacttcggatatatatatgtttccaggtgggagaagtgggatttgttggcctacc

SEQ ID NO: 227393 - DNA, 101 bp, Homo sapiens
agccggcagctccggagctgcccgcgccatgtccgcgcacaatcggggcaccgagctcggagaagaatttggattggtttcctcggatgcgagccatgtcc

SEQ ID NO: 227394 - DNA, 98 bp, Homo sapiens
ggcggctcagcctccagccagctggacgagggcaagtgcgcttacatccgaggtaagaatgattgatgttggctgatattggagtgctcattcacatg

SEQ ID NO: 227395 - DNA, 148 bp, Homo sapiens
ggctgcgacccgtcgagcggagcgtcgtggtagctgagacctggtgcccttcgacggcctggctgatccgaatgaagatgagctttgcgttgactttcaggtcagcaaaaggccgttggatcgcaaaccccagccagccgtgctcgaa

SEQ ID NO: 227396 - DNA, 100 bp, Homo sapiens
tgattttcaagttggagaagacccacctttgtttcctagtgagaaccgagtcagtgctcttacccagtgtggcttcctgttgtggtgcatggccccgagc

SEQ ID NO: 227397 - DNA, 100 bp, Homo sapiens
ccccggcccacagtgggggtgtgcaaacccgagagaactggcccaggtggggaagacgtcgctgatcctgtccctggtgggcgaggagttccccgaggag

SEQ ID NO: 227398 - DNA, 90 bp, Homo sapiens
aagtcaaggctctgggggccatgtggaaactacataaggaatgagaagtgttacctctgtaaatccctggtcccatttagagagtatcag

SEQ ID NO: 227399 - DNA, 100 bp, Homo sapiens
caggctgcatctttgctgaaatgctgactggtaaaaccctttttgcagttccgcagctctctgtacttgctcatggagaccctcaatgcgacgacgcccc

SEQ ID NO: 227400 - DNA, 75 bp, Homo sapiens
taaggagctccgaaaagcaagaaatcaaataacacagttggaatccttggtgattgaaatctctgaatatcgaac

SEQ ID NO: 227401 - DNA, 100 bp, Homo sapiens
gagaacccgaagcacctcccggcgccgggacgcttcttctgagcagctgcattggcatggaagaatcctatttcaagctggtttactgctatgctccact

SEQ ID NO: 227402 - DNA, 75 bp, Homo sapiens
cgcctcccgtggaagcccaggcccgcttcgcaggtcagtcattggcaccatgaactggaataaaggtggtcctgg

SEQ ID NO: 227403 - DNA, 75 bp, Homo sapiens
cagctgctgaggactgcacagctcccagaacaggtgtcccttggaggtgccaaggaggcatgccccacaggcctg

SEQ ID NO: 227404 - DNA, 90 bp, Homo sapiens
tgaaactcaaggtccagggagtggagtctcggaagggtgctgacctggaccgggagaagaaggctgccgagtgcaaggtggacagcatcg

SEQ ID NO: 227405 - DNA, 100 bp, Homo sapiens
gacaagtggattcttcagatgaggctgaggccaccatggagcagtgtgcgtgcgtggagagagagctggacaaggtcctgcagaagttcctgacctacgg

SEQ ID NO: 227406 - DNA, 75 bp, Homo sapiens
taatgtgactagacggccagccagtcatcaaacatgtggaaacaacttctgtgcatctcatcgttatgcagaaac

SEQ ID NO: 227407 - DNA, 117 bp, Homo sapiens
ttctcttccccgaggaaagggtatccgcctcaccattgctgaagagagagacaaaagactggcggccaaacagagcagcttctcacggcattcagcagcagcgttgctgtaaccgac

SEQ ID NO: 227408 - DNA, 90 bp, Homo sapiens
ggcagttcgcggcccggcggggagcgccggagttccttgtggccgacgtgcaccaaggtggaaaaccatgaattccttgtaaaaccttca

SEQ ID NO: 227409 - DNA, 80 bp, Homo sapiens
cctccacccagaccgaaaaccccagagatcttcaggtacaggtttgcagattccgccagcagcacagcaagctctacaga

SEQ ID NO: 227410 - DNA, 107 bp, Homo sapiens
tgccccctgccccgcccggaggtgaaagcgggtgtgaggagcgcggcgcggcaggtctagcacataccgctccaagggctttgacgtcacagtgaagtacacacaag

SEQ ID NO: 227411 - DNA, 90 bp, Homo sapiens
gaatcatctgctcttggctgtgccccactttggagctgggctactccatattagcaggatatcactactttaactggagttccagaagag

SEQ ID NO: 227412 - DNA, 100 bp, Homo sapiens
ccaaatccaagatggcggccagcaggaggctgatgaagcctcccctggtgaagacacaaactgtcaccatctcagataatgccaatgctgtgaaaagtga

SEQ ID NO: 227413 - DNA, 101 bp, Homo sapiens
gctgagtggttgtgtggtcgcgtctcggaaaccggtagcgcttgcagcatgaaaatgaaactgaagccgtggtcacgtgacaggacatgtagtatatagca

SEQ ID NO: 227414 - DNA, 98 bp, Homo sapiens
gcaaggtgtccacgtcgggtcagatccgacagaaggctccgagctctgtccagtggtgggagtattacatcccctcctctttctccagcattgccgaa

SEQ ID NO: 227415 - DNA, 82 bp, Homo sapiens
aggatgtacaaacatccacaccaggtggctatggaggcttttacaacagtgatggatatggaggaaattataactcccaggg

SEQ ID NO: 227416 - DNA, 75 bp, Homo sapiens
ctctctctttctggcctggaggctatccagcgatcccaacaggagctaacaaagggttctcctggctgctccaaa

SEQ ID NO: 227417 - DNA, 97 bp, Homo sapiens
tcagcaaccagctagctactcgagagcatgatggaagtggttcattgcatgatattcaactgtcattgccatccagtccagaaccagaagatggtga

SEQ ID NO: 227418 - DNA, 83 bp, Homo sapiens
ttttggcattgacatttaattttagggtcctttatatagaagggagagtaggcccccgatttctacgttgagatgaagtggga

SEQ ID NO: 227419 - DNA, 100 bp, Homo sapiens
acttgtacagagatgtgatgttggagaactatagcaatctggttttcttgggacacattcagctaacgtattttagcaggtggagtgaggttgaagattc

SEQ ID NO: 227420 - DNA, 100 bp, Homo sapiens
tcagcctccagccagctggacgagggcaagtgcgcttacatccgagcaatgtctcaggctgtgcagacaaacggaactcaaccattaagcaaaacatggg

SEQ ID NO: 227421 - DNA, 100 bp, Homo sapiens
ttttctacagagcacagaacagaacttcttacagaagcattgggttattttggagctgttggagcactccttgagctgttgaagatcccgtgatcattac

SEQ ID NO: 227422 - DNA, 82 bp, Homo sapiens
ccggagtcggggacccaggagtttcctgtgtccagcgctgccggagccgcctgagacaccattcgcttttcacccaagatga

SEQ ID NO: 227423 - DNA, 74 bp, Homo sapiens
gcagccctcatcgcaactgggcccgcgcgcaggtcctggacccaagccagaagcctctgcaaagcttccttcca

SEQ ID NO: 227424 - DNA, 88 bp, Homo sapiens
aaatacatccaggaaagacatggagattctcttaaaaagatgacagatttgaagatctggaagaggcaaatccattctcttttagaga

SEQ ID NO: 227425 - DNA, 80 bp, Homo sapiens
ctgaaagcccagaggaagaggagctctttagacaaggggaatgtgcaggtgatggtcctaccagtgtgtctgttgaggtc

SEQ ID NO: 227426 - DNA, 75 bp, Homo sapiens
tgagtttcttactcgggagctggctgaagatggctactctggagttgagcgaatcctgtgtcacgagcagcagga

SEQ ID NO: 227427 - DNA, 100 bp, Homo sapiens
gcctttccgcgcgggactccggggcgccacgggggccatgtaagcagggtaatactgaacaacctgtccaaactagcaagattggacttggaagaagaga

SEQ ID NO: 227428 - DNA, 100 bp, Homo sapiens
tggctttcagagagaacagcgtttcagttttggtcatcggaagtggtgccttcagcacaggccaagatcaaggctcgagatcttcgcgggaagaagaagg

SEQ ID NO: 227429 - DNA, 82 bp, Homo sapiens
tgcagcatgtgctgttgctggagcaggcccggcagcagagcaccctcattgctgtccagaacacatattacataatggagcc

SEQ ID NO: 227430 - DNA, 75 bp, Homo sapiens
cgctctacccaggagccttggagtatgatcaggttgatgctatgaaactgggagtaaaggaaatgaagaaggcat

SEQ ID NO: 227431 - DNA, 58 bp, Homo sapiens
tgggtctgggcttcccgggcgagcggtgggtaagaatgattgatgttggctgatattg

SEQ ID NO: 227432 - DNA, 100 bp, Homo sapiens
cctggctcctcgcgcctcggcagccctgacgccacgaggaagggagtgagttttccgggagtccctacagccaccctcagtattcctcgtacaacgactc

SEQ ID NO: 227433 - DNA, 51 bp, Homo sapiens
accacacactgggaaacatcattaaatcctacaagcgatatattccagaaa

SEQ ID NO: 227434 - DNA, 100 bp, Homo sapiens
gcttcaacaagatttcgagagacgctgactgtcgggcggtggtgatctctggtgcaggaaaaatgttcactgcaggatactggtatcgggatgacacagg

SEQ ID NO: 227435 - DNA, 127 bp, Homo sapiens
gtcgcgatgctgcccggtttggcactgctcctgctggccgcctggacggctcgggcgctggagccagagactgctgctactttgaaacgtacgatagaggccctgatggacagaggagcaatagtga

SEQ ID NO: 227436 - DNA, 50 bp, Homo sapiens
ctctacttagctcagcaattcttaccttggcgccaatgcttcggcattag

SEQ ID NO: 227437 - DNA, 98 bp, Homo sapiens
gaagctggggcggcaccggatcaccaagacggaggtccctgtgcgttttattgcgacctgccggtgggaactttgtctccgagtcggagcagcatgga

SEQ ID NO: 227438 - DNA, 100 bp, Homo sapiens
cgggccggggccggggcgccgctggcaggagcgcttggggatcctccaagatgatgattattctccaccgtctaagagaccaaaggccaatgagctaccg

SEQ ID NO: 227439 - DNA, 100 bp, Homo sapiens
cgctaagctccatggccaacattgcggggttattgacccagtggctccacgatatgttgcattactgaagaaagaagtgatcccagtgaatgtacctgaa

SEQ ID NO: 227440 - DNA, 50 bp, Homo sapiens
gactcatggaggctgagcatttattcagctgagtcagtgctgattctctc

SEQ ID NO: 227441 - DNA, 75 bp, Homo sapiens
agatgaaacgaaaaaagctgtgaaataccagagtcaggcccggaaggaatgtggatacggagagacttggcaacc

SEQ ID NO: 227442 - DNA, 100 bp, Homo sapiens
agaggctaacactctgtttaatgaagatgatgagaagatcctggtggagcccgcctgcggggcagccctggccgctgtctatagccacgtgatccagaag

SEQ ID NO: 227443 - DNA, 100 bp, Homo sapiens
cttgagctccaggagttcgtctcttacgtctgcggaagtgcagctgcctcagttcttagcgcagtgcaccgtccaggtgaggttagagctggggcatcgc

SEQ ID NO: 227444 - DNA, 75 bp, Homo sapiens
gccaggactgtcctgtggacagacggggttacttcctcagaatgttggcctcctgtatgttggaggttatgaaag

SEQ ID NO: 227445 - DNA, 101 bp, Homo sapiens
gcaacagtagtcgctgttggatcgggttctaaaggaaagaatagctgaaacctttggacttcaagaaaattatatcaaaattgtcataaataagaagcaac

SEQ ID NO: 227446 - DNA, 98 bp, Homo sapiens
cagcgactcatgagagcgcggccggaggacagtgcctacaccaactaatgttacaattgaatcctataacatgaaccctatcgtatattgggagtacc

SEQ ID NO: 227447 - DNA, 100 bp, Homo sapiens
ctgacttggtggagtggcagcttagattaagtgggcagaccaacatccacctcagcaaaaacttcttcctgacgaatcgcgccagggagcgctcagacac

SEQ ID NO: 227448 - DNA, 83 bp, Homo sapiens
ccgggcggcaccgcggtgcgcaagcgcaaccgtcggtgggtcggggatcggtcgcctgagaggctaccggctctctgaccagt

SEQ ID NO: 227449 - DNA, 82 bp, Homo sapiens
aacatttagaatttctacttattctgagattcacaatgacatcctttcaagaagtcccattgcagacttccaactttgccca

SEQ ID NO: 227450 - DNA, 100 bp, Homo sapiens
cggcggcgctcggcgatggtaggcgtccctggagcggccgccttccagctctatccttcactggagtctgatgatgatgaccctgctttgaaatctcgac

SEQ ID NO: 227451 - DNA, 100 bp, Homo sapiens
cagagatcagagtactaagagacagctgacaagctctctactgatgatctgaactccctcattgctcatgcacatcgtcgtattgatcagctgaacagag

SEQ ID NO: 227452 - DNA, 100 bp, Homo sapiens
tccccaggctgacaatccccttggcagatctgtccttaggaaagatatttaccaacatcaagccctacagctgcgagcagtgcggcaaagtgttcaggcg

SEQ ID NO: 227453 - DNA, 100 bp, Homo sapiens
cgcagatcaaggccaactatgacgtgctggaaagcggtaagcaggaagagaacgacgtggtggagaagctgaacctcttcttggatctgctgcagtccta

SEQ ID NO: 227454 - DNA, 83 bp, Homo sapiens
ctccaccaccgaccgcgtcatcaaaggatgacgtagctttgccaaagacttagaagctaagcagaaaatgagcttaacatcct

SEQ ID NO: 227455 - DNA, 100 bp, Homo sapiens
ctcagctgcaacaacttcaatgcagtctttagtcgcatttctaccagacttattctggactcttctgtgtagttataaacccttacaagaatcttccaat

SEQ ID NO: 227456 - DNA, 74 bp, Homo sapiens
ctagccaaggaaaaaaagcagagaggagcggggagcaatgcagccgccaccggcacggccaggccagcatggtg

SEQ ID NO: 227457 - DNA, 98 bp, Homo sapiens
cgggctgaagcgactgagtccgcgatggagtacgaggatgtcgtccaggaaagattgtgcagatgactgaagcagaagttcgaggcttatgtatcaag

SEQ ID NO: 227458 - DNA, 100 bp, Homo sapiens
caaagacgggctaggcatcttgagaaaaaattcctggaaaacccagcaaaagcggcgccaggaaattgaacaaaaacttgaagttcaggcagaagaagag

SEQ ID NO: 227459 - DNA, 100 bp, Homo sapiens
gagactgggcggccggccgacccttcctgtcgctgacggcgactgcgggaggccaggtgtgttgtgctctccgaccccttgaaggactcttctcgaactc

SEQ ID NO: 227460 - DNA, 98 bp, Homo sapiens
ttcttccaaagcacaggaatctcactctgttaaagctggtctgttctaactgaggttcgtgggagtaagggagaagttttgtacattttggatgctac

SEQ ID NO: 227461 - DNA, 82 bp, Homo sapiens
gggcgagtaagccagcggcaggaccagcgggcgggggcccacgagtcaggacaatcgcagcaagctccggaacatgaccgac

SEQ ID NO: 227462 - DNA, 100 bp, Homo sapiens
aggtgaagagtcctggatggcagatggggggaccccggtacggacctgtgcaggtgaggacaggccagaactgataaatttcaaacggaagagagtggca

SEQ ID NO: 227463 - DNA, 125 bp, Homo sapiens
ccgccacactttcctgggagcggcggccacggaggcaccatgaagaagtcttactcaggtcaaaatgcagatcttcgtgaaaacccttaccggcaagaccatcacccttgaggtggagcccagtg

SEQ ID NO: 227464 - DNA, 98 bp, Homo sapiens
tatgagtggtgtggacagaagcggatacgggccaccactctcctggaaggtggcttccgagaagaaagccccgcccccacctccaacctcgatgccca

SEQ ID NO: 227465 - DNA, 51 bp, Homo sapiens
gttatatcctccaggaatactggccagtcttccgtgtgtgctaagatcgtg

SEQ ID NO: 227466 - DNA, 83 bp, Homo sapiens
tttgtctccttcgacttggagtctttgtccaggacgggcttttttccagacttcaagctcccattccaacagtaagagcttct

SEQ ID NO: 227467 - DNA, 100 bp, Homo sapiens
ccatggtggcttctggctcagagctaggaaaaaagctgaaggcaactatggatgctgggaaactgggctcctcgcacctaccccagcaactcaaattcac

SEQ ID NO: 227468 - DNA, 60 bp, Homo sapiens
gaaaggagcagtagatgatgatgtagcagaaggccataaagaatgctgatgggagaacca

SEQ ID NO: 227469 - DNA, 100 bp, Homo sapiens
ggcgtctcgggcgaggagaggaggtgaccccgcgaaagctacttgaaggaaattttgccaaagaagtgagccatgaaatggatggacttatttttcagcc

SEQ ID NO: 227470 - DNA, 83 bp, Homo sapiens
ctttagagcaagaggagcttcaagcattgcagatagagcaaggaggtgttcagattttgcaaatctaaatgtcataaaaactt

SEQ ID NO: 227471 - DNA, 100 bp, Homo sapiens
acccaatggaacatcagcaatgcttctggctcatccatggaataccaattctttttcttagtgttcacattggatttttctgttaaaaatagattgttgg

SEQ ID NO: 227472 - DNA, 96 bp, Homo sapiens
tcttccccaggcctgcgtccgagtctccgccgctgcgggcccgctccgacgcggaagccttcacagttgttgatcacatagcatggtcatccactc

SEQ ID NO: 227473 - DNA, 100 bp, Homo sapiens
cgggagcgtccgggacgcggagcccggagctggggcgacgaggcgattgcgggggcctgggctaggattactacagcatcccatttcccacacccactac

SEQ ID NO: 227474 - DNA, 80 bp, Homo sapiens
ctggctggggagtgtctgtctgtgcaggtggtcaactgcagccgtgtattcagccttagtatggtttgaagtggtgaaca

SEQ ID NO: 227475 - DNA, 100 bp, Homo sapiens
ggccggggctggtcgtggtgcatgcagaggacggcaccacctccaaatactttgtttcaagtgtcgtcagatgtatcacgcacccacagactgtgccaca

SEQ ID NO: 227476 - DNA, 50 bp, Homo sapiens
caaaaatccagaagtacaagcagtctgcttctcagatgaccaagatggtg

SEQ ID NO: 227477 - DNA, 98 bp, Homo sapiens
cgcggcttgaaggactgtgggcagatgtgaccaagagcctgcattaaggtcatcctggcccggcagtatggctccgagggcaggttcactttcacttc

SEQ ID NO: 227478 - DNA, 96 bp, Homo sapiens
tggatggagcaattgctgctgccttgctgatgtttggtgatgcaggggctatctgatgggttagagtgcctttgagaagaaatcagtggatactgg

SEQ ID NO: 227479 - DNA, 90 bp, Homo sapiens
ccccgccgctctgtctacaacccgagggaactctaatgatccaggacaaagaagttaccctggagtatgtatcaagcctggatttttggt

SEQ ID NO: 227480 - DNA, 89 bp, Homo sapiens
cccgtacttgaagccctacgccgtggacttccagcgcagtactatactggcaattgctggagaagattttgcaattgttgcttctgata

SEQ ID NO: 227481 - DNA, 83 bp, Homo sapiens
ggaaaacctaaccatgaagacttgaacttaatacagcaagaaagaccatcaagtttaccaggaaatcctcattgacgattcaa

SEQ ID NO: 227482 - DNA, 98 bp, Homo sapiens
tgagagtccgtaaggagcagcttccaggatcctgagatccggagcagccggggtcggagcgggaactttatattgctgttggaatatctggagccatc

SEQ ID NO: 227483 - DNA, 100 bp, Homo sapiens
atgtagccaagactggagaaacaatgtgtagaatgagccaaggagactcaaacccagcagctattccgcatgcagcagaagatattcaaggagatgaccg

SEQ ID NO: 227484 - DNA, 97 bp, Homo sapiens
aaaaggtcccggaccccccggatctgacggggcgggacctggcgccaccttgcaggtatccagtagaaaaagcactctccagtgttcatctgtggaa

SEQ ID NO: 227485 - DNA, 88 bp, Homo sapiens
gcatgtgtcttccccagctctgcagccacatactatccgtttgttcaggaaccaccagtgacagattttcacctctgacagagcccag

SEQ ID NO: 227486 - DNA, 90 bp, Homo sapiens
agtagatctggagaaaccaacagctgtgttgaagaaataatccgggtgacttaagagattaaaattaatttggttgctgttggttctgaa

SEQ ID NO: 227487 - DNA, 80 bp, Homo sapiens
ctcccgccaggctctgaccctgcaggtctatcagccacagtctctgcaagtttccaagagcagcagaaaatgaacacatt

SEQ ID NO: 227488 - DNA, 100 bp, Homo sapiens
ctgaggagtatgagacgcttgttgcagaggaatctgcccaagcacaattccaggaaggtgagaaagatcagtctaaagaaaaggagaagaaagtgaaaaa

SEQ ID NO: 227489 - DNA, 89 bp, Homo sapiens
gctgagagcccacaggcccccacagatggctattcatatgaaaaggaagcaatggaaaattggatcagcaaaaagaaacgtacaagtcc

SEQ ID NO: 227490 - DNA, 100 bp, Homo sapiens
cgggagatcccaggcggtgacagagtggagccatggctagaggtttggtgcacctcgatttggaggaagtagggcagggcccttatctggaaagaagttt

SEQ ID NO: 227491 - DNA, 99 bp, Homo sapiens
agagccttcgcagggcccctgagtccagccaagggtgctggaaatgtaaacaagaatagactgttcattcctgatggcttttagtctatactaacatat

SEQ ID NO: 227492 - DNA, 90 bp, Homo sapiens
cgaatcgttaaacatctgaaagggtcagtatgaagtgtaacagaacagactttaccacctgaaactgctgcttcaagttcagatcaggca

SEQ ID NO: 227493 - DNA, 74 bp, Homo sapiens
gggacgacttttacatcatcacggaggtgatctttgcagagctgtttcaacttccagcaccccctcacattgat

SEQ ID NO: 227494 - DNA, 75 bp, Homo sapiens
ttccatctgtggaaggacctaccaaccaggtggagccgccaccaaaatgcagattttcgtgaaaacccttacggg

SEQ ID NO: 227495 - DNA, 100 bp, Homo sapiens
agatgccagcgtagctgaatccagtaccaaaaacgtcaacaacagttttacggtcctgagaagtatttctcgttttcattggagatcacagcatacaaaa

SEQ ID NO: 227496 - DNA, 100 bp, Homo sapiens
gggagcaaactgggcagaaacaaaggacactgccaaccttgataagatggcttcggagggaatgagcaccacaccccactctggccggagcacgccaagc

SEQ ID NO: 227497 - DNA, 100 bp, Homo sapiens
catcttacagattgggatcccagccttctcaccagctgggtgccaagaaaggcctaggggcccagaaggtgagcagccagagcttcagtgagattgagcg

SEQ ID NO: 227498 - DNA, 100 bp, Homo sapiens
ggaagattggttttgctgatcagattccaccaccactggaggggagagagagtcaggaatgttttaaaggaagttgggctactcacaagttactacataa

SEQ ID NO: 227499 - DNA, 82 bp, Homo sapiens
cttcacgcaaggcgaggatgcatgagttttcctgtgaagcaggattatttgaggtgtagagggtgggaagcgaagccgagac

SEQ ID NO: 227500 - DNA, 100 bp, Homo sapiens
acaagacaaattagagttttcctactgacttaacttggtcttggtcttgatgccaagtttgggaaaggagctaagaagacatcccactaggaagagagag

SEQ ID NO: 227501 - DNA, 100 bp, Homo sapiens
agattatgatactcttgcttatttattggcttaaggattaaggatccccaaagtctcagacttcattcccgatgggtcccggctcggacggtccgatggg

SEQ ID NO: 227502 - DNA, 75 bp, Homo sapiens
ctttggttacctatgtacctgttaccactttcaaaagtggaagatggatgcctgaagtgtagactgctgctagct

SEQ ID NO: 227503 - DNA, 90 bp, Homo sapiens
ttggtgggccagcaatcctcagacgcctcacttaggacaagacctcagcagccatgtcgaagccccatagtgaagccgggactgccttca

SEQ ID NO: 227504 - DNA, 100 bp, Homo sapiens
ctacaggaacatggtcttgctgggcatccgtgtcattctggaccttactcccaactaccggggtgagaactcgtggttctccactcaggttgacactgtg

SEQ ID NO: 227505 - DNA, 100 bp, Homo sapiens
ctgcgtcccactgctccagggcctggtcctggtcctcgccctccatcgtgtggagccctcaggaagacaactgttagttttgtggcttactgctgctcca

SEQ ID NO: 227506 - DNA, 118 bp, Homo sapiens
cggcggccattagctgtgtgtagttgcccgggactaggagcttaagtgaagaggcttgcttccggcgtcatggctcaaagggccttcccgaatccttatgctgattataacaaatccc

SEQ ID NO: 227507 - DNA, 74 bp, Homo sapiens
tcaagaatctcgtgctcaccggtttctcccacatcgacctggtggtgaaaactattggcttgagggaagtttgg

SEQ ID NO: 227508 - DNA, 100 bp, Homo sapiens
gactgctttggacgtgggagtcacctgaaagccaggaaatggttttgcactgattgcaaaaataaagtcctccgagcatacaatatccttattggtgaac

SEQ ID NO: 227509 - DNA, 100 bp, Homo sapiens
ctcaatagcaagaatgtgtgcccttaatgaacgttacagtgtttctgccacctctgtacaaaagacaattttacttgtgtgacagatgggctctgctttg

SEQ ID NO: 227510 - DNA, 98 bp, Homo sapiens
gatcatcgagcatttcaaacggagatggtaacctgcacctcaatgtgacggcggaggccttcagcccctcgctcctggctgccctggagccccacgtg

SEQ ID NO: 227511 - DNA, 90 bp, Homo sapiens
agtactcagacatcaccatcatgtttgagatccgcctcacggacacgctgggcaggctctcgcacatcctggagatggaccacttcgccc

SEQ ID NO: 227512 - DNA, 75 bp, Homo sapiens
aggacaagcttttgtccccaaaccagagcacatgccaaaatttaattcaatttcaattagtggataccatatgca

SEQ ID NO: 227513 - DNA, 98 bp, Homo sapiens
gccggaaggggtcccgaagccccctgcaggaactctacaacccaatccagtgtaaacaggaacatcgataagtagtgtaaaaacttgcacaatgaaat

SEQ ID NO: 227514 - DNA, 74 bp, Homo sapiens
tgctcaaagccctgggtcgcttggaagaagccaaggagtctcgctctcagtcaaaatctccaacgggaactcct

SEQ ID NO: 227515 - DNA, 82 bp, Homo sapiens
tgcagcgggagctggacggcgagcgcgagcggcgcgagaaagtcactatcatatgacaaaggctttgccgcagttcatcttc

SEQ ID NO: 227516 - DNA, 50 bp, Homo sapiens
aaaaaagtgaatcagcagccaaatacaggactgctgagatgtcctctatt

SEQ ID NO: 227517 - DNA, 51 bp, Homo sapiens
tgaagaaacccagcttgatatgttggttctctacttaaaagacaatgacta

SEQ ID NO: 227518 - DNA, 100 bp, Homo sapiens
gattatacatctctcatcatttcagcaacaaggaaataaattagtggcagagtaagggtgacttggttgaaaggattgttgacaaaaggaaaaataaaaa

SEQ ID NO: 227519 - DNA, 50 bp, Homo sapiens
ctggcagtacctgaccactctctcccagcgggaatgcatatcagtccacg

SEQ ID NO: 227520 - DNA, 80 bp, Homo sapiens
ctgggaaacctgctcagccccgacaatgtggtccggaaacaggcagagactgtgccctgtccacggtgcctcctgcatgt

SEQ ID NO: 227521 - DNA, 97 bp, Homo sapiens
gaaaaatgtaggcatcatagccattcagcagaaggggatgaggacggggacttggttgccttttccagtgacgaggaattgacaatggccatgtcct

SEQ ID NO: 227522 - DNA, 75 bp, Homo sapiens
tgtcatgtcctacttcaatggggagagatgacatgctggacgtggagaccgatgcctacatccactgcgtcagtg

SEQ ID NO: 227523 - DNA, 82 bp, Homo sapiens
gataatgaagtgaaggcctttatgagaggacagaggctatatgaaaagattaaactgcaaatatctcatgaagctgctgcct

SEQ ID NO: 227524 - DNA, 96 bp, Homo sapiens
atagagtcgcagggagcccaccgggcgggcctggccaagatggactcaccctgtcacccaggttggactgcactggcctcaacctcctgagttcaa

SEQ ID NO: 227525 - DNA, 82 bp, Homo sapiens
cagaaacacctaggaagggagaactggtactccaaagattcaggtttactcacgtcatccagcagagaatggaaagtcaaat

SEQ ID NO: 227526 - DNA, 83 bp, Homo sapiens
ggagatccggcggcagggcaagctgtgcgacgtgaccctcaagcccattgcagatgcaaaggctcctgagaagcgggcctcac

SEQ ID NO: 227527 - DNA, 82 bp, Homo sapiens
gtccgcggaggatctggggacatcttactggtccatgctactgagactgacaggaaaggatgcctttgtggaactgtacggc

SEQ ID NO: 227528 - DNA, 85 bp, Homo sapiens
aacctataaacatcagctctcaacaggtatgaatcctaggacccagaataaggattctctagaggacagtgtttctacctctcca

SEQ ID NO: 227529 - DNA, 100 bp, Homo sapiens
ggaatcagacggtgccccatagatggccagctttcccccgagggtcaacgagaaagagatcgaatcttgtggaagaagaatgaagttgctgattatgaag

SEQ ID NO: 227530 - DNA, 90 bp, Homo sapiens
cgatgagtggtctcggcaggctcttcgggaaggcccccttacccaggaatggaacaacctccacaccatccttactatcagcaccatgct

SEQ ID NO: 227531 - DNA, 80 bp, Homo sapiens
gactcacagctgatgacctgctgctcgtgctgatctcaggtctactggggttcatcccatctgagccaggcctggctttt

SEQ ID NO: 227532 - DNA, 75 bp, Homo sapiens
caggaccgtcagcctcttctccccaggacttggtggggaaacttaaagatgcttcgaaaagcctggaaagagcaa

SEQ ID NO: 227533 - DNA, 50 bp, Homo sapiens
ccgcgttcacagccccagcgcaggttgggcagatgcagattctgagacaa

SEQ ID NO: 227534 - DNA, 83 bp, Homo sapiens
ggtcggtgcaccgtccgggattttatccaccggcactgccaagatcagaattctccactttaccaatacttacaggatctggg

SEQ ID NO: 227535 - DNA, 100 bp, Homo sapiens
ctgggggcgagctgagcacctgtagtcaatcacacgcagattctggaacttttcaaagcctgactctcttcttgaaacagtggagcatcatacagagttt

SEQ ID NO: 227536 - DNA, 85 bp, Homo sapiens
ggacagggcgatggcaggttcgccgggtgtgaggcttcacagcggtccggtgaccaagtcgagctacacttctggaaaattcagt

SEQ ID NO: 227537 - DNA, 74 bp, Homo sapiens
ctattgccttagatccttcaagtggcaaagaacagtctgaacttgatcaagatttggatgatgttgaagaagta

SEQ ID NO: 227538 - DNA, 101 bp, Homo sapiens
gcgagtcgggctctggaggaaaagaaagaacccttaggagaaatcttgagagtggacagcaattgtgaagatcgccagagagttctgtgtttcatcaccgc

SEQ ID NO: 227539 - DNA, 80 bp, Homo sapiens
gactgagtgaagaagaacagctcgagagagcattacaagccagcctctgggaccgagatgatggatttggacatgcttct

SEQ ID NO: 227540 - DNA, 83 bp, Homo sapiens
catgcatcctgccgtcttcctatccttacccgacctcagatgctcccttctgctcctggtgactctgttttgagaagtgcaac

SEQ ID NO: 227541 - DNA, 75 bp, Homo sapiens
aaaaagcacctgacttccttcctcttctgaacaaagaaacaggaagattggaatctgcctggaacaaagaactgc

SEQ ID NO: 227542 - DNA, 88 bp, Homo sapiens
ggcagtggaaaatgcgctcgggctggaccagcaggggacggcaaaacagaacagaaaggcggagataaaaagaggggtgttaaaagac

SEQ ID NO: 227543 - DNA, 75 bp, Homo sapiens
tatacccttagaaaaaatgtggcagtggatcgtgggactttaccagatcggtttgtaataacacctcgaagacgc

SEQ ID NO: 227544 - DNA, 101 bp, Homo sapiens
gatacatcaaggcctggccaccagcagggagaagctcggcaacgtggagtcggtttatgtcatcgaccctgaagatgtggcccttctctttaagtccgagg

SEQ ID NO: 227545 - DNA, 83 bp, Homo sapiens
gccagcatggccgtcccactgctggagttcctgtccattgcccctcgccatggcctgcagagtctcgggaaagttgccattgc

SEQ ID NO: 227546 - DNA, 100 bp, Homo sapiens
tggaaacatcaaagctggattagaacatctggtttaactatagatcaacacatcatcttgcatctcatgggttctatgaatttttaaattggtttgatga

SEQ ID NO: 227547 - DNA, 75 bp, Homo sapiens
tttctttttatcagcctccagaaggggataatgcaccgaccgtggcagccatgtattacagctactacatgctac

SEQ ID NO: 227548 - DNA, 100 bp, Homo sapiens
aattgtcctttccaacatccagagctgcatcattccttggggcaaaatgtggacaagggtactagcaaaggccagacgtcttactcaacaacttccctgc

SEQ ID NO: 227549 - DNA, 74 bp, Homo sapiens
aacagaagctccaggatattatgaagttataaggttccccatgggtttctttacctccagaaagaagaatattg

SEQ ID NO: 227550 - DNA, 90 bp, Homo sapiens
tgcctctgaccatggggaaaagaaacttatttctgttgacacactcacagatgaatgcttctcacccggaaacaaacttgccagttgggt

SEQ ID NO: 227551 - DNA, 100 bp, Homo sapiens
caagcacttggggttccagtcagcagaggaagccttgaggggcttgtatggtcgtgtgaggaaaggggcaacctggacgccaggctggatggaggggaga

SEQ ID NO: 227552 - DNA, 78 bp, Homo sapiens
gcaacactcgcttggttggggagatcggcgcttggccggtggacgacccaccggagcccgtgtacgcgaacatagaga

SEQ ID NO: 227553 - DNA, 88 bp, Homo sapiens
gccgcctccgaagatgggggatttctacgacccggagcacccgacccctgagtgatctgtgaaaatggttcgctattcacttgacccg

SEQ ID NO: 227554 - DNA, 98 bp, Homo sapiens
gccatgcgacctctccatgcagtcagtggaagtggcggttctcagaggcactgtgactgacttccctggatttgatgagcgggctgatgcagaaactc

SEQ ID NO: 227555 - DNA, 83 bp, Homo sapiens
tgagagcggacgggccatacccaataaccaggtgcttggcaaaatcgagcgggccattggtttacccaaggtccagcctagcc

SEQ ID NO: 227556 - DNA, 85 bp, Homo sapiens
gacatgaaggtccatgtaccctgtgaaaccctcgaatacattgaagccaactatgttgcagcatttgcaagaagaagcagaatag

SEQ ID NO: 227557 - DNA, 100 bp, Homo sapiens
agacgccgccgctgcctcccgcatcaatgtccgagttaccaccatggatgcagagctggagtttgcaatccagccaaatacaactggaaaacagcttttt

SEQ ID NO: 227558 - DNA, 74 bp, Homo sapiens
accatgacgctggcacgggtctgcctctgccctatggtcctgccgccacccccactggtgcctgtggttccggt

SEQ ID NO: 227559 - DNA, 83 bp, Homo sapiens
aagaagtccaagaagcaaaaaagggactgctaagaagataccaccaggccaagaataaaatctttatgaactaacaagatgaa

SEQ ID NO: 227560 - DNA, 90 bp, Homo sapiens
tgcaaaaaaactaatggaattagcctgcaacatgaaggaattgaatgatctggcacgggaccctccagcacagtgttcagcaggtcctgt

SEQ ID NO: 227561 - DNA, 75 bp, Homo sapiens
aatttagcttccatttaccatgaacatcttagtcaagagcatatcatgtcccgagtgggaaaatattagctgtaa

SEQ ID NO: 227562 - DNA, 83 bp, Homo sapiens
atgacaagaagacgtccaatctgagcgtgctgcggacggcgctgcggtacatccagaattcagaaggagctggcggacatcac

SEQ ID NO: 227563 - DNA, 96 bp, Homo sapiens
ctggattgttcccacctgcatggatcaccggacaatgcagatcttcgtgaagactctgactggtaagaccatcaccctcgaggttgagcccagtga

SEQ ID NO: 227564 - DNA, 74 bp, Homo sapiens
tggcaggaacctcggcctcagagccctctgccatggtggacgaagccacctgtgctgcctgtgacttcaataag

SEQ ID NO: 227565 - DNA, 83 bp, Homo sapiens
tgggattccagagaggccctgtgtacttaccggaaccccagaaagtattgactcagaagtgtcatactctgcaaagcatgaat

SEQ ID NO: 227566 - DNA, 75 bp, Homo sapiens
cccggatcaagtctctggagaaggactcctgaggaagttcagaagcagaaggaactttccaaagctgaaatccag

SEQ ID NO: 227567 - DNA, 97 bp, Homo sapiens
tgaagtattaattcttccactgatatctcaaaaggtgatctggacaaaggaacaggtatctcaggatccggatcacctgtttgaaaccatctcccaa

SEQ ID NO: 227568 - DNA, 87 bp, Homo sapiens
taaggatctggcatgtttctacacaacaaaacattcatggagggggaaactcagaagtcaaaaacctcctttcagatgataactcag

SEQ ID NO: 227569 - DNA, 83 bp, Homo sapiens
ctcttctctggttccgagatgggaaaaaggtatcctccatgaaatgtgggatccttccaatttctcaagagtctcttcttctg

SEQ ID NO: 227570 - DNA, 100 bp, Homo sapiens
ggatcctgaggaggcagctgcggtggcagctgctgagttctcggtgaaggtgcgcgcggagccatggttatcatgtcggagttcagcgcggaccccgcgg

SEQ ID NO: 227571 - DNA, 99 bp, Homo sapiens
aaaaggaattcatttcttacagttatggaggctgagaagtccaaggtccaggggcataacaggctggactctgtgaagctgagcaggagcagatgcgga

SEQ ID NO: 227572 - DNA, 100 bp, Homo sapiens
cggacgagatgatcaaacgcctgaagcaaacttccttgataacatgcttttgcgaagtgcaggaaaattaaatgtgggcaccaagaaagaggatggtgag

SEQ ID NO: 227573 - DNA, 98 bp, Homo sapiens
gcagtggtcgcttcttctccttgctaatggttgcagagaagaatggaacaatccggttttatgatcttttggcccaacaggctattttatctcttgaa

SEQ ID NO: 227574 - DNA, 100 bp, Homo sapiens
gtggaatgctgtcctgtcctcctggggccaccacttttaggaaacttctatggaactcccaagcctccagcagaacccagcccttttcagccagatccag

SEQ ID NO: 227575 - DNA, 100 bp, Homo sapiens
cagacatggttggtatattagacttctacttccagatatgaagagaaggctactaaagacttggaacgatacaatagtcaaatgaagagagccattgaac

SEQ ID NO: 227576 - DNA, 76 bp, Homo sapiens
actacaatcacctaatgcccacaaggatggatgtggagaaaggcaagattgaagacacaggaggcagtggcggctc

SEQ ID NO: 227577 - DNA, 80 bp, Homo sapiens
gcagccgatccagcctgcggagcctgtggggcagtaagcaagctgtgtgggaagtgcagccccactgacgtggacatcct

SEQ ID NO: 227578 - DNA, 75 bp, Homo sapiens
caacgtggaaaccctcaaaggccaagctgtgcgcaaacagctttgtcatcagtgagttctgcctcagtcagctcc

SEQ ID NO: 227579 - DNA, 100 bp, Homo sapiens
tggtcgactgagatctgatgatatttacaaccagataatgctaagtttgcaacagagagcacagaaacgtgcaagttacatcttgcgtcttgaagaaatc

SEQ ID NO: 227580 - DNA, 76 bp, Homo sapiens
cacagatccagagtgttactggcttacaaattggattgaggtttgatgagaagagggcagtgcagcagctgagagc

SEQ ID NO: 227581 - DNA, 100 bp, Homo sapiens
gtcgcagatcctgagacccggacagtggcagtgaaacagattcggaggaacctgagtgcctcagtcatcgccgtcaccatccaggggggagcgcaccacc

SEQ ID NO: 227582 - DNA, 75 bp, Homo sapiens
ccgggggcctggctaaggaaaccctattacctccagatgaagaggaagatgatgatgtagtggctcctaaaccac

SEQ ID NO: 227583 - DNA, 100 bp, Homo sapiens
ctgccgcggcggtggcgacggccgcggggactcggagctgagaggagctgctgctcggaccagcgcgaattatagaccaatccagcaatgtggagatagc

SEQ ID NO: 227584 - DNA, 83 bp, Homo sapiens
agaaagcatcatatttggagcatccagcgtggacttctccctcagtgtacgaattggagcaatgttggcttatacacctctgg

SEQ ID NO: 227585 - DNA, 100 bp, Homo sapiens
tcggcttccagctcaatcctgccggttgcgccttcttcctggacatgaccaactggctggagtaaaagggacattgggaagattagttggaatttttgag

SEQ ID NO: 227586 - DNA, 90 bp, Homo sapiens
taggcggtatcaaatggaaagtttttccaaatattcatctgtacagagtcctgtgtatggaaactcacatgagtcagctcagtctagaag

SEQ ID NO: 227587 - DNA, 90 bp, Homo sapiens
ctgggcgcgggggcggcgtgtcaggtggttgcggagctgatacagcgtggtacccacccagcaatacatgatatcttggctctgagagag

SEQ ID NO: 227588 - DNA, 75 bp, Homo sapiens
agagaattctggcactgcactgggtaggaaaaaggagccagctagatattaacaacaagaagagtgtaactgatt

SEQ ID NO: 227589 - DNA, 100 bp, Homo sapiens
ggcagaggaggaaccagaatctctccaaagaaattcctcaaacagaatttcacacagggtattccatggagaatgagagcctgtcatagggaactgcatg

SEQ ID NO: 227590 - DNA, 90 bp, Homo sapiens
cggaacgggagccaacatggcagcggggttcgggcgatgctgcaggcattagtgccagcagtagttcccaagggctgtctcagccatcca

SEQ ID NO: 227591 - DNA, 85 bp, Homo sapiens
gtggccctgccaacctttacattttggacttccagcctccgaaatggaaataatgaagatgtttcattttcaagaccagcagatc

SEQ ID NO: 227592 - DNA, 100 bp, Homo sapiens
tacgccagtatgctgtacgaacgccggatactcatcatttgcagcaaactcagcactgccaagatcaaggctcgagatcttcgcgggaagaagaaggagg

SEQ ID NO: 227593 - DNA, 100 bp, Homo sapiens
cttccttgcagaggccatggaggacgaggagagacagaagaagctggaggccggcaaagccaagaagaagaagaggacagtgctccagtgaaagtggaag

SEQ ID NO: 227594 - DNA, 90 bp, Homo sapiens
ccgctaggccgtccccgaccttgcctgaacaagggtcatcgagcagctcggtgggaagcagctggtcatgaaccacatgcatcatgaaga

SEQ ID NO: 227595 - DNA, 101 bp, Homo sapiens
ttctctagctattgccttattttttctcatggatgttcttcttcgagtatttgtagaaggatagtcactgccaatccttggaacacaattgctcttctctg

SEQ ID NO: 227596 - DNA, 100 bp, Homo sapiens
gcctggaccagtatgagcgctactcagagcagcacaaggaagctgccttcttcaaagagctggaagcagtcaattatagatttcttcaaaccagcttcaa

SEQ ID NO: 227597 - DNA, 75 bp, Homo sapiens
agaatcttttatggggggctgcatcattcttaacaaagaagttaaatattggtgggaaaagagtaaaccttgcca

SEQ ID NO: 227598 - DNA, 75 bp, Homo sapiens
gtcgcctcggacgtccactgcaccctgcgcgagaaggagctggaggatcttcagaagaagcctcccccatacctg

SEQ ID NO: 227599 - DNA, 83 bp, Homo sapiens
gaaaggaagcaagcagttcagaagagccaaggaataaacatgcaatgaacccaaaaggaaaataatgttgagtttccatgaag

SEQ ID NO: 227600 - DNA, 100 bp, Homo sapiens
gaattcagttactcaggcactttcttctcaatttcatatggcaacaaactgttactcactataaacaatatccacccaacacaagcaaagtttattccta

SEQ ID NO: 227601 - DNA, 82 bp, Homo sapiens
tgctgttgccgggtgatagttggagcggagactacaatgcagatcttcgtgaagactctgactggtaagaccatcaccctcg

SEQ ID NO: 227602 - DNA, 88 bp, Homo sapiens
gaggattgtcactccaacctcttttcgctgatctggcaggggatcgacattgagaccaagatgcacgtccgcttccttaacatggaaa

SEQ ID NO: 227603 - DNA, 83 bp, Homo sapiens
gttggcaacgcgacacagagccagagcctggagacacaggccccatccttcccaatggggacacttcagggagcggctctcag

SEQ ID NO: 227604 - DNA, 100 bp, Homo sapiens
cacacacaagatctaccacctgcagagtgttatagttttgccgctggactcttccctcccttcccccaccccatcaggatgatatgagacttgaaagaag

SEQ ID NO: 227605 - DNA, 75 bp, Homo sapiens
atctactcaagagtggaagttttcacaggactggaatgtcacgtggaataccagcaaccccgacttcaccaagtg

SEQ ID NO: 227606 - DNA, 80 bp, Homo sapiens
ctcactcgctacacagcccagcagttccgaaatgagtccactgccagctggttcgactctttgcacgaggaattgaagag

SEQ ID NO: 227607 - DNA, 75 bp, Homo sapiens
gaaattgtttatgccaaatcaactgccttacaggttgcccccaagtttcctggcagtgtgtgatactgaggaggt

SEQ ID NO: 227608 - DNA, 78 bp, Homo sapiens
aaactctcatctccggccctctcggcgtccgccagcgatggcacaggtgttggagagcacaatggctgaacaagtcct

SEQ ID NO: 227609 - DNA, 100 bp, Homo sapiens
ccctgagagagctcatctcagatctggagcatcggctgcaggggtcagtgatggagctgcttcaggcagctgagtatgtcccagagaaggtgaagaaagc

SEQ ID NO: 227610 - DNA, 82 bp, Homo sapiens
tgcagtccgtatgctgagaacctggagcaggaatgcggggaagctgatcttcagtttagatcttggaggcatatcaactgtg

SEQ ID NO: 227611 - DNA, 126 bp, Homo sapiens
tcccgcataaacagcacggaagcgcggacggcgcacgacgagtactggcatgcgcacgtggacaaggacgccaagagtgccgaggatgaggctccttccagacacttgggaaagcaccagccccgc

SEQ ID NO: 227612 - DNA, 75 bp, Homo sapiens
acgacatccacctggtgcacgccatcgaggagcagatcaatcttgctgacgtcttgactgtgaacccggactcac

SEQ ID NO: 227613 - DNA, 75 bp, Homo sapiens
gttcgcgtctctctgctgcggcgcggggaccgctgtgctctcgcatcccttcgtcagcagcatcaccagtaacaa

SEQ ID NO: 227614 - DNA, 50 bp, Homo sapiens
caacctggaccccaaaattaccgacgccgcgcggtgaggttctctagtcc

SEQ ID NO: 227615 - DNA, 82 bp, Homo sapiens
tggccggttcttggtgggatctgagcagatatatttttgccatcatggatcagtttggagatatattagaaggtgaagtgga

SEQ ID NO: 227616 - DNA, 74 bp, Homo sapiens
cagcagccctgaggcccagaagctgtttgaggacatggtgacaaaactccaggattctcagctggtagctggtg

SEQ ID NO: 227617 - DNA, 89 bp, Homo sapiens
cagggctacacatttttcatcccttccggtggcgacatgtctaagaatgtgagccagtcacagatggcaaaattgaaccaacaaatggc

SEQ ID NO: 227618 - DNA, 100 bp, Homo sapiens
tttcaggacagctgtgatccacgatgaaatctttgacatggtaaaaccaaaggatcctttgaaaatctctcttcaggatttaatcaacagtaatcaagga

SEQ ID NO: 227619 - DNA, 100 bp, Homo sapiens
gacaggacagaaagagtgtgcagcggattaaagctaaagacatagttcctggtgatattgtagaaattgctgtaccaaatatgccccaacagcggcaaga

SEQ ID NO: 227620 - DNA, 90 bp, Homo sapiens
agaagaacagctcgagagagcattacaagccagcctctgggaccgaggacaacataacgatgcacggatgaaccttgccattgctctgac

SEQ ID NO: 227621 - DNA, 100 bp, Homo sapiens
aaaaaatcccaaggtctgcaaagggaatccgagcccgcattttagagactttggtcatgcttcttcttcttgcgttactcattcttgggatagtgtgggt

SEQ ID NO: 227622 - DNA, 75 bp, Homo sapiens
aaattatcgccaagattcagcaattacgaaaagcggctgtactgaggacagcggtggaggccgaggtggtggagg

SEQ ID NO: 227623 - DNA, 87 bp, Homo sapiens
tcatctcgctcggctgcgggaaatcgggctgaagcgactgagtccgcgatggagggtctggtcgccagcaacctgaatctcaaacct

SEQ ID NO: 227624 - DNA, 76 bp, Homo sapiens
gtcaccaacccggccttcaccaaactccctgttgggggccgtcccgctcctaaggcaggaagatggtggccgcaaa

SEQ ID NO: 227625 - DNA, 100 bp, Homo sapiens
ctttttgagccttacggagccgtctaccagatcaacgtcctccgggaccggagtcagaaccctccgcagagtaaagatgaggaaactgaacttgccccaa

SEQ ID NO: 227626 - DNA, 50 bp, Homo sapiens
atatatttcctttcaaaaagctggtctcccaacatttgattcgtcctctg

SEQ ID NO: 227627 - DNA, 98 bp, Homo sapiens
gccaagcctgctacacgcttgatgtggaaatcccagtatgttccatatgatggaatcccatttgttaatgcaggacactgcccatctctaagataaga

SEQ ID NO: 227628 - DNA, 101 bp, Homo sapiens
cggcccccaggtcgcagcagcgtgtcgcctccggggggcgtagcaagatcagtgtactgttacccggacatacctattccttcacaagttctggttcttca

SEQ ID NO: 227629 - DNA, 74 bp, Homo sapiens
ttcagtattaccaggtccctgaaaagctaccccccaaagtcctggagctgtgctctagccggcccggtccttgg

SEQ ID NO: 227630 - DNA, 97 bp, Homo sapiens
ttggagcaggcgctgggcgagccgtgcgatctggacgcggcgctgctgaccgacatcgaagatgctgtgtgctgtggacccacctggggttcatgga

SEQ ID NO: 227631 - DNA, 100 bp, Homo sapiens
ctcaagttcaactcttacatcagttaatagtagcaaatatgactggactggaaccatcaaacaaggctgcagagttgtctcggaggaagtgataatttta

SEQ ID NO: 227632 - DNA, 50 bp, Homo sapiens
gaggtctcctcagccatgctgaactgattcggacggagagcgcgaggact

SEQ ID NO: 227633 - DNA, 75 bp, Homo sapiens
gccgagcctgcagcctgccccgcggccaacatgagcttcttgttgtgaaatgacaatggatgctctgttggctcg

SEQ ID NO: 227634 - DNA, 90 bp, Homo sapiens
gcatgtgcttcactgccagttctccgcgtggtacccgttcttccgaggcgttaccatcaagagataaagtggagaattttcatgaagaac

SEQ ID NO: 227635 - DNA, 75 bp, Homo sapiens
agaaggataaagtaaatggagacaagctgtggttggttcttgaggtacaaacccgtagtgctgatgaaccaatga

SEQ ID NO: 227636 - DNA, 98 bp, Homo sapiens
gacttgtctcttatttagttctggggagcgcctcgtcgacatgagtgatgtggaggaaaacaacttcgagggcagacgcaagcaccaggaaatccgag

SEQ ID NO: 227637 - DNA, 75 bp, Homo sapiens
cggcagcccgtggagtcggctgagggaaaagcgaggcaaggcaggcggacctaatctgggagcctgcaagtgaca

SEQ ID NO: 227638 - DNA, 87 bp, Homo sapiens
ggagcctcggggtccggaaccagacgatgagacagagttgcgaccgcgcggcagggtattgcaggttccgacggtcttcctggggat

SEQ ID NO: 227639 - DNA, 74 bp, Homo sapiens
agcaaatacagtaatagatttttggaggatgatatgggagtataatgttgtggctctggaatgtttttgtcagg

SEQ ID NO: 227640 - DNA, 100 bp, Homo sapiens
ccggtgcaagaggcgcaaacaagccaatcccaggaggaaaaacgggagatgcagttaaagacttgatgcttcgctttctgggtgaaaaagctgcagcaaa

SEQ ID NO: 227641 - DNA, 75 bp, Homo sapiens
ctgtggggcctctacatgtccctggttaatgtgggccatgtctgaccctgtattcagtggatcagctggcaccac

SEQ ID NO: 227642 - DNA, 91 bp, Homo sapiens
agatgggcttgaattacaacaagagccaaactcattttttgatgcaacagtggactgtgaacggacaactgagggttgggttttttaccac

SEQ ID NO: 227643 - DNA, 82 bp, Homo sapiens
gagggtactgtatttatggagaccgctgcaggtactttgtttgcaagaagttcaagaagatcattatggagcagagatcagg

SEQ ID NO: 227644 - DNA, 90 bp, Homo sapiens
acaaacctgggagactgcaagacttctatgattccacagcaggtggaagctataaaggccatgtggatattttggcacctactgttcaag

SEQ ID NO: 227645 - DNA, 100 bp, Homo sapiens
cggagtagcaagtggccatggggagcctcagcggtctgcgcctggcagcaggtacaagaaaattccccaggacacagagctggtttggagcctttctttg

SEQ ID NO: 227646 - DNA, 75 bp, Homo sapiens
tatccctgtctcagcgaagtggtgaaagagcatcaggtgcacagatgtattcataaaggaagacattagatccag

SEQ ID NO: 227647 - DNA, 50 bp, Homo sapiens
gttttaggcacttttgtggtacaggcattaaacgtcgtctttgaaaaaat

SEQ ID NO: 227648 - DNA, 75 bp, Homo sapiens
tgggggtgtgcaaacccgagagaactgggccagcggaagcctgccacctcctatgtgcggaccaccatcaacaag

SEQ ID NO: 227649 - DNA, 101 bp, Homo sapiens
tgcttaccgagatgcggttttcctcgcagaacgcctttatgcagaaggcggaagaaggactcggtggagagccacccgacctgggtggacgacacgcggat

SEQ ID NO: 227650 - DNA, 82 bp, Homo sapiens
gtttagcatttaatttgaaagataaagtcttttgtgaattatttcctgaagtcgtggagacgttgccccatctgacgctcgg

SEQ ID NO: 227651 - DNA, 87 bp, Homo sapiens
atgatcgtgtgtcggatgaggagaaggcagagaagaggcgatggcggcgatggcatctctcggcgccctggcgctgctcctgctgtc

SEQ ID NO: 227652 - DNA, 98 bp, Homo sapiens
gattactcgcccccacctgtggactctgaccgcaaacaaggagagcctactgagcagcctgagtggcctcccagtgcaacgtcagcttaaagaagcag

SEQ ID NO: 227653 - DNA, 50 bp, Homo sapiens
tttggagaaaggattaagaagtgatgatgaacagtctacacagatggctg

SEQ ID NO: 227654 - DNA, 75 bp, Homo sapiens
atttgacccagagaaggagacaagcggcactgcagaggtggagctgaagaagggagccactctcaaaatcacgct

SEQ ID NO: 227655 - DNA, 100 bp, Homo sapiens
aaaaacgaaagcaactggagctcagtctctggatggtcgtcagatccgtgtggatcatgcaggcaagtctgctcggggaaccagaggaggtggctttggg

SEQ ID NO: 227656 - DNA, 96 bp, Homo sapiens
cgcccctcagcagcctggcagcagcccccggggcaagagcaggagcccggcaccccccgccgacaaggagggttgttcggaatcctataattgaaa

SEQ ID NO: 227657 - DNA, 75 bp, Homo sapiens
tgcgcgtccagtggtacccggagggcgtcaagcagcatgtgaaggagaccaaggcctatgaaaggaggttcccta

SEQ ID NO: 227658 - DNA, 75 bp, Homo sapiens
atgcagccagtagcttggatccttgtgggcatgatccataatcggtttcaagagcggcactgcagaggtggagct

SEQ ID NO: 227659 - DNA, 75 bp, Homo sapiens
atggcagagaagaggcagctgttcatagaaatgcggtggttctcttcccaaagtggaagccaaattcatcaatta

SEQ ID NO: 227660 - DNA, 88 bp, Homo sapiens
aggcatatgttcgactggctcctgattacgatgctttggatgttgccaacaaaagctccaaggtcctcgctaagaaggagctgctcta

SEQ ID NO: 227661 - DNA, 75 bp, Homo sapiens
cgggagttacaccgccaccgccaggtctgttctcagagcgatgggccgcggagactgatctgccgccatgattgg

SEQ ID NO: 227662 - DNA, 109 bp, Homo sapiens
gtccggtactcagacgctggcgggcgcagtttctcacgacgggccgagcctgccactgtgagaagccctaccactgcaactgggacggctgcggctggaagtttgcgcg

SEQ ID NO: 227663 - DNA, 100 bp, Homo sapiens
gttggaagtgtctcttagcagcgcgcggagaagaacggggagccaggtgtttgagaagtcccccctgcgggtgaagaacttcgggatctggctgcgctat

SEQ ID NO: 227664 - DNA, 87 bp, Homo sapiens
gggctgcggcgtgtgcgcgcccgccagctgctccggagatacgagagatggaaaacttgatgactagctccaccctaccgccccttt

SEQ ID NO: 227665 - DNA, 90 bp, Homo sapiens
tggcccccgagaccccgtcggacccatggtttccagtgcagcgcggagtgggcgatgccagcgtgccagaatgtatgacaacatgtccac

SEQ ID NO: 227666 - DNA, 83 bp, Homo sapiens
aaatgacatggatggatgtccctggagataaacttttggagccagttgtttccatggacgactgggtttggattcagaagagg

SEQ ID NO: 227667 - DNA, 75 bp, Homo sapiens
cccagtgagggtgtacaaatacccctttgaattaattatggctagttgatctctctaatgtattagatcttcatg

SEQ ID NO: 227668 - DNA, 83 bp, Homo sapiens
ccacgagtaggtcggcagcgttgctgggtggcaggcagaaatccacaatggaggggaactctgtgactttatggaaaatggag

SEQ ID NO: 227669 - DNA, 101 bp, Homo sapiens
cttcggcaagatccagatcgggatttacgtggagatcaagcgcagcgatgggagaagatgtcaaccggacactagaaggtggaaggaaacctcttcattat

SEQ ID NO: 227670 - DNA, 75 bp, Homo sapiens
gccatggctcactccccggtgcagtcgggcctgcccggcatgcaggacccagtggcctttgaggatgtggctgtg

SEQ ID NO: 227671 - DNA, 82 bp, Homo sapiens
ccgcgaggcagccgccgggagccgggaggctggggcgcaggggccagcgcgccgacaatgcagatcttcgtgaagactctga

SEQ ID NO: 227672 - DNA, 118 bp, Homo sapiens
tgctattccggcgcctccactccgtcccccgcgggtctgctctgtgtgccatggacggcttcctgggtctgcaggtccagccggctggcaccctccatgtacccaggggagattccag

SEQ ID NO: 227673 - DNA, 83 bp, Homo sapiens
ctggattcggggctggacgcagcaagcggggcgctgtgtccccaagctccccgtcctcgggattttttatcaagcagaaatgc

SEQ ID NO: 227674 - DNA, 74 bp, Homo sapiens
gactaccgcctggatcctcagctccagctgcactgctcagacgaggaccgtcctccttctaatatttggaagaa

SEQ ID NO: 227675 - DNA, 74 bp, Homo sapiens
ccagaaggaaccaattccggacacataacaagcagcagtgaggacaccaaaggaaggatgcctgtggccctcgg

SEQ ID NO: 227676 - DNA, 75 bp, Homo sapiens
gaacgatgtgcgagaactgcgcagacctggtggaggtgttaaatgaaagagtagctcggagaggaggaaggagaa

SEQ ID NO: 227677 - DNA, 82 bp, Homo sapiens
cgcagaattaccgcctcttctttagtatttgggaataagatgatcattccttccctggatggagccctcttccagtgggacc

SEQ ID NO: 227678 - DNA, 82 bp, Homo sapiens
ttcaaaagcagcttggaaaacattatttctaaagatcaactttacttagaatggtagataacgcagatcatctctggaaagg

SEQ ID NO: 227679 - DNA, 76 bp, Homo sapiens
ccgtgaacgccagttggattgcagttcagtgcatctgaactatcgccagaagggcgtgattgacgtcttcctgcat

SEQ ID NO: 227680 - DNA, 75 bp, Homo sapiens
gcaagatggcagccaccacgggctcgggtaagaatgattgatgttggctgatattggagtgctcattcacatgaa

SEQ ID NO: 227681 - DNA, 100 bp, Homo sapiens
gagactactggccgaaggggcgtctgcggctctccgccgtccccagccctgcctctccctgggctctgtatgatccatttgctgagcacagacctccaaa

SEQ ID NO: 227682 - DNA, 50 bp, Homo sapiens
ctgatcccgagcagcgtcatgtaccccttagctgctgctggtggtgacaa

SEQ ID NO: 227683 - DNA, 77 bp, Homo sapiens
tgtcctcaatgtgcccccatactgcacagaggaatggaagttggatacactttgtgacttgtacgagacactgacca

SEQ ID NO: 227684 - DNA, 75 bp, Homo sapiens
ggtggatcagcgcctacccgagtgtgcgaagctagccaagcactggccatgggcctctgtgtcgccatgatcgcc

SEQ ID NO: 227685 - DNA, 95 bp, Homo sapiens
agacatttacgcggatgtcggcgaagagttcaaccaggaagggaaaaggccgaggcatcagcgtgtgaagaccgcaaagacgatcccgagtacag

SEQ ID NO: 227686 - DNA, 75 bp, Homo sapiens
ctagttgatcattgaatctggatgctgtcacgggaagtctttttaggataaacgtaggcctgcgtggcctggtgg

SEQ ID NO: 227687 - DNA, 128 bp, Homo sapiens
tggactgcactacaccgtgcacattctctgttctaagtgccttaagagaggatcgcccaatccacatgcttttccagctctaagcgaaagacatgaggcctcagcctgaaatgaggttgttttgaggt

SEQ ID NO: 227688 - DNA, 100 bp, Homo sapiens
cagaagctcatccgcaaggtgtccacgtcgggtcagatccgacagaagaaccagacgtcctgggtcctctccagcatggcagccctctactggagggtga

SEQ ID NO: 227689 - DNA, 100 bp, Homo sapiens
agtaatggtgcaaagcctgaagagaggatgaagatcagtatgagcagttcatgctgccactcacagcagcatttgaggctgtggcccagatgtttagcac

SEQ ID NO: 227690 - DNA, 100 bp, Homo sapiens
ccttgctgctcagacgctccgagaagcttcaggcagcataacacttacagtactataaccaagagtggacattgtgggatcgctttgaggtacaagggct

SEQ ID NO: 227691 - DNA, 88 bp, Homo sapiens
aagtaaagttggaagttaagggagacaaagttgaaaacaaagtgctgggggaccagaccgccttgcaccgggccacagtggtggggaa

SEQ ID NO: 227692 - DNA, 98 bp, Homo sapiens
atcaattggcccacacctggagagatagcccacaagagtgttcagaatcctggttttgacttcagtggagcagaaatctcaggaaactacactaaagg

SEQ ID NO: 227693 - DNA, 90 bp, Homo sapiens
gatgctctggatcaatttgaacgtccctccccacccccaaatgttgactatccattagatggagagaagattttacatatccttggatca

SEQ ID NO: 227694 - DNA, 82 bp, Homo sapiens
cgacacacaaagaatagagttgagcctgtgggacacttcgggtgtggaaacaggaagagaactagaactggaagtaaagcat

SEQ ID NO: 227695 - DNA, 100 bp, Homo sapiens
gggaaaggagaggatcccggagccggatatcggccgggtagcaggaccaccaatactcaatccaatagcaaatgagatttacttgaattttgaaagcagt

SEQ ID NO: 227696 - DNA, 78 bp, Homo sapiens
gaagcggggaagtgggacaagatggtttacatctcgaacggtgtctactatgaaccatcctgtactcagaatgtgaat

SEQ ID NO: 227697 - DNA, 100 bp, Homo sapiens
cctaaacctgcttttgccagagattatgccaggtctaatacagtccagcagggtgggataatgataagaaaataggaatattacatgaaaattttcaaac

SEQ ID NO: 227698 - DNA, 100 bp, Homo sapiens
tcatccccgctctccaaggagctgcggcagaagtacaatgtccgctccatgcccatccgcaaggacgacgaggtccaggcttcccagaggtctgtgcgac

SEQ ID NO: 227699 - DNA, 127 bp, Homo sapiens
ccaggagttcgtctcttacgtctgcggaagtgcagctgcctcagttcttagcgcaggtgtcatggagaaactccagctgggcccagagattctgcagcgggaaaatccaaggcttatttatgccagg

SEQ ID NO: 227700 - DNA, 75 bp, Homo sapiens
ggcttccgcaagcagtacagacctgacatgatgtcgctgcagatccttcatggatttaaaaatcaagttggcgat

SEQ ID NO: 227701 - DNA, 75 bp, Homo sapiens
tttgcccttatcagtaacacctgagaaatgcactcggtgatggaaagagagccactattctgaagaacacttggc

SEQ ID NO: 227702 - DNA, 75 bp, Homo sapiens
tccctctgcggtggggtccgggacatggcagaaacttgaagggtcaaagtgcaaagggcagcttttgatttttgg

SEQ ID NO: 227703 - DNA, 100 bp, Homo sapiens
cccaaattgtagctgacgaagcattttgcaacgcagttcggagttattatgaggttttgattcccaccatggccatcacccagtttcggttatttaaatt

SEQ ID NO: 227704 - DNA, 100 bp, Homo sapiens
atttcaggaaaacagagaaagaagtgataggagggctctgtagattcctggtcgggtggcttccagtggtcttcagtctgtcgtgcaccgatgagaactc

SEQ ID NO: 227705 - DNA, 82 bp, Homo sapiens
gcgaagctggccgagcaggctgagcgatacgacggttgttgatcattatgaaaatcctagaaacgtggggtcccttgacaag

SEQ ID NO: 227706 - DNA, 50 bp, Homo sapiens
cgtggaacggctgcttttggaaggagcatattaatgaaaagtgccataaa

SEQ ID NO: 227707 - DNA, 100 bp, Homo sapiens
gcacaatcggggcaccgagctcgcataagcagtactataatggatgtagacagcacaatttccagtgggcgttcaactccagcaatgatgaatggacaag

SEQ ID NO: 227708 - DNA, 144 bp, Homo sapiens
tggcggccaacgggccaggtaggatttccgggagaggctgctgtggaggctgaggaggcggcggcggagatctggaaccatggccaactgtgagcgtaccttcattgcgatcaaaccagatggggtccagcggggtcttgtggg

SEQ ID NO: 227709 - DNA, 76 bp, Homo sapiens
gttggaggaagccttgttctatggtactcggaccatggagccatacaggaaggaaaatcacctcggcagtgtttga

SEQ ID NO: 227710 - DNA, 75 bp, Homo sapiens
gcggcgctttcggcgcgggcccgggccccgagcgcccgaacagctggtgtgctctcatcactgagactgccggat

SEQ ID NO: 227711 - DNA, 100 bp, Homo sapiens
agctcatgttcccgctgttgctcctccttctgcccttccttctgtatatggctgcgccccaaatcagggcattgatttctgccctgggcagaacgtttca

SEQ ID NO: 227712 - DNA, 75 bp, Homo sapiens
cagcctcaggcgtgcgcggacggtgtgcggaaagatgtgtcatggcaatgctgagaaggaggatcagggatgaga

SEQ ID NO: 227713 - DNA, 74 bp, Homo sapiens
aagccgctggcagccgcggatctcaccgccgctcagggtatgatgccgggcgggacggcttcatcgacctgatg

SEQ ID NO: 227714 - DNA, 83 bp, Homo sapiens
cttggattctttgttaaaaggagacctaaagggagtcaaaggatctcacaccattttgctggtacagcctaccaagaggccag

SEQ ID NO: 227715 - DNA, 100 bp, Homo sapiens
tcctgggcgagacctacaaagatgacatccagcggcacctggagactcttatccggagctaccccgacatcaggagcctgcaggcctgaaccagggtgat

SEQ ID NO: 227716 - DNA, 96 bp, Homo sapiens
ctgtggggagaccctttccccctcttcagctgcaggaggagcagtttttgcaagaaaggatcaaagtgaacggaaaagctgggaaccttggtggag

SEQ ID NO: 227717 - DNA, 100 bp, Homo sapiens
aaaatgctagtgtgaaggtctccattgacattgaaggatttcagctaccagttacttttacgtgtgatggtgaaggcagaaattggagatgttagtattt

SEQ ID NO: 227718 - DNA, 83 bp, Homo sapiens
gtctggccgtgagacgtttcgggagccggagtctctccaccgcagacatgacgaagcatgctacaagtgaaaactgatgagaa

SEQ ID NO: 227719 - DNA, 100 bp, Homo sapiens
ctgcccgcctcccgatggccctgccccaggagaacgtcagctgcctcaacaccagcctggtgatcctgatgctggcccgacggaaagagcggctgcccct

SEQ ID NO: 227720 - DNA, 97 bp, Homo sapiens
aggaagtcggagtttgagccccggaggcagagcggctgccatggtttcccaaatgtggggaaaagcagcattatcaatagcttaaaacaagaacaga

SEQ ID NO: 227721 - DNA, 75 bp, Homo sapiens
ttacgtgtggcatatggactcctgacgaccaacagagcaacattttgcagatgttgtacttagtgaagaatttct

SEQ ID NO: 227722 - DNA, 98 bp, Homo sapiens
atgatcaacgccattcctgtagcctctcttgaccccatcaaggaatggttgaagaaaacggacgatgtattactaagctggaaaacatggggtttcga

SEQ ID NO: 227723 - DNA, 90 bp, Homo sapiens
gttctgtactgtccaagtcagttcctgggtacaagtctctagtgatccctgaaaagttccagcatattttgcgagtactcaacaccaaca

SEQ ID NO: 227724 - DNA, 100 bp, Homo sapiens
gcttgtgaagcagataatcatatcattcagggcgacagctcagtgaagtcttcattcagttaccttcaaggaaagaattaccagaatactatgaattaat

SEQ ID NO: 227725 - DNA, 100 bp, Homo sapiens
cgacaacaacgggttcattctgatctccaagaggtcccgagaggctccataaaaatacagactcaccagttcctgctttgatgtgacatgtgactcccca

SEQ ID NO: 227726 - DNA, 115 bp, Homo sapiens
ctcgcactctgttcttccgccgctccgccgtcgcgtttctctgccgatgtgactgccatcatcttcgtggtggccagcagcagctacaacatggtcatccgggaggacaaccaga

SEQ ID NO: 227727 - DNA, 90 bp, Homo sapiens
gaaaatctcaaagcgatgtgaacaagaaactaggaaacagagcaaatgcagcgttacaatcaaagacttattgaggaattgaaaaacaga

SEQ ID NO: 227728 - DNA, 82 bp, Homo sapiens
ccggttcctgggcccacgctaccgggagctggtcaagaactggctctacagattctcccctgcccctggagaaggaggagca

SEQ ID NO: 227729 - DNA, 100 bp, Homo sapiens
ggaaacctgtatttatcactgccttcttgggaattgcttcgtttgccattttcttatggagaactgtccttgtttgaaaggactatggatctggttttgg

SEQ ID NO: 227730 - DNA, 80 bp, Homo sapiens
tcgtccgttctctcaggctcccgttcagcttccccgggcgctgcctggacaggcctgcctgcgtgctgggacatgtctgg

SEQ ID NO: 227731 - DNA, 90 bp, Homo sapiens
ggatttataacgacagaagtgaattggattcaagtacgtggctctgggagacctcatcatcctcatcacttttggcccgctggctgtgat

SEQ ID NO: 227732 - DNA, 97 bp, Homo sapiens
atctcaaaaggtgatctggacaaaggaacaggtatctcagtactatactggcaattgctggagaagattttgcaattgttgcttctgatactcgatt

SEQ ID NO: 227733 - DNA, 100 bp, Homo sapiens
gaatgagagacccatgggacagactcaagctgtaccctgaagcagagctgcccagttgactgcagacctgcctgcattgatgagaacctggaggtggtgc

SEQ ID NO: 227734 - DNA, 75 bp, Homo sapiens
gcgcagggaaggagggcgtccgagtcaacaaccgcttcgagctggatcctcctccgcctgccttcgtctgtcctc

SEQ ID NO: 227735 - DNA, 100 bp, Homo sapiens
tcccgggcgctgtgcatccacactggacgcgagctgcgctgcaagggtcagcgccaaactggaggggaatgaaacactaaaagttgtagaactcgacaga

SEQ ID NO: 227736 - DNA, 51 bp, Homo sapiens
ctgcagtggagcttgactcttaatgagccagtcttggtgctctgtgttcac

SEQ ID NO: 227737 - DNA, 87 bp, Homo sapiens
tctgcacttcgcattttggcattgacatttaattttagggtcctttatatagaagggagagtaggtgcgatttggtcaacaaaagcg

SEQ ID NO: 227738 - DNA, 90 bp, Homo sapiens
ttccaagaagctttcagaaccttcttctctccagtacctaccttacagggattataattactccttgctgaagtcacctgggagcccccc

SEQ ID NO: 227739 - DNA, 75 bp, Homo sapiens
gaagaaagaagacgccacagacagcagcgcagtaccaccttccagagatgatgttatcagtcattgatgcatatt

SEQ ID NO: 227740 - DNA, 75 bp, Homo sapiens
ccacaagacgactcaataggaggaaggactgagcagggggaggaacatttaagctgatggaagtggaagtggaag

SEQ ID NO: 227741 - DNA, 100 bp, Homo sapiens
cagtgatcttggtgccatagagagtctccgggtccctggaaaggaaaaccagtttggctattaagggaacctgtcgacacagagcagagcaagataaggc

SEQ ID NO: 227742 - DNA, 98 bp, Homo sapiens
acttcatgttccagtgcctcgagcgctcaggatggaggaagactcgatccgcctgcctgcgcacctgcgtgagatgagtgagagccgagcaaagagag

SEQ ID NO: 227743 - DNA, 100 bp, Homo sapiens
aatcattcgattcgagagacaagcagaagaattcctcaatgcagtcttttatagaaaagactttatattcagagcaccaatcaaattaagcaagcctggg

SEQ ID NO: 227744 - DNA, 100 bp, Homo sapiens
gagaaattgcccatgggctccataaaaaatgtggtcagtgaacctatcgaaggacatgaagactaccacatgatgcaacccaaggagatctgtgcgctgg

SEQ ID NO: 227745 - DNA, 100 bp, Homo sapiens
acgttctgcaaagtcgacaagaatctcaataacagtatggctattttggcattctgctggatatatgttcgtaaataccaaagtcggcgggaaagtgaag

SEQ ID NO: 227746 - DNA, 74 bp, Homo sapiens
agaagctgaggatgaagaagatggttgacatgacaactgaagagatagatgctcttgttcatcgggaaatcatc

SEQ ID NO: 227747 - DNA, 98 bp, Homo sapiens
gagaatgcgctcttcaagcggatcttgggaactgctcgcagaaagaagaaggtggttcatagaacagccacagcagatgacaaaaaacttcagttctc

SEQ ID NO: 227748 - DNA, 82 bp, Homo sapiens
atccagagcgccgcgcacttcgtcatgttcttcgcgccctgctcacggatgattgatatccagaccaggatggctgggcgag

SEQ ID NO: 227749 - DNA, 100 bp, Homo sapiens
caggaccctcagggagagcgggcagccttccaggtggacagaatgccgggacattctgcttcctgtcatcaccaaagagctgaaggagctgctggagcag

SEQ ID NO: 227750 - DNA, 100 bp, Homo sapiens
atctgcttaggattcactgcacatcgaattaagagagcagaaggatgggaggaaggtcctcctacaggctgatgagccctgaaaacacactcctgcagcc

SEQ ID NO: 227751 - DNA, 73 bp, Homo sapiens
cgtacccacagtgcttcatgagagctgccactgcagagccccgccatggaagacacgccgttggtgatatcga

SEQ ID NO: 227752 - DNA, 96 bp, Homo sapiens
gaagtttgcagatcaagatgacattggcaagtagagcagagccggagccaggtgcaggccattggagagaaggtctccttggcccaggccaagatt

SEQ ID NO: 227753 - DNA, 82 bp, Homo sapiens
ctccgtcccccgcgggtctgctctgtgtgccatggacgggggcactatggcagacaaagttaggaggcagaggccgaggagg

SEQ ID NO: 227754 - DNA, 101 bp, Homo sapiens
ccgcgggccaggagagcgctcggcggatgaaggatttgggggcagagcacttggcaggtcatgaaggggtccaacttctcgggttgttgaacgtctacctg

SEQ ID NO: 227755 - DNA, 75 bp, Homo sapiens
taaaagatctcagtacagtagaagctctgacttccatggagtcactgattcatcactttaagttgtatactgagg

SEQ ID NO: 227756 - DNA, 75 bp, Homo sapiens
cctcagaacatacccaagaggacaaatcccccaggtgggagctgaatgccatgaccaccaacagcaatatcagtc

SEQ ID NO: 227757 - DNA, 48 bp, Homo sapiens
agccccccaatgtcgaggagtgggttgcagattttaaagatgcccttg

SEQ ID NO: 227758 - DNA, 48 bp, Homo sapiens
cccacagctgttaaagcaacaggtgttgctgccatcgcaggagccttc

SEQ ID NO: 227759 - DNA, 90 bp, Homo sapiens
cccgcagctgctgccgccgccgccagggcccggactcggacgcgtggtagcctggagatgcccaaagatgagctgcccaaccataactgc

SEQ ID NO: 227760 - DNA, 101 bp, Homo sapiens
agcgtgaacatggtgcaaagataccagtctcctgtccgagtctacaagtacccgtttgagctggtcatggcggaggactcggaggagagtgaaattgacat

SEQ ID NO: 227761 - DNA, 75 bp, Homo sapiens
accagtggaagatgatcacatcccaggctttcctggggtttgatgtatgctggcttcatccttatcatggccact

SEQ ID NO: 227762 - DNA, 83 bp, Homo sapiens
agacagttctgtctgcagaagcccattatggctgtaactggagatgacacagagacttccagtgtcctactattgaagcctgc

SEQ ID NO: 227763 - DNA, 100 bp, Homo sapiens
atctcttccccttgtccatagcctagatcgagctccctgtgtgcaccgcgcgctgcccgaggcgcactcaccccacacagaccgcgtttctctccagtgt

SEQ ID NO: 227764 - DNA, 100 bp, Homo sapiens
cagctacgtgagcagaacgcccgccctggagcagttaggaccgaaggtctccggagagtcgccggcggtgccaggaggccgggtgttccctcatccccaa

SEQ ID NO: 227765 - DNA, 100 bp, Homo sapiens
gcagaagcagcagcagcaactcctgatttaggggcaatcgatacagagtttcactcctgttacccaggctggaggacaatgatgtgatctcgggtcacca

SEQ ID NO: 227766 - DNA, 100 bp, Homo sapiens
aggaggtcctgagtcactttgagaaggacttcagggccacaggtgctgccaagatgctccagggcacctgctccgtgctcctgctctggggaatcctggg

SEQ ID NO: 227767 - DNA, 100 bp, Homo sapiens
aaagcttgaaatgctacatttccaagctgccactgcagagccccgccatggaagacacgccgttggtgatatcgaagcagaagacggaggtggtgtgcgg

SEQ ID NO: 227768 - DNA, 83 bp, Homo sapiens
gaggaatccgagaagagcagagcggagggagccccagacacggcaagagcggtgagcggggcgcctatgcctccttcgggaga

SEQ ID NO: 227769 - DNA, 100 bp, Homo sapiens
cggagttccgcgcggcgccagcccttccgccacggccgtctctggagagcagcagacacttggcatttcacctgaagaaaaatttgttattacaacaaca

SEQ ID NO: 227770 - DNA, 75 bp, Homo sapiens
ctgctgtcaggctacatcagcaaaggggttctaagctggtctatgtccatcaccttcttggagaaggagcctttg

SEQ ID NO: 227771 - DNA, 80 bp, Homo sapiens
atcaggaaactgaagactctctgcttttgccacagcagttcctgcagcttccttgagtgcctccggagccagcgtggtgg

SEQ ID NO: 227772 - DNA, 98 bp, Homo sapiens
tcgcatccctgtcattgagaacccccagtacttccgtcagggacacaactgccacaagccggacacgtatgagatggaccaaacgcccccggcgcgtc

SEQ ID NO: 227773 - DNA, 100 bp, Homo sapiens
gcctgcttacgtcggcatctgcattccagagccccctaaggtctaggcagcctgaggctgacaggaggagtagcaaagagctcctgttacaacctgtgac

SEQ ID NO: 227774 - DNA, 50 bp, Homo sapiens
gtgcaccggcctctcctgctactcccggtccctggaggagtctgtaggaa

SEQ ID NO: 227775 - DNA, 85 bp, Homo sapiens
ccaagtcaataagaagatgtaaagaaataaatatttccttcattccacatgaatctcaggagaaatccctccctggtgtagtgat

SEQ ID NO: 227776 - DNA, 74 bp, Homo sapiens
gaccagggcagcactcctcctgttcacaggacgcgtgaccaaaaccaaagacggccatgaagtgagatcgtgca

SEQ ID NO: 227777 - DNA, 83 bp, Homo sapiens
tcaggctggacgtgcacgcagcccggcgggaggataaagaccaccacggtgtcgtgaaaactacccctaaaagccaaaatggg

SEQ ID NO: 227778 - DNA, 83 bp, Homo sapiens
ctcaatcagatttggaaatgtgggtgtgggttgctgaccgaggaaataaaagaatccaagtatttgataaagacactggggag

SEQ ID NO: 227779 - DNA, 125 bp, Homo sapiens
tgcaaggaactgatagcttatggttctccattgtgatgaaagcacatggtacaggcagaaatggtgcacagtgctttccaggcccagcgggctttccttctgatggcctctcagtaccaacaacc

SEQ ID NO: 227780 - DNA, 101 bp, Homo sapiens
aggcgcgccaagaggaaaggaaagtgcggcggccctggaacctggatatcgcgcgagggcgccctgcgtccggcagaggaggcgagcatcccgctcaggtg

SEQ ID NO: 227781 - DNA, 100 bp, Homo sapiens
gcgtttccgaggtgaaggcgccgcgccaggccgggcgggcgggatatctgtgtttgccttacatggcattgcagcagcatcatcttctctccgatgtcac

SEQ ID NO: 227782 - DNA, 98 bp, Homo sapiens
cagaatgcagcagatatgcctgctaacatggataagcatgccctgaaaaagtatcgtcgagaagcctatcatcgaagtgtatgctgacttgtaaagtg

SEQ ID NO: 227783 - DNA, 128 bp, Homo sapiens
ctctagagctttggaaggctgaatgcactaaacatgaagagcttgaaagcgaagttcaggaagagtgacattgggaaaatgaggtacgttagtgttcgcgattttaaaggcaaagtgctaattgatat

SEQ ID NO: 227784 - DNA, 101 bp, Homo sapiens
ctttgactactggggccagggaaccctggtcaccgtctcctcaggagccttcacgtaaatgggtccagtcatgcctcccagtaagaagccagaaagctcag

SEQ ID NO: 227785 - DNA, 75 bp, Homo sapiens
gaagatgatgatgaattgggtagagagaccaaagatcttgatgagtgagaaagatcagtctaaagaaaaggagaa

SEQ ID NO: 227786 - DNA, 98 bp, Homo sapiens
actgatcactcagtttgagctatcaaaggaccctgaccccatacctttgaatcacaacatgagattttatgctgccctggccaacgtcaacattggga

SEQ ID NO: 227787 - DNA, 74 bp, Homo sapiens
tcggctgcgcggcggggctgaggcggccgcggggcccgagcgcagctccagaaggtcctgagcctcggccacat

SEQ ID NO: 227788 - DNA, 74 bp, Homo sapiens
ctctacatctcagactactgtgtgtggattcagaaagtcaatgctgcaggtggagaaattttcagcctgtgttt

SEQ ID NO: 227789 - DNA, 51 bp, Homo sapiens
ctctaacatgtcagcgttattgtaatgcaaccaacttctctttgcctgaaa

SEQ ID NO: 227790 - DNA, 100 bp, Homo sapiens
actctgctaacaccagatagtggaaagaaaccatgtgctgaaatgtttgacgacactgatggtttggaggtagaagaggatgatccagtgcctgagatcc

SEQ ID NO: 227791 - DNA, 50 bp, Homo sapiens
gcaaaaaagtctgtggccactacactcagcttgagaatgccagactgtca

SEQ ID NO: 227792 - DNA, 99 bp, Homo sapiens
cggaaaagaagaccatctcaccagagcatgtcatacaagtcactgtatatatgccttatttcctgggtccatgggaagcatgagtctgttgggacttgg

SEQ ID NO: 227793 - DNA, 101 bp, Homo sapiens
ggccagagcgtggttgctgaccagttgaaagaggactaccccaatggcacctggctgggcgacgagaacaaccccgagatgcgggtacgctgcgccatcat

SEQ ID NO: 227794 - DNA, 100 bp, Homo sapiens
tgggaagaaggtggaggtggagccgcccccagatcggccagtccgagcgtgccggacacagccagaaaaatatggtgttatccctaagaaatgcttccct

SEQ ID NO: 227795 - DNA, 103 bp, Homo sapiens
caaaatgagtctacagttataccaagtggatagtagaacttatctactggatttccgtagtattgatgggaggtggggaagacagggctccagctaccacagg

SEQ ID NO: 227796 - DNA, 100 bp, Homo sapiens
gcgcccggagcggtccgcgagccaccgaggcccaggctactgcagcactggggtgtcagttgttggtccgacccagaacgcttcagttctgctctgcaag

SEQ ID NO: 227797 - DNA, 75 bp, Homo sapiens
ctgtgctgtgaactgtgaacagaagcaagagaacatcaccaccctgaagccagagactaacactgcaggactcag

SEQ ID NO: 227798 - DNA, 75 bp, Homo sapiens
tcgaaatgtccatgagaaaaagcttggagataaagttgctttttactgattcacggcccttccacagtaccttcc

SEQ ID NO: 227799 - DNA, 83 bp, Homo sapiens
aagcagcgtgcgttcagccctggggtttattgggcacttcctagcaccaggcactgcaataagaaatggaggttaaaccatga

SEQ ID NO: 227800 - DNA, 83 bp, Homo sapiens
gcgtccccggcgcgaagaggctggactcggattcgttgcctgaggctgaaggtgatgtggccgccctcaaccgacgcatccag

SEQ ID NO: 227801 - DNA, 50 bp, Homo sapiens
ccgcatctgcttccaggggccagaacagcgagtaaccagctcataaatca

SEQ ID NO: 227802 - DNA, 75 bp, Homo sapiens
ctgtcgctcttgtgccctagcaccccgagaaccgtcagtttgagccagatgcgcaagacgttcaaagaacacttt

SEQ ID NO: 227803 - DNA, 85 bp, Homo sapiens
ttcacacagggttctggggaaaacaaggaaggctggatctccagaactgttctctggaggaccctggtccaaactttcatcaggc

SEQ ID NO: 227804 - DNA, 82 bp, Homo sapiens
cggagccggcgctgagaggggctgcggccggagcgggcggctgagacaaaggcgacgggttacacatcattttggaatgact

SEQ ID NO: 227805 - DNA, 98 bp, Homo sapiens
aggcccccagcggtccccgggtccgcagcttctggcggttcgggcggtcggcgaagcggccggcaggagtccatagaggccactgtattctattgaag

SEQ ID NO: 227806 - DNA, 98 bp, Homo sapiens
cgggaagggcctcggcactggtaccctttacatcgctgagaggagttggccgaggaaaagatatctccaccatcacaggtcatcgtgggaaagacatc

SEQ ID NO: 227807 - DNA, 100 bp, Homo sapiens
tctgaaatgagtgaggaaaaacgagccaaacttcgtgaaattgagcaggaggccactgtctgcagctcccgtgaagatgtccactccagacccacccctg

SEQ ID NO: 227808 - DNA, 100 bp, Homo sapiens
atctaccaaacccagggtatcttccttgatcagcctttacagtaaaaatgacccatctatggctgcttaatgtattgggagagttgctgctacatcttta

SEQ ID NO: 227809 - DNA, 100 bp, Homo sapiens
gtgtacgagtgtgtggcccagaactcggttggggagatcacagtccatgccaagcttactgtcctccgaggacctgcaaatgcaactggttgatcctgaa

SEQ ID NO: 227810 - DNA, 51 bp, Homo sapiens
gagggctacccacttcggccaggccgctttgtagttcagaatgtttctgca

SEQ ID NO: 227811 - DNA, 74 bp, Homo sapiens
taggatggtttttcaacaagttggagtaagcatgcaatcggtggagccgccaccaaaatgcagattttcgtgaa

SEQ ID NO: 227812 - DNA, 75 bp, Homo sapiens
ggaaaatgtggacagtggagaaggcccagccaatgaagatgaagacataggagattctgctctctttgctgaact

SEQ ID NO: 227813 - DNA, 82 bp, Homo sapiens
ctggctctgctgaccttgtgccttgcaattctgtggtgttcttggtcacacatttatggagtttctgaagggcagtggagat

SEQ ID NO: 227814 - DNA, 101 bp, Homo sapiens
caaaggcaaaggcggctcgggagattcagccgtgaagcaagtgcagatagatggcctttgtcccgagcaagagaagcagtcctggatgcccactttcttgt

SEQ ID NO: 227815 - DNA, 80 bp, Homo sapiens
ggtgaaacccaaacaacatctcctgctattccttgggctgcctttcctgcagtctatccttcactggagtctgatgatga

SEQ ID NO: 227816 - DNA, 82 bp, Homo sapiens
gtgacctcctggacttcagcatgcatcaagatggtgctcatgtggaccagtggtgacgccttcaagacggcctacttcctgc

SEQ ID NO: 227817 - DNA, 98 bp, Homo sapiens
ggaggaggaagaagaagtgttatatgtcctaaagtaaggtttcaggatatccgacatgaagccagtgacttcccatgtagagtggccaagcttcctaa

SEQ ID NO: 227818 - DNA, 82 bp, Homo sapiens
gaaagggaagagatgatttctccatcctgaacgtgcagcgaatgagtccctggaacgccagatgcgtgaaatggaagagaac

SEQ ID NO: 227819 - DNA, 98 bp, Homo sapiens
gtcgtgaagctcggtgaccttggtctgggccgcttcttcagctctgagaccaccgcagcccactccctagagatcgagatggtgatcatggagcgtag

SEQ ID NO: 227820 - DNA, 82 bp, Homo sapiens
acaatcttcaatgagtaaacatattcctttccaaagaactactggttcagattttagctcttcccaagttgtgaaaatagtg

SEQ ID NO: 227821 - DNA, 100 bp, Homo sapiens
cttgatgagacttcggagatcctttctattcaggataacacaagtcccttgccggttgtggaacttttagcaagtgctcttatggacttggtacaaggag

SEQ ID NO: 227822 - DNA, 100 bp, Homo sapiens
cacagtgatgagcaagcagtaataaagtctcccttaaaatgcaccctccttccacctggccaggaatcagcctctgttggaatgctacacaaaactgcgg

SEQ ID NO: 227823 - DNA, 87 bp, Homo sapiens
aggaggagaggggttgttttataaactgcctggccgaatcagccttttcacgctcaagcaacacagtcactcctggcggcaaaccaa

SEQ ID NO: 227824 - DNA, 75 bp, Homo sapiens
ttctgatgttccactgaaatcacaatggaaagtcttgacttgactgaccccaagactgcttctgagacagaaaca

SEQ ID NO: 227825 - DNA, 100 bp, Homo sapiens
tcgtgtctcatcctgttttgagcttcctgtaccgctggatatatgatggggagcttgaggacacttaccacgaagtggagccgccaccaaaatgcagatt

SEQ ID NO: 227826 - DNA, 75 bp, Homo sapiens
atgaacttcttttggccaagctcaagaccccctggttgtggaatacgaggcattgctggtacaactacccctatc

SEQ ID NO: 227827 - DNA, 100 bp, Homo sapiens
ctgaatcaggatcacccaagggatccgtttgcacattaacgtctgagaagtactggcctaggagttgatccctgaattttattatctccctgagatgttt

SEQ ID NO: 227828 - DNA, 82 bp, Homo sapiens
cgaagcgctgcgctcgcgcccggatccctcaggtcagaagttgagtagcaggggcctaggagggctcgaagccttcacagcg

SEQ ID NO: 227829 - DNA, 75 bp, Homo sapiens
atctttaccaccaagtcttggagaaagcgccaggtgaaaggtgtagcagtcactcggcctacacccacagcatcg

SEQ ID NO: 227830 - DNA, 74 bp, Homo sapiens
atgtcctcatcatcccgtcagagctgaggtacttcgtgaaggtctatgttaacaatgaatgggcaaccagtgtt

SEQ ID NO: 227831 - DNA, 100 bp, Homo sapiens
gcggacgccgcagagcgccgaggaggctttcctgctggtggcaaccgcctacgagacactcaaggttatgcagatgtatcttccattttgtggaatcgcc

SEQ ID NO: 227832 - DNA, 101 bp, Homo sapiens
gcccctggtgaccaacttgctgcggtttttgttcctggggctgagtgccctcgaacatacatatgatagttgagaaagacacatattctgatcatgaagaa

SEQ ID NO: 227833 - DNA, 51 bp, Homo sapiens
aggaaggacggacttcaggggcagcctgctcctgcaaccagcacgcccgac

SEQ ID NO: 227834 - DNA, 88 bp, Homo sapiens
ggcagccctgctctgcgtcaacgccatcgcagtgctgcacgaggagcgattcctcaagaacagcagtctgcagaactaaataaactac

SEQ ID NO: 227835 - DNA, 100 bp, Homo sapiens
cccgcaaccggggcgaatcatggcggccgccaaggttgtggaaaatgcccttaaagtgaacccaatactaggtccacaaatgtttcaaccgattttaccc

SEQ ID NO: 227836 - DNA, 75 bp, Homo sapiens
gaatggagtcacatcacatgaatggctctttaggacagagcgggatgccaccagcttgtccaaagggaagttcca

SEQ ID NO: 227837 - DNA, 87 bp, Homo sapiens
gagggtggaaaaagcagggaggttatgaggcttaataaagaaggaggattccctgggagcacccaccagctgagatctgcacatcag

SEQ ID NO: 227838 - DNA, 82 bp, Homo sapiens
gctcctgctgccgccgctgctgctgggggccttcccgccggccgccgccgcccgagatgaggacggggacttggttgccttt

SEQ ID NO: 227839 - DNA, 75 bp, Homo sapiens
atggcctattcagctgtaccagtccgccattttgctaccaagaaagccaaaggctgaggaaaaggcagatgctct

SEQ ID NO: 227840 - DNA, 100 bp, Homo sapiens
ccgagacacgcggtgaggcggcgacgggctccggaggtgtgctctgaacaagccgagacggggccgtgccgagcaatgatctcccgctggtactttgatg

SEQ ID NO: 227841 - DNA, 104 bp, Homo sapiens
ttctttttcaggcctcgatctgtttatcgtcctttaaatcctctggcgcctagccgaggtacagtgaaggtgaaattcgatttaatttaatggccattgtgtct

SEQ ID NO: 227842 - DNA, 99 bp, Homo sapiens
gaagaagacaggttccaggagcttaaagtagcaacagcagaagcaatgagcacctaggctaaaatgtcaagaactcttaaattatatcatggatacagt

SEQ ID NO: 227843 - DNA, 75 bp, Homo sapiens
aaggataaaattcaggatttcttaaaggatagccaattgcagtttgaggctgtattggcatactccacacatctg

SEQ ID NO: 227844 - DNA, 115 bp, Homo sapiens
gcgggacgcgagcggcgagccggagcgcggagcccggctcccgcaccatggaggaggacgacagctacgagtgatggtgatgattttaattacatcattgcatttttccttggaa

SEQ ID NO: 227845 - DNA, 83 bp, Homo sapiens
cgtgcatgcccggaagaataagaacgtcgacattctctggcaagctgctgaggaagggaaaaggccgaggcatcagcgtgtga

SEQ ID NO: 227846 - DNA, 75 bp, Homo sapiens
ttggatcttcattcattaagcagtgcagaaacacagatcattgcttttgtcctggaaggaaaaagatctaaagtc

SEQ ID NO: 227847 - DNA, 75 bp, Homo sapiens
cagttggcaaaccagatatatgacttgggccatgaaatgacaagcattggactgctacttggtgtttctgctgca

SEQ ID NO: 227848 - DNA, 110 bp, Homo sapiens
cccctatcaaggatggcatcctctaccagcagcatgtcaagtttggcaaggtcagcccaaggccaaccccactgtcactctgttcccgccctcctctgaggagctccaag

SEQ ID NO: 227849 - DNA, 82 bp, Homo sapiens
ggagtgatttgcgccatcatcctcatcatcatcatagtacttggaccatgagactgtttcagccactttcatcgacagcagt

SEQ ID NO: 227850 - DNA, 100 bp, Homo sapiens
ctctgatatggaagaggaagcagatgatggttctaagatgggatctgatttagtcagtcaatgccacctgggacagcaagaccaggttctcgtggttgtc

SEQ ID NO: 227851 - DNA, 109 bp, Homo sapiens
gggccggccgcccagacgctgcccgcgggcccggccacggcggagccaaggttgaagaagcctcagcggaggcgatacggcctcctcgccaacactgaggaccccacgg

SEQ ID NO: 227852 - DNA, 88 bp, Homo sapiens
catgaactctttgaaagatttcttctgtatgaccagacaaaaggtcaaagcagactttaataaatggtgctgagccaactggaaagcc

SEQ ID NO: 227853 - DNA, 97 bp, Homo sapiens
cccggaaaaacgaagaggaaacagaaattatgagtaagcagcggaagttggtagatttcgggcagacaacttgaacaagctgaagaacctatgcagc

SEQ ID NO: 227854 - DNA, 107 bp, Homo sapiens
ggcaagatggcggcgcccagacaggcctggagcacgtaacagagattcaaaggtaccttcagaaggaaagaaatctctctacacagatgagtcatccaaacctggaa

SEQ ID NO: 227855 - DNA, 95 bp, Homo sapiens
gtctcggctcaacgagaagatcctggaagaaccgcaccctctgatgttccagaaactccaggaccagcagcccatgacccatcgagaaactgcac

SEQ ID NO: 227856 - DNA, 75 bp, Homo sapiens
gagttcctggagtttgagtttcgaccggacgaggagaaggcagagcccccccaggctatgaatgccctgatgcgg

SEQ ID NO: 227857 - DNA, 100 bp, Homo sapiens
tgagatgagttacatcttggaggggaagatggtgaaaggaatgggaggtgctatggatttagtgtccagtgcgaaaaccaaagtggtggtcaccatggag

SEQ ID NO: 227858 - DNA, 95 bp, Homo sapiens
ccggacccaggccctggatgggactgtctatgatgtcatgtttgtcagcacagggactggtgattgcagctggaagtgcccatgaccgagctggc

SEQ ID NO: 227859 - DNA, 100 bp, Homo sapiens
ctctgcctggctcctgcagaccccatcttcacagcactcttactacttcttaaattcactgttgccaaatggtggttcagggaattcatattggactggc

SEQ ID NO: 227860 - DNA, 73 bp, Homo sapiens
tcacccatggagcacatggagatgattggaggtggacacaaaggaagaggcagccagacagctacttcagcgt

SEQ ID NO: 227861 - DNA, 50 bp, Homo sapiens
ggtcttcctggtcctcctggtagtaatggccatgatccaaaggaaccaga

SEQ ID NO: 227862 - DNA, 75 bp, Homo sapiens
gcgctctgcccggcgagtcgggctctggaggaaaagaaagggcgttacctactgcggagaaagttcagcaagcag

SEQ ID NO: 227863 - DNA, 83 bp, Homo sapiens
cctggttctggaatcctcagttcaagttcattagaactaccatatactccccctttggaaagtaagcaacgtagaaatctccc

SEQ ID NO: 227864 - DNA, 88 bp, Homo sapiens
cgttcaagcgaaaacatgaccgctgagcccatgaggcctctggctgtacctggcagggagcagcctgccctgtctcacgctgattggc

SEQ ID NO: 227865 - DNA, 100 bp, Homo sapiens
tcaggttctccggcctgccttcactgtttgcccagtatgcggagatcgtccacttcaccctcccagatgggactcagaggagcgggcaggtgcttgaggt

SEQ ID NO: 227866 - DNA, 100 bp, Homo sapiens
aaaagacagtgttctgctttcatggagttcacagaagagtcgaggagacttgtgcaccatggacaattttgctgagggagatttcactgtggcggattat

SEQ ID NO: 227867 - DNA, 80 bp, Homo sapiens
cagtcctgacaatgggcagaacgaattcagtgatatcattaagtccagatctggttttaaaatcaaagatgggaaaatcg

SEQ ID NO: 227868 - DNA, 100 bp, Homo sapiens
actgcgagccctgctacattgtttcctatgttattcgagatgaagtggagaagtacaaccgaaatggagtcaatgctctgcagctggatccagcactaaa

SEQ ID NO: 227869 - DNA, 100 bp, Homo sapiens
tttacctgcttcccaatcccactgatgaggatcagcccatggcagcttggattaattaggagaaagtcaattgcgccagcaaatggaaatctcggaagaa

SEQ ID NO: 227870 - DNA, 98 bp, Homo sapiens
atgaaccttcttatggattggattgaggttcagatcaacaacgaggaaatatttccaacatgcgtggctgcaagagaaatagtgtggttagaaagaga

SEQ ID NO: 227871 - DNA, 101 bp, Homo sapiens
gtttgctctgctcttccaacaccagtggaagatgatcacatcccaggattctcaaagttggattggtggaaacaatgaaccattgacaggctttacatggc

SEQ ID NO: 227872 - DNA, 100 bp, Homo sapiens
cagactgctgcttccccggatgagcagaaggtgtttgccctctgggagtctggagacatgagtgatcagacagagtcttgctgtgtggcccaggctggag

SEQ ID NO: 227873 - DNA, 73 bp, Homo sapiens
aggagatgtctgtgcccttgaaagaactgattgagaagcatgctggcctcagcaatctggcccctcgaaccct

SEQ ID NO: 227874 - DNA, 75 bp, Homo sapiens
aacctctttaaacattctcattaaggttccatcttagcccacatccagaagcaaaagcacttcaatgagcgagaa

SEQ ID NO: 227875 - DNA, 82 bp, Homo sapiens
tcccatttcgcccctcgcgtccggagtccccgtggccaggcagctgtgcctcctgctgaatgcggagaacatcttccactca

SEQ ID NO: 227876 - DNA, 100 bp, Homo sapiens
aacaggcatcatggactgtgcgcccaagaacaaagaactttgagtctggcaaggcttataagacaacatggggagatggtggagaaaactcaccttgcaa

SEQ ID NO: 227877 - DNA, 98 bp, Homo sapiens
ctggaggcggcccattatttcacagaggacagctcctcagaaggtggccagcgtgaggaagaccacggtcctggatgtcatgaggcggctgctgcagc

SEQ ID NO: 227878 - DNA, 95 bp, Homo sapiens
ggagcctccagagtagacaagccctcaaggatgcccggtccccatcaccggcacacattgtcgaacggcagagtcgaaacaaacaatgagggcga

SEQ ID NO: 227879 - DNA, 106 bp, Homo sapiens
cgctggagcagctggcgcaacaaggcaagatcaaagagaagatgtacggcaagcagaagatctattttgcggatcaggacatcaaccaggaagtttataatttcct

SEQ ID NO: 227880 - DNA, 100 bp, Homo sapiens
gccggcgtttgggctacggttgttgttggcgactgtgcttcaagcggactcacaccacccggcaagaactgctcactacggctccctgccccagaagtca

SEQ ID NO: 227881 - DNA, 75 bp, Homo sapiens
cgaagcttggaagttgcagaagtctcagaccagtatccttcaggggttctcttactctgatttgcggaaatttgg

SEQ ID NO: 227882 - DNA, 75 bp, Homo sapiens
ggtggagtgtaggtcatatcgccgcggagaagacagactgctgctttggacctgttggtaatgatggcctgagct

SEQ ID NO: 227883 - DNA, 100 bp, Homo sapiens
cagccaagatggtgaagcagatcgagagcaagcttgctcacttccgacagagaaaaacaaaaggtgacagttcgcattcggagaaaaagacggcgaagag

SEQ ID NO: 227884 - DNA, 96 bp, Homo sapiens
tctccaggcaacaaaggatcattggtttatgcaggaattaaatcaattgtaaagtcatcgttgggaattttatggtgattacattgctgtgaaccc

SEQ ID NO: 227885 - DNA, 75 bp, Homo sapiens
cgcctgaggaggcgagctagccgggagttacaccgccaccgccagactagggtatttaaattacttcaaaaccaa

SEQ ID NO: 227886 - DNA, 100 bp, Homo sapiens
aaaccacgaagtcttcaagtatgtcatctctcacctaaacaaccgcttacaaacacgcagatggcaagaagattgatggcaggagggtccttgtggacgt

SEQ ID NO: 227887 - DNA, 109 bp, Homo sapiens
ctggtgtcctgaacctggaagttgtgctttttaaggtcctcttcctgatggatgggaacaagccatgactcaggatggagaaatttactatataaaccataagaacaag

SEQ ID NO: 227888 - DNA, 82 bp, Homo sapiens
ccggggcacgtgcagaaaggagccccgcgagtggcgcgccggggatgcctggtctccaagtcctctcctaagaagcctcgtg

SEQ ID NO: 227889 - DNA, 100 bp, Homo sapiens
gggtgaaagaaaatcctgcttgacaaaaaccgtcacttagggttagaacaattaatcctctctgacactggaatttcttctctacattttccggatgctg

SEQ ID NO: 227890 - DNA, 88 bp, Homo sapiens
gccgggctcgggtcgccggagccgcgccccaccccgccagctccagagccacgtacggtctttggtagaagagtttagaaagacactc

SEQ ID NO: 227891 - DNA, 101 bp, Homo sapiens
aacatgttcgagttctgggatatctgtgacttcctccgcggagccacagtccatagaatcctcggccagcaggtcccctatgccaccaagggcaaccagtg

SEQ ID NO: 227892 - DNA, 100 bp, Homo sapiens
atttcaccacaagaagggctgccaggctcatgagaggctagaagattccaaactagaagctgtcagtgacaataacttggaattagtcaatgaaattctt

SEQ ID NO: 227893 - DNA, 100 bp, Homo sapiens
accatcagtgtttgggaatgattctgatgatgatgatgaggcacaacagcaacgccatgaaagagacttggccctcttgaaactaaaggctgaacaagag

SEQ ID NO: 227894 - DNA, 82 bp, Homo sapiens
catgtccaattctggggactatgagattctttactcaaaccagtccagctacgggggcccagccagccagcagctgagtggg

SEQ ID NO: 227895 - DNA, 100 bp, Homo sapiens
acgtgtccttcaatgtttcccgggagctcttcttcatcaacatgtggcagaaggacaaagtggccttggagagtatgcctctgctaggcttcaccattgc

SEQ ID NO: 227896 - DNA, 101 bp, Homo sapiens
tggggcctcattttggatatctgtgataaagttggtcagtctcgcactggactgggactcttcaattaatctgacatttcacaaatccaaaattgccgtgg

SEQ ID NO: 227897 - DNA, 98 bp, Homo sapiens
tctggtgctctgggaaatgacatctcgctgtaatgcagtgggagcttcagtatcagacacagcacagcagccatctgaagagcaaagcaagtctcttg

SEQ ID NO: 227898 - DNA, 48 bp, Homo sapiens
acaacaagtactcctacaccagggtcacggagactcaccagttggcag

SEQ ID NO: 227899 - DNA, 100 bp, Homo sapiens
agctagagagccgtctcccctctctggagccgagagaggccggtttcccccaccaacatccagtcatggataaaaatgagctggttcagaaggccaaact

SEQ ID NO: 227900 - DNA, 75 bp, Homo sapiens
ggattccaagtaactcttatttgggagcagattaagcgagtaaaagactcggatgatgtacctatggtgctagtg

SEQ ID NO: 227901 - DNA, 83 bp, Homo sapiens
aaagacccagaatatgccaagtatctaaagtcgttcttccctctttccaatagatgatggcttgcttgatgatggtcacagtg

SEQ ID NO: 227902 - DNA, 96 bp, Homo sapiens
ggttcctagagttgttcagaatcctccaaaaccagtcatgaccactagacccacagctgttaaagcaacagagctcagaggacgaatcaaaatggg

SEQ ID NO: 227903 - DNA, 98 bp, Homo sapiens
cgtgctgctgaccgaggcccccctgaaccccaaggccaaccgcgagaagatgacccagctcttcctcggaggcagcattgttaagggaggccctgtgc

SEQ ID NO: 227904 - DNA, 101 bp, Homo sapiens
ccacgaaggctgcaagagaggcgctgttgagttctgcagttgatcatggcttaattggcttagtgtcgacttcaataattggaaagactgggaagatgatt

SEQ ID NO: 227905 - DNA, 100 bp, Homo sapiens
acgaggatggtgtctactggaagtactgtgagatacctgcttgccagagcattatattgtacttctagcaagtgcaccaacagaaaaacaacgcctggaa

SEQ ID NO: 227906 - DNA, 74 bp, Homo sapiens
cggatttcaccacaagaagggctgccagggaccaaacttgctcaagcaaaaaagtttaatgatcccaatgaccc

SEQ ID NO: 227907 - DNA, 100 bp, Homo sapiens
ctcgtcgccacccgtgaggactacagcagcagccgctcttctaaaacattcaaaccaaagaagaatatccctgaaggatctcatcagtatgaactcttaa

SEQ ID NO: 227908 - DNA, 138 bp, Homo sapiens
cgaaaataaaacatcgccccttctgcttcagtgtgaaaggccacgtgaagatgctgcggctggccaccagcccctcgggttccaagatgcagctactggagacagagttctcacacaccgtgggcgagctcatcgagg

SEQ ID NO: 227909 - DNA, 82 bp, Homo sapiens
gcccgctggccgggctggctgcggccgccctgggccgggccccaccggacgcaattctgtggtgttcttggtcacacattta

SEQ ID NO: 227910 - DNA, 100 bp, Homo sapiens
ttgactgaaaatggggcggaagaaaatacaaatcacacgcataatggatgaaaggaaccgacaggagatcatgaatcagacagataaaaatcaacaagaa

SEQ ID NO: 227911 - DNA, 90 bp, Homo sapiens
tgaggcccaggtcgccgccgcggcgcgatgaacaagagaactgggcaacccatgatccacatctacctggacaaggaaacaggaaagccc

SEQ ID NO: 227912 - DNA, 74 bp, Homo sapiens
cttgcacactgtgaagagctgagagcacaggtgatggagatccaatggaagaagacattctccaagttgtgaaa

SEQ ID NO: 227913 - DNA, 75 bp, Homo sapiens
aggacagctgttccttggccatcccaaagctattctgggggcaacagagctcgagagtcaggatgtctcagattt

SEQ ID NO: 227914 - DNA, 99 bp, Homo sapiens
gcacttggagaacgccagcctgtcggggcggcccctcatgctgctcgctctcgaggctcctcccgctgcgggtcggcgctcgccctcgctctcctcgcc

SEQ ID NO: 227915 - DNA, 100 bp, Homo sapiens
tgaggcctccccagccatgtggaactggttgatttggctgatctggctgtctaggcgggtgtccccttcttccctcaacgctccacgtgcgtccctcctg

SEQ ID NO: 227916 - DNA, 74 bp, Homo sapiens
gaagtctggacatcaatgcctttaggtgtgtaatgctgtgtcatggagctaaaatcggatttttccaaggagat

SEQ ID NO: 227917 - DNA, 100 bp, Homo sapiens
gacattggctgacatcacagttgtctgcaccctgttgtggctctataagcagcaatctgcacatcgtgctgccacacgaggcttcattcgttatggctgg

SEQ ID NO: 227918 - DNA, 90 bp, Homo sapiens
gttggatctacactttctcaagcactgtgatcttcaaatcccgctcccaaaagacttcaggcattgggcgcctgatggtgcatgtcattg

SEQ ID NO: 227919 - DNA, 75 bp, Homo sapiens
gtggcagtcagcagccggcagcagcagcgggtgcatacattcagagggccacactggtgtgaatactgtgccaac

SEQ ID NO: 227920 - DNA, 90 bp, Homo sapiens
gaggctctgcggctggtccaggccttccagtacacagacgagcatggggaagctttctctcctttgaaaacactaagaataatgtcactg

SEQ ID NO: 227921 - DNA, 100 bp, Homo sapiens
ccgagctcccttcaagaagagcagaagtgcccaccaagcctcccctgccaccggccaggacacagggcacaccaggccaatggaagcagtgctgtgatga

SEQ ID NO: 227922 - DNA, 75 bp, Homo sapiens
agaaaggacagagattgaactcagctatgcaaagcaactcagaatcatgaggaaaacttgtgtcctgaataccca

SEQ ID NO: 227923 - DNA, 100 bp, Homo sapiens
ctgcagttggccttcatcgacttgagacaatgtaaacaggaacatcgataagtagtgtaaaaacttgcacaatgaaatccgaagccaaggatggagagga

SEQ ID NO: 227924 - DNA, 100 bp, Homo sapiens
acctctgttgccatcagcaactgtgatggtctgaaatgcatcttctgcagacaccgggttaagagggtctctggagcctgcatccagtgttcctacggtc

SEQ ID NO: 227925 - DNA, 97 bp, Homo sapiens
gaaaaacccggtactgtgcactattctttcccaggaaccattggataaggataaagaataactgtgtagaatacattgaggatgatgaggagcacgt

SEQ ID NO: 227926 - DNA, 100 bp, Homo sapiens
agcacctcagcagaattttttgcaggggaaaacatccagtgtggtggaaatggttttgctgtggcgtggcacctggtctctttctagaaggaaagttcaa

SEQ ID NO: 227927 - DNA, 98 bp, Homo sapiens
agacgacgctgctgggtccgctgagcggggcgacccgaggggtagaaatatttctgtcatggctcattcaaagactaggaccaatgatggaaaaatta

SEQ ID NO: 227928 - DNA, 50 bp, Homo sapiens
gtgtctcgtgtgtgaacatcacaggagtcaactgagagttcaaatacaac

SEQ ID NO: 227929 - DNA, 98 bp, Homo sapiens
gaaagtccctttggccttgcagacctctatagaggagcgtgtggctcatctacgaagagtccagctggccctgaaggaccctgttcatacagtgtcac

SEQ ID NO: 227930 - DNA, 125 bp, Homo sapiens
ccgccatgacccgcagaccaccaacctcctgtatctggagctgggagacaagcccgcgcccaacaccttctatgtagagtgcagtgaatagaagacacttctctgcaccccaaaagctccatgct

SEQ ID NO: 227931 - DNA, 100 bp, Homo sapiens
gaaccgcaccaccagctggatcgacccgcgggacagcgtcacactgctcagctccgcgaagagttgctgaaacttccctgccctgaaggcttggatcctg

SEQ ID NO: 227932 - DNA, 98 bp, Homo sapiens
gatggtggactcagagaccaataaaaataaactgcttgaacatcctttgactggttagccaggatgatggcttggaaaaaagtccaatgaaaaaaaaa

SEQ ID NO: 227933 - DNA, 80 bp, Homo sapiens
ggggaccaagctggagatcaaacgtagttgtcctgggaacccctgcagaagaagatggtggtggcaaaattgatttaatt

SEQ ID NO: 227934 - DNA, 76 bp, Homo sapiens
tgaatgaccaggtgtaaagtgcaagagtaatatgctatgactgagggaatgacagaggaagaggaagacaaacttc

SEQ ID NO: 227935 - DNA, 153 bp, Homo sapiens
attcaaacaaccaaccctgatttcctgcttctccttttcatgagtgttcctgtggtctctgcacctcctttctggagaagatgtcaaccggacactagaaggtggaaggaaacctcttcattatgcagcagattgtgggcagcttgaaatcct

SEQ ID NO: 227936 - DNA, 82 bp, Homo sapiens
gatcctggaccacgcagggggaaacagagcctccagggccaagagcaaagatggtcgacctttgccagcaagggataaacgc

SEQ ID NO: 227937 - DNA, 98 bp, Homo sapiens
tgcgttgtgtcatccgccccccgctcaatggcgactccctcaccgagtacgaagcgggcgtttgcgaaggatatgggtctgcaggatggagttcttcc

SEQ ID NO: 227938 - DNA, 100 bp, Homo sapiens
cttagcaagtgcggggaagagctgggtcgactcaaggtgatgatgaacagtctacacagatggctgcaagttgggaagatgataaagttacagaagcatc

SEQ ID NO: 227939 - DNA, 75 bp, Homo sapiens
gttcgtctcttacgtctgcggaagtgcagctgcctcagttcttagcgcagcttccacttcaccatcggatgtttg

SEQ ID NO: 227940 - DNA, 51 bp, Homo sapiens
tgttcccggggcagatccaggttcagctgacgaagaatttgatgaactatg

SEQ ID NO: 227941 - DNA, 90 bp, Homo sapiens
gtggcccaggaggcggcaggacggccaagaccagcgcgagggccctgggcaaggcccgacagggtctgggggtggtggcatctcccctaa

SEQ ID NO: 227942 - DNA, 100 bp, Homo sapiens
gtggcaatatgccttcaccagctatggcattagcccacaggccaagtttcagaaagtgctttctctctgtggacatgaggattggattagaggagtggaa

SEQ ID NO: 227943 - DNA, 100 bp, Homo sapiens
agagagcggttaaaaaaccctaatgctcctatgttaccgccacctaaaaacaaagaggattttgagaagacattatacaacgtgaaggctgagatctttc

SEQ ID NO: 227944 - DNA, 89 bp, Homo sapiens
aaagaatgtaaacattgtaacatcgttgcctactttgggagttatcttaggccccaaggcccagaagaaatttaagcgtcttatgctgc

SEQ ID NO: 227945 - DNA, 73 bp, Homo sapiens
ctgggggctgagatccggaatggcatggccatcattaggaatggaagttggatacactttgtgacttgtacga

SEQ ID NO: 227946 - DNA, 109 bp, Homo sapiens
cccgggagcgccgagcgtcgccgccgccgccgccatgaacaactcgggcgccgacgagatcgggtatcacctcttctgggctcaagatggacaacaagaagcgcctggc

SEQ ID NO: 227947 - DNA, 100 bp, Homo sapiens
tgagaagaggaggaagaataatgggaggagacaggacctttttcaacttgacaaatagttatctggctgcggcattgtgtactgcaggactagagaggct

SEQ ID NO: 227948 - DNA, 100 bp, Homo sapiens
ccgccaagtgcttcgagtactacgaaagcacttaagtattcatcgaagagtcaccccagtagcggtgatcacagacatgaaaagatgcgagacgccggag

SEQ ID NO: 227949 - DNA, 74 bp, Homo sapiens
aacagggcagacgttagcgtgagtgatcactctcaatcccggcagacaactaaactggtaggtggcagcagagg

SEQ ID NO: 227950 - DNA, 98 bp, Homo sapiens
cgagaccgtgaccgagagcgtgaccgagagcgcgaatatcgtcatcgttagaaggaaagcagatggtggagctgaatatgccacttaccagactaaat

SEQ ID NO: 227951 - DNA, 100 bp, Homo sapiens
gggcaggacacggaggaccggagcggcctgtccgagacttaattcagtgcacaaatgagatgaatgtgaacatcccacagttggcagacagtttatttga

SEQ ID NO: 227952 - DNA, 82 bp, Homo sapiens
atctgcataggaattatcattgtgaatcccaattattgccttggtccatctccacagcacctgttgccttcattagcagctt

SEQ ID NO: 227953 - DNA, 100 bp, Homo sapiens
ctacagagccggtgatatgatctgtcctgaatgtggcttggttgtagcttctgcagaaagccgtcattacacctgattttgaaaaaaaccactgtgttcc

SEQ ID NO: 227954 - DNA, 97 bp, Homo sapiens
tgagaatacattttggagacatgacacaaaagctgataccagagctatacagctgctattaggcagtcatcttgcagctgtggcacacaaaacacta

SEQ ID NO: 227955 - DNA, 75 bp, Homo sapiens
agagacatgagatggtagacaaaaccccaggagacggtggctcagggagtaaaggaaggccagttgagcaaacag

SEQ ID NO: 227956 - DNA, 83 bp, Homo sapiens
ccgggaatcctgtgatcgcagaaagcaattctgtggtgttcttggtcacacatttatggagtttctgaagggcagtggagatt

SEQ ID NO: 227957 - DNA, 100 bp, Homo sapiens
atgccccttcactggtaatgtgtccattcgagggcggatcctctctgtgccagccatttttggagtctcctttggtatccgcaaactctacatgaaaagt

SEQ ID NO: 227958 - DNA, 100 bp, Homo sapiens
actggcaaaagcacaaggattctcgctgtgacagagacaacaccgagtatgagaagcccagggccccggccagtgcccagccccgctgggagacccggcc

SEQ ID NO: 227959 - DNA, 100 bp, Homo sapiens
gaacttcctcggccatatggaggggtcatataatacccttgtgtcttcagtttgaggctgaagccgacgtagcttctctgaacagacgcatccagctggt

SEQ ID NO: 227960 - DNA, 142 bp, Homo sapiens
catcgtgcccggcggggtcgtcacggacccggaagcgctgcaggctcccaacgtggactggttgcggacgctgcgagatacttccgggtcatcctcctcctcctcctggccctgactctgctcctgctggccggattcctgc

SEQ ID NO: 227961 - DNA, 85 bp, Homo sapiens
aggaagaggcactgctgagggggcgcgaggggaacggaggccagagctgcggaagcctgtgggatccgaacatcactgcttgtaa

SEQ ID NO: 227962 - DNA, 87 bp, Homo sapiens
cagacaaacagcccgcccgaccccgtcccgaccctggccgccccgagcggagcctggagggtgcttcaaggatgaccgcatcgtctt

SEQ ID NO: 227963 - DNA, 90 bp, Homo sapiens
ctccaagcagcaatccaaaagagtctcaaggatccttcaaataacttcaggggtgttccaatgaattcactcaggtttctctttgagggt

SEQ ID NO: 227964 - DNA, 75 bp, Homo sapiens
accctgtctgtaggaggaaaaactgtatcacgttttcgtgttgtgatgaataacttaagcccagcctggaaatca

SEQ ID NO: 227965 - DNA, 83 bp, Homo sapiens
ctggctgcgtgcacagcgccttgttccagcagggcctgatccagcctgagcctccaacaacaaacaaatggcagctggacaac

SEQ ID NO: 227966 - DNA, 101 bp, Homo sapiens
ctggaagacgtgcggctacaggagcgcacgagcggtaccaaatatgccccaacagcggcaagaccagcatcatcagagtgccatgatgcacccagcgtcag

SEQ ID NO: 227967 - DNA, 75 bp, Homo sapiens
tcggaaaccggtagcgcttgcagcatgatgagctcacagtgcctgcactttaccccagtagccctgaagtgtggg

SEQ ID NO: 227968 - DNA, 124 bp, Homo sapiens
ggagtatggaaagttagagtggacctacctgataaataccctttcaaatctccatctatagggtccacatatagcctcagttacattagctgcttatgaatgcaattcagttaattttcccgaa

SEQ ID NO: 227969 - DNA, 82 bp, Homo sapiens
gtccagcgtgcgacgacttactggcttcatggaggtgtgattgcctatatcagttcttccagctcagcctcaagccctgcct

SEQ ID NO: 227970 - DNA, 100 bp, Homo sapiens
gaggccacagcccaggtcacagtgaaaggaaagaccacagcaagattctttcattcgtctcctcctagcctgggggaccaggctcgaactgaccctggac

SEQ ID NO: 227971 - DNA, 90 bp, Homo sapiens
gcgctcggtagccgtctggctcttggtcgggctcagcctcggtgtcccccagttcggcaaagtgaaagctggtggaatgcgaattgtgca

SEQ ID NO: 227972 - DNA, 100 bp, Homo sapiens
tacattggaacagggccgcctctcaagctggctccaaggctgcatctctccactggactagcgagagggttgtcagtgttttgctcctgggtctgcttcc

SEQ ID NO: 227973 - DNA, 90 bp, Homo sapiens
cacatcaccttgatttttaatcccacgttttgtgaggagtttaaagaaaagtgtcctatctgtgtcccctgtggcttgaggttggctgag

SEQ ID NO: 227974 - DNA, 100 bp, Homo sapiens
ggcgtcggcccctgcgccggcctcggccaccgagatcctgctgacgccggctagggaatagccaggccagaagaaggaaggcctgtggtgagtgggacag

SEQ ID NO: 227975 - DNA, 91 bp, Homo sapiens
gccgcaacgccgagcgcaccgacatctgcctgctcaaagtgccctctggtggtcagaagatgctgtgctgtctcgttaggatgaatggatt

SEQ ID NO: 227976 - DNA, 75 bp, Homo sapiens
aaactctttgggaaagccactcgaaaagatgcacatgttcattgctcgctactgtgacctgttaaatgtggacat

SEQ ID NO: 227977 - DNA, 96 bp, Homo sapiens
ttcgcaccccttcctgtcaggggccgaggctcacgaggcccagggaatcctctggaccatcagattaccaatgaaagaggagaatcaagctgtgat

SEQ ID NO: 227978 - DNA, 82 bp, Homo sapiens
tcaacatcctcctggccaccgactcctacaaggcgatcagtgggtgaccgcggctgcgagggactttgtcatccgtcctcca

SEQ ID NO: 227979 - DNA, 83 bp, Homo sapiens
agctcaacaacgtattttagaacaacagaactcttcaaggagcatattaatgaaaagtgccataaactgaaaaaccaaacatg

SEQ ID NO: 227980 - DNA, 113 bp, Homo sapiens
gaccagcagcgtgaagacatcacatccagtgcacagattgggaaaatgaggtacgttagtgttcgcgattttaaaggcaaagtgctaattgatattagagaatattggatgga

SEQ ID NO: 227981 - DNA, 101 bp, Homo sapiens
cacaagttcacgaaagcctacaaaagtgtggagaggttccttcaggaggatcagtgtttactaaaggacaagtcaccacaggacagtacaggatgcttgcc

SEQ ID NO: 227982 - DNA, 100 bp, Homo sapiens
cggtcatgggcggctcagcctccagccagctggacgagggcaagtgcgcttacatccgagacaaagaaacagccttggtataatagcacgttagcatcaa

SEQ ID NO: 227983 - DNA, 83 bp, Homo sapiens
gaccgcgcgcagggcctgcagcgggagctggacggcgagcgcgagcggcgcgagaaacgtctgcttctgcgctttgcctggga

SEQ ID NO: 227984 - DNA, 75 bp, Homo sapiens
tcctgcccctgagatccacccaagttgtgttggctgattgcaattctggcccaactcaaccctctctttggaccg

SEQ ID NO: 227985 - DNA, 100 bp, Homo sapiens
aacatttcccacaggacacgaagtttgtcggcccttgccttggcagagctgagcctcctctattggcccaggaagcccacccagccccgccacgcagagc

SEQ ID NO: 227986 - DNA, 98 bp, Homo sapiens
tagctgggtctcggccacggcgtggagagcggcaaagctctcgatgttctgaagtatgaggaagttgacatggattcattagccaaggctgttccaga

SEQ ID NO: 227987 - DNA, 75 bp, Homo sapiens
aggactcgctcgacccgtccttcactcacgccatgcagctgctgacggcaggtcaaaatgcagatcttcgtgaaa

SEQ ID NO: 227988 - DNA, 100 bp, Homo sapiens
cggcgctatggaggagctcgatggcgagccaacagtcactgctctgatggttgtatatatgaaaccttgataccaatacgtccagctgacccagaaaaaa

SEQ ID NO: 227989 - DNA, 50 bp, Homo sapiens
gggtgatttctgcatttccatctgaggagttatgatcgaagttccaggag

SEQ ID NO: 227990 - DNA, 90 bp, Homo sapiens
tccgcagcaagatggcggacgagaaggacagggaaggtgtccctggccagtgtccttccacctgtccacaagcatggggaacatcttcgc

SEQ ID NO: 227991 - DNA, 100 bp, Homo sapiens
gtgtggcaggttgcagaggacagtgatatacaaccacttcctgttgtgtcacacttgcctgcagtaacatgctgtaaggtttgtggcataggagcagtgg

SEQ ID NO: 227992 - DNA, 100 bp, Homo sapiens
gtcggcgctgggctggaggcggcggagcgcgagagcttcgagcggactcaggttgcatattcatcgaagagaacttttctttgaaatgtcccaaacataa

SEQ ID NO: 227993 - DNA, 72 bp, Homo sapiens
aggggcaactgggccatgagagggaaggaaacaagccaggtagctacagcaagctgggtagcaggcagatcc

SEQ ID NO: 227994 - DNA, 100 bp, Homo sapiens
agatggcggacggcgtggaccacatagacatttacgcggatgtcggcgaagagttcaaccaggacagttaatgattggacgtcatccaatgagaaagcag

SEQ ID NO: 227995 - DNA, 75 bp, Homo sapiens
ggagcagggaagcatggctattgtggatgtaaaagccatgttcaagacaacacaggcagttctacataccggcca

SEQ ID NO: 227996 - DNA, 75 bp, Homo sapiens
agttcttgcattggatgcaatccattccatgggttttattcacaggaatgaacaaaatggttatcaaccacttgg

SEQ ID NO: 227997 - DNA, 108 bp, Homo sapiens
tctcagcccgcgcctgggctaagcctggctaggagccgcgcagatgctgtgagagaagtaaggaaatattcctcagttcataccattgagaagagctccaccagcaga

SEQ ID NO: 227998 - DNA, 75 bp, Homo sapiens
cttgcacccattcgacccagagcagaggaaggctcatgaaaaggttcgagaacttgtcttggacaattgcaaatc

SEQ ID NO: 227999 - DNA, 130 bp, Homo sapiens
cggggcgaggtcgccgccatggcccgctggatcccgaccaagaggcagaagtacggggttggtggtataagttgaaatccaaaccaggaaagaaggacaaggagcgaggagaaattgaggttgacatcca

SEQ ID NO: 228000 - DNA, 75 bp, Homo sapiens
ccctgcccttgccagaatttcctgcgctgttccacctcattcaacttcagagcggttccgccaccccagccgcag

SEQ ID NO: 228001 - DNA, 100 bp, Homo sapiens
ggagaggagcggccggagtcagcgatggtgcccggcgaggagaaccaactggtcccgaaagagttgagacatttgggaaatgatgaagtgcacattgttt

SEQ ID NO: 228002 - DNA, 97 bp, Homo sapiens
tgccacccattgtgtcttctcaagaagaacatctaatgaaattgtccatggaagaacttgtagaattttttcaggagaccctggcaaaggatttttt

SEQ ID NO: 228003 - DNA, 75 bp, Homo sapiens
aacccggtggtgcagctgggcctgaccaacccgaaaacattgctaggtgagaagccctaccactgcaactgggac

SEQ ID NO: 228004 - DNA, 75 bp, Homo sapiens
gaatggggaggaggagcctgagcgtgagtgcatctccatccacgttggccaggctggtgtccagattggcaatgc

SEQ ID NO: 228005 - DNA, 100 bp, Homo sapiens
gcaagaagtacaacgtgccggtccaggtgtggatgtggaagcagccaagcgggcagaagaggaattgctccttcatgacacgaggtgctggctgaatggg

SEQ ID NO: 228006 - DNA, 100 bp, Homo sapiens
cgcgccgaccgcgttcctatggacagacgcacagacacctgcaggaggctggcaggatgtacagtttttatcacaggtgcaagccgtggcattggcaaag

SEQ ID NO: 228007 - DNA, 74 bp, Homo sapiens
agaccttagaaaggatcaggactggcggaattgcggcgagcagtaagaagcagcgtgtggaaaagggagacgat

SEQ ID NO: 228008 - DNA, 100 bp, Homo sapiens
attgtgttgtaatcattcaaaggataaccaaatgtgccgtgatgtatgtgaacagtctgcagatctccaggggagcccaccagcctagtcaacatggcct

SEQ ID NO: 228009 - DNA, 100 bp, Homo sapiens
ggtcagagaacacaggaccagtttgccatcccaaggccgaagggaatgaaagctactggttgattttaaagtgcctgggcctcacaggtttggagatgtc

SEQ ID NO: 228010 - DNA, 50 bp, Homo sapiens
gaggaggcggatcccccggcgtcagagtgcttgtgatttcacgtattttt

SEQ ID NO: 228011 - DNA, 82 bp, Homo sapiens
cagagcctcgcctttgccgatccgccgcccgtccacacccgccgccagcttccccttctcagaatcctgctcttcctccaga

SEQ ID NO: 228012 - DNA, 75 bp, Homo sapiens
cgacaagccgctggcagccgcggatctcaccgccgctcaggaaagtttcctacactactgaggtttaggggcact

SEQ ID NO: 228013 - DNA, 75 bp, Homo sapiens
gcaccgcagatgttgtcaaggtggcctaccaggaggccaggggtgtcgccatgagttgatctctctaatgtatta

SEQ ID NO: 228014 - DNA, 75 bp, Homo sapiens
aaggtgtactgcaaggaacaaaatgtttgtaaattctccttttaccaaggagaatttgcagccttcaagtagcca

SEQ ID NO: 228015 - DNA, 100 bp, Homo sapiens
ggcaaaccctggtcctcctggatcgacgccgccaaattacactgctccgacaatgtggacgagtgctcactagcagaaaaaacctgtgtgaggaaaaacg

SEQ ID NO: 228016 - DNA, 83 bp, Homo sapiens
gaagctggcgtggcgaggcacgttctgcagctccagtttaaagatctcagaggctgatcagctgaccgaagaacagattgctg

SEQ ID NO: 228017 - DNA, 96 bp, Homo sapiens
tcaagtcgtaaaaacaggtcaagtggttattcttggacagtataattggctttcctatgaagatgtctttgttcgagcctttaattttggaaatgg

SEQ ID NO: 228018 - DNA, 74 bp, Homo sapiens
ggcagagtggaccacggggagccccacgagggactcttgacgtttaggtatgtggccatagaattctctctgga

SEQ ID NO: 228019 - DNA, 50 bp, Homo sapiens
gcgggaaacgctgtttgaagcgggttggatggcaagcatgtggtgtttgg

SEQ ID NO: 228020 - DNA, 90 bp, Homo sapiens
gagatttccttcgtccctgacatcatctctgtgcactgataataaccctgcagctggtgccgacaagaaagccgaggctggggctgggtc

SEQ ID NO: 228021 - DNA, 82 bp, Homo sapiens
ttggatgtggaggggaatagactccatctatccatatgagatgatcatgacgcagtcctgaggtttaatggggcacccacag

SEQ ID NO: 228022 - DNA, 83 bp, Homo sapiens
ccttgatcctctgtctcctggtggtgagatttgatccaggtgaccaagaatatggcccaggtgaccaaagccctggacaaggc

SEQ ID NO: 228023 - DNA, 50 bp, Homo sapiens
ttttttgctgcaatcacaaaatccagaagcttggaagctgtattacagat

SEQ ID NO: 228024 - DNA, 100 bp, Homo sapiens
cgggctgcaggagaagatggcggtctccacagcctctgcagtccttgtccctggctgactcgaaactcaagactgaggtcaccatcatcatcaatgccct

SEQ ID NO: 228025 - DNA, 82 bp, Homo sapiens
agcatggctaagagtgttcagtagaaatgggtatttacctcctgagtgttttgtagttggaaaagagccaccaaagatttcc

SEQ ID NO: 228026 - DNA, 100 bp, Homo sapiens
cactgtgtctggcatgttagtaaacatgtttcataggaaggattacggccaggagatacaaccagcactttctgtggtactcctaattacattgctcctg

SEQ ID NO: 228027 - DNA, 101 bp, Homo sapiens
aaaagacaaggaagatgagctgtcctttcaggaaggagccattatttatgtcatcaagaagaatgacgatgaattttttgcagataacctgggtgattttc

SEQ ID NO: 228028 - DNA, 50 bp, Homo sapiens
tttgaccacaacatcagccctactattggctctccggtgtcatgaggagc

SEQ ID NO: 228029 - DNA, 100 bp, Homo sapiens
gagagtgacatgcagttggatggcggtgactgcgtggtgtcgtgaaaactacccctaaaagccaaaatgggaaaggaaaagactcatatcaacattgtcg

SEQ ID NO: 228030 - DNA, 105 bp, Homo sapiens
ggtcccaatcccccactctttccgccctaatggaggtctccagtttcggggcctttacaacaactaaacggacaggcattccagccccacgggaattttcagtaa

SEQ ID NO: 228031 - DNA, 50 bp, Homo sapiens
cccaaacaccctggagacgaattcctatgcacccactgggcctatgtaat

SEQ ID NO: 228032 - DNA, 100 bp, Homo sapiens
cggggacccagaccctggagcctcagttggaagcagccgatccagcctgcggagcctgtggggcaggtatctctaagggacagcagtctggaggctgacc

SEQ ID NO: 228033 - DNA, 134 bp, Homo sapiens
tagagtgggctctgacccagtgcttatgcggaaacacagacgccatgatttgcctttagaaggagctaaggtatcattgcccagtgcctaagatcttttatgttcagctcactgtaggaaataatgaatttttt

SEQ ID NO: 228034 - DNA, 74 bp, Homo sapiens
attgaagaaaaactaagactcacatctacaagcaatgaactgtggaagatagatgataagcctgtaaaaattga

SEQ ID NO: 228035 - DNA, 93 bp, Homo sapiens
caggaggtgaagaaagcagagcacgtagcaaggattgtcacttcttcacgaacgatcctggatgcaaatgaagaatttaagtccatgtcgggc

SEQ ID NO: 228036 - DNA, 100 bp, Homo sapiens
aagatgttcctgctccttctacatctgcagataaagtggagaggaattggattcaagtacgtggctctgggagacctcatcatcctcatcacttttggcc

SEQ ID NO: 228037 - DNA, 90 bp, Homo sapiens
gagagtctgagtgcagccaccacctttgagcctcttgagcctgtgaaggacactgacattcagggtctttttggagttcctgagctgagt

SEQ ID NO: 228038 - DNA, 87 bp, Homo sapiens
ctgcaggctacctcaggggccgtccccaggacactgtccggatcttccctccctgtcagtcaagaacaatacccaagtgctcatcaa

SEQ ID NO: 228039 - DNA, 90 bp, Homo sapiens
cggcggtcggggccgaggcgcgaggagctgctctgttaaaagcgaaaatgaaacaattgcctgcggcaacagttcgactcctttcaagtt

SEQ ID NO: 228040 - DNA, 100 bp, Homo sapiens
tgcaagtccaagaggaggaggaggcggaggtccaagcggaaaggtttgctgaaaagcccagtgaacaagacagccctgacactgattgctgtgagttcct

SEQ ID NO: 228041 - DNA, 82 bp, Homo sapiens
gacgcggacatggtcatgagctttgtgaacctggggtgagaactctgtctcagtcgacgggaagtgcagtgactccacgcta

SEQ ID NO: 228042 - DNA, 101 bp, Homo sapiens
attcgctaaatttgaggaagaacgcgccagagcaaaatgggacacagagccgacacccgcactgccaggatccaagatgcagggctggtgttggcagacac

SEQ ID NO: 228043 - DNA, 82 bp, Homo sapiens
tcagttggaagcagccgatccagcctgcggagcctgtggggcaggtaaatccatttcggatggccactcgtggcatgttccc

SEQ ID NO: 228044 - DNA, 88 bp, Homo sapiens
cttctccattgtcgagtgggccaggagtagtatcttcttcagagaacttaaggttcaaaccttgtactactcagctgatcacaagctg

SEQ ID NO: 228045 - DNA, 90 bp, Homo sapiens
cagaacctgagaaagtagagactgaagttgggatatctaaagcagaagccttagaaactctgcaaattatcagaagagaatgtctcacaa

SEQ ID NO: 228046 - DNA, 100 bp, Homo sapiens
ccgacatggaacagggactcactgggggtgagcctgaatttaaatacattgggaatatgcatgggaatgaggctgttggacgagaactgctcattttctt

SEQ ID NO: 228047 - DNA, 74 bp, Homo sapiens
gcgctggggggcagaggagcggagttgaggcagaagccaggctattgagggcacctacattgacaagaaatgcc

SEQ ID NO: 228048 - DNA, 77 bp, Homo sapiens
gaaaatgaagagtttgttgaagtgggaagattggggccttctgattattttgaaaccaatagagccatggcgactcc

SEQ ID NO: 228049 - DNA, 75 bp, Homo sapiens
tagtgagaaatgaacttcaactggttgatcttccaacaggacctggaagccggcgagagagacccctgtctgcaa

SEQ ID NO: 228050 - DNA, 50 bp, Homo sapiens
attccagttaccgtccatctcaaaagttccaaaggatggcctcaaaagcc

SEQ ID NO: 228051 - DNA, 82 bp, Homo sapiens
aggacatcatgcgcctccgggagaagtcctcctcgactggattaatgacgtgctggtggaggagaggatcattgtgaagcag

SEQ ID NO: 228052 - DNA, 76 bp, Homo sapiens
caagacttggttaaagtcattgaggactttccagcaaagtatcctagaaggaaaacatcaccatggctacagaaat

SEQ ID NO: 228053 - DNA, 142 bp, Homo sapiens
aaatcactcactgcatacggcctcaggacatcaaggagcgccgagcagtcatcatcctcaggaagagaccctcctgttcttaactgtgggcgatgagaaaggtggtggactcttcttactggcagggccacctgcgtctgtg

SEQ ID NO: 228054 - DNA, 75 bp, Homo sapiens
atgacattgatgtggccaaggtcaacaccctgattcgtcaagctgtattagtcgacaggaccatttacatttcag

SEQ ID NO: 228055 - DNA, 83 bp, Homo sapiens
cggcagagcaaggggcttacgcagaaggacctggccacggccagaagcggactcctagaagaggggagcagcaaggatggaat

SEQ ID NO: 228056 - DNA, 100 bp, Homo sapiens
ctccaccaagcatcccattacagatagaagaggactataagacctacttggactttgtccttgcattagaaaacagaaaggaacctgcagctctacaata

SEQ ID NO: 228057 - DNA, 109 bp, Homo sapiens
aagagtcataggattagatgatccaagtcaccaagaaattactgtctcaagtgatacgctctagaggacaaaatcccagtccttggcacaaactcaggaaatggaagcc

SEQ ID NO: 228058 - DNA, 100 bp, Homo sapiens
tagtagccacggtgtggcagctgctctgaaccaggacctggacccggacccaaagtgccatgtctttaatgtactactgagcgagtgtgcttgatccagg

SEQ ID NO: 228059 - DNA, 90 bp, Homo sapiens
ccgaccttctgaacaaggccaacacctatgcagatgcctgtgaggagccaccaacatttgaagctatggagctcattggtaaaccaaaac

SEQ ID NO: 228060 - DNA, 75 bp, Homo sapiens
ttcgacacctaccgctgcgaccgcaacctggccatgggcgtgaacctcaccaggaggatttgacagctaaggata

SEQ ID NO: 228061 - DNA, 100 bp, Homo sapiens
tatttaaatgcaggagcaggaggaattgctggtgccttcattcatgaaaagcatgcccatacgattaaacctgcttcatttgatgaatacagttcagaac

SEQ ID NO: 228062 - DNA, 102 bp, Homo sapiens
tttgactactggggccagggaaccctggtcaccgtctcctcagttacagaatgtctgaaggggacagtgtgggagaatccgtccatgggaaaccttcggtgg

SEQ ID NO: 228063 - DNA, 83 bp, Homo sapiens
tgaccaccaccctcgtgtctgccaccatcttcgacttgagcgaagttttatgcaaggcactacaagggcccccagggatggag

SEQ ID NO: 228064 - DNA, 98 bp, Homo sapiens
cccggtttccctcggcgtgctactgtgcgctcgatccagcaccatggggaagcgggacaatcgggtggtaattgctctagcagatgcagtggaggaaa

SEQ ID NO: 228065 - DNA, 83 bp, Homo sapiens
cttcgaccttggacttctcagcctccagaatgcaaaatgatgcttcaacacccaggccaggtctctgcctcggaagtgagtgc

SEQ ID NO: 228066 - DNA, 50 bp, Homo sapiens
ataacccttgatcctcctcctaattgcagaattaaggaagttcactggag

SEQ ID NO: 228067 - DNA, 97 bp, Homo sapiens
cttgattgatatatatgctgacgaggagttcaaccaggattactacagcatcccatttcccacacccactactccgctgactgggagggatggtagc

SEQ ID NO: 228068 - DNA, 100 bp, Homo sapiens
cagcgagcggcgcggagctggacgccgcgatcgtggggcccgcgaggcgggcagccggggcgtccagattctgaggttgggaccaagaaggaactatcta

SEQ ID NO: 228069 - DNA, 75 bp, Homo sapiens
acagtgccaagttagatgccgattacccacttcgagtcctttattgtggagactgctgcagtaagaatgtctttt

SEQ ID NO: 228070 - DNA, 123 bp, Homo sapiens
gctggacggaccgcccaaccccaaaagagccaaactcagctcgcccggtttctcggcgaatgacagcacagcttggcggagaaccagatcagtaacaaaggggccaaagctctggccagatcc

SEQ ID NO: 228071 - DNA, 83 bp, Homo sapiens
tcaaccaccaaagtgggaaacattgaaatcaagactatcatagaactctctgaagagcgggatggtctccattttctacccca

SEQ ID NO: 228072 - DNA, 100 bp, Homo sapiens
ggcgctctggctgtgctgcgcgacccccgcgcatggtcacagctctcatcaagctgaaggagtgtgaggatacccaccttggggaggaggtggataggaa

SEQ ID NO: 228073 - DNA, 96 bp, Homo sapiens
tttccttccagaaatgatggtggatcattgctctttgaattccagtcccgtgaatggatgtatatggctacctactggcacgagaagggcggctag

SEQ ID NO: 228074 - DNA, 82 bp, Homo sapiens
atagaaaaacttctttcacatggtacaaatattgaagaatgcagcaagacccttcgcaggtgttacagtcgggtgaaagaac

SEQ ID NO: 228075 - DNA, 74 bp, Homo sapiens
tccattagctgctgtcatcaagccctttgccaccattccttcaaatgaggagctgaccagtgctttggtgcatc

SEQ ID NO: 228076 - DNA, 100 bp, Homo sapiens
cacatactcagcagagtcctgctctgggcccagagtgtctaggttcaaatactgcctctatacctttgagtggcccaccctcaggaccctcaccacccat

SEQ ID NO: 228077 - DNA, 83 bp, Homo sapiens
gcgccttgatcgagtacttgagagacgtctcccacaacctgctccgggcgctggacgttgggctcctggcgaacctctcggcg

SEQ ID NO: 228078 - DNA, 76 bp, Homo sapiens
ggaggccaggaagaaggttctcaaacaagtctgaacagcagaagaagcaacaggaggctgagaaactgcatcgaca

SEQ ID NO: 228079 - DNA, 80 bp, Homo sapiens
gcgccgtccgtgcccgcgggacctgacagccgggtcagaggtgtcgtgaaaactacccctaaaagccaaaatgggaaagg

SEQ ID NO: 228080 - DNA, 100 bp, Homo sapiens
cgtcaatcagagcgtcctgtgcggttggtcaaagaaaaagtgatgtatgaaaaagaggcaaaacaacaagaagaaaagattgaaaaaatgagagctgaag

SEQ ID NO: 228081 - DNA, 75 bp, Homo sapiens
cgaggtgtacaccgaggaggacgccgtgtcctacgtcaggaagaggtcctcaaagagggcagcgggctgttccca

SEQ ID NO: 228082 - DNA, 125 bp, Homo sapiens
caagtttcaagatgtttcttgataattggaatattcagacagctctttggctcaaaaggacacttaccgaagaaggcagatgcagaggaccatcactcgccagatgtcctttgatcttacaaaac

SEQ ID NO: 228083 - DNA, 100 bp, Homo sapiens
tccgaggtgccaccgtggaaggacagaatgtggccctcatggagcacagcaactgctcgtcggagcccggcttctgggcacaccctcctggggcccaggc

SEQ ID NO: 228084 - DNA, 100 bp, Homo sapiens
aattgaaaggaaccactcattcacttctagacgacaaaatgcaaaaaaggaggccaaagactttgtgaagaaagccctgtgtgtcctcgtccaacataac

SEQ ID NO: 228085 - DNA, 100 bp, Homo sapiens
ggctgtgctggccgccatcctgcagctgggcaacatctgcttctcctcctcagaggaatgggtaccacagaccatgtcatcgtcctggcgtccacgaacc

SEQ ID NO: 228086 - DNA, 88 bp, Homo sapiens
gctgttcttatcaatgcactgggcactttcgattccttctttccaggctctaggaattctccactttaccaatacttacaggatctgg

SEQ ID NO: 228087 - DNA, 101 bp, Homo sapiens
cctgcgctccaagtccatgacagctgagctcgaggaacttgagccagtgccctccctgacctccatccaggtgctggagaattcgatgtccatcacctccc

SEQ ID NO: 228088 - DNA, 82 bp, Homo sapiens
gaatgacctccatccgcaggacgagaaaatatatcgctatcgtctcctatgagcaacgccagaattataaggatgacttcaa

SEQ ID NO: 228089 - DNA, 82 bp, Homo sapiens
tttgaccgcgctaagatggcgactcccatgcatcggctaatagcccggagacaagcgtaaacggagtcttgctctgtcgccc

SEQ ID NO: 228090 - DNA, 51 bp, Homo sapiens
cccaggaaccccgcacagccacaccaagcttaccactcttctctcatggat

SEQ ID NO: 228091 - DNA, 100 bp, Homo sapiens
cccatctatggctgcttaatttgcatttgctggtctggcctttgcgtccttctacctggcagggaagttacactgcttcacaccacaaggccgtgggaaa

SEQ ID NO: 228092 - DNA, 83 bp, Homo sapiens
gcccccccttccccacgcaaccccagatccatttacactttacaatcctggtggacctctcaaaccccggtggccggcctgcc

SEQ ID NO: 228093 - DNA, 100 bp, Homo sapiens
ggcgcctccgctgcagtcgctgcgtctccaagcttccccgggcgctgcctggacaggcctgcctgcgtgctgggacatgtctggcctccaaggaccgtcg

SEQ ID NO: 228094 - DNA, 78 bp, Homo sapiens
gccacttttcacttctgctgcactgctttcagcatgcaaacgatcctgaagatcctcgtctccgggggcggcaagtca

SEQ ID NO: 228095 - DNA, 74 bp, Homo sapiens
atcgctctcggcctccgacacgggaacaagcccaggaccatttccagtctgtggccagccagagctaccgcccc

SEQ ID NO: 228096 - DNA, 100 bp, Homo sapiens
cagatgtccaaaaagactcctgactgctgagatgaagataaaacgttacctgcagagtcgggatgtacaatagaggatcacgtaattgcaggaaatgtag

SEQ ID NO: 228097 - DNA, 80 bp, Homo sapiens
cgacgtcttgcctgtgtcccacttgttcgcggcctataggcatggaagaggagatggttcgtgttacgcagtggccgttt

SEQ ID NO: 228098 - DNA, 50 bp, Homo sapiens
gaactcgtgagccggattgatgtgttgttaataacagtactggtagtgga

SEQ ID NO: 228099 - DNA, 100 bp, Homo sapiens
cctactcagaagaacttgtacagagatgtgatgttggagaactatagcaatctggttttcttggcaggtattaatctctggagaagacacatccacagtt

SEQ ID NO: 228100 - DNA, 100 bp, Homo sapiens
aactgaatgagtttcttactcgggagctggctgaagatggctactctggagttgagaattgaagacgtaccacctcccactaaaaagctaactccagaat

SEQ ID NO: 228101 - DNA, 75 bp, Homo sapiens
agagaatgctgccctccggcggcggctggaggccctgctggctgaaaaatatgaacagggattcatcacagaccc

SEQ ID NO: 228102 - DNA, 100 bp, Homo sapiens
cctacgtgcatgaagatggacgaggtcctgtacagcatcgccgagaagagcagtcattatggcgaaccttggctgctggatgctggttctctttgtggcc

SEQ ID NO: 228103 - DNA, 74 bp, Homo sapiens
tgcctcagcctcccgagtggctgggactacaggcccgcaccgccgccatgatgtgcgaggtgatgcccaccatc

SEQ ID NO: 228104 - DNA, 89 bp, Homo sapiens
gtcagagtccaaggtccgggtatcttaccaggttttgctgggcctgcgtgatactagcgattccattgtggcaattactctgcatagcc

SEQ ID NO: 228105 - DNA, 75 bp, Homo sapiens
gactgcaccctgcacggctttgtgcacggaggtcactgcagccagaggggtccagaagagagaggaggcactgcc

SEQ ID NO: 228106 - DNA, 98 bp, Homo sapiens
gcgcgccttgtcactggagtgcaagaagaaattcccacctgtcaaagagttgtctatcaacgtctatgactacaactgccatgtggacttgatcagac

SEQ ID NO: 228107 - DNA, 100 bp, Homo sapiens
aatacaagggcctcagggccggctaccactgcggctactgcgattccaaggagggcaaagcgtcctgcgcgccatcatgaccgggtcctataacaacttc

SEQ ID NO: 228108 - DNA, 90 bp, Homo sapiens
tgcagagttggtgtcttttaaacatcctcatgttgcaaacccacgacttcaatggtcctttggcgtgctcctctgggagctgatgacaag

SEQ ID NO: 228109 - DNA, 83 bp, Homo sapiens
gtttcatcctggtttatagcctggttaatcaacagtcttttcaggctgttcctgattcgatctgcttgcatctcttctaactt

SEQ ID NO: 228110 - DNA, 140 bp, Homo sapiens
gaggtggatctgacagatgccagcgtagctgaatccagtaccaaaaacgtcaacaacagttttacggatggcttaaattccttggtccttgatttagattttcctgctttgaggaaaaacaagaacatagataatttctt

SEQ ID NO: 228111 - DNA, 100 bp, Homo sapiens
ttacactgagaggtcttgttcttccagccaggagtggtggctcacacctgtaatcccagctctgggaggccaaggccagtggattgcttgagcccaggag

SEQ ID NO: 228112 - DNA, 100 bp, Homo sapiens
ctgcggtacctgcactccaaaggtgtatttcaccgcgacctcacatccaagcaagccacccgaggggactgcctggccttccagatgcgagctgggttgc

SEQ ID NO: 228113 - DNA, 75 bp, Homo sapiens
ctacttcaaagggtactttttagaaccaaaggagacggtggctcagggagtaaaggaaggccagttgagcaaaca

SEQ ID NO: 228114 - DNA, 100 bp, Homo sapiens
tctgggacagctctactgacggaaaaactagaccagacctctgttatcttctgtgaaatcatcctacaagcaaactaacctggaatcccttcacctagag

SEQ ID NO: 228115 - DNA, 101 bp, Homo sapiens
tggtgggttccatgtgatggtggagtaggaggcaggtctccgcgaccttcacggcatggtgcaactcccacctgcggaaggcaggcacacagatcgagaac

SEQ ID NO: 228116 - DNA, 100 bp, Homo sapiens
gcagagtgaagagaaaatagcaaacgatccagacggcagggagtgcatcaaaggtgtgaacacagacatagggcctgattacattccaacagaggaagaa

SEQ ID NO: 228117 - DNA, 121 bp, Homo sapiens
gtgaagctgcagatctgggacacagcggggcaggagcgcttccgcaccatcacctccacacaatgcagatcttcgtgaagactctgactggtaagaccatcaccctcgaggttgagcccag

SEQ ID NO: 228118 - DNA, 95 bp, Homo sapiens
tcagaaggtgccctctttgcaacatttcaggaaaacagagaaagaagtgataggagggctctgtaggttagctttatacgtctacgaatatttac

SEQ ID NO: 228119 - DNA, 83 bp, Homo sapiens
ttaattaatgctgatcccttcaactctgaaccagaaaccctttatctccagaagaagaagagaaaaggagaatccgaagggaa

SEQ ID NO: 228120 - DNA, 80 bp, Homo sapiens
ccaggagcaccgccgaggactccagcacaccgaggatcgcgctagcgagcttttatgaggacggaggggatgaagacatt

SEQ ID NO: 228121 - DNA, 75 bp, Homo sapiens
catggcggagctgacggtggaggttcgcggctctaacggggctttctacaaggtgctggagaatctggtaaaagc

SEQ ID NO: 228122 - DNA, 50 bp, Homo sapiens
gagaattccgcagcccacacgatcactactggttacaacctggaagatga

SEQ ID NO: 228123 - DNA, 77 bp, Homo sapiens
accagtacctgcccaggaaactggcacagaaaactgaatctgtagataacgagggagaatgaattgtcatgaaaaat

SEQ ID NO: 228124 - DNA, 98 bp, Homo sapiens
ttccccgtcggcccccacccagagttcctgccatcaagaagccaaccttgagaaggacaggaaagagacgagttgtactgctgtcacaggaaatggac

SEQ ID NO: 228125 - DNA, 74 bp, Homo sapiens
ttcgataaaggttcactttttggaggctctgtaaaactggtgatgtcttggcattgcccattttcaagcaggaa

SEQ ID NO: 228126 - DNA, 82 bp, Homo sapiens
ccacggcctaaaccgcccagcggtatcagaagcatgtgcacacgtatcgcattctgcctgatggagaagatttcttggctgt

SEQ ID NO: 228127 - DNA, 74 bp, Homo sapiens
gcacattataccttttaggacctatgttattaggaactgtggctgcaccatctgtcttcatcttcccgccatct

SEQ ID NO: 228128 - DNA, 101 bp, Homo sapiens
agaaaatagcagccaggaaccaagaaaacttggaatatgatgaagaatgggctaagaaaattcagagtgaaaagtttcgctggcataactctcagtggctg

SEQ ID NO: 228129 - DNA, 75 bp, Homo sapiens
ggcagaggcagctggaccgagctgcggctgctgtgggtatcctacagcttcttcagtcaagaacatcccgaaaat

SEQ ID NO: 228130 - DNA, 152 bp, Homo sapiens
ctccgccgagcccaccgccttcgacatccaggatctcagccatgtgaccctgcccttctaccccaagagcccacagaaacttggatttaactggccagaagcaggtattcaaagcagagaacaatccctgggtgacccccattgcagaccag

SEQ ID NO: 228131 - DNA, 75 bp, Homo sapiens
ggccatcaagggtttccgcaatgcccctgttgtgtcctgaaggcagtggaccacatcaactccaccatcgcgcca

SEQ ID NO: 228132 - DNA, 150 bp, Homo sapiens
ctgatggcaactgtatgatagaagctatataaagtcaagtgtccattttctttcaactatatttgagcatacccagaaatcttgcagcagctccaccagcagctggttgaagctgaacgtaggtcagtgacatacctcaaacggtacaat

SEQ ID NO: 228133 - DNA, 90 bp, Homo sapiens
acttgcagcagacatgtacaactttatggccaaagaaggggagtatggcaaattctttgttacgatggagtctcactctgtcgcccaggc

SEQ ID NO: 228134 - DNA, 90 bp, Homo sapiens
cagacagcggcgccttcctgctgctcttcctgctcgtgctcactgtcaccgagccgctgcggccagagcgcatcagcgaggaggtggggc

SEQ ID NO: 228135 - DNA, 100 bp, Homo sapiens
cgaagacggaccgtgccgggaagagctgcatatctatgtgagactgaattttcctcttagacttcagctaaaactgtgtattgcatcaggctgagagcag

SEQ ID NO: 228136 - DNA, 51 bp, Homo sapiens
gcacgatgccctttgacttcaggaggccaccagcccctcgggttccaagat

SEQ ID NO: 228137 - DNA, 100 bp, Homo sapiens
gtggaaactaggcataaggaagaatgtctcatgttcgagtctggggctgtcgctgtgctctattagaaatgatatttgccaaatttgatgaagtgcaaag

SEQ ID NO: 228138 - DNA, 73 bp, Homo sapiens
gatgagcctgcagagcgcgcagtacctccggattggtggaactccacgtcatactccaactattatagaacct

SEQ ID NO: 228139 - DNA, 78 bp, Homo sapiens
acggcgaggaggagtgtcctgatggctccgatgagtccgaggccacttgcagtgaagaacaaattggttttgagctag

SEQ ID NO: 228140 - DNA, 74 bp, Homo sapiens
cggccgcgaccccggccccggcctcggccgtggcgagcggccttagattgtaagcaaaagaaatcaaggtcaag

SEQ ID NO: 228141 - DNA, 101 bp, Homo sapiens
ggatttggtactggagtgatgagtttggttcttggcaggaatatggaagacagtacaaaattggacagctgtacatgatcagcaaacacagccatgaacag

SEQ ID NO: 228142 - DNA, 90 bp, Homo sapiens
aagcagctggctaaccagaccgtgggcagacaatgcagatcttcgtgaagactctgactggtaagaccatcaccctcgaggttgagccca

SEQ ID NO: 228143 - DNA, 100 bp, Homo sapiens
ggcccccggaaaacctaaccatgaagacttgaacttaatacagcaagaaagaccatcaagtttaccagtcaatgtgacggtggactacattagaccagcc

SEQ ID NO: 228144 - DNA, 74 bp, Homo sapiens
ttttgtgaagccaagatcaagacagcaaaaagacttgtcaaagtcaagacaccagttggcgctccgaggcaacc

SEQ ID NO: 228145 - DNA, 75 bp, Homo sapiens
cagagaagtgcccgaggagagttaacagggaagacaaaggcgctttggctaagctggtggaagctatcaggacca

SEQ ID NO: 228146 - DNA, 110 bp, Homo sapiens
ccaaagcagtcgtaagaagaggtcccaatcccccactctttccgccctaatggaggtctccagtttcgctgtgtattcttattacaaccaaggcattttaccagagcaag

SEQ ID NO: 228147 - DNA, 75 bp, Homo sapiens
agaaaagacagtgttctgctttcatggagttcacagaagagtcgaggagtgacgagtagcacagcccctctatgg

SEQ ID NO: 228148 - DNA, 74 bp, Homo sapiens
tggagctctaaaattaaacatcggggacctacaggttacaaaggaaacacatgctgatctgtggccagccaaac

SEQ ID NO: 228149 - DNA, 111 bp, Homo sapiens
tatctgtcttcggtggactccttcggcagtccacccaccgccgccgcctcccaggagccttcacgtaaatgggtccagtcatgcctcccagtaagaagccagaaagctcag

SEQ ID NO: 228150 - DNA, 76 bp, Homo sapiens
gaggaaggaaatggcttctggagtgaataccaggattgatgatctccaaatgggccatgctatgatagtggaagct

SEQ ID NO: 228151 - DNA, 76 bp, Homo sapiens
tcaccgttctgcccccagaactagtgagcaagaagaacccatcaggtgattgtcaggcctctgagcccaagctaag

SEQ ID NO: 228152 - DNA, 101 bp, Homo sapiens
atacacctcccacctgtcctcaggcatatcaaaggctactgcagcactggggtgtcagttgttggtccgacccagaacgcttcagttctgctctgcaagga

SEQ ID NO: 228153 - DNA, 100 bp, Homo sapiens
ccgcgcgcagggcctgcagcgggagctggacggcgagcgcgagcggcgcgagaaaattggtttatcttggaagctaaagggcattgctcatcctgaagat

SEQ ID NO: 228154 - DNA, 100 bp, Homo sapiens
cgggacccggttccccggcccacagtgggggtgtgcaaacccgagagaactggaaatgagtcacaggtcatcagattttgccaagattattaacaataca

SEQ ID NO: 228155 - DNA, 83 bp, Homo sapiens
ggaagaccgcgcgcagggcctgcagcgggagctggacggcgagcgcgagcggcgcgagaaacctcagtcaccttctgctgaac

SEQ ID NO: 228156 - DNA, 75 bp, Homo sapiens
gtgaagaacatcatccagtggcagacactgaaaataagtgtcacagatttatcagagcattgagttttctcgttt

SEQ ID NO: 228157 - DNA, 83 bp, Homo sapiens
cgcttcgccccgggccccccagcatgaagaccccggcggacacaggttttgagcaaaattttggactgtgaagcaaggcattg

SEQ ID NO: 228158 - DNA, 143 bp, Homo sapiens
tcccaagagaagcgggcagcggaaacgcactttgggtttgagactgtgtcggaagaggagaaggggggcaaagccgtttccctggggagatggtaaccatactctattccataaccctcatgtgaatccacttccaactggct

SEQ ID NO: 228159 - DNA, 75 bp, Homo sapiens
gagtcaacagactgagcgcgtccaggcctgacagctctgcggctcgggccctgagctatggggtgctactttggg

SEQ ID NO: 228160 - DNA, 100 bp, Homo sapiens
cgacgacatgtatgggccagaaaaggacccctatggtgtagccgtgggtggaactgtggggcactgcctgtgcacgggattggcagtaattggaggaaga

SEQ ID NO: 228161 - DNA, 97 bp, Homo sapiens
attgaaattacctccgagggaaacaagaaaacatcaaagaggtctagcaaagagtaacagttacccctcaatgagcgacccctacctgtccagctat

SEQ ID NO: 228162 - DNA, 50 bp, Homo sapiens
gaagccccagcccgcagccctcgggggttgttcctcaaagtcattcaagc

SEQ ID NO: 228163 - DNA, 100 bp, Homo sapiens
ccaagagagaccttggagtaattcgtcgacaggtctgcgcaggcatggcactaagtgtcccatggcacatttggccctcatggaggcctcaaaagggcag

SEQ ID NO: 228164 - DNA, 80 bp, Homo sapiens
atccggtcctggtccctgctggttggagccttcacgtaaatgggtccagtcatgcctcccagtaagaagccagaaagctc

SEQ ID NO: 228165 - DNA, 83 bp, Homo sapiens
gggaggaagctgggacacccgggagtcaggaaatgcaggaggccactgtctgcagctcccgtgaagatgtccactccagaccc

SEQ ID NO: 228166 - DNA, 82 bp, Homo sapiens
cgccagcccgtgccgcgagcgcggcctgcaggaggtaagtaaggaggtctctgtaccatggctcgtacaaagcagactgccc

SEQ ID NO: 228167 - DNA, 100 bp, Homo sapiens
gacaagaaaagctgtggcaaccgaaatgagactccctcagatccagtgataattgacaggtctcccactccaaagagcaaacgtaaatctaaggacaaaa

SEQ ID NO: 228168 - DNA, 80 bp, Homo sapiens
aacgcccccaatttcccagctgctaaaggaagaggaagcctcttcgagcactactgctactcccggggcggcatgcgcca

SEQ ID NO: 228169 - DNA, 98 bp, Homo sapiens
tgaagcagaaaggagtgatgaatcagcccatggcttacgctgcacttccatcccacggtcaggagaatgcagttgaaactaattttgtggatagagaa

SEQ ID NO: 228170 - DNA, 106 bp, Homo sapiens
ctggctgtgctgcgcggcccccgcgcatggtttcccaggcagctgcagacttgaaacagttctgtctgcagaatgctcaacatgaccctctgctgactggagtatc

SEQ ID NO: 228171 - DNA, 75 bp, Homo sapiens
atcgaccccatcgacggcacctgcaattttgtgcacaggagcaagtgttcctgctgccagttctttcctctttag

SEQ ID NO: 228172 - DNA, 89 bp, Homo sapiens
aactggtcagagtggacagattgctttccgtgccaggacaaaaagtcagccatcgctcccagccccaacagccttcccagccccagcgg

SEQ ID NO: 228173 - DNA, 132 bp, Homo sapiens
atgagcacttacttggttgctttcattgtgggagagatgaagaacctgagtcaggacgtaaatggaaccctgggaaattcacctcttctatagaagagtttgttttgaactatacgatttgaaacaaaattc

SEQ ID NO: 228174 - DNA, 74 bp, Homo sapiens
gaagatggcgcctgttgtgacaggtttctcttcagcaacgggtagcagaattggaaaaaattaatgcagaattt

SEQ ID NO: 228175 - DNA, 88 bp, Homo sapiens
ctacctggctccatgaagatgccacagggatcctaaaatctctttctaaaaccaatttttccaacaacaacgatttccgtgctcttct

SEQ ID NO: 228176 - DNA, 83 bp, Homo sapiens
ggcggacagtgcggaactaaaggtgctgctggtgagtagcagccggtacccagaccagtggattgtcccaggaggaggaatgg

SEQ ID NO: 228177 - DNA, 82 bp, Homo sapiens
ctgaaagaagctacctgcaagctctatttttaccagatgctcttggctgtgcagtcgtcctccagaggagcgtcccccgggg

SEQ ID NO: 228178 - DNA, 82 bp, Homo sapiens
ccgatgtggactcagccactttgctgcactgaccactacgagttccagggagctctgtcctggtgaccgtgcccgggttatg

SEQ ID NO: 228179 - DNA, 73 bp, Homo sapiens
cggcaggctgagaaaagcgagaccgcgtgcgaggaccgggatcttcattgccttgctgctgcgctttgacatc

SEQ ID NO: 228180 - DNA, 82 bp, Homo sapiens
agaaacaggcaacatttggacacatctcttaggatatggagcctagtagatcatgcattaatagcaaggtgtaatatggaag

SEQ ID NO: 228181 - DNA, 76 bp, Homo sapiens
gggaaagccgtctacactctcacctatggtgcgcccacctcgtccacatgttgttaagagaccaaagagcaacatc

SEQ ID NO: 228182 - DNA, 83 bp, Homo sapiens
tcgctggagcgggcggagctgtgcgagagcctcctcacttggttgatattcactgatggactccaaagaatcattaactcctg

SEQ ID NO: 228183 - DNA, 100 bp, Homo sapiens
atgaaccaccgagtccctgcccacaagaggtaccagcccacagagtatgaacatgcggccaactgtgccacccatgctgatggcctggtgggaatccaac

SEQ ID NO: 228184 - DNA, 75 bp, Homo sapiens
ctgcccctattgtaagtgcagatggaacacaacaggcgacagaaggctagagagaggcagcagaaattgcttgcg

SEQ ID NO: 228185 - DNA, 100 bp, Homo sapiens
tttagccctaggaggtgggcaggctctgaggaatcatcaatcaagagaagagaacatcgccagaaacacattccaaaggttttcctaaaaatataaccaa

SEQ ID NO: 228186 - DNA, 82 bp, Homo sapiens
gggcaccgaggaccagctcaatgacagggggtggcccgattctacaggtcacggaaaaagcacttgatcaccacccagacag

SEQ ID NO: 228187 - DNA, 121 bp, Homo sapiens
gtgttaaaggaacctctacaacgaaggtgaagccacggaagataaggatgatcacggacgtgcagctcgccatcttcgccaacatgctgggcgtgtcgctcttcttgcttgtcgttctcta

SEQ ID NO: 228188 - DNA, 75 bp, Homo sapiens
cacctgcctgaggaagatatttcctggcctctctccagttgttgacctaaccaatgaagaaacaactgattccac

SEQ ID NO: 228189 - DNA, 100 bp, Homo sapiens
aaaccttattctggccaacagtgttaagtataatgaccagaggaagagtcttcatcatcctccagtgatgaagatgaggatgataggaaacagattgatg

SEQ ID NO: 228190 - DNA, 90 bp, Homo sapiens
gaggaggatgatctccagatacactcggaaggcggtgccacagagcttggagctgatcatggggttgacagcagcattttccagaatcct

SEQ ID NO: 228191 - DNA, 75 bp, Homo sapiens
ggagagagtgttgctggtatcactgcaatatctggcaagccgggtgacaagtttttcagaaactttggaattggc

SEQ ID NO: 228192 - DNA, 110 bp, Homo sapiens
gaattcccagagttcgaggtggtgggactcaccgctctggccagggtgcttttggaaaccacggatgataccatcggggaccttaagaagctgattgcagcccaaactgg

SEQ ID NO: 228193 - DNA, 100 bp, Homo sapiens
atattcccaagtccttcacccggggtgtgattaggcccactgggggatacgctgtcatgctacactggtcaatgtcttccatatacggacttcaacccgg

SEQ ID NO: 228194 - DNA, 100 bp, Homo sapiens
gagcctgttgatgcccgccctgctgccgaccgaggactgaccactcgaccagaccacaggcggagcagcagcagccggagccaggactctgcggaggggc

SEQ ID NO: 228195 - DNA, 88 bp, Homo sapiens
ccggaaacttccactttgcccctgggaagagcttccagcagtcccatgtgcacgcctttgacgacccctatgccctggtggtgctggc

SEQ ID NO: 228196 - DNA, 51 bp, Homo sapiens
ataattcacttactctgtgtagtctctggaatctgttctgcgccacccggc

SEQ ID NO: 228197 - DNA, 89 bp, Homo sapiens
aggtgatcatcatggacacagttttgacagtaattcttttgggccgagttgatctctctaatgtattagatcttcatgcctttgatagt

SEQ ID NO: 228198 - DNA, 99 bp, Homo sapiens
agaatacagagagaaaattgagacggagctaagagatatctgcaatgatgtactgataccgagtggcaatctgggtatgtttggcaatagtggagcagc

SEQ ID NO: 228199 - DNA, 83 bp, Homo sapiens
ggaagacagccacacggctgacattagctcccactttcaagaagcaatagacttcattgggctcagagagaacagattgagaa

SEQ ID NO: 228200 - DNA, 95 bp, Homo sapiens
gaaggtgtgcatggatctgccaaattttatatttcagatttgtggaagatctgggacatgagcgatgatgagaccatctgagatggccccgctgt

SEQ ID NO: 228201 - DNA, 100 bp, Homo sapiens
aatcaggttgtcaaaccgcaggcatttcaatcacattatggacccagatgatgtggtaccagttggccaaagaagagcctggtgttggtgcatgtgcttt

SEQ ID NO: 228202 - DNA, 80 bp, Homo sapiens
tgattctacatctcaagctcatattttgaagtgtttacggacttatgcagagatggaccccaccacagcagccttggaga

SEQ ID NO: 228203 - DNA, 98 bp, Homo sapiens
aaagcctgaagaccccggagcccctttagccatgtggatacctacggagcacgagaaatacggcgtgggtatagacacgtgtggccgtttacgctgta

SEQ ID NO: 228204 - DNA, 75 bp, Homo sapiens
ggatcgctgtgatcgtcacttggtgaaattgctcaaataatggagcaaggtgacctctcagtgagagatgctgcc

SEQ ID NO: 228205 - DNA, 82 bp, Homo sapiens
cctggcactgcgcttcttcaaaggcaccccagctaccatgtcccagatagccaaggatgtgtgcaccttcctgcgctgggca

SEQ ID NO: 228206 - DNA, 100 bp, Homo sapiens
atggcgttgtcgatgccgctgaatgggctgaaggaggaggacaaagagcccctcatcgagctcttcgtcaaggctatggtgaactaaacggtaatgctgg

SEQ ID NO: 228207 - DNA, 100 bp, Homo sapiens
gagatcaagtggcagcaggagctgagctgggaggaggctgcccggcgcctggaggtggccatgtaccccttcaagaagtcccatgaagctgaggtcttga

SEQ ID NO: 228208 - DNA, 103 bp, Homo sapiens
ggaggggaaacacaaagccggctacgcgctgcgagaaaaggtcacggatcgcctacagtgacgaagtacggaatgagctcctgggggatgatgggaattcctc

SEQ ID NO: 228209 - DNA, 82 bp, Homo sapiens
gtcaagaagaggaggaagccatgcgtagggaggctctgtcggtggtgagcgacgaccagtccctctttgactcagcgtacgg

SEQ ID NO: 228210 - DNA, 83 bp, Homo sapiens
gcggattaaagctaaagacatagttcctggtgatattgtagaaattgctggaactgtggctgcaccatctgtcttcatcttcc

SEQ ID NO: 228211 - DNA, 87 bp, Homo sapiens
aagtcgagtatctggtgaagtggaaaggatggcccccaaacatgcttttcacttccactgcatctctcgctggctcaaaacacgaca

SEQ ID NO: 228212 - DNA, 100 bp, Homo sapiens
gagcgcgctgtggaaagacaggccaatccggggcaaggaatacggtgaggcttcgagctctgaggaagagcctccatccccagatgataaagagaaccag

SEQ ID NO: 228213 - DNA, 83 bp, Homo sapiens
cagctccagagcgacgggaaacgaaagagttcaagctgaagaagatgtggaaaagtcccaatggaactatccggaacatcctg

SEQ ID NO: 228214 - DNA, 100 bp, Homo sapiens
gggcggtggaagctgccaaggtgggggctttggcatctctcattcgatccgtggcctccttctccatctacaggcaagaaataatggcggcagctacggg

SEQ ID NO: 228215 - DNA, 100 bp, Homo sapiens
agaaaatcacctcgtttaatggcacaagtactatactggcaattgctggagaagattttgcaattgttgcttctgatactcgattgagtgaagggttttc

SEQ ID NO: 228216 - DNA, 75 bp, Homo sapiens
ccgccatggccgagccggcttcgatcttagcaaagcaatgtctcaagatggtgcttctcagttccaagaagtcat

SEQ ID NO: 228217 - DNA, 100 bp, Homo sapiens
tggtgctatctttgagcttggacctcggggaattaggccagcgggagccctaggggcccggaccttgctcctggacacacacctcctctacgtactggca

SEQ ID NO: 228218 - DNA, 75 bp, Homo sapiens
tcttgcctcaggccagtcgcctccaggccaagagggatccttcacccgtgtctgaacaccttccaccatgaccac

SEQ ID NO: 228219 - DNA, 100 bp, Homo sapiens
ccgcgaggcgggcagccggggcgtccaggagcaatttacagcaatgagggatttatacatgaaaaatggacaaggatttgcattagtttattccatcaca

SEQ ID NO: 228220 - DNA, 124 bp, Homo sapiens
ctgcgcatacacaatcccgggcatgggcggcaactctttgatgtactactataatgggaaagcggtgtgggccatgtttgaggattgccccagcattcagttctatgagtaataaatatccaca

SEQ ID NO: 228221 - DNA, 75 bp, Homo sapiens
actcagaccggtctctgcaagagatctagtgaaaagccatttgatgtatgcggtcagagaagaagtggaggtcct

SEQ ID NO: 228222 - DNA, 90 bp, Homo sapiens
gaccaggggggcggcagcgctggacacccagcctccagtgtgtcccggcatggatatccggaacaacctcactaggttgcatgagctgga

SEQ ID NO: 228223 - DNA, 83 bp, Homo sapiens
agaaaccccgttgacaaggcactgctttttcatgacggagcatcagatccatgctgctgctgactcggagccccacagcttgg

SEQ ID NO: 228224 - DNA, 82 bp, Homo sapiens
agaagcatgttagttcgacatcatcatcttttcttgaagtaagactgtgccaaaatcccaaacttcagttgaaaaatagccc

SEQ ID NO: 228225 - DNA, 52 bp, Homo sapiens
gccaacgccccggtggagaagctgagcctcaggctatggcccaccttcctct

SEQ ID NO: 228226 - DNA, 100 bp, Homo sapiens
actttgggcctggtcccgccaagctgccgcactcaagacgaggtcttgctacgttgcccaggtcggtcacgaactcctggcctcaagtgatcctcccacc

SEQ ID NO: 228227 - DNA, 100 bp, Homo sapiens
cgaagctgaaaatagatagcaatccttttgccaaaggattccgggattcctccaggctcactgacattgagagtggtggtgaccgcggtggcttcaaaaa

SEQ ID NO: 228228 - DNA, 97 bp, Homo sapiens
aagatctaccttctggaagctactactacgtggtgcttggaaaggtgttcagcacttactccaacgaggattacgatcgtcgcaacgaggatgtgga

SEQ ID NO: 228229 - DNA, 75 bp, Homo sapiens
ctgaagtcaaaggagcaattgctggtcctgagcctgagccatgtgaagatgtgcttgcttcccctttgccttctg

SEQ ID NO: 228230 - DNA, 90 bp, Homo sapiens
cttcaagcttaggaccacccaccatgcctatccagaccatcatggagcagttcaaccctagcctccggaacttcatcgccatggggaaga

SEQ ID NO: 228231 - DNA, 75 bp, Homo sapiens
ggaatgttttaattcttcggaaataccaagtggtctctatttcaggtatgctgctgaaagtgggaatcctctaca

SEQ ID NO: 228232 - DNA, 83 bp, Homo sapiens
ccgccggcccgcgggtctacttcctcaaaggaaatgcttgacatcatgaagtccatctatgacatgatgggcaagtacacgta

SEQ ID NO: 228233 - DNA, 76 bp, Homo sapiens
tgacaacttcggtcgtggaggaaacttcagtggtcgtggcaactttggctttggggattcacgtggtggcggtgga

SEQ ID NO: 228234 - DNA, 75 bp, Homo sapiens
tcctagcggcgcggcgctcgctcctacggatttaagtgccctgtatgctcaaaatttgtatcctcagatgaaatg

SEQ ID NO: 228235 - DNA, 100 bp, Homo sapiens
ccgactgctgcctggtctgcaaagaagtcctttcaagtctctaggactggactcttcctaagcaagtccggtgtctgacttccagcaactgctggcctgt

SEQ ID NO: 228236 - DNA, 83 bp, Homo sapiens
cgccgctccgccgcccgcaggctccggcttccgtcccggacagagcccgtggtcgcgcaggtatcacctcttctgggctcaag

SEQ ID NO: 228237 - DNA, 98 bp, Homo sapiens
ggatcatccagaagcatctgaagaccatggatcacaaccggaaccgcaggggaccttggtagctaatgtccgaagaaagtgactctctgagaaccagc

SEQ ID NO: 228238 - DNA, 75 bp, Homo sapiens
aacaattgagatggcttcaaaggataaatccagcaaaaagaatgtatttgaggaacaagagtttgttcagaaaca

SEQ ID NO: 228239 - DNA, 100 bp, Homo sapiens
ccgaccgcaacacgtgcgctggataaacgcttgttaactggcgcaaaggactgctgattgcgtgtctgtgtcatgacctggaccacaggggcttcagtaa

SEQ ID NO: 228240 - DNA, 83 bp, Homo sapiens
accatcgtcaccatgacaacactaggaatccacattcatctcaatggaaggatcctgccttaagtcaacttatttgtttttgc

SEQ ID NO: 228241 - DNA, 75 bp, Homo sapiens
aatgggcaagacctcaggaggaccctgactcatatcaaggaccagaaaggagtgttgaattcaactgaaggcgag

SEQ ID NO: 228242 - DNA, 75 bp, Homo sapiens
ccgaggcctgggacagctaccgcagcatgagcgaaagctacacgctggagcctgccctcaagtatgtgttgtata

SEQ ID NO: 228243 - DNA, 50 bp, Homo sapiens
tacttctggaatccagacagaatggctgtattcatcaccaaagaaaaaac

SEQ ID NO: 228244 - DNA, 75 bp, Homo sapiens
agtgcaggcccttaccactgacatttcactcatctttgcgagaattccagtactaaaggtattggcaagagacag

SEQ ID NO: 228245 - DNA, 90 bp, Homo sapiens
tacaaccatcaatgagatcgaagacactttccgtcttgaaagcgccacaagcagcagctgctgagccatggctgaaggggaaatcaccac

SEQ ID NO: 228246 - DNA, 83 bp, Homo sapiens
agaccatcgaggggtctggacgcacagaacacatcaatgccggatggagtgctgtgatgtgccagccgagacactctacgacg

SEQ ID NO: 228247 - DNA, 100 bp, Homo sapiens
ctcattcctaggcaccagcaagtgtttagcacgaatcagtacttcagtggagtgaaaattccagaccctgaagatatgagacgagttgtactgctgtcac

SEQ ID NO: 228248 - DNA, 100 bp, Homo sapiens
ggcgtcagcagaggggccactgctgggccctgaggctgcaccaagtggcgaaggagccggctccaagtgcactggtgattgctgcggtgtttgaccgaga

SEQ ID NO: 228249 - DNA, 90 bp, Homo sapiens
cagccctgactctgcccagcccagcagcagcaccgaccctagcatcatggagcccacagcatcctcagggcctcatctttgtggtggaca

SEQ ID NO: 228250 - DNA, 78 bp, Homo sapiens
gaagacatggaccagggctacggaggagcatcagatccatgctgctgctgactcggagccccacagcttggcacaggc

SEQ ID NO: 228251 - DNA, 75 bp, Homo sapiens
tgcagctgagcaagcgccaggaaaaagtcatctttgatcaatggggcttggagtacccataatacagtgagccca

SEQ ID NO: 228252 - DNA, 89 bp, Homo sapiens
cggacctgtctgggtctcagccgccaaagaccccgtccggtaggtgccagaaccctgtggagcatcatgaactgggaagagtagctgag

SEQ ID NO: 228253 - DNA, 101 bp, Homo sapiens
ctacaggacctgtctgacgatagtccaaaaactgaagaagatggtggataagcccacccagacagccctgcacctggcagccatcctgggggagacatcca

SEQ ID NO: 228254 - DNA, 100 bp, Homo sapiens
gcctgtaccatgatgtgatgctggagaccttgacacttatatcctccctgggcatagaatgtcaagctaaccaggcgtccgctacttcagaagagtgtac

SEQ ID NO: 228255 - DNA, 82 bp, Homo sapiens
gccctgtcaccatttctttcacaaaccttgtgtctcaatttggctacaaaaggaacatccaatacttgggcaaccctttttt

SEQ ID NO: 228256 - DNA, 97 bp, Homo sapiens
tggggaccgactctggggaccctcgccgaagagctcgaattacatctttacaagaggaggtgaagcatctcaaacataatctcgaaaaagtggaagg

SEQ ID NO: 228257 - DNA, 90 bp, Homo sapiens
gaagccatgatttaaatatcggcgttaaggatcccgctgcacaagttcacgtccatccgccggaccatgtcggaggttgggggctctgtg

SEQ ID NO: 228258 - DNA, 75 bp, Homo sapiens
tgagaccatgaatgacttgctggcccagatcctaagtgtgaacgtgaagtccccagccctgctgctgagccagtt

SEQ ID NO: 228259 - DNA, 82 bp, Homo sapiens
cctgggctttaccatctttgtggctgtgcttgccaggcctggctccaacccaacatgagtgaagtttcctgcaagaaacggg

SEQ ID NO: 228260 - DNA, 83 bp, Homo sapiens
agccactagacagagccgggcctagcccagagacatggagagttgctacaacccaattatgtttgagaccttcaacaccccgg

SEQ ID NO: 228261 - DNA, 100 bp, Homo sapiens
gacgtggactacagtgacgccctcacggagaagcagtggctaaggggcggccaggcggccaggctgcaggaggagtgtgactatgtgcagatgatcgagg

SEQ ID NO: 228262 - DNA, 83 bp, Homo sapiens
ctcagctggtgaagacatgacgaccctggactccaacaacaacacaggagcatcagatccatgctgctgctgactcggagccc

SEQ ID NO: 228263 - DNA, 98 bp, Homo sapiens
cggagcgtgtggatttgagccgccgcattttttaaccctagatctcggcttagagacacagtgaaggccctgactcgggaacaagagaagctccttgg

SEQ ID NO: 228264 - DNA, 100 bp, Homo sapiens
acaaataagttatgctatgaggatgacaaactctggagtaattggagccaagaaatgagtatagattattctatgagccagtcacaacaccttgcgggca

SEQ ID NO: 228265 - DNA, 100 bp, Homo sapiens
aaacatccactccaacccatagaagtgcctcctcttcaacatcctcccaaagggacagtaggcagtcattgaaattatgagactatcattcaaatggaag

SEQ ID NO: 228266 - DNA, 90 bp, Homo sapiens
gccacttgaagaaaagggtgaaggaggcgaattttcagttgatagtgccggtggtggtgtgcacattgagccccggtatagacagttccc

SEQ ID NO: 228267 - DNA, 82 bp, Homo sapiens
cagaggggccactgctgggccctgaggctgcaccaagtggcgaaggagccggctccaaggtgtccctggccagtgtccttcc

SEQ ID NO: 228268 - DNA, 100 bp, Homo sapiens
cggccctctggcgctaccatggcgtttggcaagagtcaccgggatccctacgcgacctccgtgggccacctcataggtggctgtgaaaaacaatatcgat

SEQ ID NO: 228269 - DNA, 83 bp, Homo sapiens
ctgctgctgctgacgctgctgctgcccggcctcgggtgttatccaagataaattctgtgggattataaacatttcagtagaag

SEQ ID NO: 228270 - DNA, 100 bp, Homo sapiens
gggtacagaatccaagagatgagagaggacccaacatggggcagaagcttgaaatcctcattaaagatactctcggtgtttggatggactggtgaactag

SEQ ID NO: 228271 - DNA, 50 bp, Homo sapiens
gaaggcgctgcgcaagcacgctgaggagcggctatgtgactacgtttgtg

SEQ ID NO: 228272 - DNA, 113 bp, Homo sapiens
cccaggcaccaccacttgcgtcccctttagatctatggcccggtgcgggtcgggggtcccgtgtgcatgttggaagctgtgtactgtgggtgttacccactttgtcctaaaga

SEQ ID NO: 228273 - DNA, 74 bp, Homo sapiens
tgttcattgtttgtcaccacaaaaaggacagatcaagtcccagcagagcgaggtgacccgaatcctggatggga

SEQ ID NO: 228274 - DNA, 100 bp, Homo sapiens
ggctcatccacaccaagaatcagccacagacggaacaagcatgcagcaaagccttctagacaagctcagtggaatctgaagggcccaccccatggaggaa

SEQ ID NO: 228275 - DNA, 100 bp, Homo sapiens
caagggagcagcaggagagacagcgagaagagcttctgtctcgaaccttcaccactaactccacattcttgagtctgatgacctccacggccagcgaggc

SEQ ID NO: 228276 - DNA, 82 bp, Homo sapiens
gtaagaagaggtcccaatcccccactctttccgccctaatggaggtctccagtttcgggactttgaacatgtcggggatcgc

SEQ ID NO: 228277 - DNA, 100 bp, Homo sapiens
ctttgctgcaagatcgaggctgtcctctggtgagaaggtggtgaggcttcccgtcatattccaggatcagttcgacagcttagacaagcatacacaatgg

SEQ ID NO: 228278 - DNA, 49 bp, Homo sapiens
gccttttcatatcctcagaaacagataatgtggatgcaaatgatcttaa

SEQ ID NO: 228279 - DNA, 100 bp, Homo sapiens
tctgtgccacctgccaagaccagcaggcagcctgcttctgcaaagtggtacgatcgaagggactatgtcttcattgaattttgtgttgaagacagtaagg

SEQ ID NO: 228280 - DNA, 75 bp, Homo sapiens
cacccggggagctgactccattgcatgtgggaccttcagccgtgaactggtatccgcccccagatcatgaacggc

SEQ ID NO: 228281 - DNA, 100 bp, Homo sapiens
cagcctccaggcccagtgccaggagaacccccatcaaaggaagacagtgtggagcagataagaattcctctgtggggtggcgttctcatcaccattgcag

SEQ ID NO: 228282 - DNA, 98 bp, Homo sapiens
aactgcacttaaaaaaaacctggagaaaattagcagacagtctagttgatgacagtgcaattttggattgccagttcagtgagttttatcatacgcct

SEQ ID NO: 228283 - DNA, 97 bp, Homo sapiens
cgctgagcgaaagagaggcctcccggctcgacaagttcaagcagctgcttgccggccccaacacggaccttgtggtaagcatccgtggcattcaaga

SEQ ID NO: 228284 - DNA, 82 bp, Homo sapiens
gattttgttattttctgccctgaaccagggcagaagcttatgggagcatttagtgggtggaaggttattttacatgtggatc

SEQ ID NO: 228285 - DNA, 100 bp, Homo sapiens
tttccttcgtacccacagtgcttcatgagaggcactcaaggagttgcccctggtcctgtaattggacttcaggcaccatctactggtcttcttggcgccc

SEQ ID NO: 228286 - DNA, 90 bp, Homo sapiens
cgtgcgccgtggcgcggcccggctgacagtgtcagaaatttggagaatatcataaagatgacccaagttccttcagattttcagaaactt

SEQ ID NO: 228287 - DNA, 75 bp, Homo sapiens
agtacgggatccccttcagccggatcattgagaagcagccaggccacattcggagcagggttttcagggaggtgg

SEQ ID NO: 228288 - DNA, 100 bp, Homo sapiens
accaccggtccctggccccggccccggccccggtcccggccctggcccgggcaggtacatgtcccagagcaagcacacggaggcccgggagctcatgtac

SEQ ID NO: 228289 - DNA, 75 bp, Homo sapiens
accccacccccatgaaagccgacacttcccacgactcccgagacatcactgattgtccctgggaagagccccacg

SEQ ID NO: 228290 - DNA, 82 bp, Homo sapiens
cctcctctccgccctagcgctgaggcttgggcactgtttaaaggaaagttccgagaaggcatcgacaagccggaccctccca

SEQ ID NO: 228291 - DNA, 75 bp, Homo sapiens
ggaatattggtgggccagcaatcctcagacgcctcacttaggacaatattcccacgagcattctgctgagatgaa

SEQ ID NO: 228292 - DNA, 98 bp, Homo sapiens
aaggagaagagctatggacacagagaatttttccaagttacagctacctaggaactgttgacattcagggatgtgaccatagaattctctctggagga

SEQ ID NO: 228293 - DNA, 100 bp, Homo sapiens
caagcgaagccttgaaaaagctgccctgagacggtgtcccgccgaaagccagagactgctgctactttgaaacgtacgatagaggccctgatggacagag

SEQ ID NO: 228294 - DNA, 87 bp, Homo sapiens
tgaccactggatgctctatgaatgcgagagcccctgggccgtctctagtgatccctgaaaagttccagcatattttgcgagtactca

SEQ ID NO: 228295 - DNA, 82 bp, Homo sapiens
cccaggcctgctcggccctcacagggacctccgggagaagaactggaaggccatggaggcactggccacggccgagcaggcc

SEQ ID NO: 228296 - DNA, 48 bp, Homo sapiens
gaaggactagacccagatcttcttgaactaaatgtgttaaatgggctt

SEQ ID NO: 228297 - DNA, 90 bp, Homo sapiens
cagattcagaaggagcaggattaccaaaggtaaaggcatgacttcctggcaccacagggaaaatcgggtgcaagcccagaaactatttcc

SEQ ID NO: 228298 - DNA, 93 bp, Homo sapiens
gttaaggattccaagtaactcttatttgcagtcctgcgttaactgcggccgggaggctatgagcgagtgcaccggctgccacaaggtcaacta

SEQ ID NO: 228299 - DNA, 83 bp, Homo sapiens
tggctggccaagttactggagccgatgtcatcagaagattgagagaaagaggagaaccaatcagactatttggagagactgat

SEQ ID NO: 228300 - DNA, 99 bp, Homo sapiens
aactgagtagtctgaaagcgactgtttctgctcctactacaacactggacacagagatagcatggatttacagaggtttaaagaaacatcaaacaagat

SEQ ID NO: 228301 - DNA, 100 bp, Homo sapiens
gtccaggcgggcctcccgtttctggctccgggctgagcttcctggagaagaggaagccttgccaacattccactaacccccgagactcagcgggaccagg

SEQ ID NO: 228302 - DNA, 82 bp, Homo sapiens
tcgagaactgccttgtcccagacttatggatccgttacagtcagtacctagcagaagctcctcctggggtagagacagatct

SEQ ID NO: 228303 - DNA, 51 bp, Homo sapiens
gcctcctgttcttacccacctaagctatcagttgagggatttgcagttgat

SEQ ID NO: 228304 - DNA, 99 bp, Homo sapiens
tgagaaattggatcttacacttgaaatacagactgttggggaacaagaggtggcgtgtgacgagcatggctcccggggtttcggctttgtccattttga

SEQ ID NO: 228305 - DNA, 97 bp, Homo sapiens
ccaagacaggggtgggttccagctgcccgcacgccccgaccttccatcgtaggttcggggtgagggcactggcgtgctgggctcattatccctgccc

SEQ ID NO: 228306 - DNA, 80 bp, Homo sapiens
ctccaggatttctgaagactattgtggaagaagcatccattaagaaatcctaagtaatgcactgaagagaggagagatca

SEQ ID NO: 228307 - DNA, 98 bp, Homo sapiens
gtgcttgatatcacagaggaaactctgcattctcgcttcctggagggagctgagcacataacgacttacacgttcaatactcacaaagcccagcatac

SEQ ID NO: 228308 - DNA, 82 bp, Homo sapiens
cctgtcttcagatcttcacagcacagttcctgggaaggtggagccaccagcctctccttggagccttcacgtaaatgggtcc

SEQ ID NO: 228309 - DNA, 97 bp, Homo sapiens
gaaaagtggaatcggagctgttgtattacctgggatccaagaaaacattcttggccaaaatctaggggaagttactgccacttcgtactatataagg

SEQ ID NO: 228310 - DNA, 74 bp, Homo sapiens
cagaactacaggatctgctgtgtcaggccaagctggttatattctgggcactaaatgaaggcgtttctaggcaa

SEQ ID NO: 228311 - DNA, 90 bp, Homo sapiens
tgggggctgtgctgggtgtcttctccctcgccagctggaaggtagaagatagcaccatgccgattcgtcgaactgtgaattctacccggg

SEQ ID NO: 228312 - DNA, 75 bp, Homo sapiens
cgactgagtactcaacatattgactgtatttgggctgcagcacaggatgctgaaaacgccattcaacagatgggt

SEQ ID NO: 228313 - DNA, 100 bp, Homo sapiens
agtagtgtgtgctttaactcaagaagaatcttcagcccagttatcaaatgaagaggacatggatttgattgacatactttggaggcaagatatagatctt

SEQ ID NO: 228314 - DNA, 50 bp, Homo sapiens
agtgtaccactgtggatgaagcagacttcattagaggggtggtagactcg

SEQ ID NO: 228315 - DNA, 101 bp, Homo sapiens
ccgcacccaggccttctcgcgctgcctggtcgctggtgaagcccgcggcgcgcgcctctcccggaccctgcagggtgagcagtaggtcatccagtcccagt

SEQ ID NO: 228316 - DNA, 100 bp, Homo sapiens
ctgggacacacctccattggatttaaaagacagtcctcgtcagcactgactttcagctatggaatcgccgcagggccgtaggcagccatggcgcccagcc

SEQ ID NO: 228317 - DNA, 90 bp, Homo sapiens
cccgagtggatcggggacggagagaacacgagcccatcaggagatctataaggacaggcagaaattctcagaacaggttttcaaagtggc

SEQ ID NO: 228318 - DNA, 82 bp, Homo sapiens
cagctggcgcagcccacgctcatgatcgacttcctcacccgcgcctgcgacctcggcgatcagtgggtgaccgcggctgcga

SEQ ID NO: 228319 - DNA, 100 bp, Homo sapiens
aagtttcccttttgcaaggagaaaattttggtggagaattatccaacaagaaaaagacctgtggctattaagatagtttgtgaaagagacagacaatgaa

SEQ ID NO: 228320 - DNA, 101 bp, Homo sapiens
gggcgagaggtgccaagggagcttctgtcccgaggaccaggggatgcgaaggtgattcgcctttgccagtctcatctcgtgtctgctttgttaagttccat

SEQ ID NO: 228321 - DNA, 101 bp, Homo sapiens
actacctgtacaacgtgctggagagaccccgcggctgggcgttcatctaccacgctttcgtgtggttctgctgggcatggacatcctgtccgccctggtga

SEQ ID NO: 228322 - DNA, 100 bp, Homo sapiens
ctattggaggagatgttccagccttacagctccagtatgaccattgtaaggtgacactgtttatggaccgtaagagctgaccgctgtctgaaggcttgcc

SEQ ID NO: 228323 - DNA, 75 bp, Homo sapiens
ggagccccaggcttctatccaggtgcaagccctacagaatttgggacctacgctcctggcctgcgcggcttccgg

SEQ ID NO: 228324 - DNA, 101 bp, Homo sapiens
aaccatgttatgctgaaccatctctatgcattgtccattaaggtggataaattagatgcttcagaatcactgagaaaagaagaagaacaagctacagagac

SEQ ID NO: 228325 - DNA, 75 bp, Homo sapiens
cgagagcgcgaatatcgtcatcgttagaagactacacttgctgctttgaaggatgaagttgtatctgttgaaaat

SEQ ID NO: 228326 - DNA, 80 bp, Homo sapiens
tgctgaccgcgggccctgccctgggctggaacgaccctgcattttgaaagcgaagcagaagccgtagaatcagcggcgag

SEQ ID NO: 228327 - DNA, 100 bp, Homo sapiens
gatccttcagcttctaaaacacgagaatgtggtcaacttgattgagatttgtcgaaccaaaggtcttgaagatgacagagaagtactgcctggaccgagg

SEQ ID NO: 228328 - DNA, 100 bp, Homo sapiens
gccgtgcttcctgttaagcctgtgaaacttgatgtccttgcattgcccatttttaagcaagaagagtcgagtttgcctcctgataatgagaataaaatcc

SEQ ID NO: 228329 - DNA, 90 bp, Homo sapiens
ctcctgctgctcatcccggtggccgccgcgcaggagcctcccggagctggtgacgccttctgggccccatctgtccttcctcacagcacc

SEQ ID NO: 228330 - DNA, 100 bp, Homo sapiens
gcaggaagaaatactaagggtgccttttaggagaaataaagaggtttctttctcagtcacatatgaaatggatcatggagaagcacatgtccagacagat

SEQ ID NO: 228331 - DNA, 51 bp, Homo sapiens
taagaaactagaatctttctacattcaaaattggtagctggcagtgttgtg

SEQ ID NO: 228332 - DNA, 74 bp, Homo sapiens
agatacagagatgtaagcccatgttgacatcatggacatatgtgagtccatcctggagaggaagcggcatgaca

SEQ ID NO: 228333 - DNA, 100 bp, Homo sapiens
ctgtctcataaaagatagagtgactattaccaattgccttctcatgaactcagtcactgtggaggaaggcgaatagcacccagtcctgcctggcagaaga

SEQ ID NO: 228334 - DNA, 101 bp, Homo sapiens
cattatgaaactgaaggtagccgaggggcagtaaaagcatctactgggggacatcctgttgtgaaggagtaaacatggaagtactaacttcattccagaac

SEQ ID NO: 228335 - DNA, 82 bp, Homo sapiens
agctgggtttcccgggagatcccaggcggtgacagagtggagccatggctagagggaaccttctgaccagcctcatgggctc

SEQ ID NO: 228336 - DNA, 96 bp, Homo sapiens
tgctgttctccttctgtcttcaatgaggctgagaccaagtccacactgatgttcggacagaggtcattgacgagactctggatgttaaggaaatga

SEQ ID NO: 228337 - DNA, 74 bp, Homo sapiens
acccgcggtccccaccgtgcagcggggcatcatcaagatggaagccctcaatctagaagagtagaggtccaaag

SEQ ID NO: 228338 - DNA, 74 bp, Homo sapiens
agggagcggagtaccagcacttcatccagcagtgcacagaaggacagaataacgggctcccagattcacaagcc

SEQ ID NO: 228339 - DNA, 75 bp, Homo sapiens
aaatggcgactgtggcagagttgaaggctggaacttaagagatttgagaacttcataaaatctcgtcctcctttt

SEQ ID NO: 228340 - DNA, 82 bp, Homo sapiens
cggggctgctggtgggccgcgtcgaagacatggaccagggctacggaggatgtgttcgaaatgcgctttgccaagatgccgg

SEQ ID NO: 228341 - DNA, 90 bp, Homo sapiens
gaagtatttgacgaaaatagactggccatggtaggggaggagtgtgtaggtgccatcgtttgcaagttggatatgcacaaaaagatgttc

SEQ ID NO: 228342 - DNA, 101 bp, Homo sapiens
tgtggcctaccaagggagaaactggctgcagcagagcgagtacttcgttccaacatggacatcctgaagccaatcctgaatacagattctgttcatcttgc

SEQ ID NO: 228343 - DNA, 80 bp, Homo sapiens
ccgggtcttccagaaggctgtagaccagagtatcgagaaggaaaatgtttataggaggccttagctgggacactacaaag

SEQ ID NO: 228344 - DNA, 51 bp, Homo sapiens
gccaaacttcaggattatcgacaagcagagagaaatccaagaccagtgact

SEQ ID NO: 228345 - DNA, 90 bp, Homo sapiens
gcatcccattacagatagaagagcttcgccgacacgaggtgaccatctgcaattacgaagcatctgccaacccagcagaccatagggtcc

SEQ ID NO: 228346 - DNA, 83 bp, Homo sapiens
cagataatttggggggacttcatattcagaagtctatataaagaaaatgaaactgaagccgtggtcacgtgacaggacatgta

SEQ ID NO: 228347 - DNA, 82 bp, Homo sapiens
gctggtcctggagtccctggagaaggcggaagtggaggtggctgacgagctgctgggtgagaagccctaccactgcaactgg

SEQ ID NO: 228348 - DNA, 50 bp, Homo sapiens
aaagcaagtgaatacgagtcagaagctgtccccaatctcttcatgctgga

SEQ ID NO: 228349 - DNA, 97 bp, Homo sapiens
aagcgcctggccggggagtacggccgaggagacctcgtcggcgtgatattccaatggagacagttggaaaacctgtacttcagagaaaagaagtttt

SEQ ID NO: 228350 - DNA, 75 bp, Homo sapiens
ggaaacagaggcccctcttgaggactcacagtgtttgagtcctcagaatggttggaatgaccctccagctttgaa

SEQ ID NO: 228351 - DNA, 82 bp, Homo sapiens
agtcatcaagctagtggacatcacggacatccagaagggtttccaggcctgaggtgcccgccctggccccaggagaatgaac

SEQ ID NO: 228352 - DNA, 83 bp, Homo sapiens
agaactgccgtcttctttgcctgcactaatgacctgcctagagctggaacgttacctccagagcgagccctgctatgtttcag

SEQ ID NO: 228353 - DNA, 50 bp, Homo sapiens
gacctctcggacacggtgcaggcagagtgcaaattcacctgcaccagtgg

SEQ ID NO: 228354 - DNA, 85 bp, Homo sapiens
tacctcctgcgaggcctcccgggctccgggaaaactacactggccaggttctttgtgaacttcccctcggccaagcagtacttca

SEQ ID NO: 228355 - DNA, 109 bp, Homo sapiens
gtcgcgctcagcggctatgaccaggtgctccacgaagacgaaaccacgaccagagtctcactgtcgcccaggctgcagtgcagtggtgccatcacgcgtcactgcaacc

SEQ ID NO: 228356 - DNA, 98 bp, Homo sapiens
ggacacacgcagctgggagggcacgaagcccccggcaaagggagttctgggaaatcgttcattcatttacagatgaacagaaaagactcttcttgcag

SEQ ID NO: 228357 - DNA, 100 bp, Homo sapiens
gtaattgttgggctgctggttggcctgaatgtgatcgatgctaatctgtgtgtgaagggagaggatttagactcacaaggaatctcagtctttgaggaga

SEQ ID NO: 228358 - DNA, 100 bp, Homo sapiens
tcagtgattctacatctcaagctcatattttgaagtgtttacggtgaagaaaatgaggcacgaggaattgttaaccaagaccttccaaggcccagctgtt

SEQ ID NO: 228359 - DNA, 100 bp, Homo sapiens
tgcatcttgtagacctcgctggatcagaaagacagaagaaaaccaaggctgaaggggatcgtctaaaagagggatttttcagaatgaacaaattaaaaga

SEQ ID NO: 228360 - DNA, 73 bp, Homo sapiens
cagcttcaagcttaggaccacccaccatgcctatccaggttctgccggagacttccatttggcctcaatgtga

SEQ ID NO: 228361 - DNA, 90 bp, Homo sapiens
acgaggcacagcgtttcttgcaagaatgggaggttaccccacagcctatccagcagctgcccctgcctacaatcccagcctgtaccccac

SEQ ID NO: 228362 - DNA, 100 bp, Homo sapiens
gcaagaaagaccatcaagtttaccaggccgttgctccagggagaactgcaaatatcttcatccacccccacatttaaaaacgcagttggagataaatgga

SEQ ID NO: 228363 - DNA, 100 bp, Homo sapiens
tccagcaaagtggtgcccagcaattcaggatgagagtgcgatggggaatccaacagaattctggaaaaaccatatggcatagttgaaaagaagtccagaa

SEQ ID NO: 228364 - DNA, 82 bp, Homo sapiens
cccaggtgtaagcgcagaaagcaggcgaacccgcggcgcaataacgatgcagcagcttttttatgagaattacgagcagaac

SEQ ID NO: 228365 - DNA, 100 bp, Homo sapiens
agctttctggatgatgtaaaccttattctggccaacagtgttaagtataatgagccctatgagtttgtctctctggaatggctgcaaaagtggttggatg

SEQ ID NO: 228366 - DNA, 75 bp, Homo sapiens
cgctggagtccgcgcctccctgggccataaaattttgagtagaaaaatccagaaatttgaaaatcagtatcgtgg

SEQ ID NO: 228367 - DNA, 74 bp, Homo sapiens
caaaggccagtgactaccaacgtttggaccagaagcagtcctgcgttaactgcggccgggaggctatgagcgag

SEQ ID NO: 228368 - DNA, 100 bp, Homo sapiens
agcacctaggattaaattggtttcctaagattggtccaaaggaagattttttccattgtttgaaatgtaacttatgcctagctatgaatcttcaaggaag

SEQ ID NO: 228369 - DNA, 100 bp, Homo sapiens
caaagccgtaggccactacaacgtggctatcccctctgacgtctcccacttccgcttccatgggtgacaagaaagtcatctgcaacaagttcatccagac

SEQ ID NO: 228370 - DNA, 88 bp, Homo sapiens
gcctgcctttagcaacgatgtcatccgcaagaggcactaccgcatcggcctgaacctcttcaacaattctcagcacagatattctaca

SEQ ID NO: 228371 - DNA, 75 bp, Homo sapiens
tccagaaagactcactgctcacagctgcccagctgaaagccaagcctggtatcgccagccttaaggtgtctggag

SEQ ID NO: 228372 - DNA, 108 bp, Homo sapiens
gtctatgtcagcacgcagaaggtttgaggagcattgcttctcatacagtaagaatctctaggactgcgtagtaaagtgctgaggaaaattgaagagctcaggaccaag

SEQ ID NO: 228373 - DNA, 82 bp, Homo sapiens
aaaagatatcgaggatttagccggaagagaggtgtgggaaatggaactggatagactcaagaatcaggatggcgaaataaat

SEQ ID NO: 228374 - DNA, 75 bp, Homo sapiens
accgcaactctcagttcgagagtaaagatctattaatgagatgaagcggttggaagaaatgtcaaatatgtttca

SEQ ID NO: 228375 - DNA, 100 bp, Homo sapiens
gtgatgcctgctagccaaaagggtatattgaagcaagtcaaagattacattaaacagtgtagcaaatgccaggagaaactagatcgatcccgtccaatat

SEQ ID NO: 228376 - DNA, 98 bp, Homo sapiens
ggttccagtgctgcgcgcaggccggtcccgcagggggcagggaagggggccggacgggcggagcgagagagcaatgctaagaagacgtttggtttaaa

SEQ ID NO: 228377 - DNA, 90 bp, Homo sapiens
cggaaaaagaacgggcccttggaagtagctggaggtggagccgccaccaaaatgcagattttcgtgaaaacccttacggggaagaccatc

SEQ ID NO: 228378 - DNA, 117 bp, Homo sapiens
cgaagttcagcccagaggagaaactcgctcgccttcagaagacaggtgctggagaatctggtaaaagcaccattgtgaagcagatgaggatcctgcatgttaatgggtttaatggag

SEQ ID NO: 228379 - DNA, 74 bp, Homo sapiens
agaaccatgctcaccgaccctaggagaaggcagagcccccccaggctatgaatgccctgatgcggttgaaccag

SEQ ID NO: 228380 - DNA, 100 bp, Homo sapiens
aagaagaaaccgttcctagggatgcccgcgcccctcggctacgtgccggggctgggccggggacgagccaaactcaggctgtaccttgagcagctcaagc

SEQ ID NO: 228381 - DNA, 75 bp, Homo sapiens
agaagatggacagtttcagtgcattacagattcttgtagacactgtttgggctctgtcatacttgacagatggag

SEQ ID NO: 228382 - DNA, 75 bp, Homo sapiens
tgatggggcagcaagtggccaactatcatggtgaacttacttcagattgtgcgggaccactgggttcatgttctt

SEQ ID NO: 228383 - DNA, 75 bp, Homo sapiens
agacaacccaaccggtatacaatgtgcgattgtgccctgatcggatcagtctcatcaaggagtgtatttcccagt

SEQ ID NO: 228384 - DNA, 50 bp, Homo sapiens
tggagccccagcaccaagtggcacaactgacctgaacccgcggcgggaca

SEQ ID NO: 228385 - DNA, 80 bp, Homo sapiens
accggttggacctaggggaggattacccctctggcaagaagcgtgcggggaccgatggatgccgctcctacgaggactgc

SEQ ID NO: 228386 - DNA, 75 bp, Homo sapiens
cacttcctcactaatatcagggcttattttgctccttgcccgacttgaaggtagaagttccttgaaagaaataga

SEQ ID NO: 228387 - DNA, 82 bp, Homo sapiens
gacggattcatttagagctgcggaacaggacgccctctgattgagacggtttaagcggaagcatcttactgccattgactgc

SEQ ID NO: 228388 - DNA, 83 bp, Homo sapiens
accagcttccagttagtggatatagcacaccatccccagccagcatgtcgggccccaggcctgtggtgctgagcgggccttcg

SEQ ID NO: 228389 - DNA, 78 bp, Homo sapiens
gcagtggtcgcttcttctccttgcatgaccaagtctctaaaataagctcagaaagaagtggaactccaaaaaaacgca

SEQ ID NO: 228390 - DNA, 97 bp, Homo sapiens
agctgggttctattttccctcctcaaactgactttgcagccacggagaggagcgagaacccgagcagcgccatgagcaacactaccgtcgtccccag

SEQ ID NO: 228391 - DNA, 90 bp, Homo sapiens
ccagaaccgtgatggcttcattgacaaggaggacctgcacgacatgctggcctcgctgggtacaccaggggttggaaaaaccacactagg

SEQ ID NO: 228392 - DNA, 100 bp, Homo sapiens
tcccgctgcctaaagaatgattgactcaacacagtcactcctggcggcaaaccaaacaaaaccagagtcatctggggaaaagtaactcgggcccatggaa

SEQ ID NO: 228393 - DNA, 99 bp, Homo sapiens
ttgtgttcgatatatacagagacagtagggagtcagacaaaaagctgggtatatcactccagttcctggaggtgttggccccatgacagtggcaatgct

SEQ ID NO: 228394 - DNA, 98 bp, Homo sapiens
gcgcccagctgccaacaccaaggtatctcagatgaagacatcatcaacattactcttcctactggagtccccattcttctggaattggatgaaaacct

SEQ ID NO: 228395 - DNA, 50 bp, Homo sapiens
cctgaagagggaagacacgcggaaacagcctctgcaatcccagataatgg

SEQ ID NO: 228396 - DNA, 82 bp, Homo sapiens
ccgcgcacttcgtcatgttcttcgcgccctgacagccctcagcgcctttttccaggagaccaacatcccctacagccaccat

SEQ ID NO: 228397 - DNA, 100 bp, Homo sapiens
acctctatgccgacatcgacgccgcctggcaggccctgcgcaccagaaccccaggctggagaagcccgtgctactctccgaatttcctaccaagatccca

SEQ ID NO: 228398 - DNA, 100 bp, Homo sapiens
gaaaggctccatggtcttgcctccttgcagaatcgggaccagtattcacatctgctaagtgatcattttctgccataccaaggtcataattccttccgtg

SEQ ID NO: 228399 - DNA, 98 bp, Homo sapiens
aggaatgggacaagacccatctttatgcaaagccagcgttacagtaatgttccaggtccagtccaggtgcagcagcaaggagaacattctcagagcca

SEQ ID NO: 228400 - DNA, 97 bp, Homo sapiens
ttactcagtctctaaaaagctaagtgagaaagatcagtctaaagaaaaggagaagaaagtgaaaaaaacaattccttcctgggctaccctttctgcc

SEQ ID NO: 228401 - DNA, 90 bp, Homo sapiens
tctcaatgacagtagagggacctcctcccaaagatgattcagtccccgtgggggtggctttggcggccgagggggctttggtgaccgtgg

SEQ ID NO: 228402 - DNA, 97 bp, Homo sapiens
ctcaggagaacgagtcatgttcatgggaaactcaatctgggtgtgaagaacgagtctttgggaacgtggtccacccagggatgtaaaactgtgctta

SEQ ID NO: 228403 - DNA, 82 bp, Homo sapiens
cctgggccgggggctgcagcatgaaacgcttcgttaagggactcaggcagtacgggaagaacttcttcagaattagaaagga

SEQ ID NO: 228404 - DNA, 74 bp, Homo sapiens
ggtgtatcaagtaatggtgcaaagcctgaagtgaaaggtgtagcagtcactcggcctacacccacagcatcgac

SEQ ID NO: 228405 - DNA, 100 bp, Homo sapiens
gatttcctccgcctcttccaaagcgacaagttggatggcttgaggactggtactaaaaggaaacgtgactgggaggccattgccagcagaatggaggatt

SEQ ID NO: 228406 - DNA, 75 bp, Homo sapiens
ccgccgccgccagggcccggactcggacgcgtggtagagcactgacacggctcccgggacctcggcaggatggaa

SEQ ID NO: 228407 - DNA, 119 bp, Homo sapiens
cgagctgagtggttgtgtggtcgcgtctcggaaaccggtagcgcttgcagcatgtacatcgacgccatcagcaacaagcagggcgagctggagaattacgtgtccgacggctacaagac

SEQ ID NO: 228408 - DNA, 100 bp, Homo sapiens
cgcattttggcattgacatttaattttagggtcctttatatagaagggagagtagatgactccaatgatatgtgggaggaccaggaggaggaagaggagg

SEQ ID NO: 228409 - DNA, 50 bp, Homo sapiens
gcctggagctcccagggccgaggtattgacctgatggacatggcttcgga

SEQ ID NO: 228410 - DNA, 50 bp, Homo sapiens
accccgcagcacagccgcgacttcaaggctgctgcactgaataatgattc

SEQ ID NO: 228411 - DNA, 100 bp, Homo sapiens
aggccgggggcgcctgcgactgcggggacagcaacgtgatgcgggagagcggatgcttgctttaaatcgagtaacagcatcgcacccatttatgactgcc

SEQ ID NO: 228412 - DNA, 83 bp, Homo sapiens
gtagccgcagctgcgggtccgggattcccagccatggcagattcctccgggcagcagggtacatgtactgggcagattggggt

SEQ ID NO: 228413 - DNA, 89 bp, Homo sapiens
ctgtcttcggtggactccttcggcagtccacccaccgccgccgcctcccagcagaaaaatatggctcaggagactaaccagaccccggg

SEQ ID NO: 228414 - DNA, 100 bp, Homo sapiens
ggctggaggcggcggagcgcgagagcttcgagcggactcaggcaagtgtcgtggacttcgtactgctaggaagctccgtagtcaccgacgagaccagaag

SEQ ID NO: 228415 - DNA, 83 bp, Homo sapiens
tcaaattggccctgaaaaaagacagagaaactatgggacacagatatgttgaagatgatttcacaaaagttcatcttcattgc

SEQ ID NO: 228416 - DNA, 100 bp, Homo sapiens
tgtccgcaccttcaggattgagacccggaaggcttcaaaggctgtcgcaaggaggaaggccatcaccatcgaggctgagccaagagctgatggcagccgc

SEQ ID NO: 228417 - DNA, 101 bp, Homo sapiens
catcctcatcctcacagtgccgctccgcatggtggtgctcacccgtatcttcaccgaccgagagatgaaatgtgccgctacctgtctgaggaacccgagcc

SEQ ID NO: 228418 - DNA, 75 bp, Homo sapiens
gattgtaaatgcaccaatcagcatgctgtgtctagctcaaggatcatcatgcctagggttcataacataaaaaag

SEQ ID NO: 228419 - DNA, 100 bp, Homo sapiens
acaccttatcacccacacccacacgtgttcaatacacctcccacctgtcctcaggcatatcaaaggcataagatgcacatttttctgctctggagccggg

SEQ ID NO: 228420 - DNA, 75 bp, Homo sapiens
aagcacataaagatcctcataaggaggtattgttgcagcatctggcagtgagactgaggatgaggacagcatgga

SEQ ID NO: 228421 - DNA, 101 bp, Homo sapiens
ctcttcgtaagtatgtcaccccatcagactttgatcaactcaagcaatttctcacctttgacaaacaggaaggcgacatgccaattcatgaacttctcagc

SEQ ID NO: 228422 - DNA, 99 bp, Homo sapiens
cccgcccccgccggggtagagatccggagcgccaccggcaaagaggtgttgcagaacctcggccccaaggacaaggttcatgactacctccgcagcaag

SEQ ID NO: 228423 - DNA, 75 bp, Homo sapiens
cctctcctgatgagatggacatccagagaaggtctctgctggagaaggagctggagtctgtgggcatccgcctca

SEQ ID NO: 228424 - DNA, 80 bp, Homo sapiens
agagacagcagcccagtgcaataaagtgactgagaccgaagatgatagtgatagtgacagcgatgatgatgaagatgatg

SEQ ID NO: 228425 - DNA, 82 bp, Homo sapiens
gcccggccggacccgggcccgagatgaagatctccttcaacgacaaaagcctgcagaccacatttgagtacccttccgagag

SEQ ID NO: 228426 - DNA, 101 bp, Homo sapiens
ccgtggccccctaccaagggcccagcagggacccagaccagaaaggcaaggttcatgcttttatcaagagatctgatgctgaggaagtggattttgcaggt

SEQ ID NO: 228427 - DNA, 90 bp, Homo sapiens
tataccatcttcctatgcatggaaactcattatgagaagtaccttgcagaagccggctggacagctgaaggaagagtggtaggagtgacc

SEQ ID NO: 228428 - DNA, 75 bp, Homo sapiens
gctctccgccgcctggaccaaccacgtcttcctgggctgcaggtactgcccttcctgcaagcagcaccagctggc

SEQ ID NO: 228429 - DNA, 51 bp, Homo sapiens
tagacactttatcaatcactcattcaaagacggtctggaaaatcccgaagc

SEQ ID NO: 228430 - DNA, 100 bp, Homo sapiens
ctttgaaattgtaacaacgtctcgaactttctatgtgcagtggtagcaactgcccttgctaatcaccgtaacctcggctgagaaagaagaggaagcgaaa

SEQ ID NO: 228431 - DNA, 100 bp, Homo sapiens
cctgctcttcactggcattgctgtgctaggaattgtcatgctgaaacggcaaaagtactttgactcaggagactacaacatggccaaagccaagatgaag

SEQ ID NO: 228432 - DNA, 101 bp, Homo sapiens
gagaaataaggacaaaagccaagaggaggacagttcgctacacagcaatgcatcgagtgaaagtaagtgaacacagtctcctgccccttatgctggagcag

SEQ ID NO: 228433 - DNA, 74 bp, Homo sapiens
caggaccctaacgacaggcgcctccggcccatttacggaggatgaagaaggttataacgatggagaggtagatg

SEQ ID NO: 228434 - DNA, 90 bp, Homo sapiens
tcatcaaggtgaacgggcggcccctggagatgattgagccgcgcacgctacagtacaaggcaatttcttgcaaccaccaccgaggccccg

SEQ ID NO: 228435 - DNA, 100 bp, Homo sapiens
gcacccagaggaccaggcggcggacaaattattggattccagcacagtgactcacttattcaagataactgaaaacattggttgtgtgatgaccggaatg

SEQ ID NO: 228436 - DNA, 100 bp, Homo sapiens
cgtcgcccgcccagcctccgcccgagtgtgaacatggctacgcctcttcattcccgtccatgccgagcccccgactgcagcattcaaagcccccacggag

SEQ ID NO: 228437 - DNA, 98 bp, Homo sapiens
tactgctaaaattagtttacgagaggcttattgtgtaacagaacctggagcaggctctgatgtagctggtataaagaccaaagcagaaaagaaaggag

SEQ ID NO: 228438 - DNA, 98 bp, Homo sapiens
cgtgatcccagcgcagagtacctgctctcgagatggcaggagtcgggagctgcggcaactgatggagaaggctgctttgaatgctgcatcaagtgtct

SEQ ID NO: 228439 - DNA, 100 bp, Homo sapiens
caagaagggcttcatcatcaagcagatgaaggaggatggcgcctgtctcttccgggctgtagatgttaatgttcgtgtgtcaagtctcacactcttggga

SEQ ID NO: 228440 - DNA, 95 bp, Homo sapiens
agggagactgcaaatgctattgtcagtcagcaaactccacaaagtgagaaggcaaccaaagtgcaggacatcaaaaacaacctgaaagaggcgat

SEQ ID NO: 228441 - DNA, 75 bp, Homo sapiens
ctcacgagtcgaggtcctgcaggtggagctccggcagccgccctggttttaaaatcaaagatgggaaaatcggag

SEQ ID NO: 228442 - DNA, 101 bp, Homo sapiens
ccacctatacttctgcccggaccctgctggctatcctgcgcctttccactgctctggtcagcccaaggctgccccctcggtcactctgttcccgccctcct

SEQ ID NO: 228443 - DNA, 82 bp, Homo sapiens
agactgtacagcaattggcggggaggaagaaagggaagattttgatactagcattgagagcaaagacacagagcaaaaggaa

SEQ ID NO: 228444 - DNA, 100 bp, Homo sapiens
gacggtcagcttgttaattcctggctgcagataaactttctggtgaccggataaagcaagtcatggagcacatctggaagctgcaggagttctgtaacag

SEQ ID NO: 228445 - DNA, 82 bp, Homo sapiens
cagatcctgtgtcacccggcaactcagaaacatcaggtccaagaatgttgtaccatctttgggtaggcagacttccctgacg

SEQ ID NO: 228446 - DNA, 75 bp, Homo sapiens
acaattctgcagcaaattgggaaaataccgtatgccttttgcttgggcagtaagaataactgaagtgaagtgatg

SEQ ID NO: 228447 - DNA, 90 bp, Homo sapiens
gcagagggcagcctcgccaaggcaaccacagccccagccaccacccgtaacacaggaactgtggctgcaccatctgtcttcatcttcccg

SEQ ID NO: 228448 - DNA, 82 bp, Homo sapiens
ggaatacattctttcatcattaagaaatcaggtggacactatatagcctactgccgaaacaatctaaataatctctggtatg

SEQ ID NO: 228449 - DNA, 58 bp, Homo sapiens
cgcagatccggcagctttccgaaaggtacaattttgtgatgctggccctgtcctcctc

SEQ ID NO: 228450 - DNA, 90 bp, Homo sapiens
cgcttctgtcatctggtggcccccagtccccactccgaggatccacagcagggtctgaattattcaaacgtagtctcatgtctggattgg

SEQ ID NO: 228451 - DNA, 88 bp, Homo sapiens
atagatacatcagtgtgggaagccaagcagatacaagaatctggaaaaccaggggctcatgtaactgtgaagaagctgtttgttggcg

SEQ ID NO: 228452 - DNA, 75 bp, Homo sapiens
gccgtcatgggcgcctcggccgccatggtcttcagcgctattcaggattatgaaactgctcaggaacacaatgaa

SEQ ID NO: 228453 - DNA, 100 bp, Homo sapiens
ccgggccgaggcggcgatgaccgcggccgacagggccatccagcgcttcctgcggaccggggcggccgtcagcctggaagtgactgatttattgctcact

SEQ ID NO: 228454 - DNA, 80 bp, Homo sapiens
agctccagcatcccgtcaggggttgcaggtgtgtgggagcaaaatgatgcttcaacacccaggccaggtctctgcctcgg

SEQ ID NO: 228455 - DNA, 99 bp, Homo sapiens
ccgcgatcgtggggcccgcgaggcgggcagccggggcgtccagacaatgcagatcttcgtgaagactctgactggtaagaccatcaccctcgaggttga

SEQ ID NO: 228456 - DNA, 49 bp, Homo sapiens
gacagatctgagagatactgagattgacgtgagtgaattcagatataac

SEQ ID NO: 228457 - DNA, 98 bp, Homo sapiens
agaaatccgaccggaccgggctcgggggagcgtgagttgcaggctccccacaggtgcaggaagccgccgcccagccatggacggggaggagcagcagc

SEQ ID NO: 228458 - DNA, 99 bp, Homo sapiens
catcctttgacttgaaccaacagttgagactcttcattacccggcacctagctcacttctcctcagaggtcaaaggacgcgagaactcttggaactggg

SEQ ID NO: 228459 - DNA, 96 bp, Homo sapiens
aagaagtccgagacacgcggtgaggcggcgacgggctccgggccctcagtaccgcctggagaagcagagcgagcccaatgtcgccgttgacctgga

SEQ ID NO: 228460 - DNA, 88 bp, Homo sapiens
tgtgcattctctcctgactcttctatgctgtgttcagtcggagccagtaaagcagtaaaggatggtcttaaccagaagccagaaaaag

SEQ ID NO: 228461 - DNA, 101 bp, Homo sapiens
acagctcagaagttccatagaacgggttattaacatatttcagagcaacctctttcaggctttaatagaagcttgagtgcccaagggtttgataaatgtgg

SEQ ID NO: 228462 - DNA, 75 bp, Homo sapiens
gatggtgaagcagatcgagagcaagaaaatgtggacacagacttgccaggcagcctggggcagagtgaagagaag

SEQ ID NO: 228463 - DNA, 76 bp, Homo sapiens
gattttgatgacaagggggagaatcttgctctgcgaacatcaatagatgcttatgacaactttgacaatatctcgc

SEQ ID NO: 228464 - DNA, 50 bp, Homo sapiens
tactaaagaaagagcttgttgcgatcctcctggccaacttcttggcccag

SEQ ID NO: 228465 - DNA, 100 bp, Homo sapiens
atcgaattcgcactgatgaaaatgggctttgtcctgcatgtagaaaggttcatgcatgggagatctcagaccagttgttacagatccggcaggatgtgga

SEQ ID NO: 228466 - DNA, 75 bp, Homo sapiens
cacatataggtggattaactgtctggcaaaggcaggtctctaattaacagaagatggcaaagcccagccacagca

SEQ ID NO: 228467 - DNA, 100 bp, Homo sapiens
gatggatgggatcatggtgacctggaaagacaactttgactccttctacagtgaagtggctgagcttggcaggcccagctactccagacttctatgcttt

SEQ ID NO: 228468 - DNA, 82 bp, Homo sapiens
ggctacggcaccatgtacatgaagacacggcttttccagaaccatccgggtatggctgaaaagagacagtggtcaatactgg

SEQ ID NO: 228469 - DNA, 75 bp, Homo sapiens
gtcaccctgcctcccctgcgtcccgccaccggccgcttctgtcctcgccaaatttgtatcctactgtggggcttc

SEQ ID NO: 228470 - DNA, 51 bp, Homo sapiens
ggcgcactggagtaccctgttcctggcaagttgctggagaatgtaacccta

SEQ ID NO: 228471 - DNA, 100 bp, Homo sapiens
agtctcccttaaaatgcaccctccttccacctggccaggaatcagagaattttctctacatgtgcacccatttaaaggactcggcttcaagggaagcagc

SEQ ID NO: 228472 - DNA, 96 bp, Homo sapiens
atgatattgtgaaaacatctgttccttcaagagaggggcttaagcagatgccttcaattaagttgcagagttctgatggagagatatttgaagttg

SEQ ID NO: 228473 - DNA, 121 bp, Homo sapiens
ttgccagatccggcccggtgcctgggttccaggaggacacgctgcagttggccttcatcgacttgagacaaggttctggcttccagtcgtcgcggagggagaagtatggcaacgtgttcaa

SEQ ID NO: 228474 - DNA, 89 bp, Homo sapiens
ctccgggggcgaacttggcacacagggaggaagggaaaggattgctgacctgcagctgcataaactggatgaactggactgtctgattc

SEQ ID NO: 228475 - DNA, 76 bp, Homo sapiens
caaggctcacttcaacctggatgagagtggcgtgctcagtctagacagggacttatcaaactggtttcaaagcaca

SEQ ID NO: 228476 - DNA, 100 bp, Homo sapiens
agaatgtcctttgtttggtctttctggaatcaatgcaagttcggttcccactgatggctcaggatgttgcttcagagtgtgaagtcaaatgcatgccaac

SEQ ID NO: 228477 - DNA, 83 bp, Homo sapiens
aggagctgtgccgtgccgctcttggggatgtcaactgcttggaccagcatgttcggaagtcccccgagagcgttgctttgatc

SEQ ID NO: 228478 - DNA, 73 bp, Homo sapiens
gcgaggccctcatgtaccacacgggaggtatggaaacattggaacttcaaaaggacatcaaagaagaatcaga

SEQ ID NO: 228479 - DNA, 100 bp, Homo sapiens
tccctatactcgtcctgtcggagacctacagtctttgccatcccggatcaatgtgactctaagaacaaatggatgaatgaatatccatatgaagagaaaa

SEQ ID NO: 228480 - DNA, 109 bp, Homo sapiens
gggaccgccctggacatcaagattaaaagagcgaataaagtttatcacgccgggaagctcattcacacagaagacccatttaatgatgaacatcaggagaggcaagagg

SEQ ID NO: 228481 - DNA, 98 bp, Homo sapiens
ctatatactttggttacctatgtacctgttaccactttcaaaaattcatgttacatgtaaagctgtcctcatttgtgactatggacctatggagttgg

SEQ ID NO: 228482 - DNA, 100 bp, Homo sapiens
ttcaccctgtcacacagccagctccggcagctcacagcgggccagccgctgcagctgcaagatcacttatttgagacatagtcctcaagtggaattatga

SEQ ID NO: 228483 - DNA, 83 bp, Homo sapiens
ggatattacctccaaaaaagacaggggagtattaaagagtctggtccagaatctgttccaccaggatctctttcaaatgtctc

SEQ ID NO: 228484 - DNA, 99 bp, Homo sapiens
cggaaagaagatatgacctatgcagttcgaaaactggataacactaagtttagatctcatgaggtcagacatggctgtgatgccacatgctggggtccg

SEQ ID NO: 228485 - DNA, 101 bp, Homo sapiens
gaccgtgtcttacatcagttcagagagataccatgtttgtgtggaagtgccccgtgtttgctatgccgatgctgtcctagtggaaacaactccactgtaac

SEQ ID NO: 228486 - DNA, 101 bp, Homo sapiens
aatttgctagtaacgtcatggaggatgaacgacagatgagacaccaattattgcggtgatggtggccctgtcctctctgctagtgatcgtgtttattatca

SEQ ID NO: 228487 - DNA, 76 bp, Homo sapiens
cggcaacctgcacctgttcatcaatgcctacaacagcctagtgatcgatacactgaaggaggtagatgaaactcgt

SEQ ID NO: 228488 - DNA, 103 bp, Homo sapiens
ggacagcatccaggcctcattggacagcattcgaggtgctggagaatctggtaaaagcaccattgtgaagcagatgaggatcctgcatgttaatgggtttaat

SEQ ID NO: 228489 - DNA, 103 bp, Homo sapiens
tggctataatgggtatggaggaggacctggaggaagcaattttggaggtggtggaagctacaatgattttgggaattacaacaatcagtcttcaaattttgga

SEQ ID NO: 228490 - DNA, 50 bp, Homo sapiens
gggcctgggagcttgctgcagcttcagccattgagacccagagcagcagt

SEQ ID NO: 228491 - DNA, 98 bp, Homo sapiens
tttcatgcagtgacatgttgataaaaaatgatgatttgataatgggctgcattaaaagtaaagaaaacaaaagtccagccattaaatacagacctgaa

SEQ ID NO: 228492 - DNA, 51 bp, Homo sapiens
tgttaaggattccaagtaactcttatttgattctctttgtggccagatggg

SEQ ID NO: 228493 - DNA, 87 bp, Homo sapiens
agaacagaaccatcctgggctacaagacgctggccgcgggctccatcagcatggctgagactacgtctactttgagaactcctccag

SEQ ID NO: 228494 - DNA, 75 bp, Homo sapiens
agggaacttggcagaaggtgatacaggtggttcagtcaggaggatcagctgatttattcggaggatttgctgact

SEQ ID NO: 228495 - DNA, 100 bp, Homo sapiens
aaaaagtcaccttgtctttccctagtactctgcaaacagcattccaaaatatgcccggtgctatccgcccagctgctcctagaccaccatttagtactat

SEQ ID NO: 228496 - DNA, 100 bp, Homo sapiens
gaactactttgcaaaggccttggagagcccagagcgacccttcctggccatcctgggcgggctaaagaacgtgccaatggaatggagcttgatgggcgta

SEQ ID NO: 228497 - DNA, 75 bp, Homo sapiens
gccctccccgcctctgcgtctttgctcccggagcgcttgaaggagctgcggtgacctgaaaaaaatgtctggatt

SEQ ID NO: 228498 - DNA, 118 bp, Homo sapiens
cgcgcgcgcctcgacctgctgctggagacctggatctcgcgccacaaggagatgctggagatggagctgaagatgctgaagtctcagtccagctctgccgaacagagcttcctgttct

SEQ ID NO: 228499 - DNA, 100 bp, Homo sapiens
gtctgcggggaggcagcggaaggcggcagatggaagaactggagcaaggcctgttgatgcagccatgggcgtggctacagcttgcagagaactccctctt

SEQ ID NO: 228500 - DNA, 90 bp, Homo sapiens
ctcgagttaaagttggatgtgctggaacagatcatagcaatggatcatttaacttgaaagctttgtcaggaagctctggatataagtttg

SEQ ID NO: 228501 - DNA, 83 bp, Homo sapiens
aaccaactggttgaggttcaatgcagacaagacggatgtgatgctggccatccggctgtccttagagcaagccctgcctcctg

SEQ ID NO: 228502 - DNA, 100 bp, Homo sapiens
gttttcttcagaagaaggacttcggaatgcactacaacaggaaaatcatattatagatggagtaaagggaaagatttctggtattaaattataaagacaa

SEQ ID NO: 228503 - DNA, 100 bp, Homo sapiens
cgacatgagtgatgtggaggaaaacaacttcgagggcagagttaaacccatccagagtaatggctgcggccttacccaggaccctgggggagttgcagct

SEQ ID NO: 228504 - DNA, 75 bp, Homo sapiens
tggaacaaccttctttccagtgctaaaggatctctgatctggctagttcttctggagctcaacttcttgccaacc

SEQ ID NO: 228505 - DNA, 75 bp, Homo sapiens
ttagggcgtggcctgaggcttggataagtgggatatctcccggggccaattcagcatctctacctggccatccta

SEQ ID NO: 228506 - DNA, 100 bp, Homo sapiens
tttacagagatcatcctcttcagaaacagtgcagtgccatacttacactgggtactgctggtgtgtcaccccggatgggaagcccatcagtggctcttct

SEQ ID NO: 228507 - DNA, 74 bp, Homo sapiens
gtcggagagctccagtgagtccagctcctctgacagcgaagactccgaaacagcagcctcccgcgacgatgccc

SEQ ID NO: 228508 - DNA, 75 bp, Homo sapiens
ctaactcagcagcaacttaatggaaactaggccatcatctctcagcaaggtgacatatttgtttttgacctggag

SEQ ID NO: 228509 - DNA, 99 bp, Homo sapiens
cgagaccggagcgccgctcgccgcagacttacttccccggctcagcagggaaaggtgttggagcgggccggagagaagtagagtgggctgcgaggagaa

SEQ ID NO: 228510 - DNA, 100 bp, Homo sapiens
ttttgcgggaggaatatgttaaaacaaactcaagatacgaaatgagacttttgaagtgcctttgatttctgggaggcaggtggaagtcatcataaagttt

SEQ ID NO: 228511 - DNA, 101 bp, Homo sapiens
cggtcatctgtatgcataatatggaatgttcttaacccagaagtagctgaatgtgttactccattgctgaggagtggtgcggcggggagagaagtttgttc

SEQ ID NO: 228512 - DNA, 82 bp, Homo sapiens
cttctcaacgcctggaggacgccttatggagccagcatattccaggagcagtgaggagaatgaataccttccaagaccagag

SEQ ID NO: 228513 - DNA, 50 bp, Homo sapiens
ggaagataaactccacatatttctgtgctggagaatctggtaaaagcacc

SEQ ID NO: 228514 - DNA, 100 bp, Homo sapiens
gtcgcgtgtctaggtgagtcgcggtgggtcctcgcttgcagttcagcgaccacgatgccatggacaatattaccaggcagaaccaattctacgataccca

SEQ ID NO: 228515 - DNA, 75 bp, Homo sapiens
ggccaacctcgctcctcggaagcctgactggtacacggctgccccacaccccctgctatctcttgatccccactt

SEQ ID NO: 228516 - DNA, 82 bp, Homo sapiens
caagatggtgaagcagatcgagagcaagtctctgttggatgaacccaatcccaatagtccagcaaacagccaggctgctcag

SEQ ID NO: 228517 - DNA, 100 bp, Homo sapiens
agattttgtggtttatacttacaacaaggaagggactttaatcactgaccatcccaatatacagaggagaattctgcctaagccaactcgaaaaagccgt

SEQ ID NO: 228518 - DNA, 51 bp, Homo sapiens
gggatgctgagcctgcacaagtggaagcataagcttaaatcgtctcagaag

SEQ ID NO: 228519 - DNA, 100 bp, Homo sapiens
ctttactccatgtgtgggacattcattgcggaataacatcggaggagaagcgatgaagaacgatacagatacagggaatatgcagaaagaggttatgagc

SEQ ID NO: 228520 - DNA, 76 bp, Homo sapiens
ctgagagagggaagtcgcctctgtgctcgcttccactgcagccatgtcactcctcttgctggtggtctcagccctt

SEQ ID NO: 228521 - DNA, 74 bp, Homo sapiens
acgagccaaccggcagacccgactgaatgggtgctgttggcccaaaggttgccctgaagccccccatccagagg

SEQ ID NO: 228522 - DNA, 75 bp, Homo sapiens
caggatctaagtcacttccaggagacgtggctcgctgaaggttccagagagattcctggaagttgctcagatcac

SEQ ID NO: 228523 - DNA, 96 bp, Homo sapiens
ttcaaaatcaatgaactgaaagctgaagttgcaaatcacttggctgtcctagagaaacgcgtggaatccctactgccaataaagggaaaataagag

SEQ ID NO: 228524 - DNA, 82 bp, Homo sapiens
gttcttctccgcggcgctccgggcccgggcggctggcctcaccgcccactggcagggaggagagagcgatggcttttttcac

SEQ ID NO: 228525 - DNA, 75 bp, Homo sapiens
gaccgggaaggagcatcccaggacctaccagaatctggttgaattgaccaaagcaatggtgatggagaagcctag

SEQ ID NO: 228526 - DNA, 75 bp, Homo sapiens
aagttggcagacaagttcatccacgcagacatgtgcattgccattgcgatttctcttctcatgatcctgatatgt

SEQ ID NO: 228527 - DNA, 100 bp, Homo sapiens
gcgagagccagggctccaaagaactcggtgatgtgtccaatctagatcccaacttctcatttgaaggcaccaaactggatgtggggaacattgtgctggc

SEQ ID NO: 228528 - DNA, 90 bp, Homo sapiens
gttccatgtttttgacatgagaacacagcatccaaccaaaggttttgcctctgtttcagaaaaggaccctgatgctcccataagacagaa

SEQ ID NO: 228529 - DNA, 90 bp, Homo sapiens
cttctagaggttgcctacattccttggcttgcggacccttcctccatctccagaatcagtaacgccttgaaaagatcttttgaggtcgag

SEQ ID NO: 228530 - DNA, 88 bp, Homo sapiens
cataagcaaaaatacttgcagctccagcaagaaaaagaacaagaactttctaagctaaaagattcttgttggatctagccttggaggg

SEQ ID NO: 228531 - DNA, 75 bp, Homo sapiens
ggctcttacagtgcactcggcaggcagtacccctcttctctatctcccttgagtttagaaatctggctgagaaat

SEQ ID NO: 228532 - DNA, 94 bp, Homo sapiens
gcccttgttcccccaaatgtctgactctgactctcggactgagaaacgcaaggtttggtgcacctcgatttggaggaagtagggcagggccctt

SEQ ID NO: 228533 - DNA, 99 bp, Homo sapiens
cccagaaacgtcactatcaagaaggtgtgatccctcacatccacaaatctctgattggaaagaagggacagcagaaaactgcttagagggatgctttaa

SEQ ID NO: 228534 - DNA, 50 bp, Homo sapiens
cttcattataaagaatttcgaagaaatggaatctatttggaatttgcaga

SEQ ID NO: 228535 - DNA, 83 bp, Homo sapiens
ggccgctgtgtggttgcaacggagataaattcccggaaccgcgattcggcgtgtcaggtcgtttatacgcaatgcagactgga

SEQ ID NO: 228536 - DNA, 90 bp, Homo sapiens
tgcaggtcaatgacaacacgcagggaccccgcgcggccctggaggccaggctgtgggagaccgagtgaaagcaggccaggtgcggtggct

SEQ ID NO: 228537 - DNA, 75 bp, Homo sapiens
agtccgatgaaaggaatgggtctgggaccttaacagggagccatgctcatgccagttactatgggagaatgaatg

SEQ ID NO: 228538 - DNA, 90 bp, Homo sapiens
ctgctattccttgggctgcctttcctgcaggacctggtgttttctgcttcccccgatgccactatcaggatttggtcggtccccaatgcc

SEQ ID NO: 228539 - DNA, 75 bp, Homo sapiens
ggaaatgtcatccgatggcacaatcagtgattacagtggcgagatcttgaacaactgctgcgtcatggagtacca

SEQ ID NO: 228540 - DNA, 82 bp, Homo sapiens
agaaacaaaagttcacctctgcgaagtgtgccgtgcaggtgaagctggagctggggcaccgcgcccaggtgaggaaaaaacc

SEQ ID NO: 228541 - DNA, 107 bp, Homo sapiens
tcagagaccaataaaaataaactgcttgaacatcctttgactggttagccagtttggagctgaatttcgtcggttttcgctggaaagatcaaaacctggaaaatttg

SEQ ID NO: 228542 - DNA, 51 bp, Homo sapiens
gatgcactggataactatgttattcgagcttgaaattttgacaaacttggc

SEQ ID NO: 228543 - DNA, 100 bp, Homo sapiens
aagactctcttcgctctttgcatcttaactgcagaatgaagagcttcgaaacttgtctttgtctggccatgtgggatttgacagcctccctgaccagctg

SEQ ID NO: 228544 - DNA, 100 bp, Homo sapiens
gtttggtccttattattcttctgtttattagcattatcttgacttttaagcctatcaagactcttccacctgctacttctaccgagccatctgtaatctt

SEQ ID NO: 228545 - DNA, 80 bp, Homo sapiens
ccggggacggcgaggccctcatgtaccacacggccttcactattctgtgtgatattttgatgatcttcagccatcagatt

SEQ ID NO: 228546 - DNA, 75 bp, Homo sapiens
acacattttctcatcacagtatgaatggtgcagatgtgaatgccaaggacatgctgaagatgacagctttgcatt

SEQ ID NO: 228547 - DNA, 100 bp, Homo sapiens
tattatctcattgaagcttggaattacatagctggaaaggatcttacagcaataacaattggtcgtcttggttacgtttgtcctcaagaggtggccccca

SEQ ID NO: 228548 - DNA, 74 bp, Homo sapiens
ggtccctcgcccaggtccccttggacaaatggtgcccaccagaagtatgtccgacaagcctggcagaaggcaga

SEQ ID NO: 228549 - DNA, 100 bp, Homo sapiens
attgaagtaaccccttctgctctaaaactaggtgctggagaatctggtaaaagcaccattgtgaagcagatgaggatcctgcatgttaatgggtttaatg

SEQ ID NO: 228550 - DNA, 76 bp, Homo sapiens
gaccctggcacgccccagcacacgagtgaggagatttctagtgaagatgatgagctggtagaagagaagaagcagc

SEQ ID NO: 228551 - DNA, 75 bp, Homo sapiens
agtacctttggtttcacagaagatctctgccaggcaaggccatcttagagatgtatcggcaagcagtgtaaacgg

SEQ ID NO: 228552 - DNA, 100 bp, Homo sapiens
tcgtgcaggatacagcaccacccctcaattattactgggttcctatactggcccgggtggaacgcatggagcagttccagaaggagaaggaggaactgga

SEQ ID NO: 228553 - DNA, 82 bp, Homo sapiens
gttcttgtttgtggatcgctgtgatcgtcacttggaaccaggtgcagatgggtctcttccttcctgcccccatctctctcac

SEQ ID NO: 228554 - DNA, 75 bp, Homo sapiens
ctttggatgaaggagtaggacttgtgcattcaaacatagcaactgagggttacacatcattttggaatgactgta

SEQ ID NO: 228555 - DNA, 50 bp, Homo sapiens
ctccccgccgctcccgggggccgtgacgttcacttagcagccatggaagg

SEQ ID NO: 228556 - DNA, 100 bp, Homo sapiens
agaagatactgtgcataagacatgagattctgaaggaagatttccattaggtaatttgtttaatcagtgcaagcgaaattaagggaaaatggatgtagaa

SEQ ID NO: 228557 - DNA, 90 bp, Homo sapiens
gtcaaaatgccaaccagcgagacctcttggtggccaggtactataagatctccgtggtgctcatgtgctttgtggtccccacgctggtgc

SEQ ID NO: 228558 - DNA, 100 bp, Homo sapiens
tggggagcctgacgttttgaaggatgagcttcaactctatggaggttactggagttggctataatcaatttggggaagtgattgttgatggtgatgttgt

SEQ ID NO: 228559 - DNA, 101 bp, Homo sapiens
agatcctgcgcccccaaccaggtcaaagtggcaggtctggcgtgctcctgatcagagttactctgatctgaagattttggcgttcaaggcattaagataat

SEQ ID NO: 228560 - DNA, 75 bp, Homo sapiens
gatggccgtaaccccgaaggaaatcaatggccaatgtacatggtggactatgccggcctgaacgtgcagctcccg

SEQ ID NO: 228561 - DNA, 100 bp, Homo sapiens
atgagctcggttttcttatgcttataagagtggaacagttgaaggcacagttaaatgaaacactcacaaaacttagaactgaacaaaatgaaagacagaa

SEQ ID NO: 228562 - DNA, 122 bp, Homo sapiens
aagcaagaagaaagacgtggcagcaagcgggagtcggggatagtgtcatcggttcggtaaagtttctgttctctgagctacagagacttctgaagtggagagtctgcgacctcctcggttct

SEQ ID NO: 228563 - DNA, 74 bp, Homo sapiens
cataccccacagaccactatcacctcgatcagcagcagccgctcttctaaaacattcaaaccaaagaagaatat

SEQ ID NO: 228564 - DNA, 75 bp, Homo sapiens
acgaggccccccaacacctccctgttcatcaggaacgtcgcggacgccaccagtgtaaggcaaacattggtgggc

SEQ ID NO: 228565 - DNA, 75 bp, Homo sapiens
gcctgccgcctccgtggcgaaggggacacagggaattagaatcatggagatgctgctaaaggaacagtgtggtgc

SEQ ID NO: 228566 - DNA, 100 bp, Homo sapiens
aaagaggaggaggcgagaaactcccaccgacccacagagcactattcctgatcagagaactccagttgcttcaacacacagtatcagtagtgcagccacc

SEQ ID NO: 228567 - DNA, 100 bp, Homo sapiens
ctatgagctttacaggcgctgcaaactggaggaaatgggctttacagatgtgggcccagaaaacaagccagtcaggcggtggtgctgtggttctgggggc

SEQ ID NO: 228568 - DNA, 98 bp, Homo sapiens
gtaaatgcaccaatcagcatgctgtgtctagctcaagaaatggcacctcgaaaggggaaggaaaagaaggaagaacaggtcatcagcctcggacctca

SEQ ID NO: 228569 - DNA, 50 bp, Homo sapiens
gtcacagtggactcccaaggggcagaatagcctaacatggcagaccagag

SEQ ID NO: 228570 - DNA, 100 bp, Homo sapiens
gaccatggccactgactcatgggccctggcggtggacgagcaggaagctgcggctgagtcggctacagcaactggacgaggagaacagtgaactccggtc

SEQ ID NO: 228571 - DNA, 100 bp, Homo sapiens
atcatagtcaactgcgtggaagagaaggtaattctgaattgctcagctctgcagagtttattgcatttgctgagtagcccaaaggaatctatcaaaaagg

SEQ ID NO: 228572 - DNA, 100 bp, Homo sapiens
acacgcaaacgagagctgaggctaatgaaaaacaggcagagtggcatgattccgactggatactctcagtgccagccaaattacctgaaattgaagaata

SEQ ID NO: 228573 - DNA, 98 bp, Homo sapiens
ggccgcgcggctgggcgttcatctaccacgcctacgtgtcgccgccctggagaggcaggtgtttgacttcctgggctaccagtgggcgcccatcctgg

SEQ ID NO: 228574 - DNA, 75 bp, Homo sapiens
ccattgcgagcggcatctacctactgggccgcgttcgcaccaaaaccgtgaagaaggcggcccgggtcatcatag

SEQ ID NO: 228575 - DNA, 82 bp, Homo sapiens
gttggtttagtatcagccaaacttgcagctgttcagaccgcgctccgccgagatgagcagcaccagcagtaagagggctccg

SEQ ID NO: 228576 - DNA, 100 bp, Homo sapiens
ggggacccagaccctggagcctcagttggaagcagccgatccagcctgcggagcctgtggggcaggtggtgattccctgcggtgtgcaagtccgactgga

SEQ ID NO: 228577 - DNA, 101 bp, Homo sapiens
tgctccatcctcatggggctggccatggtggaggccatctcacttcacagagaatgcagttgtcttgacttcaggtctgtctgttctgttggcaagtaaat

SEQ ID NO: 228578 - DNA, 97 bp, Homo sapiens
gcctgaagcagctgctgtcccgggcctaccccctggactccctggagaagcagatggaaaagtgggccggatgtatcccccgcgttctcccaagtct

SEQ ID NO: 228579 - DNA, 95 bp, Homo sapiens
ggaggtgctgggagcgagttggctggtaatcattaccaaatgaggaggaaaggacgatgtcatcgaggctctgcagcgaggcatccttcttcccc

SEQ ID NO: 228580 - DNA, 99 bp, Homo sapiens
ctcggcgattatggacccggccgaggcggtgctgcaagagaaggcactcaagtttatgcatatcgcacggatgactgccatccctgggttttgccagta

SEQ ID NO: 228581 - DNA, 100 bp, Homo sapiens
ctcagaaggtgccctctttgcaacatttcaggaaaacagagaaagaagtgataggagggctctgtagtgcatccactctgggagagcgtggacctggttc

SEQ ID NO: 228582 - DNA, 100 bp, Homo sapiens
gatacctaccctacaaccagcagcacctgtacttcttcctgaatgtgaagttcatttccaatccgccctccatggtggcagcggggagcgtggtggccgc

SEQ ID NO: 228583 - DNA, 75 bp, Homo sapiens
gatcttaaagagaaagcatccaagctttcaccaacctgatggccaaaagaaaggaagaaaatttttcctctccta

SEQ ID NO: 228584 - DNA, 100 bp, Homo sapiens
caaagatgtcaagattgagccttgtgggcatttgatgtgcacctcttgccttacggcatggcagttaatggaaacctcaggaacagacatgctgagtgat

SEQ ID NO: 228585 - DNA, 75 bp, Homo sapiens
tctgaaacaattgaggattctagtaatcaagcagcagccagagaatgggaggaccatgcagaggagggcagggct

SEQ ID NO: 228586 - DNA, 50 bp, Homo sapiens
gctgaagccaaggaatatgtcataaagatgcaagtgctgctggaccaggc

SEQ ID NO: 228587 - DNA, 76 bp, Homo sapiens
agagttgtctgcaaagtgcctctgggtgacttaagagattaaaattaatttggttgctgttggttctgaacaaata

SEQ ID NO: 228588 - DNA, 75 bp, Homo sapiens
agaaggtgctccagagatcttctgttcttcaggtataaaggaccattgttagaagagcaagcccttacaaaggcg

SEQ ID NO: 228589 - DNA, 100 bp, Homo sapiens
cgcactgatgaaaatgggctttgtcctgcatgtagaaagttactccacaggatccgctgaacataggatgttgccacaaaatctacctcgtgtatttttc

SEQ ID NO: 228590 - DNA, 83 bp, Homo sapiens
cttcacccttggagcggcttttgtctacttggctgacctcctgatgcctcacttggttacagttcctctgagtcatctcatca

SEQ ID NO: 228591 - DNA, 75 bp, Homo sapiens
agcgaccgggaggttgggctggccagattcagctgccgggaccggaccagcatgtagagcgcatgaagtacagga

SEQ ID NO: 228592 - DNA, 101 bp, Homo sapiens
cctggactctgcagagtgaagagaaaatagcaaacgatccagacggcagggagtgcatcaaaggtgtgaacacagactctggctcctcctcctcctcagaa

SEQ ID NO: 228593 - DNA, 83 bp, Homo sapiens
tcaaccatctcacacctttccaaaggacgcgaccataactctaaaagtgccctctggtggtcagaagatgctgtgctgtctcg

SEQ ID NO: 228594 - DNA, 90 bp, Homo sapiens
cggtgatggctcagatcctagagcatctgaaaaccctggccaaggacgagctggtcctatagtacccctcctcaggaatgtctccccagt

SEQ ID NO: 228595 - DNA, 101 bp, Homo sapiens
tgcccagcaccccccccgtggtgaccatcgctccaaccaaaaccgtgaatggtgtctggaggagtgagagccggcaggtttggtgcacctcgatttggagg

SEQ ID NO: 228596 - DNA, 50 bp, Homo sapiens
gaaatctggctgctgcccttggacaacagattgctgctgcagaaaacaat

SEQ ID NO: 228597 - DNA, 108 bp, Homo sapiens
cgggctgaagcgactgagtccgcgatggaggttctgggccggagaaggggcgacgttcgggcaccccccgaatggacaatctttccttctgtcaacggcaggggcagg

SEQ ID NO: 228598 - DNA, 89 bp, Homo sapiens
cccaaacccaaaggcctccttgaggatgagcgtcgtatgtctcgtggggtgaatccctccttggtgagctggctgaccactatgatggg

SEQ ID NO: 228599 - DNA, 99 bp, Homo sapiens
gttcatgggaaactcaatctgggtgtgaagttgggtatctacagccattggttgctgttcaggtcagctttgctcctaacaacactgggaaagaagtaa

SEQ ID NO: 228600 - DNA, 96 bp, Homo sapiens
ggcaataagactctttaaagaaggcaaggagagaatgtatgaagaacagtcacaggacagtatgtccgtggttcagaccctgtattaaagcttttg

SEQ ID NO: 228601 - DNA, 75 bp, Homo sapiens
attgaagtgcttggagtgcagaactgaaagagatatgcacccaatgtccagggagcgtgcaaaatttgtcaaaag

SEQ ID NO: 228602 - DNA, 100 bp, Homo sapiens
gccgcggcctcccgaagtgctgggattacagatgtgagccactgcgcctggccaggtgctggaggtggtgagagccaactatgacacgctcacgctgaag

SEQ ID NO: 228603 - DNA, 100 bp, Homo sapiens
tgaaggcgtatacaggaacaatattgatgatgtagtaagtgaacacctacctcttcatgatgcaagcccaaggcattctgatccgggacaacgtgagaac

SEQ ID NO: 228604 - DNA, 100 bp, Homo sapiens
tggctgagaaggagacactactggcctgggctggaagtacaccttgttggaggcttcagtgacgacaggcagttgtcacaaaaactcactcatcaacttc

SEQ ID NO: 228605 - DNA, 73 bp, Homo sapiens
agactccacgattatggttgtttggctatgatgaggttgagcaatgtttaaagcgtttgaaaaacatgaattt

SEQ ID NO: 228606 - DNA, 75 bp, Homo sapiens
aaagaggctcctgaagcacaaatgcagggaatagccaggccagaagaaggaaggcctgtggtgagtgggacagga

SEQ ID NO: 228607 - DNA, 74 bp, Homo sapiens
ctgcgcagccaggatagcatgagctcagacaccgccagggctgctgagcttcgtgcttatctgaaatctaaagg

SEQ ID NO: 228608 - DNA, 75 bp, Homo sapiens
cgtggtctaaagcttcggcacaagggcccaactggaattccacttacgggaaacatgccctgaactgtcacagaa

SEQ ID NO: 228609 - DNA, 101 bp, Homo sapiens
gcccttgcaacaacatgaaacagcatctcagacttctttcccagatgtttataatgagggcacacagacatcaaaatttacaagctcttcggatattccag

SEQ ID NO: 228610 - DNA, 50 bp, Homo sapiens
atataaaccacttcccagagcagccaaagcgccagacaaacctattcagg

SEQ ID NO: 228611 - DNA, 74 bp, Homo sapiens
gcaccatgccgtcggagaagaccttcaagcagcgccgcaccttcggcgccatgtcagaaccggctggggatgtc

SEQ ID NO: 228612 - DNA, 100 bp, Homo sapiens
ttggattttcacgtgctcttgctaaagaggtagcaagaaagaaaattagagtgaatgtagttgcaccagaaggagttgagccttccaagaagaggcagct

SEQ ID NO: 228613 - DNA, 51 bp, Homo sapiens
attacaggcacgcgccaccactcccagagcagcccgacggccatggaggct

SEQ ID NO: 228614 - DNA, 75 bp, Homo sapiens
tcaagtgactgctcaggaaattttccaagacaattgccagagtctgccctccgagacctcatcgtagccaccatt

SEQ ID NO: 228615 - DNA, 74 bp, Homo sapiens
gttccttgccctttatcgaggggtttccctcactgttgtagttgaaaacgaggcccactgcgactttgtgaagc

SEQ ID NO: 228616 - DNA, 82 bp, Homo sapiens
acaccatcaccaaggggcccagcaagctggtcgcgcagcgccgcacagggctgggttacgacccctacaaccctgagctgcc

SEQ ID NO: 228617 - DNA, 82 bp, Homo sapiens
ccgcccgccggatcccccggaccccccgaccgtgtttgaaggcgtctacaacaattccagaatgctgcatttccttacagct

SEQ ID NO: 228618 - DNA, 74 bp, Homo sapiens
ttcgatctccgccctggggtcattgtcagatatgagaccttggtggggacaattgggaaaaagtttgccagaaa

SEQ ID NO: 228619 - DNA, 100 bp, Homo sapiens
cctcccaaagtgttgagattacaggaaactggagaggcgtggctggaccaagacctccccccatgtgagcaggcttcctcctcccccaacaaccgttgcc

SEQ ID NO: 228620 - DNA, 99 bp, Homo sapiens
ctccgccgcccgcaggctccggcttccgtcccggacagagcccgtggtcgcgcaggtgacacgtgcaccatggccggctacgcccgcttgaagaatgtc

SEQ ID NO: 228621 - DNA, 50 bp, Homo sapiens
agctctaccattccatcaatgatgagaaagatcagtctaaagaaaaggag

SEQ ID NO: 228622 - DNA, 82 bp, Homo sapiens
ccccaaccaccgcacccctacgctgaccaggttttgtagtgcatccctgagcatgagcacagaatgaagcggcgtttggatg

SEQ ID NO: 228623 - DNA, 73 bp, Homo sapiens
gctgatctacaagaaaatccacaagaacgcactttcctcccaggattttttatcaagcagaaatgcatcgaac

SEQ ID NO: 228624 - DNA, 101 bp, Homo sapiens
ctgtggtggttcccgcagagtggataaagaactgggagaaatcagggagaggcgaattgtactaggttttgacaagcttgcatcatgcgtgagtataagct

SEQ ID NO: 228625 - DNA, 116 bp, Homo sapiens
gaatctctagctgaccagtttgacttcaagatgtatattgcctttgtattcaaggagaaggcaaatcctgatcctaactgttgtcttggagtatttgggctgagcttgtacaccac

SEQ ID NO: 228626 - DNA, 80 bp, Homo sapiens
ctggctgtgcgcgctggcgctgagcctgcagccggccctgccgatgaaggatttgggggcagagcacttggcaggtcatg

SEQ ID NO: 228627 - DNA, 96 bp, Homo sapiens
gacaaaatcttcaccaaatactcaaggtcactacagaattagcccaagcagattcctcccagtgtgcaaagatccaccttacaaagtagaagaatc

SEQ ID NO: 228628 - DNA, 98 bp, Homo sapiens
agtccctgcaggcctggaaagaccacaagctgcacatcgaccacgagattgaaacccacaagctgaccttccgcgagaacgccaaagccaagacagac

SEQ ID NO: 228629 - DNA, 100 bp, Homo sapiens
aaaaagaggcgaaaggaagcaagcagttcagaagagccaaggaataaacatgcaatgaacccaaaagggttaaagtattgcacaatcagctggtcctttt

SEQ ID NO: 228630 - DNA, 74 bp, Homo sapiens
tcgtgacaccatgaaagtcctctttggacatctaactaagtcaaaatgcagatcttcgtgaaaacccttaccgg

SEQ ID NO: 228631 - DNA, 83 bp, Homo sapiens
tacaggaagaaaagaagaagctgacccctgaaggaaacaaagctagaatgggtactaggaaaaaagttcatgcatttgtccgt

SEQ ID NO: 228632 - DNA, 82 bp, Homo sapiens
tggtcgctgccggaaatggccaggctttatcctgtggataaacgcagagtgaacgagtttggggagtcctacgaggagaagg

SEQ ID NO: 228633 - DNA, 100 bp, Homo sapiens
ttatcctttggaaatgtgctcacacttggaacagctgttaaatttgatgatatagctggtcaagacttggcaaaacaagcattgcaagaaattgttattc

SEQ ID NO: 228634 - DNA, 82 bp, Homo sapiens
cgggaggaaggaacgaggcaaggagctaaagcagcgtgcgttcagccctgggcgccatcatgaccgggtcctataacaactt

SEQ ID NO: 228635 - DNA, 100 bp, Homo sapiens
gttgaaactagcaacatctataagtgaaaccttggaagagaaggtgcatcatttctggcatggcttcaggaagcattgtgctattttacaacgactttaa

SEQ ID NO: 228636 - DNA, 118 bp, Homo sapiens
cagctgtatgcagggcgggcacaccaccctcacactcatcttcatcatcttctatatgacagctgcactgctccagggcaggagcgcttcacctctatgacacgattgtattatcggg

SEQ ID NO: 228637 - DNA, 75 bp, Homo sapiens
gcagaagagaccctagaacatccttggttcaaagtatcccggtgccggaaatgccggaagcgctacgagccagtg

SEQ ID NO: 228638 - DNA, 98 bp, Homo sapiens
atcatggccatgatcgccctcaacaccatcgtgcttatgatgaaggttgaaaaagatcatctagcaaagccttttttcccagctacatataaggaatt

SEQ ID NO: 228639 - DNA, 105 bp, Homo sapiens
agctaggagcgctctgtggtgcctggggctgaacgcggctttctgttggaccctgggcgttttttacacatggggacccaggctcgccaaagcattgctgctcac

SEQ ID NO: 228640 - DNA, 50 bp, Homo sapiens
tctctgtatggcacagaagaatatttgtctacgcctgcaagctctcagac

SEQ ID NO: 228641 - DNA, 82 bp, Homo sapiens
cctcgcactggcgctgcaacaagaccctgcccgtggccttcaagacctctgtgagtgaaagccttcagagggaagctgctaa

SEQ ID NO: 228642 - DNA, 100 bp, Homo sapiens
ccaaggaagccacgtgcagacatctacaaccttcgatctcctgacgagatccaaggattctgtagctacaatgttgtcaagactttttcgaatgcatggc

SEQ ID NO: 228643 - DNA, 100 bp, Homo sapiens
caacatgttgaatgcacaaaagcaacaggtccagatgagacgtgcaggtaccatcaggaagcagcgggataagctgataaaggaaggaaagtacacccct

SEQ ID NO: 228644 - DNA, 100 bp, Homo sapiens
gcaggaactctacaacccaatccagactggtcgaattgacaaatcttaccctacagtatgtggccacacaggaccagtgctggacatagactggtgccca

SEQ ID NO: 228645 - DNA, 90 bp, Homo sapiens
aaatggcttttaggaatggtagcttcctggggatggtatgctggatatacaggatcgattttaaaaagaagcatgtcgggggaatcagga

SEQ ID NO: 228646 - DNA, 100 bp, Homo sapiens
cgctctgcgcgttttccgatttcttgctggttgaatacctccctctccactcccatcttcaggttgtggaagatatcaataagcgcagagagccgctccc

SEQ ID NO: 228647 - DNA, 100 bp, Homo sapiens
cagcatggaggacgatgcaccagtgatctacgggctggagttccagcactcccagcagctctacagacacatctacctgagctgcaaggaggaaacaaac

SEQ ID NO: 228648 - DNA, 100 bp, Homo sapiens
cttcgtcccctttgatccctgtgtgctgaagagacctggaatggccaaatatcaaggtgaagttcaaagtttgaaactggatgatgattcagttatagaa

SEQ ID NO: 228649 - DNA, 100 bp, Homo sapiens
caaggagctcatcaaggacgggaagtcactcataagcgcgctcaagaaattcagcttagagaactatcaacacaggacaatgcaagcccatgagctgttc

SEQ ID NO: 228650 - DNA, 90 bp, Homo sapiens
gtgaacatgactagcggcccgggtgggccggcggcggccgcgggcggcaggaaggagaaccaccagaactgatagtgcatcagctgaccc

SEQ ID NO: 228651 - DNA, 98 bp, Homo sapiens
cgagatgtctcgctccgtggccttagctgtgctcgcgctactctctctttctggcctggaggctatccagcgcaacaggacctgtaccgaatcctgaa

SEQ ID NO: 228652 - DNA, 87 bp, Homo sapiens
attctcgacctgctaacagaactggaccttttcggtaaaatttggtaataccacctttaaaacagatgtgtaccttaagtcactcaa

SEQ ID NO: 228653 - DNA, 100 bp, Homo sapiens
aagacagtgagctgttcgagctggattattgcctcaaaggtccctgtggatgctgctgaaactgagacagaggctgcggagccccacggcgcccttcacc

SEQ ID NO: 228654 - DNA, 100 bp, Homo sapiens
cacaactctgcagtggaccacagcattcctgaaatacatccaggaaagacatggagattctcttaaaaagtgttttccaagcagtgaagcacttgccgtg

SEQ ID NO: 228655 - DNA, 89 bp, Homo sapiens
tccaaaatcaccatttggaaggaacagtacagagttgtacaggaggaaaaccagttatttgaaattacagtgcctctctctcaaggccc

SEQ ID NO: 228656 - DNA, 74 bp, Homo sapiens
ttctaatattattggccagtctgtggaagaagctatcagagttgtggaaagtaaaaatgtagccctaccaaaag

SEQ ID NO: 228657 - DNA, 100 bp, Homo sapiens
ttgctctggcggacgctcaagtacctgtggaccgtgtgctgccactgcgggggcaagacgaaggacatgtctcaggaaggctatggaactagatctcaac

SEQ ID NO: 228658 - DNA, 100 bp, Homo sapiens
ctatgaagaaaagagtgtgttgtgaacgaagtcagaatttcctgtgttccctttgccgctcctggagttcactggttcacgaggacacataccacatgca

SEQ ID NO: 228659 - DNA, 87 bp, Homo sapiens
acagtggagaaggcccagccaatgaagatgaagacataggaggaagtgcacggctgtctataacgtgctgccgggtctcaggatgga

SEQ ID NO: 228660 - DNA, 83 bp, Homo sapiens
cctggctcttgccctcatcctggttctggaatcctcagttcaagccatcactggtgcaagctatatttaacggagatcctgat

SEQ ID NO: 228661 - DNA, 100 bp, Homo sapiens
atgaattccccaatgacatcttcacaaacgaggatagaagacaaggtgcggtggtcctccatgtgctctgtctgcagggaagccaaaggctcagaaactc

SEQ ID NO: 228662 - DNA, 74 bp, Homo sapiens
ggactctgatttcttcacagaacacactcaaattgctcgagactttaatcccaactggatgagtgctgtggaaa

SEQ ID NO: 228663 - DNA, 75 bp, Homo sapiens
gggttattcgagtgaccgagaccgcggccgggaccgaggcctcccgcgacgatgcccctcaacgttagcttcacc

SEQ ID NO: 228664 - DNA, 100 bp, Homo sapiens
tgaaaggaaagaaggaacaattattaggctctcagatgtaactagagagagaaggaacattccagaaactttgggatggatgagggagatgctgcaatca

SEQ ID NO: 228665 - DNA, 100 bp, Homo sapiens
gtgaatccatgttgagctgagctagcgggggccggccccagcccagactggaagatgagattgacttcctggcccaggagcttgcccggaaggagtctgg

SEQ ID NO: 228666 - DNA, 98 bp, Homo sapiens
aacaggctccagatataggtgacctcggcacagttaacctcttcaaacgacctttgcccaaatccaaaccagaacagaaactgttcatacttggtgcg

SEQ ID NO: 228667 - DNA, 100 bp, Homo sapiens
gcggagctcccccaagagccggaaaggttctcagaggcactgtgactgacttccctggatttgatgagcgggctgatgcagaaactcttcggaaggctat

SEQ ID NO: 228668 - DNA, 109 bp, Homo sapiens
cccgccaaccgcaaccattgacgccatgtcgggttattcgagtgaccgagaccgcggccgggaccgagggttactataacaacagtaccaaggtggctgtgaaaaccct

SEQ ID NO: 228669 - DNA, 100 bp, Homo sapiens
cagcaagtgccaaggggctagttgaggaatggcttcatgaggaaagaccacagcaagattctttcattcgtctcctcctagcctgggggaccaggctcga

SEQ ID NO: 228670 - DNA, 100 bp, Homo sapiens
aaagaattcatcagcgatggcagtttcatagtattgacatgggagtggtgagccggaactgcacggaggatggctggtcggaacccttccctcattactt

SEQ ID NO: 228671 - DNA, 80 bp, Homo sapiens
ccgggagccctacgttcgtcagagagctccggagtaggacttttgacaggaaaaagcagttgatcctaagacacgtttac

SEQ ID NO: 228672 - DNA, 76 bp, Homo sapiens
cgctggagcgggcggagctgtgcgagagcctcctcacttgggatctcatagatcagaacatactggagcctgtaac

SEQ ID NO: 228673 - DNA, 75 bp, Homo sapiens
agctggagctggagctctcggagggatgttgcttcagagtgtgaagtcaaatgcatgccaacattccagtttttt

SEQ ID NO: 228674 - DNA, 138 bp, Homo sapiens
atcattttcacctcgcgtcgcgcccgggaggaaggaacgaggcaaggagctaaagcagcgtgcgttcagccctgggacaatgcagatcttcgtgaagactctgactggtaagaccatcaccctcgaggttgagcccag

SEQ ID NO: 228675 - DNA, 82 bp, Homo sapiens
cccagctgtgcggagctaggacgcggaacatcccagaggccagcatcaacatgtggatgaaaatactaggaaaagtttattt

SEQ ID NO: 228676 - DNA, 51 bp, Homo sapiens
gaaaatgcgctcgggctggaccagcagggagtgcatccgccccaacccttt

SEQ ID NO: 228677 - DNA, 100 bp, Homo sapiens
ttcatcatctgatggcagcctagaatcttatcaaaatctaaaccctcacaagagctgttatttatctgaaaggaacaccagtgtattcagtagcgtgggg

SEQ ID NO: 228678 - DNA, 98 bp, Homo sapiens
cctgtgtcccacttgttcgcggcctatagttcaaaaggtgatgacctatcaacagccattctcaaacagaagaaccgtcccaatcggttaattgttga

SEQ ID NO: 228679 - DNA, 102 bp, Homo sapiens
tcggctcttgagtacttgcactcgcgggacgtggtataccgcgacatcaaggctcccagccccattgccaataccttcctccactatcgaaccagcaaggtg

SEQ ID NO: 228680 - DNA, 100 bp, Homo sapiens
tccagcagatggcggatgccctgcagtacctgcagaaggtctctggagacatcttcagcagaggcatttcatccttcatgaagccattcaggattttgaa

SEQ ID NO: 228681 - DNA, 101 bp, Homo sapiens
gggcatggtccagaattttgtaaacatatgcatcgcatcaacagcctgactggagccaatataacggtaccaaagcagtcagactcacagcctaattctga

SEQ ID NO: 228682 - DNA, 100 bp, Homo sapiens
caagaatggaggcaaggactgcgacggcctcgtcttgcaatccaagaactgcactgatgggctttgcatgcagaagtcaagtaaagaacagtttgccagt

SEQ ID NO: 228683 - DNA, 75 bp, Homo sapiens
aaaattctgaactcaggacttggcaaggaatctttaaccagtttcagtgtagtagtgaaaaagtgcttccatctg

SEQ ID NO: 228684 - DNA, 98 bp, Homo sapiens
cccttgctcaacagaagatttgctctatgatcgtgataaagctatttgtcgtagatgtccagacaagccagatcaccaagatccccattctgaaagac

SEQ ID NO: 228685 - DNA, 78 bp, Homo sapiens
tgttggcatcatgtgagagtgaagacagtatttgccagctcattgacctgcctagagctggaacgttacctccagagc

SEQ ID NO: 228686 - DNA, 90 bp, Homo sapiens
ggcgatccagataagaggaaatgagagccgggttttctgacttccaactcattagggaccaggacactttcttcatgagcaacaaacccc

SEQ ID NO: 228687 - DNA, 75 bp, Homo sapiens
cacaaagccggctacgcgctgcgaggaagaaggtagataatgactataatgcccttcgagaaagactcagcacct

SEQ ID NO: 228688 - DNA, 100 bp, Homo sapiens
atggggccgcatcctaccactgtgattgctatcctggctacaccttaaatgaggacaagaaaacatgttcaggttatggaggttttgatgactatggtgg

SEQ ID NO: 228689 - DNA, 100 bp, Homo sapiens
agacggggcggaagaccaagatcatcgagatgtataacaagaggattgcctgatccagccaagatgcagagcacttctaatcatctgtggcttttatctg

SEQ ID NO: 228690 - DNA, 75 bp, Homo sapiens
cagcgatgttcggccaggtggctccaaggagaggaagcagtgatgcattgagatctgcaaagcccctgagcccaa

SEQ ID NO: 228691 - DNA, 75 bp, Homo sapiens
agcattgcatagaagcagccttacagaaagcataacccctactgtagaactaaatgcactgtgcatgaaacttgg

SEQ ID NO: 228692 - DNA, 99 bp, Homo sapiens
tgctggtcgtgagcgactccttccttggtgctaacagtggtttgcacatcatcatctttgatgaaattgatgccatctgcaagcagagagggagcatgg

SEQ ID NO: 228693 - DNA, 75 bp, Homo sapiens
gcccacagtacactccagacatgcagaagcagtttgccgaagagcagcactgctacaggagctgagagaccctac

SEQ ID NO: 228694 - DNA, 100 bp, Homo sapiens
ggcggacaggcgacagcgacctgcggcaggactgggaggtgctggtcctagggaagctcaagtgggacctggctgctgtgattgcacatgatttcctggc

SEQ ID NO: 228695 - DNA, 98 bp, Homo sapiens
tggaaggacaggaaccagaacccaggcccacggaggaagagccgggcagtccctggagcgggccagatggagtctcgccctgtcacccaggctggagt

SEQ ID NO: 228696 - DNA, 121 bp, Homo sapiens
gaggaatccgagaagagcagagcggagggagccccagacacggtcttgggcgtctttggtactggcttttttaggggtctgcctggggattacccttgctgtggatagaagcaactttaag

SEQ ID NO: 228697 - DNA, 120 bp, Homo sapiens
gtggaaaatattgttttgaagcacctacactggcaacattagatccacctcatacagagacaaagcatggaggacacaagaatgggaggaaaggcggactctcaggaacttcattcttca

SEQ ID NO: 228698 - DNA, 113 bp, Homo sapiens
aagcgcggctgctgtcgcccagcgccgccccgtcgtcgtctgccttcgcttcacggcgccgagccgcggtccgaggtgaaggttgccgaactgtccccctggctggacatgtg

SEQ ID NO: 228699 - DNA, 96 bp, Homo sapiens
cacggagaagcagtggctaagggagagaaaccctttatctgtgaaatctgtggcaaaagcttcaccagccgccccaacatgaagagacaccgcaga

SEQ ID NO: 228700 - DNA, 75 bp, Homo sapiens
tggaccatttagtaagaagaattccagtcttataaagtttactcctggcttgggggcattaggaagcactggagg

SEQ ID NO: 228701 - DNA, 98 bp, Homo sapiens
gtctctgaaatcaagtccggatgaaggcagccttaagtgccttgaaacaattttctgaacaaggactggatccaatcgatggagcaatgaatatcgaa

SEQ ID NO: 228702 - DNA, 100 bp, Homo sapiens
agatgggatctttccggatcaatccagatggcagccagtcagtggtggaggtgtttggagaagagggattgaccctgaatcttgaagacgttcagcctca

SEQ ID NO: 228703 - DNA, 75 bp, Homo sapiens
gtacttctgaagcaaccaaaatgcatgctccacccattaatatggaaaggaaagaatacccacctcatgtccaaa

SEQ ID NO: 228704 - DNA, 100 bp, Homo sapiens
tacaggactcgcctcctcagggttccctgtgctgccacttttcagccatggccacaagaatcttgcctcctggaatccttcaaatcctgaatgtctctta

SEQ ID NO: 228705 - DNA, 90 bp, Homo sapiens
ggatatggaaaatactttgcagctggtggtctgagctcggcctatgggggcctcacaagccccggcctcagctacagcctgggctccagc

SEQ ID NO: 228706 - DNA, 100 bp, Homo sapiens
gtgacataggagaagtgattcttgtgggtggcatgactaggatgcccaagagtggtgagatcaagtcggtagatcccagactaatccatgtgatgctgat

SEQ ID NO: 228707 - DNA, 97 bp, Homo sapiens
gtgtttggctgcccaggctcgcctcgactccaaatggttgaaaacagatatacaggtgtcatggagaaactccagctgggcccagagattctgcagc

SEQ ID NO: 228708 - DNA, 75 bp, Homo sapiens
ctgccgggaggaattacagaaccaggtagaagatgggacatctagtgtaacagtgttatcacatgaagaagatgc

SEQ ID NO: 228709 - DNA, 122 bp, Homo sapiens
gcgggcctcgcgcgcctcgggcgcggctccgcagtgagcccaccaagaaggaagcgtgctgctcacggccgtgaactgctacagcgtgaaggccgccacccgggtccaggatgcctttgccg

SEQ ID NO: 228710 - DNA, 78 bp, Homo sapiens
gccagtgcatgaccttactattggttatggtggagaattcagactttaccccctcacaagtaggatgtctctttacct

SEQ ID NO: 228711 - DNA, 97 bp, Homo sapiens
agttcaagaagatcattatggagcagagatcaggccaagtttggaatcactgggactggggttcagactttccgcagagaccatgatcgtttctggg

SEQ ID NO: 228712 - DNA, 80 bp, Homo sapiens
cagaggaaacccagccgcttctggggcctcctggcggcaggaagcgccgcggagccatcaacagcaagcagctcacctac

SEQ ID NO: 228713 - DNA, 100 bp, Homo sapiens
cagctgtaaagcacgaacaggaatacatggaagtccgggagagaatacacagagccagttatgatgtgattgctcaagcccaatctgggactgggaaaac

SEQ ID NO: 228714 - DNA, 98 bp, Homo sapiens
cccagacggctcacctgtgcgggatggaacaaaaggttccttttttgccaggagattcagaccttgatcagctaacaagaatatttgaaactttgggc

SEQ ID NO: 228715 - DNA, 75 bp, Homo sapiens
gtgtgtcgccgcgcagtgccggcagagagtctgaagatgatgagaaactgaaaaagaggaaggagcgatttggga

SEQ ID NO: 228716 - DNA, 100 bp, Homo sapiens
cgcttgcagatacccccgagatcgttccgccacgctgccgctgatgatgaagtgcgtggaggagaataatggcgtggccaagcacatcagccgtttcatc

SEQ ID NO: 228717 - DNA, 76 bp, Homo sapiens
tggcatccaagtcgatggaacagtttatgaagccccactgtgttctccttgcctcaaaagaaaactcggcacctgt

SEQ ID NO: 228718 - DNA, 82 bp, Homo sapiens
aactcgctcgccttcagaagacaggtacatggtgcagtggccgggagcacgcatccttcggcgtcaggagctagatgccttc

SEQ ID NO: 228719 - DNA, 82 bp, Homo sapiens
tgctcgcccgcagccccgagaccgcagacaatgcagatcttcgtgaagactctgactggtaagaccatcaccctcgaggttg

SEQ ID NO: 228720 - DNA, 100 bp, Homo sapiens
caggtgctggaggacttcccaacgctcaaccaaatcccgggagatgagaaccctattttcctcccttcggatgcaaaatacgactggcttttggccaaaa

SEQ ID NO: 228721 - DNA, 98 bp, Homo sapiens
attgcgcagtcgggaccatcgccggagcctgaggacacttctctgtcgtcacagttaggaaggtgctcgggtcttcggggcactgggtcccatcggtc

SEQ ID NO: 228722 - DNA, 95 bp, Homo sapiens
tgggacgaccgtcggttctgtccgggaggaatgacggggtcaaggtggcatggaatattcacatgggagagccgcatgaggccgcccaccacgct

SEQ ID NO: 228723 - DNA, 97 bp, Homo sapiens
acagccaagcctagcagctcgggcaaggatggtggaggcgagaacactgaggagggcgatgccagtccctccactccagaggagaacgaaaccacga

SEQ ID NO: 228724 - DNA, 90 bp, Homo sapiens
cgtcaccgaggagaagtaccaggaggcgttggccaaggaggaggctgaggatcctgcctgcatccccatcttctgggtcagcaagtgggt

SEQ ID NO: 228725 - DNA, 100 bp, Homo sapiens
gacgcagatgcccgggccgtggctctagcaggctccactaactggggctacgactctgatgggcagattttgcaagaacgaggctcaaggatgtgaggga

SEQ ID NO: 228726 - DNA, 85 bp, Homo sapiens
gacccgcgcgtgttcgtggacggcctgtgccgggagggtgtgaagacagagaatgaccacatcaacctgaaggtggccgggcagg

SEQ ID NO: 228727 - DNA, 100 bp, Homo sapiens
tgaagattgtcatgattgtttatcctaatcccaatgctgaagtaagattgtcttggaaatactaagttgggaagctgccacttttgctagagagcaaggc

SEQ ID NO: 228728 - DNA, 50 bp, Homo sapiens
cagcaccctcaccgtctactgcataatcaccagcaacacccgggacaata

SEQ ID NO: 228729 - DNA, 100 bp, Homo sapiens
aacaaaccctcacaaggtgatccttttaacaatcgagttcaggaccttatcagatatgctgtgatagcatttggatgtgccagctgtccaaaattaactt

SEQ ID NO: 228730 - DNA, 74 bp, Homo sapiens
acaagatgaacaatgagaagcaggcagaagattgcatcacacggtggaataacactcccatggatgaagcactg

SEQ ID NO: 228731 - DNA, 90 bp, Homo sapiens
ccgccccgccccggcctcggccccggccctggccccgggggcagtcgcgcctgtgaacgaactgaagcgctgcggcatggcgcgcgcctg

SEQ ID NO: 228732 - DNA, 50 bp, Homo sapiens
tattgccgcggtggaaatggagagtttcagattgccaaaagacaaaacgg

SEQ ID NO: 228733 - DNA, 101 bp, Homo sapiens
gacatccgaggtgcctttctccaaaaggaagattgttgatcgaatcgacaatgatggggatggctttgtcactactgaggagctgaaaacctggatcaaac

SEQ ID NO: 228734 - DNA, 88 bp, Homo sapiens
gaatccccccgaaaggaccccccagaagcatcaagtgtacctgatttgtgaacctatcttgcttcagttggtttcctcctaaatatta

SEQ ID NO: 228735 - DNA, 121 bp, Homo sapiens
cttgatcagtgtcaggctggttgtcaattttgatatgccttcaagtatggatgagtatgtccatcaggcccttctgcgatgttttacctggctgcggctgtgtcagatttctatgttcctg

SEQ ID NO: 228736 - DNA, 87 bp, Homo sapiens
gcctgaaggagttgttgtctcggcagcgcccgcggagacgtgaagagttggtggttggtgcagtggagatgccatttccagtgttga

SEQ ID NO: 228737 - DNA, 87 bp, Homo sapiens
aactccacagagtgaccagagagaggacgtggctgaagacaccaaagatgggggaggggaaggtgtgtttaagcagaggaaaattat

SEQ ID NO: 228738 - DNA, 100 bp, Homo sapiens
aaggagatcattctggtggatgacaacagcagtaacgggcccccagatgccgacggccctctctacctcccctacaagacgctggtctccacggttggga

SEQ ID NO: 228739 - DNA, 75 bp, Homo sapiens
gaatgacagcggcgaggagaacgtcccgctggatctgacccgaggttgatccaaggattagttttggatcatggt

SEQ ID NO: 228740 - DNA, 80 bp, Homo sapiens
aaatgtctgactctgactctcggactgagaaacgcaaggcttctggagttacagtgaatgatgaagtcatcaaagttttt

SEQ ID NO: 228741 - DNA, 99 bp, Homo sapiens
taaagatgcagctatttacagtggacagaaactgaaggggtgaaagaaaacccaagatggccatcacagcagtgacccttggagctcctccagtgggat

SEQ ID NO: 228742 - DNA, 100 bp, Homo sapiens
ctcatcttcctttgaccacgttatcaaggaggcaagtagcctgcagtatgaaatgctgctgctgacggattctatctccaaggaggacagctgctgggag

SEQ ID NO: 228743 - DNA, 83 bp, Homo sapiens
caagaagaacttaagcgaggccctgggggacaacgtgaaacagatgccaaagaagagtgaatggcccacaaagagcctggtag

SEQ ID NO: 228744 - DNA, 96 bp, Homo sapiens
tgcgcgtggaacggctgcttttggaaggtgaggcggaaccaaccctcctggccatgggaggggccgtggtggacgagggccccacaggcgtcaagg

SEQ ID NO: 228745 - DNA, 100 bp, Homo sapiens
gaatatgtatcctaatgaatattttcctcatggaataacaaatggagctagttggtataatgtgccaggatatgttcaaggaatgagtgatttactttcc

SEQ ID NO: 228746 - DNA, 90 bp, Homo sapiens
aaccgtttggcaatatgtacgacgcggatgaggagtcaagtaaagaacagtttgccagtacaaacattgctgaagagctagtaaaactct

SEQ ID NO: 228747 - DNA, 75 bp, Homo sapiens
gaagacctcatctggatgccaggcccaggaattcccataccaaccacagagggcaataaaccttggatttccctg

SEQ ID NO: 228748 - DNA, 75 bp, Homo sapiens
aagcgaagccgaaaaaggcagcagcgaagtatttgattttcatcaagcagctgatggtatccaggaacaacagag

SEQ ID NO: 228749 - DNA, 90 bp, Homo sapiens
ctgccgcttcagttctcccggtgtggccacgagtcggctacagagggccggagctggagatgtggtctctgggagtcactctgtacacgc

SEQ ID NO: 228750 - DNA, 100 bp, Homo sapiens
caggagcactgaggcatcccaggtgtgacactcttccacctagagcattccgtctctcatcctctgccatgtatgccagaattccagaaaagttcagttc

SEQ ID NO: 228751 - DNA, 100 bp, Homo sapiens
tggaagccccaggaggctgtgcaggtggatatcaaagtattgcagagtgccttagcagccatccgacatgcccgctggttcgaggaaaatgcttctcagt

SEQ ID NO: 228752 - DNA, 101 bp, Homo sapiens
tacaatagcagattctaatcaaaatatgcagtctcttttaccagcagactcacaccacccggcaagaactgctcactacggctccctgccccagaagtcac

SEQ ID NO: 228753 - DNA, 88 bp, Homo sapiens
ctccggccggcggcggcggcggcggcggcggcggcgcagatctgggacatgagcgatgatgagaccatctgagatggccccgctgtgg

SEQ ID NO: 228754 - DNA, 100 bp, Homo sapiens
gtgaaggacatgaaaagatgtcttctaacgcagaaaagaagagcagccagcggcggacaatccttgaaatgctcctgggtttcttgaagctgcagcagaa

SEQ ID NO: 228755 - DNA, 98 bp, Homo sapiens
acatcttgttttttcatattacatctacaagaggggacaagtacctttatgaaccagtgtatcccaacatgttgacatagcggctttattgataaaat

SEQ ID NO: 228756 - DNA, 83 bp, Homo sapiens
cctgggcggagaggctggttcgcgggctgcgaggtgagaagccctaccactgcaactgggacggctgcggctggaagtttgcg

SEQ ID NO: 228757 - DNA, 75 bp, Homo sapiens
cagaatcagttttacatacctgttcaggactttgattcctggtttgatacaaacaactgccttggggatcaaaaa

SEQ ID NO: 228758 - DNA, 100 bp, Homo sapiens
tgaagctggtgagagccctgccaggatgtggagtggacttcctagcagaggtgcttttcagtgggaagaattggaagaagatatcaggaagaagttgaaa

SEQ ID NO: 228759 - DNA, 97 bp, Homo sapiens
ttcctcatcatcaaggatcaggaccgcaagtcccgtcttatgggacttgaggccctcaagatggaccagcttttgggaaatatgattgaaatgtggg

SEQ ID NO: 228760 - DNA, 100 bp, Homo sapiens
gaaaaggctcgactggagattgaaccagaatgggcttacggaaagaaaggacagcctgatgccaaacactatgataccctggcaactggaataatttatt

SEQ ID NO: 228761 - DNA, 100 bp, Homo sapiens
cttcatgcttagatacatgtataacaaggttcaatgtatctatgcctgcctacctcaatctgcaagggagtgtcagaaaggccccgcattcgccaagccg

SEQ ID NO: 228762 - DNA, 100 bp, Homo sapiens
gtgccctgcaatgcgatacctgagctacatgtcaccaagccagatccaattctggtacagcagttgcgccggacatacaaatatttcaaagattatagac

SEQ ID NO: 228763 - DNA, 100 bp, Homo sapiens
atgagatcttcagcctccaggctctccagtttttcgtcgagagattcactatggaatcgtgtgtgcaggaacggagaataaactgagctctctctctgac

SEQ ID NO: 228764 - DNA, 74 bp, Homo sapiens
agcagctagcccttttcctcaagaaaagctttgacctggaaatactacgcaaaaaaaattctttactacctgcg

SEQ ID NO: 228765 - DNA, 144 bp, Homo sapiens
gcacgagctcatcagatgatgatgaagaggtttcagggagcagcaagacaatcactgcagagataccaggttcgatacaagaggctgttttcctagcgtggcttgctgcctttggtaagaacatgtcgtccatcttgccattca

SEQ ID NO: 228766 - DNA, 83 bp, Homo sapiens
ctgaagagcgacaagccgctggcagccgcggatctcaccgccgctcagggcaatactgaacactgcgcagcttgcagaggtct

SEQ ID NO: 228767 - DNA, 74 bp, Homo sapiens
gcacatgtgggtagaggacgtgttagacaagttcatgaggacctcagcagccatgtcgaagccccatagtgaag

SEQ ID NO: 228768 - DNA, 100 bp, Homo sapiens
tctctgaacttggcgtcgatgtagatgtgagagccacatcaacccacctcacagcacttcattatgcagctaagacctcccagtgccaagtgtataagcg

SEQ ID NO: 228769 - DNA, 90 bp, Homo sapiens
tttgcagccagtactctatatgaacaatccgtctggatcacggatgtaggaagtggacacatgacggaagtgtgtatttttgggccactc

SEQ ID NO: 228770 - DNA, 100 bp, Homo sapiens
cctcgccgcccgtccccggcacacgcgcagccccggcctctcggcctctgccggagaaacaggatccaaggagctggttctgctggttggaccaaacctc

SEQ ID NO: 228771 - DNA, 97 bp, Homo sapiens
ctggaagcatctttgctaagttttgaaaaacttgaccgtgcctcaccagatctttggccagaacaatgcaatgtatcaggaacacagaggttggatt

SEQ ID NO: 228772 - DNA, 100 bp, Homo sapiens
gctccagggtttgagccacaatgtgatcttcaccttggattctttgttaaaaggagacctaaagggagtcaaaggagaaaattgtagctgaatatgaaaa

SEQ ID NO: 228773 - DNA, 91 bp, Homo sapiens
agaaatcatcacaaaggagtttattttaatgggcggaaccgtggacacgtttgtcccgctggctggaagcctggcagtgacacgattaagc

SEQ ID NO: 228774 - DNA, 83 bp, Homo sapiens
cccggccccgctgagcgatcccaccgaagcagcgtgtcctccgtgggagcccgaggtgctggggagtcagggaagagcaccat

SEQ ID NO: 228775 - DNA, 75 bp, Homo sapiens
cgggatttgggtcgcagttcttgtttgtggatcgctgtgatcgtcacttgctgcactgggtgttcaacagccatc

SEQ ID NO: 228776 - DNA, 100 bp, Homo sapiens
cctaaatgtggcgacttgtgcacacatgtagagacctttgtatgttccgaggtgcaccgattatacccgtggcggccaagccggggggaccagaggcccc

SEQ ID NO: 228777 - DNA, 90 bp, Homo sapiens
cctatgaatcgtccacctctaagtgacaaggagttccatctggaatatgacaaattagaagaacggcctcacctgccatccaccttcaac

SEQ ID NO: 228778 - DNA, 97 bp, Homo sapiens
acaggactacccgcagccctcggacctgtccacctttgtaaacgagaccaaattcagttcacccactgaggctctgtatgaaaaagctgatatcaag

SEQ ID NO: 228779 - DNA, 75 bp, Homo sapiens
ttcggtggaacgaggacgcggactgcgaaggcaggaagctcttcgtgggcggtcttgactggagcacgacccaag

SEQ ID NO: 228780 - DNA, 75 bp, Homo sapiens
accagggacctgcccgcctgcggctgctccggaccgtagctttatgggatctgcgtaacttaaaattaaaactcc

SEQ ID NO: 228781 - DNA, 51 bp, Homo sapiens
cgagcgcctcgacctcggtctgagtacggcaagaagaagctgaaatacctg

SEQ ID NO: 228782 - DNA, 98 bp, Homo sapiens
tggaagtctacctgcaccctggagccgtggtgtttgggcggcctcaggaggatgcattagcacaacaggcctttgaagaggctcggagaaggacacgc

SEQ ID NO: 228783 - DNA, 77 bp, Homo sapiens
cgtacattcggggtgccagaaggaaagcatagatttgaacatggaattcaatccttcagatcatcctcgggccagca

SEQ ID NO: 228784 - DNA, 75 bp, Homo sapiens
agcaccccgagaaccgtcagtttgagccagatgatgacagtcatgtccctttccagggacctcaaggacgacttt

SEQ ID NO: 228785 - DNA, 75 bp, Homo sapiens
attcctcatgggtacatggagttgactattccacctaagaacggagatgccaaagaggtgctgaaaaaatatttg

SEQ ID NO: 228786 - DNA, 75 bp, Homo sapiens
ggtggaagtgacccgattttccaggaaggcactggaggagtttgcagaaatgaaagaaagagaagagaagaaggc

SEQ ID NO: 228787 - DNA, 75 bp, Homo sapiens
gtcttttccagcagctcattcagagtctcggcagacacctgagggtgagttccttccccttgaccaacttgaact

SEQ ID NO: 228788 - DNA, 98 bp, Homo sapiens
tcgcctcagacgcggtggagccgccggagtctgagaaggaccctgatgctcccataagacagaaaatgccccttgatgatctggatagagaagatgaa

SEQ ID NO: 228789 - DNA, 75 bp, Homo sapiens
acaaagagcttgctccctacgatgagaactggttctacacgcgagctggtggtgctggacaacacagccctgaac

SEQ ID NO: 228790 - DNA, 90 bp, Homo sapiens
gtggacgagcaggtgcagctcaccttctctgcagagtacaggggctcaggtccaggtggcaggggatatgctacccaactcaactgagcg

SEQ ID NO: 228791 - DNA, 97 bp, Homo sapiens
gacagcctgagacagttcttacggaaacaccccaggacacaattgcgccaagcccatctttgtgtgcttgcatccaactgtgatgagcctatgtatg

SEQ ID NO: 228792 - DNA, 75 bp, Homo sapiens
tcgggacaccccggaagctgggaaatgacatggaaggtctttaatgtaactttaaatggttcaccaaaggatgct

SEQ ID NO: 228793 - DNA, 94 bp, Homo sapiens
cgaccgagggactgggagtcgttagtgaggtcctggtgcttgatggtcgaggccatctcctgggccgcctggcggccatcgtggctaaacaggt

SEQ ID NO: 228794 - DNA, 100 bp, Homo sapiens
tgctccgcaccccggggtcccaggaagggcggcccagggatgtttcagcagcccctgagaaggaagaggaggaagctgagggcccgctgagggcgcagga

SEQ ID NO: 228795 - DNA, 99 bp, Homo sapiens
gttgaagcgctgggggcagctgtagtgggagtgttccaggattcgccttgttctctcagctactggaagagaaaaacaccctttccattcagctctgcg

SEQ ID NO: 228796 - DNA, 100 bp, Homo sapiens
cctcacttccccggggtgtaataatgttaactgagaaatacactttcgggaaatggcctctaaatcctggctgaattttttaaccttcctctgtggatca

SEQ ID NO: 228797 - DNA, 82 bp, Homo sapiens
ccagcggggagtgtgtgttgccatcgcgtctccgcctgcagcttccccgggcgctgcctggacaggcctgcctgcgtgctgg

SEQ ID NO: 228798 - DNA, 100 bp, Homo sapiens
agagcaagacctctacgtgcgtctcatcgactccatgtccaaacagacccagctcatccagatggtggtgtggatgctgcagcgccggcttctcatccag

SEQ ID NO: 228799 - DNA, 101 bp, Homo sapiens
catgaagggaacaggcatcatggactgtgcgcccaagaccagcatctcagacatgtcgaaaaagatgttttgatccctaaaataatgagagaaaaggccaa

SEQ ID NO: 228800 - DNA, 50 bp, Homo sapiens
cctggagcggccgccttccagcatctcattcgtcggttcggatccaagcc

SEQ ID NO: 228801 - DNA, 100 bp, Homo sapiens
tcggaaaggaaacaaaattcgatttgcaaatcattcagtgaatcccaactgttatgccaaagttctcctgtgcctcctgttggctctctttgcatctggc

SEQ ID NO: 228802 - DNA, 90 bp, Homo sapiens
gcagtttctcaggcagcggcagcgcccccggcaggcgcggtggcggtggcgcgcagccagatttcatgcagaaagagctattggtatcat

SEQ ID NO: 228803 - DNA, 75 bp, Homo sapiens
gccgccgccgctgtccggagccccacagacctgcctagagctggaacgttacctccagagcgagccctgctatgt

SEQ ID NO: 228804 - DNA, 75 bp, Homo sapiens
ggcgttgcaggacagcccccagctgagatgagtgaactgagtgtggcacagaaaccagaaaaacttttggagcgc

SEQ ID NO: 228805 - DNA, 142 bp, Homo sapiens
gaacagtggcagcgcgacctggccagctgccgcgactgggaggagcgccggaacgccgaggcccagctttatcttcaagccaggatgaagggagactgggcaagactcttacgccccacactgcaatttggtcttgttgccg

SEQ ID NO: 228806 - DNA, 100 bp, Homo sapiens
gggaccggcaccactgagaaagatcctatagcaatggaactcagcgatgcaaatctgcaaacactaacagaatatttaaagaaaacacttgatcctgatc

SEQ ID NO: 228807 - DNA, 75 bp, Homo sapiens
gcgcgggcaaggaagtgctgctggaagctacccaggtggatttagacaagtaacagctgctcagcttcacctgag

SEQ ID NO: 228808 - DNA, 98 bp, Homo sapiens
ccagtgtttccacaatggaaccaattgttttacagtctgttccacatgatcattgtaataagaacagctgaatagatttgctggatttggtattggac

SEQ ID NO: 228809 - DNA, 50 bp, Homo sapiens
aagtgtcagcgctactgccgcagggtgtcaaattgagaaccaggtagatc

SEQ ID NO: 228810 - DNA, 51 bp, Homo sapiens
ttcatggccaacctcaggctcagatctttaatctcatgaagtacgacagct

SEQ ID NO: 228811 - DNA, 75 bp, Homo sapiens
ggcccctcaactactaccgaaacctcttcagaggcggggtttcaccatgttgcccagactggtcttgaactcctg

SEQ ID NO: 228812 - DNA, 100 bp, Homo sapiens
ctttctcagcaccttggcgaagccttgggtttctttcttaaaggactgatttttagaactccacatttgaggtggggacctgcactaccacctctcccag

SEQ ID NO: 228813 - DNA, 75 bp, Homo sapiens
cccctgtcccaggtgctcctggagggacagaaggacggcttgctctgtggatagcaactggatcgtgggtgccac

SEQ ID NO: 228814 - DNA, 83 bp, Homo sapiens
ggacatccctggccacgcctccaaggaccgatacaagaccatcttgccaagtaaaaatgcatttgcaaagggagaaaatgaag

SEQ ID NO: 228815 - DNA, 75 bp, Homo sapiens
gcggcagccgagcccgcccgcgcgccggtactccaaagattcaggtttactcacgtcatccagcagagaatggaa

SEQ ID NO: 228816 - DNA, 96 bp, Homo sapiens
aacaaagtgagcctccagtaaactttattcaaagttcacaacagtaccagaaattggagatattgctggtgttgctgatgttacaatcagacagtc

SEQ ID NO: 228817 - DNA, 88 bp, Homo sapiens
cacgccaataactcagtcactggctgcaacaggaccacagtcaagacgatcatagtcactgatgtcagccaggaagatgttcccctcg

SEQ ID NO: 228818 - DNA, 51 bp, Homo sapiens
tgagatggtagacaaaaccccaggagagtggcttcttcccatttaaaccct

SEQ ID NO: 228819 - DNA, 101 bp, Homo sapiens
ccagagcacgacgagcgcggaggaccgggaggctcccgggcttgcgtggacctgcctagagctggaacgttacctccagagcgagccctgctatgtttcag

SEQ ID NO: 228820 - DNA, 96 bp, Homo sapiens
gtcactgcacctccatcctaccctcctaccaggtgatgatgaccaaacggaccaaagacatgggcaagttcagttctgtcaccgtgtctaccattg

SEQ ID NO: 228821 - DNA, 100 bp, Homo sapiens
ccatcagcctcggtgacagtgtggagatccctgccctcaaggtcacccgtgtgaacagaaagtgagaggttgtagcacattgccaccgtccagatctcgg

SEQ ID NO: 228822 - DNA, 75 bp, Homo sapiens
gtccacccaccgccgccgcctcccaggaccagctgtactggcgctacgatgaccacacgaggcacatggaccccg

SEQ ID NO: 228823 - DNA, 101 bp, Homo sapiens
gggacggcagtgctgaggcggaacaggccgggcaccaaggcgcagtgtcttgggacaaggtgcgcattcctggtgtgctgcagcgattgggagtgacatac

SEQ ID NO: 228824 - DNA, 105 bp, Homo sapiens
cttggggccactccggaggagcctctgttggacttcaagcgagtaaccagctcataaatcacatcgaacagtttttggatactaatgaaacaccgtattttatga

SEQ ID NO: 228825 - DNA, 74 bp, Homo sapiens
gaccctgaggaaggccatgaaagggctcggtcacagaattttccacactccttgacagaggtgcttaaccctta

SEQ ID NO: 228826 - DNA, 107 bp, Homo sapiens
catgcttctgacggccaatgaaacccccaagatgggcatctattacattccattgcctgacctggtaccccagctggggacactctaccagttaatggaaagcagag

SEQ ID NO: 228827 - DNA, 75 bp, Homo sapiens
ctctgtccccggccgccatggagcagccgccggcgcctaagaggagtggcaagaattacaacaaagcatacagcg

SEQ ID NO: 228828 - DNA, 82 bp, Homo sapiens
gaacgaggcaaggagctaaagcagcgtgcgttcagccctggggagtacgagagggcctccaaagtggaccagtttgtgacgc

SEQ ID NO: 228829 - DNA, 75 bp, Homo sapiens
aatccaagtcaaataccaagcaaaatagtgtgcctccttcacagaacatgtgcattgccattgcgatttctcttc

SEQ ID NO: 228830 - DNA, 80 bp, Homo sapiens
ggacgcagggcgctgggccgggtttcggcttcggccacagatataattgaccctgcaatcctgcgcccgggccgcctgga

SEQ ID NO: 228831 - DNA, 82 bp, Homo sapiens
ctcgtggcctggtctccattatttgagatgagttacatcttggagaatggtgtgctcttgcttgcacagcttttgaatgagg

SEQ ID NO: 228832 - DNA, 100 bp, Homo sapiens
gaccctgcctgcctgaggaggcctcggttggatgcgaaggagctgcagcatccagatgagcgtgaagccgtgcagaagaagaccttcaccaagtgggtca

SEQ ID NO: 228833 - DNA, 90 bp, Homo sapiens
gaagccgatccccatttttattgaaagatgtattgagtacattgaagccacagacttcccaagtaagaagcggaagaggagccgctggaa

SEQ ID NO: 228834 - DNA, 98 bp, Homo sapiens
caggagaggcggggtcggcgggagccagcgagccacgggagcgagccaggtgagaagccctaccactgcaactgggacggctgcggctggaagtttgc

SEQ ID NO: 228835 - DNA, 156 bp, Homo sapiens
ataggcaccaagaactaacacatcctggagctgcccggagttccgctcctgcgggcttagcaggaaagggtgcctaaggaagccagttgagggaagttctccatgaatgtacgtcacaatgatgatgaccgaccaaatccctctggaactgccacc

SEQ ID NO: 228836 - DNA, 100 bp, Homo sapiens
ggccctggcgggtgccctggctaccatggaccatcctgctggtcagcactgcggctgagctcttcagaaaccaggctgctttcaggaacattgctgtgga

SEQ ID NO: 228837 - DNA, 98 bp, Homo sapiens
tacaaacccgtagtgctgatgaaccaatgacaacatttgttgtctgtaatgaatgtggaaatcgatggaagggaggagctttatctttatatactgcc

SEQ ID NO: 228838 - DNA, 100 bp, Homo sapiens
cgaggtgctgtcgccgctgtccccaccactgcagccatgatctccttaacggacacgcagaggcaagaagagtggactaactcaagacacaaggcacctt

SEQ ID NO: 228839 - DNA, 100 bp, Homo sapiens
cagacaccgagcttcagcaagctctctccaacggcctcatgcattgtgcgtcagcagcaatgtttatggtgaaaaatggcaacgggaccgcgtgcataat

SEQ ID NO: 228840 - DNA, 104 bp, Homo sapiens
tggcggacggggagctgaacgtggacagcctcatcacccggctgctggaggttgcctgacctggtaccccagctggggacactctaccagttaatggaaagcag

SEQ ID NO: 228841 - DNA, 90 bp, Homo sapiens
gtcggcagcaagaacagagagagaggtggacagatctgagagatactgaggaacccagaatgggggcttcgggacacagccctcctggag

SEQ ID NO: 228842 - DNA, 75 bp, Homo sapiens
gaaaaagttcattgatatagcagctgctaaagaagtcctctctgatccaggtaacctgtgtatggtgactggagg

SEQ ID NO: 228843 - DNA, 75 bp, Homo sapiens
cttggcctcggaggatgcagcctttggactcaaggtggttcacgggggcaagtgacagccctggtttctctgaag

SEQ ID NO: 228844 - DNA, 50 bp, Homo sapiens
cccaggagaagccgcccaaagaactgcttgatggaccagacaaataggat

SEQ ID NO: 228845 - DNA, 100 bp, Homo sapiens
gctgccagatccgctgatctagtgcttctcgaaaaaaaccttcaggcggcccatgggcaatgtgcagaatatacacaaggaagataaacctttaagtctg

SEQ ID NO: 228846 - DNA, 97 bp, Homo sapiens
acctggagccctgggatgcaggtgaactcacagccaatgaggaacttgaggctttggaaaatgacgtaggcggcgactggcggcgcgatggacctga

SEQ ID NO: 228847 - DNA, 100 bp, Homo sapiens
aaaatttgagggagttatggatggataataatgcattacaagtgttacctgggagaaagtctgtgattgctgtgagcttcatagcagcgttccttttcct

SEQ ID NO: 228848 - DNA, 75 bp, Homo sapiens
accaggatgatagacctactggagaatgccagctgatgaagaccgagaggccgcgacccaacacctttgtcatac

SEQ ID NO: 228849 - DNA, 83 bp, Homo sapiens
cgaggacgaggaggcagccacggggcccctgggtgaggccagagacaggcagacagcagatgtattgcagggagctggatgac

SEQ ID NO: 228850 - DNA, 48 bp, Homo sapiens
ccattaactgaattgattaatcagcatgaatgtcagcatcatcattca

SEQ ID NO: 228851 - DNA, 85 bp, Homo sapiens
agttacagagggccgagaaggacaggatcaggcagatggctcggtgagctgcaagaggacagactgtgtggactcctgccctcac

SEQ ID NO: 228852 - DNA, 97 bp, Homo sapiens
caggaaacgggaaagatggcgacggctccgcgacgttgaggccgcgttgggcggttcagactcagggtgagagcagctctaaattgggaagcaatgc

SEQ ID NO: 228853 - DNA, 75 bp, Homo sapiens
ccgtgctccattatgtcgtgtgcttccccggtggtgcttcccacctttatcctggagaagcgatctttgctggag

SEQ ID NO: 228854 - DNA, 114 bp, Homo sapiens
agcgagccagcgagccgccgacccgccgagcaaaatgtactatactggcaattgctggagaagattttgcaattgttgcttctgatactcgattgagtgaagggttttcaattc

SEQ ID NO: 228855 - DNA, 51 bp, Homo sapiens
cttcatcaaaaatagtgatagctttgataatgagaaggcaaccaaagtgca

SEQ ID NO: 228856 - DNA, 90 bp, Homo sapiens
aactgaagtatctgcccctgtcaaatcattccaggtcttatgaacttacccggaaggaccgactgtacaaaaacattattcgaatgcagc

SEQ ID NO: 228857 - DNA, 76 bp, Homo sapiens
aatggtatcaagaaaccccgatcacaaagatacgaatctcttaagggggggaaactgactctactctgtgatgcca

SEQ ID NO: 228858 - DNA, 98 bp, Homo sapiens
caagatgtgaactgtttctcttctgcagaaaaagaggctcttcctcctcctcccgcgacgacctagaggatcaagacataatgggagcatttttagac

SEQ ID NO: 228859 - DNA, 100 bp, Homo sapiens
gtttaaaccattggtccttcgccgtcagtatttgaggagaaagcatttgattaaagagtctattgttggggaaatcagacgggaaattgtaagtggactt

SEQ ID NO: 228860 - DNA, 75 bp, Homo sapiens
cgcagctggcggagctggagctggagctctcggaggccactgaggcggctcccagctgcgttggcgacatggccg

SEQ ID NO: 228861 - DNA, 90 bp, Homo sapiens
gaggcggcgggctggagacatggaccgcggcgagcaagatcttacagactctttcagcacctacgaaaaatttagaacagcaggtgaatc

SEQ ID NO: 228862 - DNA, 100 bp, Homo sapiens
ctcagattccattagctgctgtcatcaagccctttgccaccattccttcaaatgagatttattaactccaaggcaagaagcagttcctgttgtctcttta

SEQ ID NO: 228863 - DNA, 74 bp, Homo sapiens
aacgggctgctctacgccggcttcaaccaggaccacgggggcaagcgcgatgaagagctggttctgcccatcaa

SEQ ID NO: 228864 - DNA, 133 bp, Homo sapiens
aaaatattcaagatgtgcagagtcaaatcagtaaaattggtcttaaggatcctactgttccagctgtgaaacatcgcacccagtttcatgtatttgaatcgacaagacagctccctcgattctccatgtatgc

SEQ ID NO: 228865 - DNA, 100 bp, Homo sapiens
cttagctgtgctcgcgctactctctctttctggcctggaggctatccagcagatgtacagtcttactacgtctttgtgagctcatggatgatgaaaatgg

SEQ ID NO: 228866 - DNA, 100 bp, Homo sapiens
gtacgtgcggaaggccctcaacatcccggagcagctgccacaatgggacatgtgcaaggacacggccaacacggtgaaggaaaagttcgggaggaagctt

SEQ ID NO: 228867 - DNA, 75 bp, Homo sapiens
ccggcgcccctgagccggccgagcggcgacggaccgcgagatgagttttgatcatcctgagaaaaatgggccttg

SEQ ID NO: 228868 - DNA, 75 bp, Homo sapiens
ccgtttggagggtcacaaagaagggattgtacagactgaacagattaggctgaacacccaaacccaggagttcgg

SEQ ID NO: 228869 - DNA, 74 bp, Homo sapiens
tgactacgaatctgtgaatgaatgcatggaagtttgctgctttgtggtgcacaagcggtgccatgaatttgtca

SEQ ID NO: 228870 - DNA, 50 bp, Homo sapiens
gggatgggatccacggacccctgcttgtcactactccatccagaagggag

SEQ ID NO: 228871 - DNA, 96 bp, Homo sapiens
tcctggagcagttgtatgtgtagaaagtgaaatcagaggagatgtaactatcggattcactttggacagatcactagcaatcaaatgcttgtgcca

SEQ ID NO: 228872 - DNA, 97 bp, Homo sapiens
ggcagatgagcagccctttgatctctgctttgggggccgaaggcagttctgcaagaggagctattctgatcttggccctcgggaccaaggatcacgt

SEQ ID NO: 228873 - DNA, 96 bp, Homo sapiens
cacccaacgcgaagacggtaacccgtgtgactttgactggccacagtcttcctggagttttggaaaaggagaaggagtatactgacctatacttgg

SEQ ID NO: 228874 - DNA, 100 bp, Homo sapiens
gaaacacaagaccttcgtggaaaaatacgagaaacagatcaagcactttggtcaaaatgcagatcttcgtgaaaacccttaccggcaagaccatcaccct

SEQ ID NO: 228875 - DNA, 98 bp, Homo sapiens
taccctggtggacgtgcacccagaggaccaggcggcgtattctaccttgtaaatactgttatttgtatatactgtaaatgatgacatcggtgggcact

SEQ ID NO: 228876 - DNA, 113 bp, Homo sapiens
cctggaccctgcccagcagaatttgtatagagatgtgatgttggagaactacagaaacctggtctccctaggactccctggaggaaaagcggaagcggcagcggtctgaacgc

SEQ ID NO: 228877 - DNA, 74 bp, Homo sapiens
aaatatcagccatctaacagagctgcaagagttctgggttcctctcctggctgaaatttatggtatagaaggaa

SEQ ID NO: 228878 - DNA, 83 bp, Homo sapiens
ccggccaggcccagccgggccctggacaggattatattccatcacaacaagatattctgcttgccagaagacccaccaaaggc

SEQ ID NO: 228879 - DNA, 121 bp, Homo sapiens
cctgcatctctgcaaactcaacttgctgggccggtgcaactattcgcagtccgagcgctgctctgttaaaagcgaaaatgaaacaattgcctgcggcaacagttcgactcctttcaagttc

SEQ ID NO: 228880 - DNA, 75 bp, Homo sapiens
gtgagcccattgccatgacagtgcctcgaaagatctgatggtgcacaatataatgaaggaagtagagactcaggc

SEQ ID NO: 228881 - DNA, 50 bp, Homo sapiens
aatatttactaagaggtaaatgacgcaagacacgaagatcgattgagaag

SEQ ID NO: 228882 - DNA, 82 bp, Homo sapiens
gggagagaggtacctctccttttccctctccctttccctaaggacacagaatttccaggtgttgtggtgcgaccaattggtg

SEQ ID NO: 228883 - DNA, 97 bp, Homo sapiens
ccgcatgagagccggacaaactcagacatcgtggaggctcccagccaacctctgataaaccctcccagcggccatcagagagcacaaattgtagccc

SEQ ID NO: 228884 - DNA, 90 bp, Homo sapiens
ctaccctggaggagattctggggcagtatcaacggagtctccggggtaaactgtcttgagccccaccctcacctgcctgtgctggcaacc

SEQ ID NO: 228885 - DNA, 100 bp, Homo sapiens
cgaggcctacagaacctagcctatcagctggggctggatgagtgttgctgcttttgctcagaggacatccatgaccctaatggtctttttgttcaagata

SEQ ID NO: 228886 - DNA, 85 bp, Homo sapiens
gcatatgacccacaggttggagattacttcatagaccacaacaccaaactcctgggacccttggacagaggggatatgctaaatg

SEQ ID NO: 228887 - DNA, 75 bp, Homo sapiens
ccacactccaggaatgccagtgcatcttttgcacagctgtcctcagaatggttggaatgaccctccagctttgaa

SEQ ID NO: 228888 - DNA, 75 bp, Homo sapiens
gaaactaaaaacgcatctatctaacgtttaccctagcaaaccagaagaggagcaggacttggatggtgagaaggg

SEQ ID NO: 228889 - DNA, 96 bp, Homo sapiens
ctgagcgagctgtcagagcccggggacggcgaggccctcatgtaccacacgattgatcgtgtcctgtgctgaagatgtttccggaacaacagaaag

SEQ ID NO: 228890 - DNA, 87 bp, Homo sapiens
tggatgcattttaactaatcctgaggacttcatccggtcaccatctacctattcttcaaatggtgcagtctttgcaagccacatttg

SEQ ID NO: 228891 - DNA, 82 bp, Homo sapiens
tcaatctctggaaaaacttcttgccaaccaaacggagctggagtttgttcagatcatcatcatcgtggtggtgatgatggtg

SEQ ID NO: 228892 - DNA, 73 bp, Homo sapiens
ccctgacttgggacatggcctgtcggattatcctgcccccagagaaggagcttaatgccaggaacagattttg

SEQ ID NO: 228893 - DNA, 88 bp, Homo sapiens
cgcctgccattgggccggatggcgaggtgcttttgaagatgatgatatcacgcacgttgaaggaagtgtagatcctattcgagatata

SEQ ID NO: 228894 - DNA, 50 bp, Homo sapiens
aggcagcccccaaatcccggcccagccacagctccggagcaagccccagc

SEQ ID NO: 228895 - DNA, 83 bp, Homo sapiens
agacatttcttcggcattctgcaacagaaatcaatgtggactgaacataaatcacctgatggaaggacttactactacaacac

SEQ ID NO: 228896 - DNA, 98 bp, Homo sapiens
aaacggcaacgtgtaatcagaaggcacagattagaggaaggaagagggtttggtgcaattctccattaatgaagataacatttgaattccccaaagca

SEQ ID NO: 228897 - DNA, 75 bp, Homo sapiens
taaacagtacaaggtgatgaagactatccctctatacaatgcaatttcagaactggtcagcccagacatcttcat

SEQ ID NO: 228898 - DNA, 96 bp, Homo sapiens
aaactctgacccttcctggcacactggtctcctgcactgagctgggatccgcgttccagccttcctggacctgttcatgcagtcactctttaaacc

SEQ ID NO: 228899 - DNA, 74 bp, Homo sapiens
gaacatccccttccaggcccacagccgggagatccgagagctcttcagacccaacatgagtgaagtttcctgca

SEQ ID NO: 228900 - DNA, 103 bp, Homo sapiens
ccttccggctccgtcgtggaagcaggactgcgccgcgtcttcctcaaggtgtccctggccagtgtccttccacctgtccacaagcatggggaacatcttcgcc

SEQ ID NO: 228901 - DNA, 100 bp, Homo sapiens
gctgatgataggggggttccatctcccaacttgtccatgtatctcgggggagctttgtgccttgatggatcaagttcatcatatgcagcactcaaaatgg

SEQ ID NO: 228902 - DNA, 100 bp, Homo sapiens
aagcataatgacattgtggacagtgacagcgatgctgaggatcgaggaacgttgtctgtgagatggaagattttcgaggtatagcagaagaatcatttcc

SEQ ID NO: 228903 - DNA, 75 bp, Homo sapiens
gtgatgtttctgtagaatctaattcctggtgcccctgatgatgaagcagtacggatatttttagaatttgagaga

SEQ ID NO: 228904 - DNA, 88 bp, Homo sapiens
cgccgccgccgcagccgccggagccgcaatgcctaaaggaggtcatatgcaaacacagagctctccttttgctcggggaaatgtattt

SEQ ID NO: 228905 - DNA, 75 bp, Homo sapiens
gacgggtttgtgagcctggactcgccctcctatgtcctgtacaggtttttgagtcatgatgcaagaatctgggac

SEQ ID NO: 228906 - DNA, 96 bp, Homo sapiens
tgatgctcaagaaattctgcaagcacgcttcccgatgccacgttacatcaacacggagcatggaggcagtcagttggcaaacatgaattgactggg

SEQ ID NO: 228907 - DNA, 100 bp, Homo sapiens
aatctaaagcctattggctctggggctcagggcatagtttgtactatactggcaattgctggagaagattttgcaattgttgcttctgatactcgattga

SEQ ID NO: 228908 - DNA, 123 bp, Homo sapiens
aaaaatgtttacttcagagaaaggggttgtggaggaatggttgtcagagtttaagaacacttcctcgtgggtactgtataacatggcttcattttactggagaattaagaatgagccatatca

SEQ ID NO: 228909 - DNA, 99 bp, Homo sapiens
tggaagccgagaagcctctgaggcgctatggggcggtggaggagacggcttggaaaacggagagactggggagaaggaagccgtggcggacggagcaga

SEQ ID NO: 228910 - DNA, 101 bp, Homo sapiens
gcccaccgactttgaggatctggaggacggagaggacctgttcaccagcactgtctccaccctagaggtataccaagcttggctacgcaggcaacactgag

SEQ ID NO: 228911 - DNA, 98 bp, Homo sapiens
ctgcatcctgcgttcccctccatccttctggatctggccaacaccaccggcacagtgacggcttcagagggtctttcatggtgctgattcagacatag

SEQ ID NO: 228912 - DNA, 83 bp, Homo sapiens
gttccccaacggctccccgtcgtcctggtgctgcagcgtgtgccgtgcaggtgaagctggagctggggcaccgcgcccaggtg

SEQ ID NO: 228913 - DNA, 82 bp, Homo sapiens
gtgagatgcagagccccagctcctgtctggtctgtgagatgtcctcactgtttcaggagctctacgaactcgacggggaccc

SEQ ID NO: 228914 - DNA, 75 bp, Homo sapiens
gcgcatccccgcggacgccacagcgctgacgtgtttgagatgaggtttgccaagatgccagatgagcccgtggag

SEQ ID NO: 228915 - DNA, 125 bp, Homo sapiens
tgaaagacgaatttaggagacataagaccgttggttctgacgaggcacagcgtttcttgcaagaatgggaggtgtcatggagaaactccagctgggcccagagattctgcagcgggaaaatccaa

SEQ ID NO: 228916 - DNA, 82 bp, Homo sapiens
gtggccgggccggcagagcagggggccgaggacaccaggtggaacacctgcagcaggagactgctgctctgaaaaagcaaat

SEQ ID NO: 228917 - DNA, 100 bp, Homo sapiens
caagctccattggcagaagaacggagactacttgtgtgtgaaagtagataggactccgaaaggcacccagtgagacggtttaagcggaagcatcttactg

SEQ ID NO: 228918 - DNA, 75 bp, Homo sapiens
cagcttggttgcacttgagaaaattaatgtggcagcttgcaagtagaagtctcaggcaacagattaaaccagcag

SEQ ID NO: 228919 - DNA, 100 bp, Homo sapiens
gagccggaacgtcatccctgatatccctgaccacttcctgtgtctgtgggagcactgtgagactccaaccgggaagactttgacccagcacctgtaaaga

SEQ ID NO: 228920 - DNA, 100 bp, Homo sapiens
agccgttgcgcccgatgccgcgtcttcgtgtgcccagggaccctgcagaaggtgctggagcccacctcgacacacgagtcagagcaccagtctggcgcat

SEQ ID NO: 228921 - DNA, 100 bp, Homo sapiens
gagtgcccccagcccagagcccggcctgtagtggtggagacacgcccagtggatgatcctactgctcccagcaacctctacatccaggaatgagtcccta

SEQ ID NO: 228922 - DNA, 75 bp, Homo sapiens
gaacactttgcacagttcggccatgtcagaaggtgcattttaccttttgaaaatctacctgatttttataatgac

SEQ ID NO: 228923 - DNA, 83 bp, Homo sapiens
gggacgagcccgcctccagctccaggccggtccgctgccagttttgtaccaatggctagaagcagatcgtcatggcaagagcc

SEQ ID NO: 228924 - DNA, 100 bp, Homo sapiens
tgtttatgaagcactgagaaatccttctcttggagtcaagaagcctaccaaagccctgctctttgtactcttgagcccagtgggaccttatttttcaagt

SEQ ID NO: 228925 - DNA, 100 bp, Homo sapiens
ctgcacttgaggcccagaatgcactgcacaatattaaaactttacctggggatcactgtctcaagagctgtagtggtcactcatatataagaaagaattg

SEQ ID NO: 228926 - DNA, 90 bp, Homo sapiens
caccttttccacagggaattgagttggaagcaagatttccagatgtagcaaatgggtttattgaggaaataattcattttaagaattatt

SEQ ID NO: 228927 - DNA, 100 bp, Homo sapiens
tgtccggaggtttgcaggggtgcagtgtgtctggtcttatgagtctcagatgcaaacatcagtgggaattgtacccacacaagcaattgcaacaggcccc

SEQ ID NO: 228928 - DNA, 83 bp, Homo sapiens
ttgcaaggacagccatatttttcagtggacccagaatcaggtacactcacgtggaagctgagtgtcctttcctgacttttgac

SEQ ID NO: 228929 - DNA, 74 bp, Homo sapiens
gatttctccatgagagatgatgttcctcccttagaccgagaagtaggagaatgctgcctttttatatggtcttg

SEQ ID NO: 228930 - DNA, 100 bp, Homo sapiens
tttattttgaaatacttggctgacttacaaaagacttcccctcacacttgacatgattgacaaaaggatgtggaaagctacgatccagttttgaacccgg

SEQ ID NO: 228931 - DNA, 50 bp, Homo sapiens
ctgcctgggggttcagacttgattgtaaactaacattatggatttttcca

SEQ ID NO: 228932 - DNA, 74 bp, Homo sapiens
cggccatggtgcgccgagatcgcctccgcaggggccaaaccagtgctcctgccacctctctggctgccccctag

SEQ ID NO: 228933 - DNA, 75 bp, Homo sapiens
agaggaagaggaaagcaaaggagtcagggatggctctttctcagcttgtcaaaattcccaaaaatgatcccctca

SEQ ID NO: 228934 - DNA, 82 bp, Homo sapiens
tcgggtgtctcgtgtgtgaacatcacaggaccaagaatcgccttcagccctgtctggtgcatccttggcagaaagtgaggag

SEQ ID NO: 228935 - DNA, 83 bp, Homo sapiens
gctgcttaggccggggcgtttcgacaggcagatctttattggaatgggtaccacagaccatgtcatcgtcctggcgtccacga

SEQ ID NO: 228936 - DNA, 101 bp, Homo sapiens
tcccaggctcaagcaatcctaccatgtcagccttcccagtagctggaactacagctgactttggtttctgtgcccagatcacccctgagcagagcaaacgc

SEQ ID NO: 228937 - DNA, 82 bp, Homo sapiens
taaggatttttaccagtttacttttaattttgcaaagaatccaggacaaaaaggattagaatcgatgatgcaaccaacttgg

SEQ ID NO: 228938 - DNA, 106 bp, Homo sapiens
tgagcctgttggaggaactggcccggaaacaggaggacgactcctcctattttgaggacttctccaacatctccatcttctcctcgtccgtggactccctgtcgga

SEQ ID NO: 228939 - DNA, 87 bp, Homo sapiens
tactcctccagtagcaaggaccagtccctcggggggaacgtggtcatcagtggtcagtgggggtggcacaagatctctgtaaagtag

SEQ ID NO: 228940 - DNA, 100 bp, Homo sapiens
cgccaacatgtacagggtcggagggggagctcttaagcccctgccgctgcgacggctcagtgcgctgcacgcatcagccctgcctcatccgctggatcag

SEQ ID NO: 228941 - DNA, 98 bp, Homo sapiens
tcatagcagctgcctgccagaatggaagcatacagatctgggaccgaaatttgactaattcagcattattctggcagacattcacaaagaactgacaa

SEQ ID NO: 228942 - DNA, 87 bp, Homo sapiens
tctgcatccttaactgagaatgaggtgctggagaatctggtaaaagcaccattgtgaagcagatgaggatcctgcatgttaatgggt

SEQ ID NO: 228943 - DNA, 75 bp, Homo sapiens
caaggagttatctattgctatccgtggatatggactttttgcaggaaattatatccagatcgagagacagaagat

SEQ ID NO: 228944 - DNA, 75 bp, Homo sapiens
cactctgttaaagctggtctgttctaactgagtggcactaaggaaaacagatcatctctccctagacaaagccac

SEQ ID NO: 228945 - DNA, 90 bp, Homo sapiens
gggaaacgtgcaccttgactaattcggttttctgtggctacgagagcaggtactgggcctaatcgctacgtgcctctttggctatgatgc

SEQ ID NO: 228946 - DNA, 87 bp, Homo sapiens
tgcttccaatcttttacaaagcatgggagtgcagctgcctgacaacaccgatcacagaccaacaatcattaacagctgaagagaaga

SEQ ID NO: 228947 - DNA, 96 bp, Homo sapiens
ggacatcttcagactatttatcaccatatataaggatgctctaaaagcgatgaaatctacattgctccttcaggagtgcaaaaggaacgaattcag

SEQ ID NO: 228948 - DNA, 82 bp, Homo sapiens
tggccgccccgagcggagcctggagattacctaaaacctcgggcagaagaggagaggaggatagcagcagaagagaagaaga

SEQ ID NO: 228949 - DNA, 100 bp, Homo sapiens
ccgtcttggctcagacgctcatgcgacatctcgaatcagcgatgcacacttggcagacacaatgattggcaaagcagtggaacatatgtttgagacagag

SEQ ID NO: 228950 - DNA, 74 bp, Homo sapiens
gtcatggggctctgtcgggaaggtgacagccgtgagggtgtatgtgaacagttcctctgagaatctcaactacc

SEQ ID NO: 228951 - DNA, 75 bp, Homo sapiens
caacaaattcacttggaacaattgtcagcagagaagccaaacttcagtttgcctcacgtcagctaactgttcaga

SEQ ID NO: 228952 - DNA, 50 bp, Homo sapiens
tcatgggcaaaggacagatccaggtgctggctgccagctgctgcgccccc

SEQ ID NO: 228953 - DNA, 75 bp, Homo sapiens
cagttactcgcacaaccccagttaagctgcgctccgggagtcactcagcctctgaagaagcttcgggttcagact

SEQ ID NO: 228954 - DNA, 75 bp, Homo sapiens
cctgtgggtcttaccattctttggtgctaacatctgatggagagatccagctccaggtcccacaggggctcttct

SEQ ID NO: 228955 - DNA, 100 bp, Homo sapiens
agcccttcttcacatgcggctcagcagacagaccccgtgcggctgacacagctgtatgagcaggcccggtgggacctgctgctggaggagattgactgca

SEQ ID NO: 228956 - DNA, 75 bp, Homo sapiens
ctcgggggtcatgatgggcagcaagatggcgtctgctagtagggtcgttcagacctgcctagagctggaacgtta

SEQ ID NO: 228957 - DNA, 90 bp, Homo sapiens
attttaaatgccatatatgtcacaagaaattgtatacaggacctggcttagctattcattgcatgcagaatgcaagttctagccggtttt

SEQ ID NO: 228958 - DNA, 74 bp, Homo sapiens
gtgcagatcattgctttttttgcccacctagcttgtaacgaagacaatgcagatcttcgtgaagactctgactg

SEQ ID NO: 228959 - DNA, 51 bp, Homo sapiens
agtcagcgccgtcaggaccgcagggagtaactattcccagtcagaggcgct

SEQ ID NO: 228960 - DNA, 80 bp, Homo sapiens
gtccagagctgaggactgcctgtttgcaggtgaggaaaatagcagctgaatactatgacaacctccctcactacaattcc

SEQ ID NO: 228961 - DNA, 95 bp, Homo sapiens
ctccccagccacgtggaactatatggctcgtggacagcagaaaattcagtctcagcagaaaaatgccaaaaagcaagctggacaaaagaagaaac

SEQ ID NO: 228962 - DNA, 100 bp, Homo sapiens
gaccgagggactgggagtcgttagtgaggaatgccatatggcagccgagagaactccctcctctactctgagattcccaagaaggtccggaaagaggctc

SEQ ID NO: 228963 - DNA, 75 bp, Homo sapiens
gcctcttcagctcgccatggatcccaactgctcctgcgccgccgtgattacagtggcgagatcttgaacaactgc

SEQ ID NO: 228964 - DNA, 74 bp, Homo sapiens
cagggctgttacatgcctacccgggaaattgcaaagaagattctttggcaagttatgaattgatatgcagttta

SEQ ID NO: 228965 - DNA, 75 bp, Homo sapiens
tctcaatcccaagtggccaaaggctaatgatgccaaaggaggaaaaacaaatggacttgaacactggtcgaatgc

SEQ ID NO: 228966 - DNA, 75 bp, Homo sapiens
tcaggtcctcgggggcggcggccacgccaaggacgggagtggcagaagctcaactatgatatccataccctgcgg

SEQ ID NO: 228967 - DNA, 75 bp, Homo sapiens
atgaggaaccaagacccagggaagatgctccgggaagcagtttgttcgctatataaacatgttgataaacgacac

SEQ ID NO: 228968 - DNA, 90 bp, Homo sapiens
cggccggtgagtgaggcttacagggccccgggaccaagttccagagaggtggatcgcatggtctccacgcccatcggaggcctcagctac

SEQ ID NO: 228969 - DNA, 100 bp, Homo sapiens
ggagattggtgcagagatggcattacgaacctttggccacttggtgaatgaaaactttgccattgatttgatagcagagcagcccgtgagcgaggtggag

SEQ ID NO: 228970 - DNA, 74 bp, Homo sapiens
tcggagccgaataccaagctcggatccctgaatttgatccagagccccccaagatgaacccagtggtggagcca

SEQ ID NO: 228971 - DNA, 100 bp, Homo sapiens
ttcttttactggcaaatagtacttcaagagcacagtcttatgtaagtggtgcctgtggagaggtaaagctggctttcgagaggaaaacatgtaagaaagt

SEQ ID NO: 228972 - DNA, 98 bp, Homo sapiens
ttgcaagaaacctcaggacttgagtaacagcaacatggaaaattgcctaagaattatgacccaaaagttaccccagatccagaaagatggctgccaat

SEQ ID NO: 228973 - DNA, 75 bp, Homo sapiens
catcaaacaaatgaagaaacacctaaagctggccaaggccgttggcatccactgtgaatgataagctggagctgc

SEQ ID NO: 228974 - DNA, 80 bp, Homo sapiens
gcgagaaagcacggggtgaaactgaccacagtgctcaccacccaccaccactggaggcagtggagaaggtgacacagcac

SEQ ID NO: 228975 - DNA, 73 bp, Homo sapiens
cctcggactccgcggccggcccggcgcggcccagcgccctcagagtgcgatgacatggatcctgcggacaaac

SEQ ID NO: 228976 - DNA, 87 bp, Homo sapiens
ttcattggccacctacagaaacaaaatgtcaacaaattgatggaccccctcgaggacggtgccagactcggaggcccccccagggtg

SEQ ID NO: 228977 - DNA, 74 bp, Homo sapiens
cgcagcactggggaaacgatccgctcccaaaacgatgatgtctttctacctaaagatattgacctagacagtgt

SEQ ID NO: 228978 - DNA, 90 bp, Homo sapiens
atgcatcagtgcccttgtggcgaatggggctcacgtcgatgatgctacaggacgaagaggaatggataaaaacattggcgagcaactcaa

SEQ ID NO: 228979 - DNA, 83 bp, Homo sapiens
cttctccagcatgggctcgcctgtcaacgcgcaggcccataacgacctgctgcgcacgtatgaggcaaagctgctggccttcg

SEQ ID NO: 228980 - DNA, 98 bp, Homo sapiens
ccgtcgccttgctcctcgccgcggcggggactgcagggcctcctttctggggcctggtgaatgcagcgtggagtctgtgtgctgtggggaagcggcag

SEQ ID NO: 228981 - DNA, 100 bp, Homo sapiens
catgatcaacgccattcctgtagcctctcttgaccccatcaaggaatggttgaatgcatttgcccagtataacatggatcagttcacgcctgtgaagata

SEQ ID NO: 228982 - DNA, 75 bp, Homo sapiens
aataatttcaatttgaaaacaagtggaatagtgctgtcttccttgtgagtgatggattggaactgagaccgaaat

SEQ ID NO: 228983 - DNA, 82 bp, Homo sapiens
tccactttcgccagcccgtgccgcgagcgcggcctgcaggagtctgcgctcctcagaccaccggcaggtgaacagcctgatg

SEQ ID NO: 228984 - DNA, 100 bp, Homo sapiens
tggtgacagtagcccagcccgccggccaggctccttctcctgaaaaagccgaggaggagagtgagaggcttctgagggaactctatttgtttgatgttct

SEQ ID NO: 228985 - DNA, 100 bp, Homo sapiens
ctgctcttggctctttatgcattctactttgaccctatgagaacctcatttctcttccaaggctggagtgcaatggtgcggtctcggctcactgcaacct

SEQ ID NO: 228986 - DNA, 75 bp, Homo sapiens
ctcaagtgaagcaaaagccttccatgattacgtcagatgggcagacctggaagagaagaaggatgcagataggaa

SEQ ID NO: 228987 - DNA, 83 bp, Homo sapiens
cacacgccggacttcgcaggcccagacgacgcgcgcgcagttgtggcagcactgcctgaaggtatgagaccagattctaatct

SEQ ID NO: 228988 - DNA, 81 bp, Homo sapiens
ggagagtaaagtcagcatgagcaaaaactccaaactcctctccaccagcgccaagagacaatgcagatcttcgtgaagact

SEQ ID NO: 228989 - DNA, 96 bp, Homo sapiens
attggtgctcctcttccatgtgacttttggctggctgtatttaagggttttgtggtctttgcaacccttgtggtcattgtggccttgatattaatc

SEQ ID NO: 228990 - DNA, 50 bp, Homo sapiens
attcccaagccaaagctttccagtgtaaacaggaacatcgataagtagtg

SEQ ID NO: 228991 - DNA, 100 bp, Homo sapiens
gatgtttaaggactccctcccctctagcggcccacctgtagatccagatgaagactctgacaacagtgcaatttatgtacaaggattaaatgacagtgtg

SEQ ID NO: 228992 - DNA, 101 bp, Homo sapiens
gaaggagcaaggctgaagaaccagacctggactttcttagaaacagaagcctatcagttgctgaagaaggccacccttcaggataatacaaatcaaactga

SEQ ID NO: 228993 - DNA, 74 bp, Homo sapiens
gaaggaagcagctagcaaggtgacccatgcattggttaatatcagggaactcaatggcaacaacatcactcgga

SEQ ID NO: 228994 - DNA, 100 bp, Homo sapiens
tcttcgggtctacccctaatcaccttgaagtacatctggattccttatgtgtgcatgttagcagcatttggtgtatgttctcccgaactttggatgacac

SEQ ID NO: 228995 - DNA, 82 bp, Homo sapiens
gctttcaaggctgcgctggcctgcgtgggaggttccgccgagcccgtcccttggcggtggtgtcactggatgctgggaagag

SEQ ID NO: 228996 - DNA, 100 bp, Homo sapiens
ggactcagtcccatcactccaaggagagaaggatgttgccttatggctgtttagcaacaggagatcgctctggcctcattgaagttgtgagcacctctga

SEQ ID NO: 228997 - DNA, 83 bp, Homo sapiens
gaaggacagcttcagggcccggagtactagtctcaacgagagacccaagagggcgaccattgacgaggtggagacggacgtgg

SEQ ID NO: 228998 - DNA, 82 bp, Homo sapiens
cacgagttcctcatcgcggccctggacgtgctccaccgacactgcaaagacaatgcagatcttcgtgaagactctgactggt

SEQ ID NO: 228999 - DNA, 99 bp, Homo sapiens
tgggcccgctaaaccaacccaggatacccaggtttggtgcacctcgatttggaggaagtagggcagggcccttatctggaaagaagtttggaaaccctg

SEQ ID NO: 229000 - DNA, 82 bp, Homo sapiens
ccgccgctgccgccgcgacccttggcgcctgcccctgcaacgggaggctggcgcccatgcggctctacacgctctccaagcg

SEQ ID NO: 229001 - DNA, 75 bp, Homo sapiens
agttccgccatgagctggggcacggagctgtgggtacccactgatggtaatgctggcctgctggctgaaccccag

SEQ ID NO: 229002 - DNA, 76 bp, Homo sapiens
ctgcatctgctgctgaccctcgtgttactccacaggatccgctgaacataggatgttgccacaaaatctacctcgt

SEQ ID NO: 229003 - DNA, 51 bp, Homo sapiens
cttgggccgcgtctcctttgagatataaagatgaagcgcagctgtataaag

SEQ ID NO: 229004 - DNA, 75 bp, Homo sapiens
ttctgttttgcctgaatacatgatttaaacaagagatttccacagaagtggttagcaggaagaagatgagcctta

SEQ ID NO: 229005 - DNA, 100 bp, Homo sapiens
gcggggcctgggcctcccggtccgcaagcaggttgcagaattgtcggagtgcataggctcagcactgatccagaagggcttcaagactgccccagatcag

SEQ ID NO: 229006 - DNA, 74 bp, Homo sapiens
gggaggcagagcggctcagccagcggcagacagaacgggacctgtgtcagctgcctgtgtcagggaatctgctt

SEQ ID NO: 229007 - DNA, 75 bp, Homo sapiens
cctcacggccggcgcttacctctgctacaggacggcaccgaaagcgaaggaagctcctgctcctcctaaagccga

SEQ ID NO: 229008 - DNA, 98 bp, Homo sapiens
agggaatgccacagcatcctccagcacctcaggcttgctatcagaggaagtggagaatgtgccttcctgaatgacaatggagtcaacagtggcagaat

SEQ ID NO: 229009 - DNA, 75 bp, Homo sapiens
agggtcaagtcgtgttctgatcactactgacttgttgggtaatacctgcctggagaatggatctttcttactgaa

SEQ ID NO: 229010 - DNA, 100 bp, Homo sapiens
gcaacagaagtttatcaaggctgtcacacatcaagttaaatttggtcaacaaaatccacgtcagggttgtggagttgctcagtgcttgaagattgtctgc

SEQ ID NO: 229011 - DNA, 100 bp, Homo sapiens
acgttatcttgctcgcctgcggcagcttcaatcccatcaccaaagggcacattcagatgtttggtcaaaatgcagatcttcgtgaaaacccttaccggca

SEQ ID NO: 229012 - DNA, 101 bp, Homo sapiens
ggaaaatgccaacgccgtgtctgaaggcccaggaagtacacgagaagctccgaggatggctgaagtccaacgtctctgatgcggtggctcagagcacccgt

SEQ ID NO: 229013 - DNA, 96 bp, Homo sapiens
atgcaaggatattcctcatatatcatgttatggaggttttgatgactatggtggctataataattacggctatgggaatgatggctttgatgacag

SEQ ID NO: 229014 - DNA, 100 bp, Homo sapiens
ggactttttgaatttcaagaacagtaaagttggaacacagcagagggtgtgtaataaaatacagggccaattcctgtccccccagcagcatggcatcgtg

SEQ ID NO: 229015 - DNA, 90 bp, Homo sapiens
agtatatgttgtcgggtacattgatatatgtaaattacggaagatcatttatatacacatgactacatgaggaaataattgacttttata

SEQ ID NO: 229016 - DNA, 75 bp, Homo sapiens
ggagttttgccattacgagggttcttgggaatagcagggtgaccggaatgagaagatgaaaaatcaaattaagca

SEQ ID NO: 229017 - DNA, 100 bp, Homo sapiens
acgtcatccctgatatccctgaccacttcctgtgtctgtgggagcactgtgagagacggtgccgagacctcaaggccaagggaattttatttgtggggag

SEQ ID NO: 229018 - DNA, 101 bp, Homo sapiens
tgtataatgattcttcctcaataccagcgtaagggctatggcaggtttctcatcgatttcaagagcaatgtggtgttaaaaatgatgaaagtagcagctca

SEQ ID NO: 229019 - DNA, 97 bp, Homo sapiens
gcctggatacagaaggagaaacctgtggaaatgcagaaaagcttgcagaatatatttgttccaggttcatagtggcgtcatgcacgcagactcctgc

SEQ ID NO: 229020 - DNA, 101 bp, Homo sapiens
gtgaatttttgcaaaacaataatttgttatcgattattagagctcatgaagctcaagatgcaggccatcaggagttggtatcctctttgcagattctggtg

SEQ ID NO: 229021 - DNA, 83 bp, Homo sapiens
ggatcacagcaacaaagagagaaacagcagcaacatttttgaaaaaggaatcattgtagtcaatcattttccagttctcagcc

SEQ ID NO: 229022 - DNA, 100 bp, Homo sapiens
cttaaatggggatctggtggtcgtgaaactgcttcccgaggagcattggaaggttctccttactatgacaatgtccgccccctctcttaccctgattcgg

SEQ ID NO: 229023 - DNA, 100 bp, Homo sapiens
aagacatcactgattatgtctctggtcagtgaagaatttccagaagaggatatgctgcaggctgctagtcattatcgccaaaatagaaactctttgtata

SEQ ID NO: 229024 - DNA, 90 bp, Homo sapiens
cccgggcagcgcttccattccgcggagctgggtcccgggattcttgagctgtgcccagctgacgagcttttgaagatggcacaataaccg

SEQ ID NO: 229025 - DNA, 99 bp, Homo sapiens
gcgcactggaggagcggcgggcttcagacaggagccaagccgccatggcctaccacagcttcctggtggagcccatcagctgccacgcctggaacaagg

SEQ ID NO: 229026 - DNA, 100 bp, Homo sapiens
agtatacctgcctaccttgcagagaccctctattatgctatgaagggcgcgggaacaaacgaagatgccttgattgaaatcttaactaccaggacaagca

SEQ ID NO: 229027 - DNA, 100 bp, Homo sapiens
caagagcggcggtagcgcaggggagattacttttctggaagacaagttggatggcttgaggactggtactaaaaggaaacgtgactgggaggccattgcc

SEQ ID NO: 229028 - DNA, 75 bp, Homo sapiens
gtgaccaacttccttgtgacgccagcccaagttcagggcagatgcccagagggtctcgctatgttgcccaggctg

SEQ ID NO: 229029 - DNA, 90 bp, Homo sapiens
ggttcagttggcaaaccagatatatgacttgagactaaggtgtcagtatgttcttcaagctgctctgctcctgggcccaagctattctcc

SEQ ID NO: 229030 - DNA, 100 bp, Homo sapiens
tggacgggctccatgtgcgctcaggcttccccagggcaaacctggtggacctgcagaagaagctggaggagctggaacttgacgagcagcagaagaagcg

SEQ ID NO: 229031 - DNA, 100 bp, Homo sapiens
gttctcccggtgtggccacgagtcggggacttccttccccgcggttcaggaatcgtcacccggcggcctctcattctgcagctcatcttctcaaaaacag

SEQ ID NO: 229032 - DNA, 80 bp, Homo sapiens
acgtgtttgacgggctcctcaccgttgtcctgctgattttgcaagaacgaggctcaaggatgtgagggacacagtattga

SEQ ID NO: 229033 - DNA, 80 bp, Homo sapiens
ttcacgcagtcaagaacgacttccaggtacgaatgtgaagaatcttttacgaccctaaacgtagacattagaaatcacca

SEQ ID NO: 229034 - DNA, 95 bp, Homo sapiens
cggagctaggagctggcggcgacggccacaggggcggcgacggcgcagtgcgaagcgaaacagttgtattccctgaatgactataaaccacccat

SEQ ID NO: 229035 - DNA, 75 bp, Homo sapiens
cctcggcaggaaccgggaccgccagcgcaggagccagatgaaaactcgctggatttttcctcctgtatgttacgg

SEQ ID NO: 229036 - DNA, 75 bp, Homo sapiens
aagaagttgtacaaggattacttgctgaaaatcaacttcacgggctggagtgcagtggcgcgatctcggctcact

SEQ ID NO: 229037 - DNA, 75 bp, Homo sapiens
gtttctaaaagatgtgtatgttgattccaaagatcctgtgtcttccttgcaggccaaagcctcactgtttcaatt

SEQ ID NO: 229038 - DNA, 100 bp, Homo sapiens
ttggttaacttgggagaaagtttcatctgtggatggagtattgtggaaattgatgacttgaaaaaaattaccaattcactgactgtgctttgcagtgaaa

SEQ ID NO: 229039 - DNA, 83 bp, Homo sapiens
agccgtagacaccagctccgaaatcaccaccaaggtcacgaacgagatcacgccggtgctgtcgtactcctacctggccgtgc

SEQ ID NO: 229040 - DNA, 74 bp, Homo sapiens
cagccaccgcggcccccgcgggccaactgtgatttgagacggcagattgatgaacagcaaaagatgctagagaa

SEQ ID NO: 229041 - DNA, 101 bp, Homo sapiens
tttgaagatgacacaccctgggccagcacatctccacctcatcaggaaacagctgagacaggaaaatggacatgaactttgaattttccctttctccaaat

SEQ ID NO: 229042 - DNA, 100 bp, Homo sapiens
agagatcctggacctatgaatatccagtttgagccatcggatctaagatccaaaaggttggtcaaagaaaaagtgatgtatgaaaaagaggcaaaacaac

SEQ ID NO: 229043 - DNA, 100 bp, Homo sapiens
tctggaatcagcttctctcattttctttccctgcaccaactagcagttcaaagcagtattcagcgatttcaagagaagttttttatttttgctttgacac

SEQ ID NO: 229044 - DNA, 100 bp, Homo sapiens
cggtcccccagcccccaccgtcgcgccaggacccgaggacagcaccgcgcaggagcggctggaccagggcggcggccctgggaggagcggggacactgag

SEQ ID NO: 229045 - DNA, 75 bp, Homo sapiens
caacttgctgcggtttttgttcctggggctgagtgccctcgctagaggaagcagagcactttgccatgatggtga

SEQ ID NO: 229046 - DNA, 85 bp, Homo sapiens
tcaacctcaaaacgtgcaataccacctcccctacctcctaagccaaatttgtatcctactgtggggcttcaaacaccaggagaag

SEQ ID NO: 229047 - DNA, 50 bp, Homo sapiens
cagcctcctaagtagctgggactacaggtgcccgccaccatgcccggcta

SEQ ID NO: 229048 - DNA, 75 bp, Homo sapiens
gttcggactatttgtagtcatgtacagaacatgatcaagggtgttacactgggaagacatgtaaggaatttgcat

SEQ ID NO: 229049 - DNA, 90 bp, Homo sapiens
gtggtcaccaggaaggggacgggacggacggtgatggtggtcgccgcggcggcgtgtgcgcccctcagagagcatcagtgatgtcacgtt

SEQ ID NO: 229050 - DNA, 100 bp, Homo sapiens
gtgaccaattcccttggtcaaagaagtgaccaaaaagtcatctacatttcaggttttgaagtacaggaagaaggttatctggcaaaaatcctggtccctg

SEQ ID NO: 229051 - DNA, 50 bp, Homo sapiens
cctcctgagtagttgggattacagggatcagtgtcatttagggatgtgac

SEQ ID NO: 229052 - DNA, 100 bp, Homo sapiens
aagcagccggtgtaaatgttgagcctttttggcctggcttgtttgcaaagctgtcggaaaaggtaacagaagatggaactcgaaatcccaatgaaaaacc

SEQ ID NO: 229053 - DNA, 120 bp, Homo sapiens
aggagctcacctgtgacgatgagccagagacctacgtggcagctgtgaaaaaagccatttccgaagaaaagagtagttgaacagctacggaagaacctgatagtaaagcaagaacaaccg

SEQ ID NO: 229054 - DNA, 99 bp, Homo sapiens
cagtgcgggtggctggctttgccattagcgggggcctttcctgaggacggcgtacggagtgtgggtatgaggatacatgggctgcacttcacagaagag

SEQ ID NO: 229055 - DNA, 75 bp, Homo sapiens
ggaaattgaactaagaaatggagaggcacttgaaaataactatgaagttatattccgagaacctgacactcgctg

SEQ ID NO: 229056 - DNA, 82 bp, Homo sapiens
cgccatgtcgggttattcgagtgaccgagaccgcggccgggaccgagggtgcatctgcagacgcagcaggaggtgaagctgc

SEQ ID NO: 229057 - DNA, 100 bp, Homo sapiens
tctggcaacagctttgcagaagctggaggaagctgagaaggcagcagatgagagtgagagatatgagggaaggcaccattggagatatggctatcctggg

SEQ ID NO: 229058 - DNA, 90 bp, Homo sapiens
gaacgaatgggacaagatcccgtccatgaatcagctccaaagacaacaggccctccctctgccctcccgtctgtgagctccctgcccagc

SEQ ID NO: 229059 - DNA, 100 bp, Homo sapiens
ggacagctagctgcttatggctataaaattacaggtgtgcaactgaggaacatggctcaagaaactaatcacagccaagtgcctatgctttgttccactg

SEQ ID NO: 229060 - DNA, 90 bp, Homo sapiens
gccccttgtcagccagggctgaacccccgcagacaatgcagatcttcgtgaagactctgactggtaagaccatcaccctcgaggttgagc

SEQ ID NO: 229061 - DNA, 100 bp, Homo sapiens
gagatctggaagatcaagaagctcattaagagcttggaggcggcccgcgggaattgaaagatgttggccatcgtgatcagatggctgcagctagaggaat

SEQ ID NO: 229062 - DNA, 74 bp, Homo sapiens
agttcaaatattctggtcctgaagatgatgctgctatcagcctgagtcgagagaaagaacttatgggtttcagc

SEQ ID NO: 229063 - DNA, 90 bp, Homo sapiens
aaaacattcaacaaagatacagtgattatagtgaacttagtgatttggcccgtgaccctccagcacaatgttctgcaggtccagttgggg

SEQ ID NO: 229064 - DNA, 100 bp, Homo sapiens
accggatctatccatatgctgccatctcctatgaagaatggaatgaccctcctgctgtggacagaatgaccgagaacatgaaggagtgcttggcccagac

SEQ ID NO: 229065 - DNA, 88 bp, Homo sapiens
cttcatcgagcacgtggccgatgtggaacagaggcatctccacctacactgcaagaagtggtaaccgaaaaagaatagagccaaacca

SEQ ID NO: 229066 - DNA, 96 bp, Homo sapiens
ctccaggcacagcggagccggcgcggggtccacaaagggcgactttgtcagtaccccaaactgtccccgcatgaggtcactctgcacggtcacgtg

SEQ ID NO: 229067 - DNA, 100 bp, Homo sapiens
ctttgtcagtgcacaaaatggcgccctacagcctactggtgactcggctgcaggtattgttgcagcatctggcagtgagactgaggatgaggacagcatg

SEQ ID NO: 229068 - DNA, 100 bp, Homo sapiens
accacttctggtggttgccactcacctgaggatctgaagttgccccagatccagaagatcatgatggagtttgagcggcaggcagagatcatggatatga

SEQ ID NO: 229069 - DNA, 74 bp, Homo sapiens
tatgatatatttcctttcaaaaagctggttcctctcctggctgaaatttatggtatagaaggaaacattttcag

SEQ ID NO: 229070 - DNA, 74 bp, Homo sapiens
tgcaggagaagatggcggtctccacagctgggatggaaattctatgatgctgatgattatcacccggaggaaaa

SEQ ID NO: 229071 - DNA, 100 bp, Homo sapiens
gggcgcccgaggggccgagcgagggtgaagagggaacagaaatctttgccccctgactttggaaatctcgtttaaccttcaaactggcgatgtcaagggt

SEQ ID NO: 229072 - DNA, 100 bp, Homo sapiens
tccgcctctgatgcagaatttgatgctgtggttggatatttagaggacattatcatggatgatgaggagtctgatgaggaagctgtgaagaaaaccaaca

SEQ ID NO: 229073 - DNA, 51 bp, Homo sapiens
cagaaacaaaatgtcaacaaattgatggagtatatgattgaacgaccagag

SEQ ID NO: 229074 - DNA, 75 bp, Homo sapiens
gctggaggaggagcagggcaacatggaggccaaccaggatctcccaacccgaagacagcaggcagcccaataatg

SEQ ID NO: 229075 - DNA, 50 bp, Homo sapiens
cagaaatggaaagtgttttggcccagaaaacatccagtacagacctttct

SEQ ID NO: 229076 - DNA, 83 bp, Homo sapiens
gtacgacagcctcaaacaggagctggagcagctcaaagaggtccggcctctttggcctacccccgttggctccgctgccccag

SEQ ID NO: 229077 - DNA, 73 bp, Homo sapiens
ccagtttatatccaagacttagatgaggagggagcaaaggagtttgctgctgctctcaccgctgagcggataa

SEQ ID NO: 229078 - DNA, 90 bp, Homo sapiens
caaagcacgaggagcagacctcatgaataaaagccggtgatctttagacagtgactgagtatggatcatttgaacgaggcaactcagggg

SEQ ID NO: 229079 - DNA, 75 bp, Homo sapiens
tccagtagaatttcttatccaagtgccaagtgggaaagggccccggttgccagaggtgtactgtgtcatcagccg

SEQ ID NO: 229080 - DNA, 83 bp, Homo sapiens
agtgggacagggacaagcatatctaagaggctgaacatgaatccacagatcagccccagcatgagaccagatgtaagctctcc

SEQ ID NO: 229081 - DNA, 82 bp, Homo sapiens
ctgctcatcaccaaggccaagaacgggcacctggctgtgtacaagattctgctgtactcattggatggccggttgttgtcca

SEQ ID NO: 229082 - DNA, 100 bp, Homo sapiens
aaaggcagaatgggtggttgcccatctctgctatgaacaaggctgtattcatcaccaaagaaaaaacttacaccaatgcagaaatcggttagtccattag

SEQ ID NO: 229083 - DNA, 83 bp, Homo sapiens
gccaaaacgaggatttgtgttgtgaggttcgagaacttgtcttggacaattgcaaatcaaatgatggaaaaattgagggctta

SEQ ID NO: 229084 - DNA, 76 bp, Homo sapiens
gctgctatgaccgtggggaaggatgttagggatcatagacggtatttctatgtaaacgaacagtcgggcgagtctc

SEQ ID NO: 229085 - DNA, 75 bp, Homo sapiens
tgcaaatgatgtcagcatgattctggaagcgcacgtgggcataggtatccaaaccttgaaacctttgctctagat

SEQ ID NO: 229086 - DNA, 120 bp, Homo sapiens
ccaagagtggcccaaaagagagaatttatctagaggaaaacccagagaaaagtgaaacaattcaggacactgtccaagctgaagatggaagatataaaagaagtgaaccaggcactgaag

SEQ ID NO: 229087 - DNA, 100 bp, Homo sapiens
gagtctgcactcttcagtctttgcagtttttggctttcacccccaaccagtgaccaaagacttgaccactcaaagtccagctccccagaacactgctcga

SEQ ID NO: 229088 - DNA, 75 bp, Homo sapiens
aaggctgtcaggaggtgctgttaccgctgccccatgggtgccttatgcccgctcagaggcccacctcacagagct

SEQ ID NO: 229089 - DNA, 82 bp, Homo sapiens
tgaatcctgcggcagaagccgagttcaacatcctcctggccaccgactcctacaagtagaacttcatggaggaacacggagt

SEQ ID NO: 229090 - DNA, 115 bp, Homo sapiens
gccgccgcccctgttgcgatggcgcagaaaccccgttgacaaggcactgctttttcatgacggtatgtgaggagcagcgctgtgaggaggaagtcttccccctggccatgaacta

SEQ ID NO: 229091 - DNA, 101 bp, Homo sapiens
gctcttggtcatgtgaactgcacgataaaggaactcaggcgcctcttcttagttgatgatttagttgattctctgaagggaaatgaggcaagttatccttt

SEQ ID NO: 229092 - DNA, 98 bp, Homo sapiens
tcacttccagccagctgtgaagaaggagagcgacttgcagttgtggaggtacagtgtgaacggctgaggatgctctaccgggactgtgctcggccccc

SEQ ID NO: 229093 - DNA, 75 bp, Homo sapiens
ggtttctacaggaacacgaggaaactccaccttccttcaaaatgtctactgttcacgaaatcctgtgcaagctca

SEQ ID NO: 229094 - DNA, 75 bp, Homo sapiens
cccggcccccatcctccccgccccatcggttgttgtctgggcggaccagagtgaactccgagcaggaacacttcc

SEQ ID NO: 229095 - DNA, 101 bp, Homo sapiens
ccttcttcaggagagcgccccagggcaagccccgctccggccaacaaacaatgcagatcttcgtgaagactctgactggtaagaccatcaccctcgaggtt

SEQ ID NO: 229096 - DNA, 90 bp, Homo sapiens
gatctcggtcaagggacaggaagcgtctgagagaggccagacttcacagacgccatcattctccggaaaggggcctcagtggagcacgtg

SEQ ID NO: 229097 - DNA, 100 bp, Homo sapiens
aagatacacagcagttgtcttaaacaggcctgtctacaagtcattttgcttgggcatttcactcagtagcagaagaagaactgctgaacatgttgccagc

SEQ ID NO: 229098 - DNA, 82 bp, Homo sapiens
aatatctgtcttcggtggactccttcggcagtccacccaccgccgccgcctcccagcagttggaattgatcacaccttttca

SEQ ID NO: 229099 - DNA, 76 bp, Homo sapiens
attctacccaagtacatatgatttcagctgcaatggcagggtttctatcttactaaaggatatttcagaaaatcta

SEQ ID NO: 229100 - DNA, 83 bp, Homo sapiens
ctcacctccctgctgggcctcaggccagagttaccggtattgtaagaacaagccgtacccaaagtctcgcttctgccgaggtg

SEQ ID NO: 229101 - DNA, 75 bp, Homo sapiens
ggagccgccgccatgggggcctgcctgggagcctgctccctgctcagctgctaagactttgaccccgacgcaggc

SEQ ID NO: 229102 - DNA, 115 bp, Homo sapiens
gctacaggaggaagggtggctggaaggagaactaaatgggagaagaggaatgttccctgacaatttcgttaagtgcagctgtctgcttcagaaagtgagggctccaggaatgagg

SEQ ID NO: 229103 - DNA, 76 bp, Homo sapiens
caggaggtggcacagctcagccagtttgatgaagaactttataagattgttggaccttcagatggaagtagttaca

SEQ ID NO: 229104 - DNA, 100 bp, Homo sapiens
gaacaggaacttaagagtcttaggagtcagttggatgtgacacataaggaggtgaccatgctttgggattttcatagtttgagtaattcctatgggctct

SEQ ID NO: 229105 - DNA, 100 bp, Homo sapiens
cacctacatcaggcaactggagagcaaagtgaggctgctggagggtgacaagctcctcgcacaggatccttgccacggctggaactgacttcgacctgcg

SEQ ID NO: 229106 - DNA, 100 bp, Homo sapiens
aacccttttccattgaggatgtggaggttgcacctcctaaggcttatgaagttcgcattaagatggaccaatcttacaaaccagatgaaaatgaagttcg

SEQ ID NO: 229107 - DNA, 100 bp, Homo sapiens
ggtctacgaactgtgatggcggcggccgcggtgatgggcccggcgcagaggagaggagacgccgtgagcgggacgaccagatgtaccgagagcggctgcg

SEQ ID NO: 229108 - DNA, 100 bp, Homo sapiens
ccctggccctctcgctgttgctggtctctggctccctcctcccagggccaggcgccgctcagaacgtatgccaccacgggctgttccctgaccctgcacc

SEQ ID NO: 229109 - DNA, 100 bp, Homo sapiens
gcttgatcaggtggaacagattcagaaggagcaggattaccaaaggatcacacgccgctatgcagagttctcctccgctcttgtcagtatcaaccagaca

SEQ ID NO: 229110 - DNA, 90 bp, Homo sapiens
ggagaaggccatcaccacgcagaacgtcaacaccaagtgcatcaccatccccagtaaggttcgtgatcctcgggccaattttgatcagtc

SEQ ID NO: 229111 - DNA, 131 bp, Homo sapiens
tagcaccgtgggcatcgacttcaaggtgaagacagtctaccgtcacgagaagcgggtgaaactgcagatctgggtacgcatagctgctaaattcatcactcatgcacccccaggggaatttaatgaagtat

SEQ ID NO: 229112 - DNA, 100 bp, Homo sapiens
gaagacaatggcttgaatcttgcttttacaattgctcatgaaatgggtcacaaaggagtatggaatgtcccatatatggctaatgtgtacttaattaaag

SEQ ID NO: 229113 - DNA, 51 bp, Homo sapiens
gatgagctgagcttcaaggctgctggcccccaagaggaccctttccaagtc

SEQ ID NO: 229114 - DNA, 97 bp, Homo sapiens
aaagtcctacaacagtttggcgtgcaacatggggcttgagaaagggaattgaatgatctggcacgggaccctccagcacagtgttcagcaggtcctg

SEQ ID NO: 229115 - DNA, 50 bp, Homo sapiens
ggcattatccacgaggcaaacgcttcctgcctgacacagctcacttcaag

SEQ ID NO: 229116 - DNA, 51 bp, Homo sapiens
atggacaggtctacgccacatcacttaggattcacagctggtaatagaagc

SEQ ID NO: 229117 - DNA, 98 bp, Homo sapiens
ccacgcagaggacgccggaacaccctggaagccgagaaatggtgcccctgggcgctgggattgctctagcctgtaagtataatggaaaagatgaggtc

SEQ ID NO: 229118 - DNA, 88 bp, Homo sapiens
gctcgctgggagagaggtacctctccttttccctctccctttccctaaggtattgggagagttgctgctacatctttaggaaatttga

SEQ ID NO: 229119 - DNA, 100 bp, Homo sapiens
ggtgatattgtagaaattgctgatatggctcgtggacagcagaaaattcagtctcagcagaaaaatgccaaaaagcaagctggacaaaagaagaaacaag

SEQ ID NO: 229120 - DNA, 100 bp, Homo sapiens
ggggaagaggcccaccctggagtaaccctcactggagaatccagaggagcctcctcaacaagcccaagagtgagatgaccccagaggagctgcagaagcg

SEQ ID NO: 229121 - DNA, 74 bp, Homo sapiens
ggaacaattcatcttaccagagctggagaatgctggaggagaccttaaggatggccaccaccactatgaaggag

SEQ ID NO: 229122 - DNA, 88 bp, Homo sapiens
tccgggtggtgttggacagatcaccccacctcttggctggtctacagtgaatatagagccagtcttgcttttgaccttgttagcagcc

SEQ ID NO: 229123 - DNA, 100 bp, Homo sapiens
cttttattggctggagtggagattccagaacctgttttcttctgtaccatagaacccccatcactgtctaagcagccagctgtggcactttaccttgctg

SEQ ID NO: 229124 - DNA, 100 bp, Homo sapiens
tgctgctcgacttcgttagcatgctggtggtctaccactttcgcaaagcaaagatttcggaaacttctggcagcccagtgtctactggaaggcccaagcc

SEQ ID NO: 229125 - DNA, 82 bp, Homo sapiens
tcgcggtgggtcctcgcttgcagttcagcgaccacggcttctcacggcattcagcagcagcgttgctgtaaccgacaaagac

SEQ ID NO: 229126 - DNA, 100 bp, Homo sapiens
ctgcaggaagccaaggagcacagggtgtccctgaagtgccgcaggcagctccgtgtggaggagctggagatggttcaagaacatgaagactcgggtgact

SEQ ID NO: 229127 - DNA, 100 bp, Homo sapiens
tgtccagcgactccggggcctgatgaatgacatcgaggtgctgatactcaaagaaggtttaagttgtctgatctctctataaattccactgaatgtctac

SEQ ID NO: 229128 - DNA, 99 bp, Homo sapiens
cggcaggtctctccgcatcaaagtcatctccatgggcaacgccgaagtggggaaaacaatgcagatcttcgtgaagactctgactggtaagaccatcac

SEQ ID NO: 229129 - DNA, 100 bp, Homo sapiens
caagggcctgactcccacaggcacactccctctgggcgtcctctcaggaggcaagcagactatcgagacagatacactctggaaatgattaaactagtac

SEQ ID NO: 229130 - DNA, 88 bp, Homo sapiens
atgtttggatgttggatctacactttctcaagcactgtgatcttcaaatcaggtttggatgcatctgctcagactacttctcatgaac

SEQ ID NO: 229131 - DNA, 98 bp, Homo sapiens
ttccagatgtgtaatacattactgcagagaaacacggaaactaggaagaggaaattaactatctgtacttataagggtgtcggttggtggaaatatga

SEQ ID NO: 229132 - DNA, 100 bp, Homo sapiens
tgcttcatctgcccctgcccagatccggaagaacggtgaatttcccccgcagggatgttcaatagcccagaaatgcaagccctcctccagcagatctctg

SEQ ID NO: 229133 - DNA, 90 bp, Homo sapiens
aggctcatcctgtccatcgtgtgcctgatgatcacgcagctggctggcttcagtggaccagaccgagaggagcggaagctgctgctggac

SEQ ID NO: 229134 - DNA, 75 bp, Homo sapiens
gacaactctgcctgtgttgaccttattcacaaaggtttgaattttgggaagattttgaagaagaccatgggaagg

SEQ ID NO: 229135 - DNA, 99 bp, Homo sapiens
gcttccgagaaaacggctcgagcagcgacaacccgtcctctcccgagtttttcatgtggcaaagaaacacagcatgatgtttggaaatataattcttcg

SEQ ID NO: 229136 - DNA, 75 bp, Homo sapiens
cagagccaggtgaactggaggagcgatttgccatcgtgctggtggccccaatgtcagtgtatgcttgtctgggca

SEQ ID NO: 229137 - DNA, 100 bp, Homo sapiens
catctaagccctggtccaaatgcacttcagccaccatcacagaattcctggatgatggccatggcaatccacctcgaagatccaagtctgcacctcctcg

SEQ ID NO: 229138 - DNA, 100 bp, Homo sapiens
ctctacacactggtgtctcctgcggaagggcagctgggcacgccttccagaccgagccttgaaaagatcttttgaggtcgaggaggtcgagacacccaac

SEQ ID NO: 229139 - DNA, 83 bp, Homo sapiens
ctgtcgtccgttctctcaggctcccgttcagcggggatctgacgagcttttctctacttgtgtcactaacggaccgtttatca

SEQ ID NO: 229140 - DNA, 75 bp, Homo sapiens
caagttttcacttatctcgaaagcctatcagcatagttaaggagtggagtcaacatatcaatggagcaagtcaca

SEQ ID NO: 229141 - DNA, 83 bp, Homo sapiens
tccagctagcaaagtaattgcactgaaagagtccagaggaagtatttatggcaatccggaatcctctggagtggcactgcaag

SEQ ID NO: 229142 - DNA, 96 bp, Homo sapiens
tcagcgaggatgtgcgcagcgacttccagcgcagagtgccctacaactacctgcagcgggcctacatcaagagctccactggttcaacagcctctc

SEQ ID NO: 229143 - DNA, 87 bp, Homo sapiens
aaccgatttcgggaaatacttgatttagtatgtaaaagatgttttggcaattcttcagttagatagtcctgaatctgctcagtcaat

SEQ ID NO: 229144 - DNA, 90 bp, Homo sapiens
gttctccaaacatgatcgtttactgcaaacctacttctgcttcctcctggccgctctgggtgtgacagctggtgcccatcgcttgtggag

SEQ ID NO: 229145 - DNA, 100 bp, Homo sapiens
aagaaaattgaggttcttgactcacttcagagcaaagcaaagctgctcagatgcggaaaacgccatgcggtacataaatgggacgcgtctggatgaccga

SEQ ID NO: 229146 - DNA, 75 bp, Homo sapiens
gaaatgtgtcttttatggggacaagttctatctacaggtgctggagaatctggtaaaagcaccattgtgaagcag

SEQ ID NO: 229147 - DNA, 82 bp, Homo sapiens
agaggaagaactgaccagagctgatcccgagcagcgtcatgtacccctgttttgcactgattgcaaaaataaagtcctccga

SEQ ID NO: 229148 - DNA, 101 bp, Homo sapiens
atatttggagttcttacaacatggcagacattgacaagtgcagctaaatcaagtccagcagctaaaccaggatccacaccttctcgaccctcatcagccaa

SEQ ID NO: 229149 - DNA, 82 bp, Homo sapiens
aaataaggacaaaagccaagaggaggacagttcgctacacagcaatgcatcgaggtgtctgtgacctttgaggatgtggctg

SEQ ID NO: 229150 - DNA, 100 bp, Homo sapiens
gctggacctgctggtgttcgcccacgaccatgataagaaggctgactgcacaatcacaatggctgactcagacttcctggctttaatgactggtaaaatg

SEQ ID NO: 229151 - DNA, 97 bp, Homo sapiens
agtattgtgtctaaattctgtggatgatgttttctcacccagtcatgtgccctgaaactctaatctcattgcctggccagaaaaggaagtaatccct

SEQ ID NO: 229152 - DNA, 100 bp, Homo sapiens
ggctttctgcttgccggtgttgacctgggtgtctacctgatgcgtttgggtacccagaccccacctacctgacccgggtgcaagaggagctgagagcgaa

SEQ ID NO: 229153 - DNA, 98 bp, Homo sapiens
ccagttctggcagattctggaaactgtacattgaagcagagcgactgcatttgcctccagacttgtcagacacagtgagccgctcaagcaaaatggat

SEQ ID NO: 229154 - DNA, 99 bp, Homo sapiens
atggtcctggaggtggcaagaaggatgacaaggtatgcctattattacagtggaattggtgctggggtgctggttgctgcttacattcaggtttcattt

SEQ ID NO: 229155 - DNA, 90 bp, Homo sapiens
gggatatttgggaagaccggtccggaatctaagaacccagaccctgtcccagtcctgtgcattcaggctgactcttgcttgtggtggggt

SEQ ID NO: 229156 - DNA, 75 bp, Homo sapiens
gggaatgtacacgataattaaagagtaaagttgtgctcaacgaaccaccgggaggaactgggccattctaacacc

SEQ ID NO: 229157 - DNA, 51 bp, Homo sapiens
caccgcacaggcaggaggcatggccaagatgttaaactctctgaggatgtg

SEQ ID NO: 229158 - DNA, 99 bp, Homo sapiens
cacgcacagagtgcaagacgctgagcaatgcaggtactctctgaagatggcagaagctcaccaagctgtggcctttcagttcacggtcactccggacgg

SEQ ID NO: 229159 - DNA, 124 bp, Homo sapiens
ctgaatggcgggaagtgtgaagcggccaatggcacggaggcctgcgtggctccacgtgttccccacgtttgtggcgtacgagctcacggtgctggtgttcctcaccttgtcagtggtggtgatg

SEQ ID NO: 229160 - DNA, 90 bp, Homo sapiens
cttttttcaggcagaaaacaagtctcgtctggacggacatgctgggcctgcgccccccactgctcgccctggtggggctgctctccctcg

SEQ ID NO: 229161 - DNA, 75 bp, Homo sapiens
gtttttgcagcagctgacagcgtttttccagcagtgccctgaaagttagttgaatccatggacatgaaacccaca

SEQ ID NO: 229162 - DNA, 98 bp, Homo sapiens
aagctgcaggaattaaatgcacatattgttgtatcagatccagaagatattacagcagcccttgccttttctcttgcagcaacagcccaggctgctcc

SEQ ID NO: 229163 - DNA, 102 bp, Homo sapiens
atgagcaggattgtgttactcaagaagtgccagactcccgccaggcagaaactgaaggtcgcgtctccttcttcacctcggggtccgagaacctacaccgcg

SEQ ID NO: 229164 - DNA, 82 bp, Homo sapiens
tgaggactaagggtgcggcagtgcctggtacatgaggaaaggagcagtggcttccggttgaagccaccaacgctgatccacg

SEQ ID NO: 229165 - DNA, 74 bp, Homo sapiens
caatctttctgaggaaaatgaagtagatgacactgaggtcttggtggatgtcagtgcttactccccatgaaatt

SEQ ID NO: 229166 - DNA, 87 bp, Homo sapiens
ctgataagattgaatgccaagcagaaaattacctaaatgcactctttcgaaagaaagacccaacatgagtgaagtttcctgcaagaa

SEQ ID NO: 229167 - DNA, 100 bp, Homo sapiens
tgagcctgcactttaagaaggcgctcttgttttgaatacgtagtctgtcctgttctttcaaaattggagcatatgatcaacaaatatgggaaaaatctgt

SEQ ID NO: 229168 - DNA, 75 bp, Homo sapiens
acaaccgtctccagccttggtctgagtggactgtcctgcaggttgttcctcaaagtcattcaagctgtactcgcc

SEQ ID NO: 229169 - DNA, 82 bp, Homo sapiens
cgctcggccccgccagcagcactgtggaggccgtcctcggattatatctgtccaagatgcgagtctggttttatcgaggagc

SEQ ID NO: 229170 - DNA, 90 bp, Homo sapiens
agactgtggtgcctacccccatcactgcttccctcagccataacagatcactgtgtccactactatgatcttcgtaacactaaacagcca

SEQ ID NO: 229171 - DNA, 100 bp, Homo sapiens
ccggtgtggtggcggcggcggagactgcgggcccgtagctgggctctgcgagggtggtcccggtactggatatcagggaatgcagccaatggccagcatg

SEQ ID NO: 229172 - DNA, 83 bp, Homo sapiens
tgctgccggaaggggtcccgaagccccctgcaggaactctacaacccaatccaggtgcaaattgagcatgacccagaattaga

SEQ ID NO: 229173 - DNA, 82 bp, Homo sapiens
cgcggtcatcggtcaccggtcgctctcaggaacagcagattcttcgctgctgctgccttaccgccgagaaccaccacccgcc

SEQ ID NO: 229174 - DNA, 98 bp, Homo sapiens
cgcacggagtccagggatgtggacagtcgccctgagatccagcgcctggacacgttgtggcagcactgcctgaaggtatgagaccagattctaatctt

SEQ ID NO: 229175 - DNA, 101 bp, Homo sapiens
aaaatagtgatagctttgataatgctgggcctaaaggagataacatttatgaatggagatcaactatacttggtccaccgggttctgtatatgaaggtggt

SEQ ID NO: 229176 - DNA, 83 bp, Homo sapiens
tagatctttctgacaacaaactcgaagactggcatgagcttaaagcttttcaagccaggccaagaagctgtgaagtaccaggg

SEQ ID NO: 229177 - DNA, 81 bp, Homo sapiens
atgacagtctgcctctatcttacacttcagatagaagcagtcgaggggcttgaggccctcgggcgtcttgacgtacttggg

SEQ ID NO: 229178 - DNA, 100 bp, Homo sapiens
gcatcggccagagaacctgcacggggtgcctgggtggcaggctgccctcctttccctccctggtattaccaacagatctgtggcaagcgctacaagaacc

SEQ ID NO: 229179 - DNA, 83 bp, Homo sapiens
agtccacccaccgccgccgcctcccagagtaaaggtgggattctatccaaagcttgtgattatatccaggagcttcggcagag

SEQ ID NO: 229180 - DNA, 75 bp, Homo sapiens
gaaagaggagaaactgattggattgatgaacaatgaagcagctcagctgccaaatggtgtcacttaccacactgg

SEQ ID NO: 229181 - DNA, 100 bp, Homo sapiens
ctctgtgcagaagaagagcagagtaggacgtgctgggtgaccgcgattagattgcttaaggtcaatgagtggtcattgaagataagaaaggaaatgagag

SEQ ID NO: 229182 - DNA, 75 bp, Homo sapiens
agcggggtctggggctgttaccattgagtgaccagaaaggacgcaaacatgcagatctttgtgaagaccctcact

SEQ ID NO: 229183 - DNA, 100 bp, Homo sapiens
ggaaaacatggcgtctgccctggagcagttcgtgaacagtgtccgacagctctcagctcaagattctacaagggggttgctcctctctggatgagacaga

SEQ ID NO: 229184 - DNA, 90 bp, Homo sapiens
cgagatcgccccgatagtttgagagtaaatgggttaccagaggaagagctaagagagaggatgcaagccatggagaaacagattgccagt

SEQ ID NO: 229185 - DNA, 98 bp, Homo sapiens
tccccagcagcacgtgttggaatggacttcggaccctggcctcttgggatgcaaagaaaccaggcgatgcggaagaagctaatcttgtacttcaagag

SEQ ID NO: 229186 - DNA, 75 bp, Homo sapiens
agaagatggacttgaaaaaaactttgctgccaatactctgggtccatgaaaaagcagatgacttgggcaaaggtg

SEQ ID NO: 229187 - DNA, 100 bp, Homo sapiens
tggacatggacatgagccccctgaggccccagaactatcttttcgtgctgggattacaagcgtgagctaccacacccagcgaggaagccaagtttaacgt

SEQ ID NO: 229188 - DNA, 82 bp, Homo sapiens
cctgaaggctaccaactacaatgctcctccctgctatatggatgtcattcctgaagatcaccgattggagagcccaaccact

SEQ ID NO: 229189 - DNA, 100 bp, Homo sapiens
ccatcctgtctatcctcctggccgtcctcctcacggtcctcctggctgtgctcatatacacctgtcatgttgtcataggaacaactggagaagaataaag

SEQ ID NO: 229190 - DNA, 75 bp, Homo sapiens
ggcgagggcatggacgagatggagttcaccgaggctgagaacgggaagcttgtcatcaatggaaatcccatcacc

SEQ ID NO: 229191 - DNA, 95 bp, Homo sapiens
aatgctgcgaaagctgccaaaagtgacatgcaggattatatgcgtcaggcaggagaagtgacttatgcagatgctcacaagggacgcaaaaatga

SEQ ID NO: 229192 - DNA, 98 bp, Homo sapiens
cagggagttctgttacgccatggaaaccgctctggtcacaccaatactgttgcagattgacaatgcagatcttcgtgaagactctgactggtaagacc

SEQ ID NO: 229193 - DNA, 98 bp, Homo sapiens
tggaattaaatctccacggtcatatactcccaaacccaatcctgtgaaatgccagatctggagtaaggaatattgtcatcacctggattttgagaaag

SEQ ID NO: 229194 - DNA, 99 bp, Homo sapiens
cttatccagatgagtacactggaagctacacctctccattactctgtccaggcttatggtgaaggctctggtgctgattgtagacgccatgtccaaaag

SEQ ID NO: 229195 - DNA, 96 bp, Homo sapiens
ttttcctccgcggtggggcgttgccatggagacgcgggcggcaggtcatattgaacattccagatacctatcattactcgatgctgttgataacag

SEQ ID NO: 229196 - DNA, 82 bp, Homo sapiens
ccagggtgccgcagacgcggggacgctggctcgctccctccctccctccctccgacgctagtaatcaagtcagaggattata

SEQ ID NO: 229197 - DNA, 80 bp, Homo sapiens
cggacagatgaagctccccaaggagctgcaggttaaaaagatcaagtggcatgagcagccttttggggaaaattggtgcc

SEQ ID NO: 229198 - DNA, 75 bp, Homo sapiens
ggagaagcgaggctgcccgcgcacggcgctggagtactgcaagctcatcctgagacagccctcagcgcctttttc

SEQ ID NO: 229199 - DNA, 100 bp, Homo sapiens
ccggccttggtgcggcgagccgagcgaggcagctctgagccgcgcggataaggaagcctgtgtgggtaccaacaatcaaagctacatctgtgacacagga

SEQ ID NO: 229200 - DNA, 100 bp, Homo sapiens
cccaggagctcctggaagatctccgcactctggagcataatgtgtgggaagaagagcgctatcctgaaggcatcaagtggaaattcctagaacataaagg

SEQ ID NO: 229201 - DNA, 100 bp, Homo sapiens
gggcacccggttggagcccctgaagccacttaagatcctggtggctttgagacaccttcacttcaagaacattgtccactgtgacttgaaaccagaaaac

SEQ ID NO: 229202 - DNA, 90 bp, Homo sapiens
cctaatcccaatgctgaagtaagattgtcttggaaatactaagttgggtagtgggcagcagtcagtgacaggtgtaacctctgtggatga

SEQ ID NO: 229203 - DNA, 82 bp, Homo sapiens
tggctgtgcactgcgtggcgggcctgggccggcgccatgtcagaaccggctggggatgtccgtcagaacccatgcggcagca

SEQ ID NO: 229204 - DNA, 75 bp, Homo sapiens
ggggctcttctggccagacagctcacaatccagcaacacagtcactcctggcggcaaaccaaacaaaaccagagt

SEQ ID NO: 229205 - DNA, 83 bp, Homo sapiens
gctggaaggaaccgctctcgcttcgtcctacacttgcgcaaatgtctccgccttgcaaaataccctactaaataaatcatttt

SEQ ID NO: 229206 - DNA, 75 bp, Homo sapiens
ccctgggcagctcttcggccgcatccccatgcgcttctcggtgctggtactccaaagattcaggtttactcacgt

SEQ ID NO: 229207 - DNA, 75 bp, Homo sapiens
ctgaagctgtagggccttgtgggctgacccagctggatgttgacagccacctggcccagtgcttggccgaaagca

SEQ ID NO: 229208 - DNA, 102 bp, Homo sapiens
cttctgctccacgaggagcacagccgggccgctgcgaaggagtctgatgacttttcacagtaccaactcaaaggcttgcttaaaaagaactatctgaaccag

SEQ ID NO: 229209 - DNA, 75 bp, Homo sapiens
ggtactgcagtgagaggcatgcttccttagaccagggccgttgctccagggagaactgcaaatatcttcatccac

SEQ ID NO: 229210 - DNA, 83 bp, Homo sapiens
gcatcgcgtaccccttcaacgccaagcagcccaccgacatggcccggaggcagcagaaggacagtctcatcgaactcaaggaa

SEQ ID NO: 229211 - DNA, 90 bp, Homo sapiens
atattgcaatataggggaaaagcaggtttctaagcatgaattgaggaacagaagaagcagagcagatgatcggagcagcatttgtttctc

SEQ ID NO: 229212 - DNA, 100 bp, Homo sapiens
tctgcgatacctgcctgcaggagttcctcaggcttgaccactatgctatcatcaagtttccgctgaccactgagtctgccatgaagaagatagaagacaa

SEQ ID NO: 229213 - DNA, 83 bp, Homo sapiens
aacatcgtaaccagagaagaaaggagactcacttatgtgcacaatgatgtaaccttctgtaatggaagatgattgaagacaag

SEQ ID NO: 229214 - DNA, 100 bp, Homo sapiens
ccacttgaagaaaagggtgaaggaggcgaattttcagttgataggtattgaacagagagttaaaagttttaatgttggtcgtggacgtggcttgccgaag

SEQ ID NO: 229215 - DNA, 110 bp, Homo sapiens
ggccccgtgtcctgcaggtattgggagatccacagctaagacaccgggacctcctggaagccaaaaatgacatatctgaagagatggattaagaatgctttggattaagg

SEQ ID NO: 229216 - DNA, 100 bp, Homo sapiens
ctgggggagctgctgggcgaagcacgctactacctggtgcagggcctgattgaggactgccagctggcgctgcaggggaacgcccttttgcttgtgactg

SEQ ID NO: 229217 - DNA, 90 bp, Homo sapiens
accccaaaatcagtgattctacatctcaagctcatattttgaagtgtttacggacaaggtcatttgatgaagatgcaaaagaaagtcgag

SEQ ID NO: 229218 - DNA, 80 bp, Homo sapiens
aggaaccattggataaggataaaggttattggagtgatgagtaaagaatacataccaaagggcacacgttttggacccct

SEQ ID NO: 229219 - DNA, 90 bp, Homo sapiens
catttgcttggagatgaagaccccagggtgcgacatgttgccgcagcatcactaattaggcgttgacccggacgacacctataatgagac

SEQ ID NO: 229220 - DNA, 98 bp, Homo sapiens
cgcccccgcggccccggccggaggagacagaaaaattgtatggcgacttcttgagctggaagctagaggaaacccttgcccagttccctttgcagcct

SEQ ID NO: 229221 - DNA, 75 bp, Homo sapiens
caaggaatgcaagggccacctgttcctcagttccaaccacaggacttttttcaggagatattgcacctttaatgc

SEQ ID NO: 229222 - DNA, 114 bp, Homo sapiens
agggtgacgctcgctccgctcgtcccgctcgtcatggcctacccgggatacggaggaggggttaaacccatccagagtaatggctgcggccttacccaggaccctgggggagtt

SEQ ID NO: 229223 - DNA, 75 bp, Homo sapiens
gctggtcagagggctgtgaagacgcacggtgccaggaccaagtatctgactggcacagcctccaggttggcgggc

SEQ ID NO: 229224 - DNA, 74 bp, Homo sapiens
gctcgacttctcaatcccaagtggccaaagggcccccagatgccgacggccctctctacctcccctacaagacg

SEQ ID NO: 229225 - DNA, 100 bp, Homo sapiens
cataccccggatttggaggttcgtacacgcctgaaaattctcataccgctcccctcactgctaggccgttgctccagggagaactgcaaatatcttcatc

SEQ ID NO: 229226 - DNA, 100 bp, Homo sapiens
gccaagtgtaacctgctggcagaaaagcagctgacggccagcaactgcctgggcgtgctggccatggccgaggccatgcagtgcagcgagctctaccaca

SEQ ID NO: 229227 - DNA, 100 bp, Homo sapiens
gtgacctgaaggctgtcaagtatgtggagtgttctgcacttacacagctccttcgagaactcatagaacggaagaccagctccttggatcccaacgatca

SEQ ID NO: 229228 - DNA, 49 bp, Homo sapiens
cacgggaagcctacacgcccaagagcggttctggtgaggttggaaggat

SEQ ID NO: 229229 - DNA, 87 bp, Homo sapiens
ttcagctgtcacaagaccaatatttggtatactgggcacaatccatctggtggcaggcaagcacgaggagcggcaggacgagcatgg

SEQ ID NO: 229230 - DNA, 100 bp, Homo sapiens
agcggcagctgaggagactccggcgctcgccatggccgacgaaaagcccaaggccaagcccagcattcggtgcttcattaaacccaccgagacactcgag

SEQ ID NO: 229231 - DNA, 100 bp, Homo sapiens
cagagggagggggggctccaaagccgaaagaggaggtccctacctgccacggataccagtcagatgaagttgcggagaataatgaacatgatgtcacttc

SEQ ID NO: 229232 - DNA, 100 bp, Homo sapiens
agagtttaaacagccaaaacagttcattcatattcagcatataatacattgccaagcagaagaactctgaaaaattcaagattagtgagtaagaaagatg

SEQ ID NO: 229233 - DNA, 99 bp, Homo sapiens
cagatccgtagggaggacaccgtgacttcccggacgctgggaaatggtgcgcacacggtcagtgggcgagtgtgtcgagtactactacctgtggaagaa

SEQ ID NO: 229234 - DNA, 97 bp, Homo sapiens
accatctccatcacccaccaacaacaccacaataatccacagccaagtttgaaggttgcgagaaggccttttcaaggcttgaaaatctcaagatcca

SEQ ID NO: 229235 - DNA, 83 bp, Homo sapiens
acccctcccccgcttgttcggggcactcagaacattcctgctggcaagccatcactccaggagaaccaggtgcatcagcgcat

SEQ ID NO: 229236 - DNA, 124 bp, Homo sapiens
ctttgaaaaaacagacttgaaagtgcctgccaaagccaagctcaccaaactgaagatgccttctcagtcagttgagcatggactggaggaaacagctgccaaatgcaagggactgggtgccaag

SEQ ID NO: 229237 - DNA, 83 bp, Homo sapiens
cagagcctaagagaactatggcaacatcaggtgactgtcccagaagtgaatcgcagcaaaatgatgcttcaacacccaggcca

SEQ ID NO: 229238 - DNA, 100 bp, Homo sapiens
caagaagatttctttcttcatgaccctgcccttgccagaatttcctgcgctgttccacctcattcaacttcagaacccttaggagaaatcttgagagtgg

SEQ ID NO: 229239 - DNA, 127 bp, Homo sapiens
gggtggtgctggctcagtacatattcaccttgaagaggaagacggggcggaagaccaagatcatcgagatgtttgcagtgttgatgtgggtatttacctatgttggtgccttgtttaatggtctgac

SEQ ID NO: 229240 - DNA, 75 bp, Homo sapiens
aaggaggtgacccaacagggacagcaaagagattgttctgaagaccgtgctctaagggcatttgaaagactgcca

SEQ ID NO: 229241 - DNA, 90 bp, Homo sapiens
tctggcaggaccacactctggcctgggacaccattttcaaatcaggaagaagatggactgcggatgaggaagacagtgcagagcaacagc

SEQ ID NO: 229242 - DNA, 100 bp, Homo sapiens
gtggaatcaatttttcttacttgaagaatatacaggatctgattatcagtacgtaggcaaggagttgtatcccgcattttgtattcacaacggaggctcc

SEQ ID NO: 229243 - DNA, 100 bp, Homo sapiens
acctgaatgacatctacctccatcaggaccccagatgtctgacagccctgtgtgacaccaagataagtaacgagctgactaaggctttggaacagaaacc

SEQ ID NO: 229244 - DNA, 59 bp, Homo sapiens
ctccagagtagctgggactacaggaaagatttgaagcactcttcaccatctatgatgac

SEQ ID NO: 229245 - DNA, 74 bp, Homo sapiens
gcagcaccaagtcgggctggccccgacagaacgaaaagaagccctccgaggatggccccagaagtaattttagc

SEQ ID NO: 229246 - DNA, 100 bp, Homo sapiens
agatttttagtggccccaaacggacaaatatggtctctttagaaggccttaccaaagtagttgatccttctcagctaactcctgagtttgatggctgcct

SEQ ID NO: 229247 - DNA, 83 bp, Homo sapiens
cccgcacggaccctctacttcacttccctctgtgtgaggaaaggatagaaatgttcaggacatcatcatacaggctcctcatc

SEQ ID NO: 229248 - DNA, 75 bp, Homo sapiens
ctggagacggcctgggtgctggcgaagcggaggccggaggtctccgtgaggccgggtgacgctccagaatgggag

SEQ ID NO: 229249 - DNA, 82 bp, Homo sapiens
ggcaggactggagacacctgggagtcgcagcggtggtttgggatgcggttgcctgtggctggagaaaggaatgtgctcatca

SEQ ID NO: 229250 - DNA, 100 bp, Homo sapiens
ccgctcgggaagcagctcttgccaaaaacctttggacagtccaatgtcaacattgcccagcaagtgattctggatgaaattgaagaacataacatcaaaa

SEQ ID NO: 229251 - DNA, 98 bp, Homo sapiens
aacattttgatgttcctcccaggagacagctatatttgcccatgttattcaaggttcgagaaatggctgctactaccttaagcggtctgctacagtgt

SEQ ID NO: 229252 - DNA, 75 bp, Homo sapiens
ctggctgaagcccatccagactgtttgatgctgaacttcaccgttaagcgcaagcaccaggaaatccgagccatg

SEQ ID NO: 229253 - DNA, 75 bp, Homo sapiens
agtcagctcccagcttcaagcccaaccaagtgcgagatctgcgtgaaaactttggtgcaattcccatcgaccaga

SEQ ID NO: 229254 - DNA, 83 bp, Homo sapiens
tagcagggctctagagaccacgtgaagtctcctcgcatcctgaggttagcattacacttctcccagtggagcccatgacttct

SEQ ID NO: 229255 - DNA, 100 bp, Homo sapiens
ctggtcttccctgaccccgcggccggacgacccaagcccgctgagcaggatgagggaaaatgtttataggaggccttagctgggacactacaaagaaaga

SEQ ID NO: 229256 - DNA, 83 bp, Homo sapiens
ctctcccttcggggagagaacaaccgttgtttaatggaagatttcgatcagttaggaaatggtggagtcaatgaagaaagtag

SEQ ID NO: 229257 - DNA, 100 bp, Homo sapiens
gaacaactcgggcgccgacgagatcgggctaaccttgccgcgggccgagccctgcctcgccatggaccaggactatgagcggcgcctgcttcgccagatc

SEQ ID NO: 229258 - DNA, 82 bp, Homo sapiens
gaaacaattgatttgctcttacgtatttgtgtgacttgactcttcaaacacaaagactgtgtcagggaaaagggaggcaagg

SEQ ID NO: 229259 - DNA, 91 bp, Homo sapiens
aaggaacgaggcaaggagctaaagcagcgtgcgttcagccctggggagcccagcagccggggccgccctattacaccgacccaggaggacc

SEQ ID NO: 229260 - DNA, 100 bp, Homo sapiens
gctcaaggtcccctgggacagtgcaaggaaagaaagaagcctgcggtgaaagtgacactgaatggagtctcattctgtcgctcaagctgaagggcagtgc

SEQ ID NO: 229261 - DNA, 74 bp, Homo sapiens
agcaagttcatggtcacggagaaggcagcctacatagacggccaatgggaacgtggaggccaaagtggtgtgct

SEQ ID NO: 229262 - DNA, 50 bp, Homo sapiens
gctttacctcgctgaccctatgaaggtggcattgcagacagtgtagccaa

SEQ ID NO: 229263 - DNA, 74 bp, Homo sapiens
taatgcccaggaaaccagaaaggagcatattaatgaaaagtgccataaactgaaaaaccaaacatgagggtagc

SEQ ID NO: 229264 - DNA, 83 bp, Homo sapiens
aacaagtacaagcggcgggtgccccggcaaaagactgttgaagtagagagcattttgcccagctcactcggattctttgctgg

SEQ ID NO: 229265 - DNA, 100 bp, Homo sapiens
ctttgcaaggttttgtgcccatgaaaattgttctgctgatttacaggtttctgcaaagattgggtttttgaagtcccgttcaagaagttcttccagttcg

SEQ ID NO: 229266 - DNA, 90 bp, Homo sapiens
aatacgggacagaattgaatcagggagatatgaagcctccaagctatgattctgtacaaagtggttgtccccaaaattggaaacatatta

SEQ ID NO: 229267 - DNA, 100 bp, Homo sapiens
ctcgacttcatcagatccagacctcctttaaatccaagtggtgaaaccagaacaatatctcactttcattatactacctggccagattttggagtccctg

SEQ ID NO: 229268 - DNA, 100 bp, Homo sapiens
gtgctgcttctgctgggtcccccagccaccatctttgacaactatgacctactgcttggcgtccatggcttttttaagaagaggagaggtcactcaattg

SEQ ID NO: 229269 - DNA, 82 bp, Homo sapiens
tctctctcatctcgctcggctgcgggaaatcgggctgaagcgactgagtccgcgatggagatacacaccatctcagcaagga

SEQ ID NO: 229270 - DNA, 100 bp, Homo sapiens
tgatgatgaacagtttgtcccagattttcagtctgataaccgaatggaagttggatacactttgtgacttgtacgagacactgaccattacacaggctgt

SEQ ID NO: 229271 - DNA, 95 bp, Homo sapiens
gatcgcaaatacctgaaagattgggcaagagaagaattcagaagaaacaaaagtgccaccgaagaggtacagagtgaagacagtgtcctcctgtt

SEQ ID NO: 229272 - DNA, 85 bp, Homo sapiens
agcctgatctaacccctagaaacagatcaccggggaacccttgatccgtcgatcagatgataatgaaaaggccttgaaaatccgc

SEQ ID NO: 229273 - DNA, 96 bp, Homo sapiens
ctatagaagagaaagttgctaaaaagtcaggaggagctactatagaagaactaactgaggagaatacttatctctggcgcacatcactatatttgg

SEQ ID NO: 229274 - DNA, 74 bp, Homo sapiens
tatggctccagggctgttacatgcctacccgcaggttcaggagaagtggcacctggtggaggacctgtcgcgac

SEQ ID NO: 229275 - DNA, 83 bp, Homo sapiens
gtcttacgcaagctgacagtggatgtgcaattcttaaagaatgggcagaactggatgttggagccagctctagccacaggaga

SEQ ID NO: 229276 - DNA, 95 bp, Homo sapiens
tctaacaaacggcaaagaacttactgattcttgaggttctgccacttgctgggaaaacagcaacagaaggatattaaggagccacccctataatt

SEQ ID NO: 229277 - DNA, 75 bp, Homo sapiens
ctgcccggcaagacgcccgtgtacgcttgttctaaagacgaaggggaactccctagtgctacaggctgtttcagg

SEQ ID NO: 229278 - DNA, 88 bp, Homo sapiens
tggggcctcattttggatatctgtgataaagttggtcagtctcgcactggatgccacctgggacagcaagaccaggttctcgtggttg

SEQ ID NO: 229279 - DNA, 89 bp, Homo sapiens
tggtctctgcacctcctttctgcaggatgacgcaaaacacggtgattgtgaatggagttgctatggcctctaggccatcccagcccacc

SEQ ID NO: 229280 - DNA, 75 bp, Homo sapiens
tgttttcaccgacgagactggagctgatggtgagaccattctaaaaggcctccagtccattttccaggagcaggg

SEQ ID NO: 229281 - DNA, 73 bp, Homo sapiens
acagagaagatccgcgaggttgtctgctaaactcgcattgtctactggatcaaggacagacagctcaccaacc

SEQ ID NO: 229282 - DNA, 101 bp, Homo sapiens
atcccctcgcttatcctgtgggggccgccgggctgcggcaaggaagtcctccagaacttataccgcaccaagtcctttctgtttgtgggctgtggggagac

SEQ ID NO: 229283 - DNA, 100 bp, Homo sapiens
ccgtgaactgaagggacagggaacagccagacgagagcttcagccatcacgaggatgatttcggaacctggagaaaatgcagatcgggagcggtgccgag

SEQ ID NO: 229284 - DNA, 100 bp, Homo sapiens
ggctgcgagaccctagaggcctgcggcccgagtgccaggcatggacggggacgctgctgctgggcacatgccttctgtactgcgcccgctccagcatgcc

SEQ ID NO: 229285 - DNA, 98 bp, Homo sapiens
gcttcatcaaaaatagtgatagctttgataactttttggattggctcacagttttcctacttttctgtcctgtcagttgagaagaatacatttcaaga

SEQ ID NO: 229286 - DNA, 80 bp, Homo sapiens
ttcgtcctacacttgcgcaaatgtctccgctcaatatcagtagtttgcagatagcaaccaggaacggccatgcatccctt

SEQ ID NO: 229287 - DNA, 100 bp, Homo sapiens
ggcagccctggtgtgggagcggccagctaggagcgctctgtggtgcctggggctgaacgcggctttctggaaaatgttggggcttttcaggaagcataat

SEQ ID NO: 229288 - DNA, 101 bp, Homo sapiens
aaggtacccaccaggccgattatgtccattgttctcttggagcagctggtcatcatgatgaagactggcccatttgcagagcactccaaccagctgtggaa

SEQ ID NO: 229289 - DNA, 90 bp, Homo sapiens
gaagaactgcctcctcttgctcataacaaatgtggcaattattttggatctatcacctgtcatcataactggcttctgcttgtcatccac

SEQ ID NO: 229290 - DNA, 100 bp, Homo sapiens
gatttctggaaataatgcaaagagagctggaccattcatccttggtagctttggatatgttaaatcctcatgttactttgcctgttttttacccacatct

SEQ ID NO: 229291 - DNA, 78 bp, Homo sapiens
ctgggggcccctgcgccgagtggacgcctaccgcatctacttggtttggggacgacatccctggaatggaaggcctgg

SEQ ID NO: 229292 - DNA, 113 bp, Homo sapiens
ccgcgcgcagggcctgcagcgggagctggacggcgagcgcgagcggcgcgagaaaggcgaccattgacgaggtggagacggacgtggtggagattgaggccaaactggacaag

SEQ ID NO: 229293 - DNA, 90 bp, Homo sapiens
aagagcagtctcacatgaagaccaatttttacgtctagatttccatgcccatggaagatatgccgtagatgatgttcccttctcaatccc

SEQ ID NO: 229294 - DNA, 100 bp, Homo sapiens
tactcgccgcttttctacatcgcggtggtctttacctgcttcatcgtgaccaccggcctggtattgggatggtagcacaggcggagtgcagcggaggccc

SEQ ID NO: 229295 - DNA, 138 bp, Homo sapiens
tgtaaatcgtcccgataagaagaaaatacttttcttcaatgataagagctgtcagttttctgtggatgaagttttctggatatgccgcagaaggatccgtgccagaagcaagcctgtgagatacagaaatgtttacaa

SEQ ID NO: 229296 - DNA, 90 bp, Homo sapiens
gggcaacgtggttggaatgtatctggctcagaactatgatgaaagtatgcctcagactcctcccttttcagcaatgtttgacagcagtgg

SEQ ID NO: 229297 - DNA, 85 bp, Homo sapiens
tgggaggcactttgctgtctgcaatcgaagttgaggtgtgaatgaggcaggatgaactggacaggtttgtacaccttgctcagtg

SEQ ID NO: 229298 - DNA, 60 bp, Homo sapiens
ggggatatacatgcatgcaccaaaacgaggacaggtggacttaggtgaaggcaagatttg

SEQ ID NO: 229299 - DNA, 147 bp, Homo sapiens
ccgccctggcccgtcatggagatggaaaaggagttcgagcagatcgacaagtccgggagctgggcggccatttaccaggggctgcgtattgtcagtttatggacatgctgttccctggctccattgccttgaagaaagtgaaattcc

SEQ ID NO: 229300 - DNA, 75 bp, Homo sapiens
acagcctgtgcccgggccgggagctgggcaggttgaaggtcgaggagctggaaggcgagcggagtcggctggagg

SEQ ID NO: 229301 - DNA, 99 bp, Homo sapiens
gctgcagccggcagcccaccgccgccttcttggcgcgaccccaacccagccccagtctgtgactcttatcctactgaactgtacgttcccaaatcggcc

SEQ ID NO: 229302 - DNA, 75 bp, Homo sapiens
gcttgttggactgctgctgcaaaacttttctagatatctatgctttatgtgtggcctatcctgaaccccttggag

SEQ ID NO: 229303 - DNA, 102 bp, Homo sapiens
gcctggagtccttggcgcccccagagagtaccgacgagggggccgaaaccgagagctcgggttcatgacgctctcgatattcctgtgcagaaacctggacca

SEQ ID NO: 229304 - DNA, 100 bp, Homo sapiens
ccgtgtaagaagtgccttttgcctcccaccgtgattctgaggcctccccaaccatgtgcaattgaatgttacgttcataacttactaaggattagtgtat

SEQ ID NO: 229305 - DNA, 100 bp, Homo sapiens
gtggcataagaagggactggctgtgttattctgcatattgcagttcttgtcaatgacctgagaggtaaagcattatttgacagatgtatggattcaagca

SEQ ID NO: 229306 - DNA, 104 bp, Homo sapiens
catggcgtacgcctatctcttcaagtacatcataatcggcgacacaggaactccttcacagacatccttcgtgccatcctgctgtcattggaagtcctaatcga

SEQ ID NO: 229307 - DNA, 100 bp, Homo sapiens
agaaagtgattgctgctatgaccgtggggaaggatgttaggatgtgatggagctgcttgaagaagatctcacatgccctatttgttgtagtctgtttgat

SEQ ID NO: 229308 - DNA, 82 bp, Homo sapiens
gttgaagctttggggagcccaagccaggaagctggaggtctgctggagtttgctggaggtccactccagaccctgtttgcct

SEQ ID NO: 229309 - DNA, 75 bp, Homo sapiens
cattggcaatggcctctcacctcagggctctgcctgccacaattcatgagctggccagaggtctttggattcctc

SEQ ID NO: 229310 - DNA, 100 bp, Homo sapiens
tgtgccgggccctgaagaagctgtgcgatccagatgtgagtcaacccgacaactgtgttcccatggaggctgtgggggatccacatactgtgactgtttc

SEQ ID NO: 229311 - DNA, 100 bp, Homo sapiens
atccttatgctgaagaggacccaccgtgggctccacgttcttacttggaaaaggtgaatggtagtgtctagaaagggtatgtcccttcaagagagaggtg

SEQ ID NO: 229312 - DNA, 90 bp, Homo sapiens
cgaggccggggaccaggacagtcgcgaggttcgagtgttgcagagcctgcggggcaagatctgtatctctggagacaaagtagagataga

SEQ ID NO: 229313 - DNA, 101 bp, Homo sapiens
agcgactcctggagatagactccgtagttccagggtctccctccactgctgtagtaacccgggtccggggcctcggtggtgctcctgatgcccctcaccca

SEQ ID NO: 229314 - DNA, 75 bp, Homo sapiens
agcagcacgggatcccagcctcaggcctgcacggacggtgttggttgggagtgatcagcagctggactgtgcctt

SEQ ID NO: 229315 - DNA, 100 bp, Homo sapiens
tctaacaagagaagagatcacagaaacgtgaggatcaagaagccggactacaaggtcgcctacgtgcagctgagactggtgaactagagaatgctgagtc

SEQ ID NO: 229316 - DNA, 90 bp, Homo sapiens
atgtttgtccactgagctgatctcctctctggagcaccggggccaccaggagggagacgccccgaccagtgcgcccagcgcccctcccag

SEQ ID NO: 229317 - DNA, 82 bp, Homo sapiens
cgtcagagctgaggtacttcgtgaaggtttttagaacttcagccataaaaatgggcagaattttccttgatcatatcggtgg

SEQ ID NO: 229318 - DNA, 75 bp, Homo sapiens
gggtgaagatccaagatgttctacaggtggattcatcattcctttccctttatgacagccacgtagcaaaggaga

SEQ ID NO: 229319 - DNA, 100 bp, Homo sapiens
gaaactaaaaggacagtagaaaaggcttttccagtttgcataatcccagatgacttactcaatgccttgaatgagggtatcagtcgtgctgatgtcatca

SEQ ID NO: 229320 - DNA, 90 bp, Homo sapiens
gttgcgggcagtggacgcggttctgccgagagccgatggcccactgcgtgaccttggttcagctgtccatttcctgtgaccatctcattg

SEQ ID NO: 229321 - DNA, 137 bp, Homo sapiens
attccaaacttatttgtggtgggatatgccttagattacaatgaatacttcagagatctgaattattttcatctcagcctagtgacgatgaatcaagtagtgatgaaaccagtaatcagcccagtcctgcctttaga

SEQ ID NO: 229322 - DNA, 98 bp, Homo sapiens
taaaatatggcatcctaatattagttccgtcacaggggctatttgtttggatatcctgaaagatcaatggtgtgtgatggatgatgacaatgaagtaa

SEQ ID NO: 229323 - DNA, 80 bp, Homo sapiens
attgctggctacagcttcagaagaccgaagcgttcgtatctggaaggccgacgcctccccccagggtcagctgcgggctc

SEQ ID NO: 229324 - DNA, 100 bp, Homo sapiens
gactcctacctgaaacatacggagattgacaatcaatgggccatcttggacgaaaacatagctctgctggcagaaacagctctgagattcctggaattag

SEQ ID NO: 229325 - DNA, 90 bp, Homo sapiens
aaagcctgcagagaaaaagaagccaaatgccacgagacctgtaacgcctccaaggggcagtcacccgcagggccaaggtggctcccgctg

SEQ ID NO: 229326 - DNA, 83 bp, Homo sapiens
tgcagatgccaaagatgatgcctgaaaaccagtatccatcagaacagaggctgggccagtaataaaggtgaaaattccaaaag

SEQ ID NO: 229327 - DNA, 51 bp, Homo sapiens
ttctttttaatcagctttgtcagaagtcaaaatgcagatcttcgtgaaaac

SEQ ID NO: 229328 - DNA, 98 bp, Homo sapiens
gaagagccgggcagtccctggagcgggccagctgcatagatgaatggtttgaagtaaatagatcttgccctgagcacccttcagattaagcgtcagct

SEQ ID NO: 229329 - DNA, 97 bp, Homo sapiens
tcaaagtctcaaatgcggaagaaggggctcccacaggatcagaggctggggccaactggaaccattggcagctgcacgctcattactaccctccgct

SEQ ID NO: 229330 - DNA, 75 bp, Homo sapiens
gtcatcacaaaagagttgattgaaattatctctggtgctgcagctctcttgtagattttcagtggaaactgggta

SEQ ID NO: 229331 - DNA, 123 bp, Homo sapiens
aagtcagcatgagcaaaaactccaaactcctctccaccagcgccaagagttactccacaggatccgctgaacataggatgttgccacaaaatctacctcgtgtatttttctctttcactcatg

SEQ ID NO: 229332 - DNA, 100 bp, Homo sapiens
acaagtcctaaatgccgactcagtggaacaatcttttgttggattgaaacagctaatcgcacgtgccttaacacctcaaactgcagaaacagatgccatt

SEQ ID NO: 229333 - DNA, 82 bp, Homo sapiens
tgaagattcaataacagttgcatttgaaaacaaatcgatgctatagaagacaaacaagggaaggttttttttccttttgcat

SEQ ID NO: 229334 - DNA, 101 bp, Homo sapiens
gggaggaagccgactaggcgaattcacttactgaccggcctgggctgctctgagacatggatagtggctacccagagacgctggtcaacctcatcgtcctg

SEQ ID NO: 229335 - DNA, 82 bp, Homo sapiens
acgtgaacctggcatatctgggcgccaagccgcggagcctccagacggctcaccatggatgatgatatcgccgcgctcgtcg

SEQ ID NO: 229336 - DNA, 100 bp, Homo sapiens
cggctgcgctgttcgtgctgctgggattcgcgctgctgggcacccacggagcctccggggctgaatcatattctaagaactcagccactcaggtatccac

SEQ ID NO: 229337 - DNA, 90 bp, Homo sapiens
cgccggcctcgtcaagtttggggctgcctagaaggctgagcagcaagtctctgctgacatcagatgattatgagctgggagcagggataa

SEQ ID NO: 229338 - DNA, 115 bp, Homo sapiens
actcaggtttttcctaagctcaactctagccagctaggttcctggtgctttgggggatggatgaaaattataacctcttgcctcacggagtcaatttccaagatgccatcttccc

SEQ ID NO: 229339 - DNA, 100 bp, Homo sapiens
ccgcagcatggaggacgatgcaccagtgatctacgggctggagttccagacatggcccatgaacatggacatgagcatggacatcataaaatggaacttc

SEQ ID NO: 229340 - DNA, 100 bp, Homo sapiens
aagtggttcaagagcaacgatgaggaggcgttcacctttgcccgcatgctgatcgcgcaagaggggctgctgtgcggagggtgtgaagacagagaatgac

SEQ ID NO: 229341 - DNA, 50 bp, Homo sapiens
tcagagaaacacaggatccaacgggacttcactgtgactttgcttgcctg

SEQ ID NO: 229342 - DNA, 98 bp, Homo sapiens
caggttccgaggttggaacacctggcgagtcctcggtgtcggtggccggcagtcatctcgcggccgttcagggagatgcacttatttacatggaacca

SEQ ID NO: 229343 - DNA, 90 bp, Homo sapiens
actatgggaagattttggtagagaagaatgaacattgtattgagaacaatatagatttgcaggttcttgggtgtctctggggagtccctg

SEQ ID NO: 229344 - DNA, 96 bp, Homo sapiens
gacttaaagcctccagagaagtagaatctgtagaccttccacactgccacctgattaaaggaattggtctgccatcatggatgttctcgcagaagc

SEQ ID NO: 229345 - DNA, 100 bp, Homo sapiens
cagctcttcagcatctacgggaggcaaacttgtaaaacctggaacagcagcatcattgtcaaagtttcaggcacctgcaagagagacctgcgtggaatgt

SEQ ID NO: 229346 - DNA, 75 bp, Homo sapiens
gcccgtggagtcggctgagggaaaagcgaggcaaggcaggcgggattcctacaggaagcaagtagtaattgatgg

SEQ ID NO: 229347 - DNA, 100 bp, Homo sapiens
aaacgtgaggagctagagcgaatactggaagagaataaccgaaaaattgcagaagcacaagccaaactggtctaccccgagccccggagcgagagcgagt

SEQ ID NO: 229348 - DNA, 90 bp, Homo sapiens
gtcccatgaaaagacccaaatcagagatgtgaagctcaccgctggcttaaaaccagggggagcacctggggaccacggaagcgaccgagg

SEQ ID NO: 229349 - DNA, 100 bp, Homo sapiens
caggaggttttccagatcagtgacaaccatgctggtttgcttcagactgattgtaaaccatggctgtgtggatacaagctcagcagctccaaggagaagc

SEQ ID NO: 229350 - DNA, 50 bp, Homo sapiens
agtgagcgagcggacccgcgatggggtaagctgctgtactgccatcctcc

SEQ ID NO: 229351 - DNA, 99 bp, Homo sapiens
cgctgccctgcgcttctcccagctgcaggatgtgaacgagtgtgaaacactacagggtgtatgtggagctgccctgtgtgaaaatgtcgaaggctcctt

SEQ ID NO: 229352 - DNA, 100 bp, Homo sapiens
gagcaaggaaaaaaaccttcgactatgcagagacatgagatggtagccaacccctcagttgatggagaaccttgtgacctgtctttgaatataacctggt

SEQ ID NO: 229353 - DNA, 90 bp, Homo sapiens
tatggagctcaagttcttaattattcagaatgctgcggttttccaagccactgtatgatgctgcttaccttacaatgtacaatatctgct

SEQ ID NO: 229354 - DNA, 73 bp, Homo sapiens
gggactgccacgtccaagcaaaccgggaaaggagaggatcccggagccggacttgattattcttagaaatgca

SEQ ID NO: 229355 - DNA, 114 bp, Homo sapiens
ctgctccaggagcacagcggcatctttggcttcagcgtgtcccgccctggtatgcgtccaccactaggcttaagagaatttgcaccaggcgttccaccaggaagacgggacctg

SEQ ID NO: 229356 - DNA, 75 bp, Homo sapiens
tcgaccacactcacctctctctgctcatgcagatacatctacctcggattgccggcagcactaagaggatcaagc

SEQ ID NO: 229357 - DNA, 116 bp, Homo sapiens
tggcgctcttgctcctctctccttggcctctcctgggatcggcccaaggccagttctccgcaggtgtggatgaggtcaccattgtcaacattttgaccaaccgcagcaatgcacag

SEQ ID NO: 229358 - DNA, 100 bp, Homo sapiens
agtctgcgaaggccgggacccggttccccggcccacagtgggggtgtgcaaacccgagagaactgggtggtcttcaagctgacagagaagctgacggaac

SEQ ID NO: 229359 - DNA, 100 bp, Homo sapiens
taatgtaaccaccaagaaaacgcggccacccagtgctcctgcagaagatcgttcaggaacacccgacagcattgcttcctcctcctcagcagctcaccca

SEQ ID NO: 229360 - DNA, 82 bp, Homo sapiens
gcggctcttcccgcccgccttccgccgtctcttcgagttcttcgtgctgctcaaggcggacctacgtgggcgccatgcccgg

SEQ ID NO: 229361 - DNA, 107 bp, Homo sapiens
cgtggtggagctgtggcaggcagaagaaggggaactcctgctgcccactcaggtatgaaggcccccgccactctgttcaccttcctggtgctgctgctcaccatcct

SEQ ID NO: 229362 - DNA, 139 bp, Homo sapiens
gaaaacatcatcgttttgaagagttctgcgttttgccagtcacctctcaactgtgtgccaaaggttgctgaaaagccaggagtcaaaatgactgagcgctttgactgccaccattgcaacgaatctctctttggcaaga

SEQ ID NO: 229363 - DNA, 82 bp, Homo sapiens
tggataatggagaaagaaataccaaggaagactatttttgagatcgcggattcaggtgtggctctatgagcaagtgaatatg

SEQ ID NO: 229364 - DNA, 75 bp, Homo sapiens
agcagtcgagcaccgccaagtcggccacctggacgtatgccgagattttgctgtcctggaggaccacaccctggc

SEQ ID NO: 229365 - DNA, 83 bp, Homo sapiens
ccaaggagacctggtggcagggttgtgttatagttttgccgctggactcttccctcccttcccccaccccatcaggatgatat

SEQ ID NO: 229366 - DNA, 82 bp, Homo sapiens
gaacgtccactgcgggccggcgaaagctggtgaccagaagtcagcagcttcccagaagccccgaagccggggcatcctccac

SEQ ID NO: 229367 - DNA, 90 bp, Homo sapiens
gacggcaccgtcaccgaggcgccgcgcacagtcaagaagagctctgaggaacatgaatacagtgatgaagctcctcaggaagatgagggc

SEQ ID NO: 229368 - DNA, 75 bp, Homo sapiens
cagaggccggggaccttgccaaccctcccaagaagttcagaggatcagattttattaagacctctactggaaaag

SEQ ID NO: 229369 - DNA, 74 bp, Homo sapiens
ttacacaagctcagtgttcgagcagctgatggcccccagaagcttttgaagaggcatttcatccttcatgaagc

SEQ ID NO: 229370 - DNA, 75 bp, Homo sapiens
cctacatcgatgacatcaccgtcaccaccagcgtggagcaagacagtggtcggattgtttgtgctgaacgaactg

SEQ ID NO: 229371 - DNA, 82 bp, Homo sapiens
gttcgctgcccggtccgcccgcggtgagagaacaccttccaccatgaccacctcagcaagttcccacttaaataaaggcatc

SEQ ID NO: 229372 - DNA, 73 bp, Homo sapiens
gcgggcggaggggacggtcaacgagggacgcccagaatcggacgcggcagccaagaaggatcaagaaggtgga

SEQ ID NO: 229373 - DNA, 100 bp, Homo sapiens
tctgaggaagcagcaaatggaaagaaatcccactgggcagagcttgaaataagtgatctttgtagaatttgatggctgtaactggaagcaacactcctgg

SEQ ID NO: 229374 - DNA, 75 bp, Homo sapiens
attttttctcatggatgttcttcttcgagtatttgtagaagggagtgtgaggaagaggctgtctgtgtcattatg

SEQ ID NO: 229375 - DNA, 90 bp, Homo sapiens
tggcgacctatccagaatgatcaagaaactggcagacctttcacttcgtatccaacaaattgaaacaactctcaatattttagatgcaaa

SEQ ID NO: 229376 - DNA, 74 bp, Homo sapiens
gctaggaccccctggaagcctagaaacggagaaggaagccaacatccttttggagccatgaatattgtccgaac

SEQ ID NO: 229377 - DNA, 100 bp, Homo sapiens
agattgtggatttgagcatcttgttcctgtaatagaaatgtgggcagatcaactgacatccttaaagttgtgttgcttgatacaacaactgtactgggag

SEQ ID NO: 229378 - DNA, 80 bp, Homo sapiens
tccacatcagccggcagcccgggcgggtcccggggtgcgagcagcgcacttccgctgcctgtggaggaaccgattgtgtc

SEQ ID NO: 229379 - DNA, 48 bp, Homo sapiens
ttgaaccccctatggctgctgcttttgatctacggaatccagaggcag

SEQ ID NO: 229380 - DNA, 100 bp, Homo sapiens
tcttgctggtcaaatgatggcctgtaaaaatgatataagtaaagctcagacagaagccaaacagctgtcgcctggttgggcccggaaatgggacgtcgcg

SEQ ID NO: 229381 - DNA, 50 bp, Homo sapiens
cgggtgctggccgggcagaccctggataagtaatggaacatcatctgtga

SEQ ID NO: 229382 - DNA, 100 bp, Homo sapiens
gaaagaacacctgatgtgacacagaactcagagccaagggctgaaccaactcagaatgcattgccattttcacatagatggagttttaacattgaatgcg

SEQ ID NO: 229383 - DNA, 76 bp, Homo sapiens
ccggctcccctctcaggacaacccagatgtgcaacaaagtgcgatgtttggcaatgaggagcagcagctggcgtgg

SEQ ID NO: 229384 - DNA, 75 bp, Homo sapiens
ggagcatcccaggacctaccagaatctggtgaaaggtgtagcagtcactcggcctacacccacagcatcgacctt

SEQ ID NO: 229385 - DNA, 74 bp, Homo sapiens
ccaaacctatcaaacctgtttagaaaataaaccaggtcctaaacatgcagctttcggatggaggacaaggagat

SEQ ID NO: 229386 - DNA, 82 bp, Homo sapiens
taaagtcgagtatctggtgaagtggaaaggatggcccccaaattactccacaggatccgctgaacataggatgttgccacaa

SEQ ID NO: 229387 - DNA, 75 bp, Homo sapiens
gaaatagaagctgaatatgctgcattagacaaacgagaggtatccaaaccttgaaacctttgctctagatgtcag

SEQ ID NO: 229388 - DNA, 101 bp, Homo sapiens
cccgccatgaatgaggagtacgacgtgatcgtgctgggcaccggcctgacgaatttttccctagattggtgtaaacagccagacgtgggccttcccaaacc

SEQ ID NO: 229389 - DNA, 100 bp, Homo sapiens
aaaggcctgacatatctgagggagaagcacaagatcatgcacagagcaacgcacctcttgctttttcctccaaagtatgttatgttaagtttcgtgatcc

SEQ ID NO: 229390 - DNA, 105 bp, Homo sapiens
gagcacagagcctcgcctttgccgatccgccgcccgtccacacccgccgccagggaaccttctgaccagcctcatgggctcctcagagcaggaggatggggagga

SEQ ID NO: 229391 - DNA, 101 bp, Homo sapiens
gcatgttgggaaaactgaccccggtactgtcttcgtgatgaataaaaacatttcaactccctacagttgtgccatgcggattaatgaaaatcaagttccat

SEQ ID NO: 229392 - DNA, 100 bp, Homo sapiens
aagtattccatctttcttgtcatgtgcccacattgacaaattttccaaggtagttgatgtcacttggcgatattcctgcaaacatgaagaggtgattgcc

SEQ ID NO: 229393 - DNA, 88 bp, Homo sapiens
cgggcctggactgtgggctggtgtgtggaactggtgatgaaacttatcaggacatatttcgtgatttttcccaaatggcatccaataa

SEQ ID NO: 229394 - DNA, 114 bp, Homo sapiens
gaagacaaagagagagcacggcggctagaagcccttaggaaacaggtctgccatcatggatgttctcgcagaagcaaatggcacctttgccttaaaccttttgaaaacgctggg

SEQ ID NO: 229395 - DNA, 74 bp, Homo sapiens
ctaacttcacacgccgaaacctggctgactgtcttcggagtcggcccctgaagaagatggccgaccggatcagg

SEQ ID NO: 229396 - DNA, 75 bp, Homo sapiens
atggcaccgatgccgagaggagacacatgtctcagagcatgtcttcagtatcttcaaggcattctgaaaagatag

SEQ ID NO: 229397 - DNA, 76 bp, Homo sapiens
gagctctccagaaaattgatgcaggtcaaaatgcagatcttcgtgaaaacccttaccggcaagaccatcacccttg

SEQ ID NO: 229398 - DNA, 80 bp, Homo sapiens
atcctggggaaggacaccgtccggggccggctttacgtcaacagcgggcaggctgtccctgcaggatcccacgtacggct

SEQ ID NO: 229399 - DNA, 88 bp, Homo sapiens
gtgggtactacacaaccgtctccagccttggtctgagtggactgtcctgcagacgcaaacatgcagatctttgtgaagaccctcactg

SEQ ID NO: 229400 - DNA, 101 bp, Homo sapiens
agaaactccaggggcagataagggagtccaagaggaattcccgcttggccagcgagaccgaggagaatggctccgacagcttcatgcattccatggaccca

SEQ ID NO: 229401 - DNA, 74 bp, Homo sapiens
tttgtctatcttcttccttaggaaaccagcatgttacatggaattggaaaatttatagttgaaataatttgctg

SEQ ID NO: 229402 - DNA, 97 bp, Homo sapiens
cgcgcccagagccccgcgtttcagccctagggaagtactatactggcaattgctggagaagattttgcaattgttgcttctgatactcgattgagtg

SEQ ID NO: 229403 - DNA, 75 bp, Homo sapiens
cctaccctgtgaagatctctcaccatccaaaaaacttttcctccgcaaccatgtctgacaaacccgatatggctg

SEQ ID NO: 229404 - DNA, 78 bp, Homo sapiens
tgcccatgcacttgttgcagaaacagccaaggtatagctgtggaccaactgtatatgatcatgcgcaccttggccatg

SEQ ID NO: 229405 - DNA, 98 bp, Homo sapiens
gggacagtgcatcaaagaagcccatctcccgccgggcgccatggcagccgtggcctggctttggcccttcaaagagactgtgaggaaatgtgcccgga

SEQ ID NO: 229406 - DNA, 97 bp, Homo sapiens
ggagcccctgccatcacactgctaatacgagaaaaggatgaaaactttcggaagagaaagttgcctgtggtaagttcagttgttaaagtaaaaaaat

SEQ ID NO: 229407 - DNA, 75 bp, Homo sapiens
cggcgccaagccgccgtcatcttcttcctgtgccagggacttcagtactagtgctaataacatccagattgataa

SEQ ID NO: 229408 - DNA, 50 bp, Homo sapiens
aggcatccgtggttgtttttaaggaagttggtgaaccatctaaagaagag

SEQ ID NO: 229409 - DNA, 98 bp, Homo sapiens
atataagcagttaaaacacagaccttcaggctttgaagacaagattcccaaaaggagattctctgagatgcaaaatgaaagacgagaacaggcacagc

SEQ ID NO: 229410 - DNA, 82 bp, Homo sapiens
gtgcgcgctggcgctgagcctgcagccggccctgccggtgaaagaactcttttcttctttgggagtcgaatgtaatgtcttg

SEQ ID NO: 229411 - DNA, 100 bp, Homo sapiens
gtgctgctggtggcggcggagaggaaccggtggcatcgtctcccgagcctgctcctgccgccgagcctcctgacaaggtgatccgggcgggccccgcagg

SEQ ID NO: 229412 - DNA, 83 bp, Homo sapiens
ctgacaatggctttggtccccagcgcagtgaagtggtgagcctttttgtcactgctctggatgagggggatattgccttgttg

SEQ ID NO: 229413 - DNA, 82 bp, Homo sapiens
gggtggcggctcgggacggaggacgcgctagtgcttcctgtgtccagtaccggttagtggtccgggatgtgaacacccttca

SEQ ID NO: 229414 - DNA, 89 bp, Homo sapiens
gtgactagtaatggagaagttgatgactctcgtgaacatagctttaatagggtagctacagcaagctgggtagcaggcagatccaaagg

SEQ ID NO: 229415 - DNA, 98 bp, Homo sapiens
cgagggactgggagtcgttagtgagatgagtaacgaaagaggctttgaaaatgtagaactgggagtcataggaaaaaagaagaaagtcccaaggagag

SEQ ID NO: 229416 - DNA, 75 bp, Homo sapiens
ggagctagttagctgtctgttgtctgtagcccaggctctcaaaattagagagatgtgtaattgtccaccactgtc

SEQ ID NO: 229417 - DNA, 100 bp, Homo sapiens
acatacaactgaagacaagtgagccagatttcacctctgcaaatatgagagattctgcagaaggtgaccttgaggaaccctgggagctcaggaaggaagg

SEQ ID NO: 229418 - DNA, 100 bp, Homo sapiens
ccatacccgtgacctggggatcgctacggaccttaaaatacccgcaacagccccttcgtcccaacacctggccacattcatcatggacaagagcgaagcc

SEQ ID NO: 229419 - DNA, 83 bp, Homo sapiens
gtctgatgtggcatctagactttggtttacatacaggaaaaactttccagccattgtgttctaagaacggaagcatctgggct

SEQ ID NO: 229420 - DNA, 100 bp, Homo sapiens
ggccgggtgatctttggtctcttcggaaagactgttccaaaaacagtggataattttgtggccttagctacaggagagtatgcaggaattaacattggcc

SEQ ID NO: 229421 - DNA, 50 bp, Homo sapiens
ggaaaaggacgcaaagttctccggcgagctgtttgcagacaaggtcccaa

SEQ ID NO: 229422 - DNA, 141 bp, Homo sapiens
cggaggaggaggaggctggagtgggcgcggaggcgaccgccatggcgttcctcaaactccgtgaccagttcatggcctcccacgggaacgacgccgcgagagccaggtttgagtccaaagtaccctccttctactaccggc

SEQ ID NO: 229423 - DNA, 77 bp, Homo sapiens
agttggcacaagacacgggactcaccatccttcaagtgaacaattgatggagttttgctctgttgcccaggctggag

SEQ ID NO: 229424 - DNA, 90 bp, Homo sapiens
ctatggcgcactggagtaccctgttcctggcaaccctctttcccagctgcccgctcctcagcacccgaagattcgcctgtacaacgcaga

SEQ ID NO: 229425 - DNA, 50 bp, Homo sapiens
ttcctgttctgatagcgtggaagctcttcaacctgtagctccctgagcag

SEQ ID NO: 229426 - DNA, 99 bp, Homo sapiens
gggcatgccaagaagatgagaccgggggaggcgacgctaagttgctgatcgtggcggtgtcatggagaaactccagctgggcccagagattctgcagcg

SEQ ID NO: 229427 - DNA, 82 bp, Homo sapiens
ggccgcgcctggcctggccgggaccatgccggctcagttcggggaagctgcaggagttcggcgtgggtgatggcagcaagct

SEQ ID NO: 229428 - DNA, 82 bp, Homo sapiens
ttagagttattcaaggggatggagtagatattaataccttacaagaggatattcagtcggagctggtcattttcggagccag

SEQ ID NO: 229429 - DNA, 75 bp, Homo sapiens
aaaccatcagtgtttgggaatgattctgatgatgatgatgaggtgctcctgacctctgataaagctgcagccaat

SEQ ID NO: 229430 - DNA, 93 bp, Homo sapiens
cttgttcccccaaatgtctgactctgactctcggactgagaaacgcaagaagctggcagggcggagatgctggaccacgccgtcctgcttcag

SEQ ID NO: 229431 - DNA, 100 bp, Homo sapiens
cccctgataaaggatacgttgacttcacagagaatgcagttgtcttgacttcaggtctgtctgttctgttggcaagtaaatgcagtactgttctgatccc

SEQ ID NO: 229432 - DNA, 50 bp, Homo sapiens
gaaacacatttcatatactgcaggtgtggggatattcagctttgccaggt

SEQ ID NO: 229433 - DNA, 75 bp, Homo sapiens
tggagaccaatcacccacccagtgtgcgcattactctactgactggcagagacaggagaggtagatgtccacgcc

SEQ ID NO: 229434 - DNA, 75 bp, Homo sapiens
agatcatcgagcatttcaaacggaaataatgcaaaaggtgtcccaaggctcctgaccagtgaacaaagatttgag

SEQ ID NO: 229435 - DNA, 98 bp, Homo sapiens
ttttcaccagtcacatctcttactactgctagtcgctgcaacactcctctacagtttgagtgattcgcctttgccagtctcatctcgtgtctgctttg

SEQ ID NO: 229436 - DNA, 100 bp, Homo sapiens
catggggctgctccccaggacctgagcaggaacctggagttttcaggaagatgttaccgagtacttcagtgaattccttagtgcaggggaacggagtctt

SEQ ID NO: 229437 - DNA, 95 bp, Homo sapiens
tctggggatgcgaccaggaccctggggaaaggctaagtgctatttatggaggtacctatatgctgaataaacccattgaagaaatcattgtacag

SEQ ID NO: 229438 - DNA, 113 bp, Homo sapiens
gcccagcaagagattaaagatgcagtacgccacggggccgctgctcaagttccagatttgacaatgcagatcttcgtgaagactctgactggtaagaccatcaccctcgaggt

SEQ ID NO: 229439 - DNA, 98 bp, Homo sapiens
tcgaaaccctgaccggatcccataaacactgtcggaaataatgaagatgtttcattttcaagaccagcagatcttgaccttattcagtcaactccctt

SEQ ID NO: 229440 - DNA, 83 bp, Homo sapiens
tcatggaatatatgctggcgttccttctgctgctattggatcctttcctaatgctcaaggagaaattgaagccatagtcgtgc

SEQ ID NO: 229441 - DNA, 100 bp, Homo sapiens
ctaggtgagtcgcggtgggtcctcgcttgcagttcagcgaccacgtttgctggcctagacctgaactcttcagataatcagagtggaggaagtacagcca

SEQ ID NO: 229442 - DNA, 142 bp, Homo sapiens
ggaacctgtgcctcgagaggtattaggcagtgctacaagggatcaagatcagctccaggcctgggaaagtgaagagttgctggagaatgtaaccctaatccataaaccagtgtcgttgcaaccccgtgggctgatcaataaa

SEQ ID NO: 229443 - DNA, 100 bp, Homo sapiens
tatctctgcctcctgcgtagcatccggaaacatgtggccctacatcaggaatttcatggcaaggccccgtgacccccagcacaccagggagcccgccagt

SEQ ID NO: 229444 - DNA, 74 bp, Homo sapiens
tcttttgatgttgaaaggaaaaagccaggttgaaaattccacccttaattcccaaagtacctcactcatgaacc

SEQ ID NO: 229445 - DNA, 75 bp, Homo sapiens
ctctctttctggcctggaggctatccagcggggggctgtcggggggctgttaggtgcctggatgacaagtggaca

SEQ ID NO: 229446 - DNA, 73 bp, Homo sapiens
agttaacgacgctttcaaagatgcactgcagagagcccggcagtcgttccccatcaggaagtcctcgcagaag

SEQ ID NO: 229447 - DNA, 100 bp, Homo sapiens
accccttctccttggccgtctttgaggattcgctaaatattgtaatggatcaaggagatacacctacactagaggaagatttgaagaaacttcagctctc

SEQ ID NO: 229448 - DNA, 111 bp, Homo sapiens
ctggaggagaggccggacggcgcgggcgccggcgaggagagcccgcggctgcagacaatgcagatcttcgtgaagactctgactggtaagaccatcaccctcgaggttgag

SEQ ID NO: 229449 - DNA, 111 bp, Homo sapiens
tcggactcctgatggcatgcctgtaaagaacttgcagttgaaggagtataacacaggttggatggcaagcatgtggtgtttggcaaagtgaaagaaggcatgaatattgtg

SEQ ID NO: 229450 - DNA, 100 bp, Homo sapiens
cactgtttgtgctggatcgcagcgctgcctttccttatgaagaagacacaagcttatcaggagggcagacttcaaaagctactaaaaatgaacggccctg

SEQ ID NO: 229451 - DNA, 99 bp, Homo sapiens
caggaggcaatttcccatacctgtgcagaagtgcagaggtcaatctttatgtacagagatttaccgcattgtttctcagaagcaaatgtcagacagacg

SEQ ID NO: 229452 - DNA, 90 bp, Homo sapiens
atgaccaacagataactgaggacaatggacctgcctgggcatagacttccttaaggtgtgggacgtgcgtgcggcgagatggacactccc

SEQ ID NO: 229453 - DNA, 50 bp, Homo sapiens
cgatgctttaacatacagccactaggttcctagaagccaaaccaaactga

SEQ ID NO: 229454 - DNA, 75 bp, Homo sapiens
tgattcctgcggccgcggtctacgaagaccaagtgggcaagtttgattgtggaaggagaacatgaatctctcaga

SEQ ID NO: 229455 - DNA, 75 bp, Homo sapiens
agcagagaagctaactgtagaacacatcaagcatttatgcggaacccagtgacttgattgtaaaaatttacagag

SEQ ID NO: 229456 - DNA, 74 bp, Homo sapiens
tgaagacattggtgttgaaccagaaaacgtcctccaggagccggtctcccagccctgcccctcgcagccgtagc

SEQ ID NO: 229457 - DNA, 75 bp, Homo sapiens
ttagtcacccacctacatgttgagaccaagatcactccatggatgaaatgacagctgtggtgaaaattgaaaaag

SEQ ID NO: 229458 - DNA, 96 bp, Homo sapiens
tttccttcccagaggagccttcatttataatacgcttacagatttcatacgagatgacgactcatttaatttacataacagcaatagtactcacca

SEQ ID NO: 229459 - DNA, 82 bp, Homo sapiens
cctgtccttcgagcggctgttgcaggacccgctgggcctggcttacttcactgaattacatgaacgacagccttcgcaccga

SEQ ID NO: 229460 - DNA, 100 bp, Homo sapiens
gctggagctggagctgtcggaagatgggaataactgggaacacaagtccatttggacagccctttagtcaagctggagggcagccaatgggagccactgg

SEQ ID NO: 229461 - DNA, 98 bp, Homo sapiens
ttaacgctgacaagttctgcatttctgctgtttcagttgtactactacaagcactatttatcaacaaagaattaaatgtgagggagtctgacgtaaga

SEQ ID NO: 229462 - DNA, 75 bp, Homo sapiens
cggacttcgacttcctcaaagtcatcggcaaagggaactacgggaagtttctgaacttctggaacaaacaggaca

SEQ ID NO: 229463 - DNA, 82 bp, Homo sapiens
accgcctcacacgcttcctctccagagtgatcaagtgtgacccggtgcagagcattgtagaccaaggagccatggataggag

SEQ ID NO: 229464 - DNA, 98 bp, Homo sapiens
gcgccttcggctcctccttcctctacggctacaacctgtcggtggtgaatgcccccaccccggggtccccacggagtctggaccatggaggagcgagg

SEQ ID NO: 229465 - DNA, 51 bp, Homo sapiens
ggatagataccgaattcttatcacaaagaccacacctgtgacaatgcaggt

SEQ ID NO: 229466 - DNA, 74 bp, Homo sapiens
gcgattccgcagtccccccgttccctggaggtcctgtggaatgccacagctccggagcaagccccagccccggc

SEQ ID NO: 229467 - DNA, 88 bp, Homo sapiens
cccgccctgggagctgcccccagcggccttcctggatgctctgcagaaccaggctgaggccagcagcaagatcatcggccagtttgga

SEQ ID NO: 229468 - DNA, 96 bp, Homo sapiens
cacagtgcctctgaccagcatcgtctgtaaagtctgcgggccaggcatcgacatccgcaacgactatcagcagctgaagcgcctggagaactgcac

SEQ ID NO: 229469 - DNA, 100 bp, Homo sapiens
cttgagcatgaccagaccatgttagataaacttgtggatggacttgctacctcttgggtgaactctagcaattacaagtactatactggcaattgctgga

SEQ ID NO: 229470 - DNA, 124 bp, Homo sapiens
gttcagaccgtggcgaagtggagagtgacatgcagttggatggcggtgactgcgtgcccccaggctccgctcttgccagagggacaggagccatggctcagaaaatggactgtggtgcgggcct

SEQ ID NO: 229471 - DNA, 90 bp, Homo sapiens
ctgcccggtgcccgaggaggcagccaagctcgtagcctgccactccgtgcgcaacagctgaacagatgcgtctcgctcaagtgatctttg

SEQ ID NO: 229472 - DNA, 75 bp, Homo sapiens
ccgcgagcgcggcctgcaggagccgcggcgagtcctttgcacatgttggcaacacacgcatccgcatcggcctcc

SEQ ID NO: 229473 - DNA, 97 bp, Homo sapiens
agaaacgaggatgcagtcaatcagatggccgttactccctttccagtgccatcaagttctccatcttctattgagaactttgcagaaaacaccatga

SEQ ID NO: 229474 - DNA, 101 bp, Homo sapiens
cactcagctggctgtctcttacacggtagcaccctttgtgatgttggcagttgaaccgaccatcagcttatacaaagactctgacctgtttttgttggaca

SEQ ID NO: 229475 - DNA, 83 bp, Homo sapiens
ttgaaatcgacacacaaagaatagagttgagcctgtgggacacttcggaggagaaatgtctgaagtaagacccctctccagag

SEQ ID NO: 229476 - DNA, 75 bp, Homo sapiens
cgcaaactgacacctcagggacaaagagatctggacagaatcgccggacagattggtggaaatcaacaagctgaa

SEQ ID NO: 229477 - DNA, 51 bp, Homo sapiens
tataagaaaggtgatattgtagacatcaagcccccagagtgtgaaaggccg

SEQ ID NO: 229478 - DNA, 83 bp, Homo sapiens
attatcgatgagttcatctaccaggaattgaaatgcaccagcggttgtctaacatagaaaggaattggccttactactttggg

SEQ ID NO: 229479 - DNA, 75 bp, Homo sapiens
gctgaagtcccttcatggaactgttatgaaaattaaccaggagcgagcagagggatgtgcccttctcgtaaagtt

SEQ ID NO: 229480 - DNA, 101 bp, Homo sapiens
ctgcgttagtgattagagtttcttccctgccggaggtgggatacacggtagcatcatggtcgaggaaggaaaggaggtgagctggcctcagctgtccacgc

SEQ ID NO: 229481 - DNA, 50 bp, Homo sapiens
atgttttcatcacttctctccagaagggtggatgtgaacactgaccggaa

SEQ ID NO: 229482 - DNA, 75 bp, Homo sapiens
atttgaatgtgatagagaccagatgtactacaatctgctaaaactgtatagaaatcataggtgggatgctggata

SEQ ID NO: 229483 - DNA, 75 bp, Homo sapiens
gatgtggtggttttggcccctttgctgcaaagtgatcatggagctttgtggtgcaacaagacttggttattttgg

SEQ ID NO: 229484 - DNA, 75 bp, Homo sapiens
tacatcattcagcaaggtggctggattcgacacctcttagaggctgcaatcccagagagagttgaagagatccct

SEQ ID NO: 229485 - DNA, 100 bp, Homo sapiens
ttggacctagcaggttcggcggccggggacctgattggggatatgagggagcagctttcggatcacttcaaagatgtgatggctggcctcatgtacccac

SEQ ID NO: 229486 - DNA, 74 bp, Homo sapiens
gagacgcaggtcgtgaagggttcccaggacccccagaaactaatctggattcactccctctggttgatacccac

SEQ ID NO: 229487 - DNA, 75 bp, Homo sapiens
cgcgcccggcgcccctgagccggccgagcggcgacggaccgcgagactgcttttggcttctggatgccctcctcc

SEQ ID NO: 229488 - DNA, 90 bp, Homo sapiens
ggccgggcgtcttctgagagtcaggcatttataagacgctgtttggcatatcgaaaagaagatcgatttgatgtgcaccagctggcaaat

SEQ ID NO: 229489 - DNA, 75 bp, Homo sapiens
ttttgacacggctttggaaacgacgtcatgtgttaggttcacctttccttgccagtgaagatggcgtgcttggcg

SEQ ID NO: 229490 - DNA, 75 bp, Homo sapiens
cctacctccaaagtttatactatcagaccttattttcctaaggatgaggaaaatgtttcaacgtgcgcaagagtt

SEQ ID NO: 229491 - DNA, 90 bp, Homo sapiens
cagcagccgccaccaccgccaatacctgcaaatgggcaacaggccagcagccaaagtaatttcatctgtgccaaagcctccagaggacaa

SEQ ID NO: 229492 - DNA, 116 bp, Homo sapiens
caatgctcctggatgtaatgccaaggttattctgggccggtaccagacaaagaaacagccttggtataatagcacgttagcatcaagacgaaaacgacttactgctcattttgaag

SEQ ID NO: 229493 - DNA, 75 bp, Homo sapiens
ctgaaatgagtgaggaaaaacgagccaaacttcgtgaaattgagtgtttcctgaggttataggcgggtgtttgag

SEQ ID NO: 229494 - DNA, 75 bp, Homo sapiens
agctcgcccacgagtagcagccgcaactggacggaggacatggaaggaggtccctgtgcgttttattgcgacctg

SEQ ID NO: 229495 - DNA, 101 bp, Homo sapiens
tgggaggccggccggtgccagcacctttcggcttctgagacggcggcagcagcggcattcagaaatatggctacacacacctttctgcaggagagctgctt

SEQ ID NO: 229496 - DNA, 74 bp, Homo sapiens
aggggctgcgaccgcatcgtgcccgtggacatctacatcccaggatgagaacaagttgagcagtgccaacggcc

SEQ ID NO: 229497 - DNA, 100 bp, Homo sapiens
cagagcacttccctctgcgcaagacagattcgcttcaagctcagcttatcaatatgggtgttattcctaccttagtgaaattactgggcatccactgcca

SEQ ID NO: 229498 - DNA, 134 bp, Homo sapiens
ctcacaagtctctgaagccgtgcccgttcttcctggagggaaagtgccgctttaaggagaactgcaggaagaacggcgccggatcccaagctgaccgtgtccacggctgcagcccagcagctggacccccaaga

SEQ ID NO: 229499 - DNA, 50 bp, Homo sapiens
tgcaagtccttctgcagcaagccagaaaactttagaaactgttcctttgg

SEQ ID NO: 229500 - DNA, 97 bp, Homo sapiens
aaagagtcaacagcagtggcaacagctctggcagaattcacagaggcagatgaagcaatggcagaactcgcaattgctgacaacgttttcctgttcc

SEQ ID NO: 229501 - DNA, 73 bp, Homo sapiens
ttacgtctgcggaagtgcagctgcctcagttcttagcgcagcaagatggattctggatatactctgagtattg

SEQ ID NO: 229502 - DNA, 75 bp, Homo sapiens
gagttgactttggctactactggttccatcgtatggctcatgctaatgttctctatgggccactccacaccaagc

SEQ ID NO: 229503 - DNA, 100 bp, Homo sapiens
tgtactgtattttaaacatggaattgatcgctactggagacgtgtagcacctcagtttctactttccaggtccactggtgtttggtgtacccatgtgact

SEQ ID NO: 229504 - DNA, 75 bp, Homo sapiens
acgctggacaagctggacgttaaagggaagcgggtcgttatgagtgaaaccagcagtgtgtgtagcagcagtgac

SEQ ID NO: 229505 - DNA, 83 bp, Homo sapiens
cccgcggccggagagctggaggagaggttcaaccgcgccctgatgaaggatttgggggcagagcacttggcaggtcatgaagg

SEQ ID NO: 229506 - DNA, 100 bp, Homo sapiens
tggagaacctgaagtagcaaaggcaagaaggcaacgacgttccatctgtggaaggacctaccaaccagagttgtctgctggttctcagcttgaagaagat

SEQ ID NO: 229507 - DNA, 118 bp, Homo sapiens
gacggagcccttgatgacgagggccacagtgggattaaaaagaccactgaggagcaggtgcagccccaactggaccctaggcaaaagtgagtggcactcctctgccaggactccaggc

SEQ ID NO: 229508 - DNA, 100 bp, Homo sapiens
tccgtccgccgccaccacccactccggacacagatggtcatcatgggccagtgctactacaacgagaccatcggcttcttctataacaacagtggcaaag

SEQ ID NO: 229509 - DNA, 90 bp, Homo sapiens
gacaagaacagcgccgtcaccagcaggccacggactctgactacgaggacgcgctgcccaagcactccttcgtgaaccactacatgagcg

SEQ ID NO: 229510 - DNA, 98 bp, Homo sapiens
aacgtcattaagctacagggccccttctccccggaggaggacccctccagatggtttatgggagaaatattagccagtgtcttcacatgctcattgat

SEQ ID NO: 229511 - DNA, 100 bp, Homo sapiens
ggctcctgggcgcgggcagccctctgccttcctggccgctcccaaatatagtaattgacctgctgactgtgggcgagtctcggcagatggtagctgtggc

SEQ ID NO: 229512 - DNA, 75 bp, Homo sapiens
ccaccatctgcccctcctggtccggagggatgtggctgatcagtgttcggtgaccagtgacttggattttccaac

SEQ ID NO: 229513 - DNA, 75 bp, Homo sapiens
catcgttaaagtctctcttcaccctgccgtcatgtctaagtcagaggtgtgggatgctctccgggaagagcccct

SEQ ID NO: 229514 - DNA, 75 bp, Homo sapiens
gccaggagcgacgtcaccgccatggcaggcatcaaagctggaacagtgaaccatggagctgtatttcggtgaata

SEQ ID NO: 229515 - DNA, 100 bp, Homo sapiens
caagcgatcccgaacgaggacggattcctactctgctggccagtcagtcgccctctgcccgaggagatgctcagctacgcccgggatgacacccattacc

SEQ ID NO: 229516 - DNA, 48 bp, Homo sapiens
gcaacaggaaatgaacacattgcagggagtaactattcccagtcagag

SEQ ID NO: 229517 - DNA, 87 bp, Homo sapiens
ttaagtaactggtcgaggttgtatcagtaagaagggagcacggaacagattcaagctcagaaatgggacgtcggtcatcagatactg

SEQ ID NO: 229518 - DNA, 98 bp, Homo sapiens
gtccgccaaatccggaagaagatgatggaaatcatgacccgagaggcgcagacggggaagcggagccaacatgccagtggcccggagctgggtttgtc

SEQ ID NO: 229519 - DNA, 100 bp, Homo sapiens
atttgtggattaaacagatcggagagattataagcgccatggctatggctagtgttaaattgcttgccggtgttttaagaaagccagatgcctggattgg

SEQ ID NO: 229520 - DNA, 87 bp, Homo sapiens
ccattcgagggcggatcctctctggttcatcatgcctagtggcgtataagaagaccccgccaccggtccctccacgcaccacttcaa

SEQ ID NO: 229521 - DNA, 100 bp, Homo sapiens
caattacatgtttgcaaaatggatggtcagcacaaccaatttgcattattcattcggctcctaaagaagtagcagtgtccaaggaacaagaagagaaatc

SEQ ID NO: 229522 - DNA, 51 bp, Homo sapiens
gatttttctaccatatcagagatgacaggagaacagtggtgtgtcccatca

SEQ ID NO: 229523 - DNA, 100 bp, Homo sapiens
atgaagggacacagtacggtagtcaaacccccagagacattttaaatccaaaggatgtgattagtgtccagctggaagacactacctcttgcaaaacttt

SEQ ID NO: 229524 - DNA, 76 bp, Homo sapiens
ggtcaagaaacagttgaaaagttccggcagagaattctggctccctgtaaggtaatctgtaagtcagatgctccaa

SEQ ID NO: 229525 - DNA, 90 bp, Homo sapiens
gctgtctctcgggtcctcaataagcttggagaactgctatgatcttctggtcagaaagaaaagacttattgttctcttcagccactggtt

SEQ ID NO: 229526 - DNA, 100 bp, Homo sapiens
tcacagtttgcgggactcagtcccatcactccaaggagagaaggtgtgcaactgaggaacatggctcaagaaactaatcacagccaagtgcctatgcttt

SEQ ID NO: 229527 - DNA, 99 bp, Homo sapiens
cacgggtcgctccatttcgaattctgcttcaagttcccggctcccaggtttattctcccatagcatgtggcgccatgtcagaaccggctggggatgtcc

SEQ ID NO: 229528 - DNA, 100 bp, Homo sapiens
aacacaaagccaaggctctgctctttgaggtgccactgcagaagcgggcagtgccctccatgaggtgcgaaactgtcttcaagctgactcctgaattctt

SEQ ID NO: 229529 - DNA, 88 bp, Homo sapiens
cacgttcgcgtctggcccggcgggaagggagaagacactgcgtcaagcaggtgccccgaataacgtccggcctctttggcctaccccc

SEQ ID NO: 229530 - DNA, 100 bp, Homo sapiens
gcaggtccgcggctggagggtacctggccctgctgaaggggtcgggtgtgctgacagccggctgttaagccctgcctgccccgcgccaaaggaagtgact

SEQ ID NO: 229531 - DNA, 90 bp, Homo sapiens
aaacagccagaccgagagcagcctgccggggcggaggagaagtacagcatcggggagcccacagtgccatccaccctggcagaggagttt

SEQ ID NO: 229532 - DNA, 96 bp, Homo sapiens
ggctagcctctatgtggccatgaatggtgaaggctatctctacagttcaggaccatcatctttagtgcagaggatggaaagttgatgcccagtaag

SEQ ID NO: 229533 - DNA, 50 bp, Homo sapiens
gataacaccctgtaacagctgaggtaacaagatgctcaactatagtgctc

SEQ ID NO: 229534 - DNA, 75 bp, Homo sapiens
gaagatgcctttgggaagcatgtcaccaacccggccttcaccaaactccctgacaaggaagatggggagccaaag

SEQ ID NO: 229535 - DNA, 75 bp, Homo sapiens
gtacacagacgagcatggggaaggggacactacacagaaaatgagaactgctcactatcctaccccagccgaatt

SEQ ID NO: 229536 - DNA, 100 bp, Homo sapiens
tataagagagtagaaagccctgattgttgacggtgagtggtttcgtttcctttttcactgggtttggagaggaaactggcataggtgagagccgcggtgc

SEQ ID NO: 229537 - DNA, 98 bp, Homo sapiens
gagggatccttcacccgtgtctggtttcctcttactcgacccagtctttgtaaagaatgggaggcagctgtcagaagaaaaaactttaaacccaccaa

SEQ ID NO: 229538 - DNA, 153 bp, Homo sapiens
gtgcaaagaatcagattcacctcatgctgttactgtatatatgctagagcctcactcctgtcaatatattcttgggattcaaccctatgaaaagataaaggccaggggcttgcctgataatatatcttccgtgttgaacaaactagtggtggt

SEQ ID NO: 229539 - DNA, 98 bp, Homo sapiens
gcgtccagtgatgactgggggatcccggcaagtaacatgactaaaaagaagcgggagaatctgggcgtcgctctagagatcatggaagggaagtggtt

SEQ ID NO: 229540 - DNA, 96 bp, Homo sapiens
atacaatgtggctgtcggcagagctggtagaggtgtcatggagaaactccagctgggcccagagattctgcagcgggaaaatccaaggcttattta

SEQ ID NO: 229541 - DNA, 75 bp, Homo sapiens
aagcccccgggcccactggtgccacctgaccagcaggacaaagtccagtgcctccccaaagccagtcctgtgtca

SEQ ID NO: 229542 - DNA, 100 bp, Homo sapiens
acgtgcgaggggcatttcaggagtttcctgtctgtcagtttgaccttgtctgtgtcaatgcgtggatgctggacctcacccaagccatcctgaacctcgg

SEQ ID NO: 229543 - DNA, 75 bp, Homo sapiens
ctcagctccagctgcactgctcagacgaggctgggctaagcagttccaagctttccatgtccaaggccctccctc

SEQ ID NO: 229544 - DNA, 100 bp, Homo sapiens
cgcacggcagcctagcgcaatgaggcgggcagcactgcggggcaccaccacgaggcgatttgtgggccataccaaggatgtgctgagtgtggccttctcc

SEQ ID NO: 229545 - DNA, 88 bp, Homo sapiens
ggatacaacaggcctttacagcttctctgaacaaaccagactgtgatgactgggagagcgggctgaatgcaatggagtgtgcattaca

SEQ ID NO: 229546 - DNA, 100 bp, Homo sapiens
gacctttcagccgctgccgaaatggtgtgatccctcacatccacaaatctctgattggaaagaagggacagcagaaaactgcttagagggatgctttaac

SEQ ID NO: 229547 - DNA, 101 bp, Homo sapiens
gatgccatgatttacactcggtatgtcctcagtcttctgctgcatgacagctatgactacgacctgcaggaacagcctctacggcagacacatgcaggcca

SEQ ID NO: 229548 - DNA, 74 bp, Homo sapiens
agattcgcagtggtcgcttcttctccttggcctgggctctaacatcttccgcctgctagacagcctgcgggccc

SEQ ID NO: 229549 - DNA, 90 bp, Homo sapiens
catcagtgtttgggaatgattctgatgatgatgatgagctgctgtgagcaggaggagcccacatactttgccatctggggcgacaacaag

SEQ ID NO: 229550 - DNA, 76 bp, Homo sapiens
ggaaaaagcagggaggttatgaggcttaataaagaaggctattcatgctcttatggaaaatgctgtgcaaccctta

SEQ ID NO: 229551 - DNA, 98 bp, Homo sapiens
attgccagcatactttgttgtccccacccctcttcctgaagagaatgtgcagcgctttcagggtcatggcataccagggatggactatttgggttctc

SEQ ID NO: 229552 - DNA, 74 bp, Homo sapiens
gcggcggcgaacatgcgcttttgacacattggaggcaagactggtgtctttgtactttgataccaagaggtacc

SEQ ID NO: 229553 - DNA, 100 bp, Homo sapiens
gacttcagcagcctggtgtcacctctcagcccccgcaggatggctgcccgggtcttctacctgctcctgggtgaccaagaatatggcccaggtgaccaaa

SEQ ID NO: 229554 - DNA, 100 bp, Homo sapiens
atgtggatgtcacagccaaaacagatcccagaagacccacttgtggctgaagagtactacgctgatgcatttgattcctattgtgaagagagtgatgagg

SEQ ID NO: 229555 - DNA, 51 bp, Homo sapiens
aggctggtctcgaactcccaacctcaggtgatccgcccgcctcgacctccc

SEQ ID NO: 229556 - DNA, 75 bp, Homo sapiens
tctagtttatcctgcaactccagtcaatatcccacttaaatcattccagccacctgtctttaccagtttccaaga

SEQ ID NO: 229557 - DNA, 99 bp, Homo sapiens
gtctccaaatccgaccaattgctcatcgtcgtgtccatcctagaagccctgaatcgtgtgcacttacttgggcgagtgggtcaggaccctgtcttgaga

SEQ ID NO: 229558 - DNA, 83 bp, Homo sapiens
aaagacgctaaacgtgccctactctgccccgggggagagatcagcttgaacgggtctttttacgacttggccatgctgaaaca

SEQ ID NO: 229559 - DNA, 83 bp, Homo sapiens
ctgtgacttcatcttctgatataaaagaccagtgtcttaagtaccagatttctaccactccaaacgccggctgatcttctcca

SEQ ID NO: 229560 - DNA, 100 bp, Homo sapiens
cggggcgcgggtctcttccgcggaaactgacattgcgtttccgttgtcggcctcccactgcagattaatatttttggggacagatttgtgatgcttgatt

SEQ ID NO: 229561 - DNA, 82 bp, Homo sapiens
gaagccgccacccaaaccagtcaaaccagtactatactggcaattgctggagaagattttgcaattgttgcttctgatactc

SEQ ID NO: 229562 - DNA, 100 bp, Homo sapiens
tttcgctttgatgaatcaggtcccgaaagtgctaaaaagaaaaatgtaaggggtgaattcacttattatgaaatacaagataatacagggaagatggaag

SEQ ID NO: 229563 - DNA, 73 bp, Homo sapiens
ggtacaggctcagtctgcggccaagactccgtcctgcaagactgaaccatcaggctctacagcagagccctct

SEQ ID NO: 229564 - DNA, 75 bp, Homo sapiens
ttttgacagaagatgagacaaccatatctgatgatttcttcggtgcagaaaaaaaatgaagatttaggacaggag

SEQ ID NO: 229565 - DNA, 119 bp, Homo sapiens
cttggggacctcttactgggctttcttaaatattatgctacagaatttgagttcaattagcagaatttctagaaaatttacaagaaaagtccttgaggattgaagcctttgttagtgag

SEQ ID NO: 229566 - DNA, 75 bp, Homo sapiens
gcctgcgtccccagactcagaggtccagtggcattgcagagcacggatggttgcaggagccaacttttacattgt

SEQ ID NO: 229567 - DNA, 75 bp, Homo sapiens
gtctcactagataccttcaatcatcattttgagctcaaaggtcctttctgaaagatctgctactgaagtagacaa

SEQ ID NO: 229568 - DNA, 75 bp, Homo sapiens
ccagtccaagctgcctggagtcaaggaagtgaatctgaatggtgcctaccctaagctggtgcctttcagacctgc

SEQ ID NO: 229569 - DNA, 88 bp, Homo sapiens
tcaatatctgtcttcggtggactccttcggcagtccacccaccgccgccgcctcccaggaatgggtaccacagaccatgtcatcgtcc

SEQ ID NO: 229570 - DNA, 100 bp, Homo sapiens
cgtgcactccgcacctcggggacattattgcgcgtggaacggctgcttttggaaggttatcaatactctggctgaccatcatcatcgtgggactgacttt

SEQ ID NO: 229571 - DNA, 75 bp, Homo sapiens
ctcattcctgccagaggtggcatctgtgaactagcaaacatgaacgttggagttgcccacagtgaagtgaatcca

SEQ ID NO: 229572 - DNA, 89 bp, Homo sapiens
gccacatgcattggaaataatagcgctgttgataacactgatgctgaggggaggctcatactggctgatgcgctctgttacgcacacac

SEQ ID NO: 229573 - DNA, 114 bp, Homo sapiens
gaagcctgtggtgtgcacctgctccaccgtggaggtccaggccgtgctgtccgccctgctcacccggatccagcgctatgggcatccccaccatcagatggtgcggggcagagg

SEQ ID NO: 229574 - DNA, 75 bp, Homo sapiens
cggcctggcatccctggcggcactgcctccctcctggagcccacctccggaactgatgaggagtttcaacagaga

SEQ ID NO: 229575 - DNA, 50 bp, Homo sapiens
gtctagcccagtggaccttctgaaggtggactggcagaggaagtggacga

SEQ ID NO: 229576 - DNA, 90 bp, Homo sapiens
tcacattttgcacaagggcagtcaccatgaaagaatgatatggaacctagcaaagctgttccactgaatgcatctaagcaagatggacct

SEQ ID NO: 229577 - DNA, 100 bp, Homo sapiens
gcggtgtctcgggaccccgacagctgcggttggcgggcaccataggccgaagcacccggttacagttacatgatcgacaacgtgatcctgctcatcacag

SEQ ID NO: 229578 - DNA, 82 bp, Homo sapiens
ctggagccgagatggagccctggtgggcacggcgtgcaaggatgaccgagtgggagacagcagcaccagcggtggcagagac

SEQ ID NO: 229579 - DNA, 81 bp, Homo sapiens
tgtctcttctaagctgaataaagctgttttggaactgtcaggtacctcaaagcgcattgaatgccccagaggagcccgaaa

SEQ ID NO: 229580 - DNA, 100 bp, Homo sapiens
tgacagcttggaccatgggcgcccgcggtctggacaagcgaggaagtttctttaagtgggctcgggatgagtttgaaggcctcttcaagcagccagcaga

SEQ ID NO: 229581 - DNA, 76 bp, Homo sapiens
gtgccttttgcctcccaccgtgattctgaggcctccccaaccatgtgcaattacatgcgtcgggatgtccaggaaa

SEQ ID NO: 229582 - DNA, 74 bp, Homo sapiens
acttatcagtagtgacttacagtaagggttggaaataccaagtaaggaattaacatatatgatgctggaaactt

SEQ ID NO: 229583 - DNA, 75 bp, Homo sapiens
aactgtgttggtgggaaaagctccacagagctgctgcggcagttagccaataccaagaaggagggtgacctgata

SEQ ID NO: 229584 - DNA, 75 bp, Homo sapiens
gccgtcgctgcagagaccccgctatggctacttagaaggttttgactccgtggtatcatctactgagaaactcag

SEQ ID NO: 229585 - DNA, 100 bp, Homo sapiens
agaatattaaaaaatctggagggactccaacttcaatggatttccagactgtattaccatcatttgagctcttctcaaagtatggaaaattatattcaaa

SEQ ID NO: 229586 - DNA, 97 bp, Homo sapiens
tccctgaccattttctactgtccctgcgcgagtcaaaattgaggagccagtttccatggagatggacaaccatatgtcggataaggatgagagttgc

SEQ ID NO: 229587 - DNA, 98 bp, Homo sapiens
tgcagaggatccatctgtcttagcaaggctgtcatcacattcagacttggttccttcaacctagagaaagttgaaaacccagctgaagtcattagaga

SEQ ID NO: 229588 - DNA, 100 bp, Homo sapiens
ttttcccatgacgcatggcaacaccggattcagtggaggaggcctcggtggtaccagaagaggaggggctgatgtgaacatccggcattcaggccgcgat

SEQ ID NO: 229589 - DNA, 100 bp, Homo sapiens
gggatgactgattctcctccgccagggactttgaacatgtcggggatcgccctcagcagactcgcccaggagaggaaagcatggaggaaagaccacccat

SEQ ID NO: 229590 - DNA, 90 bp, Homo sapiens
cctttgtggatggccggtctctacctgcagcaaaatgatgcttcaacacccaggccaggtctctgcctcggaagtgagtgcttctgccat

SEQ ID NO: 229591 - DNA, 97 bp, Homo sapiens
atgaagagcttaagaaacaaatgcctattggaggagatgttccagccttacagctccagtatgaccattgtaaggctggagtgcaatggcgtgatct

SEQ ID NO: 229592 - DNA, 105 bp, Homo sapiens
agaattctcacctgccatcggaagttctgtacatgctgaaaaacgttcgtgaagatagtgatccggggagacaggaacacgggcaagacagcgctgtggcaccgc

SEQ ID NO: 229593 - DNA, 82 bp, Homo sapiens
aatcagtacagcgttcacaagacttcatcacctctttgtacatcttctgcaattactcgtactgccaaatctgtcgaaaggg

SEQ ID NO: 229594 - DNA, 82 bp, Homo sapiens
tccactgttcctggaggaatccgagaagagcagagcggagggagccccagacacgaaagaagatgctgatatgctacaacac

SEQ ID NO: 229595 - DNA, 83 bp, Homo sapiens
cagaaagcccttcaagaaggggaaggtatagtcgtctccccctccaccacggcaagtcctgcagagggaaccagctctgacag

SEQ ID NO: 229596 - DNA, 101 bp, Homo sapiens
ctcactccctgtgaagctctccagcatcatcgaggtcccatcagcccgttttacggagaagacttttactgtgaaattcctcggagctttcgtcacctgtc

SEQ ID NO: 229597 - DNA, 59 bp, Homo sapiens
gaccgatgtcatatgctaggccactatacagatacaggcattttccaaaggcaagcctg

SEQ ID NO: 229598 - DNA, 75 bp, Homo sapiens
agggagatgattattagttgcgttgagtcatcaggcaaaacccggagagtggccagtctcctatcccaggacatc

SEQ ID NO: 229599 - DNA, 100 bp, Homo sapiens
gccgcgcagctgggcgagaagctgctccggcctagcctggcggagctccacgacgagctggaaaagggccgttgctccagggagaactgcaaatatcttc

SEQ ID NO: 229600 - DNA, 83 bp, Homo sapiens
ataacagcgacctcttttctgaacaggttgcttcaaagatggtcaacattatgaagagggatcagtaattaaagaaaactgca

SEQ ID NO: 229601 - DNA, 98 bp, Homo sapiens
gcggccatggctcacctccggggatttgccaaccagggccaattcctgtccccccagcagcatggcatcgtgtgctgaaccctctgagccctctgccc

SEQ ID NO: 229602 - DNA, 75 bp, Homo sapiens
gccgccgccgcctcggccgaccagggacctgcccgcctgcggctgctccggggttatgtaccgaaggactctacc

SEQ ID NO: 229603 - DNA, 75 bp, Homo sapiens
ctttgagctactgggctgtgagctgaacgttgcctttccccatcttcctggttctgctccttcgtggcctagtct

SEQ ID NO: 229604 - DNA, 83 bp, Homo sapiens
tctggggccaagggacaatggtcaccgtctcttcaggcccatcttgacgattccaagaccacccccttgagcaagaatgccat

SEQ ID NO: 229605 - DNA, 75 bp, Homo sapiens
ttccagcttcggaacaagagaccctggtgaagcgacttccagtcatttggaaaggatgggatgaaaaggaacctt

SEQ ID NO: 229606 - DNA, 83 bp, Homo sapiens
cacccaccgccgccgcctcccaggaggcctagaaggagagccagagtgcgatcagaaaaccagccgtgcgctggaagacagga

SEQ ID NO: 229607 - DNA, 83 bp, Homo sapiens
cgctactcgcttgcctacccgccggcccgcgggtctacttcctcaaagcttccccgggcgctgcctggacaggcctgcctgcg

SEQ ID NO: 229608 - DNA, 82 bp, Homo sapiens
agaaagagaagaaaaattaaaaaagaggccactgctatttgaaagagttgctcagctctggattaatcgaattacagctgct

SEQ ID NO: 229609 - DNA, 82 bp, Homo sapiens
gcggggaccgctgtgctctcggttttaaaatcaaagatgggaaaatcggagaaaattgcccttccccatggccagcttgttc

SEQ ID NO: 229610 - DNA, 101 bp, Homo sapiens
agggatgttgcctagtggagtgttagctggaggacggcagaccctgcaaagtgatatgcaaccattgtctccaatttctgtccatgaacgctacagttctc

SEQ ID NO: 229611 - DNA, 100 bp, Homo sapiens
cagagatgcctgtaccgtgatgtgacgctggagaacctggcacttatgtcctccctgggtgtctgatgatttgtgagcctcaagtgactactctgtggaa

SEQ ID NO: 229612 - DNA, 146 bp, Homo sapiens
cagaaagcaagtttctgaagttggtggccgccatcaaagccgccttggctcagggctaatgcgccctgaaggcagagaaggatttgcccctgccccggaaaagcagcaggtgagcctggggagagacgtggcgggggctggccgcc

SEQ ID NO: 229613 - DNA, 100 bp, Homo sapiens
ctcaccatacaggaacagggcagacgttagcgtgagtgatcactctcaatcccgggtgtccctggccagtgtccttccacctgtccacaagcatggggaa

SEQ ID NO: 229614 - DNA, 82 bp, Homo sapiens
aggtgatccagcaaggtcggcagagcaaggggcttacgcagaaggacctggccacgaggaacaatcctgcaccatgactcaa

SEQ ID NO: 229615 - DNA, 90 bp, Homo sapiens
ggagcgggccgtggaggcttcgccgcctagacctcctgccccccgaggtctgcagtctcctgaacccagcagccatctacgccaacaacg

SEQ ID NO: 229616 - DNA, 75 bp, Homo sapiens
atcgggctcggcgcaggcccgcggggagcgcagcccggcggaggacatgatccacatcgcggacaccaaggtcgc

SEQ ID NO: 229617 - DNA, 91 bp, Homo sapiens
gacaagccgctggcagccgcggatctcaccgccgctcaggatgccttcaattaagttgcagagttctgatggagagatatttgaagttgat

SEQ ID NO: 229618 - DNA, 100 bp, Homo sapiens
tcactggtttgtgtccagagccggactgattctctcaatttgcggtgcaacaccggaggatttcagcaacctcccacctgaacaaagaaggaaaaagctg

SEQ ID NO: 229619 - DNA, 82 bp, Homo sapiens
cccagtcctgaccccaaatttgaaaggcttcgaggcagcggtataccgctgggccgaccactcaagcacggtgctgcagcgg

SEQ ID NO: 229620 - DNA, 75 bp, Homo sapiens
gccatggcggccgccctgggagcgagcggaggagcaggcgccggaggcagaggcaaggctggcagcaaaacgggc

SEQ ID NO: 229621 - DNA, 75 bp, Homo sapiens
gaaagagacccaggcccctggcgagcaggacagcatgctgcctgaggtgcagtcagcctcagtttccaaagccgg

SEQ ID NO: 229622 - DNA, 100 bp, Homo sapiens
atgttctcgggcgacggcgagtacattgacttcctccactcagtatttttagaaggccctgtggaggatttgttaaggattccaagtaactcttatttgg

SEQ ID NO: 229623 - DNA, 101 bp, Homo sapiens
aaaatatatccgcagggttcggatgagaccagggaagatcagttttcctgccatccaggctgctccctccttcagcaactcattcccacagatcttccgag

SEQ ID NO: 229624 - DNA, 100 bp, Homo sapiens
aaaacggccaagaggcagacctaggaaatggggtctcccttgatctgagaatggctacctctcgatatgagccagtggctgaaattggtgtcggtgccta

SEQ ID NO: 229625 - DNA, 75 bp, Homo sapiens
actctggaccaggagaggcccgcggtgaccgaggcctgggccccggacatatgtagagtgtgtcggtcagaagga

SEQ ID NO: 229626 - DNA, 105 bp, Homo sapiens
ctcaatatctgtcttcggtggactccttcggcagtccacccaccgccgccgcctcccaggggcactatggcagacaaagttaggaggcagaggccgaggaggcga

SEQ ID NO: 229627 - DNA, 74 bp, Homo sapiens
ctataaagtaaaagaacctggtgaaagtcccatattctggaactgtggctgcaccatctgtcttcatcttcccg

SEQ ID NO: 229628 - DNA, 80 bp, Homo sapiens
aagcagcaggagtttggaagcccttttcctccaaatcctgggaaagcaccctggaggggtattatgtggatgatgccttg

SEQ ID NO: 229629 - DNA, 75 bp, Homo sapiens
cggtgacagcgtgagaggttcgcagagtaagtaaggaggtctctgtaccatggctcgtacaaagcagactgcccg

SEQ ID NO: 229630 - DNA, 114 bp, Homo sapiens
tccaagttagctgacttctgggggaacaacaacgagatcctcagtggtagaagaagaaaggtgccactccggcatgaagacagactcgcttagtcgccagtcacttaagctgag

SEQ ID NO: 229631 - DNA, 152 bp, Homo sapiens
caggtcaagccactgatctggattgagtctgtcattgagaagttctcccacagccgcgtggagatcatggtcaagactacagtggtagtggaggccgaagcggcgggaacagctacggctcaggcggggcatcctacaacccagggtcacac

SEQ ID NO: 229632 - DNA, 97 bp, Homo sapiens
ggagtgaagctgcataccttcgcgaatgcatacacagccacagctatcaacagcaccaacttctgcacctcagcaaaggatgcctttgtcattctgg

SEQ ID NO: 229633 - DNA, 127 bp, Homo sapiens
agtcaaatatacaaatcactttagaatcttggctctaagtgccacaccaggtagtgatataaagcctatggaccagctctcattgaacactgtcttttagaaaatggattctcgggtaatgtcaaag

SEQ ID NO: 229634 - DNA, 87 bp, Homo sapiens
gtgccagaaggtcttccacttgcagtcacgatctcactggcttattcagtcaaaggagtgcatccgccccaacccttttccccctcg

SEQ ID NO: 229635 - DNA, 82 bp, Homo sapiens
cctgatcatcctgctgggcttcgtccagatcgggaagggtggatccataaagaacccagccaacccgcagagggaggggagg

SEQ ID NO: 229636 - DNA, 74 bp, Homo sapiens
tggaaaaccagttattgaatatcaagaggaggagttgttgggcaagtgtccagagaatggctgggatgaaagta

SEQ ID NO: 229637 - DNA, 101 bp, Homo sapiens
taagcgcagaaagcaggcgaacccgcggcgcaataacggaaactactttgcttcgcactttttcatgggaggagagaaattcgacaccccccaccctgaag

SEQ ID NO: 229638 - DNA, 98 bp, Homo sapiens
ggataggcacggacgcaacacttttggaacttagacgctagtattgttgcagcatctggcagtgagactgaggatgaggacagcatggacattccctt

SEQ ID NO: 229639 - DNA, 82 bp, Homo sapiens
ggactgcctcactgagcaaccaagagttttgaacgaagaatgtgatcagaactggtacaaggcagagcttaatggaaaagac

SEQ ID NO: 229640 - DNA, 83 bp, Homo sapiens
cagtggaaccatcacacaaaagcacacaaagacctcctcctccacaggggagacagaggatgaatgctatcaagtaagacaag

SEQ ID NO: 229641 - DNA, 101 bp, Homo sapiens
atatctggccgcctctgccgcagctggagataatagtggaaccatggatttatttggaggtgcagatgatatctcttcagggagtgatggagaagacaaac

SEQ ID NO: 229642 - DNA, 98 bp, Homo sapiens
ggcagctgtactaggactgggaacggatgacgtccggttgtttgccttcgtgcgcttcaccaccggggatgccatgagcaagaggtccaagtttgccc

SEQ ID NO: 229643 - DNA, 90 bp, Homo sapiens
tggcttgtaatcataacttgaaaggggtttctctggatctcagcaactgtgagtgtcctgggtcatgaaacttaatccacagcaagctcc

SEQ ID NO: 229644 - DNA, 50 bp, Homo sapiens
attggactgtgggcatggaatgaaaaacactattcctgatcagagaactc

SEQ ID NO: 229645 - DNA, 101 bp, Homo sapiens
acaggacctttttgaggagttgccatgaggactgtcagataagtttataccatggatagcacaaaggagaagtgtgacagttacaaagatgatcttctgct

SEQ ID NO: 229646 - DNA, 110 bp, Homo sapiens
ttgacactctggtccagcttcacctcaaaccaggcaccagggaaggtgatgaagacgtatacggggaggttcgagaagaggcatctgatgatgacatggaaggggacgag

SEQ ID NO: 229647 - DNA, 50 bp, Homo sapiens
tgcgccggcctcgcctcgcttctcagtggttatcactaggctaaaactgg

SEQ ID NO: 229648 - DNA, 110 bp, Homo sapiens
gcgagctgagtggttgtgtggtcgcgtctcggaaaccggtagcgcttgcagcatggtttttagaacttcagccataaaaatgggcagaattttccttgatcatatcggtg

SEQ ID NO: 229649 - DNA, 100 bp, Homo sapiens
ctatgcagaagaatgtgcctccatgctggcagtcaccttcagtggtggggacaagatgcttcggagcattccctgaatcgtgtgcacttacttgggcgag

SEQ ID NO: 229650 - DNA, 100 bp, Homo sapiens
cgacagtgactaccatgacgaaaacatgtactacagccagtcttctatgtttccacatcggtcagaaaaagatcattttgaaagcgaagcagaagccgta

SEQ ID NO: 229651 - DNA, 100 bp, Homo sapiens
ccgcagcccgccgggagctctgaccgaggcgcctcgctggggcggggaccttgccttgcccgggctgatgactatcagccagttcgtctgctcagtaaac

SEQ ID NO: 229652 - DNA, 75 bp, Homo sapiens
aagaaactgtgaagcaaattcgtcagatcaaagaacaagatcctgataacttaagtgactctctcttttccggtg

SEQ ID NO: 229653 - DNA, 82 bp, Homo sapiens
gaggaaagcaaaggagtcagggatggctcttcctcagtactatactggcaattgctggagaagattttgcaattgttgcttc

SEQ ID NO: 229654 - DNA, 75 bp, Homo sapiens
gctccttctcctggagacgcaactcaagcgccgacaccatgtggatccaggttcggaccatggacgggaggcaga

SEQ ID NO: 229655 - DNA, 75 bp, Homo sapiens
cagagaccatattctacggggctttcagcaaatcaaagccaggacccctaccatggaggagaccatcaaagatcc

SEQ ID NO: 229656 - DNA, 73 bp, Homo sapiens
tgaggtgtgggtgttcgtttctcaggcgcagcccagcctcgaaatgcagaacgacgccggcgagttcgtggac

SEQ ID NO: 229657 - DNA, 100 bp, Homo sapiens
tgtgcgaaccccgggcagcccgggaaatctccaagtcagaaaggctcctcctgctggaccctccagccccgggcctcaggagcccgagaaggaggagagg

SEQ ID NO: 229658 - DNA, 83 bp, Homo sapiens
gtgtggagatcaaccgtgagcagtggatccaggaaactcccagtacagccagcagcaggccgggtaccagcagggtgccgcgc

SEQ ID NO: 229659 - DNA, 75 bp, Homo sapiens
tccgccagtcaataggaagtacgagtgtgagaagccctaccactgcaactgggacggctgcggctggaagtttgc

SEQ ID NO: 229660 - DNA, 99 bp, Homo sapiens
ggacagattatcaacacgctttaaatcctatgtagcaatggaccagcatctcagacatgtcgaaaaagatgttttgatccctaaaataatgagagaaaa

SEQ ID NO: 229661 - DNA, 98 bp, Homo sapiens
tgcgacgttcacagaggaacactgccggggcccaaccacaagacgactcaataggaggaagattgaaaaggccaaacctattaaatgtggaacatttg

SEQ ID NO: 229662 - DNA, 82 bp, Homo sapiens
agttgtggcgaggcagatcctgccccgtggccgcggccgtctcgtgcctcaggaaccctgaagctgggctgagccatgatgc

SEQ ID NO: 229663 - DNA, 90 bp, Homo sapiens
gcagttctgtgaggcagcctagtttgcatatgagtgctgctgcagcttcccgagacatcaccttggagggtgcatctgcccggaagactc

SEQ ID NO: 229664 - DNA, 90 bp, Homo sapiens
gaaaaaaccagaaaggctattgtagcagcaaagtcaaaaattgcacacttagctgggggagagcaaggacctgctgtttatcttgacagc

SEQ ID NO: 229665 - DNA, 116 bp, Homo sapiens
agcacatcgaccggcgacagcagccaggagtcatgagcgacagcggcgagcagaactacggcgagcggagttgctacgatggaagttaaagggaaaaagcaattcacaggaaagag

SEQ ID NO: 229666 - DNA, 74 bp, Homo sapiens
tcgccctcaaggccatgatcaaaacagaagcagggccctgagcggaagaggattaagaaggagcctgtcacccg

SEQ ID NO: 229667 - DNA, 88 bp, Homo sapiens
aaggagaggcggcggcggcctcggctgaagaaagaaggaatactcccccagttgcaagaggcgcaggaccgtggaagacttcaacaaa

SEQ ID NO: 229668 - DNA, 100 bp, Homo sapiens
gagaactctttgttaaagaagagaataagatttttggaagaaaagggcccagctggtcctgctggtcctccagggctgataggagaacaaggcatttctg

SEQ ID NO: 229669 - DNA, 75 bp, Homo sapiens
cacagcacagccccaagaaggacaatgccgtctacaagatgtttggaccaggaagagagtacaacttcactcggc

SEQ ID NO: 229670 - DNA, 97 bp, Homo sapiens
atattggaagcgatttgatctacggcgactccaggtgtcatggagaaactccagctgggcccagagattctgcagcgggaaaatccaaggcttattt

SEQ ID NO: 229671 - DNA, 100 bp, Homo sapiens
cttaggagttgactttggctactactggttccatcgtatggctcatggtaccatggggaaccgcctgcagaggatcaaggtggaaaacactgaagagaac

SEQ ID NO: 229672 - DNA, 100 bp, Homo sapiens
gaatcgcaaggctcttccctgaccattttctactgtccctgcgcgaggctgttcacggaagaccaggatgtagatgagggacttgtctatgacactgtat

SEQ ID NO: 229673 - DNA, 100 bp, Homo sapiens
cacatggaaggatttattcggaagtgacttgcttttttgaccatgttactcatagagtccgactataccacatacaggtggtctggaactgaaagtgatg

SEQ ID NO: 229674 - DNA, 98 bp, Homo sapiens
tgagcgcaccctggaccccaactcagccttcctgcataccctggaccagcagaaacctagagtggactggccaaccaagcgcaccaggtgacacttca

SEQ ID NO: 229675 - DNA, 98 bp, Homo sapiens
gctgatcaagtggaagagattttaagtgtggcatacaagaaagacattgtggatatcaagcctgccaatatggaagagctaacagaggtgattacagc

SEQ ID NO: 229676 - DNA, 50 bp, Homo sapiens
gcggcagtatccttggggcactgtgcaggacttaattcagtgcacaaatg

SEQ ID NO: 229677 - DNA, 82 bp, Homo sapiens
agagcgcagcgcacgggacagactgatgagcgaggaagtactagccggacatcatgagtggctgtcgggtattcatcgggag

SEQ ID NO: 229678 - DNA, 90 bp, Homo sapiens
cctcgcgtcgcgcccgggaggaaggaacgaggcaaggagctaaagcagcgtgcgttcagccctgggggtgctgataagactgtgaaaggc

SEQ ID NO: 229679 - DNA, 100 bp, Homo sapiens
agtgtatccctaagaaggcgctgaagggcaaggaaagcagcatagagaatgagatagccgtcctgagaaagaaggaaaatcacctcggcagtgtttgaag

SEQ ID NO: 229680 - DNA, 100 bp, Homo sapiens
gccagacagggaacacatgcaaggagctgagagaccctgtgacctcgggactcaacacctcggtgtgggctcgggatgagtttgaaggcctcttcaagca

SEQ ID NO: 229681 - DNA, 51 bp, Homo sapiens
gggaaatccaggaagacagtaggcctcaaggaataggttctcctagtgtct

SEQ ID NO: 229682 - DNA, 75 bp, Homo sapiens
gtcccggcagcgggaacacagagagcgaagccagactcctgaggaagaagagattttaaacaaaaaacgatctaa

SEQ ID NO: 229683 - DNA, 95 bp, Homo sapiens
ggctgtattctgacgtttacaaaactacagacccatggatgacagtctcattgcatttcgaacgcgttctaagatgcccctgaaagatgttcccc

SEQ ID NO: 229684 - DNA, 83 bp, Homo sapiens
cagctatgcatgctgcttttgatgtctgacaacgtggatcgttgttttgaaacggggtccactggacggggcctgagctacaa

SEQ ID NO: 229685 - DNA, 75 bp, Homo sapiens
ggaacgcccggcccagccccgaggaggaagccaagaatctggtgagcgaagccatcgcagctggcatcttcaacg

SEQ ID NO: 229686 - DNA, 78 bp, Homo sapiens
ctttgactaccaatccaaaatgctggctttaaccctgaaaagcaaaggcctcatctccatggcacaggtgatgaaaca

SEQ ID NO: 229687 - DNA, 80 bp, Homo sapiens
cacagacggagaagacgagggggcgtctgaggaggaagacctggaagacagatctgacaatgcagatcttcgtgaagact

SEQ ID NO: 229688 - DNA, 85 bp, Homo sapiens
gaacatgtacacctcatccctgtacgggtgcctggcctcgcttctgtcccaaagtctcaggggatccagaactgcagccagtcct

SEQ ID NO: 229689 - DNA, 100 bp, Homo sapiens
cttcctcctggccagcctcctgggcgcggtgttctaagaacggaagcatctgggctggatggaatttagcatcaagcagagtcccctttctgttcagagt

SEQ ID NO: 229690 - DNA, 100 bp, Homo sapiens
gaagtgcccgcccctctaagcccggagcccggcgctttccccgcaagatggacggtttcgccggcagtctcgacttccaagtgctggccttcatctcccc

SEQ ID NO: 229691 - DNA, 73 bp, Homo sapiens
atcccaaagctattctgggggcaacagagacagtaaacacagtggatcattcccattctactacagtggaaaa

SEQ ID NO: 229692 - DNA, 75 bp, Homo sapiens
tctatgtggtacagccgcgtgatttcccagaaggttttgagagtattttagaagggctttatggaccacggctac

SEQ ID NO: 229693 - DNA, 100 bp, Homo sapiens
gtgggatcgttggctatgtaaaaacaggttaccatggcctctactgtgaggaggaatataatgagtgcctctccgctccatgcctgaatgcagccacctg

SEQ ID NO: 229694 - DNA, 100 bp, Homo sapiens
aacgaggaggcccggaggaccaataggcaggccgagctctttgccctttacccatcagtggacgagaacactctggacctggaggaaactggcgaggctg

SEQ ID NO: 229695 - DNA, 50 bp, Homo sapiens
cgcaaaaccaaaaccagatcctttcaaagtcttcccatgcacaagatgat

SEQ ID NO: 229696 - DNA, 88 bp, Homo sapiens
caagctcactgccgacttcagggaggatccggacccccgcaaggtcaacctgggagtgggagtttgcctgagaatacagatcaaccca

SEQ ID NO: 229697 - DNA, 100 bp, Homo sapiens
cagaattgagtgatttcctgcaggctatggaacacactgaagttcttcagcttctcagccccccaggaagaagaccgaaaactgttagttggattcttag

SEQ ID NO: 229698 - DNA, 100 bp, Homo sapiens
gcaaagtgatcaaggacagcgtcaccctcctgccctgcttttatttcgtcgagataatagttggagaaactgctgtcttttgcctacaactagccacaag

SEQ ID NO: 229699 - DNA, 75 bp, Homo sapiens
gcagggacccggtgacagcgtgagaggttcgcagacattccaaaatatgcccggtgctatccgcccagctgctcc

SEQ ID NO: 229700 - DNA, 85 bp, Homo sapiens
tggtcaagacgctgcagcgggactgcctggctaaccttgccgcgggccgagccctgcctcgccatggaccaggactatgagcggc

SEQ ID NO: 229701 - DNA, 101 bp, Homo sapiens
acttttgatgagattgtcaacattgctcgacagatgcggcaccgatccttagccagagaactctctgggaccactgaagaaagaccgaattgcaaaggaag

SEQ ID NO: 229702 - DNA, 97 bp, Homo sapiens
gcccgtcaagctgcgcctgacaggcctatgaaaggaggttccctacatgtcctttgattccgatgttcgtgggcagtgacactgtgaatgaattcaa

SEQ ID NO: 229703 - DNA, 82 bp, Homo sapiens
ctctgcgtcctcatcgggcttatgttcgagacggaagtgaaaatgtgacaggattggacctttcagatttcccagcattagc

SEQ ID NO: 229704 - DNA, 49 bp, Homo sapiens
tgggacagaaccggcatacattgaggtctctgtcccacctggtgctctg

SEQ ID NO: 229705 - DNA, 75 bp, Homo sapiens
ctgtcttcccgcttgcgtcagggacctgcccgactcagtgggaagtcacccggtctctgaaagatttttcttcta

SEQ ID NO: 229706 - DNA, 75 bp, Homo sapiens
cgtgttcaagaggaagcccgctgccttgtggaggagttgagaaaaaccaagggcaatggacctcatcatgaccgt

SEQ ID NO: 229707 - DNA, 100 bp, Homo sapiens
tgtctctggctatgttggtgggatgttacgtggccggaatcattcccttggctgttaatttctcagagatggatcctgagcttgaaaaaaaactgaaaga

SEQ ID NO: 229708 - DNA, 100 bp, Homo sapiens
cccttagcgggtgggggaagctggtaggcacgggcggctccgcagtgaccggactcgggggagatggcgtgatcaacatgagcatccccattgtactgcc

SEQ ID NO: 229709 - DNA, 83 bp, Homo sapiens
gaaacatgagaagcagcagtggtgagaagccctaccactgcaactgggacggctgcggctggaagtttgcgcgctcagacgag

SEQ ID NO: 229710 - DNA, 82 bp, Homo sapiens
agagagggcctgggagcttgctgcagcttcaggatgccggctccaggagcagcagtggaggtcgggaacgcctcattgtgga

SEQ ID NO: 229711 - DNA, 96 bp, Homo sapiens
ccgcagttgaacatcatgaaacatgagttcaactactcaatttcatgctggcatgagaagataatcctttgaaacatcattaattgaagtgatttt

SEQ ID NO: 229712 - DNA, 75 bp, Homo sapiens
gcctgtcagttatcgggtgtgaccgccgccgcccagtttgtgaagtgtggatatgcaggctctaactttccagaa

SEQ ID NO: 229713 - DNA, 80 bp, Homo sapiens
caatggggacccgggacgacgagtacgactacctattcaaagaaatgagccgtcagactgctacagcattacctaccggt

SEQ ID NO: 229714 - DNA, 101 bp, Homo sapiens
ccgcgccgcccggcccgcgttcctcccgccggccccaaagacgctaaacgtgccctactctgccccgggggagagaaggacagaataacgggctcccagat

SEQ ID NO: 229715 - DNA, 103 bp, Homo sapiens
agcgccccagcatttgccatcttcaagtttgttcagctgaacatccatgtgggaaacatttccctggtggaccagtttgagtgggacatgtcagagaaggaga

SEQ ID NO: 229716 - DNA, 100 bp, Homo sapiens
caggagtgtttgacatagacctggaccagccagaggacgcgggctctgaggatgagctggaggaggggaggaaccgcatcggctcagaaaacccaagcga

SEQ ID NO: 229717 - DNA, 83 bp, Homo sapiens
tatgacacagcacctcgaggcaaggaaataagaaaactgcctctgatccaagcagagaagtgcacctatgatatgtgttttag

SEQ ID NO: 229718 - DNA, 100 bp, Homo sapiens
gattaacctggagttaaggaacagatccccggaggaggtcaacactggacgtatgagggtgagcagatctcaaggcctcccgacaaccctttcacactgg

SEQ ID NO: 229719 - DNA, 96 bp, Homo sapiens
caatttcctgcacatgctgtcctcccgctcttctggcatccagcggaaggagagttttacatggaagtggcttacagaaacttggcgctgaggtgc

SEQ ID NO: 229720 - DNA, 100 bp, Homo sapiens
ctccaacccagaactggacaatctgttccggaactttaagatcatttaccgccgctatgctggcctctacttctgcatctgtgtggatgtcaatgacaac

SEQ ID NO: 229721 - DNA, 75 bp, Homo sapiens
ctgaggagaaggaggagcgggccgtggaggcttcgccgcctaggagttaaagttcctcgtaattttcgcttgttg

SEQ ID NO: 229722 - DNA, 100 bp, Homo sapiens
ctggggctcagccaggcctgcgcgggcccgaggccggaggaacccggactccggcgtagcggtgatgatgaacagtctacacagatggctgcaagttggg

SEQ ID NO: 229723 - DNA, 74 bp, Homo sapiens
tccttcaactacgctgtgcacgagggtctcggcctcgcggtgcaggtgtgttccagagaacaagccttcagaca

SEQ ID NO: 229724 - DNA, 100 bp, Homo sapiens
aagcagtgggaaaatcgcaaggaagccggctgcacagttggggatcttcaaaccaagatagatggcttggaaaagactaactcaaagcttcaagaagagg

SEQ ID NO: 229725 - DNA, 50 bp, Homo sapiens
gcagaacgccatcaaccagctttaataacgacatgatagtcactgacaac

SEQ ID NO: 229726 - DNA, 98 bp, Homo sapiens
taaacatagttttggaactagcagatgctggcgacctatccagaatgatcaaggaatgcttcacgccattcgtgaacggcagcttcttcgagcacgac

SEQ ID NO: 229727 - DNA, 51 bp, Homo sapiens
gtggaaacgcttgtagggtttcaccagagatggggtcttgctatgttgccc

SEQ ID NO: 229728 - DNA, 75 bp, Homo sapiens
atttgattgaatatcctatagaccctgttacacaagaatttaagatgctggctatgagtttgacatctgcttcac

SEQ ID NO: 229729 - DNA, 90 bp, Homo sapiens
gaagttagcttcagagttctttgtggatggacttgattctgatgagagggcagcagaatcaactgaggaagtatctagcctccgtccccc

SEQ ID NO: 229730 - DNA, 101 bp, Homo sapiens
atgggaaattgtattctccgagtcagattggagcatttgtgttgatgaagatgaaagagactgcagacacacttctagactcccagttggaggagaaaggt

SEQ ID NO: 229731 - DNA, 82 bp, Homo sapiens
agatatatggagctctacacgtatcctcctgcctagcgcaggtgagcgagtgctgtgctttcatgggcctcttctttatgaa

SEQ ID NO: 229732 - DNA, 100 bp, Homo sapiens
aaggaacgggtcggctacagggagggacccaccgtagagactaagatgatactctccaagctgtaaggaagaagtcaaggattaaggagacctggactgg

SEQ ID NO: 229733 - DNA, 100 bp, Homo sapiens
ggagttcgggggatggcacagaatgggctaaaaaacattcccttcaatttaaaaaatgttcccgactcttaacaccccagttgagaactactgatcttag

SEQ ID NO: 229734 - DNA, 83 bp, Homo sapiens
aagggaccacggtcaccgtctcctcaggacagagcgggatgccaccagcttgtccaaagggaagttccaggagctcctggtgg

SEQ ID NO: 229735 - DNA, 98 bp, Homo sapiens
cggggctgaggaggccgccaagatgccgcagtccaagtcccggaagatcgcgatcctgggctaccggtctgtgggacgtagacaagtttggcaacgag

SEQ ID NO: 229736 - DNA, 82 bp, Homo sapiens
aaacggcgagagtgggcgagaacgtccactgcgggccggcgaaagctgcagggagagcaacaagccccggccctcagagctc

SEQ ID NO: 229737 - DNA, 100 bp, Homo sapiens
ctctgatcgaaggggagtttccacagtgattgatgctgcctcaggaagtgcacggctgtctataacgtgctgccgggtctcaggatggaggagtgaagtc

SEQ ID NO: 229738 - DNA, 143 bp, Homo sapiens
aatacggaggaaaagttcgttatggactgatccctgaggaattcttccagtttctttatcctaaaactggtgtaacaggaatgaatctgaagtctgctgcagtaaaacacagaaggctttaaaatgttttcttgcataaaatt

SEQ ID NO: 229739 - DNA, 100 bp, Homo sapiens
gagatcttcagcctccaggctctccagtttttcgtcgagagattcactatggaatcggcagcttggatcttaaaagcaagagcgctaacagaaatggtat

SEQ ID NO: 229740 - DNA, 51 bp, Homo sapiens
gttccagaactgctggaagctgagtcccatgaagctgaggtcttgaagcag

SEQ ID NO: 229741 - DNA, 117 bp, Homo sapiens
tttagtcaaaaatgaaaagatgggaacagcagaaaatcaaaacaagctctttatgagaatggcatctaagattggttgtgatcgtagccaaaaccttgtggacatttgtagagagag

SEQ ID NO: 229742 - DNA, 90 bp, Homo sapiens
cttcctcggccgagccgggccgcgccgccgctgccgccgccgcgcgcggaaatgtctttcctccaggacccaagtttcttcaccatgggg

SEQ ID NO: 229743 - DNA, 83 bp, Homo sapiens
tcgcagtggtcgcttcttctccttggttacacgcatggggagatactctggaggaagcatttgagcaatgtgcaatggccatg

SEQ ID NO: 229744 - DNA, 155 bp, Homo sapiens
accgaagatgatttctactgccccgtctgtcaggaggtgctcaaaacgcccgtgcggaccacggcctgtcagcacgtgccccaataagaaacccttttccctgaaggagaagaaaccaggtgacggtgaagtcagcccgagcacagaggatgcac

SEQ ID NO: 229745 - DNA, 82 bp, Homo sapiens
cgcgcctgcgccgccggggccgctgcaaggggaggagagaggccgcctcagctcctgtccaaatatgacccccagaaggagg

SEQ ID NO: 229746 - DNA, 99 bp, Homo sapiens
cgccccaagagcaccgcgagggtttcaggcacagaactgtatatccaataatagtgaaatggatcccactaattatgacagaaatgatgatacatttaa

SEQ ID NO: 229747 - DNA, 75 bp, Homo sapiens
ctcaacgccaggcgccgctcctttacagtgcccgaagtgacgaaaccaagtttaagccaaccaacggccgccagc

SEQ ID NO: 229748 - DNA, 80 bp, Homo sapiens
gtatctccagcctttcaaggacaaactagaggagttcttccaaaaaggtgctggagaatctggtaaaagcaccattgtga

SEQ ID NO: 229749 - DNA, 75 bp, Homo sapiens
ccaaaggaaaaagtggttctggaaaagcggggaaagaaccaagagccactgagagaggaagactctgatttcatc

SEQ ID NO: 229750 - DNA, 83 bp, Homo sapiens
caacagttcaccaccattaccgttggattggatgctgctggcaagacaaccattctgtataaactgaagttaggggagatagt

SEQ ID NO: 229751 - DNA, 98 bp, Homo sapiens
ttaacttgggagaaagtttcatctgtggatggagtattggggtctagtggggatgagcgggcaatggctaaggagctggccagccttctctgtgatgg

SEQ ID NO: 229752 - DNA, 74 bp, Homo sapiens
gccatctgctcagtctcctggagttcatgcagatgcagatcagaacttgtctgtgtgtccagaggaggagtcca

SEQ ID NO: 229753 - DNA, 51 bp, Homo sapiens
gggagaacctgcggcggccggagcgagccctatgagtttgtctctctggaa

SEQ ID NO: 229754 - DNA, 100 bp, Homo sapiens
cacatcgcagacctgtcaccaggagacaagatggcccactgcgtgaccttggttcagctgtccatttcctgtgaccatctcattgacaaggacatcggct

SEQ ID NO: 229755 - DNA, 75 bp, Homo sapiens
gtacagaacaggaaagcccatccctggctgggctgagggcaaccttgccccccacccaagaagccctgccctcca

SEQ ID NO: 229756 - DNA, 100 bp, Homo sapiens
gtgcggcggattgcagagctggggcatatgatattttcctgaatgcaaaagagcaaaacattgtgtttaatgctgaaacctacagcaatctcattaaatt

SEQ ID NO: 229757 - DNA, 100 bp, Homo sapiens
tcgctccgtggccttagctgtgctcgcgctactctctctttctggcctggaggctatccagcagagctcagaagaggaagacgcaccatccttcgcacct

SEQ ID NO: 229758 - DNA, 100 bp, Homo sapiens
ctcgtctttgtaagaaagccaaagcccctgaagactgtgaagatggaggttgtgggagacaagtagccaacagtatcataactggcaacaaaattgtgaa

SEQ ID NO: 229759 - DNA, 99 bp, Homo sapiens
gcgctgctgctgctgctctatcggccgcctcgctaccagttgccaccttccagagaagaggtacgagatgacaagacaaccataaagtgtgaaacctcc

SEQ ID NO: 229760 - DNA, 75 bp, Homo sapiens
gatcatgtctgcgagccaggattcccgctgcctgtggaggaaccgattgtgtccacagatgaggtcatcttccca

SEQ ID NO: 229761 - DNA, 90 bp, Homo sapiens
ggaagcaggactgcgccgcgtcttcctcaaggaacttgctactaccagcaccatgccctaccaatatccagcactgaccccggagcagaa

SEQ ID NO: 229762 - DNA, 100 bp, Homo sapiens
gaccgcttcccccgagccagcaggtgaagctttgttctaagaatatttgtttcatctagtttatgagtccaaatgatatagactgtaaatgtcacagcag

SEQ ID NO: 229763 - DNA, 51 bp, Homo sapiens
gcagctcagcagccacatataggaacttgtaatagctggcatcgttgagaa

SEQ ID NO: 229764 - DNA, 132 bp, Homo sapiens
tgggaggccggccggtgccagcacctttcggcttctgagacggcggcagcagcggcattcaggatgaatttcacccattcatcgaggcacttcttccacatgtccgtgcaattgcctatacttggttcaacc

SEQ ID NO: 229765 - DNA, 100 bp, Homo sapiens
gcgctacactttgtctgtcagggctctggagttggaagatgctggctcaagtagtttagataatctactaagtagatacatctcaggcagtcacctaccc

SEQ ID NO: 229766 - DNA, 88 bp, Homo sapiens
gggggtgactatttttttatttatgcctggctgttcacattagttgtgtctctgtttagtcatccaacaagaagaaatatgaaattcc

SEQ ID NO: 229767 - DNA, 80 bp, Homo sapiens
gggtgctgcaggcgccgccgccggacgtcggcaacggagaaggccagctgcgggccgtccagcggctgtgccacttctac

SEQ ID NO: 229768 - DNA, 100 bp, Homo sapiens
gggaaacttacactgctgcataatggagaacctctctacattccagtaacccaggatgagagccactcagagtgggtgtcttgtgtccgcttctcgccca

SEQ ID NO: 229769 - DNA, 76 bp, Homo sapiens
gcccattcctatgccatcgtggtagaacagcggctggagccggccaagcgggcagcccacaacatccacaagcggc

SEQ ID NO: 229770 - DNA, 88 bp, Homo sapiens
taatttcaacagaagagtgagagatggaacccgaagaagaaaggattcgttacagccagagattggcagctgacacacaagagttcag

SEQ ID NO: 229771 - DNA, 100 bp, Homo sapiens
gcaagcagtacctcctaggactctatgacacggccggacagagttacatccatatgggagaatagtctccagatcactacaatttctagctttgtaggag

SEQ ID NO: 229772 - DNA, 100 bp, Homo sapiens
gctggcttcacaaaggagctattgcttgtgctgaaaaactagccaaaggtgaacctactgataggaagagcagcgaagaggcacaaaaagagaggagaag

SEQ ID NO: 229773 - DNA, 75 bp, Homo sapiens
gccaaccagagattcatctttcatgcagtgacatgttgataaaaaatgatgaacatccagtcatggataaaaatg

SEQ ID NO: 229774 - DNA, 82 bp, Homo sapiens
gcccaaggtctctcgcgggcgggagaacggaaaactcccaacttcctgggaatttgaagtactgccttgtaattcttaatca

SEQ ID NO: 229775 - DNA, 75 bp, Homo sapiens
ctttaccgcaattatggcatcctggccgatgccacggagcaagtgggccagcatcaattcctgaagattgccaag

SEQ ID NO: 229776 - DNA, 98 bp, Homo sapiens
cagaatgaaatccatgctcagagatgccaagaagaatctagacagacaggcctttctaggatcactactcttggaatcaaagataaatccaaatactg

SEQ ID NO: 229777 - DNA, 92 bp, Homo sapiens
tctcaaacagcgacgagagatccgtgcaggcacagccttttacattgatcaggttttgatgatgatggttcagaatttcatgaacatatatt

SEQ ID NO: 229778 - DNA, 75 bp, Homo sapiens
ccaccaactctccaccctagacgaagcctttgaagaattaagactttgaaatatcagtgatgtataatgaatctg

SEQ ID NO: 229779 - DNA, 100 bp, Homo sapiens
ggaaaaggaagatgcactgactagaactgaacttgaaacacttcaaagaaacagtgacatttaattcttctcttctgaggccccgtgtgattggagaatg

SEQ ID NO: 229780 - DNA, 76 bp, Homo sapiens
gacaagaggcatgtctggttcggcgagagcatgaccgatggattccagtttgaatataatgtagaaggagtgactt

SEQ ID NO: 229781 - DNA, 51 bp, Homo sapiens
ctgtccagcatcctttagaagaatccaggccaaaacagcttcatgaaatcc

SEQ ID NO: 229782 - DNA, 100 bp, Homo sapiens
ggactcacccggcacattgccgggccgcggcgtggagccgggcaggagccgcgagccagctgcgcgaaggtgctggagaatctggtaaaagcaccattgt

SEQ ID NO: 229783 - DNA, 83 bp, Homo sapiens
ctggccaacctgctgctggaggaggataacaagttttgtgcagattgccagtctaaaggttttacagacatttcaccagagga

SEQ ID NO: 229784 - DNA, 50 bp, Homo sapiens
cgctacggaagaggcggtccgggagagatggagagaccagagaagagaac

SEQ ID NO: 229785 - DNA, 80 bp, Homo sapiens
tggaaacatctttaccctgttcattgggccagagacctgacaagtttcttcagtgtgtgaaaaatcctgaggattcatct

SEQ ID NO: 229786 - DNA, 75 bp, Homo sapiens
gcctcggcggcagcggctgcggagaaggcgagcgaagaaatcttcccaaggctgcagacaccgacggatttgctt

SEQ ID NO: 229787 - DNA, 75 bp, Homo sapiens
taaagctcttcatgcaaggaaacataagttggaggttctggaatctcagtctctgttgagtcaacgggggtgttg

SEQ ID NO: 229788 - DNA, 101 bp, Homo sapiens
ggaaattcatccagagggtccaggccatgaagagtcctgaccacaatggggaggacaacttcgcccgggacttcatgtgttctcaggcgctgtggtctcac

SEQ ID NO: 229789 - DNA, 75 bp, Homo sapiens
aacttgatgaaggtacacccaatagagagctgaagaaatcaggggagaaacccctgcttggtggaagcctgatgg

SEQ ID NO: 229790 - DNA, 101 bp, Homo sapiens
tcttgcgccgccgccttccacccggaggcctccggtgtggctgtctctgatggtgtcatcaaggtgttcaacgacatgaaggtgcgtaagtcttcaacgcc

SEQ ID NO: 229791 - DNA, 100 bp, Homo sapiens
cacgcagtgctttgcaacgctaattagactcatgccacttgagttgacattttgctaaaggctgtgggagacactcctattatgaaaacaaagaagtggg

SEQ ID NO: 229792 - DNA, 82 bp, Homo sapiens
aaccaactgttacaatcaaggtctatgaaggaaacatgttcaaccaaatggcaaagtgggtgaaacaggacaatgaaacagg

SEQ ID NO: 229793 - DNA, 51 bp, Homo sapiens
tgcaatcttcaggaaagtaagaggatgctgtttaagaagaacctatttgag

SEQ ID NO: 229794 - DNA, 50 bp, Homo sapiens
ggcgggaggagcctgttcccctgaggtacatgtcccagagcaagcacacg

SEQ ID NO: 229795 - DNA, 101 bp, Homo sapiens
ggtgaagctcctcgacaccatggtggacacttttcttcagaagctggtcgccgccggcaggggccattgacgtttagggatgtggccatagaattctctct

SEQ ID NO: 229796 - DNA, 75 bp, Homo sapiens
ggttgaggaattcagcgatttatacaacgaggctgaccccgcactacatctacccaccagccatcgtgcagccca

SEQ ID NO: 229797 - DNA, 83 bp, Homo sapiens
gtcccgggggcgcagggaaggagggcgtccgagtcaacaaccgcttcgagctggtgtcgtgaaaactacccctaaaagccaaa

SEQ ID NO: 229798 - DNA, 50 bp, Homo sapiens
cagttcttgaaggtgacaacttagagacgaaacttacgatcatctttcgg

SEQ ID NO: 229799 - DNA, 104 bp, Homo sapiens
gctgtgtggttgcaacggagataaattcccggaaccgcgattcggcgtgtcaggttttaaaatcaaagatgggaaaatcggagaaaattgcccttccccatggc

SEQ ID NO: 229800 - DNA, 75 bp, Homo sapiens
gggcacccggttggagcccctgaagccacttaaggcctgggccgaggccactggtgcatatgttcccgggaggga

SEQ ID NO: 229801 - DNA, 100 bp, Homo sapiens
tacacaatgattaatccagtgccgcctggaggcagccggtccaacttacagaatgtctgaaggggacagtgtgggagaatccgtccatgggaaaccttcg

SEQ ID NO: 229802 - DNA, 100 bp, Homo sapiens
tttcgatattgaagtgtcaaaatccatagatggaaaagatgttctgcttttccagaatcctgccctttccaaaaggaagacggtatgattaagttccagg

SEQ ID NO: 229803 - DNA, 100 bp, Homo sapiens
aagtcgccctcggggtggcagttcccgttaaccttagccacaaagtcaaagggctttgttcgcgggggtcacagctctcatggctgcagctagcgtgacc

SEQ ID NO: 229804 - DNA, 95 bp, Homo sapiens
gcgcgctgagggtctcggggcgggcgccgcgggacctctccgggccatgggtcgcctgcgaggccgctggccaggcctgagcctctgccaccatg

SEQ ID NO: 229805 - DNA, 51 bp, Homo sapiens
gagttcaagaagaacactccagagcagaagatggctgtgccacccacgtat

SEQ ID NO: 229806 - DNA, 100 bp, Homo sapiens
ttagattggattctgaatatcaggaccgtgaatagtctcccacaatacgcagagccttcctgtcccagccttcctgccgggcccacaggtgttgaagaag

SEQ ID NO: 229807 - DNA, 90 bp, Homo sapiens
gggatcgatgtttcaatattggaagcgctttgatttacagcagctgcagactatgtcttcagcagtggtgcagttatatgcagcagatcg

SEQ ID NO: 229808 - DNA, 75 bp, Homo sapiens
tgatgttggagaactacagaaacctggtctccctagaacattctagtatgccagtagaaaaaaatatcactttag

SEQ ID NO: 229809 - DNA, 100 bp, Homo sapiens
ggcgacggcgaccatagctctcgaaagaccacagcaagattctttcattcgtctcctcctagcctgggggaccaggctcgaactgaccctggacatcaaa

SEQ ID NO: 229810 - DNA, 98 bp, Homo sapiens
ccccggaccaacaagcagaatcagaagaagaaacggaaagtggagccccccacaccacaggccggaaggtggtggtcgtacgctgtgaaggcatcaac

SEQ ID NO: 229811 - DNA, 85 bp, Homo sapiens
gcctggttctgggaaaacaacattgtctcgagttttgcggcctccaggtggtggatccaatttttcattaggttttgatgaacca

SEQ ID NO: 229812 - DNA, 74 bp, Homo sapiens
ctggctgagggcagagactctcccggactcgtgagctgaagtgcagatgaccacattcaagggggaaccttctg

SEQ ID NO: 229813 - DNA, 95 bp, Homo sapiens
cgttggtgctgtttgcggatgctgatgcaggccaagcagatagaacttcagttcactattggcgaagccattaccagtgctgcaataggaactag

SEQ ID NO: 229814 - DNA, 75 bp, Homo sapiens
ggtactggtgcccatcctgccttcaagtacctggcccgagagctcctcagagcagcttccctggagttaccaaga

SEQ ID NO: 229815 - DNA, 133 bp, Homo sapiens
agtagaggagctttaccgcaattatggcatcctggccgatgccacggagcaagtgggccaggtggattcaccaatgaacttgaagcatcctcatgacctagtcatattaatgagacaagaagcaacagttaac

SEQ ID NO: 229816 - DNA, 100 bp, Homo sapiens
gtcggcttaccataaagagtctctgtctgtcaaatggaggaagccatacacctgcctgtggccctttctcagccctgactccgagcatatggccccagga

SEQ ID NO: 229817 - DNA, 100 bp, Homo sapiens
agtagcattacctacagctggtatgacaggtggactgaagaatgcatgtggccgcagggcgtgctggtgaagcacagcaagaacgtctacaaagccgtag

SEQ ID NO: 229818 - DNA, 100 bp, Homo sapiens
agccgctgagacggtttttcacaagattttcaggcacatcctgcagcgggagttttcaggactgagccacctttcccgaaagttcaccgagtggtgctat

SEQ ID NO: 229819 - DNA, 95 bp, Homo sapiens
tgagctgtcgacggcagggtctgaggtcatcggggatgtggacgaaggggccgacctcctaggagcacgtgaattgcctctgcttacgttcaggc

SEQ ID NO: 229820 - DNA, 100 bp, Homo sapiens
tcaacctggaccttatatcatgtatacaactgtagatgcaaatgggtatctgaaaaatggatcagctgtcccccaaagttccctactcaaggagagaagc

SEQ ID NO: 229821 - DNA, 75 bp, Homo sapiens
gctcgcagagagccggcttgcagggtgtccgcaatgttgccagtgtctgtctgcagattggctacccaactgttg

SEQ ID NO: 229822 - DNA, 49 bp, Homo sapiens
attgtcagcaaaggaagagatgggtatgatctcgtgaaaccttgagaga

SEQ ID NO: 229823 - DNA, 99 bp, Homo sapiens
aagaaaccgacgcccatgggcgaaagggacctgctcaagttcactcagttctggctccttggcagcaatggctgtatttgaagataagtttaggccaga

SEQ ID NO: 229824 - DNA, 78 bp, Homo sapiens
tccaggaacagcagaggctgggccttggaggtggtccaggccacgctggtggtcctggccttggccatggtgcccatc

SEQ ID NO: 229825 - DNA, 88 bp, Homo sapiens
gaacttcaggaacctgctgtcagtgggcaacgccctgctgcggcggctggtccgcattggggtgctggatgagggcaagatgaagctg

SEQ ID NO: 229826 - DNA, 101 bp, Homo sapiens
gagctctttgcagatgccaggaatgaacactgtgtgccctgagcagggcctcgtcctcctgcctaagacggagtgcgacgtgcgggaagtggagctgatgc

SEQ ID NO: 229827 - DNA, 74 bp, Homo sapiens
caccgaacgtgctactcgacacagcatccttcggaaagctctggacaagatcgcggaaatcaagtctctgttgg

SEQ ID NO: 229828 - DNA, 89 bp, Homo sapiens
tgtagctcaagagattgctgaaagggcaagtgtccagagaatggctgggatgaaagtacacttgaactctttttacatgaacttgcaat

SEQ ID NO: 229829 - DNA, 100 bp, Homo sapiens
gaccaggtttccagtgaaataaacttaattcagtgcacaaatgagatgaatgtgaacatcccacagttggcagacagtttatttgaaagaactactaata

SEQ ID NO: 229830 - DNA, 87 bp, Homo sapiens
tgaagagggctgcaaggtgggaagtgaagtcagtgcctcagttgctgtttgtacaatgacgacagaaacctgcttcgaattagagag

SEQ ID NO: 229831 - DNA, 74 bp, Homo sapiens
tctcgtctggtttgatcacaagacgggcaagtctttcccagggaactccgatgaagtgttccaacaaaatgagc

SEQ ID NO: 229832 - DNA, 83 bp, Homo sapiens
ctctgcctgaagatcaacgtcaagctgggaggcgtgaacaacatcctgctgccccagggcagacaatgcagatcttcgtgaag

SEQ ID NO: 229833 - DNA, 74 bp, Homo sapiens
ttcaagtgaagcaaaagcctttcatgattatgttgcccctctacctggcctccctcttcatcagccttgttttc

SEQ ID NO: 229834 - DNA, 98 bp, Homo sapiens
gttaatcctcaatttaagcctgatctaacccctagaaacagaatgctgcctttttatatggtcttggtttggtctacttccattataatgcatttcag

SEQ ID NO: 229835 - DNA, 74 bp, Homo sapiens
caacctgcagcacatcagcgaccgggagaacatagacgtttctcttcagcaacgggtagcagaattggaaaaaa

SEQ ID NO: 229836 - DNA, 74 bp, Homo sapiens
ccgcgccgccaccgtctgaactaggatgtcccgacatgaaggtttgctctggaattagtcacagaaaagggcca

SEQ ID NO: 229837 - DNA, 74 bp, Homo sapiens
atgaccgtccaccgcatcatcaaccacagcagaatggggaaatggagagagaacctgaaagagccccaaactcg

SEQ ID NO: 229838 - DNA, 115 bp, Homo sapiens
actggaggaagcacaccctgtcctatgtggacgttggcactgggaaggtgtcgtgaaaactacccctaaaagccaaaatgggaaaggaaaagactcatatcaacattgtcgtcat

SEQ ID NO: 229839 - DNA, 50 bp, Homo sapiens
cgggacctcctggaagccaaaaatgcatccacccaacccaccagtatcac

SEQ ID NO: 229840 - DNA, 100 bp, Homo sapiens
aggattataatgagactgactggtcccaagaattcatctctgaagttacagctgtccagaccaaaacgaagaagacgttagccaaacccaatataaggaa

SEQ ID NO: 229841 - DNA, 88 bp, Homo sapiens
gcctcgccggggacccggccatggcgctggacttcttggctggatgcgcgggggggaaagcaggcaggatgggagagtcgccgataga

SEQ ID NO: 229842 - DNA, 97 bp, Homo sapiens
tcaggctgccctcaaactcctggactgaaacgatcctctcatctcagcctccaaaagtgctggcattacagtttgatgaaggccggaacaactttga

SEQ ID NO: 229843 - DNA, 98 bp, Homo sapiens
ccaagttttgttgaccgcatctttggtggtgaactaactagtatgatcatgtgtgatcaatgcagaactagcttatgtggatgccagagttcagccaa

SEQ ID NO: 229844 - DNA, 109 bp, Homo sapiens
aagatccgcagctccacgcagcaagacccgcgccgccgggacccccaggacgacgtgtacctggacatcaccgggacaggagagagtggcaagagtacgtttatcaagc

SEQ ID NO: 229845 - DNA, 75 bp, Homo sapiens
aggattctcgctgtgacagagacaacaccgagtatgagaatccaagtggtaagaagttcagaagcaagcctcagt

SEQ ID NO: 229846 - DNA, 75 bp, Homo sapiens
taaacacagcacgtaccttagaactctatggagttgaattccactatgcaaggttttgtccatcaactaaaggca

SEQ ID NO: 229847 - DNA, 115 bp, Homo sapiens
cttccccacctgcccggtgcccgaggaggcagccaagctcgtagcctgccactccgtgcatatggctcgtggacagcagaaaattcagtctcagcagaaaaatgccaaaaagcaa

SEQ ID NO: 229848 - DNA, 98 bp, Homo sapiens
ctcgtccagcctaggttccacccttttctgggaacgtgagtatcaaccaagtgcattccactcttcgttcaacttgttttggagagattaactcgagg

SEQ ID NO: 229849 - DNA, 95 bp, Homo sapiens
cttgcccaacccacagacatattttacaacaaagaatactgaatggctcttctaacaggcgacagaaggctagagagaggcagcagaaattgctt

SEQ ID NO: 229850 - DNA, 75 bp, Homo sapiens
gctgggaacattcctcataaagcgagtcgtcaaggagttgcaggtgaccttgaggaaccctgggagctcaggaag

SEQ ID NO: 229851 - DNA, 75 bp, Homo sapiens
accaaataagctatatactttggttacctatgtacctgttaccactttcaaaaaatcaagcccttgaagttgcca

SEQ ID NO: 229852 - DNA, 83 bp, Homo sapiens
cgccctggtgctcaccaagcaagagcaacttgctggatgtgaatcagatcatcaaggacttggcctccatggtgtcagagcaa

SEQ ID NO: 229853 - DNA, 100 bp, Homo sapiens
accaggcggtccagcgaaggagtcgactccagcgaagagtatgtgaacatgcaggatcccgagatggacatgaagtcagtgactgaccgggcagcccgca

SEQ ID NO: 229854 - DNA, 74 bp, Homo sapiens
ctcacctggcggtgcccgaggagtagtcgctggagtccgcgcctccctggagtctcactctgttgtcacccagg

SEQ ID NO: 229855 - DNA, 96 bp, Homo sapiens
caccaatcagcatgctgtgtctagctcaagccaaagaatttagaacgagtctacgtggacacgcaagtttcagcgagcggggatttcctgcgaggc

SEQ ID NO: 229856 - DNA, 82 bp, Homo sapiens
tcatccgctgtgctcccttcttcaaaagcttggaaagcaacctttaaaagtccaacctgatcgtggtccagagaggtcacag

SEQ ID NO: 229857 - DNA, 75 bp, Homo sapiens
caggccccgtgatggggcccctgagccaggttgaaccatgattccggtgacagagctccgctactttgcggacac

SEQ ID NO: 229858 - DNA, 75 bp, Homo sapiens
gcccgtccccctgccccgttcacaatgtgtggatgaggtcaccattgtcaacattttgaccaaccgcagcaatgc

SEQ ID NO: 229859 - DNA, 114 bp, Homo sapiens
tcctcttctgggctgtgctggtcacagccacactctgcaccgctaggccgtccccgaccttgcctgaacaaggtgctggagaatctggtaaaagcaccattgtgaagcagatga

SEQ ID NO: 229860 - DNA, 100 bp, Homo sapiens
ctgaagcctttaaatgcagcatctgcgatgtgaggaaaggcacctccaccagcaggaaccgaatattgtatctgacgcatcctgtaatactgaagagcaa

SEQ ID NO: 229861 - DNA, 100 bp, Homo sapiens
gcagggggctgcgcctgcctgctccgccccagacctgtcggcgaaaggttgcttttgaaatcagaaagtcagtgcagggttgtagtgttgatgggctcta

SEQ ID NO: 229862 - DNA, 100 bp, Homo sapiens
cgctccccgaactcccgcgcaccgcggaggaggcggccctggcgcggggaagcagtgggaaaatcgcaaggaagccgggaaagtgggaggtagaggaaat

SEQ ID NO: 229863 - DNA, 100 bp, Homo sapiens
tgcggaagtgcagctgcctcagttcttagcgcaggtcggtgagctggtaaaggttacgaagattaatgtgagtggtcagtgggaaggggagtgtaatggc

SEQ ID NO: 229864 - DNA, 82 bp, Homo sapiens
actcggtcctgtttcgacagcgaacatgtcgcggcctgtcagcgtgaccacaggcaagtgctcagctccctgctgtctgggg

SEQ ID NO: 229865 - DNA, 74 bp, Homo sapiens
aagctcttcatgcaaggaaacataagttggaggttctggaatctcaggaggagatgttaaagtaacccatcttg

SEQ ID NO: 229866 - DNA, 98 bp, Homo sapiens
tcagaaaatacgtggttggagagctcatctggaattttgccgatttcatgactaaccagtgagcagcagccaagctggacagatgacctgcctctctg

SEQ ID NO: 229867 - DNA, 100 bp, Homo sapiens
tgacaatgactttgagccctaccttactggacagtcaaatcaggttctcccatgggcaggtggtctctctggatgagctgcgccccttccaggacccaga

SEQ ID NO: 229868 - DNA, 83 bp, Homo sapiens
gaatgaagaccacaataaaagagacctctacttagctcagcaattcttacctttttttcagaagaagtgaagtcaagatgaag

SEQ ID NO: 229869 - DNA, 50 bp, Homo sapiens
cggcggctgagccgatgggcccggcacagtatctggagtccatctttcac

SEQ ID NO: 229870 - DNA, 98 bp, Homo sapiens
tgggcttcctccacaccttgtccataaactgcccctcagctaccttcagacccaggatacaggctcatgctgaagattcggttatggaccatcatttc

SEQ ID NO: 229871 - DNA, 90 bp, Homo sapiens
gactcagagaccaataaaaataaactgcttgaacatcctttgactggttagccagatgagtgtgggtcagagagccaaactgactatatc

SEQ ID NO: 229872 - DNA, 100 bp, Homo sapiens
acaactcatgcccagcagcagcaagcagcaataacaattggtcgtcttggttacgtttgtcctcaagaggtggcccccatgctacagcagtttataagac

SEQ ID NO: 229873 - DNA, 103 bp, Homo sapiens
tcagccctgaagaaaagggaaaacttgctgcggttgctcaagtgagaagaggggatgtcctggcagcatggagtggaatccgtcctcttgttacagaccccaa

SEQ ID NO: 229874 - DNA, 75 bp, Homo sapiens
aagatgatccttactattttctccagtttaacaaggtgacaaaattgaattgcttatcttgaaggccaagagaaa

SEQ ID NO: 229875 - DNA, 74 bp, Homo sapiens
tgcttccatcccgccagtttgggttgggggccgtcccgctcctaaggcaggaagatggtggccgcaaagaagac

SEQ ID NO: 229876 - DNA, 87 bp, Homo sapiens
cgggcgcctaccccaaactcatggaaattgatcagggtatttgaagtataccatacaactgttttgaaaatccagcgtggacaatgg

SEQ ID NO: 229877 - DNA, 97 bp, Homo sapiens
ctttaaaggatgccagctttgagaaggaggcaacagaagcacaaagtttggagggcctggctctgtcgcccaggctggaatgcagtggtgtgatcac

SEQ ID NO: 229878 - DNA, 74 bp, Homo sapiens
gcggcgagagagcggctgacagaggggatgcgagacaatgcagatcttcgtgaagactctgactggtaagacca

SEQ ID NO: 229879 - DNA, 100 bp, Homo sapiens
ggccttggtggaggattggcaccgagagaccaggactgcaggacagtcggtagagttggctttgtgggacacagctgggcaggaagattatgatcgcctg

SEQ ID NO: 229880 - DNA, 82 bp, Homo sapiens
cgctgtgatgcctgcagagctgtggcttaccagaagtgatgagagcctatttacaacagctaaggcaagagactggactgag

SEQ ID NO: 229881 - DNA, 75 bp, Homo sapiens
ctcggcgagaagaccgtcttcgggcaagagctccgagtaggtcctacgtccagtgccaggggatcccgcagggct

SEQ ID NO: 229882 - DNA, 100 bp, Homo sapiens
accatagaagatgttcctccctggtacctgtgtatatttctggggctacagtgcctacaccaactaatgttacaattgaatcctataacatgaaccctat

SEQ ID NO: 229883 - DNA, 100 bp, Homo sapiens
cctggctgatcctgcaccacaaggtgtacgatttgaccaaatttctggaagaggttggacgcacttttggatattttccaaaagatttaatccaggtagt

SEQ ID NO: 229884 - DNA, 98 bp, Homo sapiens
acaatgccagactcatgtttggagatggaactcagctggtggtgaagcccatttgcctgagaatacagatcaacccacagaacaaagcggatttccaa

SEQ ID NO: 229885 - DNA, 83 bp, Homo sapiens
cgtggaggaggcctacagcctcctcaacgaatacggcgacgacatgtatgggccagaaaagcgggagatacagatgacccacc

SEQ ID NO: 229886 - DNA, 50 bp, Homo sapiens
atttgggtctatgacgttggagagattcagaatggacagtttagaagaac

SEQ ID NO: 229887 - DNA, 88 bp, Homo sapiens
aatagctcagttgcggtttcctgtaccaaagatttctctatgaatcatcatcaagaactctgggagaacttttgaattcataaccaag

SEQ ID NO: 229888 - DNA, 75 bp, Homo sapiens
gcggggccggaacatggctgcgtccggtctgctctaagcgaaagacatgaggcctcagcctgaaatgaggttgtt

SEQ ID NO: 229889 - DNA, 75 bp, Homo sapiens
gagatagccgtcctgagaaactcttttgtgacagggacggcttgttgcgggcacttctcacccctgagaatctgg

SEQ ID NO: 229890 - DNA, 100 bp, Homo sapiens
gggcagtgctcacatttctgggcagtcaccgagacttggagccagaatctgagcctcagctggagtcagagacagcaggaaaatgggtcctgtgtaatta

SEQ ID NO: 229891 - DNA, 50 bp, Homo sapiens
cgagaagtttgtagacacaccgagggatttgtcttggctgttactatgac

SEQ ID NO: 229892 - DNA, 82 bp, Homo sapiens
ccgagtctccgccgctgcgggcccgctccgacgcggaagctgcggttggatttctcacgatgtccagtgttatctccatgtc

SEQ ID NO: 229893 - DNA, 100 bp, Homo sapiens
attttgcgagtactcaacaccaacatcgatgggcggcggaaaatagcctttgccatcactgccattaagtttaagtgctgtggggctgctaactacacag

SEQ ID NO: 229894 - DNA, 88 bp, Homo sapiens
aatgaagaactgaagaagctggagttgctcagacaggccatcaccatcgaggctgagccaagagctgatggcagccgccggaccaccc

SEQ ID NO: 229895 - DNA, 100 bp, Homo sapiens
actctggggcttcctgctccagctgagcactcggccgcagccaagacgggcggctgcttccctgccggagcccaggtacgcctggagagtggggcgcgtg

SEQ ID NO: 229896 - DNA, 88 bp, Homo sapiens
ttgttaaggattccaagtaactcttatttgctatgtttccagtgtcctctgggtgtttccaagagcaacaagaaacgaataaatctct

SEQ ID NO: 229897 - DNA, 75 bp, Homo sapiens
tcaacagatctttaccagatgttaggttagaaggatgtgaatttggacattggctctggacatgacacatgtgga

SEQ ID NO: 229898 - DNA, 75 bp, Homo sapiens
cacgcctggcctcactcaaacagtaaacgaggatacatgatcccttaattcaggctcaggctgaagaactgaccc

SEQ ID NO: 229899 - DNA, 100 bp, Homo sapiens
caagcagctgcttgccggccccaacacggaccttggctatagaaagcgcaattggtggtaacgcttatcaacacagcaaagtgaaccagtggaccacaaa

SEQ ID NO: 229900 - DNA, 51 bp, Homo sapiens
gtggaggaaaacaacttcgagggcagagtcagcagcaaggacaagatggag

SEQ ID NO: 229901 - DNA, 74 bp, Homo sapiens
cactgctgggccctgaggctgcaccaagtggcgaaggagccggctccaagaagtgggagagcgtgaaactcctg

SEQ ID NO: 229902 - DNA, 83 bp, Homo sapiens
gtaccccactgctggggtggtggttccaatgagacagggcacaccaaactccatctgctcaccatggatgatgatatcgccgc

SEQ ID NO: 229903 - DNA, 97 bp, Homo sapiens
aagtgcgattgtggaagctgctcggcttaatcttctccatacagagctggctaaacagttggcagacacaatggttctacctatcatacaattccga

SEQ ID NO: 229904 - DNA, 98 bp, Homo sapiens
atcgctctcaactaactacaattgtattggcagctagagagattttcagctgaactctcatctctcaacactggcaaatattcataagatctaccaca

SEQ ID NO: 229905 - DNA, 88 bp, Homo sapiens
cgtcgcagtttccagcccgacgagcttgttttgtcccggactcgagtttgaacaactgactcttgatggacacaaccttccttctctc

SEQ ID NO: 229906 - DNA, 83 bp, Homo sapiens
ccgggaggaaggaacgaggcaaggagctaaagcagcgtgcgttcagccctggggcagccagataagctggtggtggtatggac

SEQ ID NO: 229907 - DNA, 104 bp, Homo sapiens
ctgcaaggtccggctgctggatggaggggattttgtcagcttgtcgtcaagggcagtcagggcgacagcaagaatgccaagaagaagaacaacaagaaaaccaa

SEQ ID NO: 229908 - DNA, 90 bp, Homo sapiens
tgaaaattctggataatggtgaatgggtggcaggttttaagaagcaaatggcagatactggaaaactgaacacactgttgcagagagccc

SEQ ID NO: 229909 - DNA, 100 bp, Homo sapiens
ggagggtcctctcagtgattaagtataagccacccgcacttaaaaagtcaaattctcctggaactgcatcatcaggatcttcacgattaccgcagccaag

SEQ ID NO: 229910 - DNA, 75 bp, Homo sapiens
gcgaacccgagagcgtggagcgggctgggccaggtgacagagttagtccttgataattgcctgtgtgtcaatggg

SEQ ID NO: 229911 - DNA, 74 bp, Homo sapiens
gcctggggtagcggcggcgggagtcctggcgctctgcagtacatcgacgccatcagcaacaagcagggcgagct

SEQ ID NO: 229912 - DNA, 75 bp, Homo sapiens
gggcggctctgcgctggccgggggcgcgggcggcggcgccggcaggaaggagaactacgatgacccgcacaaaac

SEQ ID NO: 229913 - DNA, 84 bp, Homo sapiens
ccgcagtatcatgctggccaagaagatcatcattaaggacggaggcacgtcccttcagtctgaatatgttcattactaaggcct

SEQ ID NO: 229914 - DNA, 80 bp, Homo sapiens
attaaccaacagaaattgaaactagaacaggatatgactacagtagatgaagatattgatgatgttaagaagttcaaacc

SEQ ID NO: 229915 - DNA, 74 bp, Homo sapiens
ggaggaagaagaggatggagaggagctcattggagatggcatggaaagatctattcttacatacagccgaattg

SEQ ID NO: 229916 - DNA, 95 bp, Homo sapiens
caactctccgggcggccgcacctgccagtttgctgctttgtggtgcacaagcggtgccatgaatttgtcacattctcctgccctggcgctgacaa

SEQ ID NO: 229917 - DNA, 90 bp, Homo sapiens
ttaatgatgtgcctctcacatgtaggaacttgctgactcgaggacagactcaagacgaggtctcctctgagcctccggcctccataagac

SEQ ID NO: 229918 - DNA, 98 bp, Homo sapiens
gggatccggctcctccagctaccggcccaaggccatctacctggacatcgatggacgcattcagaagcattttgaaagcgaagcagaagccgtagaat

SEQ ID NO: 229919 - DNA, 98 bp, Homo sapiens
atctacagcatggatgagggcatccgcacccgctctaagtcagccaaaaaccccaccaacaactgaacgctttggtcaggctgctacaatggaaggaa

SEQ ID NO: 229920 - DNA, 75 bp, Homo sapiens
cggagaccccgcgccggaccctgaggcagcgagagctggagttcctacgcgtggccaagaaggagaagctgcggg

SEQ ID NO: 229921 - DNA, 49 bp, Homo sapiens
gttctctgcctcttgtattctaggctgctttgctggctctgcaagaaaa

SEQ ID NO: 229922 - DNA, 88 bp, Homo sapiens
cggaaagggaactccctgaccccttgcgcttcccagattgtctacaacctgttgtctctgcgcttcaactcacggatccgtgtgaaga

SEQ ID NO: 229923 - DNA, 74 bp, Homo sapiens
tgaagagggaagacacgcggaaacagaaatgttttagcaagtgcatcagctgacaacactgtaattctgtggga

SEQ ID NO: 229924 - DNA, 83 bp, Homo sapiens
atccaggaggaggagttgcagaggttatgcctccgcctcgttgccctgaaagccgcagcgacagcgaaaagggctaagattcg

SEQ ID NO: 229925 - DNA, 50 bp, Homo sapiens
cgggagttcaagaagaacactccagagatctgccgacaccccaggccatc

SEQ ID NO: 229926 - DNA, 74 bp, Homo sapiens
gggctgctcccatcattgatgtggtgcgatcggaggaacagcacagcatgctgggctctggatttaaagctgag

SEQ ID NO: 229927 - DNA, 90 bp, Homo sapiens
tcagcaggctccgggctgaagattgcttctcttctctcctccaaggtgggcacaggcttcagttttactgatgatacccacggatatgca

SEQ ID NO: 229928 - DNA, 101 bp, Homo sapiens
agaaaccagtcccttggacagtctgcaccttctcttactgctggcctggtactccaaagattcaggtttactcacgtcatccagcagagaatggaaagtca

SEQ ID NO: 229929 - DNA, 100 bp, Homo sapiens
aagcattttgtcaaagcctttcaaagtccccattccaaattatcaagggtcctgcagttctgagcttgggttccctttgcctggacaccaaccaagcccc

SEQ ID NO: 229930 - DNA, 100 bp, Homo sapiens
atagcctccagcgccacagccttttacctgcagcttttcctgcttgatatagcacaggcaaggcctttggctgtgtgggcggctacattgccagcacccg

SEQ ID NO: 229931 - DNA, 75 bp, Homo sapiens
ctagcacccggaggctgggctgtgctagggaaggggactggagcagttcaggacaaagaggtgtgggcaggccac

SEQ ID NO: 229932 - DNA, 117 bp, Homo sapiens
aaggaacgtatcttcgcggagactggcttcccggtgtcggagcagcggctgtggcgcggcggccgcgagagccagagcccagaggtggagcagttagggagggttgtggaactggac

SEQ ID NO: 229933 - DNA, 98 bp, Homo sapiens
gcggcaacgttgaggcagaatcaaaacctggggaaagaccttaggtattcagggtctcggattgcgagctggctgccgagtttttcggttgaagtgat

SEQ ID NO: 229934 - DNA, 111 bp, Homo sapiens
ctttcaatgacaaaaagtttgtcattaaacccatcgacaagaaggcacctgctctgaagggctccaagaagctggtgctgtctgtgtactcagcagggcgcatccctgggg

SEQ ID NO: 229935 - DNA, 51 bp, Homo sapiens
ggcacagcatttatcctggagaagaggactcagcccaaaaccatgtttgcc

SEQ ID NO: 229936 - DNA, 78 bp, Homo sapiens
cgaagtggagcaaaaggtgacagtcacagcttagtagtcaggatggctaaaggtgaccccaagaaaccaaagggcaag

SEQ ID NO: 229937 - DNA, 85 bp, Homo sapiens
gtgtggacgtcgtggtgggaggacactccaacacatttctttacacagtctgtgatcaaaacagggcgactgctaatcagtcacg

SEQ ID NO: 229938 - DNA, 75 bp, Homo sapiens
ctgaagctggggaacatggtgctcaacaagagagcactacaaacaccactggtttcccgaaaagccgtccaaggg

SEQ ID NO: 229939 - DNA, 107 bp, Homo sapiens
cgaacccatccgcgacttcctggccatcgttttcttcgcctccatagagactaatagacaagtcacgagttacctgtgtcaaatgggttcccggttcggaaagcctt

SEQ ID NO: 229940 - DNA, 100 bp, Homo sapiens
ggtttcgtggcctgaccaaggacctccaagggtctccatcacccaactccatgcttcgagtcctgctctctgctcagacctcccctgctcggctgtctgg

SEQ ID NO: 229941 - DNA, 100 bp, Homo sapiens
tacggcgtgcgcggctatcccaccatcaagttcttcaggaatggagacacggcttcccccaaggaatatacaggtgactcagaattcatgattgaagaaa

SEQ ID NO: 229942 - DNA, 75 bp, Homo sapiens
atcgcttcctctcgcaacaaactatttgtcgcaggagcagacgcctccgcctagacctgaagcctaccccatccc

SEQ ID NO: 229943 - DNA, 101 bp, Homo sapiens
gactttcttccagcttctgctgtccttctttgtggagagcaagcagagcatcctggccagaacaagccaaggagccaagacgagagggacacacggacaaa

SEQ ID NO: 229944 - DNA, 89 bp, Homo sapiens
aggcgaagctggccgagcaggctgagcgatacgacgaaaatgcatccgatgcagatttatggctcctgaacagttgcactgtaaaaaac

SEQ ID NO: 229945 - DNA, 97 bp, Homo sapiens
gtgaggaccactgtatactacagcactctaaccggcgcagttgtgtagcagttgagtaatgctggttagctgttaaggtggcgtgttgcagtgcaga

SEQ ID NO: 229946 - DNA, 100 bp, Homo sapiens
cttcgcctggcccaccactcccagagttgtcgccgtgatcctgaaggcgctgacctacgacgagaagcggggtgcctgcagcgtgggcaccaacgtcagg

SEQ ID NO: 229947 - DNA, 98 bp, Homo sapiens
cttcataaaatgattcgactcattacgcatgggcttggtggagaaggctatctcaatttcatgggaaatagttgacaaacagggacataccaaagtat

SEQ ID NO: 229948 - DNA, 75 bp, Homo sapiens
tagtcaactccttcaagcatataagtggtcaaacaaggacaagatgaagctcatcatcctggagcactattctca

SEQ ID NO: 229949 - DNA, 50 bp, Homo sapiens
ggatgacaaaaaagccttcataggatccaaggagctggttctgctggttg

SEQ ID NO: 229950 - DNA, 100 bp, Homo sapiens
cgggaccgcggggagcgcgggtttgacccggagccgcgagggacgaccgggagccggtctaattgaagccaacggagaactcaaggtcttcatagaccag

SEQ ID NO: 229951 - DNA, 100 bp, Homo sapiens
aacgccttgagtatgcccttgtgaagtactatcaactacagtaaagaccttcctctggcccaaggaatcaagtttcagtaaaggtgttttagatgaacat

SEQ ID NO: 229952 - DNA, 100 bp, Homo sapiens
cattttttcacccgagggtcggctctaccaagtagctgagatgagtgaactgagtgtggcacagaaaccagaaaaacttttggagcgctgcaagtactgg

SEQ ID NO: 229953 - DNA, 76 bp, Homo sapiens
ttacagaggtctccagagccttctctctcctgacctgcctagagctggaacgttacctccagagcgagccctgcta

SEQ ID NO: 229954 - DNA, 100 bp, Homo sapiens
gtccaccactgtccaacatggcaatggaacagcatatgccatatatgagctggctgtggcttcatttcccaagaagcaggagtgacttcagtcatcccag

SEQ ID NO: 229955 - DNA, 75 bp, Homo sapiens
gtggctcaagcaggacaatcgcactttataccacctgcgattactgttgctatgagtaatgtagaagaagccgtc

SEQ ID NO: 229956 - DNA, 82 bp, Homo sapiens
ccacaacccgcagagacttctactggctgcgctcctttctggccggaggttcctgcacttggccatcatccatgaagaaaag

SEQ ID NO: 229957 - DNA, 100 bp, Homo sapiens
cagcaacctgacaattctgtcgtgtcccgattcccgacagttaagcaatggggagacatttggctttgctcctgcttctgctccttctcttccaacattt

SEQ ID NO: 229958 - DNA, 100 bp, Homo sapiens
tgctaggatatcagcactaaacatcgtgggggatctcttacggaaagtagggatgggggctccggaggtggcgcccaggctctgagctaccctaggtctg

SEQ ID NO: 229959 - DNA, 75 bp, Homo sapiens
cttgtttagatatgctggtcctgaagatgatgctgccattaccttggtgaatcagtggctaacctggttagaaac

SEQ ID NO: 229960 - DNA, 75 bp, Homo sapiens
gctgtcaatcaagtggaataaacttgaggatgttgctcaggttccaagagtccaggacatatggtaatactagac

SEQ ID NO: 229961 - DNA, 100 bp, Homo sapiens
tttggctttgcctttctggacacagaagtatttgtgacaggcagttgcagtggtgcagaatggctgacctcagtcttgcagatgcattaacagaaccatc

SEQ ID NO: 229962 - DNA, 98 bp, Homo sapiens
aaaaacaggatggatatgactctctgcagcgggatcaagctgtgtgcattagtacaaatgggaagaaacccttttttcttggagccagcaataattat

SEQ ID NO: 229963 - DNA, 123 bp, Homo sapiens
ctgggtcagtccgccgctcaccccgcggccgcaccttcccgccttctcagtacctggagtagaacagaaaaattattatgtctgtgttcccttgggactcattggaaattgtacagtgacatc

SEQ ID NO: 229964 - DNA, 100 bp, Homo sapiens
cccggagttccttagttgaaaggtgtgaggacttctgcatcttacagtcagcacagaacacactgagacttgaatcaagtcagcaacagagcaaaataaa

SEQ ID NO: 229965 - DNA, 82 bp, Homo sapiens
ccaagcaacagacggcctggctggagccctggacgcccggcagcagagcactggcgcggttcaatgtggcttaattgtggtg

SEQ ID NO: 229966 - DNA, 97 bp, Homo sapiens
cagcaagaacagagagagaggtggacagatctgagagatactgagaccctgtacacgtatcctgaaaactggagggccttcaaggctctcatcgctg

SEQ ID NO: 229967 - DNA, 83 bp, Homo sapiens
cttcctgctggggctcatgtttgaggtggcgacctgcacatgacccagtttttccgaggcaatctggctggcttaactctccg

SEQ ID NO: 229968 - DNA, 82 bp, Homo sapiens
cgaccgccgagcctgcagcctgccccgcggccaacatgagcttcttgttatgatgataattccgaagaaggcttccacacta

SEQ ID NO: 229969 - DNA, 75 bp, Homo sapiens
cctttaatccagtgactgtcaggtcgatcatatactgggccagtgccattcgcgtcgcagctctggactgcatgg

SEQ ID NO: 229970 - DNA, 98 bp, Homo sapiens
cttcggaaaaccatcataaacgagagccttaatttcaaggttactcaaatgagtcgtccagacttgattctctttctgatgaaatacctgatggctct

SEQ ID NO: 229971 - DNA, 100 bp, Homo sapiens
attatttcttcagcatggctcatattctacttcattcagaagatcaggtacacaaatgcacgcgacaggaaccagggatctgaaacttgcccacccttcg

SEQ ID NO: 229972 - DNA, 100 bp, Homo sapiens
tctcctttctacaacccgttccagttcgagatcaccttcgagtgcatcgaggacctgtctgaagggtcccgggattcttgagctgtgcccagctgacgag

SEQ ID NO: 229973 - DNA, 75 bp, Homo sapiens
ggaactttcttaatagaacatcactgttaaccctagagactgctgtggaattcctgagaaagagcaactgaggga

SEQ ID NO: 229974 - DNA, 75 bp, Homo sapiens
cgcagatgctggagaagtccccttatgaccagaaagcgtggatacccatcaacgaagttttgatattggaattca

SEQ ID NO: 229975 - DNA, 75 bp, Homo sapiens
cgcccgccaccctgcgctgccgccgctctgaggagttaaaggtgactccccggacagctcaacaccaaagctttc

SEQ ID NO: 229976 - DNA, 83 bp, Homo sapiens
tcattgctttttttgcccacctagcttgtaacgaaggctgaccccgcactacatctacccaccagccatcgtgcagcccagcg

SEQ ID NO: 229977 - DNA, 83 bp, Homo sapiens
cgccaaccagcttgaggccactggcgtcacctgctatgcagcccacccagcaattctgtggtgttcttggtcacacatttatg

SEQ ID NO: 229978 - DNA, 75 bp, Homo sapiens
ccgggactccctgtgccttgcttggagctgacgccgacgggaaattacattgctgtaggaaacatgacccctgtt

SEQ ID NO: 229979 - DNA, 98 bp, Homo sapiens
agaagcaagaaggccctggacacagcaatatctctgggctttcacaggtgatggtgtttgtacatgctcgaaatgccactgtaagaacagctatgtct

SEQ ID NO: 229980 - DNA, 98 bp, Homo sapiens
gactacatggtcctggctgcacatttccagaggacaacagaggagacagaggggctggactcgggccttgatggaatgcctggctcccctccgccttc

SEQ ID NO: 229981 - DNA, 75 bp, Homo sapiens
gaagcaggatgaactgaaacggattgccagagaattggcagaagctcggcttgcccttcccctgcttgtgccgtg

SEQ ID NO: 229982 - DNA, 82 bp, Homo sapiens
ctggacgacgtgaaggagaaattcgactatggcaacaagtacaagcggcgggtgccccggctgccgcagcgggaaccgcaag

SEQ ID NO: 229983 - DNA, 90 bp, Homo sapiens
caggagtgctgccagaaatttgaacaactttccgaatctgcaaaagaagatttggagtccaggaatgagactaagcatttatctgtagga

SEQ ID NO: 229984 - DNA, 82 bp, Homo sapiens
gcaggagggtgtcctgaacagcaaggtgatgtgtccaatctagatcccaacttctcatttgaaggcaccaaactggatgtgg

SEQ ID NO: 229985 - DNA, 82 bp, Homo sapiens
ctgtaggaagcaaccagtctcgatctggcccaatctctcctgcaagtatcccagcaccgaacaagatttgtgatgaaatgga

SEQ ID NO: 229986 - DNA, 75 bp, Homo sapiens
atacagggctatgatgctattgtggttgaacaatggacagtcctggaaagaaatccaagaccagtgacttatcaa

SEQ ID NO: 229987 - DNA, 75 bp, Homo sapiens
tgggactgtggtggcgatgctaatgtctccagaacgctatagctatggcacctccagctcttcaaagaggacaga

SEQ ID NO: 229988 - DNA, 75 bp, Homo sapiens
aaatgttaggatcactttattctgagtcctgtgtatggaaactcacatgagtcagctcagtctagaagggtagta

SEQ ID NO: 229989 - DNA, 100 bp, Homo sapiens
tacgatgtgatcgccaaccagcctgtcgtgatcgacaactggcttggatgaggtcatcttctcctatgtgcttggggtcctggaggacctgggcccctcg

SEQ ID NO: 229990 - DNA, 100 bp, Homo sapiens
gttaggcgtggagagggagtgatgtcttccagactcggtgctgtacccgcccactattcctgatcagagaactccagttgcttcaacacacagtatcagt

SEQ ID NO: 229991 - DNA, 100 bp, Homo sapiens
ccaacatggcggaacgcaggagacacaagaagcggatccagacaccattcgcttttcacccaagatgatttgatgtcttataaaactctgatgaaccatg

SEQ ID NO: 229992 - DNA, 50 bp, Homo sapiens
tacagacccagtctctgccaagtgctagactggatcgagaaccacggaga

SEQ ID NO: 229993 - DNA, 100 bp, Homo sapiens
gggcctcaattaatgtatctggtgaagctcgtgtgtggagtgccacggtacaatcagacgacagatggacagtgtgacaaaagtgtcagaaaggattggg

SEQ ID NO: 229994 - DNA, 100 bp, Homo sapiens
gaagcgaagccgaaaaaggcagcagcgaaggactcacaccacccggcaagaactgctcactacggctccctgccccagaagtcacacggccggacccaag

SEQ ID NO: 229995 - DNA, 90 bp, Homo sapiens
aacctgtacattcgaggcctcccaccaggcaccactgaccaggacctaatcaagctgtgccaaccgaggtacttcatcgattccaccaac

SEQ ID NO: 229996 - DNA, 50 bp, Homo sapiens
gcggcggcagcagcagtgagagaaattgcatctgatggtctcaagggtcg

SEQ ID NO: 229997 - DNA, 100 bp, Homo sapiens
gggactagtggaccagctggtgaaggcagacagcgagtggcgacgatgggcgtttgtggtatgctggaccccgggcctggtggttctgctcctcgacggc

SEQ ID NO: 229998 - DNA, 96 bp, Homo sapiens
ggagagccgcccagcagcacaacacagggaagcttggggaggacctgaaggagaagaaggagaaggtggaggagaaggcaagccggaaagagcgaa

SEQ ID NO: 229999 - DNA, 82 bp, Homo sapiens
ctgcgctcccctaggagtgctgagcccgcggaaccgcagccatggatgaatttttagatgtgatctactggttccgacagat

SEQ ID NO: 230000 - DNA, 74 bp, Homo sapiens
ccgcatctcgatggagaacttcctagcatatcggtatctccaaaaggcagcaagcatgaaccataccaaagccc

SEQ ID NO: 230001 - DNA, 144 bp, Homo sapiens
cagagcgagcttcggagaagcagtggtgggttccatgtgatggtggagtaggaggcaggtctccgcgttttcggctttgtgagaaaccttaccatcaaacacgatggccagcaacgttaccaacaagacagatcctcgctccat

SEQ ID NO: 230002 - DNA, 75 bp, Homo sapiens
ggcgccgaaagaagctacccagtgtcctgaaagtttcctacactactgaggtttaggggcactgtgaagcaaaag

SEQ ID NO: 230003 - DNA, 100 bp, Homo sapiens
gagaaaagtaggatgaacctgcccaaggggccggacacgctctgcttcgacaaggacgagttcatgaagctcggggacctgcttcacaagttacagttcg

SEQ ID NO: 230004 - DNA, 75 bp, Homo sapiens
cgcagcggcgcagctgatagcaggaacagatttaatccagagactgacttcactatagaacccacagttgtatca

SEQ ID NO: 230005 - DNA, 100 bp, Homo sapiens
tgagctgtcaccaccgacactctccaggctccggacacgatgcaggccatcaagtgtgtggtggtgggagatggtggaatgcagtagccctctgggcctg

SEQ ID NO: 230006 - DNA, 75 bp, Homo sapiens
agggattatcacacacaaaaaatgacagaaatgttgaatgttcctttgaggtggaaaggagactatggaaccagg

SEQ ID NO: 230007 - DNA, 100 bp, Homo sapiens
tggcactatggtcatggcggaggggacggcagtgctgaggcggaacaggccgggcaccaaggcgcagattgtcctgggtcacataatgccagctgagcgt

SEQ ID NO: 230008 - DNA, 100 bp, Homo sapiens
agaaagctgctgatggggctgctgagggtggaattgcgtttgttgccataaaaggagcatttaaagtttacttcaaacagcagcaatatttacgacaggc

SEQ ID NO: 230009 - DNA, 82 bp, Homo sapiens
cggggacggcgaggccctcatgtaccacacggtatgaaacaacttcaagtgatgattccagctcagatgaaagctcttcttc

SEQ ID NO: 230010 - DNA, 100 bp, Homo sapiens
cctgcacttcctcaaccctcaggaagctcagcggtgggcagtcctagtccgaggtgccaccgtggaaggacagaatgccttttttagcaaaacttcagtc

SEQ ID NO: 230011 - DNA, 100 bp, Homo sapiens
ttcctgcccatgacggaggaagagctcgaaaccagcctggacaccaagtctgtgtcagaaggccacctcaagaggaacatcgtggtgaagaccgtggaga

SEQ ID NO: 230012 - DNA, 100 bp, Homo sapiens
ggcgcccaagcagcagccgccggagcccgagtggatcggggacggagagagcacgagcccatcagttccctgacatcgtggagttctgcgaggccatggc

SEQ ID NO: 230013 - DNA, 82 bp, Homo sapiens
ggtggcgtccggcgctgccaggatccgcggggagaccttgggcatcatcggacttgttaatatgatcctctgttgaagcaag

SEQ ID NO: 230014 - DNA, 100 bp, Homo sapiens
gccttctcgtggcggcggggaccgtccagcccagcgattctcagtcaggtgcgttgtagaagacaagaactcaaaggtggcctggttgaaccgttctggc

SEQ ID NO: 230015 - DNA, 100 bp, Homo sapiens
cacgccagccgcaccatgccgctcctaagcctgcacagccgcggcggcagcagcagtgagaggcacgggcgagagcgggaagagcacgttcatcaagcag

SEQ ID NO: 230016 - DNA, 76 bp, Homo sapiens
tgatgtctgacaacgtggatcgttgttttgaaacgtcgagcctcttaggcagagtttaacacatgggagctgcctg

SEQ ID NO: 230017 - DNA, 75 bp, Homo sapiens
ttcagtgagcaaggcatcaacgagtttctcagttgcaggaagaggcagaggaagaggaagaggaagaggacgtgg

SEQ ID NO: 230018 - DNA, 80 bp, Homo sapiens
ctgagatcatcaccaccccgacggagacttgtgacgtgcctccggagccagcgtggtggccatagacaacaagatcgaac

SEQ ID NO: 230019 - DNA, 89 bp, Homo sapiens
gactgaacttaaatactgataggtccgagtggacagtggcatccaaccaggaagtgatattagcatttattatgatcctatgatttcaa

SEQ ID NO: 230020 - DNA, 100 bp, Homo sapiens
tgctgtcctacggaaggagagctgcatgatctgattgcagagatggaagacgtcatagcacggatgcaagatgaaaaaaatggaattcctattcgtacgg

SEQ ID NO: 230021 - DNA, 86 bp, Homo sapiens
cccggaagctcccggcgtctgcaccccggcagcgcgaggaaatgcccaaagacaatgcagatcttcgtgaagactctgactggtaa

SEQ ID NO: 230022 - DNA, 100 bp, Homo sapiens
aaagaaggaggctccgtacacgcttgtgcttgccagagtgatctctcggcttgccgactttgctaaggaacgagccagtctacccacattaggtttcaca

SEQ ID NO: 230023 - DNA, 83 bp, Homo sapiens
ctggacgtggagtgtgaggtgcaggaccgcctggcacacaaggcgtccgagctgggccacagcctgaacgagaacgtcctcaa

SEQ ID NO: 230024 - DNA, 90 bp, Homo sapiens
aagcaagctcagattccattagctgctgtcatcaagccctttgccaccattccttcaaatgagcacaaacgtgcagatatctgatagccc

SEQ ID NO: 230025 - DNA, 75 bp, Homo sapiens
ctgttttccagagctttgccaagttcagcaaatttggagatgagccaaagccttggctggacagtcagtacgaat

SEQ ID NO: 230026 - DNA, 77 bp, Homo sapiens
ccctggatcggcctggagccagtgcccaagtacggtttgatctggcagtgtggtggggttctggaaacacacccatg

SEQ ID NO: 230027 - DNA, 100 bp, Homo sapiens
ctgactttgtcttctccgcacgactgttacagaggtctccagagccttctctctcctggtgtgatgaatgcagactctgctaccattttggctgtttgga

SEQ ID NO: 230028 - DNA, 75 bp, Homo sapiens
ggcaaaacttcggacatagaggccaaccaacctttggaggaaatttatcagtggtgtggttcctcgtgcaacaaa

SEQ ID NO: 230029 - DNA, 90 bp, Homo sapiens
agcgggagaggagtctccaccaggactgaccgctgccgcccagcacgtccagtgttatagttttgccgctggactcttccctcccttccc

SEQ ID NO: 230030 - DNA, 71 bp, Homo sapiens
tgatcttgcaggcagtgaaagagctgctcaaacaggcgctgcaggtaaaatgtccagtgatcgagctttga

SEQ ID NO: 230031 - DNA, 80 bp, Homo sapiens
ctggatgaggagggctctgatccccccctgccggggagggcccagcgcatccgacagcaattctgtggtgttcttggtca

SEQ ID NO: 230032 - DNA, 90 bp, Homo sapiens
gcctattcccctggtgcggcctgctgctggatacccggaccctggaggtgcagagcgactactccagctctgagcccagaggaagccgag

SEQ ID NO: 230033 - DNA, 100 bp, Homo sapiens
gttgcacacaaacttggtataccttgctacaatagcagattctaatcaaaatatgcagtctcttttaccagcagtcatcaccgagtggtcttctcacatc

SEQ ID NO: 230034 - DNA, 89 bp, Homo sapiens
gcggcgcagctgggcaagaattacatcagcgcctgggagctccagcggaagggatgtgtcttggtgagctagtcattaacccccaccag

SEQ ID NO: 230035 - DNA, 83 bp, Homo sapiens
gccaacaatgcctttgaccagtatcgagacctggaagatcagttttcctgccatccaggctgctccctccttcagcaactcat

SEQ ID NO: 230036 - DNA, 118 bp, Homo sapiens
ctcagcttctccgagtgtgtgcagcgctgcacccgcaccctgcaggccgagggacgtgccaagaagcgcaaggatttgaagcctagcaacattgttgtgaaatcagactgcaccctga

SEQ ID NO: 230037 - DNA, 74 bp, Homo sapiens
cggctggacctgttcgagatcagccagccgaccgagccttatgccagcctggaccatcttggaggcagtgtagg

SEQ ID NO: 230038 - DNA, 74 bp, Homo sapiens
tctttgctcaaggatcccagttttctctggatgacgtgacaatgcagatcttcgtgaagactctgactggtaag

SEQ ID NO: 230039 - DNA, 117 bp, Homo sapiens
aagacctacaaggggtgcccgagcggctgctggggacggcggggaccgttcctctgtgacgagggtgcaggtatctctggggactacatcgatcgcgtggacgagcccttgtcctgc

SEQ ID NO: 230040 - DNA, 126 bp, Homo sapiens
taaactgaaagtgcgaactgcctatccgtcattgagacttattcatgctgtcagagggttttgtgatgaaggaacctgtacagataaagccaatattctgtatgcctgggcgagaaatgctccccc

SEQ ID NO: 230041 - DNA, 100 bp, Homo sapiens
cagccttcccagtagctgggaccacaggaggaaaattcttccagcgatggtctcccactcagagctgaggaagcttttctactcagcagatgctgtgtgt

SEQ ID NO: 230042 - DNA, 90 bp, Homo sapiens
ggccttacattgtaacaggagtgctggacagatgtgcctgtctgtcgcaggctgaggagcgccagcccctgcggatccgccggcttctcc

SEQ ID NO: 230043 - DNA, 109 bp, Homo sapiens
cgcgagcacagagcctcgcctttgccgatccgccgcccgtccacacccgccgccagtctctgctttctatccgtcaagatgataaagtcgtgtgcccgagaaccaaaga

SEQ ID NO: 230044 - DNA, 83 bp, Homo sapiens
ctttccaaacctttgcagctgccctttgttaaaggctttccttaaagtttcccatgtctcaatggactcctgaatataacgag

SEQ ID NO: 230045 - DNA, 83 bp, Homo sapiens
ctgtcttcatctttacagaggaatagtctacaaaggaagacttgtaacctggagaagagggggatatgagactttctactcgg

SEQ ID NO: 230046 - DNA, 100 bp, Homo sapiens
caagcctgagccggttcctgttcaaaagatcttgcaggagagagagttactgcctgtgaagaaatttgaaagtgagattctggaagcaatcagccaaaat

SEQ ID NO: 230047 - DNA, 74 bp, Homo sapiens
ttcaagatgacgtctgtctgtggtcacgtgatgaccctggatttcctggacaagttgttgcatggcaccgacct

SEQ ID NO: 230048 - DNA, 100 bp, Homo sapiens
cgtccctgggacgctcagcggctgcaggaaagaccacagcaagattctttcattcgtctcctcctagcctgggggaccaggctcgaactgaccctggaca

SEQ ID NO: 230049 - DNA, 75 bp, Homo sapiens
atgtttgcgaattatggaatctggaagtgaactttctaaaacactttggaaacatgatgagcaaggagaagcgag

SEQ ID NO: 230050 - DNA, 76 bp, Homo sapiens
gaaagtggctgacatggccaccaacacacgtggtaaactcgggggccaggactcttttgaaagcatagagagctac

SEQ ID NO: 230051 - DNA, 75 bp, Homo sapiens
gttctgaagacggatctgaggatgggcttcccgaaggaatccatctgggtgctggagaatctggtaaaagcacca

SEQ ID NO: 230052 - DNA, 104 bp, Homo sapiens
gcggctgcgctgttcgtgctgctgggattcgcgctgctgggcacccacggagcctccggggctgtacaagcaggtggagcagtacatgtccttccacaagctgc

SEQ ID NO: 230053 - DNA, 75 bp, Homo sapiens
atccaccggcactgccaagatcagggttaccgtaatttctatgatcgatacaggggagactatgatcgattttac

SEQ ID NO: 230054 - DNA, 98 bp, Homo sapiens
gacagtgttgaggaccatcttgcctggagcaagatatttacagaaagccttctgtgctctagtcgccttgaaaacatccacctggctggacagatgat

SEQ ID NO: 230055 - DNA, 75 bp, Homo sapiens
cccctccgagttacacctccagagccaaaagtacaatggcaccagcatgatatcattgatcattcctcccaaaga

SEQ ID NO: 230056 - DNA, 136 bp, Homo sapiens
gttaccttcgcgattacactggatcagaaacaggccatggagggacaggatccggaggcgccagctcaaccgctcacagaacatttcctgcctgttgctcacactctgttgtccacagcatacccgcaccctagat

SEQ ID NO: 230057 - DNA, 75 bp, Homo sapiens
atggtacttacatttttgtgggctggataataaacaaggatgcgggataagaccctcattgaggagcagtgggaa

SEQ ID NO: 230058 - DNA, 83 bp, Homo sapiens
caatggtctcaatctctggaaaaacttcttgccaaccaaaactgcaaaattcaaaatggggctcaaggtattcgtttcatcta

SEQ ID NO: 230059 - DNA, 50 bp, Homo sapiens
atgtaaagtcagtgacagccccatatatctcttccaaacgcatgatgaag

SEQ ID NO: 230060 - DNA, 100 bp, Homo sapiens
ccaggacccactggaagcctagaaatggcctaatgggattgtttgaaaaacgtcgcttcaggaaattcctagtgtatgttgccaacttcgatgaaaaaga

SEQ ID NO: 230061 - DNA, 74 bp, Homo sapiens
gcatcgacggcatcctgggcgacaaaggttggagcaaaacgtcccactcactggaggcacctgaggacgacggg

SEQ ID NO: 230062 - DNA, 100 bp, Homo sapiens
tttcaacttccggctggattccaagtccgtcgtggaggattttttatcaagcagaaatgcatcgaacaacgagaatcaagatcactgagctaaatcccca

SEQ ID NO: 230063 - DNA, 49 bp, Homo sapiens
tccaggcctcattggacagcattcgagctcgatcaagtcatccgccaaa

SEQ ID NO: 230064 - DNA, 100 bp, Homo sapiens
acagcttctccgcctggctgcactgcgtgtgtgtggtgggcttcgacctggagctgggccaggccgtggagagcttagaaaccaagatagccaagtggaa

SEQ ID NO: 230065 - DNA, 75 bp, Homo sapiens
acgatattttatgcatcagcaacgatcgtggactatctgggcttccatcagcttagaccatgctcagcctccaag

SEQ ID NO: 230066 - DNA, 110 bp, Homo sapiens
gctggagctgggtcagtccgccgctcaccccgcggccgcaccttcccgccttctcaggtctctaattaacagaagatggcaaagcccagccacagcagctatgtccttca

SEQ ID NO: 230067 - DNA, 75 bp, Homo sapiens
tcatcccaaaacaatgcctttgcacaaaataaaccaactggctttggcagcctgtctcctccctcctacacattt

SEQ ID NO: 230068 - DNA, 74 bp, Homo sapiens
caagatgcatggacccagctcagcgggacgcgccgctggagaatgaaggactggaaggatcaccagcacatatg

SEQ ID NO: 230069 - DNA, 100 bp, Homo sapiens
gcagttatctgtccagaaaccagagcaagttatcaaagaggaaaatttctaccttgaaccgtatctgaaagaggttattcgggaaagaaaagaaagagaa

SEQ ID NO: 230070 - DNA, 96 bp, Homo sapiens
ggtcaccggagcgacagaaaacttggaactaagctggaggacaccgagtactcttatgcagtccccatgatggtccccacagagcttgttgagaaa

SEQ ID NO: 230071 - DNA, 87 bp, Homo sapiens
gctgccctcggcgggcggcgacggcggcaaatctaagaaatttccagagactgctgctactttgaaacgtacgatagaggccctgat

SEQ ID NO: 230072 - DNA, 83 bp, Homo sapiens
tacatttgtgaaagtcagtttctgaggaatttcatcaggctgagagcagtttcagtgaagaagaggaagaaaaacttcaagcg

SEQ ID NO: 230073 - DNA, 73 bp, Homo sapiens
ctactttgagtgctgtctccatgtttgatgtatctgagcagaataattgtgtgcccaagaagatgctgcagct

SEQ ID NO: 230074 - DNA, 96 bp, Homo sapiens
gcgggcggtgagcgcccatatgggggttctggagagcggggtgtgggctctcatgggaggttgaatggagcagctgaacttggctgacagtggcct

SEQ ID NO: 230075 - DNA, 98 bp, Homo sapiens
aaggcttaaagtaggacaaccatggagccttcctgtggcaggagagacaacaaagcgctattatcctaagattctccatctcctattgctgcaagaac

SEQ ID NO: 230076 - DNA, 90 bp, Homo sapiens
ttctggggcaggggccagggccaggaccgggactttgtagccaagcagaaggaggacctggagctggccatgaagaggctcaccaccgac

SEQ ID NO: 230077 - DNA, 75 bp, Homo sapiens
aggacgtcctggacagcgaaggatgtgttccagctgccaagaagccggggccaccattgggtgctgccacaaagg

SEQ ID NO: 230078 - DNA, 75 bp, Homo sapiens
gaactttcacggacaacctcagaggacaacgaagtgttcggaggcaaaaccttcaactgaggacttgggggataa

SEQ ID NO: 230079 - DNA, 90 bp, Homo sapiens
cagaacaacaaggtgttgatgccgccggacggtatactgcaacatccagatggcacagttttgaaacagttacaaccacctccaaggggc

SEQ ID NO: 230080 - DNA, 74 bp, Homo sapiens
ggaagttcgtactgggcagaacgcgacgggtctgcggcttagggcccctccagccagcgtcaggtgcagaatgg

SEQ ID NO: 230081 - DNA, 83 bp, Homo sapiens
gggccatcccgaaactgtgattgttttctgacctgcctagagctggaacgttacctccagagcgagccctgctatgtttcagc

SEQ ID NO: 230082 - DNA, 100 bp, Homo sapiens
gtcccaatcccccactctttccgccctaatggaggtctccagtttcgagccagccccagtgcctgctgagccgtttgacaacactacctacaagaacctg

SEQ ID NO: 230083 - DNA, 98 bp, Homo sapiens
aagaggcacgagatgccgcctcacatctacgccatcgcagacacggcctaccggagcatgcttcaagatggagatgggtgtcgtgagctggtggtggg

SEQ ID NO: 230084 - DNA, 83 bp, Homo sapiens
cctgcccggtgcccgaggaggcagccaagctcgtagcctgccactccgtgcgagcgagcccagggcgtggtgctgaaagtgct

SEQ ID NO: 230085 - DNA, 80 bp, Homo sapiens
ctgctatcgattgcacgggataccttgccacggctgcatgactttgctgggagtgcatccgccccaacccttttccccct

SEQ ID NO: 230086 - DNA, 75 bp, Homo sapiens
gtgctggtcatcaatgttactcaggtagaggatgctgaaatttctggaaaagacaatggaaatcaggggcaggaa

SEQ ID NO: 230087 - DNA, 82 bp, Homo sapiens
ggcccaggcctcggactccgcggccggcccggcgcggcccagcgccctcaggttgcttatggaaccacagagaacagtcccg

SEQ ID NO: 230088 - DNA, 98 bp, Homo sapiens
gtcagtcttctgggagcaagcctgcagcccggctcacctggagaaagggtgaccaagaactccacgacaacctctcctacattgagcacatctttgag

SEQ ID NO: 230089 - DNA, 98 bp, Homo sapiens
gccgaccttgagctccaggagttcgtctcttacgtctgcggaagtgcagctgcctcagttcttagcgcagaaacccgcgctgaccgcagcaagaagct

SEQ ID NO: 230090 - DNA, 100 bp, Homo sapiens
agcgagctgagtggttgtgtggtcgcgtctcggaaaccggtagcgcttgcagcatggggtattccctcagcggatactacacccatccatttcaaggcta

SEQ ID NO: 230091 - DNA, 90 bp, Homo sapiens
gatgtatggaaagcagcagagtttctacaaatgctagaagctatcaaagcccttgaagtcagatgatgattattctccaccgtctaagag

SEQ ID NO: 230092 - DNA, 87 bp, Homo sapiens
agctcttgaggaaagccattgctgaaagcctgaatgtgggcttgggcatcagcacgctgctgatgtatgtcccaactcctctggccg

SEQ ID NO: 230093 - DNA, 75 bp, Homo sapiens
tttgctggaaaaaatgacatccagcgacaaggactttaggggacattctggagaaggtcagcgtgcattgccctg

SEQ ID NO: 230094 - DNA, 74 bp, Homo sapiens
ctggcccaaagggatccggagcgagctagggcaggttctgcttggattctgctagacagacccgacaaagactg

SEQ ID NO: 230095 - DNA, 101 bp, Homo sapiens
tagtagaacatcgtgttgctcaggcaacaggagagactcctatagcagtcatgggcgagaaaattatgacttacctgtttgacttcccacatggccccaag

SEQ ID NO: 230096 - DNA, 100 bp, Homo sapiens
gtattttaatggtggtcctcctgctgagacggacttcgggggagacacatctcaacagtgagcatgcgctggacgatagaagtacagcccaatgtagagt

SEQ ID NO: 230097 - DNA, 82 bp, Homo sapiens
ccgcacctgtgaacctcggcagtgcgtccccgggactctgttctgtgagggactttgaacatgtcggggatcgccctcagca

SEQ ID NO: 230098 - DNA, 96 bp, Homo sapiens
gctctgcagctcagccaatcagtgacatcattgtggtcatatgcattagaaaaacccaacactggcagcatatttaatattgcatggtctatcgat

SEQ ID NO: 230099 - DNA, 100 bp, Homo sapiens
gtccctcccagcggcgcgtgagcggcactgatttgtccctggggcggcagcgcggacccgcccggagatgaggctcttcagagtaacctgaggtactcct

SEQ ID NO: 230100 - DNA, 75 bp, Homo sapiens
gcagagccgcccagccctgccagctgcgccgggacgacattcacggcatggtgtaactcccacctccggaaggcg

SEQ ID NO: 230101 - DNA, 75 bp, Homo sapiens
taaggattccaagtaactcttatttggtgacagagctgaatgaacctctctccaatgaagatcgaaatctcctct

SEQ ID NO: 230102 - DNA, 99 bp, Homo sapiens
acgactgcgtctccatcaaccgggccgtgccccagatgcccaccgggatggagaaggaggaggaatcggtttgtggagaaaaacagcgctttgagaagt

SEQ ID NO: 230103 - DNA, 50 bp, Homo sapiens
gcactattaaatgtagagatctcaggtttcgaaaaaacgatgaaatgaaa

SEQ ID NO: 230104 - DNA, 90 bp, Homo sapiens
aaaatgtcaacaaattgatgggagacattttcaacattaaagaattgggtgaaagagcttcgacagcatggcccacctaatattgtagtt

SEQ ID NO: 230105 - DNA, 90 bp, Homo sapiens
cagccatcaaagttatggatgtcactgagcttgttgcagatccttgtgccagcaacccttgtcaccatggcaactgcagcagcagcagca

SEQ ID NO: 230106 - DNA, 101 bp, Homo sapiens
atgatcgagaggatctggtgtaccaggcgaagctggccgagcaggctgagcgatacgacggtatgtgaggagcagcgctgtgaggaggaagtcttccccct

SEQ ID NO: 230107 - DNA, 101 bp, Homo sapiens
gtggctggattggacaagcaggcaaagctgagacctttgatgaatgtgtagcagaaggtggctcagactgtgctccagagaagctctggcttcaaatcccg

SEQ ID NO: 230108 - DNA, 109 bp, Homo sapiens
gacgcagtgtgcaccggctggctcgttaagtcgccccccgagaggaagctacagcgctaccttgcaaaccatactgggtacatcaaagttgactggcaacgagtggaga

SEQ ID NO: 230109 - DNA, 82 bp, Homo sapiens
aaaacaagctcagggcttccactgattctacattatgacaaaattgcttacccagtacatattaaatctcggcaagtatgat

SEQ ID NO: 230110 - DNA, 75 bp, Homo sapiens
gctgccgctcggtcacgcttgtcttacctccagtattagtgcctcgtcataatgaattcaatccacaacacagcc

SEQ ID NO: 230111 - DNA, 101 bp, Homo sapiens
agttggggaaagtaattttgtttgccgaagtgacccccacaacgatgcgtctcctggatggatacagatccacgggttttagaaaaacaagaattacagca

SEQ ID NO: 230112 - DNA, 75 bp, Homo sapiens
ccggggcttgccctggtcttgctcggccgatgaagtgcagaggtttttttctggcatacgaggagcggcagcggc

SEQ ID NO: 230113 - DNA, 100 bp, Homo sapiens
tgcatttttagaacctagagaaatcacactgcctgaggccaaagataaggatgttttagaagaatgtatgtctcttcccaagctatcttcttattctgga

SEQ ID NO: 230114 - DNA, 74 bp, Homo sapiens
ctgagaggatgggaaattctctgctgagagaaaacaggacaccataaatcgcatccaggacctgctggctgagg

SEQ ID NO: 230115 - DNA, 89 bp, Homo sapiens
gcttcaccttcaccttccactgtgattgtaagttttctgaggcctcgccagccatgcggaactcacctgttcttcccggagcctatcag

SEQ ID NO: 230116 - DNA, 100 bp, Homo sapiens
gatcacaactgctgcttaactggtgtgtccagatagctaaggatgttgcttcagagtgtgaagtcaaatgcatgccaacattccagttttttaagaaggg

SEQ ID NO: 230117 - DNA, 82 bp, Homo sapiens
gcaggctgagaaaagcgagaccgcgtgcgaggaccggtgttcatgaagtctgtgaagctggagtgggtgcaagacaacatca

SEQ ID NO: 230118 - DNA, 74 bp, Homo sapiens
acgtcatcctgatcttggaactatcatccaattatgatgggttttgaaccccttgtgaaccagaggctacttcc

SEQ ID NO: 230119 - DNA, 51 bp, Homo sapiens
tccacggggtgctgcagatcctgttccagggccatgaagcccccaggagga

SEQ ID NO: 230120 - DNA, 98 bp, Homo sapiens
gttatcactggccggaaccgctccttggaaggtcgctgggaggtggcattcaaaggggattgcagtggcaaagctaggctaggtcttggaggctggtg

SEQ ID NO: 230121 - DNA, 100 bp, Homo sapiens
gtcgtgatccagaagtccagagctgaggactgcctgtttgcaggcctggtactgtggcgctccgtgaaattagacgttatcagaagtccactgaacttct

SEQ ID NO: 230122 - DNA, 90 bp, Homo sapiens
tttgaaagaatgaggaaataccagatgactggtgtagaggaagtaacacaggtggcctgtggattaaaccacactttggcagtgtcagca

SEQ ID NO: 230123 - DNA, 97 bp, Homo sapiens
ttgctgcccttccggagtccgccccgtgaggagaatgcagataaacactgttgatgtgttaactacgatgggagctattcctgcagggttcaggcct

SEQ ID NO: 230124 - DNA, 100 bp, Homo sapiens
gcgactctcggtcgtgcagcggcggcgagcgctcgcgagcggctgcgggacgcgaggtttccggggccaattcctgtccccccagcagcatggcatcgtg

SEQ ID NO: 230125 - DNA, 80 bp, Homo sapiens
acgctctcgctctgggtccctcagaatatgactctctgcctgaaaatagcgagacaggcaccacaccaaccccgtgggca

SEQ ID NO: 230126 - DNA, 98 bp, Homo sapiens
cctctgctcttcctcccttcgctcgcaccatgaacgtgctggccaaagcgctctatgacaatgtggccgagtccccggatgagctctccttccgcaag

SEQ ID NO: 230127 - DNA, 75 bp, Homo sapiens
tttaattgctatggtgttgctgtcattgaagcccagaacctcatggccctcaccaatgtggacaccccattgaaa

SEQ ID NO: 230128 - DNA, 80 bp, Homo sapiens
aattgagccacagagtaattatattccaggaagcctgatgttactttggattttatgcttccaagaaaaacaagtttgtc

SEQ ID NO: 230129 - DNA, 46 bp, Homo sapiens
gtctgctctgtgtgccatggacgggactccatccccgtgtctacct

SEQ ID NO: 230130 - DNA, 90 bp, Homo sapiens
gagaagcaagaaggccctggacacagcaatatctctgggctttcacagccaaatgatttctcagtatcactaaaagcacaagggaaaaac

SEQ ID NO: 230131 - DNA, 50 bp, Homo sapiens
tttgatgagctgtgtttgaagacagttgaccacgttgttcctgagcctgg

SEQ ID NO: 230132 - DNA, 100 bp, Homo sapiens
gggaaatcgggctgaagcgactgagtccgcgatggaggtgaaggaaatacaggtgctgcagaatcttctttttctcaggaggtttctagagaacaacagc

SEQ ID NO: 230133 - DNA, 88 bp, Homo sapiens
atatagagacaacgactatgtccaattttcatgctcaggagtctccccaggacagtgctatcacccgggatattaaccgaacattccc

SEQ ID NO: 230134 - DNA, 100 bp, Homo sapiens
caagatggctgcccccatcaagatgaccggggtgtgccggggggaaaggggcagcatgatggtctgagatggtaagaatgattgatgttggctgatattg

SEQ ID NO: 230135 - DNA, 74 bp, Homo sapiens
attgacccttatttatccagaagattgatcatcatatgggtttgctcccaagaagatattgctgataaactagg

SEQ ID NO: 230136 - DNA, 82 bp, Homo sapiens
ctaaaactggtcaaagtgctgactctggtaccattaaggcaaaattgggaaaacaaagtgcatgatgaagtcttcagactgt

SEQ ID NO: 230137 - DNA, 96 bp, Homo sapiens
gaaaacaattcattctgaacaggcagtatttgatatttactgcctgctatggcatcctcaaggtcccagaaggcagctggctgtgtcgctcctgtg

SEQ ID NO: 230138 - DNA, 100 bp, Homo sapiens
ctggagcgaaccaacaagttcatcaaggagctcattaaggacggctctctgctcattggggcgttgaggattcctacaacagcagccagtacccctgatg

SEQ ID NO: 230139 - DNA, 100 bp, Homo sapiens
ctcacctgtgcaaccccagggacctggaaagacagacaggatggggaggaggttcttcagtgtatgcctggtcctgatgaagttgtagggccagaaggaa

SEQ ID NO: 230140 - DNA, 100 bp, Homo sapiens
cccgggctgggcaccaaataccaggctaccatggtctacaagactctcttcgctctttgcatcttaactgcagcttacaagagcagtgattcccaggctt

SEQ ID NO: 230141 - DNA, 100 bp, Homo sapiens
aggctacaacaggcctgcgccggcggcagagaggatatcttgggcgggggatgtgagcgctgagcccttggcagcaagcccttgtgattcgaaatggtga

SEQ ID NO: 230142 - DNA, 85 bp, Homo sapiens
cggggcaggtgtgccagccctccggaggcatcctgagctgcgtcaacaaaggtttctgcataaagaccaactcctcggaagggaa

SEQ ID NO: 230143 - DNA, 51 bp, Homo sapiens
caagttccaaggttacgtttcagccaccttcctaaagctggctggccccca

SEQ ID NO: 230144 - DNA, 76 bp, Homo sapiens
cagccatggaggccaactggaccgcgttcctgttccagatctgccgacaccccaggccatcgagccccaggccatc

SEQ ID NO: 230145 - DNA, 83 bp, Homo sapiens
gaagcggaacctggacacgggcggcaacaagagcgtcctgatggagcggctcaagaagtacttggaccatgagactgtttcag

SEQ ID NO: 230146 - DNA, 87 bp, Homo sapiens
ctggggaccctgagatcgtcaagtctcccagcgaccccaagcaataccgctcttccaccaaagccacctaagccaatgacttcagca

SEQ ID NO: 230147 - DNA, 100 bp, Homo sapiens
ggcttgagagttccggaataccaaaggcatctcccctcagatggaagtcacatgtgtgcccacgcccacaagcacagtgtcctccataggtaacacaaat

SEQ ID NO: 230148 - DNA, 100 bp, Homo sapiens
ttacaacagtgactttgaggaatcagacaccagagaagcctatgatgacaagcaggtggtcacagagatcatggcaagatgttttattccaactctgata

SEQ ID NO: 230149 - DNA, 119 bp, Homo sapiens
atgatgaaatcaccccggatttgtggcaagaagcatgctggattgtaatcagtgattcgcctttgccagtctcatctcgtgtctgctttgttaagttccatgatccagactcagcagtt

SEQ ID NO: 230150 - DNA, 90 bp, Homo sapiens
atcaacgtgtatccacacaagcagagcagcccgacggccatggaggctgaagagacgatggaatgccttcaggagttccctgaacatcat

SEQ ID NO: 230151 - DNA, 100 bp, Homo sapiens
gaagccgaccaggacgggtactaccagaccacactccctgccattgtcttccagactcagatgccactgcatcatcagataacagcgagacggaggggac

SEQ ID NO: 230152 - DNA, 99 bp, Homo sapiens
tcaaggagcgccaagagctagagcagactcagaatgagctcaccagggagctgaaactcaagttttatgctgggggctcagagagaagtggacagcaga

SEQ ID NO: 230153 - DNA, 97 bp, Homo sapiens
tgcgatctggacgcggcgctgctgaccgacatcgaagatgcctgggaaccactcacctccttctgtgccatgaggccacctcagccctgacaccaac

SEQ ID NO: 230154 - DNA, 100 bp, Homo sapiens
accatgtttgacaagacgcggctgccgtacgtggccctcgatgtgctctgcgtgttgctgggttgtgcaccatctccaggtgcttatgatgttaaaactt

SEQ ID NO: 230155 - DNA, 96 bp, Homo sapiens
caagatttgctgggtatgaataatgactttcctccaagagcacattgcctggtaagatgggacttgagtgagaacgccatccaggccatccccagg

SEQ ID NO: 230156 - DNA, 75 bp, Homo sapiens
cgccgttttcgcctgcagctgctcaccggctcttgtcaggatggtgaagctgttcatcggaaacctgccccggga

SEQ ID NO: 230157 - DNA, 75 bp, Homo sapiens
ggagcttcgctcggaagggtctttgttccctgcagccctcccacggaaaaggggaagatagtgatgtactcagta

SEQ ID NO: 230158 - DNA, 50 bp, Homo sapiens
cccacatcaatgcactgccaatgaccagcatctcagacatgtcgaaaaag

SEQ ID NO: 230159 - DNA, 108 bp, Homo sapiens
aaaaattacgaccctgcaacaggaaaatgaggacctccatgtccgaagccgcaaccaggtggtcctgtcaagtggattctgctgcgaaccggagaccatggccaaacc

SEQ ID NO: 230160 - DNA, 82 bp, Homo sapiens
tagatgattacaaagaaggcgaccttcgcattatgcctgattccagtcttgggcgtctttggtactggcttttttaggggtc

SEQ ID NO: 230161 - DNA, 100 bp, Homo sapiens
agagactgaaatcactgcaccttaaaaacaaaagattgagctgcactgtattcctgacacttcacggccatggtatggaagaacaccaagaagatgggcg

SEQ ID NO: 230162 - DNA, 123 bp, Homo sapiens
gagctgctgcttccttcggccttgtccgagcaaacagaggcgctcatccacagagccacatctgttaggctggttggaaggaaaatcatgcaacattcatgagcgaactaaaaaatcttcagg

SEQ ID NO: 230163 - DNA, 96 bp, Homo sapiens
tctggaagtgcaggatgacaatgcttctgtgcttgacgtctatttacctgtggacatctctacagcaatgagtgaacgggcacttgctcagaaaag

SEQ ID NO: 230164 - DNA, 87 bp, Homo sapiens
cagagctctgatagttgttccttgtgcagaagctggagctgtgaagttaaaccgacaacagactgatatggctgttaattgggctgg

SEQ ID NO: 230165 - DNA, 74 bp, Homo sapiens
gagaaaaggcctaagaattttggcattggagttattcctgatgaagctaaagctttgtctctgttggcaccagc

SEQ ID NO: 230166 - DNA, 105 bp, Homo sapiens
cagacgctggcgggcgcagtttctcacgacgggccgagcctgccactgtgtggacactgccagcggctgcagccgacttggaatgacctgggagacaaatacaac

SEQ ID NO: 230167 - DNA, 100 bp, Homo sapiens
gttaccggaacggcggcgacaagggtgttcccgaactagagtgggctgatgggaaccaccctgtagaggtccatctgcgttcagacccagacgatgccag

SEQ ID NO: 230168 - DNA, 100 bp, Homo sapiens
tagatacatggagcccatcagaatggcagatggcttatgaaccacaggacaatctctatgggaagcagaaggcaaggaccccggtcattttaggtagaaa

SEQ ID NO: 230169 - DNA, 75 bp, Homo sapiens
gagtttacgaagctggtaaaagaacttgaaggtcgctttggtcatcttggcttagccatcaacttgatcacatat

SEQ ID NO: 230170 - DNA, 75 bp, Homo sapiens
gaaaatacatggagcagaccagcagttatttgcagctatcatgtgaggtaaatcagaagactgaagcacggcata

SEQ ID NO: 230171 - DNA, 82 bp, Homo sapiens
gaaattcgacttcagtaatttgagtagtaggctcctacccagagattctacccagtgaaactcccacagcaacgcaggtaga

SEQ ID NO: 230172 - DNA, 101 bp, Homo sapiens
ggtccattcctgatggctctgatctttaatctcatgaagtacgacagctacagccgcttcttaaagtctgacttgtttttaaaacacaagcgaaccgagga

SEQ ID NO: 230173 - DNA, 100 bp, Homo sapiens
gtaccgaaagttattggaacgacttaaagaaagtggtcatggaaactctgtctgtcctgtaacttcaaattatcacagggtaaaggagctggaagtgcga

SEQ ID NO: 230174 - DNA, 75 bp, Homo sapiens
tttagttttccttcaagaaaaagaccagaagtacatctttgcatcattggtaatgagtatggtgtcaggatttac

SEQ ID NO: 230175 - DNA, 74 bp, Homo sapiens
atcactggcctgaggtcacatgactagcacatggcaagaaaagtccaacctgatcgtggtccagagaggtcaca

SEQ ID NO: 230176 - DNA, 100 bp, Homo sapiens
tgaaaaggctttgagaaattttgagtcctcgagtgaatgggcggatctcatatcttcacttggcaaactcaacaagacctgatggccaaaagaaaggaag

SEQ ID NO: 230177 - DNA, 101 bp, Homo sapiens
cctagctccagccgcaatgccattaccagttcctacagctccactcgaggcatctcacaggagctcctgcccaggggactggacatcaagcaggaggagct

SEQ ID NO: 230178 - DNA, 98 bp, Homo sapiens
tgctggaaaatcttatacaatgatgggtaaacaagaagaaagccaggctggcatcattccacaggtgcgcgtctacagcccgtaccaagactactacg

SEQ ID NO: 230179 - DNA, 80 bp, Homo sapiens
aaggtaccaaggattggagcacagaggctcagaagcaagtccagaactgtaagagtaaatgggtccagtaattggaatga

SEQ ID NO: 230180 - DNA, 75 bp, Homo sapiens
gctgccagggtccctgaagagggaagacacgcggaaacagattctataccagactgttacaggattgaagaaaga

SEQ ID NO: 230181 - DNA, 75 bp, Homo sapiens
cggcgcggcagcggagggacggcagtctcgcgcgggatcgcttacacctgagacgaactacagaacagcacgtac

SEQ ID NO: 230182 - DNA, 74 bp, Homo sapiens
cttcgactacttcaaccaggaggttttccgagacaacaacggcaccgcgatgccatggacaatattaccaggca

SEQ ID NO: 230183 - DNA, 83 bp, Homo sapiens
ccggtgtgtggcgcgcccagagccccgcgtttcagccctagggaagagggtcaccatgaagttcaatcccttcgttacctcgg

SEQ ID NO: 230184 - DNA, 100 bp, Homo sapiens
cttcgaaccatggaccaggccctcaagtccctgatggcctcagaggaggagcaccttccaaaaagggaaagaagcggaaggcacaaagggaagaggaaca

SEQ ID NO: 230185 - DNA, 96 bp, Homo sapiens
ctcaggtgctttacgtgcattcgtgaagaagcccatcagtatttcttgaataccaggcttccagttgtgcagctctggaaatgccaatacattctg

SEQ ID NO: 230186 - DNA, 74 bp, Homo sapiens
cggcccacagtgggggtgtgcaaacccgagagaactgggtataaatgaccaaggattgtacagagttgtggggg

SEQ ID NO: 230187 - DNA, 75 bp, Homo sapiens
cactctcaggagaccattgcatcattggccgcacactggtgggctaccataaagctttggtcaaactaaaactga

SEQ ID NO: 230188 - DNA, 100 bp, Homo sapiens
cccttctttgtcttttgcagatgatcgccgggtgtcgatccttttccctccagtcaggccaactgagctgcatttccttcccacctaaggaagagaagta

SEQ ID NO: 230189 - DNA, 87 bp, Homo sapiens
gttttcactcatgtacttgtacctgtctggattattcattattacatgaagtatcatgtttctgactcagaattcatgattgaagaa

SEQ ID NO: 230190 - DNA, 101 bp, Homo sapiens
acagatttccttgcacttatgccaatgaagattgatgtacagctatatattttgtcctttctttcacctcatgatctgtgtcagttgggaagtacaaatca

SEQ ID NO: 230191 - DNA, 50 bp, Homo sapiens
actcagtctctaaaaagctaaggtaggtgagctcgtgaaacaatatgaag

SEQ ID NO: 230192 - DNA, 100 bp, Homo sapiens
taattctccattgagaagagagaagaacattctcgaatacctagaatgggtgaacagagtatctgtcaggcaagagctgctgtgatggtttatgatgatg

SEQ ID NO: 230193 - DNA, 100 bp, Homo sapiens
gatgcttgtatggtctccatatcacagtatcccagatgccaaatatcaaagtggtcaaagcgttccatagttccctccacgaaagcattcagaaacccta

SEQ ID NO: 230194 - DNA, 50 bp, Homo sapiens
gccgctttctcggtcggcaccgccatgagcagtcattatggcgaaccttg

SEQ ID NO: 230195 - DNA, 82 bp, Homo sapiens
ggtgcttggcaaaatcgagcgggccattgggcagctggtggaatttttgaagaaaatggaatctcgaggccccctttcgtgc

SEQ ID NO: 230196 - DNA, 99 bp, Homo sapiens
cgcgaggggaacggaggccagagctgcgtttttggctttcacccccaaccagtgaccaaagacttgaccactcaaagtccagctccccagaacactgct

SEQ ID NO: 230197 - DNA, 75 bp, Homo sapiens
ggcaggctgctaccgcccctccgcttccagacattctcagctgtcagctgccactgcagagccccgccatggaag

SEQ ID NO: 230198 - DNA, 73 bp, Homo sapiens
ggacaattcaccatagttttctttaagttcaaagaggaaatctcccggaggtttaaggctcagcaggatcagc

SEQ ID NO: 230199 - DNA, 83 bp, Homo sapiens
cgaggaggcagccaagctcgtggcctgcctctgcgtgcctggtaggtgagtgctgtcctcggctcactttcctcaagctctcc

SEQ ID NO: 230200 - DNA, 98 bp, Homo sapiens
aagatcatcgagcatttcaaacggttgattcttcaccacactgaaaccattaggaaaaatccttgtggttaacagcagaggcttcagagtgtaacctg

SEQ ID NO: 230201 - DNA, 100 bp, Homo sapiens
cgcctgtccggacccgggcccctctccgctttcggccggcctcgggcaccgggcttctggaggaccagtcctgcctctgttgtagaagacatgtggtgta

SEQ ID NO: 230202 - DNA, 100 bp, Homo sapiens
tgggcctctgctgcgtcctgctgaccttcggtcagcccaaggccaaccccactgtcactctgttcccgccctcctctgaggagctccaagccaacaaggc

SEQ ID NO: 230203 - DNA, 98 bp, Homo sapiens
agaggttcctcatggcagcaaacaggagctgcaggacctcaaggactactccaaaggattcggcgggaagtatggggtgcagaaggatcggatggata

SEQ ID NO: 230204 - DNA, 100 bp, Homo sapiens
gtctctcggacaccattttctgccgctggacgcaaggtgatggaatatgagaataggattcgagcctactccacgccagacaaaatcttccgatattttg

SEQ ID NO: 230205 - DNA, 97 bp, Homo sapiens
acacaggtcaggaagcagaatattccttatatggtacagacagtgtttgtgtgttcctgttgtggctaactttaagaagcggtgtttctcagaattg

SEQ ID NO: 230206 - DNA, 83 bp, Homo sapiens
agatagctgaagaaggtgacgataatttggctagagcagctcctgaagcagcagcagcagcaccagtggcagcagcatcaaca

SEQ ID NO: 230207 - DNA, 82 bp, Homo sapiens
ccgcacccacgcggccctgctgaaagtggcgcaaatggtcagcccaaggccaaccccactgtcactctgttcccgccctcct

SEQ ID NO: 230208 - DNA, 75 bp, Homo sapiens
ctcaagtgtgccagtctccaaaaatttggagaaagagctttcaaagcatgagaaccatggagtctggcagtaccg

SEQ ID NO: 230209 - DNA, 114 bp, Homo sapiens
aacaagctgaagatgctgccaaaagcataaccaatggcagtgatgatggagctcagccctccacctccacagctgtgtgttctcatttcacccaaaacctttggacagtgcagg

SEQ ID NO: 230210 - DNA, 75 bp, Homo sapiens
aaagaaggttgggttcagaagaggggaagcttattgagactcacctgagaactattccaagtcatgcattttcta

SEQ ID NO: 230211 - DNA, 100 bp, Homo sapiens
ctctatcacatatgacatcagtcagttgtttgatttcatcgatgatctggcagacctcagctgcctggtgttgtgggctgcacactgcagaaagatacag

SEQ ID NO: 230212 - DNA, 83 bp, Homo sapiens
ggcgcagaaaccccgttgacaaggcactgctttttcatgacgggatccaggtccggcacgatcaagacccaggctacatgcat

SEQ ID NO: 230213 - DNA, 75 bp, Homo sapiens
aaactttcatttgatgaagagcatagacatgcaatgaatgaactagcggagcttggagattatgacccatataaa

SEQ ID NO: 230214 - DNA, 75 bp, Homo sapiens
tgctgctgctgctgctgctggtcccactctgtcctcaaaggcttcccttccctactggttacaaaaggcagcgag

SEQ ID NO: 230215 - DNA, 100 bp, Homo sapiens
gaattccagagcaagcagcaggcggatgaggagaacaatccccttgagacagaatatggcctttctgtctacaaggatcaccagaccatcaccatccagg

SEQ ID NO: 230216 - DNA, 83 bp, Homo sapiens
cttatttctctgctgagtgtccagatcctccaaagacagatctggtgattctcatctaaatgttcaagttagcaactttaaat

SEQ ID NO: 230217 - DNA, 90 bp, Homo sapiens
agaaagacaagtcaggcatggctctcacccagaaacgttcctggatccgaacactgccccctgacgacctagagagatcccggctcccag

SEQ ID NO: 230218 - DNA, 83 bp, Homo sapiens
aggtggtctatatccatccttccagtgccctcttcaacagacagccagaatggaactcatgtcgtgtcccattttgtaaactg

SEQ ID NO: 230219 - DNA, 82 bp, Homo sapiens
gcgaggccctcatgtaccacacgatgaaggatttgggggcagagcacttggcaggtcatgaaggggtccaacttctcgggtt

SEQ ID NO: 230220 - DNA, 83 bp, Homo sapiens
accgctctcgcttcgtcctacacttgcgcaaatgtctccggaattttggagagtaaaaggctgaaccttgttaaagagaaaac

SEQ ID NO: 230221 - DNA, 100 bp, Homo sapiens
atgtccatgttcaatcaccactgtccaaattcagaagctcagaacgctggactctccctttgcaggttgcacgttttcaaaaaatacctaatggtgaaaa

SEQ ID NO: 230222 - DNA, 76 bp, Homo sapiens
cagaatttacagtctccccatttgcagtgcaaaaactttccaggacttcttaattactcaaatgactggaaaagag

SEQ ID NO: 230223 - DNA, 100 bp, Homo sapiens
ttattttttctcatggatgttcttcttcgagtatttgtagaaggcttcttggacacttaatgattgttggcaagaaatgtgctgctgatctgggcctgaa

SEQ ID NO: 230224 - DNA, 100 bp, Homo sapiens
tctgcgatgcagggcggcggcctgtaatcccagcgaccgccagggttctaatagaagactgtatcccggtactgaagaggtacgccaaagaagggagaga

SEQ ID NO: 230225 - DNA, 83 bp, Homo sapiens
cccgctcgctgggagagaggtacctctccttttccctctccctttccctaagtttgctggcctagacctgaactcttcagata

SEQ ID NO: 230226 - DNA, 75 bp, Homo sapiens
cggcgccgcgcccatagccggacggggatctgagctggcagaaataggaaggttgttgattactcacagtttcag

SEQ ID NO: 230227 - DNA, 100 bp, Homo sapiens
agccccgaggtgtgcgaagccaccaatctgctcccagttttcgagaggagtctatgctatttttggattttatgacaagaagtctgtaaataccatcaca

SEQ ID NO: 230228 - DNA, 100 bp, Homo sapiens
accctgatgacatcatcaccaacatcgagatgattgacgacggctggtggcgcggggtgtgcaagggccgtggtcgtaacccacaaaatccttcggaagg

SEQ ID NO: 230229 - DNA, 108 bp, Homo sapiens
cccgtctgagaagtgaggagaccctctgcctggcaaccaccccgtctgagaaagtgtatccagaagctactgtcaggaggacactgtaagagaaccttggcacctctg

SEQ ID NO: 230230 - DNA, 46 bp, Homo sapiens
ggctccctggacaactccgagcaggaatcccttggcaccatgtcct

SEQ ID NO: 230231 - DNA, 90 bp, Homo sapiens
ccatgctgcaaaaactgttaaacatggcgatgcatcatctgcagacatcagaaaagcatatcgtaagctttcactaactttacatccaga

SEQ ID NO: 230232 - DNA, 50 bp, Homo sapiens
gcaggattctgtctattcagaaagacctgaaactgtataaaactttgagt

SEQ ID NO: 230233 - DNA, 100 bp, Homo sapiens
actaaggacgagctgatcaagtatatgactgaagaagagcaagctataccagagaatcagatagcaagccctccctcagaggccaagggagcagaagagc

SEQ ID NO: 230234 - DNA, 82 bp, Homo sapiens
cgggcgcggctggcggccacgcaggtccaggggcaagttcatcctactctcgagtctaatgatgatgctcttcagtatgttg

SEQ ID NO: 230235 - DNA, 100 bp, Homo sapiens
gccatagttcacaatgttgattctgatgacctcattagcatgggatccaacgacagctctctaggaaacaccagaattatcagtgaagaatatattaaat

SEQ ID NO: 230236 - DNA, 100 bp, Homo sapiens
cccctgcttgctgtccaactaagtgagcaatcgcaggcgctggctcagtcaataaaggatccgggcccaacacgcacattcacagtagttcccagggcag

SEQ ID NO: 230237 - DNA, 102 bp, Homo sapiens
atgaccttcagtctttactctgtgcaactcttcaggatcccgttgaagataccacattacacttaggctcctgttggccatgacagcttcttagacttgttt

SEQ ID NO: 230238 - DNA, 100 bp, Homo sapiens
gagaggcaccgctggaacactaatgagaaggtagaagatagcaccatgccgattcgtcgaactgtgaattctacccgggaaactcctcccaaaagcaagc

SEQ ID NO: 230239 - DNA, 75 bp, Homo sapiens
gcctgctgtggaggcagcggcggacgccgagctaagcagttcgttccaccagtcataaaccagatgaaatctatg

SEQ ID NO: 230240 - DNA, 100 bp, Homo sapiens
catcttcgacttgagcgaagttttatgcaaggaaccacgtgaatgttgagggggcgacacacaagcaggtggtggacctgattcgagcaggcgagaagga

SEQ ID NO: 230241 - DNA, 82 bp, Homo sapiens
accgtccgccagtcgtcccgagggagtgcatccgccccaacccttttccccctcgtctcctgtgagaattccccgtcggata

SEQ ID NO: 230242 - DNA, 74 bp, Homo sapiens
ctggcaaagcagctacacaaagagggtcatctcttctattgtacctgcagaaaccgatctgctcctccgtataa

SEQ ID NO: 230243 - DNA, 75 bp, Homo sapiens
tgtaattctaatctcacggatatcctctgttgggggagaaggactggagtccagagttgccaccagatgggatat

SEQ ID NO: 230244 - DNA, 100 bp, Homo sapiens
aggttcaggaaggattcctgagattccaggaggaagtactggcgaagtgctccatggtccagctgggagctccccgacctccaggagggcaagatccaag

SEQ ID NO: 230245 - DNA, 99 bp, Homo sapiens
cgggagccgggcgcggggagctgcgcgaagccggggcggagcacgcgagctatgaatcctaatgtacctggctagctggtggtgagtaggggctttggg

SEQ ID NO: 230246 - DNA, 88 bp, Homo sapiens
tgcagacaatctccactgttgcaagtgtgactgcacagaaaagttacaaaacaaatttgactttttgcgctcacagttgaatgatatt

SEQ ID NO: 230247 - DNA, 96 bp, Homo sapiens
ggcccagacccagacagaggaggagatgaccagatatgtccaggagctccaaaagcatcagaacaagttgaaatcatcgcagaaggataaagttcg

SEQ ID NO: 230248 - DNA, 75 bp, Homo sapiens
ggcagtggggccttcggcggcgactatggaaggagccggctacaggggttcagccgactcctacaccagccgccc

SEQ ID NO: 230249 - DNA, 50 bp, Homo sapiens
ccaaagtgctgggattgcaggtatccgctttatcctcatccagaaccggg

SEQ ID NO: 230250 - DNA, 58 bp, Homo sapiens
aaagacccttcccaggggaggacattcggatactcatttcaaagaacttccaactctt

SEQ ID NO: 230251 - DNA, 100 bp, Homo sapiens
gtaaaccgctgcaaactcatcaccaggaaagacttcgaaactttgttcaccgattgcaccaatgccagggcccctcagcagaaggcagaacagaaccgag

SEQ ID NO: 230252 - DNA, 80 bp, Homo sapiens
gtgtgagaaaaaaataaactcctatttgtttatggcaagtgagatgaacccagtacctcagatggaaatgcagaaatcac

SEQ ID NO: 230253 - DNA, 83 bp, Homo sapiens
ctcggccccgccagcagcactgtggaggccgtcctcggtgaaatgacaatggatgctctgttggctcgattgaaacttctgaa

SEQ ID NO: 230254 - DNA, 100 bp, Homo sapiens
aggacccgctttctaccattaagattctgaaggaagatttccattaggtaatttgtttaatcagtgcaagcgaaattaagggaaaatggatgtagaaaat

SEQ ID NO: 230255 - DNA, 90 bp, Homo sapiens
catgaggccaaaggcagttgtattgacggtcctaaaatctctacacttgccaaaaaacaacagtctttatgtccttacaccagatttgcc

SEQ ID NO: 230256 - DNA, 98 bp, Homo sapiens
gatcctggaggatgtgcggggtgcgccggcagaggatccagtgttcaccatcctggccccggaaggtgcccctgggcgctgggattgctctagcctgt

SEQ ID NO: 230257 - DNA, 90 bp, Homo sapiens
ccagcacgcgcctgcttcccgtctgcgcgagtccacgcagctccccagctgctcagatggaagataaaaagccctttatcctgtcttcca

SEQ ID NO: 230258 - DNA, 100 bp, Homo sapiens
catattgcggccctcagcggccgcgaccgagtcatggctgagacctacgacctgctgcggatgttctttgacgcactgtatgacgaggacgtggtgaagg

SEQ ID NO: 230259 - DNA, 95 bp, Homo sapiens
cggcgacggccacaggggcggcgacggcgcagtgcgaagcgaaacagggcactgtgttggcactcactgaaaataacttcgatgacaccattgca

SEQ ID NO: 230260 - DNA, 73 bp, Homo sapiens
gagaggcgagctcgcgatgagtggtctcggcaggctcttcgggaagggctgcccttccaaaggccaccatcct

SEQ ID NO: 230261 - DNA, 83 bp, Homo sapiens
gcagtacggaggcgcagtgggcaccgtgggccgactgaacatcacggtggtacaggaaggtgctcgggtcttcggggcactgg

SEQ ID NO: 230262 - DNA, 75 bp, Homo sapiens
atggggcccaagaaaaagcacctggactagttcttcgtaagtacatcttaaagctgtcaagatggttctagcaga

SEQ ID NO: 230263 - DNA, 75 bp, Homo sapiens
agatcacccacaacccatttggtcccggacagttctttgataggctgacccgcggctgattgagtccctctccca

SEQ ID NO: 230264 - DNA, 100 bp, Homo sapiens
aggacgtggagcgcacggacggcgccctgctagtcaacgccatgttcttcaagcccggttgttatgacaatggaaaacactatcagataaatcaacagtg

SEQ ID NO: 230265 - DNA, 75 bp, Homo sapiens
aagctatcactgtcagtgctgaaatatggctacacacacctttctgcaggagagctgcttcgtgatgaaaggaag

SEQ ID NO: 230266 - DNA, 100 bp, Homo sapiens
attttcttaaggctaaatcctggaataaaaagttctatgattatgaagcaaacatgccagacaggtgacaatctccaatagacttgtgtcttcaccttgc

SEQ ID NO: 230267 - DNA, 100 bp, Homo sapiens
tccacatcgccttttgccacctttccctttatttccggagtgctatgaagggaaatcctccaaagatatcctgaaaagagtagctgcaaatgcattgatg

SEQ ID NO: 230268 - DNA, 83 bp, Homo sapiens
ccaggccgaccgcacgctcggctgctacgtggaaatcctcaagctgctacaatgcagatcttcgtgaagactctgactggtaa

SEQ ID NO: 230269 - DNA, 87 bp, Homo sapiens
agagcaggagccactgagatgaggaggcgtcgcgcgcgcctgtagctcgcgggcctcgcaggaattggattcaagtacgtggctctg

SEQ ID NO: 230270 - DNA, 88 bp, Homo sapiens
gacaaagctcccgttgggctaaagaatgttggcaatacttgttggtttagtgctgttattcagaacactgatatttgcatttaatggg

SEQ ID NO: 230271 - DNA, 83 bp, Homo sapiens
aagagaagacgctttacccgactctttgggccgttatctcacgtgtttcccattaaacactaccaggacaaaatcaggcctta

SEQ ID NO: 230272 - DNA, 99 bp, Homo sapiens
tggcagttgagccggaaacattaaacgcagacatgcagcaggtgctggaacagcagctggtagggtgccaggcactgattgtggggtacgcattccact

SEQ ID NO: 230273 - DNA, 73 bp, Homo sapiens
agcttcaagcttaggaccacccaccatgcctatccaggctacggggcgtggagtgctggacctgccaacaccc

SEQ ID NO: 230274 - DNA, 95 bp, Homo sapiens
agcggccaccgactactgtcagcagctgtgccagccacataaagaagatccctaatagtcatttctcaacaattatatagtcaactgatgtaaca

SEQ ID NO: 230275 - DNA, 98 bp, Homo sapiens
agcgttggagaatggaaatgagtgtcaacctaagaaaaagtctacgccactgaagtatgaagttggagatctcatctgggcaaaattcaagagacgcc

SEQ ID NO: 230276 - DNA, 74 bp, Homo sapiens
gccgaggcggtgctgcaagagaaggcactcaagtttatgatgatgtcagttcatacagactgtattgtgtcagt

SEQ ID NO: 230277 - DNA, 101 bp, Homo sapiens
agttccgctcctgcgggcttagcaggaaagggtgcctaaggtgatctgcaactctttcaccatctgtaatgcggagatgcaggaagttggtgttggcctat

SEQ ID NO: 230278 - DNA, 101 bp, Homo sapiens
tgcaacaacatgaaacagcatctcagacttctttcccagatgtttataatgagggcacacaggacttgcaattgtgaccaaatatattacaaagggctgga

SEQ ID NO: 230279 - DNA, 98 bp, Homo sapiens
gcggagctcccccaagagccggaaagggccgcgatgggcctcttggaacattggtgtgttcatctgcattcgatgtgctggaatccacaggaatctgg

SEQ ID NO: 230280 - DNA, 100 bp, Homo sapiens
ctgccgtcgccatgtttggctgcttggtggcggggaggctgattgcagcaattctccggaaacggaaattagactattatttacacaaactactccctga

SEQ ID NO: 230281 - DNA, 100 bp, Homo sapiens
taaatatacgctttgttggtggactactctcagcctactatctgtctggagaagagatctattccagaggggagcttcaccacttcattgacggctttaa

SEQ ID NO: 230282 - DNA, 95 bp, Homo sapiens
gcgtggctggaagacatggccactccagtcggtgttgagcacggcgagcagtctcaggcctttagtgatgatgatcctgataacttaagtgactc

SEQ ID NO: 230283 - DNA, 74 bp, Homo sapiens
cgaggagtctctgtccgggggcctggctaaggaaaccctattacctccaggcaacagcattattgagaaaagcc

SEQ ID NO: 230284 - DNA, 100 bp, Homo sapiens
aagtgaaaaatggggagaaggatatccagacagccctaagaaaggaataatgctgacagcatgtctgcacattccatgctctgtgaacgaatcgccatag

SEQ ID NO: 230285 - DNA, 75 bp, Homo sapiens
gccgtctgcaaagtgtccccggcaagaaggctgctctttggcgtaaattgcaatcgattagggatcgtttctcag

SEQ ID NO: 230286 - DNA, 74 bp, Homo sapiens
tggagatcaagcgcagcgatgaaacgcttcgttaagggactcaggcagtacgggaagaacttcttcagaattag

SEQ ID NO: 230287 - DNA, 90 bp, Homo sapiens
gcgggcgttttggaagataccggaagtagagtcacggagaggttggtcaaagaaaaagtgatgtatgaaaaagaggcaaaacaacaagaa

SEQ ID NO: 230288 - DNA, 75 bp, Homo sapiens
gaagttctaggcgtgcagagacatgcctcacccgaggatattaaaaaggcgaccatggccaacctggagcgcacc

SEQ ID NO: 230289 - DNA, 90 bp, Homo sapiens
ccgacggtcacccgaatcgcagggagtcgccgctggagaggggctcggcgcccggcggggactgcagccatctcttcctgtactctatac

SEQ ID NO: 230290 - DNA, 100 bp, Homo sapiens
caaagcctgcaaaatgttcctcaggcagctgcattcagcctcagcggaggacacgcctgtggtgcagttggcagccgagaccccaacagcagagagcaag

SEQ ID NO: 230291 - DNA, 90 bp, Homo sapiens
cgtagatacaaatttttggatgatgatggatccatttctcctattgaggagtcaacgtatgtgacgcattcccagactcttcagccaact

SEQ ID NO: 230292 - DNA, 75 bp, Homo sapiens
agaatgccacagaatcaggggaggcatgcttcagattctgaagactactttgaggtcaacattccaacagaccta

SEQ ID NO: 230293 - DNA, 73 bp, Homo sapiens
tagaaataagaagaagcaactgtacaaaccatgacactttcttcatgagcaacaaaccccaaagatacaaaga

SEQ ID NO: 230294 - DNA, 100 bp, Homo sapiens
ttcgcctcgcctcgggacccgcggtccccgctcttgctggtctgctaccgctgccacggccccccctgctgccccggctggggagggtggtccccctgca

SEQ ID NO: 230295 - DNA, 100 bp, Homo sapiens
cgagcgccgggagagcagcgcagaagccgagccgcgaggagcgcactccgtggccccgatggagcggtacaaagacccactatgaaaatggagaatatat

SEQ ID NO: 230296 - DNA, 100 bp, Homo sapiens
gacggtgccccatagatggccagctttcccccgagggtcaacgagaaagagatcgcaggttggcaacattgtacaagtcacccagccagaaggaatgcac

SEQ ID NO: 230297 - DNA, 90 bp, Homo sapiens
gaaggagcagatcaagaccctcaacaacaagtttgcctccttcatagacaaggccacggatcctggagatggacaaggaagagaaccggc

SEQ ID NO: 230298 - DNA, 100 bp, Homo sapiens
tacccgacctcagatgctcccttctgctcctggccttagaaaatttacgtgtatacctgtgtgagaaaatcatagctgagagacattttgatcatctacg

SEQ ID NO: 230299 - DNA, 90 bp, Homo sapiens
acacaacaagccggaagtggaagtcaggcactgcattgatctcttcttagatttcattactgtcttcagaaaactcatgatgatcctggc

SEQ ID NO: 230300 - DNA, 75 bp, Homo sapiens
cttagctgctcacatatggatactttcacagttcagaattatatccagatcgagagacagaagattctgaaaggg

SEQ ID NO: 230301 - DNA, 100 bp, Homo sapiens
cgtggagatggacaggagacctggaatcattgttgcctctacggcagacacatgcaggccaacccagaaccaccgaagaagaataatgacaaatcgaaaa

SEQ ID NO: 230302 - DNA, 100 bp, Homo sapiens
tacaagtctgccaaccgagagagccggcggcagcagagacctccggggggcaacaagccccaacagcatggtgaccaccagccaggcagtgccaaacaca

SEQ ID NO: 230303 - DNA, 90 bp, Homo sapiens
ccatgtcagccttcccagtagctgggaccacagctctggggcgctgctttccatggaccaacgttactccaccggcgctcccagggatca

SEQ ID NO: 230304 - DNA, 75 bp, Homo sapiens
ggtgtgctgaagataaccatctgtgactacaggaatatgtggaagctgtctcttttcaacacttcatcaaaacac

SEQ ID NO: 230305 - DNA, 75 bp, Homo sapiens
ggaggaccacgcctgcatccccatcaaggatggtgccatgacaatggtgtgaactacaagattggagagaagtgg

SEQ ID NO: 230306 - DNA, 101 bp, Homo sapiens
ttctccagcgccctggcctccctcaccttggacacctcgcttgggatggcaagtgcactggcaggaatggtggtcttctgccctgacttctggccgttctc

SEQ ID NO: 230307 - DNA, 99 bp, Homo sapiens
ttcggaaggagacatcgaagcagggcgaggcgcagagggcgttgcggactcatgccccagtcggcagtgcgggttttgggatttgagattgacgcggtg

SEQ ID NO: 230308 - DNA, 100 bp, Homo sapiens
catcagtgcccttgtggcgaatggggctcacgtcgagaagacataggccaaggagccagacttcctgtgttaactccttcctctgccactttttaccttg

SEQ ID NO: 230309 - DNA, 83 bp, Homo sapiens
cgcagggggacggggaccagcagctgtcgccgccgctctcagaactgtcagaccttcagcagcctcagctgcctgagcgcagg

SEQ ID NO: 230310 - DNA, 82 bp, Homo sapiens
agctgggtcagtccgccgctcaccccgcggccgcaccttcccgccttctcagtccacaggtcctggctaccctgggaagaga

SEQ ID NO: 230311 - DNA, 100 bp, Homo sapiens
gttggcccagctccttggggtttccggctgcagggcggtaaggatttcaacatgcctctgacaatctctagttctacatcggtaaactctgcaaaactcc

SEQ ID NO: 230312 - DNA, 85 bp, Homo sapiens
cgaggaccctgccaagttcaagatgaagtactggggcgtagcctcctttctccagaaaggaaggatcactgagattctgatgaac

SEQ ID NO: 230313 - DNA, 90 bp, Homo sapiens
gaaaccagtaacagattgtgttatttcagaatttatgcgtatgattggcaatgacaaacaaggacagatgatcgtgttccatttgataga

SEQ ID NO: 230314 - DNA, 82 bp, Homo sapiens
gcggatctcaccgccgctcaggacagacagtctagcagtgcttccttggagaccctgttagcacttcttcaggcagaagggg

SEQ ID NO: 230315 - DNA, 83 bp, Homo sapiens
caagaaagttcctaaaggtgttcccctgcagtttgacataaacagtgtcggaaaacagcacccagtcagcttgaagagtttca

SEQ ID NO: 230316 - DNA, 50 bp, Homo sapiens
gctccgcgggcggcccacggcgagcgaagcggtactgcaaggaccccagc

SEQ ID NO: 230317 - DNA, 82 bp, Homo sapiens
gccagcatggaccccgccgtcgtgcaccctgagctcaatggggctgcctatagtgtcaacagcatctccaccctggagcctg

SEQ ID NO: 230318 - DNA, 90 bp, Homo sapiens
cgcgtctggtggcggcggcgtgatgttctcggcaggagcggagagtttgctccaccaggccagattgtcactgctgttccaagggcacac

SEQ ID NO: 230319 - DNA, 50 bp, Homo sapiens
gttcagctgcttcaagatgaagatttctttctccaggaagaaaaatggca

SEQ ID NO: 230320 - DNA, 74 bp, Homo sapiens
gaaccaggggccaaccagataacattcaggactcagatcctgcagaaagtgctccagggctgccgagaggacat

SEQ ID NO: 230321 - DNA, 50 bp, Homo sapiens
cgggcccgggccccgagcgcccgaacaggccctgggcagtgacggggttc

SEQ ID NO: 230322 - DNA, 82 bp, Homo sapiens
cgctggtctgggagcctgaggacatggagcaggagccagcacagcagcaattctgtggtgttcttggtcacacatttatgga

SEQ ID NO: 230323 - DNA, 90 bp, Homo sapiens
cttggctgtacagctcgatctaggttctgcggcacgggatggcggaggcgcctcctgtctcagaagtccaaggcttgcgagaaggtcatt

SEQ ID NO: 230324 - DNA, 100 bp, Homo sapiens
cgcgactggctgctgcggcgcgagacctaatctgggagcctgcaagtgacaacagcctttgcggtccttagacagcttggcctggaggagaacacatgaa

SEQ ID NO: 230325 - DNA, 90 bp, Homo sapiens
gaaagaagtctcatcttcctttgaccacgttatcaaggagcagggagagcaacaagccccggccctcagagctcagccggatgagcgcag

SEQ ID NO: 230326 - DNA, 50 bp, Homo sapiens
aggacgcaaagttctccggcgagcattgcagtgtcgagatggctatgaac

SEQ ID NO: 230327 - DNA, 100 bp, Homo sapiens
cctacgtcacatgcccactgacagaggggtgggagaccaggtttttcgttggaatatacgttgcacatttatggcgattctgagtgtgagggcagacttc

SEQ ID NO: 230328 - DNA, 95 bp, Homo sapiens
cttttctcagatgttggatatttgcttggaaaaacgtgtgggtacgaccttgacagatgcattccagaagcccgttccattggaacagcaccctg

SEQ ID NO: 230329 - DNA, 100 bp, Homo sapiens
aaaatgcacaaaagcatattttcacatgggaaaagccaacctggccctgaagaactacagtgtggcaagaaacctattggaattcgagacttaattaatg

SEQ ID NO: 230330 - DNA, 74 bp, Homo sapiens
ttgggggtcgagcacataacggggttcgggtgtctcgtgtgtgaacatcacagaccatcatcaaagaggggatg

SEQ ID NO: 230331 - DNA, 75 bp, Homo sapiens
cgggaccccagcgcgggcggcggcggctgggcgggagccccagaggagatggcgtctaccagaaggggatggact

SEQ ID NO: 230332 - DNA, 51 bp, Homo sapiens
atcccaggaatacagctttgcattaggaagagagagaaaatccttcaaaac

SEQ ID NO: 230333 - DNA, 101 bp, Homo sapiens
ctgaaacagtacatggatgactgtggaaacatcatgagtatgcacaacgtaaagtctactgttagcagacttggccgatggattgactttgacaatgacta

SEQ ID NO: 230334 - DNA, 75 bp, Homo sapiens
gcgctgcccacgattcgcttctgaggcccttctgcgatgttttacctggctgcggctgtgtcagatttctatgtt

SEQ ID NO: 230335 - DNA, 100 bp, Homo sapiens
caaggatccggggatcaaagagcagtgggggttgctgacccagaggagagttctccaaacatgatcgtttactgcaaaaaatgagccgtcagactgctac

SEQ ID NO: 230336 - DNA, 97 bp, Homo sapiens
agatctttctccgtggattcctctgctaagaccgctggaccctgctgccgaagctgattccctccggtgcaggccgggagtggctggagcggcgccg

SEQ ID NO: 230337 - DNA, 88 bp, Homo sapiens
ccattcgcatccaaaatggaatccgagacagaaagaggaccttagaggctgaggggatctggcggtggagcgctaggatcagacgccc

SEQ ID NO: 230338 - DNA, 74 bp, Homo sapiens
gattattaaactgatcactgtctgataagaccttctcttccaccttctaaacaagctaacaagaatctgatttt

SEQ ID NO: 230339 - DNA, 100 bp, Homo sapiens
gtacgccgaggaggttgggatcttcttcactgcctctggcatggatgagggtaatctacagttgctgcagaactgcctggcagtgttaaatggagacaca

SEQ ID NO: 230340 - DNA, 90 bp, Homo sapiens
ggcggctgctggtagttccatgctgtctgttcagacttcagcttggtatacagaaggtggtcatggcactaggagactacatgggcgcct

SEQ ID NO: 230341 - DNA, 82 bp, Homo sapiens
tactctctctttctggcctggaggctatccagcgtctgcgcaggcatggcactaagtgtcccatggcacatttggccctcat

SEQ ID NO: 230342 - DNA, 82 bp, Homo sapiens
gatgaagccaccagcgctttggatgccgagagcgagtatctgaggccattgcccaagtctggccaggctgatgggaccagcg

SEQ ID NO: 230343 - DNA, 75 bp, Homo sapiens
ctctcgctgtcctggtacgcggcactcagcggccagaaagggcgaccattgacgaggtggagacggacgtggtgg

SEQ ID NO: 230344 - DNA, 88 bp, Homo sapiens
tttttatattaagaaaattaatccattgaaggaaaaaagcataatattacccaagtccttgagaagtcattcagaattcaaaagaagt

SEQ ID NO: 230345 - DNA, 98 bp, Homo sapiens
ctcctcgccagcagccgtccggagccagccaacgagcggcgttggagaccagggccagccctggccacaccccaggctgtgtcaccttcgtcctgaat

SEQ ID NO: 230346 - DNA, 96 bp, Homo sapiens
ctgacatggaggatgatttcatgtgcgatgatgaggaggactacgacctgccaacaaatggaattttcttgagcatgtttctaatcgttttgccat

SEQ ID NO: 230347 - DNA, 87 bp, Homo sapiens
catggccagcgacggggccaggaagcaattctggaagcgcagcaacagcaagctcccgggcagacatggatgggtgcaaaaaagagc

SEQ ID NO: 230348 - DNA, 50 bp, Homo sapiens
ccgtggtccttctccatattcgaggtgaccaaaagccagccccactgtga

SEQ ID NO: 230349 - DNA, 50 bp, Homo sapiens
ccatccctgcagcatgaacaaggaacttggcattagaattcctcgaccac

SEQ ID NO: 230350 - DNA, 82 bp, Homo sapiens
acttacaaggacgaccaggccaagcttaagaagacgaaggggaggaccaggctggcgatgaagatgaagatgatgaatggga

SEQ ID NO: 230351 - DNA, 100 bp, Homo sapiens
gccagcctttatcttcgatggacggcgtgtcctggatgggctccacaatgaactacaaaccattggcttccaggacctttcttggccaggactcgcagtg

SEQ ID NO: 230352 - DNA, 100 bp, Homo sapiens
cgcggccaacatgagcttcttgttgtagcccagccatgacccataggaatctgacttcctccagtctgaatgacatttctgataaaccggagaaggacca

SEQ ID NO: 230353 - DNA, 50 bp, Homo sapiens
ttgcatgtctctgttttcagcagtcggtgtgctgatgtatcgggactacc

SEQ ID NO: 230354 - DNA, 83 bp, Homo sapiens
gtgccatttttccagccagcgtgtgcttacttcatgtctctgggtcacattttgaaatgtccagaaggaagaccgcactccta

SEQ ID NO: 230355 - DNA, 90 bp, Homo sapiens
gttctggtgccgcgcagctttccccgggagtgcatccgccccaacccttttccccctcgtctcctgtgagaattccccgtcggatacgag

SEQ ID NO: 230356 - DNA, 100 bp, Homo sapiens
caggggctgttcctggtggggacagatttcctgggccagcaggaccaggagggccacccccaccttttccaggaggagatgttaaagtaacccatcttgc

SEQ ID NO: 230357 - DNA, 83 bp, Homo sapiens
gacaccgattatggattggcaacctggaccccaaaattaccgaatagtgtttttagaagaagcatctcaacaggaaaaactgg

SEQ ID NO: 230358 - DNA, 98 bp, Homo sapiens
accgccgccgccgccgcctctccttagtcgccgccatgacgaccgcgtccacctcgcaggctgctggtggtctacccttggacccagaggttctttga

SEQ ID NO: 230359 - DNA, 75 bp, Homo sapiens
gcgcgagaaggagcgcgagcttgaacgcagcgtggtgctggaggcgctgctgccgctgaagggcctagaggagcg

SEQ ID NO: 230360 - DNA, 90 bp, Homo sapiens
agcccactgtggtcactgttgagatctccgtcaacagccttggtcctctctctatcctagacatgaaacctctgcgccatgagagccaag

SEQ ID NO: 230361 - DNA, 75 bp, Homo sapiens
aagctgatgaagttgtttgggtacgtgcaagagttcatacaagcagagctaaagttggtcctgagaaaagggtgc

SEQ ID NO: 230362 - DNA, 98 bp, Homo sapiens
ccacacccagcctcagccacagggacgcctccaaggaactgttcagaaatgaaggggatactcagggcagagttctgaatctcaaaacactctactct

SEQ ID NO: 230363 - DNA, 75 bp, Homo sapiens
cacctacagaaacaaaatgtcaacaaattgatggagagtcccacgaactggctgggtatacagaaatgtccagag

SEQ ID NO: 230364 - DNA, 75 bp, Homo sapiens
cgcgagccccgagccccgagcccggcgcctggctgagtaggcgcaccctacgacgcgcacaccaccggcatgacc

SEQ ID NO: 230365 - DNA, 75 bp, Homo sapiens
tagattcatctcgacactgaaattacagccctggtacctgacagtgtaaagaaggagctcctacaaagaataaga

SEQ ID NO: 230366 - DNA, 75 bp, Homo sapiens
tgctcgcgctactctctctttctggcctggaggctatccagcatgacagtcatgtccctttccagggacctcaag

SEQ ID NO: 230367 - DNA, 101 bp, Homo sapiens
gcagctcagggccggctggtgcgcgaccccggaaagcgggggtggagaggcgagcggagcccgcggggccaggaacctcctggacaaagacatgttttcca

SEQ ID NO: 230368 - DNA, 74 bp, Homo sapiens
ttcaatactgttggctcaaaagaaggtattcctggagtggagagccactctttttgacctgccctacatcagaa

SEQ ID NO: 230369 - DNA, 98 bp, Homo sapiens
gaggatctttgctcttccatccgcctttgatcgtcttcctcttcagccatccagctttcagattgcatcttctctgtctaaagagctctgtgccctgg

SEQ ID NO: 230370 - DNA, 83 bp, Homo sapiens
cttcgccgtgctggccgcggcccgcctcagcatctggtacagccgaacaatgcagatcttcgtgaagactctgactggtaaga

SEQ ID NO: 230371 - DNA, 100 bp, Homo sapiens
gctgctgctgctgctgctgctgcagcagcagcagtgagagtgaggaggaagacgtgggagagtaccgtccccaccaccgagtgaccgagggcaccatcag

SEQ ID NO: 230372 - DNA, 100 bp, Homo sapiens
ccttatgagggtggcatcagcctgaattgaacatcctatatctgaacatctgcataaattccagtatgttttgtgaaagcactttatgattatgagggcc

SEQ ID NO: 230373 - DNA, 101 bp, Homo sapiens
ccagcaggcgctggctcctgctcagatgctagctaaacagttggaagctcttggtttagctgaaaagcctcagttggtgactcgctttcaagaagtttttc

SEQ ID NO: 230374 - DNA, 116 bp, Homo sapiens
cagatcttcacagcacagttcctgggaaggtggagccaccagcctctccttggtgaatctggattgggaaagtcgacattaatcaactcattattcctcacagatttgtattctcc

SEQ ID NO: 230375 - DNA, 99 bp, Homo sapiens
gacaaaggtgatcctggtatttcaagcattggtcttccaggtcttcctggtccaaagctggaaagtgaaatttcaaccacagcagatgactgcagttca

SEQ ID NO: 230376 - DNA, 90 bp, Homo sapiens
tgaggatgacgatgacgatgaggaagatgaagtgatgagagcctatttacaacagctaaggcaagagactggactgagactttgtgagaa

SEQ ID NO: 230377 - DNA, 83 bp, Homo sapiens
gtccgagtcaacaaccgcttcgagctggtgctcttacagcctgttccaagtgtggcttaatccgtctccaccaccagatcttt

SEQ ID NO: 230378 - DNA, 100 bp, Homo sapiens
tttattgaccagattgatggaatagttcattttgaaagttcgagaacttgtcttggacaattgcaaatcaaatgatggaaaaattgagggcttaacagct

SEQ ID NO: 230379 - DNA, 74 bp, Homo sapiens
tatgctgtggaaaagaaagcatactgcgagccctgctacattaaaaggtatagtttggcagtggggcctccaaa

SEQ ID NO: 230380 - DNA, 82 bp, Homo sapiens
gaagcgagactcatacgcaacctcaatgcggagctggagtttgttcagatcatcatcatcgtggtggtgatgatggtgatgg

SEQ ID NO: 230381 - DNA, 90 bp, Homo sapiens
ccccaggcatgcagcaccctgccagagtcctggtggaggacgatgagatcatgcagggattcatcagggctttcaggcccctgcccaggc

SEQ ID NO: 230382 - DNA, 83 bp, Homo sapiens
cactgggtgagttcatgcaaagcgctgagaacaggaccccccgcccccatgaagaaactgaggttcagagaggttaagagact

SEQ ID NO: 230383 - DNA, 98 bp, Homo sapiens
actacaccctcatgagggtctgcaagcagatgataaaggctgaccggttccctgatgtgttacctgcttctgctactgatccaaactgcagaacttct

SEQ ID NO: 230384 - DNA, 82 bp, Homo sapiens
ctgagcgggcggtcattcgcatcgcagataacgaaggaggcccaacttcattcaataaggagcctgacggatttatcccaga

SEQ ID NO: 230385 - DNA, 75 bp, Homo sapiens
taacagccaagatgctgcggaatctgctggcagaagtcaattcatctggaaagactatctctgagtcagacttaa

SEQ ID NO: 230386 - DNA, 73 bp, Homo sapiens
ggaatgcagtcagtctgttgatgaaactatgctcccaggccagtgccagtacttgggcttgccagtggcggat

SEQ ID NO: 230387 - DNA, 75 bp, Homo sapiens
aaaaaatagggtctggcttcttttctgaagtgttcaagggcacacgtgtttcacgttgacaggtttgcttgggac

SEQ ID NO: 230388 - DNA, 50 bp, Homo sapiens
cctaatcaagctgtgccaaccggctgatcccttatccaacatggttctaa

SEQ ID NO: 230389 - DNA, 74 bp, Homo sapiens
gggcttaagatgtcctgcctgaaaggtgtcttcaaaaacaaacatatttaaaagattttacttctcatctccag

SEQ ID NO: 230390 - DNA, 88 bp, Homo sapiens
gtcaatgtgtggaatattggggggctcggctgcagacttggccaaatggacgggactattaaggtcccttcaccgatgttgtcaccac

SEQ ID NO: 230391 - DNA, 75 bp, Homo sapiens
ggaggaggaggattcagggaataggagctggggagcccttctgcgccacagctgctgaaatgggttgcggattga

SEQ ID NO: 230392 - DNA, 50 bp, Homo sapiens
cgggcatgcgaagccgtccctccccggcgtgagtgcatctccatccacgt

SEQ ID NO: 230393 - DNA, 119 bp, Homo sapiens
ttaatgggacctgtgaagcaactgaagaaaatgtttgaagcaacaagattgcttgcaacaattgttatgcttgctctaagtatgcagtcatctccaaatggccagtttgtagcgccaag

SEQ ID NO: 230394 - DNA, 75 bp, Homo sapiens
ggcatttcagtcactggtttgcagagtccagaacattagcagtgttgtggctgcattttccgaccttcttcacgt

SEQ ID NO: 230395 - DNA, 98 bp, Homo sapiens
tcccttcaaggatacatttgattggggaatgtatcctgtcaggtataatgtcagtgaatggcaagaaagttcttcatatggatcgaaacccttactac

SEQ ID NO: 230396 - DNA, 75 bp, Homo sapiens
ggttgcagaaaatcctcactctgagtacggtctcacagacaacgttgagttctggacatggcaagacatgtgcca

SEQ ID NO: 230397 - DNA, 83 bp, Homo sapiens
tcctcctccttggtcgccgcgtccttggctggcgttttgctggcctagacctgaactcttcagataatcagagtggaggaagt

SEQ ID NO: 230398 - DNA, 83 bp, Homo sapiens
gaaaaaatctcactgggcagaattagaaatctcggccccagcatgagaccagatgtaagctctcctccatccagctcctcaac

SEQ ID NO: 230399 - DNA, 76 bp, Homo sapiens
aagtacgagcgacaggagttcatctacccggagaagcaggagccctactcggcagaggtcctcaaagagggcagcg

SEQ ID NO: 230400 - DNA, 83 bp, Homo sapiens
gacgaagatggggagaaggaagcgagactcatacgcaacctcaatgggcgtctctggccgagcctctttttgtggaaaacgac

SEQ ID NO: 230401 - DNA, 100 bp, Homo sapiens
aaataacaccagaatcttccagatactttctccataaggcgaaaagatggatcctgtgcaaaaagcggttattaaccatacatttggagtatccattccc

SEQ ID NO: 230402 - DNA, 100 bp, Homo sapiens
aaaacggaagcgcagggagaaggaagaggtgtttgaaaaggtgttgacttcaaaatcaaaactgtagagctaagaggaaagaaaattagattacagatct

SEQ ID NO: 230403 - DNA, 100 bp, Homo sapiens
gtgctttcacaaagataatagaagccatgggattcacgggacctttgaaatacagtaaatgggacttaaccaccaccatgtcgagcaaaagaacaaagac

SEQ ID NO: 230404 - DNA, 75 bp, Homo sapiens
gccagcgattgctgatctgtgcatgcccttctgttacagtggatgatctgaagaaccttttcatagaagctggat

SEQ ID NO: 230405 - DNA, 95 bp, Homo sapiens
gggattacaggcacccgccaccatgcccgactaaatagggactttgaacatgtcggggatcgccctcagcagactcgcccaggagaggaaagcat

SEQ ID NO: 230406 - DNA, 100 bp, Homo sapiens
gtgccagataccattgatgaaggaaatgctaaagcgattccaagaacccagtgacttgattgtaaaaatttacagagcggaatcatatgctggtctccaa

SEQ ID NO: 230407 - DNA, 50 bp, Homo sapiens
tcaccattgccgcctacctctgctccagatgctgggtgcggagccccgtg

SEQ ID NO: 230408 - DNA, 82 bp, Homo sapiens
cgtggtctgaggtccgcggcagggtcccgcatggcggcgcacaggaagcacggagggtgtgaagacagagaatgaccacatc

SEQ ID NO: 230409 - DNA, 100 bp, Homo sapiens
ctcgagcgtcccaccggctggaaatgcttcgtttaccacttcgccgtatgaaatcatgcaccaggacatcgtcccgctctgtgctgccgacatccaggac

SEQ ID NO: 230410 - DNA, 75 bp, Homo sapiens
ccttactgaaaccctctacaaaggcattagtcctatcttgtaagtgacttttttgaacgaaccattctgtgcaac

SEQ ID NO: 230411 - DNA, 83 bp, Homo sapiens
aatttgctccagcacttcacggactgcaagcgaggcacttgctaactcttggtaagaagaggaggaggccaggcaggcaaaag

SEQ ID NO: 230412 - DNA, 101 bp, Homo sapiens
gtaaggcgccggccctgggccgccctcccgggaatcgggagccgccgctgcagttttccagataacagaaagtaacgtgaaggaattcaggtgactcagac

SEQ ID NO: 230413 - DNA, 90 bp, Homo sapiens
agcgcagcaccgattcctctcgggctcttgggcgctgctctgagacaatgcagatcttcgtgaagactctgactggtaagaccatcaccc

SEQ ID NO: 230414 - DNA, 75 bp, Homo sapiens
ccggcagtaactgtcctccacatattgagaataggagaaggcagagcccccccaggctatgaatgccctgatgcg

SEQ ID NO: 230415 - DNA, 87 bp, Homo sapiens
gtcacccttcctgcgattctacttagacaaggtctttactaggtgtatttgaagaagatgccacagctatttccaactatatgaacc

SEQ ID NO: 230416 - DNA, 58 bp, Homo sapiens
caccttcaatccgctctactggaatgtggtccttggtaaatcctgcaagccaatccca

SEQ ID NO: 230417 - DNA, 129 bp, Homo sapiens
aagatgatgtgagtgatgaggaaggacaggaactctttgacacagaaaatgttgttgtatgccaatatgataagacagctttattaaaccgcctggagcgaattttcgaagcatgttttccttccatac

SEQ ID NO: 230418 - DNA, 82 bp, Homo sapiens
cttgagagacattgattttgttgaagatgactcggacattttacatgttactccacaggatccgctgaacataggatgttgc

SEQ ID NO: 230419 - DNA, 75 bp, Homo sapiens
cggggtctttgaggccaggttccccctgcacaaggacactccgggggagaatgtggaacccagccacactgccac

SEQ ID NO: 230420 - DNA, 100 bp, Homo sapiens
gcctattctcctaacatgtatcctggagcgaatcctaccttccaaacagatgagaactggactgatgaccaactgcttggttttaaaccatgcaatgaaa

SEQ ID NO: 230421 - DNA, 75 bp, Homo sapiens
tctacctgagcgaggacgaggtgcgccggctgatcgatcgcttcttgacctgcacaactttctgatttgatgagt

SEQ ID NO: 230422 - DNA, 74 bp, Homo sapiens
tcaccttttagcccgggactctttcacaggctggatgaagattggggataaccctattggcaactgggatggaa

SEQ ID NO: 230423 - DNA, 75 bp, Homo sapiens
aggagtaggacttgtgcattcaaacatagcaactgagatcagtcgcatcgaatacattcattcaaagaacttcat

SEQ ID NO: 230424 - DNA, 90 bp, Homo sapiens
gaaagaagtatggcttatggactgcttgagttgaagaagacactgctggacaggatggttcacctgctgagtcgaggttatgtacttcct

SEQ ID NO: 230425 - DNA, 98 bp, Homo sapiens
aacaactgtcgtgactccagagaagccgatccccatttttattgaaagatgtattgagtacattgaagccacagtgctggatgcccaaagcctggcac

SEQ ID NO: 230426 - DNA, 98 bp, Homo sapiens
tttacccgcccgcctgctcggcgaccaggtgctggagaatctggtaaaagcaccattgtgaagcagatgaggatcctgcatgttaatgggtttaatgg

SEQ ID NO: 230427 - DNA, 100 bp, Homo sapiens
caggaagagaggccgtgcccctcaggacagtcattttgtttactcattcagccctgttgcaggtcccaataaactcttcataaggttgacagaagcaccc

SEQ ID NO: 230428 - DNA, 95 bp, Homo sapiens
actatacacatcgtgacagtcaccattaacggagatgatgccgaaaacgcaaggccgaagccaaagccagacctgttaccctccaaatcttctgt

SEQ ID NO: 230429 - DNA, 101 bp, Homo sapiens
aaagatccctggaatatgaagggacacagtacggtagtcaaacccccaggaatggaagttggatacactttgtgacttgtacgagacactgaccattacac

SEQ ID NO: 230430 - DNA, 90 bp, Homo sapiens
tagtgaagcaaaggctatgattatggaggattggacctgcaaactccagaacagaggaagttctactacatcaccctgctacgagacccc

SEQ ID NO: 230431 - DNA, 128 bp, Homo sapiens
gagaactcggcgccgccaaacagcccagctcgcgcttcagcgtcccggcgccgtcgcgccactcctccgatttggaatagttgatgctgatggatatttaagtttgtatcaaacaaactggaaatgtt

SEQ ID NO: 230432 - DNA, 100 bp, Homo sapiens
aggacgaggactacgtgccgtcgggtacaggtttgcagattccgccagcagcacagcaagctctacagatgagtggctctttggcatttggtgctgtggc

SEQ ID NO: 230433 - DNA, 75 bp, Homo sapiens
ctgcagcacatcagcgaccgcgagatgcccgaagctattcctgcaccaactgacctgaagttcactcaggtcaca

SEQ ID NO: 230434 - DNA, 118 bp, Homo sapiens
ggacaacagccctctgctgcaatccatccaccagctggatttcgtgcaagtgaaaggtttatcgacaagaaggaaaggttaagccgacttaagagcaagcaagaagaatttcagaaag

SEQ ID NO: 230435 - DNA, 75 bp, Homo sapiens
attctttttcgaatataaccagagaaaaaaaggatggagaaatatctaggacagtgagctggagattggatcaca

SEQ ID NO: 230436 - DNA, 80 bp, Homo sapiens
tactggaaactggatgcagcaaggaaataggatttaaccgctctctgcctcccaggtttttagaacttcagccataaaaa

SEQ ID NO: 230437 - DNA, 100 bp, Homo sapiens
ctcccgagtacctgagattagcccaggacagagcgggatgccaccagcttgtccaaagggaagttccaggagctcctggtgggcatcgttgtggagaatg

SEQ ID NO: 230438 - DNA, 88 bp, Homo sapiens
gcccgggcccacgcggaacgacggggcgagggccaattcctgtccccccagcagcatggcatcgtgtgctgaaccctctgagccctct

SEQ ID NO: 230439 - DNA, 82 bp, Homo sapiens
cttcaggacacgcaggccgcagcgagggcccgggccctggggatcccaggatgacgtagctttgccaaagacttagaagcta

SEQ ID NO: 230440 - DNA, 100 bp, Homo sapiens
cggagggagctgaccgaccgactccaggcggtggtctacatagcctgctccttcaccacggtctggttgatttatagcaagttcaaagctacttacgatg

SEQ ID NO: 230441 - DNA, 73 bp, Homo sapiens
tcttgtgccctagcaccccgagaaccgtcagtttgagccagatgaaatgggacgtcggtcatcagatactgaa

SEQ ID NO: 230442 - DNA, 50 bp, Homo sapiens
agagttctgagacctgctctggatgccggtggtggtgtgcacattgagcc

SEQ ID NO: 230443 - DNA, 98 bp, Homo sapiens
atattgagatggaaggatgactatgagtatgagctattatagaaaccatggttcatgtactggacagactggggagaagtgccaaagatagaacgtgc

SEQ ID NO: 230444 - DNA, 75 bp, Homo sapiens
tggccagcaagaaagtaattacagtgtttggagcaacagtttgtcgctgatggcatcttcaaagctgaactgaat

SEQ ID NO: 230445 - DNA, 90 bp, Homo sapiens
ggtacgtcgaaggccttgtgaacagatggagtctcccaggcgggaatgcaatggtgcgatctcgacttcactgcaatcttcacctcccgg

SEQ ID NO: 230446 - DNA, 100 bp, Homo sapiens
gttgtcatccgcggcgcggcggcggctctggggtttcagcgagagtcttctaatccgaggcgctgcgggacggcgtggatagaaataaatatcaaattca

SEQ ID NO: 230447 - DNA, 100 bp, Homo sapiens
aggatgtgcagttgcagccttttcagcagacgccctgagaacgggaggtcaagagttggagcagacggtcagttctgcaaaaagatggcacctttgcagc

SEQ ID NO: 230448 - DNA, 75 bp, Homo sapiens
taaacgcccccaatttcccagctgctaaaggaagaggaagacctgcctagagctggaacgttacctccagagcga

SEQ ID NO: 230449 - DNA, 75 bp, Homo sapiens
aatcatatgacatagcaatgaggtcagcagcaaggacaagatggagtaaaagtccagcaagctactatagctcct

SEQ ID NO: 230450 - DNA, 75 bp, Homo sapiens
tcatccccgccctgtgggagaagcacagtccacagtcccatgaagctgaggtcttgaagcagctggctgagaaac

SEQ ID NO: 230451 - DNA, 83 bp, Homo sapiens
gggaaggcgcgagtgaggaaaggaggtactgtaggtaagtaaggaggtctctgtaccatggctcgtacaaagcagactgcccg

SEQ ID NO: 230452 - DNA, 119 bp, Homo sapiens
cgggcccctgctgaaagaccggcatgccctattctgtgggcttccgcgaaacatatgtagagtgtgtcggtcagaaggaacacctgagaaaccgctttatcatccttgtgtatgtactg

SEQ ID NO: 230453 - DNA, 50 bp, Homo sapiens
cctcctgaggagctgggattacagtggaatgtatcctgctttcatcttgg

SEQ ID NO: 230454 - DNA, 90 bp, Homo sapiens
gccagcaggatgccgcttctgctccagggcatgcaccatgcaacttggagcgtgatgcccagaagtgtgtgaactggtctgtgaccacaa

SEQ ID NO: 230455 - DNA, 83 bp, Homo sapiens
ctactgaagagcttatcagagctctacttgggaaagtatttaccttgctgtggattgctgactggatggtccatcacttctgg

SEQ ID NO: 230456 - DNA, 89 bp, Homo sapiens
ctgaccctgatttcacagtccgagacgtcaaactcctagtggaaggaacccagccagccggcggaatgcaagcagcagtaggaagcgga

SEQ ID NO: 230457 - DNA, 75 bp, Homo sapiens
catcgactcagtcagtctcttggtttggtctctaaaagtaaaggggaagatttaaaaccatgggaaaagtcacca

SEQ ID NO: 230458 - DNA, 80 bp, Homo sapiens
ccacgtcgtacatggcttcctggacaccaaccctgccatccgggagcagacggtcaagggtcctgggcccagtctgccct

SEQ ID NO: 230459 - DNA, 75 bp, Homo sapiens
tggtctgtgaagccacacagtgtccagatacgaggattgactggggcgactttggggtagaggcagtgtctgagg

SEQ ID NO: 230460 - DNA, 90 bp, Homo sapiens
ctgaagcagctagagcgactattcatgatgttgctatcaaaagttgagaaattgtcagaagaaatcatggagataatgcaaaatttaagt

SEQ ID NO: 230461 - DNA, 83 bp, Homo sapiens
gtgcagaaagccatggatgacaagaggtttgacgaggccacccagctccgtggtggccctattcaggcaggagctgctcttct

SEQ ID NO: 230462 - DNA, 100 bp, Homo sapiens
ggctttcgacaccaaccccttcgcggacccagtggatgtaaaccccttccagccaggcccagacatgtccgtccttgtaagttaaaagcttccatgggag

SEQ ID NO: 230463 - DNA, 82 bp, Homo sapiens
gatgacttggtggtggagtgtagagatatagttggcaacctcactgagttagaatcagagcgacttcaggaagaaatcacca

SEQ ID NO: 230464 - DNA, 75 bp, Homo sapiens
ctccctcttctgtgtcagggaatgctcctggctggtgcggacacaacccaatagtgtaatgttcaagctcagaaa

SEQ ID NO: 230465 - DNA, 147 bp, Homo sapiens
gcagcggacgagggaggtgccgccgtcgcccaggatgggctgggaatgaagcgatgtagccttttaaggatggaagcttcctggcgccaggtggccggtggccgaggccgatcccggggacgggccactgccgccccctcaggaaat

SEQ ID NO: 230466 - DNA, 88 bp, Homo sapiens
tgcttcccaataaggaaacaaccatcatcaaagaggggatgctgaccaaacagaacaattcattccagcgatcaaaaaggagatactt

SEQ ID NO: 230467 - DNA, 117 bp, Homo sapiens
gaagatgtggttcgatgacaataagcacgtgctgggcacggtggggatgtgcatcctcatcatgcaggtgattgtagagaaggctccaaaagccagggtgcctgatctggacaagag

SEQ ID NO: 230468 - DNA, 98 bp, Homo sapiens
agattctacccgcaaacaggatgcttcagagaaggagcccaagaagaggccgaaaccgagaccatgccagggaagctgaaggtgaaaatcgtggccgg

SEQ ID NO: 230469 - DNA, 100 bp, Homo sapiens
cgtggacctcgaccagctgctggacatgtcctagaggaggggaccgaggctatggggggaaccggttcgagtccaggagtgggggctacggaggctccag

SEQ ID NO: 230470 - DNA, 98 bp, Homo sapiens
aaggagctggaaggctgggagccagatgacgaccccattgtggcaaaggagcagagaactttgacaagttcttcacacgaggacagcccgtcttaaca

SEQ ID NO: 230471 - DNA, 100 bp, Homo sapiens
aacgagagactacgcgctctggaagacattgaacgggaaatcggcgccatccttcagaatgcagtgtactaatggtcacttgatgtgcgctggctgtttt

SEQ ID NO: 230472 - DNA, 100 bp, Homo sapiens
gaggtagaccaggaggatttcctgatcatccacatcgaggttttgaaacattgaaatggatgcagtcagaactgaatgttgaagaagtggtaaatgacag

SEQ ID NO: 230473 - DNA, 100 bp, Homo sapiens
agaggcggaaggactcctggaatgccacaaatgcaaatacttgtgcactgggagaggtgtcagaactgggaaggtggcattggcggggtaccagggatgg

SEQ ID NO: 230474 - DNA, 90 bp, Homo sapiens
ctccgagttcaagcaggcctatatcacctggtatactgcaacatccagatggcacagttttgaaacagttacaaccacctccaaggggcc

SEQ ID NO: 230475 - DNA, 50 bp, Homo sapiens
tcttcctcctcctcccgcgacgtatttaggtcagttaacgtccataccag

SEQ ID NO: 230476 - DNA, 123 bp, Homo sapiens
cctgtgacctgcatgtactgggggattcgcagggaggatgtcgggacaccccggaagctgggaaatggacacagattatccttatttgggtaccaccatggacacctataaggaactgattga

SEQ ID NO: 230477 - DNA, 75 bp, Homo sapiens
tggcaaccaagttcatgagacaaatccattagaaatgttgagtttggatttaggtggcgagtagaaaaagaagta

SEQ ID NO: 230478 - DNA, 50 bp, Homo sapiens
actacaaggtcgcctacgtgcagctgctgtttgcagacaaggtcccaaag

SEQ ID NO: 230479 - DNA, 100 bp, Homo sapiens
cagagaattgccttcaaccgggaacagagaatgtttaagtgacctgaccaacggtgcagatgggatgctggccacaagctccaatgggtctcagtacagc

SEQ ID NO: 230480 - DNA, 82 bp, Homo sapiens
ctgccacaaacgccgcaccaggtcttgtagcagcgcctcctcggtgagaagccctaccactgcaactgggacggctgcggct

SEQ ID NO: 230481 - DNA, 75 bp, Homo sapiens
aaacatcaagcagaatgtgatttgcttgaagatatgaggattgttcaagtttagaagaatacaacattgccgcag

SEQ ID NO: 230482 - DNA, 90 bp, Homo sapiens
gggaaggcaggactgacgcagatggaccgtatcgtgggtctggatcaagtcactggtatgactgagacagcttttggctccgcatataaa

SEQ ID NO: 230483 - DNA, 101 bp, Homo sapiens
ccgctctccctgcgctctccgcaccgcggcttaaatgatgtattttgtgatcgcagcgatgaaaggctcctgggtagaactgcacttcagcaataatggga

SEQ ID NO: 230484 - DNA, 75 bp, Homo sapiens
gcaaaacttcggacatagaggccaaccaacctttggaggtgaatgaaaactttgccattgatttgatagcagagc

SEQ ID NO: 230485 - DNA, 97 bp, Homo sapiens
atatctctgcacatagtgaaaaacaatacccggggccctggcctgaagagggtgaccaccacacggaaatccctaagtcagccaacccctcctccca

SEQ ID NO: 230486 - DNA, 97 bp, Homo sapiens
agtcagccatcagcaagccaacatgtgtcaaaggtcgacctggccgtctctgtttcccagatctccatcgaagagaaggtgaaggaattgagccccg

SEQ ID NO: 230487 - DNA, 100 bp, Homo sapiens
ctttcagttcaagtgacaaacgtacctgtggtccctggatccagtgctactgctacaaataagcgttatacgcagagcaatgggcgcaggccgtttggca

SEQ ID NO: 230488 - DNA, 106 bp, Homo sapiens
ctgcagccgcctgaccacggcgactggacttacgaggagcagtttaagcaggtgagaagccctaccactgcaactgggacggctgcggctggaagtttgcgcgctc

SEQ ID NO: 230489 - DNA, 75 bp, Homo sapiens
gaggaagatgcaagcggtttgggaccttgaacaaggcaaatatggttttgctggctggaggcgtgatcctgggtg

SEQ ID NO: 230490 - DNA, 98 bp, Homo sapiens
caccaccagcaccacgggctccaccctgctgcagcccctcagcaacgccgtgcagctgcccatcgaccaggtatgaagtgaaggtgataggctacaac

SEQ ID NO: 230491 - DNA, 92 bp, Homo sapiens
agcagccgatccagcctgcggagcctgtggggcaggacttccttcgctgggcatctggctgggattcttgttggactaatgtacactcaagg

SEQ ID NO: 230492 - DNA, 99 bp, Homo sapiens
ctctgggctcagcacggagggagcgacggggccttcggccgacacctccgggtcggagctggacgggagtctatgcatggaacattgaaaagtattgaa

SEQ ID NO: 230493 - DNA, 100 bp, Homo sapiens
ggtcggatttcaccacaagaagggctgccagtggttggatttcatcccttactggtctcaaccaaaatattcctgttggaatcatgatgataatcatagc

SEQ ID NO: 230494 - DNA, 121 bp, Homo sapiens
cgcgtcccccagtaggagaatgactccgattcgtgaccctcagcgccggtgcatgtcgatacaatgcagatcttcgtgaagactctgactggtaagaccatcaccctcgaggttgagccca

SEQ ID NO: 230495 - DNA, 83 bp, Homo sapiens
ggccgggttgccagattacgggatgcctttgtggaactgtacggccccagcatgcggcctctgtttgatttctcctggctgtc

SEQ ID NO: 230496 - DNA, 60 bp, Homo sapiens
tcatagcattcgcctactccgtgaaggtgctgggctctgtgaagaataagattgagaact

SEQ ID NO: 230497 - DNA, 100 bp, Homo sapiens
cgcttgtcctgagctggttgccggggcaggggcggaggcggaggcagaggtggaggcgctttgaaaggaaccttgggtaatgtggaacatgggaaccaat

SEQ ID NO: 230498 - DNA, 83 bp, Homo sapiens
ggttattcgagtgaccgagaccgcggccgggaccgagggatgcgaagtacaaaactgcttcggctcattgacttagatttttc

SEQ ID NO: 230499 - DNA, 82 bp, Homo sapiens
cacaatatcagtgtcccctttttcttaagatgaacttgagatgctttctgaagccagagcccgcttggctaatactcaggga

SEQ ID NO: 230500 - DNA, 73 bp, Homo sapiens
gccttttgggcagcttttccggcctgacaacttcatctttgctatgctgggactcatgtatgtctactggact

SEQ ID NO: 230501 - DNA, 100 bp, Homo sapiens
gcaagatttaaatgttgatcatggcctcaaaatcttttctctgggctactgcccaactggagagtggcttgcagtggggatggagaacagcaatgtggaa

SEQ ID NO: 230502 - DNA, 100 bp, Homo sapiens
cacagtttaggtctcaaggcaagcctattgagttaacacctctgccgctgctaaaagagagacaaccctggtagtctatatcatgacactggtgggcatg

SEQ ID NO: 230503 - DNA, 98 bp, Homo sapiens
aatattactactgggttattaatcctgctgacagtagtggcattacacctaaaggattagggatttggtaatgtgggcctacactctatgagatattt

SEQ ID NO: 230504 - DNA, 100 bp, Homo sapiens
ctgtcttggaggacatcagaaggccgacgcccccaacccatccctcatcccagagactgatgccgtgggtgtgactgtggtcctcatcacctgcacctac

SEQ ID NO: 230505 - DNA, 95 bp, Homo sapiens
accgtttgggtccctttagcaaaccaaaaacttttgctagaaaatcagcttttacgagagaaaactcatggccttgtagttgagaaccaggagtt

SEQ ID NO: 230506 - DNA, 51 bp, Homo sapiens
taataatgtaaaagacgtcactaaattggaattttggagagtaaaaggctg

SEQ ID NO: 230507 - DNA, 100 bp, Homo sapiens
aaattcaaagctttctggtttctgatccagaaaatacaacttgggctgatatcgaagctatggattcgcccgtccttccagttggagagttctcggagcc

SEQ ID NO: 230508 - DNA, 82 bp, Homo sapiens
agagtgcttatcccagctaagctccagggcaatagccctctggaacaagacaattcatgtgagataagaaagaagagcccac

SEQ ID NO: 230509 - DNA, 101 bp, Homo sapiens
gccgcggggagcgcgggcgtccggggctggagtcgcgcaggtcatgcaagacaagataatctgccttccgaaaagagtgcagcctgctcagaaccactctt

SEQ ID NO: 230510 - DNA, 100 bp, Homo sapiens
tggactccctggagaagcagatggaaaaggtctccagaaatgctttgggttcatctttcattgctgcaaggaacttccatgcctctaacactcatcttca

SEQ ID NO: 230511 - DNA, 90 bp, Homo sapiens
gtggtcatcttcaacgtgggctccaacaccaacgagaccatcaccatgccccacgcgggcaagacatctgtatagattctgcttcatccg

SEQ ID NO: 230512 - DNA, 51 bp, Homo sapiens
gggacagccatggtttcagacgatttggaacttggccacaaatcgcctcac

SEQ ID NO: 230513 - DNA, 83 bp, Homo sapiens
ccggacgctgagcggagcagctgcgccacggtttggtgcacctcgatttggaggaagtagggcagggcccttatctggaaaga

SEQ ID NO: 230514 - DNA, 80 bp, Homo sapiens
cgcagccccctggctcctccttggcgtgctgctgctgcccgggaccctgcgactggcagccagcctctgggtgacatcca

SEQ ID NO: 230515 - DNA, 75 bp, Homo sapiens
cgagaaggcacggagtcgccgcggagcgcagggacttgaagttggacggaggaagacaatcaactggtgcagtga

SEQ ID NO: 230516 - DNA, 96 bp, Homo sapiens
agagaggatttgcttttgtaacttttgatgatcatgatacagttgataaaattgttgatatcagttttagagaatgtggcgtggagaaattctcaa

SEQ ID NO: 230517 - DNA, 100 bp, Homo sapiens
gggcaacgctgtgaccctgggagattactaccagggccggaggattaccatcaccggaatgtgtttcctgtaacaaatcgttcaagaaactctggtccct

SEQ ID NO: 230518 - DNA, 100 bp, Homo sapiens
ggcgcgggcaggagcctggcgaggatgcaccttcccctgccttggaaaggtactccaaagattcaggtttactcacgtcatccagcagagaatggaaagt

SEQ ID NO: 230519 - DNA, 83 bp, Homo sapiens
ccaccagcatgcgggattccctcattgacaggtcttgaggaccggcccagctcaggctcctggggcagcggcgaccagagcag

SEQ ID NO: 230520 - DNA, 73 bp, Homo sapiens
tggagagtgacatgcagttggatggcggtgactgcgtggaacttacaatgtctcagaaaaatggtgggaatgt

SEQ ID NO: 230521 - DNA, 101 bp, Homo sapiens
tggaggattgtaaatgcaccaatcagcatgctgtgtctagctcaaggtacatggactatatcgcacaacaggtgctagttttgagaaggcccaacaggagt

SEQ ID NO: 230522 - DNA, 101 bp, Homo sapiens
gggagggactacatggagccatgctccctgggctcttccgcgggcgcccgcgcgctgcccttcgcttgagcttattcagctgattctgaatcatcttacac

SEQ ID NO: 230523 - DNA, 100 bp, Homo sapiens
gccgagggatagcctatggaaagaagggactacattggccctgttccagtattggttatgagtcttctgttcatcgcttctgtatttatgttgcacattt

SEQ ID NO: 230524 - DNA, 96 bp, Homo sapiens
gtgccacaggaggctgtgcgggccccgctccgcttcgaatgggttcgagactataagaggcttacccccatttctgtgctggaccatgcactagaa

SEQ ID NO: 230525 - DNA, 100 bp, Homo sapiens
gtacagctcgatctaggttctgcggcacgggatggcggaggcgcctcctgtctcaggaactctattttaagaacctctcaaaacgaaacaagcaaatcat

SEQ ID NO: 230526 - DNA, 75 bp, Homo sapiens
gatctttttcatgttgaacaaagacagtacatgttttcctttggaatatggataaatacaccatgatacggaaac

SEQ ID NO: 230527 - DNA, 75 bp, Homo sapiens
ttccatgatatcattatatggacagtttaggacaatgcagatcttcgtgaagactctgactggtaagaccatcac

SEQ ID NO: 230528 - DNA, 80 bp, Homo sapiens
gaactgaccagagctgatcccgagcagcgtcatgtacccctgtgaggcaggcgactaatcagattgtgatgaattgtgct

SEQ ID NO: 230529 - DNA, 98 bp, Homo sapiens
ccgagggtagggtcgcgctcgcccgggcggcagaacggaatcagtccccaatgcctggaaattcctcattggattactgtgttttaaacagaatttcg

SEQ ID NO: 230530 - DNA, 75 bp, Homo sapiens
cgccgcaagatactgatccggggcctcccgggggacgtgaccaaccaggagtatgaacccaccatcttctacccc

SEQ ID NO: 230531 - DNA, 76 bp, Homo sapiens
caaagccgggagatcgactgtttgagcccggaagcgcagaagctgatgcacctacctgatgggagagcccagccag

SEQ ID NO: 230532 - DNA, 96 bp, Homo sapiens
cctcggagcgcccggagccggagaaaacaaccctttttgctgcacatgtaagtggagctgtgcttacctttggtatgggctcattatatatgtttg

SEQ ID NO: 230533 - DNA, 83 bp, Homo sapiens
cagcgcccgcggagacgtgaagaggagagactctgtggactccaagtcttctgcctcctcctctccaaaaagaccatcggtgg

SEQ ID NO: 230534 - DNA, 100 bp, Homo sapiens
tttgatccagaacttgcagcaacaataggctctttggtgtaacgggaaactgcgctgcctgtagtaagctcatccctgcctttgagatggtgatgcgtgc

SEQ ID NO: 230535 - DNA, 101 bp, Homo sapiens
ttggaagttaagggagacaaagttgaaaacaaagtgctgtgctgcttttgacacaaaaacggggttacgtgtggcagtgaagaagctctccagaccatttc

SEQ ID NO: 230536 - DNA, 78 bp, Homo sapiens
gaagaaactcaatgatcgtgtcatgagaggtcagttggatctcttaaggagcaatacgggccttttatatagaataaa

SEQ ID NO: 230537 - DNA, 96 bp, Homo sapiens
gtgaacttaggttccatgatgtgctattctatacttggaccgtttttccccaaagaggtgctgtacctggtggagaagggagccgtgatcgagcat

SEQ ID NO: 230538 - DNA, 97 bp, Homo sapiens
tgcagacgactttatagataagaacaagctgaaagctggatacctaatgtcagtggagtcttctgagtgtttcctggaagaagtcgggtcccaggct

SEQ ID NO: 230539 - DNA, 100 bp, Homo sapiens
aggcggctcagatccccagatccagtgtgtgggagcaggaccagcagtgtcacccagctctggatgggcagcgtggcaagtgctggtgtgtggaccggaa

SEQ ID NO: 230540 - DNA, 75 bp, Homo sapiens
tacacacttatagatcttctgcactgtttacaggcacagatgccttcaattaagttgcagagttctgatggagag

SEQ ID NO: 230541 - DNA, 71 bp, Homo sapiens
gcggagaaggactccaaggcggagcaggccaaagtgaagaagagtataaatggcattcgcacagaggaggt

SEQ ID NO: 230542 - DNA, 96 bp, Homo sapiens
gggaagcgatgccacgggagatggaaccaaggagaaaccatttaaaacaggtctaaaggtataagtgtgctagcggagtgtctagattgtcctgaa

SEQ ID NO: 230543 - DNA, 75 bp, Homo sapiens
gaaaacaggttttacagaaaacaggtgaaccgggtttatgtgattttcgatctgcctaccaccgtgtcaatgatc

SEQ ID NO: 230544 - DNA, 50 bp, Homo sapiens
gcggggacctggtggccatcggttaatttggagtggcccctggagtcagt

SEQ ID NO: 230545 - DNA, 100 bp, Homo sapiens
aacaccggctcccattctggttaaagatcgccacatcacagaatcgtatctatctcacagctgacaaccttgtgctgaacctacaggatgaaagtttcac

SEQ ID NO: 230546 - DNA, 101 bp, Homo sapiens
gaggaagttatgacccattccggattatggagaacctgctgcctagaaggcccgcagcccgagtgtcgccgccatggcttcgccgcagctctgccgcgcgc

SEQ ID NO: 230547 - DNA, 90 bp, Homo sapiens
gtggccttggcacagaagaatgtcaagctctcaacagagcaggactctctgggtggctcagcccacagtatccttattgccaacattgcc

SEQ ID NO: 230548 - DNA, 75 bp, Homo sapiens
aaaagtttcagctgctgcagtggtttttcccatgatggtgaccatgctcttctgtgtgtcagaatcaacaacata

SEQ ID NO: 230549 - DNA, 131 bp, Homo sapiens
ccgggagcgccgagcgtcgccgccgccgccgccatgaacaactcgggcgccgacgagatcggggagtaccctgacttctaccggaagctctacggcctcttggacccctctgtctttcacgtcaagtaccg

SEQ ID NO: 230550 - DNA, 75 bp, Homo sapiens
ctgatgcctctaagctgcaattcatcctagcaggtatggaatcttgcggcatccacgagaccaccttcaactcca

SEQ ID NO: 230551 - DNA, 98 bp, Homo sapiens
tcttcccggcccctgaagttggcactgcagcagacagctccctgggcaccaggcagctaacaggtccggcctctttggcctacccccgttggctccgc

SEQ ID NO: 230552 - DNA, 74 bp, Homo sapiens
taaggattccaagtaactcttatttggctatggatcgaagttgtaatcgtatgtcttcgcacacagagacgtca

SEQ ID NO: 230553 - DNA, 50 bp, Homo sapiens
tatgtccaggagctccaaaagcatcagaactctcttgatagagcccaagc

SEQ ID NO: 230554 - DNA, 96 bp, Homo sapiens
catggcatggagacggccctggcctgctgggagtggctgctggctggcaaggatggagtggaagtgccggacaaccctccatatgataagggagcc

SEQ ID NO: 230555 - DNA, 100 bp, Homo sapiens
gggtaaagttccagggaggccgcgaaggcatccgtgtcattctggaccttactcccaactaccggggtgagaactcgtggttctccactcaggttgacac

SEQ ID NO: 230556 - DNA, 101 bp, Homo sapiens
ggacgcgcagcatggcggtggaggacgaggggctccgggtcttccagagcgtgaagatcaagatcgatgatatcatcaagttgaatcgaaaggaagggaag

SEQ ID NO: 230557 - DNA, 75 bp, Homo sapiens
tggtggcttccgtttgttggtggaggaggtggcaggcctcggcggtaagaatgattgatgttggctgatattgga

SEQ ID NO: 230558 - DNA, 82 bp, Homo sapiens
tccagcaccctcatcgccctggccgacaagcacgcaaggcaattgaaggaacagactaaaaatcgtgtcctggaaggaaact

SEQ ID NO: 230559 - DNA, 101 bp, Homo sapiens
agcgagtgggacggtcatgaggagctgaaggccatcgtatgggtgctggagaatctggtaaaagcaccattgtgaagcagatgaggatcctgcatgttaat

SEQ ID NO: 230560 - DNA, 100 bp, Homo sapiens
ggaagatggcggccgcggctgtggtggttcccgcagagtggataaagaactgggagaaatcagggagaggcgaattgcctgtttaaagaagaaaacccgt

SEQ ID NO: 230561 - DNA, 87 bp, Homo sapiens
acagtagatccagaaacacaggctagactggaagctttactagaagctgcaggaccgtataatagacgctggccccaaaggaaacta

SEQ ID NO: 230562 - DNA, 98 bp, Homo sapiens
acaatcctaatatgacccatttgaagattaatctgccagttactgcccttcctcccctttggggatatgatgatacatacgcagaacaaagttacgaa

SEQ ID NO: 230563 - DNA, 75 bp, Homo sapiens
cgctgctacctgcagcgccgtgtggcacgacacaaaaatcagacaattccaagctcgagtgtctcggcaaactct

SEQ ID NO: 230564 - DNA, 98 bp, Homo sapiens
cgtgggcggcggcaacggggcactgacctgggtggcaaggcagtttccccggcatgaaccagagtggacttatggcttccagctctccctacagccag

SEQ ID NO: 230565 - DNA, 96 bp, Homo sapiens
tggtggcatccccactgtcctgctcatagacgtcagctgcttcctggggctatcaaggactcacaaactgcatgatggccgccctgccggaggaca

SEQ ID NO: 230566 - DNA, 101 bp, Homo sapiens
ctagaaaatttaaccttgatgcaactgaattgagtataagaaaagccttcattacaagtactcggcaagttgtcaggcaactggaacagatccagaaggag

SEQ ID NO: 230567 - DNA, 75 bp, Homo sapiens
tggaactctggtggtttcaggaaggagtgagctgttgccgcagaatgggctgctggctcctgccctgcttcctgt

SEQ ID NO: 230568 - DNA, 75 bp, Homo sapiens
ggccagaggctgccggcgcctcctgcctgccctgctgaggtcaagatgcaaaaaggtgagcgccagatggccaaa

SEQ ID NO: 230569 - DNA, 100 bp, Homo sapiens
tcaaaagaaaatctctaaatgcagattccagaaaaattacagcacatctcagtgaatttgcaagtggaacttgcttgctagaaaacaaagtgcaaggctt

SEQ ID NO: 230570 - DNA, 82 bp, Homo sapiens
cgcgggaggtgttcgagaacgaccccgagacgtgatcagggccaaagcggtcagtgagaaggaagtggactctggaaacgac

SEQ ID NO: 230571 - DNA, 82 bp, Homo sapiens
cctgtgtcccaaccggcctgagtcaagacatggatttgattgacatactttggaggcaagatatagatcttggagtaagtcg

SEQ ID NO: 230572 - DNA, 83 bp, Homo sapiens
ggccgctctgcgggactctgaggaaaagctcgcaccagtttggtgccctggttgtcagatgttggaaagcagtaggacggaac

SEQ ID NO: 230573 - DNA, 88 bp, Homo sapiens
tcgcgcaggatttcaaaaccgacctgaggtttcagagcgcagccatcggtgcgctgcaggaaagaccacagcaagattctttcattcg

SEQ ID NO: 230574 - DNA, 90 bp, Homo sapiens
ggagaggcctggaggacaccaacatggaagaaacatattgccgagtggatgccgccgcgcagcgtgtttgcttgaggcagaagcttcagc

SEQ ID NO: 230575 - DNA, 126 bp, Homo sapiens
ctccagtttccatatgttgagattctacttattcatcagtttgttgtgcttgtcaagatcaggtttatcttgcagattatggactttcctacagatattgtcccaatgggaaccacaaacagtatc

SEQ ID NO: 230576 - DNA, 90 bp, Homo sapiens
caagaactggaggaaaaggtcgcctctttgctgcaccaggtgtcctggagacaggagcagtatgtgtttatccacgatgcgatcctggaa

SEQ ID NO: 230577 - DNA, 73 bp, Homo sapiens
gttgatggctcaggaactaaaggcaattgaaggaacagactaaaaatcgtgtcctggaaggaaactacaggta

SEQ ID NO: 230578 - DNA, 103 bp, Homo sapiens
ggcctgcagcgggagctggacggcgagcgcgagcggcgcgagaaagctgcctgctgtttcccggggagatcatgaaacgaggtcgccttcccagcagcagtga

SEQ ID NO: 230579 - DNA, 95 bp, Homo sapiens
aaccccaggcagagacgggggaagcagcacgggatcccagcctcaggcctgcacggacggtgttggttgggatgccatggacaatattaccaggc

SEQ ID NO: 230580 - DNA, 100 bp, Homo sapiens
gacggagtacacggagcagcggccccggccccgccaacgctgccgccgggtctcctctgagcctccggcctccataagacccaaaacagatgacacctct

SEQ ID NO: 230581 - DNA, 100 bp, Homo sapiens
gcagcaacaacagagagcacgtgcgggctgacgcacgaggcacacaggaaggaggtggagcaggtgtatctgcgctgtgcggcgggtgccgtggagtgga

SEQ ID NO: 230582 - DNA, 83 bp, Homo sapiens
cagcttactctgcaagttctccccggacggcaagtacctggttcctgacggagacttcgcccttcatgtggtccaacctgggc

SEQ ID NO: 230583 - DNA, 100 bp, Homo sapiens
cctgaatttgcctgtatactctcgttctgcgacttataaaggaccagacaaatcaaattagtggttttgggcttttttccagacttcaagctcccattcc

SEQ ID NO: 230584 - DNA, 106 bp, Homo sapiens
tgagcgggtggcagcgacagagccaaaatcagagctggaacctgaggagagaggaactgtggctgcaccatctgtcttcatcttcccgccatctgatgagcagttg

SEQ ID NO: 230585 - DNA, 75 bp, Homo sapiens
agcttcccttcctcaaataaggaaattgacacctggcgtgcctggcgctggccaacaatagcaccctcaccattg

SEQ ID NO: 230586 - DNA, 80 bp, Homo sapiens
tcttcgaacttagacttccggaaggactttggcgagggacatggatttgattgacatactttggaggcaagatatagatc

SEQ ID NO: 230587 - DNA, 75 bp, Homo sapiens
gcagcagcttcagccccgaaaacactctgctccagccaaggtggtgagggcagctgttcctaaacagcgcaaagg

SEQ ID NO: 230588 - DNA, 75 bp, Homo sapiens
caagacaggcttcttaaggacatgtgtaaacaggaacatcgataagtagtgtaaaaacttgcacaatgaaatccg

SEQ ID NO: 230589 - DNA, 83 bp, Homo sapiens
taatataccagacactgcaactggatattggtatggtatagagcttgaaaaaccccatggcaagaatgatggttcagttggag

SEQ ID NO: 230590 - DNA, 82 bp, Homo sapiens
ttgtgggagtctccgcgtcccgctcgctgggagagagattaactgctgaagtactgatcgagttctgcatttcttcaatgag

SEQ ID NO: 230591 - DNA, 100 bp, Homo sapiens
gagacggagcggacctcagcgctgaagcagaagtccccggagctgcggtctccccgccgcggctggtgcgtgctctggaggaggccaacgccgacctgga

SEQ ID NO: 230592 - DNA, 97 bp, Homo sapiens
ttctaagtgccttaagagaggatcgcccaatccacatgcttttccagtattaagggacatcagcgagagaggcagggatcttgagcagattttatct

SEQ ID NO: 230593 - DNA, 95 bp, Homo sapiens
cgccgatatcttcgccatcgccagcatcgccaacccggactggatcaacaccggggagtctgcggattttgtggaagtataatactttgtcatta

SEQ ID NO: 230594 - DNA, 100 bp, Homo sapiens
ttggggagagcagcaccgaggccagcaagacgctgcccgccatcgaggtcctggaccggatcaaaggctcactgctgccccggcctggccacaactttgt

SEQ ID NO: 230595 - DNA, 97 bp, Homo sapiens
tcgcgaagctgccaaagccttagacaagcactggctcaggcgatcagggaagccagagagcagcaccctgacatgtcggtcacaagagtggtggtac

SEQ ID NO: 230596 - DNA, 100 bp, Homo sapiens
tcgatttaagagagcaattggatattattcagcgactagtaagcctatgtcatttcatccaccacattacttagatattgaggagaaaggcgtccggatg

SEQ ID NO: 230597 - DNA, 100 bp, Homo sapiens
catctacaaaagctgagtttacttctcctccttctttgttcaagactgggcttccaccgagcagacatgaagccattattatatcaggaaccgaaatggc

SEQ ID NO: 230598 - DNA, 83 bp, Homo sapiens
ttcgatttattggaggcctacttgcagcatattacctatcaggagaggagttgacgaaggatcagagattggtgtattcgggc

SEQ ID NO: 230599 - DNA, 82 bp, Homo sapiens
ggaccacaaagtggaagagtcctgtgccattaaaaacaacaaggaagctttcagtgttgatccaactaatggaagaaataat

SEQ ID NO: 230600 - DNA, 76 bp, Homo sapiens
tggcccgaagccttcctttatcgctttcaggtgtgagcagctgctggaagaggaggtgctcctgaagacactgcgg

SEQ ID NO: 230601 - DNA, 95 bp, Homo sapiens
aggggaccatgtccgggaggcgcttccacctctccaccaccgaccgcgtcatcaaagacaatgcagatcttcgtgaagactctgactggtaagac

SEQ ID NO: 230602 - DNA, 102 bp, Homo sapiens
gcgcagggcctgcagcgggagctggacggcgagcgcgagcggcgcgagaaaccgccaccggcacggccaggccagcatggtggaccacttacttccagtgga

SEQ ID NO: 230603 - DNA, 100 bp, Homo sapiens
cacaatccaagttccacaatatattgactactgccacaattccgcttggtgatccagctatttttcctgccgtaattgtggaacatgttcctggtgctga

SEQ ID NO: 230604 - DNA, 75 bp, Homo sapiens
cgacaccatgcatctcctcggcccctggctcctgctcctggatgctggtctggaagtaaaagtaaaagacccacc

SEQ ID NO: 230605 - DNA, 83 bp, Homo sapiens
ctggtattttttggagcttccatcctggttcttccaaagtgcccggacccaaaacaggaaccaagtacatcgtgcaagtggat

SEQ ID NO: 230606 - DNA, 98 bp, Homo sapiens
cgaaatgccaacgagctatcggtgctcaaggatgaggtcctagagctgtgagccgtgagctttgaggcggtgggatgtgtcagcagaatgtctcctgc

SEQ ID NO: 230607 - DNA, 75 bp, Homo sapiens
tcgtcataccgggcttccttgccctgtccgggtgtaatgttcaagctcagaaatgccttatgtggatcgtcagaa

SEQ ID NO: 230608 - DNA, 75 bp, Homo sapiens
aggagtggactattcctttgaatgtattggtaatgtgaaggtcatgaaaataaagcagttggagtgatgaagtcg

SEQ ID NO: 230609 - DNA, 100 bp, Homo sapiens
gtgcctgtgatggcatctttcatctaacactatcctagaaggaaaacatcaccatggctacagaaattggttctcctcctcgttttttccatatgccaag

SEQ ID NO: 230610 - DNA, 75 bp, Homo sapiens
ctccgttgggtccggccgctctgcgggactctgaggaaaagctcgcaccagtaagactttgaccccgacgcaggc

SEQ ID NO: 230611 - DNA, 100 bp, Homo sapiens
aggcccctgtcaagaaggtgccggtggtgcgagtcttcggagcgaccccggcagtgatcctgccatgaagcagtttctgctgtacttggatgagtccaat

SEQ ID NO: 230612 - DNA, 89 bp, Homo sapiens
ggcgctatgtacgccctcttcctcctggccagcctcctgggcgcggggaaggtgctgagctactggtgcttcagtcccggccacagcat

SEQ ID NO: 230613 - DNA, 100 bp, Homo sapiens
cggcgtcattcagctgtacgagatccagcacggggacctgaagctgcttcgggaggatcacgcagatttgcgaagccatttcttcacagttgggatgaag

SEQ ID NO: 230614 - DNA, 74 bp, Homo sapiens
ttcggtgaggacttcaagcagctggagtccttctacatccagactgccggtggtggtgtgcacattgagccccg

SEQ ID NO: 230615 - DNA, 75 bp, Homo sapiens
cccctgaccgccaccgtggccatggcaagatccatctgcaggtcctcatggaagacgccatggagttggtgctgg

SEQ ID NO: 230616 - DNA, 90 bp, Homo sapiens
gtcatggtcacccaggcaggtgtctgctaccagggcaccttccaggcggacaagacggtgtccagaatgacagggtccagaaactggcga

SEQ ID NO: 230617 - DNA, 99 bp, Homo sapiens
gagtggagtcaacatatcaatggagcaagtcacagtcgtcgatgccagcttcttcttgaaatgtgcagctcagtggaagatgatgacaaccagaagaca

SEQ ID NO: 230618 - DNA, 50 bp, Homo sapiens
tgcctttgttacatttgcagatgatcaggatatgatggatgatatctgtc

SEQ ID NO: 230619 - DNA, 100 bp, Homo sapiens
gcctccttttgaggcaaacacataccaagagacctacaaaagaatatcacggtgaaaatgcctcgtgtaaaagcagctcaagctggaagacagagctctg

SEQ ID NO: 230620 - DNA, 100 bp, Homo sapiens
cttagaagaactgctgaaccgactctgagaaatttgggcttcgtgctgtgtcactccatcgctgggggtacgggttctggcctgggctcctacctcctgg

SEQ ID NO: 230621 - DNA, 98 bp, Homo sapiens
ggctctcgccgtccgagtcgtttattggggcctcatccacatgctcacccacttggccgaggctctgcaccaggcccggctgctggccctcctggtca

SEQ ID NO: 230622 - DNA, 75 bp, Homo sapiens
cacctagatgacgtaactctcatcttttgcctggaccttgcatattttggctactctgggcagttgaaaagtaga

SEQ ID NO: 230623 - DNA, 76 bp, Homo sapiens
tcatgatggttcctgctgacctggaaacatcttaaatggaaggtaaactcgggggccaggactcttttgaaagcat

SEQ ID NO: 230624 - DNA, 48 bp, Homo sapiens
aaatttggtaagaagaaagtgatttgacaccagcaggcagctggctcc

SEQ ID NO: 230625 - DNA, 75 bp, Homo sapiens
ctgggaaggtggagccaccagcctctccctgcctccacctcctggatgccctcccaatgctgctcagcttgcagt

SEQ ID NO: 230626 - DNA, 82 bp, Homo sapiens
ccgaccccacttgtgctggaagaacccgagcaacttcccgagaagagaagaacctccaaggctttctggaacagcccaagga

SEQ ID NO: 230627 - DNA, 74 bp, Homo sapiens
atttggcctcatttatctttatacagctgagctgtatccaaccattgtaaggataaagggaagtggaggctgga

SEQ ID NO: 230628 - DNA, 50 bp, Homo sapiens
aatgaaggaaagcgaggctgacagcgaggccctggccaacgtcaacattg

SEQ ID NO: 230629 - DNA, 75 bp, Homo sapiens
ctgggccggtgccatcggaaaccggagtgaccagaggagggacacggtgattgtagagaaggctccaaaagccag

SEQ ID NO: 230630 - DNA, 75 bp, Homo sapiens
tcctgctgtgcgcgctgctcagctgtctgcttctcacaggagtacatcgatgcccaccctgagaccatcgtcctg

SEQ ID NO: 230631 - DNA, 98 bp, Homo sapiens
cttcaatgtccgcatcgcaaccaccgccctggccatctaccatgtggacctgaaggagaagaaggagaaggtggaggagaaggcaagccggaaagagc

SEQ ID NO: 230632 - DNA, 100 bp, Homo sapiens
cggggcggccgggcggatccagcgcagccgggagacagatgcgaggcggcggtcaggccaggtcagagcagcccaccatgggatggggagggggtggagg

SEQ ID NO: 230633 - DNA, 100 bp, Homo sapiens
attcgggacacacagaaatataaacctttcaagagtcaagtaaaggttcaatgtatctatgcctgcctacctcaatctgcaagggagtgtcagaaaggcc

SEQ ID NO: 230634 - DNA, 50 bp, Homo sapiens
atgagaggacagaggctatatgaaaaatactgttcctaagagcatctgcc

SEQ ID NO: 230635 - DNA, 100 bp, Homo sapiens
atttctgaatgatgaaaacaaaggcctggatgtactggtggattacctgtcctttgcccagtgttctgtcatgagccaggaggaactctctcccagtccg

SEQ ID NO: 230636 - DNA, 83 bp, Homo sapiens
atcgtgatcccggcgacatactacctctggccccgagatcagaatgccgcaattctgtggtgttcttggtcacacatttatgg

SEQ ID NO: 230637 - DNA, 101 bp, Homo sapiens
caacatgaagctaccggccagggttttctttactctggggtcccggctgccctgtggcctcgctcctcggagggaaatgacttatttcttgtagcagtcca

SEQ ID NO: 230638 - DNA, 83 bp, Homo sapiens
cttttgtgcatgcgtcgcgccttttggcagaagtcctcctgcatatgcccaagaggattgggagtggaatggacaccagcaga

SEQ ID NO: 230639 - DNA, 100 bp, Homo sapiens
agcaagaggagcagtccagcggcatgaccattttcttcagcctccttgtcctaggtgctggagaatctggtaaaagcaccattgtgaagcagatgaggat

SEQ ID NO: 230640 - DNA, 82 bp, Homo sapiens
agctcggccggcaaccgagggacccgcgtccagcccctgtcaaagggaacaggaagcagtccacggagggtgacgccctaga

SEQ ID NO: 230641 - DNA, 95 bp, Homo sapiens
ctcatccattctcctgccacccccagacctcctcagctccagacctgcctagagctggaacgttacctccagagcgagccctgctatgtttcagc

SEQ ID NO: 230642 - DNA, 96 bp, Homo sapiens
gattctactgtagcctgccgtttctttcacttccggaggtgatttgatgaaggctgctgcaggagagttcgcagatgatccctgctcttctgtgaa

SEQ ID NO: 230643 - DNA, 82 bp, Homo sapiens
ccttcacgcaggctttaagatgatgagcaaaaacctaaaggcagacccagaagagctttttacaaaactagagaaaattggg

SEQ ID NO: 230644 - DNA, 83 bp, Homo sapiens
ttggcttctcgactcggtcctgtttcgacagcgaacatgtcgcggcctgtcagcttctccagcagcgccagcactgtgtccac

SEQ ID NO: 230645 - DNA, 98 bp, Homo sapiens
tcgagatcccctgtgtggccaagaagctggtgtgcggagatgaaggcaattaagttggaatatgcaaggttggttaagttggcccaagaagacacccc

SEQ ID NO: 230646 - DNA, 97 bp, Homo sapiens
cagctcatcgagatggggaacaggctccgtgcagagctgggccgacccgaaaatgggagcttgcctgattgtcaacccatcggcctggaccccagag

SEQ ID NO: 230647 - DNA, 100 bp, Homo sapiens
ccgccgtgctggatgccgtgatctccagcgccggcctcctcagtgcgaagaagctgcagccgcacctggccaagggtgggaacatccagttgcaggaaaa

SEQ ID NO: 230648 - DNA, 83 bp, Homo sapiens
cagcccagtgatgcgggcagcaggcccctcctgcgcacagagcccagccctgaccctgctgctggtggacgaggcctgctggc

SEQ ID NO: 230649 - DNA, 119 bp, Homo sapiens
gagagaggcaccgggatcgtgaccgagaccgtgaccgagagcgtgaccgagagcgcgaatatcgtcatcgttagaaggaagggaaaaggccgaggcatcagcgtgtgaagaccgcaaag

SEQ ID NO: 230650 - DNA, 90 bp, Homo sapiens
ctacagtgtttcagatgacaatgctccctctccttatatggtacaaacccgtagtgctgatgaaccaatgacaacatttgttgtctgtaa

SEQ ID NO: 230651 - DNA, 99 bp, Homo sapiens
gagcggtggcagtcgcgaccgcgggtgcatccagtttctgcgcccagggactatgttcggagtgaactggagtttgcctatgagggaccaatgtattta

SEQ ID NO: 230652 - DNA, 74 bp, Homo sapiens
caacatcaataccaatgaatttcccaatattggatcctggaaagtggtaaaatagctgtggagtgcagacccag

SEQ ID NO: 230653 - DNA, 83 bp, Homo sapiens
aaccaaattgtcgccattaagaaagaaataatgcaaaaggtgtcccaaggctcctgaccagtgaacaaagatttgagaaagac

SEQ ID NO: 230654 - DNA, 100 bp, Homo sapiens
ttgggtaaccggatggggcttctcgaaggagaaagcctggtgaggagatggaggcttgtgaggagctggccctggccctgtctcggggcctgcagctgga

SEQ ID NO: 230655 - DNA, 77 bp, Homo sapiens
catttgaagtctgagagtttccagggccgttgctccagggagaactgcaaatatcttcatccacccccacatttaaa

SEQ ID NO: 230656 - DNA, 49 bp, Homo sapiens
caggaacctggcactgtttgagagtttatgtggccgaggcagacaagtg

SEQ ID NO: 230657 - DNA, 100 bp, Homo sapiens
cgctgtgcctgctgctgagcagcgccgcgggtaaaatgtcggttccaggaccttaccaggcggccactgggccttcctcagcaccatccgcacctccatc

SEQ ID NO: 230658 - DNA, 51 bp, Homo sapiens
cagcatcaagatccgtctgacaggctaggcagctggaagagaaagaccgag

SEQ ID NO: 230659 - DNA, 82 bp, Homo sapiens
cagaaacgtcactatcaagaaggttaccattccatcaaatacaatatctgtgaatggaaggtcaagactcagccattccatg

SEQ ID NO: 230660 - DNA, 74 bp, Homo sapiens
aaaaagaaccctgcaagatgaagcgacatgaaatggtggatgaacccccagacatcaacgagtgtgatgaggcc

SEQ ID NO: 230661 - DNA, 75 bp, Homo sapiens
ggaaaatcgcttggttaaaacctgacacttttaacagagtttaccacctaggatgacttcagtgactagatcaga

SEQ ID NO: 230662 - DNA, 75 bp, Homo sapiens
ccatggtgaagtataggctgaggctacctgtgaacagtacgcagtgaatgttgccaactacacagacccccagag

SEQ ID NO: 230663 - DNA, 86 bp, Homo sapiens
cgcgctactctctctttctggcctggaggctatccagcgttgataaggattttattcctggactcatgtacatccgagacaatgaa

SEQ ID NO: 230664 - DNA, 82 bp, Homo sapiens
cagagctgcacgaagtccgaggcgccgcgagcccaggtgcgcgcggagccatggttatcatgtcggagttcagcgcggaccc

SEQ ID NO: 230665 - DNA, 75 bp, Homo sapiens
gtggttttgatcatgttgttaccctcggacgtagcccggcttgtattggggccagctctcaatgttgcaagaaaa

SEQ ID NO: 230666 - DNA, 98 bp, Homo sapiens
gtgctggagctgttccgggccgcgcagctgccgaacgacgtggtcctacaggattgcttatggatgcccaaatgcgttaagttcggatggtttctgcc

SEQ ID NO: 230667 - DNA, 100 bp, Homo sapiens
gagatttcagtgcattgcctcccctgggtgctcttcatcttgggcctacgagaagcagcggggcacccggcgcgaggagcagaaggagcttcagcgggcg

SEQ ID NO: 230668 - DNA, 75 bp, Homo sapiens
cacgggggagtcgggggagtcgtaaacaaccctgaagagaacagccaggcctggagttcatgatcaagtgttgcc

SEQ ID NO: 230669 - DNA, 82 bp, Homo sapiens
gtatgtcggacagatgaaggccgagtcctggaaggcatttcagaagatggacacaaagaagaaggaggaacagttgaagctt

SEQ ID NO: 230670 - DNA, 75 bp, Homo sapiens
ctcgccgtcctgcggaaccgctggctgtcagacagcttcaaggagacggtgagaagccctaccactgcaactggg

SEQ ID NO: 230671 - DNA, 92 bp, Homo sapiens
aatttttggatgatgatggatccatttctcctattgaggagtcaacgttatgatgtgattgctcaagcccaatctgggactgggaaaacggc

SEQ ID NO: 230672 - DNA, 78 bp, Homo sapiens
aaaacttaccagcgagctcatcacacatatctgtgtgccgtgagcgatgtggagatgcaggaacactatgatgagttt

SEQ ID NO: 230673 - DNA, 75 bp, Homo sapiens
aagatccccgttcctggagattctgattgagccttttcaggagccaaaaaaacaaatacaaacaaacaaaaaaat

SEQ ID NO: 230674 - DNA, 100 bp, Homo sapiens
ttaatgccaaccagtgggcagatatttttcaggcctctggtgccaaatacattgtcttaacttccaaacatcatgaagaaattgcatctgatggtctcaa

SEQ ID NO: 230675 - DNA, 90 bp, Homo sapiens
aaaatccgcagagaaattcagaacctcaagcttttcaggcatcctcatataattaaactcctatccctcggccagatcctgtgcataata

SEQ ID NO: 230676 - DNA, 100 bp, Homo sapiens
ctacggagacgggcccgactcctccgacgccgatccggacagcggcacagaggagggagattggaaacctggaagattactaccatttttatcacagcaa

SEQ ID NO: 230677 - DNA, 100 bp, Homo sapiens
atgccggtggaggaatttgtggctggctggatctctggtgagacatttttcttccttctgtcacatcacacccaatggctttcatgagaaggacaagaag

SEQ ID NO: 230678 - DNA, 100 bp, Homo sapiens
ctaccatctaaaatacgaaggtttctggctgggtggatactttaatactgataagccacaccccaggggtgaaattcttattgggggccaaagtgtgaca

SEQ ID NO: 230679 - DNA, 100 bp, Homo sapiens
gtctatcgtctgcagtgagggaaggagcctggcaaaccttcatccagaacctcttcctcaagcaagacaaaaagctgctaagcactgctccctccgtctc

SEQ ID NO: 230680 - DNA, 75 bp, Homo sapiens
gtttggccaccccctgttcctgcagaacacagtccagagacaacaagttcagcaagaaagattgtctttcaatca

SEQ ID NO: 230681 - DNA, 103 bp, Homo sapiens
ggactcttctaggagacgagagagcgaacgccagggaccctgtgcaggcctgctcctccgtttgcaagaaattccgggtagatatgcctggctcaggcagtgc

SEQ ID NO: 230682 - DNA, 100 bp, Homo sapiens
atgggctacagttagagtctgaagttgttaccaatggtgaaactacatgttcagaaagttgcagggagagtagctgaagaaaggggtgcagtgctgggcc

SEQ ID NO: 230683 - DNA, 74 bp, Homo sapiens
tggattctacagcaacatattggatagaatttttgcggcatttgaagagctttttccagattatgtttaaaatt

SEQ ID NO: 230684 - DNA, 82 bp, Homo sapiens
ctggattccaggaactggtggagtggaagtggatccaggaaaatcacgagctgctcaggcaagagctgaacacgcggtttct

SEQ ID NO: 230685 - DNA, 113 bp, Homo sapiens
gtcacctgccaacggtgtggtcctggacaggagctatccaaggtcctgcaaccctggttccagtctggcaagcattgtagacctggctgctgaagactgacggggcccagggt

SEQ ID NO: 230686 - DNA, 100 bp, Homo sapiens
tgatgatgacggccctgtgtccagccagggatacatgccctacctcaacaagtacatcctggacaagatggcagaaacggtggacacaagcgaaatggtc

SEQ ID NO: 230687 - DNA, 98 bp, Homo sapiens
gttccagccccaacgtagcaatcataccctaatgatcccagcaagataatgtcctgtcttctaagatgtgcatcaagcctggtacatactgaaaaccc

SEQ ID NO: 230688 - DNA, 98 bp, Homo sapiens
acgcctcccggctctcgtcagcctcccgccggccgtctccttaacaccgaacaccgtggtatggtcaggaaaaagactacaatgtactagtcatggat

SEQ ID NO: 230689 - DNA, 115 bp, Homo sapiens
cagagggaggaccttggagtccagcactctgcatgtgactccccgcagcctggacaggtgtggacactgccagcggctgcagccgacttggaatgacctgggagacaaatacaac

SEQ ID NO: 230690 - DNA, 75 bp, Homo sapiens
gatgtgatgttggagaactatagcaacttggtatcactaggctcctgcaggagatgggtcacagacccgagggaa

SEQ ID NO: 230691 - DNA, 82 bp, Homo sapiens
tctccctgccgtggctgctcaacaaggagctgggctgcatcaactcgtgtactaatggtcacttgatgtgcgctggctgttt

SEQ ID NO: 230692 - DNA, 98 bp, Homo sapiens
cacagaagcagaagaactcgcctctgttgagtagcccgaacccagccctcaccttctgcgtaaagacccatgaccggctgtactacatggtggcccca

SEQ ID NO: 230693 - DNA, 46 bp, Homo sapiens
agctgctgggtggatttgagcagagggtcctccgcggaagggcagc

SEQ ID NO: 230694 - DNA, 75 bp, Homo sapiens
cacttagaaaagctagctacgtgttctaaggacctatcagattcgacggaggcgccttgcacgacttgctggtgg

SEQ ID NO: 230695 - DNA, 74 bp, Homo sapiens
acctgtgcgggatggaacaaaaggcctccccatggccacccatggaccagtcggcattcacttcctcccttctg

SEQ ID NO: 230696 - DNA, 100 bp, Homo sapiens
ctcagatgggtcgtttcaccttaagagatgaggccctaccacttatgtcttggatgaagatgaacctcgattccttgaagaagttgattacagtgcagaa

SEQ ID NO: 230697 - DNA, 82 bp, Homo sapiens
cggggaggcgcgcggaggctggagctggaggcgcggcgccggtgagctgagagaccccactggcttttgccagcatcccagg

SEQ ID NO: 230698 - DNA, 75 bp, Homo sapiens
aaaacttgatcacatcaatatctgcagttccaatttcccaaaaagaaggcggggtttcaccatgttgcccagact

SEQ ID NO: 230699 - DNA, 96 bp, Homo sapiens
ccggtttttagtccattgactatgcagcctaatggcgctggggctgtggagatccggagtcgccacagctcctaccccgcggggacggaggacgac

SEQ ID NO: 230700 - DNA, 100 bp, Homo sapiens
caacttctgcaaggcggtttctagtgcaaatcccctgctcagggtcttcatccagaaacgaggtaccagctggaggatgagtctgcgcatttggatgaaa

SEQ ID NO: 230701 - DNA, 101 bp, Homo sapiens
gctccgtggagatcgtcccgcgcctgccggttggagaaggaaattgaggtgctggagcgtggagactccgccccagccactgccaaggagaacgcggcggc

SEQ ID NO: 230702 - DNA, 75 bp, Homo sapiens
ggttgctggatttgacccactgattctactgtgcaattcttgactatgccagttactaccagggcctatgggatt

SEQ ID NO: 230703 - DNA, 100 bp, Homo sapiens
ctcttccagaccatcatcagcgacatgaaggtgtcagttgtacccgaggcgttctcagcagcagcaagtacctgtggtggatttccaggctgaactgagg

SEQ ID NO: 230704 - DNA, 75 bp, Homo sapiens
tgggacatcagagggtcgcttcatgcagaatgcaaagtatggcgaaatccactaaatttatttaggggtgctgaa

SEQ ID NO: 230705 - DNA, 80 bp, Homo sapiens
ctggcaaagtacttcagaacttttattccttccagaagcagggtaagatgatggcatgcaaacactgcagtgacattttc

SEQ ID NO: 230706 - DNA, 83 bp, Homo sapiens
attagtgcttggagtcatgggagcaatcagaaatgatcaagggtgtatgcaacagcgttattgcaacaggctaacgaaaacag

SEQ ID NO: 230707 - DNA, 75 bp, Homo sapiens
gactgtgctttatcaggacatcactctgaaggtcatgacgccagtcagatcacactagccttgggcacagctgcc

SEQ ID NO: 230708 - DNA, 50 bp, Homo sapiens
tagcagattttgtaagggaacgtgatgctgcttcaaaagtcatggtggaa

SEQ ID NO: 230709 - DNA, 82 bp, Homo sapiens
ttgctgaaggttatcatcctgggagattctggctgccactgcagagccccgccatggaagacacgccgttggtgatatcgaa

SEQ ID NO: 230710 - DNA, 100 bp, Homo sapiens
aaaacaaagagttatatgaaatcaatcctccattcaattttgtggggaaattgcttggaccaagaggaaactccttgaagaggctacaggaagaaacagg

SEQ ID NO: 230711 - DNA, 97 bp, Homo sapiens
tgcaagcgccccatctatgagttcaagatcacatggtggtcagttcaccgggacctggaggcccagattgcgatcgtgacggagaaccaggccctgc

SEQ ID NO: 230712 - DNA, 83 bp, Homo sapiens
cagctgttggcgagcacgtcttcgcggtggagagcatcgagaagaagcggatccgcaagagtctgtagaagaggcgacaccag

SEQ ID NO: 230713 - DNA, 100 bp, Homo sapiens
ctgacggccgtgcccgaggggctcagcgccttcacccaagcgcttcctattttgtaacggattatgatccaaccattgaagattcttacacaaagcagtg

SEQ ID NO: 230714 - DNA, 50 bp, Homo sapiens
atcctctgtacgcccgttcactggtgaacggctgtttcctcttattcaag

SEQ ID NO: 230715 - DNA, 85 bp, Homo sapiens
ctgacgggcctgcgagggttgaagattgtgaagcaatagcctaaggtctttggctcaggcgttggggtagtctctgtatgtcaag

SEQ ID NO: 230716 - DNA, 100 bp, Homo sapiens
aagatgcagaggaagaggaaagcgaactgactgctctggcccatttagagtctcttgcagtggatgttgaggtggccaatccaccagctagtaaggaaag

SEQ ID NO: 230717 - DNA, 97 bp, Homo sapiens
cgggaagcactacaagggtcctgaagtcagttgttgcatcaaatacttcatatttggcttcaatgtcatattttggataactggtggtctcaggtat

SEQ ID NO: 230718 - DNA, 101 bp, Homo sapiens
gcggaggcggcggtcgccccggggctccggcggcggatgaagactggcccatttgcagagcactccaaccagctgtggaacatcagcgccgtcccttcctg

SEQ ID NO: 230719 - DNA, 97 bp, Homo sapiens
atgtctctagtggcggaagccttcgtctcccagattgcagccaagtcattgttggataagcgagatggtagtacaattgtcagacagcttgactgat

SEQ ID NO: 230720 - DNA, 96 bp, Homo sapiens
aatcaagaggaatgcacatctgtgaagatgctgtaaaaagattgaaagctaatatggattgtgctcagttccgtttgaaaataagctctatctagt

SEQ ID NO: 230721 - DNA, 100 bp, Homo sapiens
cccacctgtgccaacacaatacccgataacacaagtgcagcctccagctagcactggacagctgcaagctttcttcctggtggcagatgacatcatggat

SEQ ID NO: 230722 - DNA, 75 bp, Homo sapiens
gggacgcccgcgcgacgagcaggtggcggcggctgcaggttggtgttcgaggaagagacattgttgttcttggtg

SEQ ID NO: 230723 - DNA, 100 bp, Homo sapiens
cgagccaggaactgcgcagcctcttcgagcgccgcggacgcgtcatcgagtgtgacgtggtgaaagggtctctcattcatcacttttatctgctatgtgg

SEQ ID NO: 230724 - DNA, 50 bp, Homo sapiens
gggcaggacaataacactcagatcgaggttgcaaaagcttctcatttcag

SEQ ID NO: 230725 - DNA, 100 bp, Homo sapiens
ggggtggtgccgcgctcctggccccgcgcgggcggacggcggaggcgcctcccaggtattgttgcagcatctggcagtgagactgaggatgaggacagca

SEQ ID NO: 230726 - DNA, 82 bp, Homo sapiens
ggaccagcagctgtcgccgccgctctcaggaaaacagttcctcctgaggatttcagagaagagctggacttcctggctgact

SEQ ID NO: 230727 - DNA, 100 bp, Homo sapiens
tctgtagttactgtggaatcaataagccatggcatctaagaaatttgctgttaaagacgaatgccttagtttccactttccagcctggatcccctcacac

SEQ ID NO: 230728 - DNA, 82 bp, Homo sapiens
aaaggagccccgcgagtggcgcgccggggatactacatgaggaaataattgacttttataacttcatgtccccttgtcctga

SEQ ID NO: 230729 - DNA, 73 bp, Homo sapiens
agatgtactccagtatgccaagtctgccagaatttaatcagttgtggaagaaggactctgggaaaatggcctt

SEQ ID NO: 230730 - DNA, 75 bp, Homo sapiens
aaaggaatcttggattataatcatgagtgtgtgctgtatttatggagtttaaagattaatcatcccaaaacattg

SEQ ID NO: 230731 - DNA, 96 bp, Homo sapiens
tcgtgagggggtgacgggttaagattcggagagagaggtgctagtggctggacttgacctggaaagaccaggaggaggatgaggaggagggaggtg

SEQ ID NO: 230732 - DNA, 82 bp, Homo sapiens
cgcagatgcccaccggaatggagaaggaagaggagtcgcagcctcccgcgacgatgcccctcaacgttagcttcaccaacag

SEQ ID NO: 230733 - DNA, 100 bp, Homo sapiens
gatgggggtcaccgtccagagccaaggtccagggggcaaggtcgtggtgccactgattaatgaacttgaatcagcaatacatcagctgtacaaacagcga

SEQ ID NO: 230734 - DNA, 101 bp, Homo sapiens
gtggaattcgcgaagctgccaaagccttagacaaatcattcctttctgacaaacgatgagctcgctgtactccctgtcgtcaaagtgcttccctctggtaa

SEQ ID NO: 230735 - DNA, 100 bp, Homo sapiens
cttttgctgatatgcatgcatgtaccgaccttctgaacaaggccaacacctatgcagatcaaatgatgccgtttggaaaaatttcccagcagttgtgtgg

SEQ ID NO: 230736 - DNA, 51 bp, Homo sapiens
ggaacatgcagggtcctattttgacgactattagaagacacattagtgcag

SEQ ID NO: 230737 - DNA, 75 bp, Homo sapiens
gcatctgaagaccatggatcacaaccggaaccgcaggggtaactaaggaagtggatgctacatctaaagaggcca

SEQ ID NO: 230738 - DNA, 98 bp, Homo sapiens
tgggtgaactttcacggacaacctcagaggacaacgaagtgttcggttaagagcaggcttatgtgatcgctgtgcagtaactgaagaacatatgcgga

SEQ ID NO: 230739 - DNA, 75 bp, Homo sapiens
acccggtccttcagtggactgagaggggctgccgacagggcttggagaagatctctgcctacatgaagtccagcc

SEQ ID NO: 230740 - DNA, 50 bp, Homo sapiens
tgacccactacatgtcaaagaagattactcttgtctctgctgctcctggg

SEQ ID NO: 230741 - DNA, 75 bp, Homo sapiens
ggtgacagagtggagccatggctagaggttctgggccggagaaggggcgacgttcgggcaccccccgaatggaca

SEQ ID NO: 230742 - DNA, 98 bp, Homo sapiens
tgagctgtgcacgaccacaccgctgatgaagacaaggactcacagtggctgcaaggtagttaaaccagagagcaatgacaaagaaacagaagctgcgt

SEQ ID NO: 230743 - DNA, 98 bp, Homo sapiens
tggcggcggccctgggacccgcggaagccggcatgctggagaagctggagttcgaggacgaaggtgagcacctgcggatctgtccccagggctacacc

SEQ ID NO: 230744 - DNA, 75 bp, Homo sapiens
cttctttgacaagagagacaactctgactttggaatgaggcagatgagctccgtaaagctctggacaaccttgca

SEQ ID NO: 230745 - DNA, 80 bp, Homo sapiens
gacttccttgcagcctcttctccggatcccaccaaatattttggttgtgagctgggagcacagacccagtttgatgttaa

SEQ ID NO: 230746 - DNA, 118 bp, Homo sapiens
ctgccgtccttctccactttcgccagcccgtgccgcgagcgcggcctgcaggaggttaatttggagtggcccctggagtcagtttcctacaccatccgaggccccacccagcacgagc

SEQ ID NO: 230747 - DNA, 103 bp, Homo sapiens
ggacctgcggcccgacgaggaagttttctactgtaaagtcaccaacgagatcttccgccactacgaatgaaggatttgggggcagagcacttggcaggtcatg

SEQ ID NO: 230748 - DNA, 51 bp, Homo sapiens
caggcttagctgttaacgggaaagagacctattactacatttctccattag

SEQ ID NO: 230749 - DNA, 82 bp, Homo sapiens
tactgaacagtacactgaagctgctgaaagggctattgcaagacacgaagtccgagaaattgagcagcgacatacaatggat

SEQ ID NO: 230750 - DNA, 76 bp, Homo sapiens
ggtggaggagccattgtccagagggctattaagcggcgaccagggacagccacactcggggctcttacaatcaggg

SEQ ID NO: 230751 - DNA, 98 bp, Homo sapiens
gcacaggccgccgcgtgtcgagtccgcgcggggagcgcacgcggggcgggcggcgacaggaggaggaagccaagaatctggtgagcgaagccatcgca

SEQ ID NO: 230752 - DNA, 49 bp, Homo sapiens
taaagagttctgattcccagaggagatgactgatgacatggattcatac

SEQ ID NO: 230753 - DNA, 89 bp, Homo sapiens
gaaagaccgtgaaagctgtcatcgataggtttcttcgacttcattgtggcctttgggtgaggagaaagatatgatcgcttgctggagac

SEQ ID NO: 230754 - DNA, 98 bp, Homo sapiens
ggcagggctccctctggatgtggaattctccgtccctttccagggagggaacaaagcccacagcaccggattttttatcaagcagaaatgcatcgaac

SEQ ID NO: 230755 - DNA, 100 bp, Homo sapiens
gtcctggtgcttgatggtcgaggccatctcctgggccgcctggcggccatcgtggctaaacaggtactgctgggctgtgagaagacatttatcacagtga

SEQ ID NO: 230756 - DNA, 101 bp, Homo sapiens
ttaaaaaactggagaatgacaccatttctaagcaacttacattagaacagtcacccacaaaagctgtatataatgccagacattggaatcatccagattca

SEQ ID NO: 230757 - DNA, 75 bp, Homo sapiens
tggcaacattagatccacctcatacaggcaaaagatgtgattgaagagcatggtccttcagaaaaggcaataaac

SEQ ID NO: 230758 - DNA, 100 bp, Homo sapiens
ccgacctagctttctgggctgccgggagctcgcggcgagcgccccagccaggcctgcgccggcatcctccgaggttgatgctatgaaactgggagtaaag

SEQ ID NO: 230759 - DNA, 76 bp, Homo sapiens
tttgaggaaaaactacagtttgccttgccaggtagaagaatcaggggtacacatctttctggaatgactgcatatc

SEQ ID NO: 230760 - DNA, 100 bp, Homo sapiens
aaaggattgagagagaaaacttggttaaaggactggatgcatttgttctgagcctgctcactctagatggtgaatcaatctacagcctgacctcgaagcc

SEQ ID NO: 230761 - DNA, 100 bp, Homo sapiens
aaggaaaggtgccacagcagagacgcgaaggagaggccctagaaccgttatcaatactctggctgaccatcatcatcgtgggactgactttggtggaagt

SEQ ID NO: 230762 - DNA, 75 bp, Homo sapiens
gatctgagggccaaagtttggaaggcacctacaaaggcagcacctaagcaaaagattgtgaagcctgtgaaagtt

SEQ ID NO: 230763 - DNA, 75 bp, Homo sapiens
ggaacacactgaagttcttcagcttctcagccccccagatatggaatgtgcagatgtcccactattaactccaag

SEQ ID NO: 230764 - DNA, 87 bp, Homo sapiens
ggggtccccggccggccaagcaggaaaaggctgaggaggtgtatcgtctgtatcagaactcgcccctctcctcccaccccgtggtgg

SEQ ID NO: 230765 - DNA, 100 bp, Homo sapiens
taacaatgaccacctggtagagaaataccgcattcttatcacaaagttggcaacaccatcatgacatcacaacctgttcccaatgagaccatcatagtgc

SEQ ID NO: 230766 - DNA, 76 bp, Homo sapiens
ctacctctatgaggtagatattaaaccagacaagtgtcctaggagagtgaacagaacagtgcccaaacctcgtgtt

SEQ ID NO: 230767 - DNA, 75 bp, Homo sapiens
agagctaaacgttttagagtaccaaccattgtgtgctgtgaggtaaagctgacctgaataatgtcagattctcag

SEQ ID NO: 230768 - DNA, 75 bp, Homo sapiens
aattatgtgaaacctccaaatgtgggagtcagaaataccatcagaggaggggtactgtgactttaatagtaggcc

SEQ ID NO: 230769 - DNA, 101 bp, Homo sapiens
gcgggagacgagaagcctgaaaagtcgcagcgagctggagccgccggaggaatttatcatggcatccagcattgaccactacaagtaaaatgcgaattcca

SEQ ID NO: 230770 - DNA, 98 bp, Homo sapiens
cgagtgcagccggtgacccggcgagaggcggcgccgctcccaagatgtcgcagacggccatgtccgaaacctacgggaaaactgaggctgccatcaaa

SEQ ID NO: 230771 - DNA, 50 bp, Homo sapiens
gacagaatcatggaatctcatttaagggtggttctcttcccaaagtggaa

SEQ ID NO: 230772 - DNA, 102 bp, Homo sapiens
ctgatggcatcttcaaagctgaactgaatgagtttcttactcgggagctggctgaagatggctactctggagttgagaaacctctgcgccatgagagccaag

SEQ ID NO: 230773 - DNA, 100 bp, Homo sapiens
aaaattcttaaaaaggctcagaaagatggatttttgcatgagacgcttctggacaggctggtccacctggcagtgattcatgaggccccagcggtgctgc

SEQ ID NO: 230774 - DNA, 98 bp, Homo sapiens
ctgctgctgaagatctggaagacgcgctcctgcgccggtacgctatttgaagaacaggtttccatgctcttagaggagcatcagaaaatgaacaaacc

SEQ ID NO: 230775 - DNA, 100 bp, Homo sapiens
ttgcatggtgtttcaaagggtggtgaagaactaaggaattgcattttgtgaaaaaagaacaagaattttctgcaaggatcatatctaagtgcactttttg

SEQ ID NO: 230776 - DNA, 75 bp, Homo sapiens
cggcgcccccgccgctgccgccgcgacccttggcgcctgcccctgcaacgggagtcagtggtgccgaagaccaaa

SEQ ID NO: 230777 - DNA, 73 bp, Homo sapiens
tttttggaagtttgtggcggaggtattctctactgccgctgatggtcaaacgcaagtggaaattaaagtgtgt

SEQ ID NO: 230778 - DNA, 88 bp, Homo sapiens
ggggatagtggagctgcccactctagaggagctgaaagtagatgagagggaggaagaaggagacttcagagaaagaggccgtgtgatg

SEQ ID NO: 230779 - DNA, 76 bp, Homo sapiens
ggcagcggcaatgtgagctacgtgaagacgtctccattaacatatgctgtcaggaggataagagatgccttcagag

SEQ ID NO: 230780 - DNA, 95 bp, Homo sapiens
agccaacgcacctgcctgctccttctggacaagcccccatgccagccatcaagacctcctgccctgagcctcgcttttaaccttctggaacctgc

SEQ ID NO: 230781 - DNA, 100 bp, Homo sapiens
tttcccaggatgacagagctgaggcagagggtggcccatgagccggttgcgccacccgaggacaaggaagatgagaatgtgcctactgctcctgatcctc

SEQ ID NO: 230782 - DNA, 95 bp, Homo sapiens
cctattctcctaacatgtatcctggagcgaatcctaccttccaaacagaatgaaactagtgatcgagaagatggcctccccaaaggacatcatgt

SEQ ID NO: 230783 - DNA, 100 bp, Homo sapiens
gaggcggcggcgccgccggctttgtttgtacaatgacgacagaaacctgcttcgaattagagagaaggaaagacgcaaccaggaagcccaccaagagaaa

SEQ ID NO: 230784 - DNA, 50 bp, Homo sapiens
tgccctgtctcctcgcagatgaggacccattccaacaatctcgtaaaaca

SEQ ID NO: 230785 - DNA, 111 bp, Homo sapiens
gttgggctcgcggcgagcggacggggtcgagtcagtgcgttcgcgcgagacaatgcagatcttcgtgaagactctgactggtaagaccatcaccctcgaggttgagcccag

SEQ ID NO: 230786 - DNA, 51 bp, Homo sapiens
cttaaaggcccaccagaggactcacacagctgctcactcccaaagcctgac

SEQ ID NO: 230787 - DNA, 117 bp, Homo sapiens
ggagaagaggaggatgcggctcgtggtggatggcatggggcgctttggcaggctcagcagggagctgctggatgagaaagggcctgaagtcttgcaggactcactggatagatgtta

SEQ ID NO: 230788 - DNA, 100 bp, Homo sapiens
ccgggcgagcagagtaagaagcagggacatgagagatggctttagaagaaaaagtttctactcttcccattatgcgagagagcggtctccttataaaagg

SEQ ID NO: 230789 - DNA, 157 bp, Homo sapiens
caggcagcgagagacacgaggagcaaagcaagtgaaggcacagacgcacgggacaggagagcctgggcaagactggagagagttcaaagaggccttttcattgtttgaccggaccccgactggagagatgaagatcacctacggccagtgcggggat

SEQ ID NO: 230790 - DNA, 98 bp, Homo sapiens
gaccttgaatgcgctctatgtatgaggaggacttgctgcgtttaaagaaacaaatgagagtattttgtcagatatgtcaacattacctgaccaacgtg

SEQ ID NO: 230791 - DNA, 50 bp, Homo sapiens
tcaagggactgtgtccaccctcaggtccatgtgaaatctgaggtccttgc

SEQ ID NO: 230792 - DNA, 98 bp, Homo sapiens
gacagacaattgttcagttgcaaaaagaaactggagccaccatcaagctgtctaagtccaaagatttttacccagatccagctccaggtcccacaggg

SEQ ID NO: 230793 - DNA, 96 bp, Homo sapiens
gcgaggtggccaagggcctgctgcgggagctcctgccgcccgccgctggcttcaagtgcaagggccgttgctccagggagaactgcaaatatcttc

SEQ ID NO: 230794 - DNA, 60 bp, Homo sapiens
agaatggcagatgcactggataactatgttattcgaggggcccgctcctgcttaaaaaca

SEQ ID NO: 230795 - DNA, 91 bp, Homo sapiens
cagagaagtcgaaggggtgctggcgagacgggggtgatgcccacccgggcgagaaagacaatgcagatcttcgtgaagactctgactggta

SEQ ID NO: 230796 - DNA, 53 bp, Homo sapiens
cttcaggttcccgcgggaccctgccaggttaacaatgagaatgttgtcaaagt

SEQ ID NO: 230797 - DNA, 100 bp, Homo sapiens
accctgcccaacagaatttatatagagatgtgatgttggagaactacagaaacctcgtctccctgggtgaccttgaggaaccctgggagctcaggaagga

SEQ ID NO: 230798 - DNA, 75 bp, Homo sapiens
tggtgatgggtattacagatgtagatgataaaatcatcaaaagagccaatgagcttgacagagccaattcgctat

SEQ ID NO: 230799 - DNA, 100 bp, Homo sapiens
gaagacagcatgctgcatccctgggaggagggagctcttaaggaagttccaagaggcttcgtgacggagttatcagagacattgagaggcaaattcggaa

SEQ ID NO: 230800 - DNA, 100 bp, Homo sapiens
tctcgctctggccgacgagtggagaaaatttctgcatgaatccccagacagtgctgctcctgcgggtcatcgccgccttctgtttcctgggcatcctgtg

SEQ ID NO: 230801 - DNA, 74 bp, Homo sapiens
aaccgctttgtagaaaccaacctcttcctggaggagattcaggccccttcccagctgcctgcctgccctagcca

SEQ ID NO: 230802 - DNA, 95 bp, Homo sapiens
gtggacccatcccacgatgccagcaaagtcaaggccgagggccctgggctgaatcgcacaggtgtggaccttgtcaccgcctgtgacatccggta

SEQ ID NO: 230803 - DNA, 76 bp, Homo sapiens
ggaccatttcagaggttcaccgccatcattggacccaatggctctgccgaggcctgcctggagccccagatcaccc

SEQ ID NO: 230804 - DNA, 75 bp, Homo sapiens
gtagcgataatggatagcttatttgacaagctgttatctaagctttcagacaacacatgactaagacagaatgag

SEQ ID NO: 230805 - DNA, 98 bp, Homo sapiens
tcttgaccaggggccagatacagagaatgtccccatcatgtacatctgccatgggatgacgcctcaggaacagaagtgtgtcccggccagtggagaac

SEQ ID NO: 230806 - DNA, 78 bp, Homo sapiens
gaagtcttagttcgagatgtgtgtatttcatctgaaccttcacctagccccaggattacaaggaaaagcaccaggcaa

SEQ ID NO: 230807 - DNA, 82 bp, Homo sapiens
aagccatgatgcatgtagtgtgtgtgtactgcagctggagtgggccccagaccagttgcagagctattttgctgcatgtgag

SEQ ID NO: 230808 - DNA, 90 bp, Homo sapiens
cgttgcccgaccgctttccgggagactggagtcgaaggccgtgaggtatttttctaagaactctaagaaggagctgatgtggaggagcag

SEQ ID NO: 230809 - DNA, 74 bp, Homo sapiens
gatgtccaggtttgttacatagatgtgatgtttactgggacagcagatggccgggtcgtaaaacttgaaaatgg

SEQ ID NO: 230810 - DNA, 82 bp, Homo sapiens
cacccggtcctgggaatgtacgacgccaaagatgacttccctcttaggaaaacaggagccttcacgtaaatgggtccagtca

SEQ ID NO: 230811 - DNA, 99 bp, Homo sapiens
acatgacacttacaagatggacagggatgataattgggcctccaagaggacaggagagagtggcaagagtacgtttatcaagcagatgagaatcatcca

SEQ ID NO: 230812 - DNA, 83 bp, Homo sapiens
agaagataaacgaggggctggaacacctcgccaaagcagagaaataggggatatgagactttctactcggaatatcctgagtg

SEQ ID NO: 230813 - DNA, 98 bp, Homo sapiens
cttcacttccctcggtctgggcttctctgaggcggcgagagatggtcaggtctggagctcgaccgggccaggggtatagaacaggctatgcttacagg

SEQ ID NO: 230814 - DNA, 73 bp, Homo sapiens
ggatggttaccaaatttggaatgagtgaaaagttgggcatcgatgggctgattgttacgaacaccaccgtgag

SEQ ID NO: 230815 - DNA, 75 bp, Homo sapiens
ggagaaggggcttcctgagcgtcccagtacactgacagagcattccaagaatcaagcactacaaagtgatgagcg

SEQ ID NO: 230816 - DNA, 74 bp, Homo sapiens
tgatcttgctgttgtggatgtcagaattggtatgactaggaaactatggtccaggaggcagtggaggaagtggg

SEQ ID NO: 230817 - DNA, 75 bp, Homo sapiens
gtgaccgagagcgcgaatatcgtcatcgttagaagtagatctctggcttcctgctctgtttgttctggttgccct

SEQ ID NO: 230818 - DNA, 100 bp, Homo sapiens
ctaccacagccagacctatggcaatgggtccaagtgcgaccttaatgggaggccccgggaggccgaggttcggacatatctgaagagatggattaagaat

SEQ ID NO: 230819 - DNA, 82 bp, Homo sapiens
ttgtgaaaatggacatacggatgttgcagatgttttacttcaagcaggggctgatttagtcaaagagttagtggaagcagag

SEQ ID NO: 230820 - DNA, 95 bp, Homo sapiens
ggaagatgcaagcggtttgggaccttgaacaaggcaaatatggttttggtgccacttcggataaaccctttggactcctaactccaatcaggtgt

SEQ ID NO: 230821 - DNA, 136 bp, Homo sapiens
attgaagactcctacctgaaacatacggagattgacaatcaatgggccatcttggacggccctggatggggatttctctgaagacaaccgcaataagtgtcgcatcgccaccgcacccttgattgaagctgtggag

SEQ ID NO: 230822 - DNA, 100 bp, Homo sapiens
ctgcggaatggggtagatattaacacctgtaaccagtttctgtagaaaatgtttcctgactgcaatgagggaaagcggagcacattgtcccctatgtcgt

SEQ ID NO: 230823 - DNA, 75 bp, Homo sapiens
cgtggacatctgccacatgctggttcaggaggaggaagccaagaatctggtgagcgaagccatcgcagctggcat

SEQ ID NO: 230824 - DNA, 96 bp, Homo sapiens
ctccttggtcgccgcgtccttggctggcgtaaacatgccaaaggccaggatttgtttgatcagattgtgtaccacttggaccttgtggaaacagat

SEQ ID NO: 230825 - DNA, 90 bp, Homo sapiens
cgggccggggaccccttagacctcgtggcgctcgcagagcaggtgcagaaggtttttgccaatccagaagactgtgtagcatttggcaaa

SEQ ID NO: 230826 - DNA, 100 bp, Homo sapiens
tgttgtgagctgcacactcaagggtgtgataaactggcacagcctccaggttggcgggctcatctgcgctggggttctgtgcgccatgggcatcatcatc

SEQ ID NO: 230827 - DNA, 75 bp, Homo sapiens
tttgatgactctcaggacaaagcagatatgaattgagaattcgttatttgccaaaaggatttctaaaccagttta

SEQ ID NO: 230828 - DNA, 51 bp, Homo sapiens
gagggatccttcacccgtgtctgggtgtcttttatgaataatcaaaagcag

SEQ ID NO: 230829 - DNA, 100 bp, Homo sapiens
gcgacgaagagtactacgccaaggaggtttacaaaatagacatgccgcccttcttcccctccgaaacaatgtctcaggctgtgcagacaaacggaactca

SEQ ID NO: 230830 - DNA, 90 bp, Homo sapiens
gaaaagacggctggaagaagagtctgctcagttgtaaagaataccgaaatgccttagaggaattgtctaaagcgactcagtggaacagtg

SEQ ID NO: 230831 - DNA, 75 bp, Homo sapiens
caccattgactaccacaaaaccttggcggcctggggactcgggacaacaccctgatccgcatcatggtctcccgt

SEQ ID NO: 230832 - DNA, 98 bp, Homo sapiens
cgggatcatcaaccgagtagttcagcttctgatcatctcctactttgtagggtcttgggcgtctttggtactggcttttttaggggtctgcctgggga

SEQ ID NO: 230833 - DNA, 100 bp, Homo sapiens
aacaactgtacaacttggaaaccttgttacagtccagttgtgattttggtacatgatgttgattgatggcacaaatgaagtttttatgattgatagagac

SEQ ID NO: 230834 - DNA, 82 bp, Homo sapiens
gtggatgagaatcttcaagtgtccccgcttcatctgccgtgaattggatgccatttccactaatgaagaggaaaaagaggag

SEQ ID NO: 230835 - DNA, 96 bp, Homo sapiens
ggagcgtccgggacgcggagcccggagctggggcgacgaggcgattgcgggggcctgggctaggaattgaatgatctggcacgggaccctccagca

SEQ ID NO: 230836 - DNA, 100 bp, Homo sapiens
tgacagtcctcctggaggggatctctggccaaggagtgtacgtctgaagtttcctggatccccaataaacattactctgggatttatggtctgatgaagc

SEQ ID NO: 230837 - DNA, 73 bp, Homo sapiens
acagaattacagagtatgatgtattgttgcagcatctggcagtgagactgaggatgaggacagcatggacatt

SEQ ID NO: 230838 - DNA, 103 bp, Homo sapiens
taaaaaaattgcaagagagagactattttcgttattacaaggcccttgatgagcctccctatttgacagtgggcactgatgtgagtgctaaatacagaggagc

SEQ ID NO: 230839 - DNA, 82 bp, Homo sapiens
tcaacgtcctccgggaccggagtcagaaccctccgcagagtaaaggatggaggttctctggatcaagtcctgaagaaagctg

SEQ ID NO: 230840 - DNA, 100 bp, Homo sapiens
gaggtgctagtggctggacttgacctggaaaggtgagcccaggccaggatgggggactccagggacctttgccctcaccttgactccataggagaggtga

SEQ ID NO: 230841 - DNA, 100 bp, Homo sapiens
cggctggacctgttcgagatcagccagccgaccgagattgccgtatccctcaaatcgaagatgctgagattcataacaagacatatagacatggagagaa

SEQ ID NO: 230842 - DNA, 50 bp, Homo sapiens
agccaggccgtcgacgatgcccagataatttctgctgctgaaacattgac

SEQ ID NO: 230843 - DNA, 75 bp, Homo sapiens
cgagtactcttatgcagtccccatgttggccatgttagaggaagatttgttagccttgaaatctccttcaaaaga

SEQ ID NO: 230844 - DNA, 75 bp, Homo sapiens
ttcttgagacttatgggtgcaggaaagagcgagatgcgagaacacttttggctaaaaatctcccttacaaagtca

SEQ ID NO: 230845 - DNA, 96 bp, Homo sapiens
gcaatgtgtttctgcatctgctgcccgaagcctgggcctacacgtgcagcgccagccctggtggccaaacaggagaagaagaagaagaagacaggt

SEQ ID NO: 230846 - DNA, 90 bp, Homo sapiens
caggttctctgcagatgcagtaccagcagagcatgcagaaatgcgcccatgctggttccagctggatcagatccccttcaaggacatgtg

SEQ ID NO: 230847 - DNA, 83 bp, Homo sapiens
gccgcaccaagaaccaaccctgccagcacctggaccttggacattcagacttcagaatggattaaactgcaaatatctcatga

SEQ ID NO: 230848 - DNA, 75 bp, Homo sapiens
caggttacaaacccagatctcacacaagtggtcagtttggttgtggaaagtgagatggaagattttcgaggtata

SEQ ID NO: 230849 - DNA, 50 bp, Homo sapiens
gtgactttttacttgatccatacaaggggaggaacaggaagagaagagtg

SEQ ID NO: 230850 - DNA, 75 bp, Homo sapiens
acttgcaagaaacctcaggacttgagtaacagcaacatggaatatattaaaggaatctgtgaacctgaactagaa

SEQ ID NO: 230851 - DNA, 85 bp, Homo sapiens
tccctgcagtaccctttaacggcagaggcagaggtgaatgtggtttctaccaaagaagttttgatgaagtagagggtgtttttgg

SEQ ID NO: 230852 - DNA, 83 bp, Homo sapiens
ctgggatggaaattttttgatcatgcggcacatcttgggggagctctttttggaatgtcccagaggtgaggaagaagttcact

SEQ ID NO: 230853 - DNA, 50 bp, Homo sapiens
gaccccctggtcatggccaaaccctgggaggtgaacacagaaaagctgac

SEQ ID NO: 230854 - DNA, 83 bp, Homo sapiens
cgggagccgggcgcggctctgtgtggactcggagaaacgcgggttaacacagaaatctgcctcctgggccatgccgcttctaa

SEQ ID NO: 230855 - DNA, 76 bp, Homo sapiens
cgcaagtcgagaggaaactgttgtgcctcttcatattggcgatcctgttgtgctaaagtaaataatgccagcctga

SEQ ID NO: 230856 - DNA, 100 bp, Homo sapiens
tcagaaggagcaggattaccaaagggaggaggaggaagagcagccgcaggcagcacagcctcccaccctgcccgtggaggagaagaagaagattccagat

SEQ ID NO: 230857 - DNA, 75 bp, Homo sapiens
cactccccagggcagaaatagcgaccatggcgagggcgacataccttctgttgaataccttttacaaaatggaag

SEQ ID NO: 230858 - DNA, 132 bp, Homo sapiens
ccgcctccgggctccttcggccccgccatgggctgctgcagctccgcctcctccgccgcgcagggctaccctgagaggaatctacatgcagagaagttcaggagactgaactaacggaacgtcaggaagcgc

SEQ ID NO: 230859 - DNA, 100 bp, Homo sapiens
aataacagctaccattgcaaaacgaaaatctttcattggcaccccttactggagtagcactgtagatgggttaaggaaaagacccctcatcgtatttgat

SEQ ID NO: 230860 - DNA, 100 bp, Homo sapiens
aatgcgctcaggatcgctgcaacgccaagctcaacctcacctcgcgggcgctcgacccggcagtgaacaaggggagaagaattgccttcagctccacgtc

SEQ ID NO: 230861 - DNA, 98 bp, Homo sapiens
tgcgactcctggaccaccgggcgctggtctgctcccagccggctggtccagggaccctcatcatggccacaggagtccaggactttaaccggacagag

SEQ ID NO: 230862 - DNA, 82 bp, Homo sapiens
cggcggcggcggcggcagtgacgtcgccggacctgcctagagctggaacgttacctccagagcgagccctgctatgtttcag

SEQ ID NO: 230863 - DNA, 104 bp, Homo sapiens
ctcagagatccaagtgcgcgccctggcgggtccggaccaaggtttacccaaggtccagcctagcccctaggcaccatgtcggacagtgatctaggtgaggacga

SEQ ID NO: 230864 - DNA, 51 bp, Homo sapiens
ctaaacacgtggaaagaatcaatttgggacgagctccgagacagtgacagt

SEQ ID NO: 230865 - DNA, 82 bp, Homo sapiens
aacaaaatctggcctgaaataaaagccaagacaatgcaaactccagtgaacattcccgtgcctgtgctccggctgccccggg

SEQ ID NO: 230866 - DNA, 82 bp, Homo sapiens
cgcggcccgaggtctccgcccgcaccatgcggctgggcagggctgaaggcctttcggcagcagctgaggaagaccacgcgga

SEQ ID NO: 230867 - DNA, 99 bp, Homo sapiens
tcaaaatatactatcatgttgttgaaactgggtccatgggagcaagattagtggctgctaaacttgaaccgaaaagatcatccgggaagcccacgggac

SEQ ID NO: 230868 - DNA, 96 bp, Homo sapiens
gcggatcacagcaacaaagagagaaacagcagcaacatttttgaaaaagccgcggcccatggagcccgccggcccggcccccggccgcctcgggcc

SEQ ID NO: 230869 - DNA, 74 bp, Homo sapiens
cagagttcaaggaggccttccagctgtttgaccgaacagattgagatagagagaagcctgtattcagaccacga

SEQ ID NO: 230870 - DNA, 75 bp, Homo sapiens
gtgaccccatatatgattttctttaaggatggtttagaaatggaaaaatgtgaatcagagatcattgatttcttc

SEQ ID NO: 230871 - DNA, 98 bp, Homo sapiens
aagaggagaggcacccgatatatgttctctaggccttttagaaaacatgctgaccccattgcgcaggtccaccaggccttctgcaagaacctgctgga

SEQ ID NO: 230872 - DNA, 98 bp, Homo sapiens
tgtctttggacaaaattgagaagaactcataaacttggcttcctcgcttctgctcctcaggcactgacatggccgtcttctgtctgctgtgtgggaag

SEQ ID NO: 230873 - DNA, 99 bp, Homo sapiens
gagcattctccagggaaaggatgacatatttttggacctgaaacagaaattctggaacacctatatggtggaacgagaactttgttcagccacagctga

SEQ ID NO: 230874 - DNA, 90 bp, Homo sapiens
gtcaggggcacagagagatggagagagacctagttagatatgattctataacagactcttccagaaatgatatgaagaggaaatttgccc

SEQ ID NO: 230875 - DNA, 75 bp, Homo sapiens
ctttatgtgcctgtaaaagaatacccagatcccaactatggaaaccagcaatatggaccaaacagccagttcccc

SEQ ID NO: 230876 - DNA, 49 bp, Homo sapiens
cagctagtaatttgccttctggattgctacccacctttctgttctgaga

SEQ ID NO: 230877 - DNA, 87 bp, Homo sapiens
ttatgaaatttttgggaaggtgcaaggggtgtttttccgtaagcatactcagatttccacaagacggcaccctatgtcgtcactggc

SEQ ID NO: 230878 - DNA, 82 bp, Homo sapiens
attgaccccaaagttgcatttcctcgtcgagcgcaacccaaggaacaagatcactcaaggtgaaggataatctactaatacc

SEQ ID NO: 230879 - DNA, 74 bp, Homo sapiens
cgtggtccgggctgagagagactgccttagtggcaaggtgaccattgtgaggtagatattttgttctaattttc

SEQ ID NO: 230880 - DNA, 100 bp, Homo sapiens
gtgcagtttgcctcgcaggagttagctgagaaggctctagggaaacacaaggagaggatagggcacaggtctggaacaaaaagaatgcaaatgaaaaagg

SEQ ID NO: 230881 - DNA, 83 bp, Homo sapiens
catccctggaggagacctggcagcagaaatgcttcggttacccacagtctttcgccagatgagaccggtgtccagggtactgg

SEQ ID NO: 230882 - DNA, 75 bp, Homo sapiens
cgccttcgagcagctgcagaggtcccgggtcgaccccatcccatatgacactccaaaaccagcgggccacacgcg

SEQ ID NO: 230883 - DNA, 100 bp, Homo sapiens
gcctcagggagaagaagcaagtctcctcgcagtaagagaaaccgaagtcctcaccactcaacagtcaaagtgaagcagcctcctgacaaggtgatccggg

SEQ ID NO: 230884 - DNA, 73 bp, Homo sapiens
tgatggaggaagtgctcctgctgggcctcaaggaccgcgaggtgaaaggtgtagcagtcactcggcctacacc

SEQ ID NO: 230885 - DNA, 101 bp, Homo sapiens
ccaacttgctgcgggtggatctccgctggacacaccgcctccgagatgtgtcttgctgaatcagggctctcttatccctgccatcgacttacagtgggaag

SEQ ID NO: 230886 - DNA, 83 bp, Homo sapiens
cccggcggcgtggaccacctcccggtgaagatcctgcagccaggggtcgggccccggctcagtggtcccaggcagctcgggtg

SEQ ID NO: 230887 - DNA, 75 bp, Homo sapiens
ctgtcaaagggtgagacaaagttcatggaaatctgaaatagagtactatgctatgttggctaaaactggtgtcca

SEQ ID NO: 230888 - DNA, 123 bp, Homo sapiens
cgagtcctcgccatgccggcccggcggctgctgctgctgctgacgctgctgctgcccggcctcgggtttggaaattttagcattcaggtgccaggaatgcagatgggacagccagtgccagaa

SEQ ID NO: 230889 - DNA, 76 bp, Homo sapiens
cctgtcggcagactggtgacttcacttttgagtgcaactgccttccagcttcaggatgagttagagaaaggtgaac

SEQ ID NO: 230890 - DNA, 100 bp, Homo sapiens
tgaggaaagaagcagctatgaagaccagggggttcagctttccaagacaaagccacgacagcccaaccctgactggcgttactctgcctccctgagagca

SEQ ID NO: 230891 - DNA, 96 bp, Homo sapiens
ggagttcaagtggatgcgcgatgacagtgagctcaccacctacagcagcgaatataaaacattcagaagattctcggccttgccccttcacgagcc

SEQ ID NO: 230892 - DNA, 100 bp, Homo sapiens
cctggtccaaggacacctacagccccgacgaacatttctgggtgacactcaacaggattcccgtcctattttgtaacggattatgatccaaccattgaag

SEQ ID NO: 230893 - DNA, 90 bp, Homo sapiens
cttggcctgtccctcacatccgatgcaccctttttgtcagattatcaggatgagggagtcttttagtcctgctatacagctgcaccttgt

SEQ ID NO: 230894 - DNA, 75 bp, Homo sapiens
tcctaatccctagccactatggtgaccagcgccatgtccagccaggtggtgggcattgagcctctctacatcaag

SEQ ID NO: 230895 - DNA, 98 bp, Homo sapiens
aggagaccggcacccagacaggtggcgaaggcagaggacttttatcaaaatacaactcaaacctagctactccaatagcaattaaagcagtgccaccc

SEQ ID NO: 230896 - DNA, 75 bp, Homo sapiens
ccctgctacagagcaggagttgccgcagccccaggctgagacaggttcacaactacatgatgccacccctcgacc

SEQ ID NO: 230897 - DNA, 90 bp, Homo sapiens
gccttctccgataggaacaccctcatcatctacctggacaaggtctcccactccaaagagcaaacgtaaatctaaggacaaaaagcgaaa

SEQ ID NO: 230898 - DNA, 100 bp, Homo sapiens
cagaagaaagaagaggagaaggagcagtccgtgctcaaacccaacatgagtgaagtttcctgcaagaaacgggacgactatttggaatggccagagtatt

SEQ ID NO: 230899 - DNA, 116 bp, Homo sapiens
ccagaatgacgagtttgatgtgttcagcagggactcagtagacctgagccgggtgcacaagggcaagaggaaggcagcctggaggaggtggccatggaggatagccttcgttatcg

SEQ ID NO: 230900 - DNA, 96 bp, Homo sapiens
cgggagcggtctggcgctcccgccgcagctgagatctgtatctgtggacctgaatgttgatccctcgcttcagattgacatacctgatgcgctcag

SEQ ID NO: 230901 - DNA, 96 bp, Homo sapiens
catcaaattccagaacatagtggtggaaatactaatcgagcactttggcaagagactgtgaaccaggaagagaagagtggcccaggtgcaagtggg

SEQ ID NO: 230902 - DNA, 109 bp, Homo sapiens
aaaaattccgccgaaaaagagaagacgctttacccgactctttgggccgttatctcacacaatgcagatcttcgtgaagactctgactggtaagaccatcaccctcgag

SEQ ID NO: 230903 - DNA, 74 bp, Homo sapiens
ccatcgatgtcaactatgagaagctcaaaactgacattaaggtggttatcactaggctaaaactggacaaagac

SEQ ID NO: 230904 - DNA, 50 bp, Homo sapiens
gggacgtggggtccaccggtacaggacccgtgcatctcttccgactctcg

SEQ ID NO: 230905 - DNA, 82 bp, Homo sapiens
ctttatgatgatgcagctattttcgaggtatggcctcacaagtcttggtctacccaccatatgtttatcaaactcagtcaag

SEQ ID NO: 230906 - DNA, 100 bp, Homo sapiens
gtccaggcaacaaatatgaatgacttcaaacgaggagagtcccgtattctcagagtaaaagttgtttctggaattgatctcgccaaaaaggacatctttg

SEQ ID NO: 230907 - DNA, 98 bp, Homo sapiens
tgcgtgttgtccacccaagatggagttcctcctggggaacccgttcagcacaccagtggggcagtgcctcggtggtgactttcgatgcagggggagta

SEQ ID NO: 230908 - DNA, 90 bp, Homo sapiens
ggaagaagaggtgaagctcaaggcacaggtggcccgatcccagcaggacattgaaagtgagacggtttaagcggaagcatcttactgcca

SEQ ID NO: 230909 - DNA, 90 bp, Homo sapiens
gctactactggttccatcgtatggctcatggccacggactctgactacgaggacgcgctgcccaagcactccttcgtgaaccactacatg

SEQ ID NO: 230910 - DNA, 100 bp, Homo sapiens
cagccaggtccagctcgccccgtgattgggctctcccgcgatctgcaccgggggaagcgcatgggccatgctgcaccttacaaaacggtctccgtccgcg

SEQ ID NO: 230911 - DNA, 75 bp, Homo sapiens
gtgaggcctccccagccacgtgaaactggccacccgttcatcgtgcagttcaatgatggaaatgccgccgtggtg

SEQ ID NO: 230912 - DNA, 82 bp, Homo sapiens
tctttgtctttgcagtggtcatctatttccagatttccatggtgtcagtgattcatattcctgataggacttataaactatc

SEQ ID NO: 230913 - DNA, 75 bp, Homo sapiens
agtgcttacaccgcccagcccactcaaggatatgcacagaccacccagacctgagtcagaactccatcacagggg

SEQ ID NO: 230914 - DNA, 75 bp, Homo sapiens
agatatcttgaaaagctgccagaaagagaagttgatgacgcctgagatgttttcagaaatcctctgtgacgatct

SEQ ID NO: 230915 - DNA, 75 bp, Homo sapiens
ctcctgcctcccagagaggggagccggcgaggatcaaaatcttcgaaggaggtttattaaccttgcaagaactct

SEQ ID NO: 230916 - DNA, 75 bp, Homo sapiens
cagaattttacaattctctcatctgggttaaacatatctgaagagatggattaagaatgctttggattaaggatt

SEQ ID NO: 230917 - DNA, 125 bp, Homo sapiens
ggcgtgttccagaggcgcggggcgccgccgctgcagctgccgcgcgtagctcccagctcctccagcagccgacaggaggcccgtcaagatgcaggcaggcattgccaccccagggatgaagacag

SEQ ID NO: 230918 - DNA, 100 bp, Homo sapiens
ctacaggagtccagggctggagagaaaacctctgcgaggaaagggaaggagcaagccgtgattggaactagatggaaagatgttgtctccaaatgcattc

SEQ ID NO: 230919 - DNA, 100 bp, Homo sapiens
cggcgcagcgcttccggctccagtaacttaggggtaccgccaggccggggaagctgcccgctcaccatgcccctgcccttcgacctcatctacaccgact

SEQ ID NO: 230920 - DNA, 75 bp, Homo sapiens
gtgcccctcaccgccttcgccctggagctggagcatgccctcagcgccatcgtgtgaagcagtattctggaaagt

SEQ ID NO: 230921 - DNA, 100 bp, Homo sapiens
ctggtctcctactcccagatgcatccgtgtcaagaggtgagagacttcagaggctgccctttcttttcatctgctgcttgtgaaaggaaaacatcttggg

SEQ ID NO: 230922 - DNA, 74 bp, Homo sapiens
tttccagcagtccagcacggccaagtcagccacctggacgattgtccccttggggcggaaagaagccaaggcca

SEQ ID NO: 230923 - DNA, 100 bp, Homo sapiens
cgtggaggtggccgtggaggcagaggtggcatggggaaggtgtcttgctgcaggtaactaatgaagaagtggtcaaccacagagtcttcaagaaataaga

SEQ ID NO: 230924 - DNA, 82 bp, Homo sapiens
cgagcgcaaggacagcgcgaggtccgcgcagcccagcgcagccatcttgccttgcgccatggactggcagccagacgagcag

SEQ ID NO: 230925 - DNA, 101 bp, Homo sapiens
aggaaacagctggctaagctcatcattgttactgggaaatcctcattgacgattcaatttgttgaaggccaatttgtggactcctacgatccaaccataga

SEQ ID NO: 230926 - DNA, 83 bp, Homo sapiens
gccggttcttggtgggatctgagcagcatcaagatggtgctcatgtggaccagtggtgacgccttcaagacggcctacttcct

SEQ ID NO: 230927 - DNA, 100 bp, Homo sapiens
gggaaggagcacccaggagctgaagtctgggttctgcccgcacacattcctcgccaccttcttggtgtctgagaacctccagcttcacctccttttctgg

SEQ ID NO: 230928 - DNA, 76 bp, Homo sapiens
gctcacgcagcaggagcaggggacgaaggagttcattcaaaagtgcctgcagtctgagcctgctcgcagaccaaca

SEQ ID NO: 230929 - DNA, 83 bp, Homo sapiens
gcgggggccgggggagagcctgtttgcgcagtacccccggagggcggaaggccgccgagctgcacataaatcaactcctcctc

SEQ ID NO: 230930 - DNA, 75 bp, Homo sapiens
tcaccatggtgggccccctcctgctcccccgaaccgctcggcagcaattccatttccgtgagggcgtttctagat

SEQ ID NO: 230931 - DNA, 82 bp, Homo sapiens
caggaggccaggggtgtcgccatggttctctccataaatgaagaagggctaaggcgatgcgaagagaatacaaaagtctttg

SEQ ID NO: 230932 - DNA, 96 bp, Homo sapiens
tgacagaagagctccagaatgtgaaacaaaatttttccctagattggtgtaaacagccagacgtgggccttcccaaacccgacctggtcctgttcc

SEQ ID NO: 230933 - DNA, 75 bp, Homo sapiens
gggaacaacatacagtgacgcttcacaggaagtcaatgaaaggattctattttgcaaagctgtattatgaagcta

SEQ ID NO: 230934 - DNA, 100 bp, Homo sapiens
aaccgtggctgctcgataaatcagacagaacagttaatcctcaatttaagcctgatctaacccctagaaacagagatcctccatagataatgaaaacctg

SEQ ID NO: 230935 - DNA, 102 bp, Homo sapiens
ggaatatactgctgaaataatgtttgagtccttcaatgttccaggcttgtacattgctgtgcaggatgagctttctgatgttagccaaggcggatctaaagc

SEQ ID NO: 230936 - DNA, 50 bp, Homo sapiens
tcagtttctgtatagtgtaaaagggtgtccggtggagagctgtttgaccg

SEQ ID NO: 230937 - DNA, 98 bp, Homo sapiens
agccttcatgtgcgagacggcactccactacatccatgatgggatcggagccatggtgaggaagaggatggagatgaagatgaggaagctgagtcagc

SEQ ID NO: 230938 - DNA, 100 bp, Homo sapiens
aatttgctagtaacgtcatggaggatgaacgacaggctgttcttgccttagctgcatcttggacctcaagacaagtaggagaacggacgttgaccggtac

SEQ ID NO: 230939 - DNA, 82 bp, Homo sapiens
cggcgagtttccgatttaaagctgagctgcgaggaaaatggcggcgggagagtcagcgtgggagaaattgtaacgagaaacc

SEQ ID NO: 230940 - DNA, 80 bp, Homo sapiens
gttttttgatgctgaggagctcctggtcgatgaagaggatgatgtttttggtgaagaatcttatggcaagggccttatat

SEQ ID NO: 230941 - DNA, 50 bp, Homo sapiens
cgcagttatccaacaatgtctggtcagcccaaggccaaccccactgtcac

SEQ ID NO: 230942 - DNA, 100 bp, Homo sapiens
aggccaccatgctcagtctcaagctgccccaacttcttcaagtccaccaggttttctgcctcctggacccccacctcctataactccaccagtatccatt

SEQ ID NO: 230943 - DNA, 105 bp, Homo sapiens
ggaatatcgagagcgtcatgaacccgagctatagagaaaggagatgagacaatgcagatcttcgtgaagactctgactggtaagaccatcaccctcgaggttgag

SEQ ID NO: 230944 - DNA, 83 bp, Homo sapiens
aggacaacgactaccaccgcagcgacgagcaggtgagaagccctaccactgcaactgggacggctgcggctggaagtttgcgc

SEQ ID NO: 230945 - DNA, 100 bp, Homo sapiens
tgcgttctgagccgtctgtcctgcgccaaggagctgtgcggtcttatgcattggaacttaatttgacagattcagaaaatgccacttgcctttatgcaaa

SEQ ID NO: 230946 - DNA, 82 bp, Homo sapiens
tgtacagcagtcgcctgctgcagtactcagatgccttggagcacttgctgaccacaggaaggttgtgcaggaccagcgttcc

SEQ ID NO: 230947 - DNA, 74 bp, Homo sapiens
gagtgattgatcgtgcgattcagactgattcttgctattccaaatcctcttccacgttgacagcccttcagata

SEQ ID NO: 230948 - DNA, 97 bp, Homo sapiens
atttaaaggagcagccctggtgtcacctatcagtaaaaggattccagtggaatgacactggtgatgcttgccgccgccggagggcaggacgacctcc

SEQ ID NO: 230949 - DNA, 75 bp, Homo sapiens
tgagatcaagcagattgtgtccgagtatgcagagaagattgagaggatccagaatccagatctctggaatagcta

SEQ ID NO: 230950 - DNA, 98 bp, Homo sapiens
ctggagcccgcgcagcgccccgcagggcgatggacggccgaaccccgcgcccgcaggacgccccagccaggatgaccagtgtcccagtgaaggaacga

SEQ ID NO: 230951 - DNA, 95 bp, Homo sapiens
agcactatttgataccaccaatcagctcttcacccggttcagtgacaacaaccaagcattagggcgagaggtcaatgatcttaaaagaaaatctc

SEQ ID NO: 230952 - DNA, 97 bp, Homo sapiens
ctatcgccgagctcgttggagcttgaacccattgtcacccctccggctacaagatcaagctgcagagaccattgaagctctgcatgcagcaggcctg

SEQ ID NO: 230953 - DNA, 78 bp, Homo sapiens
gagttttctagaagcctgtcgaaaaatgggggtgcctgagggacctcaggatggaaaccagcagcctgcaccgcccga

SEQ ID NO: 230954 - DNA, 73 bp, Homo sapiens
ccacttgtaccttgtccccagcgacgccttgctaacaaagctgaagttcctgtctttgccagacacctggatg

SEQ ID NO: 230955 - DNA, 100 bp, Homo sapiens
ctcactgcaaatagaccaaagatgcctggaagaaggttgccgggccgtttcaatggtggacattctgtgaattttattgtgagtgactctggagcacatg

SEQ ID NO: 230956 - DNA, 100 bp, Homo sapiens
cctgtgacctgcatgtactgggggattcgcagggaggatgtcgggacaccccggaagctgggaaatgaaagctaaaagtttggccatgtcagttactact

SEQ ID NO: 230957 - DNA, 75 bp, Homo sapiens
tccactcggctggcctctgcgcctttctctcatcccgattgagattttagagaaaacaactactatctatgagga

SEQ ID NO: 230958 - DNA, 90 bp, Homo sapiens
cttcatcatgcccatcgaggtgcacttcaaaaacaagagtgcctggtgaagaatgtgatgggatcactagcatgtctgcggagagcggcc

SEQ ID NO: 230959 - DNA, 83 bp, Homo sapiens
cgagacttaccagagccacaagggtgcttcaaggatgaccgcatcgtcttctggacttggatgttctccacctacttcatgga

SEQ ID NO: 230960 - DNA, 82 bp, Homo sapiens
cgacgccttcccggaggagtacgtgcccaccgtcttcgaccactacgcagggggggccctcagcctcttggccttgaacggg

SEQ ID NO: 230961 - DNA, 75 bp, Homo sapiens
ggccctgaggctgcaccaagtggcgaaggagccggctccaagaaagagaactgccgtcctgatggaagagaactt

SEQ ID NO: 230962 - DNA, 75 bp, Homo sapiens
aattagcagattggccgatgattcagatgatgaataaggtatttggaggtactgtgcacaaaaaaagtgtcagag

SEQ ID NO: 230963 - DNA, 89 bp, Homo sapiens
aaaggccgcctgtccctgcagaatacaggtattgatgaagatgaccctactgctgatgataccagtgctgctgtaactgaagaaatgcc

SEQ ID NO: 230964 - DNA, 112 bp, Homo sapiens
ttcaacatgatagagcagagtggaccaccccatgaacctcggaccaaactcttacccaggatctactggagcagctgttggagcccatgacgcctgtcgggatgcaaaagag

SEQ ID NO: 230965 - DNA, 83 bp, Homo sapiens
cgccatgaaggcctcgggcacggtaaaagtacacctgtaagccagcttggttccgcagactttcccgaggcccccgatccatt

SEQ ID NO: 230966 - DNA, 83 bp, Homo sapiens
ccccgcgctgcggcctggcggcttccaggcgcactaccgcgttcaaatctgaacatcaatgatgtactagggaactactcatt

SEQ ID NO: 230967 - DNA, 100 bp, Homo sapiens
cttccagaacatctgggagaatatttaatggaaaatcgcttggttaaaacctgacacttttaacagctcatggggcattcagaatgggaccacaaacgag

SEQ ID NO: 230968 - DNA, 75 bp, Homo sapiens
aagaatgccagcaacatggagtacagcatctactgccgaggatgttccaagccgctgtgctgctcgtgcgcgctc

SEQ ID NO: 230969 - DNA, 75 bp, Homo sapiens
cgcacaattgccagctcaggctaaggactgcaggaggttccagcatgttggcagataaattgaacatgactccag

SEQ ID NO: 230970 - DNA, 83 bp, Homo sapiens
atcctggggacctggtacatggttcgagatgcagcaataaacagcttagtggaaatttacagacatgtaggagaacgtgtgag

SEQ ID NO: 230971 - DNA, 90 bp, Homo sapiens
ggtttgtgcagctctattaccacgggaagatgcagacagacatgctgaactatctggaagtccactgaaaagcaaaagcactaggaagcc

SEQ ID NO: 230972 - DNA, 83 bp, Homo sapiens
catgaccaagcgcctctactacctctggatgtgagcagtttctcctcaaataccccaacggagtgaaccccgtgaacagcaac

SEQ ID NO: 230973 - DNA, 82 bp, Homo sapiens
cggaggccgcccccgcggcggccgcgctcttcgcctggccctgaccctctattctgcaccctgtgagccaccgagactgaac

SEQ ID NO: 230974 - DNA, 75 bp, Homo sapiens
ccatcccaccaaagggggctgctgaccgagagagctcactcagccagattgctggactcgctgaagagagactac

SEQ ID NO: 230975 - DNA, 75 bp, Homo sapiens
tggatcaacaccggggagtctgcggtgtgaccgcaacaagggaaaacatggcttatactgtggaatgcctgcggg

SEQ ID NO: 230976 - DNA, 73 bp, Homo sapiens
gctgagtgctaaactgtgtggggcgcggatgggatccagctgttagtcggttccacttacttacatgatcatt

SEQ ID NO: 230977 - DNA, 100 bp, Homo sapiens
aggaaacagtgacagacctggagactgcagttctctatccttcacacaggaaggaatcgtgtctcctagtgacctggaccttgtcatgtcagaagggttg

SEQ ID NO: 230978 - DNA, 100 bp, Homo sapiens
caaagacagtgtccagctaaaggaggtagcatctccgcccccacttactgatactcctgacactacagcaaatgctgaaggagatttaccaacaaccatg

SEQ ID NO: 230979 - DNA, 98 bp, Homo sapiens
ctgcagtttgcctactataagtactggggcagcacctactccgtgtcagtggtggagaccgactacgaccagtacgcgctgctgtacagccagggcag

SEQ ID NO: 230980 - DNA, 100 bp, Homo sapiens
agaaaacagccgacttcgacagtctttggtcatgcttcaaggaaggaccatcgagacctgttcttgaatacatcgatctggtctgtggtgatgatgaaaa

SEQ ID NO: 230981 - DNA, 80 bp, Homo sapiens
acagttacatagtaaaaggaggcctaactctttcgacgtgtagcagcagctttgccgggaatggaaagcacacaggacag

SEQ ID NO: 230982 - DNA, 51 bp, Homo sapiens
tggtcatttcagatgtgattcatctagatttggtgctatggagaaattttt

SEQ ID NO: 230983 - DNA, 88 bp, Homo sapiens
aaagagccatacgaccttcggatgtatgtccctgggaagctgcatgatgtggaacacgtgctcatcgatgtgggaactgggtactatg

SEQ ID NO: 230984 - DNA, 82 bp, Homo sapiens
ccgagcgcaaggacagcgcgaggtccgcgcagcccagcgcagccatgttagctttatacgtctacgaatatttactgcacgt

SEQ ID NO: 230985 - DNA, 95 bp, Homo sapiens
ggcaagatccggacgcggcgttgccaccaggggccaattaagccttaccagcaggggcgacaacagcatcaggtctcggcgcggaagatggccgg

SEQ ID NO: 230986 - DNA, 131 bp, Homo sapiens
ggtcactcagttcggcaacaagtacatccagcagacgaagcccctcaccctggagcgcaccatcaacctcaactccgaagtcaagcccgcactctgattacctttgctggaatgataccataccgaacgtc

SEQ ID NO: 230987 - DNA, 100 bp, Homo sapiens
cagggaaccctggtcaccgtctcctcaggaatactcccccagttgcaagaggcgcaggaccgtggaagacttcaacaaattctgcacctttgtcttggcc

SEQ ID NO: 230988 - DNA, 75 bp, Homo sapiens
gcagatcggcgatgtggtgcgaatacaggagacgtgtggagtgctgcatttgatacagttcttgggataaatgtt

SEQ ID NO: 230989 - DNA, 100 bp, Homo sapiens
gcggaagcggagagcaacagcgcgccgcatatcgcacggatgactgccatccctgggttttgccagtagtgaagaaagtggagcagaagattgctaatga

SEQ ID NO: 230990 - DNA, 96 bp, Homo sapiens
acaaatgaagatgtttccagccctgcctcggcggaccaaaggaatgctgatcctaagtcatccctcaaaggtgtaagcaaccagcttggagaaggg

SEQ ID NO: 230991 - DNA, 100 bp, Homo sapiens
agaacttggaacaaagcccctgcaggccccaggtttccgaggaaggtgtcttgctgcaggtaactaatgaagaagtggtcaaccacagagtcttcaagaa

SEQ ID NO: 230992 - DNA, 96 bp, Homo sapiens
agctgtgccgcaccgaggcgagcaggagcagggaacagacaatgcagatcttcgtgaagactctgactggtaagaccatcaccctcgaggttgagc

SEQ ID NO: 230993 - DNA, 50 bp, Homo sapiens
aacaaacctcacagccagagccagagtaaatttctaagtgatgaagaaaa

SEQ ID NO: 230994 - DNA, 88 bp, Homo sapiens
cccgggcggctgccgagaaggagggaggggaaacacaaagccggctacgcgctgcgagaaaagagtctcatcgtggaaggcaagaggg

SEQ ID NO: 230995 - DNA, 80 bp, Homo sapiens
cagagacaaaagaaacgggccccgactggaaatctggcattttttaaagtttgcgccccacaaagaggaaatattccaaa

SEQ ID NO: 230996 - DNA, 82 bp, Homo sapiens
cggagtatctggcctccatcttcggcaccgagaaagacaaatcaggatcctcatgaccagccaaagagaagaagaattagga

SEQ ID NO: 230997 - DNA, 95 bp, Homo sapiens
aggaatctgagggtgccctcaatgagcacatgaccagcttagcttctgtcctaaagcagaaaaagtcctacctggagcgaagcgttaaggaagct

SEQ ID NO: 230998 - DNA, 75 bp, Homo sapiens
ctccagccgaaggagaaggggggtctggccgtgggcctgggcttcggggcactggcagaggtcgccaagaagagc

SEQ ID NO: 230999 - DNA, 87 bp, Homo sapiens
acataataaagaagtggagcctctgctgggaagggcacaggtgaatcagtggctaacctggttagaaactgctgaagaagaagaatc

SEQ ID NO: 231000 - DNA, 100 bp, Homo sapiens
gagcgacacgccgtacctcgcagaggccaggatctcctttaacctgggggcagtgagaacaatctccaggaagatctcttcgaccagatcttggctggga

SEQ ID NO: 231001 - DNA, 80 bp, Homo sapiens
gacaaagagcccctcatcgagctcttcgtcaaggcatggaagaggagatggttcgtgttacgcagtggccgtttaactgg

SEQ ID NO: 231002 - DNA, 83 bp, Homo sapiens
aagctgaacagcctgctgagagggcaacaggtttgtctatgctggctctaactcgggcgtggtccaggccccgctggccttct

SEQ ID NO: 231003 - DNA, 83 bp, Homo sapiens
gctggaccgtcgccttgctcctcgccgcggcggggactgcaggatgagagggccttaccaaaaggagatttcttccctcctga

SEQ ID NO: 231004 - DNA, 74 bp, Homo sapiens
cagtatccaggtcgaggttctgcagaaggttgtgactttagtatacaggcccagataaaggccactgtgaaacg

SEQ ID NO: 231005 - DNA, 88 bp, Homo sapiens
aaatgtgaaggtgatgaggttgaagatctctatgagcttttgaaacttgttaagccaacaaatggaattttcttgagcatgtttctaa

SEQ ID NO: 231006 - DNA, 75 bp, Homo sapiens
aaatctccccacaaagagaagtctcaagatcccaggttttaatggtacggttcgcatcattatttgatgcaaagg

SEQ ID NO: 231007 - DNA, 50 bp, Homo sapiens
agagtgccccacaacacccctgtggaccctgcgggagattgtgattggcg

SEQ ID NO: 231008 - DNA, 100 bp, Homo sapiens
gaagggcttattttactcctttatggagcaaatatgaactcttctgaagaaagggccatgtttatgagtggactaagtgaaagcaaacaaacccatgtac

SEQ ID NO: 231009 - DNA, 140 bp, Homo sapiens
agaagatggagctaaaggaactgcttatttaatacatttgaacaacttttggggtacttagaaggagaggccccctttcatccctgaaggagtggtggctcgcaggaagaggatggaaactgaggagtccaggaagaaga

SEQ ID NO: 231010 - DNA, 98 bp, Homo sapiens
ggtgacaggcactggtggcatccagtggtggccagtagaggaggaggtgaacaaggaggaggtcgatgaaacaggtgtagaagttaaggacattgaat

SEQ ID NO: 231011 - DNA, 83 bp, Homo sapiens
ttaaaagacagtcctcgtcagcactgactttcagctatggaatcggcccagctgagagccagcctggaggttacccagcagca

SEQ ID NO: 231012 - DNA, 74 bp, Homo sapiens
gtgtctaagcgctcgcggaaggaggagaaagcagaagccactggagaaaaacggccaagaggcagacctaggaa

SEQ ID NO: 231013 - DNA, 80 bp, Homo sapiens
tgctcaatggagagaaggaaagtcaatcgtaggaagaacacagtacaggaagaaggtagataatgactataatgcccttc

SEQ ID NO: 231014 - DNA, 82 bp, Homo sapiens
gttgtgtggtcgcgtctcggaaaccggtagcgcttgcagcatggtacggaatggccacatcaaaagaatcactgataatgac

SEQ ID NO: 231015 - DNA, 75 bp, Homo sapiens
ggagaatatgtgcggcattatccacgaggcaaacggtccttttggaataaatcatgggattgagcttcattcaga

SEQ ID NO: 231016 - DNA, 100 bp, Homo sapiens
ggtggtttcggttgcggcagtcgcgtcccgggagcgtcgctgcctggtgaacgctagaacaacagaggcagcagttgcttactgaacgccaaaacttcca

SEQ ID NO: 231017 - DNA, 100 bp, Homo sapiens
tctcaattttctttctcagaaagcagaggctcagagcttggagacagacggtttttcgttggaatatacgttgcacatttatggcgattctgagtgtgag

SEQ ID NO: 231018 - DNA, 100 bp, Homo sapiens
cagctgttgaaacagaagaagttgagcctgatgaagaagaagaatgtctgaatctgaacaggctcttaaaggtacttctcagattaaattactctcatct

SEQ ID NO: 231019 - DNA, 100 bp, Homo sapiens
aggcttgagcgtgagcacttctggaagatcattaatgccttccgctactacggcggggatctgatgagcttctttcttctggcatcattaacggaccttt

SEQ ID NO: 231020 - DNA, 75 bp, Homo sapiens
caatttttagtggagttgccatctatgttaatggatacacaggtgcaaattgagcatgacccagaattagaaaaa

SEQ ID NO: 231021 - DNA, 75 bp, Homo sapiens
gggaaatcgggctgaagcgactgagtccgcgatggagattcttcgctgctgctgccttaccgccgagaaccacca

SEQ ID NO: 231022 - DNA, 100 bp, Homo sapiens
gtttggtctcctgccgtgcccgaccctggaagctgtcctgaatttcaaatactctggaggcccgggccacactgaaggatattacaggaatctctccctg

SEQ ID NO: 231023 - DNA, 100 bp, Homo sapiens
ctatgtccgggaacacaaagacaatattggctcccagtacctgctcaactggtgtgtgcagatcgcaaagatattatgcctggtgatcctgatctgcttc

SEQ ID NO: 231024 - DNA, 75 bp, Homo sapiens
cggcaacgccgaggcgcttctgcatctgtgggccgaggctggcgcccatgcggctctacacgctctccaagcgcc

SEQ ID NO: 231025 - DNA, 98 bp, Homo sapiens
gatgcaccgagtccagcccaggaaaatggagaggtgggaaagaataacttcagaccaccgcccaaggtggaatccagtgttgtaaggatagaacctaa

SEQ ID NO: 231026 - DNA, 100 bp, Homo sapiens
cacacaccagaacagcgtgggatcttcacaatcagtgaccacccagcagaacagcgtgggatgttcacaaagatgcagagcaaagcggcagtccccggac

SEQ ID NO: 231027 - DNA, 95 bp, Homo sapiens
aagcttaggaccacccaccatgcctatccagaggtgttatgaacataaacagtatagaaatggattgaaattctgtaaacaaatactttctaatc

SEQ ID NO: 231028 - DNA, 82 bp, Homo sapiens
tcagcatgagcaaaaactccaaactcctctccaccagcgccaagaggggtttcctggaagcaccttcatgtcatcctatcaa

SEQ ID NO: 231029 - DNA, 74 bp, Homo sapiens
agcccctaagggcccttcgcgggagagcgtcgtgcacgcgggccagaggcgaaactatccaactctggccaata

SEQ ID NO: 231030 - DNA, 87 bp, Homo sapiens
cacggatgccccccggagccgcgggctggcaggtcacacagcggcagtgataaagagcacagggatgtggagagatctcaagaacaa

SEQ ID NO: 231031 - DNA, 74 bp, Homo sapiens
tgtgtagctgagcctcgtcctaactttaacacccctcaagctctacgacctttaccagaagatgatagtattga

SEQ ID NO: 231032 - DNA, 100 bp, Homo sapiens
aagttcctgcttctgggacagctctactgacgactgcaaaattcaaaatggggctcaaggtattcgtttcatctacaccagagaaggcagaccaagtggc

SEQ ID NO: 231033 - DNA, 82 bp, Homo sapiens
ctgacggtcaagaccaaggatggcgtggtggagatcaccgatacactggcagtgatgtctgtggacctgggcagtgagtcca

SEQ ID NO: 231034 - DNA, 90 bp, Homo sapiens
agggatgcacctatggattccattgaatgggctgaagtggtgatcaatgtgaacaatattctcaagattgcttatgcccgtatagagggg

SEQ ID NO: 231035 - DNA, 75 bp, Homo sapiens
gccgaccggcgccgggagatcctggtgcactggtgattgctgcggtgtttgaccgagacataaactgcagaagag

SEQ ID NO: 231036 - DNA, 83 bp, Homo sapiens
ccgctgccctcagctccgagtccagggcgagatggtcagtaggacagaaggtaacattgatgactcgctcattggtggaaatg

SEQ ID NO: 231037 - DNA, 75 bp, Homo sapiens
gatgaagttgttcattgtttgtcaccacaaaaaggacagctctacattaatcatactcctccaccactgtccaag

SEQ ID NO: 231038 - DNA, 100 bp, Homo sapiens
tggcatcagggaggctttcagccggagaagcgagtttcagctgggttttggccaaattgggcgagggcacaaaataaccacttaccccttctcaccgagg

SEQ ID NO: 231039 - DNA, 100 bp, Homo sapiens
ctctgcggagccgggctcgggtcgccggagccgcgccccaccccgccagctccagagccactactatactggcaattgctggagaagattttgcaattgt

SEQ ID NO: 231040 - DNA, 90 bp, Homo sapiens
ggtcctgacactgtccataaatgtgcagaggaatgatgagaagacagcagctgattacaagattttaggtggttcagtccttcacctggt

SEQ ID NO: 231041 - DNA, 50 bp, Homo sapiens
gacacctggaagccgagaaatgtttgccgagaagttccaggaagtgaagg

SEQ ID NO: 231042 - DNA, 50 bp, Homo sapiens
ctcactgcaacctccacctcccgggctgaggcaggagaatcgcttgaacc

SEQ ID NO: 231043 - DNA, 100 bp, Homo sapiens
tccaggcgggcctcccgtttctggctccgggctgagcttcctggagaagaggaaggaagtttatctcgacaatgctagttgcagtctgtgtgaccctgac

SEQ ID NO: 231044 - DNA, 75 bp, Homo sapiens
tgggatgtgaaaactctgttactgaagaatccaaaggactgcatgacacaccataggatatagtcaagaagcctt

SEQ ID NO: 231045 - DNA, 90 bp, Homo sapiens
cgagactggaggctgagtgctaaactgtgtggggcgcggatgggatccagctgttagtcggaaaatgtgccagaggaacttcaagaacca

SEQ ID NO: 231046 - DNA, 83 bp, Homo sapiens
ccctgcgtcgccgggaccctcgcgcgcgaccgccgaatcgctcctgcagcagagctggcccgagataacttcttccgctgtgg

SEQ ID NO: 231047 - DNA, 75 bp, Homo sapiens
cgcggagctggaatgactggcaacccagactcagatgccactgcatcatcagataacagcgagacggaggggaca

SEQ ID NO: 231048 - DNA, 90 bp, Homo sapiens
ctcgttcaagatggcggagctcgaccagttgcctgacgagagactttccttatcccagttgattgtgcagaatacactgcctgtcgcttg

SEQ ID NO: 231049 - DNA, 96 bp, Homo sapiens
cagtgtaatgcggtgtgtagcagtctttgttggtataaatcatgccagtgctatatcgttactgtcgaatgctagaagaaggctctttccgaggtc

SEQ ID NO: 231050 - DNA, 59 bp, Homo sapiens
ggggctgaagaagcagttctacaaggcgagccagtagaccaaattttggtacaattgaa

SEQ ID NO: 231051 - DNA, 95 bp, Homo sapiens
ctacctcctgcgaggcctcccgggctccgggaaaactacactggccagggtttccaggcctgaggtgcccgccctggccccaggagaatgaacca

SEQ ID NO: 231052 - DNA, 75 bp, Homo sapiens
gatcctacgtgcatgaagatggacgaggtcctgtacagcatcgccgagaaggaagctgccacttttgctagagag

SEQ ID NO: 231053 - DNA, 74 bp, Homo sapiens
ggccaagggaccaaggtggaaatcaaacctgtcggaaaaggtaacagaagatggaactcgaaatcccaatgaaa

SEQ ID NO: 231054 - DNA, 51 bp, Homo sapiens
ttcccgtcagaacatggacccaggtggtttgtgatgaaaatggttccaagg

SEQ ID NO: 231055 - DNA, 102 bp, Homo sapiens
ggagaccaaacatccagatctggagtgccggcacaggctttcttcgagagtcacccagctccttcagctgagcgtaccatccagcagtgttgtgaaaatatt

SEQ ID NO: 231056 - DNA, 101 bp, Homo sapiens
tgttcgctcagttgccagtaggaccttggtcagagatctacatcttagtatcacgctatcagttgagggatttgcagttgataaaatggctggagaggtta

SEQ ID NO: 231057 - DNA, 73 bp, Homo sapiens
caactgcagagcattttcgaagaggtggtgctcccacatgtgtttgtgaattgtgttgaatgctttacattga

SEQ ID NO: 231058 - DNA, 100 bp, Homo sapiens
gggcagtgattcacattgtggaccaacgggtgcgcttctacccagtggccttcttttgctgctggggcccagagccagccccagtgcctgctgagccgtt

SEQ ID NO: 231059 - DNA, 96 bp, Homo sapiens
ggaaaccttgctggtctaaatactcttggaccccagtatttagcagactatctcaagcaggtgctggacattgatcttcatgctcagatccatttt

SEQ ID NO: 231060 - DNA, 75 bp, Homo sapiens
ccccggcctctcggcctctgccggagaaacagaacactatggctatgcatcctccaacgtcagccccgccctgcc

SEQ ID NO: 231061 - DNA, 96 bp, Homo sapiens
cgacttcggctcccctcccctagtatggataaaattgaccgaattaacagaccagtggatggcattcccaatgacagtagtgatagtgaaatggag

SEQ ID NO: 231062 - DNA, 100 bp, Homo sapiens
gggggagcggggccttccacaccccctccgtgggtgtgtggagctgtgccgccagcgtatggccacgcggccaccagaccgacctgagggcccgcacacg

SEQ ID NO: 231063 - DNA, 98 bp, Homo sapiens
atcggaggggtgatagatatgatgactaccgagactatgacagtccagaggcctactgaacttgacgcactggtatttggccatctatacaccattct

SEQ ID NO: 231064 - DNA, 87 bp, Homo sapiens
aatgtctctctatccatctctcgaagacttgaaggaagagtttaaagaacgctgtactcagtgtgctgctgtctcatggggtcttac

SEQ ID NO: 231065 - DNA, 82 bp, Homo sapiens
ggattttttaactgaagatagtgcctttcagccctaccagatgtgtgttaaaagagctagaaacattgggaaaggacttata

SEQ ID NO: 231066 - DNA, 97 bp, Homo sapiens
tgcgtgggggaccggctgttggcggtgggagcccgtccagtatttcaacaacaaaatcatctgtgatctggtggaggagaagtttaagggcatcatc

SEQ ID NO: 231067 - DNA, 90 bp, Homo sapiens
gggtcactcactgatgtggtaacagaaacgtgcatggatgaagcacagattgctgctgtatgcagagagttatcaggaactgttgccgtt

SEQ ID NO: 231068 - DNA, 100 bp, Homo sapiens
tggagattttgatgtggatgatgccaaagttttattaggtgtgaaatctaagaatcccctgccaactcttgagggctcaatccagaatgttgaattgaag

SEQ ID NO: 231069 - DNA, 139 bp, Homo sapiens
tccgggacagggatgtctacctggtaatagaggacttgaagcagaaagcaagtgaatacgagtcagaagatattgatgatgttaagaagttcaaaccgggttacctggaagctactcttaattggtttagattatataa

SEQ ID NO: 231070 - DNA, 111 bp, Homo sapiens
agaaccaccgcatcaagagcttcaagaacaagggccgcgatgtggaaggtgataaaagaaaatgtggctgaagttacccgaagttcagcttgcagtgtaattcagaagagt

SEQ ID NO: 231071 - DNA, 98 bp, Homo sapiens
gtcaccacagtcaccttcactgggatgatgcgctgcagccagctggcccccagggccctgcagacgagccaaactcaggctgtaccttgagcagctca

SEQ ID NO: 231072 - DNA, 98 bp, Homo sapiens
caagatggacaacatcagccgagccgcggggccttcacttaacttaagggaccttggattatctgaactaaaaattggacagattgatcagctggtag

SEQ ID NO: 231073 - DNA, 75 bp, Homo sapiens
agccccagctcctgtctggtctgtgagatgtcctcactgtttcaggaggagcaggacatcgagactttacatggc

SEQ ID NO: 231074 - DNA, 100 bp, Homo sapiens
ttcagcgtagagtcgctggagcgggcggagctgtgcgagagcctcctcacttgggagctccttcccttaacagagctgagagaggcatctggagctgcag

SEQ ID NO: 231075 - DNA, 87 bp, Homo sapiens
aaaaggaaagaagtgcattgttttggtgactgaacttatgacgtctggaacacttaaaacgcaagaagctcttctggctgccattag

SEQ ID NO: 231076 - DNA, 75 bp, Homo sapiens
gctggactggagcagaaccccaggactgcgcccccgggagcgggcgcccagagatgcttcaggactgccccaagg

SEQ ID NO: 231077 - DNA, 100 bp, Homo sapiens
gagaatgccatcgaccgcgcggagcaggcggaggcggataagaaagccgctgaggacaagtgcaagcaggatgaccggaaagaagggatgaccgcgtttg

SEQ ID NO: 231078 - DNA, 83 bp, Homo sapiens
ctccctgcagatcctggacctccggaacaaccacgtgctagactcggacaatgcagatcttcgtgaagactctgactggtaag

SEQ ID NO: 231079 - DNA, 98 bp, Homo sapiens
ggtgccgggggatacaatcactacggacacaggattcatgcgtttcagaagaatcgacgagaccaggacgccaccaaacacaagctcatagagatcgc

SEQ ID NO: 231080 - DNA, 50 bp, Homo sapiens
tggacccctactattgcaacaagaaaactttagaaactgttcctttggag

SEQ ID NO: 231081 - DNA, 75 bp, Homo sapiens
ggagaccaaacatccagatctggagtgccggcacaggctctgcaatgccagagggaggcttgtgcaaatattctc

SEQ ID NO: 231082 - DNA, 83 bp, Homo sapiens
ggagctccttttcctccacctaccttcccgatgagaaagatcagtctaaagaaaaggagaagaaagtgaaaaaaacaattcct

SEQ ID NO: 231083 - DNA, 100 bp, Homo sapiens
aatctccagagagccatggacattggagagagtggtattatggtgtaaacaacgattctttggagtttaacagcaatgctcaggatgtaagctgttttca

SEQ ID NO: 231084 - DNA, 100 bp, Homo sapiens
tggaagaactcctttaatgaaagctgcaagagctggtcatgtttgtactgttcagttcttaattagtaaaggtaaaaatgcatttgcaaagggagaaaat

SEQ ID NO: 231085 - DNA, 100 bp, Homo sapiens
cgggagctgtctctacgtcggagacgtggccggcctagccgaagcctcctctgtggcgctcagcaactgcgatgggctgatgccttcaattaagttgcag

SEQ ID NO: 231086 - DNA, 82 bp, Homo sapiens
catggatggctcctcccgctgccgctgccgctccaggagacaggatggagtctcactctgttacccaggccggagtgcagtg

SEQ ID NO: 231087 - DNA, 83 bp, Homo sapiens
cctttgtctccccgatctacggggctgacatcagcggctctttgtatgatgacgtgctgcagggtgcacagctgatcgccgtg

SEQ ID NO: 231088 - DNA, 98 bp, Homo sapiens
ttgagcactacagacctcacagtgccaaatggagctggaagcagtccagtggtaaggatggggatgataagaagagacctgtgatcattcatcgagcc

SEQ ID NO: 231089 - DNA, 98 bp, Homo sapiens
cccgccgctgatcgaggagccagccttcaatgtgtcctacaccaggcagcccccaaatcccggcccaggcctgatcttttggccagaaggagattaaa

SEQ ID NO: 231090 - DNA, 75 bp, Homo sapiens
gaaaaagttggcaaagacacttggttaccaagaagccatacatggaagtgtttggattgtgagctatttcagaac

SEQ ID NO: 231091 - DNA, 96 bp, Homo sapiens
ataacatccctccagaagatgcttttcgctgtggcctgcagtttttaggcaacattgcctcacggaatgaagattcccagtctattgtttgggtgc

SEQ ID NO: 231092 - DNA, 75 bp, Homo sapiens
tgagacccaaactgctcatacagaattacgcatttccacttctaatggccctggtatgcgtccaccactaggctt

SEQ ID NO: 231093 - DNA, 90 bp, Homo sapiens
tggaagttcaacagaaggcaaatacgaagacgaggcaaagcacccagctttcttcactcttccgtcactcagcctctgaagaagcttcgg

SEQ ID NO: 231094 - DNA, 82 bp, Homo sapiens
ggccacctccccaggtgatgcctgaagctcaagggactgtgtccaccctcaggtgaccaggcattgatgcacccccaggaag

SEQ ID NO: 231095 - DNA, 100 bp, Homo sapiens
accaagaccaaccatggccaagttaatgattcgttttgtaatgaaggcccactcatttgtcagagagaacgtgcctcgggtactaaattcagctaaggag

SEQ ID NO: 231096 - DNA, 97 bp, Homo sapiens
tggccccgtgtcctgcaggtattgggagatccacagctaagacaccgggacctcctggaagccaaaaatggtggacatgttgagtgaaattaacatt

SEQ ID NO: 231097 - DNA, 50 bp, Homo sapiens
ggaaagtgccacaagcactaacaggacacagccagtgtgaagtcctctag

SEQ ID NO: 231098 - DNA, 149 bp, Homo sapiens
aaccagcccgaccgggcgctccgcttcctggagaaggcacagcggctgtatccgacgccgcgagttcgcgacagagattactgcagtttatgtgacaagcagccaatcgggaggctgcttttccggcagttttgtgaaaccaggcctgg

SEQ ID NO: 231099 - DNA, 106 bp, Homo sapiens
agatcgggatttacgtggagatcaagcgcagcgatggtatcgagaaccttccctgcgaacttcagaggaacttccagctgatgcgagagctggaccagaggacgga

SEQ ID NO: 231100 - DNA, 75 bp, Homo sapiens
taaagagagacagtggacagtattggccaagcgtataccatgcaatgccttcactgaacctaccagatgtatttg

SEQ ID NO: 231101 - DNA, 100 bp, Homo sapiens
gggtgcgccggcagaggatccagtgttcaccatcctggccccggaagatttggtcgtattgggcgcctggtcaccagggctgcttttaactctggtaaag

SEQ ID NO: 231102 - DNA, 82 bp, Homo sapiens
ccatctggggaaaaggcaaaaatcccatctaccgcaactctcagttcgagagtaaaggccaccagcttgggctccccacgga

SEQ ID NO: 231103 - DNA, 100 bp, Homo sapiens
tctgggagatctgaagattgagaaaaatcctgctaattgaggacgaggtggatgttatctggtggatgttatagacttccattagtttgatgaatctgac

SEQ ID NO: 231104 - DNA, 50 bp, Homo sapiens
cgccttcgcccagaagatcagcagacaatgcagatcttcgtgaagactct

SEQ ID NO: 231105 - DNA, 100 bp, Homo sapiens
actgactccagtgatgacgcaggccttaaggagaaagtttcagcttcagcgagaacccagacctttcccaaagctcaggattcttcgaaaagttgagaaa

SEQ ID NO: 231106 - DNA, 87 bp, Homo sapiens
ccaacttgggcaaaatatatgccatgaaagtcctaaggaaggctaagctggcggtgctgctggtgacgctggtggcggccgcggtct

SEQ ID NO: 231107 - DNA, 74 bp, Homo sapiens
cccagccaaaaactttaaacttagaagaacattgcaagagttgtcaggggagtgtccattggcagcacctgcct

SEQ ID NO: 231108 - DNA, 87 bp, Homo sapiens
tttgctcaaggatcccagttttctctggatgacgtggtgtggactggatgaacaaggtgatggcacgtttcgtgaggggggatgccc

SEQ ID NO: 231109 - DNA, 75 bp, Homo sapiens
gagcctcagttggaagcagccgatccagcctgcggagcctgtggggcagttatgtgtctcggtaccacgtgaaag

SEQ ID NO: 231110 - DNA, 75 bp, Homo sapiens
agtccagacccaggagagcaaggcccagaaagaggctcatgctgaagattcggttatggaccatcatttccggaa

SEQ ID NO: 231111 - DNA, 100 bp, Homo sapiens
cctggctgggattcctacacaatgcgttgcctggctccacgccctgctgggtcctacctgtcagagccccaagatggagtctcgctcttcgcccaggctg

SEQ ID NO: 231112 - DNA, 100 bp, Homo sapiens
aaaatggctcggccaagttcaaagttccccaccaccaagttagagatgactgctgtggctgacattttcgaccgagatggggatggttacattgattatt

SEQ ID NO: 231113 - DNA, 83 bp, Homo sapiens
tcgggtcgccggagccgcgccccaccccgccagctccagagccacgcgccatgtcagaaccggctggggatgtccgtcagaac

SEQ ID NO: 231114 - DNA, 97 bp, Homo sapiens
ggccagttttgaaatcgacacacaaagaatagagttgagcctgtgggacacttcgggttgacatcatggacatatgtgagtccatcctggagaggaa

SEQ ID NO: 231115 - DNA, 48 bp, Homo sapiens
tgaagaacacagaaatggtgatcagagaacatggcggcccagagggaa

SEQ ID NO: 231116 - DNA, 100 bp, Homo sapiens
ggacctcgccccgggacagcgaggagctgagggaccctcacatacccccggcctcatgagtacctgtccccagcggatctgcccaagagctgggactggc

SEQ ID NO: 231117 - DNA, 50 bp, Homo sapiens
gcctcctgggtagctgggactacaggaagaactcttggatataaaagaac

SEQ ID NO: 231118 - DNA, 76 bp, Homo sapiens
cggcattcggggaatctgcagggcaggtgcccgcctggctgggtgggtgagcggtgtcagctggaggacccctgtc

SEQ ID NO: 231119 - DNA, 96 bp, Homo sapiens
gcgtgtttcgccccctccgacgccaccgagtctctagtgatccctgaaaagttccagcatattttgcgagtactcaacaccaacatcgatgggcgg

SEQ ID NO: 231120 - DNA, 99 bp, Homo sapiens
actgccggctggtgaatggaacctcgcagtcatttatcatcagacctcagaaagatgcctgtgaggagccaccaacatttgaagctatggagctcattg

SEQ ID NO: 231121 - DNA, 83 bp, Homo sapiens
cttggccttcttcaggttcccgcgggaccctgccaggtgtatctacatcagcaatcaaaatggcatcaaccagacttccttcc

SEQ ID NO: 231122 - DNA, 82 bp, Homo sapiens
ggaatgtggtcgacgagaagccccaacagcacggcgtggcctctcagcctcggacttgggaccctggaggactgacgctgct

SEQ ID NO: 231123 - DNA, 100 bp, Homo sapiens
gcggctgggcgttcatctaccacgctttcgtgttgtgtgtgtcccgctgtggattctcatgtcctttctgtgcctggtggtcctctactacattgtgtgg

SEQ ID NO: 231124 - DNA, 71 bp, Homo sapiens
gccaaaggacagttagaagacagtaggttcagcttgttggtttagatgaggagagttcagagtttatttgc

SEQ ID NO: 231125 - DNA, 97 bp, Homo sapiens
gcggagcgaagtgaagggtggcccaggtggggccaggctgactgaagattctgaacacgaccctctttgagagttgggagataatcgggccttatgc

SEQ ID NO: 231126 - DNA, 75 bp, Homo sapiens
gacattcaaggatatttatctaaaaattcttcttttgagtgccagtaaaggaaactttaccctcccagaggtagc

SEQ ID NO: 231127 - DNA, 101 bp, Homo sapiens
ccccagacgtccaggacgctgacattgatctccaagaccgttcagaccctcggcagcctgtccaagtccaaatctggactctgtaagctcggttcggctgg

SEQ ID NO: 231128 - DNA, 100 bp, Homo sapiens
gctttaccagcaactaccccagtgccggggagggttctgctgcttcgaaagctgtgcatttgcccagtataacatggatcagttcacgcctgtgaagata

SEQ ID NO: 231129 - DNA, 49 bp, Homo sapiens
cgcgcgcctcgaggccgagtcaaggtgctggagaatctggtaaaagcac

SEQ ID NO: 231130 - DNA, 98 bp, Homo sapiens
tctgttcttactcaggttttgacaaaccaacaaaactacaaagatctgacttctgagaaaatgctgctgtgaagacccaattaaagctttcacataaa

SEQ ID NO: 231131 - DNA, 75 bp, Homo sapiens
attatttagccttcaaacgtcagcaggtcattcctgtcccaatcagctgctctactactgatgacattaaagatg

SEQ ID NO: 231132 - DNA, 95 bp, Homo sapiens
agttgtcgacgaccgacagggtggtgaaaggtaaaatgtcggttccaggaccttaccaggcggccactgggccttcctcagcaccatccgcacct

SEQ ID NO: 231133 - DNA, 98 bp, Homo sapiens
tgtgatgaatcagatgtcaaagacttagcttttaaattaaaaaggaagctattcaccattgagaaaactttagaaactgttcctttggagaggaaaaa

SEQ ID NO: 231134 - DNA, 100 bp, Homo sapiens
ggcgggctggagacatggaccgcggcgagcaagggcggcgactggcggcgcgatggacctgaccgggctcctgctggacgaagaaggcaccttctccctc

SEQ ID NO: 231135 - DNA, 75 bp, Homo sapiens
tacatgaatagcatcagattgtatgctggaggaaatggctagtgatgagctgaaagagatgcggaaaaacttgac

SEQ ID NO: 231136 - DNA, 74 bp, Homo sapiens
atgtgatcgtcatcacagtcaactatcgacttggagtactcgaaacctccacagctgttgagaaaaaggagaaa

SEQ ID NO: 231137 - DNA, 74 bp, Homo sapiens
aaaacccggacctcgcttacctgcatgctgggcttaaaagacaaccttcttgcttctgggacatccagcctgac

SEQ ID NO: 231138 - DNA, 119 bp, Homo sapiens
cggaagatgttggagaagatgggttggaagaaaggagagggcctggggaaggatggtggaggaatgaaaacgccgctagctgaaagcagagaacccagcagaggattctgggaaggtcc

SEQ ID NO: 231139 - DNA, 76 bp, Homo sapiens
accatgtgctgaaatgtttgacgacactgatggtttgcgacatctcgaatcagcgatgcacacttggcagacacaa

SEQ ID NO: 231140 - DNA, 73 bp, Homo sapiens
tggtggtgattgcacacgacgtggatcccatcgaggccttctctgactaccagatccagcagatgacagccaa

SEQ ID NO: 231141 - DNA, 74 bp, Homo sapiens
tgactgactgggagaagaccaagcctgtcacgacttcattagaggggtggtagactcggaggatctccctctaa

SEQ ID NO: 231142 - DNA, 100 bp, Homo sapiens
gttttaaatcaagatttaacattccaacacataaaaattatttatccaacagctcctcccagtgtttaactgctgaagagatcttttcccttcatggctt

SEQ ID NO: 231143 - DNA, 100 bp, Homo sapiens
tccaggaatgcagtcagtctgttgatgaaactatctttggaaacatgatgagcaaggagaagcgagaggctgtcagtaaagaggacctggccagagcgac

SEQ ID NO: 231144 - DNA, 90 bp, Homo sapiens
tgcttcctcgtcctagtgatccacgcgcagttcctcaaagaagccacaatggtgcgcatgaatgtcctggcagatgctctcaagagtatc

SEQ ID NO: 231145 - DNA, 100 bp, Homo sapiens
caagtgaaggccccctgaagtggaagacagcattggtactaatggccaactcaagactcagcccgcctgcacccaggtgaaatatacagccttgttgctc

SEQ ID NO: 231146 - DNA, 101 bp, Homo sapiens
ggagccacctagactggatgcagagcatgagcgaaaagctgttgctatatgatacagtccagagtgaactagaggagaagataagaaggcttgaagaggat

SEQ ID NO: 231147 - DNA, 83 bp, Homo sapiens
gcaagaaggcaacgacgttccatctgtggaaggacctaccaaccaggcataatcaccagcaacacccgggacaataatacggg

SEQ ID NO: 231148 - DNA, 98 bp, Homo sapiens
ccacattgcactttccacatgcttcaaacatcaccttgtacaaggctccttgccagaggcctccactcactccagacccctatagcccgtcgctgtca

SEQ ID NO: 231149 - DNA, 82 bp, Homo sapiens
ctgcctcagcctcttgagtagctgggattacagatgcatttttgtagaagcattttgaggatgaatgtttgcaaatcatttt

SEQ ID NO: 231150 - DNA, 76 bp, Homo sapiens
tacttgacattggaccaggtgtttaagggttggattgagattgttggatgtgctgatcgttcctgttatgacctct

SEQ ID NO: 231151 - DNA, 98 bp, Homo sapiens
ggaagatgcaagcggtttgggaccttgaacaaggcaaatatggttttgacgaagttatacggaagcgtctcctcattgatggagatggtgctggagat

SEQ ID NO: 231152 - DNA, 100 bp, Homo sapiens
gcccaccctccaactttgcgacggaaatgtgtcatcgaaagccaggtacgcccagagccagaccgtgtttcaaaatccagacgcacaccccgccaacagc

SEQ ID NO: 231153 - DNA, 100 bp, Homo sapiens
caaagtggttgtggtcactggagctaattcaggaataggtcctcatgctgataccgccagtggatgccagaatttgcagtgtggttttcgagcctgctgc

SEQ ID NO: 231154 - DNA, 90 bp, Homo sapiens
gaggtggccatcttcggaccccccaacaccctctacgaaggcggctacttcaaggtcgacatttataactcagaccccctgatctgccgg

SEQ ID NO: 231155 - DNA, 100 bp, Homo sapiens
taaccctgctaaccttagcagaagaaaggacggtagacctgcccaagtctcccaaggtttgtggataccggataaagcttcactttgatgggtattctga

SEQ ID NO: 231156 - DNA, 75 bp, Homo sapiens
cacacttttgtggttgatgtagctcagattatgtttgagaccttcaacaccccggccatgtacgtggccatccag

SEQ ID NO: 231157 - DNA, 100 bp, Homo sapiens
gcccatagcagtctgccagacaatagagcatatggggtagatacaacaagaattgaatactccattcctttaagagaaaactgggcactaccatattttg

SEQ ID NO: 231158 - DNA, 100 bp, Homo sapiens
tcacttctgcctttccagtgacaaaatggtgtgatgtgggcgctatctccaactgtctttgcacttctgagtaagaatctgatgattgtgcacagtgacc

SEQ ID NO: 231159 - DNA, 100 bp, Homo sapiens
ggaggtcatcgaaggctaccgggcccagcacagccagcaccgcacgccctgcaagggaggtagtgggcagcagtcagtgacaggtgtaacctctgtggat

SEQ ID NO: 231160 - DNA, 106 bp, Homo sapiens
agaacagtgcggaagatctgtgctttggatgacaacgtctgcatggcctttgcagactttgagaatcactacaagaaaaactccttgtggtgaaggttctaagacg

SEQ ID NO: 231161 - DNA, 100 bp, Homo sapiens
agattagcaaaggtgctaatccagtggaaatcaggagagacaggtgatttggcttctgcacagttaggaggagcaccaaaccgatgggaggttttgtcag

SEQ ID NO: 231162 - DNA, 60 bp, Homo sapiens
atgaagagacatgagatggtggaagaatccccagaacaactctgctcatggtgattacat

SEQ ID NO: 231163 - DNA, 101 bp, Homo sapiens
tttaggcaggtggctcccaaattaccggaaaggactgttcttgaggtattcaggttttgctgttactgctcagtgtagtcacaccttgaataagaaatgga

SEQ ID NO: 231164 - DNA, 75 bp, Homo sapiens
cgggtccatccatcgcataagagcaaagaatactattgttgccacaggaatacaaatggagagatttgcatggga

SEQ ID NO: 231165 - DNA, 100 bp, Homo sapiens
ggctgcggggatgtatttggaacattatctggacagtttttcgttggaatatacgttgcacatttatggcgattctgagtgtgagggcagacttctgcca

SEQ ID NO: 231166 - DNA, 75 bp, Homo sapiens
cgatccagcaccatggggaagcgggacaatcgggtgggctcgtgcaatccgcttcagacaggatggtaacgaagc

SEQ ID NO: 231167 - DNA, 98 bp, Homo sapiens
acaacatgctgtactttgccaagcaccaccaagatgcctacatccgggctctagaccaagatagaacagcccttcagaaagtgaagaagtctgtaaaa

SEQ ID NO: 231168 - DNA, 100 bp, Homo sapiens
tgttcttctccgcggcgctccgggcccgggcggctggcctcaccgcccactggtgcatttgcccagtataacatggatcagttcacgcctgtgaagatag

SEQ ID NO: 231169 - DNA, 126 bp, Homo sapiens
tcactgtcgcagggacaggagtactccacagaggataaatttcaacctccggggccacaatagcgaggctatagaaagcgcaattggtggtaacgcttatcaacacagcaaagtgaaccagtggac

SEQ ID NO: 231170 - DNA, 90 bp, Homo sapiens
agcggcaccggttggacctaggggaggattacccctctggcaagaagcgtgcggggaccgatgggccataggaaaaggatacagagtaga

SEQ ID NO: 231171 - DNA, 82 bp, Homo sapiens
tctctatctgcgcaccttggagtccaagcttgtgctctttggtgtttcccattaaacactaccaggacaaaatcaggcctta

SEQ ID NO: 231172 - DNA, 97 bp, Homo sapiens
atcttcgagttgtcatccccccttcaagcaagggcatgatgcctccactaggaatatccctgcgctccagacgccaaaataagactgaggcagaaca

SEQ ID NO: 231173 - DNA, 100 bp, Homo sapiens
agaaagcataattttgcagactttagatgtggaagatgtcaagtttgtgatcaactatgactatccaaacagctcagaggattatgtgcaccgtattggc

SEQ ID NO: 231174 - DNA, 51 bp, Homo sapiens
cccttggattcagacgccgattcgcccagaggctggcgaaggttcctgcca

SEQ ID NO: 231175 - DNA, 101 bp, Homo sapiens
ccggattggcgctgaggtggcccgtggggcagacatccacgacagcgatggcagttccagcagcagccaccagagcctcaagagcacagccaaatgggcgg

SEQ ID NO: 231176 - DNA, 90 bp, Homo sapiens
cactgaagagccctcccaaaggatttgatacgactgccataaacaaaagctattacaatgtgaccattcctcaagaattttgtatccaag

SEQ ID NO: 231177 - DNA, 83 bp, Homo sapiens
cgcagcccgccctccccaagtcgacgccgcaacccggggaaagcagatttggtgttgtactgcgaggcattcctgaccaccta

SEQ ID NO: 231178 - DNA, 76 bp, Homo sapiens
tgacaaactaaagaaagacttgtgttacgactctatctgtcctcctcagccatctccacctcttcaggctgcatgt

SEQ ID NO: 231179 - DNA, 74 bp, Homo sapiens
aagctcctacttccagaaaaagtgctcctgggactccaggataccagctgcccaacatgttcggcgaccttcgg

SEQ ID NO: 231180 - DNA, 83 bp, Homo sapiens
tacgcagaaggacctggccacgaaaaatggctacaaacttcctagcacatgagaagatctggttcgacaagttcaaatatgac

SEQ ID NO: 231181 - DNA, 75 bp, Homo sapiens
aacaccccatcaccgtggagatcaatggaatcaacccagtgtaccacatgaaggaagatggttgggtgaaagtag

SEQ ID NO: 231182 - DNA, 82 bp, Homo sapiens
ctgtcatcctacccaccataccacagcttactgaaacaaatgcaggtatcaagtgcttggactccatgtgctgtttcccgga

SEQ ID NO: 231183 - DNA, 75 bp, Homo sapiens
gcagctggctggcttcagtggaccaaacattgatgatggcacctcagatcgcccctacagccatgctctggtggc

SEQ ID NO: 231184 - DNA, 75 bp, Homo sapiens
gtctgcaagagcacgctatgagagatacagtggcaatcaggttctcttttggcctctgtgtcctttgtcccaata

SEQ ID NO: 231185 - DNA, 75 bp, Homo sapiens
acagcttgtggatatgggggcaaaggtcctggaatctcaaaatttgttcagaaagtaaatgaaataggcatttac

SEQ ID NO: 231186 - DNA, 98 bp, Homo sapiens
tgaacttctggtggttgaaaaggacactcgatttattcctggattacaggggactcattctcacagttccggtttgctgaggagaaagaatgggatag

SEQ ID NO: 231187 - DNA, 95 bp, Homo sapiens
ccgggagcgagctgggagggagccgcgcgcctttgtgcgcgcgccgagatagcagaccccacgttagctgaaatgggaaaaaacttgaaggaggc

SEQ ID NO: 231188 - DNA, 100 bp, Homo sapiens
caggttttaaatcaagatttaacattccaacacataaaaattatttatccaacagctcctcccagtttgcagctcaccttgtgaagatgaaatatccaag

SEQ ID NO: 231189 - DNA, 75 bp, Homo sapiens
acgaggtggatgtgacccaaggagagtgctacccggtgtactggaaccactcggtgaaatacctggagtgctcag

SEQ ID NO: 231190 - DNA, 100 bp, Homo sapiens
agagggagccgcagctgatgtcagggtttgtggatgcacttagatgtttgcaatgagcactgtggctggcatgccccagtgttttggataccaatgcata

SEQ ID NO: 231191 - DNA, 96 bp, Homo sapiens
tttctcgctgatcgcctaacttctactgacgaagcttggaagttgcagaaggcactaggaagcttttattttcttcatgagtccttaaaaaacatc

SEQ ID NO: 231192 - DNA, 100 bp, Homo sapiens
cttacatctctagataacagtctgcactttcacccgtttcaggtcatgagtgacactgaatatgcagagtggctgaggaatcattttttagctgaaacca

SEQ ID NO: 231193 - DNA, 100 bp, Homo sapiens
caccaacttctcagagggtgatgtcacccatttcatctgccaggctgctgtgcccaagggtactggctgtcacgctgacatgagcccccagcactcctcc

SEQ ID NO: 231194 - DNA, 96 bp, Homo sapiens
cggggagttgagaatcgcaggttggccgcagggaaaaggttccccctcagcccttcctggagatgcagcagctccgcctggcgaggcagctggaag

SEQ ID NO: 231195 - DNA, 98 bp, Homo sapiens
ttggagaaacctactcaacaccaggcagatcgggagcggtgccgagaaaaatttccttactagatgacatttcatcgcaatgtccgatcgtttggggc

SEQ ID NO: 231196 - DNA, 100 bp, Homo sapiens
actgtcaggtacctcaaagcaggccatgtggaagtgttacatcaccttttgcttggaaagatttactaagaagtcaaatagtgggttccttagagggaag

SEQ ID NO: 231197 - DNA, 110 bp, Homo sapiens
ccgcaaattcttctatgggaaagatgttgcccatttaatgtggttcgaaagactctatgtttggcttcagtgttttgaaaaatacatcttgtacccagcgctaattttga

SEQ ID NO: 231198 - DNA, 106 bp, Homo sapiens
aaaaatctggacgtgtaaaaagaactcttaacggccgatgcagctcttccaaagctaagatactgaacggctgtattcagtggtgtttcaagaaatatgtaatcgc

SEQ ID NO: 231199 - DNA, 71 bp, Homo sapiens
ccaggaagcacagagctgtaccagtacacggcccacgttgccaggtcgttccaggggtagaggaggcatga

SEQ ID NO: 231200 - DNA, 90 bp, Homo sapiens
cgcccacagacctcaaattcaaagcgccatcatgaccgggtcctataacaacttcttcaggatgtttgatagagacacgcggagggatgt

SEQ ID NO: 231201 - DNA, 100 bp, Homo sapiens
ctgaacccaaccagtacagccccgatgactccgagctcttccagctgctggccttcctgcaaggactcttcactttctatcaccatggttacgaactggc

SEQ ID NO: 231202 - DNA, 73 bp, Homo sapiens
atgaagaaggagctttctccagcagatcatcacttaccgggactacctgcccctggtgctggggccaacggcc

SEQ ID NO: 231203 - DNA, 51 bp, Homo sapiens
tgcttggagacggacttgcttccgatgttcctcctgctgatcaagagaagc

SEQ ID NO: 231204 - DNA, 75 bp, Homo sapiens
ctcacccagtgatgacatggacagcatcatcttcccaaagagtcaagggtccagagaaggaggagaagttgagac

SEQ ID NO: 231205 - DNA, 96 bp, Homo sapiens
ggagattacacagaagcaaaagccttgatagcatggatttctgtgagctcactattggaaagaagactgatgaagaaaaataacagcatgattcag

SEQ ID NO: 231206 - DNA, 111 bp, Homo sapiens
gcaggttcaagtgccaagtgtgcaagaagttcttccggcgggagcattatctcaaactgcatgctcacatccactcgggcagcctgcttctgcaaagtggtacgatcgaag

SEQ ID NO: 231207 - DNA, 75 bp, Homo sapiens
cggagaactcaaggtcttcatagaccagaaccttagtcccgggaaaggcaatgtctacttcgatctgaagtctag

SEQ ID NO: 231208 - DNA, 100 bp, Homo sapiens
agagatggagatgggcagacggattcatttagagctgcggaacaggacgccctctgatcccatgactgaagagttgctgaaacaacaaaagctgaattca

SEQ ID NO: 231209 - DNA, 101 bp, Homo sapiens
gcgctgggttggacctttacctgtggaggcaacactggccaagaagaggaaaggaatgggtaccacagaccatgtcatcgtcctggcgtccacgaaccgag

SEQ ID NO: 231210 - DNA, 100 bp, Homo sapiens
tcaagaaaccgaagtgatttccagaggatttacactatttggagtcaaaatatggacctgagaaaatatctccagaaaatgatatttttgaaataaattt

SEQ ID NO: 231211 - DNA, 80 bp, Homo sapiens
cgccggggttcggtggcctctagtgagatctggagaggaggcctaccagaaactggccagcgagaccctggaggagctgg

SEQ ID NO: 231212 - DNA, 75 bp, Homo sapiens
gcagagggcaccgggcgccgggagcaggcggcgcagcaccaggtgttggtaaatcatgcttattgctacagttta

SEQ ID NO: 231213 - DNA, 75 bp, Homo sapiens
aggattatggcagctggcttgatattgggacaagtttcttatctcagtcatcactatggtgcttctgacgttgat

SEQ ID NO: 231214 - DNA, 79 bp, Homo sapiens
ggaaagcgcatacaggaccctaaacaggaattgaatgatctggcacgggaccctccagcacagtgttcagcaggtcctg

SEQ ID NO: 231215 - DNA, 83 bp, Homo sapiens
aaggcaaattgcaaaccataaggatgtttcgttccctgccagaagatcagctgccatgttacttgactcacaccaaccctaga

SEQ ID NO: 231216 - DNA, 60 bp, Homo sapiens
ctctcagtgcctgccacctccccaaaggcaaagtacctgaatctctctcatccatggagt

SEQ ID NO: 231217 - DNA, 88 bp, Homo sapiens
ggtagcgcctgctgcccccaccagaccctgcacttgatggaccagctggcaccacccagatcaataaactggcttatttgaatttgcg

SEQ ID NO: 231218 - DNA, 90 bp, Homo sapiens
cctcaagatataatcttcacttccgggggcactgaggtaaagggagaagatgaggaagagaacaatttggaagtacgtgaaaccaaaatt

SEQ ID NO: 231219 - DNA, 100 bp, Homo sapiens
tgctcagtgcttgctatcatgtgtgccccaactataccaatttccagtttggtcattgattacaacggggaacgcacgctggatggttttaagaaattcc

SEQ ID NO: 231220 - DNA, 100 bp, Homo sapiens
cttggatgtgcaacacaaccagctccttgagctcccacctaaccttctgatgaaggctgacagggatttgtcttggctgttactatgacacgggaagcaa

SEQ ID NO: 231221 - DNA, 80 bp, Homo sapiens
cactgtgccttcgcgcacggccccctggacctgcggccgcccgtgtgtgacgtcaggtccagccctgctgggagttttct

SEQ ID NO: 231222 - DNA, 82 bp, Homo sapiens
agccgttattggctgccgttaaggaccgttacgtttcccgggtacaccaggggttggaaaaaccacactaggcaaagaactt

SEQ ID NO: 231223 - DNA, 90 bp, Homo sapiens
gaaagattgggcaagagaagaattcagaagaaacaaaagtgccaccgaagaggagtgtttctcaggagctatcagaaactatcctcacca

SEQ ID NO: 231224 - DNA, 90 bp, Homo sapiens
gagagtaatgctccttcaacaaggtcttaatgacagatcaggtgtgcctaccgcatgttgccgctgctgtttctgctgggacgtctgact

SEQ ID NO: 231225 - DNA, 90 bp, Homo sapiens
tggctgataagtctagattcaccaatgtcaaacagtttattgcaccaggtcctgggaactccaacaagggagcaaatcagagaaatgaac

SEQ ID NO: 231226 - DNA, 98 bp, Homo sapiens
ggacgacgacgatggggatatcggtgtttaaaattatccaactgccatagagctaaattcttttttggaaaattgaaccgaacttctactgaatacaa

SEQ ID NO: 231227 - DNA, 110 bp, Homo sapiens
catgaagagtcctgaccacaatggggaggacaacttcgcccgggacttcatggcctgatcaaccccgtataaccaaagatgtaatttgttttcatgctgaagatttctta

SEQ ID NO: 231228 - DNA, 75 bp, Homo sapiens
aatatctgaatctacccccgtggaaatgatggatgccaaccagcgctgggatgtgcctgaggcggtggagtggat

SEQ ID NO: 231229 - DNA, 100 bp, Homo sapiens
acaggactcagagaagaagaggagtcattcttctccatcacagattcctaaaaagattctcagggggcagctggcattttatgctatgtgggagcctatg

SEQ ID NO: 231230 - DNA, 75 bp, Homo sapiens
agatgaatggacaccttgaagcagaggagcagcaggaccaggtactccaaagattcaggtttactcacgtcatcc

SEQ ID NO: 231231 - DNA, 100 bp, Homo sapiens
cagccgggaactccccatcgcgttttgccagcgataatacgcctcagggtttggtgcaattctccattaatgaagataacatttgaattccccaaagcag

SEQ ID NO: 231232 - DNA, 100 bp, Homo sapiens
ccgcgctgcagacgaagcccgcgcgtgatcccgctccgggaagcctgatgttactttggattttatgcttccaagaaaaacaagtttgtcatctgatagc

SEQ ID NO: 231233 - DNA, 90 bp, Homo sapiens
aagctgcacaggaagccgtgaaactgaacatgaacttcatgaggacagagacttgggcttattcaccaccaagtccccagttcctaactc

SEQ ID NO: 231234 - DNA, 82 bp, Homo sapiens
gttcagaatcctccaaaaccagtcatgaccactagacccacagctgttaaagcaacaggaattgaatgatctggcacgggac

SEQ ID NO: 231235 - DNA, 75 bp, Homo sapiens
cctggctccccatactagtcgccgctggatgctgacaaatatgagaatgatccagaattagaaaagatccgaaga

SEQ ID NO: 231236 - DNA, 100 bp, Homo sapiens
tgaaattcccgtcatcggagtgaccctgcccatcatgtggttctacctcctcatgaacatcatcactcatcatgtttataactactgtactagtgttcac

SEQ ID NO: 231237 - DNA, 97 bp, Homo sapiens
gctactaacagcctgggtgagatcaacactagtgccaagctctcagtgctcgaagaaaagacccgacgacacagctttccaaatagtggaacttcgg

SEQ ID NO: 231238 - DNA, 88 bp, Homo sapiens
acgatggcctagcacgtggaattcgcgaagctgccaaagccttagacaagtatggagagtcggcttgactacactgtgtggagcaagt

SEQ ID NO: 231239 - DNA, 110 bp, Homo sapiens
ccggcgcctccactccgtcccccgcgggtctgctctgtgtgccatggacggaacccagcgggtgccgcttctccacccgaggcttccacctccaacgagccatgttccag

SEQ ID NO: 231240 - DNA, 100 bp, Homo sapiens
atgtacgcgaactattggatttgcacaagcagcctacattactaaagctcaagcagttgtttactgcacatgttcagtttttccagaagaaaatgaagct

SEQ ID NO: 231241 - DNA, 51 bp, Homo sapiens
caagtcttgaagagcttgctggagttcacacaaaagatgttggacaatttc

SEQ ID NO: 231242 - DNA, 127 bp, Homo sapiens
caggcgacaggtgtcgcttgaaaagactgggcttgtccttgctggtgcatgcgtcgtcggcctctgggcagcagtcttaggaaaagtcctcagtgctgtgggcagtgcccagctactgatgtcccag

SEQ ID NO: 231243 - DNA, 100 bp, Homo sapiens
acaacattggctcaatagcaagaatgtgtgcccttaatgaaggtgaagttgaacaaattgctatgatgaaaccaaaaggccagactgaacacgatgaggg

SEQ ID NO: 231244 - DNA, 100 bp, Homo sapiens
ccaggggtccgggctagagctggagtcgtgagcgcgcgcccgccccgctctgggaggaccgcgagagttttccgtggccaaaatcctgcccaagaccgtg

SEQ ID NO: 231245 - DNA, 86 bp, Homo sapiens
cgagctgagtggttgtgtggtcgcgtctcggaaaccggtagcgcttgcagcatgccgccgccatgtctgcgcatctgcaatggatg

SEQ ID NO: 231246 - DNA, 98 bp, Homo sapiens
aggagatgagtatattattaatggtcagaagatgtggataaccaacggaggaaaagctaattggagctattcatcactaatgaaagttgaaaatatgt

SEQ ID NO: 231247 - DNA, 75 bp, Homo sapiens
ggctggcggtgcctggacgtacaatgtatgtggtagaagaccaaagaagagatgagctaggaccatccacctgcc

SEQ ID NO: 231248 - DNA, 100 bp, Homo sapiens
tgacgctctgggtgaagaatggaaggtttacatgttccaatatgattccacccatggcaaattccatggcaccgtcaaggctgagaacgggaagcttgtc

SEQ ID NO: 231249 - DNA, 90 bp, Homo sapiens
agacaattgcgagtcgcactgcgcggagaaggggtccgagggcagtctgtgtcaaacgcagtccacctggaaggccgctgtggtggaagg

SEQ ID NO: 231250 - DNA, 98 bp, Homo sapiens
aatcagtctctctccctgctctacaacgtgcctgcagtggccgaggagattcaggatgaagttggtatttaaaccatgtcagagctgcctcaccacag

SEQ ID NO: 231251 - DNA, 101 bp, Homo sapiens
cacaatctgatttgaacctcacacatgggaagtaggcaaacagggaaactgaggaccagagagggttgttggtatggagcaaaagacgagacaccttctaa

SEQ ID NO: 231252 - DNA, 82 bp, Homo sapiens
cgagatctgtgcccccggcttctacggcaacgccctgctgcccggcaactgcacccgatgccggctccaggagcagcagtgg

SEQ ID NO: 231253 - DNA, 83 bp, Homo sapiens
ctgagcttcccagcgccgcctcacctcgcttttcgaactccgcgacccgagcgcaagggagaactaatgccgacgtgatgacc

SEQ ID NO: 231254 - DNA, 82 bp, Homo sapiens
aggcctccgggcccggcgccgccgcccgcaggaaattgacaatggcccttcagctatgctaggtctataatgggaagtgtca

SEQ ID NO: 231255 - DNA, 75 bp, Homo sapiens
cacgcaccccactcggcgtcgcgcggcgtgccctgcttgtcacagatcctggccaacgtcttcctctacctgtgc

SEQ ID NO: 231256 - DNA, 98 bp, Homo sapiens
gtaaacatgtgccatggtggtttgctgtacctatcaacccattatgctttccttaaagtttcccatgtctcaatggactcctgaatataacgagctct

SEQ ID NO: 231257 - DNA, 75 bp, Homo sapiens
gtaaatgttgagcctttttggcctggcttgtttgcaaaggacaaccgcatccagggtggctacgagaacgtgccg

SEQ ID NO: 231258 - DNA, 75 bp, Homo sapiens
gaagaagatcgaaaattaaacctcaggttcctaaaagtaaagctctagaggccgtcaaattggcaatagaagccg

SEQ ID NO: 231259 - DNA, 99 bp, Homo sapiens
ggcagagctcatctgacgtggcatcagttgacgaaggatcagagattggtgtattcgggcagactgcttcccgatcatctgcagctgaaagacattctc

SEQ ID NO: 231260 - DNA, 96 bp, Homo sapiens
ccaatggacaccttctaagagtttggcgagtcagtgactgaagcgcccgtccattccaaggctctccagcagaactatctcctactactctttccc

SEQ ID NO: 231261 - DNA, 90 bp, Homo sapiens
caaggccacagagtcggggtcttcacggttttttattggcacctcagtctcaacattttcttttcggattcatgaggaaagagaaatcct

SEQ ID NO: 231262 - DNA, 97 bp, Homo sapiens
gccggcggcgggaggagctagggctggagcctctccagcctcccgcgaaggtactgtgagaatagagatgtttcgaaatatgcagaatgcagaaatc

SEQ ID NO: 231263 - DNA, 145 bp, Homo sapiens
gaaagctatctagggacgagatctagaatcaactgagagagatgcttaaaaatcaccagttactttaatgattcgatcctttggtacagaagacagaccgacagatcgtccaataccacctcgagatgaagtctttgaatacatt

SEQ ID NO: 231264 - DNA, 97 bp, Homo sapiens
ggagcggacgccacccgcgcaccgggcaggcgcggagaccggcgtgggacagccacctggagcgcagctgccagttccatggaaaatgggagaccac

SEQ ID NO: 231265 - DNA, 75 bp, Homo sapiens
aatcaaggctgtgttcgaaaagtttacctgaaggacaccgccacagcagaggtatctcagtaacgaagaagacac

SEQ ID NO: 231266 - DNA, 51 bp, Homo sapiens
aaaattctgaactcaggacttggcaaatgttcatttggatttggaagaccg

SEQ ID NO: 231267 - DNA, 82 bp, Homo sapiens
cttccggcagctctcccacctccagcagcacaccagaaatgtctttcctccaggacccaagtttcttcaccatggggatgtg

SEQ ID NO: 231268 - DNA, 153 bp, Homo sapiens
attcctgcctttcctcaagagaagagcccccaggagaaaagccagtattgcttgtgctcctaacaacctgtctcttgtaatgaaggtgatgccatcaaagtttttgtgcgaattcgtcctcctgcagaaagatctgggtcagctgatggagag

SEQ ID NO: 231269 - DNA, 100 bp, Homo sapiens
cttcaccaagacctaaaaaaccccaacaacagctcccttagatgtcttcggaagacatatccttcccaactcccatccctcagtgtcattctcatattcg

SEQ ID NO: 231270 - DNA, 98 bp, Homo sapiens
tgaaccaagtgtttgggcaggatgagatgatcgacgtcatcggggtgaccaagggcaaaggctacaaaggggagctacctggcacatacgcaggggaa

SEQ ID NO: 231271 - DNA, 90 bp, Homo sapiens
gggagaagaagatgaagagattgatcaattcaatgatgatacatttgggtcaggtgcagttgattcgtcttttgggatccacgattccac

SEQ ID NO: 231272 - DNA, 82 bp, Homo sapiens
ctgaattcccttctgagttaatgtcaaatgacagcaaagcactgtgtggctgaataagcgataacgaaggaggcccaacttc

SEQ ID NO: 231273 - DNA, 100 bp, Homo sapiens
gccaaatgtgtctccagcccacacttccagtggcttgattaaactggcatcccagaatttttcctatggagttactgaaatgtataaagcatgttttctt

SEQ ID NO: 231274 - DNA, 90 bp, Homo sapiens
aagaagagtgtgtggacactccaaagccctggtacctgacagtgtaaagaaggagctcctacaaagaataagaacattccttgctcagca

SEQ ID NO: 231275 - DNA, 90 bp, Homo sapiens
aaccagttattgaatatcaagaggaggagttgttggattacaaggcagaggaagacccagcaaaatttaaatctatcaaaacaggccgag

SEQ ID NO: 231276 - DNA, 98 bp, Homo sapiens
ggactacgaactcgtccagagggtcggcagcggcacctacggggacgtctataaggtaacaaacctgaatttggcaactggcatcataaacagaagca

SEQ ID NO: 231277 - DNA, 50 bp, Homo sapiens
tgcaaagatcctgggagaccaaggagtctcaggagcaggggctgcggcag

SEQ ID NO: 231278 - DNA, 74 bp, Homo sapiens
gcaggtctcccccacggatgaggagaaggtcaaaatgcagatcttcgtgaaaacccttaccggcaagaccatca

SEQ ID NO: 231279 - DNA, 54 bp, Homo sapiens
gattcgcagtggtcgcttcttctccttggtttctaccatgaatgaaatgaagag

SEQ ID NO: 231280 - DNA, 50 bp, Homo sapiens
agtatatacatcaagtcactgagctgggctcaaaatgcagagaactcaaa

SEQ ID NO: 231281 - DNA, 98 bp, Homo sapiens
cagggatctttgaattggtggaacttgttggaaatggaacatacgggcaagtttataagtttgatggtgacagtgcctacgtggggatgagtgacgga

SEQ ID NO: 231282 - DNA, 75 bp, Homo sapiens
ggagaagaaatagttacctatgatcgtatttaccttgctgtggattgctgactggatggtccatcacttctggag

SEQ ID NO: 231283 - DNA, 74 bp, Homo sapiens
atcctcgaccgatactacacaccgatggctttgaagcgtatgttgaatttcaatgtgcctcatattaaaaacag

SEQ ID NO: 231284 - DNA, 98 bp, Homo sapiens
cggatcgcaacccggagtccggatccgatcccgctctgcacattccaaaggcagacctgcgaccgcatcaagcagtccgccagcggaaccaagcggcg

SEQ ID NO: 231285 - DNA, 100 bp, Homo sapiens
tgaagatactccacagttgtatgtggcctgtggtaggggaccccgatcatctctgagagtcctaagacatggacttgagaaagtggtggagagagagctg

SEQ ID NO: 231286 - DNA, 100 bp, Homo sapiens
atctcgcagaacgccatcaaccagctacatttcaacctacgaatgaagagggacacttcccttttcagtgatgaatttaaagtagaaacatcaaataaag

SEQ ID NO: 231287 - DNA, 97 bp, Homo sapiens
ttggcttctcccagcatagccccaggggcataaggaaatggtggcaggcacttcctcctaacaagaaggaagtagttaaagaaaatataaggaagaa

SEQ ID NO: 231288 - DNA, 99 bp, Homo sapiens
ggccttggtggaggatttgaaataggaattgaggtatgatctcgtgaaaccttgagagaaactgaatgacgaatgaaactattgttcctgtttcacaca

SEQ ID NO: 231289 - DNA, 51 bp, Homo sapiens
ggagctaacggactccgcgcggtgagtgaccactagtgtttgttaacaaaa

SEQ ID NO: 231290 - DNA, 75 bp, Homo sapiens
gactccgattcgtgaccctcagcgccggtgcatgtcgatcagccattgtttgatgtcctgtgactgagaaaccag

SEQ ID NO: 231291 - DNA, 83 bp, Homo sapiens
ccagagaaaggccggcctgcagcacccgccaccgtcgccggccgcccgcacgtccgtccggtaccccctgtaccggctgggtg

SEQ ID NO: 231292 - DNA, 101 bp, Homo sapiens
gtggggcaatccgggcttgcagacgaggtggccctcatgacactgacgctcttcccggtccggctcctggttgccgctgccatgatgctgctggcctggcc

SEQ ID NO: 231293 - DNA, 51 bp, Homo sapiens
ggcatctcctctcacggatgcctcggtatctctgcattagccagattggac

SEQ ID NO: 231294 - DNA, 115 bp, Homo sapiens
gatgttgctgtggaagctattcgattggttactctgatacttcagaactaccactgctggaatgaagcatggatgacaaggcctgaccttcctgttggatttggaggctggcaag

SEQ ID NO: 231295 - DNA, 75 bp, Homo sapiens
cagagcaatggaagcattgttgtcgtctcctctctggctgataacaacgaacttgatgcaagtgataggtttgcc

SEQ ID NO: 231296 - DNA, 51 bp, Homo sapiens
tggagcccgaaggcgtcatcgaggaggaagaaccagcgtgcccgccagtcc

SEQ ID NO: 231297 - DNA, 82 bp, Homo sapiens
ccacacagtgtgcctgcaacctgtccggggatcccagggaggtgcatggctgcctcctaatcccatagtccagaggaggcat

SEQ ID NO: 231298 - DNA, 75 bp, Homo sapiens
gggccaatgacagtgcactaaaagcacaatcgcatggaatttagtggctagttactatgaacagttgccttatgg

SEQ ID NO: 231299 - DNA, 100 bp, Homo sapiens
gtccactccacctggacctgccccatggaggtgctgcgggatcacctcctcggcgtgagcgacagcggcaaaatggcccactgcgtgaccttggttcagc

SEQ ID NO: 231300 - DNA, 100 bp, Homo sapiens
ttcagtgactgaattaaaaggtgtcaagaagctcagaatgcaaggagctgtacctccaaccagttcagttcctcctgttgccggggccccatcggttgga

SEQ ID NO: 231301 - DNA, 51 bp, Homo sapiens
cagccgagcccgcccgcgcgccgcgggaaaggaactgctgccttcagccca

SEQ ID NO: 231302 - DNA, 83 bp, Homo sapiens
tagcctgctgtcgcccagccgcggtcaaaatgcagatcttcgtgaaaacccttaccggcaagaccatcacccttgaggtggag

SEQ ID NO: 231303 - DNA, 75 bp, Homo sapiens
ggatcaaccctctgcatacagtaaagatgaagtaggtgttccaggtagcaattcagctgacctattgcgctggac

SEQ ID NO: 231304 - DNA, 151 bp, Homo sapiens
gagaggcaccgggatcgtgaccgagaccgtgaccgagagcgtgaccgagagcgcgaatatcgtcatcgttagaaggcctccccatggccacccatggaccagtcggcattcacttcctcccttctgcggcccataaaagccctgggttcag

SEQ ID NO: 231305 - DNA, 100 bp, Homo sapiens
atctgaagttggctaacaaattgaaagatatcatcaaacgacatcaggctcaaactgtccaggttgctgaagttgaaccacagtcacagccacagccttc

SEQ ID NO: 231306 - DNA, 98 bp, Homo sapiens
ctttctctcgatgaggataacatccctccagaagatgaggtggggttttgccatgttgcccaggtgggtctcaaactcctgggctaaagcgatcttcc

SEQ ID NO: 231307 - DNA, 100 bp, Homo sapiens
gggcggcgagcagaggagctaacaggcacgttgcccctggcctcgcaggagtcggccgtggtggaggacctgctgtacgtgctggtgggcgtggacggga

SEQ ID NO: 231308 - DNA, 75 bp, Homo sapiens
ccgccatggagcccgactcggtgattgaggacaagaccatcgagctcatgctctgatccagtatatacggcctgt

SEQ ID NO: 231309 - DNA, 75 bp, Homo sapiens
ctgtcatcccacctgagaaccatgctcaccgaccctgaagacaactgttagttttgtggcttactgctgctccac

SEQ ID NO: 231310 - DNA, 98 bp, Homo sapiens
gaaaagctttggatgaaggagcttcaaacccaaagaggcaaccacgagacagacaacatgaaccagatctacggtttcgagggtgaggtgaaggccaa

SEQ ID NO: 231311 - DNA, 50 bp, Homo sapiens
aacctcagaggacaacgaagtgttcggtgctggctgccagctgctgcgcc

SEQ ID NO: 231312 - DNA, 100 bp, Homo sapiens
tcgctggctgctctgctgatcggaggcttcgcaggtctcacctcgacggtgatttgcaggtgttcaatcccctgtctcccctttactccctggatgttct

SEQ ID NO: 231313 - DNA, 83 bp, Homo sapiens
gagctgaggactgcctgtttgcaggggccaaaccagtgctcctgccacctctctggctgccccctagagcctgcccatcccag

SEQ ID NO: 231314 - DNA, 100 bp, Homo sapiens
gtgttgctaacaatgatcgcccgagtggcggacgggctcccgctggccgcctcgatgcaggaggacgaacagatggcgggtgaaaaagttgagaagccag

SEQ ID NO: 231315 - DNA, 82 bp, Homo sapiens
aaggtggaggcagcgcggctctcagggagtgcatccgccccaacccttttccccctcgtctcctgtgagaattccccgtcgg

SEQ ID NO: 231316 - DNA, 75 bp, Homo sapiens
atatcaagaggaggagttgttggacaggttgcttggaagcgagctgtcaaaggtgttcgagaaatgtgtgatgtg

SEQ ID NO: 231317 - DNA, 74 bp, Homo sapiens
ggaagttcgtactgggcagaacgcgacgggtctgcggcttagggtatattactcgaggggtttttaaatattgt

SEQ ID NO: 231318 - DNA, 100 bp, Homo sapiens
cccccatctacctgtcgtttgtcatgcttttggctgccctgagctggcagtacctgaccactctctcccagatcctcagacagattctaagcctcctgag

SEQ ID NO: 231319 - DNA, 83 bp, Homo sapiens
agcagaacgtgagggtgtaacttacaaaaaggcacctgaatggacagaagaggacctcagccaactgacaagaagtatggtta

SEQ ID NO: 231320 - DNA, 75 bp, Homo sapiens
agcagaggcctacgacgtgctgagtgaccaatgttggctcaattaagaaacatcagggagataaattcaacccag

SEQ ID NO: 231321 - DNA, 100 bp, Homo sapiens
actgaggaataagatggtacaagttggactgcttcccaagctcactgcactcctaggtgattttcttccacccccacctccacctctagatgattccagt

SEQ ID NO: 231322 - DNA, 97 bp, Homo sapiens
gcgggtatcagagccatcagaaccgccaccatgactgttggcaagagtagcaagatgctgcagcacattgactatagaatgagatgtatcctgcaag

SEQ ID NO: 231323 - DNA, 82 bp, Homo sapiens
caaggaggcctgttcataaaagatatcgaggatttagccggaaggaaatctggcattttttaaagtttgcgccccacaaaga

SEQ ID NO: 231324 - DNA, 83 bp, Homo sapiens
gacctgttcaccagcactgtctccaccctagagtggccacagatgtctttaattccaaaaacctggccgttcaggcacaaaag

SEQ ID NO: 231325 - DNA, 90 bp, Homo sapiens
atgctgaccaaggaggagcctgttccagaactgctggaagctgaggatgagcaggaggaagtgctgaatgtgaatctcgaggggaacttg

SEQ ID NO: 231326 - DNA, 75 bp, Homo sapiens
cggcgagagtgggcgagaacgtccactgcgggccggcgaaagctggcgatcagtgggtgaccgcggctgcgaggg

SEQ ID NO: 231327 - DNA, 75 bp, Homo sapiens
ccggtacatctgaaagccgggaaatggacactcatgaggaccatgatacttccactgagaatacagacgagtcca

SEQ ID NO: 231328 - DNA, 124 bp, Homo sapiens
gcatcttgacatttccgtggcaaccaaagacgggcgcctatcagtacacaataagggccgactgaaccaagctaactcctccggaagagagtccaaggtgcctggtgcccgaagcgctcagaat

SEQ ID NO: 231329 - DNA, 82 bp, Homo sapiens
ctgaaaggagagacacttgtgaacattcaagtgaagcaaaagcctttcatgattatgattgtcagtggcttcgccccgagga

SEQ ID NO: 231330 - DNA, 100 bp, Homo sapiens
atgatttctcgaaaccactgtgttttgaagcagaatcctgagggccaatggacaattatggacaacaagaaaagcacttggttctgcttcgagatggaag

SEQ ID NO: 231331 - DNA, 75 bp, Homo sapiens
ttgctgagccagcggagctgcttggtgtccttaagtttgctcgcttggtcaagtcctacgaagcccaggatcctg

SEQ ID NO: 231332 - DNA, 50 bp, Homo sapiens
cacagagttagagagagggatggtggacaactttgggtttgaccttcctg

SEQ ID NO: 231333 - DNA, 100 bp, Homo sapiens
gctggggctgccgccacggccgcccggaggcacagatgaggagagcatcctgactctgttgacatcccgaagtaatgctcagcgccaggaaatctctgca

SEQ ID NO: 231334 - DNA, 75 bp, Homo sapiens
cttcccagtagctgggaccacagcatatactttagaagaacagaagaacctcacagtctgtcctgatggagcact

SEQ ID NO: 231335 - DNA, 88 bp, Homo sapiens
ccgcttaggagggagagcccacccgcgccaggaggccgaacgcggactcgccacccggatcaagagactgaaatctcatccttctatc

SEQ ID NO: 231336 - DNA, 75 bp, Homo sapiens
agtctcctgagtagctatgactacgggcctatgaaaggaggttccctacatgtcctttgattccgatgttcgtgg

SEQ ID NO: 231337 - DNA, 75 bp, Homo sapiens
tagaagctaggatcgccgcaaccacaggattttctgccgtctcttggcaaaaatggcaaataatgatgctgttct

SEQ ID NO: 231338 - DNA, 97 bp, Homo sapiens
gggatgatgacaatgtagaggatgacttctctaatcagttacgggtatgtccagaaatcttgatgcatgtatctgaaaagaaaatttctgtttcatg

SEQ ID NO: 231339 - DNA, 95 bp, Homo sapiens
tcatgattaccgtcaagtttgtggagggggccaacgcagtcaccgccgtccgcagtcacagtccagccactgaccgcagcagcgcccttgcgtag

SEQ ID NO: 231340 - DNA, 100 bp, Homo sapiens
ggggaactagctggagggcaaggcgggaacactcaagttcatccgagaagtaacaccatatatcaagaagccatcattagtatcagatctgccgtgggaa

SEQ ID NO: 231341 - DNA, 75 bp, Homo sapiens
ctttgtggtcttcatttgtgaatacataggttaccaggtgacaggggtgtttatgaagaactgggactcactgga

SEQ ID NO: 231342 - DNA, 83 bp, Homo sapiens
ctgcaaacttcctaattctaaggttatggaggttttgatgactatggtggctataataattacggctatgggaatgatggctt

SEQ ID NO: 231343 - DNA, 74 bp, Homo sapiens
tggacctatgaatatccagtttgagccatcggatctaagatccaaaagatgacaagattctgcagatcattacg

SEQ ID NO: 231344 - DNA, 100 bp, Homo sapiens
cttgttgtcttcaattaaaaaatttattaaaggaagcacacctaagctccggtctgatatacaaaaacgactgcaggaagaccccaactacagtccccag

SEQ ID NO: 231345 - DNA, 75 bp, Homo sapiens
cagtgttatatcctccaggaatactggccagtttcttgcagaacataaattattaggaaacattaaaaatgtggc

SEQ ID NO: 231346 - DNA, 86 bp, Homo sapiens
gaggaccggagcggcctgtccgagggcccagtcatatatgcacagttagaccactccggcggacatcacagtgacaagattaacaa

SEQ ID NO: 231347 - DNA, 110 bp, Homo sapiens
acctgcctccctccttgtggccctgggaggaagccatggactctaccaagtctgaacccctgaagggatcaccagagctctagaggacaaaatcccagtccttggcacaa

SEQ ID NO: 231348 - DNA, 75 bp, Homo sapiens
aaaatactgaaattgatagcagtttgaatggagcatctttccttgaagaagtacattattgacattgtggttgaa

SEQ ID NO: 231349 - DNA, 101 bp, Homo sapiens
gacgtgcagcggaggagggcaaggactacccctttgccaggttcaataaggaaattggatacactcacatgaaaatagcggaaggagtgaactctcttttg

SEQ ID NO: 231350 - DNA, 100 bp, Homo sapiens
cgtagggaccacatcaaagacagctttcacagtttgcgggactcagtcccatcactccaaggagagaagacctgaaagatgtctgaaaattccagtgaca

SEQ ID NO: 231351 - DNA, 50 bp, Homo sapiens
attgcacatcaatgatatcatcccagatatgaggccccaggattcctggc

SEQ ID NO: 231352 - DNA, 100 bp, Homo sapiens
gggagctgaggaaccagatatcttgaaaagctgccagaaaggtatcgagaaccttccctgcgaacttcagaggaacttccagctgatgcgagagctggac

SEQ ID NO: 231353 - DNA, 75 bp, Homo sapiens
ccagccttcaatgtgtcctacaccaggcagcccccaaatcccggcccagctcttttaagagcctgtgccgatgga

SEQ ID NO: 231354 - DNA, 74 bp, Homo sapiens
ctggaaatgagtcttcaagctctgtaagacatgtggacccccaaaagtacaagggcatatttaacggattctca

SEQ ID NO: 231355 - DNA, 83 bp, Homo sapiens
ctgggccgccgaatctccggccgaagagcggcggcggcagcggcgcatgtagagcgcatgaagtacaggacaataaagcttcc

SEQ ID NO: 231356 - DNA, 75 bp, Homo sapiens
gaaaacagtacccagtgaagccattcgagggctgagtgctttgcagtctttcagagagggtgtgtatgaaatcag

SEQ ID NO: 231357 - DNA, 90 bp, Homo sapiens
ccgagggcggggaccggcggcgctggaggagcgaggcagctgtactaggactgggaacgggataagtctacttttcttccacgtaacaac

SEQ ID NO: 231358 - DNA, 75 bp, Homo sapiens
acgagctgagcttcaaaaggggggacatcctcaaggtatatttgaaggctcccatgattctgaatggagtctgtg

SEQ ID NO: 231359 - DNA, 75 bp, Homo sapiens
tgaagagcgacaagccgctggcagccgcggatctcaccgccgctcaggtctcttgcatggcaccaagaatgttac

SEQ ID NO: 231360 - DNA, 83 bp, Homo sapiens
ccaagccgagggcaactttggaggccccctggaaggctttaggatccaggcttgggcactgtttaaaggaaagttccgagaag

SEQ ID NO: 231361 - DNA, 100 bp, Homo sapiens
agtcctcgctggactgctcagggtgccagacctcatcctctggccaggctgccgcacctctacaggaactttgccgcggagcagtatgccagtgtgttcg

SEQ ID NO: 231362 - DNA, 96 bp, Homo sapiens
acagtttggagaactcaaatatgtccgcattgtcttgcatccagacacagagcattctaaaggcaccacactgtaactcgaggcatcaccaaaggc

SEQ ID NO: 231363 - DNA, 100 bp, Homo sapiens
actattgtactatggacttcatcgctttataacagagtctcactcccatcgcccagacttgagtgtagtgatgtgatcactgctcactgcagtctcagcc

SEQ ID NO: 231364 - DNA, 74 bp, Homo sapiens
gggacggagcctgacctcttacttcctgtgggaaaagctggaacgggtgatcctagggagtgaggctgctcagc

SEQ ID NO: 231365 - DNA, 82 bp, Homo sapiens
aaggtcgccctcaaggccatgatcaaaacatgtgcactcccagcaacacccctgccacgccgcccaacttccccgatgcgct

SEQ ID NO: 231366 - DNA, 100 bp, Homo sapiens
gacgctgcggcccggcccggcggggcggagtacgtccagcttgttactgaacttcgaatgacaagagccattcagcctcagatcaatgcttttttacagg

SEQ ID NO: 231367 - DNA, 75 bp, Homo sapiens
cagatcttcacagcacagttcctgggaaggtggagccaccagcctctccctgcacccatatatctcccatcagca

SEQ ID NO: 231368 - DNA, 83 bp, Homo sapiens
ctggtatctaggcaacagggatgagcctgaacctccctgaggccagcttactgagggaactctaatgatccaggacaaagaag

SEQ ID NO: 231369 - DNA, 50 bp, Homo sapiens
tcctatgagctcctctctggcaggattggagacacaaaatcagaaattaa

SEQ ID NO: 231370 - DNA, 75 bp, Homo sapiens
ccccattccgctttgccagaagaggccatcgagtcagtggaaaggaaaaagcaagagaaaaagcaagaacaagag

SEQ ID NO: 231371 - DNA, 75 bp, Homo sapiens
ggccgagcaggctgagcgatacgacgaggtcctgtaataaagagggatccgaacaagctcagaaagaaaatgaat

SEQ ID NO: 231372 - DNA, 100 bp, Homo sapiens
caaatggtccccccggtcctgctggaagtcgtggtgatggaggcccccctggtctgactggaagccctggcagccctggtcctgatggcaaaactggccc

SEQ ID NO: 231373 - DNA, 74 bp, Homo sapiens
gaagatgaacagggttcctggggcatcgacgatctccatatttcattgcaagtgtttgtggagaaggtgctgca

SEQ ID NO: 231374 - DNA, 75 bp, Homo sapiens
cgcggcggccccgggaccaaggaggtgtcgtgaaaactacccctaaaagccaaaatgggaaaggaaaagactcat

SEQ ID NO: 231375 - DNA, 98 bp, Homo sapiens
taaagaaaacctgccaagtattcaggatagtgacaacctctggtgggacgcctttgccactgaattttttgaagatgacgccacattaaccctttcat

SEQ ID NO: 231376 - DNA, 100 bp, Homo sapiens
agtaatcgattacccaaagtttacaaatggagttttcagatgtatgctgcagttggagaagaaacttgaacgtgaacttgaggatgatgcacgagttatt

SEQ ID NO: 231377 - DNA, 90 bp, Homo sapiens
cttaatgaggaaatatcaagaacatgaagatgttcctatttgtattcattgcagaattctgcttggtcagaatcgtgatggcattgtgtt

SEQ ID NO: 231378 - DNA, 98 bp, Homo sapiens
ataaatcagacagaacagttaatcctcaatttaagcctgatctaacccctagaaacaggtcctagcagaagatgtgactcagactgcctctgggtggg

SEQ ID NO: 231379 - DNA, 75 bp, Homo sapiens
ggctgaacttcaccttttggctttcttggcctgatgctgaactctcgaggcctcctgatttgtatgataccaaca

SEQ ID NO: 231380 - DNA, 73 bp, Homo sapiens
gatgatacaccttttccacagggaattgagttgagctgtagtgcaagtgcccttcaggcaagattgaaagtag

SEQ ID NO: 231381 - DNA, 100 bp, Homo sapiens
ctgagtcaacagactgagcgcgtccaggcctgacagctctgcggctcgggccctgagtactatactggcaattgctggagaagattttgcaattgttgct

SEQ ID NO: 231382 - DNA, 75 bp, Homo sapiens
ctctctcagagaccgtcggttcagcatctcggagagatgcttgtggttggtggcatcgaccgggtttatgaaatt

SEQ ID NO: 231383 - DNA, 100 bp, Homo sapiens
cttgctcctttgcctgcaaacctgctgccagcgatccataggtctttccaatgggaaagccaaggtgtgcaactacagtgggtggtattactgcagtagc

SEQ ID NO: 231384 - DNA, 100 bp, Homo sapiens
tgcggagaattggagatggggaccgccctggacatcaagattaaaagagcgaataaagtttatcacgccggggtgaccaagaatatggcccaggtgacca

SEQ ID NO: 231385 - DNA, 100 bp, Homo sapiens
cgccatccagccaggacatctgcagggacgacctggcccagctgcccttcctgaccatgtgcgtgaaggagagcctgaggttacatcccccagctccctt

SEQ ID NO: 231386 - DNA, 90 bp, Homo sapiens
gtgtttcgtgtgcgctcagtgcttccagcagttcccagaaggactcttctatgagggaggagatatcaccaaacatgatggaacaggcgg

SEQ ID NO: 231387 - DNA, 75 bp, Homo sapiens
ttcagcttcggcttcctcatctgcaaagcataaatacgtgtaaacaggaacatcgataagtagtgtaaaaacttg

SEQ ID NO: 231388 - DNA, 74 bp, Homo sapiens
aaacccacaggcacacccaattgagccccatatgggggttggcaggcagcagagaggcccctttcaaggtgttc

SEQ ID NO: 231389 - DNA, 80 bp, Homo sapiens
agttggaagcagccgatccagcctgcggagcctgtggggcagatttggatcatacagcagatgtccagtgagtatagcgg

SEQ ID NO: 231390 - DNA, 75 bp, Homo sapiens
tttctccattgaagagctggaggacctttacatggtgtttaagtacaatgcttgcacactgcacggtggaaaagg

SEQ ID NO: 231391 - DNA, 87 bp, Homo sapiens
agcatccgcggtgggaagagaactgcgaggaggaagctggtggagggccagctagaggaattaaggaatttgcaagagcaaatgaag

SEQ ID NO: 231392 - DNA, 100 bp, Homo sapiens
ggaattcggagcctcccctgcagcgactcggaagattcgaggcggcgggggacaagtcggcgccccagagcggacgaggatctcccagccatccagcccc

SEQ ID NO: 231393 - DNA, 100 bp, Homo sapiens
attagaagaggtgcctgattatgtaaaaaaggatgtgatggtggcaggtgggatggagagcatgtccaatgttccatatgtaatgaacagaggatcaaca

SEQ ID NO: 231394 - DNA, 100 bp, Homo sapiens
agaagcagcgggggggcaggcgatcgaagtgccgcagaatggaattcggcattgttcctacacagcttctcggcaacatctctatgttgataaaaataca

SEQ ID NO: 231395 - DNA, 75 bp, Homo sapiens
ttgaccaagaggagaaggggaagatcacattcgcaaaccagtccagctacgggggcccagccagccagcagctga

SEQ ID NO: 231396 - DNA, 100 bp, Homo sapiens
atcattaagattctgcttaatgctggggcagaaattaattcaaggagtggcatcaggattataggaaattcagggaaacaactatgtatctcataattgg

SEQ ID NO: 231397 - DNA, 48 bp, Homo sapiens
cacccagaggaccaggcggcggtccttattccttaaatggatacagag

SEQ ID NO: 231398 - DNA, 82 bp, Homo sapiens
cggcgcaggcccagatgcgcgcgatgctggaccagttgatgggcacctcccgggacgaaacgcttcgttaagggactcaggc

SEQ ID NO: 231399 - DNA, 75 bp, Homo sapiens
gggatcggttgccttgagcctgatacttggtgcttgaaaaactgaagaaggaagacgctgaccgaattcatatat

SEQ ID NO: 231400 - DNA, 100 bp, Homo sapiens
atccttggtggtccttacctcatttggaaactattgtctactcacagtgatgaagtaacagatgctgcagttggagaagaaacttgaacgtgaacttgag

SEQ ID NO: 231401 - DNA, 90 bp, Homo sapiens
cctttggagtctgccgtgatggcatcaaccgctacgactgtgtctgccaacctggcttcacagcaaatcagccggcaccaggagcagttc

SEQ ID NO: 231402 - DNA, 90 bp, Homo sapiens
gatcaatccagatggcagccagtcagtggtggagttctctgtggacattgactcggagctggtggaggagctgccggccgaaatcgagct

SEQ ID NO: 231403 - DNA, 50 bp, Homo sapiens
gggagatcagcatttgcatggaacacatgcatccagttttggatgaacca

SEQ ID NO: 231404 - DNA, 100 bp, Homo sapiens
gcgaggggggcgccgcggcgggtggatgagagttggccccgatatccgctcaggcccaatattggccacctgggcctgccccatgggccgtccggggaaa

SEQ ID NO: 231405 - DNA, 100 bp, Homo sapiens
ggtcctggggctgggcatcaacggcaaagttttgcagatcttcaacaagaggacccaggagaaattcgccctcaaactggagcagttcaacatgatggag

SEQ ID NO: 231406 - DNA, 100 bp, Homo sapiens
caagatgaagattttccgatggcaattgaaggaacagactaaaaatcgtgtcctggaaggaaactacaggtactaccagggattttcagtctgaagaaga

SEQ ID NO: 231407 - DNA, 97 bp, Homo sapiens
tttgccttacactaaaagcattacctcacctcatccaggaagtagaagcactatttaaaggagataatttaccaaaatttataaactgtgaatttgc

SEQ ID NO: 231408 - DNA, 76 bp, Homo sapiens
atctccagatgccgcgcaactgtctgatctcagttcatggaaggtgtcttgctgcaggtaactaatgaagaagtgg

SEQ ID NO: 231409 - DNA, 80 bp, Homo sapiens
tttcaacctccaaacccagttgatgggacattcatcctgccaggtacctcatggcagggccaggttccagcagtgaggag

SEQ ID NO: 231410 - DNA, 100 bp, Homo sapiens
tggagagaaaatgaataccttacactccaagttcctgcatttttgcttcagagtaatccatatgtaaagacctgaagattatcggctataagagaataag

SEQ ID NO: 231411 - DNA, 100 bp, Homo sapiens
cagacatgggactggaggacgagcaaaagatgcttaccgaatccggagatcctgaggaggatggagatgaagatgaggaagctgagtcagctacgggcaa

SEQ ID NO: 231412 - DNA, 96 bp, Homo sapiens
agctgcggccggagaccggaggagcaggggctcagctgggctgtggaggctccaacccattccagcaccttgagaagagtgcggtactccaggagg

SEQ ID NO: 231413 - DNA, 78 bp, Homo sapiens
taagcacaagagaaagaaggttaagctggctgtcctgaaatattataaggtggccgacatgaaaaagaagatggagga

SEQ ID NO: 231414 - DNA, 90 bp, Homo sapiens
cttccaagggacaaggtgtcaacaatgtgccggcccagaagccatggcccactataagactgagcaggacgactggctgatcatctactt

SEQ ID NO: 231415 - DNA, 83 bp, Homo sapiens
ctcagctcctggggctgctaatgctctgggtctctggaactctgcgaccttcaagtcgtttgaggaccgagttgggaccataa

SEQ ID NO: 231416 - DNA, 90 bp, Homo sapiens
gaaggggccagtctggagacagtcaaggactggagactgatgcatgagggggctacggaggcgcaggagcggtggtgatggtctgggaag

SEQ ID NO: 231417 - DNA, 95 bp, Homo sapiens
gcaggatcgcccaggaagtgcagcgctttgcccaggagaagtgaacctgatgcagcacatgaagctcagcacctcacgagacttcaagatcaaag

SEQ ID NO: 231418 - DNA, 100 bp, Homo sapiens
gccagaggtcaacaaggttctggacaagatgaagtctttctgccaggtggccctcatgacactgacgctcttcccggtccggctcctggttgccgctgcc

SEQ ID NO: 231419 - DNA, 101 bp, Homo sapiens
gctgggtgcgtggggctgcctcgccgcgtctcgccacggagccgtgccgctcttggccaccgaaagcgtcaagcaagaagaagctggagtacggccttctg

SEQ ID NO: 231420 - DNA, 100 bp, Homo sapiens
gagacttgtcacatgcatcaggaccagagagatttaccgcattgtttctcagaagcaaatgtcagacagacgcgaaaatgacatgtctccaagcaacaat

SEQ ID NO: 231421 - DNA, 98 bp, Homo sapiens
tgagacgtgcctttgaccttctgccatgattgtgaggcctccccagccacgtgaaactgtggagccgccaccaaaatgcagattttcgtgaaaaccct

SEQ ID NO: 231422 - DNA, 98 bp, Homo sapiens
gctgcccggctctcgcaggcccccccgcgccgaccgcgttcctatggacagacgcacagacacctgcagattgaaaatcttcaagagcagcttagaga

SEQ ID NO: 231423 - DNA, 75 bp, Homo sapiens
agtctttccaaaaggtcaaggttcacaaggaactgtggctgcaccatctgtcttcatcttcccgccatctgatga

SEQ ID NO: 231424 - DNA, 90 bp, Homo sapiens
gtacatcaagctcctagaacggaactggaaacgcagaagacacttaaataggtctcgatctagaagacggtcacgaagtaggagtcgcag

SEQ ID NO: 231425 - DNA, 100 bp, Homo sapiens
gggagccgccagcgcgtttggctgtgacctgacggagtatctggaaagctcgggacaggatgatacctctactaagaagacagaagacttactttcatca

SEQ ID NO: 231426 - DNA, 101 bp, Homo sapiens
tatatgttggcattgagtcaaaccatcttctcccaaggtttttgcagcctagtgtgttaattgtaacctacaaggagcctgcaaaatcatctactcagttt

SEQ ID NO: 231427 - DNA, 100 bp, Homo sapiens
cacattcctcatggttggttcaaagaaaccttggctatgaaaggattaacattgaactgtttggggaaaaaggaagaagcttatgaattggttcgtagag

SEQ ID NO: 231428 - DNA, 83 bp, Homo sapiens
gtgcatctacaccgacaactccatccggcccgaggagctgctgcttccccgggcgctgcctggacaggcctgcctgcgtgctg

SEQ ID NO: 231429 - DNA, 88 bp, Homo sapiens
gcggaaaacactgaaggatgagtcttctgttacttgcaagttagcttgtacagctgtgagggacaatgtgttgaacatcattaaccag

SEQ ID NO: 231430 - DNA, 100 bp, Homo sapiens
aacaagcactttgccaataaaaacgagagaggccttacctgaaagtggagttgatctctctaatgtattagatcttcatgcctttgatagtctctctgga

SEQ ID NO: 231431 - DNA, 74 bp, Homo sapiens
tccacaggatgctgtagtagcaaatcaggatggcactggatctttaaaacgcagtggttcctttagcaaactcc

SEQ ID NO: 231432 - DNA, 154 bp, Homo sapiens
cgaagggctccagcaacagctaaaatctcaaagacaagaggagacactgagggaacaaacacttctggatgcatcccttgtacctccttttaaacctcaagtaacatctgagacagatactagatattttgatgaagaatttacagctcagact

SEQ ID NO: 231433 - DNA, 75 bp, Homo sapiens
cacagacagaatccctgctaccagttaccaacatcaagaagacactcaaagccaccgcatcctcctcggctcagg

SEQ ID NO: 231434 - DNA, 83 bp, Homo sapiens
tagctgtgctcgcgctactctctctttctggcctggaggctatccagcgcttgtccagccggaagccctgagggcagctgttc

SEQ ID NO: 231435 - DNA, 102 bp, Homo sapiens
tcccactgaggatcatcttctgcagaatactttgtggcctgaagttcaaaaactgatttgttaaggattccaagtaactcttatttggtgagtaaatctgct

SEQ ID NO: 231436 - DNA, 100 bp, Homo sapiens
ggagaaactggctgcagcagagcgagtacttcgttccaacatggacatcctgaagccaatcctgtcttcccaagggattgttgaagaaacttctgaagag

SEQ ID NO: 231437 - DNA, 100 bp, Homo sapiens
tcttggctgaccttgagtgcagctccccctataagcctcggcctccacaggaatcccgttctgcttccagaagtggaagtgctcacggatcggggaaatc

SEQ ID NO: 231438 - DNA, 53 bp, Homo sapiens
cccaggccccgccgaggcggccagttacagttacatgatcgacaacgtgatcc

SEQ ID NO: 231439 - DNA, 95 bp, Homo sapiens
tacactccatacgcaaaccgcgatacattttgctgaacaaatagcaaagttccatgccattgcagtgtcaactaggcctcagttacttttcagtt

SEQ ID NO: 231440 - DNA, 82 bp, Homo sapiens
tccgccgcccgaaaacccggagtgccccgcacaggttaatttggagtggcccctggagtcagtttcctacaccatccgaggc

SEQ ID NO: 231441 - DNA, 100 bp, Homo sapiens
ttcttcagatcgttctgattcagagcgagtgcctggctctctggctatgaaaatcctgtggtgtctcgaattaatatgagaatacaagatctaacaggac

SEQ ID NO: 231442 - DNA, 75 bp, Homo sapiens
gacaagccagcagctcgctcagtacaagaggttgggggccgtcccgctcctaaggcaggaagatggtggccgcaa

SEQ ID NO: 231443 - DNA, 100 bp, Homo sapiens
ggagaaagtatttatggtgaaaaatttgaagatgaaaatttccattacaagaaatatggctacacacacctttctgcaggagagctgcttcgtgatgaaa

SEQ ID NO: 231444 - DNA, 82 bp, Homo sapiens
cgggagaagcagcgcctgttcccggggcagatccaggttcaggtgtcccgacccaggctaagcttgagcatggctgagcagg

SEQ ID NO: 231445 - DNA, 90 bp, Homo sapiens
gaaatgttcagcctggactcattcagaaaaggaaatgacatcggagagagagacaagatcacagagaatccagtcagtaccggcgagaaa

SEQ ID NO: 231446 - DNA, 98 bp, Homo sapiens
aagaacactgctccaagtgcctggcagagcagatgatcctggaggaatttggaaggcgcctgtgtctggcagagctggtgtgagacgagacaatcctg

SEQ ID NO: 231447 - DNA, 75 bp, Homo sapiens
ggccgccccgagcggagcctggaggctatggtgaactaaacggtaatgctggagaaagagaaatatctttaaaga

SEQ ID NO: 231448 - DNA, 100 bp, Homo sapiens
agagggctttgtacagggaagtgatgttggagaactacaggaacctggaggctgtgggttcttgggtgtctctggggagtccctgggccagaccttcctc

SEQ ID NO: 231449 - DNA, 100 bp, Homo sapiens
accttccagtggatttccttgcggaaaggatgttggcggtccctgtgacctgtggagacacggccagatctgccctccaaatgcaggctcaacagtacca

SEQ ID NO: 231450 - DNA, 74 bp, Homo sapiens
ctacttcacactgcagaactgggttctggactttgggcgtcccattgccatgactgtggatattcataaggaga

SEQ ID NO: 231451 - DNA, 75 bp, Homo sapiens
ttaggaccacccaccatgcctatccagttcgtaagaaggcaacaagttcttctcctctacagaaggattttgcaa

SEQ ID NO: 231452 - DNA, 100 bp, Homo sapiens
cggcgcactcgctttccagcacctcaacacggactcggacacggtctgctacaatgctgctgctgcacagagctgtggtcctcaggctccaacaggcctg

SEQ ID NO: 231453 - DNA, 100 bp, Homo sapiens
aaggattccaagtaactcttatttgaatcttgcctcctggaatccttcaaatcctgaatgtctcttacttgtggtgaaggaacttgtgcaacaatatcac

SEQ ID NO: 231454 - DNA, 118 bp, Homo sapiens
tggaggctgagtgctaaactgtgtggggcgcggatgggatccagctgttagtcgggtgctggagaatctggtaaaagcaccattgtgaagcagatgaggatcctgcatgttaatgggt

SEQ ID NO: 231455 - DNA, 100 bp, Homo sapiens
acttcgaagtgcatccaattcaggtcacagtaggtgggcaaaggacttcagaccctggagacacaaagttgatattcactgatggactccaaagaatcat

SEQ ID NO: 231456 - DNA, 100 bp, Homo sapiens
tgagagcctcacgagtcgaggtcctgcaggtggagctccggcagccgccctgctagaacgagtaaatctgtctgcagcccagacactgagagccgctttc

SEQ ID NO: 231457 - DNA, 101 bp, Homo sapiens
ggcttcgggaagcagggattccagtgccaaggtttttcgttggaatatacgttgcacatttatggcgattctgagtgtgagggcagacttctgccaggctc

SEQ ID NO: 231458 - DNA, 100 bp, Homo sapiens
ttttgagccatttcgaatcacttaaaggagtggacattgctagcaatgagctcccaaagccatccagggagcgcgagcagcgggagcgggagcaacgcct

SEQ ID NO: 231459 - DNA, 101 bp, Homo sapiens
tccggaccctgcagtggcgcctaaagtctgcgaggaggaagtcgcctctgtgctcgtgagtccagggatctaagttgtggaagaaggactctgggaaaatg

SEQ ID NO: 231460 - DNA, 88 bp, Homo sapiens
aatattcctgccatcacaaaagctggacaagcgaaggatgaatctggttatagatggacaagagacgatcattctgcaagcaggcaac

SEQ ID NO: 231461 - DNA, 75 bp, Homo sapiens
gccgtcggctgcggcgccatcgggaatatccccggctcggctgtgctggtgtttgacatccatgtgatcgacttc

SEQ ID NO: 231462 - DNA, 100 bp, Homo sapiens
gagcgcgcaccgcaggccggcggccgagctcgcgatgagcctgaagtcttgacagaacctccaagtgccacaaccactactaccataggtatatctgcaa

SEQ ID NO: 231463 - DNA, 88 bp, Homo sapiens
gcagtggcagaagattttaattagggaatctggaaacatcaaagctggattagaacatctggtaagttctcattttctcttgaacatt

SEQ ID NO: 231464 - DNA, 83 bp, Homo sapiens
aagacgtcaaacgtaaacagctcgggggatatgagactttctactcggaatatcctgagtgttgcgtggatgtaaaacccatt

SEQ ID NO: 231465 - DNA, 96 bp, Homo sapiens
gccgaaggagatgcagaagcctcagtggtacaggacccttggcttctgcgttcgaagagtcctgtaggtaacccccagctgatccagttcagtaga

SEQ ID NO: 231466 - DNA, 83 bp, Homo sapiens
gcggcggtggcggcttggacgactcggagagccgcattttgaaagcgaagcagaagccgtagaatcagcggcgagcctgttga

SEQ ID NO: 231467 - DNA, 100 bp, Homo sapiens
acgatctgcacttcgcattttggcattgacatttaattttagggtcctttatatagaagggagagtagaagtagagaagatcctctaatggatcccagtg

SEQ ID NO: 231468 - DNA, 99 bp, Homo sapiens
ggatgtgtgtcagtttacgcctctgagatcacacagctgcctgggggccgtgtgatgcccaaggtcatcctgtacagttctacagcatgaataggcctg

SEQ ID NO: 231469 - DNA, 100 bp, Homo sapiens
ttctgctgaccgcgggccctgccctgggctggaacgaccctgggcatccgcttcgatcctgaaattccgcaaacactacgactagagtttgctaaggcaa

SEQ ID NO: 231470 - DNA, 83 bp, Homo sapiens
gcccagatgcgcgcgatgctggaccagttgatgggcacctcccgggacgactcgtttgtgaacagccaggagtggacgctgag

SEQ ID NO: 231471 - DNA, 75 bp, Homo sapiens
ccccggaactccttttctttgctaaaaggtacccgaggattaataaagaatctttacttcctgtagcaaaggacg

SEQ ID NO: 231472 - DNA, 98 bp, Homo sapiens
cttaaaaaggctcagaaagatggatttttgcatgagacgcttctggacaggtctacttccccagcaggacagcatcattctcctatatcttctagaca

SEQ ID NO: 231473 - DNA, 100 bp, Homo sapiens
atcatagcagtggctgatgaagggtggcacattttacagaataagtcagatgactttctgttcaccaggagactaaagtccatcaaaaacatccagaaaa

SEQ ID NO: 231474 - DNA, 109 bp, Homo sapiens
caccatgtcagacgcagccgtagacaccagctccgaaatcaccaccaagccttatgccagcctggaccatcttggaggcagtgtaggatcatggaagaactttgaatta

SEQ ID NO: 231475 - DNA, 83 bp, Homo sapiens
ttgttgatgtgatatgggttgcttcctctgaacttacttcgctatatgttctcctttcagccaagacctttcaccagtgcagg

SEQ ID NO: 231476 - DNA, 131 bp, Homo sapiens
ccggcaagtaacatgactaaaaagaagcgggagaatctgggcgtcgctctagagatacttgttcccaggaccttaactcacgtgtgaagccaggatttcctaaaacaataaagaccaatgacccaggagtc

SEQ ID NO: 231477 - DNA, 88 bp, Homo sapiens
tgaaaatgggcacatcttcaactgcattcagcgagcccaccagaacacgttgcccccaagtttcctggcagtgtgtgatactgaggag

SEQ ID NO: 231478 - DNA, 96 bp, Homo sapiens
tctgtgccatcatcgtggtagttattgtaatgcctcccagaccagcagccgatacccacagagaccttccaggtggctgaccgtcacccagaggtg

SEQ ID NO: 231479 - DNA, 50 bp, Homo sapiens
atcaggacatggagtatgaaagacggggagtctctcaggaaaaagaagcc

SEQ ID NO: 231480 - DNA, 90 bp, Homo sapiens
ggctaaggaaaccctattacctccagggagaagcatgacactggccaacactgcgtccagcatttgggtggccctcaggatttcccagtc

SEQ ID NO: 231481 - DNA, 101 bp, Homo sapiens
ttcagcaacacagaaattcaggaagctgctttcaaaaggtgaacatgtcaaaccttttaagccagagaaagcaaaagaaattatcatgtctttacaacaac

SEQ ID NO: 231482 - DNA, 96 bp, Homo sapiens
ctaaggaagcaaaaaaggctaagcaagcatctaaaaagactgcaatggctgctgctaagcaaagtggaagatgctttctacaaaggtgaactcagg

SEQ ID NO: 231483 - DNA, 105 bp, Homo sapiens
gcgctgctcttccccgcggagcccgcgcagtccgcgcagccctcatcgcaactgggcccgcgcgcagatgtaaagacgaccgtggtttaccctgccacagagaaa

SEQ ID NO: 231484 - DNA, 83 bp, Homo sapiens
gtgaagtggaaaggatggcccccaaagactccatccccgtgtctacctccctccttggagacacttccgacacgacctctact

SEQ ID NO: 231485 - DNA, 48 bp, Homo sapiens
aaggattccaagtaactcttatttgaaacgctaatggactccactaca

SEQ ID NO: 231486 - DNA, 100 bp, Homo sapiens
cggctgcctgggcactatggaggtgaagagcaagacttctaggccactgggaagaagcagcccatgatcttgcccttgcctgtaaattggattatgatga

SEQ ID NO: 231487 - DNA, 100 bp, Homo sapiens
agtgatggaccgtgctagtgacctgactgatgccttcgtggaggtgcctaaggccgcgctgccgggctcgagcggaggcggcgcaggcgctgaggctggc

SEQ ID NO: 231488 - DNA, 82 bp, Homo sapiens
ctgaggcggaggcagccccgcgccgcgccggacccgaggccaccagcccctcgggttccaagatgcagctactggagacaga

SEQ ID NO: 231489 - DNA, 88 bp, Homo sapiens
cgcggcagcacctgggcagccccgcacgccgtgcgcgtcccgagcccgcggggcagctaccgctcgatgaaggatttgggggcagagc

SEQ ID NO: 231490 - DNA, 100 bp, Homo sapiens
cgaggaggccaaggcgccagtgagaggcgtttctccttggaccaagatgactgatggaaaactctccacctctacaaatggcgtagccttcatgggtatt

SEQ ID NO: 231491 - DNA, 98 bp, Homo sapiens
ctcttctagaattttatgaggattatttcagcataccgtatcccctacccaaacaagggactgctgagatgtcctctattcttgaagagcgtattctt

SEQ ID NO: 231492 - DNA, 75 bp, Homo sapiens
aggaaaacagagaaagaagtgataggagggctctgtaggtgaccaggcattgatgcacccccaggaaggccacgg

SEQ ID NO: 231493 - DNA, 75 bp, Homo sapiens
gctaaactgtgtggggcgcggatgggatccagctgttagtcgggtaggcatagcaattctgtggtgttcttggtc

SEQ ID NO: 231494 - DNA, 100 bp, Homo sapiens
aagaccctggaggaaattctgagccgcctacaggaagaagagcaggagagggataggaagctgcagcccacagccagggctcccgctgctggaggacaag

SEQ ID NO: 231495 - DNA, 75 bp, Homo sapiens
cgccagtcttggggacagtgtcagcatttggtgcttccagatgtgagttatcaggtggaatccagtgaggaggat

SEQ ID NO: 231496 - DNA, 75 bp, Homo sapiens
cgaccgcgttcctatggacagacgcacagacacctgcagtatcagcaaacctggtatcatgaaggaccaaatagc

SEQ ID NO: 231497 - DNA, 98 bp, Homo sapiens
acgcttgatccccggccgcggggccaggaagtcggagtttgagccccggaggcagagcggctgccatggccctggccaacgtcaacattgggagcctc

SEQ ID NO: 231498 - DNA, 97 bp, Homo sapiens
gcagtgttgatggtggtggtgctggtcatcaatgttactcaggtagaggtcctagcagaagatgtgactcagactgcctctgggtggggctggctgg

SEQ ID NO: 231499 - DNA, 74 bp, Homo sapiens
tgctgctcaagagaggcacgggacaggtcccagaatatggcattgcggcctcatttgctgtcaagcttttcaaa

SEQ ID NO: 231500 - DNA, 116 bp, Homo sapiens
ctggcattgaatgatttatagctaagactccaggacacccctgaagccgagaaatgattttggtttcagtaacctcttcactcctgggcagctgctgaagacctggtgtggcagcc

SEQ ID NO: 231501 - DNA, 90 bp, Homo sapiens
gtgatttcttccaaagcacaggaatctcactctgttaaagctggtctgttctaactgagatattaataaggcagcggaaagaagaaatat

SEQ ID NO: 231502 - DNA, 83 bp, Homo sapiens
ctcggcggctgaggaaagcaggaggaggtggcggcggcgggaagatgaaaaccaattctgtgtcctcggaggaccacagccca

SEQ ID NO: 231503 - DNA, 100 bp, Homo sapiens
ccgagagatgaggccggagcccaccaagttctgggaatgcggaaacaggaaattataaaagtgacagagcagctgattgaagccataagcaatggagatt

SEQ ID NO: 231504 - DNA, 90 bp, Homo sapiens
attgaagtgcttggagtgcagaactgaaagagagcagcccgacggccatggaggctgaagagacgatggaatgccttcaggagttccctg

SEQ ID NO: 231505 - DNA, 100 bp, Homo sapiens
ggaacactgaaaccagtcatcactgcatctttttggcaaaccagatggcagtggcagcaccatgatgcaaaccaagaccttctcctcttcctcctcatcc

SEQ ID NO: 231506 - DNA, 100 bp, Homo sapiens
caggatcacagccttctctaaagaagtattcctctccaaagagctgcaggccttcaacagccttattagacttaattcagtgcacaaatgagatgaatgt

SEQ ID NO: 231507 - DNA, 100 bp, Homo sapiens
gcgaagtgaagctgtgggacacgcggttcttctccagcgccctggcctccctcaccttggacacctcgcttggacctgcgaccgcatcaagcagtccgcc

SEQ ID NO: 231508 - DNA, 75 bp, Homo sapiens
gcccggcaggccactcatgatcatgagaaccttttgcccagagtagcagccaaacttgaggttgccccgatttct

SEQ ID NO: 231509 - DNA, 100 bp, Homo sapiens
ctctgctgacccgccagggggaccccgccccgggctgacccgaagggccccgatgctggagagcatgatcaagaagccccgccccactcgggctgaaggc

SEQ ID NO: 231510 - DNA, 98 bp, Homo sapiens
tcacacacaatccccatcagttgcacgtcttcgaaacctgctataaccccaaagcagtgttgtactgctacttctataaacggacagccgtaagacta

SEQ ID NO: 231511 - DNA, 82 bp, Homo sapiens
aaaggcagcgcaaaaaacagccaccgattttgctatgtctctgagctgcgagagatttctcccgaaggggaaaagtacaaac

SEQ ID NO: 231512 - DNA, 75 bp, Homo sapiens
ggaacacttcagtgcattcaaggtttaagaattgtttaagctgcatcaatggagcacatacagggagcttggaag

SEQ ID NO: 231513 - DNA, 100 bp, Homo sapiens
gttggcaccactgaagtgaccgaatgagggccaattcctgtccccccagcagcatggcatcgtgtgctgaaccctctgagccctctgccccactgcccgc

SEQ ID NO: 231514 - DNA, 80 bp, Homo sapiens
tggtctgctgtctgctgaccccagccgaggcctgcctggagccccagatcaccccttcctactacaccacttctgacgct

SEQ ID NO: 231515 - DNA, 147 bp, Homo sapiens
gaagccagtggtgctgcgggtgttcttttggggtagtgtctgggatccagtacgagttgaatcattgttcaaataagatgggaatttcttagccataggctcacatgacaactgcatctatatatatggcgttagtgacaacgggag

SEQ ID NO: 231516 - DNA, 100 bp, Homo sapiens
gaggagcgggatctaacccaggagcagacagagaagctgctgcagtttcagaatttcagaaactgtggaggagtgtcactgtagattccatggacgagga

SEQ ID NO: 231517 - DNA, 99 bp, Homo sapiens
accaggccaagccgttgattgcatctggaccattaaagccactccaaaagctaaggaattgaatgatctggcacgggaccctccagcacagtgttcagc

SEQ ID NO: 231518 - DNA, 82 bp, Homo sapiens
acctctggccccgagatcagaatgccgatgttggatgacaataaccatcttattcagtgtataatggactctcagaataaag

SEQ ID NO: 231519 - DNA, 76 bp, Homo sapiens
tgatatcctacacaacaaacaaatttccatcggaatatgtaccgactgttatttccgatgttgaagaagatgccgg

SEQ ID NO: 231520 - DNA, 131 bp, Homo sapiens
ctgcagacacttgctgatatgggaggagatcttagaaaatgctcctttatcaaattggaggctcatcagaacagatggccagtttgccatcgtgaagaagtgccgggagaagagcacggggcttgagtatg

SEQ ID NO: 231521 - DNA, 100 bp, Homo sapiens
cagtggctctgggtccagccccttacttaaaggacacagagtctgggatctaataattcagtcattttggatggactaaaaagaagacagaattttctgc

SEQ ID NO: 231522 - DNA, 100 bp, Homo sapiens
gagagggggatgaagaaatctgccaggagggtgcctcccgccagtatctgatgaaggtaagaggtgaatgacgtgccattccagaacctgacacgggagg

SEQ ID NO: 231523 - DNA, 83 bp, Homo sapiens
tgtagacaatggttagagaagaattttccaaatgaatttgcaaaacttactgtagctaagtgttaggcggaaaaatactaaag

SEQ ID NO: 231524 - DNA, 100 bp, Homo sapiens
gaggaggaagatggcgggacggctgccggcctgtgtggtggactgtggcacgggagcattggggagtcagcaatgtccgttgtgttaaatcagctgctgc

SEQ ID NO: 231525 - DNA, 83 bp, Homo sapiens
cgaggaggcggcggagcagcgggcggaggtggaccggatgctcaggtgagaagccctaccactgcaactgggacggctgcggc

SEQ ID NO: 231526 - DNA, 100 bp, Homo sapiens
gagagcaaggaagagagaacatttcggaactggatgaattccttgggagtcaacccatacattaatcatttgtacagtttttgtagagacagcatcttgt

SEQ ID NO: 231527 - DNA, 50 bp, Homo sapiens
atgagcaaagaggaggtcgacagaaacgaagtctcactgtgttgtccagg

SEQ ID NO: 231528 - DNA, 82 bp, Homo sapiens
gccccggattattctgcctttgaagtgggctacaccattcgatttgaggactgcactagccctgaaacagtcatcaagtaca

SEQ ID NO: 231529 - DNA, 90 bp, Homo sapiens
gctgactgtcgctctgcctttgacaggagaggctgcttcttgtagaggtctgtgactcttatcctactgaactgtacgttcccaaatcgg

SEQ ID NO: 231530 - DNA, 51 bp, Homo sapiens
tggccgagcaggaggcgccatcatgggaggagctgtgcagtgagaagcaaa

SEQ ID NO: 231531 - DNA, 82 bp, Homo sapiens
tttcatccctcgtcgaaaggattggattggcatctttagaggactgctgagatgtcctctattcttgaagagcgtattcttg

SEQ ID NO: 231532 - DNA, 74 bp, Homo sapiens
tccaggtattaagggagatatcccaaagcttgctagagaagttttggatgttgctgccggcatgattaaaccag

SEQ ID NO: 231533 - DNA, 88 bp, Homo sapiens
atgaagacttgaacttaatacagcaagaaagaccatcaagtttaccatcgcagatatggccagtacactatgaaccaggaaagcacca

SEQ ID NO: 231534 - DNA, 83 bp, Homo sapiens
ccctggagcctcagttggaagcagccgatccagcctgcggagcctgtggggcagaacaccttccaccatgaccacctcagcaa

SEQ ID NO: 231535 - DNA, 103 bp, Homo sapiens
aaaaactcgccaaactgcaggcacaagtgcgcattggtgggaaaattgggaaaatgaggtacgttagtgttcgcgattttaaaggcaaagtgctaattgatat

SEQ ID NO: 231536 - DNA, 100 bp, Homo sapiens
atccattgctgctaagtactccggttcccagcttctgcaaaaggtgggcaccatgtccttgaagcttcaggcaagcaatgtaaccaacaagaatgacccc

SEQ ID NO: 231537 - DNA, 75 bp, Homo sapiens
cccaggcacagccgacgccgcgggcggagctggagtttgttcagatcatcatcatcgtggtggtgatgatggtga

SEQ ID NO: 231538 - DNA, 73 bp, Homo sapiens
acagtcctgtatcaaaactgaagatggtttgaaacagcttcacaaggatggtgatgggaatctttgcaaattg

SEQ ID NO: 231539 - DNA, 101 bp, Homo sapiens
ctcctgcgctcccgggcggcctcgggcccagccacctgctcgccggggaagggaaatcctcattgacgattcaatttgttgaaggccaatttgtggactcc

SEQ ID NO: 231540 - DNA, 83 bp, Homo sapiens
aaatttgtgacccttacgcctggcttgaagaccccgacagtgaacagactaagtttattaggagtgctctctgaccacttaaa

SEQ ID NO: 231541 - DNA, 82 bp, Homo sapiens
ttggaatgaatccttctagagacgtccacgcctgtggacatctctacagcaatgagtgaacgggcacttgctcagaaaagac

SEQ ID NO: 231542 - DNA, 111 bp, Homo sapiens
ccctcctcccccctcccctcagcggtggctcccaagaagtccgagacacgcgacaatgcagatcttcgtgaagactctgactggtaagaccatcaccctcgaggttgagcc

SEQ ID NO: 231543 - DNA, 75 bp, Homo sapiens
tgtcaagacatttcttcggcattctgcaacaggaaaatgtttataggaggccttagctgggacactacaaagaaa

SEQ ID NO: 231544 - DNA, 83 bp, Homo sapiens
cgtggacaagtttgcagatcgggagcgcaaggtcgccctcaaggccatgatcaaaacatgccagcctggcggtctcattcagc

SEQ ID NO: 231545 - DNA, 75 bp, Homo sapiens
ccgtggccgtggggagaccgtctctgttccatttcctccaagtcaccggcttacagcaaaagaagtgtttgataa

SEQ ID NO: 231546 - DNA, 99 bp, Homo sapiens
cagaatcgaatctcttctccctccccttcttggtgaaatgacaatggatgctctgttggctcgattgaaacttctgaatccagatgaccttagagaaga

SEQ ID NO: 231547 - DNA, 101 bp, Homo sapiens
agaagaagaaaacaaaggtagaacatggaggatcgtcaggctctaaacaaaattctggtaatgtggaacacagctgtccactctgaattcatgcatgatca

SEQ ID NO: 231548 - DNA, 100 bp, Homo sapiens
gggctcccttcgccaaactcttcattttctctatttgaaagaagccaacactaaaccacaaatatacaacaaggccattttctcaaacgagagtcagcct

SEQ ID NO: 231549 - DNA, 50 bp, Homo sapiens
cttgggtcctccgagagcagcagcgccctgggcgctgcctatggcacagc

SEQ ID NO: 231550 - DNA, 82 bp, Homo sapiens
cccagccccttgtcagccagggctgaacccccgcaggttgggcccgaaggcatcctgcagaacggggctgtggacgacagtg

SEQ ID NO: 231551 - DNA, 82 bp, Homo sapiens
ccggagcctggcgcagcctccctctattaccagtgatgaacggcagcagccactcaccaacagccatcaatggtgcaccgtg

SEQ ID NO: 231552 - DNA, 90 bp, Homo sapiens
cacggtcaacgtggacggcttgacagccctgcaccaggccaagatcaaggctcgagatcttcgcgggaagaagaaggaggagctgctgaa

SEQ ID NO: 231553 - DNA, 76 bp, Homo sapiens
agcggattaaagctaaagacatagttcctggtgatattgtagaaattgctgcaagttggaattgacagaggtgata

SEQ ID NO: 231554 - DNA, 78 bp, Homo sapiens
aaactgacggagacgcagatgtggacttgaaagaagctgcagcggaggaaggcgaggctcaacgagaacctttgacaa

SEQ ID NO: 231555 - DNA, 100 bp, Homo sapiens
ggcggggcggcgcgtgacctaaggcctctctgccgcgcgcgcagttcaccacaggcacgtgcagcgactcggtggttcacagctgtgacctgtgtggcaa

SEQ ID NO: 231556 - DNA, 90 bp, Homo sapiens
gagatctccagtctctacagacaactggatgacaaggatgaccaactcttggatgatggcaagacactgggcgagtgtggcttcaccagt

SEQ ID NO: 231557 - DNA, 86 bp, Homo sapiens
aggcggcaggaaccgcagggcgctcggggaagcaaacggagtgtggaaatacgacctgacccgttagcagaggagccggacacaga

SEQ ID NO: 231558 - DNA, 83 bp, Homo sapiens
cttggagctggaccagtacttgaggtgcaatggatgagcttcatagtctggatccaagaaggcaagagttattggaagctaga

SEQ ID NO: 231559 - DNA, 75 bp, Homo sapiens
gttggaacttgctcgtgccttagacaagaaactcctttccttaaaggccacagtgtagctttatgggaatggtta

SEQ ID NO: 231560 - DNA, 73 bp, Homo sapiens
cccactggctgcaggcctcctgctgctcctgtttgtgggtctgtgcaaggggcacagagcccggaagagtcga

SEQ ID NO: 231561 - DNA, 89 bp, Homo sapiens
gcagtgataagcgggtaggcaggactatgtctcaccatgcagcagctctcaagtgtttgctttcacaaccaaagttctgggccattcag

SEQ ID NO: 231562 - DNA, 87 bp, Homo sapiens
gacccatttatgaggaggtggcttatgaaagtgtgatgttcgcgtatttcttgacaggcgatcattatttcgaagttctagtattct

SEQ ID NO: 231563 - DNA, 82 bp, Homo sapiens
cgtgtactttaccaacgagctgaagcaggaacaagcacatcatgattgacttggggactggcaacaacaacaagattaactg

SEQ ID NO: 231564 - DNA, 73 bp, Homo sapiens
ctttcatagaggcccacagccagtaatctatgccagcaattatgacaatgttagcagaccatgcagctcgtca

SEQ ID NO: 231565 - DNA, 83 bp, Homo sapiens
gagaaggcggccaccgcccgggcatcaggatgggagcgacaccaggtgagaagccctaccactgcaactgggacggctgcggc

SEQ ID NO: 231566 - DNA, 85 bp, Homo sapiens
cccgactcggtgattgaggacaagaccatcgagctcatgtgaaattggagcgatttgaaattccaatcaaggttcgattaagccc

SEQ ID NO: 231567 - DNA, 98 bp, Homo sapiens
ggcacttggagtccggacatctgaaacttgaaaatgcatccgatgcagatttatggctcctgaacagttgcactgtaaaaaacccagctgaagaccac

SEQ ID NO: 231568 - DNA, 83 bp, Homo sapiens
cggccacctggtccagctgcccgcaggggtgttgtgaatgggagagttcacatccgcgactggcgagaggagacactgtggaa

SEQ ID NO: 231569 - DNA, 76 bp, Homo sapiens
agtctgttccacatgatcattgtaataagacatatctgaagagatggattaagaatgctttggattaaggattgtg

SEQ ID NO: 231570 - DNA, 100 bp, Homo sapiens
gccgtccagcagatggcggatgccctgcagtacctgcagaaggtctctggagacatcttcagcagtctttcccagggaactccgatgaagtgttccaaca

SEQ ID NO: 231571 - DNA, 100 bp, Homo sapiens
caggcgatcataaagaaaatcgacttggactcagatggctttctcactgaaattggtgcttcccgtgctgctgttgatgctggctttgttcccaatgaca

SEQ ID NO: 231572 - DNA, 100 bp, Homo sapiens
atttgaagatacatgagacagcagccaaacccccagactgttcgccatggatttccctatcaaccctcagccctggcctttgatcctgtacagaagatcc

SEQ ID NO: 231573 - DNA, 82 bp, Homo sapiens
cagcggcatacagaatgcctatgaccggcgtcgagaatttcaactggaacactttggtcttagtaacctgactggaatgaac

SEQ ID NO: 231574 - DNA, 75 bp, Homo sapiens
agcactttaatattcctgccatcacaaaagctggacaagcgaaggcatcttgaaaaataaagtcacctacccgcc

SEQ ID NO: 231575 - DNA, 51 bp, Homo sapiens
attcgcagtggtcgcttcttctccttgaagagacatcctctttgactacga

SEQ ID NO: 231576 - DNA, 100 bp, Homo sapiens
attgactatggtctctccggctaccaggtagattatgataatcatgcactttataaacacggaaagacaggtcgaaaacagtctcccgtgcgtattttca

SEQ ID NO: 231577 - DNA, 83 bp, Homo sapiens
aggctgcggggcgcggagtcgggagaatggagatgtatgcatttcgattcttcatccgcctgtagatgacccacagagtggag

SEQ ID NO: 231578 - DNA, 100 bp, Homo sapiens
ggcggacggcgtggaccacatagacatttacgcggatgtcggcgaagagttcaaccagcacctgtggccttgccgaagaactggaaaaagagaagtcaag

SEQ ID NO: 231579 - DNA, 126 bp, Homo sapiens
agacgccaccgaccccaacggcaccagccctttgcacctcgcagctaaaaacggccacatcgacatcatcaggtggtcttttggtgccttaatgaagagtcggattttgaagcagccttcagcgtg

SEQ ID NO: 231580 - DNA, 74 bp, Homo sapiens
ggagactcagaatcgaatctcttctccctccccttcttgaaacctccacagctgttgagaaaaaggagaaacct

SEQ ID NO: 231581 - DNA, 49 bp, Homo sapiens
cagtcaagacgatcatagtcactgttcgatcctttggtacagaagacag

SEQ ID NO: 231582 - DNA, 97 bp, Homo sapiens
cgcggcgccgacatcaattacgccaatgtggacggactcactgccctgcaccagcacaaccagtgtctctgaagaagatgtctcaagtagatattct

SEQ ID NO: 231583 - DNA, 100 bp, Homo sapiens
gctgacggcgactgcgggaggccaggaggatcccttttcccccagaaattactcaatgctgaaacctctcaaagtggtattagagacgctgaaagcacca

SEQ ID NO: 231584 - DNA, 75 bp, Homo sapiens
cagctgtgtgtccagaacgtgccatggagacgcttaacggccagaagcggactcctagaagaggggagcagcaag

SEQ ID NO: 231585 - DNA, 96 bp, Homo sapiens
ctccaatggcacagccaggactgccaccagtaccaggagcaccaggaatgcctccagtgaagcgtgacattcaggaaaacgatgaagaggcagtgc

SEQ ID NO: 231586 - DNA, 100 bp, Homo sapiens
gcgggtgctgagggacattgtgcacaagcctggcccctcttggagtctgtgccttatgaagaagcactggcaaaccgccgcatccttctcagctctactg

SEQ ID NO: 231587 - DNA, 83 bp, Homo sapiens
cacgggatcctcatgttcactacccttcatgcatgaaagacaaagctactcaggctactgcagcactggggtgtcagttgttg

SEQ ID NO: 231588 - DNA, 76 bp, Homo sapiens
tggggtcaagtcctggctgaagccacggctgggacaggaagccacacaaaagcgaaagcttcggatctacatttcc

SEQ ID NO: 231589 - DNA, 98 bp, Homo sapiens
tcgaaaccctgaccggatcccataaacactgtcgtgtgaacgatcccgggaacatgtcctttgtgaaggagacggtggacaagctgttgaaaggctac

SEQ ID NO: 231590 - DNA, 82 bp, Homo sapiens
gtccacgatagtgccaggcctatgttggaggtgtcgtgaaaactacccctaaaagccaaaatgggaaaggaaaagactcata

SEQ ID NO: 231591 - DNA, 75 bp, Homo sapiens
acaagatctaccacctgcagagctctttgaaggtgtatgcagcctacttgatcgcctgggagcctggccccacct

SEQ ID NO: 231592 - DNA, 101 bp, Homo sapiens
ggcctcgacttcttgggctcaagtgatcctctcacctcggctgccaggcctcagagaaccatggctactgccaagggaatcgccataggcatcgacctggg

SEQ ID NO: 231593 - DNA, 75 bp, Homo sapiens
ccttgccagaatttcctgcgctgttccacctcattcaacttcaggatgatcggctgaatgtaacagaggaactaa

SEQ ID NO: 231594 - DNA, 75 bp, Homo sapiens
actcccacaagccccccgtgtttgacgagaatgaggaagaacactctgctccagccaaggtggtgagggcagctg

SEQ ID NO: 231595 - DNA, 101 bp, Homo sapiens
ggagcgcggggcgacgctggctgcagggacccggtgacagcgtgagaggttcgcagagccacagagatgctggttcacaatgcccagaacctcatgcagtc

SEQ ID NO: 231596 - DNA, 100 bp, Homo sapiens
cggaggccggcctgaggggctggctgctgtgggccctgctcctgcgcttggttccagcaacagatagaaatgctttaagttcactctggggaaagctggc

SEQ ID NO: 231597 - DNA, 100 bp, Homo sapiens
gatttctggagttcagcactagaaatgcctccacggctgtgtacgcctgttgcaaccccatccaggagacatatttccagcagctggcacctgcagcacg

SEQ ID NO: 231598 - DNA, 99 bp, Homo sapiens
gacctgagagacccatggcattcctcagggaatactttgagaggttggagaagatgtttcagaaagaacaagtggatcctcttcagatgaaattgcagc

SEQ ID NO: 231599 - DNA, 88 bp, Homo sapiens
cgactgggagcagaggaagccttgaggacctactcacagataggaattgaagaattggcagagggggtcgatttgggaggaaaggtgt

SEQ ID NO: 231600 - DNA, 100 bp, Homo sapiens
cttccctctgcggccgtttgtcattcccttcctgaagcgtgagtgcatctccatccacgttggccaggctggtgtccagattggcaatgcctgctgggag

SEQ ID NO: 231601 - DNA, 101 bp, Homo sapiens
ctggaggatgcctactggaaggacgacgacaaacacgtcatgaggaaggagcagcgcaagttcctgagactggcccagacgctgcggcactatggctactt

SEQ ID NO: 231602 - DNA, 100 bp, Homo sapiens
tttggcctacagttcccgctggacctggatgtgagggtgaaggctgtgctgctgggagccacattcctcattgaatggttttagggaagactgttgccgg

SEQ ID NO: 231603 - DNA, 83 bp, Homo sapiens
gccgaggcaccgaggcactcagaggaggttcgaaaacatggccaaaagaaatgccgagaaggaactgacagataggaattggg

SEQ ID NO: 231604 - DNA, 75 bp, Homo sapiens
gagcggcagcgcggcagtgacccgccctgggagctgcccccagcgtgtatgctagcctcaattttggcagtaaga

SEQ ID NO: 231605 - DNA, 100 bp, Homo sapiens
gagcgggtgtgggcgctgttcgacgtgcggcccgaatgccagcgcctcttctaccggggcaagcagctggaaaggcagctcatcatgcagagtgaaatga

SEQ ID NO: 231606 - DNA, 92 bp, Homo sapiens
atcacccgccgagatgaccttgttgaacgacctggacgtgtggtgtgctactgcggaaggtgaatggcacagccattatccagctgccctct

SEQ ID NO: 231607 - DNA, 100 bp, Homo sapiens
aagaaggttgggttcagaagaggggtctggaacaaaaagaatgcaaatgaaaaaggaagaagccagacttctaagcttcctccaagatttgccaaaaaac

SEQ ID NO: 231608 - DNA, 100 bp, Homo sapiens
attccagactcgtgggggaaaggctggttcaggcctcatctccagtggcactgggtgtaaggattcccactgtggctcttcacatgatggaactgtttga

SEQ ID NO: 231609 - DNA, 82 bp, Homo sapiens
tttgctgtggacacccaagtgggcactgtgacctccctcacagctgacccagcacaccctgcctgcatggcgctgcgctgca

SEQ ID NO: 231610 - DNA, 100 bp, Homo sapiens
aggatctcgggctcggaacgagactgcacggtgaacttcacggtagaccagatccgcgccatcatggacaagaaggccaacatccgcaacatgtctgtca

SEQ ID NO: 231611 - DNA, 90 bp, Homo sapiens
aaaccaatttcgatcagactacatcaagagcatagcccctatcactgactttgaatattcccagggaagacatgtaaggaatttgcataa

SEQ ID NO: 231612 - DNA, 75 bp, Homo sapiens
aaaccagtggccacagcatctttgtctagccccagtgcaggtcagaagagatcaattctacagaaatttccagtg

SEQ ID NO: 231613 - DNA, 100 bp, Homo sapiens
cttttctcggggctcccgtggcctaccaggacatcctcggaaagtatttattctaggccaggctccagtattcctggctcaccaggtcatactatctatg

SEQ ID NO: 231614 - DNA, 101 bp, Homo sapiens
attttgccgatttcatgactaaccagtgaatagcgggttttgcagcaattgttgcatatggattatataaactgaagagcaggggaaatactaaaatgtcc

SEQ ID NO: 231615 - DNA, 101 bp, Homo sapiens
ccccagttctactcaagccttattgaagagataggaactcttggttgggataattacagatttatggtaatggaaagactaggaatagatttacagaagat

SEQ ID NO: 231616 - DNA, 75 bp, Homo sapiens
ctgtattatacggttactataatggccctgctgtggcaccagtgaccaacgggaacacaacggtgccacccctga

SEQ ID NO: 231617 - DNA, 89 bp, Homo sapiens
ttatgatctacctaccaatcgtgaaaactatattcacagattatccagccaagaagatgaaaactacagagaagggatttggcttggtg

SEQ ID NO: 231618 - DNA, 82 bp, Homo sapiens
tccatgaatccagggcctaacatgggacagccgcaaccaggaatgacttctagtcccactctatgaccagtgggaggatgtg

SEQ ID NO: 231619 - DNA, 88 bp, Homo sapiens
tgccaacccacctaactacggaaaacctgatcccaaaattattgaaaacactcgaaggggatattggagaagatattccactagacaa

SEQ ID NO: 231620 - DNA, 100 bp, Homo sapiens
ggcccgcggctgcgcttccgacggggcggccgggggctcagagatccaagtgcgcgccctggcgggtccggaccaaggggacggcaaaacagaacagaaa

SEQ ID NO: 231621 - DNA, 98 bp, Homo sapiens
gaggctgaaggacatggggttccagtacagctgtattaatgattaccgtgtttcagctgaaccatccgttcatcttcaagccatcatgagctgtaaga

SEQ ID NO: 231622 - DNA, 75 bp, Homo sapiens
aagaagccctaatagaacagagaagaatccaaaggcaggcaattgttcagatgaggacggggacttggttgcctt

SEQ ID NO: 231623 - DNA, 129 bp, Homo sapiens
ctcgctccgtggccttagctgtgctcgcgctactctctctttctggcctggaggctatccagcgtcgcctgcgaggccgctggccaggcctgagcctctgccaccatggccattgtgcagactctgcca

SEQ ID NO: 231624 - DNA, 100 bp, Homo sapiens
cgccgggacccccaggacgacgtgtacctggacatcaccggaccaacttggaggccttgcagaagaagctggaggagctagagcttgatgagcagcagcg

SEQ ID NO: 231625 - DNA, 100 bp, Homo sapiens
taaagacaaagatgtcaggcctgcggcccggcactcaagtggaccctgagattgagctttttgtaaagctccagtgatccacaagctcagaaatacatcg

SEQ ID NO: 231626 - DNA, 74 bp, Homo sapiens
tggaactactctacggcatctggagcaactgggccacaacacacagtgatcttgttctaagagcaacaaagctg

SEQ ID NO: 231627 - DNA, 100 bp, Homo sapiens
caatagacagtgttgaggaccatcttgcctggagcaagggccctcgtggacctcagggaattgatggagaaccaggtgttcctggtcaacctggtgctcc

SEQ ID NO: 231628 - DNA, 74 bp, Homo sapiens
cagccaggagtcatgagcgacagcggcgagcagaactacggcgagcgggattgacttggcctctacttcttgtt

SEQ ID NO: 231629 - DNA, 50 bp, Homo sapiens
cgacgcgctggtgcacttcgcgctggtgtttgtggccagtcctcacaaaa

SEQ ID NO: 231630 - DNA, 83 bp, Homo sapiens
taaagagcgtcgtgtggcagacttaccctgaaagaagcagatcccagttcaaaagtagccataagaaggaaggattcaccacc

SEQ ID NO: 231631 - DNA, 122 bp, Homo sapiens
gacgccctatggcgtccgcctcgacccaaccggcggccttgagcgctgagcaagcaaaggacaatgcagatcttcgtgaagactctgactggtaagaccatcaccctcgaggttgagcccag

SEQ ID NO: 231632 - DNA, 100 bp, Homo sapiens
agaagttcagcctcaagcatcagctggagacgcactatagggtgcacacaggaaagtggagaatgaggacatgaataaagaccagatcttgctggaaaaa

SEQ ID NO: 231633 - DNA, 90 bp, Homo sapiens
caactgcatgttggtgaatattgggttggaagaatgtgggttaacgagcacctgctgtaaggatctcgcgtctgttctcacctgcagtaa

SEQ ID NO: 231634 - DNA, 75 bp, Homo sapiens
gccgaagacagtggtgaggagggcgcccctgaacctgcaccaggatgcctttgtggaactgtacggccccagcat

SEQ ID NO: 231635 - DNA, 100 bp, Homo sapiens
agtctcctgaagaggaaggagcggtgtcctcttaagaaaatgacccggagtggcgttggatggaagcgagtcctgcgttcactctgtcattcacggaccc

SEQ ID NO: 231636 - DNA, 80 bp, Homo sapiens
tgggccgctgggagccgttattggctgccgttaaggaccgttacgtttcccgggcggtaaccagcgtgagctcgcccgcc

SEQ ID NO: 231637 - DNA, 96 bp, Homo sapiens
gatgaagttgttcattgtttgtcaccacaaaaaggacagagctccttaataagcatttatagtcagtttttggcagcaatagaatcactaaaggca

SEQ ID NO: 231638 - DNA, 110 bp, Homo sapiens
gacgtcttagacagtcgtggttcctgtgatctgtgtcctctttgcagaaggtgctggagaatctggtaaaagcaccattgtgaagcagatgaggatcctgcatgttaatg

SEQ ID NO: 231639 - DNA, 100 bp, Homo sapiens
caggagctggcatgacgtgcaggtctctagcgcgccatctggctgctgtgcacaggcgctcgtgaggctgccttccggaacattaagaccattgctgagt

SEQ ID NO: 231640 - DNA, 75 bp, Homo sapiens
tggggaaaggacagttcagcaaagacaccgagagaaatgttttagcaagtgcatcagctgacaacactgtaattc

SEQ ID NO: 231641 - DNA, 98 bp, Homo sapiens
gaactacagaaacctcgtctccctgggcctggagctgctgaagactgctattgggaaagctggctacactgataaggtggtcatcggcatggacgtag

SEQ ID NO: 231642 - DNA, 85 bp, Homo sapiens
caggtttctgcacaggaatatcgagagcgtcatgaacccgagctatagagaaaggagatgagtaagactttgaccccgacgcagg

SEQ ID NO: 231643 - DNA, 83 bp, Homo sapiens
agccccaacccaccgccgccatggtaggaaaaggtgccaaagggatgctggagcgtgaggatcatccccggagaggacgggag

SEQ ID NO: 231644 - DNA, 75 bp, Homo sapiens
ctccgctcgtcccgctcgtcatggcctacccgggatacggaggagggatgatgtcagaagtgggatccaaagtag

SEQ ID NO: 231645 - DNA, 100 bp, Homo sapiens
aagactgtgaaagacgagggagaaatgttttgtttgactccagtgttaagagaagaaatgaggacatatcagtatcgtggtcacgagtcttggcaagaaa

SEQ ID NO: 231646 - DNA, 75 bp, Homo sapiens
tctacctcggccccaggttctctgcagatgcagtaccagcagagcatgcaggaccgccgggagagcctgcccacc

SEQ ID NO: 231647 - DNA, 100 bp, Homo sapiens
ggaccccctgaaagcctagacatgtgttctcctaagtgctgtaagtggtgaagacactcaggatcgtactgacagattacttttaactccatgggttaaa

SEQ ID NO: 231648 - DNA, 75 bp, Homo sapiens
gttcacgtgactgtggatctcaagtactaccggccaactgaagtggaatgtatcctgtcaggtataatgtcagtg

SEQ ID NO: 231649 - DNA, 131 bp, Homo sapiens
tgaggatgaagattcaccaaataagctatatactttggttacctatgtacctgttaccactttcaaaagtgtcatggagaaactccagctgggcccagagattctgcagcgggaaaatccaaggcttattt

SEQ ID NO: 231650 - DNA, 89 bp, Homo sapiens
ggcgtgcccagcaagagattaaagatgcagtacgccacggggccgctgctcaagttccagatttgtgtatgtggtagaagaccaaagaa

SEQ ID NO: 231651 - DNA, 100 bp, Homo sapiens
ctgctcgagggatgaaggggggtcccccgagggcgcaagccccagcactgcctccgagatgagcacgtgcccccggagctgtgggagcccttctataccg

SEQ ID NO: 231652 - DNA, 51 bp, Homo sapiens
tactgatttcatcaagttcgacactgcatccaggcagagggattgatgtcc

SEQ ID NO: 231653 - DNA, 90 bp, Homo sapiens
ttaaggaacagcgagctgtttgacccctttgacctcttcgatgtgcgagactttggaaaggtattatagctgcaaatgtccttgtattct

SEQ ID NO: 231654 - DNA, 100 bp, Homo sapiens
ttcatgggccatgcccggtgaccacttttggaccaaaggcctgtgtgctgcagaacccccagaccatcatgacgtcccagtgatcgggaggagtgggaag

SEQ ID NO: 231655 - DNA, 100 bp, Homo sapiens
cgccagttgggatcaaatgtgagcctatggatcaaggagagaaaatacaggctcaggaattgagtcatccaagttcacaagcctagcatcagagccaaga

SEQ ID NO: 231656 - DNA, 100 bp, Homo sapiens
aaagaagataaacttggcaaatgacatgcaggttcttcaaggcagaataattgcagaaaatcttcaaaggtatgatgatattctgatcaatggacttcca

SEQ ID NO: 231657 - DNA, 100 bp, Homo sapiens
tgagaaatcaaccggaggaatttccgtgcctggccccatgggtgctgctggtcctcctgggccacctggtgctgctggtactcctggtctgcaaggaatg

SEQ ID NO: 231658 - DNA, 75 bp, Homo sapiens
cgcagatgttgtcaaggtggcctaccaggaggccaggggtgtcgccatgattgacatatttgaggatagaatccg

SEQ ID NO: 231659 - DNA, 83 bp, Homo sapiens
caccggagcaacgtcacggcggtgcacaaagccaacatcatctggattgtagtcacatattccacttacagtgctgtcggcga

SEQ ID NO: 231660 - DNA, 75 bp, Homo sapiens
tcctttatcctggtcatcttctatttccaaaagtgaccgactcctcatcaaaggtggacggatcatcaacgatga

SEQ ID NO: 231661 - DNA, 90 bp, Homo sapiens
gaacccttttgatcaagatgcggtgaacatggaaggaggagtcagtggttttctccatgcttttattgctgaagtgtttgcaatggtgag

SEQ ID NO: 231662 - DNA, 83 bp, Homo sapiens
gggacccaaggccacaaaggagagctccgtggagagaaggctaacagagaccctgatgctggaattgatgaagctcaagttga

SEQ ID NO: 231663 - DNA, 76 bp, Homo sapiens
cgagccagcctactactgcaacgagtgcgatgtcttattagtaggtaagaaacagctgctcctccacctccacccc

SEQ ID NO: 231664 - DNA, 89 bp, Homo sapiens
ggggccagggaaccctggtcaccgtctcctcagcccagggccttgctgccgccatgactgaggaatcagaggagacagtcctgtacatt

SEQ ID NO: 231665 - DNA, 82 bp, Homo sapiens
agcatagagaatgagatagccgtcctgagaaatgtgaagcctcagtttaggtcatctggtggttcagaacactcaacagagg

SEQ ID NO: 231666 - DNA, 51 bp, Homo sapiens
ccttcatcctcaacgccctcacctggtgcaaatatatacagagcttcataa

SEQ ID NO: 231667 - DNA, 106 bp, Homo sapiens
tcgctcaagtgatctttgataagaatgattcagattttgaagctaaagttaagcagggctgaaaacacagttaaatcactttcaaagttaaaagactattaagaac

SEQ ID NO: 231668 - DNA, 75 bp, Homo sapiens
catcagcattttctgttgactgtaaaggtgctggtaagatttcttctgctgactgcctgcatccacgggtctgcg

SEQ ID NO: 231669 - DNA, 101 bp, Homo sapiens
tgaaacatccctcacattgaaatatgatcaggcctttgtgacactaaccacaaacgatgcctacgccaaaggtgccctggtcctgggatcatctctgaaac

SEQ ID NO: 231670 - DNA, 100 bp, Homo sapiens
aggatgtcctcctgcagtttctggatacacaggctcccatgctgagttttccagcggaggatggatggctctgtggacttctatcgggactgggccgcat

SEQ ID NO: 231671 - DNA, 100 bp, Homo sapiens
cttttctcagactagtctgaaagggaaaacccccattcattctggattggtggatctgaagtacaaaatattttccagttgaccagcaagtcaagtccct

SEQ ID NO: 231672 - DNA, 100 bp, Homo sapiens
tggacaatgaagactattactcgttgctgaacgtgcgcagggagcctcccctggtgaagacacaaactgtcaccatctcagataatgccaatgctgtgaa

SEQ ID NO: 231673 - DNA, 123 bp, Homo sapiens
ggccgcggaccgtgagtcagcattggcggcggccccagcgcgtggcagccgtgcgccgccaagaggtggggctggtgtccgagcacttctcgcaggccccgcagaggctgtccttctacagct

SEQ ID NO: 231674 - DNA, 100 bp, Homo sapiens
acaagggtgtgatccaagctatccagaaatcagatgaaggccacccattcaggagtctactcttcatcttgtgttgagacttcgtggtggtgctaagaaa

SEQ ID NO: 231675 - DNA, 90 bp, Homo sapiens
gcagcctctgatcatgatgggaacattgtggagctggccttccagaccacttgccacattgtcagcaaactaggcgtggcaactgctggc

SEQ ID NO: 231676 - DNA, 50 bp, Homo sapiens
gcagtcaagtatgtcccaaacgtctcaaccctgatctccggagaactgag

SEQ ID NO: 231677 - DNA, 98 bp, Homo sapiens
cttctggcgctgccgcccaccttgtggccctgggctttaccatctttgtggctgtgcttgccaggcctggctccaattgttgttataatgagaggatt

SEQ ID NO: 231678 - DNA, 74 bp, Homo sapiens
aatgaaacacctatttgtgacagcacgtgtggttctcaaatataggcattctgatgggaacttgtgtgttaaag

SEQ ID NO: 231679 - DNA, 100 bp, Homo sapiens
aggagcacatcaagagggtttcggatatggtggaggacctctacaggcggaaggcctgggctggcgaacacctgttcattcagaccttttggcaaaccat

SEQ ID NO: 231680 - DNA, 83 bp, Homo sapiens
cagaggacgcgggctctgaggatgagctggaggagggggtcagcacctcatctatgggcactttaccaaagcgggtgaaaatt

SEQ ID NO: 231681 - DNA, 82 bp, Homo sapiens
gaccacttttggaccaaaggcctgtgtgctgcagaacccccagaccatcatgtggaagttaaacgagctgagcctcgggaca

SEQ ID NO: 231682 - DNA, 75 bp, Homo sapiens
acggcgtacgccctcatggggaaaatctccccggtgactttcagggggggctgtcggggggctgttaggtgcctg

SEQ ID NO: 231683 - DNA, 83 bp, Homo sapiens
gcgagctgagtggttgtgtggtcgcgtctcggaaaccggtagcgcttgcagcatgggccgcgatgggcctcttggaacattgg

SEQ ID NO: 231684 - DNA, 51 bp, Homo sapiens
agcagccaggcagcgggaccatgagattactcttgtctctgctgctcctgg

SEQ ID NO: 231685 - DNA, 75 bp, Homo sapiens
ggctttgacatcaacaagactttcatattctctgacctggactacatgggattggttcgagtgagtaaaaactac

SEQ ID NO: 231686 - DNA, 51 bp, Homo sapiens
aagaagaaaacactttgtgggccaggaatgggaagatacagtgcagtcgga

SEQ ID NO: 231687 - DNA, 89 bp, Homo sapiens
cattgcgctgtgtaacacagattctcctctgcgctatgtggacattgccatcccatgcaacaacaagagtcacctaaggtcctgcgagt

SEQ ID NO: 231688 - DNA, 82 bp, Homo sapiens
cttcgaccttggacttctcagcctccagaatgcccaagaagatgaaaggattgttcttgttgacaacaaatgtaagtgtgcc

SEQ ID NO: 231689 - DNA, 90 bp, Homo sapiens
ctcggggcggcggactggctcgcggtgcagattctgcttcgtgaaggctgcaagaagattctcgtagctgactctttgtccttactgaag

SEQ ID NO: 231690 - DNA, 50 bp, Homo sapiens
ccagagcaacctctttaaaaagcaagggagagcctggggatgtacaggag

SEQ ID NO: 231691 - DNA, 50 bp, Homo sapiens
ccggtacatctgaaagccgggaaatggaactgtggaaggtgcatcagtga

SEQ ID NO: 231692 - DNA, 90 bp, Homo sapiens
cgataacatttagcctggaacagagcggcactcggcctgagcgggtttgacttctccgtgacagtgttcgccttcctgggactgctggcg

SEQ ID NO: 231693 - DNA, 100 bp, Homo sapiens
gcaatagtagccgatcacctgggacttagttggacaggaaaagaatttcctccctgcgccattgaggtctataaaattatagagaaagttgattaccccc

SEQ ID NO: 231694 - DNA, 100 bp, Homo sapiens
tcctcccagagtcgtcaggaatcgacatgattgactcgtcccccagcgtcaacgggagggctccaccgctgaggctgcccgcatcatctaccccccagag

SEQ ID NO: 231695 - DNA, 97 bp, Homo sapiens
cctgtacagcctgcagaactgccgggatagaaaatcgtcagctggacacagtaaatttctttttgaagagcaaggaaaatctttttaatccatcctc

SEQ ID NO: 231696 - DNA, 100 bp, Homo sapiens
ccagccgcggccgccctggggacgcagacgccaaggcccctccggccagggccgggagccgggccggcctagccagggtctggctctgtcacccaggctg

SEQ ID NO: 231697 - DNA, 76 bp, Homo sapiens
tcatacttggaaatggctgcaggttcagaaatttatccagttggcgaaggactttgaggatttccgtaaaaagtgg

SEQ ID NO: 231698 - DNA, 94 bp, Homo sapiens
gggaacctagctgatgataggggggttccatctcccaacttgtccatagatcatcttcagacaccaacgaaagtgaaataaagtcaaatgaaga

SEQ ID NO: 231699 - DNA, 74 bp, Homo sapiens
gggccacggcgcggacgccatgatgtcgaactctctcaggttcacccagaccaaagaattttaagaagattcat

SEQ ID NO: 231700 - DNA, 100 bp, Homo sapiens
acggaaccggcgccgcgcttgctgctggtaacagggccttgcctagtgggccttccttcccagattgaccgactcatcagtcacggggccgacatcctga

SEQ ID NO: 231701 - DNA, 100 bp, Homo sapiens
cacaccactcctgaccacccgctgttcttgctgctgaacgccaaggtagcaacacaagtcggaatagaatggaacctgtcccctgttggcagagttaccc

SEQ ID NO: 231702 - DNA, 83 bp, Homo sapiens
atctgctcaacgacgaggacctgacgcaggtttggtgcacctcgatttggaggaagtagggcagggcccttatctggaaagaa

SEQ ID NO: 231703 - DNA, 100 bp, Homo sapiens
ctggagacccttttggctaaactcatccaaacctgtcaacatgttgaagatcccattgaagataccacgctgcatgtgtccttagtagtcatgtctcctt

SEQ ID NO: 231704 - DNA, 83 bp, Homo sapiens
tcatcagaagcgtctatgattccttcagataccagggactggaactgtggctgcaccatctgtcttcatcttcccgccatctg

SEQ ID NO: 231705 - DNA, 107 bp, Homo sapiens
gtcagtgttaaaggaacctctacaacgaaggtgaagccacggaagataaggatgccaaagaagagtgaatggcccacaaagagcctggtagcacatacgcttttcaa

SEQ ID NO: 231706 - DNA, 100 bp, Homo sapiens
cctgacctgcgttacatcttcccactgggaccggccttattccagagaggtggcagcattcccactcacggagtctcgctctgttgccaggctggagtgc

SEQ ID NO: 231707 - DNA, 88 bp, Homo sapiens
cctacattgctcatcggatcacccctaaggtggagccgccaccaaaatgcagattttcgtgaaaacccttacggggaagaccatcacc

SEQ ID NO: 231708 - DNA, 100 bp, Homo sapiens
tccttgagattatggctcctgtatacccaatctgtttcaccatgaccgtctccaccagcaacctagccaaggatgtgaacctgaagatgccccggaacaa

SEQ ID NO: 231709 - DNA, 82 bp, Homo sapiens
tgtgcgagagcctcctcacttgggccaaatttgagtttcatcatggtgactatgaaaaacagtttctgcatgtactgagccg

SEQ ID NO: 231710 - DNA, 101 bp, Homo sapiens
taatgagcgtcaaaattatccgaaaccgcctcactggagtcagatggagttcagtatctccgccctatccatccaggagccgagcaacggcaccgccgcca

SEQ ID NO: 231711 - DNA, 100 bp, Homo sapiens
aagtagtccgatggctgcggctgcgccgaggcgccctactcagattcaaccctatgaaaagataaaggccaggggcttgcctgataatatatcttccgtg

SEQ ID NO: 231712 - DNA, 75 bp, Homo sapiens
cacccggacccagccacacagattttttatcaagcagaaatgcatcgaacaacgagaatcaagatcactgagcta

SEQ ID NO: 231713 - DNA, 100 bp, Homo sapiens
gtcggatttcagctgaagtagaagaaactgtggacatcggatgtcaagccatggataagattgaagatgagctggagatgaccatggtttgccatcggcc

SEQ ID NO: 231714 - DNA, 76 bp, Homo sapiens
gacggggatttctcctcctaatctgggcctcttgtcatgggatcatagacggtatttctatgtaaacgaacagtcg

SEQ ID NO: 231715 - DNA, 75 bp, Homo sapiens
gcagcaagtgcgcggttggggccactgcgaggccgttttagaatcctcactatggatgggctcattgaggacatt

SEQ ID NO: 231716 - DNA, 122 bp, Homo sapiens
cttttcatttccagttgcctgttattcctgtgactggtcctgtggctcagctctacagcttacctcctgaagattctgatggtagaattaaccatgggcgaattgcttatatttcttcgaag

SEQ ID NO: 231717 - DNA, 121 bp, Homo sapiens
tggaaacaattgatttgctcttacgtatttgtgtgacttgactcttcaaacacaaagcacgtagaaaatctaattgtgtgaaagaagtagaaaaactgcaagaaaaacgagagaaaaggag

SEQ ID NO: 231718 - DNA, 100 bp, Homo sapiens
gtgaggttcagctgatgaagcttctgaaccatccacacatcataaagctttaccaggttgatgataattagaagcatgctttccactgaacttcccgaca

SEQ ID NO: 231719 - DNA, 100 bp, Homo sapiens
atgctggtggctctacccagaattcaattaaagtggctcagctctttcagtctcacatggcaacgaaaacaacttgtatgtcttcacaaggatcagatga

SEQ ID NO: 231720 - DNA, 83 bp, Homo sapiens
ccggcagctggcgctggggatccctgctcttcgctctcttcctggctgcgtccctaggaaagattctgaagcttggcggagag

SEQ ID NO: 231721 - DNA, 80 bp, Homo sapiens
gcaagatggaggcgctgattttggtcaaaatgcagatcttcgtgaaaacccttaccggcaagaccatcacccttgaggtg

SEQ ID NO: 231722 - DNA, 83 bp, Homo sapiens
cgctcatttacggagcatgcgtggtcttcacccttggcatgttctccgccggcctccggctgaggcagagcaccgtgaaggcc

SEQ ID NO: 231723 - DNA, 84 bp, Homo sapiens
tctctctttctggcctggaggctatccagcgccctgggaggagcggggacactgaggacctctctccaaattggcctctcaact

SEQ ID NO: 231724 - DNA, 100 bp, Homo sapiens
cgtcactccccagggcggcatcgtcgtctatgggggctactcgaaacagggctgaaatctctttaatgatggagggaagcaggcagacgcgagtgtctcg

SEQ ID NO: 231725 - DNA, 100 bp, Homo sapiens
agctgcttccgtccttctgtattctctgtgggcacacacggaactgcatcatgcctacaagaagttactccacaggatccgctgaacataggatgttgcc

SEQ ID NO: 231726 - DNA, 82 bp, Homo sapiens
tcttccatctgctgctcacctcagctgcctgggtccccgacgagagccagtaagactttgaccccgacgcaggcttcagtga

SEQ ID NO: 231727 - DNA, 75 bp, Homo sapiens
cgggtttagcggcagcctcttcgagccagtccatgacagacatgcttctcaaagtacagaatgctattggagaac

SEQ ID NO: 231728 - DNA, 74 bp, Homo sapiens
ggatgactgtggaatcctcatgaaaacagagatttgggattagaatctaccttaatatcgtcaaaacctcagtc

SEQ ID NO: 231729 - DNA, 75 bp, Homo sapiens
gtgaacctccggagccttggcacagctcgcttctaaaggtactccaaagattcaggtttactcacgtcatccagc

SEQ ID NO: 231730 - DNA, 50 bp, Homo sapiens
cgctgcacttccatcccacggtcaggcttgaagccacagtgcatggccag

SEQ ID NO: 231731 - DNA, 82 bp, Homo sapiens
cggcggggctgaccacttaccgcagcatccaagtcggccctgcaaccatgtccaagggacctgcagttggtattgatcttgg

SEQ ID NO: 231732 - DNA, 87 bp, Homo sapiens
gctctttgcccttttagaatcagctgcaaacaaagggatcgtgatctggaactcgctgctcgaattggacaagctctcttaaagcgg

SEQ ID NO: 231733 - DNA, 100 bp, Homo sapiens
ggcgtcttcacccccaccattgaggcccgcacagcccagtccagtgccgacgccaccgccgagcccatgatcctggaacagtacgtggtggtgtccaact

SEQ ID NO: 231734 - DNA, 75 bp, Homo sapiens
taccagttaccataccagaagtttcttcagtccctgatcagatcagaggagatttggagcaagaggtggtggtgg

SEQ ID NO: 231735 - DNA, 100 bp, Homo sapiens
cctggaccctgctcagagggacttgtacgtggatgtaatgttggagaactatagtaacttggtgtcactgggtgaccaagaatatggcccaggtgaccaa

SEQ ID NO: 231736 - DNA, 101 bp, Homo sapiens
ttattgtagaaaatctttctagtcggtgcagttggcaagatttaaagtacaacaagttcaaatgccggatattgaatgaaaaggtgaatactccaactacc

SEQ ID NO: 231737 - DNA, 135 bp, Homo sapiens
aaaggacatgtggagatccccaatttgtctgatgaaaacagcgtggatgaagtggagaaactggcgatggaatatgagaggagccctctggaaagaaaaggacagaccctgtgctttcatgaaagtgaagatctg

SEQ ID NO: 231738 - DNA, 96 bp, Homo sapiens
gcttaaagaaatcagtccttcctttccgacttagtcctcgggaagaagtttcagactacaaggaagctgcactgcaccaggaattacatccacctg

SEQ ID NO: 231739 - DNA, 96 bp, Homo sapiens
tggagctgccgccgcctgcagtcggtgaccgcgcgactcggcgcccgcccgcgcaccctggaggagaagaggttctgctggaacaagctggtgtag

SEQ ID NO: 231740 - DNA, 90 bp, Homo sapiens
aggacagcacctagtcgtggccggaggagtctcagagctgtcagaaagaaaaggcgacggcggattgacagaagtatgattggagagccc

SEQ ID NO: 231741 - DNA, 100 bp, Homo sapiens
caggacagaggaagtatggtggtcctccaccagacagtgtgtactctggcgtgcaacctggaattggaacggaggaatatgatgaattagctgaaacaca

SEQ ID NO: 231742 - DNA, 100 bp, Homo sapiens
cagtgccctgtgtcagaaatatcctcgcaaacacgccgtccttatgaacttcctgttcaccatgctgcgggaagagaaaccccatttcatttcactttgc

SEQ ID NO: 231743 - DNA, 100 bp, Homo sapiens
ctgcaatatggcggaggcggaaggggaaagcctggagtcctggctcatgtctttggtgcaacactaacaaggcttgtctggactacccagttacaagcgt

SEQ ID NO: 231744 - DNA, 100 bp, Homo sapiens
gtccaacagggcctggtccgtgtccggtcccccaaatctgtcgtccctgcccccagggtgacctcaaagcagaagctctgaattcacctctcatctgacg

SEQ ID NO: 231745 - DNA, 50 bp, Homo sapiens
agaactgcctcctcttgctcagaccatctgtcgttcgttaccatctgccc

SEQ ID NO: 231746 - DNA, 80 bp, Homo sapiens
cctcaaggatgtcatatctatgagtaccgcgagagcaacaagtttttagaacttcagccataaaaatgggcagaattttc

SEQ ID NO: 231747 - DNA, 98 bp, Homo sapiens
agcacggagctgcagccggttgggccggtgtactttcccggcaattaagttggaatatgcaaggttggttaagttggcccaagaagacaccccaccag

SEQ ID NO: 231748 - DNA, 82 bp, Homo sapiens
ctgaagattgcttctcttctctcctccaagccgttggacataccagatggtcgaagagctccacttcctgctcattaccgga

SEQ ID NO: 231749 - DNA, 75 bp, Homo sapiens
cagagaagaggaaaactctaccggtgcagattaagatgttctacgaggagcatttgcacttggacgatgagatcc

SEQ ID NO: 231750 - DNA, 80 bp, Homo sapiens
ctggggttccttccagctccctggattgctgaactttggcgagtttaaggtcagcccaaggccaaccccactgtcactct

SEQ ID NO: 231751 - DNA, 96 bp, Homo sapiens
gccgcgctgcctgcgccggaccggggcgggtccagtcccgggcgggccgtcgcgggagaggaactggtgctcctatgtggtgacccgcaccatctc

SEQ ID NO: 231752 - DNA, 88 bp, Homo sapiens
ccattaaaaacaacaaggaagctttcagtgtctcggcgcggaagatggccggcggcgtggacggccccatcgggatcccgttccccga

SEQ ID NO: 231753 - DNA, 83 bp, Homo sapiens
cttcatccttgtttaatgactttggtgccctcaacatctctcagagacgaaagcaaactctggcctgttctattctgactgcg

SEQ ID NO: 231754 - DNA, 82 bp, Homo sapiens
gccgctgtgtggttgcaacggagataaattcccggaaccgcgattcggcgtgtcaggttgatgataattagaagcatgcttt

SEQ ID NO: 231755 - DNA, 75 bp, Homo sapiens
cagtgtctttccacctttggatccgcagaaatcgagcaattctgtggtgttcttggtcacacatttatggagttt

SEQ ID NO: 231756 - DNA, 90 bp, Homo sapiens
ttgcctagagagatttgtaaccggttactaaatatttttcatcctacagatccagtgagggccaagatgggtcgccgagctcaacaggag

SEQ ID NO: 231757 - DNA, 96 bp, Homo sapiens
ccaggaggcagtggagcagcagctccccacgctgcatcatgagtgcagccggctgcaggagcagctagcgcaggctggagtgcagcggcacaatct

SEQ ID NO: 231758 - DNA, 83 bp, Homo sapiens
cttgttcctcctgtcccaaaagaccatcctgctctcaactacaacatcgtttcagggtgctagtcctatgggagtaaatggag

SEQ ID NO: 231759 - DNA, 90 bp, Homo sapiens
agaagaggctgcagaatatgctaaacttttggccaagagaatgaaggaggttaccccaaagcctgttctgatctctacccccacacccac

SEQ ID NO: 231760 - DNA, 96 bp, Homo sapiens
ccctcgtgagttgggcttggtaccgtgctgcccagaatgcccttcgggagcaggaggccactgtctgcagctcccgtgaagatgtccactccagac

SEQ ID NO: 231761 - DNA, 100 bp, Homo sapiens
cggtggccctgctggaggagctctgggacaggaagatgtcacccaagcgcatagctaaaagaaggtcccccccagcagatgccatccccaaaagcaagaa

SEQ ID NO: 231762 - DNA, 82 bp, Homo sapiens
ggctgctgcaggccatcgacccccagagcaacgcgtccgagctgggccacagcctgaacgagaacgtcctcaagcctgcgca

SEQ ID NO: 231763 - DNA, 100 bp, Homo sapiens
actgctcatccggataccatgctgggaagaacactatgtggctgccgtgtaagagtggaactgtcgaatggtgaaaaaagaagtagaaatcgtggcccac

SEQ ID NO: 231764 - DNA, 90 bp, Homo sapiens
gcaagatgtggcagaagaacaagaagttgagaccgagaatgtggaaacaggatctaagcctttcccacgttatggttataaaccctcccc

SEQ ID NO: 231765 - DNA, 94 bp, Homo sapiens
aaggaacgaggcaaggagctaaagcagcgtgcgttcagccctgggtgttctaagaacggaagcatctgggctggatggaatttagcatcaagca

SEQ ID NO: 231766 - DNA, 51 bp, Homo sapiens
tagaccccgacctgccgcgcccggagtgaccccagttttgcccgtctgggt

SEQ ID NO: 231767 - DNA, 75 bp, Homo sapiens
gagtacagggaagtctataagctttgcaacagaattacagagtatgatacgtcttgctgccctccaaaaaagaag

SEQ ID NO: 231768 - DNA, 75 bp, Homo sapiens
aggaggcggtggagcgcagagcgggcgagcgcgcttgcactttccagtgacaagattgctgcattacgaatgcca

SEQ ID NO: 231769 - DNA, 100 bp, Homo sapiens
tttaggagttcagatgtttggaacatttacttatcactgtgttgtaaatgacacaaagccagggaatcgagtcactggcatttacgaactcagcttatgc

SEQ ID NO: 231770 - DNA, 82 bp, Homo sapiens
ggaaggcgtctgttgagcctttctctcagtcgtgagggaggcgtcgacggcgtgcggagctcgaggccatgagcagatatac

SEQ ID NO: 231771 - DNA, 101 bp, Homo sapiens
attcttctgcctcagcctcccaagatccggagtgttggaacagcagctgttaatatgtgccttgtggcaactggcggagcagatgcatattatgaaatggg

SEQ ID NO: 231772 - DNA, 100 bp, Homo sapiens
ccaaaatgatacctggaggcttatctgaggccaaacccgccactccagaaatccaggagattgttgataagatgttccatttaagcagacctcttccata

SEQ ID NO: 231773 - DNA, 98 bp, Homo sapiens
tcacagagaacttaagactgacaatctacctaatcaagctgtgattgtgaagtgctgaccaattgccactggacatacttgaaacaaaataggaaaat

SEQ ID NO: 231774 - DNA, 97 bp, Homo sapiens
ctccggctggctgacgacgggcgcccccgagccgccgccgctgtccggagccccacaggacagagcgggatgccaccagcttgtccaaagggaagtt

SEQ ID NO: 231775 - DNA, 90 bp, Homo sapiens
gtcgactacaagaagagggcggagcggagacgggagtattatgaaaagatcccaccaattaccctagttatgggcccatcatctcacctg

SEQ ID NO: 231776 - DNA, 90 bp, Homo sapiens
ggtcccacaggctcctgccctggactaccgagggaaacagtgcttcttagtcctacgtcagcagcagtttaatgtccaggctcttgtggc

SEQ ID NO: 231777 - DNA, 119 bp, Homo sapiens
caggccgaggagacgcgggccttcgagcagctcatgaccgacctcaccctgtcgcggattaatggagtggacgtgactgaggccaggcatgaccacgccgtctccctgctgaccgctgc

SEQ ID NO: 231778 - DNA, 110 bp, Homo sapiens
ctcacggccattcactgcccatgctgagcgcctctcacacaggtgtctggaaatgaagtatggaaatgaaatcatgaataaagacccagttttcagaatctctccacgaa

SEQ ID NO: 231779 - DNA, 51 bp, Homo sapiens
tcgcagtggtcgcttcttctccttggagccatgtgttcacatgtcatgtgg

SEQ ID NO: 231780 - DNA, 83 bp, Homo sapiens
cgacacgcctgccactcctgcccccaggtacatccccttcttcctcatcctcttcatgtacttcagcggctgctttactgcct

SEQ ID NO: 231781 - DNA, 50 bp, Homo sapiens
gcaattttggagaattacgattagtgcagctgtctgcttcagaaagtgag

SEQ ID NO: 231782 - DNA, 82 bp, Homo sapiens
taaattattccatttgcaacttatccccaacagatggctattcatatgaaaaggaagcaatggaaaattggatcagcaaaaa

SEQ ID NO: 231783 - DNA, 100 bp, Homo sapiens
cagctcttcagagcatcctgagcttcagccacgggcagctccggactcccgaagtggacatagagggcatggagtttggccctggtgagctggacagtgt

SEQ ID NO: 231784 - DNA, 100 bp, Homo sapiens
cgttcacggtgccccggcgccacctggagagaggccgcgtcctgggcagagctgtcctggataatgaaagacttactgcagaggagatggatgaaaggag

SEQ ID NO: 231785 - DNA, 82 bp, Homo sapiens
gcctgcggcgcctgggcgctctgaggacttgcaccttcgagatcccctgtgtttacccagctggaggatgatgaacagtcgt

SEQ ID NO: 231786 - DNA, 78 bp, Homo sapiens
agggttattcacttgcttcacttttggctaaagttgcagcaggcaagctgaataccactagaaacatacctgtaacca

SEQ ID NO: 231787 - DNA, 100 bp, Homo sapiens
atgtatgccgtcgacctcatgctgaagtgggacaacggcccagatgtctcgcccaagaacttcaaggtgaaaatgatcatgaagacatcagttctgctca

SEQ ID NO: 231788 - DNA, 75 bp, Homo sapiens
cagctctcagtccacactcccaaaagggaaaggcgttgcttgagtccatggttgatgctgctgagaatctttgtc

SEQ ID NO: 231789 - DNA, 50 bp, Homo sapiens
gccgccagcccaaacaggcgtgtcacagacactggaagaattgtcttacc

SEQ ID NO: 231790 - DNA, 98 bp, Homo sapiens
tgagttctagaatgaagctgcagaccctcgcagtgagtgttacagctcttaagcctgcttagacgcctggtgactctcatttcgcagcaggccacgct

SEQ ID NO: 231791 - DNA, 100 bp, Homo sapiens
gtgcgtgtggggctgggtctcggagtgggagacgtggagtgcagtgctcccaaatgtgtcagaagaaacagtgtctcccaccagagcacggaacatgaag

SEQ ID NO: 231792 - DNA, 100 bp, Homo sapiens
cgctcacctcaggggcgggcccccgcctgcgttcgcggcgccaccctttggagtgaatcaacctggaccttatatcatgtatacaactgtagatgcaaat

SEQ ID NO: 231793 - DNA, 98 bp, Homo sapiens
gaactggcacagaccaaactccagctggtggaggccgagtgtaagatacaggcagaatccagagaccacatttgaagtatatgttgaagtggcctatc

SEQ ID NO: 231794 - DNA, 74 bp, Homo sapiens
ggctgcccaagctcaagcacgtgaattcagaaggagctggcggacatcactttagaccctccacctaattgcag

SEQ ID NO: 231795 - DNA, 75 bp, Homo sapiens
accacggcgtagcagaagccattccgacaatgatagagaggaacttgatacagatgaatatgaagaaaccaaaaa

SEQ ID NO: 231796 - DNA, 90 bp, Homo sapiens
atggcggatgccctgcagtacctgcagaaggtctctggagacatcttcagcagaaggacagaataacgggctcccagattcacaagcccc

SEQ ID NO: 231797 - DNA, 98 bp, Homo sapiens
caaagtcagccacaaagcagactagccagccggctacaattggagtcagagtcccaaagacatgggttccatcaatggtgagcaccagcctgaatgca

SEQ ID NO: 231798 - DNA, 100 bp, Homo sapiens
cgaagtggagcaaaaggtgacagtcacagcttagtagtttgacggtgagaacatgtatatgagcatgacagagccgagccaggactatgtgccagccagc

SEQ ID NO: 231799 - DNA, 89 bp, Homo sapiens
agagaagttgcggaatgaactccggcagaacacagatctgctagaaagcaagaatgagtccctggaacgccagatgcgtgaaatggaag

SEQ ID NO: 231800 - DNA, 100 bp, Homo sapiens
ctgggattcagacaccgcaagctgctttcggaagggcttcaggagggggaatggatataaatttctctactgttctgcccgtgccatcgggatggcggac

SEQ ID NO: 231801 - DNA, 73 bp, Homo sapiens
aaaaacagaaaaataataattacatctgcaaagaccttatttccaggcgcctgtgtctggcagagctggtgtg

SEQ ID NO: 231802 - DNA, 82 bp, Homo sapiens
ctccaaaagcagtgatgtctggagatttgcggcaggaactggccgtgcagcagaagcaggagaaacccaggacccccatgcc

SEQ ID NO: 231803 - DNA, 101 bp, Homo sapiens
ggggattctcgacctgctaacagaactggaccttttcggtcacgggaatccccatgaactgctctgtgaaactgcagctgagcctctacatgaaatctgtc

SEQ ID NO: 231804 - DNA, 122 bp, Homo sapiens
gccgctcctaagcctgcacagccgcggcggcagcagcagtgagaggtactccaaagattcaggtttactcacgtcatccagcagagaatggaaagtcaaatttcctgaattgctatgtgtct

SEQ ID NO: 231805 - DNA, 99 bp, Homo sapiens
gtcgggacaccccggaagctgggaaatggactcacaccacccggcaagaactgctcactacggctccctgccccagaagtcacacggccggacccaaga

SEQ ID NO: 231806 - DNA, 100 bp, Homo sapiens
tcggacgcgggcatcttcttcacccgggcggtgcagagtgacaaccaacaagctgctgctttccattatcatcttactggagctcgccatcctgggaggc

SEQ ID NO: 231807 - DNA, 51 bp, Homo sapiens
gtggacagatctgagagatactgaggtttccatcgtgtgggaagaacggag

SEQ ID NO: 231808 - DNA, 82 bp, Homo sapiens
ggagcgcgtcgtgcgcctgggggtgcgcgcctgcgacctgcccgcctggaatgttgtaccatctttgggtaggcagacttcc

SEQ ID NO: 231809 - DNA, 90 bp, Homo sapiens
ggctataccaaagaccaagtagatggagttctcaggtcacggtctagatcacattctcgatccagaggaaggcgatactctcgctcacgc

SEQ ID NO: 231810 - DNA, 49 bp, Homo sapiens
atggccatggaagacgaatttggattttctgccgtctcttggcaaaaat

SEQ ID NO: 231811 - DNA, 83 bp, Homo sapiens
agaaattcgagaagctgcaaatgccactgcctttccagatgaagttggtgctggtgttcctgtctcccaggaagaattgactg

SEQ ID NO: 231812 - DNA, 83 bp, Homo sapiens
caggcggggacaggacggcggggcgagccaggaactgtggctgcaccatctgtcttcatcttcccgccatctgatgagcagtt

SEQ ID NO: 231813 - DNA, 88 bp, Homo sapiens
acctatggatcttgctcctttgcctgcaaacctgtattatagctgcaaatgtccttgtattctgtttatggagagtaccttctctgca

SEQ ID NO: 231814 - DNA, 100 bp, Homo sapiens
acccttgatcctcctcctaattgcagagaggatctgacgaactactctcaggcagtgttctcagtagtccgaactctaatatgagcagcatggtagttac

SEQ ID NO: 231815 - DNA, 96 bp, Homo sapiens
agagcattgaccaggaaataaagatcctgagagaaagagactcttcaagagagattcccagttctcaatcttccttcctccttacaagatacaagc

SEQ ID NO: 231816 - DNA, 98 bp, Homo sapiens
gtccacggagtgtatgaccacaaacagccatcaaggttgaagcactcaataagttaaaaactttaaatagtttaatcaaactgaatgccgtgaagtta

SEQ ID NO: 231817 - DNA, 75 bp, Homo sapiens
ctggtacatcgcctcagggcattcatttcaggctccttctaaatggccaaggttgatgataattagaagcatgct

SEQ ID NO: 231818 - DNA, 83 bp, Homo sapiens
caaatatttgcggtttcagcctcaacccagaggaatcgttactctttcagggggaaactaatgcctaacctgcttccagctgg

SEQ ID NO: 231819 - DNA, 48 bp, Homo sapiens
cccagaggagcgtaagcaaggaccagagacgagttgtactgctgtcac

SEQ ID NO: 231820 - DNA, 78 bp, Homo sapiens
gatcatcgagcatttcaaacggtggaagttaaacgagctgagcctcgggacagcaagagccaagcgccgggacagcca

SEQ ID NO: 231821 - DNA, 75 bp, Homo sapiens
ctcaacgccaggcgccgctcctttacagggacactccggacgcaggcccggccaggagagttcgtctgcatcgag

SEQ ID NO: 231822 - DNA, 100 bp, Homo sapiens
ggagtgtatgtctttggagaacttctggagctggccaacgtgcaggagggtggagagattcaaccagttagcgtgaaagttggagataaagttcttctcc

SEQ ID NO: 231823 - DNA, 114 bp, Homo sapiens
gatcatggctcaccgcagtctcgactttcctgggctcagattctgcccccgtggagactcccagagggaagcccccactcaacacccgctcccaggctccgcttctccgatggg

SEQ ID NO: 231824 - DNA, 100 bp, Homo sapiens
agagggcccagactttacgagttcggaccaaacacacttcaggtctcagttatgggcaagaatctggaccagctgttccatttcctccaagtcaccggct

SEQ ID NO: 231825 - DNA, 101 bp, Homo sapiens
tgaaggcctttatgagaggacagaggctatatgaaaagaagatgttaccgagtacttcagtgaattccttagtgcaggggaacggagtcttgaattccagg

SEQ ID NO: 231826 - DNA, 96 bp, Homo sapiens
aacggaggaaaaaaagagttgcgggaggctgtcggctaataacggaggccactgtctgcagctcccgtgaagatgtccactccagacccacccctg

SEQ ID NO: 231827 - DNA, 90 bp, Homo sapiens
tgaaattgaggtcacaccttcagtccttcgagcaagttatctaccttgcctgctcctatgccacagtgtacctgatctacctgaaattta

SEQ ID NO: 231828 - DNA, 75 bp, Homo sapiens
cagattcgcagtggtcgcttcttctccttgggtctccgtctctccaccgggggcttcatccttccagggaggaga

SEQ ID NO: 231829 - DNA, 75 bp, Homo sapiens
ggagtggctacatgaagttctgaaggatgttcagccccgggtcactccacttgattctgattttgcaagtctgag

SEQ ID NO: 231830 - DNA, 117 bp, Homo sapiens
ccctttggccgcagtagtatagagctgaccaagatgctatgtgagatcttgaaagtgggcgagttgcgtgaatctggattgggaaagtcgacattaatcaactcattattcctcaca

SEQ ID NO: 231831 - DNA, 100 bp, Homo sapiens
gcgctccgcgctctggcgctacggtctggccgtcggctgcggcgccatcgatgcttttactgactctgctatcagtgctaaagtgaatggcgaacacaaa

SEQ ID NO: 231832 - DNA, 82 bp, Homo sapiens
cttacctctttgatctcgacaataagattgtcactgctgttccaagggcacacgcagagggatttggaattcctggagagtt

SEQ ID NO: 231833 - DNA, 100 bp, Homo sapiens
ctggtactttgtatctcagttaaagaagatgaagaagtcttcaggggagattgtctactgtgggcagcaagaagccaccgcagagcaagagaacaaacgg

SEQ ID NO: 231834 - DNA, 100 bp, Homo sapiens
actgatttttttgtgcagtgggcaggaagaacccatcgggcagctacacatcttgaaagagaagctcttcctgtgaggattgcttcatggattggagaac

SEQ ID NO: 231835 - DNA, 101 bp, Homo sapiens
ccagagtatgtggcacctcttgtcctttggctttgtcacgagagttgtgaggagaatggtggcttgtttgagaaatatgttggtgaagtctttaacatcgt

SEQ ID NO: 231836 - DNA, 83 bp, Homo sapiens
aagccagaggacccagctaagccacgttcaacttcctgacctgtcagggtgactgttggatctgtatggaactcatgtctacc

SEQ ID NO: 231837 - DNA, 100 bp, Homo sapiens
ccgagagcgcgaatatcgtcatcgttagaagaacccagcttagactagaaagtctagaagacacacacataatgaagggggaagatgatgctttgtcaga

SEQ ID NO: 231838 - DNA, 82 bp, Homo sapiens
ccacccacggcacaggagcctcctggaggcagcagttacagaatgtctgaaggggacagtgtgggagaatccgtccatggga

SEQ ID NO: 231839 - DNA, 88 bp, Homo sapiens
tcagttggagttattaattagcccaacctgttcttgcaaacaagcagatatttgtgtggtatgtgaggaagctcgatgtcccaatatt

SEQ ID NO: 231840 - DNA, 75 bp, Homo sapiens
agggagaagaaggaggcctttgtggagttctccacgttgcctgcagctcttggataagcacaagaatacagagag

SEQ ID NO: 231841 - DNA, 100 bp, Homo sapiens
cgaggacagtggcacttcagctgccagctcccctaccatcatgcggaaaagcagcggcagccccgactctcagcactgggagcgttctccatcaccactg

SEQ ID NO: 231842 - DNA, 100 bp, Homo sapiens
tcttggaggacttgcagtcatacagaggagctggccacgaaatacgagaggagttttttgagaaccctgcttttcgtcccgatgggctgaaactctatcc

SEQ ID NO: 231843 - DNA, 51 bp, Homo sapiens
ccggcgatgagcccggactcgaggtggccgaacaacaatgatgaggacccc

SEQ ID NO: 231844 - DNA, 116 bp, Homo sapiens
gaccgcgcgcagggcctgcagcgggagctggacggcgagcgcgagcggcgcgagaaagtgacttaagagattaaaattaatttggttgctgttggttctgaacaaataatgagttc

SEQ ID NO: 231845 - DNA, 100 bp, Homo sapiens
tggggctggtggctgtggacaaggctgtctatgtcttgaacagcaaacacaagctcactcagaagaagcaggagactctctgaagaccagcaggaaagca

SEQ ID NO: 231846 - DNA, 101 bp, Homo sapiens
tggaatatgccaaggaaaaactggagagcttcatcaaaaatagtgatagctttgataactgaatgcaatatccatacatctccttctccgggaattcaagt

SEQ ID NO: 231847 - DNA, 100 bp, Homo sapiens
attcaaaggacctgcccccagagagagaatataaatagtttctggaaaggacactgacaacttcaaagcaaaatgaagttctttctgttgcttttcacca

SEQ ID NO: 231848 - DNA, 82 bp, Homo sapiens
gagaaaggaagcaggcccgttggaagtggttgtgacgagattgaggagctgcgggccgagatgctggagatgcgggacgtct

SEQ ID NO: 231849 - DNA, 96 bp, Homo sapiens
aatttgagaaggaggctgctgagccctggaggctgcccgaatttgtgccaataagtacatggtaaaaagttgtggcaaagatggcttccatatccg

SEQ ID NO: 231850 - DNA, 98 bp, Homo sapiens
aaaacgtggacgtgaaggaggaatggcaggacgaagatcttcccaggagacagagctactggatctcagccttgtcaaagatgccagatgtgggagac

SEQ ID NO: 231851 - DNA, 75 bp, Homo sapiens
ctactttcgagactactttcccatccaggttccgaggcctcatcctgctgctgaccttcctaatttacgcctgct

SEQ ID NO: 231852 - DNA, 75 bp, Homo sapiens
tgcagttgaaggagtataacacaggtgtggagccggagccttttgaagttggagaccacctgactgaggctagtg

SEQ ID NO: 231853 - DNA, 74 bp, Homo sapiens
tcggggaggcaagatgatccaccagcggttccatcctacacttggaaagaaatcgtggtgcttggagtaagtct

SEQ ID NO: 231854 - DNA, 98 bp, Homo sapiens
taggggttcggccccctgcctctgggcaggagccagcaccgctctttgaccttgccatgcttgccttagatagtccagagagtggctggacagaggaa

SEQ ID NO: 231855 - DNA, 100 bp, Homo sapiens
acactgcacagcagaatttatataggaatgtgatgttagagaactacagaaacctggccttcctgggcatttcagaagatggacacaaagaagaaggagg

SEQ ID NO: 231856 - DNA, 100 bp, Homo sapiens
tgaagaagcatcttttagggatcagcctgtgttttttaggtatctagaagagcagaagacagagaatggaaaagataaggaacagaaacaaacaaatacc

SEQ ID NO: 231857 - DNA, 75 bp, Homo sapiens
gcagcagcaggactcagaggcgagagtggccccagccgggccagaagcagattgagaggatccagaatccagatc

SEQ ID NO: 231858 - DNA, 100 bp, Homo sapiens
ggttacttcttcctcaacaccagcaccgcagatgttgtcaaggtggcctaccaggaggccaggggtgtcgccatggagcccagcagccggggccgcccta

SEQ ID NO: 231859 - DNA, 51 bp, Homo sapiens
tgttcctgtggaccccagtccagagactgggtgtgttgctgtattgcccag

SEQ ID NO: 231860 - DNA, 75 bp, Homo sapiens
taggggcagcgagcaagacagcaagcaggttcgtgctggccgtgggcagcgccgtctttgatgccatgttcaacg

SEQ ID NO: 231861 - DNA, 83 bp, Homo sapiens
cttggcaaaatcgagcgggccattgccacacccactcgcccgggtctatggccacggtcggagagtggtcctgtgtgcgctgc

SEQ ID NO: 231862 - DNA, 75 bp, Homo sapiens
ggcctgtaccatcgcagccacggccagcgtggtcaaggagaagctggctggatatgatgatacatacgcagaaca

SEQ ID NO: 231863 - DNA, 75 bp, Homo sapiens
cacgcctgaaaggcgactctcctctaaagccaattcaaatactttcaaatccactgtctacatacaatcagcaac

SEQ ID NO: 231864 - DNA, 97 bp, Homo sapiens
gagcaacagctttcagcaacacagaaattcaggaagctgctttcaaaagggaaaccggctcctgaaatcaggtgtcccattccagccttccctgact

SEQ ID NO: 231865 - DNA, 80 bp, Homo sapiens
cgaagagttggatactcagcgtcgctggcagccgctgtacttgtctcttgcatggcaccaagaatgttaccaattcaagc

SEQ ID NO: 231866 - DNA, 90 bp, Homo sapiens
agtgtccgatagatggtgcagtggcaaatgaaatggcgtaatcgaggtgtcctcatgacttctcttgtggaccatgtccgtgatcttttt

SEQ ID NO: 231867 - DNA, 74 bp, Homo sapiens
caaaggctagggcgggtgcttcgagctaaaaaaggactcatctgatgatgtgagaagagttcagaggagggaga

SEQ ID NO: 231868 - DNA, 75 bp, Homo sapiens
agtgatgacaaaccctttctatgtactgcgcctggatgtggccagatctttaagcaagcgacaatgaaggcattg

SEQ ID NO: 231869 - DNA, 89 bp, Homo sapiens
cggccgtggacatcggggcagctgacctcgcccacgcccagcagcagcagcaacagagttatgcccagccaagtcttcagtatatccag

SEQ ID NO: 231870 - DNA, 74 bp, Homo sapiens
tttcgacatcggtcatctctggaatttttccttacaaacagatatgaccagaaggcaattggaatatgaagcaa

SEQ ID NO: 231871 - DNA, 50 bp, Homo sapiens
cagacgccgacgtcgaccagcagagactgtctttcccagggaactccgat

SEQ ID NO: 231872 - DNA, 75 bp, Homo sapiens
gagcgcgagcgagcgaggcctgggccttgcctgagcacttctggggcccagtagccaactggggtcttcccattg

SEQ ID NO: 231873 - DNA, 89 bp, Homo sapiens
ccctcctctgttgtagctgttcctctggcaatacaaactttctgctttcagtacaattttgtgatgctggccctgtcctcctcattcct

SEQ ID NO: 231874 - DNA, 96 bp, Homo sapiens
ccccgcggagctccccccgctgccccctaccaccccttcactgcatttattgaaatggcaaccacagaggatgctcaggccgcagtggattattac

SEQ ID NO: 231875 - DNA, 82 bp, Homo sapiens
gtggacagtctcagggacaccatgtagagaattttggtctcgattcagtccctgaagaggaaggagaaggaatatgagcatg

SEQ ID NO: 231876 - DNA, 102 bp, Homo sapiens
gaaaaccgtgtatgagggattcatctcggctcagttgttgacctcctgtactggagagacattaagaagactggagtggtgtttggtgccagcctattcctg

SEQ ID NO: 231877 - DNA, 90 bp, Homo sapiens
cttggcaggagtagctgatcaaaccaaggatggggccatcgatgcacccctcggagctaatagcggagatgagaaacagtgggtttgcac

SEQ ID NO: 231878 - DNA, 75 bp, Homo sapiens
agctgcctcagttcttagcgcaggtgtcagctgtgatgcatgtttaaaaggaaattttcgaggtcgcagatataa

SEQ ID NO: 231879 - DNA, 73 bp, Homo sapiens
tttgatgttagaagccatccagggagcccgccataggaaaaggatacagagtagagtttcatgaacctgaaac

SEQ ID NO: 231880 - DNA, 100 bp, Homo sapiens
aggcatatgttcgactggctcctgattacgatgctttggatgttgccaacaaagtgatttgaagatattaaagctagaaattggaactagaaaatcaaaa

SEQ ID NO: 231881 - DNA, 89 bp, Homo sapiens
ctcaagatggcggacaaaacgccaggcggatctcagaaggccagttcaaagtattagccggcactgttatcacaaccatcactcgcgat

SEQ ID NO: 231882 - DNA, 100 bp, Homo sapiens
cacgacgatgaggtgacagtcacggtctgtgcagacttttgcagacaaatcaaaacaagaagctctgaagaatgacctggtggaggctttgaagagaaag

SEQ ID NO: 231883 - DNA, 82 bp, Homo sapiens
aaggtaattttaaagccaaaaatgttggataagaaaaaacctacacctataataccagaggattacttccttaggatagatt

SEQ ID NO: 231884 - DNA, 75 bp, Homo sapiens
aggctgaggtggcagcggcaggagagtccggccgcgacaggacgattttaggtgatgggcaagtcagaaagtcag

SEQ ID NO: 231885 - DNA, 90 bp, Homo sapiens
ctgggatttcggagaggccgcaggagtcatttcgtgaaatgacaatggatgctctgttggctcgattgaaacttctgaatccagatgacc

SEQ ID NO: 231886 - DNA, 75 bp, Homo sapiens
gagagggcctgggagcttgctgcagcttcaggttgagaacttgttgcttagtaaccaagggaccattaagctgtg

SEQ ID NO: 231887 - DNA, 89 bp, Homo sapiens
cgttacggccatcacggcggccgcagtggcgtcctggagccctcctcagatgcctttgaagatgagaaacccccaaagaagagccttct

SEQ ID NO: 231888 - DNA, 100 bp, Homo sapiens
gcagtggtcgcttcttctccttggagaccccaaccaaagagctggggccctgtggaggagaggcgtgcggcccggacctgagcggcccagccccagcctc

SEQ ID NO: 231889 - DNA, 74 bp, Homo sapiens
ggtggcggcggcggagactgcgggcccgtagctgggctctgcgaggtgcaagaattgtttatccgtgattatgg

SEQ ID NO: 231890 - DNA, 100 bp, Homo sapiens
tgccaacttccccgtgcgtgtgccctttgaggccttcctggccagtttggcaatgaggagcagcagctggcgtgggccaagcgggagagcgagaaggcgg

SEQ ID NO: 231891 - DNA, 117 bp, Homo sapiens
agatgttgatggagaagctctaagtacactcgtcttgaatagatatttagcttcctgtggtatactgatgagcagaactcttccactacatacctcaattttgcctaaggagatatg

SEQ ID NO: 231892 - DNA, 95 bp, Homo sapiens
ggggagtgtcgcagccctgaagttgcctcttctggtgtcaaagcttttggacattcctgggctgatcgtcgtgtgttgccacccattcatgtcaa

SEQ ID NO: 231893 - DNA, 75 bp, Homo sapiens
gcgttacgggcggtacggaggaggaagatgttggatccagggttgatgacgtgttccaagcaagctatgtttctt

SEQ ID NO: 231894 - DNA, 74 bp, Homo sapiens
gccgcctggctccccatactagtcgccggatgaagtcattgctgtttccgaaaaggtgattgtgaagcttgaag

SEQ ID NO: 231895 - DNA, 83 bp, Homo sapiens
cacaagaactgaaaatgcttcgatacagtggaaggtcttgatgcccaggttgtaaatggttacatgattcatgatcaggaaag

SEQ ID NO: 231896 - DNA, 75 bp, Homo sapiens
gccccagcgggtgaggctgcaacacgaggctgccgttcagcacccgtcgagcgggtctgggaggacagctcatga

SEQ ID NO: 231897 - DNA, 95 bp, Homo sapiens
agagagagaggtggacagatctgagagatactgaggctgcaagatcaaggccctgcgggccaagacaaacacctacatcaagaccccagtgcggg

SEQ ID NO: 231898 - DNA, 113 bp, Homo sapiens
aagatctgctgcaaggaactgatagcttatggttctccattgtgatgaaagcacatggtacagaaaagagtctcatcgtggaaggcaagagggaaaagaaaaaagtagagagg

SEQ ID NO: 231899 - DNA, 97 bp, Homo sapiens
gttgaaacgctgcctggaaaggaagtaccaggacttgcacaggtgccacttcggataaaccctttggactcctaactccaatcaggtgtctgctttg

SEQ ID NO: 231900 - DNA, 100 bp, Homo sapiens
gaagaggaggaggaggaagaagaggaggaggaggaagaagattatgaggtggctggtttgcgatgttcaagattatctaagaagatttgaaagtatacca

SEQ ID NO: 231901 - DNA, 82 bp, Homo sapiens
ccacttggagaaccaggaaaacctttcaatgaactgtgggattatgaaggaagagaggatggtgatgcaccggttacaaaag

SEQ ID NO: 231902 - DNA, 75 bp, Homo sapiens
acttttcggattgattcagcattaccagcaatggttgttttgaacaacctggaaccaaatacaacttatgaaatc

SEQ ID NO: 231903 - DNA, 75 bp, Homo sapiens
gggggtcatcacagagaaggagacccaggtgtttaattggttggggtcagataagaagaggagtgacaatcaagc

SEQ ID NO: 231904 - DNA, 100 bp, Homo sapiens
gagaggaactgcttttgagtgagatggtcccagaggcctggaggagcggactggtagacgttacatccaagaggaaataatccaggcaaggaagcacaag

SEQ ID NO: 231905 - DNA, 80 bp, Homo sapiens
cagcatgtccttctctgaatgatgaatacttttactactgtgacaacattaacggggcactatgaacgaagaggagcagt

SEQ ID NO: 231906 - DNA, 75 bp, Homo sapiens
cgcgtcccctgcacagcacagaggggcagccggagagcctgggaaagtctcggaagggtgctgacctggaccggg

SEQ ID NO: 231907 - DNA, 82 bp, Homo sapiens
ccaccgagaaagtcaactgcctggataaggattttttatcaagcagaaatgcatcgaacaacgagaatcaagatcactgagc

SEQ ID NO: 231908 - DNA, 75 bp, Homo sapiens
agcttttgttggggcgacagctgctcctggctacatagctccaggtgctggagaatctggtaaaagcaccattgt

SEQ ID NO: 231909 - DNA, 87 bp, Homo sapiens
aatttccatgtcaacatagtcctggtctgggtcactacaatatcaccagctcgcccaccaagctgggtggagacctggcgggagtga

SEQ ID NO: 231910 - DNA, 83 bp, Homo sapiens
acgtcagcctctaccagcctcagctggccaccaggcactataagaccgacttcgacaagaataagatctggtatgagcaccgg

SEQ ID NO: 231911 - DNA, 100 bp, Homo sapiens
ctccagtcgtagcaagagtctcgaccactgaatggaagaaaaggacttttaaccaccattttgtgacttacagaaaggtctcggcgcggaagatggccgg

SEQ ID NO: 231912 - DNA, 98 bp, Homo sapiens
tccacgccgagggcaggacgaacttcaccaggtccagcctgatgagtgaagaggctaagcgaggagcacccaacccttggctctttgaggagccagag

SEQ ID NO: 231913 - DNA, 80 bp, Homo sapiens
aaatgtcagctacaggccagcttatgaccagtcttctcaagtcttaggattgcagcaacacgctcggctgcccaaaccca

SEQ ID NO: 231914 - DNA, 83 bp, Homo sapiens
ctcatcgccaccatctttgtctttgcagtggtcatctatttccagccaatggagatcttcgtggatgatgagacgaagttgac

SEQ ID NO: 231915 - DNA, 100 bp, Homo sapiens
cacctccttccttcataatgagctacaaactaccaatggaggatcttaaagagaccagttagcagatgcttgatcctgataacttaagtgactctctctt

SEQ ID NO: 231916 - DNA, 51 bp, Homo sapiens
ctcaccggggagtctgatacacaggttattaacacggggatcaaagtctgg

SEQ ID NO: 231917 - DNA, 74 bp, Homo sapiens
cagctgcctcagttcttagcgcagggtgatttcacctggaacagcatgtcaggccgcagtgtacggctgaggtc

SEQ ID NO: 231918 - DNA, 101 bp, Homo sapiens
cctccttcgccgccgcgcacaaccgcacgtgcagcctacttctgcttcctcctggccgctctgggtgtgacagctggtgcccatcgcttgtggagccacag

SEQ ID NO: 231919 - DNA, 116 bp, Homo sapiens
atcacagctacatatttgttattggggagaaaatcttcagagtgaatgagagccacaagtctgaatttatagagctgaggaagtggctgaaagctaggaagtttcaagattcaaac

SEQ ID NO: 231920 - DNA, 87 bp, Homo sapiens
agtcgccagcaagtccatggagaacacgcctcctgcccgaaggccacctgaacctaacggctccctgcaacgctgcctgcagctgcc

SEQ ID NO: 231921 - DNA, 75 bp, Homo sapiens
accagcggaaccgggagtggaacattgtagagtctgagaaggcccttgtgtggaaattgatgacttgaaaaaaat

SEQ ID NO: 231922 - DNA, 105 bp, Homo sapiens
atcgggatttacgtggagatcaagcgcagcgatggctgtattcatcaccaaagaaaaaacttacaccaatgcagaaatcggttagtccattagtttggtgcaggc

SEQ ID NO: 231923 - DNA, 87 bp, Homo sapiens
tccggactgcacttgcgaagggagcttggggaggaatacgcctgcctcacaccttgcgatgcgccaacatcaccatcattgagcacc

SEQ ID NO: 231924 - DNA, 90 bp, Homo sapiens
ctgggacgcggagtcctgaagccggcggacggttttcgtacgggcggccgtgcgcgaggcgagagctgagctcaatgtgcagcaatggat

SEQ ID NO: 231925 - DNA, 82 bp, Homo sapiens
gatatgttgtgaaagaagcagtagcagtgaatctacagggacgccatcgaatccgttcttctcaccactaaatccaatacga

SEQ ID NO: 231926 - DNA, 75 bp, Homo sapiens
ccctggtacttctagtctaaaacaggatttgactctactaatccaggtgtggtggctcacgtctgtaatcccagc

SEQ ID NO: 231927 - DNA, 96 bp, Homo sapiens
ctgctctgctctaacaacatttgagtggaagctggacacactatgtgacttgtatgaaaccctgaccatcacccaggcagtcatcttcatcaacac

SEQ ID NO: 231928 - DNA, 97 bp, Homo sapiens
cgagtattttcgagatctttttattgagaaaggagctgtttccagtcatgaggctgtggtggatctttctgatataaaccacagtacttcaggatcc

SEQ ID NO: 231929 - DNA, 87 bp, Homo sapiens
gaacagcagagacacagagggcagtcatgaggtccgaataaatactggaaagaataccactttaaaattcagtgaaaagaaagaaga

SEQ ID NO: 231930 - DNA, 100 bp, Homo sapiens
cagacagccctatgctgtcagtgaattagcagccaggtgattggtgaaaacactaaacaaccctgagcccagggccaacccctacggaacaccactactt

SEQ ID NO: 231931 - DNA, 75 bp, Homo sapiens
aaccagctaaagtttgctcgaagccttcagtccgttgcagaggttgatctttgctgggaaacagctggaagatgg

SEQ ID NO: 231932 - DNA, 100 bp, Homo sapiens
aaacagtatgaaataaacgccactcctaaaggctggtcctgccactgggacaggtcctaaatgcccagaaggctggatatggtgccgctgtagtacacaa

SEQ ID NO: 231933 - DNA, 100 bp, Homo sapiens
cttctgggtccatcaccaaagagcagatgccaaatctgttatctggaagtattttggatgtgtatagcggtgaacaaggaatttcaccaattaacatggg

SEQ ID NO: 231934 - DNA, 75 bp, Homo sapiens
atggaaatgaagtataataccaagaaagccccacttggccaaggcagaggcttcctcaggagaccatcccactga

SEQ ID NO: 231935 - DNA, 74 bp, Homo sapiens
ttcaatactacctttatttccaccatagctgactttggtttctgtgcccagatcacccctgagcagagcaaacg

SEQ ID NO: 231936 - DNA, 100 bp, Homo sapiens
agacaacttcctcaccagcaccttacagtgtgatgtgctggtggaagagtttgaggaggtgatcgaggactggtacaggaaccaccaggaggaagacctg

SEQ ID NO: 231937 - DNA, 75 bp, Homo sapiens
acctggaacttcatcatcatctacttcacaggaattgccatttggcaccatgccggtggaaaggatgcgcatgcg

SEQ ID NO: 231938 - DNA, 85 bp, Homo sapiens
gaggccagtatggcttagtggctgcgtgtgcagctggagggcaggttggatggcaagcatgtggtgtttggcaaagtgaaagaag

SEQ ID NO: 231939 - DNA, 90 bp, Homo sapiens
gggacgacagcgtcgttattggggtgtaaagggtcaagtttttgatcagaatggaaatccattacccaatgtaattgtggaagtccaaga

SEQ ID NO: 231940 - DNA, 100 bp, Homo sapiens
aacatcgccccatccacagacattgagaagatctttgcagtggccatcatgatgattggctgcccgatacttctccccacaagctcgccgtcgattccac

SEQ ID NO: 231941 - DNA, 131 bp, Homo sapiens
ccgagatgtctcgctccgtggccttagctgtgctcgcgctactctctctttctggcctggaggctatccagcggaaggtggccatccagaaggaggacttgcagaagtaccacaacagggacacctggttc

SEQ ID NO: 231942 - DNA, 87 bp, Homo sapiens
tggagcgaccccttgttctttggtggcgctgacaacagcagttctgtagagagtttaaatatgaaggaatggcaggacgggctaagg

SEQ ID NO: 231943 - DNA, 101 bp, Homo sapiens
ccgagagcgtgaccgagagcgcgaatatcgtcatcgttagaaggatcttgatgctggtgtaagtgaacattcaggtgattggttggatcaggattcagttt

SEQ ID NO: 231944 - DNA, 90 bp, Homo sapiens
gtgatactgtgacaggggactgtgtctgcagtgccggctactgggggcccaggtcaacgtggaggtaccaggccaccatgctcagtctca

SEQ ID NO: 231945 - DNA, 96 bp, Homo sapiens
aagatctcatgtccatcatggaaatgcagaaatctcctttacagacaataggtgaagaacaaacccagaatccctacactgaactgctagtactga

SEQ ID NO: 231946 - DNA, 131 bp, Homo sapiens
tgttgcaacttttttcgaaagctgggtttcccgggagatcccaggcggtgacagagtggagccatggctagaggtgagaagccctaccactgcaactgggacggctgcggctggaagtttgcgcgctcaga

SEQ ID NO: 231947 - DNA, 82 bp, Homo sapiens
gcttggcccgcctaaggcactgggtgtacctgctttgcttctctgcaggtcagcccaaggctgccccctcggtcactctgtt

SEQ ID NO: 231948 - DNA, 79 bp, Homo sapiens
caagaagaagaagttgcgaaggatccccaacggggaggccaacgtgaagaatttgatgaaggccggaacaactttgaag

SEQ ID NO: 231949 - DNA, 73 bp, Homo sapiens
aaaaatgtctctctatccatctctcgaagacttgaagcacctgctgtccccagatgcccctgcagaagctgct

SEQ ID NO: 231950 - DNA, 98 bp, Homo sapiens
tgaggcgcaatgatgagaggatgtggtggtctactctgatgtcaatcttgagggctagtttctgccactgccttctacaaagcacaacctgtaattca

SEQ ID NO: 231951 - DNA, 71 bp, Homo sapiens
cgcagcctctcgggatgacaccactctgaatgcactgaacacactgccactgcagagccccgccatggaag

SEQ ID NO: 231952 - DNA, 119 bp, Homo sapiens
ttctgctccctctaagtaccaccgaactcgatctgggggagccagggatgaacgatatcgatcagctaaagatcatcaccctggtaaaactttgccagagaacccagcaggattcacca

SEQ ID NO: 231953 - DNA, 106 bp, Homo sapiens
ccagcggtagccctccttgcgcctccgattcccaggagcaatttacagcaatgagggatttatacatgaaaaatggacaaggatttgcattagtttattccatcac

SEQ ID NO: 231954 - DNA, 99 bp, Homo sapiens
ggtggctccagcatgtatcagccgaggtggagctgcggggccctggcatgaaagatgacgtccggttgtttgccttcgtgcgcttcaccaccggggatg

SEQ ID NO: 231955 - DNA, 100 bp, Homo sapiens
gcagctccccctgccgagggcatgtgctgcggaaggccaaggattcccctattccaaatctgaccctctcccaggacatggaaagaatggcttggaccag

SEQ ID NO: 231956 - DNA, 100 bp, Homo sapiens
cgggttccaaggccaccgtgagggggaccatccatccaggtgtgagcgccactttgaagggcatccaacccgcggctatccatgtggaatcgctttcagt

SEQ ID NO: 231957 - DNA, 50 bp, Homo sapiens
ctgggacacctcactcaccagcagagctccttaataagcatttatagtca

SEQ ID NO: 231958 - DNA, 82 bp, Homo sapiens
aaaagaggatgggagagaagaaggcaaagaggatccagagaaggagctagagccggtgcaggccacgcagaacaagacaggg

SEQ ID NO: 231959 - DNA, 90 bp, Homo sapiens
ccggggcgctagcgttcgccttcagccaccatggggaatgggatgaacaagatatgaggccccaggattcctggcgaggtcctcctcccc

SEQ ID NO: 231960 - DNA, 71 bp, Homo sapiens
tgcccagtgccgcttcccccctggagcagaaccctagcaagcatggttacattggcgaatttgaaatcatt

SEQ ID NO: 231961 - DNA, 50 bp, Homo sapiens
cactgtaatgtgcagactccaagcacttttccagccattaactccaggct

SEQ ID NO: 231962 - DNA, 75 bp, Homo sapiens
tgtcccagatatagccgttggtacaaaggattatgatgttgatgaagaggacatgatgaatcaggtgttgcagcg

SEQ ID NO: 231963 - DNA, 74 bp, Homo sapiens
caggccggagcctggtaccgtcgaggtatccaagcccaccaatgggatctgtctcagcacccaacctgcctaca

SEQ ID NO: 231964 - DNA, 100 bp, Homo sapiens
gtcagagcgagcttcggagaagcagtggtgggttccatgtgatggtggagtaggaggcaggtctccgcgtcctattttgtaacggattatgatccaacca

SEQ ID NO: 231965 - DNA, 75 bp, Homo sapiens
tgtaatccggatccaggatggtactggtctctaattaacagaagatggcaaagcccagccacagcagctatgtcc

SEQ ID NO: 231966 - DNA, 102 bp, Homo sapiens
tcgggggccgaactggccctggactacctctgcaggtacatgtcccagagcaagcacacggaggcccgggagctcatgtactcgggagccctgctcttcttc

SEQ ID NO: 231967 - DNA, 100 bp, Homo sapiens
ttctgctaccaccgtagggacacagacccttccacatagcagttctggcttcctcgattctgcatggaaagaccatgtttgtagatttattggctgtggg

SEQ ID NO: 231968 - DNA, 100 bp, Homo sapiens
gtggttattatgacttccttgtcgaagttgaaggtgacaaccggtatattgcaaataccgtagagtgctgggattacaagcgtgagctaccacacccagc

SEQ ID NO: 231969 - DNA, 98 bp, Homo sapiens
agccgcgcagcttccgtgtttgctgcgcccgcactgcggacctgaaggagaagaaggagaaggtggaggagaaggcaagccggaaagagcgaaagaaa

SEQ ID NO: 231970 - DNA, 50 bp, Homo sapiens
gaggtcctgtacagcatcgccgagaaggcattgtttccaagtcgtacgag

SEQ ID NO: 231971 - DNA, 100 bp, Homo sapiens
ctacaaggccagagctttctggaagggggcagtggagctggccctgctacagcgctcctaccaggacctggcctcgcagatcaacctcatccttctggaa

SEQ ID NO: 231972 - DNA, 98 bp, Homo sapiens
ctgcggtcattacacatgctattggacccaggaccacccccaccttctccattactaggtttgaaaccactgcagttattagaagtgaaagcaagggg

SEQ ID NO: 231973 - DNA, 85 bp, Homo sapiens
tgtttgccacacagatcaccctgggaatcctcatctccactcagcgggcccagaattccttcgacaatcctgagtggttttatcg

SEQ ID NO: 231974 - DNA, 98 bp, Homo sapiens
agaatttcaagatatttgtgagcggtgtgttctactccctcttctgggaatgaagcctccccagcaaagcctatacctgcttgttgattctgttgatg

SEQ ID NO: 231975 - DNA, 100 bp, Homo sapiens
gggggcacgcagctgaagctcatcatgaccttccagaattacgggcaagcgctgttcaaacccatgaattcctgggcttcccgatggactcgagttttta

SEQ ID NO: 231976 - DNA, 75 bp, Homo sapiens
tggagttccccctggcccagatatgtccccaagctccttcatgaccaagtaggggtaatccagtttggcccctac

SEQ ID NO: 231977 - DNA, 98 bp, Homo sapiens
agaaattatattttccagcccgtgtctgcagtactaaggctcgtacgtctgcatcgattatcttacgtggggcaaatgatttcatgtgtgatgagatg

SEQ ID NO: 231978 - DNA, 75 bp, Homo sapiens
gaagatccagcaaatacggtttactccactgtggaaataccgaaaaaggagaagaaactgaggcctggaatttga

SEQ ID NO: 231979 - DNA, 74 bp, Homo sapiens
gacaccccgaaagccggaaaacggttggcattggaaacatttttatttgcagttattttgtctacttttactac

SEQ ID NO: 231980 - DNA, 51 bp, Homo sapiens
cgagaatccatttctctgctcatgcgcttgctcctggtaacgtttttatcc

SEQ ID NO: 231981 - DNA, 100 bp, Homo sapiens
gaaactggaaaccctatcatcaagatgggaatatctggcattacttagagcctccagtgaagctgaatgaagctctagagagatacggacttaacgctga

SEQ ID NO: 231982 - DNA, 90 bp, Homo sapiens
ctggttagtgtgctctgagggagggtccgagccagccgctgttttgccggaggagcccctcaggccggacaaaagtggctctcaatccag

SEQ ID NO: 231983 - DNA, 73 bp, Homo sapiens
agatgggagagctcacacagacagatcagaatcaagctttgcgactctgtctgggtagcactagtgttggagg

SEQ ID NO: 231984 - DNA, 83 bp, Homo sapiens
cagctgcggagcatgtcgaccccggcccggaggaggctcatgcgggatttcaagcggatcctcccaccactggaaggcccccc

SEQ ID NO: 231985 - DNA, 100 bp, Homo sapiens
gcgaaccccgggcagcccgggaaatctccaagtcagaaaggtagttgatgtcacttggcgatattcctgcaaacatgaagaggtgattgccagaagaact

SEQ ID NO: 231986 - DNA, 100 bp, Homo sapiens
atcctgataagatgcaccttgtcttacaaaacatttacaaggaatctttgtctgaagtggaagaaaaatacaagaaagccatggtttccaatgcacagtt

SEQ ID NO: 231987 - DNA, 107 bp, Homo sapiens
atcattggaaattgtgtgtccatcttggttttgagctctgctctgcctgtgatgtcgagaacactggggaaatcctcattgacgattcaatttgttgaaggccaatt

SEQ ID NO: 231988 - DNA, 50 bp, Homo sapiens
gcacagacttcctgccttcccagctcggatggagtcccctgtttccacac

SEQ ID NO: 231989 - DNA, 83 bp, Homo sapiens
ccacgagtacaagcggcagctgctcaactgcctgcacgtcgtcaccctgtacaatcgtgagaagccctaccactgcaactggg

SEQ ID NO: 231990 - DNA, 83 bp, Homo sapiens
ccgaggcaccgaggcactcagaggaggtggtgcgcgtgggcagggcgcggggacatggggcccgacatggagctgcccagcca

SEQ ID NO: 231991 - DNA, 50 bp, Homo sapiens
gtaaaatggcggacctggcgaacgaagttcgatcctttggtacagaagac

SEQ ID NO: 231992 - DNA, 138 bp, Homo sapiens
aaatgtcgctttctaacaagctgacgctggacaagctggacgttaaagggaagcgggtcgttatgaggtggtgtgcggaaggtggaaacttgatttgttgtgacttttgccataatgctttctgcaagaaatgcattc

SEQ ID NO: 231993 - DNA, 100 bp, Homo sapiens
acacctgcatctcttgctgctttacagagtgatgtgcagccagtgggccatgattatgtggaagagggttacacatcattttggaatgactgtatatcat

SEQ ID NO: 231994 - DNA, 97 bp, Homo sapiens
acctgtgtaccatgcactgatatgtgccaagagttgtaacctctgcacaacagaaagcaggaagaactattacagcccggatcacaggaagatgtga

SEQ ID NO: 231995 - DNA, 100 bp, Homo sapiens
gtttcagatttcagatactctgactccacctttacttttacctacgttggcggccccagaaggatccatcagttacacaagtgacaagaaatgttccacc

SEQ ID NO: 231996 - DNA, 100 bp, Homo sapiens
gtggccgatgaatcacccaacatgctggtgtacagaaagaaaatgtgccagaggaacttcaagaaccattttacacagatcagtatgaccaggaacacat

SEQ ID NO: 231997 - DNA, 75 bp, Homo sapiens
gcggcggtcgccccggggctccggcggcggcccgagcgggaagaagttccgcagcaagccgcagctggcgcgcta

SEQ ID NO: 231998 - DNA, 97 bp, Homo sapiens
ctcaagatggcgtgcttgttggagaccccaatccgcatgagcgtcctttcgggatgacttgtcaagctcgaacatcatatactgaagatgaagttct

SEQ ID NO: 231999 - DNA, 76 bp, Homo sapiens
gaagaagactcccccacatctgggataagttctgaacgtcgaaaagaaaagtctcgagatgcagccagatctcggc

SEQ ID NO: 232000 - DNA, 82 bp, Homo sapiens
agcaggcgctcaccatgttccctggagtaagactttgaccccgacgcaggcttcagtgattgccgcggatcagaagcctgag

SEQ ID NO: 232001 - DNA, 75 bp, Homo sapiens
gatgtctcatatgtctcaggcttccatgcagcctgccttaccgattgtgccaaggacttgaatggatgatgtcac

SEQ ID NO: 232002 - DNA, 100 bp, Homo sapiens
tgggttcatgacagacaagaagaaaatctctgccacgtccatcttctttgaatctatgccctacaaggtcttaaaattttggtagcagaaagcaaatgtg

SEQ ID NO: 232003 - DNA, 82 bp, Homo sapiens
gaacagggacagcacctcatcccctggatgggggaccacaagatcctcatcgacagatatggatcagaaactttcgaagttg

SEQ ID NO: 232004 - DNA, 75 bp, Homo sapiens
aactagggagcgtctccggctgcacagcgctcagaaactatgttccaacttcctgtcaacaatcttggcagttta

SEQ ID NO: 232005 - DNA, 74 bp, Homo sapiens
atcatgtctgcgagccaggattcccgggcatcatggtgggaggcttgaagaggaaacactctgatttggaagag

SEQ ID NO: 232006 - DNA, 96 bp, Homo sapiens
cagattcgcagtggtcgcttcttctccttgtcatctggggacctggagaatgatgagcaggcagccagtgccatctctgagctggtcagcacagcc

SEQ ID NO: 232007 - DNA, 82 bp, Homo sapiens
aaagggtgtgttactgaagtgaaatatcaagctcaggtacacgccaatttgaaagtaaacaacgtgcctcggagtgggaatt

SEQ ID NO: 232008 - DNA, 71 bp, Homo sapiens
tctgcacatcgatgctcgcggggaaccaggtgtggatgtcagcatgaatacacatcttaaagctgtgaaaa

SEQ ID NO: 232009 - DNA, 127 bp, Homo sapiens
tccaaggagaaaggcggcggtgcgtgttgctgcgagtgggacgcgcactggtcggtgccggctcaggagccggggctcttgtcaggatggtgaagctgttcatcggaaacctgccccgggaggctac

SEQ ID NO: 232010 - DNA, 90 bp, Homo sapiens
gcagaggatgctttgcagaaacttcataaatatatgcagaaagccgaccgagcaaagagatttgaatttttactgaagcagacagaactt

SEQ ID NO: 232011 - DNA, 82 bp, Homo sapiens
tccgcacctcggggacattattgcgcgtggaacggctgcttttggaagcttccttcaaaatgtctactgttcacgaaatcct

SEQ ID NO: 232012 - DNA, 100 bp, Homo sapiens
cgaagcctgacccgactgcctctctcagtgaggtgctggagaatctggtaaaagcaccattgtgaagcagatgaggatcctgcatgttaatgggtttaat

SEQ ID NO: 232013 - DNA, 75 bp, Homo sapiens
gcctcttccagtgggcagggtcagcaggcccaaacccccacagctgtcgacttgctggagaagatgcttgtattg

SEQ ID NO: 232014 - DNA, 100 bp, Homo sapiens
gcctcaaatcgtcgtagtgggaacgcagattatggtgacaagctgaacatggagctgagtgagaaatacaagctggacaaagagagctacccagtcttct

SEQ ID NO: 232015 - DNA, 74 bp, Homo sapiens
cgaagactgcatttcaacttcaagaatggagaacacaaagttatacctcaatttacttgaaatggaatatagtg

SEQ ID NO: 232016 - DNA, 83 bp, Homo sapiens
cagctggagctgagcaaagtgcgtgaggagtttaaggagctgaaagcgcgtgttgctaacaaccacaagcagaatttgatgac

SEQ ID NO: 232017 - DNA, 82 bp, Homo sapiens
cgctgcccgcctgccctgaggagtccccgctgcttggtcaaaatgcagatcttcgtgaaaacccttaccggcaagaccatca

SEQ ID NO: 232018 - DNA, 76 bp, Homo sapiens
aatgacatccgagcgaaagagaaagagttaattggccttggtcctcacagctccaaaaagaaacaggatctcgata

SEQ ID NO: 232019 - DNA, 100 bp, Homo sapiens
gcgagaggtgcggcgaaggaggcagaggcacttatgcttgtcagtactatactggcaattgctggagaagattttgcaattgttgcttctgatactcgat

SEQ ID NO: 232020 - DNA, 100 bp, Homo sapiens
gcagagaagccttcctggaaaagatagcatagaagccaatgtggaaaatgcagaggtgcacgttcagcaagcaaatcagcagctgtcaagggcagcagat

SEQ ID NO: 232021 - DNA, 75 bp, Homo sapiens
ccgaagtccgtcgtgggcctggatcaagtcttccataccagggaccaggccaaaaccagactgccactgccccta

SEQ ID NO: 232022 - DNA, 82 bp, Homo sapiens
ggaaggagcatcccaggacctaccagaatctgattgctcgctgtaagcagctcatctgtgaccccagctacgtaaaagatcg

SEQ ID NO: 232023 - DNA, 100 bp, Homo sapiens
gggccacctcaaggcccacctgagccgcgtctaccccgagcgtccggttatcaatactctggctgaccatcatcatcgtgggactgactttggtggaagt

SEQ ID NO: 232024 - DNA, 100 bp, Homo sapiens
agagagcccaacgcctggtgctcaagactttctccgaggaggagatgaccgccgggttctgctatggcacatggaacaagccatccactccagggtcaag

SEQ ID NO: 232025 - DNA, 74 bp, Homo sapiens
ctactcttcgttttcctttgaaaggccttttgccatatgataagggactatgttcggagtgaactggagtttgc

SEQ ID NO: 232026 - DNA, 74 bp, Homo sapiens
agcgaatcaagcgggagttcaaggaggtgctgaagagcgaggagctgccactgcagagccccgccatggaagac

SEQ ID NO: 232027 - DNA, 50 bp, Homo sapiens
gagcagagtggaccaccccatgaacctcgctcaccatggatgatgatatc

SEQ ID NO: 232028 - DNA, 100 bp, Homo sapiens
ctttagttcgtctttcctagagaggaaagaccacagcaagattctttcattcgtctcctcctagcctgggggaccaggctcgaactgaccctggacatca

SEQ ID NO: 232029 - DNA, 100 bp, Homo sapiens
taaaaatgcagatcatttactgcacctaaagacaaagtcaagttcatccgagaagtaacaccatatatcaagaagccatcattagtatcagatctgccgt

SEQ ID NO: 232030 - DNA, 90 bp, Homo sapiens
gccagaaggactctgagcccctgggaccgcctggctagccctcaccctggcgctggccttcctcctgctgatcagcactgcagcaaacct

SEQ ID NO: 232031 - DNA, 75 bp, Homo sapiens
aggaggtcattctgccctttcttgggctgtgttcacgagtcactcaagggaaaggattaatgccagatggtacca

SEQ ID NO: 232032 - DNA, 59 bp, Homo sapiens
caatgagaagactgatcaatctgagtggcagaatttagtgacatttggaagcttttcaa

SEQ ID NO: 232033 - DNA, 100 bp, Homo sapiens
aggtgctggccatttcccacaacagaagaaaatgatcaatgcccagatctcgacatggcaggagctgaggcagctgcaggagcagatccggagcctggag

SEQ ID NO: 232034 - DNA, 99 bp, Homo sapiens
actgctcgcgtgacgaccgcattcgtggcaggtctgccatcatggatgttctcgcagaagcaaatggcacctttgccttaaaccttttgaaaacgctgg

SEQ ID NO: 232035 - DNA, 80 bp, Homo sapiens
tgacagcccaatcacgatgaagaggaggcggggagaccgtcagccatgtcatctgagcctcccccaccaccacagccccc

SEQ ID NO: 232036 - DNA, 99 bp, Homo sapiens
catccccccaaaagttgtcaggttgaaaatggaagagtaattgcctgctttgattccctaaaggatcttcagcctgttaaacaagaaaacgaaaaaccc

SEQ ID NO: 232037 - DNA, 100 bp, Homo sapiens
actgatcagacgaactacgaacccctggacgggagagtctgccggcggagaatataagtgagggccccaaggctgttgcagctcctcgacctgatcggtt

SEQ ID NO: 232038 - DNA, 100 bp, Homo sapiens
gtggccatgaactcacccgtggaccctggcgctaggcaggcgttgaggaagaagccacccgagcggactcccgagacacgaatgcagagtttgagtccag

SEQ ID NO: 232039 - DNA, 100 bp, Homo sapiens
ggagagcggtgctgaggctacgcgggctggagactcagggatgctcacaactgtattcctgagctggacagtgagacagccatgttttctgtctacgatg

SEQ ID NO: 232040 - DNA, 95 bp, Homo sapiens
atgtggtggataagagctgtcctagaggcatcatcagagtactgcagcgaggcaagaaacaacagattgaaaatggtagtggagcagaagataat

SEQ ID NO: 232041 - DNA, 125 bp, Homo sapiens
cttccttcgagtctgtttatccgttgcagcctcccttccccacgacggggcgcctctgcaactcacagaatcaaggccagaggtgtgaacaaggtgtcagctctgaagggaaggtttttctaagg

SEQ ID NO: 232042 - DNA, 100 bp, Homo sapiens
gcacagcaaacccgccgggatcaaagtgtaccagtcggcagcatggccgtggtccttcagcatatctctgtgctgcagacaacacaccttcctgatggag

SEQ ID NO: 232043 - DNA, 75 bp, Homo sapiens
ggcaagcgctgttcaaacccatgaacagcaatgcagagtccctggacaggctcctgccacctgtgggcactgggc

SEQ ID NO: 232044 - DNA, 100 bp, Homo sapiens
aggaatctcccaggcggtatttgcacgtgtggcttttaacagaactcagatccatccttttacaatccctgctattattcgtccattcagcgtattgaac

SEQ ID NO: 232045 - DNA, 50 bp, Homo sapiens
ggaggaggaagaagaaggtgatggttatgaacagtatcagagattgcttc

SEQ ID NO: 232046 - DNA, 100 bp, Homo sapiens
ccattgaagaaatcattgtacagaatggaaaagtaattggtgtaaaatctgaaggagaaataaagcaacagaagcctccagcgactaagttaaactttcc

SEQ ID NO: 232047 - DNA, 100 bp, Homo sapiens
caaaaagagatgccaggcagatttataaccctcccagtgggaaatatagcagcaatttgggcaactttaattatgttgtcacaggtagtactgatggaat

SEQ ID NO: 232048 - DNA, 97 bp, Homo sapiens
ggtggaggggaggattttgaggacacttgtggagagctcgaattccagaatgatgaaattgtgtaatgttgttaatggaacgattggcaaacagatg

SEQ ID NO: 232049 - DNA, 100 bp, Homo sapiens
tacagttcattttttgcttggtttggaaaaatttcattagagatcagcatctcatggaatacttccgggacagaagaaatatttgttcaaagttccatta

SEQ ID NO: 232050 - DNA, 82 bp, Homo sapiens
tggactcatagtcactgccagaaagggaagatcagttttcctgccatccaggctgctccctccttcagcaactcattcccac

SEQ ID NO: 232051 - DNA, 83 bp, Homo sapiens
aacggccagacgccgacgtcgaccagcagagactggtgccgtgagcgatgtggagatgcaggaacactatgatgagttttttg

SEQ ID NO: 232052 - DNA, 74 bp, Homo sapiens
agttggaagcagccgatccagcctgcggagcctgtggggcagattcatggaaacagctattctcataaagtgga

SEQ ID NO: 232053 - DNA, 75 bp, Homo sapiens
gtgagagacaaattgcttgttaaaggggatgccaacagacagatcagcgacctcaaatttaaacttgcaaaatct

SEQ ID NO: 232054 - DNA, 74 bp, Homo sapiens
acatttgagactcagtcactcaaggctgcgctgaacatcttaaagttgctgtctgagttggaccaacaaagtac

SEQ ID NO: 232055 - DNA, 48 bp, Homo sapiens
atccggcccagacatgactatcaaggaaggatcgagatcgagaccggg

SEQ ID NO: 232056 - DNA, 100 bp, Homo sapiens
aaagtgccagcagattcagtgtcatgtgaggacgtgcttcctgcttcatagataagaggttaattaccatgctcagcattaccatctcactccatttaca

SEQ ID NO: 232057 - DNA, 50 bp, Homo sapiens
aaccatcaagtgaggaaagtgatctagagcatgcaagcggcaagatgtcc

SEQ ID NO: 232058 - DNA, 75 bp, Homo sapiens
ctaaatacaagagtggcctattgctcgcttccccaccccagcctgggcactgctgttcgactgagaccaggatta

SEQ ID NO: 232059 - DNA, 100 bp, Homo sapiens
attcccgctctgcgggcgttctccctccaggcagttccggcgaggggggagcctcagcaggattgctgtgtgaaaaccgagctgctgggagaaggtgagg

SEQ ID NO: 232060 - DNA, 100 bp, Homo sapiens
gcgacaccatcttcgacaacatcctcaagacaagcaatcatctccttgggccaaaaccatttccactagacagattattagcaatattatatagtatcgt

SEQ ID NO: 232061 - DNA, 96 bp, Homo sapiens
gctggactgaaagaggacacgggaagaacaaagacttagactcggcagaagtttctaaaaagtactgaggagcaagagctggagaagagtatgaaa

SEQ ID NO: 232062 - DNA, 115 bp, Homo sapiens
tttatctgtgcctcggcttccccacttagtcgcagaagacttaggctgaggccccaggaagaggtgactctcctattccatctgtttcttcgggatcatcttcacctctttcagc

SEQ ID NO: 232063 - DNA, 100 bp, Homo sapiens
gggcagctggcagcactgaaagaaattcaggctgaagttcagatcaaggatctggattttgcataactggtaaaatagaagctggttatatccaaactgg

SEQ ID NO: 232064 - DNA, 83 bp, Homo sapiens
gtcgggaagaatcgtttggtctcctgccgtgcccgcaaaagctggcaggctgacagaggcggcctcaggacggaccttctggc

SEQ ID NO: 232065 - DNA, 75 bp, Homo sapiens
ctggaacatgcagagtctgcacaatgtggaggaatgaacgtaattaactttgaacatcttgatacagaaagacct

SEQ ID NO: 232066 - DNA, 107 bp, Homo sapiens
atagggacagccgcccctggtgcacacaccctcgtattctcctgcccttccccagacaatgcagatcttcgtgaagactctgactggtaagaccatcaccctcgagg

SEQ ID NO: 232067 - DNA, 100 bp, Homo sapiens
cttgtatgaagatggtaccctggatgatggtgaatacaaccccactgatgataggccttccagagtggtggacatgacaacagagtcaactgcatacagt

SEQ ID NO: 232068 - DNA, 88 bp, Homo sapiens
tttcagagaaggcctgaacttacaagaaggagaattcttattacaggatgataaagtcaaatccctcctctgtagcttgatatgttat

SEQ ID NO: 232069 - DNA, 51 bp, Homo sapiens
tcgaaaactacgggcggcgacggcttctcgaacagtccaggctctgcagac

SEQ ID NO: 232070 - DNA, 100 bp, Homo sapiens
cgctgaattgcccgtgcccccagcccattagcacctgagccagtgctttctggagctcacacctggcgctcactcatccatcacattaggctgatgtcct

SEQ ID NO: 232071 - DNA, 129 bp, Homo sapiens
ggcagcagaggtactttgtgctgagggcgcagcagctctactactacaaggatgaagaggacacgaagccccagggtatcagctttcccagcctgacgctgcctccaggctggacactgaggaactccg

SEQ ID NO: 232072 - DNA, 74 bp, Homo sapiens
agactgactaaagaccgaaatgatgatctatcttgggatcccatggctttctttactgggctctggggcccctt

SEQ ID NO: 232073 - DNA, 50 bp, Homo sapiens
agttagaaatcctacaaaggaccttgttcgatacaagaggctgttttcct

SEQ ID NO: 232074 - DNA, 100 bp, Homo sapiens
aggacgctgcgcacaacatgggcaaccacctgccgctcctgcctggttgtctgcattcaaaagagcattctattaaagctaccttaatttggcgcttatt

SEQ ID NO: 232075 - DNA, 100 bp, Homo sapiens
aggtgctgctggtgcacgctgccacgctcatctgccgcgggctggactacttcagcagcctgtggaatgcatacacagccacagctatcaacagcaccaa

SEQ ID NO: 232076 - DNA, 82 bp, Homo sapiens
cagcagaaagtcaagaagacagcggaagctggaggagtgacagaatttgcaccatcctgggattgtaaacctggaatgtatg

SEQ ID NO: 232077 - DNA, 115 bp, Homo sapiens
gccgcaccatgccgctcctaagcctgcacagccgcggcggcagcagcagtgagagcgtccagcctgcatgccgtgcggactgcacccaccagcaaggtgatcaagacccgctacc

SEQ ID NO: 232078 - DNA, 74 bp, Homo sapiens
aggagcagccaaccagcagcagccatcatggaggtttggtgcacctcgatttggaggaagtagggcagggccct

SEQ ID NO: 232079 - DNA, 90 bp, Homo sapiens
tattcgggtgggagtgacccgattttccagatttctacctggacaaggactggtactatacccacagataggagacaaattggatattat

SEQ ID NO: 232080 - DNA, 100 bp, Homo sapiens
gggcagacggtggaactgggcgagctgcggctgcgggtgcggcgggtcctggccgaagacagaagccctgggggatgcggaggaagatgaggacgatgag

SEQ ID NO: 232081 - DNA, 83 bp, Homo sapiens
ccaggagtcatcggacgccagaatctggtggaggagaagatcaagcagacccaccgtaagtacctgctgcaggagcagctaaa

SEQ ID NO: 232082 - DNA, 82 bp, Homo sapiens
cccacaagtatgtatatgaatgatggctatgcaccacctgatatcaccaactagtctccgggaccattatggcagtcaagtg

SEQ ID NO: 232083 - DNA, 100 bp, Homo sapiens
cgcacgacaggacctgccctctagcctcgtgggtctgttccccagggcccagggccctgcagcctccagccagagtggtctgcgaggaacagaagtgcga

SEQ ID NO: 232084 - DNA, 83 bp, Homo sapiens
tgcagcagcagcgcctgggccgcgcgctatggcaccttcgcctggcccaccactcccagagacctcctgccccccgaggtctg

SEQ ID NO: 232085 - DNA, 98 bp, Homo sapiens
ccagatgataggaatcccatctcatttagctcatgccttcaaaccaacagcataaaacagatgagaaaggcagggctaatttgggagtattcagtgtt

SEQ ID NO: 232086 - DNA, 97 bp, Homo sapiens
gaacaacctaccaagtgatgtggatttgtaggtgaaaatgcccagccaatcctagaaaataatattggaaaccgaatgcttcagaatatgggctgga

SEQ ID NO: 232087 - DNA, 98 bp, Homo sapiens
agacccgcacctacgacggcgacggctacaagaagcgggccgcatgcctgtgtttccgcagcgagagcgaggaggagataatgtggatgcaaatgatc

SEQ ID NO: 232088 - DNA, 97 bp, Homo sapiens
cagattacggaaagaaggaggccagtatggcttagtggctgcgtgtgcagctggagggcagattgcccccgaggaattagcacttgttcacaacttg

SEQ ID NO: 232089 - DNA, 51 bp, Homo sapiens
aggagcgcggcagggggccgggggcccagaccacaccaccccagagccaag

SEQ ID NO: 232090 - DNA, 100 bp, Homo sapiens
aaaaaaaggaagagaaaaagagagaaaaggagccagaaaagccggcaaaaccacttacagctgaaaagagtcacctaaggtcctgcgagtacaagggtcg

SEQ ID NO: 232091 - DNA, 147 bp, Homo sapiens
ggaggacttgcagaagtaccacaacagggacacctggttccagctgcagcacgtggacgctgactcggaagtgcaggtgctggagaatctggtaaaagcaccattgtgaagcagatgaggatcctgcatgttaatgggtttaatgga

SEQ ID NO: 232092 - DNA, 74 bp, Homo sapiens
cctgaagaactttgtacttcccccaccttaatgacatctcaggatgtgctaggtgtgggccggcccccacccga

SEQ ID NO: 232093 - DNA, 100 bp, Homo sapiens
acgggagctgtgatgccatcagcggcctgtgtctgtgtgaggctggctacgtgggcccgcggtgcgagcagcagctggaagaggcgccgctgacggtgaa

SEQ ID NO: 232094 - DNA, 75 bp, Homo sapiens
tgtttgatgcagttgatcactgatattccactcttaataacatagctgatccagaagaactgttcacaaaattag

SEQ ID NO: 232095 - DNA, 98 bp, Homo sapiens
ccagcgctgctctccgccgcagcttcagcacctcggcccagctgtcaaagctcgaaaaacagcagcagaggaaagaaaagaccagagctaagggacct

SEQ ID NO: 232096 - DNA, 82 bp, Homo sapiens
caaggagtactggtttgtgctgactgccgagtcactgtcctggtacaaggatgaggaggcaccatgactcctgtgaggatgc

SEQ ID NO: 232097 - DNA, 101 bp, Homo sapiens
gctgaggaggcggcggcggagatctgggatttatgaagctgggtcggagaacaacacggcagttgtagcagtagaaactcacacgatacacaaaattgaag

SEQ ID NO: 232098 - DNA, 51 bp, Homo sapiens
tcatctcctgtcctgctcatcgctctctgctggagtgcaatggcgtgatct

SEQ ID NO: 232099 - DNA, 73 bp, Homo sapiens
agataatgaatgtcgaatgtgactgactagcagcttcattttgaaggcttccgttacaagatgaggtctgtgt

SEQ ID NO: 232100 - DNA, 51 bp, Homo sapiens
cagacctggagaccaggagctcaggcagatagaagttcctgtcactttctc

SEQ ID NO: 232101 - DNA, 89 bp, Homo sapiens
agcaaatgctgaggactcagaccggtctctgcaagatggtttgagtccagccaatgacactggagccaaaaagaagaaaaagaaacaaa

SEQ ID NO: 232102 - DNA, 75 bp, Homo sapiens
cctcaaggatgtcatatctatgagtaccgcgagagcaacaaagctggccacggtagtacggcggttctcccagac

SEQ ID NO: 232103 - DNA, 83 bp, Homo sapiens
cagctgccgaggcgttcggtcctgctgttgcggccgctgccccagggctgcggggacgatgatatcatcaagttgaatcgaaa

SEQ ID NO: 232104 - DNA, 74 bp, Homo sapiens
aaaggcgaagggctaaatggaatgcacagaacctgctgtggaagcttattccactaagctcaacaaatttcctg

SEQ ID NO: 232105 - DNA, 75 bp, Homo sapiens
tgaggcggtcgcggccatgaaggtacatgtcccagagcaagcacacggaggcccgggagctcatgtactcgggag

SEQ ID NO: 232106 - DNA, 100 bp, Homo sapiens
gaagccctccttctcctggcagcaggcccagctgaccacctcctgctgcagctctactctggacacctgcagcacgtggccgaggagctccagcatctgc

SEQ ID NO: 232107 - DNA, 100 bp, Homo sapiens
aagaggaactaagatctagagtatctcctcgaggaagtacaactggctcatcttcaggtggaactaatctggttaagattcctacagaaaaaagaactcg

SEQ ID NO: 232108 - DNA, 50 bp, Homo sapiens
caacgatcggaactcggacacggtgccgtccggaatcatcctccagaaca

SEQ ID NO: 232109 - DNA, 82 bp, Homo sapiens
cggaggcagaggagctgaagactccagtatgcaactgactacaaggagctatcatggtgaacttacttcagattgtgcggga

SEQ ID NO: 232110 - DNA, 75 bp, Homo sapiens
cccatggctgatgcagcaggcatcatccgctatgcaattgggtgctggcctacatgcagttgctggaggactact

SEQ ID NO: 232111 - DNA, 98 bp, Homo sapiens
ccagcgtttccagtcaccgcttctttggacccaatgctgaaataagggtgaggacgcttgagcggaagttagaagcaaaaatgatcaaggaggaaagc

SEQ ID NO: 232112 - DNA, 97 bp, Homo sapiens
tggcaattccaacgagtgtttggacggctcaggatactgtgtgggcgtcagtgcagtcagattgtttcctctctctggccatttattgctgtcttgt

SEQ ID NO: 232113 - DNA, 90 bp, Homo sapiens
agcggacgttggacaagatcatgatcctgttcaggtttatccacgcaacacggaggtagtcacgtttcccggaaatccgaacacttgagt

SEQ ID NO: 232114 - DNA, 100 bp, Homo sapiens
tctcgtcagaggagagctgcgatagttttgactcactagagtcagggaaacagatgccgctcctacgaggactgctgtggctccaggtgctgtgtgcggg

SEQ ID NO: 232115 - DNA, 100 bp, Homo sapiens
ttcggcatactggacagattggaggactgaagctgctatcggcaatctgaaagcaaatcctgtttagatgcaggcgaaggttcctggtgacccaggctct

SEQ ID NO: 232116 - DNA, 75 bp, Homo sapiens
gaggtctaccaaaggcgacatgctcccggatacaccagagccctggaaaccaacaggtataaccatatcacagcc

SEQ ID NO: 232117 - DNA, 75 bp, Homo sapiens
cagcctgcggagcctgtggggcaggttgtccgagcggaactgcattgagattgttaataaattgattgctcagaa

SEQ ID NO: 232118 - DNA, 98 bp, Homo sapiens
aagacctgcgtcctttttcgtttttcggatgatgccttcaatactacctttatttccaccatagaaatctcctgcaaagaagctgagccatgcaatta

SEQ ID NO: 232119 - DNA, 136 bp, Homo sapiens
ggccagcctgcaagatagccatttcctcaccgacgccgacatggtcatgagcttcgtcaacctcggtcccttcaccgatgttgtcaccaccaacctaaagcttggcaacccgacagaccgaaatgtgtgttttaag

SEQ ID NO: 232120 - DNA, 75 bp, Homo sapiens
ttatcagcacgcagcagtccatattcctactgacatctatgagggctgtcaaaatgcagatcttcgtgaaaaccc

SEQ ID NO: 232121 - DNA, 82 bp, Homo sapiens
cgctagtctgaccctccgccaggcaaaaggaagaagctgaacatggttatgcctccatgttaccatacaataacaaggacag

SEQ ID NO: 232122 - DNA, 96 bp, Homo sapiens
atgatccacttccccttaatgaataaatgacatcttcgagtggtccagggaccaccgagcccaccacaagtactcagagacggatgctgaccccca

SEQ ID NO: 232123 - DNA, 90 bp, Homo sapiens
ccgagaggcaggccgggcaggggtgtcggacgcagggcgctgggccgggtttcggcttcggccacagtattgaaatggctgatggcaagt

SEQ ID NO: 232124 - DNA, 100 bp, Homo sapiens
ctggcatggtggctcaaattgatgctaactggaacttcctgagaaagcagcagctgccaacatagatgaagtgcagaagtcagatgtatcctctacaggg

SEQ ID NO: 232125 - DNA, 75 bp, Homo sapiens
tgacagaacttcacaggagaactctcctgcccttttaggagtgcaaaaagacctttccaaagtgaaactgatgag

SEQ ID NO: 232126 - DNA, 90 bp, Homo sapiens
cacacttgcactaagccttacaatacctctgtccataatagctgacatgtgtatgcaaaaggctgaagggtatgtgattggcagctgtat

SEQ ID NO: 232127 - DNA, 110 bp, Homo sapiens
gtggagagctcgaattccagaatgatgaaattgtgcacacaaaaaatccctttggacgattgaacccaatgaaggcatggttcctccagaaactgatgttcaactggcac

SEQ ID NO: 232128 - DNA, 100 bp, Homo sapiens
cacgagatcatggggcccaagaaaaagcacctggactctccagaacctgggtatcaacccagcaaacattggcttcagtaccctgactatggagtctgac

SEQ ID NO: 232129 - DNA, 50 bp, Homo sapiens
ccgcagtacaagaactggagaggaaccaaccggtgagccctctcctaaga

SEQ ID NO: 232130 - DNA, 101 bp, Homo sapiens
cgggaagaacttcttcagaattagaaaggagctgcttcccaataaggaaacagtgctggagaatctggtaaaagcaccattgtgaagcagatgaggatcct

SEQ ID NO: 232131 - DNA, 100 bp, Homo sapiens
gaagaattgcagcagggagatactatagcacgactgccttgtctatgcatatatcataaaggcttccagaggcccttattagtccttgttgacagaaaca

SEQ ID NO: 232132 - DNA, 82 bp, Homo sapiens
tccaaagcacaggaatctcactctgttaaagctggtctgttctaactgagtattaaaggtggaagaaggtccatatcttttt

SEQ ID NO: 232133 - DNA, 100 bp, Homo sapiens
gagctcaaccccatccactgccgcggccgtgggcccgaccgcggggacccgttcaagggcagcaggaaagacgagatcctgggcatcgccaacaaccgac

SEQ ID NO: 232134 - DNA, 100 bp, Homo sapiens
gctgtccacggcggacgggcgagtggagctacctgagaggagacaatgcagatcttcgtgaagactctgactggtaagaccatcaccctcgaggttgagc

SEQ ID NO: 232135 - DNA, 100 bp, Homo sapiens
atgttcgacaagaatctgcaggacttggtccgcggcatccgtaaccacaaggaggacgagacaatgcagatcttcgtgaagactctgactggtaagacca

SEQ ID NO: 232136 - DNA, 75 bp, Homo sapiens
cgaagctgccaaagccttagacaagtgtgatgaatgcagactctgctaccattttggctgtttggatcctccttt

SEQ ID NO: 232137 - DNA, 95 bp, Homo sapiens
caacattcagacccatttccagtcatgagatgaccagtgtcccagtgaaggaacgagtgaaggtgtctcagaactggagactggggcgctgccga

SEQ ID NO: 232138 - DNA, 100 bp, Homo sapiens
gaactgaaataatcatcaatctgaaaagctactcttaaacaggtgactccaggttctacctgtgctgtgtttggcctgggaggagtcggcttgtctgttg

SEQ ID NO: 232139 - DNA, 100 bp, Homo sapiens
aagacctcatctccgactctaaccccatggatcagttcttaagagcagccccggtaactggaggaatgggagccgttttgatgagaaaaatgggctggag

SEQ ID NO: 232140 - DNA, 50 bp, Homo sapiens
ttctactccaccattgactggaatatgaggaacttgaggcaagtcaccag

SEQ ID NO: 232141 - DNA, 75 bp, Homo sapiens
ggactctttcacaggctggatgaagattggggttggcgttgcaaacgctatggtcaccgaacgggtgacaaagaa

SEQ ID NO: 232142 - DNA, 75 bp, Homo sapiens
gccccgccatgaatgaggagtacgacgtgatcgtgctgggcaccggcctgacgttgcctgtgtccctggagtgtt

SEQ ID NO: 232143 - DNA, 96 bp, Homo sapiens
ttttgacagtcgtagatacaaatttttggatgatgatggatccatttctcctattgaggagtcaactcggcgtggcacaagcctaatggaagatga

SEQ ID NO: 232144 - DNA, 75 bp, Homo sapiens
caatctgaatatcaaaatagcaggtttcacagatggcagtgttacattgaacaaaggagacatcacccgggaccg

SEQ ID NO: 232145 - DNA, 100 bp, Homo sapiens
aaggctgccagagtcattcagcaggcctggaaaagtttccttgtgaaacaccattcaaagtcgtagtcaaatctctttcacctaaagagttggtccggat

SEQ ID NO: 232146 - DNA, 75 bp, Homo sapiens
gcgtgccctgggacgcacggccgccccccgccgccccctccttccgccagacttaattcagtgcacaaatgagat

SEQ ID NO: 232147 - DNA, 101 bp, Homo sapiens
gctggaggagcgaggcagctgtactaggactgggaacgggcaaatgttctgaaaaagactctgcatgggaatggcctgccttacgatgacagaaatggagg

SEQ ID NO: 232148 - DNA, 100 bp, Homo sapiens
ctactgtataagcgtgttcacgcgtgcctgaagcgggaagggtggtcagcaggcacaggagaagcgaatatggtgatggaatatgagaataggattcgag

SEQ ID NO: 232149 - DNA, 52 bp, Homo sapiens
cgggtgatttctgcatttccatctgagtagagacggggtttcaccatgttag

SEQ ID NO: 232150 - DNA, 75 bp, Homo sapiens
taactctctacatttctgaatgtctgaagaaactgcaaaagtacaaaattggacagctgtacatgatcagcaaac

SEQ ID NO: 232151 - DNA, 75 bp, Homo sapiens
cgcgtttcccgcctgagcgcaactagcggcgggtcgtgggcacctccagacccagattgatcactatgttggcat

SEQ ID NO: 232152 - DNA, 100 bp, Homo sapiens
cattatttcagttcaaaatgaactatatgcctggcaccgccagcctcatcgaggacattgacaggggagctgatcaccttctattactattggaagaaga

SEQ ID NO: 232153 - DNA, 48 bp, Homo sapiens
aacgatcaaaagccaagtggcaaacgcaattttccagattattcaaag

SEQ ID NO: 232154 - DNA, 101 bp, Homo sapiens
ctgctctcccggcaaggaaacttcgcaggctggttttaccaattcttgagattctgtatcatgttgaagaaaggaattcacaccatgtgtatatggccctt

SEQ ID NO: 232155 - DNA, 96 bp, Homo sapiens
acttccggcagctagagcagctactgactctgtttcagccatcttcgataaaggcaaaaagattgaggtggtgccttctgcctctgccctgatcat

SEQ ID NO: 232156 - DNA, 83 bp, Homo sapiens
cggaataattctttatcaaaaccagatgattcaactgagacaggggcaagtgtccgagtggtgaatcagctacttacagagat

SEQ ID NO: 232157 - DNA, 51 bp, Homo sapiens
gcatcatcaaggacttcaccaagcaggaatctatggatttcctgaaatatg

SEQ ID NO: 232158 - DNA, 100 bp, Homo sapiens
tcctgtgagtgtccagatggcttcacagaccccaactgttctagtgttgtggaggttggatttttcaagccacattcaattgataggatgaaaaaattta

SEQ ID NO: 232159 - DNA, 48 bp, Homo sapiens
tcatggtttacagaaattggtgcaggttcaggaacaagtgcatcccac

SEQ ID NO: 232160 - DNA, 74 bp, Homo sapiens
ggaaaagtcaatcgaacagactcagattaaggatattggtgctggaaaaggcaaatactatgctgtcaattttc

SEQ ID NO: 232161 - DNA, 75 bp, Homo sapiens
tgtctgtgtgagcagaggggagagcggccgccgccgctgccgcttccaccacaggaagactatgaccgtctgagg

SEQ ID NO: 232162 - DNA, 82 bp, Homo sapiens
tcgcggtgacggtggcgccgcccggggcgaggcagggccagcagcaggcgggagagtccggcagcgtcttctcttgagggag

SEQ ID NO: 232163 - DNA, 100 bp, Homo sapiens
tggatccaaagcatgtctgcaacccagccattttcagtttaaggaagaaatctctaaacgttttaaatcacatactgaccaacttgtgttgatatttgct

SEQ ID NO: 232164 - DNA, 100 bp, Homo sapiens
cctcctaaagtgctgggattacaggaggagagacttcagcatgcaaaccttcatctgttcggcttgcaccgtcattttcattccatgctgctggccttca

SEQ ID NO: 232165 - DNA, 75 bp, Homo sapiens
tgcagatccgcaggcgcaaggcttcaggcgacccgtactgggcctactctgtgccatcagacaagatcagttgat

SEQ ID NO: 232166 - DNA, 98 bp, Homo sapiens
gacagtcacgctgggaactgctgatggcactggaggaaaacaaaggccgagagaccctgatgcccacagcccccacctgattacatcaaccccagagc

SEQ ID NO: 232167 - DNA, 100 bp, Homo sapiens
caggttacttcttcctcaacaccagcaccgcagatgttgtcaaggtggcctaccaggaggccaggggtgtcgccatggactcagaattcatgattgaaga

SEQ ID NO: 232168 - DNA, 82 bp, Homo sapiens
ctcacattcggaggctggtgtccagggtctcagcgcgggggacgactcaggagtccatagaggccactgtattctattgaag

SEQ ID NO: 232169 - DNA, 101 bp, Homo sapiens
ccctgcagaccctgaagttcactaaggagtgcggcgagggaactccccaggccaccgggttctttgaagtgatggtagccgggaagttgattcactctaag

SEQ ID NO: 232170 - DNA, 96 bp, Homo sapiens
actcactggtccagaagcagctgtaggtgcccaccaagcccatgacgacgctgctggccagggtccaggcagatggctcggtgagctgcaagagga

SEQ ID NO: 232171 - DNA, 76 bp, Homo sapiens
cggtgctcgagtgcctgcaggatgtgagggagctccagaacctgggtatcaacccagcaaacattggcttcagtac

SEQ ID NO: 232172 - DNA, 100 bp, Homo sapiens
gagaggaggccgtccagcagatggcggatgccctgcagtacctgcagaaggtctctggagacatcttcagcagaatggacagcaaattatggatgaacct

SEQ ID NO: 232173 - DNA, 75 bp, Homo sapiens
ggctctgcagcggcaacccccagcggcttaagccatggccctacccgttccatcccgggctatcccagttcccca

SEQ ID NO: 232174 - DNA, 90 bp, Homo sapiens
tctagacagcgcagcccgaggagttctggaaagtgaagtcactgcttttgctgtcttggatcaagaccagaaagaaattattgataccaa

SEQ ID NO: 232175 - DNA, 101 bp, Homo sapiens
gtgccatgtgagcagagatgtgaaggagtggcccgggacaatcagggcagaatccctgagttgtcgagatgtccacagaaggaggatttggtggtactagc

SEQ ID NO: 232176 - DNA, 75 bp, Homo sapiens
aaaactcttggattctatgcatgaatgacttctgacagctctctccatggaaggaggcggcggccgcgatgagcc

SEQ ID NO: 232177 - DNA, 76 bp, Homo sapiens
ctctgccgaaggcaacgagttctggagcgccctgcttgagaaggcctatgccaactcagcctcacaggccaaagca

SEQ ID NO: 232178 - DNA, 100 bp, Homo sapiens
acgtggtggagctgtggcaggcagaagaaggggaactcctgctgcccactcaggatcaatatggaaattatgtaatccaacatgtactggagcacggtcg

SEQ ID NO: 232179 - DNA, 50 bp, Homo sapiens
ggggtaaagatcctgcctttgcaaggagttggtgtcctgcctgcgctcag

SEQ ID NO: 232180 - DNA, 100 bp, Homo sapiens
ctgctaaggaagcaaaaaaggctaagcaagcatctaaaaagactgcaatggctgctgctaaggagggcctgaggctatggcaggaggagcaggagaggaa

SEQ ID NO: 232181 - DNA, 100 bp, Homo sapiens
ccgcgagccaggccggcgcttctcctcctgatgcttttgcagaccgcggtcctgcaggggcgcttgctgcgcattgaagttgatatcgatgtggagcacg

SEQ ID NO: 232182 - DNA, 98 bp, Homo sapiens
agtgaagggtggcccaggtggggccaggctgactgaaacaatgcagatcttcgtgaagactctgactggtaagaccatcaccctcgaggttgagccca

SEQ ID NO: 232183 - DNA, 100 bp, Homo sapiens
caagcagtatggaagatgggccgttgtcagcggtcctggacccaagccagaagcctctgcaaagcttccttccagacctgcagataactatgacaacttt

SEQ ID NO: 232184 - DNA, 78 bp, Homo sapiens
ggcagccggcacctgacggcgtgaccgacccgagccggcaggtgacagcagggacatgtctcgggagatgcaggatgt

SEQ ID NO: 232185 - DNA, 95 bp, Homo sapiens
gccaccgctcccggccgccgcgctccggtacacacagccaatgttttcagttgcaccaagcttagccaccaatgcatcagcagccgcctttaatc

SEQ ID NO: 232186 - DNA, 76 bp, Homo sapiens
gcaattgacgacatggaagcctatactaagctgacaggtgctcatggaaacaacctcattgctgttctagccaaat

SEQ ID NO: 232187 - DNA, 82 bp, Homo sapiens
gaaaatcaacgacaacttgagcacagtttggtgccctggttgtcagatgttggaaagcagtaggacggaacatactcttcgt

SEQ ID NO: 232188 - DNA, 100 bp, Homo sapiens
gtgtccctgaagtgccgcaggcagctccgtgtggaggagctggagatgactggcacagcctccaggttggcgggctcatctgcgctggggttctgtgcgc

SEQ ID NO: 232189 - DNA, 82 bp, Homo sapiens
ccgggcccgagcctgctagtgcgccacggctcgggtgcgcgcggagccatggttatcatgtcggagttcagcgcggaccccg

SEQ ID NO: 232190 - DNA, 100 bp, Homo sapiens
ggtttagaacagatgtggaaaaatgtttacttcagagaaaggggttgtggaggaatggttgtcagagtttaagaactgataaatttcaaacggaagagag

SEQ ID NO: 232191 - DNA, 83 bp, Homo sapiens
cagcacccgcctgccaggcgctcgggggccgaactggccctggactacctctgcagtttgctggcctagacctgaactcttca

SEQ ID NO: 232192 - DNA, 82 bp, Homo sapiens
agagcgctgtctcttctctcagtcagccttacccctcgtgaattcaactcttacggagctcgaagaggtaatgatgctgtaa

SEQ ID NO: 232193 - DNA, 88 bp, Homo sapiens
actaggcacaaaaaataaacctgctgtggttgatacaatagtgatggcacatcatctcaaatctaatccaagtgaaaatgaagaaaag

SEQ ID NO: 232194 - DNA, 82 bp, Homo sapiens
cgaccatccccgggggttgaggttcaaatgcatgggcccatgcaatgccagttgtaatttagattcgagaagtggtttatcc

SEQ ID NO: 232195 - DNA, 100 bp, Homo sapiens
gggcccgacgggcatgccaagaagatgagaccgggggaggcgacgctaagttgctgatcgtggcgatatggctcgtggacagcagaaaattcagtctcag

SEQ ID NO: 232196 - DNA, 100 bp, Homo sapiens
tggtcggggaggagaccatggctgactacctgctgtacaccctcaacaaacaccagcgctttggatgtgggaggaggccattgccttgggcaaggagcta

SEQ ID NO: 232197 - DNA, 75 bp, Homo sapiens
atcaaaggaaaggggaaaatgtctcagtcgaaaggtaggcgaaaaccaagagtacatcggcctcgttctcctata

SEQ ID NO: 232198 - DNA, 80 bp, Homo sapiens
tatcagacaccgagcttcagcaagctctctccaacggtgtggacactgccagcggctgcagccgacttggaatgacctgg

SEQ ID NO: 232199 - DNA, 101 bp, Homo sapiens
cgcggtggaggtctgcgttgctcttgcttttcctcgctggggtgtacggagattacctggggcaattgatgttatcggtcagactataactatcagccgag

SEQ ID NO: 232200 - DNA, 100 bp, Homo sapiens
cgggagaagcatgggaaggaggccgagccgggatctcaggtcctcgggggcggcggccacgccaaggacgggctgttcgctgctacgaatctttaatctt

SEQ ID NO: 232201 - DNA, 82 bp, Homo sapiens
gaacgcttcactggggcagtctctgcatatcatggggagatagacgctgctgcctgttcttcagatagatcctgaagttaca

SEQ ID NO: 232202 - DNA, 101 bp, Homo sapiens
tgctttctctcgatgaggataacatccctccagaagatgggcagcccaatggatccaatggtgatgaagagacctcagttgtatggcatgggcagtaaccc

SEQ ID NO: 232203 - DNA, 98 bp, Homo sapiens
ggagatagaggcctgcctgggcagcctccaccaggcccagtggccaggggtgaaatgacaatggatgctctgttggctcgattgaaacttctgaatcc

SEQ ID NO: 232204 - DNA, 74 bp, Homo sapiens
gccgacttcgatgatcgtgtgtcggatgaggagaaggaatgtgggtgccggcaggacaggcgattggtaagtcc

SEQ ID NO: 232205 - DNA, 100 bp, Homo sapiens
cactcatcatagccttcacctctgcaggtccaggttcacactagaaggccaaaacttccgcaaacatctgatgatgaaaagaaagatttttgagactgca

SEQ ID NO: 232206 - DNA, 100 bp, Homo sapiens
aattgcatgggaaaatcatggaagttgattactcagtctctaaaaagctaaggaagagccaggacttctgaatttaccttgaatacagacaggaggatgt

SEQ ID NO: 232207 - DNA, 82 bp, Homo sapiens
agaatgataatggcaaaccagattctgtgggactccggcattcttagcagggttacagaatctgttaagaatattgtgccag

SEQ ID NO: 232208 - DNA, 100 bp, Homo sapiens
atgaggaatgtctttcctaccatctaaaatacgaaggtttctggctggattgagtgctatatttgaagtaaatacagaccttcaaaaaaatataatatca

SEQ ID NO: 232209 - DNA, 85 bp, Homo sapiens
agtttgggaagctgctcagaatggtgcagatgagggaactgccactgaggcggctcccagctgcgttggcgacatggccgacacc

SEQ ID NO: 232210 - DNA, 100 bp, Homo sapiens
accagctgtgatggtgtggatgccaaccagaaaagtgtgctggggcggaatttcaagatggatcggtaggagagaagtttgctgaggaatgccttcaagc

SEQ ID NO: 232211 - DNA, 82 bp, Homo sapiens
gcgaacccgcggcgcaataacggctgcctgctgtttcccggggagatcatgaaacgaggtcgccttcccagcagcagtgagg

SEQ ID NO: 232212 - DNA, 100 bp, Homo sapiens
ctttgactactggggccagggaaccctggtcaccgtctcctcaggtggtagctgagcacccagatgcttcaggtgaggagattgaagagctgctcaggtc

SEQ ID NO: 232213 - DNA, 98 bp, Homo sapiens
cgaggcccatcgcatcctgctggctgcgtcctgcgattacttcagaagtgaccggggaggtgcgtcctcatcatgggaaggaggctgtggatccgcgg

SEQ ID NO: 232214 - DNA, 75 bp, Homo sapiens
ctcggacgtggacgcctttttccggacagaaataagcgggttttgaaaacaaaaaaaagaaggagtggaagaggg

SEQ ID NO: 232215 - DNA, 97 bp, Homo sapiens
agttgacctaccccttgcacacctaccctaaggtatcatgatattagctggtttgacatcaagtcatttgtgagtcatcagatcttctcctgaaaat

SEQ ID NO: 232216 - DNA, 75 bp, Homo sapiens
gaggaggaccaggtggtggccgtgttcgtggtcaccttcgacccccgctcggttcgtaggtgtaaagctttgaag

SEQ ID NO: 232217 - DNA, 75 bp, Homo sapiens
agagcgcacacaccaacaccaggcatctacatgggcagaccaactcagcctgtctccactaactctggaccctaa

SEQ ID NO: 232218 - DNA, 82 bp, Homo sapiens
gagggccagaacctcactcgctctcccgcagcgctggcgggaggagctctcccacatgaagcgacttcccccagtgcttccc

SEQ ID NO: 232219 - DNA, 90 bp, Homo sapiens
ggaagaccgtgatgggagctgcagcacagtcgggggtgtaggttatgggggtggtgaagaaggtgaagtccatgcagatgttccacatgc

SEQ ID NO: 232220 - DNA, 75 bp, Homo sapiens
ctcaatggaagctggatttcctctcctgtaaaatgagagttgctacgatggaagttaaagggaaaaagcaattca

SEQ ID NO: 232221 - DNA, 95 bp, Homo sapiens
gaaatcgccctggccaagaagcacggcacgcagaataagcgaggttcagtgggaaatcccacctgtccaaacactgtgtgagacaccagaattag

SEQ ID NO: 232222 - DNA, 100 bp, Homo sapiens
aaacttatataaagttactggacagttcccttggagctcactgcgggagacggacagaggaatgtcagctgagtacagtctgtttgcagacaaggtccca

SEQ ID NO: 232223 - DNA, 50 bp, Homo sapiens
cagccattgaacgggagtatgggcagactctccagaaagagcaacagtaa

SEQ ID NO: 232224 - DNA, 98 bp, Homo sapiens
tgaatgtgggagaaaatggagaccaagacgatcgtgtacgacttggacacatcaggggggctgatggaggtttacccaaggtccagcctagcccctag

SEQ ID NO: 232225 - DNA, 51 bp, Homo sapiens
agtacggtctcacagacaacgttgagtggtggacttgctttgtgaagagac

SEQ ID NO: 232226 - DNA, 100 bp, Homo sapiens
atgtctcccgaggagtgcaggcgcttcaccacagacggaatttgctgacacaatatcttccgcctggtgctgggcatatcctaagaacttacaactttcc

SEQ ID NO: 232227 - DNA, 100 bp, Homo sapiens
atccaaggcaagactggcacccagcacagcaggttcagcagcgtggctggaacgcctgagatccaggaactgaaggcggctgcagaactgaggtccaggc

SEQ ID NO: 232228 - DNA, 75 bp, Homo sapiens
accaaaaagctttctgctaggggcagccatgttgttcagttctggagtcttttggatgggcttgttattcatccc

SEQ ID NO: 232229 - DNA, 74 bp, Homo sapiens
cttctcttcctcctccaccgagtcgtgctctcgccccaacccgcgcgccagtgaaaatgcctcgtgtaaaagca

SEQ ID NO: 232230 - DNA, 98 bp, Homo sapiens
gtgcccgtcatccaccgtgatctcaagtccaacaacagccctagcacaaaacacagatcttaaagaacgcttacgcagaatccatgccgagtctctgc

SEQ ID NO: 232231 - DNA, 101 bp, Homo sapiens
gacttcctctcagaagaggaccgcggagtacaggtttgcagattccgccagcagcacagcaagctctacagatgagtggctctttggcatttggtgctgtg

SEQ ID NO: 232232 - DNA, 50 bp, Homo sapiens
gccggcgccctggggccccggagagatttggtcgtattgggcgcctggtc

SEQ ID NO: 232233 - DNA, 73 bp, Homo sapiens
ttccatgtcaacatagtcctggcatcataggcgagtattagtggaatggctaagagatccatctcaggagctt

SEQ ID NO: 232234 - DNA, 100 bp, Homo sapiens
gaaaaactggagagcttcatcaaaaatagtgatagctttgataacctcctctcaagtcctcactgccatctcttccaaacactttctgatgactgccaac

SEQ ID NO: 232235 - DNA, 90 bp, Homo sapiens
gtgagatgtctccagcatttttacggacccaatcatgagcactgctttaatagggctctgtggatagcaactggatcgtgggtgccacgc

SEQ ID NO: 232236 - DNA, 75 bp, Homo sapiens
gaggactagacctgaagtttcaaagggaggagtctgctactagtcttatcagctcttaaaaacagaaactcatct

SEQ ID NO: 232237 - DNA, 89 bp, Homo sapiens
tggtggtgtgcgacaacggcaccggggtgaaaggtgtagcagtcactcggcctacacccacagcatcgaccttgtgaacccagcgacct

SEQ ID NO: 232238 - DNA, 98 bp, Homo sapiens
ctggagcggacactggcagccgagatggaagcagctgacacaggatgatgatactgatgcggttgagattgctatcgacaacacggcttttatggacg

SEQ ID NO: 232239 - DNA, 75 bp, Homo sapiens
cgggatgtattcgtccccgctctgcctcacccaggcacgggcgagagcgggaagagcacgttcatcaagcagatg

SEQ ID NO: 232240 - DNA, 98 bp, Homo sapiens
ggagaccgaattcctgctgacctcagaatcatatctgcaaatggctgcaaggtaaatcgggtccttcctcgctccaacatggtctacaatctctatga

SEQ ID NO: 232241 - DNA, 100 bp, Homo sapiens
gaagcttgggaatcccaaattagtgacatgtcaacactgctgagagaaatcaatgacgtgtttgaaggaagacgaggcccggattgcatttctacaaggc

SEQ ID NO: 232242 - DNA, 100 bp, Homo sapiens
ctttaccaacgccatcaccgacctcatcagtgagctgtccctgctggaggagcgcttccgggtgtttcctgctgaatgagattgagaaggaggagaagga

SEQ ID NO: 232243 - DNA, 90 bp, Homo sapiens
ggcacttttattgagaatgagaagaactttagatgatgatgtatttatgcccttatatcccaaaaagtccaaattaactgtgctacagat

SEQ ID NO: 232244 - DNA, 96 bp, Homo sapiens
gcggcagcggttggaggcttcgcccggctttgcagcggggacttcggcggcggcgcctcaggcacctcggcccggagccgaacactgtcagctaca

SEQ ID NO: 232245 - DNA, 75 bp, Homo sapiens
gaccggggccctaggcccgacgacggcaggtgtggacactgccagcggctgcagccgacttggaatgacctggga

SEQ ID NO: 232246 - DNA, 83 bp, Homo sapiens
atccttctcaaccttgtgggatgtgaaaactctgttactgaaggcattttttactgtctacagaaacttattgtaattcattt

SEQ ID NO: 232247 - DNA, 100 bp, Homo sapiens
gacacagctgaaagccttactgatacttgaaggaggccagaaagttgttttcaaacctaagcgcaaatacactactctcctcacagatagtgaaaacagg

SEQ ID NO: 232248 - DNA, 100 bp, Homo sapiens
tccgtcaccagccacatctaccaggttccatcaggcttgttcatccccagcatggccattggagcgatcgcaggaaggattgtggggattgcggtggagc

SEQ ID NO: 232249 - DNA, 118 bp, Homo sapiens
ctgctttccactcggctcctgtcgtccgttctctcaggctcccgttcagaatgttgtaccatctttgggtaggcagacttccctgacgacatcagtgatacccaaagctgagcagagc

SEQ ID NO: 232250 - DNA, 75 bp, Homo sapiens
ccctgtgacctgtggagacacggccagatctgccctccagtccggaaggtccatttcgacacccaggagcacggg

SEQ ID NO: 232251 - DNA, 95 bp, Homo sapiens
atacggcatttttcaacaatgcttcagctgtgtcctgtggaatcccagaatccccaggaaacggttcatttaccgggaacgagttcactttggac

SEQ ID NO: 232252 - DNA, 82 bp, Homo sapiens
cgggaagagcgggcgcacgcgctcaagaccaaggaaaagctggcacagaccgccacgggaaggcccgaacaagacaggaacg

SEQ ID NO: 232253 - DNA, 74 bp, Homo sapiens
ccgagctggagctgaagcgcaggctgcggggcgcggagtcgggaggctaccaagcagtttctcgaagagattaa

SEQ ID NO: 232254 - DNA, 96 bp, Homo sapiens
ggggccccagcagcccccgaaggccctatcaggacatggagtatgaaagacggtggcgacatgtctaagaatgtgagccagtcacagatggcaaaa

SEQ ID NO: 232255 - DNA, 50 bp, Homo sapiens
tgtgttttcagtagaactcttttcattagtgcagtgggccatgagtatgt

SEQ ID NO: 232256 - DNA, 119 bp, Homo sapiens
cttggcacagatcagaaccttcacagaaatggattctcatgaggagaaggtgttcagagccgtcagagagacaaataccgatactttgcttgtttgatgagagcccggtttgaagaaca

SEQ ID NO: 232257 - DNA, 74 bp, Homo sapiens
gcgtccgcgtccggcacgcgagatggagcgccgtggttgtagcagataccaatataagcgccatagcagctcag

SEQ ID NO: 232258 - DNA, 83 bp, Homo sapiens
atgagcgtcccggccttcatcgacatcagtgaagaagatcagctggctccaaggctgcatctctccactggactagcgagagg

SEQ ID NO: 232259 - DNA, 50 bp, Homo sapiens
gacgtcgcctctgcttcggagattctttctactaatccagatacttgttg

SEQ ID NO: 232260 - DNA, 90 bp, Homo sapiens
cagtcactctaaatggacaccacatgaacctctgtttagaatacctacattctctcgggcctagccgtccttggaacccgatattcgggc

SEQ ID NO: 232261 - DNA, 90 bp, Homo sapiens
ggggacgtggcttttgtgaagcacagcacggtactggagaacacggatggagtgttgaagcctggaaatcccctccccttccccctcccc

SEQ ID NO: 232262 - DNA, 100 bp, Homo sapiens
agccggtgacccggcgagaggcggcgccgctcccaagatgtcgcagacggccatgtccgaaacctacgctgatggtgagaccattctaaaaggcctccag

SEQ ID NO: 232263 - DNA, 75 bp, Homo sapiens
ccaatactacacaagaaggagaggaaatggaaactgatatggatggtgcccctgggcgctgggattgctctagcc

SEQ ID NO: 232264 - DNA, 75 bp, Homo sapiens
ggtcgcagatcctgagacccggacagtggcagtgaaacagatgggccggacacccccatcatttcccccccagac

SEQ ID NO: 232265 - DNA, 100 bp, Homo sapiens
cggaagatggcggccggcgaaaggagctggtgcctgtgcaagttgttgagtgaaactggaacgccaagctgaagaagaacgaatacggaagcacaaagca

SEQ ID NO: 232266 - DNA, 76 bp, Homo sapiens
cagctctcctgggaccctccaagagcactagtgtctagaaggcactaagggcatcgttggcttcacagtatgactg

SEQ ID NO: 232267 - DNA, 98 bp, Homo sapiens
cctcctgagtaactgggactatagaagcctaaagaaactgttccaactcttgctccaaaaactctttcagtagcagcagcttttaatgaagatgaaga

SEQ ID NO: 232268 - DNA, 101 bp, Homo sapiens
catgctagaattacctggaacttcatcatcatctacttcacaggaattgccattttatggcatgcagctgtaccagaattatatgcatccatatcaaggta

SEQ ID NO: 232269 - DNA, 74 bp, Homo sapiens
ctaccaacgtttggaccagaaggcaaatttagcgatcaacccagcggccttgctgcccacagcggcttcccaga

SEQ ID NO: 232270 - DNA, 82 bp, Homo sapiens
atggacatgttccacacgcgcttcaagcaggagggtgtcctgaacagcaagattttgcaagaacgaggctcaaggatgtgag

SEQ ID NO: 232271 - DNA, 78 bp, Homo sapiens
tctggcatcctttaagaatgagggtgccgaaccagatctaatcaggctgaccggttccctgatgtgttacctgcttct

SEQ ID NO: 232272 - DNA, 100 bp, Homo sapiens
gtcagaaatatcctcgcaaacacgccgtccttatgaacttcctgttcaccatgctgcgggaagaggtatccacaagtgaaaatccacaactctgaagaga

SEQ ID NO: 232273 - DNA, 50 bp, Homo sapiens
gctctcttcgctggtggcaaactggtggccataaaagacaagcaggaagg

SEQ ID NO: 232274 - DNA, 88 bp, Homo sapiens
gagctctcctccttcttcctcaactatctcgctgacacgcaggtggaacggcacatgtgtgatggggacattgttatcttcaaccggc

SEQ ID NO: 232275 - DNA, 75 bp, Homo sapiens
gggagcacgtcatctccatcgagggttatgaagacagtatggagtttccagaccatagtagacatttgctacagt

SEQ ID NO: 232276 - DNA, 100 bp, Homo sapiens
cagcttttccggaatctgttccatcgccagggcttctcctatgactacgtgttcgactggaacatgctcaaatttacatcaactagtcaggcagtcttcc

SEQ ID NO: 232277 - DNA, 100 bp, Homo sapiens
tgttccttgccagcctgcccggctccacccactctaccgctgctgagctcaccggacccagcctggtggaaacttcccaagaaggacaacccgaggcgag

SEQ ID NO: 232278 - DNA, 100 bp, Homo sapiens
atgccccagattcctgttgcttcagtcactcctacagcatcactatcaggagccagacagtgacaatgagtggcagcacctgctagagaccactgagcct

SEQ ID NO: 232279 - DNA, 100 bp, Homo sapiens
aagatgaccagcggcgacgtgctgtccaaccgcaagatgttctacctgctcaagaccgccttccccagcgtccagacttcaaatcatcccaacaccagag

SEQ ID NO: 232280 - DNA, 50 bp, Homo sapiens
gtggatgacaggctagtcacaatgcaggtgtctcgaaataatgatgtgtg

SEQ ID NO: 232281 - DNA, 100 bp, Homo sapiens
aaatatggtgtgaaggttggcctgacaaattatgctgcagcatattgtactggcctgctgctggcccgcaggaatcctcactatggatgggctcattgag

SEQ ID NO: 232282 - DNA, 83 bp, Homo sapiens
ggctggacgcccgtgcactgggccgcgcatttcggcaagaataccgtagcagtaggcaggacagttccaattcaacaaaaacc

SEQ ID NO: 232283 - DNA, 100 bp, Homo sapiens
tgaactcagcattgctgcagctcgtgggtgctcaggtcagggaagtcaaagatgcatccctgagttcttcctagcaggcaagcagccgtgcaccaatgac

SEQ ID NO: 232284 - DNA, 82 bp, Homo sapiens
agccgatccagcctgcggagcctgtggggcaggatggacagattcctggtgaaaggggctcaagggggccttttgaggaagc

SEQ ID NO: 232285 - DNA, 75 bp, Homo sapiens
aggaattattggaggccaggtttactggagtaggtgttagtaagtgtcttcgtcaaattacagaagccaaatgct

SEQ ID NO: 232286 - DNA, 76 bp, Homo sapiens
cagccgccgccgccgccgttttcgcctgcagctgctcaccgattttaacctaccgctctcagcagatataatcctg

SEQ ID NO: 232287 - DNA, 100 bp, Homo sapiens
cttccgctggatgaacaacctgctgatgagggaggtgcccctgcgttgtaccatccgcctgtgggacacctaccagtgcacagccagagaacaacacatc

SEQ ID NO: 232288 - DNA, 82 bp, Homo sapiens
gaggcaaggagctaaagcagcgtgcgttcagccctggggtcagctggccgccggcacctgtgagattgtgaccttggaccgg

SEQ ID NO: 232289 - DNA, 100 bp, Homo sapiens
accttggtcaagaaagatgtggaatcctccctcagttcctgcagaaacagtagtagcactgtgtcatacctgaaaaagaggttggaaagaaccatgactg

SEQ ID NO: 232290 - DNA, 100 bp, Homo sapiens
gagttcaccaaaattcagacattcaaatcgcagtcttctccaggctgacaaggcgaagggcatggcttcgaagtgcaaaagagtcatcatgaaacatcat

SEQ ID NO: 232291 - DNA, 87 bp, Homo sapiens
tggacactgcattgagtttttaccatatggctggagcatctcttgataaagcaaagccttctagacaagctcagtggaatctgaagg

SEQ ID NO: 232292 - DNA, 74 bp, Homo sapiens
ggccaagttggactgcagctcgcggtttcctggcttctaggtactccaaagattcaggtttactcacgtcatcc

SEQ ID NO: 232293 - DNA, 83 bp, Homo sapiens
agcccaacaattggaaaacaattacttaagcaaaagactgttgaagtagagagcattttgcccagctcactcggattctttgc

SEQ ID NO: 232294 - DNA, 97 bp, Homo sapiens
aagaggaacagcctatgtgggcttccacggagctgtccagaccaaaacgaagaagacgttagccaaacccaatataaggaatgttgtggtggtggat

SEQ ID NO: 232295 - DNA, 98 bp, Homo sapiens
atgcatttcctggagaatatatccctactgtacagcccacctgaggatattgaccataaggactcatatctcattacaagaagcatcatggccgagcc

SEQ ID NO: 232296 - DNA, 100 bp, Homo sapiens
gcgagcgcgccttcggcattggccgccgcgatgtcagctcagtgctgtgcgggccaggtcaaaatgcagatcttcgtgaaaacccttaccggcaagacca

SEQ ID NO: 232297 - DNA, 50 bp, Homo sapiens
tcaataccctgttcccaaccgagcaaggcagtaaacggctttgaccccgc

SEQ ID NO: 232298 - DNA, 75 bp, Homo sapiens
atgaagtcgccacagctgattttggtgaatatggccagcttcccagaggtattgcaggcaatgggatatccaaca

SEQ ID NO: 232299 - DNA, 138 bp, Homo sapiens
agctccccagggcccacgggccagccccgccgccctcgcaacctggcagccgccgccgtggaagggtggttctcttcccaaagtggaagccaaattcatcaattatgtgaagaattgcttccggatgactgaccaaga

SEQ ID NO: 232300 - DNA, 83 bp, Homo sapiens
cctcgctggggcggggaccttgccttgcccggggtgaccaagaatatggcccaggtgaccaaagccctggacaaggccctgag

SEQ ID NO: 232301 - DNA, 101 bp, Homo sapiens
gatgtaccatcatgggtagcctttgataaacagtgctattaccacagctactggcactccatggtctatgtgccacagatgcagcagcagcttcatgtaga

SEQ ID NO: 232302 - DNA, 97 bp, Homo sapiens
aagcacacactatggcgctgaaacggattaataagatattgatgatgctcaaatacttccccgctcaactagagtcagacatttttcacaaagtgaa

SEQ ID NO: 232303 - DNA, 75 bp, Homo sapiens
gcggcggcggaagtggccggcgagcccggtccccgccggcaccatggcacaagatgctggtcttggggtgtcaat

SEQ ID NO: 232304 - DNA, 100 bp, Homo sapiens
gtgacctctgcctaccatccataaaatactcattcccctctcagaaaaagcttgtggtgaaggggggcaaaaaaaagaagcaagttctgaagttcactct

SEQ ID NO: 232305 - DNA, 83 bp, Homo sapiens
gttcgagcgctgttctcgctccggagccgctgcacatttcggtatccagctcacatagaagacattgactacgaggaaggaaa

SEQ ID NO: 232306 - DNA, 83 bp, Homo sapiens
tgcagacttggccaaatggacgggactattaagtcaccttcaggccattcagaggaggaaagagaggggaatatgaagtcagc

SEQ ID NO: 232307 - DNA, 100 bp, Homo sapiens
tatagcaatctggttttcttgggatgctccagaccttgtatgattacttctggtgggaacgtctgtggctgcctgtgaacttgacctgggccgatctaga

SEQ ID NO: 232308 - DNA, 75 bp, Homo sapiens
gccatcgtcatcctgctgctgaagatctggaagacgcgctcctgcgccgcaaattgtggctactaatttgccccc

SEQ ID NO: 232309 - DNA, 51 bp, Homo sapiens
ttctacgacccggagcacccgacccctgagatggcactggatctttaaaac

SEQ ID NO: 232310 - DNA, 76 bp, Homo sapiens
gggtaaatgagggtgttgatttctccaaggatctgctgaaaagaccatcatgcagacatcagagactgggtcggac

SEQ ID NO: 232311 - DNA, 74 bp, Homo sapiens
atcagatgaaccattcagctgcctctgccatggttccttttttgccaggagattcagaccttgatcagctaaca

SEQ ID NO: 232312 - DNA, 100 bp, Homo sapiens
catcatcaaaaagctgaatgcacgttataacttgactggctccaatgcagtgtggcaaaggagcagagaactttgacaagttcttcacacgaggacagcc

SEQ ID NO: 232313 - DNA, 100 bp, Homo sapiens
catggaaattggactaaattaccagaatgcagggcaccactgccggaactgtggccacatcttctgcaacacctgctccagcaacgagctggccctgccc

SEQ ID NO: 232314 - DNA, 82 bp, Homo sapiens
acaagaacctgaacgaggacacgaccttcctgcccttcacgctccaggagctagctgtttgcagacaaggtcccaaagacag

SEQ ID NO: 232315 - DNA, 111 bp, Homo sapiens
tctttccctttaagatatgtgcaggatcaagttgcggcaccttttcagcagagacaagagagacacctccaacttcgacaaagagttcaccagacagcctgtggaactgac

SEQ ID NO: 232316 - DNA, 83 bp, Homo sapiens
gtggaatatgccaaggaaaaactggagagcttcatcaaaaatagtgatagctttgataatatcatcgagaaaggagaagaaca

SEQ ID NO: 232317 - DNA, 102 bp, Homo sapiens
aaggtggtgttccagtggcaaacagctgtataaactcttgtaaacaggactacaaatccctccaggatatcattgccatcctgggtatggatgaactttctg

SEQ ID NO: 232318 - DNA, 74 bp, Homo sapiens
gttacctgaaactcctctcagagcagagccgccatcttcatataagaatctccaagatgatctggaaaaacagg

SEQ ID NO: 232319 - DNA, 90 bp, Homo sapiens
caaaagcaacgacttcgtatgcatttttgaaacgttggggttgttggagtggttggattttccctggaattgagtgagaaattcagaaga

SEQ ID NO: 232320 - DNA, 101 bp, Homo sapiens
gtcgtggatcgacccccgcgaccggaggaggaggaggcccggctggccagcatgcccgcctggaggtgggacctcctgcggaagaagctggaagaagagag

SEQ ID NO: 232321 - DNA, 82 bp, Homo sapiens
ctcggctgcagacttggccaaatggacgggactattaagttgatattcactgatggactccaaagaatcattaactcctggt

SEQ ID NO: 232322 - DNA, 98 bp, Homo sapiens
ggctgcaggactgggcacagcatgagatccaaaggcagggcaaggaaactggccacaagaagttggtgaaccatctaaagaagagaaggctgtggcca

SEQ ID NO: 232323 - DNA, 51 bp, Homo sapiens
ctcagacagtacaggaagacttgagggacagagcgggatgccaccagcttg

SEQ ID NO: 232324 - DNA, 101 bp, Homo sapiens
tgtcagagcctcatggagtacgggcgaactttctgaccaagtatacaactacccagagggcctaggagaagtgctgtatagagagcagttcgacttcaacg

SEQ ID NO: 232325 - DNA, 100 bp, Homo sapiens
catgtccaagaagaagcccagtcggggttttggggacttcagctcctggtagcagcaggacttcgagtaagaaggtgatttacagccagcctagtgcccg

SEQ ID NO: 232326 - DNA, 50 bp, Homo sapiens
ctcggccacggcgtggagagcggcaaatacattccaccgttgatctgggg

SEQ ID NO: 232327 - DNA, 97 bp, Homo sapiens
aagagatggaaaattgttgcctgaagaataccaaggaggatcttttaggtgaccaagaatatggcccaggtgaccaaagccctggacaaggccctga

SEQ ID NO: 232328 - DNA, 76 bp, Homo sapiens
cagactcagggatcaaagagcaaacagattcagtggcctgcattgaaatgatcctagataattgatagatcctgtg

SEQ ID NO: 232329 - DNA, 74 bp, Homo sapiens
cggatcctgctggtgggagaacattggtgtgcccgtttaataaaagaatatggaaactgaacagccagaagaaa

SEQ ID NO: 232330 - DNA, 100 bp, Homo sapiens
aacaaatgaagcagcgctttgaaagagtggcagaatttagtgacatttggaagcttttcaaacatggttccctgtagtcatccatatattggtaccctga

SEQ ID NO: 232331 - DNA, 100 bp, Homo sapiens
gttccctagagaatcaacttggaaacacccagtatggtggctggaatggaatttataaagcagtatatgaacctctagaaaatgaagggatagaaatcac

SEQ ID NO: 232332 - DNA, 51 bp, Homo sapiens
tcgtggctttccgaaggctgctgagcagcccgacggccatggaggctgaag

SEQ ID NO: 232333 - DNA, 100 bp, Homo sapiens
cgcggcccccgcgccccgcgggacccggacggcgacgacgggggaatgtggcgctggatccggcagcagctgctgactttggtttctgtgcccagatcac

SEQ ID NO: 232334 - DNA, 98 bp, Homo sapiens
gaactagggagcgtctccggctgcacagcgctcaggtatcaggaattaagggagtcacttcaacaatgtaggcttccttggggcgctgaaagagagta

SEQ ID NO: 232335 - DNA, 97 bp, Homo sapiens
tggctggcaaggcccatagcaccggagagcaaccgccgcagctcagcttggccaccagagaagatggcgaattagaagatggtgaaatagacgatgc

SEQ ID NO: 232336 - DNA, 74 bp, Homo sapiens
ttttttcttgctgaaacattaaaaaatgcactcggtgatggaaagagagccactattctgaagaacacttggcc

SEQ ID NO: 232337 - DNA, 51 bp, Homo sapiens
cggtggctgtccaagtgcctgggatgcagctgtatgcaggagctattcttg

SEQ ID NO: 232338 - DNA, 75 bp, Homo sapiens
acacgcgcagaccttcgttgccctctgtgccacaggaatactcccccagttgcaagaggcgcaggaccgtggaag

SEQ ID NO: 232339 - DNA, 100 bp, Homo sapiens
gttgctgcggctggttcaagcggtggcgggagcctgtcagatactgtggatggtagggaagaaaagtctgcttctgattcttctggaaaacagtctactc

SEQ ID NO: 232340 - DNA, 100 bp, Homo sapiens
ctgtggtcgctgctgctgctgctcggagtcttcgccgccgccgccgcggccccgccagtctgtggcaagcgctacaagaaccgaccggggctcagctacc

SEQ ID NO: 232341 - DNA, 100 bp, Homo sapiens
caagtcgagactactggccgaaggggcgtctgcggctctccgccgtccccagccctgcctctccctgggctctgcatgcttttcacttccactgcatctc

SEQ ID NO: 232342 - DNA, 51 bp, Homo sapiens
tgtctgcgagccaggattcccgggtggagttcacagtgggagacaagcctg

SEQ ID NO: 232343 - DNA, 83 bp, Homo sapiens
aaaggacggtagcactcagcgccccgccaacaggtatcacctcttctgggctcaagatggacaacaagaagcgcctggcctac

SEQ ID NO: 232344 - DNA, 82 bp, Homo sapiens
ccactttctcggcgccgcggctcttttctaaaagtagtgcttgtgcacagagctcgaaaactagctcaacaatactatcttg

SEQ ID NO: 232345 - DNA, 75 bp, Homo sapiens
cggcgagcgcgagcggcgcgagaaagttctggaggacacgtgccggcggcaggacttcaacccctgtgaatatga

SEQ ID NO: 232346 - DNA, 50 bp, Homo sapiens
cggagcgccagctcaatgaagatgccttccgcgccttccaccctgacctg

SEQ ID NO: 232347 - DNA, 50 bp, Homo sapiens
ggccgctccccgctgtcccccaggcaaaagaatgcatgtgcagttgtcca

SEQ ID NO: 232348 - DNA, 82 bp, Homo sapiens
gggcggcttcctggcctgggcgctccggtggcggcggaggccaagactaaggggctgcagagcggggtggacattggcgtca

SEQ ID NO: 232349 - DNA, 83 bp, Homo sapiens
gggggctctgctgcatcttccaatcttccagggctcgagctggaatcattagcactgtagaggttctaaaagtcatggaggct

SEQ ID NO: 232350 - DNA, 75 bp, Homo sapiens
cctgctgacacggaaccctcacctcaacaagtctccagagaatacagagggcaaagatggatccaaagtaactaa

SEQ ID NO: 232351 - DNA, 100 bp, Homo sapiens
gaccagtttaatgaccttgttatcagtgatggctcttctctggaagatcttgtgaaggagaacttatggattgtgatggaaaatcagaatctagtcctga

SEQ ID NO: 232352 - DNA, 87 bp, Homo sapiens
tcaccatacaggaacagggcagacgttagcgtgagtgatcactctcaatcccggaatgtgcaaaagtcttctatgctgcgggtgcta

SEQ ID NO: 232353 - DNA, 90 bp, Homo sapiens
aacacacctcagctggctgacattgttgcaacagggttgctaggaagaggctcaatgtttgtgttttcaccagatcagtttcagagactg

SEQ ID NO: 232354 - DNA, 101 bp, Homo sapiens
ggccagcttcacgaagtcagagagttgctgtctctgctggccttcatctgtgaagaagttgtatcacaatgtactttatgtggaggactttatttttttga

SEQ ID NO: 232355 - DNA, 98 bp, Homo sapiens
gttcatgctgggaacatcattgcaacacagcgccatttccgctggcacccaggtgcccatgttcatcttccttcctgtacagtattttcaaacttccc

SEQ ID NO: 232356 - DNA, 50 bp, Homo sapiens
cgccgccgctgccgccgccgcgcgcggcactgccagtaactccaaccgca

SEQ ID NO: 232357 - DNA, 100 bp, Homo sapiens
gaaccaatccagtcaggatgtcactgactctaaatcaggtctatcatctcatgaagaactgctgggagacagaggcgtcctttcgcccaaccttcgagaa

SEQ ID NO: 232358 - DNA, 90 bp, Homo sapiens
tgcgaagaactcctaaacaggtggatccagctttcggaaaatgtgattgatcgaatgaaggaatcctctccatctggttcgaagtctcag

SEQ ID NO: 232359 - DNA, 98 bp, Homo sapiens
cggccaaccgcctacgtatcagctccatccaggccaccactgcggcgggctctgggtcctttgtcatccagcaaatcccaagcagcaacctgttcatg

SEQ ID NO: 232360 - DNA, 75 bp, Homo sapiens
aaaacatgtgttgctgatgagtcagctgaaaattgtgacaaatcacttgccactggagaatgcacggcaaccgtg

SEQ ID NO: 232361 - DNA, 100 bp, Homo sapiens
tgaagctggtgccaaagtggttgcgctcgaaagtgacaaaacttttattccacatttggaggatgctgatatgctaactggtgatgagcaagtatggaag

SEQ ID NO: 232362 - DNA, 98 bp, Homo sapiens
gcaggatgcacagcaggaggatttcggaatcttccagagcccacaggcggttttgtgagctgcttccccaggagcagcggagcgtggagtcgtcactt

SEQ ID NO: 232363 - DNA, 98 bp, Homo sapiens
tatcttggctgagcagtatgatcacagcattaatgaaatgctctccacacaagccgctttggtatcaggatgatgctgtcctcataaaatgagttagg

SEQ ID NO: 232364 - DNA, 80 bp, Homo sapiens
cgagtcaagccgccgcctcgacccagggcccgcgggccaggagagcgctcggcggagttttgcggcctccaggtggtgga

SEQ ID NO: 232365 - DNA, 75 bp, Homo sapiens
acagagcaggagttgccgcagccccaggctgagacaggctatctatgtgcctgctgatgacttgactgaccctgc

SEQ ID NO: 232366 - DNA, 75 bp, Homo sapiens
agctattaaaaccagggctccacagttaggagattacaggaatgaagaactgttgcctaattggaaagtgccagc

SEQ ID NO: 232367 - DNA, 75 bp, Homo sapiens
cacgctctcgtctggtttgatcacaagacgggcaaggtgttaaaccgcctgacttttgcgtctactctttctcac

SEQ ID NO: 232368 - DNA, 100 bp, Homo sapiens
gctcgggactttgcagccggccttagtgctcgcgcagaccattcctcaagaattttgtatccaaggcccaaaagtttgttacccaagatgatgaatgctg

SEQ ID NO: 232369 - DNA, 100 bp, Homo sapiens
cggccgctggtcgcagggctgcgggactacaatcttcgcatgaaatggaagagagggtggtgcggatagcttgaggaagttccccctgcagtggtttgga

SEQ ID NO: 232370 - DNA, 82 bp, Homo sapiens
tacggcatccgcgccggcctcgtccagaacgtggtcagcaaggagcatcagatccatgctgctgctgactcggagccccaca

SEQ ID NO: 232371 - DNA, 100 bp, Homo sapiens
tccaggtgcgaaaggtgcaaggcaccaacttgggcaaaatatatgccatgaaagtcctaaggaaggccctgaagtactctttccagacccacgaccgcct

SEQ ID NO: 232372 - DNA, 98 bp, Homo sapiens
acgtcctccgggcactcccacgaccaggttgcagtccatgagctgggaaaggaggcagtgctcttgggagaaacagcagaggcctcaagtttcgggct

SEQ ID NO: 232373 - DNA, 108 bp, Homo sapiens
gagcggccgccgcggccaccgaagccaccgcggccacggagaagggcgagaagaagaaggagacaatgcagatcttcgtgaagactctgactggtaagaccatcaccc

SEQ ID NO: 232374 - DNA, 82 bp, Homo sapiens
cgagtacctgatccgcctcttccaggagtgggaggcccagggccccggccagtgcccagccccgctgggagacccggccagc

SEQ ID NO: 232375 - DNA, 123 bp, Homo sapiens
agtctgccctgcagttgctatacactgccaaggaggctggtggtaacccaaagtgagaaggacgttgaagagtgggctcggagatgacctggtgcaggcactgggactaagcaagggtcctgg

SEQ ID NO: 232376 - DNA, 76 bp, Homo sapiens
ttaaccagcatggctacttcatattttggaaagcagtttttaagacaatttgatggtgacagtgcctacgtgggga

SEQ ID NO: 232377 - DNA, 101 bp, Homo sapiens
cataccactatatcagataagcttgacattacagccaagatggtgctgtcccagagacaacgagatgaactgaggtaactgagttctatgttcaaaatgaa

SEQ ID NO: 232378 - DNA, 100 bp, Homo sapiens
acccgagggccagcgcaagcagcggcaacaggagcgccaggaggtgggtccgaggagagcactacaggtacaagttcagccgtcctgggggcaggcacgc

SEQ ID NO: 232379 - DNA, 98 bp, Homo sapiens
cccccctcctggcacatcaagcagctttacctgcagcaccccagccctatccctttacgtcatccctgagcaccatcaactatgatgagtttcccacc

SEQ ID NO: 232380 - DNA, 100 bp, Homo sapiens
tggaaagtcaggaccgcgacggcagcagagcagtcttgggcgtctttggtactggcttttttaggggtctgcctggggattacccttgctgtggatagaa

SEQ ID NO: 232381 - DNA, 83 bp, Homo sapiens
ggcttgggtagagatgatgcgcttctcagaaatgtccagctgagctgactgctgcccactttggaggaggcggtgggctcctt

SEQ ID NO: 232382 - DNA, 82 bp, Homo sapiens
aaacaggatgaaaaagactgattggctcttcctcaatgcttgtgtgggaaagtgactattttaccccacagggagaattccg

SEQ ID NO: 232383 - DNA, 74 bp, Homo sapiens
caagcgccccatctatgagttcaagatcacatggtgaagattaagattgcggccctgcgcatgtatactagctg

SEQ ID NO: 232384 - DNA, 89 bp, Homo sapiens
aaacctgtagggtatggtccagctgtgccgcaccgaggcgagcaggagcagggaacagcaattctgtggtgttcttggtcacacattta

SEQ ID NO: 232385 - DNA, 100 bp, Homo sapiens
accattcctaggctgggagcaaaacgttgagaaaccaaggcagtatcatgagcaggaagaaacacctgagatgatggcagcccgcattgacagagatgtg

SEQ ID NO: 232386 - DNA, 80 bp, Homo sapiens
aggatgctgtagtagcaaatcagattctgaaaaagagttccacgtcctcccttatcgagtctttgttccccttcctggat

SEQ ID NO: 232387 - DNA, 100 bp, Homo sapiens
agaggtctcctgtagagacagtcagcctattgtcctgccaacagagcaccggtatgaggatacatgggctgcacttcacagaagagccaaagactgtgca

SEQ ID NO: 232388 - DNA, 98 bp, Homo sapiens
caaagactacattatgaacccaccactgggcaaagaaagtatccctttgacaacgctgtggaccgcctggcacctggggacctggggagaacacgggc

SEQ ID NO: 232389 - DNA, 100 bp, Homo sapiens
cacacggagggctcgcccgcggaggagccgcctgcgcatgctccatcgcctggcatatttgaagatgggagacctttactactatggccaccaaaaccag

SEQ ID NO: 232390 - DNA, 100 bp, Homo sapiens
gggacacccatggccagttctatgacctcctcaacatattcgagctcaacggtttaccctcggagaccaacccctatccctgaaaagcaaaggcctcatc

SEQ ID NO: 232391 - DNA, 100 bp, Homo sapiens
taagccgagtaagaagacatacaaaagcctcttctgaaggaaaagacagtgtagtcctgcaaaacattttgagcatttacacagatgtggaagacatgaa

SEQ ID NO: 232392 - DNA, 100 bp, Homo sapiens
tgggcctcagactacctcctccactttgctggttcctgtgcctaacctcgacagaaacctcctcatggattccagaaaaaaatgaagcttgaggttgtag

SEQ ID NO: 232393 - DNA, 100 bp, Homo sapiens
ggtgggagcggagagcgcaggcgtgaagccagctgaagatgagtggggtaaaaccccagacgccatgaaagctgccatggccctggagaaaaagctgaac

SEQ ID NO: 232394 - DNA, 75 bp, Homo sapiens
ccgagtccccgtacggccacccggcggaaagacttccgagtgcaggaactcccactggctcgtattaagaagatt

SEQ ID NO: 232395 - DNA, 80 bp, Homo sapiens
cttcaagaagtcatgatggagttccagaacgtgctggccaaagcgctctatgacaatgtggccgagtccccggatgagct

SEQ ID NO: 232396 - DNA, 80 bp, Homo sapiens
tgtactgccgttgttggaggtccaaaaagatgatgaacaacatgggtggtgatgaggatgtagatttaccagaagtagat

SEQ ID NO: 232397 - DNA, 75 bp, Homo sapiens
aaggattccaagtaactcttatttgcatgcatatgcgctagaacttctatttgatcagttgcatgaaggagctaa

SEQ ID NO: 232398 - DNA, 95 bp, Homo sapiens
tttagtacctttggagaagttcttatggtgcaggtctatccagatggcattcggcacatacgagcagacaagagagtcaatgagtggaagacccc

SEQ ID NO: 232399 - DNA, 98 bp, Homo sapiens
ttctcagcatgaagcatcctgaaagatccagggccaggttccccaggattggggagttgcctgacatttaccccggtaactgctgggcatttaaaggc

SEQ ID NO: 232400 - DNA, 74 bp, Homo sapiens
gtgacacggacaaggatagttttggctgatgtaaccaccgggaggaactgggccattctaacacccgttgctac

SEQ ID NO: 232401 - DNA, 83 bp, Homo sapiens
agccagtcaggaatccgggcaggagacactgtgacactttagttcaaaaggtgatgacctatcaacagccattctcaaacaga

SEQ ID NO: 232402 - DNA, 131 bp, Homo sapiens
acagaaaccgtccctgctacagagcaggagttgccgcagccccaggctgagacagctggagaagcgactggaggagtggttggggaggacattgcctggcagtgactggacacccaatgcccagtttatca

SEQ ID NO: 232403 - DNA, 100 bp, Homo sapiens
gctgcccgccagggcccagatgttctgggaggtgatcagtgatgaacatggcatcgaccccaccggcacctaccacggggacagcgacctgcagctggac

SEQ ID NO: 232404 - DNA, 87 bp, Homo sapiens
gctgagaagggcgacattgaccatgttaagcagatgaagactcttaagatgacagaaggtgatttttctggtgatcgaggacttccg

SEQ ID NO: 232405 - DNA, 82 bp, Homo sapiens
atccatatcataagtggaattttggagatattcaaagaagcccctgaatgtgacagtgatccgcaggggggaaaaacaccag

SEQ ID NO: 232406 - DNA, 96 bp, Homo sapiens
tacgcagaacccgggagtaggagactcagaatcgaatctcttctccctccccttcttggtctaccaggtccagaaggtcctccaggtctccctgga

SEQ ID NO: 232407 - DNA, 101 bp, Homo sapiens
ttggaaggaatgttttgctagctgctaaaaccacctttgtcaccagaatgaatgaagtgcttcagatttaaatatataaccccgttttcacacgaatggcc

SEQ ID NO: 232408 - DNA, 100 bp, Homo sapiens
gtcatacaccagtactaccaaggacagcttttttcctgcaagagccctatgagtttgtctctctggaatggctgcaaaagtggttggatgaatcaacacc

SEQ ID NO: 232409 - DNA, 101 bp, Homo sapiens
gtgaaactggggaaaagtgcaatgcaggacacctcctacctgttcatcactggccctgatgttgtgaagtctgtcaccaatgaggatgttacccaggagga

SEQ ID NO: 232410 - DNA, 100 bp, Homo sapiens
gccaacagtgcaaggaagcctggttcagcaggtggccctaaggttggagttccttttgatgaagatgacaaagacgattctgtatggtttttagaccatg

SEQ ID NO: 232411 - DNA, 74 bp, Homo sapiens
gagaattataggaacctggtctccctgggccctgggaggagcggggacactgaggacctctctccaaattggcc

SEQ ID NO: 232412 - DNA, 100 bp, Homo sapiens
tggctgcgcggcctgcgcgcgcctcccgggcggattccagccccgagcgggacagcgcggcggggagcgacgagtttttcgttggaatatacgttgcaca

SEQ ID NO: 232413 - DNA, 75 bp, Homo sapiens
gcgccggccggctgcgaagacgcggtgggccgcccctccggtatggtctctctggcagtgatgtcctggataatg

SEQ ID NO: 232414 - DNA, 75 bp, Homo sapiens
gcagcctgctcgagggccaggatgccaagacagagcgggatgccaccagcttgtccaaagggaagttccaggagc

SEQ ID NO: 232415 - DNA, 75 bp, Homo sapiens
gctgccacctcgtcctgtgcaaagcacaggcaccgtccccaaaagaattacatgaacgacagccttcgcaccgac

SEQ ID NO: 232416 - DNA, 75 bp, Homo sapiens
caactgcagagccaggaaaactttgaagccttcatgaaggcaatcggaatgccagcagagaccaccatagccatt

SEQ ID NO: 232417 - DNA, 82 bp, Homo sapiens
tagatccattgaacatctagataaaatgtcagccataatggcaggtgaagaaattaatgaagactatccagtagaaattcac

SEQ ID NO: 232418 - DNA, 101 bp, Homo sapiens
cgacgacgtgcggacgcagcggcgggggctgaaattggagcgatttgaaattccaatcaaggttcgattaagcccagagccatggacccctgaaactggtt

SEQ ID NO: 232419 - DNA, 82 bp, Homo sapiens
aagaagccaaaaacattctgggcatcacgttgggtggtttccatttagaccgaggccggttcagaacttcccaaatgatggt

SEQ ID NO: 232420 - DNA, 138 bp, Homo sapiens
gggccccagccgcaccccagcagcagtcagagcccgccagaccttcctctgaaggcaaagtgacctgtgctccagctccagaaatcccagtacctgcaactgggccccagccgaggccagtactatggcgggtccctg

SEQ ID NO: 232421 - DNA, 88 bp, Homo sapiens
aactgagacgtttcgaattccagatgttccatttaagcagacctcttccatagctgtagctggagcggtaattggagctgttcttgcc

SEQ ID NO: 232422 - DNA, 50 bp, Homo sapiens
atggaagccatggatggccgggaacctgaaataatgcaaaaggtgtccca

SEQ ID NO: 232423 - DNA, 98 bp, Homo sapiens
ggcgatccaaaaattcagtggaaggtttctcttgataaaggggacaggaaagaaagggatttacatgaagacctatggtttgagttgtctgatgagac

SEQ ID NO: 232424 - DNA, 118 bp, Homo sapiens
gcgatgtccatctgccaccgtggcactggtattgctttgagtgcaggtgctggagaatctggtaaaagcaccattgtgaagcagatgaggatcctgcatgttaatgggtttaatggag

SEQ ID NO: 232425 - DNA, 100 bp, Homo sapiens
caggttgttttgaagcaaagtccaagcattgtatcacttcatctgcaaatatttcaataagtacccaaaagagcagcccgacggccatggaggctgaaga

SEQ ID NO: 232426 - DNA, 90 bp, Homo sapiens
cgaggggctcggagaggtgctcggattctcgtagctgtgccggatcttcttcagcagtatcgttctgctgtgtgcaaactagacagtgtg

SEQ ID NO: 232427 - DNA, 100 bp, Homo sapiens
ctgcgcctggatgcagctcttggcagacatgtgcattgccattgcgatttctcttctcatgatcctgatatgtgctatggctacttacggagcgtacaag

SEQ ID NO: 232428 - DNA, 82 bp, Homo sapiens
caagatgagcagggcccttgcggagttccgcgtccgaggtgtgaagacttcccaagtaagaagcggaagaggagccgctgga

SEQ ID NO: 232429 - DNA, 94 bp, Homo sapiens
agcctgcgtgctggtgatcgcgctgatgttcctggcctggggggaagcggacaaggcaaaatctcagcaagttcggacctctagtacaataagg

SEQ ID NO: 232430 - DNA, 90 bp, Homo sapiens
atcttagataagaaggttgagaaggagccagatgaccaagatgctccagatgaacatgagtcgcctccacctgaagatgccccattgtac

SEQ ID NO: 232431 - DNA, 85 bp, Homo sapiens
agaggcttcttctatagactcttcagaagaggggtagtcaaaccacacactccattaataaggtttcctgacagaagagacaatc

SEQ ID NO: 232432 - DNA, 101 bp, Homo sapiens
cccgccgccggggacatgtctaaccccggaggccggaggaacgggcccgtcaagctgcgcctgacaggatcaggcagctagagacatgaagaggcttgaag

SEQ ID NO: 232433 - DNA, 98 bp, Homo sapiens
ggagggcagccactccccgctggacagcgccgacgtccgggtgcacgtgccacgcacgaggctgggaggcggcagaatgcagccagaggagggcacag

SEQ ID NO: 232434 - DNA, 148 bp, Homo sapiens
gacttgcagaagtaccacaacagggacacctggttccagctgcagcacgtggacgctgactcggaagtgcaggtactccaaagattcaggtttactcacgtcatccagcagagaatggaaagtcaaatttcctgaattgctatgtgtc

SEQ ID NO: 232435 - DNA, 100 bp, Homo sapiens
ctcggaagagcgctcccaggagaaacaagtcagaatggcggcagtggagcatcgtcattcttcaggattgccctactggccctacctcacagctgaaact

SEQ ID NO: 232436 - DNA, 100 bp, Homo sapiens
gccatcacccaggtcagcaagggcacctgcgagcaaggtgcaaagttccccatcaagtggacggcccccgaggcagccctgtacgggaggttcacaatca

SEQ ID NO: 232437 - DNA, 95 bp, Homo sapiens
accctctgcacttccccctgtcatgaaacagcaaccagttgctatttctagcgcaccagcatttggctcttgcagccaatgccggaacaggattt

SEQ ID NO: 232438 - DNA, 74 bp, Homo sapiens
accttggggacaagctgcgcatgatcgtcatgggacacagaagcaacacggaggtagtcacgtttcccggaaat

SEQ ID NO: 232439 - DNA, 80 bp, Homo sapiens
ggatacagttcatgacaatgactttgagccctaccttactggacagtcaaatcagaggtctgcggggtttccgagaggct

SEQ ID NO: 232440 - DNA, 83 bp, Homo sapiens
ttgcagccttttcagcagacgccctgagaacgggaggtcaagagttggagcagacggattttttatcaagcagaaatgcatcg

SEQ ID NO: 232441 - DNA, 100 bp, Homo sapiens
tgttgcgtggttcgttattaacaggtatacccgaaatcttgtggatcaaggaaatggaaaatttaatctgatgattctctgttggggtgaaggacatggc

SEQ ID NO: 232442 - DNA, 96 bp, Homo sapiens
gaggatctggaggcacagctgcagtctgacgagagggtgatgtccttgcattgcccatttttaagcaagaagagtcgagtttgcctcctgataatg

SEQ ID NO: 232443 - DNA, 80 bp, Homo sapiens
tcgggacagctctctagaaactcgctctaaagacggaaccgccacagcactcaacccgtggaccgggagcccgtggaccg

SEQ ID NO: 232444 - DNA, 83 bp, Homo sapiens
agagaagggaaaagcaaaggagaagagacaggacgcgggaccgtgcagccgacagatggaattgtcagccacttgaagaagca

SEQ ID NO: 232445 - DNA, 75 bp, Homo sapiens
ttccactcggctggcctctgcgcctttctctcatcccgttggtgcttcccgtgctgctgttgatgctggctttgt

SEQ ID NO: 232446 - DNA, 101 bp, Homo sapiens
agatgtggggggattctcgacctgctaacagaactggaccttttcggagaactgcgacacatcaccaagctgaagccctggagcctctttgatgtacttgt

SEQ ID NO: 232447 - DNA, 126 bp, Homo sapiens
agacgatctgcacttcgcattttggcattgacatttaattttagggtcctttatatagaagggagagtaggagcctgaacgaactgcgggtgttgctgctggaggccaatcgtcactccccagggc

SEQ ID NO: 232448 - DNA, 101 bp, Homo sapiens
agaattcccaagccagagctttccagggaggcgccacatccaccacctggggaaccagctgcagctgaaccagcactgcctggacaccgccttcaacttct

SEQ ID NO: 232449 - DNA, 100 bp, Homo sapiens
actcccccgggccggtgggcgaaggacacccgcaggaactcggcagaggagaaattcagacggctcccgagggtcttgggcttgccttcaacttgaatcc

SEQ ID NO: 232450 - DNA, 100 bp, Homo sapiens
gctgccgggagctcgcggcgagcgccccagccaggcctgcgccggcatcctccgaggtgtcatggagaaactccagctgggcccagagattctgcagcgg

SEQ ID NO: 232451 - DNA, 99 bp, Homo sapiens
ccagcaacagctcctgcagcagtaccgagtgccccggggaagccattccccaccccccagaatgaagcccaaactgccaaggagtttattaaaatcata

SEQ ID NO: 232452 - DNA, 100 bp, Homo sapiens
gtcatcctccacagctccagggaaggcactcaaaagtggggggcaggaaaggctaatcaagacaagccctgaactggctgagtcctgcacatggttccct

SEQ ID NO: 232453 - DNA, 75 bp, Homo sapiens
tcagcctcctgagtagccgggattacagaaattcattgagtttgaagatgctctggaacaagagaagaaagagct

SEQ ID NO: 232454 - DNA, 101 bp, Homo sapiens
ttatgttttcatcacttctctccagaagcaaatgcagccctgaggatttggctactgcatataacaacagggggcaaatcaagtacttcagggttgatttt

SEQ ID NO: 232455 - DNA, 90 bp, Homo sapiens
tttcatatgttttagctacaaacatttatctaagaacaccgaaaagctttggaggatttcactcttgataatattctttctcatatttat

SEQ ID NO: 232456 - DNA, 83 bp, Homo sapiens
gccgacatgttcacgcacgggatccagagcgccgcgcacttcgtcatgttcttcgcgccctgcagcccctgtcaaagggaaca

SEQ ID NO: 232457 - DNA, 111 bp, Homo sapiens
cgcgtgtctaggtgagtcgcggtgggtcctcgcttgcagttcagcgaccacgatcttcgtgaagactctgactggtaagaccatcaccctcgaggttgagcccagtgacac

SEQ ID NO: 232458 - DNA, 90 bp, Homo sapiens
ccatggcaatggggatttatactggggcgcagttgtgtagcagttgagtaatgctggttagctgttaaggtggcgtgttgcagtgcagag

SEQ ID NO: 232459 - DNA, 90 bp, Homo sapiens
cctgtcctcgtccgtctcatcaaaggtcatacttacctggttgcttgcgcatctagtaatgttggatcatattctggatgttttgaatac

SEQ ID NO: 232460 - DNA, 100 bp, Homo sapiens
cttggaaagcccgaaaaaccttgtcataaactgtgaagtcttcgaccctcagttctcaaaagtctatggtcctgtgttcaccgtgtattttggcatgaat

SEQ ID NO: 232461 - DNA, 88 bp, Homo sapiens
ggagttttaccggccgggaacagacggggctcagtgctgtcagagagggactacgagagcctcgtcatgatgcgcatgcgccaggcgg

SEQ ID NO: 232462 - DNA, 82 bp, Homo sapiens
tatttttccccaattcagcagagaatattttcaaggggggtgtccctacctgcaccggacgacgggggacacagaacgcaag

SEQ ID NO: 232463 - DNA, 98 bp, Homo sapiens
ggcggcaggaatcctcctccggcgataggtgcccgggaagaacccaccgtccagcaggcacagcgtcggtcagctgtctttctgtcctttaagtcccc

SEQ ID NO: 232464 - DNA, 100 bp, Homo sapiens
attttgatatgccttcaagtatggatgagtatgtccatcagtttgcaggcctttcagatatatccatctcacaagacatccccgtagaaggagaaatcac

SEQ ID NO: 232465 - DNA, 75 bp, Homo sapiens
aaggctgaaggggatcgtctaaaagaggaaatggtggagtcaatgaagaaagtagcagggatggatgtggagctg

SEQ ID NO: 232466 - DNA, 75 bp, Homo sapiens
ggactgagtcctgcaggacacaggtgccgacgccaccgccgagcccatgatcctggaacagtacgtggtggtgtc

SEQ ID NO: 232467 - DNA, 100 bp, Homo sapiens
ttcccatggcagacttggacgctctgtctcccatacacacaccacagcggtctgaaaggcactttattatgcaggtggtctgtgaagccacacagtgtcc

SEQ ID NO: 232468 - DNA, 50 bp, Homo sapiens
agagagaggtccgtctaatgaagaacaggaagtgcttcgggagatccagg

SEQ ID NO: 232469 - DNA, 75 bp, Homo sapiens
ttctccctcagtatttagaccagggctagtgccacgaggtttacttgactgttgtgtgaaaagctgataagaaaa

SEQ ID NO: 232470 - DNA, 100 bp, Homo sapiens
aaggttgcgggtcatggagtcccgaaccctcctcctgctgttctcgggagccgtggccctgatccagacctgggcagtcctggaaagacaagcatcatgc

SEQ ID NO: 232471 - DNA, 102 bp, Homo sapiens
gtgtcatcattagcaggtgctcttggaaaactcaagcatagtcaagatccagggttttcagagaaagatgctgatgaggtgaaaggaatttttgtagatacc

SEQ ID NO: 232472 - DNA, 100 bp, Homo sapiens
gtcatccgcctgtacctggagcagcaagtgcaattttacgaaacgctgtgtgttctcatttcacccaaaacctttggacagtgcagggcatagaagattc

SEQ ID NO: 232473 - DNA, 75 bp, Homo sapiens
ggctctgatgtgtctctcacagcttgaaaagacaccatcgatttgtgtgaacaaacggggaaaatgaagatgctt

SEQ ID NO: 232474 - DNA, 90 bp, Homo sapiens
ctcatgcatttattgatctgactgaagattttacagcaggataacttcaaactaatgtgtactaatgccatgatttacaataaaccagag

SEQ ID NO: 232475 - DNA, 99 bp, Homo sapiens
gaacttaaaaagcagtctaaacctgtgaccacccctgaagaaattgcacaggcgcagttgtgtagcagttgagtaatgctggttagctgttaaggtggc

SEQ ID NO: 232476 - DNA, 100 bp, Homo sapiens
aagctcatcatgaccttccagaattacgggcaagcgctgttcaaacccatgaaacattccacttcttccatctattacatctctgagtctaaatgaaaat

SEQ ID NO: 232477 - DNA, 51 bp, Homo sapiens
attttgtgatcgcagcgatgaaagctgcgactgatagattggggtctggca

SEQ ID NO: 232478 - DNA, 100 bp, Homo sapiens
gctagcaggaatgcttactgttgcgtggttcgttattaacagaaatctgcaactcgacctagcccctctccggaaaggagcagcacaggcccagaaccac

SEQ ID NO: 232479 - DNA, 90 bp, Homo sapiens
gctgggtctggagacgccgtggcagcctgaacggagtgtgcgacggattgggaggtactccaaagattcaggtttactcacgtcatccag

SEQ ID NO: 232480 - DNA, 58 bp, Homo sapiens
aagtaaagcactccggatcttgcaactcaaattattttccatcacctggcattacttt

SEQ ID NO: 232481 - DNA, 146 bp, Homo sapiens
agtgacacaaggtgatagacttcgggccttgaaaagcagaagacaatccaaaacaaacgctattcctctcacgatggaatccgacgtggtaggcccagagcagatactgtccgcgatttaataaatgaaggagagcattcatccag

SEQ ID NO: 232482 - DNA, 100 bp, Homo sapiens
cggcagctcccggggcgtctggccttgaaaagatcttttgaggtcgaggaggtcgagacacccaactccaccccaccccggagggtccagactcccctac

SEQ ID NO: 232483 - DNA, 98 bp, Homo sapiens
tgcggcgcgcgtggatcctgctcaccttgggcttggtggcctgcgtgtcggcggagtcgttcttcctgtccaagatccggtcccacgtggctacttgt

SEQ ID NO: 232484 - DNA, 89 bp, Homo sapiens
gctgtgtgctggcagtgtgggacacctgcttggaggtggtgttcccactgatgaagagcaggcgactgggttggagagggagatcatgc

SEQ ID NO: 232485 - DNA, 100 bp, Homo sapiens
aatatgaatatgttttacatccaagaactacaggctttacttttgtggtagaccgtctaagagaagggtctcactctgctcactctgtctcccaagctgg

SEQ ID NO: 232486 - DNA, 82 bp, Homo sapiens
gcgagactgcgggggtgctgcggccgtcctgggggccttcagagccgcaatcaagcagcccccaaatacatcaagatgtttg

SEQ ID NO: 232487 - DNA, 82 bp, Homo sapiens
cccgtggctatgccttcatcgagtacgaacacgagcgagacatgcactgattttttatcaagcagaaatgcatcgaacaacg

SEQ ID NO: 232488 - DNA, 100 bp, Homo sapiens
ggacacctgccactgcgagcctggctggggagggcccgactgctccagcggcttactagaaagcagcacccgcctgaaacctcacgaagcccagaactac

SEQ ID NO: 232489 - DNA, 82 bp, Homo sapiens
cacctctacctcctgcgaggcctcccgggctccgggaaaactacactggccagttcaaaaggtgatgacctatcaacagcca

SEQ ID NO: 232490 - DNA, 82 bp, Homo sapiens
gtttgacccagttcctgtcaagcaagaggccatggaccctgtctcagtgatttctcgaatgctggcagccaaaaccgttttg

SEQ ID NO: 232491 - DNA, 96 bp, Homo sapiens
ctcttagataaaatgacgacgtccttctggaagaggcgaaactggccacagatggtatctccagtgagtaaggatgccacggaagatctgcggaaa

SEQ ID NO: 232492 - DNA, 90 bp, Homo sapiens
cagattcgcagtggtcgcttcttctccttgctaccggctctcccgggtcattgagccaccagctgcctcctgccccagctccccacgcat

SEQ ID NO: 232493 - DNA, 100 bp, Homo sapiens
aagacatccttgggcccccgatgtatgaaatggaggagagaaacaagaatgctgctcaggagctggccactttgctgttgtccctgccagcacctgccag

SEQ ID NO: 232494 - DNA, 82 bp, Homo sapiens
ctgaaccgttatgaaatgtatcgccgctcagctttccctaaggcagccatcaaaagggtttggtgcacctcgatttggagga

SEQ ID NO: 232495 - DNA, 96 bp, Homo sapiens
tttcagtgcactgaaagaactactttctgggccaaaccgactgaagatccgtattgatgctatgcatggagattctgaaaaagagttccacgtcct

SEQ ID NO: 232496 - DNA, 87 bp, Homo sapiens
ccaggagaggaaggagcggctgcggcgcgcgctggaagctaacaacctgagagaagattacaaatttcaccacactttcagcacaga

SEQ ID NO: 232497 - DNA, 50 bp, Homo sapiens
gcagatggcagactcagcagtcacgttctgcggggagtgtctccagccct

SEQ ID NO: 232498 - DNA, 113 bp, Homo sapiens
atacacacacctgttgccattatagagctggaattaggcaaatatggacaggtggttgtgggaagagaagtttgcagaactgaaatggaggtcagagcttcattacagaaggt

SEQ ID NO: 232499 - DNA, 82 bp, Homo sapiens
tctcccgcccacgctgcgcccctcctgcccagagggcccctccaggttcaacggtctcctaacctgtagtcacccacaagag

SEQ ID NO: 232500 - DNA, 87 bp, Homo sapiens
aagatccagatatacataactgatccagactttaagggtcttactgaagtaacacaaagcttaaaaatggaaaatgaagagtttaag

SEQ ID NO: 232501 - DNA, 97 bp, Homo sapiens
ctttgcctgatcatgcagacatctccaactgtgggaactctttccagcttgtgtctgagtggtgagatcaagtcggtagatcccagactaatccatg

SEQ ID NO: 232502 - DNA, 76 bp, Homo sapiens
acctccacctcagtttaaccggatggaagaaatgatataaagatgaagcgcagctgtataaagaagagcacctgag

SEQ ID NO: 232503 - DNA, 75 bp, Homo sapiens
ttgtggtaataacccttaccgggagtttcactgaaggacttgcaattgtgaccaaatatattacaaagggctgga

SEQ ID NO: 232504 - DNA, 50 bp, Homo sapiens
gagaaaaggcctaagaattttggcattgatgggcggaagccatttccaat

SEQ ID NO: 232505 - DNA, 75 bp, Homo sapiens
ttctcagaatgccgactctatgctaatgttgaaaacgaggcccactgcgactttgtgaagctgcgggagatgctg

SEQ ID NO: 232506 - DNA, 74 bp, Homo sapiens
ggccgtcggagacatgggagacccggggtcggaagcgaatctggctttgggggaagaggaagaaaagtcggatt

SEQ ID NO: 232507 - DNA, 50 bp, Homo sapiens
tggagagttgctacaacccaatggcagtggcagcaccatgatgcaaacca

SEQ ID NO: 232508 - DNA, 74 bp, Homo sapiens
gcagccgatccagcctgcggagcctgtggggcaggtttccaatacttatctacaggaatcgccatgaccccagc

SEQ ID NO: 232509 - DNA, 89 bp, Homo sapiens
ctttctattcaggataacacaagtcccttgccggaagagaaacgtctcagagaaaaggaagagcaaaagaaacttttggaacagcgggc

SEQ ID NO: 232510 - DNA, 122 bp, Homo sapiens
ccgagccgctgtcggcgggaagcggcgatcctgccaccgggaggtgtggaagagccggggcgccctgcgtccggcagaggaggcgagcatcccgctcaggtgatgaggaacccctcgcgcac

SEQ ID NO: 232511 - DNA, 100 bp, Homo sapiens
ttggtctcagcattgtgggaggaaaagacacacccttgctccacactacaggttcaagagaagagtaatacgtggtcctgggggattttgaagatgttaa

SEQ ID NO: 232512 - DNA, 90 bp, Homo sapiens
ccctgggtgaagtgctccgccgcccttgcctccaggattaagcatgaaaatattgttgccctggaagacatttatgaaagcccaaatcac

SEQ ID NO: 232513 - DNA, 75 bp, Homo sapiens
aaggtcatctcggagactagaggctggataccaaatagcagtggaaaccggaatagccaggccagaagaaggaag

SEQ ID NO: 232514 - DNA, 100 bp, Homo sapiens
ggccgggacccggttccccggcccacagtgggggtgtgcaaacccgagagaactggcatgtcccaaattaccatacaacaaggagacaagcccttctttc

SEQ ID NO: 232515 - DNA, 98 bp, Homo sapiens
cttccattgtcctcttgatgtcctgttacagcatttatggatgaatgagaacagccacatcatcctgtgtggtcaaatttctcagtacaacaaagatg

SEQ ID NO: 232516 - DNA, 100 bp, Homo sapiens
gttaaggattccaagtaactcttatttggacaccgagtttccaggtgtggttgcaagacccattggagaattcaggagcaatgctgactatcaataccaa

SEQ ID NO: 232517 - DNA, 88 bp, Homo sapiens
gcggcgagggctccacgtgcagcgtctctccgggcttattgcagtatattatatctaaagccaagaatgcagatcatcctacgtggac

SEQ ID NO: 232518 - DNA, 75 bp, Homo sapiens
tggagctgtggtcgctgctgtgatgtggaggaagaagagctcagaaagttcaggagccctggaaaggagaaggaa

SEQ ID NO: 232519 - DNA, 100 bp, Homo sapiens
cgccaggtcgtgggctcccgctccgggcccggggccaccggctgtggaaatcgtggaacacatggtccagcactttaaaacacagatctttggggatcgg

SEQ ID NO: 232520 - DNA, 80 bp, Homo sapiens
attcaccgtgacggccggacacctggggcggttccagacagttccccaatgaagaagactcatttcataagtttgtggct

SEQ ID NO: 232521 - DNA, 74 bp, Homo sapiens
gtcaccccgctgtgacgcgcacgctgtaggaaaacttcacccacaaaagctgtatataatgccagacattggaa

SEQ ID NO: 232522 - DNA, 79 bp, Homo sapiens
gaatgctcaagtgcaatgtcaagagctttctggtgtgagccactgccccatgttgtgttgatgccaatctgccatgcta

SEQ ID NO: 232523 - DNA, 119 bp, Homo sapiens
cccccttccccacgcaaccccagatccatttacactttacatgtactaatggtcacttgatgtgcgctggctgttttatccacctactagcagatgcccggctgaaggaggagcaggcc

SEQ ID NO: 232524 - DNA, 51 bp, Homo sapiens
tgttaaggattccaagtaactcttatttgggatcagtgtccttcagtgatg

SEQ ID NO: 232525 - DNA, 101 bp, Homo sapiens
caccgtctattgtcattcagagaaagtctctcggactttttccaagtggtgaagcagtattttccaatttgaagattcatttgaaggtggctcctgccacc

SEQ ID NO: 232526 - DNA, 82 bp, Homo sapiens
aggttaatctgttggattctaatgcagttcatcacatcattcatgattttcagagactctgacctgtttttgttggacaccc

SEQ ID NO: 232527 - DNA, 75 bp, Homo sapiens
cagcggccgggatagccccggcggagcccgcagcttccctgccgaaaacttggaatataacgtggagcctcaaga

SEQ ID NO: 232528 - DNA, 83 bp, Homo sapiens
cagaatttttggaacagcattatgatagagaactgtggctgcaccatctgtcttcatcttcccgccatctgatgagcagttga

SEQ ID NO: 232529 - DNA, 76 bp, Homo sapiens
caaatttattcaagtcaattaccatcctttaccagggtgcgtatagcagcaaaattcatcattcatgcccctcctg

SEQ ID NO: 232530 - DNA, 50 bp, Homo sapiens
tttgatagtcgtaccatatgcagaagattcccgctgcagcaggagagcgg

SEQ ID NO: 232531 - DNA, 100 bp, Homo sapiens
tgccgcagatgcccaccggaatggagaaggaagaggagtcgagtgtcccactggtccagacatcattccaattgtagctggtgtggttgctggaattgtt

SEQ ID NO: 232532 - DNA, 100 bp, Homo sapiens
gtccctcgaacacgagacgctggtgctggtggtaaccagcacatttgggaatggggatcccccggagaatggagagctcttcctgctgcccacattcctg

SEQ ID NO: 232533 - DNA, 100 bp, Homo sapiens
cctggatctccaagtgaccccctcagcaactcctgatgaacagtttgctgaatggtgcttagagtatggagaacatggatgcagaacaccagacacccct

SEQ ID NO: 232534 - DNA, 75 bp, Homo sapiens
acttcggcaagatccagatcgggatttacgtggagatcaagcgcagcgatggagtcttttagtcctgctatacag

SEQ ID NO: 232535 - DNA, 100 bp, Homo sapiens
agttcgctccgagccccggccgcctgtccgtcgatgcaccgaaaaggtgaaaggtgtagcagtcactcggcctacacccacagcatcgaccttgtgaacc

SEQ ID NO: 232536 - DNA, 100 bp, Homo sapiens
caaagaccagaaagagtgtctcatcttcttcaagataacttgccaaaatgtgctaaaatgatgtattttctggacaagtcaaggcaggagaaagcaattg

SEQ ID NO: 232537 - DNA, 90 bp, Homo sapiens
ggttgggagcagatcgattttaccttggataccctgctttgggaattacatgaacgacagccttcgcaccgacgtcttcgtgcggttcca

SEQ ID NO: 232538 - DNA, 100 bp, Homo sapiens
gtttgtgagtgaagatggacactggaagctaggaggaatggaaactgtttgtaaagtttctcaggccacaccagagaaaggagaatcacttgaacccagg

SEQ ID NO: 232539 - DNA, 100 bp, Homo sapiens
gccaacagcgaggctttcagttctttggaattccattcttttccttattcttctgatgtggatccagctgggggctctcttccctatagcatccagacag

SEQ ID NO: 232540 - DNA, 99 bp, Homo sapiens
ccaagagaggctgagagaccaggctcttgcagccaatgccggaacaggatttgctgttgctgagcctcaaatcgcaatgttttgtgggaagttaaatat

SEQ ID NO: 232541 - DNA, 88 bp, Homo sapiens
ctaccgcagcatgagcgaaagctacacgctggagttaagtgggcagaccaacatccacctcagcaaaaacttcttcctgacgaatcgc

SEQ ID NO: 232542 - DNA, 80 bp, Homo sapiens
gggcgtcgcatcctggacaggaaaattcagagcctgggagacagcaagaccattcccgagttcccgattttgaaatgctg

SEQ ID NO: 232543 - DNA, 100 bp, Homo sapiens
cgtggatccgctggagcggagccggccgtacgcggtgctgcgagggcagaacctggtcatgacttgtgctgaccctggcgagattgccaacgggcaccgc

SEQ ID NO: 232544 - DNA, 75 bp, Homo sapiens
cagatggggggaccccggtacggacctgtgcagggctcatcgttggggtgatcctgaggtatggtacccctgcta

SEQ ID NO: 232545 - DNA, 96 bp, Homo sapiens
gattcccaggatgtgagcaacacgggaccggacaaccgcatccagggtggctacgagaacgtgccgactattgacatccacatgaaccagatcggc

SEQ ID NO: 232546 - DNA, 90 bp, Homo sapiens
agaatctgcccgagttagaattcgggaaacagagcaaatgcagcgttacaatcaaagacttattgaggaattgaaaaacagacagactca

SEQ ID NO: 232547 - DNA, 100 bp, Homo sapiens
cttatttaatcctgttacagacattgaggaaattatccgtttctggaaacattctacaggtgttgaagatgctttttacacactggtaagagaaatacgc

SEQ ID NO: 232548 - DNA, 75 bp, Homo sapiens
ggtaggaagccggagacagcagggtgacagagagcacgttttcaatatcataggagcatttgatattccacgctt

SEQ ID NO: 232549 - DNA, 98 bp, Homo sapiens
agaccgtgtgaatcattgtctgacaatatgtgaaaacatagtggcacagtctgtcaggtgctgctggtgagtagcagccggtacccagaccagtggat

SEQ ID NO: 232550 - DNA, 100 bp, Homo sapiens
cgccgaggagccatcagcttcagctccagctccgctctcttcggctgccccaatccccggcagctctctcagggcaccatgccggtggaaaggatgcgca

SEQ ID NO: 232551 - DNA, 97 bp, Homo sapiens
ccgtcgtctgcacgcagcccaaatccccatccgggacagtgtgcacctcaaatcgggctggtggtcatcctggcttccacggtggtggccatgtcgg

SEQ ID NO: 232552 - DNA, 82 bp, Homo sapiens
caaggatctggggatcttcgcactatcccaagggccttgggaactccaagacagaatggcccgaggcctggacactctctga

SEQ ID NO: 232553 - DNA, 100 bp, Homo sapiens
ctgaccgccatgaccccccagagcccggcgtgagggggccgagcctgggcagaggagcagaataagttggtgcatggcggaccctgcgacaagacatctc

SEQ ID NO: 232554 - DNA, 96 bp, Homo sapiens
ttttgtgcgcaccacttttgtgtccaggcataagaaatttgacggaccagcaacggagcgaggagctggctcgaatcatgggggagtttgagatca

SEQ ID NO: 232555 - DNA, 75 bp, Homo sapiens
ggccaagcgtataccatgcaatgccttgatgacacttctgtggtgtgtagtgagtctctacttttatggaatcct

SEQ ID NO: 232556 - DNA, 83 bp, Homo sapiens
gtcacccagctgggcagccagctcagtgctatgcaaatcaacagctatggaagatgatccctatgatcttgaagatgtttctg

SEQ ID NO: 232557 - DNA, 101 bp, Homo sapiens
acagaacatttacttaacacatcatgaaggctagtttggatgtggaggggaatagactccatctatccatatgaggtttcagaggtgccgggaagtctgag

SEQ ID NO: 232558 - DNA, 98 bp, Homo sapiens
ccagacgcggcacagagagggcctgggagcttgctgcagcttcaggtgcaactgacatgggtgaaccccagggatccatgcggattctagtgacaggg

SEQ ID NO: 232559 - DNA, 82 bp, Homo sapiens
ctttcttggcccttgttcccccaaatgtctgactctgactctcggactgagaaacgcaaggaaggttgtgcaggaccagcgt

SEQ ID NO: 232560 - DNA, 100 bp, Homo sapiens
agaccccacccccgccctgcgccagccttcgtccccgcagaggaccccccgacaccagcatggactgctgcaccctcattttccaggtgaccccactgag

SEQ ID NO: 232561 - DNA, 95 bp, Homo sapiens
ggccggcaggctgagaaaagcgagaccgcgtgcgaggaccggagcatcagatccatgctgctgctgactcggagccccacagcttggcacaggct

SEQ ID NO: 232562 - DNA, 82 bp, Homo sapiens
gccccggctcgcccgtgtgcagagatgaagatctccttcaacgacaaaagcctgcagaccacatttgagtacccttccgaga

SEQ ID NO: 232563 - DNA, 100 bp, Homo sapiens
ggaatccttgctgtgctgaatcctggctgtgtgaccccaaggttttggccaaattgggcgagggcacaaaataaccacttaccccttctcaccgaggaag

SEQ ID NO: 232564 - DNA, 82 bp, Homo sapiens
ggacacctggaaggttgctcacctgaagggtgaggtggctttgaccccgggttgcccggccagcacgaccgaggaggtggct

SEQ ID NO: 232565 - DNA, 101 bp, Homo sapiens
gttgttcattgtttgtcaccacaaaaaggacaggtgacacttggacagaaacactggcctatgtgctcttctggggagttgcaagcattggaacatttttt

SEQ ID NO: 232566 - DNA, 146 bp, Homo sapiens
ctggatacttagctacagatcagctcttgcttttatgggatagaatcctaggatacaactctctggaaattcttgctgatccctgcatgtcactgagtccaccatgctttacagaagaagacagatttagtctggaagctcttcaa

SEQ ID NO: 232567 - DNA, 90 bp, Homo sapiens
gggggaaaagcgagcgatcgagcgagcgcgcgcgcgaaaactccgggcagggagtggagcaactgctgtagtccaagcagcttattgtgc

SEQ ID NO: 232568 - DNA, 74 bp, Homo sapiens
tgacacatattctgtctgtccacgatagtgccaggcctatgttggagtaattcgccaaaatgacgaacacaaag

SEQ ID NO: 232569 - DNA, 82 bp, Homo sapiens
tttcaacaagtggactagaatcactctgcctctccctccttataccaggtggtgaaaacaggaatgagaacgaggagtcaac

SEQ ID NO: 232570 - DNA, 95 bp, Homo sapiens
ttaaggagtgtgtgttgcgtgacggcgtctacggtgacgtgcagcgcgtgaagatcctgttcaataagaaggagaacgccctagtgcagatggcg

SEQ ID NO: 232571 - DNA, 89 bp, Homo sapiens
acccggaaacttaggggccacgtgagccacggccacggccgcatagcggacaaacataaattgcagagattcctgactgctgacatggc

SEQ ID NO: 232572 - DNA, 100 bp, Homo sapiens
actacctgctgtacaccctcaacaaacaccagcgctttggacagccctcagcgcctttttccaggagaccaacatcccctacagccaccatcaccaccag

SEQ ID NO: 232573 - DNA, 83 bp, Homo sapiens
ctcgatgttaccctcatattttcagcactaattttaggctggtccatgttgctggtcctggccccacagggcccatcaagatt

SEQ ID NO: 232574 - DNA, 50 bp, Homo sapiens
gaaatagaaagggccctcaaacagattgaagatggatacgtgacaatccc

SEQ ID NO: 232575 - DNA, 100 bp, Homo sapiens
gtctggagcaaggaaaagatccctggaatatgaagggacacagtacggtagtcaaacccccagctatctcttccaaatgcatgacaaggaagttctcatc

SEQ ID NO: 232576 - DNA, 90 bp, Homo sapiens
agaatggagtgggcaggaaagcagcgggactttcagtgcacgatctgattttctggagagatgtgaagaagactgggtttgtctttggca

SEQ ID NO: 232577 - DNA, 98 bp, Homo sapiens
tgctcaccggggagtctgatacacagagtcaaagccaagagctccctgctgattcacaagcacttatgtcacttctgcacttcagtaaaccaggatgg

SEQ ID NO: 232578 - DNA, 74 bp, Homo sapiens
gccataaacaaaagctattacaatgtgactatgaaagtgatgacgactcttatgaagtgttggatttaactgag

SEQ ID NO: 232579 - DNA, 74 bp, Homo sapiens
tcagtcctttgtactggttggtgagactgggtctggtaaaacaacacagaatgggagttgcctggcctccagaa

SEQ ID NO: 232580 - DNA, 98 bp, Homo sapiens
cagaaacacaagaccttcgtggaaaaatacgagaaacagatcaagcactttggacacagcattgttggttttgccatgtactattttacctatgaccc

SEQ ID NO: 232581 - DNA, 94 bp, Homo sapiens
gcctgctcaaagagctgcaccgcttcgagtctattgccattgcccaagacaatgcagatcttcgtgaagactctgactggtaagaccatcaccc

SEQ ID NO: 232582 - DNA, 50 bp, Homo sapiens
tgtgctgccttggccaaaagagacaacaagggaggtgtcacagttttcca

SEQ ID NO: 232583 - DNA, 75 bp, Homo sapiens
accaaatattatggatcctatctgaagctggaccagaccaattttgaggaaaggatacagacagcgcctggaatt

SEQ ID NO: 232584 - DNA, 74 bp, Homo sapiens
gcagaacacttcaactactccgtgatggctgaaattcccttgtttcatgtcttaaatgcacggattacatttgg

SEQ ID NO: 232585 - DNA, 89 bp, Homo sapiens
gtagtccttattttcatgccatgtttacaggatagtggccaaagcctccaagaacctcatgtccacgcaaagcttggggattgtatttg

SEQ ID NO: 232586 - DNA, 96 bp, Homo sapiens
ctttgatctttctcaggaagggccaaaagatgcggagaagatgtcaaccggacactagaaggtggaaggaaacctcttcattatgcagcagattgt

SEQ ID NO: 232587 - DNA, 100 bp, Homo sapiens
tgtaaagatgaaaatgggcagagaaagcaaccaaacctcaaccagaaccctcggactttgctgcctaaattctatggactgtactgtgtgcaggcaggtg

SEQ ID NO: 232588 - DNA, 100 bp, Homo sapiens
ctcaatctgtcaaccatgggtttgaggcagtatatgagctcaccaaaatgtgtaccattcggatgagttttgtcaaggaagatgaagatcctgccaaagg

SEQ ID NO: 232589 - DNA, 82 bp, Homo sapiens
aaaaaaggagatgcctggcagccccgctctctgcaagaatttccgctgcctgtgcactcatgaaaagggctttggctttaag

SEQ ID NO: 232590 - DNA, 100 bp, Homo sapiens
cacgagcctgctgcagctctatgatgcctccaacagcgagtggcagctggggaagaccaagattctgtttctggcgtctgcatacgcaagtccccaactc

SEQ ID NO: 232591 - DNA, 115 bp, Homo sapiens
gtcatggtcctggatttgcaaggctgaatagaagagatgggactgctgagatgtcctctattcttgaagagcgtattcttggagctgatacctctgttgatcttgaagaaactgg

SEQ ID NO: 232592 - DNA, 90 bp, Homo sapiens
gtcatgaaggaaatgggacatttgagtgtggcgcgtgcaggcgtctgtggctttggaggcccctatggggaaacggtagcaacaggccct

SEQ ID NO: 232593 - DNA, 75 bp, Homo sapiens
aaaacttacaaacaaccccatctccagacaaagagtaaactacaaattcttgtgagtcctaattcctccttatcc

SEQ ID NO: 232594 - DNA, 74 bp, Homo sapiens
aacgagttcaacttcccggatccctactccaaaaattttgagactgaagaagtagaactttccttctccaagaa

SEQ ID NO: 232595 - DNA, 99 bp, Homo sapiens
attgatacctttcctgagtgtagtacggaagtgatggaatggggagaagatattaaagcagtttcaaaagatgaagcagtgatgttggtgaatcatcag

SEQ ID NO: 232596 - DNA, 75 bp, Homo sapiens
ctgggaaccacccttctactttctgtctctaggaatttcactactctagttctgtgccttcccctgcagccacag

SEQ ID NO: 232597 - DNA, 75 bp, Homo sapiens
cttcaagtgcatgatgtgcgatgtgcggaagggcacctccacccgatgccaccggaaatgtcatcttctccccag

SEQ ID NO: 232598 - DNA, 75 bp, Homo sapiens
ttccagtggaggcattttggggcagaatacagagatatggaatcagggtgctcaaggattggagaggagacaaaa

SEQ ID NO: 232599 - DNA, 75 bp, Homo sapiens
tgcccttaccatattggtcatttctcccttgttggtttgggatttgaagaacacagtatgcggttgaaattgatt

SEQ ID NO: 232600 - DNA, 75 bp, Homo sapiens
gtgctccactggaaaataaaagccacgtgggggggccctcagcctcttggccttgaacgggctgttcatcttgat

SEQ ID NO: 232601 - DNA, 50 bp, Homo sapiens
cagatggcagacatacatcatttaaaggatgtccctggtagatttgggaa

SEQ ID NO: 232602 - DNA, 83 bp, Homo sapiens
cgtcggacgcggcccggcgccgagccatgactctgaacaggaagtgcctcctggaaccacagagtcggttcagtctgtggatt

SEQ ID NO: 232603 - DNA, 100 bp, Homo sapiens
acggcctctcagtggctcccggaggacccggcgggcccagtgttggaggaaagtaatggaccagtgaaggtgtggggaagcattaaaggactgactgaag

SEQ ID NO: 232604 - DNA, 98 bp, Homo sapiens
tgaagttgttcattgtttgtcaccacaaaaaggacaggatctacagcgagatattgaacaacacagcgcaggggtggagtccgtgtttaacatctgtg

SEQ ID NO: 232605 - DNA, 98 bp, Homo sapiens
gctgctggctgcgctctgcccggcgagtcgggctctggaggaaaagaaagagccaatcttcggacgtggtgattgtctcctctaagtacaaacagcgc

SEQ ID NO: 232606 - DNA, 98 bp, Homo sapiens
gtgtgtaacgactgtaatcaggttgtcaaaccgcaggcatttcaatcacattatggttgcacaccgatgctccagaattgtgagggagccatactcta

SEQ ID NO: 232607 - DNA, 100 bp, Homo sapiens
cgcgtggatcctgctcaccttgggcttggtggcctgcgtgtcggcggagtcgaggacagttatgggatggatgggaaggttaatcagccccgtctcactg

SEQ ID NO: 232608 - DNA, 74 bp, Homo sapiens
gctcgatcttgggacccaccgctgccctcagctccgagtccagggcgagagccccccaagatgaacccagtggt

SEQ ID NO: 232609 - DNA, 82 bp, Homo sapiens
atccccatttgaacaagcaaagaaggtgataaccatgtttgtacagcgacagttgcctgacctggtaccccagctggggaca

SEQ ID NO: 232610 - DNA, 96 bp, Homo sapiens
ataaatgggaacaggccagcaaaacactcagctgcaagtccaaagccacaagtactatactggcaattgctggagaagattttgcaattgttgctt

SEQ ID NO: 232611 - DNA, 75 bp, Homo sapiens
cggcttcccccaaggaatatacagattccagctaagaaagagtcttgtccaaacactggaagagacaaagaccac

SEQ ID NO: 232612 - DNA, 101 bp, Homo sapiens
ggctcgaagggatactggttcgtccttactgcggaaagcttgtcctggtataaagatgatgagttatcaagtgggaatcctgtatatgaaaaatactatag

SEQ ID NO: 232613 - DNA, 98 bp, Homo sapiens
agaaggccctggacacagcaatatctctgggctttcacagatgctctacccatggtaccccaggaccagaaggcaaccatatttcagatttaccactt

SEQ ID NO: 232614 - DNA, 75 bp, Homo sapiens
gggaggatgacggagctgcagtcggcactgctactgcgaagacagctggcagcaatggctgccatccggaagaaa

SEQ ID NO: 232615 - DNA, 82 bp, Homo sapiens
aattttggctcctaaagattttgcagaacagagatgacatgccagcccagactttcatgtcgtgtacaacgtgggactctgc

SEQ ID NO: 232616 - DNA, 89 bp, Homo sapiens
agactcctgtctccttccaagggctaggcctgggggaccagaagcaagagatgagcctgaagtcttgacagaacctccaagtgccacaa

SEQ ID NO: 232617 - DNA, 75 bp, Homo sapiens
gcatcttcttcgtgaggctgctcttcgagcgtggtcatctccatcagaggcaactgaaagtttcttatcaaaaga

SEQ ID NO: 232618 - DNA, 100 bp, Homo sapiens
gccgcatccgctgcgctgtagcctggaggctccgggcgcggggaagtcatgctcgcttcacggaggcaatagctagccgcaggaacgaatgcaggaattt

SEQ ID NO: 232619 - DNA, 75 bp, Homo sapiens
gcggaggctcgcgagatccgcatgaaggagctggagcggcagcagaaggaggttatacattggctcttcaaagac

SEQ ID NO: 232620 - DNA, 75 bp, Homo sapiens
acgtgctttcccattttgctcagcgactgtttgatgacgtcccgcagatatttggagttcttacaacatggcaga

SEQ ID NO: 232621 - DNA, 97 bp, Homo sapiens
tttgtacggcttagaggacttccctttggatgtagcaaggaagaaattgttcagttcttctcagtgttccttgcctgtatctccccttggttcaata

SEQ ID NO: 232622 - DNA, 75 bp, Homo sapiens
cggaagagcgctcccaggagaaacaagccctcagtctccgaggaggatctcaaggtcctgttttccagcaatggg

SEQ ID NO: 232623 - DNA, 82 bp, Homo sapiens
gcagccgccgagccggacgtgtccgcgaagatggcgggccggacaaaacttacctggggtccctacttatggttttacatgc

SEQ ID NO: 232624 - DNA, 96 bp, Homo sapiens
tggcattgttcaagtacccactggaccgtggttttgcaggaaatgtgaatctcaggagagagcagccagagtgggattaatgaaaatcaagttcca

SEQ ID NO: 232625 - DNA, 51 bp, Homo sapiens
cagttaactacctcaaagaattagagctggttccatatctacgatccaatc

SEQ ID NO: 232626 - DNA, 87 bp, Homo sapiens
gcctcagcctccctggtagctgggattacaggagtttttcggagctgtacacgctgtcgctgcaggagcctagccggcggggggccc

SEQ ID NO: 232627 - DNA, 83 bp, Homo sapiens
ggagtttttatgatgatgtcacagtaccagaatggttttagggaagactgttgccggatgacaaggctgtcactattgttctg

SEQ ID NO: 232628 - DNA, 82 bp, Homo sapiens
tgtgcttggtggagcagctgcctgggagaatgttgactctactgcagattccaaaagatgagcatattcttcggttcctccg

SEQ ID NO: 232629 - DNA, 100 bp, Homo sapiens
ttcacttattcatctgtccagcatgactcatccccgggagtgttgaaacaaaatccagtctcatagcagaggagaatataatgtttacagcaccttccag

SEQ ID NO: 232630 - DNA, 98 bp, Homo sapiens
tgaccccatatatgattttctttaaggatggtttagaaatggaaaaatgtgtggaagttgatgggtcgaaactaaatgtgaccagcacgtggaacctg

SEQ ID NO: 232631 - DNA, 100 bp, Homo sapiens
agaaggcaaagttgaccagatccgagccagagtggagcgtaacgcagtggacccagatgatgtggtaccagttggccaaagaagagcctggtgttggtgc

SEQ ID NO: 232632 - DNA, 100 bp, Homo sapiens
catgaacccttccctatgtccaaaaacgtttttcctgataactggaaagttcctcaagatggagactttgactttgacccagatgatgtggtaccagttg

SEQ ID NO: 232633 - DNA, 51 bp, Homo sapiens
ttcgaggtggagtcggagctgggacgggcagctgcaatgactctccgcacg

SEQ ID NO: 232634 - DNA, 80 bp, Homo sapiens
taccttgtatgcctcaatttgctggatttaagcactgctgcactttatgagatgccatggacaatattaccaggcagaac

SEQ ID NO: 232635 - DNA, 76 bp, Homo sapiens
ttcagacattacgagaaatgttagagaagaaagacagctttgtggaagagctaatggcagcattagccgctgttgg

SEQ ID NO: 232636 - DNA, 97 bp, Homo sapiens
aagcagccgatcatggcggatggcccccggtgcaagaggcgcaaacaagccaatcccaggaggaaaaacggagttccgattctgaagaggcatttga

SEQ ID NO: 232637 - DNA, 83 bp, Homo sapiens
gatgacggagctgcagtcggcactgctactgcgaagacagctggcagttccagggtctccctccactgctgtagtaacccggg

SEQ ID NO: 232638 - DNA, 82 bp, Homo sapiens
cgaggtttcttccactcagcctgtgggagtctctatgctgcagtgcagaaaatctatttcaggaacttcaggaacattttca

SEQ ID NO: 232639 - DNA, 98 bp, Homo sapiens
atgtcaccatcactggctctccggtctccatcgccctggcccagtacctcatcactgcctgctacctgaacgacctggagcgtattgcacagagtgac

SEQ ID NO: 232640 - DNA, 90 bp, Homo sapiens
tcctggcccttttgaagaggaaatgaagggtattgccgctgttactgatatacctttaggaagttaaatgaagttcgaaagagattgaat

SEQ ID NO: 232641 - DNA, 100 bp, Homo sapiens
cttaacgccagtcttgtacctgtctctgtgggacgccctcaagtacctgggggaggtggtggaattgggcatcctggaccagctctccactgaggagcgg

SEQ ID NO: 232642 - DNA, 98 bp, Homo sapiens
ttctccattcccagtgggatcccagacttgccccaggacacctttatccagtttcctggatggaccaagagcctgttcatccgagcagtgcgggcata

SEQ ID NO: 232643 - DNA, 90 bp, Homo sapiens
gcaagggctattcctgaccaagaagatctaaagagaacgtctctgaaatcaagtccggatgaagtagaaaacccctttggtgaaacattt

SEQ ID NO: 232644 - DNA, 74 bp, Homo sapiens
actgcagcgtcttgtccacccagatttcttcagccagaggtctcaggccacggcagagacaacgtgtgtacccc

SEQ ID NO: 232645 - DNA, 75 bp, Homo sapiens
ctgacggtcatcaaccagcaggaggactccagcgagggtgactatgaccagagcaggaccaaagtgctgcacatg

SEQ ID NO: 232646 - DNA, 83 bp, Homo sapiens
gattgttgggtatattttggaagtgtgccagaattgagcttactcacatagcatattggtatatcaaaatgaaatgcaaggaa

SEQ ID NO: 232647 - DNA, 100 bp, Homo sapiens
actgcgaagtccacccagcgttccggagggtttggaaatcccttgtctccaggttgctgggattgacttcttgctcaattgaaacactcattcaatggag

SEQ ID NO: 232648 - DNA, 100 bp, Homo sapiens
cggtgcctggccctctagccccgctaccggactacatgtcggaggagaagctgcaggagaaaggcccttgggactgaaagaatccaagatctggatctcc

SEQ ID NO: 232649 - DNA, 98 bp, Homo sapiens
gatgaaacgaaaataccgagtttgtaatgtgactagacggccagccagtcatcaaacgttatccaggtacctcaagggaagtacaaagttttgccaac

SEQ ID NO: 232650 - DNA, 97 bp, Homo sapiens
cccttgttcccccaaatgtctgactctgactctcggactgagaaacgcaagattgtcactgctgttccaagggcacacgcagagggatttggaattc

SEQ ID NO: 232651 - DNA, 100 bp, Homo sapiens
gctaatggatggttccttgcaaagggcacgtatagcattggtaaagaacgatcgtccagtggaggtgagaggccctccagctgcaggggcatttaaagaa

SEQ ID NO: 232652 - DNA, 78 bp, Homo sapiens
tgatttggatatccctagaacgttgagggcacgagtcgggtcctgagaccagacctgcaaatccaagagacacatctt

SEQ ID NO: 232653 - DNA, 51 bp, Homo sapiens
cacaagcagcagaacttcgggttattgactggggcgactttggggtagagg

SEQ ID NO: 232654 - DNA, 100 bp, Homo sapiens
cggcgttggaggccaccgtttccagtgatgtccttgcattgcccatttttaagcaagaagagtcgagtttgcctcctgataatgagaataaaatcctgcc

SEQ ID NO: 232655 - DNA, 49 bp, Homo sapiens
ctgatgagccttttaggcctgttcaggttgtatccacgccatgcaagtg

SEQ ID NO: 232656 - DNA, 50 bp, Homo sapiens
attacggaagatcatttatatacacatgatggagtcttgctctgtcgccc

SEQ ID NO: 232657 - DNA, 100 bp, Homo sapiens
gtagaagctaagtcctggctcaaatctcttccctccctccctctcccagctgtcagtgcttttggacttgtgctcaggtgtggagagagtatgctctgtg

SEQ ID NO: 232658 - DNA, 83 bp, Homo sapiens
ggataccccgagcggcaccaacagcggcgcgggcaagaagcgctttgaagtgaaaaaggaggcactggctacaattaggcttc

SEQ ID NO: 232659 - DNA, 101 bp, Homo sapiens
ctccagtttcacgggcacattttacctcagccaccgagaaggctacggcaccatgtacatgaagacacggcttttccaggctccgagctctgtccagtggt

SEQ ID NO: 232660 - DNA, 98 bp, Homo sapiens
cagcccccgctgcaaaccccccagcccctactgcaaaccccacgggtccttctctggcctcaattcccgtctcaaggccacgccttccacctacagtg

SEQ ID NO: 232661 - DNA, 90 bp, Homo sapiens
gtcacggaggtagtcatgatctatgacgccgagaagcagaggccccgaggaggagatgttaaagtaacccatcttgcaggacgacattga

SEQ ID NO: 232662 - DNA, 74 bp, Homo sapiens
gggcgccccgcagccccccaacatcctgctcctgctcatggacgactgaacttgctgactgagaaggcaccttg

SEQ ID NO: 232663 - DNA, 100 bp, Homo sapiens
acaacatcacagtaggatccttagttacagtgttggttaagttgacaaggcaaacaatggctgatcccctaacaacagtgagagagcaatgcgagcagtt

SEQ ID NO: 232664 - DNA, 76 bp, Homo sapiens
tttgaacaactttccgaatctgcaaaagaagatggagttttaacattgaatgcggagaacactaattatgcctatc

SEQ ID NO: 232665 - DNA, 98 bp, Homo sapiens
ttgctcacaccaaagccttggacccctcccagcctgtgacctttgtgaccaactccacctacgcagcagacaaggggtagagacggggtttcaccgtg

SEQ ID NO: 232666 - DNA, 51 bp, Homo sapiens
aagcgagaggaggaggaggatgatgagtacattacctgtgctgaatacact

SEQ ID NO: 232667 - DNA, 100 bp, Homo sapiens
ctggaagacctcagaagacctcctgtcctatgaggccctccccatggctttagggccagatattcgaagcttacaacatggcagctttgtggaaattacc

SEQ ID NO: 232668 - DNA, 75 bp, Homo sapiens
ggcgatgatgccacattacctgtccacaaaaggtggctccgattcctccctttctgagccagggccaggtcggtc

SEQ ID NO: 232669 - DNA, 100 bp, Homo sapiens
gggtgaccctgttcctgaacggcagccccaagaacggaaaggaatcccagtcagaagttccagcctgccactgttctctgatgccatgccagcaccaact

SEQ ID NO: 232670 - DNA, 75 bp, Homo sapiens
agacaggagagactgtcagacagttcctgctgctgcccaggtgcatctgaggcggtggccagtttgaatactccc

SEQ ID NO: 232671 - DNA, 80 bp, Homo sapiens
ggttcgagcgctgttctcgctccggagccgctgcacatttcgggaacgggtatggcaatccccgaaactcaccaggtctg

SEQ ID NO: 232672 - DNA, 75 bp, Homo sapiens
gagctcatcagaaatgtgaccctttgtggacatctccaccatggcaaggaggtcccaggtgattgaaaagtttga

SEQ ID NO: 232673 - DNA, 82 bp, Homo sapiens
agcgagagtgcatgagcccgaggaggcagggtctgatgggaggccctgcctgagctgccccctggggagccggaattccgct

SEQ ID NO: 232674 - DNA, 100 bp, Homo sapiens
agaccatgctggcaagtctgaaggtcaatggaatgcagtagccctctgggcctgggatattgtggttgataactgtgccatctgcaggaaccacattatg

SEQ ID NO: 232675 - DNA, 98 bp, Homo sapiens
gccttccgctattcagcagagagctattattccctgtattaaaggtgtcatggagaaactccagctgggcccagagattctgcagcgggaaaatccaa

SEQ ID NO: 232676 - DNA, 83 bp, Homo sapiens
ccaaatatacgggttatctatgccgcagcaacacagtcctcatctgtaaagaatgctgggctcttgcactgtttggtggaaat

SEQ ID NO: 232677 - DNA, 50 bp, Homo sapiens
cctcctgcgtagctgggactacaggggcagagaggaacctgctctacgag

SEQ ID NO: 232678 - DNA, 96 bp, Homo sapiens
catgagatggtggatgaacccccaggttaatttggagtggcccctggagtcagtttcctacaccatccgaggccccacccagcacgagctacagcc

SEQ ID NO: 232679 - DNA, 90 bp, Homo sapiens
gcgggcaggagcctggcgaggatgcaccttcccctgccttggaaaggttcaaaccttgtactactcagctgatcacaagctgcttgatgg

SEQ ID NO: 232680 - DNA, 75 bp, Homo sapiens
gtgtatgtagaagaccagaagtggatggagaaggtaccaatcttgggaaaaagaagcaacacatttgtcatatac

SEQ ID NO: 232681 - DNA, 75 bp, Homo sapiens
tccaagaagacaaagtctagttcagaggagagtagatccgagatatatgttcacttagcagccatggaaggccac

SEQ ID NO: 232682 - DNA, 99 bp, Homo sapiens
cccggcccctgccctggttccgttgcgcgccccggatgtggcgcggctgcgcgaggagcaggaaaagaacggggaagataaccgaagggtggtttgaga

SEQ ID NO: 232683 - DNA, 98 bp, Homo sapiens
tttgatgtgccgtgtggaggaagagattgcagtgggggctgccagtgctaccctgagaaaggtggacgtgtgctacagaatattttagaaacagaaaa

SEQ ID NO: 232684 - DNA, 98 bp, Homo sapiens
tctggtatggacacagcttctagtgttgctttggatcttgtggaaagtcagagtaaagaacaagcacctttggagatgagtatgcatccagcggcaag

SEQ ID NO: 232685 - DNA, 74 bp, Homo sapiens
tgctgctcctgagggtgctggaccccctgctctgcgacttcctgggtgtcgcccttgatctcaggatgctacca

SEQ ID NO: 232686 - DNA, 97 bp, Homo sapiens
agacccgtgagccagctgagactgggggctacgccagcttggaagaagatgatgaagacctttccccaggtggaacgggcccttcatcagatgctgg

SEQ ID NO: 232687 - DNA, 75 bp, Homo sapiens
cccggccatctcgctgcccgacgatgtccgcaggcggaagctcttcgtgggcggtcttgactggagcacgaccca

SEQ ID NO: 232688 - DNA, 90 bp, Homo sapiens
gttctgacaaagatgaaggaaattgcagaagcctaccttgggaaggaggccaagtttgctgtggttctggaagaggacctggacattgct

SEQ ID NO: 232689 - DNA, 83 bp, Homo sapiens
cgctactctctctttctggcctggaggctatccagcagaggtggagaagagcgagtacttgagaaagaagaggaagaagatga

SEQ ID NO: 232690 - DNA, 82 bp, Homo sapiens
agcgagcgcggcgcggggccaccatgggggcccagctcagcacgggcctgggttccaataaataattgctacctcatgtcta

SEQ ID NO: 232691 - DNA, 75 bp, Homo sapiens
agaaaaatcctggatctgtatgctttgagcaagatatccagctcctcttcaccaaggcccattgcgacagcagca

SEQ ID NO: 232692 - DNA, 80 bp, Homo sapiens
gtccagcctaggttccacccttttctgggaacgtgagtatcaaccaagtgacttatcagatgccctggtcatcttccagc

SEQ ID NO: 232693 - DNA, 75 bp, Homo sapiens
ggtcacttgaaccttgggaatattgaggatgctggatgagtactttgaggagcagatgaaggagatcatccgaat

SEQ ID NO: 232694 - DNA, 95 bp, Homo sapiens
cccggacccaaagtgccatgtctttaattttttacccacctcttgatgaaccatctattggaagtaaaaatgttgatctgtcaggacggcaggaa

SEQ ID NO: 232695 - DNA, 82 bp, Homo sapiens
ggactgagtcctgcaggacacaggtcatgagtgacactgaatatgcagagtggctgaggaatcattttttagctgaaaccag

SEQ ID NO: 232696 - DNA, 102 bp, Homo sapiens
aaacagcccgcccgaccccgtcccgaccctggccgccccgagcggagcctggagccttatgccagcctggaccatcttggaggcagtgtaggatcatggaag

SEQ ID NO: 232697 - DNA, 106 bp, Homo sapiens
gcccgtcggacggggaggaggagcaggagctggaggaggagccgccgccgccagccaaagaagcctaaagccccagacaatccatttcatggcattgtttccaagt

SEQ ID NO: 232698 - DNA, 80 bp, Homo sapiens
ggctggacgcagcaagcggggcgctgtgtccccaagctccccgtcctcggtgtcttgggacaaggtgcgcattcctggtg

SEQ ID NO: 232699 - DNA, 141 bp, Homo sapiens
cagggaacagcaatgggaacgccagtatcaacatcacggacatctcaaggaatatcacttccatcttcgttccagagcccagcatgaatggatacgcggaatttccgcccagccccagtaaccccaccaaggagcccgtgg

SEQ ID NO: 232700 - DNA, 90 bp, Homo sapiens
agatttgatgctcttgtgctcagtgacatcattcaggtcttggcagcacctgtctcctttcaccccagggcctgagcctggccagcctac

SEQ ID NO: 232701 - DNA, 82 bp, Homo sapiens
tgcaaatatatagagcacctggaagcagtaacatgcaagttatcaatactctggctgaccatcatcatcgtgggactgactt

SEQ ID NO: 232702 - DNA, 90 bp, Homo sapiens
agatgtctcgctccgtggccttagctgtgctcgcgctactctctctttctggcctggaggctatccagcacttgaaagagggctccagaa

SEQ ID NO: 232703 - DNA, 90 bp, Homo sapiens
aatgaggaatctgttcgccaggcaaccaagcggagttcatgatcaagtgttgcccacaccaaatgcttcatccagagtcatagtacatgt

SEQ ID NO: 232704 - DNA, 134 bp, Homo sapiens
ccttgcccgtgaccgtcgctagaactcagttgtgcgttgcggccagtcgccactgctgttggtcaaagaaaaagtgatgtatgaaaaagaggcaaaacaacaagaagaaaagattgaaaaaatgagagctgaag

SEQ ID NO: 232705 - DNA, 75 bp, Homo sapiens
gacataggacactctggccatgtgtccctggtggtgaatgtggccagcgagtgcggcttcacagaccagcactac

SEQ ID NO: 232706 - DNA, 107 bp, Homo sapiens
attaaaagttaaacccaggaagctttggatcagacttttgtgttgcagttcggggcgccctgcgtccggcagaggaggcgagcatcccgctcaggtgatgaggaacc

SEQ ID NO: 232707 - DNA, 75 bp, Homo sapiens
gcccacggaggaagagtgggagtttgccgcccgagggggcttgaaggatggagtctcccaggcgggaatgcaatg

SEQ ID NO: 232708 - DNA, 75 bp, Homo sapiens
aagaacttcttcagaattagaaaggagctgcttcccaataaggaaacatataaccccgttttcacacgaatggcc

SEQ ID NO: 232709 - DNA, 101 bp, Homo sapiens
cgcggccagacctgcgtggtgcactacaccgggtgaatttggaagtgaaaagaaaactgctttgcatgaaaaagaggagacacttcggcttcagagtgcac

SEQ ID NO: 232710 - DNA, 75 bp, Homo sapiens
cgcccgccaccctgcgctgccgccgctctgaggagttaaaggattttttatcaagcagaaatgcatcgaacaacg

SEQ ID NO: 232711 - DNA, 98 bp, Homo sapiens
tgacctgtggagacacggccagatctgccctccagctggcgcccatgcggctctacacgctctccaagcgccactttgtcctcgtgtttgtcgtcttc

SEQ ID NO: 232712 - DNA, 82 bp, Homo sapiens
aaaagaaatgatgcaattgtatatcagacctccaccaggcggtgtgaagatgcctaatgtacccaatacacaaccagcaata

SEQ ID NO: 232713 - DNA, 108 bp, Homo sapiens
tttgttgccataatcatagaggcaagtgggggaggagcgttccttgtcctccctctgcacaaggctgaggctgaggtggcctccttgaaccgtaggatccagctggtt

SEQ ID NO: 232714 - DNA, 117 bp, Homo sapiens
agggccacaaagtgaccaagaacgtgagcaagcccaggcacagccgacgccgcggggtgagaagccctaccactgcaactgggacggctgcggctggaagtttgcgcgctcagacga

SEQ ID NO: 232715 - DNA, 51 bp, Homo sapiens
cggtgagggacctgcccagacctggagagctgaggaactgcgtgtggagtc

SEQ ID NO: 232716 - DNA, 75 bp, Homo sapiens
ctttactgcagagcgcgccgggcactccagcgaccgtggggatcagcgtagatattaataaggcagcggaaagaa

SEQ ID NO: 232717 - DNA, 83 bp, Homo sapiens
cgaggagcgcctgcctgaggagagcagcagcgatggattttgggtggggaagtcctccttgcggagttggcgccagctagctc

SEQ ID NO: 232718 - DNA, 75 bp, Homo sapiens
atgtgactaatttgtccaaagagagtcgtgagatggagaataaagaaactctcaaagggttgcacaagatggatg

SEQ ID NO: 232719 - DNA, 100 bp, Homo sapiens
ggcggtgattgcagccccagacagccggcgctggctgtggtcggtgctggcggcggcgcttgggctctgccctcgggaccaaggatcacgtcatgactcc

SEQ ID NO: 232720 - DNA, 75 bp, Homo sapiens
tggaacccctggagcaggaggaagcggtgattctccaggccttggcccgtggaccgggagcccgtggaccgggag

SEQ ID NO: 232721 - DNA, 100 bp, Homo sapiens
gatgaaggccgagggcttcgtggatgccctgcaccgggtccggcagtgcctggatcaaagtggaacagctgaagccatatcatgctcataaagaggaaat

SEQ ID NO: 232722 - DNA, 98 bp, Homo sapiens
tgtagacgccccttcgccgggacctggcacccgaatccggcctgccggagaaggtgttcgccagcctcccgcaggtggagaggggcgtctccaagatc

SEQ ID NO: 232723 - DNA, 75 bp, Homo sapiens
agtccaggtaccagccagtccagacaccgttccacagccttctctcagattagctttatttgctcaccgtgaaga

SEQ ID NO: 232724 - DNA, 124 bp, Homo sapiens
caaacggcgggaacccattcccagtctggaggccatttatttgctgagccccacggagaaggtggaggaggagctgacgcacctccagaagaaactaaaagggacagaggacgagctggataaa

SEQ ID NO: 232725 - DNA, 87 bp, Homo sapiens
tttccccaagacaaaagtaatttccagcagatggaagtgccgccacgaccagtgggttacagctcagttgtggcagacagcccggca

SEQ ID NO: 232726 - DNA, 76 bp, Homo sapiens
gaacatggcatcatcaccaactgggacgacatggaaaagggttggatgggctgtctgagcgctgtgcccagtacaa

SEQ ID NO: 232727 - DNA, 83 bp, Homo sapiens
cggcttcaaagagaaaaggcaacatcctgtcacaggccatgctctggcaaaaacgattctgaaaccttccttgtatccctcct

SEQ ID NO: 232728 - DNA, 51 bp, Homo sapiens
ctggagccgaggcgcaggtggcgctgggaagctcttcgtgggcggtcttga

SEQ ID NO: 232729 - DNA, 78 bp, Homo sapiens
tcaccttgatgctggcgatgctgagctccctactggctgagggcagagactctcccgcaagaggtggaaacatacaga

SEQ ID NO: 232730 - DNA, 100 bp, Homo sapiens
ttctttatgacatgtactcctatgtttgggatatcaagagtataatgtctatggtgaagtcttttgtacagtggttaggcagatcgggagcggtgccgag

SEQ ID NO: 232731 - DNA, 98 bp, Homo sapiens
ccagtggcggctgccaaggagacggaggaggacttcatccaacccagcagccgagaagaggcccagcagctgtgggaggctgaaaaggtcaaaatgcg

SEQ ID NO: 232732 - DNA, 98 bp, Homo sapiens
ctaatctccacgcccagaaattcagacaagagcattctccttatctcatctgcacaggaagcaggtctaagagaatccttgatacgaactgcattcca

SEQ ID NO: 232733 - DNA, 102 bp, Homo sapiens
cgggaggaaggaacgaggcaaggagctaaagcagcgtgcgttcagccctgggcccagctcaacattggcaatgtgctccctgtgggcaccatgcctgagggt

SEQ ID NO: 232734 - DNA, 98 bp, Homo sapiens
cacgctgcatcatgagtgcagccggctgcaggagcagctagcgcagagtgaagacatttccacctggacacctgaccatgtgcctgccctgagcagcg

SEQ ID NO: 232735 - DNA, 83 bp, Homo sapiens
ggagaaggcccagccaatgaagatgaagacataggagaagtttgcctgcaatggtactgtaattgagcatccggaatatggag

SEQ ID NO: 232736 - DNA, 75 bp, Homo sapiens
cccatctgaggcgtttgttgcagctacctgcacttctagataattatatccagatcgagagacagaagattctga

SEQ ID NO: 232737 - DNA, 100 bp, Homo sapiens
aacatcaccatgtcgcgggaggcagacctggactttgcaagatacgatgaatggattaaagcagataaaatagtaagacctgctgataaaaatgtgccaa

SEQ ID NO: 232738 - DNA, 100 bp, Homo sapiens
gaatgtttaattaatcaggaatgtgaagaaattctacagatggatgcatctggaccctcagatagtgatatgccaagtcggacacgacctaagagcccaa

SEQ ID NO: 232739 - DNA, 51 bp, Homo sapiens
aagaacgggaacaaaactctgagaaactcttgctactcagttggatctagc

SEQ ID NO: 232740 - DNA, 98 bp, Homo sapiens
cctgagcaaggagcgggtccgtcgcggagccggagggcgggaggaacatgacatcgcggagggtgcccgggaaacatttgagaattactaccgaaaac

SEQ ID NO: 232741 - DNA, 75 bp, Homo sapiens
ccgggtcatgttaattgggaaaaagatgatgaggagtctgatgaggaagctgtgaagaaaaccaacaaatgtgta

SEQ ID NO: 232742 - DNA, 75 bp, Homo sapiens
tcttctttctcagagctacgttaaaatgtataacaaagctgtcaagctgcctccttctgaagaaataaaaacagg

SEQ ID NO: 232743 - DNA, 98 bp, Homo sapiens
tggatttatttctcgattcgctgtcggaggagaatgagaccctggtggagtttgctattggtctccagtgggggctgcagactaagcaaaatgaggcg

SEQ ID NO: 232744 - DNA, 114 bp, Homo sapiens
aaggagagccccctgcctcgccttgtggagggccttgatcagttcacaggttccagagagattcctggaagttgctcagatcacattacgggagtttttcaatgccattatcgc

SEQ ID NO: 232745 - DNA, 90 bp, Homo sapiens
gtcgcgggccccgcagcgcatcccggcgtgtcggacagagctccaaacgagaatggaagccgctggaggaccgtagctgcacagacatac

SEQ ID NO: 232746 - DNA, 75 bp, Homo sapiens
cgcaaacgaaaaagaacgacatgatgcaatcttcaggaaagtaagagggaaccactcgttttgactattatttta

SEQ ID NO: 232747 - DNA, 96 bp, Homo sapiens
ttcctggaatggcaagcgcagcaacaacagagagcacgtggtccagccctgctgggagttttctgccacacagatttgcggaagaacctgaccgtg

SEQ ID NO: 232748 - DNA, 101 bp, Homo sapiens
gtgtttggggaattggctattctttacaactgtacccggacagcgaccgtcaagaacacctgaagaacatgaactggagactggaataaaatcaaaagaag

SEQ ID NO: 232749 - DNA, 83 bp, Homo sapiens
agcaacttggcgaggttcagactcttggagccagaagctacatgacccctaaacggttaaataggattgcgaatcaggtggcc

SEQ ID NO: 232750 - DNA, 100 bp, Homo sapiens
ccaagttggaaaaagaaatggaacagaaacatagagaggaactggagcaattgaagctgactactaaggagaataagggctcccttaaggaaaagacagt

SEQ ID NO: 232751 - DNA, 96 bp, Homo sapiens
gagcacagagaaagagaatgatgaagagaaaggcccggagactttttacaggcgtttatcagaggaaatgacacaaagaagatgggagaatatgcc

SEQ ID NO: 232752 - DNA, 82 bp, Homo sapiens
cgcaggaacacggggactgtcggatggctcgttcggaacaccacctggatacggctgcgctgcagaccgggcagaggagcag

SEQ ID NO: 232753 - DNA, 80 bp, Homo sapiens
gcagggaccatggaatccagagctgagtcttccccagggaggtcctgaactacacagctgagaacatctgtaagtgggcc

SEQ ID NO: 232754 - DNA, 50 bp, Homo sapiens
gcacctcccgcgccgcacggtggacgagctgctgatgcaaggaatcccct

SEQ ID NO: 232755 - DNA, 59 bp, Homo sapiens
ggggcggcggccacgccaaggacgggggatatcattttcaatgcccaatacccagaact

SEQ ID NO: 232756 - DNA, 73 bp, Homo sapiens
aagctaaaaatgattcgggaatatcggcaaatgggtgtgggccgaagatatgctcatgtggtgttgaggaaag

SEQ ID NO: 232757 - DNA, 75 bp, Homo sapiens
ggaacatggactgaagtatccagcgctcattgggaatttagttaaggtgatctgcaactctttcaccatctgtaa

SEQ ID NO: 232758 - DNA, 89 bp, Homo sapiens
gcattttccaagtactgtaaattcctgtgcagaaggcatcgtcgtcttccggacagactatggtcaggcacgtggactccctttaatcc

SEQ ID NO: 232759 - DNA, 98 bp, Homo sapiens
aaaagcaaaccgatgtccaggggtcttgtgcaggacctgaaagttctcttcaccctctgaaaacaagaggatgtgtagcatagtgagcaacagctgtg

SEQ ID NO: 232760 - DNA, 90 bp, Homo sapiens
ggccgccaccaagatgagcagggcccttgcggagttccgcgtccgaggtgtgaagcttcggaaccaaaaagaagcttcccagagccgggg

SEQ ID NO: 232761 - DNA, 83 bp, Homo sapiens
ccagaggccaactgcagaggaactggaacagaggaacattttgaaacgtagcccctgaagaagatgaaaggaaaaagaggcga

SEQ ID NO: 232762 - DNA, 75 bp, Homo sapiens
cgagagctcgccccgaacgggggtcttcctcctccgccgttgacagaacccagtgacttgattgtaaaaatttac

SEQ ID NO: 232763 - DNA, 75 bp, Homo sapiens
ggccgagcaggaggcgccatcatggcgcatgccaagcttactggagtatttgagttacaactgtaacttcatggg

SEQ ID NO: 232764 - DNA, 90 bp, Homo sapiens
ctgcggatccccttgcacaacgaggacgccttccagcacggcatctgctttgaggccaagtagtattattgattccacagaatacagcca

SEQ ID NO: 232765 - DNA, 75 bp, Homo sapiens
ttagaagaattcatgctcatccgggactctgtctactagtgacgatgtcgaagacagggaaaatgaaaagggtcg

SEQ ID NO: 232766 - DNA, 101 bp, Homo sapiens
catggagaagatgttcaagcaatcccttcccactggaggcatgtgatgagaggaaatcaccgaaaacgtggctgcttcaaggatcctgagccagatttcac

SEQ ID NO: 232767 - DNA, 75 bp, Homo sapiens
gctgtgtggttgcaacggagataaattcccggaaccgcgattcggcgtgtcaggagttgataccaagttgaaatt

SEQ ID NO: 232768 - DNA, 100 bp, Homo sapiens
aagaagaagaagctgcggaagcccagacaccaggaaggtgagatcttcgacacagaaaaagaggcagaaccaccccagtgcacctccctggcctggtctg

SEQ ID NO: 232769 - DNA, 98 bp, Homo sapiens
agccagccgggacggacatgcgcgggagggcgccgcggggcagccgccgctcctccggggcatcagcaatgcagaagcacggcagccagggaaggccc

SEQ ID NO: 232770 - DNA, 90 bp, Homo sapiens
ccctacatcttccatgtcctgacgaagcttcttccagaccagctggtcttgcttctggagcatctcttggagcagaagactctgagcccc

SEQ ID NO: 232771 - DNA, 120 bp, Homo sapiens
gtggaggagctgtgcagccgcgaggaggcgcgggaggtgttcgagaacgaccccgagacggaatactcccccagttgcaagaggcgcaggaccgtggaagacttcaacaaattctgcacc

SEQ ID NO: 232772 - DNA, 100 bp, Homo sapiens
gacggcgacggctacaagaagcgggccgcatgcctgtgtttccgcagcgagagcgaggaggagaaacgatggaaagaactttctaaggaagacttatctc

SEQ ID NO: 232773 - DNA, 75 bp, Homo sapiens
agagtgaagatgagttgacaccttttgacatgagcatccagaaggaccctctattgtcccaggcctgtgttggct

SEQ ID NO: 232774 - DNA, 98 bp, Homo sapiens
gaggtgaaccagctccgggagaaatggttccagtctcatcagattttccatgtcctggtggtggcagcagcctttgtccacttctatggagtctccaa

SEQ ID NO: 232775 - DNA, 100 bp, Homo sapiens
gccgcggatcgccgcgctcagcgacaaacaaacatttatgcagtgtgtgattctttctaaaacaactccctggaagagaggacatttaattcaacaattt

SEQ ID NO: 232776 - DNA, 94 bp, Homo sapiens
ccgcgttcccagcccgggtccccgcgttcacagccccagcgcagtgtactaatggtcacttgatgtgcgctggctgttttatccacctactagc

SEQ ID NO: 232777 - DNA, 75 bp, Homo sapiens
ctttctgataaagacaaaaagatcttcatgattgtcattccactccaggatcagtttgacaacttagaaaaacac

SEQ ID NO: 232778 - DNA, 100 bp, Homo sapiens
agcgggcagtggtggggttgctacgcctggccattcggcttctccggagagaagagatcagtgctcaggatcccgttgaagataccacattacacttagg

SEQ ID NO: 232779 - DNA, 85 bp, Homo sapiens
aggaatacacttatttatgaagtggcttgctttggtgaaggtattcatacagccttcctaaaggcaatgctttccacaggattta

SEQ ID NO: 232780 - DNA, 98 bp, Homo sapiens
cctcctgctcttacttgtcctgctcctgctgctcgaggacgctggagcccagcaagtggcttttcatggcctgccactgaaaatcaagaaagaacccc

SEQ ID NO: 232781 - DNA, 75 bp, Homo sapiens
cagccgatccagcctgcggagcctgtggggcagatggccaccatgtctgggagatggaagcgaaaactgaccggg

SEQ ID NO: 232782 - DNA, 100 bp, Homo sapiens
aatttttggactgtgctctcaaactttactttgcctcatttgaggagtgggaacaggcttcggcgaacacaaagaaccatccgggtatggctgaaaagag

SEQ ID NO: 232783 - DNA, 89 bp, Homo sapiens
gaagtagaaagtctgaagcgggaactccaggagagagagcagctgctcatcaaagcctcccctgactataatgtggaatttttccgaca

SEQ ID NO: 232784 - DNA, 100 bp, Homo sapiens
cacaaaccccaatctcagtggacaaggcaggtggacacgaacaccaaaaatgtctttgggcaaccgaggttgagggcatccctccgagacctccggtcac

SEQ ID NO: 232785 - DNA, 98 bp, Homo sapiens
gcaaagaatgaccgttcaaagagcgaaagcaaccgggaagcgagcagctgcaaagcatctaatagaacgctactaccaccagttaactgagggctgtg

SEQ ID NO: 232786 - DNA, 50 bp, Homo sapiens
caaagggtactttttagaaccaaaggtctatgaaaattatcctacttatg

SEQ ID NO: 232787 - DNA, 100 bp, Homo sapiens
ctgaggaggctgcggctaacagggcccagagttagagaaggaacggcagcgacacatcggcaagcctttacttgggggaccgttttccctcacaactcat

SEQ ID NO: 232788 - DNA, 100 bp, Homo sapiens
ggactaagcaatgcaagaaaatttctcgtaacttcagcaacaaatggagacgttccatgctcagatactacaggttatactactccaactgccccccagg

SEQ ID NO: 232789 - DNA, 82 bp, Homo sapiens
ttggtgaaatggtgctggccattgactccatccatcagcttcattacgtgcacagaggctgacccgcggctgattgagtccc

SEQ ID NO: 232790 - DNA, 82 bp, Homo sapiens
gtggctattgtgaaggagggttggctgcacaaacgaggagcatcagatccatgctgctgctgactcggagccccacagcttg

SEQ ID NO: 232791 - DNA, 75 bp, Homo sapiens
aagaagtactgccaagtcatccgtgtcattgcccacacccagcccacttcgatgtgttgttcttgtcgcacttag

SEQ ID NO: 232792 - DNA, 87 bp, Homo sapiens
aggaatcagacagtgatggggaggcaccggcagctgtgacctctgcccagcccatgcagaatgccaccaagtatggcaacatgacag

SEQ ID NO: 232793 - DNA, 100 bp, Homo sapiens
gcgcctggaacgccgattcaattcgatattgtgcttcctgctacagaattccttgatcagaacagagggagcaggagtgaaagctggacattgaagaagc

SEQ ID NO: 232794 - DNA, 98 bp, Homo sapiens
ggagaaccaactggtcccgaaagaggtctaacttcaaacttgtggctgttaattcaaaactctatgccatcggagggcaggccgtttctaacgttgag

SEQ ID NO: 232795 - DNA, 100 bp, Homo sapiens
gtgaagtgtctgcgctgcctgctctacgccctcaatctgctcttttggattgactttgaagatgtgattgcagaaccagaagggacacacagttttgacg

SEQ ID NO: 232796 - DNA, 100 bp, Homo sapiens
gaggtggatcaccagctgaaggagcggtttgcaaacatgaaggaagcttcaaaagcagtggactgtcttttggattcaaagtgggcaaaggccaagaaag

SEQ ID NO: 232797 - DNA, 82 bp, Homo sapiens
cggcgactggccggcggggctgaccacttaccgcagcatccaagtcggccctggtcaaaatgcagatcttcgtgaaaaccct

SEQ ID NO: 232798 - DNA, 100 bp, Homo sapiens
agattattgagcggctggaccacctggagaatgtcatcaagcagcacattcaagacagtactactggtatgacgagcgggggaagaaggtcaagtgcacg

SEQ ID NO: 232799 - DNA, 88 bp, Homo sapiens
agcagcccagacgcggcacagagagggcctgggagcttgctgcagcttcaggcacgggcgagagcgggaagagcacgttcatcaagca

SEQ ID NO: 232800 - DNA, 97 bp, Homo sapiens
gaagggatacccttccatttcaaagaacagaatgctaaggaagctgtggcaagtggaacattgagaatttatgcagatagtttaaaaccaaatattc

SEQ ID NO: 232801 - DNA, 98 bp, Homo sapiens
ggcggatggccccaggtgtaagcgcagaaagcaggcgaacccgcggcgcaataacgcctttctgagaaaagtctacagcattctttctctgcaggttc

SEQ ID NO: 232802 - DNA, 75 bp, Homo sapiens
ggcggggactggccacggcgctgctaggtcaaaagaaatagactggcaaccttattttactacacgcattgtaga

SEQ ID NO: 232803 - DNA, 112 bp, Homo sapiens
agaaggtggtggtcaccacaccactgcaccgggacaagacacccctgcaccagaaacatgctgcgaaatatgttcaagtttgtgtccagaatttgtcagaacttgactttca

SEQ ID NO: 232804 - DNA, 100 bp, Homo sapiens
ttgatagcaaagaagataaagttgacagcagaggcagagagcaccaaaactactttggaatagatgaaaaccttggtccagtagcagtcagcatccggag

SEQ ID NO: 232805 - DNA, 75 bp, Homo sapiens
ctcctccttggtcgccgcgtccttggctggcgtcaaccaaccagtggttcatcccagccgtgaggggggacattc

SEQ ID NO: 232806 - DNA, 100 bp, Homo sapiens
cttggatatagccatgattaaaatggtcgccccgtccatggcctcccgagtgattgatcgtgcgattcagtggattgggccgtggaacaggcccacttcg

SEQ ID NO: 232807 - DNA, 75 bp, Homo sapiens
agaatggaggaccatccataattcctatctttaaaagaggacattctgagcatgtgagacctgaggactgcaaac

SEQ ID NO: 232808 - DNA, 90 bp, Homo sapiens
aattaatcaaacttggacagctctctatggtcctgtgggaatggccgctgctgctgctgtggcaacaggaaagaaacggaaacggcctca

SEQ ID NO: 232809 - DNA, 75 bp, Homo sapiens
cctgacaagtgtaactcattcctacacaacaaggcggagtggaggtcttcaaagcttcacctttctccaaaggca

SEQ ID NO: 232810 - DNA, 75 bp, Homo sapiens
aggcacagtgcctctgaccagcatcgtctgtaaaggtgttacacataatattgcattacttcgagaggtgataat

SEQ ID NO: 232811 - DNA, 100 bp, Homo sapiens
ctttcagttcaagtgacaaacgtacctgtggtccctggatccagtgctactgctacaaataaggagtcttttagtcctgctatacagctgcaccttgtac

SEQ ID NO: 232812 - DNA, 100 bp, Homo sapiens
tgagccttgtgaagcggatagagaggactggcattgctgccatcgcagttcatgggagaggtcctgtaataaagagggatccgaacaagctcagaaagaa

SEQ ID NO: 232813 - DNA, 109 bp, Homo sapiens
acagcgccttcctcaacgacgcggacatggtcatgagctttgtgaacctggacaatgcagatcttcgtgaagactctgactggtaagaccatcaccctcgaggttgagc

SEQ ID NO: 232814 - DNA, 88 bp, Homo sapiens
aacttccgggtgacttcttctatgtcttccccctctatgcagccaaagaagatgcagatggacgatgtgaagttcatttccaatccgc

SEQ ID NO: 232815 - DNA, 76 bp, Homo sapiens
ggcaatcatcctgaatgaatttagagccaaactgtccaaggctttggcaacccttctcaggtgcagccagagagac

SEQ ID NO: 232816 - DNA, 75 bp, Homo sapiens
gctctacccactgccctcggcccgcggttgacatgatgaaagaagcattagaaaaacttcagctcaatatagtag

SEQ ID NO: 232817 - DNA, 50 bp, Homo sapiens
gacagccttgctgactatttcaagaaggttggggacaccctaggagacag

SEQ ID NO: 232818 - DNA, 100 bp, Homo sapiens
agaaaaatgccagccagaagaggcgttcgctgcgcgtgcacattccggctgaagccgacgtagcttctctgaacagacgcatccagctggttgaggaaga

SEQ ID NO: 232819 - DNA, 51 bp, Homo sapiens
agctgctgcttagctgattggccttggttgtgtctgagtacagggcatctc

SEQ ID NO: 232820 - DNA, 100 bp, Homo sapiens
ctagcaacgcagggaccgcggcggtaactgtggctagggaaacctggagcggtcagagcagctgggacctggaagacccctgcccaccttccccacctcg

SEQ ID NO: 232821 - DNA, 100 bp, Homo sapiens
aagaagatcatcaagcgcaagcacaccctaccgaattacaagatcagtgtcagagatggctttggattccccgttctgtgtgctgctgtctggctcctga

SEQ ID NO: 232822 - DNA, 82 bp, Homo sapiens
aaccccagctggaactccggccacagccagcatgcaggtgaaatgacaatggatgctctgttggctcgattgaaacttctga

SEQ ID NO: 232823 - DNA, 98 bp, Homo sapiens
taaaaactcagttactcaaactgaaacgtctcctgcatcaggtcgcaatgatgatgtcaaatgcttttgttgtgatggtggcttgaggtgttgggaat

SEQ ID NO: 232824 - DNA, 101 bp, Homo sapiens
tcactgcattcaatacctagatgatgaagatgagaatgtgcctactgctcctgatcctccaagtcaacatttacgtgggcatgggacaggcttttgctttg

SEQ ID NO: 232825 - DNA, 82 bp, Homo sapiens
gtaaccacctcacagattccagcttcggaacaagagaccctggttcatcctaagttccactataaacaggctcatgactcgg

SEQ ID NO: 232826 - DNA, 141 bp, Homo sapiens
atcaggacaacaatacattaaaggctgataataacacagttattaatggactgcttggaaatataggaaatctgcagtgaatttcgggaccaagtgaggaatggaacacttatatgcaccagggagcataatcctgtccgt

SEQ ID NO: 232827 - DNA, 100 bp, Homo sapiens
aatgcagaggttccaagaccaattccccgtacggcttcaggtccagagcgtggagaagcctcagtaccgcgggacgttgcactgcttcaagtccatcatc

SEQ ID NO: 232828 - DNA, 75 bp, Homo sapiens
cagcccttctgaggagctcccaaacgtaacacgtacacagacctctcggccggaatctccagggatgaccagccc

SEQ ID NO: 232829 - DNA, 74 bp, Homo sapiens
agattctgtcgtgtcgtcgctgctggcacttcaggctctgcttctgggctggctggctgagaaactacctactc

SEQ ID NO: 232830 - DNA, 50 bp, Homo sapiens
acaggacctgagaatctgagaaactgcagaacatccagtcatggataaaa

SEQ ID NO: 232831 - DNA, 87 bp, Homo sapiens
tggagccatcctctacaggacccgctttctaccattaaggtacaatgccagggagtactacgaccacctgcccgagctgaagcaggc

SEQ ID NO: 232832 - DNA, 101 bp, Homo sapiens
gacgttattaaaccaatgtttgtcatcaatgagatgcggcgctctttcattatcatcctcatcttgatatagttccatgaatattaaatgagattatttct

SEQ ID NO: 232833 - DNA, 100 bp, Homo sapiens
ataacatcctgccactggcatccagtcagatcaggtacaggtgaacaaaggcagagtaaactgtcaccccagatgcaggtacatcaagacaaaaccctgc

SEQ ID NO: 232834 - DNA, 99 bp, Homo sapiens
agtcatttctgttccgcacaggcctgctgaactgggtgctttatatagggtacagaagattatcgatcaaaattaagtggagactgctttgcggatctg

SEQ ID NO: 232835 - DNA, 49 bp, Homo sapiens
ccgcggctccggtcacgtcaccgtattattcagagctgggagagcttcc

SEQ ID NO: 232836 - DNA, 75 bp, Homo sapiens
acggaggtggcagccatctccttctcgggtcctgacttgtcctgggcaagccaagtccattgcttctgctcctgg

SEQ ID NO: 232837 - DNA, 82 bp, Homo sapiens
cggaaaccggtagcgcttgcagcatgccttagccccgtgggccccacggagtgagcggcatgcagcacccccgggcctgtcc

SEQ ID NO: 232838 - DNA, 75 bp, Homo sapiens
ttctactctttggatagagaccaaaatcatactttgaaatggcttgttcaatcagtatatcagtcaacaggaata

SEQ ID NO: 232839 - DNA, 100 bp, Homo sapiens
aactcccaagcgactgcaggcagaagctgagacggctaagtttcaccagtgatcattaaagaatgggcagcttacaaaggaaagtctcctcaaaccccgg

SEQ ID NO: 232840 - DNA, 82 bp, Homo sapiens
aatcgagttgagtacttggatagacttatacctcagggtattttaagcctggaatattgtgtgggtattattggtggcaaac

SEQ ID NO: 232841 - DNA, 105 bp, Homo sapiens
ccactgccgcagccaggagatggttcgggcctagcggagccgggactggagggacaagaatccttcaagaaacaggaaaaaactcctaaaacaccaaaaggacct

SEQ ID NO: 232842 - DNA, 100 bp, Homo sapiens
ggacactttgcgttcgggctgggagcgtgctttccacgacggtgacacgcttccctggattgggtcaagggattggttccaaaataatcaaaaaggtggc

SEQ ID NO: 232843 - DNA, 102 bp, Homo sapiens
atatatggcagatttgactcaaagaggaaggatgggaaacatctcacacttcatgaggttttaattacaacaagaacggctgctgataattttagcacccag

SEQ ID NO: 232844 - DNA, 80 bp, Homo sapiens
ggggagagtggatccaggtgaagggggcagaggtggctgccacactcaacaatttggctgtgctctatggcaaaaggggc

SEQ ID NO: 232845 - DNA, 101 bp, Homo sapiens
ccttccatttcaaagaacagaatgctaaggaagctgtggcaagaatggaagttggatacactttgtgacttgtacgagacactgaccattacacaggctgt

SEQ ID NO: 232846 - DNA, 75 bp, Homo sapiens
cagaagacttgttccatgaaagtacattggggcacaatatcatcacccttgcagaaactggctctctggacttca

SEQ ID NO: 232847 - DNA, 98 bp, Homo sapiens
agatggccgcgctgcgtcgaatgctccacttgccgagcctgatgatggggacgtgccgcccctttgcgggaatgtttctccagtgggttctttgtgct

SEQ ID NO: 232848 - DNA, 50 bp, Homo sapiens
cccaaggacctattgctatgcagttgaggagctcaagcttgggaaaatgg

SEQ ID NO: 232849 - DNA, 90 bp, Homo sapiens
agagactccggaggggcgtcggaccagccggcgcaagcgggcgaaggatgccaaagaagagtgaatggcccacaaagagcctggtagcac

SEQ ID NO: 232850 - DNA, 100 bp, Homo sapiens
tagaggacttgaagcagaaagcaagtgaatacgagtcagaaggtccacgctgcttttatgagctgtaacactcaccgcgaagatctgcagcttcactcct

SEQ ID NO: 232851 - DNA, 90 bp, Homo sapiens
cttcatctttgcacagaaaaacttctttacagctacgactaatagactggggtttggctgagttttatcatcctggccaagaatataatg

SEQ ID NO: 232852 - DNA, 100 bp, Homo sapiens
ctttttcaaaatacacatgtctggtttccagacccagagattctgattggcttcggggagttttgcctggctcacctgttactgaagaggaaccctgtca

SEQ ID NO: 232853 - DNA, 82 bp, Homo sapiens
tgcgctgttccacctcattcaacttcagtctgcgctcctcagaccaccggcaggtgaacagcctgatgcagaccgaggagtg

SEQ ID NO: 232854 - DNA, 88 bp, Homo sapiens
cgacaagccgctggcagccgcggatctcaccgccgctcaggggtttccaggcctgaggtgcccgccctggccccaggagaatgaacca

SEQ ID NO: 232855 - DNA, 100 bp, Homo sapiens
acctgagtcaccagttaactatggtagcccacccagcattgggcaaaaaagtttatcttctggatgccaatgtgaattgtggtctacaaatacattgtgg

SEQ ID NO: 232856 - DNA, 98 bp, Homo sapiens
gaggctgctcagttcacctcccaggctgttttggagtcagcggaagatcaccaaggccagggagtggttccaccgcactgtgaagattgactcggacc

SEQ ID NO: 232857 - DNA, 90 bp, Homo sapiens
gttcctctggttcctgctgccgctgctcttgctgacgtgcctgacgtatggaagctccgagatgaaactaccttctccttctgtctggag

SEQ ID NO: 232858 - DNA, 90 bp, Homo sapiens
cagcctcccgattagctgggattacagatcctctccttcatcctgcacacaatcgtgcgaggattcatccactccgctgtcgggggcctg

SEQ ID NO: 232859 - DNA, 75 bp, Homo sapiens
taaagatggaaaaccagttattgaatatcaagaggaggagttgttggctgcttttgtcagagacgttttattacc

SEQ ID NO: 232860 - DNA, 51 bp, Homo sapiens
agcttttcctccaggcctttgagagtcacggtctagatcacattctcgatc

SEQ ID NO: 232861 - DNA, 78 bp, Homo sapiens
gggctaatggtaaccgaaactcaaagttaatggagccaaatttaataaaggagggtgcatctgcccggaagactcaga

SEQ ID NO: 232862 - DNA, 100 bp, Homo sapiens
ggatccccaagatcttcaagaagaagacctgcacgacgttcatagttgactccacagatccgggtatcttcagctcaagaagaagttagaagatgagttc

SEQ ID NO: 232863 - DNA, 82 bp, Homo sapiens
gggaagacgccctggtgctcaccaagcaaggtacaatgactcttcttgcttttcacctaagttgaataagcaccctgtgcac

SEQ ID NO: 232864 - DNA, 96 bp, Homo sapiens
cgccgcacggccccggccccctcccagcctgccgctccggagagccgcccgccgaggatgcgacgcaccgcagacaaagatcattccactcagcct

SEQ ID NO: 232865 - DNA, 100 bp, Homo sapiens
gagctccagtacaccatattcaccggacaagccaacgtcgttaactgtgatcaaccactctatgattgtcctatgtgtgggctcatatgtacaaattacc

SEQ ID NO: 232866 - DNA, 87 bp, Homo sapiens
ccacagcagggactactagacaaaataaaagatgaacctgacaatgctcaatttgtgaagaaatatgggaacctttttagcttggag

SEQ ID NO: 232867 - DNA, 101 bp, Homo sapiens
gaggctgagtcctggccgcgggccggggccggggcgccgctggcaggagcgcttggggatcctccaaggccaggaatagttgctgaacaccccaggcctgc

SEQ ID NO: 232868 - DNA, 97 bp, Homo sapiens
aagggcctggggctgagcaaggcctacgtaggccagaagagcagcttcacagtagactgcagcaaagcaggtgcgggcaggtgggcctgggaccggt

SEQ ID NO: 232869 - DNA, 100 bp, Homo sapiens
cgcaggctgagaatatggagagactatgtggctcccacagctaatttggaccaaaaggacaagcagtttgttgccaagagctctgaggaacatgaataca

SEQ ID NO: 232870 - DNA, 122 bp, Homo sapiens
gctgccgtccgtgccgtggtgcgcatgggtatctacgtgggggccaaggtgtacttcatctacgagattgtcctgggtcacataatgccagctgagcgtaaaaagccagcaagtatggaaga

SEQ ID NO: 232871 - DNA, 107 bp, Homo sapiens
atttcgaaggactctatccaacctattatatccacaatggtgcgcatgaatgtcctggcagatgctctcaagagtatcaacaatgccgaaaagagaggcaaacgcca

SEQ ID NO: 232872 - DNA, 114 bp, Homo sapiens
cgggctgcccggctctcgcaggcccccccgcgccgaccgcgttcctatggacagacgcacagacacctgcagcatcaaagctaagccagaagatttatcacattttcatcatca

SEQ ID NO: 232873 - DNA, 50 bp, Homo sapiens
tctggacacagaagtatttgtgacaggtactccaaagattcaggtttact

SEQ ID NO: 232874 - DNA, 80 bp, Homo sapiens
ctagaccggagtggaaccaggaaaggacacattgtgatcaaggcaactttggctttggggattcacgtggtggcggtgga

SEQ ID NO: 232875 - DNA, 75 bp, Homo sapiens
caatatcggcattctgtgctacgaagaatgccagaggattcaacatgagcatacctatgcctgggcatccagtga

SEQ ID NO: 232876 - DNA, 75 bp, Homo sapiens
ccagcgggacgcctgcatcaaggaggccattctcttgatagacaccctgcagcccgtcggagacaacatcagcgg

SEQ ID NO: 232877 - DNA, 98 bp, Homo sapiens
cctcgtcattaattggacacagtgccagagtgtatgcactttactacaaagatggacttctctgtacagtaaacaaatccgagctatgctgggccagt

SEQ ID NO: 232878 - DNA, 100 bp, Homo sapiens
cgcgtccaggcctgacagctctgcggctcgggccctgagttttcggctttgtgagaaaccttaccatcaaacacgatggccagcaacgttaccaacaaga

SEQ ID NO: 232879 - DNA, 82 bp, Homo sapiens
ggagccggagtgcgggcgcgccccaccaccgccctcaccatgaaagtttcctacactactgaggtttaggggcactgtgaag

SEQ ID NO: 232880 - DNA, 82 bp, Homo sapiens
agagacaagctgagcttgccgcacaaaaagctagagagttctcccgaagatgactcggatacaaaaaggctttccaaagagg

SEQ ID NO: 232881 - DNA, 75 bp, Homo sapiens
ggacgcgcgcagcccgcccgcccggcgaccagcaaggtatggacctgtctgccaatcaggacgaggagaccgacc

SEQ ID NO: 232882 - DNA, 82 bp, Homo sapiens
atttttcgtcgtccccctccccccaaccagggagcccgagcggccgccaaacaaagtaatagctcttcaagtctgcaataaa

SEQ ID NO: 232883 - DNA, 100 bp, Homo sapiens
tcggtgacctcgacgtgcgggctgcacaagcccgaaccctactgtatcgtcagccacttgcaggtggctgaatccacagaggagcctgctggttctaatc

SEQ ID NO: 232884 - DNA, 50 bp, Homo sapiens
ggtaaagttccagggaggccgcgaaggatgaagctggaggcagattcgtc

SEQ ID NO: 232885 - DNA, 101 bp, Homo sapiens
tctcgatctctggaggcacctgttgcaagtgacaggaaggaatcgtgtctcctagtgacctggaccttgtcatgtcagaagggttgggcatgcggtatgca

SEQ ID NO: 232886 - DNA, 90 bp, Homo sapiens
ccgcgatcgtggggcccgcgaggcgggcagccggggcgtccaggttgggcccgaaggcatcctgcagaacggggctgtggacgacagtgt

SEQ ID NO: 232887 - DNA, 75 bp, Homo sapiens
tgctaatccagtggaaatcaggagagctattgaattatcgctgcaagaacagaaacagcaacacacagaaacaaa

SEQ ID NO: 232888 - DNA, 82 bp, Homo sapiens
cgggccgccatcgccttctcctttttctccatcttcacctgggaatcttgtcgattggcctggctgctgcctactacagcgg

SEQ ID NO: 232889 - DNA, 98 bp, Homo sapiens
agagaaggaaaatgcgcgtcccgggcgcggcttgttctaaagacgaaggggaactccctagtgctacaggctgtttcaggaagccaattaattttgta

SEQ ID NO: 232890 - DNA, 95 bp, Homo sapiens
gtggcggcggcggcggaggcgacggcagcggtcccagcggcagcagcagcggcgggaggagcctccgggcacatcaggtccacccatctggccgg

SEQ ID NO: 232891 - DNA, 101 bp, Homo sapiens
caacgccagagcccaggtgcccagaggactttcttccagcttctgctgtccttctttgtggagagcaaggatgacgactcatttaatttacataacagcaa

SEQ ID NO: 232892 - DNA, 87 bp, Homo sapiens
cgtgccacctgctgcacccacgaatctgcccacccctcctgtaacccagcctgtttcacttcttgacatttcagcctttgcacacgc

SEQ ID NO: 232893 - DNA, 75 bp, Homo sapiens
gtttgagaaaaggcctaagaattttggcattgtttctgatgaagaattgaaaagaagagtagctgaggagctggc

SEQ ID NO: 232894 - DNA, 74 bp, Homo sapiens
agcccccagcgcagcggccgcgatgagacaaaaggacccagtgaaaggaatgacagcagatgactaaagccgcc

SEQ ID NO: 232895 - DNA, 75 bp, Homo sapiens
ttttgtcaccgttatgtgggaagcgaatccaatgacacccccaaccatggttgtgaagatgctagcgacacatcg

SEQ ID NO: 232896 - DNA, 80 bp, Homo sapiens
tggtgctgcttccagtggccagccagatggaagcatcctgcctcgtcatccagttgatggagtctcgctctgtcgcccag

SEQ ID NO: 232897 - DNA, 83 bp, Homo sapiens
acgcaaaccaaggatctggggatcttcgcactatcccaaggtgtttcccattaaacactaccaggacaaaatcaggccttaca

SEQ ID NO: 232898 - DNA, 100 bp, Homo sapiens
aggccgcccgggaactgctgacgcttgatgagaaggacccacggcgtctgttcgaaggctgcatagagcctggacctgggcactggggtgagctgagccg

SEQ ID NO: 232899 - DNA, 82 bp, Homo sapiens
ccccgtggccaccgcctccagcttgccaccaaagacctgcgactttgctcaggaaacttcctcctggccaaccctgtgtctg

SEQ ID NO: 232900 - DNA, 83 bp, Homo sapiens
ttcggcagtccacccaccgccgccgcctcccaggtgtgcccccgagagcctgaagacacgcaccttctcccatgccagcgaca

SEQ ID NO: 232901 - DNA, 74 bp, Homo sapiens
ataaagtcttggttgctgccaacaaggaaccactcgttttgactattattttatcactctttgtgaaacttcac

SEQ ID NO: 232902 - DNA, 105 bp, Homo sapiens
aaacaagttgcagagctacgtggacgcaggaactccaatgcaggacagctggagcacacattgatgaatcattgttccctgcagctaatatgaatgaacacttat

SEQ ID NO: 232903 - DNA, 50 bp, Homo sapiens
ccgccaccacccactccggacacagtttttccaggggcattgttatttgt

SEQ ID NO: 232904 - DNA, 74 bp, Homo sapiens
ggtcgcgcggcggcaggcacaggtttgtggtaaatatgccagctctagaacacatgaatcagattttacacatc

SEQ ID NO: 232905 - DNA, 81 bp, Homo sapiens
ctgccgacctcttgcaatccaagtgacatgagccatgggtacgtgacagtaaagtagaaacggggtttcaccgtgttagcc

SEQ ID NO: 232906 - DNA, 75 bp, Homo sapiens
cttatacagagatgtaatgatggagaactacagcagcctggtctcactagacctgatggtagagtttattgtaac

SEQ ID NO: 232907 - DNA, 96 bp, Homo sapiens
ttaatacggggatctgtgagtcttctggcaaacagtgtttgcctctggttcagctcatacaacagcttcttagctgcagaggttcatccagtggct

SEQ ID NO: 232908 - DNA, 75 bp, Homo sapiens
ttcactgactgattatgaaagaagcagtagactggtatcaagaatcagtcagtttggagaacatttataaagagt

SEQ ID NO: 232909 - DNA, 75 bp, Homo sapiens
gattcttggataccacagtatcataaaattcctctaaatgcaggtttgaaagtattcttgaagggctgtttggac

SEQ ID NO: 232910 - DNA, 75 bp, Homo sapiens
atcgagcagaaagaatgtctttcaggcagcagactgtcctgggaagctgttcatcttccattcttccttgccaac

SEQ ID NO: 232911 - DNA, 98 bp, Homo sapiens
ttgggtcctccgagagcagcagcggagctagggaaatacggagtacttttctacaatgcctgcttcatgattatcccaactcttattattagtgtctc

SEQ ID NO: 232912 - DNA, 52 bp, Homo sapiens
gacggccaagctgcacgtggccgttaagaacatgccgagtttttgcactgca

SEQ ID NO: 232913 - DNA, 97 bp, Homo sapiens
gcttaatgacctccttgtcctggagtctcccttaatacaggaaaaccagtagattcccagacatcgcgaagtgaatctgaaattgtgccaaaagttg

SEQ ID NO: 232914 - DNA, 75 bp, Homo sapiens
gtatcagctccatccaggccaccactgcggcgggctctggatgtgcacccccgccaatacccctgctacaccccc

SEQ ID NO: 232915 - DNA, 98 bp, Homo sapiens
cagcctcccaagtagctgggattacaggtgttccccctcccctccctggggcagcagccaccatgttctcgtgtgtgaagccctatgaggaccagaac

SEQ ID NO: 232916 - DNA, 138 bp, Homo sapiens
tggccacttgcttgggatcctttatcctggtcatcttctatttccaaagtatgttgcacccagataagagatgctgcctatttctataagcgaagccagtgctacaaagacgctttcagatgctttgagcagattcag

SEQ ID NO: 232917 - DNA, 95 bp, Homo sapiens
gaggaagcgcgggcggacgacagaggatgccgaaccactccagtgcgagaagatgtactaaattcattgaataacaactttcttcaaacgctaaa

SEQ ID NO: 232918 - DNA, 100 bp, Homo sapiens
gcggagtcgtgcggttggtgggggagccctgccctcctggttcggcctccccgcgcactagaacggatgcagtgtcagccttacttgcaagaacatcagc

SEQ ID NO: 232919 - DNA, 82 bp, Homo sapiens
agcactgagttcactgacagtattgaggaggaggctgcacaccatagtcaccagcaaattgaccgactcatcagtcacgggg

SEQ ID NO: 232920 - DNA, 98 bp, Homo sapiens
ggtgatccgcgtggtcatccatgacctgcagcagacgattaacgtgacagtgtcaggtggacccacagccatcccacctccccctctggggagtgctg

SEQ ID NO: 232921 - DNA, 90 bp, Homo sapiens
aaataacccttgatcctcctcctaattgcagagttacatccatatgggagaatagtctccagatcactacaatttctagctttgtaggag

SEQ ID NO: 232922 - DNA, 100 bp, Homo sapiens
tgtccatcaaaatccagatgctggatgacacccaggaggcatttgaagttccagggatcctgctaaagcggagcggcaagtccctgaacaaggagtggaa

SEQ ID NO: 232923 - DNA, 100 bp, Homo sapiens
aacagattggctgtttcacgaacagatggcactgtggaaatttataacttgtcagcaaactactttcaggagaaagtgcagataaaactctagactccag

SEQ ID NO: 232924 - DNA, 100 bp, Homo sapiens
tcaagaaacctgtgtgatgactccttccccatgttctacaccaccagtcaaggtcagatgtaccaacagtaccagcaacaggccggctatggtgcacagc

SEQ ID NO: 232925 - DNA, 90 bp, Homo sapiens
catggccactccagtcggtgttgagcacggcgagcagtctcaggcctttagtgatgatggggtcaccagtcgttggcacaccaagaagct

SEQ ID NO: 232926 - DNA, 82 bp, Homo sapiens
cagcagatggcggatgccctgcagtacctgcagaaggtctctggagacatcttcagcagccctgggcgctgcctatggcaca

SEQ ID NO: 232927 - DNA, 100 bp, Homo sapiens
ctttcctgcttttggtttccctggcaggggttgaactgtggagtgtgtggacccaacatgagtgaagtttcctgcaagaaacgggacgactatttggaat

SEQ ID NO: 232928 - DNA, 50 bp, Homo sapiens
agaagtgtccagcgacagcttctgggagggatttatagtaaaacaagtgt

SEQ ID NO: 232929 - DNA, 74 bp, Homo sapiens
aataccacaagtggcgcatctactacaagaagcgggagtcactgtgccagccccaccacatcctggaagaggag

SEQ ID NO: 232930 - DNA, 90 bp, Homo sapiens
ggacgcgcccggcgcccctgagccggccgagcggcgacggaccgcgagtgatgtcttggcattgcccattttcaagcaggaagattccag

SEQ ID NO: 232931 - DNA, 96 bp, Homo sapiens
tttttaggagaagcattttgaatcagaaggcttaagaagaattctgcttttctcgttaaacccatccagagtaatggctgcggccttacccaggac

SEQ ID NO: 232932 - DNA, 100 bp, Homo sapiens
aaacagactcctgtgatgtaaatgactgtgtccagcaagttgtggaacttctacaggaacggattatcttagaagacctaggactccaaaaatgtttccc

SEQ ID NO: 232933 - DNA, 100 bp, Homo sapiens
atgagcgacagcggcgagcagaactacggcgagcggggctgaaaaactgggtggtagctgaagacgtggtgtttaaacctgtggctgccccctggaaccc

SEQ ID NO: 232934 - DNA, 75 bp, Homo sapiens
aaaaagtcaaccaccatccgattcacctgcagcgagagccaagtggtgcgtgctctggaggaggccaacgccgac

SEQ ID NO: 232935 - DNA, 100 bp, Homo sapiens
tcaacatggttgacgttgcaaaggcgcttaatcggcctccaacgtgtaaaatatacccaggaccataaacagatgaaaggtagaccaagtctgattttag

SEQ ID NO: 232936 - DNA, 75 bp, Homo sapiens
cgccttttgccacctttccctttatttccggagatggactcaccctgtcacccaggttggactgcactggcctca

SEQ ID NO: 232937 - DNA, 76 bp, Homo sapiens
gcctgaagccggtggtgggcgaagtgtacgatcaagggccgagaactactggtggcgtggccagaacacacggacg

SEQ ID NO: 232938 - DNA, 75 bp, Homo sapiens
ctgtctgttcagacttcagcttggtgagcaggaaaattcagattcgaaacatccctcctcacctgcagtgggagg

SEQ ID NO: 232939 - DNA, 90 bp, Homo sapiens
aatacaaagattatttgccagggtttcactggcaaacaggaactcttggtgtaataacagaagctacaataaaaatcagaccagtccctg

SEQ ID NO: 232940 - DNA, 83 bp, Homo sapiens
tgaagggcaaggaaagcagcatagagaatgagatagccgtcctgagaaagattttttatcaagcagaaatgcatcgaacaacg

SEQ ID NO: 232941 - DNA, 75 bp, Homo sapiens
gacctgaagaagcctcctgcctccaaatgcccccatcgctatacaaaagtgtcagcacagcgggctactcctagg

SEQ ID NO: 232942 - DNA, 75 bp, Homo sapiens
tgcctttgaccttctgccatgattgtgaggcctccccagccacgtgaaactccgctacatctgttacttttgttg

SEQ ID NO: 232943 - DNA, 89 bp, Homo sapiens
tctgaaaagaagatggaattgtcaaagcttggctttctcctgtttctcagaggatttatcaattatgcaaaagttcggaagatgccaga

SEQ ID NO: 232944 - DNA, 75 bp, Homo sapiens
aactcctctctgttaatggagtgagctcagagttctacagagtcaccactgaacaatatcagaaagctgctgaag

SEQ ID NO: 232945 - DNA, 71 bp, Homo sapiens
tcaggtaccccttccagagaagccaggagcacccggcgtcccagacaagctgcatgcagggcatggtgccc

SEQ ID NO: 232946 - DNA, 83 bp, Homo sapiens
agatcaccattgaacacccacacacagatgtggtgaaatgtacccagttagtaagagcttaaagcttttcaagccaggccaag

SEQ ID NO: 232947 - DNA, 88 bp, Homo sapiens
tggccaaatggacgggactattaaggggaaaaaagttgttccatgtagacatgactggcatcagactggaggtgaagttaccatttca

SEQ ID NO: 232948 - DNA, 75 bp, Homo sapiens
cagagcatcctggaactgggatctctcctggcaaagactggacaagctgcagtcaggaagcatctaaatatggtg

SEQ ID NO: 232949 - DNA, 82 bp, Homo sapiens
cagtgcccttgtggcgaatggggctcacgtcgatgctgggcctaaaggagataacatttatgaatggagatcaactatactt

SEQ ID NO: 232950 - DNA, 82 bp, Homo sapiens
cgacaagccgctggcagccgcggatctcaccgccgctcagggtgtgttccagagaacaagccttcagacatttgctatattg

SEQ ID NO: 232951 - DNA, 82 bp, Homo sapiens
ggagcaaagagctgcatcatgaattcaggagcatcggttgatccattttctaagaaagattggtatgatgtgaaagcacctg

SEQ ID NO: 232952 - DNA, 90 bp, Homo sapiens
cggctcggcgccttctgcgtctcccggctggtggggaagcctctgcgccgccggcaccatgaggtgctggagaatctggtaaaagcacca

SEQ ID NO: 232953 - DNA, 100 bp, Homo sapiens
cgaggatttcgatttcattgtcaggctgcaaggtgtccgcaatgttgccagtgtctgtctgcagattggctacccaactgttgcatcagtaccccattct

SEQ ID NO: 232954 - DNA, 85 bp, Homo sapiens
caagagaagaccccgctgggatgggtaacctggatgaggacatcattgcagaagagaacatcgtttcccgaagtgagttcccaga

SEQ ID NO: 232955 - DNA, 80 bp, Homo sapiens
tgccgggcggagagaactcagcgaggattctgagtgtgcaacttgctttggtgtttgctgttttattgccacagatgaca

SEQ ID NO: 232956 - DNA, 75 bp, Homo sapiens
cgaccgggctcggggagccggtctatggactttccgaagacgaggaactgtggctgcaccatctgtcttcatctt

SEQ ID NO: 232957 - DNA, 74 bp, Homo sapiens
gggattcatgacgtcatagcagatgagcacgaggtgactgaggagagaggcgcctcctcgctcccgccaccgcc

SEQ ID NO: 232958 - DNA, 75 bp, Homo sapiens
gcaaccgcccattcagtctacggctggggccgtcccagttcgcaatgagaaagcattccaaaatatgcccggtgc

SEQ ID NO: 232959 - DNA, 74 bp, Homo sapiens
gacagcgggcctggtatgaaagtacttctcatggataaagagacggtctgagagtcactggagctaccagaagc

SEQ ID NO: 232960 - DNA, 80 bp, Homo sapiens
cagtttggtccacaaggcttgctgcccaatctttgccaacagcaatcccacagagtattgatgaggaaactgaagtttgg

SEQ ID NO: 232961 - DNA, 74 bp, Homo sapiens
aatcagacctctgtggcagcattttttccagaacacaaaagaccagcatctcagacatgtcgaaaaagatgttt

SEQ ID NO: 232962 - DNA, 82 bp, Homo sapiens
gagcgcgagcggcgcgagaaaaacatgaaaggctcccggagcagcgctgactcctccaggaaacactgaggcagacgtgtcg

SEQ ID NO: 232963 - DNA, 74 bp, Homo sapiens
tcatgaacccgagctatagagaaaggagatgagaggaagaacaggcttttgagttcctgtgcagatcacacgat

SEQ ID NO: 232964 - DNA, 100 bp, Homo sapiens
tcccggaggcgacatggggcacccggtgtaccgcggcgagaagccccagctgcactacgcgctgatggtgagaccattctaaaaggcctccagtccattt

SEQ ID NO: 232965 - DNA, 75 bp, Homo sapiens
tgtagacgccccttcgccgggacctggcacccgaatccggcctgccgggatttttagactctgaggagcagttgg

SEQ ID NO: 232966 - DNA, 100 bp, Homo sapiens
gagctggaaactttcccggcagattcatcttggaggcatagtcaagttcctagatcttcatcaatggtacttggatcatttggaacagacttaatgagag

SEQ ID NO: 232967 - DNA, 101 bp, Homo sapiens
gcctctatgctgaccttacttcctgcggttgcccagcatctaaagtcaaatctctcaagcccattgactatgtcacaaagtattgctgatgtagctataga

SEQ ID NO: 232968 - DNA, 50 bp, Homo sapiens
tcattaggaacaatggtgcaaggtactccaaagattcaggtttactcacg

SEQ ID NO: 232969 - DNA, 75 bp, Homo sapiens
gaaaacatcaaagaggtctagcaaaggtatgaacgctgccgtccgtgccgtggtgcgcatgggtatctacgtggg

SEQ ID NO: 232970 - DNA, 75 bp, Homo sapiens
taagcaaagccccctaactgcctggcgtctagtaagtacacaggctaccaagcagtttctcgaagagattaacaa

SEQ ID NO: 232971 - DNA, 98 bp, Homo sapiens
ggggaaccgccgtcccaacatcacaaaaagggtcttactgaagtaacacaaagcttaaaaatggaaaatgaagagtttaagaagaggttcagtgatgc

SEQ ID NO: 232972 - DNA, 48 bp, Homo sapiens
cctctgacgacttcagaagcaagagctcgagtatatttagcttgccgg

SEQ ID NO: 232973 - DNA, 95 bp, Homo sapiens
gatgaactggcgggtgtggacgccactacagttcatcaacatcaactacgtccctctgaagttatttacagagtatggaagacttgcgatggaag

SEQ ID NO: 232974 - DNA, 100 bp, Homo sapiens
ggagaggataatttctctaagttaacagaagaggaactattggacagagaatttgaccttctaagatcaaatacatatgaaccagatggttacaacccag

SEQ ID NO: 232975 - DNA, 83 bp, Homo sapiens
cctgctgcgggatcccaaatcggaagtgaattcggattgtttgctggacctcgactggattttgatcctgacattgttgcagc

SEQ ID NO: 232976 - DNA, 75 bp, Homo sapiens
cgagggactgggagtcgttagtgaggtcagactatgatgactggagaccgtctctggccagtttgcttcaaccca

SEQ ID NO: 232977 - DNA, 100 bp, Homo sapiens
cttatttcagttaacatcgtgacctccagttccatccatgttgctgcaaatgaattctcccagtccttggctacatcagcccacccctgtgacctcagca

SEQ ID NO: 232978 - DNA, 98 bp, Homo sapiens
ttctggagatgcttccgaactgtgggcaaaaatggcgatcagctggacatcatctccatggcggagacaaccatgatgccagaggagattgagctgga

SEQ ID NO: 232979 - DNA, 100 bp, Homo sapiens
ggcggatgttgtgaaccgggtcgcggcggccgaggctcggggtgtcatggagaaactccagctgggcccagagattctgcagcgggaaaatccaaggctt

SEQ ID NO: 232980 - DNA, 98 bp, Homo sapiens
atggaacagggactcactggggttcacttagcagccatggaaggccaccttcactgtttcaaattcctagtcagtagaatgagcagtgcgacgcaagt

SEQ ID NO: 232981 - DNA, 50 bp, Homo sapiens
ggcatcatccgctatgcaattggggaggctgagctccagagggtccagaa

SEQ ID NO: 232982 - DNA, 50 bp, Homo sapiens
gaagagccggcgcatcctggccgcgctgtgggtcctggccttcgagatct

SEQ ID NO: 232983 - DNA, 98 bp, Homo sapiens
gtctggagctcgaccgggccaggtcctgggaactccaacaagggagcaaatcagagaaatgaacccaaactacacagaatttaaattccctcaaatta

SEQ ID NO: 232984 - DNA, 74 bp, Homo sapiens
gcgggccaggagagcgctcggcgggagcatcagatccatgctgctgctgactcggagccccacagcttggcaca

SEQ ID NO: 232985 - DNA, 97 bp, Homo sapiens
agcgtctatgattccttcagataccagggactggagcagcatggacctgtcagcaactaaggaacaaaagtaatgaagatttacacaaactttggta

SEQ ID NO: 232986 - DNA, 99 bp, Homo sapiens
atgtgcaaggcaggatatgaagagaaaaatggcacctgtcaaggtttccactgtatccaaaaggaggggagaagttgcagtttgattatggtgtctatc

SEQ ID NO: 232987 - DNA, 101 bp, Homo sapiens
aaaacagaacaggaggtggtagagggcatggatatctctactcgctccaaaggagactacaactcaggagcagctggatgagatggaagagatccccagag

SEQ ID NO: 232988 - DNA, 100 bp, Homo sapiens
gctccttcggcatgaccccagtgctgcctgcattcgcggggcatgttcccgaggctgtcaccagaccaattttaacactgttttaacaagagagaaaatg

SEQ ID NO: 232989 - DNA, 75 bp, Homo sapiens
aagacagtgcctggataccttcgaatagggacctccacaaaaagtactcgtacatccgcaagaccaggcctgacg

SEQ ID NO: 232990 - DNA, 88 bp, Homo sapiens
ctcctacccaaggacagggggacagggctctgtctcgcacttcccagggaaatcctcattgacgattcaatttgttgaaggccaattt

SEQ ID NO: 232991 - DNA, 100 bp, Homo sapiens
cgcacactcgcctgtccctccagggatcaaaagcatccaaggaattcacccggcgaagaagtctgaatcaccatcttattctcctcagcctcagccattt

SEQ ID NO: 232992 - DNA, 95 bp, Homo sapiens
cggatctgtgtgcccacagctcctggagccccacaggagctgcagaggctggagacagagttgggccaacccgctgagcgctggaaggacacctg

SEQ ID NO: 232993 - DNA, 83 bp, Homo sapiens
aaaaaagattgggcctgttatgctcacaatgacttcaggtggtatcatgatattagctggtttgacatcaagtcatttgtgag

SEQ ID NO: 232994 - DNA, 82 bp, Homo sapiens
gccgtccttctccactttcgccagcccgtgccgcgagcgcggcctgcaggaggtgatccgcaggggctggctgaccatcaac

SEQ ID NO: 232995 - DNA, 75 bp, Homo sapiens
ggtgcaggcgctgcgccgcaacgccgagcgcaccgacatctgcctgctcaaagaatccacattcatctcaatgga

SEQ ID NO: 232996 - DNA, 100 bp, Homo sapiens
ccgacatagtcattatgccgaagagaaagaaatattgtatccacagtgaatcttggttgtaaacttgacctaaagaccattgcacttcgtgcccgaaacg

SEQ ID NO: 232997 - DNA, 90 bp, Homo sapiens
ggttgtatgaggatggagaagaccagccaaagcaagtttatgttgataagttggctgaattaaaaatgccttcaattaagttgcagagtt

SEQ ID NO: 232998 - DNA, 100 bp, Homo sapiens
ctcatcgaacagtacgcactgagggaagagggtgtccttctgtgctgaacatgtccgtaggaatgccctggcacttcatgctcaaatgaagaagaccaac

SEQ ID NO: 232999 - DNA, 134 bp, Homo sapiens
ggacagagaagccttttccgttgccggtgccggcctagcgtcctggaattacttcaatcaagtcttgtcaacggaaaggggtccctatccagaccccaagagagcattcttggatctcttgcaagaaagaattt

SEQ ID NO: 233000 - DNA, 75 bp, Homo sapiens
tttcgtacgggcggccgtgcgcgaggcgaggtacatgtcccagagcaagcacacggaggcccgggagctcatgta

SEQ ID NO: 233001 - DNA, 100 bp, Homo sapiens
ggaaggcatggaaagttccagccggttcgagagctagctacatccgatactcccagatctgtgcaaaagcagtgagagatgcactgaagacagaattcaa

SEQ ID NO: 233002 - DNA, 100 bp, Homo sapiens
cctggatcttcacacagctgcttccattggccagtatgaagtggtgaaggagtgtgtgcagcgctccctgggaagctgaatgaagcggatcataacggag

SEQ ID NO: 233003 - DNA, 90 bp, Homo sapiens
gtgaaactgtacacaacaagcatcttgatctagaaaatataacggaaagaccacagcaagattctttcattcgtctcctcctagcctggg

SEQ ID NO: 233004 - DNA, 90 bp, Homo sapiens
tggcgttgctggtgcgagtccttagaaagctctgggcttgtactcctctccagctgtccccagacagctagtcgcctccagaagtacttc

SEQ ID NO: 233005 - DNA, 90 bp, Homo sapiens
gaggattcaaatttttcctgttgattctgccattgacactatatctccattgaatcagaaggctacagaagaagtttccaaaaatctggt

SEQ ID NO: 233006 - DNA, 90 bp, Homo sapiens
gcgccgccaatggcaagttggagggagagatgcaaataccagaccaagaccttggacaaggcaggggtgctccatcgcaccaagacggca

SEQ ID NO: 233007 - DNA, 100 bp, Homo sapiens
gaagggcatggcaagactccacctcctggtgaagaaagcaaacagcctaccccttgctcaggttcaagaagacagtgaagaggctcattccgcatcttct

SEQ ID NO: 233008 - DNA, 82 bp, Homo sapiens
ttggactgagtcctgcaggacacaggattatattccatcacaacaagatattctgcttgccagaagacccaccaaaggcatc

SEQ ID NO: 233009 - DNA, 80 bp, Homo sapiens
caactacgccaccactgtgcaagtgaaagagtggagccccctgagctgcccgctgatctgcagcactggatctcctacaa

SEQ ID NO: 233010 - DNA, 83 bp, Homo sapiens
ctttggaggtagcctggcccggtgggcactgtgatctcagacttccagccttcagaactactggtcgaattgacaaatcttac

SEQ ID NO: 233011 - DNA, 82 bp, Homo sapiens
cgcgcgaccgccgaatcgctcctgcagcagaggaaaatgtttataggaggccttagctgggacactacaaagaaagatctga

SEQ ID NO: 233012 - DNA, 100 bp, Homo sapiens
cttcactgaaccagatcttggatccttgggtttacctgctgttaagaaagatccttcttcgaaagttttgccaggtcaaaatgcagatcttcgtgaaaac

SEQ ID NO: 233013 - DNA, 100 bp, Homo sapiens
cggccgtgatcccagcgcagagtacctgctctcgagatggcaggagtcgggagctgcggcaactgatggagaagactggcaagcgtgtgggcaaggtact

SEQ ID NO: 233014 - DNA, 75 bp, Homo sapiens
ggccaaggttccgcgccgggcgtggacggtgtggggcggtcccggccccgcagaaagtttcctacactactgagg

SEQ ID NO: 233015 - DNA, 99 bp, Homo sapiens
ggaaaatgccaacgccgtgtctgaaggtgatgtgcgttcagattaagtgtttccatgagataatcactattggctacaacgtctaccactcatatgatc

SEQ ID NO: 233016 - DNA, 75 bp, Homo sapiens
attcgagtctgtgatggggccatccgggaagcgcgactcttcgatgaaccgcagctggccagcctgtgcctggag

SEQ ID NO: 233017 - DNA, 75 bp, Homo sapiens
ccaatgaggctgctggccctggattatggagcggacattgtttactgtgaggccacagcaaacacaggtgtgcag

SEQ ID NO: 233018 - DNA, 95 bp, Homo sapiens
ccaacttctgctacagacgactcactgcggataaccgtctggtccttgtgcacaaaatccgtgtcttacatcaaatacccgaaagcttgtctgca

SEQ ID NO: 233019 - DNA, 96 bp, Homo sapiens
actaccgctgctggaccacaaaccgctgccagaaaagccaagtcctgtatctgccatgtctgtggcgtccacctcaacaggctgcattcctgcctc

SEQ ID NO: 233020 - DNA, 80 bp, Homo sapiens
aagcaagggctgtatgagctctcagcaagcaactttgagctgcacgttgcacaaggttcgacgaggtgctttataaatca

SEQ ID NO: 233021 - DNA, 87 bp, Homo sapiens
ggagagcatgccccggccccctgagcagggagtgcatccgccccaacccttttccccctcgtctcctgtgagaattccccgtcggat

SEQ ID NO: 233022 - DNA, 73 bp, Homo sapiens
ccgtgtctctgcccacgtcgagcgtgcccgagacccgaggataaaagaatcagagtgtctcaacccttgacaa

SEQ ID NO: 233023 - DNA, 100 bp, Homo sapiens
tgctgttccaggcgcacactagtctacaaggccagagctttctggaagggggcaatggcccctgagttctgcagcctcgaggaaggcctgccctatctgg

SEQ ID NO: 233024 - DNA, 100 bp, Homo sapiens
agagcttctctccagagtagaaaggtcaacagcgacctcatttacattacagctaagaaagatggcactcatgtggtggaaaatgtggatgccacccaca

SEQ ID NO: 233025 - DNA, 75 bp, Homo sapiens
taacatgttcttgaagtaccatggcgtggattaaaagggaagctgcctatcgtcaatgattgcgatgagctggtg

SEQ ID NO: 233026 - DNA, 50 bp, Homo sapiens
agtctccctcagctgttgagcaggttgagagcaccattggatgcttactt

SEQ ID NO: 233027 - DNA, 100 bp, Homo sapiens
gcaccagcacgcctggctaacccatcgccgaagcaccattcaagttcgacatggaattggatgacttgcctaaggaaaagctcaaagaactaatttttga

SEQ ID NO: 233028 - DNA, 97 bp, Homo sapiens
tctgaccgaggcgcctcgctggggcggggaccttgccttgcccggggacttcggaagcccacggtccatcacctctcggtgtgatctgagggcaaac

SEQ ID NO: 233029 - DNA, 100 bp, Homo sapiens
gcggcagctccagcggaggccacaagtcctcctcttccgggtccgtgggcgagtcttcatctaagggaccaagctgccttgaggtgcagtgttggggatc

SEQ ID NO: 233030 - DNA, 98 bp, Homo sapiens
gtggaagtgatttgtcggatgaagataagacactttctcagttacagagagagtctcaagtcaaagtcgtggccctgtgtgctggttctgggagcagc

SEQ ID NO: 233031 - DNA, 90 bp, Homo sapiens
caacagtcaattgtgtactagcattccaagttctcttgcaactagcaagtgaagccttgccaaatgacatgaccttggctcttgcttacc

SEQ ID NO: 233032 - DNA, 90 bp, Homo sapiens
ggaagttggagggacaccgagaaagattattaccactgtctgtcggatatgaagaccctggagtagacatgtcatgctgcccaaggacat

SEQ ID NO: 233033 - DNA, 133 bp, Homo sapiens
agctgatgtatacacgtttaatttttctaaagagtcttgttatttcttctttgagaaaaacctgaaagatgtctcagactcacaccacccggcaagaactgctcactacggctccctgccccagaagtcacac

SEQ ID NO: 233034 - DNA, 100 bp, Homo sapiens
gtccatgctttatcatcaccatggagtgggtctacaaggaagtcttcacgaggagcagtgagaactcagcgtcgtcgacgttctaagtctcctgtccttc

SEQ ID NO: 233035 - DNA, 101 bp, Homo sapiens
cagaaagcggcttatcgaacagagccgggagttcaagaagaacactccagagctgtgttggagtagaagaacatcatgctgttgacattgacctgtatcac

SEQ ID NO: 233036 - DNA, 75 bp, Homo sapiens
atccgctgggccgggagcgacttccaggatatagccctggaggtggcaattttggaggtagccccggttatggag

SEQ ID NO: 233037 - DNA, 100 bp, Homo sapiens
gagcacccaggcgactgcctcatcttcaaggtttggtgcacctcgatttggaggaagtagggcagggcccttatctggaaagaagtttggaaaccctggg

SEQ ID NO: 233038 - DNA, 80 bp, Homo sapiens
cttcatagcctaacactcatgacaaacatgcagcttaattgttgcaaattgctttataaacatgacttggcaaaacgctg

SEQ ID NO: 233039 - DNA, 76 bp, Homo sapiens
gggacttcggcggcggcgcctcaggcacctcggcccgggttaaagatcgaggtccggaagccactaggagattttt

SEQ ID NO: 233040 - DNA, 75 bp, Homo sapiens
gtctgaactaggatgtcccgacatgaagtctcagaccagtatccttcaggggttctcttactctgatttgcggaa

SEQ ID NO: 233041 - DNA, 75 bp, Homo sapiens
aaggaacccattgtgggcagcactgactatggcaaggacgaagactctgctgagacaggcaatctatacctgcgg

SEQ ID NO: 233042 - DNA, 100 bp, Homo sapiens
tctttcacaaaggccttcacaacgtggacccccaaaagtacaagggcatatttaacggattctcagttacacttaaagaggatggtgttcgtggtttggc

SEQ ID NO: 233043 - DNA, 82 bp, Homo sapiens
gcacttcgtcatgttcttcgcgccctggttcacccaagcagcactgactataacctaatgtggacaggatcccacctgaagc

SEQ ID NO: 233044 - DNA, 75 bp, Homo sapiens
cagatattgacagggtgtttgactggatcgcatataaaaagctctaagcgaaagacatgaggcctcagcctgaaa

SEQ ID NO: 233045 - DNA, 51 bp, Homo sapiens
agaaatttgtgctcaaaacccccaagcttcacttaaaggacaagaagcgat

SEQ ID NO: 233046 - DNA, 75 bp, Homo sapiens
ggccccagccgctggagacacaatcatatctttagattttggcagcaacggttactcactataaacaatatccac

SEQ ID NO: 233047 - DNA, 98 bp, Homo sapiens
gacgcgacgcgccccgcctcccccgtccggtccctctctccacggtaagggggtttccaggcctgaggtgcccgccctggccccaggagaatgaacca

SEQ ID NO: 233048 - DNA, 100 bp, Homo sapiens
agccagtggatacgttcagggtataaatgatctcgtcactcctttctttgtggtcttcatttgtgaatacatagagttacactgttagaccttatgatag

SEQ ID NO: 233049 - DNA, 82 bp, Homo sapiens
aaagacagtcctcgtcagcactgactttcagctatggaatcgcaattctgtggtgttcttggtcacacatttatggagtttc

SEQ ID NO: 233050 - DNA, 71 bp, Homo sapiens
gaccttaaacctgaaagtggtagcaaggttatcaatactctggctgaccatcatcatcgtgggactgactt

SEQ ID NO: 233051 - DNA, 50 bp, Homo sapiens
acttgcactagcagcgaacgattcgtgtctttctcgagaagcaggtggaa

SEQ ID NO: 233052 - DNA, 125 bp, Homo sapiens
cagcagcaggcgaggaggaagatggcgggacggctgccggcctgtgtggtggactgtggcacgggatggtggttgctatttcaggcccagacataatcaaatccatgtgaagaaaagagatttct

SEQ ID NO: 233053 - DNA, 98 bp, Homo sapiens
ggaagagttggacggccctgcggctctgcgccacagatactgatttggtccttgtaattggagctaatgacactgttaattcagcagctcaagaagat

SEQ ID NO: 233054 - DNA, 82 bp, Homo sapiens
caagaaggccctggacacagcaatatctctgggctttcacaggaactgtggctgcaccatctgtcttcatcttcccgccatc

SEQ ID NO: 233055 - DNA, 100 bp, Homo sapiens
aattaggtcctccacaatgaagacaggtaatgtggaggaaagagagcttgtcatggtgagcgagtgctgtgctttcatgggcctcttctttatgaagcaa

SEQ ID NO: 233056 - DNA, 100 bp, Homo sapiens
gaaaaggctttgagaaattttgagtcctcgagtgaatgggcggatctcatatcttcacttggcaaactcaacaagcttgaaacggagactttctactcgt

SEQ ID NO: 233057 - DNA, 100 bp, Homo sapiens
cgcaggttcgggaccatgagctggtgcccatgggttggacaatgaggctggtcacagcagcactgttactgggtctcatgatggtggtcactggagacga

SEQ ID NO: 233058 - DNA, 74 bp, Homo sapiens
tggacagaccaacctgtcagtgctgcaaccaatctaaaaagggccctcaggatcgcccacaatgcccagcttag

SEQ ID NO: 233059 - DNA, 49 bp, Homo sapiens
tatgaggcatgggcaaaacttgatgtgaccacaattagtcctctggaga

SEQ ID NO: 233060 - DNA, 108 bp, Homo sapiens
gcaccacctaacgctggccgacaacagcctggcgtccgccacggttgcactgctgtgatccatcctcatctcctaaagatgcatcctgacttatctccacacttgcac

SEQ ID NO: 233061 - DNA, 75 bp, Homo sapiens
gttgcatccttggagagagctgagagctggaggttctcagctgctgcgggagttgaaaaagatggacgacaaagc

SEQ ID NO: 233062 - DNA, 100 bp, Homo sapiens
catggcaagaagaagctgtatcttatctatggaagataaagcatggagttggctaatggatgctggatttacttcagatgcaatatgaaggagtagctgt

SEQ ID NO: 233063 - DNA, 100 bp, Homo sapiens
gaaacccagcgtggagacccgtctgttatttctagcatgaataatctttcatttagtgagctatgttgcctcttctgctgtccaccttgtccagggaaga

SEQ ID NO: 233064 - DNA, 75 bp, Homo sapiens
cgctggcagccgcggatctcaccgccgctcagggcgacttcagaatgcccacactggcctcgacctgactgtgcc

SEQ ID NO: 233065 - DNA, 75 bp, Homo sapiens
agaagcacctcatgcaagcgagggacctgggactgctcacagccagctggaatagtcaaatgatttcagttcgtg

SEQ ID NO: 233066 - DNA, 75 bp, Homo sapiens
ctacaagaagcgggccgcatgcctgtgtttccgcagcgagagcgaggaggagatctcaaagacggaattagattg

SEQ ID NO: 233067 - DNA, 83 bp, Homo sapiens
caagtgccaccagcgcttccccttcgaggcgctgtctcaggggcagcagctgtgcaaggtttgggccccatggtatccctgtg

SEQ ID NO: 233068 - DNA, 75 bp, Homo sapiens
ccaagccatggtgcagttccaccggcaccatggccaggagggctccatcctgtgcttatgaggtgatcaaactca

SEQ ID NO: 233069 - DNA, 100 bp, Homo sapiens
taccgggctgtcaaatttacattaactatgagaattaagcaggactccctggaggaaaagcggaagcggcagcggtctgaacgcctggaacggattttcc

SEQ ID NO: 233070 - DNA, 100 bp, Homo sapiens
ctagaggatataccagaccctggagtgaactggattccatgtagagacccctggaggtggagcgatttagccaagaagttcagattacagaagcccgctg

SEQ ID NO: 233071 - DNA, 75 bp, Homo sapiens
agcagaggctgcaaagaatgctttgaatagcctggcccaactagagaatctgtgcaaacagctgtatgaaaccac

SEQ ID NO: 233072 - DNA, 100 bp, Homo sapiens
tcttttgaggtgcccaaaccattgtttcctgtggcaggggtccctatgatccaacaccatattgaagcctgtgcccagttctctgtggacattgactcgg

SEQ ID NO: 233073 - DNA, 75 bp, Homo sapiens
gacaagggacaattgccctggaagtgctgaaccagactaccaaaaggaagcgtggctacattaaaaataagctgg

SEQ ID NO: 233074 - DNA, 87 bp, Homo sapiens
tctgggtttccattacccctgccatcgtcagggtaccccaagaagctagtgcagacttattcagtgtttccctaccaggacgagatg

SEQ ID NO: 233075 - DNA, 73 bp, Homo sapiens
ttttgaagctaaagttaagcaggaaaaccagtgttctctggacatgaaaagcaaactgaatacaagtaaacaa

SEQ ID NO: 233076 - DNA, 87 bp, Homo sapiens
gcaaggccaaagacagggagaagaggcaaatttctggagatgtgcaatgatctcttagctagagtggagccaccacttcgtagtgtt

SEQ ID NO: 233077 - DNA, 98 bp, Homo sapiens
agatgccctgttccaggaggacagctacaagaaacacctgaagcatcactgtaacaagtaagaatgattgatgttggctgatattggagtgctcattc

SEQ ID NO: 233078 - DNA, 78 bp, Homo sapiens
gcagataatcactgggctcatgggtcttgctctttacaaagagtgtctttacatccaaaatgcaaagcagacaaatgg

SEQ ID NO: 233079 - DNA, 100 bp, Homo sapiens
aggagatcctaaggttcaatgttcaagaggttggtgttcgaggaagagacattgttgttcttggtgtggagaagaagtcagtggccaaactgcaggatga

SEQ ID NO: 233080 - DNA, 99 bp, Homo sapiens
gagttcgtgaaagctttctgcccagagctcctggaccaatgcatcttcccaccaccttaaaccactggtaagaatgattgatgttggctgatattggag

SEQ ID NO: 233081 - DNA, 100 bp, Homo sapiens
ctttattatgcaggtggtctgtgaagccacacagtgtccagatacgaggatccttgatatccctgatgggcaccgggccccagctcctccccagagtggc

SEQ ID NO: 233082 - DNA, 76 bp, Homo sapiens
catcatccagcagttggaaaaaagtggtgactacaattgcaaagtagaatttgctttgacacctgatgccaggaca

SEQ ID NO: 233083 - DNA, 75 bp, Homo sapiens
aaacttgacactcaccctgaccggtaagcagaattttgtacagtttctgtacagcattcaaacgttcttccagac

SEQ ID NO: 233084 - DNA, 90 bp, Homo sapiens
ctggagatgactccggtgcttgggacagaaatcatcaattaccgaggaggagatgaccgccgggttctgctatggcacatggaacaagcc

SEQ ID NO: 233085 - DNA, 74 bp, Homo sapiens
gacaggaaggacagttactactccattcaccagataggcaccatgactcctgtgaggatgcagcactccctggc

SEQ ID NO: 233086 - DNA, 74 bp, Homo sapiens
cgacaagatcaccacggacgagatgatcaaacgcctgaagcaatatgttaaggatacctgtaagaaaggcctta

SEQ ID NO: 233087 - DNA, 75 bp, Homo sapiens
ccgagagcgcgaatatcgtcatcgttagaaggacttggatgttgtgggtgatggtatgcagtgtcctccttcacc

SEQ ID NO: 233088 - DNA, 51 bp, Homo sapiens
aaaagatggctacgagggtaacatgttcgtactactataattccttgaccc

SEQ ID NO: 233089 - DNA, 74 bp, Homo sapiens
gccgggactctgaactatggcgatgtctgtcagggttcaccttggcatcaatttgccctgaaacttagctgtgc

SEQ ID NO: 233090 - DNA, 90 bp, Homo sapiens
acggggcagatggactcggagcgccccgccggcaatggtggcttgctatccgggaaatggaacaggttatgttcgccacgtggacaaccc

SEQ ID NO: 233091 - DNA, 75 bp, Homo sapiens
ccggtaggagctgtaatcaattgtgctgacaacacagcttatgtttattcagagccaaggccaggtccagctgac

SEQ ID NO: 233092 - DNA, 83 bp, Homo sapiens
ctgttttctgccggctgtaaagtcatcacctcctgggatcagatgtgcattgagttcacttcttcaactgagatggacatgat

SEQ ID NO: 233093 - DNA, 97 bp, Homo sapiens
gaaggaggtcctgccgtccatgcggaagatcgtcgccacctggatgctggagttcaaatctgaacatcaatgatgtactagggaactactcattgac

SEQ ID NO: 233094 - DNA, 98 bp, Homo sapiens
tcacccttccgaactcttaacatcaatgggcaaatccccacaggagaaggagtgtccaactatccattaccaagaagaaatctattcgtttgagcctg

SEQ ID NO: 233095 - DNA, 100 bp, Homo sapiens
tggcctggcgtgcactccgcacctcggggacattattgcgcgtggaacggctgcttttggaaggtggctatggaccgccccctgcaggaagaggagcccc

SEQ ID NO: 233096 - DNA, 97 bp, Homo sapiens
aaaatttgtctgcaaacctggagccagaaacattaccgtcatattccacccattactaaggttgggggccgtcccgctcctaaggcaggaagatggt

SEQ ID NO: 233097 - DNA, 87 bp, Homo sapiens
ctctctcgctgtgagacatgtctgagactcctgctcagtgtagcattaagcaaagtgtgggatgctgtctcaggagatgaattgatg

SEQ ID NO: 233098 - DNA, 88 bp, Homo sapiens
ctggaggaaactgatgaaaattttcacaagcaatggcagcagataaaagtgacgagtggtttgccaaacacaataaacccaaagcttc

SEQ ID NO: 233099 - DNA, 83 bp, Homo sapiens
gtgttgcccgccaccatgagctacacaggttctgcggggagtgtctccagccctgcctgcaggtgccatccccgctgtgccca

SEQ ID NO: 233100 - DNA, 100 bp, Homo sapiens
ccatggtatcagctctggcccaggctccagcacccgctcccttggaaccctgtatagccaggtcagccgtctagccccgctgagcagcagccgtagccgc

SEQ ID NO: 233101 - DNA, 99 bp, Homo sapiens
attcctcatgtatcatgcaaggatattcctcatatatcatgccccttcacagatgtagtcactacaaatcttaaattgcgaaatccatcggatagaaaa

SEQ ID NO: 233102 - DNA, 85 bp, Homo sapiens
ttagggtcctttatatagaagggagagtaggagaagcaacagtttcagcgccatctgacccgcccaccaccccagtaccaagacc

SEQ ID NO: 233103 - DNA, 83 bp, Homo sapiens
gcggaatgacagcggcgaggagaacgtcccgctggatctgacccgaggtttggtgcacctcgatttggaggaagtagggcagg

SEQ ID NO: 233104 - DNA, 100 bp, Homo sapiens
gaagtcacaaaacagcagatttcccaagagcagcggaaaatgatccagtcacagaatttatccagttggcgaaggactttgaggatttccgtaaaaagtg

SEQ ID NO: 233105 - DNA, 96 bp, Homo sapiens
caaggaggactccaagaccttcgaccagctcaccccggacgagagcaaggagaggctaggggtgatacaattctggagactggagaagtaattcca

SEQ ID NO: 233106 - DNA, 100 bp, Homo sapiens
gggggttatggtgggaggagccgatactgagcttcttcctatttgccatggtattctaccttgtaaatactgttatttgtatatactgtaaatgatgaca

SEQ ID NO: 233107 - DNA, 75 bp, Homo sapiens
tctcatattagtgcctgtgatggcatctttcatctaacactgtcgtgtgggagccaatgggagatgggaagaaaa

SEQ ID NO: 233108 - DNA, 75 bp, Homo sapiens
atcgtgtgtcggatgaggagaagcatccacccgttttgtcaagtgtgaaaagtgtcatcatttttttgttgtgct

SEQ ID NO: 233109 - DNA, 100 bp, Homo sapiens
gttgcgtgaggggtttgtactatcctcggtgctgtggtgcagagctagttcctctccagctcagccgcgtagacagagagagtagacttgacacccctca

SEQ ID NO: 233110 - DNA, 90 bp, Homo sapiens
atgaggggccaggcttttatcacctttcccagctctggtgaagagaactcctagcagtggcatgagctctaccatgaaggagtcggcatt

SEQ ID NO: 233111 - DNA, 100 bp, Homo sapiens
tcaccattcccgtgcagaccttctccaacctgcagattcgagatgtacaggtggatcatctgaatctcctgaaacagtttgaacacctggaccctcagaa

SEQ ID NO: 233112 - DNA, 75 bp, Homo sapiens
ctgctccacagattatttagagggtcttactgaagtaacacaaagcttaaaaatggaaaatgaagagtttaagaa

SEQ ID NO: 233113 - DNA, 98 bp, Homo sapiens
gccaccagaacccaagaagattccgataagaaacacgaagcatcaagtgtacctgatttgtgaacctatcttgcttcagttggtttcctcctaaatat

SEQ ID NO: 233114 - DNA, 100 bp, Homo sapiens
taaccttcaaccatctggggaaaaggcaaaaatcccatctaccgcaactctcagttcgagagtaaagctcaactgagaagtcatttccttggagatcaac

SEQ ID NO: 233115 - DNA, 75 bp, Homo sapiens
cctccgcgctcttcttcgccagcaccgtgctctccaccacagaggatgtctacagttgctttcgcttcctacgtg

SEQ ID NO: 233116 - DNA, 82 bp, Homo sapiens
cccagagccccgcgtttcagccctagggaaggagtgtggccatctggggccgtgtggtatttgccactcaggagacatgtcc

SEQ ID NO: 233117 - DNA, 100 bp, Homo sapiens
aaatccttgtggagcaaatgggaaaagatattgcggtggtggagatgagcgatgccttccggcagccgtccttgttttaccaccttggggtgagagaaag

SEQ ID NO: 233118 - DNA, 50 bp, Homo sapiens
ccggtgcagctagaagtccatatcggtttcctgggagaaggtggcttaag

SEQ ID NO: 233119 - DNA, 75 bp, Homo sapiens
atcataatcaaagaatctttgacctgaaacgctgaccggaaaggagattgagattgacattgaacctacagacaa

SEQ ID NO: 233120 - DNA, 87 bp, Homo sapiens
tggagcgtgtcctgaaggagttccaccaggccgggaagcccatcggggacccagacatggagctgcgggaagaagcctggtctccgg

SEQ ID NO: 233121 - DNA, 100 bp, Homo sapiens
cgacgcaaaccaaggatctggggatcttcgcactatcccaagctcatttagaggcgagttttgaggaggtagagaacaacctgctgcatctggaagactt

SEQ ID NO: 233122 - DNA, 87 bp, Homo sapiens
gaaatcgtgcacatccaggctggtcagtgtggcaaccagatcggtgccaagagcagcccgacggccatggaggctgaagagacgatg

SEQ ID NO: 233123 - DNA, 89 bp, Homo sapiens
caaatttttggatgatgatggatccatttctcctattgaggagtcaacggaacgacagtgggtagatgattttcctctccaccgaagcg

SEQ ID NO: 233124 - DNA, 75 bp, Homo sapiens
tcccgcatgaacatcaagtgctcggtacgtggctcaactttaccaccaagttagtaaaattgagtgggattatga

SEQ ID NO: 233125 - DNA, 100 bp, Homo sapiens
ggaagaggaaagaaaaggagtcaggaatgcctcttagccacaatggtgcgcatgaatgtcctggcagatgctctcaagagtatcaacaatgccgaaaaga

SEQ ID NO: 233126 - DNA, 100 bp, Homo sapiens
ccctcaggactttattgattgcttcctgatgaaaatggagaaggaaaagcacagtgcagagcgcttgtacacaatggacggtatcaccgtgactgtggcc

SEQ ID NO: 233127 - DNA, 50 bp, Homo sapiens
tgcccctggaggagaaatagaagcagcagccgctcttctaaaacattcaa

SEQ ID NO: 233128 - DNA, 75 bp, Homo sapiens
caatgataacttctccctctccaccattgccgagggctctcacccaaatgtcagataccaggcccaggttccatg

SEQ ID NO: 233129 - DNA, 83 bp, Homo sapiens
gccgacttcgatgatcgtgtgtcggatgaggagaagaaatttaaaagcctgttgattcaagaactttctaaagtatttccgga

SEQ ID NO: 233130 - DNA, 100 bp, Homo sapiens
tgaagtggataggacatcatctaaacatgttccaaatcaagtatagatattgagaatgggtttatttctgaatctcagtatacatatgccttaaaagaaa

SEQ ID NO: 233131 - DNA, 75 bp, Homo sapiens
tgcagacagggcaaagaaaatgggactggttgaccaactggtggaacccctggggagtgcatccgccccaaccct

SEQ ID NO: 233132 - DNA, 100 bp, Homo sapiens
gccccagcagcaacagcagcacagtaacaaatgtggcaattattttggatctatcacctgtcatcataactggcttctgcttgtcatccacacaacacca

SEQ ID NO: 233133 - DNA, 75 bp, Homo sapiens
ggctacggaggtggttatgacaactatggaggagattggcatccagaactattccacaaccagcagctgccaggc

SEQ ID NO: 233134 - DNA, 75 bp, Homo sapiens
tcagggtcatgattacacatggtgtggatgtgacagcccaagatactaccgggtgtcagatgcctgatacattca

SEQ ID NO: 233135 - DNA, 80 bp, Homo sapiens
atggtgctgagtttcctggtagagccggccgagctgaggcggtcgcggccatgaagatgatgataattccgaagaaggct

SEQ ID NO: 233136 - DNA, 83 bp, Homo sapiens
ttgagtcagtgcgccgctctccagcccgcttgaacggagtggaagctggacacactatgtgacttgtatgaaaccctgaccat

SEQ ID NO: 233137 - DNA, 90 bp, Homo sapiens
tttgacgttgtttacatccacaatggcactgaggagaaggaggaggagatgagttggaagcaaatggacaatgccgtgtatacgttcgag

SEQ ID NO: 233138 - DNA, 95 bp, Homo sapiens
gggaaccgctcgagcctaccaggtcaaaatgcagatcttcgtgaaaacccttaccggcaagaccatcacccttgaggtggagcccagtgacacca

SEQ ID NO: 233139 - DNA, 71 bp, Homo sapiens
ttgggtgctgctataggctcagccctcagtggatttggttcatcaggtcagaagacatctctaacccaaga

SEQ ID NO: 233140 - DNA, 100 bp, Homo sapiens
ccccctgtggctgaggctacaccccggagccaggaggaagatgctcatgaagcagcaggaccggctggaggagcgagagcaggacattgaggaccagctg

SEQ ID NO: 233141 - DNA, 50 bp, Homo sapiens
gaagtattctgatgtttcaggtctgcttaaaagatccaagtgctttcttt

SEQ ID NO: 233142 - DNA, 100 bp, Homo sapiens
acgataccgaagcgggctgtgtgccccttctccacccagaggtttaccgacaagactgtgaaactttcgggatggtggtgaaaatgctgattgaaaaaga

SEQ ID NO: 233143 - DNA, 49 bp, Homo sapiens
catgtacccggtggactcggtgaagaacatccgtcccattactacgggg

SEQ ID NO: 233144 - DNA, 50 bp, Homo sapiens
agaccttattttcctaaggatgagagagcctgttacctatccataaaccc

SEQ ID NO: 233145 - DNA, 141 bp, Homo sapiens
gttaaggaaggctatgagaaagcagatcctgcacagtttgagttgctcaaggttcttggtcaggggtcatttggaaagaccattcctcaagaattttgtatccaaggcccaaaagtttgttacccaagatgatgaatgctg

SEQ ID NO: 233146 - DNA, 100 bp, Homo sapiens
acgaggacgccagttactccacggaaagcagcttcagcagcactccagaatcatctcccctgccccacaaacatgaaagaaaagacaagagaagcacccc

SEQ ID NO: 233147 - DNA, 74 bp, Homo sapiens
aaaactgtacttatgttagctgaccagggcactctggccgtgctggccctgcagctggcaaggcagatccactt

SEQ ID NO: 233148 - DNA, 80 bp, Homo sapiens
attgaggaaattatccgtttctggaaacattctacagtttccacttgagcggcacagtgacagaacctgcaatacaatcg

SEQ ID NO: 233149 - DNA, 98 bp, Homo sapiens
atatcaccaaactggaggatgcctatgtattccctggggatggcgcatcacacaccaaagaaacgcttcgttaagggactcaggcagtacgggaagaa

SEQ ID NO: 233150 - DNA, 75 bp, Homo sapiens
cgggggcgcgggcggcggcgccggcaggaagaggcctttgaaattgttgttcgccatgccaagaactacaccaat

SEQ ID NO: 233151 - DNA, 90 bp, Homo sapiens
gctgagctgcgaggaaaatggcggcgggagctgttcatcaaagaaaaagggttcttttggtcacccaccactggccccatggctgccgtg

SEQ ID NO: 233152 - DNA, 100 bp, Homo sapiens
gctgttgcttctgggccagaggaagagaatgagggctggttgatatgtgaagagccaacctgtcgcaatcgaactcgtcaccttccccttcaattctccc

SEQ ID NO: 233153 - DNA, 100 bp, Homo sapiens
tacgaaccatctttcccctctttatgaaatctcccaggaagatcaagaaagtgggaaccactgagaaggaacatgaagcgatggcaagccggcaggtgga

SEQ ID NO: 233154 - DNA, 100 bp, Homo sapiens
ggagctggacggcgagcgcgagcggcgcgagaaagtctgtgcagacttttgcagacaaatcaaaacaagaagctctgaagaatgacctggtggaggcttt

SEQ ID NO: 233155 - DNA, 107 bp, Homo sapiens
ggggcctcgggcgccccgcagccccccaacatcctgctcctgctcatggacgacgtgagaagccctaccactgcaactgggacggctgcggctggaagtttgcgcgc

SEQ ID NO: 233156 - DNA, 96 bp, Homo sapiens
ttccttctttcacttcatgcttttcctggcttcactttatatcatgatgacccttaccaactggtacagcgcaaatccagaaaaaccctgtgcatc

SEQ ID NO: 233157 - DNA, 100 bp, Homo sapiens
gggacaaatccgcgatcccagtcatgcatggccgcgatgggcctcttggaacattggtgtgttcatctgcattcgatgtgctggaatccacaggaatctg

SEQ ID NO: 233158 - DNA, 100 bp, Homo sapiens
cggatgagtacgataccgaagcgggctgtgtgccccttctccacccagaggctacattggcgtggtgaaccgcagccagaaggatattgagggcaagaag

SEQ ID NO: 233159 - DNA, 75 bp, Homo sapiens
gaaaaattatccgactcctcggaccagcaggacagacccatccctggaaggcatgtgtggcactgagcatgccca

SEQ ID NO: 233160 - DNA, 76 bp, Homo sapiens
gaagttcacgactctttactagtgacagctccacaaccaagaagatgggtgtgaacctgacacgcagcaacaagga

SEQ ID NO: 233161 - DNA, 100 bp, Homo sapiens
ggacctctacctggcctacttcgtgcgtgagcgagctccaggcgaggacacacctaggatgcctgggaaaagtgaaggctccagtgacctagaaaatact

SEQ ID NO: 233162 - DNA, 120 bp, Homo sapiens
atcaaaaagtgattaagcagagaatggagaagaaggttgattccagtgtaaacaggaacatcgataagtagtgtaaaaacttgcacaatgaaatccgaagccaaggatggagaggaggag

SEQ ID NO: 233163 - DNA, 90 bp, Homo sapiens
atgaagacgacattcagtttgtcagtaatgtttctccatcccagagagatgaagtaattcaatggctggccaaactcaagtaccaattca

SEQ ID NO: 233164 - DNA, 74 bp, Homo sapiens
ctacttcacaggaattgccatttgttggtaacaaggaagatgctgagaaggaagtagctatttctaccttctca

SEQ ID NO: 233165 - DNA, 100 bp, Homo sapiens
gcggcggcgagcgcggtcgagatcgccatgcctacccaacatccatgatagcagtcttctgtaaatcgaacttttcaagaattctctgaaggaaccaagt

SEQ ID NO: 233166 - DNA, 103 bp, Homo sapiens
ttcaaaattaaaagaggagcagcatggcatttcagtcactggtttgcagagtccagtccacctctggaggtatgaaggaggctatccagccctcacagaagtc

SEQ ID NO: 233167 - DNA, 74 bp, Homo sapiens
ctgtggataagggctcagaatagcaccattgctgatttgctccaggtctttcctgtgtaacatatgcaggcgac

SEQ ID NO: 233168 - DNA, 100 bp, Homo sapiens
catcgaaatgccctcacaccagacctacggagggagctggaaattcctgacgttcattgatctggttgttcttgcagaacatgccagcagaagcattcac

SEQ ID NO: 233169 - DNA, 75 bp, Homo sapiens
gggagacgacagaccgtttgtgtgcaatgccccgggctgtggacagctcactgttaatgaagcggctgctcaact

SEQ ID NO: 233170 - DNA, 97 bp, Homo sapiens
gtgccggtggtgcgagtcttcggagcgaccccggcagcatactggagcatagtgaaagagtctattttgaagcttcaaacttagtgctgctgcagac

SEQ ID NO: 233171 - DNA, 100 bp, Homo sapiens
agctgctgctggattgaactcagagaagccggggattggaggctgttgtcattggagaagttcatgagaatgttactctgcactgtggcaacatctcggg

SEQ ID NO: 233172 - DNA, 80 bp, Homo sapiens
cggaaaccggtagcgcttgcagcatggatgcagactcatctgagcgtatcattgctcccatgcgctggggcttggtccct

SEQ ID NO: 233173 - DNA, 100 bp, Homo sapiens
gatgatgttcactggaaggaaaatgggacattagttcaagtagcaactatatcagatgcaactgtgaaagttccttttcttaagaaatgcaaggaagcag

SEQ ID NO: 233174 - DNA, 80 bp, Homo sapiens
ggcttggcttccggctccccccatctggctggaacacacatcagtcacctgtccagaccaaaacgaagaagacgttagcc

SEQ ID NO: 233175 - DNA, 100 bp, Homo sapiens
aggagtttgagaccaacctggccaacatggttcaactccaatttgtgaagatattggtaggcaaatgttatgctataatagaaggattcccatccctgag

SEQ ID NO: 233176 - DNA, 98 bp, Homo sapiens
gccatcagccgctacgtgactcttttctccagtacaaaattggacagctgtacatgatcagcaaacacagccatgaacagagtgaccggggagaaggg

SEQ ID NO: 233177 - DNA, 96 bp, Homo sapiens
cccaatgtcgctctgacccaactcccttgatgatgcagtgtgtgtttggaggttgaaagcagataaggaattggtaaaagatgtttattctgcagc

SEQ ID NO: 233178 - DNA, 51 bp, Homo sapiens
caggtggacgtgccccttagtcaccttccgtaccatggggcgcaagttgga

SEQ ID NO: 233179 - DNA, 75 bp, Homo sapiens
ccgcggcctggggcaggaatgcgtcctgagcagcagccccgcggtgctgggtacaaacccgtagtgctgatgaac

SEQ ID NO: 233180 - DNA, 90 bp, Homo sapiens
tcttctccactgttcctggaggaatccgagaagagcagagcggagggagccccagacacgtgccggtggtggtgtgcacattgagccccg

SEQ ID NO: 233181 - DNA, 96 bp, Homo sapiens
aatgtgggccgggagctgtacttctatatctacaagggggtccgcaagtggtggctgaatacattttggaagagagtttttcatcttagagattgg

SEQ ID NO: 233182 - DNA, 82 bp, Homo sapiens
tttccaccttggtgtgtctcagcaggctctacactgggatgcatacggtcctgagtaagccatatcaaagacttcattgaaa

SEQ ID NO: 233183 - DNA, 100 bp, Homo sapiens
agcagcagcagcctccgccgccgccaccgccgcctccgccgctgcctcaggagcggaacaacgtcggcgagcgggatttcttcgcaagactatggaaagg

SEQ ID NO: 233184 - DNA, 50 bp, Homo sapiens
aacagccagtgatatgctatacatgatggggtcgaggatttggtcttttg

SEQ ID NO: 233185 - DNA, 100 bp, Homo sapiens
tttctgctcagagctcgatgtcaggcatcagatgactgaagacttcctctgataggaagatgtcttcaggaaatgctaaaattgggcaccctgcccccaa

SEQ ID NO: 233186 - DNA, 100 bp, Homo sapiens
ccccgccactttccccggagctgggccgcgaacacctcactattgatggtgtagcgctttaggggaagatgcagagcaaagcggcagtccccggacaggg

SEQ ID NO: 233187 - DNA, 83 bp, Homo sapiens
gaaagatccaaaacaagtggctgcggccgtcgcccaggagtcatcggacgccagaatctggtacacggtcctcttctcgcacg

SEQ ID NO: 233188 - DNA, 100 bp, Homo sapiens
acagattaatggctggatccatggcagcatttaaatcaaacggtattgagatggattgggttatgaaacataatggtccaaatgacgctagtgatgggac

SEQ ID NO: 233189 - DNA, 82 bp, Homo sapiens
cctgcctcagcctcctaagtagctgggactacagctcgagcccagaaaactatcctctaagaccagacgtgacaaggagaag

SEQ ID NO: 233190 - DNA, 84 bp, Homo sapiens
ccgccaaggcggcgcgcgagctggagcactcgctgccaggtggagctcaacaggaaagtcctagcggatctggccatctacgag

SEQ ID NO: 233191 - DNA, 49 bp, Homo sapiens
cacccttccagatgatttttgagagtgatcagcagctggactgtgcctt

SEQ ID NO: 233192 - DNA, 75 bp, Homo sapiens
acatgacacttacaagatggacagggatgataattgggcctccaagaagagaagaggtactcccttatagggact

SEQ ID NO: 233193 - DNA, 82 bp, Homo sapiens
ccgcaactctcagttcgagagtaaaggccagaagcggactcctagaagaggggagcagcaaggatggaatgacagccgtggg

SEQ ID NO: 233194 - DNA, 90 bp, Homo sapiens
agagaagctcaaggccgaagccgagcagaggatctaaatacaagagtggcctattgctatgctaagaaggaatctgatcttaatggcgcc

SEQ ID NO: 233195 - DNA, 50 bp, Homo sapiens
cgcgcccggccggacccgggcccgagcagatggactgctcccccacggcc

SEQ ID NO: 233196 - DNA, 100 bp, Homo sapiens
atttgaaaacaagtggaatagtgctgtcttccttgaatgcaagttctagccggtttttcctacaaggaatccagttgaatacaattcttcctgacgccag

SEQ ID NO: 233197 - DNA, 83 bp, Homo sapiens
atcagacccagtgccatgagggaaatagcaattgatgtcccaaatgtggagtacatcctgctgcttcaagggtagaagactcc

SEQ ID NO: 233198 - DNA, 100 bp, Homo sapiens
gggggagcggcgctgcctgtggagatccgcggaggccgacaggattcgttggctgccgtccccgctgctgtgcattgggaactttatattgctgttggaa

SEQ ID NO: 233199 - DNA, 75 bp, Homo sapiens
tggccgagtggtctaaggcgccagactcaaggcctctggcttctgctatgtcaacgacattgtgattggcatcct

SEQ ID NO: 233200 - DNA, 100 bp, Homo sapiens
catggctgagatcaccaatatccgacctagctttgtggaagtatgcgagacttaagagctcaagtgactagtggtctcctgccatttccagaagtgactc

SEQ ID NO: 233201 - DNA, 90 bp, Homo sapiens
ccaatgcactggattacatccgcacggtcaaggatctagtgaaaagccatttgatgtatgcggtcagagaagaagtggaggtcctcaaag

SEQ ID NO: 233202 - DNA, 87 bp, Homo sapiens
gaagagtcctgaccacaatggggaggacaacttcgcccgggacttcatgggccaagattaacacccctcctgcaggaggaagacagc

SEQ ID NO: 233203 - DNA, 82 bp, Homo sapiens
tccagagcgccgcgcacttcgtcatgttcttcgcgccctggtggtctttgggaagaagcttcctgcctttgccaccatcccc

SEQ ID NO: 233204 - DNA, 90 bp, Homo sapiens
accagtgttgcttactagtttgaacggaaagcaagagtcaaacgacaacttccttcttgccacttatcggtgccaggcagatactacaag

SEQ ID NO: 233205 - DNA, 83 bp, Homo sapiens
tgctccgggacaacatgctgcggggcacagtttcagagactcctccactctctgggaatgacacggactccctctcctgcgac

SEQ ID NO: 233206 - DNA, 82 bp, Homo sapiens
gtgcaaccttgactgccaggaagagccagattcctgcatcagcaaaatgatgcttcaacacccaggccaggtctctgcctcg

SEQ ID NO: 233207 - DNA, 97 bp, Homo sapiens
acaaggaagatgagctgtcctttcaggaaggagccattatttatgtcatcaagaagaatgacgatgttggccacggacagagcgaaggggagaggat

SEQ ID NO: 233208 - DNA, 96 bp, Homo sapiens
agctggacgctgtcctggaggaattcaagcgaggagtttgctataaaatgggagttctggttgtactcactgttctgtggctgttctcctcagtaa

SEQ ID NO: 233209 - DNA, 98 bp, Homo sapiens
tattttttggagcttccatcctggttcttccaaagtgcccggacccaaaacaggaagtgctggagaatctggtaaaagcaccattgtgaagcagatga

SEQ ID NO: 233210 - DNA, 98 bp, Homo sapiens
tgaagcctatagtgctccctcctgtggtaataagttggtggacgctggggaagagtgtgactgtggtactccaaagacagccttttgattgattatca

SEQ ID NO: 233211 - DNA, 90 bp, Homo sapiens
cgaacaattcagcatagaaaacagcaccgataaccctgacctgtgttgccctcaaattggctgtagccacacggatataagaaagtcaga

SEQ ID NO: 233212 - DNA, 100 bp, Homo sapiens
ggaaattgtgcttttccagcatgcttactgaccctgatttacctcaggagtttgaaaggctctgtacaactcaatcaagaatgagaagcttgaatgggca

SEQ ID NO: 233213 - DNA, 83 bp, Homo sapiens
gatcctggaggcctgggaagccaacgaccacacgcaggcgaccattgacgaggtggagacggacgtggtggagattgaggcca

SEQ ID NO: 233214 - DNA, 98 bp, Homo sapiens
gccaaaagatgaagacattctccaagtgtacaaggtgaatatcttaaccagacttgccgcagaattgaacaaatttatgctggaaaaagtgactgagg

SEQ ID NO: 233215 - DNA, 88 bp, Homo sapiens
acaagggcatcgactcagacgcttcctatccctacaaagccatggcacagtaccacctgatgctgcacatccagatgcagctgtgtga

SEQ ID NO: 233216 - DNA, 50 bp, Homo sapiens
gatgcagtcaatggaagcccaggtgctgtatctcaccttcctgggagccc

SEQ ID NO: 233217 - DNA, 100 bp, Homo sapiens
ttaattacaaaactgagccttggaacatttcaggcctggcacggaatgcagtttttacacaacttaatgatgccaatgggtggaatgatgccacctggac

SEQ ID NO: 233218 - DNA, 100 bp, Homo sapiens
ctgaacttcagttgccttacctgtaaggaaatctgaaatagagtactatgctatgttggctaaaactggtgtccatcactacagtggcaataatattgaa

SEQ ID NO: 233219 - DNA, 74 bp, Homo sapiens
gatggacgagcctcccgggaagcccctcagctgtgaggagaaggaaaaggcttcttgcacctgggtggcctccg

SEQ ID NO: 233220 - DNA, 100 bp, Homo sapiens
tacgggagaaaaccgggcgcaagacatggaaggtctttaatgtaactttaaatggttcaccaaaggatgctctaatggatgacagcgatactcctacata

SEQ ID NO: 233221 - DNA, 100 bp, Homo sapiens
ctttaataagtgttgcgctggttcaaggttgggcattgggtggaggagcagaatttactacagcatgtgatttcaggtatcacagatgtcgtaagaatct

SEQ ID NO: 233222 - DNA, 100 bp, Homo sapiens
tgcggttgaaggcagccctgcacgaccagctgaaccgcctcaagagtaatcaagtcagaggattatatgacttttatctgcctagagaagaactatggat

SEQ ID NO: 233223 - DNA, 90 bp, Homo sapiens
ccacaaacaaactacccattttcttttttggaactcatgagacgcgcagacggggaagcggagccaacatgccagtggcccggagctggg

SEQ ID NO: 233224 - DNA, 101 bp, Homo sapiens
ttgcctgggctccagatggagaattatttgctgttggatcgtttcatactttacgcttgtgtgataaaactgggggtggaaggtgaaggggaatatactga

SEQ ID NO: 233225 - DNA, 73 bp, Homo sapiens
ggaaagcataggccgtgccccgaccggactggacgcatttttatacatagggaggctactcacagtcgaacta

SEQ ID NO: 233226 - DNA, 98 bp, Homo sapiens
accgccatggctgccccgtgtttgctgcggcaaggacgagccggggcgctgaagtaatgccatcggtcccctggtagccttgtggctgatttacaaac

SEQ ID NO: 233227 - DNA, 83 bp, Homo sapiens
atacaccggctgttcgaggccttgactgtagcacaggaagtcctggagaacctgaaggaccgctggtaccaggcggacagccc

SEQ ID NO: 233228 - DNA, 80 bp, Homo sapiens
ccgcggggccaggaagtcggagtttgagccccggaggcagagcggctgccatggtgaaagaaaatggcccgaaccaagca

SEQ ID NO: 233229 - DNA, 76 bp, Homo sapiens
gaaaaaagagttgtatttactcaagaaatcaagtacttcagtaagagatgggctgtgatgcagatccatccgccct

SEQ ID NO: 233230 - DNA, 82 bp, Homo sapiens
gtccttcagcagccgctcctacctgcctgagaagctccagatcgtgaagccgctggaaggatagctggctatttggaattta

SEQ ID NO: 233231 - DNA, 74 bp, Homo sapiens
cagaagtgatcgctcagctggagaacgcggctaaagttctgatgagaagctcatagccaaactgaaaagcggag

SEQ ID NO: 233232 - DNA, 88 bp, Homo sapiens
tagcattccgatatttcagagaactttttggtatcaagcctgatgattacttggtctagtgacggagcccgcgcgcggcgccaccatg

SEQ ID NO: 233233 - DNA, 90 bp, Homo sapiens
ccccttgaccagcacacactgcaaggagatcagaaactcagagaatatttggaaggcagtaatctcatcacaaaacttcaagccaaacat

SEQ ID NO: 233234 - DNA, 99 bp, Homo sapiens
cccaaagtgccatgtctttaatagcttagaaaccaagatagccaagtggaacctgcaatcaagaatgaataagaatgaggctatagtgatgaaagaagc

SEQ ID NO: 233235 - DNA, 88 bp, Homo sapiens
tgtactgattgcagcccatggcaacagcctccggggcattgtcaagcatctggaggtggtacacctgatactgttctatgagaaccgg

SEQ ID NO: 233236 - DNA, 74 bp, Homo sapiens
tctaggcaaagctgcttcaaaatttgatgccttcaattaagttgcagagttctgatggagagatatttgaagtt

SEQ ID NO: 233237 - DNA, 75 bp, Homo sapiens
cctgaatcctgaattttccttgatggtcaaaagattaaggacacattcagctaacgtattttagcaggtggagtg

SEQ ID NO: 233238 - DNA, 50 bp, Homo sapiens
ggctgaagcgactgagtccgcgatggagatcccgactgggcctcctacac

SEQ ID NO: 233239 - DNA, 83 bp, Homo sapiens
cgctgctgctcgggctgctcttggaggttgtgaccgagattcccgacgagagagactgaggggaagagaggaaggaggggcgg

SEQ ID NO: 233240 - DNA, 100 bp, Homo sapiens
aagaaggtcagtgtgcttgcttggagatcaggacgcaaagatggcagtggcagcaccatgatgcaaaccaagaccttctcctcttcctcctcatccaaga

SEQ ID NO: 233241 - DNA, 100 bp, Homo sapiens
ccgagaagcctctgaggcgctatggggcggtggaggagacggcttggaaaacggagagactggggagaacgccacgatcatgtctctcgaagactttgag

SEQ ID NO: 233242 - DNA, 75 bp, Homo sapiens
agtacctaaaaacaggtccctggcgagccccttgcaggtccagaggtgtccttctaaagctggtagaggtttcac

SEQ ID NO: 233243 - DNA, 100 bp, Homo sapiens
ggcaaatggatacatcttgttttttcatattacatctacaagaggggacaagtacctttatgaaccagtgtatcccaatattggtaaaggttttcaaggt

SEQ ID NO: 233244 - DNA, 156 bp, Homo sapiens
tcagcggggaccgagcctgggaggccggccggtgccagcacctttcggcttctgagacggcggcagcagcggcattcagacctactgaacgtgaacgaacagaaaggctaattaaaaccaaattaagggagatcatgatgcagaaggatttggaga

SEQ ID NO: 233245 - DNA, 74 bp, Homo sapiens
cagaagcacgacttttgttacagacctactgctcgccgcaagccagattatgagccagttgaaaatacagatga

SEQ ID NO: 233246 - DNA, 100 bp, Homo sapiens
actatcatcaccatggaaaaagtgacttgagcaggtatcctggtcagatataggaggactggaaagtatcaaactgaagttggaacaggctgtggaatgg

SEQ ID NO: 233247 - DNA, 46 bp, Homo sapiens
gggctgctgtttctcttcgccgacgaatacagttatggccacccag

SEQ ID NO: 233248 - DNA, 75 bp, Homo sapiens
caagaatgctatcaataatggtgttcgaatatctggaagaggcaccatgactcctgtgaggatgcagcactccct

SEQ ID NO: 233249 - DNA, 97 bp, Homo sapiens
cggacacacatccacaccaagttggacgaaaaggtgggaactttgaggctcagagacagagcagaagacagaacctggtcttctgattccctgtgtt

SEQ ID NO: 233250 - DNA, 82 bp, Homo sapiens
cattgatgcaagcctgacctccttccagttttacagcaaaggcctggtactgtggcgctccgtgaaattagacgttatcaga

SEQ ID NO: 233251 - DNA, 75 bp, Homo sapiens
ctcgagacttaccagagccacaaggttaatttggagtggcccctggagtcagtttcctacaccatccgaggcccc

SEQ ID NO: 233252 - DNA, 111 bp, Homo sapiens
cgactcggtgattgaggacaagaccatcgagctcatgttgatattcactgatggactccaaagaatcattaactcctggtagagaagaaaaccccagcagtgtgcttgctc

SEQ ID NO: 233253 - DNA, 99 bp, Homo sapiens
cagaaaaaggcgctggaaaaagtgaatttcgtaaccagaagccgaagccggagaaccaaggatttgcagatttacagaatggctgcacattaatggaaa

SEQ ID NO: 233254 - DNA, 50 bp, Homo sapiens
ggacaaggctccggcctgcgaggagggcagctggtggaatttttgaagaa

SEQ ID NO: 233255 - DNA, 100 bp, Homo sapiens
atggcagcctgcagctaggactttaatgcatgaagaatcgagaggaaagatcccagcattttttcgacacatcagtaccactaatggatgatggagacga

SEQ ID NO: 233256 - DNA, 90 bp, Homo sapiens
aaaaaaggtgaaaggtattcttgtggatattgggcttgacagctgcaaggagttactgaaggcaccatactggacataccttttatgtgc

SEQ ID NO: 233257 - DNA, 75 bp, Homo sapiens
gccgcggggcggcgcgggacggcgggcgccggcgccgaaactggcgatggaatatgagaggagccctctggaaag

SEQ ID NO: 233258 - DNA, 75 bp, Homo sapiens
ccgaggtgctgacgtcgcaaaaaaattggatagtacctttaaaacagggcagaagccttatggattggattcgac

SEQ ID NO: 233259 - DNA, 75 bp, Homo sapiens
gttctccccggcacccgggagtcatcttcaaagccctgaagcttatcacacagactttcagccaccacaatcagc

SEQ ID NO: 233260 - DNA, 90 bp, Homo sapiens
cgccatggaaaccgctctggtcacaccaatactgttgcagattgggcctggggttgcccctgaaggcagccggatgccggagcccacctc

SEQ ID NO: 233261 - DNA, 82 bp, Homo sapiens
cccggaagctggtggaacagctacgcatagaagccgggattgagcgcatcaaggaaacttcctcctggccaaccctgtgtct

SEQ ID NO: 233262 - DNA, 90 bp, Homo sapiens
ccgccgtccccgggaaaacgttcgtcaacatcacggtggagccgccaccaaaatgcagattttcgtgaaaacccttacggggaagaccat

SEQ ID NO: 233263 - DNA, 100 bp, Homo sapiens
cataaaaattatttatccaacagctcctcccagaacaaaagtgaagtggtggcaaagtgctggaccagatgttagaagtctccaatttgctctcgacaac

SEQ ID NO: 233264 - DNA, 101 bp, Homo sapiens
ccgagcggtgactccccgccgctcccgggggccgtgacggaatccaggtaaaaatggcttgtctaatagctgcattttgttagataaatgtccacctccaa

SEQ ID NO: 233265 - DNA, 75 bp, Homo sapiens
agccaagaacagcccaatctcctttctgggcaaacgttccaagctgacatagcccagagatacaggataagcaaa

SEQ ID NO: 233266 - DNA, 75 bp, Homo sapiens
aagctgagggcacgtgtttgcggttcagccctttgatgaccgcagcaggatgatcctttcaaaaataaagccttg

SEQ ID NO: 233267 - DNA, 82 bp, Homo sapiens
gacgtcttgcctgtgtcccacttgttcgcggcctatagaacatacatatgatagttgagaaagacacatattctgatcatga

SEQ ID NO: 233268 - DNA, 100 bp, Homo sapiens
gaaaactggacattataacattaagactggctggacaatggcccagaacaagctattcaacaagatcctcaaagccctgcagtctgaccggcttgcccgc

SEQ ID NO: 233269 - DNA, 49 bp, Homo sapiens
ggtatactacatggcaaaatgggaaagaatgaaactagtgatcgagaag

SEQ ID NO: 233270 - DNA, 101 bp, Homo sapiens
ggagtcaccactggacctccaaggaagccacgtgcagacatctacaaccttcgatctcctgacgaggctcgatccatatacgagcgtgctttagatgtaga

SEQ ID NO: 233271 - DNA, 98 bp, Homo sapiens
aaaaaggttcgggaggctgacctagtgatatttcagaagcattcctgcgtaaatactgctgtaatactgtcatgcaaagtgtatcctttcttgtcgta

SEQ ID NO: 233272 - DNA, 100 bp, Homo sapiens
cagggccccagcaagcctccagcagtggtaatgaatttgggcatcctgaatggttagacttcccaagaaaaggaaataatgagagttaccattatgccag

SEQ ID NO: 233273 - DNA, 83 bp, Homo sapiens
cgtgaagctgctgctgtccaagggctctgacatcaacatccgagacaacgttttaaaatcaaagatgggaaaatcggagaaaa

SEQ ID NO: 233274 - DNA, 87 bp, Homo sapiens
accggctctggaaaatccgcaagaccatcatgcaggatgattgccgccgtggacacagactccccccgagaggtctttttccgagtg

SEQ ID NO: 233275 - DNA, 50 bp, Homo sapiens
gtcatgctcagggaccctgtggagaggcagtatttggcagtcgtattcag

SEQ ID NO: 233276 - DNA, 82 bp, Homo sapiens
ttcgacaagaatctgcaggacttggtccgcggcatccgtaaccacaaggaggacgaggatgatcggctgaatgtaacagagg

SEQ ID NO: 233277 - DNA, 75 bp, Homo sapiens
aaagttttaaaagccatctccagtatccattctttatggcagattgctcatttagaaagtggatgtgtgggataa

SEQ ID NO: 233278 - DNA, 50 bp, Homo sapiens
caaaatctgcctggaagataatgtgaagcaagaggctactatgagcagac

SEQ ID NO: 233279 - DNA, 87 bp, Homo sapiens
ttttaaacttaggtatttaagtactgaaagtctgatgaccgggattccaagcgggattcccttgaggagggggagctgagagatcac

SEQ ID NO: 233280 - DNA, 74 bp, Homo sapiens
ggagaagcaacttttattgctagaatggcccaatatagctttgacaagggctatttttggagcattacaagata

SEQ ID NO: 233281 - DNA, 95 bp, Homo sapiens
cttacagggtataactttacattagcagatatactattgtactatggacttcatcgctttatacttcttggtgatagcaaagatgtccttgggcc

SEQ ID NO: 233282 - DNA, 100 bp, Homo sapiens
cagaaacaaactacatctcaggcttccaggccctggggtcagaagggcaggaagacctctctgaccgggagaagtgtggtgccgtcctgagccaggtgct

SEQ ID NO: 233283 - DNA, 88 bp, Homo sapiens
cttcgatgatcgtgtgtcggatgaggagaaggtgtattccagagcaaatgaaaaagagccttgctgttggtggttagctaaagtgagg

SEQ ID NO: 233284 - DNA, 82 bp, Homo sapiens
acctcgccacgaactcagcccgccacagaagcgcatgaggagagactggaactgtggctgcaccatctgtcttcatcttccc

SEQ ID NO: 233285 - DNA, 80 bp, Homo sapiens
ttggtcttaaaacagtaattggagaacttcctccagcttccagtggctaccacatactgttgattgtgatgaaatgccag

SEQ ID NO: 233286 - DNA, 100 bp, Homo sapiens
gggaaagttcagcgacggcggcagcggccggagccgggccgggcagctagcagggcgcttcgggtccatggaaataaaaggcacatgaacaagtgcattc

SEQ ID NO: 233287 - DNA, 90 bp, Homo sapiens
cggactaaggaccggggacttcttgattgaggtggtccgggactacaatcttcagctgtttttgcaagaaaacgctgtatttcacaaacc

SEQ ID NO: 233288 - DNA, 75 bp, Homo sapiens
aaaaccttctggccccagggcagtgtgcagcctggattttctttgctaaggggagagaccattctaacacaggta

SEQ ID NO: 233289 - DNA, 100 bp, Homo sapiens
ctgggagcagaggaagccttgaggacctactcacagataggaattgaagcggctgccggaaacaacatggaggacatctttggggagcttttgctacagc

SEQ ID NO: 233290 - DNA, 100 bp, Homo sapiens
agtccaagaggaggaggaggcggaggtccaagcggaaagatgcagagagaacttgtttatgcaagaggagatggccctggggcccctcgccccggatcta

SEQ ID NO: 233291 - DNA, 75 bp, Homo sapiens
ccccaacgcatcatgccagggagccaagcgtcctgcccggccgatagaccctttttccggtaactaaacttcttg

SEQ ID NO: 233292 - DNA, 82 bp, Homo sapiens
cccagtttggtccacaaggcttgctgcccaatctttgccaacaggtctctaattaacagaagatggcaaagcccagccacag

SEQ ID NO: 233293 - DNA, 82 bp, Homo sapiens
gaacgaggcaaggagctaaagcagcgtgcgttcagccctgggggtgtttctgtggcctgggactggttagcaccaacaagtc

SEQ ID NO: 233294 - DNA, 100 bp, Homo sapiens
caggattcctgatatagatgccagtcataatagatttcgagacaacagtggccttctgatgaatactttaaaaacccaaacctttcgggtgaccgtgatc

SEQ ID NO: 233295 - DNA, 101 bp, Homo sapiens
ggaggaaggactcctcgctctatatagtggtagtcgctcttctaaaacttttaaaccaaagaagaacattccagagggttctcaccagtatgagctcttaa

SEQ ID NO: 233296 - DNA, 50 bp, Homo sapiens
gtggatttgggagacatttaggagtaccattcagggaaacccccagctat

SEQ ID NO: 233297 - DNA, 75 bp, Homo sapiens
gtcttcgtacagtctgtcaaagaagaggagaaggggaccagctctccggactatcggcactaccttcgaatgtgg

SEQ ID NO: 233298 - DNA, 82 bp, Homo sapiens
gacaaggccaaagagactgcagatgccatcactaaagaaggtttattcactggatctctgaatacccaggccccctccacca

SEQ ID NO: 233299 - DNA, 50 bp, Homo sapiens
atcgcctccatctgtaatatgagctctgaggaacatgaatacagtgatga

SEQ ID NO: 233300 - DNA, 100 bp, Homo sapiens
acgggcgaaggcagcatcagccatgaggagcagaagtcagtccggctgagagcagagctgacatctgataaagacatgtaccttgacaacagctccattg

SEQ ID NO: 233301 - DNA, 75 bp, Homo sapiens
aaaaactgaagaagatggtggataagcccacccagcccgccgctgactcagttcttcttggagtgtggcggcctg

SEQ ID NO: 233302 - DNA, 95 bp, Homo sapiens
gcgcgccaagagggtcagctgggacttcaagacggccgagagccactgcgtgacttaagagattaaaattaatttggttgctgttggttctgaac

SEQ ID NO: 233303 - DNA, 100 bp, Homo sapiens
gaagagacagattcctcggagcaggatgaacagacagacacagagaaccttgctcttcatatcagcatggaacagatggagtcggataactgttcaggag

SEQ ID NO: 233304 - DNA, 100 bp, Homo sapiens
tgcgccttcccggcgtctaggggagcgaaggctgaggtggcagcggcaggagagtccggccgcgacaggacggctggagtgcggtggtgtgatctcggct

SEQ ID NO: 233305 - DNA, 96 bp, Homo sapiens
ggcgccggagctgaaacacgacgtgaagataatccgcaagatgggattatggtgaaactagttgtcaatttgttgcagttatccaagatggcaata

SEQ ID NO: 233306 - DNA, 73 bp, Homo sapiens
gcatgtggtcacattacttcagccccattgacaaaccttcagattctctcagtatagggaacggtgataattc

SEQ ID NO: 233307 - DNA, 100 bp, Homo sapiens
accgggcgctggtctgctcccagccgggaactgggaacagccaggtgccccaaagcaaatacgcggagctgctggccatcattgaagagctggggaagga

SEQ ID NO: 233308 - DNA, 90 bp, Homo sapiens
aagaacacgatcacgttctagatcacatactccaagaagacagtgatagtagaaaaggctcccaaagctcggataggagacctggacaaa

SEQ ID NO: 233309 - DNA, 101 bp, Homo sapiens
ccgcggctgccgagcgcggcggggcctccgcggtctgctcatggcgcacagccagcggctgctcttccgaatcgggtaatagcctgcagctggtgttttga

SEQ ID NO: 233310 - DNA, 82 bp, Homo sapiens
tccgactgatccagctggtggtcctggtctacgtcatcggggagacattagagaagcaagtattttctctctggaggcagaa

SEQ ID NO: 233311 - DNA, 74 bp, Homo sapiens
gggccgtcctcggcggcagtgtcaggacattgtatctcagtttggaatggaaactgttatcttacacacagcac

SEQ ID NO: 233312 - DNA, 98 bp, Homo sapiens
ggaaaagcatggctacaatgtggaacagcgggaacttcattgcaggccgtgtgtcaccctgaccacgtctatctctgggggtcgcacgttgcgggcag

SEQ ID NO: 233313 - DNA, 80 bp, Homo sapiens
ctcggaggcctcttccagaccatcatcagcgacatgaaggtctcggcgcggaagatggccggcggcgtggacggccccat

SEQ ID NO: 233314 - DNA, 97 bp, Homo sapiens
ggcagccaagctcgtagcctgccactccgtgccttatggaagaagaaccagtgtcagatttcgcagttcaggaatgactttagacaatatcagtcgg

SEQ ID NO: 233315 - DNA, 98 bp, Homo sapiens
caacatcgctcggttggaacttaattactgcgtccccatgggagtacagacaggcgacaggttacctcaaggccaagacagatgctcaatctccagcc

SEQ ID NO: 233316 - DNA, 120 bp, Homo sapiens
ttttactgtgtctgcctgttgagttatcagataaacagtgggaacaatttcagacactggtgcagacgcagtaaaacgcaggactcttcccgcttggattcgcgaaggtcttgaaaaaat

SEQ ID NO: 233317 - DNA, 100 bp, Homo sapiens
atgggttcctgtggagaaaaatggtgaagaaaacaaagatgatgataatgttttcagcagcaatttgccctcagaggtgaggtgcaattcctacagacca

SEQ ID NO: 233318 - DNA, 96 bp, Homo sapiens
ccgccactgccggagccatctcggagctcacggagagccgcctgaggagcggcacagcactcactgaaaatgaccgagacagccagtcgccgttga

SEQ ID NO: 233319 - DNA, 75 bp, Homo sapiens
cctggagatgagcacgccctttacctgcgtttcctggatgctcttaaagggaggacatgtatgcccaggactcta

SEQ ID NO: 233320 - DNA, 82 bp, Homo sapiens
cagaagtcgcgtgtctaggtgagtcgcggtgggtcctcgcttgcagttcagcgaccacgcagaaaaatatggctcaggagac

SEQ ID NO: 233321 - DNA, 88 bp, Homo sapiens
gaatcagtgtttcgtattccacctgaacttgatatgtctttattactggagttcattggggtgtttgtgaaccgaagtttagcaatgg

SEQ ID NO: 233322 - DNA, 100 bp, Homo sapiens
ctccgagtcagattggagcatttgtgttgatgaagatgaaagagactgcaggttcggatctgaagctcctgccttgtaccagcaaggctatcatgccata

SEQ ID NO: 233323 - DNA, 82 bp, Homo sapiens
gctcaagcaagggctgtatgagctctcagcaagcaactttgagctgcacgttgcacaagctgaaccatccgttcatcttcaa

SEQ ID NO: 233324 - DNA, 90 bp, Homo sapiens
atggaagccatggatggccgggaacctctgacattatctctacggtagaattcaaccacacgggagaattactagcgacaggggacaagg

SEQ ID NO: 233325 - DNA, 100 bp, Homo sapiens
taaacatgcaatgaacccaaaagggtgaggtttatacatggggcgacaatgatgagggacaactgggagacggaaccaccaatgccatccagaggcctcg

SEQ ID NO: 233326 - DNA, 97 bp, Homo sapiens
gggctgggagtatttgtagacacctaccccaatgaggagaagcagcaagagcctgtcaagttggctgttgtttgcagagatggtcaagtccatcttt

SEQ ID NO: 233327 - DNA, 50 bp, Homo sapiens
ttctggagtactcttattttgaaaagaagttgattcaagtcagttgagac

SEQ ID NO: 233328 - DNA, 51 bp, Homo sapiens
atcaagggcagccaattactgagcggaatggccaaagactatgacgggtct

SEQ ID NO: 233329 - DNA, 100 bp, Homo sapiens
gtgagttcaagtacagatcacacgcccactaaagcccagaagaatgtggctaccagcgaaggagtttcggacgtggctgagggaggaatgggggcgcacg

SEQ ID NO: 233330 - DNA, 50 bp, Homo sapiens
gcgccgtgtaactgtgaatctttcaaaggagctagacaaaatagtggcat

SEQ ID NO: 233331 - DNA, 82 bp, Homo sapiens
ccaagcagccaaccatgctcaacttcggtgcctctctccagcagactgcgaattcagaaggagctggcggacatcactttag

SEQ ID NO: 233332 - DNA, 101 bp, Homo sapiens
aagtccatgatcgaaattagccggacccaggatgaagaggttggagatgggaccacatcagtaattattcttggacttgaaagaggagattgatattcgac

SEQ ID NO: 233333 - DNA, 83 bp, Homo sapiens
caggactagagagccagcaatgcctccatgaacaatctcacccaattactctgctcagggagactgcattgcttattgatcca

SEQ ID NO: 233334 - DNA, 100 bp, Homo sapiens
gaacctgattggcttcgtgtcgagttgcatttgctggtctggcctttgcgtccttctacctggcagggaagttacactgcttcacaccacaaggccgtgg

SEQ ID NO: 233335 - DNA, 76 bp, Homo sapiens
cggggatcgacaagctgcccatcgaggagacgctggaggacagcccgcaggtgacttaagagattaaaattaattt

SEQ ID NO: 233336 - DNA, 51 bp, Homo sapiens
aaatgaagaagctagtaagcagctggagactttgctaccaggacttgctgg

SEQ ID NO: 233337 - DNA, 98 bp, Homo sapiens
aacagcagaagctattcagacacccctgaaatctgccaaaaattctctaaccatggcacaggtagagaaacgtggaggtttgctccggaaatcttcag

SEQ ID NO: 233338 - DNA, 82 bp, Homo sapiens
cggggtggcagtgcggcgggttacggcctggtcagacaatgcagatcttcgtgaagactctgactggtaagaccatcaccct

SEQ ID NO: 233339 - DNA, 50 bp, Homo sapiens
atgtctgtatcctcaatcaaatctccaagaaggagaagcttctctcgcag

SEQ ID NO: 233340 - DNA, 75 bp, Homo sapiens
cagctctctaacccaacagatgacagctggaagggtagaccatacgcaaaaccatatttatttagagtcagaatg

SEQ ID NO: 233341 - DNA, 74 bp, Homo sapiens
cccggctcccgcaccatggaggaggacgacagctacgactggcatcagtactatgacatagtttatatgaagcc

SEQ ID NO: 233342 - DNA, 100 bp, Homo sapiens
cgtatctgcctaggcattttgctgtctcctcctaatacgctggtaagcgggcccctcagtgctaccccagttccgtcaactctgccaggactgtgatgct

SEQ ID NO: 233343 - DNA, 88 bp, Homo sapiens
gcacagtccatcggcatacggagacagtctggagggcagtatgagctttttgctgtgattgcgcacgtgggaatggcagactccggtc

SEQ ID NO: 233344 - DNA, 82 bp, Homo sapiens
ggaggtggatgtgaaagatcctaactatgatgatgaccaggttatggaggttttgatgactatggtggctataataattacg

SEQ ID NO: 233345 - DNA, 83 bp, Homo sapiens
gaacctcttccagttggaattgaagaatattcccaagtccttcacccggcggaaggagagttttacatggaagtggcttacag

SEQ ID NO: 233346 - DNA, 82 bp, Homo sapiens
ggcttctcgactcggtcctgtttcgacagcgaacatgtcgcggcctgtcagagaaccatggagtctggcagtaccgccgcca

SEQ ID NO: 233347 - DNA, 101 bp, Homo sapiens
aaggagcgggcgacccggtgtgtgggccagcggagctccgacgctatgtccagcaaaggctccgtggttctggcctacagtggcggcctggacacctcgtg

SEQ ID NO: 233348 - DNA, 100 bp, Homo sapiens
gctactctctctttctggcctggaggctatccagcgctgtgacaaaccctgtgcccacgctgcctccactgccgggagactcagggctgggggagacatg

SEQ ID NO: 233349 - DNA, 102 bp, Homo sapiens
agaacttagaaggcaaaagagggaggagatgcgactcgaagcagaaagaaactgctctttgagcgcgggaaggaggccctggagtccgaatttcgcagcctg

SEQ ID NO: 233350 - DNA, 82 bp, Homo sapiens
caagaaggcaacgacgttccatctgtggaaggacctaccaaccaggtgccttctccaagagaggcagcagggagggagaaat

SEQ ID NO: 233351 - DNA, 100 bp, Homo sapiens
cgagcagatgaacgggcctgtggcaggtgcctcccgccaggaggatacgaagcgttttcggcttcctgcccggagctgtgcagcaaacagtcgaccccca

SEQ ID NO: 233352 - DNA, 75 bp, Homo sapiens
gaagaagcaggaccgcggggagctgaagctgctgcttttggcacgagtacacgagacaggattgagaaaggagag

SEQ ID NO: 233353 - DNA, 50 bp, Homo sapiens
acggccagatctgccctccagaacgccacagaagtatgatcccactttca

SEQ ID NO: 233354 - DNA, 75 bp, Homo sapiens
gctcctactatccatttcaactacagatactttgaagtagaagaagctgatgcacttttgatatcaagcaagtgg

SEQ ID NO: 233355 - DNA, 99 bp, Homo sapiens
caccaccctgcctgtggacagcaggatgattgaggtgaatgtgatgccctctgccagccgggtgatcctcttggagaacctgaaccgcttctggcccat

SEQ ID NO: 233356 - DNA, 100 bp, Homo sapiens
gaatgatgctctaccaccacggcagcttacaggaagcccttaagaactttaaggggttgctgaaagccagaaagattctctctgaaaattttggaagcat

SEQ ID NO: 233357 - DNA, 51 bp, Homo sapiens
tgaagactaaagcatctgtcagaaaatgcgaccaagaccagtgcattcaga

SEQ ID NO: 233358 - DNA, 90 bp, Homo sapiens
ctgaaaacatcatcgttttgaagagttctgcgttttgccagtcacctctcaactgtgtgccaaaggggatcatggaagctgataaagatg

SEQ ID NO: 233359 - DNA, 105 bp, Homo sapiens
ttcacctttgtctcctcagcagacgcggaaggacactcatgaggaccatgatacttccactgagaatacagacgagtccaaccatgaccctcagtttgagccaat

SEQ ID NO: 233360 - DNA, 75 bp, Homo sapiens
gttgctgccgccatacgcgctctccctgtttagactgtgccctgtccacggtgcctcctgcatgtcctgctgccc

SEQ ID NO: 233361 - DNA, 50 bp, Homo sapiens
agtctgccgcaagttcatgcaagatgaccagaagcggatggagaagatct

SEQ ID NO: 233362 - DNA, 80 bp, Homo sapiens
tgaagctgtaaatgaacccaagaagaagaaatatgcaaaagaggcttggccaggacctgaaggagaagaaggagaaggtg

SEQ ID NO: 233363 - DNA, 75 bp, Homo sapiens
catgatttaaacaagagatttccacagaaggtttactcctggcttgggggcattaggaagcactggaggctcttc

SEQ ID NO: 233364 - DNA, 96 bp, Homo sapiens
caggtgctggggaagacaagccggcggctaaagaattacctccaaagccattgtcaagaccacagcagtcatctgcaccagtccagctgaactctg

SEQ ID NO: 233365 - DNA, 75 bp, Homo sapiens
ggcaaagtgcaagaaggagagaccatcgaggatggggctaggagagctgaagaagcaggtggagagtgccgagct

SEQ ID NO: 233366 - DNA, 75 bp, Homo sapiens
gaaagactgtaaacacccaaatattgttgcttattttggaagctatctcagtatttgactacagtcattccttat

SEQ ID NO: 233367 - DNA, 95 bp, Homo sapiens
gatcatggagccaagcattccagtaggtacctgtgcaggttgctgcttttgctcagaggacatccatgaccctaatggtctttttgttcaagata

SEQ ID NO: 233368 - DNA, 75 bp, Homo sapiens
ctgatctccatgtcctgttgtggggcttttacagcctttggtaaatcttggtgccaataatggaacgaacactgg

SEQ ID NO: 233369 - DNA, 89 bp, Homo sapiens
actgcgacgttcacagaggaacactgccggggcccaaccacaagacgactcaataggaggaaggtgccctacgagacgctgaacaaacg

SEQ ID NO: 233370 - DNA, 75 bp, Homo sapiens
actatttcaagatgatatttattcaccaaacaaggtgactctgacatcattagaagcatgccagaacagactggt

SEQ ID NO: 233371 - DNA, 51 bp, Homo sapiens
gcgcacgtttaaacatctcaaggatatcacgcagcagcacctctgtgaccc

SEQ ID NO: 233372 - DNA, 50 bp, Homo sapiens
ggaactcctagatctggcaatgcagcctttggcccttcttatcaggatga

SEQ ID NO: 233373 - DNA, 98 bp, Homo sapiens
ctgcttgtcatagtcttcattcctgccttctggagcctgaagacccatccattgtggagcacctgtggaatcctctcaagaggaacagtcattgtgtg

SEQ ID NO: 233374 - DNA, 88 bp, Homo sapiens
gacaaactagaagctgtggtcaaggatctaaaagctcggatgcaggaggccatgactcaggaagtgtcagatgttttcagcgatacca

SEQ ID NO: 233375 - DNA, 100 bp, Homo sapiens
cgctcaggtccttttggccagatctttagaccagacaactttgtatttgcaccagtggctctgacagttctctctcagatggtcttcctgttcacctagc

SEQ ID NO: 233376 - DNA, 108 bp, Homo sapiens
ggggtcctcagcgtggtctgcctgctgcactgctttggtactagcaaaggccagacgtcttactcaacaacttccctgccaccacctccaccatcccatccggccagc

SEQ ID NO: 233377 - DNA, 100 bp, Homo sapiens
gtccccgtacgcctacagtaacgggcccactgatgatggtgaagaagagatggaagaagacacagtcacaaacgggtcctgagcagtgaggcagatgtat

SEQ ID NO: 233378 - DNA, 98 bp, Homo sapiens
gctcgggtcgttgtggtgcgctgtcttcccgcttgcgtcagggacctgcccgactcagtgaacctcaagaaggcatgaagccagcccctgcagtgccg

SEQ ID NO: 233379 - DNA, 82 bp, Homo sapiens
attgggaggggggcagctggagcctcaggcggcagcgcttctagctcttcacagatggaatcacaaataaacttattggctg

SEQ ID NO: 233380 - DNA, 74 bp, Homo sapiens
gccaaagcagcagccttctcgacagccttttactgtgaacagacatatctgaagagatggattaagaatgcttt

SEQ ID NO: 233381 - DNA, 88 bp, Homo sapiens
gacatttaattttagggtcctttatatagaagggagagtaggtgactctcctattccatctgtttcttcgggatcatcttcacctctt

SEQ ID NO: 233382 - DNA, 100 bp, Homo sapiens
ttacctggaacttcatcatcatctacttcacaggaattgccattttgactgtgaagtgctgaccacactcaccccagacactggccgtatcctgtccaag

SEQ ID NO: 233383 - DNA, 98 bp, Homo sapiens
gaagacatggacctctatagcattaattatctccactttggagagcccaagtcttggtaactataactacccaatattgcagccatggagtccatgct

SEQ ID NO: 233384 - DNA, 75 bp, Homo sapiens
cggggagggtgctgtgcaaaaccatgtcctggcactcagaatggtccagcgtttgacataccgacgtaggctttc

SEQ ID NO: 233385 - DNA, 100 bp, Homo sapiens
ccgcccgccacgcagactggcgcgtccaggtggccgtgaagcacctgcacatccacactccgctgctcgacagttatttatcagagagtctgatgctgaa

SEQ ID NO: 233386 - DNA, 90 bp, Homo sapiens
ggaatttgcctcttctacagatagagctgttaaggtgacagccgtgagggtgtatgtgaacagttcctctgagaatctcaactacccggt

SEQ ID NO: 233387 - DNA, 75 bp, Homo sapiens
gacgtcgtgtcgagttcccaaaaagctccgcaggggctgtagggagattgctggactcgctgaagagagactacg

SEQ ID NO: 233388 - DNA, 143 bp, Homo sapiens
gtctacgctgacatcaaaactgttcggacttccccgttagaactcgcgtttccacttcagagatctggttgtctgcattcaaaagagcattctattaaagctaccttaatttggcgcttatttttcttaatcatgtttctgac

SEQ ID NO: 233389 - DNA, 50 bp, Homo sapiens
gataaatgaaatcttcctaagtatagcagccctagcaaaccaagagtgag

SEQ ID NO: 233390 - DNA, 83 bp, Homo sapiens
caagaagctggtgtgcggagatgaagactgtgccctgtccacggtgcctcctgcatgtcctgctgccctgagctgtcccgagc

SEQ ID NO: 233391 - DNA, 50 bp, Homo sapiens
tgaagagggaagacacgcggaaacagggctgtgtgcaggaaacatgaact

SEQ ID NO: 233392 - DNA, 100 bp, Homo sapiens
aattacagggctcgtccaactggtccctcagtcacacatgccagagattgctcaggaagcaatggaggaggaggtgcgccagtctgtaactcctgccgag

SEQ ID NO: 233393 - DNA, 74 bp, Homo sapiens
gaatggcatgctggtgacggacagtgcagggaagcaactgcagagaaagaaatttcagagcttccaagaccaca

SEQ ID NO: 233394 - DNA, 95 bp, Homo sapiens
gcaggacctgctttcggagtacatgggcaatgcacgtctgagaatggtggatgtggtggagaaagaagatgtgaatgaagccatcaggctaatgg

SEQ ID NO: 233395 - DNA, 100 bp, Homo sapiens
gagcaaacacaaaaacctacactctcactcggagagcccgtgtctactcaggagagaagacaatcatatcctgattcagcccttcctccacaaaggcaag

SEQ ID NO: 233396 - DNA, 82 bp, Homo sapiens
ctgtcggccccggcccgactctatcacaagaagggcgtctctggccgagcctctttttgtggaaaacgacagcagcagcagt

SEQ ID NO: 233397 - DNA, 75 bp, Homo sapiens
atggatttttccacaattagagagaaactaagtagtggacagtttcatttccagggaccctgtggaacgactctt

SEQ ID NO: 233398 - DNA, 98 bp, Homo sapiens
tggctccagggcatctcggaagatccaggtcccaactggaagctgaaggaatagcgggttttgcagcaattgttgcatatggattatataaactgaag

SEQ ID NO: 233399 - DNA, 50 bp, Homo sapiens
caaggccttagcttccttggcctgtcagtaagactttgaccccgacgcag

SEQ ID NO: 233400 - DNA, 50 bp, Homo sapiens
tgtggagacacggccagatctgccctccacacttgcacctcctgcgccgc

SEQ ID NO: 233401 - DNA, 75 bp, Homo sapiens
ggggtcagcagggggccagctcaggacacacagacccagctggaactcgtttgacggtgagaacatgtatatgag

SEQ ID NO: 233402 - DNA, 82 bp, Homo sapiens
gtctggtcaagtcccccaatctctgccatcaaggccgattttctttgaaccttcagcaaagtaaactgtttcacgttagacc

SEQ ID NO: 233403 - DNA, 75 bp, Homo sapiens
cctgctgtgaaccagcagaatttttgaacaggatgcacaggaacaaacgagggaatatgcctcctatggaacatg

SEQ ID NO: 233404 - DNA, 83 bp, Homo sapiens
gaggtggaagtccaagtcaaacgcagaaggactgcctcactgagcaaccaagaatgtgaatgaactgaaggagtgtctttctg

SEQ ID NO: 233405 - DNA, 90 bp, Homo sapiens
ctagtgaacatgtaataatgcagaatgaagctcttgttgctttggcattaatagcagctttagaattggatttggatttccaggaggtag

SEQ ID NO: 233406 - DNA, 100 bp, Homo sapiens
gttcagttcgtcatggggctgtttggaaagacccaggagaagccgcccaaagaactgagttttgcggcctccaggtggtggatccaatttttcattaggt

SEQ ID NO: 233407 - DNA, 100 bp, Homo sapiens
cagttctgagagtggcgtcaaataccacatcctgaagacccacgcagagagggaacagtccgacctggacttcttcagccccaggccggggaccgctgcc

SEQ ID NO: 233408 - DNA, 98 bp, Homo sapiens
cctcccaaagtgctggaattacagtctgactaaagacatgactggaaaagaagatgtataccgaggcccggccatcagagctctctgcaggatcaccg

SEQ ID NO: 233409 - DNA, 100 bp, Homo sapiens
catcctttgcaaccagatttcttcttagatgaatacccagaagcagttagcaagaaagtggaatcaactggagagaagtttgctgaggaatgccttcaag

SEQ ID NO: 233410 - DNA, 95 bp, Homo sapiens
aaacgcctgaaaatgacattcctgaaacagaagtagaagatgatgaaggatgtcgtgagatggagaataaagaaactctcaaagggttgcacaag

SEQ ID NO: 233411 - DNA, 100 bp, Homo sapiens
gcagaagagacgcacagtagaaccgatctcagccttgctgatcatctcgtacagcagcagaaaatgaccatgttacaggcctgatcttttggccagaagg

SEQ ID NO: 233412 - DNA, 83 bp, Homo sapiens
gggaggccggccggtgccagcacctttcggcttctgagacggcggcagcagcggcattcagggcaagaatatcacggcatggg

SEQ ID NO: 233413 - DNA, 82 bp, Homo sapiens
gctgggactacagacatgcgccagcacgcctgattggttttcacagaattccatggactttaactgctgaaccaatgatgca

SEQ ID NO: 233414 - DNA, 99 bp, Homo sapiens
aaggattgtcttcaatctggaaatgacagaacaatcaccctttaaaataaggaagtgcaattcagtgaagacagatctgggttggaatttgcccctgac

SEQ ID NO: 233415 - DNA, 112 bp, Homo sapiens
aatttaccagagataattgataacaccctgtaacagctgaaagaagctcattcacacagaagacccatttaatgatgaacatcaggagaggcaagaggtggaaatgttggct

SEQ ID NO: 233416 - DNA, 76 bp, Homo sapiens
gacctgtgtatgaaaaatgcatggctggaggggaagaatattgtgacacctcacactcagtgccggttaaaattac

SEQ ID NO: 233417 - DNA, 90 bp, Homo sapiens
tggatatatcttccttgacagcaaaggagccagatgaccaagatgctccagatgaacatgagtcgcctccacctgaagatgccccattgt

SEQ ID NO: 233418 - DNA, 90 bp, Homo sapiens
cggacggccgacaaaggctggcagaaacattattccatcatttgtgttgatggatatccaggcttctacagtggtcacctatgtgtatca

SEQ ID NO: 233419 - DNA, 58 bp, Homo sapiens
cctcaggacacggcctacaacaccaagagttgattatggaagattcccacaagagtac

SEQ ID NO: 233420 - DNA, 96 bp, Homo sapiens
cggcagtacggcaaatatggcggaggaattgaaagatgttggccatcgtgatcagatggctgcagctagaggaatcctgcagaagaacgttccgat

SEQ ID NO: 233421 - DNA, 98 bp, Homo sapiens
aaccccgcgtggctctgggacgcctgccgcctgcggccgaggtgcagcagtagcgggcatttacagagtagctgggaagaacatggcccctttggaag

SEQ ID NO: 233422 - DNA, 83 bp, Homo sapiens
tggagacctcaagaaggagatcaatgagcggctgcttactgctcgacagatggtcagtaggacagaaggtaacattgatgact

SEQ ID NO: 233423 - DNA, 83 bp, Homo sapiens
tgagcccggatacttctgaagaacaaattaaagaatattttggagcctttggagagccaaatatcatgcagcttcgtgacaga

SEQ ID NO: 233424 - DNA, 100 bp, Homo sapiens
caagggttcatagcatgcggtggtgaagatggattactgaaagttttgaaattagagacgcagacagtgtctgagcagcaggagagagccttcacgctgg

SEQ ID NO: 233425 - DNA, 100 bp, Homo sapiens
cagcaggtccgctataatgctctgctggccgtgcagaagctcatggtgcacaactggaaagtcgtggaaggcgctgacgctgtcccagaagaggccgtac

SEQ ID NO: 233426 - DNA, 90 bp, Homo sapiens
ctcctgcctccaggccgctccccacggtggtgttagcacctcagcccatcccagatttaccatatgagccccccaggagatcagcctgga

SEQ ID NO: 233427 - DNA, 100 bp, Homo sapiens
aaacaccaaactctctagcaaaaccactgctaagttatccactagtgctaaaaggacatggatttgattgacatactttggaggcaagatatagatcttg

SEQ ID NO: 233428 - DNA, 83 bp, Homo sapiens
tcctgcgccggccttgcctcggaagaagctcattcacacagaagacccatttaatgatgaacatcaggagaggcaagaggtgg

SEQ ID NO: 233429 - DNA, 75 bp, Homo sapiens
gcttctcagaagacagagggttttcttttgaggtaactataactacccaatattgcagccatggagtccatgctt

SEQ ID NO: 233430 - DNA, 100 bp, Homo sapiens
gaccgcattgccatacctgatgcctctaagctgcaattcatcctagcaggcatggctccaaaattatggtctgtgagaaggacccagccctcaagaaccg

SEQ ID NO: 233431 - DNA, 75 bp, Homo sapiens
tgatcatccttggagagagatcagtccggagtaacactggccagaagactcagcctgatgtcatgtcacagaatg

SEQ ID NO: 233432 - DNA, 75 bp, Homo sapiens
gacactgccaagcagccttagccctagtgtagagtatgtctggacctaatagctcttcagaatggtccattgaag

SEQ ID NO: 233433 - DNA, 100 bp, Homo sapiens
ggagagaaatcaggaagattatgggagatgtctggcgataaagggatttctgccttccctgaatcagacaaccttttcaaatgggtagggaccatccatg

SEQ ID NO: 233434 - DNA, 75 bp, Homo sapiens
ggaaaccaggcggccagccagctggaggaaacccaccttgtcccatccacatcaggacatcccagctggagttca

SEQ ID NO: 233435 - DNA, 82 bp, Homo sapiens
ggagtttccccggtgtgcctcggcagccttgcgctgctctaatggtccggacttccgtgttgtcaacagcatctccaccctg

SEQ ID NO: 233436 - DNA, 100 bp, Homo sapiens
agaacagccctccatcttgcagcccagaaggttgatgcccagctacaggtagtaaggaaactggaagagaaggagcatctgttacagagcaacattggca

SEQ ID NO: 233437 - DNA, 83 bp, Homo sapiens
aatagtgatcacattcattttaattttgccggaatatttcaagacaccgaaagatgcctgaaaacttcatgcctcctgttccc

SEQ ID NO: 233438 - DNA, 80 bp, Homo sapiens
tcgcggtgacggtggcgccgcccggggcgaggcagggccagcagcaggcgggaggagccattccgtagtgccatcccgag

SEQ ID NO: 233439 - DNA, 102 bp, Homo sapiens
ttccagagaacgttcgagatctcgtgggtcgaaatcaagggggcccatgtgaccatcaacgcacgggccgaggaggatgtggagcctgagtgcatcatggag

SEQ ID NO: 233440 - DNA, 100 bp, Homo sapiens
cccgcggctccccagccccaggccgggagcaagagtgagccatggagctacgtgtggggaacaagtaccgcctgggacggaagatcgggagcgggtcctt

SEQ ID NO: 233441 - DNA, 75 bp, Homo sapiens
cgaaaccttcgtgatgagattgactgtagccgagggtaaagtgcaagttaagagttcagacatacaagttggaga

SEQ ID NO: 233442 - DNA, 75 bp, Homo sapiens
cactttgccttggttacgccctgattctaaaactcaagtcatttttatcacagaatacatgtcatctgggagtct

SEQ ID NO: 233443 - DNA, 97 bp, Homo sapiens
ggaaaatggatgtagaaaatgagcagatactgaatgtaaaccctgcagaatctttagatgacttgactaatctggtggtaaagttattttctgaagt

SEQ ID NO: 233444 - DNA, 74 bp, Homo sapiens
ggagaatctggtccttaaggatatgtcagatgaccttgccaccatggaagaaagagtacaaagacgatattatg

SEQ ID NO: 233445 - DNA, 74 bp, Homo sapiens
caacatctctcagagacgaaaggctctccgtgtgaaatggtcccatctcagactgccctgggtagacctagact

SEQ ID NO: 233446 - DNA, 98 bp, Homo sapiens
ctggtgtcctgaacctggaagttgtgctttttaagctacaatggttgtctggcaagtggggacaagggccgccggcgaagccgcctggcactgagccg

SEQ ID NO: 233447 - DNA, 82 bp, Homo sapiens
ctgatgagaacatgtcagaatggctttttggaaaggatataaacaacggaaggagtatatgcacaggcggcaaacgttcatt

SEQ ID NO: 233448 - DNA, 76 bp, Homo sapiens
caacagcggaatcatcgatgcaggggcctcaattaatgtatctgcttcttctcagcctgttgataaccatgttagc

SEQ ID NO: 233449 - DNA, 50 bp, Homo sapiens
tgccttctggacaatctttccgccttcctacagcaacttcccactccagg

SEQ ID NO: 233450 - DNA, 74 bp, Homo sapiens
ataataggaccatccaaagaaaggggtccttttgtacaagtggatgaactgatggaaattttccgaagatgcaa

SEQ ID NO: 233451 - DNA, 106 bp, Homo sapiens
agagctgtaccagtacacggcccacgttgccagaattcaattcgtcataatctgtccctacacagcaagttcattcgtgtgcagaatgaaggaactggaaaaagtt

SEQ ID NO: 233452 - DNA, 90 bp, Homo sapiens
gcggtgttttcgtcgtgctcagcggtgggaggaggcggaagaaaccagagcctgggagctagcatatttggcagcttattgcttcgaaac

SEQ ID NO: 233453 - DNA, 83 bp, Homo sapiens
cgaagatgaagcaaaagaacaaattcagtcccttctccatgaaatggtacacgcagaacatgcccaagaagatgaaaggattg

SEQ ID NO: 233454 - DNA, 100 bp, Homo sapiens
agactcatggaggccagattttctccaattaaccagatcttgccctggtgcagacaagacttaaacatcgggtcagaagttgagatttccactatcgaga

SEQ ID NO: 233455 - DNA, 82 bp, Homo sapiens
tttgggtttgaagaatcttctacatgcccaggatccggttgtggccgtggctgaggatggccgggagaagccgaagctgccg

SEQ ID NO: 233456 - DNA, 50 bp, Homo sapiens
acggtcttgctgaaagccagggaagataggaatcgcgatgttggtgagcg

SEQ ID NO: 233457 - DNA, 83 bp, Homo sapiens
gcttcctggcctgggcgctccggtggcggcggagatgcggcattccaaaagaactcactgtcctgattgggatagcagagaaa

SEQ ID NO: 233458 - DNA, 96 bp, Homo sapiens
tgctgaaaacctttgggcttcatggagtcgtcttagatgttgattcagagtttgtggaaaacagtaggaaagcaatgaaagaagctggtaagggag

SEQ ID NO: 233459 - DNA, 75 bp, Homo sapiens
tctcacgaggctgtcatcaccgccatgcccaagaataaaggacttccttcgctgggcatctggctgggattcttg

SEQ ID NO: 233460 - DNA, 100 bp, Homo sapiens
agacaccacacattgcgcagtcgggaccatcgccggagcctgaggacacttctctgtcgtcacagttagaaccaggacaatcctgtgattgatgaaatag

SEQ ID NO: 233461 - DNA, 83 bp, Homo sapiens
gccgatttcatgactaaccagtatttttggaagtaccagcacagtgacgcttcctgaaaccttgttgtttgtgtcaacgctgg

SEQ ID NO: 233462 - DNA, 82 bp, Homo sapiens
tgaccgccacattaccattttttcacccgagggtcggctctaccaagtaggactataagacctacttggactttgtccttgc

SEQ ID NO: 233463 - DNA, 100 bp, Homo sapiens
agcaaatcgagtgcacctgggatgacaaaaagtcatagtggtgtgacaagtggttatcactaggctaaaactggacaaagaccgcaaaaagatcctcgaa

SEQ ID NO: 233464 - DNA, 75 bp, Homo sapiens
gaacgaggcaaggagctaaagcagcgtgcgttcagccctggggtgattgaattactcagatatgaagatcatcat

SEQ ID NO: 233465 - DNA, 100 bp, Homo sapiens
gtcccttttgcctcagatactattttgaaggttcacgcaaagaatctgctccacaagttttgcttccagaagaagagaaaattatagtggaagaaactaa

SEQ ID NO: 233466 - DNA, 50 bp, Homo sapiens
tgggaccacatcagtaattattcttggaggctgtgcagaaggtatcctgc

SEQ ID NO: 233467 - DNA, 100 bp, Homo sapiens
tttgatagtcgtaccatatgcagaaggagaagatgtatggtcttatgcaaagggacttcctcacatgtttcagcagggtggtgtattctacagtattatg

SEQ ID NO: 233468 - DNA, 98 bp, Homo sapiens
tggccatccaaggagtgaaggctagcctctatgtggccatgaatggtgaaggctatctctacagttcagacatagctcgccttttgcaagaaaaggag

SEQ ID NO: 233469 - DNA, 51 bp, Homo sapiens
ccggaatggagaaggaagaggagtcgggaggttcccctgaaggatgctaag

SEQ ID NO: 233470 - DNA, 82 bp, Homo sapiens
acacttacaagatggacagggatgataattgggcctccaagagaggcactggctacaattaggcttctcgacgtcctgtgcg

SEQ ID NO: 233471 - DNA, 98 bp, Homo sapiens
ggagaggaacagaccctcactctctctgtcagaaaaattgtcaacagcatctccaccctggagcctgtgagccggtgccagcgcctgagtgagctgta

SEQ ID NO: 233472 - DNA, 82 bp, Homo sapiens
cctcttcgatggcttcttcctcaccgcctctccaagcaattctgtggtgttcttggtcacacatttatggagtttctgaagg

SEQ ID NO: 233473 - DNA, 50 bp, Homo sapiens
gtgctcaattcccatacatgcactagagtatatgaaaatgatgatcagct

SEQ ID NO: 233474 - DNA, 100 bp, Homo sapiens
tgtgacaatgcctcttgggaacaaaatacaaatcatggagccgctggggtcccttttgcctcagatactattttgaaggatcctgttcccagtgggtttt

SEQ ID NO: 233475 - DNA, 83 bp, Homo sapiens
tgttgtcaaggtggcctaccaggaggccaggggtgtcgccatgttttaacacaggctaagcggtatgctttttttatgccaac

SEQ ID NO: 233476 - DNA, 88 bp, Homo sapiens
ggaaatagcgcggctgtgcaagtacctgccagagaacgacctgaagacccttctcaggtgcagccagagagacactagcccactgatg

SEQ ID NO: 233477 - DNA, 100 bp, Homo sapiens
gagtgagagatggaacccgaagaagaaaggattcgttacagccagagattgttgccaccttccagagaagaggtacgagatgacaagacaaccataaagt

SEQ ID NO: 233478 - DNA, 78 bp, Homo sapiens
ttcagtctgtgcggcccgctgttgtctgcccgcacccgggcccgcaggccaggtttaagaatgttacatttgatatca

SEQ ID NO: 233479 - DNA, 95 bp, Homo sapiens
ctctccgccctcgcccggcctgccagcgctgctctccgccgcagcttcagcacctcggcccaggaatttatcatggcatccagcattgaccacta

SEQ ID NO: 233480 - DNA, 90 bp, Homo sapiens
ttgattacatactgttagagaccactggattggcagacccagatgatggacctagccaaagtgagtctgctactgagactgccatgacac

SEQ ID NO: 233481 - DNA, 85 bp, Homo sapiens
tgtcaacgaatcatccacgcacctgcagctctgctgagagagtgcaagccgtggggttctgatctacaatggccaactggacatc

SEQ ID NO: 233482 - DNA, 76 bp, Homo sapiens
gaactattctacatcctcctggcatattcagagtataacccagtcaaaatgcagatcttcgtgaaaacccttaccg

SEQ ID NO: 233483 - DNA, 75 bp, Homo sapiens
ctggactcggacattaaggtccagaagattcgggcccactcggatctcagttggaatcaactggactcggcctta

SEQ ID NO: 233484 - DNA, 75 bp, Homo sapiens
cgatagcaatgcacagccaatttcatgctccactataggaagaaatgttggctatttggcgatgagaggtggtga

SEQ ID NO: 233485 - DNA, 100 bp, Homo sapiens
tagagaaggaaacgggactaaactggcgggctccgtggaagcgtggccggcagcgtcccggacgaggagctcgagatgctgctgtgcagaagattgagac

SEQ ID NO: 233486 - DNA, 100 bp, Homo sapiens
ggtggatcagcgcctacccgagtgtgcgaagctagccaagggttctgagcaaggttcaaccagtcaagaacaggccttatctgctcagcaagctgctgtt

SEQ ID NO: 233487 - DNA, 100 bp, Homo sapiens
cctgcgcgaagctggccaaagcctgcccagacggctcacctgtgcgggatggaacaaaagtgtggacaacagtgagtatatgcggaatggagacttctta

SEQ ID NO: 233488 - DNA, 107 bp, Homo sapiens
aacagccttcatacaagcaaaatgaagactttgactagggtccaaccagcctgctgagggatgcccaagaagttccagggtgagaacaccaagtcggcagcggcccg

SEQ ID NO: 233489 - DNA, 100 bp, Homo sapiens
ccttgcttctgtagaccagctccaacaggattccatggtagctgggatgttagggctcagtactatactggcaattgctggagaagattttgcaattgtt

SEQ ID NO: 233490 - DNA, 75 bp, Homo sapiens
ctgatttgagatcaattcttggagaacacaaagaagtgtgatggctggttggaaggaaaatcatgcaacattcat

SEQ ID NO: 233491 - DNA, 50 bp, Homo sapiens
ggacaccgcagtatgaggcagagacctgcctagagctggaacgttacctc

SEQ ID NO: 233492 - DNA, 82 bp, Homo sapiens
tgttggaagagtcaccatttttaaaacgctggccgcgcgccgaacccgagtccggcggcaccgacgacgacctcaacagcgt

SEQ ID NO: 233493 - DNA, 83 bp, Homo sapiens
accatggctgcggcggcccagctctctctgacacagttcttctggatctgcctcagtcctgacacacagcagctcgggaaata

SEQ ID NO: 233494 - DNA, 95 bp, Homo sapiens
cgggaacccttgccgctgctgtcctgcgaccccaagcagcctgtgggccaaagctgaccaactcccccaccgtcatcgtcatggtgggcctcccc

SEQ ID NO: 233495 - DNA, 75 bp, Homo sapiens
cgtgccctccctggaggagctgggtgtgatccctcacatccacaaatctctgattggaaagaagggacagcagaa

SEQ ID NO: 233496 - DNA, 75 bp, Homo sapiens
acaggacatcggggagaagccagcaggagatcctcatacctcaaacagtgcttccctgcaaggaatcgatagcca

SEQ ID NO: 233497 - DNA, 115 bp, Homo sapiens
gaatttccttgtgcctccattcccgggaggggggagcggcgttggaggccaccgtttccagacgaagttatacggaagcgtctcctcattgatggagatggtgctggagatgatc

SEQ ID NO: 233498 - DNA, 100 bp, Homo sapiens
gccactatcatggcctttgatgccctggtgaccttctgtgaagaactgggtgaaagagtttctagccaaagccaaagaagactttttgaaaaaatgggag

SEQ ID NO: 233499 - DNA, 90 bp, Homo sapiens
ttggctgtaaggacccctaaggttatggcagagaacgatgtggacaatgagctcttggactatgaagatgatgaggtggagacagcagct

SEQ ID NO: 233500 - DNA, 88 bp, Homo sapiens
ccagaagtccagagctgaggactgcctgtttgcagttctaaatggagcccctggatttataaacttgtgcgatgctttgaacgcctgg

SEQ ID NO: 233501 - DNA, 100 bp, Homo sapiens
acaagcaaggagtcatatatccttcatatgatccatcttagtgaagaattaggatacagctctcctgccacagctcctcaccccctgaaaatgttcgcct

SEQ ID NO: 233502 - DNA, 103 bp, Homo sapiens
caaacctgtatctgtgcaggcaatgtgggtcgggaacttctggcttctgctccaactggatctggaaaaacattagcttttagcattcctattttaatgcagc

SEQ ID NO: 233503 - DNA, 75 bp, Homo sapiens
catcttccacatggagatgctgaaggttcaagggcagcaggaaagacgagatcctgggcatcgccaacaaccgac

SEQ ID NO: 233504 - DNA, 97 bp, Homo sapiens
acaaggtgtacgatttgaccaaatttctggaagagtctggctcttgctgattgaattcctttggtgcagtttagcatgttcctctgtgttctgcatc

SEQ ID NO: 233505 - DNA, 101 bp, Homo sapiens
acagcaagatgtggaagacacaaagcctgcgaaagtgctcgggaagagggagagcaaacttggctcagcccatacctgccatcctggctggacttgacccc

SEQ ID NO: 233506 - DNA, 75 bp, Homo sapiens
gcgctcgggtgaggagctggtggcgtcggcaggttcgaggcgattcgaggggtcatcctgtatatcctcctggtg

SEQ ID NO: 233507 - DNA, 100 bp, Homo sapiens
ggaggaggtgccgctgccgtggccgcccggctgccgggagccgacagcttcgcgccgggtggccagcatcgaaatgttcagccttttagtgatgaagatg

SEQ ID NO: 233508 - DNA, 75 bp, Homo sapiens
ggaagaagagaaacctggggaggagaagacaatcttacatggtgagcgaggagctgatccgagtggccatcctct

SEQ ID NO: 233509 - DNA, 100 bp, Homo sapiens
tgaagtgcttaattcaaggtcacacaatgtcggggatggacctccagatttccttactgtttttggctttcacccccaaccagtgaccaaagacttgacc

SEQ ID NO: 233510 - DNA, 87 bp, Homo sapiens
caccaattacacctttgatttcaaagtgactggtatagtggtcccgcaactgaacttgatactgaacctgatgatgaatgggtgaaa

SEQ ID NO: 233511 - DNA, 82 bp, Homo sapiens
aaatggaatacattctgaatttagagcattttgaaagcgaagcagaagccgtagaatcagcggcgagcctgttgaaagaacc

SEQ ID NO: 233512 - DNA, 74 bp, Homo sapiens
gcttggtttcgggatctcggtgctgcagacggcgagacctcctgcacagtttttcagaagaagtgaagtcaaga

SEQ ID NO: 233513 - DNA, 75 bp, Homo sapiens
gggattgctggctacagcttcagaagaccgaagcgttcgtatctggaagccccgagcctggagatgagggggagc

SEQ ID NO: 233514 - DNA, 82 bp, Homo sapiens
gcgcagaaagcaggcgaacccgcggcgcaataacggccagaagcggactcctagaagaggggagcagcaaggatggaatgac

SEQ ID NO: 233515 - DNA, 75 bp, Homo sapiens
aaactcatcaggacggaagcacaggggccactcagagtcgcccgagaagttgttcctggtcattgagtacgtcaa

SEQ ID NO: 233516 - DNA, 75 bp, Homo sapiens
ggcctcccaaagtgctgagattacagagattcacggatccatccgggtggtccgggcaccactggcgcccctctg

SEQ ID NO: 233517 - DNA, 48 bp, Homo sapiens
agaaacatcagaatttgaagcccggtttaaaattggtggtgaatggtg

SEQ ID NO: 233518 - DNA, 50 bp, Homo sapiens
gaggccgaggactcggagttcacctgcagcggggatctgatgagcttctt

SEQ ID NO: 233519 - DNA, 75 bp, Homo sapiens
gcagagcatgcagaagtcctcgctggagtttcataagcttccacagcgcggcacctgtacctccggggtggcgct

SEQ ID NO: 233520 - DNA, 82 bp, Homo sapiens
aaagatttactgcctgaacatctgaaattgacatttgggagcctctggtggagcaagtaattgggattcctacagtgaccat

SEQ ID NO: 233521 - DNA, 100 bp, Homo sapiens
agcaagaacaaggtgacacatattctgtctgtccacgatagtgccaggcctatgttggagttgctgttggactgcggtttgggaaatggcagcacttccg

SEQ ID NO: 233522 - DNA, 98 bp, Homo sapiens
gccgtcctcctcacggtcctcctggctgtgctcatatacacctgattccaactccacagagtgaccagagagaggacgtggctgaagacaccaaagat

SEQ ID NO: 233523 - DNA, 74 bp, Homo sapiens
ccaccttagcctcttgatcgaggaagtggatatcaaagtattgcagagtgccttagcagccatccgacatgccc

SEQ ID NO: 233524 - DNA, 96 bp, Homo sapiens
cctcggacccatcgccgcttctagaccctactgcggtctcggatattgccgggttttaaaatcaaagatgggaaaatcggagaaaattgcccttcc

SEQ ID NO: 233525 - DNA, 90 bp, Homo sapiens
tagagattgtgaagaagaatttcgatctccgccctggggtcattgtcagattttgatccaaacaatatcttcaaggcattctttggcggt

SEQ ID NO: 233526 - DNA, 101 bp, Homo sapiens
ctagcgcgaccctgagccggcgcccgtggtccggccatggacgacctcggtagaacgtcatgacatgaataccttaagcctgcccctgaacatacgccgag

SEQ ID NO: 233527 - DNA, 76 bp, Homo sapiens
catagttttggaactagcagatgctggcgacctatccagaatgatcaaggtgaacatgtcaaaccttttaagccag

SEQ ID NO: 233528 - DNA, 100 bp, Homo sapiens
ggcggccaaggctcctccaggaggagggactacacggacaggatttttgtccctgagtcatggaagacagaagagctgaaaagtcatgtgaacaagcatg

SEQ ID NO: 233529 - DNA, 97 bp, Homo sapiens
gtcaagtcacaggacaccgaagaaaccatcacgtacacgggagatgcacttatttacatggaaccagagaaacaagtgatgtccaggtcgtcagatg

SEQ ID NO: 233530 - DNA, 98 bp, Homo sapiens
gcttcacccgtacaggtagccccgccgccgcgcacctgccttcgctcccgcaccggaaagaatacccacctcatgtccaaaaagttgaaattaatcct

SEQ ID NO: 233531 - DNA, 82 bp, Homo sapiens
ggaaaacaaatttgtaaatattttcttgaaaggaaatgtattaagtttgtgaagtgtggatatgcaggctctaactttccag

SEQ ID NO: 233532 - DNA, 75 bp, Homo sapiens
tataacttgtcagcaaactactttcaggagaaatatgacgccgtgcccatccagtccagcgtggtgttatgttcc

SEQ ID NO: 233533 - DNA, 76 bp, Homo sapiens
taatatttctccctgtcttactcagttacatagtgctgggctttgacaaacttcctctgtggggtaccatcctcat

SEQ ID NO: 233534 - DNA, 82 bp, Homo sapiens
attgataacaccctgtaacagctgagtcgttccaggggtagaggaggcatgaaggatgaccgtcgggacagatactctgcgg

SEQ ID NO: 233535 - DNA, 75 bp, Homo sapiens
atcgcagtggaaaactgagtgaaaatgtttataggaggccttagctgggacactacaaagaaagatctgaaggac

SEQ ID NO: 233536 - DNA, 83 bp, Homo sapiens
tcgagagccctgtcatcttctaaacagagcagcagcagcagagatgataacatgtttcagctcttggataagcacaagaatac

SEQ ID NO: 233537 - DNA, 75 bp, Homo sapiens
gcgggaacacagagagcgaagccaggtatctagaagagcagaagacagagaatggaaaagataaggaacagaaac

SEQ ID NO: 233538 - DNA, 82 bp, Homo sapiens
gtttgctcgagggaacgtggtcggaggccgattcgacacagacaaggtttggtgcacctcgatttggaggaagtagggcagg

SEQ ID NO: 233539 - DNA, 100 bp, Homo sapiens
ttctccgccgcggcactgatccccacagtctgacagcaatgcaagcttcctccgtgctgccagagcaggcaacctggacaaagttgtggaatatctgaag

SEQ ID NO: 233540 - DNA, 100 bp, Homo sapiens
catgatgggcgggtacctggatgacaggtgcccgcctggctgggtgggtgagcggtgtcagctggaggacccctgtcactcaggcccctgtgctggccgt

SEQ ID NO: 233541 - DNA, 75 bp, Homo sapiens
cggttcagccctttgatgaccgcagcaggacaaattgatggccaggagatcactgccaccgccgtgctggccccc

SEQ ID NO: 233542 - DNA, 96 bp, Homo sapiens
cagaatcctgagggccaatggacaattatggacaacaagcatgggaatcattgtgctggagctgtactggaagcatgctccaaagacctgtaagaa

SEQ ID NO: 233543 - DNA, 71 bp, Homo sapiens
attatggagcggacattgtttactgtgaggtttctaccatgaatgaaatgaagagttattctcaagctgtc

SEQ ID NO: 233544 - DNA, 74 bp, Homo sapiens
caaaagccaagaggaggacagttcgctacacagcaatgcatcgaggctaaatgtgaacaataatgtcttggaag

SEQ ID NO: 233545 - DNA, 89 bp, Homo sapiens
aaaggagagcgccaaaccattactgatgatgtggaggttaacagctatctttctaaacttgtggtggagaatgttgatgtgttaacaca

SEQ ID NO: 233546 - DNA, 75 bp, Homo sapiens
ggcactgctcctgctggccgcctggacggctcgggcgctggagtgttatagttttgccgctggactcttccctcc

SEQ ID NO: 233547 - DNA, 74 bp, Homo sapiens
ttgattgcacccaccctgtagaagatggaatcatggatgctgccaattttattgtccccttggggcggaaagaa

SEQ ID NO: 233548 - DNA, 82 bp, Homo sapiens
tgcctgagacaagccacaagctgaaacgcttcgttaagggactcaggcagtacgggaagaacttcttcagaattagaaagga

SEQ ID NO: 233549 - DNA, 105 bp, Homo sapiens
atcgctcagccaggagatgagatgcaccatccggctgctggacgactcggagatctcctgccacatccagttgttgacctcctgtactggagagacattaagaag

SEQ ID NO: 233550 - DNA, 95 bp, Homo sapiens
gcccacatcaggacagctgttccttggccatcccaaagctattctgggggcaacagagggcttccgagtggacctgccaatcaagtcggcccgct

SEQ ID NO: 233551 - DNA, 83 bp, Homo sapiens
aaatcgggctgaagcgactgagtccgcgatggaggtatcttggagatggccgcttccatctggagtctgtcatgattgccaac

SEQ ID NO: 233552 - DNA, 75 bp, Homo sapiens
tgttaaggattccaagtaactcttatttggttccttcaatggtgccttagctgctgttcctgtccaggacctggg

SEQ ID NO: 233553 - DNA, 80 bp, Homo sapiens
tgtcacctccatgggaccaggaccgtaggatgatgtttcctccgccaggaagtgggaaaactcttgcctttgccatccca

SEQ ID NO: 233554 - DNA, 100 bp, Homo sapiens
cagatggcaactctgatcccaactctgagcatgtcctttgcaacctgatcacacaaatgatgaaaaagaatagaactttctcattcatctttgaataacg

SEQ ID NO: 233555 - DNA, 50 bp, Homo sapiens
caacaagtacatcctggacaagaggaaggaccagaagaagctcgagcaga

SEQ ID NO: 233556 - DNA, 51 bp, Homo sapiens
gatcccagtgaagagcttcgactccaaggaatactcccccagttgcaagag

SEQ ID NO: 233557 - DNA, 90 bp, Homo sapiens
gcaaggccgcccgggaactgctgacgcttgatgagaaggacccacggcgtctgttcgaaggatctcaaagatttcatgagacaagctggg

SEQ ID NO: 233558 - DNA, 100 bp, Homo sapiens
tggtcactaggagtatgccagatggaagaaccattgttagtgaacgtggacaaagctgttgtctcagggagcacagaaatgacctgtgtagaaaaagcag

SEQ ID NO: 233559 - DNA, 82 bp, Homo sapiens
gaagttgaaccagctgtgggagaaggcccagcgatcaggatggctaaaggtgaccccaagaaaccaaagggcaagatgtccg

SEQ ID NO: 233560 - DNA, 74 bp, Homo sapiens
tgcgttgtaccatccgcctgtgggacacctaccaggttggatggcaagcatgtggtgtttggcaaagtgaaaga

SEQ ID NO: 233561 - DNA, 50 bp, Homo sapiens
cctggatccaggataacggaggctgggcccagattattcatcagcatggc

SEQ ID NO: 233562 - DNA, 96 bp, Homo sapiens
tgcaaatttacagaagcagtacgagaactggcagccaaggcttgccagcaaagcacggacagagaaggaggagaagctgagccaggcctatgcaat

SEQ ID NO: 233563 - DNA, 83 bp, Homo sapiens
taatggatagtatgaatgatcaagatggcattggagtcaagagagattataaacaggccttgaagtattttaatttagcttct

SEQ ID NO: 233564 - DNA, 116 bp, Homo sapiens
ctgggactttcttcgttgccatgaggaaagaattctccgaggaaacctgtccagtttaagtcgtcttggtctgagatataacagactgtcagcaatacccagatcattagcaaaat

SEQ ID NO: 233565 - DNA, 85 bp, Homo sapiens
ggatgccgacgccgaggccttcaccgcctacctggttggcgtgcagtggtgtgatctcagctcattgcaacctctgcctcccgga

SEQ ID NO: 233566 - DNA, 98 bp, Homo sapiens
cacgtatgaggccgtggtcacagctgtggatcccgtggcagacatcgcaacgctgaggattcagactaaggctaatgctgatgtccctatacaatgta

SEQ ID NO: 233567 - DNA, 100 bp, Homo sapiens
tcatgcggtcattctctttgtccttgtgccagtcgcacagtcatccgtccttggctcaggatttggagagcttgcaccaccaaaaatggcaaacatcacc

SEQ ID NO: 233568 - DNA, 100 bp, Homo sapiens
aattacagtgtctggaggcagaggacttgcctgtgacccccgatcaggtttagttgcttacccagcaggatccctctctgggcgcattgttggaggtgtg

SEQ ID NO: 233569 - DNA, 100 bp, Homo sapiens
cgtacgtcactaccactgtctctgctcacagtgccaaggtgacccggccctgtagctacagcaagaagtcccactttgactttgaggaggaagacgtgga

SEQ ID NO: 233570 - DNA, 100 bp, Homo sapiens
agaagagcagctgctacttcatcctgcagcggcgccgcgggcacggcgaggggggcggccgcctcaccgatttataatcgcttagatacaaattgctgtg

SEQ ID NO: 233571 - DNA, 85 bp, Homo sapiens
cggtcgcgagtatctccgtttcctggatgtgaacgacgaatgccttagtttccactttccagcctggatcccctcacactgaacc

SEQ ID NO: 233572 - DNA, 100 bp, Homo sapiens
cacgagctcagcagcggccccctacggcgggagcgcagcgtggcgcagttcctgagctggggcgccgcggctctgctactgctgctgcccgccaccatgt

SEQ ID NO: 233573 - DNA, 97 bp, Homo sapiens
agaagagtgagagagagctattagagattgtgaagaagaatttcgatctccgccctggggtcattgtcagagacttttcttggtctcctggtggtaa

SEQ ID NO: 233574 - DNA, 75 bp, Homo sapiens
gctgaagtaagattgtcttggaaatactaagttggtttgttacaggaacaactttttgacgtgaaggaagataga

SEQ ID NO: 233575 - DNA, 100 bp, Homo sapiens
ggacgccagtcaccagcaggagcagccaaccagcagcagccatcatggagagcaaaatatgctgtgaattccatcaagaagaaagtcaacgacaagaacc

SEQ ID NO: 233576 - DNA, 82 bp, Homo sapiens
ggtggcagcggcaggagagtccggccgcgacaggacgcttccatgaggcaggctgaacctgcagatatgcgcccagagatat

SEQ ID NO: 233577 - DNA, 75 bp, Homo sapiens
ctgcgccggcgaggggaagccgcgcggccggccggccgactaggaattatatccagatcgagagacagaagattc

SEQ ID NO: 233578 - DNA, 100 bp, Homo sapiens
gtcctgctggtgctgttggcccaagaggtcctagtgtgatttggggaactggtcagctctttcaagctcagcaagacctactacatcgaacagctcccct

SEQ ID NO: 233579 - DNA, 100 bp, Homo sapiens
ggcgacttccgaggcccgggctagacagcgcagggccatggctgaggcggccccggccccggcacataaagttaacagcctattggatgcatactcaggc

SEQ ID NO: 233580 - DNA, 75 bp, Homo sapiens
atgagtccacctccaggcaatggtaataattctgatggaattgaaaaccggaatggcactgcaagtgccctcttg

SEQ ID NO: 233581 - DNA, 51 bp, Homo sapiens
gaccttcccaaggacacacactgagaagccctcctatgacactgaaacaga

SEQ ID NO: 233582 - DNA, 101 bp, Homo sapiens
tgagcggcgagtttccgatttaaagctgagctgcgaggaaaatggcggcgggagacagctttattaaaccgcctggagcgaattttcgaagcatgttttcc

SEQ ID NO: 233583 - DNA, 100 bp, Homo sapiens
atggtaaatttaactccaaatttatcacaacagtgggcattgatttcagggaaaaaagagtggtgacttaagagattaaaattaatttggttgctgttgg

SEQ ID NO: 233584 - DNA, 83 bp, Homo sapiens
ctccgtggtctggggcttcgcgctcttcttcttcttccagggactcagcacctggcaggtggaacggcacatgtgtgatgggg

SEQ ID NO: 233585 - DNA, 90 bp, Homo sapiens
ggaacctgcggggcagaggcggcggccgcagcggcgcagctgatagcaggaacaggatgaagtgaagctgccggccaaactgagcatcag

SEQ ID NO: 233586 - DNA, 111 bp, Homo sapiens
tgaacatcaagatatagatgtagcaatacttactgcactgctaaaaggttagtcagtggaccaggctatgtgaactcaccatccctttggctattgagaattttctcagag

SEQ ID NO: 233587 - DNA, 101 bp, Homo sapiens
gcggaagcggagagcaacagcgcgccggcacgtgccttaacacctcaaactgcagaaacagatgccattcggtttttggttgggacgcagtctcttaaata

SEQ ID NO: 233588 - DNA, 99 bp, Homo sapiens
cttttttttttgcggaacctgaaaaattcaagaagttgaaaaacgcttttcacgtcacctggagagatgcacagttgtcacaggtagtactgatggaat

SEQ ID NO: 233589 - DNA, 101 bp, Homo sapiens
gaagtggaaggcgcttttcaccgcggccatcctgcaggcacagttgccgattacaggactggggttttaaggggtgtggcaggaggttttggactcgatga

SEQ ID NO: 233590 - DNA, 95 bp, Homo sapiens
aaagtgtgctggggcggaatttcaagatggatcggtttgcgcgataacaatatctcagaccgaggcatctgcaagctcattgaatgtgctcttca

SEQ ID NO: 233591 - DNA, 82 bp, Homo sapiens
ggcaacgacgttccatctgtggaaggacctaccaaccagtgctccatgtgcatccctcttgaagcttcgcactctgttgaag

SEQ ID NO: 233592 - DNA, 96 bp, Homo sapiens
aatcaaaataaaggaaacacatttcatatactgcaggtgtatgtggaatttgatgatcttgaatgggataaacgagagtgggttaaagtttatgaa

SEQ ID NO: 233593 - DNA, 82 bp, Homo sapiens
ctctgaggactccttctatggctggacgcccgtgcactgggccgcgcatttcggcaaggaaaccatcaagatctcattttac

SEQ ID NO: 233594 - DNA, 100 bp, Homo sapiens
tgagctggttgccggggcaggggcggaggcggaggcagaggtggaggcgctttgaaagggggacttgatctcatcttcatgccaggccttgggtttgaca

SEQ ID NO: 233595 - DNA, 101 bp, Homo sapiens
ggtgttagaagcgctggtaggccttggagaggcgggttaggaaggatctatctggttcaatagatgacctccccatggggacagaaggagctctgagtcct

SEQ ID NO: 233596 - DNA, 101 bp, Homo sapiens
ggccggaagcgcagtgtctcctttgggggcttcggatgggccgttgctccagggagaactgcaaatatcttcatccacccccacatttaaaaacgcagttg

SEQ ID NO: 233597 - DNA, 133 bp, Homo sapiens
cagttttttgatgctgaggagctcctggtcgatgaagaggatgatgtttttggtgaagtttggaaattttagcattcaggtgccaggaatgcagatgggacagccagtgccagaaacaggcccagctatactc

SEQ ID NO: 233598 - DNA, 100 bp, Homo sapiens
agatgatcaggaagtcattcgcttccagaagaatcatggcacaggagcaatggaccacagaaattctgcattgaaaaagttgggaaagaaaattggctac

SEQ ID NO: 233599 - DNA, 83 bp, Homo sapiens
ccccagtcggtgctccggggaggtcacctgacgaggaggaaagatgaatgggagggctgattttcgagagccgaatgcagagg

SEQ ID NO: 233600 - DNA, 75 bp, Homo sapiens
ctcctgagtagctgggattgcagctgctggctaccaatattctactttctgtctctatgaatgtgactaccctgg

SEQ ID NO: 233601 - DNA, 100 bp, Homo sapiens
gccccgcgcagggtcgcgatgctgcccggtttggcactgctcctgctggccgcctggacggctcgggcgctggaggactcacaccacccggcaagaactg

SEQ ID NO: 233602 - DNA, 101 bp, Homo sapiens
cagagctggagcccacagagcctgggcctcttgtgagtgagatcattggccgagacctgagtggcttccctgcacctcctggagaagagcctcctgcctga

SEQ ID NO: 233603 - DNA, 101 bp, Homo sapiens
acctgccctccactgccctctgtcagatggactttgccgtcctgggcctcggggactcctcatacgccaaaatctgctgcgggtgggcagcgccctcctgg

SEQ ID NO: 233604 - DNA, 90 bp, Homo sapiens
gagaagccgcatggatgaaaacgacagggtctcactgtattgcccaggttggtctcgaactcctggcttcaagcgattctcccacctcag

SEQ ID NO: 233605 - DNA, 100 bp, Homo sapiens
gacactacacatctgtcctccacagaggctttttgtgtgttttatcatctaaaatccaatccctcgcctggtctgccacctcagaacttttcaatgtctg

SEQ ID NO: 233606 - DNA, 73 bp, Homo sapiens
agctgggccgcgaacacctcactattgatggtgtagcgctttaggggaaggaacaggagtacagctgtgtagt

SEQ ID NO: 233607 - DNA, 83 bp, Homo sapiens
acaaaagcagcacttcagattctgttgatgaagcctgtgcaggagacatggcggacgcagcatctccgtgctctgtggtaaac

SEQ ID NO: 233608 - DNA, 75 bp, Homo sapiens
ctcttcttgaaaaatgcaaagatgtagatgagagaaatgagatataaagacctgatgccacatgatttggctaga

SEQ ID NO: 233609 - DNA, 100 bp, Homo sapiens
gaaactcagccactggttgccttggtaggcaataaaagtaattgtcatgagaaaaccctggacaacagccatgacaaacagaaatattttgacaactcac

SEQ ID NO: 233610 - DNA, 75 bp, Homo sapiens
ggcgagctcgcgatgagtggtctcggcaggctcttcgggaaggaattcaaggaagccttctccctatttgataaa

SEQ ID NO: 233611 - DNA, 98 bp, Homo sapiens
ggctactacctggagatgctgatcgggacccccccgcagaagctcaaactttggaacaaataccgaatttccaacattccatcactaatattcctcga

SEQ ID NO: 233612 - DNA, 82 bp, Homo sapiens
ctgcgtcccagaagtgcctgcagttcagacccttctctcccctccactttctcccgggtgtcgtgaaaactacccctaaaag

SEQ ID NO: 233613 - DNA, 75 bp, Homo sapiens
ctgagagagggaagtcgcctctgtgctcaacaaaatccagtctcatagcagaggagaatataatgtttacagcac

SEQ ID NO: 233614 - DNA, 51 bp, Homo sapiens
ctatgtttgacagcgattttaagcaaggaaataaagtctttgcttttgctt

SEQ ID NO: 233615 - DNA, 100 bp, Homo sapiens
ggagagagtaactctgtccttattatcggaccccgaggatcaggaaaaactatgcttccttcttcttcaacgtggggccagcagtccaatacaacagcat

SEQ ID NO: 233616 - DNA, 100 bp, Homo sapiens
agcacacaaccaagccatggtccactggtctggccacaacagcagcgaggatacagaccacaattactatatatctcgaatatatggtccatctgattct

SEQ ID NO: 233617 - DNA, 75 bp, Homo sapiens
gtaaaaacaatagctcaaggaaacctttccaacacagatgtccaagctgccaaagctggtggagttgagatctat

SEQ ID NO: 233618 - DNA, 100 bp, Homo sapiens
tgctacacgttaattaacgtgccaatggattcagaaccaccatctgaaattagcttaaaaaatgatctagaaaaaggagctccctgttccgcaagatcac

SEQ ID NO: 233619 - DNA, 97 bp, Homo sapiens
tttgaaagcccagcagacgctaaggatgcagccagagacatgaatggaaaggtcacagaaacatccagccatgacatatatgaagaggctgaggctg

SEQ ID NO: 233620 - DNA, 100 bp, Homo sapiens
tctgaaaaaaagagaaacctgggtgaactttcacggacaacctcagaggacaacgaagtgttcgatgccctgtacagacttttggggaactgggtactga

SEQ ID NO: 233621 - DNA, 98 bp, Homo sapiens
agcgacgtgggcaagggcgagatcctggcgagcctgcaggatggcgcggccgagtccccgtacggccacccggcgggacctgaaggagaagaaggaga

SEQ ID NO: 233622 - DNA, 98 bp, Homo sapiens
tctacgtgtatgtgtgtgccagcgatgtccccatccgccgccgagaggaggcctatgagaatcagacacagcaggatgccaatgcctcttccctctta

SEQ ID NO: 233623 - DNA, 89 bp, Homo sapiens
aatatattttccgatcaagactacaagagatcagtcattacaatagcaacttctgttgataagttggggattaatgaaaatcaagttcc

SEQ ID NO: 233624 - DNA, 100 bp, Homo sapiens
tgacacatgtcaacactggccgaaacctccatagtcaccacttcacttcacctctttctggaaaccaggtaaagtgaatgccgaagacagaagatttgga

SEQ ID NO: 233625 - DNA, 83 bp, Homo sapiens
agccactcgagtccttgaatggattgatgacaaagaaatgtgatacctcaaagcacaaagtgctggtagtgtctgtgtgtcct

SEQ ID NO: 233626 - DNA, 75 bp, Homo sapiens
tgaagaccacaataaaagagacctctacttagctcagcaattcttaccttctggacaggtagtgaatcaaatgaa

SEQ ID NO: 233627 - DNA, 96 bp, Homo sapiens
atcgttgctgccttcttcgtcaagttggtgttggtattaggagatctgcacatcccacaccggtgcaacagtttgccagctaaattcaaaaaactc

SEQ ID NO: 233628 - DNA, 82 bp, Homo sapiens
tccaaataccagctcgacaaagatggggttgtcctctttaagaaggcgtcttggctgcccacaagataatggctagctcccc

SEQ ID NO: 233629 - DNA, 100 bp, Homo sapiens
ctttatggtggtggagtctgcccaggctgtgctctcgtgctcattcccccatgatcgccgtaggaagtgatgacagtagccccaacgcaatggccaaggt

SEQ ID NO: 233630 - DNA, 75 bp, Homo sapiens
attagttccgtcacaggggctatttgtttggatatcctgaaagatcaatgtgagatggaagattttcgaggtata

SEQ ID NO: 233631 - DNA, 100 bp, Homo sapiens
ttcctgcagatgaaaaagtgtgacttggcagctggtatccagctcacatagaagacattgactacgaggaaggaaaagtactcatccatttcaagcgttg

SEQ ID NO: 233632 - DNA, 75 bp, Homo sapiens
tcagctctcggcgcacggcccagggaatcttgatcacgtggacaaagggttttaaggcaacagactgcgtgggcc

SEQ ID NO: 233633 - DNA, 76 bp, Homo sapiens
ctgcaaagtgtccccggcaagaagtgtggcaaaggagcagagaactttgacaagttcttcacacgaggacagcccg

SEQ ID NO: 233634 - DNA, 89 bp, Homo sapiens
tccactgtatctgggaattgccaaggagaagagtaccaaggctgctagtgaacagcgacgtgcagcagaaacgaccgaatccagagctc

SEQ ID NO: 233635 - DNA, 48 bp, Homo sapiens
cccttgatcctcctcctaattgcagggtgatgaattagaagacaatgg

SEQ ID NO: 233636 - DNA, 83 bp, Homo sapiens
gaaaaagcatccccgaggaggaagacgaatcgttaaacatctgaaagggtcagcccagaaaattcatctgaacagccttccta

SEQ ID NO: 233637 - DNA, 73 bp, Homo sapiens
gatggcttgtgctccctttacgaggcagcattatgtctctttgaagaggacacagattatccttatttgggta

SEQ ID NO: 233638 - DNA, 90 bp, Homo sapiens
agccctccatcttgcagcccagaagaaaaagcttgtggtgaaggggggcaaaaaaaagaagcaagttctgaagttcactcttgattgcac

SEQ ID NO: 233639 - DNA, 83 bp, Homo sapiens
cgaaatttcaatctaagcagcagccacagtctccaaaaaaagttggtgatgacattgccaaggcaacgggtgactggaagggc

SEQ ID NO: 233640 - DNA, 100 bp, Homo sapiens
ttattgccaaagaagatgtagacttcctgccctacatgagctggcagggggagccccaagaagccgtcaggaaccagattcaaccctatgaaaagataaa

SEQ ID NO: 233641 - DNA, 90 bp, Homo sapiens
tgctggtgttcgcccacgaccatgctgttcgggggtcttgtctggattttggttgcctcctccaatgttcctctacctctactacaagga

SEQ ID NO: 233642 - DNA, 97 bp, Homo sapiens
tcaaggcatttatatgagtccagcatctccttggaaacaatgccatctttgaatgtgagagataaacctagtttcagcatgtctgcagcagagacca

SEQ ID NO: 233643 - DNA, 75 bp, Homo sapiens
agggagccctcctggctgggggcaagaaaacatcctgggatggcacgggtccaagtcacattccacagagcagct

SEQ ID NO: 233644 - DNA, 90 bp, Homo sapiens
aaaggagctgcttcccaataaggaaacagtctcctctgagcctccggcctccataagacccaaaacagatgacacctcttcccagtcccc

SEQ ID NO: 233645 - DNA, 100 bp, Homo sapiens
cacacgcagaacagccggcagctgagcctggtggcctccgttctcttggcccaggaacaagtacttgttactcaacaaccaggagctgaatgaactcagt

SEQ ID NO: 233646 - DNA, 95 bp, Homo sapiens
cagatggcggatgccctgcagtacctgcagaaggtctctggagacatcttcagcaggttgttcctcaaagtcattcaagctgtactcgccgaagg

SEQ ID NO: 233647 - DNA, 75 bp, Homo sapiens
gtttgaagttggagatgctgaaaatgttgcttcatatgagtggtgttatcaaggagaagaaattcctgccttgac

SEQ ID NO: 233648 - DNA, 98 bp, Homo sapiens
gcgaagattattctaaaaactgaggtgcttttcactccagcaacgcaggccgcacggcaggcagcctgtaccattgtggaagctctagccaccattcc

SEQ ID NO: 233649 - DNA, 88 bp, Homo sapiens
acagatgatctgaccattaagctggtgatcaaggcactcctggaagcgcagttgtgtagcagttgagtaatgctggttagctgttaag

SEQ ID NO: 233650 - DNA, 118 bp, Homo sapiens
catattcagattggccagtgtggcaaccagatcggagccaaggtaaagaagcagctttgaatctgagcttcatatcgaaagaagagatgaaaaataccagttggattagaaagaactg

SEQ ID NO: 233651 - DNA, 100 bp, Homo sapiens
gtgtgtacctcctgctccggcagcctggcttacggcaaccagctcctttttctgatgaaattgaagttgactttagtaagccctatgtcagggtaactat

SEQ ID NO: 233652 - DNA, 100 bp, Homo sapiens
ccctcatcacccgacccggggcgccgagccggaggaaggaggtttcccaaaccactccttatgatccagtgaatattcaagagagctacatttgaagcct

SEQ ID NO: 233653 - DNA, 116 bp, Homo sapiens
cagggatgcctggaatagaagagaatgacctagcaaaagttgatgatcttccccctgacacggcttacctggatggggtgtcgttgcccgacttcgagctgctcagtgaccctgag

SEQ ID NO: 233654 - DNA, 90 bp, Homo sapiens
cacttgttccctccaagacaactgaatggactttccttatcccagttgattgtgcagaatacactgcctgtcgcttgtcttctattcacc

SEQ ID NO: 233655 - DNA, 75 bp, Homo sapiens
tccgtccgcgtcagcgccttgccaccctcatctccaatatgggtcctgccctccggaggagcagcctcgaggctg

SEQ ID NO: 233656 - DNA, 83 bp, Homo sapiens
atcgggtctggctccttcggggacatctatttggcgatcaacatcaccaacggcgaggtactgtgagaatagagatgtttcga

SEQ ID NO: 233657 - DNA, 83 bp, Homo sapiens
ctcccaacttttccggagagctgtgctgatggcagggcaagaatcctttcgttccatcacaaggtcgtattacagaggtgcag

SEQ ID NO: 233658 - DNA, 111 bp, Homo sapiens
gtcccctgaaactgggtcggcaggacggtggtggagcccgagagagacaatgcagatcttcgtgaagactctgactggtaagaccatcaccctcgaggttgagcccagtga

SEQ ID NO: 233659 - DNA, 83 bp, Homo sapiens
tgtatgagaaggacaacacctacttagatatcaaagctcagctctttgaaacatccagcaagacaggccagagtgtgggtgag

SEQ ID NO: 233660 - DNA, 82 bp, Homo sapiens
ctcattcacttctagacgacaaaatgcaaaaaaggaggccaaagactttttgctagacctgatgcacaccctgcacacgcgg

SEQ ID NO: 233661 - DNA, 97 bp, Homo sapiens
aaggagccctgcaactggcgccgccctgaccccaagattccagatgttcctgtggaccccagtccagttcataattggacccttgaagacactcttc

SEQ ID NO: 233662 - DNA, 75 bp, Homo sapiens
gggagaccgtaatgagcgtcaaaattatccgaaaccgcctcactggaccagttcaaggagctgatcctcacactg

SEQ ID NO: 233663 - DNA, 90 bp, Homo sapiens
ggaaatgttaggatcactttattctggtgaatgaaaactttgccattgatttgatagcagagcagcccgtgagcgaggtggagactcggg

SEQ ID NO: 233664 - DNA, 100 bp, Homo sapiens
gagaagctggagaatgacaagagcttccgcggtgtcattctgacctcggggccaaaccagtgctcctgccacctctctggctgccccctagagcctgccc

SEQ ID NO: 233665 - DNA, 100 bp, Homo sapiens
tagaaaagtctttatttcagggagctgatcgtcactccttccttaaggctctttattaccaagagctttcattgttgaggttcctcagtgctgaactaac

SEQ ID NO: 233666 - DNA, 95 bp, Homo sapiens
atctgggggccacaaatgctccttctcctggagacgcaactcaaggctattcagcttgaccctgaagaaactcgtcatgctaaaagaaatggaca

SEQ ID NO: 233667 - DNA, 100 bp, Homo sapiens
gagggagaaaggggtgttggtggctttgcccaaatccaaatggatgaatgtagaccatcccattcatctaggaggctgagacaggagaatcacttgaacc

SEQ ID NO: 233668 - DNA, 100 bp, Homo sapiens
ctttgctttcctgcaaacagtcacaggcagtgggatgagcgaagttatagcaaatcaagatggcgagcggctgcagctgcaggatgaggaagacgacagc

SEQ ID NO: 233669 - DNA, 100 bp, Homo sapiens
cttccctttgaattacagagaaactttcagctcatgagggacctagaccaaagaacagaggttgcagtacctaccccagctaactggcagcagcatcctt

SEQ ID NO: 233670 - DNA, 75 bp, Homo sapiens
cgccgaggcaccgaggcactcagaggaggagccagggagtaacgaagagatcaaagagttcgccgcgggctacaa

SEQ ID NO: 233671 - DNA, 75 bp, Homo sapiens
atgccattccagcactggactcatggaggctgagcatttattcagctcccggagccctgcctgttccctgtccat

SEQ ID NO: 233672 - DNA, 103 bp, Homo sapiens
accgtgaccgagagcgtgaccgagagcgcgaatatcgtcatcgttagaagcaagcttcaaaaccgaaagtacctccaaaatctgaaaaagaaaatgatcctct

SEQ ID NO: 233673 - DNA, 83 bp, Homo sapiens
cgagtatctggtgaagtggaaaggatggcccccaaagttttttattggcacctcagtctcaacattttcttttcggattcatg

SEQ ID NO: 233674 - DNA, 74 bp, Homo sapiens
gacagatagctggcgtggataaagatggaagggttctcagaggcactgtgactgacttccctggatttgatgag

SEQ ID NO: 233675 - DNA, 51 bp, Homo sapiens
ttacgccccctatcctatccgcaaacaacgctgaccggaaaggagattgag

SEQ ID NO: 233676 - DNA, 50 bp, Homo sapiens
aagtccttagctaccaggatgcgggtgtgtttgaccatcgaatgaagtgc

SEQ ID NO: 233677 - DNA, 90 bp, Homo sapiens
cacggtgtggcagctgctctgaaccaggacctggacccggacccaaagtgccatgtctttaatgtgagtcgcaatggaagaagagatcgc

SEQ ID NO: 233678 - DNA, 96 bp, Homo sapiens
tggagcagcagcaggcctatcgtccaggaccaattctgactccgccctgcaccagagcacaatgacgcccacgcagccagaatcctttagcagtgg

SEQ ID NO: 233679 - DNA, 75 bp, Homo sapiens
tggagccaatcagcgcgggcagcgaaccgggggagcgaggcacgctcttttgaaacagatggtcaccatgtttag

SEQ ID NO: 233680 - DNA, 82 bp, Homo sapiens
aggaactggcccggaaacaggaggacgaggtgcgggagacgcggcggcggcacgagcggcgcctggtggaggtggacagcag

SEQ ID NO: 233681 - DNA, 87 bp, Homo sapiens
ctgatgtgacccatttgctgctcaaagccatggaacattttcccaatcaccagcaggttgttgatcattatgaaaatcctagaaacg

SEQ ID NO: 233682 - DNA, 82 bp, Homo sapiens
cccgcttcgatcgcctcgcgccggctgctctttccgggtcctgaacgaggctgtgggggccctgatgtaccacaccatcact

SEQ ID NO: 233683 - DNA, 110 bp, Homo sapiens
cccgggcgtccgctcctcagcggatgtggcagccccgagccatggctctcgccgtccgagtcgtttattggcagcctggcatcctcgctacaacctcattgttgtgggcc

SEQ ID NO: 233684 - DNA, 100 bp, Homo sapiens
ttttactgtcaagacatttcttcggcattctgcaacagaagtgtcattgttgcagcaaaaaagtcagcagtctcaccttccacctttaatacaagcatac

SEQ ID NO: 233685 - DNA, 100 bp, Homo sapiens
tggtgcagaaataccagtccccagtgagggtgtacaaatacccctttgaattaattatggctcttctgggctggctggctgagaaactacctactcttcg

SEQ ID NO: 233686 - DNA, 74 bp, Homo sapiens
ttctccttcgagaactgccaaagacccgaccgcatgtctgtcatggacctcgccaatacttgctccagctttca

SEQ ID NO: 233687 - DNA, 83 bp, Homo sapiens
cctggatgcttctctctgctctgccctggctgggccactacaggaactgtggctgcaccatctgtcttcatcttcccgccatc

SEQ ID NO: 233688 - DNA, 80 bp, Homo sapiens
gagcaaggggcttacgcagaaggacctggccacggtggaccaggtgctctgaggctggcgtacagacacagcacgtgcga

SEQ ID NO: 233689 - DNA, 82 bp, Homo sapiens
gttctaagaagactcttcccggttgatcgtggattatttgagacatttgaagacagtgatttgttccatttgattggtgtta

SEQ ID NO: 233690 - DNA, 90 bp, Homo sapiens
aaaataatcaaggcaactcgtttcaggcaaagagagctcgacttaacaagattactgaccaagccaccctggtagaacaagtaaaaagag

SEQ ID NO: 233691 - DNA, 100 bp, Homo sapiens
cgccctgcccagaaacgtccacatgtgggtactgcattcctaccggtgtgacaggaagagtctaacctgtctctgcaagctcttgagtcccgccaagatg

SEQ ID NO: 233692 - DNA, 75 bp, Homo sapiens
aagaaggcagacacaagagacagcagacaagcctgcctgggaactgtggctgcaccatctgtcttcatcttcccg

SEQ ID NO: 233693 - DNA, 76 bp, Homo sapiens
ctcagttggaagcagccgatccagcctgcggagcctgtggggcaggagctgacatggacccaaatcctcgggccgc

SEQ ID NO: 233694 - DNA, 100 bp, Homo sapiens
aagatgttgtttgcattgacttggatacgaacatgttatatgttactatactggcaattgctggagaagattttgcaattgttgcttctgatactcgatt

SEQ ID NO: 233695 - DNA, 100 bp, Homo sapiens
tggccctgaggcatctgagtcaacaacggatgaaaatgaagacgacattcagtttgtcagtgtttttttaacatgtggggatttggaagagtcagcaaac

SEQ ID NO: 233696 - DNA, 75 bp, Homo sapiens
cgggccaaggccaaggccagccggactaaaacaaagaacctaaaggcagacccagaagagctttttacaaaacta

SEQ ID NO: 233697 - DNA, 100 bp, Homo sapiens
gatgttggagaactacagccacctgatctcactgggagccaggtgagaatttcaaggattatcgacttcatattgcacattaaagttacaaattaaagtg

SEQ ID NO: 233698 - DNA, 75 bp, Homo sapiens
gatccagcctgcggagcctgtggggcagacggcgcctcatctcccagagatcttccttggagaccctggaagata

SEQ ID NO: 233699 - DNA, 100 bp, Homo sapiens
tttcactccttgcaaactttgccatctttgttgcagagaatcggcttgccaattctgtaactccttgggatatcttgctgagcttaattgcagctgccac

SEQ ID NO: 233700 - DNA, 98 bp, Homo sapiens
tttgaaagctgcctgcggcaaaggtggacaacgcgtactggctgtggactttccagggacgcctcctgcagaagaacaacaaggaccgcttctgccag

SEQ ID NO: 233701 - DNA, 90 bp, Homo sapiens
cacctggattgactctctgcaggcctttttccctggactgcagagtggagagatctacagaccaagtaatcaagccagtcaatgtaggag

SEQ ID NO: 233702 - DNA, 74 bp, Homo sapiens
cccaacacggaggtcaacctcactctgatctggagtgtggccatctggggccgtgtggtatttgccactcagga

SEQ ID NO: 233703 - DNA, 74 bp, Homo sapiens
aggaatatccatgtcggcttgtagagagattgcaattcatctgaaaactacattaagatgaagacctttgaagg

SEQ ID NO: 233704 - DNA, 98 bp, Homo sapiens
agtcactttgcctggacaggaggaaccctgtgaaaggcaggattgggaaccccacagaccgcagctcctcccaggagaaccccacacatgagtctgga

SEQ ID NO: 233705 - DNA, 75 bp, Homo sapiens
actgtcgacctaaagcctgactggggcaagttcctgagactggcccagacgctgcggcactatggctacttgcgc

SEQ ID NO: 233706 - DNA, 75 bp, Homo sapiens
aggctcagtctgcggccaagactccgtcctgcaaggtttgggagaaggttcgtgctcagatggtgttacctccag

SEQ ID NO: 233707 - DNA, 100 bp, Homo sapiens
gtccaggcctgacagctctgcggctcgggccctgaggcgaaccctcctggtgtactggcccttttggatgaagaatgctggttccctaaagccacagata

SEQ ID NO: 233708 - DNA, 75 bp, Homo sapiens
attcgttgtggtccaaaacagtttacctcttatctaacagactccccatccccaggatgtcaacctcagtccctc

SEQ ID NO: 233709 - DNA, 89 bp, Homo sapiens
cagtatctcagtcctccagtgtttggatattcaggtggtggaggtggatacagcagtcggagaacatctggcagagacaaatacggacc

SEQ ID NO: 233710 - DNA, 98 bp, Homo sapiens
cgggaggaaggaacgaggcaaggagctaaagcagcgtgcgttcagccctgggggacctcaggatggaaaccagcagcctgcaccgcccgagaaggtcg

SEQ ID NO: 233711 - DNA, 100 bp, Homo sapiens
gtgtataagcacagcaggacaccaggacctggcctgaagacatttcctctcctcccctctggatttctcagagttgttgacctcctgtactggagagaca

SEQ ID NO: 233712 - DNA, 51 bp, Homo sapiens
tatccgactcctcggaccagcaggacaggaaagaaccggaggctgaagcag

SEQ ID NO: 233713 - DNA, 88 bp, Homo sapiens
tggtaacttcgggagttgagccacgagctgttgtgcatccagaggtggaattggggcccgtccctaggctgcgtgctatatgccatga

SEQ ID NO: 233714 - DNA, 90 bp, Homo sapiens
atctattccatctgtgagtgactctttgacatggagagaatttcactatattcagcatgacgtatcccagactttactcaaggcaacact

SEQ ID NO: 233715 - DNA, 100 bp, Homo sapiens
gaaactcggagggaccctggcccggaggaagaaagccaaggaggtcccaggtaaaccaccacagtgctgctagtaatgaaacctaccaggaacgcttggc

SEQ ID NO: 233716 - DNA, 83 bp, Homo sapiens
caagacatttcctgctcggaaccttgtttactaattttcatagccctgatgaagcaagttactctgctctcctaataaatgca

SEQ ID NO: 233717 - DNA, 126 bp, Homo sapiens
acgcctcccggctctcgtcagcctcccgccggccgtctccttaacaccgaacaccttgcagtaccatgcaggactagcatctggccttttaaatcagcagtcattgaagcgttccgctaatcagat

SEQ ID NO: 233718 - DNA, 100 bp, Homo sapiens
ggaagatcgcttaccctccgggggtaaaagagatcaccgacaagatcaccacggacgagatgatcaaacgcctgaagcaaccatcaactgatctagaatt

SEQ ID NO: 233719 - DNA, 75 bp, Homo sapiens
ggcaaagtggaaaaatgtgcggttgatgaagctgtagctgtactacaagcccaccaagctaaagaggctgcccag

SEQ ID NO: 233720 - DNA, 100 bp, Homo sapiens
tatgacaagaccaaggtcaacaaggacaacaatgagatcgtggacaagatcatgggcaaaggacagatccaggccctgggcagtgacggggttcgggtga

SEQ ID NO: 233721 - DNA, 100 bp, Homo sapiens
ctcaccttttgtacctgctacctggcttcttacctcacgaacaagtcctcctcgccctctgactaatatgaatgacaccatggttagccacatgtcctct

SEQ ID NO: 233722 - DNA, 100 bp, Homo sapiens
gggctgcagtacctgctggagaagggagactacaaggacagcagcgactttggggcccgtcaccctcaggtggccaaggtggaatacgtcaggaagaagc

SEQ ID NO: 233723 - DNA, 82 bp, Homo sapiens
acaggaggcgtctccagcaaggcctgcaggctttgccacaaatgtcagtgcagaactctggctggccccaccaagaagacag

SEQ ID NO: 233724 - DNA, 82 bp, Homo sapiens
tcgcgagcctccttcgccgcgccccacttgctcgtgcactttacacacatgaggtgcagaggccaagaccgttttgcccaag

SEQ ID NO: 233725 - DNA, 80 bp, Homo sapiens
atggggggtcagagtgccggaccccagcacacagaagccgagacggaacttagtgatttggcccgtgaccctccagcaca

SEQ ID NO: 233726 - DNA, 83 bp, Homo sapiens
tcgtggccggagcggcccgcgcctgggctgccggcacttcgcggcagcaatggctgccatccggaagaaactggtgattgttg

SEQ ID NO: 233727 - DNA, 74 bp, Homo sapiens
aagaaaccagccgaacttcagggtttccaccgttcgttcaagtctgtgagttctccacttcagtctcttcagca

SEQ ID NO: 233728 - DNA, 100 bp, Homo sapiens
aaagagacctggagagaggaaaaaaaatgttcaccggcaacctgtccagctgtcaaagctcgaaaaacagcagcagaggaaagaaaagaccagagctaag

SEQ ID NO: 233729 - DNA, 98 bp, Homo sapiens
caccggcgccatgggccagtgcggcatcacctcctccaagaccgtgctggtctttctcaacctcatcttctggggtgataaaagaaaatgtggctgaa

SEQ ID NO: 233730 - DNA, 85 bp, Homo sapiens
agcgacaagaagctcacccaggaacaagtatctgacagaattagacctttacgagaagcacagttttgtcttcagtttcctctcc

SEQ ID NO: 233731 - DNA, 75 bp, Homo sapiens
atgaagatattcctaatatgaaaaacagcaatgttgtgaaaatgctacagtccaaaattgaagacattagagcag

SEQ ID NO: 233732 - DNA, 74 bp, Homo sapiens
ggatgggtcagatggctatgggaggtggctatggaggcttttacaacagtgatggatatggaggaaattataac

SEQ ID NO: 233733 - DNA, 96 bp, Homo sapiens
gcaaagaagggatcacagatgcagccaccatgaagacattctgtggcactccagaatatctggcaccagaggtgtttggagtagatgacaatcagg

SEQ ID NO: 233734 - DNA, 95 bp, Homo sapiens
tgttctgctttcatggagttcacagaagagtcgaggaggtgaaagaaaagatgttgtcccggttaagagtagtttccaccacttgtactttggca

SEQ ID NO: 233735 - DNA, 98 bp, Homo sapiens
ctgccatggacgacgaggaggagacgtaccggctctggaaaatccgcaagaccatcatgcagccatgcccggacgtgtactggttcccactgctgtca

SEQ ID NO: 233736 - DNA, 101 bp, Homo sapiens
ggaatgtgttgttagagaactacagaaacctggtctttttgggtgctggagaatctggtaaaagcaccattgtgaagcagatgaggatcctgcatgttaat

SEQ ID NO: 233737 - DNA, 75 bp, Homo sapiens
tgctgctggctgccggctcctgtgacttcaagtgtcggaatgatgagaagacagcagctgattacaagattttag

SEQ ID NO: 233738 - DNA, 90 bp, Homo sapiens
gaacttgccctgtctcctcgcagatgagaggctaagaatattgtacacaaagattcttgatgttcttgaggaaatccctaaaaatgcagc

SEQ ID NO: 233739 - DNA, 74 bp, Homo sapiens
atttcccaagagcagcggaaaatgatccagtcacagccattcaaactcctccccacgacactctgaagcagcga

SEQ ID NO: 233740 - DNA, 100 bp, Homo sapiens
gacatgtcctccattttccaccagaaggccgaaaagggttacacatcattttggaatgactgtatatcatctggattacgtggctgtatgttaattgaat

SEQ ID NO: 233741 - DNA, 100 bp, Homo sapiens
cggaagcgcggagggagccgcgggatggaccgcagggtccagcgagggcactatctctatggccgagggtgaagacctcagtcttatggaagaagacaaa

SEQ ID NO: 233742 - DNA, 75 bp, Homo sapiens
atttcttacgtgataatgtgaagcgtcagaggtccctgtttgataggtactccaaagattcaggtttactcacgt

SEQ ID NO: 233743 - DNA, 75 bp, Homo sapiens
tagtgaagattatcgcacgtttttacagattactgacagccctgtcctaggagcacaacgtccgagaaatgctca

SEQ ID NO: 233744 - DNA, 112 bp, Homo sapiens
gcactgctttccactcggctcctgtcgtccgttctctcaggctcccgttcaggtactccaaagattcaggtttactcacgtcatccagcagagaatggaaagtcaaatttcc

SEQ ID NO: 233745 - DNA, 96 bp, Homo sapiens
gcgtgcgcggctatcccaccatcaagttcttcaggaatggagacacggcttcccccaaggaatatacagaaaccagcctggacaccaagtctgtgt

SEQ ID NO: 233746 - DNA, 97 bp, Homo sapiens
aacatagaccaaatggaaaaagataaagtgaagattcatggaatattgtccaatactcatcggcaagctgcagcaggcagtatgacacctaagtcgc

SEQ ID NO: 233747 - DNA, 100 bp, Homo sapiens
cccggctctccgagcacgccacggcccccacccggggctccgcgcgcgccgcgggctacgacctgtacaggagcatttcatggaagtaatcagaaaccag

SEQ ID NO: 233748 - DNA, 97 bp, Homo sapiens
cggcgggcccggagcagccgccgccgcagcgcgaacatggacgccgtcaacgccttcaaccaggaggccgagacgcatccagagctttcgtgaccgg

SEQ ID NO: 233749 - DNA, 100 bp, Homo sapiens
gagcaaaccccagcaagatgcggaggctgcctcggcggagcagaggaaccacacgctgatcatggctcatggatttgagatcttatgctccaaatgtagc

SEQ ID NO: 233750 - DNA, 74 bp, Homo sapiens
ggcttaccatctctaccatcatccggtgttggctgcaccaattctagaagtaagctctccaagttcagactcca

SEQ ID NO: 233751 - DNA, 98 bp, Homo sapiens
ttgaaagatctacctgaattagcactggatactcctagagcaccacaggtactgaaggaatacttagacaatgtccagttgggtcatatccttgaacg

SEQ ID NO: 233752 - DNA, 74 bp, Homo sapiens
tcaaatctggttcagattttacagctctggcctatacggttcagacatccgagagcatgaccccaactgccact

SEQ ID NO: 233753 - DNA, 101 bp, Homo sapiens
gccaatgcatcttctgtactctggttaatagcaatgaacttacaaatggggtaataaatgctgccttcatgctcctgttcaaagatgccattagactgttt

SEQ ID NO: 233754 - DNA, 82 bp, Homo sapiens
atcgacgtcgtgatccagaagtccagagctgagaaggactgcctgtttgcagggctgaaatctctttaatgatggagggaag

SEQ ID NO: 233755 - DNA, 98 bp, Homo sapiens
ccgacgccatcaacaccgagttcaagaacacccgcaccaacgagaaggtggagccgccaccaaaatgcagattttcgtgaaaacccttacggggaaga

SEQ ID NO: 233756 - DNA, 50 bp, Homo sapiens
aaaggaataaaaggtgaccaatgccaattcttacctgtggcccatacctg

SEQ ID NO: 233757 - DNA, 100 bp, Homo sapiens
aggaaatcgcctcccgagaagaagttgaggcgctatagtggttaagaaagtagctcaatacatggctgatgtattggaagatagcaaagacaaagttcaa

SEQ ID NO: 233758 - DNA, 50 bp, Homo sapiens
tgactacaaagctttttatgaggagacagacagcttctccctccctgagg

SEQ ID NO: 233759 - DNA, 104 bp, Homo sapiens
ggcgtggaccacatagacatttacgcggatgtcggcgaagagttcaaccaggagtcaatcttaagatgtgatactttcctgtgaaacctgaaacaaggtgatct

SEQ ID NO: 233760 - DNA, 75 bp, Homo sapiens
ccaagccggggcagtttcagtctccaccccaaatgcaggtgaaatgacaatggatgctctgttggctcgattgaa

SEQ ID NO: 233761 - DNA, 82 bp, Homo sapiens
ctggagcctcaggcggcagcgcttctaggtgaaaggtgtagcagtcactcggcctacacccacagcatcgaccttgtgaacc

SEQ ID NO: 233762 - DNA, 88 bp, Homo sapiens
cgcagtggtcgcttcttctccttgaggcccacctcacagagctgctggaggagatatgtgaccggatgaaggagtatggggaacagat

SEQ ID NO: 233763 - DNA, 83 bp, Homo sapiens
ccgacctcgacgtcttgcctgtgtcccacttgttcgcggcctatagacaggggcaagtgtccgagtggtgaatcagctactta

SEQ ID NO: 233764 - DNA, 100 bp, Homo sapiens
acagaatctgccggatggtgctggccacttgcttgggatcctttatcctggtcatcttctatttccaaaggaaattcaactactgaggaggttacggcac

SEQ ID NO: 233765 - DNA, 80 bp, Homo sapiens
gctgagggcacgtgtttgcggttcagccctttgatgaccgcagcagtttttgaatcagagccgacaggcacttgaattga

SEQ ID NO: 233766 - DNA, 93 bp, Homo sapiens
gtgcgacccaagcccctgcattcctgtacggacaatgcagatcttcgtgaagactctgactggtaagaccatcaccctcgaggttgagcccag

SEQ ID NO: 233767 - DNA, 75 bp, Homo sapiens
cccgcgtgggcaccctgcaggtggtcagacatgtcatcaactcagctggtgcgcgcggagccatggttatcatgt

SEQ ID NO: 233768 - DNA, 50 bp, Homo sapiens
tactgccttatgggacagatcaaaattccttgtgtggatatcagatccgg

SEQ ID NO: 233769 - DNA, 75 bp, Homo sapiens
agaggcaattcccggaggactacagtgaccagagatggaaaataatgtcctgcaagatgaggattgaacagttaa

SEQ ID NO: 233770 - DNA, 90 bp, Homo sapiens
acgagccagtgatttacaatagagcaagatttccacaagacggcaccctatgtcgtcactggcagcgtagatcaaacagtaaaagtgtgg

SEQ ID NO: 233771 - DNA, 75 bp, Homo sapiens
tgaaaagtgtggagaagctgctttaaattgttcggtgaccagtgacttggattttccaacacaagtcatcccatt

SEQ ID NO: 233772 - DNA, 50 bp, Homo sapiens
cgcgggggagccccgggagccgcacgttctacttgtccaattctgaaaag

SEQ ID NO: 233773 - DNA, 75 bp, Homo sapiens
agatcatcgagcatttcaaacgttacagaatgtctgaaggggacagtgtgggagaatccgtccatgggaaacctt

SEQ ID NO: 233774 - DNA, 100 bp, Homo sapiens
ggcggcggcggcggccgcggcggcgaatctgaatgcggtgcgggagaccatggacggtggtggaatgggtagcatgaacagtgtgactggaggaatgggg

SEQ ID NO: 233775 - DNA, 87 bp, Homo sapiens
ccctcacattagccagtgtgaagacctccgaaggaccatagggggatatgagactttctactcggaatatcctgagtgttgcgtgga

SEQ ID NO: 233776 - DNA, 75 bp, Homo sapiens
cacctttgccaggaactggggggccgactatatcctggcgctccaggcccctgcctgtcacgagaacatggtgaa

SEQ ID NO: 233777 - DNA, 74 bp, Homo sapiens
gctgaggtgccacccgagctgctggctgctgccggcttcttccacacaggtgctggagaatctggtaaaagcac

SEQ ID NO: 233778 - DNA, 75 bp, Homo sapiens
cgccaaggtgcggtctttcgaccactccggaaagtgacctgaccaacggtgcagatgggatgctggccacaagct

SEQ ID NO: 233779 - DNA, 83 bp, Homo sapiens
acggatgcccagctgaagagcctgctgatgtcagtgggacccattcaggttttgattcccaccatggccatcacccagtttcg

SEQ ID NO: 233780 - DNA, 100 bp, Homo sapiens
ccgagcccgagccatggcgtccgagcggctccctaacaggcccgcctgtctgctcgtggccagcggcgccgccgaaggaagctcttcgtgggcggtcttg

SEQ ID NO: 233781 - DNA, 82 bp, Homo sapiens
ggcgacatactacctctggccccgagatcagaatgccgtcagcagataagcagagagccctagaagaaaccaaagcctacac

SEQ ID NO: 233782 - DNA, 100 bp, Homo sapiens
cgtcgccgtcgccgtcgccctcccagaatgtttctgatgaagaattgaaaagaagagtagctgaggagctggcattggagcaagccaagaaagaatccga

SEQ ID NO: 233783 - DNA, 99 bp, Homo sapiens
gaaaccggcgcggagcaactgaggcccgagccttctcgggacccgggggacgcctaaccccgcgagctatttccttcgtgctaccatcagccgccgcct

SEQ ID NO: 233784 - DNA, 75 bp, Homo sapiens
gaaggcgttgtggaccaccaaacagaactttctaatttagccaaggaaggtcgtcgtcccgcagacacacaatcc

SEQ ID NO: 233785 - DNA, 74 bp, Homo sapiens
ccgccggccgtctccttaacaccgaacaccaactcccccactggaaaggattctgaaagaaatgaagtcagccc

SEQ ID NO: 233786 - DNA, 100 bp, Homo sapiens
tggcaattcaccgaattcgaatcaccctaacaagccgcaacgtaaaatccttggaaaaggttttttcaagggggaacatggcaaaggtgttcagtttcat

SEQ ID NO: 233787 - DNA, 100 bp, Homo sapiens
tgtcgctgagagcctcacgagtcgaggtcctgcaggtggagctccggcagccgccctgatgaatgcatgatatctcttggtaaaatggcccagaagaaac

SEQ ID NO: 233788 - DNA, 103 bp, Homo sapiens
gcccgcccgcgcccaggggccccgaacggtggggccgggcaggcggctgagtcccaacggaagggcccaggtccccaagtgggcctgcgtatctccagaacac

SEQ ID NO: 233789 - DNA, 75 bp, Homo sapiens
ggtcaacgtggtatactcgcagacaacccaaccggtatacaatggtgaattatgtaacctcattacgctggatgt

SEQ ID NO: 233790 - DNA, 75 bp, Homo sapiens
gttattgggaaaattcaacttcattcagtttttcagaagaagtgaagtcaagatgaagaaccatttgcttttctg

SEQ ID NO: 233791 - DNA, 83 bp, Homo sapiens
gtgaaggaaagtggctgcagtgacacaggaggatacgaagcgttttcggcttcctgcccggagctgtgcagcaaacagtcgac

SEQ ID NO: 233792 - DNA, 50 bp, Homo sapiens
gtggagtgttctaaccaacaaggaagatgtcgagttatagcagtgctgga

SEQ ID NO: 233793 - DNA, 100 bp, Homo sapiens
agaagattggaagaaatatattactggcacagatatattggatatgaaactggaagacatcctgcaatggccaatgtacatggtggactatgccggcctg

SEQ ID NO: 233794 - DNA, 50 bp, Homo sapiens
aattagtgaaggagatgaagtagagacttgcacacctacccctgtggagc

SEQ ID NO: 233795 - DNA, 100 bp, Homo sapiens
cccggagtgagcggagtagcgagtcggcaacccggagataagctgtcattggaaggaatagtggtacaaagagctgaatgccgaccagctgccagtgaaa

SEQ ID NO: 233796 - DNA, 75 bp, Homo sapiens
taatcgctgaagatgttgatggagaagctctaagtacactcgtcttgaataggtgcaattaaaaactagcatttc

SEQ ID NO: 233797 - DNA, 100 bp, Homo sapiens
cctagtctgaagactctgtgcaaactggccgtgattcagtataacctagaccagtcctgtttgcctcatgatatcagggtcgacaagtgcccccaatgat

SEQ ID NO: 233798 - DNA, 74 bp, Homo sapiens
gggcaaacaggattccacagtgtcctctggaaaatgaggagaggagacgccgtgagcgggacgaccagatgtac

SEQ ID NO: 233799 - DNA, 135 bp, Homo sapiens
ggcccccgagaccccgtcggacccatggtttccagtgcagcgcggagtgggcgatgccagcgtgccagaaccgtgggtaccgatggatgtggccgagagccctgaacgggatcctcactctccagaggatgaaga

SEQ ID NO: 233800 - DNA, 100 bp, Homo sapiens
cgaggggtgaagcggcccaggtgagggccgaggaggagctcatcaaagcccagaaggtgtttgaggagatgaatgtggatctgcaggaggagctgccgtc

SEQ ID NO: 233801 - DNA, 100 bp, Homo sapiens
cttgaatcagaaattgagaagctggttcgatacaagaggctgttttcctagcgtggcttgctgcctttggtaagaacatgtcgtccatcttgccattcac

SEQ ID NO: 233802 - DNA, 100 bp, Homo sapiens
gcccaaggcagacagcggcgccttcctgctgctcttcctgctcgtgctcactgtcaccgagccgctgcggccagaaaaatggctacaaacttcctagcac

SEQ ID NO: 233803 - DNA, 82 bp, Homo sapiens
aacgatctacctatgttacagaagtcagagagtgagaaagatcagtctaaagaaaaggagaagaaagtgaaaaaaacaattc

SEQ ID NO: 233804 - DNA, 75 bp, Homo sapiens
ctcgaacagatgtgagcgagaaagccgttgcctccagcaccacttctaatggtcttcccaaaagttatcttctgg

SEQ ID NO: 233805 - DNA, 87 bp, Homo sapiens
gagaagagccgtgggtaggagatggagaaattccaagttcagattctccaggatggacactccacagctgaccttgactgaactccg

SEQ ID NO: 233806 - DNA, 100 bp, Homo sapiens
atggagagcaaggagaaggatcgccaggtgctggaggacttcccaacggaagatcataaccaaccattgtttggagttcagtttaactggcacagtaaag

SEQ ID NO: 233807 - DNA, 75 bp, Homo sapiens
gcagcgggtcctacgaggagggctgtcagagcctcatggagtacggtggtgaggatccaggaaagccaagcgatg

SEQ ID NO: 233808 - DNA, 96 bp, Homo sapiens
cggccggagcggcgccatggaggagggggcgccgcggcagattgtccccttggggcggaaagaagccaaggccaaggagctggtgcggcagctgca

SEQ ID NO: 233809 - DNA, 100 bp, Homo sapiens
ctccagagtgaagaagagattgatcatccactgatgattctaaaagcaatcttattagagcaaaggcgccagcagagggagttgatgaaagctcttcagc

SEQ ID NO: 233810 - DNA, 87 bp, Homo sapiens
agctgagcgagctgtcagagcccggggacggcgaggccctcatgtaccacacggatacaaatcactcactttgtctaagtgacttga

SEQ ID NO: 233811 - DNA, 100 bp, Homo sapiens
cctgccctggtccatcaacagggacgattacgagctgcaggaggtgatcgattggcagattgctactctggctttactcctgggcggcgctgccatcatt

SEQ ID NO: 233812 - DNA, 73 bp, Homo sapiens
gtgactgagcggagcccggtgacaggatgacacgatgaggcgagtggtacgacagagcaagtttcggcatgta

SEQ ID NO: 233813 - DNA, 100 bp, Homo sapiens
gtttagcttcaaaaatgacaagttcgataaaagtgtgcagaccaaggtaaagtgttgagagaggagaaccagtgcattgctcctgtggtttccagccgcg

SEQ ID NO: 233814 - DNA, 90 bp, Homo sapiens
ccttgggcctgcggctctctacgtccctgcggagcagccgagaattcggtcaacagtggatgaaaaagaacaaaaacaacttcttatgga

SEQ ID NO: 233815 - DNA, 125 bp, Homo sapiens
gaagatcttagtgcctcatttcggagcctttataagtcagtttttgagcagtcacttagtcaacaaggaccctttgtggaggagttgtttgaagtgacatcctgttatttccctatcgattttac

SEQ ID NO: 233816 - DNA, 75 bp, Homo sapiens
tccttggaacaagcaactggctattgaaaaggagcgagaacccgagcagcgccatgagcaacactaccgtcgtcc

SEQ ID NO: 233817 - DNA, 100 bp, Homo sapiens
ttatggctgtccttgggagttttccatatgtgaccatggatataaaatcacaggtcttagagtttgaaagagtctatcttgataatctccccagtgcatc

SEQ ID NO: 233818 - DNA, 75 bp, Homo sapiens
gtcggcagagcaaggggcttacgcagaaggacctggccacggtatgctgccccacaaaaccaagcgaggccaggc

SEQ ID NO: 233819 - DNA, 100 bp, Homo sapiens
acatctctaaagtggatatgcacgatgactcattgaatacaacggcgaatttaattcggcataaacttaaagaggtttgccatgcagaacttgaattggg

SEQ ID NO: 233820 - DNA, 88 bp, Homo sapiens
tggactcaagccgtcctcctgcctcagcctcccaagtagctaggaggtgtgtaccaccacacacagacaggaagatgtcacccaagcg

SEQ ID NO: 233821 - DNA, 100 bp, Homo sapiens
tatataaggcttcattaagcttaactgagaagtatttctctgtagagatctcccagatttgcccccagctttggtcccttctcctccaaagagagccagg

SEQ ID NO: 233822 - DNA, 88 bp, Homo sapiens
acccaatagaaattgctcgacaactcactttacttgaatcagatctataccgtgctctacggaaacgtattcgagaggacagaaaggc

SEQ ID NO: 233823 - DNA, 75 bp, Homo sapiens
cccgggtggcttacagacgctgccagcatcgccgccgccaggaagctcttcgtgggcggtcttgactggagcacg

SEQ ID NO: 233824 - DNA, 100 bp, Homo sapiens
tgggcggtgccggcgccggagacgatgccgttgtggccagcatcgaaatgttcagccttttagtgatgaagatgcatcaattgaaacaatgagccattgc

SEQ ID NO: 233825 - DNA, 100 bp, Homo sapiens
atctcagaactatcatggaaatagaagaaagtagacaaaaatgtggagctacaccaaagtcacatttagggcacttaagtattcatcgaagagtcacccc

SEQ ID NO: 233826 - DNA, 75 bp, Homo sapiens
tggagccacctcatgtgaaagatggatgagaccttcgtcagcaaacctggtaatggtaactcgggatttgaagga

SEQ ID NO: 233827 - DNA, 100 bp, Homo sapiens
cagactgctggggaagaacacctctgcatgtgtgtgctgagaagggccactcccaggtgcttcagatgtggatgaggcttccaagaaggagatcaaagac

SEQ ID NO: 233828 - DNA, 100 bp, Homo sapiens
gagcaaagctcaccctcccgagttgaaaaagtgagacgtggtcttgtaacacagtggttaagaatgtgactttggagccagcctgctaggggctgaattc

SEQ ID NO: 233829 - DNA, 83 bp, Homo sapiens
gacattggccaggcccagtcccgggcccagctcctagtgcaaggaacttccgcaaacacctgcgcatggtcggcagccggagg

SEQ ID NO: 233830 - DNA, 101 bp, Homo sapiens
ctctgctgcaccgacctcgacgtcttgcctgtgtcccacttgttcgcggcctataggtgaactgcgccaggccactgtggccatgatgaacaggaaggatg

SEQ ID NO: 233831 - DNA, 82 bp, Homo sapiens
tgcagacaggccaggagatatgaaagtctttgcttcgcgcaaagagttgttggaatatgacctacagcagagggaagcagcc

SEQ ID NO: 233832 - DNA, 100 bp, Homo sapiens
ccggtttttagtccattgactatgcagcctaatgacagagcgccaagtgtctcgctggtttgttcagtgccttcgggaacagtccatgctgctagaaatt

SEQ ID NO: 233833 - DNA, 98 bp, Homo sapiens
gtcgctgctgctgctgctcggagtcttcgccgccgccgccgcggccccgccagatggagaaggatgaaactgtgagtgactgctccccacacatagcc

SEQ ID NO: 233834 - DNA, 50 bp, Homo sapiens
ttgaataatcacatgatctcacaggtgcaactgacatgggtgaaccccag

SEQ ID NO: 233835 - DNA, 83 bp, Homo sapiens
agcaacagctctgccggctggaagataacgaaggaggcccaacttcattcaataaggagcctgacggatttatcccagacggt

SEQ ID NO: 233836 - DNA, 51 bp, Homo sapiens
tcctaagtagctgggactacagacacaggcagccatgccgcgcagcccaac

SEQ ID NO: 233837 - DNA, 98 bp, Homo sapiens
tgggagagaggtacctctccttttccctctccctttccctaagccctgcatgaattccccaatgacatcttcacaaacgaggatagaagacaaggtgc

SEQ ID NO: 233838 - DNA, 83 bp, Homo sapiens
tgatcggggctatgatgatcgggactactatagcagatcatacagatccaaaaggtaattctggcacttggagactatatggg

SEQ ID NO: 233839 - DNA, 73 bp, Homo sapiens
cctctcccacctgtccaagctcaagatggacatcactagccgcttcctggcccagaggaacacggaggagaac

SEQ ID NO: 233840 - DNA, 83 bp, Homo sapiens
aaaaggtcccggaccccccggatctgacggggcgggacctggcgccaccttgcagacaatgcagatcttcgtgaagactctga

SEQ ID NO: 233841 - DNA, 100 bp, Homo sapiens
ggaagctattgctgggattttgaggagtgtcgagttatagcagtgctggattgggagctgtcaaccattggtcatcctttgtcagacttagctcattttt

SEQ ID NO: 233842 - DNA, 102 bp, Homo sapiens
ttctctcaactgattgattgtccagagtttgtaccaggccaagccttttgctcacatacagagctaaatctgcttcgtaatgttgatgctaacaacactgag

SEQ ID NO: 233843 - DNA, 100 bp, Homo sapiens
tgttgagtgaagaaaaagagcaggaagtcattacatggtacatgtcccagagcaagcacacggaggcccgggagctcatgtactcgggagccctgctctt

SEQ ID NO: 233844 - DNA, 100 bp, Homo sapiens
ctttggacctgtgtacccacccaaggctaaaggcagagccagctaatttgacaggacatgctgagaaggtgggaatagaaaattttgagctcctgaaggt

SEQ ID NO: 233845 - DNA, 80 bp, Homo sapiens
ctcggggctccgcagggggcacccggcaggattacagtttaaagacaatttctgtgatcaagttgtcatttggaagatta

SEQ ID NO: 233846 - DNA, 51 bp, Homo sapiens
attccaagtaactcttatttggaaggtgggagtcaatcattttgacaagtc

SEQ ID NO: 233847 - DNA, 75 bp, Homo sapiens
gacgctcatcagagggaagatctttttcctcaattggcagctgttgtgctgtgtatggacgtgggctttaccatg

SEQ ID NO: 233848 - DNA, 95 bp, Homo sapiens
agaaaaaaatcctataaaagagaatttccctttcaacaacccctggcgcgctggttttcaatacagaataatcagttggtttaccagaaaaaatt

SEQ ID NO: 233849 - DNA, 100 bp, Homo sapiens
gtcagaaacagaactgaaacaactggaaactgttttggatgatcttgaccccgagggccgttgctccagggagaactgcaaatatcttcatccaccccca

SEQ ID NO: 233850 - DNA, 80 bp, Homo sapiens
gagaaccgtcagtttgagccagatgtgtccgagttggagagtgctctgcagatggagccagctgccttccaggctttata

SEQ ID NO: 233851 - DNA, 90 bp, Homo sapiens
cacctttgaaatcgccaaataaggtactataagatctccgtggtgctcatgtgctttgtggtccccacgctggtgccctggtacatctgg

SEQ ID NO: 233852 - DNA, 90 bp, Homo sapiens
ctctgatgagctgagaaacaaagccacccagccaatgaagattgtgaataagtggaatacagctctcattggccttatgacatactttcg

SEQ ID NO: 233853 - DNA, 100 bp, Homo sapiens
cggatgtccagatctacatctgcaaacaatggacggagattcttcactttacagagtgcctggaagagctgggatgtctggttgagtcctatggcatgaa

SEQ ID NO: 233854 - DNA, 100 bp, Homo sapiens
gagaaaggggtgttggtggctttgcccaaatccaaatggatgaatgtagaccatcccattcatctaggagagctccgagaggccttcagagaattcgaca

SEQ ID NO: 233855 - DNA, 100 bp, Homo sapiens
cagtgtggacggggccaccggctggagcggatcccacacctccggaccgagggacgcgggaagatttccaacccgcagcagcttcagagaccaactggga

SEQ ID NO: 233856 - DNA, 50 bp, Homo sapiens
caaaaactgaaggactctgaagctgagattcatggaagaagtaaggaaaa

SEQ ID NO: 233857 - DNA, 104 bp, Homo sapiens
cttcccgcgtccgccgattcctcctccttggtcgccgcgtccttggctggcgtggcgaagctgtgctcaggcccgggctggacgcagagccagagctgtcccca

SEQ ID NO: 233858 - DNA, 100 bp, Homo sapiens
cggtctgatgcctggagcaccactgcagccagaaagcgaggtatcacctcttctgggctcaagatggacaacaagaagcgcctggcctacgccatcatcc

SEQ ID NO: 233859 - DNA, 100 bp, Homo sapiens
tttaagaattaaaagatgatgagaaataaggacaaaagccaagaggaggacagttcgctacacagcaatgcatcgagattatcctcttgacttgaaccac

SEQ ID NO: 233860 - DNA, 90 bp, Homo sapiens
acaagatctgcaaggccgccaggcactgagctggagcccgcctggagagacagacacgtgaatacggggtgctttgcattcaggaataca

SEQ ID NO: 233861 - DNA, 50 bp, Homo sapiens
aggatcacgcggcatgtattgagtacgagctcaactggaggcagtcctgt

SEQ ID NO: 233862 - DNA, 75 bp, Homo sapiens
cacctctgtaacaactcagaatttcttctccgggcttccttcagcaaagccttctagacaagctcagtggaatct

SEQ ID NO: 233863 - DNA, 51 bp, Homo sapiens
ttgatcgtggacttctagcctccagaactagataattgacgaccttgccaa

SEQ ID NO: 233864 - DNA, 50 bp, Homo sapiens
gccgatttcatgactaaccagtgttgctgcttttgctcagaggacatcca

SEQ ID NO: 233865 - DNA, 100 bp, Homo sapiens
tatgccatggctgtgatgaaccaccatgtatgccctgtggagaactggtccgcaggggtggagcagctcatgtacatcaaggaggacttgatcatccctc

SEQ ID NO: 233866 - DNA, 98 bp, Homo sapiens
ttgtaccagtcggccggagtggcccctgagtcatttgaatacatcgaagcccacggcacaggcaccaaggtgactgagatcagcaacgtcaagtgtgt

SEQ ID NO: 233867 - DNA, 90 bp, Homo sapiens
cgggagaagcagcgcctgttcccggggcagatccaggttcaggacgggctctacgagtgcattctctgtgcctgctgtagcaccagctgc

SEQ ID NO: 233868 - DNA, 100 bp, Homo sapiens
ggttagcccgtcagtccctgctctgtgcgcgcctccatctgggccatggatgggcagaatccagagaccacatttgaagtatatgttgaagtggcctatc

SEQ ID NO: 233869 - DNA, 95 bp, Homo sapiens
tgattgggacaacattcagacccatttccagtcatgagtgtcatggagaaactccagctgggcccagagattctgcagcgggaaaatccaaggct

SEQ ID NO: 233870 - DNA, 100 bp, Homo sapiens
gcaacacgcaaacgagagctgaggctaatgaaaaacaggaaggttgaggaccttcagttccgggttgaagaagaatcaattaccaaaggtgatcttgagg

SEQ ID NO: 233871 - DNA, 100 bp, Homo sapiens
ctgccattctggattccagaagatttaactacgtggtccgggaactacttccagtagcaatacaatggtagctcccacagatggcaatcctgataataag

SEQ ID NO: 233872 - DNA, 100 bp, Homo sapiens
ctaagtggatcctctggccagctgactgcacttcttttttgagaaaggaaggaatatatcctgactgattataaagcttcaccaagaaggttgcccagga

SEQ ID NO: 233873 - DNA, 90 bp, Homo sapiens
aggccgaggagacgcgggccttcgagcagctcatgaccgacctcaccctgtcgcgggtactccaaagattcaggtttactcacgtcatcc

SEQ ID NO: 233874 - DNA, 75 bp, Homo sapiens
caacctgcctgacaggctgagcgccaccagggaggtccacctgggcttgcgaaggcacagattccccgtccacag

SEQ ID NO: 233875 - DNA, 100 bp, Homo sapiens
ctggtaaacaacctgctcagggctctggtgaacaagctgtagtattgctgacagacagaacgccttggaggctgagtggaggacggtgcaggcctctcgc

SEQ ID NO: 233876 - DNA, 82 bp, Homo sapiens
ctggaggaatccgagaagagcagagcggagggagccccagacacggtggtataagttgaaatccaaaccaggaaagaaggac

SEQ ID NO: 233877 - DNA, 98 bp, Homo sapiens
agagatgccctttccaaaccagacccctgtgtcatcctcaagatgcagtctcatgggcagtggtttgagatcttcagtttagatcttggaggcatatc

SEQ ID NO: 233878 - DNA, 51 bp, Homo sapiens
gttttgccagcgataatacgcctcagcaggagcgagaacccgagcagcgcc

SEQ ID NO: 233879 - DNA, 100 bp, Homo sapiens
agagaaatacagagaaggacaagaagccctcatgcacacctcaagcgacttgtctcggcaactaatagctcaggagggctttggtatcaggatggtgctg

SEQ ID NO: 233880 - DNA, 100 bp, Homo sapiens
tgggctggtgttctccccacacagggtttggacagaggagccaaaggccaaatttccactttcagcagttttatttcagctgttagcccgaagaaagaag

SEQ ID NO: 233881 - DNA, 75 bp, Homo sapiens
actactcggacaagtacttcgacgaacactacgagtaccgtggaaatttaatggagccaccatttcagaaccaaa

SEQ ID NO: 233882 - DNA, 98 bp, Homo sapiens
ggagacctacctgcggcgtcggcagctgctgctccgagccagcaatacaggaatgcacaggaggcaaatcactgaccttttagaccaaagtattcaag

SEQ ID NO: 233883 - DNA, 100 bp, Homo sapiens
cctgaacagatttcctgcccggggccctcatggacggttggatcagggccgaagagacgaggtcttgctacgttgcccaggtcggtcacgaactcctggc

SEQ ID NO: 233884 - DNA, 134 bp, Homo sapiens
tcgaagcgagggtctgaagttcacgactactagaaggggaggggagtggaaaggctctcagtgaaaaagccatgggctccccaaaggaagtcattttctcagacatcactgaaaattcggctactgtcagctgg

SEQ ID NO: 233885 - DNA, 50 bp, Homo sapiens
aaacaatgtgaaatcaattatgtgaagattgttgatcgaatcgacaatga

SEQ ID NO: 233886 - DNA, 96 bp, Homo sapiens
ctctggtgtctgtgcgcgcgcggcaggggcggcggcggcgacggccggaggtgtacgacctacgtctaccagtggccctggacgctcctgctcctg

SEQ ID NO: 233887 - DNA, 83 bp, Homo sapiens
gaggacgttcccttcacggagaaagattttgagcactttgaggtgaatgaccggaaggacccccaagagacggccaagctctt

SEQ ID NO: 233888 - DNA, 80 bp, Homo sapiens
ctttggatgatcaagatgatggccgcaggaaaccgggtataggaggaagagaggtcctgggcctatgtcaagaagtgcaa

SEQ ID NO: 233889 - DNA, 98 bp, Homo sapiens
ggaactcggggcgcgcatcccgcaagtcggaacccggcggatcggatcccgcagatcggagacggggcctggagaacaagattgtggaccagtgtgag

SEQ ID NO: 233890 - DNA, 114 bp, Homo sapiens
gttcttgagtcgggaaatggccgctgtgtggttgcaacggagataaattcccggaaccgcgattcggcgtgtcaggtcaaaatgcagatcttcgtgaaaacccttaccggcaag

SEQ ID NO: 233891 - DNA, 100 bp, Homo sapiens
taccgcgcgtgcgggattccggcgccgctctccgagctcgatccgctgctcgcacgggagccagctgggtgagctgtaggtaaaacttgcctactgatca

SEQ ID NO: 233892 - DNA, 100 bp, Homo sapiens
gaagagtcggggttgagccccagctgagccgagggctcgcactcttctggtctcccaggcccaacccacctgaagtgagaaagatcagtctaaagaaaag

SEQ ID NO: 233893 - DNA, 75 bp, Homo sapiens
cgtcgtctgccttcgcttcacggcgccgagccgcggtccgaggtctccaactgaattccttgaagagaaaatggc

SEQ ID NO: 233894 - DNA, 74 bp, Homo sapiens
agaaaagcctctgggagcagaagggaggctccaagacctcatcaacaattaagttgacatcacttgttagaaga

SEQ ID NO: 233895 - DNA, 75 bp, Homo sapiens
cagccaagttccccaacggctccccgtcgtcctggtgctgcagcgggcaccgcgtccgtgctgcagcgccggtcc

SEQ ID NO: 233896 - DNA, 100 bp, Homo sapiens
catggcggaacgcaggagacacaagaagcggatccagaggtgtgctctgaacaagccgagacggggccgtgccgagcaatgatctcccgctggtactttg

SEQ ID NO: 233897 - DNA, 50 bp, Homo sapiens
caccttctctgggatcgatgctctgggacccaaccagagcctggcctggg

SEQ ID NO: 233898 - DNA, 75 bp, Homo sapiens
cgtgaccgagagcgtgaccgagagcgcgaatatcgtcatcgttagaaggtacgttcttcagatgtgtcatggtct

SEQ ID NO: 233899 - DNA, 75 bp, Homo sapiens
atcagagtggaggaagtacagccagcatataccaacagatgttttaaagattgtgtattctgtgggtgctcagac

SEQ ID NO: 233900 - DNA, 99 bp, Homo sapiens
aaagagaaagatagatgccctctctcttcatcttcacttgaaataccggatgattttggaggacccgctgtggaaggtgcgccgcagccagaagctgga

SEQ ID NO: 233901 - DNA, 75 bp, Homo sapiens
aatcactaaatactactctgaggggcttagaaattaacaggatggttgaaaaagaaggttatctgcaaaaagcta

SEQ ID NO: 233902 - DNA, 98 bp, Homo sapiens
tcggaagggccctcaggccagaggccaaggggtggccgctgccaagcagcgtacacagactttactaaaagagtacaaagaaagggataaatccaatg

SEQ ID NO: 233903 - DNA, 100 bp, Homo sapiens
taaataaagctgctgtttttgaagaggttagaaaatggatttctgactggaatctcaccactgaaaaaaagcacacccttttaagactactttatgaggc

SEQ ID NO: 233904 - DNA, 100 bp, Homo sapiens
gcgggggccgggcgcgcacagaccggtatctcgggggagctttgtgccttgatggatcaagttcatcatatgcagcactcaaaatggcagcatccttcgg

SEQ ID NO: 233905 - DNA, 100 bp, Homo sapiens
caccgccccctgggatccgcaggttccctacacggtctcctgggtcaaggtaaagagaaatgtgtatgaccttacaagtatccccgttcgccaccaatta

SEQ ID NO: 233906 - DNA, 90 bp, Homo sapiens
tggatgtaccgactgcttttggaataaaaagattcccaggatgtgagcaacacgggaccgtcaattggtgtcaacactggtttgaatatt

SEQ ID NO: 233907 - DNA, 109 bp, Homo sapiens
cagatcgggacttacagaagtctaccaatggcctggaagaaacgctggtttatcctgcggagtggccggatgagcggtgacccagatgttctggaatactacaagaacg

SEQ ID NO: 233908 - DNA, 81 bp, Homo sapiens
tctttacctgctcctgcaagagctttcaaagtgccacctgtctttaccagtttccaagactatgttactgggcttcagact

SEQ ID NO: 233909 - DNA, 75 bp, Homo sapiens
cgcttgcagacgcactgctacaaggtccatgacctgaactttgaggcgctgatcatcaccatgtcggtagtcggg

SEQ ID NO: 233910 - DNA, 100 bp, Homo sapiens
cacctctgctttatgctgtacatggaaatcatgtgaaatgtgtaaagatgctcttagtgagatggaagattttcgaggtatagcagaagaatcatttcca

SEQ ID NO: 233911 - DNA, 83 bp, Homo sapiens
ctgctttccactcggctcctgtcgtccgttctctcaggctcccgttcaggaagcggggagaggtggtgagagatgacccctgt

SEQ ID NO: 233912 - DNA, 100 bp, Homo sapiens
agagagaaggaatccaccttcttacgctatggcagaatgccagctgatgaagaccgagaggccgcgacccaacacctttgtcatacgctgcctgcagtgg

SEQ ID NO: 233913 - DNA, 101 bp, Homo sapiens
gtcccaatgccatccagagctgtgcctcccagcaccacagtccttctgcagtccctcgtccagccacccccagacgcaaacatgcagatctttgtgaagac

SEQ ID NO: 233914 - DNA, 100 bp, Homo sapiens
caagttctgcagccagtgcggagagaggctgcctcctgcagcccccatagcaggtctctaattaacagaagatggcaaagcccagccacagcagctatgt

SEQ ID NO: 233915 - DNA, 74 bp, Homo sapiens
aaagaagcattacttcgagacactattaatgggcttaataagcaggtagagtacagagagatggatgaaagctt

SEQ ID NO: 233916 - DNA, 74 bp, Homo sapiens
gcggacagtgaaccggacagtcatcaccatgggccgggatcacattctgattgcagacctgttatcctaaacta

SEQ ID NO: 233917 - DNA, 100 bp, Homo sapiens
ctatcaaaaggagcggggtcgacggtccccactttcccctgagcctcagcacctgcttgtttggaagcaaaagttcaaacagaccctccctcagttccaa

SEQ ID NO: 233918 - DNA, 98 bp, Homo sapiens
aaattatggtagaagaaatcgtagctggcgtgagttatcttctggaaatgagtcttcaagctctgtaagacatcattcctctgaatattgatttgctg

SEQ ID NO: 233919 - DNA, 100 bp, Homo sapiens
ggcatcgaatatggtgataaggagagaaaggagaaggccatcagcatttgggagtcaaagaatttcttttttgaacttgagcctctgccaggggccgtgg

SEQ ID NO: 233920 - DNA, 100 bp, Homo sapiens
gttggaccttccggagcttctcagaagacagagggttttcttttgagatgcgaattggactgcactctggatcagtttttgctggcgtcgttggagttaa

SEQ ID NO: 233921 - DNA, 82 bp, Homo sapiens
tccaccgccatccgccaccatgatgtgcactcccagcaacacccctgccacgccgcccaacttccccgatgcgctggccatg

SEQ ID NO: 233922 - DNA, 105 bp, Homo sapiens
cttcgcaacctcaaggactcggagcgcatgcagctgctgctgaccctggccttcaaccccgagccgctggtgctacaggggaatcccggaggcaagacacttgag

SEQ ID NO: 233923 - DNA, 82 bp, Homo sapiens
ggttcaagcaattctcctgcctcagcctcctaagtagctgggactacagcgccatcatgaccgggtcctataacaacttctt

SEQ ID NO: 233924 - DNA, 90 bp, Homo sapiens
tcggcttagaccaggactgggagctgtcaccactgactaaagaagagaaaactgcggcagagcaattcaaatttcacatgccagatttat

SEQ ID NO: 233925 - DNA, 88 bp, Homo sapiens
tttccgagtgccaggcgccggccggctgcgaagacgcggtgggccgcccctccgatggcaccaaaagcgaaggaagctcctgctcatc

SEQ ID NO: 233926 - DNA, 74 bp, Homo sapiens
cgagatcagccagccgaccgaggaagcatgagtgggaaaagcatgggacctgcgccgcccaggtggatgcgctc

SEQ ID NO: 233927 - DNA, 100 bp, Homo sapiens
ccaggtctccgtgcagcccaacttccagcaggacaaggatcagttcttaagagcagccccggtaactggaggaatgggagccgttttgatgagaaaaatg

SEQ ID NO: 233928 - DNA, 100 bp, Homo sapiens
gtctgtgaacgtgacccacgatgcagtgcatgcacaaatggatgtgaagctccgctcactgatctgcgtggggctcaaggtcgggtgtgctgacagccgg

SEQ ID NO: 233929 - DNA, 100 bp, Homo sapiens
tgtagatcagcgattttctgctgttcaagtacttgagcatccctgggttaattggaagaagttgttccgaatgtaattgaaccttccttcggcctgggta

SEQ ID NO: 233930 - DNA, 100 bp, Homo sapiens
gttgagtgaagaaaaagagcaggaagtcattacatggccagcactccttgcccgaggacagagatggcgagcgcccggattggggatgagtatgcggagg

SEQ ID NO: 233931 - DNA, 75 bp, Homo sapiens
caggcaacctggagacattccctagagatcctgagaaagctgttgtatttggactgagcaacaaatttgaatctg

SEQ ID NO: 233932 - DNA, 98 bp, Homo sapiens
ggcgccatcgagccttggcggcggacgtgcagggatgccattattacttgcaatcctgaggaattcatagttgaggcgctgcagcttcccaacttcca

SEQ ID NO: 233933 - DNA, 100 bp, Homo sapiens
aagctgccaagttgaaaatggacgagtaatcgcctgctttgattcattgaaattgtatatgaacacagatcaagattagagaaatccttgcaaaaagaaa

SEQ ID NO: 233934 - DNA, 74 bp, Homo sapiens
gtcgtcacggaggacgggaaaatccagcagcaggacccctatggtgtagccgtgggtggaactgtggggcactg

SEQ ID NO: 233935 - DNA, 91 bp, Homo sapiens
caagatccggcccatagccgagcagactggcatctgtaaggtgcggccgccgccgacaatgcagatcttcgtgaagactctgactggtaag

SEQ ID NO: 233936 - DNA, 99 bp, Homo sapiens
cgcgtgagacagatcaagatcaagaccggcgtggtgaagcgatcaagaagttggtatatgtttacctggttcgatatgctgaagaacagcaggatcttg

SEQ ID NO: 233937 - DNA, 83 bp, Homo sapiens
agtgttggctgggtcctctccgaaatcgacagcctcaaccttcataaacagagccaaagagttcaagacacgtctggggatct

SEQ ID NO: 233938 - DNA, 98 bp, Homo sapiens
tggaccaccgggcgctggtctgctcccagccggatgctcgacatgcagcagaaggagaaatatataccaaactgaatcaaaaaattgatgaatttgtt

SEQ ID NO: 233939 - DNA, 100 bp, Homo sapiens
acaactccgcgttgggctgctgctctgatgggaagacgccctcgctggacgcagagggctccaactgccccggactatggactacgtggcttcttccaag

SEQ ID NO: 233940 - DNA, 75 bp, Homo sapiens
tcatgtcccggacctgtcttgccgtggatggcataccattctcatcgttgatgcaagtgctgctggaccaggcgg

SEQ ID NO: 233941 - DNA, 97 bp, Homo sapiens
gcagtgcttccatggcagaggacctctgccggaagagcgccatcattgagacctacgtcatggacagccggatcgtgccaccaaccatggtgaataa

SEQ ID NO: 233942 - DNA, 101 bp, Homo sapiens
gcgcggccgtcggagacatgggagacccggggtcggaagctgaaggtgatgtggccgccctcaaccgacgcatccagctcgttgaggaggagttggacagg

SEQ ID NO: 233943 - DNA, 90 bp, Homo sapiens
ggaacttagcagtgattcggatagtgaatacagcaaagtggtgttaatgttgactttgcaaaatgatccacccactttggaaacaggggt

SEQ ID NO: 233944 - DNA, 129 bp, Homo sapiens
gtgaaagcagcatgcccctgcccacagagcagccccccagaacagaaagagcctccatccctgtgagatcactgccctgagccaatccctacagcccttacggaagctgccttttagagcctttcgcac

SEQ ID NO: 233945 - DNA, 50 bp, Homo sapiens
gggctcggaacgagactgcacggtctccgtgaggccgggtgacgctccag

SEQ ID NO: 233946 - DNA, 50 bp, Homo sapiens
cttcttcgagtatttgtagaagggtgcagtagacattgttgcaatcatga

SEQ ID NO: 233947 - DNA, 75 bp, Homo sapiens
cgaagagcgggcgtcatctctcgggaggtgtcccaatatggccatgaaggaggcagatgacgatgaggaagtcga

SEQ ID NO: 233948 - DNA, 138 bp, Homo sapiens
taataatttacaatgaatggacacagtgatgaagaaagtgttagaaacagtagtggagaatcaagaaaaaatgcctgtcttaaaggctgaagcgtcacattataactctgacttaaataacttgctgttctgctgcca

SEQ ID NO: 233949 - DNA, 75 bp, Homo sapiens
ctctggtgagacatttttcttccttctgtcacatcacacccaatggtttgcccaaaggaccagccaaaacctcac

SEQ ID NO: 233950 - DNA, 98 bp, Homo sapiens
tgaaaatatgctatgtcttaagagaaggggctaatgccacaagtgatatgttctattttgcagttgaagatggtggagcctcacagtctactcagaga

SEQ ID NO: 233951 - DNA, 100 bp, Homo sapiens
tccttccccggggagtcagttcctccccgggcccctgagccatgcccatcgcagccgccccgaaggagccagatcttacagactctttcagcacctacga

SEQ ID NO: 233952 - DNA, 100 bp, Homo sapiens
cttatatgtgatgccattccagcactggactcatggaggctgagcatttattcaggatttgtaggtgaaaatgcccagccaatcctagaaaataatattg

SEQ ID NO: 233953 - DNA, 98 bp, Homo sapiens
ggagacgattgcctcgagctggagagttccatggctgagagtaggctccgggccccggacctaggaggccatgctctaccacaaccagaccgccgagc

SEQ ID NO: 233954 - DNA, 74 bp, Homo sapiens
ttgtatttggtgatttcaacttccggctggattccaagtccgtcgtggaggtcgcaatggaagaagagatcgcc

SEQ ID NO: 233955 - DNA, 100 bp, Homo sapiens
cgaactgtcaccgaacgtacagctgtatccactgcagagcacacctggccaatcatgacgagctcatctccaagggctacaccaagtccattgatatttg

SEQ ID NO: 233956 - DNA, 100 bp, Homo sapiens
gtaggaaataattttcacaaccttcaagaaattcgggttaatttggagtggcccctggagtcagtttcctacaccatccgaggccccacccagcacgagc

SEQ ID NO: 233957 - DNA, 80 bp, Homo sapiens
cgcggcagagtccccgtacgcctacagtaacggcgtataaagcagttgttaatgatgctaccatatttaaacttgaatta

SEQ ID NO: 233958 - DNA, 100 bp, Homo sapiens
cgagccaggagtcgccgcgcgcgcccgttcgcgctggcctcctgacaaggtgatccgggcgggccccgcaggaattttatcccctcaccggcctcacact

SEQ ID NO: 233959 - DNA, 83 bp, Homo sapiens
ctcaaagtatcctccaaagtccagttggtcaaagaaaaagtgatgtatgaaaaagaggcaaaacaacaagaagaaaagattga

SEQ ID NO: 233960 - DNA, 101 bp, Homo sapiens
cggagctgggcgcggattcgccgaggcaccgaggcactcagaggagtccacgatggcccggtccctggtgtgccttggtgtcatcatcttgctgtctgcct

SEQ ID NO: 233961 - DNA, 100 bp, Homo sapiens
tgcctggaccctgcccagcagaatttgtatagagatgtgatgttggagaactacagaaacctggtctccctaggggaaagtgcagtgttgcccttctgaa

SEQ ID NO: 233962 - DNA, 82 bp, Homo sapiens
acgagatcttccgccactacgagccgccatggcatcagatgaaggcaaactttttgttggagggctgagttttgacaccaat

SEQ ID NO: 233963 - DNA, 90 bp, Homo sapiens
aacgactgcatctttgacaagtttgagtgttgctggaacggttcggatagaataagaccacagcttgccaaagagaagattgaaggatgc

SEQ ID NO: 233964 - DNA, 97 bp, Homo sapiens
gaaaagccatcgtaagagaagatctattaagtgcaaaagtttgtgacttgaagtggatacatagtgatgttcctgcctccaggaggccttttctgac

SEQ ID NO: 233965 - DNA, 100 bp, Homo sapiens
gttggatttatgcaaacttgggccaaaggacagttagaagacagtagcagcagcccatcaataagggaggggtcaggactccagtacctccaagaggaag

SEQ ID NO: 233966 - DNA, 100 bp, Homo sapiens
gggctacgccagcggcgtcgagaggaccatcctgggtgctggccctgtgctggaggcctgtagtggtggagacacgcccagtggatgatcctactgctcc

SEQ ID NO: 233967 - DNA, 75 bp, Homo sapiens
gattggagacacaaaatcagaaattaagattctaagcataggcggaggtgcagctttaaggaagcctcctatttc

SEQ ID NO: 233968 - DNA, 90 bp, Homo sapiens
catgggttacatttatttcgttcacccctgtcaacagataccccatcagcctgagtctcttaaaggcctttatacacatatgtctacaca

SEQ ID NO: 233969 - DNA, 75 bp, Homo sapiens
ctgcctccggggacaagaaactagagcaaataaccgttttgaaatttagtattattgattccacagaatacagcc

SEQ ID NO: 233970 - DNA, 83 bp, Homo sapiens
cgcgcgcagggcctgcagcgggagctggacggcgagcgcgagcggcgcgagaaaacttcccaagaaggacaacccgaggcgag

SEQ ID NO: 233971 - DNA, 105 bp, Homo sapiens
caatcatggtgcagaaataccagtccccagtgagggtgtacaaatacccctttgaattaattatggctgaatgaatctgaagtctgctgcagtaaaacacagaag

SEQ ID NO: 233972 - DNA, 101 bp, Homo sapiens
ccgctccctgggcgtccatctgagcttcatcaggtaattgcagccacaaacagggtggacatcctggaccccgccctcctccgctcgggccgccttgaccg

SEQ ID NO: 233973 - DNA, 98 bp, Homo sapiens
ggcatgttgctggccatggctcagcagcacgagggcggcgtgcaggagggtctgcggaagagggagctgctgaaggagctgctaccagtcatcgggca

SEQ ID NO: 233974 - DNA, 100 bp, Homo sapiens
gcgggctcggtccggcatgtagacgcccccgcaggcgcccgcggcagcgaacgggcttcgtgggacacatatgcaacatgcctatgatttttacaagcct

SEQ ID NO: 233975 - DNA, 75 bp, Homo sapiens
ccttcacctgggtctgcacgccctttctgagacggtgccgagacctcaaggccaagggaattttatttgtgggga

SEQ ID NO: 233976 - DNA, 101 bp, Homo sapiens
ttgcttttgttgaatttgaagatccccgagatgcagctgatgcagtccgagagctagatggaaggctgttgaagccaaggaaaaacaagatgaacaagtcg

SEQ ID NO: 233977 - DNA, 100 bp, Homo sapiens
tcttacgtctgcggaagtgcagctgcctcagttcttagcgcaggaaggatctgagtctctccctgcggagacagccctgaagaactcctgtaacgtcaag

SEQ ID NO: 233978 - DNA, 90 bp, Homo sapiens
ggaaagtttcattgtgtatgtagaagaccagaagtggatggagacactcaaaaggctatgagaatggtacaaacagattgagactccaga

SEQ ID NO: 233979 - DNA, 82 bp, Homo sapiens
gaatgtgatttgcttgaagatatgagaagctccaccatgaggcgaggtggatggaggaagcgagctgaaaatgatggctggg

SEQ ID NO: 233980 - DNA, 98 bp, Homo sapiens
gctagccaggaacatggactgaagtatccagcgctcattgggaatttagttaagctgcggataaccgtctggtccttgtgcacaaaatccgtgtctta

SEQ ID NO: 233981 - DNA, 101 bp, Homo sapiens
ggctgttgagtggtcgcggacctgggctctgtgcgttgggaaagggaagtggagattgtgcttgagaacagtagtcgagaagacaagcatgaatgtccctt

SEQ ID NO: 233982 - DNA, 74 bp, Homo sapiens
gtcgccccggtttgacgcacacggcaccaaactaagttggtgagatggcaaagcagtatatagagaaaagtctt

SEQ ID NO: 233983 - DNA, 90 bp, Homo sapiens
cagttacttgccaagacgattgaacttctggaatgtggtggaaatttgtttgatgccatttccattgctgtaaaggctgctctcttcaat

SEQ ID NO: 233984 - DNA, 100 bp, Homo sapiens
ccgaacgggcgaggttgggctgccgtgctgctcggcggcgctgagaggagaaggcagagcccccccaggctatgaatgccctgatgcggttgaaccagct

SEQ ID NO: 233985 - DNA, 100 bp, Homo sapiens
gacacagagactttatcaaaaacatgattacagggacatctcaggctgacattcttcatctgttcagttggtttcacatccccaatgctgtttgatgaga

SEQ ID NO: 233986 - DNA, 100 bp, Homo sapiens
tgcatcgagcagttggtttagtatcagccaaacttgcagctgttcagaccgcgctccgccgagaatctccggcctgtgaaactgtgaggggattcggcca

SEQ ID NO: 233987 - DNA, 83 bp, Homo sapiens
ctgcgtcagaagtcactcgcagtcccgtcagcccaggaacccaagacagaccaggatgaggagcattgccggaaagtcaacga

SEQ ID NO: 233988 - DNA, 82 bp, Homo sapiens
cagaagtcgcgtgtctaggtgagtcgcggtgggtcctcgcttgcagttcagcgaccacgatcattgagaagcagccaggcca

SEQ ID NO: 233989 - DNA, 100 bp, Homo sapiens
ggtgtcctcctggcctcagcaacctgacaattctgtcgtgtcccgattctggcagccaggaggtgctgtctgaattgagagtactatctcagaaattgaa

SEQ ID NO: 233990 - DNA, 100 bp, Homo sapiens
accagaatggactgattaaaatagaatggcctaattggaaagaatttcaggatcaccggtttctcctgcttcatatcatggggaatttcagaggtcatgc

SEQ ID NO: 233991 - DNA, 83 bp, Homo sapiens
cgtcacgctgctggtggcccgggtcttccagaaggctgtagaccagagtatcgagaagggccggtgcataaacttctcccgag

SEQ ID NO: 233992 - DNA, 100 bp, Homo sapiens
ctcagtacgccacctactattacccccagtatctgcaagccaaggtctcttagacatcttctcaagattatgctaagagaaatgactgcacccttttcct

SEQ ID NO: 233993 - DNA, 100 bp, Homo sapiens
acaagtaatagttcagaggaagcagaaagtgaaggaggaatgacagggagagagtttttctctcgtttcccagaactctatccttttcttctcaaacagt

SEQ ID NO: 233994 - DNA, 83 bp, Homo sapiens
aacttccgacgcttcacgacagccagtgacgtctggatgttcggtggcagctgccaacaagaagcattagaacaaaccatgct

SEQ ID NO: 233995 - DNA, 87 bp, Homo sapiens
ggacttggagctactttcatccttaggaatgttatcgaaggacaagttatgacatgcaccgattacatccctcgctcatccaatgat

SEQ ID NO: 233996 - DNA, 110 bp, Homo sapiens
gagcgcgctcgctccggcgccggcctcgcctcctcgcagcagcgccatggccgccatggcatcagatgaaggcaaactttttgttggagggctgagttttgacaccaatg

SEQ ID NO: 233997 - DNA, 101 bp, Homo sapiens
aacagtgctgaagcctttaaatgcagcatctgcgatgtgaggaaaggcacctccaccagagcattggggagtcagcaatgtccgttgtgttaaatcagctg

SEQ ID NO: 233998 - DNA, 76 bp, Homo sapiens
gatccggctgccgaaggtcctcgccagaaaaatggctacaaacttcctagcacatgagaagatctggttcgacaag

SEQ ID NO: 233999 - DNA, 100 bp, Homo sapiens
atggagggcatcttcaaccacaaaggccttgaaccggggcattgctgctgtcaaggaggatgcagtcgagatgctggccagctacgggctggcgtactcc

SEQ ID NO: 234000 - DNA, 76 bp, Homo sapiens
aaccggcaggtggccttgtgggaccagggcagcacagactatttcttgagcagtggtgacaagattcgattcttct

SEQ ID NO: 234001 - DNA, 90 bp, Homo sapiens
gtgaacccggaagcgatttcatagccacggaaagaccacagcaagattctttcattcgtctcctcctagcctgggggaccaggctcgaac

SEQ ID NO: 234002 - DNA, 76 bp, Homo sapiens
cgacccagcccccgcccgcagcctggacgacatcgacctgtccgccctgcgggttcgatacaagaggctgttttcc

SEQ ID NO: 234003 - DNA, 87 bp, Homo sapiens
ctacgcgcacgggctcggccgccgcccctgccgcaaactgtgaagtcatccaaaggtggtcccggatcagcggtgagcccctatcct

SEQ ID NO: 234004 - DNA, 98 bp, Homo sapiens
gcctggacgacatcgacctgtccgccctgcggttaaaagaagatggatgcacagtgttcagccaaggtcaatgcaaggaagaggagaaaagaggcgcc

SEQ ID NO: 234005 - DNA, 100 bp, Homo sapiens
gcgattcctgcaggcgttggttcccctctttgacctgtcaatcctttcccatggtaccgtggcagactgtgctgttgttggcaaggaagatcccttaaaa

SEQ ID NO: 234006 - DNA, 101 bp, Homo sapiens
actagtctgaaagggaaaacccccattcattctggattggtggatctgaagtacaaaatattttccagcctgggttactaggtgtctttcagaagctgatt

SEQ ID NO: 234007 - DNA, 74 bp, Homo sapiens
gtaagggctaggggatgccagttccttggaccagacgccacaggtcatcatctggatcatcccattctggttcc

SEQ ID NO: 234008 - DNA, 100 bp, Homo sapiens
aggtggaggagctgagaagcagcctgcgagggcttgcgggggagattgttggggaggtccgagagggccatgatgcctttgagcttaaagagcaccagac

SEQ ID NO: 234009 - DNA, 75 bp, Homo sapiens
cacatggtgtgggccgacatcaagagctgcgagatccaacaggtgacctcacaaagttcggccgtggggatgcct

SEQ ID NO: 234010 - DNA, 100 bp, Homo sapiens
atccgtctggatcacggatgtaggaagtgttgaaaatcgagttcgtccgttagtgctggtgattaagaagtgggcaagtcaccatcagataaatgatgcc

SEQ ID NO: 234011 - DNA, 50 bp, Homo sapiens
ggaccctcaccgccccgcggcaggcacacaaaccaatggtctggactttc

SEQ ID NO: 234012 - DNA, 98 bp, Homo sapiens
gatgacacagtcagatgcacagcctcacgaaagattttacttgtagatcaactttcaaaatgtaggaagtcagaatgggtgacatcatcagaaaaata

SEQ ID NO: 234013 - DNA, 94 bp, Homo sapiens
tgtctgggtctcagccgccaaagaccccgtccggtagagacaacattttgctctgtcacccaagctgaactgaactgggctccagaaatcctcc

SEQ ID NO: 234014 - DNA, 98 bp, Homo sapiens
ccacagccaccactattctagcatccgtgaaggagcaggggccacctacagatgctcctgcagtggacacagcagaacaagtctatatctcttccctg

SEQ ID NO: 234015 - DNA, 76 bp, Homo sapiens
ctggatcggtcccaccaaggcaactgtgcccgctgtgccagctatcatggtgaacttacttcagattgtgcgggac

SEQ ID NO: 234016 - DNA, 100 bp, Homo sapiens
cgctggcagtcagtcggaactacctctcccagcctcgcctcacatcaagatggtgctcatgtggaccagtggtgacgccttcaagacggcctacttcctg

SEQ ID NO: 234017 - DNA, 90 bp, Homo sapiens
ctctgtgtgagggaaagaaaacaatttctcctgctctgcagcttctgttcagtttcttaaacaattaggtctacatcctaactggcaatt

SEQ ID NO: 234018 - DNA, 101 bp, Homo sapiens
ctgagaggggctgcggccggagcgggcggctgagacaaaggcgacgctctagaggacaaaatcccagtccttggcacaaactcaggaaatggaagccggag

SEQ ID NO: 234019 - DNA, 83 bp, Homo sapiens
gtcgtcggcctctgggcagcaggtggtatggtcaggaaaaagactacaatgtactagtcatggatcttctgggacctagcctc

SEQ ID NO: 234020 - DNA, 83 bp, Homo sapiens
attgaactcgagttggaagaggcgagtccggtctcaaaatggagggtgaggtggctttgaccccgggttgcccggccagcacg

SEQ ID NO: 234021 - DNA, 50 bp, Homo sapiens
gctagcatgatggaggcagccagtgaacttcacggtagaccagatccgcg

SEQ ID NO: 234022 - DNA, 100 bp, Homo sapiens
gcgtctatttctctggcccagcttacaaagtatgaggttgatgagctacgccgaaagaaggagattacagtgagggggggagatgtttgtcctaaacccg

SEQ ID NO: 234023 - DNA, 76 bp, Homo sapiens
ggaggagaaggcaagccggaaagagcgaaagaaagaagtggtggaggcctgctgggaacgggacttctaaaaggaa

SEQ ID NO: 234024 - DNA, 75 bp, Homo sapiens
tggtgcatgcgtcgtcggcctctgggcagcagatccactccttataccgccgcacaggtgccagctttcagaagg

SEQ ID NO: 234025 - DNA, 75 bp, Homo sapiens
cctgccgtgtggacccgtaaaataaaatggttatgtgtctcggtaccacgtgaaagactcctcacgccacgtcat

SEQ ID NO: 234026 - DNA, 98 bp, Homo sapiens
ctgcagcataagaaagtggatgaatacacagacactgacctgtacacagaagtctcaggggatccagaactgcagccagtccttgctgggctgttcct

SEQ ID NO: 234027 - DNA, 100 bp, Homo sapiens
atgtcactgaatacgtcgttcgagttcctaaagccagccccagtgcctgctgagccgtttgacaacactacctacaagaacctgcagcatcatgactaca

SEQ ID NO: 234028 - DNA, 95 bp, Homo sapiens
agtatttggggagaatgactgaggagccattgatgtgtggccagatattcgaagcttacaacatggcagctttgtggaaattaccttgtattttc

SEQ ID NO: 234029 - DNA, 75 bp, Homo sapiens
agagattgagccaccacacgagcaattcacaaagaaatcatgagtggaggatctcaagtccacattttttggggt

SEQ ID NO: 234030 - DNA, 100 bp, Homo sapiens
ctctaggtggtctggataccattgtcaagatccctccacatgtactgaggtgtgggaaatgctactgcctgtgtcttacatgatgttatctacgtcattg

SEQ ID NO: 234031 - DNA, 75 bp, Homo sapiens
ggcctacgagcagctgaagctatgccttcaattaagttgcagagttctgatggagagatatttgaagttgatgtg

SEQ ID NO: 234032 - DNA, 82 bp, Homo sapiens
ggcggtggcggcttggacgactcggagagccgaaaccaaggtgtatgttggtaacctgggaactggcgctggcaaaggagag

SEQ ID NO: 234033 - DNA, 100 bp, Homo sapiens
ccacctaccaccggctcctcgataaagtggagctgatgctgcccgagaaattgaggccgttgtacaaccatccagcagcatgttggaacaggattccagg

SEQ ID NO: 234034 - DNA, 82 bp, Homo sapiens
ttaaggattccaagtaactcttatttggcatgcattcctcagcagcaactgagctgtttgctactggacctttgccaagcac

SEQ ID NO: 234035 - DNA, 100 bp, Homo sapiens
gcccatgcgggaccagatcatccgcgtgaagcggaaactggagaggcgtggctggaccaagacctccccccatgtgagcaggcttcctcctcccccaaca

SEQ ID NO: 234036 - DNA, 101 bp, Homo sapiens
gagcattacagagacatgggctacccactagccgtgaaactgggaaccatcactcctgacggggcaggtgatgatgaacagtctacacagatggctgcaag

SEQ ID NO: 234037 - DNA, 74 bp, Homo sapiens
aagaaacatgttgtgaaatatcagatactaaggcaggagctaacatgattgtgtctggcagtgctattatgagg

SEQ ID NO: 234038 - DNA, 89 bp, Homo sapiens
ttaagtgagagagatgccatctacaaagaattctccttccacaattttaatcagggagcactcaacatcagtgatagaaccatacctca

SEQ ID NO: 234039 - DNA, 88 bp, Homo sapiens
ttgtcatgaagaaactcaatgatcgtgtcatgagacaatctgcacatcgtgctgccacacgaggcttcattcgttatggctggcgctg

SEQ ID NO: 234040 - DNA, 90 bp, Homo sapiens
ctaagatgtcaggacatcctggaagctgggaaagggttattatatccgggaaaaatctaagcaagtcatcacattgctgatggatgaacc

SEQ ID NO: 234041 - DNA, 100 bp, Homo sapiens
agtacgagcgacaggagttcatctacccggagaagcaggagccctactcggcaggtggccaaggtggaatacgtcaggaagaagccaaaattaaaagaag

SEQ ID NO: 234042 - DNA, 75 bp, Homo sapiens
gcgacaagccgctggcagccgcggatctcaccgccgctcaggagctgaagaagcaggtggagagtgccgagctga

SEQ ID NO: 234043 - DNA, 110 bp, Homo sapiens
gggactaaactggcgggctccgtggaagcgtggccggcagcgtcccggacgaggagacttcccaagtaagaagcggaagaggagccgctggaaccaagacacaatggaac

SEQ ID NO: 234044 - DNA, 98 bp, Homo sapiens
aacacaattataaaatgtcagcttttaaggggtacagctctgccggggggggaaaaagtggtaccattttgggcgttcttgagcttcagaatgcaacc

SEQ ID NO: 234045 - DNA, 100 bp, Homo sapiens
aggcactttgctctatctggaaaatattctcgggaattcttcaatcgcagagggggcgagtacttcagtgatgagcagatgcggttccgggcccccctgc

SEQ ID NO: 234046 - DNA, 88 bp, Homo sapiens
agaaactccttcctgcctttaacacacctactgggattccttgggcaatggtgaatttgaaaagggacatgagagatggctttagaag

SEQ ID NO: 234047 - DNA, 97 bp, Homo sapiens
acaggatggattgccagggcttcctggcccgaaaggagagcctggaacagatgctgcttgtgttgctcagagtcacggaatctgtactgaagatgcc

SEQ ID NO: 234048 - DNA, 83 bp, Homo sapiens
caaagatgaaatccgtataccagatgtcgaacctgctgcttttctcgctatgctgaacttcagctttagctgcagctgcctct

SEQ ID NO: 234049 - DNA, 98 bp, Homo sapiens
ccgtcttcaacctcgagtactcgcccgacgggcggaattctccacgagttttgagcagcctcgggtttcccaccacctccaaatcatggaagacacac

SEQ ID NO: 234050 - DNA, 82 bp, Homo sapiens
taatgacagtctccaaattcgcctccatctgtaccatgctgtcgcctggttgggcccggaaatgggacgtcgcgctttctca

SEQ ID NO: 234051 - DNA, 83 bp, Homo sapiens
ctattgacagcaattcatgcatcattcctaagatgaggacacagcatcctgggccactgtcactaatacaaatttgcctctgg

SEQ ID NO: 234052 - DNA, 80 bp, Homo sapiens
ggacctaaagcgattcttgtataaaaagttaccaagattaatgacactgagttcttctactggagagagttggtttctaa

SEQ ID NO: 234053 - DNA, 75 bp, Homo sapiens
ggagacccccgccctcaactgaggtgaaaggaaagcaagccaggatggatatttacgacactcaaaccttggggg

SEQ ID NO: 234054 - DNA, 75 bp, Homo sapiens
agcctctttccggcaaatcacgcgagatttcgttcacccgggctccacagggttgcctaagtactcttgccagtt

SEQ ID NO: 234055 - DNA, 136 bp, Homo sapiens
gtggaattttagcagcagaatctatttttaatcaactaactagtgaaaatctccaatcaaagacaataggtctctcagccagggtagtacaaatgcaacagtgctagatgttgctcagacaggtggtcataaaaag

SEQ ID NO: 234056 - DNA, 73 bp, Homo sapiens
tgaaggactacgagaggaaggttatcttggagaaggcaggcatccgcacttccactaatagccaagtagacaa

SEQ ID NO: 234057 - DNA, 133 bp, Homo sapiens
cttgttcctcctgtcccaaaagaccatcctgctctcaactacaacatcgtttcagggggggacacagcgattgccacgcgccattggaatgtccctggccaaggagctcatattctctgcgcgagtcctcgat

SEQ ID NO: 234058 - DNA, 80 bp, Homo sapiens
agagagccctttgcaggatgcagaagaagccaaaaacattctgggagtattttctgcattgcgtgctgttcctcaaaaag

SEQ ID NO: 234059 - DNA, 83 bp, Homo sapiens
caaccaggagctggtgtctggctctgagctcctgcagctcgtcagcccatttctgggcttctaaccgaaaatcttcagttggc

SEQ ID NO: 234060 - DNA, 85 bp, Homo sapiens
caagattacagccaagcacgcggccaaggggaaatgtgaagttcatttccaatccgccctccatggtggcagcggggagcgtggt

SEQ ID NO: 234061 - DNA, 80 bp, Homo sapiens
cagaccctggagcctcagttggaagcagccgatccagcctgcggagcctgtggggcaggaagacagagatgtcaatgacc

SEQ ID NO: 234062 - DNA, 100 bp, Homo sapiens
catcaattcgaggcctggattgctgctttcaattactggcatccagaaattgtgtattcagtggagacctttggcgacttggcctttggcgacatcttcc

SEQ ID NO: 234063 - DNA, 50 bp, Homo sapiens
ctacgaattcatccgctctctgccagcctgccgagtgcctgggattgcag

SEQ ID NO: 234064 - DNA, 83 bp, Homo sapiens
gaggccgacggagccggagtcgcggacgccgcggggtctccgggacaggtgtcgtgaaaactacccctaaaagccaaaatggg

SEQ ID NO: 234065 - DNA, 75 bp, Homo sapiens
cggggctgaagaagcagttctacaaggcgagccaggtcagaaagcaacattgaatgcagaagaaatggcggactt

SEQ ID NO: 234066 - DNA, 100 bp, Homo sapiens
aggaccacagcggcaaggtctccaagtcccagctcaaggacttcctgacagacctgatgatgtcagaggtggaccgctgcggggacaacgagcacctcat

SEQ ID NO: 234067 - DNA, 100 bp, Homo sapiens
aaccagatgagagccttcaaaagcagtgcaactggctcagtattcacagggaaagctgtgagggctctgattgtactttctccacaagcttcagcatggc

SEQ ID NO: 234068 - DNA, 82 bp, Homo sapiens
gcgacaagccgctggcagccgcggatctcaccgccgctcaggggtgttgaaagcagcaggggcctagaagacattaaaccga

SEQ ID NO: 234069 - DNA, 90 bp, Homo sapiens
cttcaggagagcctagatgagctcatacaggccctggccaacgtcaacattgggagcctcatctgcaatgtaggggccggtggacctgct

SEQ ID NO: 234070 - DNA, 100 bp, Homo sapiens
gagacgcgggcggctagagccggagtggggcgagccgcggaacccggccgggagccgcgcgaggcggtacaatccttggatttaccctccgaccatacag

SEQ ID NO: 234071 - DNA, 90 bp, Homo sapiens
tcgaactagagggggctttgggatcaccagtcggagcccttcgtgttacagggtgttgctgaaaatgtcagatgcaaatttggatagcag

SEQ ID NO: 234072 - DNA, 99 bp, Homo sapiens
gcgctatgccctgctgtagtcacaggagctgtagagaggaccccggtacatctgaaagccgggaaatggcagtgctttcctcagtgctatttttcttgc

SEQ ID NO: 234073 - DNA, 87 bp, Homo sapiens
atgatgcctgagttcagccctcagcagaaactatgttccaacttcctgtcaacaatcttggcagtttaagaaaagcccggaaaactg

SEQ ID NO: 234074 - DNA, 82 bp, Homo sapiens
agagaactcttttaaatatttgataaaactactcacccaatgcttgtggttggtggcatcgaccgggtttatgaaattggac

SEQ ID NO: 234075 - DNA, 86 bp, Homo sapiens
caaccagatttcttcttagatgaatacccagaagcagttagcaagaaagtggaatcaactggtgacgcatccaaagaagacattga

SEQ ID NO: 234076 - DNA, 50 bp, Homo sapiens
tcgccgcaaggatctctggaagtgtactaatggtcacttgatgtgcgctg

SEQ ID NO: 234077 - DNA, 80 bp, Homo sapiens
cctcctgagtggctgggactacagggtcatctagtagcaggcacccaaatcaggcaactcccaagaaaagtggtttaaag

SEQ ID NO: 234078 - DNA, 95 bp, Homo sapiens
gcgtgggtgaggtgtccagctgcccaaaggcgacaggtgaagaagaattttcttatgggtattctctaaaaggaataaaaacatgcaactgtgag

SEQ ID NO: 234079 - DNA, 100 bp, Homo sapiens
ggaacatttgggacttcagatacgctttaacttgaaatcaaggaatgtagaaatcagggttcggagcgaccttggccgttggcctgaccatctttgtgct

SEQ ID NO: 234080 - DNA, 74 bp, Homo sapiens
tcgggccagagacgacaacccgggcctccgaggtaaaaatgttgtacatcagctctcagtaaccctagaagact

SEQ ID NO: 234081 - DNA, 74 bp, Homo sapiens
atggtgaagtataggctgaggctacctgtgaacagtacgcagtgaatgttaagaaaaagtcagcactttttgaa

SEQ ID NO: 234082 - DNA, 75 bp, Homo sapiens
gggtctctgatgcctattattgtaaggagtgcaccatccaggagaaggacgcagaacagattatatttgatcatt

SEQ ID NO: 234083 - DNA, 90 bp, Homo sapiens
agcagtagatgatgatgtagcagaaggtgtcatggagaaactccagctgggcccagagattctgcagcgggaaaatccaaggcttattta

SEQ ID NO: 234084 - DNA, 83 bp, Homo sapiens
gtcgcgaccagagccattggagggcgcggggactgcaaccctaatcagcgccaaatcttaaaggcagaccacgcaaaaagaaa

SEQ ID NO: 234085 - DNA, 90 bp, Homo sapiens
cagattcgcagtggtcgcttcttctccttgcacgagtacacgagacaggattgagaaaggagagattcaaattgtgacttcagattcaaa

SEQ ID NO: 234086 - DNA, 100 bp, Homo sapiens
ggatttccaactccaggaccctttccttctctacagaaatgccagattatgactatgaatatgatgaaaatggtgacagagtcgttttaggaaaaggcac

SEQ ID NO: 234087 - DNA, 100 bp, Homo sapiens
taaacatgcaatgaacccaaaaggggactttgaacatgtcggggatcgccctcagcagactcgcccaggagaggaaagcatggaggaaagaccacccatt

SEQ ID NO: 234088 - DNA, 98 bp, Homo sapiens
actgctcttcccgaagagcaaagtaccatgagctcccgacactctgccagcccagtggttttcaccagtgcccggagttcacctaaagaagagcttca

SEQ ID NO: 234089 - DNA, 75 bp, Homo sapiens
gcggctctgccaagtccagcagcaatgggcctgtggccagtgcacagctccaggccatgcccgcagccggaggtg

SEQ ID NO: 234090 - DNA, 75 bp, Homo sapiens
aaggtggaggaatcctgatactgagcgaaggtcagtgcaccagatattctgaaacctctcaatcaagaggatccc

SEQ ID NO: 234091 - DNA, 100 bp, Homo sapiens
caaggagaagaacttccacatccaaagtccatgcttcagatggcagaaacggtggacacaagcgaaatggtcaacggcgctacagaacaaaggacgagct

SEQ ID NO: 234092 - DNA, 74 bp, Homo sapiens
tgaagagggaagacacgcggaaacaggatgatgatgacgacatgggagaggatgaagatgaggacgatggtttc

SEQ ID NO: 234093 - DNA, 127 bp, Homo sapiens
gttcctattgattcatcagattttgcattggatattcgcatgcctggggttacacctaaacagtgcatttgacctacctcaggatatccaaaggagaacagagggaagtgaggggttgagaactgac

SEQ ID NO: 234094 - DNA, 75 bp, Homo sapiens
cgtggtctgaggtccgcggcagggtcccgcatggcggcgcacaggaagcacgtcactctccagttcttcaagaaa

SEQ ID NO: 234095 - DNA, 100 bp, Homo sapiens
ttattgctaagtgtgggaattttagctaacatgacgacagagatgatggtgtggattattgggccaaaagaggaagaggtcgtggtacttttcaacgtgg

SEQ ID NO: 234096 - DNA, 100 bp, Homo sapiens
ctacctgccaccaaactagtagtacagaggtgcagttccatggtacaccataaatcttgacttaccaccctacaaaagatggcatgaattgatgcttgac

SEQ ID NO: 234097 - DNA, 100 bp, Homo sapiens
tgacgatttcaacccatttttagatgagtctaatgaggatgatgaaaatgatgctcccataatactctcagatagtgaagaagaagaaatgatcattttg

SEQ ID NO: 234098 - DNA, 83 bp, Homo sapiens
aaggagcagctctgttgcgacataggccgagcagcgaggcccacttcttcctgcgtctgtgctccgaggtgcccattttggag

SEQ ID NO: 234099 - DNA, 100 bp, Homo sapiens
ttgctgctgatgaagatgatgacgatgatgatgaagaggatgatgatgaagaaagcctaaagaaactgttccaactcttgctccaaaaactctttcagta

SEQ ID NO: 234100 - DNA, 100 bp, Homo sapiens
ggacgtgcttcctgcttcatagataagaggtggttcagaatctggggagccttatattccaggtgtctttttcagacagtttctacctgtatcacccaag

SEQ ID NO: 234101 - DNA, 83 bp, Homo sapiens
gctagtgatcctttgcaccctgcttggagacggacttgcttccggttggaagtactccatgacacacactcggagaaagtccc

SEQ ID NO: 234102 - DNA, 100 bp, Homo sapiens
ggttgacacctttacacagagcagttgcatcttgtagtgagaacaaaatccagtctcatagcagaggagaatataatgtttacagcaccttccagagcca

SEQ ID NO: 234103 - DNA, 108 bp, Homo sapiens
gcgattggcatcgatctctccatcccttccgaggcccgacttcgactatttggagttttcctggtcttactggatgtcactctcgtccttgccgacctaattttcact

SEQ ID NO: 234104 - DNA, 87 bp, Homo sapiens
cagcggaggcaggttgatgtgtttgtgcttccttctacagccaatatgaaaaggcctagtgtgaagatatgtgacgtgtataacgct

SEQ ID NO: 234105 - DNA, 73 bp, Homo sapiens
gggatggctataatggatttggtaatgatggaaaagaattccatggcaacatcattaaagtgtcctttgccac

SEQ ID NO: 234106 - DNA, 73 bp, Homo sapiens
aagccacgtgcagacatctacaaccttcgatctcctgacgaggcatatcgatgcatttacttcaaaacttttt

SEQ ID NO: 234107 - DNA, 90 bp, Homo sapiens
cttgacttctctggggactctgaacttccctggtcgaacagttttttctaatggctattcaaggctgatgtccggccccaaactgatggc

SEQ ID NO: 234108 - DNA, 50 bp, Homo sapiens
ttactgatttcatcaagttcgacactgcatgtttgtgtcattagtgaaac

SEQ ID NO: 234109 - DNA, 96 bp, Homo sapiens
acttatattttctaaaacctggagacaaaccacataaatacaaaacaagtctgcttcttcaaaattctgctggtacaggtttgcagattccgccag

SEQ ID NO: 234110 - DNA, 97 bp, Homo sapiens
gaaaagaaccattgaagcttgagagaaaagcccccaaaagcagctattcagctgttgaatttgtgtgaggctgaagattcagctttaacaaagctgc

SEQ ID NO: 234111 - DNA, 100 bp, Homo sapiens
ataaggttttttgactgtgattcactagtgtgcctctgcgaatttaaagctcatgaaaacagtctctggaatctgttctgcgccacccggcagataatcg

SEQ ID NO: 234112 - DNA, 75 bp, Homo sapiens
gatcagagaccagggctcctgtggctcctgctgggttatcaatactctggctgaccatcatcatcgtgggactga

SEQ ID NO: 234113 - DNA, 100 bp, Homo sapiens
gttttacagtctgttccacatgatcattgtaataagttatgagttgcagaaacgaattgctgaaatggaaactcaaaaggaaaaaattcatgaagatacc

SEQ ID NO: 234114 - DNA, 76 bp, Homo sapiens
gaggagtgtctgaaggactcgccccgcttcagactggaacgtgagaaacgagcccgcatcaaagcacggaaggaaa

SEQ ID NO: 234115 - DNA, 90 bp, Homo sapiens
ttctaaacctggtaaaatttcacggcaggatcctgttacatacatttcagaaacagactgctcactagaagctcagcccaaatatgttag

SEQ ID NO: 234116 - DNA, 75 bp, Homo sapiens
gccaagcgtttactgggcagctgttacggaatgaatctgaagtctgctgcagtaaaacacagaaggctttaaaat

SEQ ID NO: 234117 - DNA, 100 bp, Homo sapiens
ggacgcggagcccggagctggggcgacgaggcgattgcgggggcctgggctaggacatccataaaaattcatcagagagcattttactactgagctgcaa

SEQ ID NO: 234118 - DNA, 75 bp, Homo sapiens
catcagatctgtgcaccattaatgtgagtggcctgaagttctccaagatgcttgctctgtcaaggcacagcctat

SEQ ID NO: 234119 - DNA, 74 bp, Homo sapiens
caggatgagagtgcgatggggaatccaacagaattctggttcttctgtgtggcagttcagaatgatggatcaag

SEQ ID NO: 234120 - DNA, 87 bp, Homo sapiens
cactctagaggagctgaaagtagatgaggtattgcaggcaatgggatatccaacaggctttgatgcagatattgaatgtatgagttc

SEQ ID NO: 234121 - DNA, 90 bp, Homo sapiens
gccgtccgtgcccgcgggacctgacagccgggtcagaggctgaaggtgatgtggccgccctcaaccgacgcatccagctcgttgaggagg

SEQ ID NO: 234122 - DNA, 100 bp, Homo sapiens
agaaaatgattcctcctacgaaacctgaaattcaggccaaggctccaagtagtctgagtgatggagatgagctgccctgtgacatgcggatcccatctga

SEQ ID NO: 234123 - DNA, 100 bp, Homo sapiens
ggaggaactgggtgctcctgcccgctggcccctcgcgcgtgaggatctatctcaggagttcatgatcaagtgttgcccacaccaaatgcttcatccagag

SEQ ID NO: 234124 - DNA, 100 bp, Homo sapiens
aacatctacattaaaccattcctgtcttcagctccagagtcttcacgtataatgctgccaacaaggaaacctgtgaacacaaccacagacaatgctcccg

SEQ ID NO: 234125 - DNA, 74 bp, Homo sapiens
gcgcaatggcgtccaaccccgaacggggggagattctgctcacggaactgcagcaccagatactgctacaccat

SEQ ID NO: 234126 - DNA, 96 bp, Homo sapiens
tgggccgcgacctggttctcccggagtctacagtgctgggcctcgtgcgggtcccgctgtacacccagaaggaccgagtcggaggcttccccaact

SEQ ID NO: 234127 - DNA, 50 bp, Homo sapiens
accttcccagaaagtccaagctcgtggtcagcgccaacggcaatgtcctg

SEQ ID NO: 234128 - DNA, 82 bp, Homo sapiens
ggttattcgagtgaccgagaccgcggccgggaccgaggaggttgacggatatattcagacgttacgacacggatcaggacgg

SEQ ID NO: 234129 - DNA, 112 bp, Homo sapiens
gagaaggaggggtatgagccacacatccccgaccacttgcggcctgagtatggtgctggagaatctggtaaaagcaccattgtgaagcagatgaggatcctgcatgttaatg

SEQ ID NO: 234130 - DNA, 83 bp, Homo sapiens
ctgctgaagtccctagggaaccaccaattcttcccagatataatgaagatctggaacttgaagatgccattcatacagccatc

SEQ ID NO: 234131 - DNA, 83 bp, Homo sapiens
aacaaactcgaagaacagctgtggaaagaagttgcaaaacactggacaatgcagatcttcgtgaagactctgactggtaagac

SEQ ID NO: 234132 - DNA, 100 bp, Homo sapiens
gatctcaagccgactctcaccatcatcaagacggaaaaagtcgatctggagcttttcccctccccggtgttggaacaaatcagagctaccaagaaagtca

SEQ ID NO: 234133 - DNA, 51 bp, Homo sapiens
gcacgacatgctggcctcgctgggatcaaaatacttgctggatggtggact

SEQ ID NO: 234134 - DNA, 75 bp, Homo sapiens
caaatcacgcgagatttcgttcacccgggctccacagggcttcggcatggaagccacgctgctgttggtggtcgg

SEQ ID NO: 234135 - DNA, 74 bp, Homo sapiens
tagcagccaggaaccaagaaaacttggagtggagtcaacatatcaatggagcaagtcacagtcgtcgatgccag

SEQ ID NO: 234136 - DNA, 75 bp, Homo sapiens
agccggacgtgggcgggcagagagccctctctgggagatggttcaggatggcattgacctcaagagcatcaagtg

SEQ ID NO: 234137 - DNA, 75 bp, Homo sapiens
cgggaggaaggaacgaggcaaggagctaaagcagcgtgcgttcagccctggggttcctcatgggtgcctcctgtg

SEQ ID NO: 234138 - DNA, 100 bp, Homo sapiens
ggaaaactgaccccggtactgtcttcgtgatgaataaaaacatttcaactccctacagttgtgccatgcgtggtgttcccactgatgaagagcaggcgac

SEQ ID NO: 234139 - DNA, 101 bp, Homo sapiens
gggaaggccaagtacaaggccagcgagaatgccatcgtgtggaagaggagctggagttctgtgaaaagctgctacagacctgtttctccagcccagcggac

SEQ ID NO: 234140 - DNA, 82 bp, Homo sapiens
agagcctcgcctttgccgatccgccgcccgtccacacccgccgccagagtgaagacatttccacctggacacctgaccatgt

SEQ ID NO: 234141 - DNA, 74 bp, Homo sapiens
cagtggtcgcttcttctccttggcacttcagacaccacctccaacaacacagcaaccgtgatttccacagcgcc

SEQ ID NO: 234142 - DNA, 100 bp, Homo sapiens
atatgccaccatggagaagcataaagaggccgttaattaaggaaaagttgagccagggcgtgaccctcgtcgtggacagatacgcattttctggtgtggc

SEQ ID NO: 234143 - DNA, 75 bp, Homo sapiens
caggaccctgttccatccaaactcttgccctttgagggaccagctgtccccgccctactccggaccgccccaaag

SEQ ID NO: 234144 - DNA, 101 bp, Homo sapiens
ctaactgcttcaaaaacagatatactttgcaggtgaaacagctgaggaatcgggcagatgaagatgctcgaatgattcacatgagtatgcagatgggtaat

SEQ ID NO: 234145 - DNA, 80 bp, Homo sapiens
ggtttctgcagcttaggtgtttcaaatcctcatcagcaggttccatcataatgaatggatccaatatggcaaatacatca

SEQ ID NO: 234146 - DNA, 75 bp, Homo sapiens
gatggcgcggccgagtccccgtacggccacccggcgggggacggcaaaacagaacagaaaggcggagataaaaag

SEQ ID NO: 234147 - DNA, 98 bp, Homo sapiens
ctgtgctcgcgctactctctctttctggcctggaggctatccagcatgcttcaggactgccccaaggcccgcagggaggtggagctgcactggcgggc

SEQ ID NO: 234148 - DNA, 100 bp, Homo sapiens
ctcggaggcggcgtgggcggcagagagcggggcggcggcaggaaccatcactgttgctggaggcacctgacaaatcctagcgaatttttggagcatctcc

SEQ ID NO: 234149 - DNA, 100 bp, Homo sapiens
gtttgccatcccaaggccgaagagagaagcccatctggaagtgcctttggaagtcaagaaaatttgaggtggaggaaagatatgactcactggcgtcaaa

SEQ ID NO: 234150 - DNA, 100 bp, Homo sapiens
ctttttctgaggagcagctgaaccgttatgaaatgtatcgccgctcagctttccctaaggcagccatcaaaagggaattatctgtattagcaggaaattt

SEQ ID NO: 234151 - DNA, 99 bp, Homo sapiens
agactttcagctacttgaagatagccatcagccgctacgtgactcttttctccagaaatacatgctacaggatttaactatcagaatgaagatgaaaaa

SEQ ID NO: 234152 - DNA, 73 bp, Homo sapiens
tggttcttgaacagacagaaggatgtaaaggatggaaaatacagccaggtttcttccccagggaacagagctt

SEQ ID NO: 234153 - DNA, 114 bp, Homo sapiens
atcaaattgaagagagcagttgaagaagtgaagaaattattggtacctgcacagatcgccaaactgaggcagcaactacaacgcagtaaacagagtagtcgtcacagtaaggag

SEQ ID NO: 234154 - DNA, 100 bp, Homo sapiens
tcctgcttaagccagcacagaagtgtctggagtggttgattcacagagattcagttgtggaaattctttttgaacaagataatgaagagcaatcagttgc

SEQ ID NO: 234155 - DNA, 75 bp, Homo sapiens
acttttcgaggcatttgacttgtttgatgttcgtgactttggaaaggtcccgccattgatctggaaaaagtaaag

SEQ ID NO: 234156 - DNA, 100 bp, Homo sapiens
agtttgaggatgcagatgttgatcactgaaaatgatttatgcaagtttaaggatttaagcgagagcctcactggttcccaggacatcaacctgaactgga

SEQ ID NO: 234157 - DNA, 83 bp, Homo sapiens
gtggaatattggggggctcggctgcagacttggccaaatggacgggactattaaggggtgagcccctccagactccgaatagg

SEQ ID NO: 234158 - DNA, 83 bp, Homo sapiens
tcggggaattaggccagcgggagccctaggggcccggaccttgctcctggagctggacaccctatgaagccccatcgcctggc

SEQ ID NO: 234159 - DNA, 98 bp, Homo sapiens
gaataaccgaaaaattgcagaagcacaagccaaactgtagctgctgctggtggtgacaatgtcaaataacggcctagacattcaagacaaacccccag

SEQ ID NO: 234160 - DNA, 82 bp, Homo sapiens
ggccgtgcgggacgcgggcgccaggaccggccgaacgcagagtgcagagcagagcgggcggaggaccccgggcgcgggcgcg

SEQ ID NO: 234161 - DNA, 75 bp, Homo sapiens
ccgctgccccctaccaccccttcacttgtttacaggcattggagtttttacatgctaatcaagtgatccacagag

SEQ ID NO: 234162 - DNA, 75 bp, Homo sapiens
aaattacgaactcactgagctggaagtcattcaacgggaattgaataggaagctcttcgtgggcggtcttgactg

SEQ ID NO: 234163 - DNA, 130 bp, Homo sapiens
gcctatcactgtcctggctgtgctggccttagtgccccaggatcagggaggactgattgggggcaccaacttcgtggcacctccaacagcagcagtaccagccaatcttggagcacccatcggcagtggc

SEQ ID NO: 234164 - DNA, 90 bp, Homo sapiens
ggctcgggtcgttgtggtgcgctgtcttcccgcttgcgtcagggacctgcccgactcagtgcttctccagcagcgccagcactgtgtcca

SEQ ID NO: 234165 - DNA, 101 bp, Homo sapiens
atgtaccatcatgggtagcctttgataaacaggagaaatctccctggtgacagagcaaaagctcttgatattatgattcccatggtgcaaagcgaaggaca

SEQ ID NO: 234166 - DNA, 90 bp, Homo sapiens
tgtccatcttctcacaccgcttcatgagcattgctgcaggttcaggagaagtggcacctggtggaggacctgtcgcgactgctgccggag

SEQ ID NO: 234167 - DNA, 80 bp, Homo sapiens
atcgagaggatctggtgtaccaggcgaagctggccgagcaggctgagcgatacgacgatgatttgtcattaattcggaag

SEQ ID NO: 234168 - DNA, 75 bp, Homo sapiens
cactgccaaagatccctgctggccaaaacattctgattaccgcattcgttcagtcagagagcataatagaagtac

SEQ ID NO: 234169 - DNA, 83 bp, Homo sapiens
aggaggagatgcttcagagagaggaagccgaaaacaccctgcaatctttcagacaggccctatgatgccaagtagagaaatcc

SEQ ID NO: 234170 - DNA, 98 bp, Homo sapiens
gcagcaaccaggagattccctgggcctgcaggaagcccttccgcggaccgaaaggtgctggtgattgggtgtggcaactcagaactgagtgagcaact

SEQ ID NO: 234171 - DNA, 101 bp, Homo sapiens
gccgtccagcagatggcggatgccctgcagtacctgcagaaggtctctggagacatcttcagcagggctgggttacgacccctacaaccctgagctgccca

SEQ ID NO: 234172 - DNA, 75 bp, Homo sapiens
taattcatgcagatccaaagctcttgctttgtgtcaggtgccaggaccagagcccaacaactctggatgccttca

SEQ ID NO: 234173 - DNA, 74 bp, Homo sapiens
ctcagttgtccatgaccctgaaggtccaggagtacccgaccctcaagacgccctgctggcggacttggagtcta

SEQ ID NO: 234174 - DNA, 82 bp, Homo sapiens
agtaaaagtagcagtggttcagcacactttgttggtacgtgataatgcagatctccgctgtgaacttcctaagttggaaaag

SEQ ID NO: 234175 - DNA, 82 bp, Homo sapiens
gggccagcaactacgtagatgctttatcctgtggataaacgcagagtgaacgagtttggggagtcctacgaggagaaggcca

SEQ ID NO: 234176 - DNA, 50 bp, Homo sapiens
gacgcaggttcgggaccatgagctgtatttaggtcagttaacgtccatac

SEQ ID NO: 234177 - DNA, 122 bp, Homo sapiens
gatcaccggcgtgccccaccatgtcagacgcagccgtagacaccagctccgaaatcaccaccaagggcgccctgcgtccggcagaggaggcgagcatcccgctcaggtgatgaggaacccct

SEQ ID NO: 234178 - DNA, 75 bp, Homo sapiens
cttccttgtacccacaggtgaaaaatgaatcctatgaggatggttgtgaggattatcctactctatcagaatatg

SEQ ID NO: 234179 - DNA, 83 bp, Homo sapiens
agaaggacaagcaggtctaccgggccacgcaccgcctgctgctgctggccctgggcgctgcctatggcacagccaagagcggt

SEQ ID NO: 234180 - DNA, 82 bp, Homo sapiens
gcctaacggcgctgggctagtgctaggccacttcatagcttcggggatggtcaatcagggacaaactctgcctgggcgagtc

SEQ ID NO: 234181 - DNA, 100 bp, Homo sapiens
tcagagaggacgcacaagaacttgagcgacatggagaacgaattctactatcgctacccaagtactccaaagattcaggtttactcacgtcatccagcag

SEQ ID NO: 234182 - DNA, 50 bp, Homo sapiens
atgcgctcgggctggaccagcagggttgttatgaggctcaaaggaacggc

SEQ ID NO: 234183 - DNA, 101 bp, Homo sapiens
gagacacgctgggccgaccccagagcggcgctggacagcgttttgctgctgacatcatctccgttttggccatgaccatgagtggggagcgtgagtgcctc

SEQ ID NO: 234184 - DNA, 75 bp, Homo sapiens
gcagccaagatggtgaagcagatcgagagcaaggttgctccggttgctaagaagactatgaacaagtcagagaac

SEQ ID NO: 234185 - DNA, 100 bp, Homo sapiens
tttgaagcgcttcaaaggaccggacccagagaagaggaaaactctaccggtgcagaagctccaccatgaggcgaggtggatggaggaagcgagctgaaaa

SEQ ID NO: 234186 - DNA, 100 bp, Homo sapiens
actgcctatatcgacttcgcccggcagaagctagatcccaagattgctgtggctgcgcagaactgctacaaaaggctgggaggcggcagaatgcagccag

SEQ ID NO: 234187 - DNA, 75 bp, Homo sapiens
tcgtagacattgtctcccaagacaacttcctcaccagcaccttacaggccccgcagggtggagcccgtctgctca

SEQ ID NO: 234188 - DNA, 100 bp, Homo sapiens
cggggaaccatggctgccccgagaggagcagtttttgcaagaaaggatcaaagtgaacggaaaagctgggaaccttggtggaggggtggtgaccatcgaa

SEQ ID NO: 234189 - DNA, 96 bp, Homo sapiens
gatattctccatcatatgacaaggacaagagtgttctggctttcagaggaatccctgaccttatggattttctgaacccaaacggtagtgactgta

SEQ ID NO: 234190 - DNA, 80 bp, Homo sapiens
ctggccgactgcgccgagctgcacgtcctcgaacgcgaggccaacagccccggggaactgatcacagccgcacatgagct

SEQ ID NO: 234191 - DNA, 80 bp, Homo sapiens
gaacagacaagcaggttgtcttgaatgtgaaaacctttgcatcttctgatagtctagccaaggtccaagaagtagcaagc

SEQ ID NO: 234192 - DNA, 100 bp, Homo sapiens
ctggggcgtcgtgcgcaaaggcctgcagtgcgcgcataaggagtcaggccagggcgggatgacactcattgattctaaagcatctttaatctgccaggcg

SEQ ID NO: 234193 - DNA, 74 bp, Homo sapiens
gcaaagagaaaggaagcaggcccgttggaagtggttgtggcatcgagcgcctcaaacgaaagaaccagcccagg

SEQ ID NO: 234194 - DNA, 52 bp, Homo sapiens
gggcggcagcgggcgtgaggggcgccaagcccatctttgtgtgcttgcatcc

SEQ ID NO: 234195 - DNA, 75 bp, Homo sapiens
agagattatggttcttgatatggccaggtatctaaaaaagtggcagatttaatccttgaaaaacagcctgcttat

SEQ ID NO: 234196 - DNA, 83 bp, Homo sapiens
gaactgtccccggcgcggccagccggtggcagagggtgtttgtgagatatggttgaccagtgaagacacgggggcttatggca

SEQ ID NO: 234197 - DNA, 90 bp, Homo sapiens
ccatggacacacagacatgcaagttgcagctggaaagctttgctgggcatattggattttacccatcataggcgctgttctcttaggttt

SEQ ID NO: 234198 - DNA, 84 bp, Homo sapiens
cttaacccctagaccggtttttagtccattgactatgcagcctaatgttgtcgagatgtccacagaaggaggatttggtggtac

SEQ ID NO: 234199 - DNA, 75 bp, Homo sapiens
agttctctctggagtctcgagcccgggaagtgcgttttggtagcagcagcagcagcagcagcagcagcagcagca

SEQ ID NO: 234200 - DNA, 75 bp, Homo sapiens
gaaaaagactgattggctcttcctcaatgcttgtgtgggggaggacgaggaagaaacgaacgtgatagttctcag

SEQ ID NO: 234201 - DNA, 100 bp, Homo sapiens
ctggatttaagcactgctgcactttatgagcgtttagtgggctacagatggcatggcatctaaaaccttacaatgcttgattttcatacagaagacactt

SEQ ID NO: 234202 - DNA, 74 bp, Homo sapiens
taaaggaagaatggatagaaattgaagcacggatcagattatcatttgcacagactccatgttttcgttggccc

SEQ ID NO: 234203 - DNA, 76 bp, Homo sapiens
cagggaccaggggggcggcagcgctggacacccagcctccagtaaacattgctatcttcagaaattaaggaatgag

SEQ ID NO: 234204 - DNA, 82 bp, Homo sapiens
acaaggacaagcccgtttctttccacaaaataaaatacagtgttggatccctttctcctgtttctgcaagtgtcctgaaaaa

SEQ ID NO: 234205 - DNA, 89 bp, Homo sapiens
gagaagaacgccaacaacattgtcgtgattcttctcttggtggcgttacttgtgatgcggctgactaagcctactttattcaccaatat

SEQ ID NO: 234206 - DNA, 87 bp, Homo sapiens
tgtactgggggattcgcagggaggatgtcgggacaccccggaagctgggaaatgttcgatcctttggtacagaagacagaccgacag

SEQ ID NO: 234207 - DNA, 83 bp, Homo sapiens
gaggaggagccgagaggagctgagcgagcgcggaaggtactccaaagattcaggtttactcacgtcatccagcagagaatgga

SEQ ID NO: 234208 - DNA, 75 bp, Homo sapiens
tgattctgaagagggtctggaggagccttctcaagaacagaggtgagaagcgccactgctttgatgtcaactata

SEQ ID NO: 234209 - DNA, 100 bp, Homo sapiens
tccccttctagagtgttacggtgactcttgggtccgaaggggacggacgtcctcccacgtaccatttagaagtccaatatcagatggaaatgatgcggag

SEQ ID NO: 234210 - DNA, 82 bp, Homo sapiens
gccagctgctccggagatacggtaaggctggcctctctgcagtcagaggtctgagctctgccatggggataggggtgtcttt

SEQ ID NO: 234211 - DNA, 100 bp, Homo sapiens
gacaaggaggtgaagcggccccagcactcccagctgcgcagggcctgccaggtggcgctcgggccatgaagcccccaggaggagaatcgagcaatctttt

SEQ ID NO: 234212 - DNA, 133 bp, Homo sapiens
cgcctacccctcagagcaggagaagctgagcctttctggacagaccaacctgtcagtgctgcaatcttaggaaaagtcctcagtgctgtgggcagtgcccagctactgatgtcccagaaattccagcagttcc

SEQ ID NO: 234213 - DNA, 75 bp, Homo sapiens
cccagtgccctggttctcatcagcattgtgtgaccagccaagataaggctccggctgtaatccgcaaggccatgg

SEQ ID NO: 234214 - DNA, 100 bp, Homo sapiens
cctccggtggaggagagcgccttggaacgccgacctgaaaccatctctgagcccaagacctagccttgctctattactgtgaagcactaacaaagacaaa

SEQ ID NO: 234215 - DNA, 75 bp, Homo sapiens
cgagccttggcggcggacgtgcagctggagcagatccgcagggacatccgagacttccggtctagcgcggggctg

SEQ ID NO: 234216 - DNA, 74 bp, Homo sapiens
ggcccgcccaccagttcgcccgtccccctgccccgttcacaatggactggtgattgcagctggaagtgcccatg

SEQ ID NO: 234217 - DNA, 101 bp, Homo sapiens
cttgtgaagagaaaaatcaactcatcttgacagcctctgctgatagaacagttattatatatgaaggaatcccagttctaaattgttggggagcactaccc

SEQ ID NO: 234218 - DNA, 73 bp, Homo sapiens
cgactacttcaaccaggaggttttccgagacaacaacggcaccgcgacctgcgaccgcatcaagcagtccgcc

SEQ ID NO: 234219 - DNA, 83 bp, Homo sapiens
aactgccagaactacttgactgagacactttataaaacccaggtaaaggaacttaaagaagaaattgaagaaaaaaacagaga

SEQ ID NO: 234220 - DNA, 87 bp, Homo sapiens
agctatgcatgctgcttttgatgtctgacaacgtggatcgttgttttgaaacgtaacagtacttcaatttctaccttaaggacttcc

SEQ ID NO: 234221 - DNA, 88 bp, Homo sapiens
cccagcggcctggtcggacccaaaggagaggtgccaagtcctgccctgccaacttcttggcagctgccgacgacaaactcagtgggtt

SEQ ID NO: 234222 - DNA, 83 bp, Homo sapiens
tcttcattggcatccagctcctcctgctcgtggagtttgcacataagtggaacaagaactgctccagaaacatgacaaggagg

SEQ ID NO: 234223 - DNA, 82 bp, Homo sapiens
cgacacctccgtccgcttctggtcatgagagtgtgccaggacagccgtatttggaggagccctaccaaaatgtctgtttcca

SEQ ID NO: 234224 - DNA, 75 bp, Homo sapiens
gaacttccctaatgccatcgagcacaccctgcaggtactgggcctaatcgctacgtgcctctttggctatgatgc

SEQ ID NO: 234225 - DNA, 125 bp, Homo sapiens
tagcccacttaaactagaatgtccatgacagctcattcacatggctagtgccttgttccgatgaagttaaattccgtcaagatttaatgaatattgcgggcacaacattatcctcaaaacttctt

SEQ ID NO: 234226 - DNA, 75 bp, Homo sapiens
gagagaaagaaaaggaacgggagctgagagatcaaatgatgccgtttggaaaaatttcccagcagttgtgtggcg

SEQ ID NO: 234227 - DNA, 75 bp, Homo sapiens
gcacagccagggtcctcaccatgtctgtgagctctgcaacaaagctccgcagacgctccctgacggcccattggc

SEQ ID NO: 234228 - DNA, 97 bp, Homo sapiens
cgcgaatatcgtcatcgttagaagacatcgctattgcggttccgaggcagtgggaagagatgcggcccctggacatcgtcgagctggcggaaccgga

SEQ ID NO: 234229 - DNA, 96 bp, Homo sapiens
gcgggaggcggtggcggcggctgcccggggccaacatgaccagctagaaagacttgagttagacaagcagcagcacacgcctccctacctcatggc

SEQ ID NO: 234230 - DNA, 100 bp, Homo sapiens
aggaacctgtgttcagggccaagaacgttccagcaacagatagaaatgctttaagttcactctggggaaagctggcctctgaaatcttaatgcagaattg

SEQ ID NO: 234231 - DNA, 82 bp, Homo sapiens
cggagacatttttcacaaaagagcccttgcggtgctggtgtccgtggcgtgcctggacaatgcagatcttcgtgaagactct

SEQ ID NO: 234232 - DNA, 100 bp, Homo sapiens
tttgactggtccccagtggtgacctatgtgtgtgatcttgaagggaacagatcctttgcacatggcctgctatcaacaatcctctacaatgattctcagc

SEQ ID NO: 234233 - DNA, 83 bp, Homo sapiens
agagcagcaggagggaaaatgaagaaggaacgatctcgtaagaaggattcagatctcacttgcttatctgaagaagattgtcc

SEQ ID NO: 234234 - DNA, 90 bp, Homo sapiens
cgtacgagatctccgaccagtctgggggcgctggcggcctgcgcagccacctcaaggtttgggaaaagttcttaagttctgaaacgccgc

SEQ ID NO: 234235 - DNA, 83 bp, Homo sapiens
gagctaaagcagcgtgcgttcagccctggggtcccaggagctccacctgcggccagagtcccactcatacctgcccgagctgg

SEQ ID NO: 234236 - DNA, 100 bp, Homo sapiens
aagagggccacaatcaaagatatcagggtccgcaagcaggtggtgaacatcccgtccttcattgtccgcctggattcccagaagcacatcgacttctctc

SEQ ID NO: 234237 - DNA, 100 bp, Homo sapiens
accaaaacggcgctgatgagtctgtttgggatcccgctgtggtacttctcgcagtccccgcgcgtggtcatccaggcgcccagacaccatgtcacaaccc

SEQ ID NO: 234238 - DNA, 100 bp, Homo sapiens
acaagtactacactccctaccaggagcatgtggccttacacgcccccatcagaagatgaagtcctcagtacattctgaagaagatgattttgttccagag

SEQ ID NO: 234239 - DNA, 98 bp, Homo sapiens
gtaactgaacattggtctaaagtctttccaaaaggtcaaggttcacaagggaaatttacctaaatattctcataactccctgatggttcaagcaataa

SEQ ID NO: 234240 - DNA, 83 bp, Homo sapiens
caaggatcgatattttgtcgaagaaactgtggaagtcattaggaacaatggtgcaaggagtcagagtcagaagcaaaggtaga

SEQ ID NO: 234241 - DNA, 75 bp, Homo sapiens
ccaagctcgtggtgggtggaaaagtgttcgccgagctctcaaaggtctatggccctgtgttcactctgtattttg

SEQ ID NO: 234242 - DNA, 83 bp, Homo sapiens
ccttcctcaacgacgcggacatggtcatgagctttgtgaacctgggacatttctactgcctccagcacctgccccagacagac

SEQ ID NO: 234243 - DNA, 75 bp, Homo sapiens
gcacctcctcgccagcagccgtccggagccagccaacgagcgcagcaagatgaagagcgacgtcggcagctgaga

SEQ ID NO: 234244 - DNA, 93 bp, Homo sapiens
ccttggggctgggctggagtgaaggtggctacgaggagctctgtgtgtcgtctgagcagtcgcgagaagatttccctccaggacttgtccaag

SEQ ID NO: 234245 - DNA, 50 bp, Homo sapiens
gatcagattattcacgaagctctagaaagtggatgattcaacagccacac

SEQ ID NO: 234246 - DNA, 100 bp, Homo sapiens
atcactccccagacgtggtcagcaacgcacagctatcttgacccacccttggctgaagccgacgtagcttctctgaacagacgcatccagctggttgagg

SEQ ID NO: 234247 - DNA, 83 bp, Homo sapiens
gcaaagcttctccctcagtatttagaccaggtgaaaggtgtagcagtcactcggcctacacccacagcatcgaccttgtgaac

SEQ ID NO: 234248 - DNA, 82 bp, Homo sapiens
cagaaccacagtttatcatcccttcctggcatggtgctgatgtgaaatgtgtagactggcatccaaccaaagggttagttgt

SEQ ID NO: 234249 - DNA, 50 bp, Homo sapiens
ccagatgtcagaagctacaccatcacagcgtatagcttctggcctgggct

SEQ ID NO: 234250 - DNA, 85 bp, Homo sapiens
atttccaagtacattctcaggtggagacctgaattccgtggttgctctcgatcttgcaatttccaaggagacggatgctttccaa

SEQ ID NO: 234251 - DNA, 99 bp, Homo sapiens
atggcggacgggaaggcgggagacgagaagcctgaaaagtcgcagcgagctggagccgccggagaatgcaccgacagagaagtccaacacaatctcctc

SEQ ID NO: 234252 - DNA, 51 bp, Homo sapiens
cggggtcgagtcagtgcgttcgcgcgagaaggaagaggcccagcagaaggg

SEQ ID NO: 234253 - DNA, 96 bp, Homo sapiens
gaccccttgtccagttactctaacaagtctggagcaaaacttagagagtaacctcaccaaccttattaagaggaacacagaactggagaccctttt

SEQ ID NO: 234254 - DNA, 80 bp, Homo sapiens
tggctttaatcctgaaagccatgcagcgggaaacctcgacctgtctcccagttggttgcacagcaggttactcagcagtt

SEQ ID NO: 234255 - DNA, 87 bp, Homo sapiens
tcgctcgtactcgtgcgcctcgcttcgtcaccttcaggccattcagaggaggaaagagaggggaatatgaagtcagccaagccccaa

SEQ ID NO: 234256 - DNA, 98 bp, Homo sapiens
cttctggagaggtgcgctatgctgctgtaacacagtttgaggcactggtgaggtggattgatgatgaatcttctggcacacctggagcaactccagaa

SEQ ID NO: 234257 - DNA, 74 bp, Homo sapiens
aaagactccagtaacactcaagcaaagaagagttgagcacaatcagacggagtcttgctctgtcacccaggctg

SEQ ID NO: 234258 - DNA, 74 bp, Homo sapiens
cctagtgaaagtggacgacgaggtggtggccagacaatgcagatcttcgtgaagactctgactggtaagaccat

SEQ ID NO: 234259 - DNA, 75 bp, Homo sapiens
ttgacctagagtcactagagataaaatgctctaatccccaggaattatctgtattagcaggaaattttcccttat

SEQ ID NO: 234260 - DNA, 75 bp, Homo sapiens
tatgctaggccactatacagattggcagtatgatcacctcacggctacctatcttctgcttctagccaagaaggc

SEQ ID NO: 234261 - DNA, 100 bp, Homo sapiens
tgttaaacaatgcagcttttagaaatggtcacaacttcatggttcgaaattttcggttcttgattattacagacctctttctgaaaagcccggaattggt

SEQ ID NO: 234262 - DNA, 90 bp, Homo sapiens
aaggaggtgctgaagagcgaggaggaacaagctgaaagctggatacctaatgtcagtggagtcttctgagtgtttcctggaagaagtcgg

SEQ ID NO: 234263 - DNA, 100 bp, Homo sapiens
gcaagcaggcaacctgaatacaggtcagaagagatcaattctacagaaatttccagtggttctgttgaggctttatggaattcagcatgtcaaaattcac

SEQ ID NO: 234264 - DNA, 88 bp, Homo sapiens
tttaaacaagagatttccacagaaggtaactccatttccaaatactggatttataaatgggtttacgtctccagcgttcaagcctgcg

SEQ ID NO: 234265 - DNA, 50 bp, Homo sapiens
tggcctaccatgattacagaacttatattggggcaaatattctgaaaaaa

SEQ ID NO: 234266 - DNA, 82 bp, Homo sapiens
gaagaggagctgggcctggtgcacagggcagctgtgcggagggtagtggcagccatgaaccggatggaccagaagaagcacg

SEQ ID NO: 234267 - DNA, 116 bp, Homo sapiens
caaccattgacgccatgtcgggttattcgagtgaccgagaccgcggccgggaccgagggtactggctgtgatcgaacttctcaaccctcagagacttagatcttccacctcactcc

SEQ ID NO: 234268 - DNA, 100 bp, Homo sapiens
agcgaggcagctgtactaggactgggaacggaaagaacattggagctatcatgtctggaagtgtgtttgcaatctaattttacctattcactctcctcct

SEQ ID NO: 234269 - DNA, 98 bp, Homo sapiens
cccacttcaaacattcgtctcggaaaccccgcctcttacagtcacgagaattcatcatcgaatatgaagatgcaatgcacaagccagggctgtggcac

SEQ ID NO: 234270 - DNA, 129 bp, Homo sapiens
ctgagatcaaatggcacttcattggccacctacagaaacaaaatgtcaacaaattgatgggtcccagctagtccacagggaccagcagtgccatggaaggatttaacatgtctcagagcatcccaagag

SEQ ID NO: 234271 - DNA, 100 bp, Homo sapiens
ggagccgcgcagccctcggagcacggagcatcagatccatgctgctgctgactcggagccccacagcttggcacaggctctctcagctcaagcctcgggt

SEQ ID NO: 234272 - DNA, 51 bp, Homo sapiens
tagctctacaatcaacccatgtgttctggacatggcaagacatgtgccact

SEQ ID NO: 234273 - DNA, 101 bp, Homo sapiens
gatttcttgataaagtcttggttgctgccaacaagttcacagacattgggaccttcgagacagtgtggcaagtcaagttctacaattaccacaagcgggat

SEQ ID NO: 234274 - DNA, 100 bp, Homo sapiens
atgaattaagttcagctattggaactgataaatttcaaacggaagagagtggcagcatttagaaagaatctaattgaaatgtctgaactggaaataaaac

SEQ ID NO: 234275 - DNA, 82 bp, Homo sapiens
gggcttcctccccggccggcagggtggacggtgggctcacagaatgttgctgcgggatgtaaaagctcttaccctccactat

SEQ ID NO: 234276 - DNA, 101 bp, Homo sapiens
tgttccttcaaaagccagcagtgtctgatgagaaaccgcaatcggaaggatgatcggctgaatgtaacagaggaactaacgtccaacgacaagacgaggat

SEQ ID NO: 234277 - DNA, 100 bp, Homo sapiens
ccgtttctgggactggctctgagctcccgcaaaaacttgtgtattcaccctgagggattggttttcagagacatttcggaaagtgaaggagaaactcaag

SEQ ID NO: 234278 - DNA, 90 bp, Homo sapiens
acccttcggccgctgagattctgtcgtgtcgtcgctgctggcacttcaggctctggtgcagacatggccaagtccaagaaccacaccaca

SEQ ID NO: 234279 - DNA, 109 bp, Homo sapiens
cttcaacatcggggacagtagctctgggctcatccagaccggtgccttggcatctcccaatggggtggctttgctctgggctcctgttccctgtgagctgcctggtcct

SEQ ID NO: 234280 - DNA, 100 bp, Homo sapiens
cgaaagcctgaggaaaaagcggccgcgaatcaaacttgacgtatggagccaagaaagcccttggaaaaactggcctcatattttgtgtacacagtccctg

SEQ ID NO: 234281 - DNA, 101 bp, Homo sapiens
cttaggaccacccaccatgcctatccagttggtggagctgaaaaatggggagacgtacaatggacacctggtgagctgcgacaactggatgaacattaacc

SEQ ID NO: 234282 - DNA, 89 bp, Homo sapiens
ggagggctcggtcaacggcttcatcagcaccttgggcatgactatatgaaggaagaggaaggttttcctgaagatgaggcgactgaatc

SEQ ID NO: 234283 - DNA, 74 bp, Homo sapiens
acgctgccagtttgcacagcagcaggcttgaccactatgctatcatcaagtttccgctgaccactgagtctgcc

SEQ ID NO: 234284 - DNA, 98 bp, Homo sapiens
cccgcggctagccccttcccacaggctctctccgctcgattttgtcaccgttatgtgggaagcgaatccagaatcaaacattttaagtccagtgcagg

SEQ ID NO: 234285 - DNA, 100 bp, Homo sapiens
ctgaagcagagcaatggaagcattgttgtcgtctcctctctggctggtattgttgcagcatctggcagtgagactgaggatgaggacagcatggacattc

SEQ ID NO: 234286 - DNA, 100 bp, Homo sapiens
cccccagcagatacattctcatggccataaaatgcagtaaaaacaaatccagttcccaagaagctgtacaaatgctttcttctgttcgactcaatttacg

SEQ ID NO: 234287 - DNA, 96 bp, Homo sapiens
aaaagaaaatctctaaatgcagattccagaaaaattacagcacatctcagtgaatttgcaagtgtttgtggggacattcatggacaattctttgat

SEQ ID NO: 234288 - DNA, 75 bp, Homo sapiens
gcatcaatcagctcatccgtcagctgaactagacccagatggagcttgatagatcagctgatcctcctcctgcaa

SEQ ID NO: 234289 - DNA, 50 bp, Homo sapiens
tggcaaacagtatatcatttcagaggaggcatgtgacgtccttttctcca

SEQ ID NO: 234290 - DNA, 100 bp, Homo sapiens
aactcctgcacctgtatatagggccaagtcaattctggagacctgggtgtgggtcaagcaaccagtactaaggctcgtacgtctgcatcgattatcttac

SEQ ID NO: 234291 - DNA, 76 bp, Homo sapiens
tcgggggcggcggccacgccaaggacggtttgctaatccagactttacacaacctatctcagaagttgtagatgaa

SEQ ID NO: 234292 - DNA, 75 bp, Homo sapiens
aagtgcggagccagcctgagttgggagaagagctccagagaatatgtgttgagacggattctccgccgagctgtc

SEQ ID NO: 234293 - DNA, 50 bp, Homo sapiens
ggaatctgtcttggaggacatcagaagataattgggaactgtgtctgtct

SEQ ID NO: 234294 - DNA, 98 bp, Homo sapiens
gaggagccagccttcaatgtgtcctacaccaggcagcccccaaatcccggcccaggggagtcctcagcactgcctcttctatttccctgtggaaacct

SEQ ID NO: 234295 - DNA, 98 bp, Homo sapiens
gagaatgagttaatctcctcagaaatcactaaatactactctgaggggcttagaaattaacagggatccatcagttacacaagtgacaagaaatgttc

SEQ ID NO: 234296 - DNA, 100 bp, Homo sapiens
agttgctctgtgtgctgagcgttctaaaggaaggcgtccgttggccttcgtacccgtcttgattgaggacagtcattttgtttactcattcagccctgtt

SEQ ID NO: 234297 - DNA, 82 bp, Homo sapiens
gtttgtcgaacgatgttggactcatagtcactgccagaaagtcaggatggctaaaggtgaccccaagaaaccaaagggcaag

SEQ ID NO: 234298 - DNA, 82 bp, Homo sapiens
acggagaagacgagggggcgtctgaggaggaagacctggaagacagatctgggcacagactccatcaagatggagaacgggc

SEQ ID NO: 234299 - DNA, 101 bp, Homo sapiens
ccgctgtcgggctggccatggcgaggggtgcacggcggccacctgagtggcgcggcggtgtcaggattcgataccagcatcttgccaatttgcaaggactc

SEQ ID NO: 234300 - DNA, 82 bp, Homo sapiens
ggggaactaatcttgtggcaggaagctaaggctgtggccacagcacagctcaaggagaaattgaagccatagtcgtgcctgt

SEQ ID NO: 234301 - DNA, 78 bp, Homo sapiens
cgttgcctgctcccggagggagacgcgctgccgaggagaacccagcgggtgatcaactgggagaacacgctccacatt

SEQ ID NO: 234302 - DNA, 50 bp, Homo sapiens
aatacaaacctgacaagggtaaagcttccttcaaaatgtctactgttcac

SEQ ID NO: 234303 - DNA, 83 bp, Homo sapiens
ggtttgggcgaccaggaggtgccggtggccgcgctcggacccgcgttgacagaaggctacgttggggccctgcacgagaatag

SEQ ID NO: 234304 - DNA, 98 bp, Homo sapiens
agtaacatacagcactttgtggagaaagtcgtcttccacttgcacgaaagctttcctaggccaaaaagagtttctctgcaggtggatattgttcccag

SEQ ID NO: 234305 - DNA, 100 bp, Homo sapiens
acatcaccacggagaaccagtaccggctgacctcgctgtacgccgagcacccaggcgactgcctcatcttcaaggttgaatcgctcctagctgacccctc

SEQ ID NO: 234306 - DNA, 75 bp, Homo sapiens
aagcacgggaagaagcagctggacccgctcaccatctacggcatccggtggagtgcatccgccccaacccttttc

SEQ ID NO: 234307 - DNA, 100 bp, Homo sapiens
cgcgcccaccgcgccgcatccatgttcgagtactccaaagattcaggtttactcacgtcatccagcagagaatggaaagtcaaatttcctgaattgctat

SEQ ID NO: 234308 - DNA, 75 bp, Homo sapiens
agaccaagtacctgcagatcctgacctctctgatgagatggatcgccctcccaggcccaatacttcaaagcatcc

SEQ ID NO: 234309 - DNA, 100 bp, Homo sapiens
ccagaagcagggccgcttccgcagcctggaggaagcactgaaagctgtggagttctacttcctttcccagtacgtgtcgccagccgactccccgttccgc

SEQ ID NO: 234310 - DNA, 75 bp, Homo sapiens
ggaccgggaggaaatcaaaccaaatttacatagtacatgacgaagttaaggataaagcttttgaactagaactca

SEQ ID NO: 234311 - DNA, 82 bp, Homo sapiens
tgtgctcgcgctactctctctttctggcctggaggctatccagcgccgccatggcatcagatgaaggcaaactttttgttgg

SEQ ID NO: 234312 - DNA, 101 bp, Homo sapiens
cttcatagcattcgcctactccgtgaaggtctacgacgttcctccatcggtgagcaaggatgtgcccgatggcccactgctgcgtgaggagacctacgatg

SEQ ID NO: 234313 - DNA, 50 bp, Homo sapiens
gagaggcctggaggacaccaacatggtgaacatgattaaagatgatggga

SEQ ID NO: 234314 - DNA, 134 bp, Homo sapiens
cgccgtgatccaggtgctgagccgggtgctgcggctctgcgcggtccccgccagcgccccatcctgagccgagctacagagacttctgaagtggagagtctgcgacctcctcggttcttcaatgaagatggagt

SEQ ID NO: 234315 - DNA, 90 bp, Homo sapiens
acgcactgtggatccagagacacaggcacgactagaagcattgctagaagcagcagtccccgcatcagagacttctcctgggcctccccc

SEQ ID NO: 234316 - DNA, 75 bp, Homo sapiens
gaaaaagtgctcctgggactccaggataccagaggcaaggtctcactcggtcatccaggttggaatgcagtggtg

SEQ ID NO: 234317 - DNA, 75 bp, Homo sapiens
ctgggataattatccaaataaattgcaagcattctatccaaatggaactgtggctgcaccatctgtcttcatctt

SEQ ID NO: 234318 - DNA, 82 bp, Homo sapiens
ttttggaagtgtgccagaattggaacatgaatctgaaggtggaagaacacctttgatgaaagctgcaagagctggtcatttg

SEQ ID NO: 234319 - DNA, 75 bp, Homo sapiens
gtcatccgcatcaacaagatgttgtcctgtgctggggctgacagacaaatggtggcccggagtttgctcgatacc

SEQ ID NO: 234320 - DNA, 83 bp, Homo sapiens
aaaaagacttcaagaaaaccttagaagagaagcatttagagagcatcagcaatagtgcggtggctactaaagttcgaaggcac

SEQ ID NO: 234321 - DNA, 100 bp, Homo sapiens
gttaatccccttgagccaaaaaatgcagaaaagctcaaggtgaagattgctgaccttggaaatgcttgttgggtgatcatcaccattcctggggtgaaaa

SEQ ID NO: 234322 - DNA, 100 bp, Homo sapiens
caaggcaccaagacgcaggggggatatccacagttcgatcaaggttcaaaatgagcctgtttggaacaacctcaggttttggaaccagtgggaccagcat

SEQ ID NO: 234323 - DNA, 83 bp, Homo sapiens
cctcaccaaggagtacgaccgcttgctggaggagcacgcaaagctgcagagggagacgctgttgcggcagctggagacgaacc

SEQ ID NO: 234324 - DNA, 83 bp, Homo sapiens
ccaggtgtaagcgcagaaagcaggcgaacccgcggcgcaataacggtgcgcgcggagccatggttatcatgtcggagttcagc

SEQ ID NO: 234325 - DNA, 95 bp, Homo sapiens
gaacaggaccccgtacgtcactaccactgtctctgctcacagtgccaaggtgtcgtgaaaactacccctaaaagccaaaatgggaaaggaaaaga

SEQ ID NO: 234326 - DNA, 50 bp, Homo sapiens
atttctggaaatgtccaaataatgattttaccaaatgttgcaagaactct

SEQ ID NO: 234327 - DNA, 50 bp, Homo sapiens
ccaaccctcccaagaagttcagaggactttatggacagcagcctgctaac

SEQ ID NO: 234328 - DNA, 75 bp, Homo sapiens
ccggctgcccactcgcctcacctgagcctggccggaagaattaacctcgagtctgcacgcttttaagaacaaggc

SEQ ID NO: 234329 - DNA, 82 bp, Homo sapiens
cacatcagcattttctgttgactgtaaaggtgctggtaagatttcttctgaaatgctgagccgattatcaggattagcaaat

SEQ ID NO: 234330 - DNA, 98 bp, Homo sapiens
aaggagaagaaggagaaggtggaggagaaggcaagccggaaagagcgaaagaaagaagtggtggaggaaactatggtccaggaggcagtggaggaagt

SEQ ID NO: 234331 - DNA, 99 bp, Homo sapiens
tctccatcagtgattgcccagaccaattggaagtttgtagagggcctgctgaaggaatgccgcaataaggagatctataaggacaggcagaaattctca

SEQ ID NO: 234332 - DNA, 74 bp, Homo sapiens
ctcacaggagaccaaggaatcccagaaagtggagttgagtgaatccaggaccctgatgctcccataagacagaa

SEQ ID NO: 234333 - DNA, 75 bp, Homo sapiens
cgccgaggcaccgaggcactcagaggagacctccttgaggcccgccgcccgcgggcccacgagtgcctgggtgag

SEQ ID NO: 234334 - DNA, 83 bp, Homo sapiens
caactacctgcactttggggagcctaagtcctggcagctgtgcctcctgctgaatgcggagaacatcttccactcaatggcag

SEQ ID NO: 234335 - DNA, 74 bp, Homo sapiens
gaatttggacgccgggagattgagattgcagagcaagggtgatcagcccatgacctaaacctccagacaaaata

SEQ ID NO: 234336 - DNA, 83 bp, Homo sapiens
cgcaacgagggtgctgcccgagttatcgggaccctgttgggtctcctgaaggaaaaggagcgcaaggcggccctgcctgcagc

SEQ ID NO: 234337 - DNA, 82 bp, Homo sapiens
gctggaattaggcaaatatggacagaaccctgatgccaacccacgccccacagcccaggacctggcagggttctgggacctg

SEQ ID NO: 234338 - DNA, 100 bp, Homo sapiens
acaggaaggagtttgagacactctgctcagagctgaccaggctgcacaagctgcttactctctctcggacacccccagaacgtgacctcatcaccccagt

SEQ ID NO: 234339 - DNA, 100 bp, Homo sapiens
gggcagcgcagctgagcagcgtgagaagatcaagcagttctcctggagttcgctgaggagcagctgcgagccgaccatgtcttcatttgcttccacaaga

SEQ ID NO: 234340 - DNA, 50 bp, Homo sapiens
cagcctcctgagtagctggaattacagaactcaagacatggctgcccagt

SEQ ID NO: 234341 - DNA, 98 bp, Homo sapiens
ggtgctccggggaggtcacctgacgaggagaacatatgctgtcaggaggataagagatgccttcagagaaaataaaaatgtaaaggatcctgtagaaa

SEQ ID NO: 234342 - DNA, 80 bp, Homo sapiens
gaggatccccagtatgcatctcaagatgtggacatggatttgattgacatactttggaggcaagatatagatcttggagt

SEQ ID NO: 234343 - DNA, 82 bp, Homo sapiens
gcctggttgcctgcagcggcccggacccgagagaaccttctgataacttaagagagattctccaaaatgtggccagattgca

SEQ ID NO: 234344 - DNA, 128 bp, Homo sapiens
cttgaggttcacagatgatacctttgatccagaacttgcagcaacaataggaaacttggatttaactggccagaagcaggtattcaaagcagagaacaatccctgggtgacccccattgcagaccagt

SEQ ID NO: 234345 - DNA, 51 bp, Homo sapiens
aagtcttctcccctgcacttcgctgcagctttggaggaattttttacatca

SEQ ID NO: 234346 - DNA, 74 bp, Homo sapiens
gcggccctggcggtgctagaagaccggttccagccgaacatgacggtgcgcgtggaattcatggacgacacgag

SEQ ID NO: 234347 - DNA, 98 bp, Homo sapiens
cgcaccccagcagcagtcagagcccgccagaccttcctctgaaggcaaagtgacctgtgattctctcgggcctagccgtccttggaacccgatattcg

SEQ ID NO: 234348 - DNA, 98 bp, Homo sapiens
gaactctggtggtttcaggaagagacctcatccttcaacagctgaatcaaaggctccaacaccaaagtttgacttattagcctcaaattttccacctt

SEQ ID NO: 234349 - DNA, 98 bp, Homo sapiens
cagaaacgagaacaacggaggcagaggagctgaagactccagtatgcaactgactacaaggagggtgaagagggaacagaaatctttgccccctgact

SEQ ID NO: 234350 - DNA, 82 bp, Homo sapiens
gaagccccaccaggagctaaaaaagccctagggtggtcccaaccatgtgatgtctggagcataggatgcattcttattgaat

SEQ ID NO: 234351 - DNA, 50 bp, Homo sapiens
tttctttccctgcaccaactagcagccatctgttgaatcttcaagtccag

SEQ ID NO: 234352 - DNA, 100 bp, Homo sapiens
tcaggaatctggtctcattgggtctacttccccagcaggacagcatcattctcctatatcttctagacatcactcatcttcctcacaatcaggatcatct

SEQ ID NO: 234353 - DNA, 100 bp, Homo sapiens
cccgcgctgcgcatccccgcggacgccacagcgctgtgagcgtggagctggccaaggtgcttctgcatctggaggagaagacctgtgtggtgggatttgc

SEQ ID NO: 234354 - DNA, 90 bp, Homo sapiens
gggcatgatgctgccgagggacttggggagcacagatcaccgaagtggccttggagtacaacaactgtcatggggaccaggtggtggagc

SEQ ID NO: 234355 - DNA, 100 bp, Homo sapiens
tccatcatcacatgaccaaagcattcctcttctatgagcccccctccatgcgcctgaaggcccgacccagcagccctggcttttccgtgcttacctgcag

SEQ ID NO: 234356 - DNA, 83 bp, Homo sapiens
cgcgtcggtgtccgcgtcgaggagccggggcagggcacgatggcggactgggctcggggatttacaaaaggtgcaggtatgag

SEQ ID NO: 234357 - DNA, 100 bp, Homo sapiens
tgaaatggtgttactaaacccagatgccgaagggaatccatttgatcattttagtgctggagaatctggtaatcctcacagccagaacatcagcagcaag

SEQ ID NO: 234358 - DNA, 98 bp, Homo sapiens
gttgccggagccgcggggcgcgggcggcggacagattgaccttcagagcgagataacttttaagtggtgaagagtataaatcgtggttttccaagtgt

SEQ ID NO: 234359 - DNA, 82 bp, Homo sapiens
tagtgcctctgcagagctcacagtcttggtttccagagtgtggattctttggcatgtatgacaaaattcttctctttcgcca

SEQ ID NO: 234360 - DNA, 100 bp, Homo sapiens
tgatctggcctcatctgttccagggaggtgggattgagttttccctgatgaatttcacctccagactttgaatccttttcttcgggcctgtgctgagtta

SEQ ID NO: 234361 - DNA, 100 bp, Homo sapiens
agctgtctatgttccattttggcagaaaaagacttttccaggggcaacaccctccactaaagagtcaagccagccggacgcattctcatctggtggggga

SEQ ID NO: 234362 - DNA, 100 bp, Homo sapiens
tttggctgaggagttttcaatcccaatttacactgactgggccaaccactacctagcaaaatcaggccacaagcggctgatcaaggacttgcaacaagac

SEQ ID NO: 234363 - DNA, 100 bp, Homo sapiens
gctggccggctccctcaccgatgtggccgtggagactcagcgccgcaagttcctggagacggtggagttgcagatcagcttgaagaactatgatccccag

SEQ ID NO: 234364 - DNA, 75 bp, Homo sapiens
tctctcattggcttctttgagactgaaatggcagagtacattctgggcactgtgcacaaagccaaaggcctggag

SEQ ID NO: 234365 - DNA, 90 bp, Homo sapiens
agccgccccgcgcccccgccgcgccctcaggccatggttgcttgttatccgggcaatggaacgggttatgtacgtcatgttgataatcca

SEQ ID NO: 234366 - DNA, 79 bp, Homo sapiens
tgacatttaattttagggtcctttatatagaagggagagtagaatatgcttttaaggctattaaccagggtggccttac

SEQ ID NO: 234367 - DNA, 82 bp, Homo sapiens
acagaaggactgggatgatacaccttttccacagggaattgagttgaaaacctcggatcaattctcagctggtggcacaaca

SEQ ID NO: 234368 - DNA, 80 bp, Homo sapiens
agatatctgcaatgatgtactgaccattgccctcttgaacatttaccgtaaccctcaaaactcttcccagtctgctgacg

SEQ ID NO: 234369 - DNA, 75 bp, Homo sapiens
gcggcgctggaggagcgaggcagctgtactaggactgggaacgggtatctctgcattagccagattggacatatg

SEQ ID NO: 234370 - DNA, 100 bp, Homo sapiens
gtttgaaatgaaacgaagccctgaagagaagcaagagatgcttcaaactgaaggcagccagggatcagagaaggctgaagaaggtggagaaactgaggca

SEQ ID NO: 234371 - DNA, 100 bp, Homo sapiens
gaaggaggacttgcagaagtaccacaacagggacacctggttccagctgcagcacgtggacgctgactcggaagtgcagttaccggtattgtaagaacaa

SEQ ID NO: 234372 - DNA, 75 bp, Homo sapiens
ccaggaccctcagggagagcgggcagccttccaggtggacaggatcaacactctgtggtaggccagaacacaggc

SEQ ID NO: 234373 - DNA, 96 bp, Homo sapiens
agcaggcctgaaggattaacatcaacagtactttgccagacgtttatcaaaatggggctgctgtcttctttcacttgtagtgacgagtttagctca

SEQ ID NO: 234374 - DNA, 100 bp, Homo sapiens
tgtcttcagatcttcacagcacagttcctgggaaggtggagccaccagcctctccttggtatggcctcacaagtcttggtctacccaccatatgtttatc

SEQ ID NO: 234375 - DNA, 98 bp, Homo sapiens
atcattgaggagaacactaccacgagcttcacctgggccttccagaggaccacttttcatgaggcagttggatgcctacagctgatcaatgctctcat

SEQ ID NO: 234376 - DNA, 100 bp, Homo sapiens
ttaaagcaattatgaaagaagtcattccttttttgaagaaaatggtgtgaatggaacattaacttcaaatgtagcagactctccccggaataaaaaagag

SEQ ID NO: 234377 - DNA, 93 bp, Homo sapiens
ctggagcagctgcggcggctcggggtgctctactggaagacacgctttcaccagcttcgagcccctcctcggtgacttatcctgtggtccccg

SEQ ID NO: 234378 - DNA, 75 bp, Homo sapiens
tggacgctcatcagagggaagatctttttcctcaattgggacaggccttcagtatttggcatcacctttacatgg

SEQ ID NO: 234379 - DNA, 100 bp, Homo sapiens
ctgagagagagcaagcgtttcagcgcctacaattacaggatttggagttccatggagtgatgagattttattttcaagataaagctgctggaaactttgc

SEQ ID NO: 234380 - DNA, 73 bp, Homo sapiens
ttctaattgctaatccagtatttgcggatagctccaaactgggatattgttctacgcagaaatagaagagctg

SEQ ID NO: 234381 - DNA, 121 bp, Homo sapiens
ctccggcccggtttccctcggcgtgctactgtgcgctcgatccagcaccatggggaagcgggacaatcgggtgcatgttacaccagacagctatattccatgccttgcagacctgtgcaaa

SEQ ID NO: 234382 - DNA, 100 bp, Homo sapiens
atccaacctgtatcaagtcttctaatctgtgaacatgacaacgactgaaagacctttcattcagaagctgtttcgtcctgtggctgcagatggacagttg

SEQ ID NO: 234383 - DNA, 100 bp, Homo sapiens
ttttatgtttgtacagcagttaggaagttcttcttctttttagatcctttaagaacaggacagtcattttgtttactcattcagccctgttgcaggtccc

SEQ ID NO: 234384 - DNA, 50 bp, Homo sapiens
tggattgctgacggcagccctctcagacgcccctgtcctggcaagagcta

SEQ ID NO: 234385 - DNA, 100 bp, Homo sapiens
cacttgtccagcgagccccactgctcggggaggaggagccacggccggggacagtccagttacaacacagggatcacaacaaacacaaccgccacagaag

SEQ ID NO: 234386 - DNA, 100 bp, Homo sapiens
aaggattgatgagaaaagcagatggttaagagctctacaacttctgtgagcatcaaggtttgggaccttgctcagcaggtggtactgagttcataccgag

SEQ ID NO: 234387 - DNA, 101 bp, Homo sapiens
tgaccgagaccgtgaccgagagcgtgaccgagagcgcgaatatcgtcatcgttagaaggtctctccaagtttgtgcctaagaagatgataatcacacaaac

SEQ ID NO: 234388 - DNA, 76 bp, Homo sapiens
aggaataataaaagttaaaacaattgctgcacgaaacactgaaattttggcagcctttctgagaaaagtctacagc

SEQ ID NO: 234389 - DNA, 82 bp, Homo sapiens
gtgctctttggccggtcacagcctgggcacagggtgactctcctattccatctgtttcttcgggatcatcttcacctctttc

SEQ ID NO: 234390 - DNA, 100 bp, Homo sapiens
acggcctggacttctatgtggtttggtcccaagcagtaaatctccaaaaaggcaattggaaccgactctaaagccattgtaggaccctcaagtgaaggac

SEQ ID NO: 234391 - DNA, 75 bp, Homo sapiens
ttgctgtcagccatgaacggatggatgtgatgcctgctagccaaaaggcatgcagcagaactgattaaaacagtg

SEQ ID NO: 234392 - DNA, 50 bp, Homo sapiens
cttcacaccccggacatccgcgccacacggcgacatggagtccaatggga

SEQ ID NO: 234393 - DNA, 90 bp, Homo sapiens
cgtcatcttcctgctcgtggccaacatcctgctggtcaacttgctcattgccatgttcaggtgacagaagcgctctgcggcccagtggac

SEQ ID NO: 234394 - DNA, 100 bp, Homo sapiens
gagtctgcagagacagtttgatcaagaccaaacctggaccacccaaaaagccgaagaccccttcaagaccatcagccttagcatattgctatcactgcgc

SEQ ID NO: 234395 - DNA, 97 bp, Homo sapiens
gttctttgtggatggacttgattctgatgagagggcaaaatggaatatgtttttgaattggatgttcccgggaaagtggaagatgttgtggagacgt

SEQ ID NO: 234396 - DNA, 98 bp, Homo sapiens
ctcccaagtagctgggagtacagggcttccttctgaactctccccagctattgaggaagaagagtcaaagagtggcttagatgtcatgcctaatattt

SEQ ID NO: 234397 - DNA, 100 bp, Homo sapiens
cctgtctggagcaaggaaaagatccctggaatatgaagagacacagtatggtagccacacccccaggatggaggaaccaggggacgccgctgtgccattg

SEQ ID NO: 234398 - DNA, 100 bp, Homo sapiens
cggtggccgccgcgcaggagcctcccggagctggtgtggacactgccagcggctgcagccgacttggaatgacctgggagacaaatacaacagcatggaa

SEQ ID NO: 234399 - DNA, 90 bp, Homo sapiens
gtgtgtttgcagtaagttgtgagatggtgattttacaacgagatgctgctctccatagggatgctcatgctgtcagccacacaagtctac

SEQ ID NO: 234400 - DNA, 75 bp, Homo sapiens
gagaagttccatgggggctgggccctcattgactgtgaccctaggttcgatacaagaggctgttttcctagcgtg

SEQ ID NO: 234401 - DNA, 100 bp, Homo sapiens
ctccctcatcactgctccgggtgaattctcaggcctcatgcattgtgcgtcagcagcaatgtttatggtgaaaaatggcaacgggaccgcgtgcataatg

SEQ ID NO: 234402 - DNA, 83 bp, Homo sapiens
aacgaatctctcaggctgcatcaggatgaatgatgacccaagtatggaagaagaggagttgtacgcatgtcagagaggttgca

SEQ ID NO: 234403 - DNA, 83 bp, Homo sapiens
ccggcctcaccatgttggtgctgtttgaaacgtctgtgggttacgccatctttaagtacttcctcgcgtattgctaaaggagg

SEQ ID NO: 234404 - DNA, 120 bp, Homo sapiens
gaagaccgcgcgcagggcctgcagcgggagctggacggcgagcgcgagcggcgcgagaaagaagccatcttcgacaagagcacagggaaggttgttttgaagacgttcagcctctacaag

SEQ ID NO: 234405 - DNA, 100 bp, Homo sapiens
gggacggagcggccggggcctggggctgcctgccgggcggccgggcgcggcgagcccagctgatgaacttattagtcctaaagacattgatcctgtccag

SEQ ID NO: 234406 - DNA, 90 bp, Homo sapiens
ggagggtagacctgtgggcacggacgcacgccactttttctctgctgatccaggcctggtctccaagtcctctcctaagaagcctcgtgg

SEQ ID NO: 234407 - DNA, 75 bp, Homo sapiens
ggacgccggcggcagatgagagcatccaacgattaatactgaggaacacgtggatgcagctgatcaggaggttat

SEQ ID NO: 234408 - DNA, 100 bp, Homo sapiens
gaccctccattctccgctgccctagcgcccatcccgcgccgggagcctgggaccctaacttggattgctgctctctgaacactatagtcgtcgaatctca

SEQ ID NO: 234409 - DNA, 100 bp, Homo sapiens
gaagtgctgcctggtgcagaggatcctggaggcctgggaagccaacgaccacacgcagcatctgcatctgggaccgacctcctgggctggctgatcaaag

SEQ ID NO: 234410 - DNA, 90 bp, Homo sapiens
ttcgcagtggtcgcttcttctccttggacccgtccctgctcctgaccatcaccgtcactggggtcactgtgctcgtgttggtcctgaaga

SEQ ID NO: 234411 - DNA, 82 bp, Homo sapiens
gatggtctttcctctgcattgctgatcttgtacttggattcagcaaggaaccttccgaaaggcctaaagaatgtatttgacg

SEQ ID NO: 234412 - DNA, 100 bp, Homo sapiens
cataaatgtctggctaatggcatttacaggaggatctagtgaaaagccatttgatgtatgcggtcagagaagaagtggaggtcctcaaagagcaaatcaa

SEQ ID NO: 234413 - DNA, 89 bp, Homo sapiens
acttattcacagttaccaaagctggaaagaccacagcaagattctttcattcgtctcctcctagcctgggggaccaggctcgaactgac

SEQ ID NO: 234414 - DNA, 100 bp, Homo sapiens
attacttcacaaacaagccttcagaatcagatgaatggaggacctttttatagccagaatccagcttgcatgctggctcagaaaatgaaagtgaacagtt

SEQ ID NO: 234415 - DNA, 76 bp, Homo sapiens
cccagatttctgtggcagaagatgatgatgaaagtcttggattagaagaacaagaaagactccacctactatggag

SEQ ID NO: 234416 - DNA, 100 bp, Homo sapiens
cagggctcgcgggtgaccgaaaggatcatgaactagtgacctggaaagatctatgcagttagatcagttgttcccaacaaaagcaataatgaaatagtcc

SEQ ID NO: 234417 - DNA, 96 bp, Homo sapiens
agaaggaatagaatgtcttcagaaacattccaagttttctgaaaatggtaaccagaagaatttgagaattctaagcttggagttgatgaaacttag

SEQ ID NO: 234418 - DNA, 100 bp, Homo sapiens
gtttgggcacctgcagcgacctacccactacaatacctcttgggactgggctcgatttgaggtgtttggagaagagggattgaccctgaatcttgaagac

SEQ ID NO: 234419 - DNA, 82 bp, Homo sapiens
gatcatgtctgcgagccaggattcccggggacggcaaaacagaacagaaaggcggagataaaaagaggggtgttaaaagacc

SEQ ID NO: 234420 - DNA, 100 bp, Homo sapiens
agagcagcagctacgggcagcagagtaacctgtgtatggtgactggaggtgctaacctaggaagaattggtgtgatcaccaacagagagaggcaccctgg

SEQ ID NO: 234421 - DNA, 90 bp, Homo sapiens
cagattcgcagtggtcgcttcttctccttgagttcaagctgaagaagatgtggaaaagtcccaatggaactatccggaacatcctggggg

SEQ ID NO: 234422 - DNA, 74 bp, Homo sapiens
cgggagggcgcgcggccgagcggaggcggagtcggcgccgagaacatggaggtcttgctggagttgctagaaca

SEQ ID NO: 234423 - DNA, 88 bp, Homo sapiens
ccgctgtcctcgtccccagcggtcccgcccaacgcccgactctgatcagctcagctactatttaataaaacaaaatctgtagaattca

SEQ ID NO: 234424 - DNA, 90 bp, Homo sapiens
ctggagaaatccagagttgtctttcaaatgaataatacggcagctagtccaatgtctactgcaacttcaagtagtggaaggagtacaggg

SEQ ID NO: 234425 - DNA, 51 bp, Homo sapiens
ctgcgcatctccaacagcgacctgagcgttacgttatgatgatgaagtgaa

SEQ ID NO: 234426 - DNA, 112 bp, Homo sapiens
cccagcaagagattaaagatgcagtacgccacggggccgctgctcaagttccagatttgatcacaaaatttgtccaggatagacatagagctagaagaaacagacttcgtaa

SEQ ID NO: 234427 - DNA, 76 bp, Homo sapiens
ttgtttctgtctcttgctacccacgtgaaaagtagtaagcattaataatgtctttcatctttgagtggatctacaa

SEQ ID NO: 234428 - DNA, 80 bp, Homo sapiens
taaaaggccctcagaccacaggattaatgcccagacacatggccccaggccaagcaccccatcaggctaccccgtggagg

SEQ ID NO: 234429 - DNA, 93 bp, Homo sapiens
cagttggaagcagccgatccagcctgcggagcctgtggggcaggtgctgactgggttacttttttaaacactaggaatggtaatttctactct

SEQ ID NO: 234430 - DNA, 82 bp, Homo sapiens
atccgaactgtcccctacacggacccagatcatgccagtgagaaagatcagtctaaagaaaaggagaagaaagtgaaaaaaa

SEQ ID NO: 234431 - DNA, 95 bp, Homo sapiens
caagagggcggcggcagcgggtcctacgaggagggctgtcagagcctcatggagtacggtagcccagccatgacccataggaatctgacttcctc

SEQ ID NO: 234432 - DNA, 134 bp, Homo sapiens
gaaatcagcagcaggtacaggcagtaattgatgccaatcttgtaccaatgataatacaccttttggataagcttcagataaaccagtcgatcattttctgtaactcctctcagcgagttgaattgctagccaag

SEQ ID NO: 234433 - DNA, 82 bp, Homo sapiens
ccgcctccagcaggacaatattcgcacccggctgaaggggtcgggccccggctcagtggtcccaggcagctcgggtgtcgga

SEQ ID NO: 234434 - DNA, 96 bp, Homo sapiens
ttggtttctatgatgcaaatgagaccgtcctggagatggaggagcaactgttctgggaggtgatcagtgatgaacatggcatcgaccccaccggca

SEQ ID NO: 234435 - DNA, 82 bp, Homo sapiens
aactgacactcgattcagctattggaaagtttttttaatgtggttggaacaactgagaaactggcgatggaatatgagagga

SEQ ID NO: 234436 - DNA, 75 bp, Homo sapiens
aaagcccccaaaagcagctattcaggactacaggaatatgtggaagctgtctcttttcaacacttcatcaaaaca

SEQ ID NO: 234437 - DNA, 82 bp, Homo sapiens
ctgattgctgtcatcaaccatgaccggccagatgtctgcatcctggtgaaatgacaatggatgctctgttggctcgattgaa

SEQ ID NO: 234438 - DNA, 98 bp, Homo sapiens
ttaaacatctatgtgcccatggaagatggtatggtgacatggtgccaaaaaccatagcagggaagatttttggttctatctgttcgctgagtggggtc

SEQ ID NO: 234439 - DNA, 100 bp, Homo sapiens
tgtgctcttgctgaggacccacaagaacttcgagatggattccaacatcctgctagacttgttaagaacggccggtttgtgggcgatgctgaccttgaaa

SEQ ID NO: 234440 - DNA, 90 bp, Homo sapiens
gcctagcagtcgggaccgtactgaggaatgtatcctgtcaggtataatgtcagtgaatggcaagaaagttcttcatatggatcgaaaccc

SEQ ID NO: 234441 - DNA, 82 bp, Homo sapiens
ggagaaggcacagcggctgtatccgacgccgcgagttcgcgggactggtgattgcagctggaagtgcccatgaccgagctgg

SEQ ID NO: 234442 - DNA, 100 bp, Homo sapiens
gaaagagctggggctccgcgaggaaaacgagggcgtgtataatggaagctggggaggccggggagagctatgctaagaaggaatctgatcttaatggcgc

SEQ ID NO: 234443 - DNA, 96 bp, Homo sapiens
aacagccagaccgagagcagcctgccggggcggaggctttattgaaaaggcttgaggccgtgaaaccaacagttggtatgaaacgttcagaacaac

SEQ ID NO: 234444 - DNA, 96 bp, Homo sapiens
agtttttttgaagaagcaggatgctgatctaaacgtggaaaaagcctggcgcaagcgctggtttgtcctccggcgaggccgcatgagcggcaaccc

SEQ ID NO: 234445 - DNA, 101 bp, Homo sapiens
tgtgtttctccattctgttggttttatgcatctttatccaatcaagtgcccttggacaaagcctgaaaccagtgtaaacaggaacatcgataagtagtgta

SEQ ID NO: 234446 - DNA, 100 bp, Homo sapiens
tgtaatatttcttttcactcccagggacaattccaaatgagggccttaaatgatgctcagctaagctggttcttgtgtggcctctgtaccttcaaaagct

SEQ ID NO: 234447 - DNA, 84 bp, Homo sapiens
gccagcggccgagcgggcggcttcctggcctgggcgctccggtggcggcggagatctctgttgaggagctggcgcggaatctgg

SEQ ID NO: 234448 - DNA, 96 bp, Homo sapiens
atctgaccattaagctggtgatcaaggcactcctggaaggtggctcttcagccaaaggcacagctctgcgaggccgctcagatgccgacctcgtgg

SEQ ID NO: 234449 - DNA, 74 bp, Homo sapiens
ataactcaacagaacttgctaccctcatcgaattcaacaagaagtttcaggagacagaggagctggaggaggag

SEQ ID NO: 234450 - DNA, 100 bp, Homo sapiens
ccacggtgttctcagaggagaagctgactttctctctgcgtctgatggagggcttttctgggaaagtgaggccaccatggctctggagaagtctcttgtc

SEQ ID NO: 234451 - DNA, 75 bp, Homo sapiens
tctggaagacctcagaagacctcctgtcctatgaggccctccccatggctttagccgagccgctgccgctcatgg

SEQ ID NO: 234452 - DNA, 101 bp, Homo sapiens
gaggatgttacagatgctggtcttaccacttatcatctccagtcttgtcacaggtgacttctgggggaacagaaagcatactgatggcctgcaaagcatat

SEQ ID NO: 234453 - DNA, 83 bp, Homo sapiens
ccttcatctaccatggctcagccgggaactctgaacctcaataacgagaaaggaagctgttgaagttattgaagtacctgttg

SEQ ID NO: 234454 - DNA, 76 bp, Homo sapiens
acccaaatacaggatgatagttcgtgtgacaaacagagatatcatttgtcaggatgttgcttcagagtgtgaagtc

SEQ ID NO: 234455 - DNA, 100 bp, Homo sapiens
aggtccggggcttgccctggtcttgctcggccgatgaagtgcagaggtttttttctgcatttacacagatgtggaagacatgaaagagcaagaaatagtg

SEQ ID NO: 234456 - DNA, 101 bp, Homo sapiens
cttcttcagaggctccgaggtaccatttctgaagccttctccttccaaaaagtttcggtctggctcatctttctctcggcgagcaggctccagtggcaact

SEQ ID NO: 234457 - DNA, 50 bp, Homo sapiens
gtttgttcaggaaccaccagtgacagacgaatgctgatgtcttaaaggcg

SEQ ID NO: 234458 - DNA, 100 bp, Homo sapiens
gttgacatctgacgacgtgaaggagcagatttacaaactggccaagaagggccttactccttcacagatcggtgtgatccctcacatccacaaatctctg

SEQ ID NO: 234459 - DNA, 76 bp, Homo sapiens
tccgtggagacccagggtgatgattgggacacagatcctgactttgtgggtcttactacatattgcaacagaagat

SEQ ID NO: 234460 - DNA, 100 bp, Homo sapiens
tggcagctgcccttagccctctgggaaactttaccctcccagaggtagctgagtgctttgatgaaataacctatgttgaacttcagaaggaagaagccca

SEQ ID NO: 234461 - DNA, 75 bp, Homo sapiens
cgaaaacagccaaaagaaaggccagcacctgaagaattgatgacggaaatggagagctggatttctccacttttc

SEQ ID NO: 234462 - DNA, 49 bp, Homo sapiens
ccctccatcttgcagcccagaagattctgaaggaagatttccattaggt

SEQ ID NO: 234463 - DNA, 82 bp, Homo sapiens
ggaaacctttccaacacagatgtccaagctgccaagaaggttgaggaccttcagttccgggttgaagaagaatcaattacca

SEQ ID NO: 234464 - DNA, 74 bp, Homo sapiens
gggaagtcgcctctgtgctcgtgagtgcatggggtataaggtacgtgcagcactacggcctgggcagtgcctgt

SEQ ID NO: 234465 - DNA, 80 bp, Homo sapiens
tggaccagaccatggccgcggccttcgcgagcagctgatgcagctgtacagtgcgcgccagcggcggcggctgaaccggg

SEQ ID NO: 234466 - DNA, 75 bp, Homo sapiens
tgctcgtctgatgagggacattgctacctgggcgatgccttccgctgtgccagctgcccctaccttgggatgcca

SEQ ID NO: 234467 - DNA, 82 bp, Homo sapiens
taggagccacctagactggatgcagagcatgtgttctagaacagatcagacattttgtaatgatgcctgaaataaacactaa

SEQ ID NO: 234468 - DNA, 75 bp, Homo sapiens
gggtggtggtggtggaggtccaggagaagccaaggccacctttgatgccatttctaagacctacagctacctgac

SEQ ID NO: 234469 - DNA, 98 bp, Homo sapiens
gtacatcaccgacggctaccgggcctacctgccgtccaggctgtgtatcaaaagtcaaggcctggccgacaacaccgttattgctaaagtaaataatg

SEQ ID NO: 234470 - DNA, 75 bp, Homo sapiens
ggaagggcacgttctcatcagcatgaacatccatgatagcagtcttctgtaaatcgaacttttcaagaattctct

SEQ ID NO: 234471 - DNA, 83 bp, Homo sapiens
ttgcagatcgggagcgcaaggtcgccctcaaggccatgatcaaaactacaatgcttgcacactgcacggtggaaaaggccagg

SEQ ID NO: 234472 - DNA, 75 bp, Homo sapiens
aacatggactgaagtatccagcgctcattgggaatttagttaaggttcacagagtgtttccaaatgggctggcct

SEQ ID NO: 234473 - DNA, 75 bp, Homo sapiens
aaggattccaagtaactcttatttgatacagcaatgatgtgacttctttgccttttttgctggagatccttacag

SEQ ID NO: 234474 - DNA, 100 bp, Homo sapiens
aacttggcagtggaagttttggaactgtctatctggtttcagacaagaaagccaaacgaggagaggaattgttgcagtattttacagagctagcccaagg

SEQ ID NO: 234475 - DNA, 74 bp, Homo sapiens
tttttcaatgagaagaatgaacagacctagtgggcgttgcctttagacccagatccagagccagagctctacct

SEQ ID NO: 234476 - DNA, 75 bp, Homo sapiens
aaagaaaacacttgatcctgatcctgccatccgacgtccagattacctctctagtgacccttcagctgttaaccc

SEQ ID NO: 234477 - DNA, 100 bp, Homo sapiens
tgggctgttgttgcggttgttttccttctctccgtgcaacgctggcaagtctcaaagtcgccacagagttaaacatgaagtttctggagagacagtggta

SEQ ID NO: 234478 - DNA, 101 bp, Homo sapiens
ctggaggctccgggcgcggggaagtcatgctcgcttcacggaggcaatagctagccgttaccttatcccatatcacacaactggtcctcagccataacaag

SEQ ID NO: 234479 - DNA, 100 bp, Homo sapiens
gtgctgacgacctgctacaacagaaatatcagttttagagaatgtggcgtggagaaattctcaaggaaagagtaaaatgctggtgatgtgctgagggaac

SEQ ID NO: 234480 - DNA, 82 bp, Homo sapiens
gacccctgctacgtggagaaaacctcggataaggtgccatcatggaagaacaggcagcagaactccttggagtgaagatgtg

SEQ ID NO: 234481 - DNA, 130 bp, Homo sapiens
tccctctgtgcggcggccggcgggaccataagggcttaactcatatatttaacccccctccaaaaagtactgagtttgagggtgcagtcatagctctgttccatttgttggccaccaggacggacaaagt

SEQ ID NO: 234482 - DNA, 82 bp, Homo sapiens
ggctcagcatctgctgcgaatctccggcctcgattacctaggaacagtacgatttggggttatcacaaataaacatcttgcg

SEQ ID NO: 234483 - DNA, 100 bp, Homo sapiens
ctcaacagagccaacatttcatagcaccatgtgcccatttcgaggccacaggtgttggtggcttcaaccactgtgctggagctcagcgaggccttcacct

SEQ ID NO: 234484 - DNA, 75 bp, Homo sapiens
aatggatatgaaaagtgaagaaagtgatcataggagaaaaccatttcaggtgctgcaacctgtactggatgtttg

SEQ ID NO: 234485 - DNA, 75 bp, Homo sapiens
gataattttgtggctgacaaagacacagtgctgctggagttttatgctccatgcaataccaagtttccaggcccg

SEQ ID NO: 234486 - DNA, 98 bp, Homo sapiens
tttgctgtctcctcctaatacggccttcttgtatcatggatgtgtcattacgtagcttctccctttgttgtgacttattaagtcaggtttgccagaca

SEQ ID NO: 234487 - DNA, 98 bp, Homo sapiens
gctcaggctccgccccctgcatgtctttgttggcaaacagttctgggggtcgtccgatcctgcaggtaatctgtaagtcagatgctccaacaggggat

SEQ ID NO: 234488 - DNA, 75 bp, Homo sapiens
gttctcagcagagaactcaagcacttggaggtgtcccaggaagtcagccattactccccagtggaatggatccaa

SEQ ID NO: 234489 - DNA, 51 bp, Homo sapiens
ctctacactattttccaaggagaggatatgatggatgatatctgtcaggag

SEQ ID NO: 234490 - DNA, 89 bp, Homo sapiens
ggcgcggggccctgcggtagcctcaggcccctcccctggacccgccgcagagccagccgctgttgtgacaagaaaagctgtggcaaccg

SEQ ID NO: 234491 - DNA, 98 bp, Homo sapiens
gtgggagcggccagctaggagcgctctgtggtgcctggggctgaacgcggctttctggtgtcatggagaaactccagctgggcccagagattctgcag

SEQ ID NO: 234492 - DNA, 75 bp, Homo sapiens
gagcgacatggacaaagccatcaagtatccatatattcctgcacatattacaaagcctaaggaacataagaagtt

SEQ ID NO: 234493 - DNA, 80 bp, Homo sapiens
gggcatagacttcaaccagcctttggtcatcaccagggatgcaaccagaaggcatcatctttgaagcagagaataaaccc

SEQ ID NO: 234494 - DNA, 71 bp, Homo sapiens
agagatggaacccgaagaagaaaggattcgttacagccagagattgcactgctcagcacgcaggcatgtga

SEQ ID NO: 234495 - DNA, 73 bp, Homo sapiens
cttggttaaaacctgacacttttaacaggtgtatgtggaatttgatgatcttgaatgggataaacgagagtgg

SEQ ID NO: 234496 - DNA, 100 bp, Homo sapiens
gactctttgcctgagttcacgatcattgagcgcttgaagctggtgcccctgaatcaggaaagtgtggaagagagagtggctgccttcagaaatttcagtg

SEQ ID NO: 234497 - DNA, 98 bp, Homo sapiens
tccctggctggacttgcggagtccccgccgaagaacccgaggcagaggtggaggagacactgaagcgactgcagagccagaagggagtgcagggaatc

SEQ ID NO: 234498 - DNA, 131 bp, Homo sapiens
ccaagacagagccagaatgttcaggatgctgaacagcagttttgaggatgaccccttcttctcgtgttctattactcaacaggaatcttcaaggatgcaggtgttcaacagcccatctatgccaccatcag

SEQ ID NO: 234499 - DNA, 85 bp, Homo sapiens
ggccaagaccttcgagaaatgcatcattgaagccgtgagctcagcctgccaggagaggagttcattacttcggaagtggtacaat

SEQ ID NO: 234500 - DNA, 98 bp, Homo sapiens
aacgtggacaaagctgttgtctcagggagcacagaaaaaaatcgttgcttatatgtatttggtggccagcgatcaaagacctatttgaatgatttctt

SEQ ID NO: 234501 - DNA, 90 bp, Homo sapiens
caactgccatttcaaagaatatagatggttttgaaaagttcatgctgtcccttcattgaattttaggtccaatgatgcatcagcagcctc

SEQ ID NO: 234502 - DNA, 75 bp, Homo sapiens
actggctgcgctcctttctggccggagctatgtgaaaacttctgagaaacttggagagtggaatgagaaagtgac

SEQ ID NO: 234503 - DNA, 87 bp, Homo sapiens
caaccacaagacgactcaataggaggaagaggtaccaatcttgggaaaaagaagcaacacatttgtcatataccaggatgtggtaaa

SEQ ID NO: 234504 - DNA, 74 bp, Homo sapiens
atgaatgtaatgcagtctgccacctatctgctcgatggaaagggaaagatcgaactggaagaaacaattaaagt

SEQ ID NO: 234505 - DNA, 100 bp, Homo sapiens
ctagacttcagatttaccagcctgattctcccttgaaaattattcaagaaggagccatggctctggacgggataaggatgccagatggctgctacgcgga

SEQ ID NO: 234506 - DNA, 74 bp, Homo sapiens
gtttggtgttcttgctaagattgtgaattacatgaagggtgtttgccagcttcccagtaaaaatgatgaaaaag

SEQ ID NO: 234507 - DNA, 87 bp, Homo sapiens
tggaacagaaacatagagaggaactggagcaattgaagctgactactaaggagaataagtttttcagttatgggacaaaaatattat

SEQ ID NO: 234508 - DNA, 96 bp, Homo sapiens
cgcctccttgcccgtgaccgtcgctagaactcagttgtgcgttgcggccagtcgccactgctggtcatcgagcagctcggtgggaagcagctggtc

SEQ ID NO: 234509 - DNA, 80 bp, Homo sapiens
ccaatcaggctgccaattgtggataagtacaagatatgatgcttcctggtgtgtttagtggttggtgccattccaatttt

SEQ ID NO: 234510 - DNA, 95 bp, Homo sapiens
gtgagcccggagcagctggctggctttgataagtacaaggtgagatttgtggatttaaaattcacgggcagaatgtcccctttgatgcagtggta

SEQ ID NO: 234511 - DNA, 75 bp, Homo sapiens
gctaccgggcccagcacagccagcaccgcacgccctgcaagggagaacggtgtgctgctgaggactgtcttggac

SEQ ID NO: 234512 - DNA, 100 bp, Homo sapiens
atacaaactgggtggacattacccaagattttgaagaagcttgtcgagggctcgtgcaatccgcttcagacaggatggtaacgaagccgtcggaggattc

SEQ ID NO: 234513 - DNA, 80 bp, Homo sapiens
ggattcgccgaggcaccgaggcactcagaggagaatgttcagcttaacaaagaaatgacacttgccagcaaccggagcct

SEQ ID NO: 234514 - DNA, 100 bp, Homo sapiens
gcacagctaagatgccaggacatcctggaagctgggaaaaggtgtgtagctgggacggtgctggtctgagctggaccttgtctgatggcttcctccaacc

SEQ ID NO: 234515 - DNA, 82 bp, Homo sapiens
ttcggcagtccacccaccgccgccgcctcccagatcaccatccatcttcaagaagctactttgaaagtctggccagtgtcta

SEQ ID NO: 234516 - DNA, 83 bp, Homo sapiens
actcggctcctgtcgtccgttctctcaggctcccgttcagggtaattttatggagtgtcagcccgagagcagcatctctcacc

SEQ ID NO: 234517 - DNA, 90 bp, Homo sapiens
ccctatattttaaaatgcttaaaacatcttaacccattgcactggttccaattaaagaaggggaatagcatttcaaggttcagtggagga

SEQ ID NO: 234518 - DNA, 50 bp, Homo sapiens
atgggactgaagggggatcatctagaagggtgaactgccccatgatcaag

SEQ ID NO: 234519 - DNA, 100 bp, Homo sapiens
ggctgtgcgggccccgctccgcttcgaatgggaagccagttgagggaagttctccatgaatgtacgtcacaatgatgatgaccgaccaaatccctctgga

SEQ ID NO: 234520 - DNA, 75 bp, Homo sapiens
tctcactctgttaaagctggtctgttctaactgaggctattttggcattctgctggatatatgttcgtaaatacc

SEQ ID NO: 234521 - DNA, 100 bp, Homo sapiens
cttaaatgacaatgaccttgctgttacctacttctttcatcagtgactgtgaagtgctgaccacactcaccccagacactggccgtatcctgtccaagct

SEQ ID NO: 234522 - DNA, 100 bp, Homo sapiens
cgacggcagcggtcccagcggcagcagcagcggcgggaggagcctccgggtcaagtaagggagaattgactacgcttatacatcagcttcaagaaaagga

SEQ ID NO: 234523 - DNA, 74 bp, Homo sapiens
ttaggccgcgagcgactgcggcgccgagccggtcaaaatgcagatcttcgtgaaaacccttaccggcaagacca

SEQ ID NO: 234524 - DNA, 100 bp, Homo sapiens
cggcatggctcctctccgagcacagggtacatgtcccagagcaagcacacggaggcccgggagctcatgtactcgggagccctgctcttcttcagccatg

SEQ ID NO: 234525 - DNA, 100 bp, Homo sapiens
cggggcctttatttctcgtcggcggcgccctgcaccgcgcctcgcaaaattctgaaggaagatttccattaggtaatttgtttaatcagtgcaagcgaaa

SEQ ID NO: 234526 - DNA, 75 bp, Homo sapiens
gctgatatcaacacggtcaacgtggacggcttgacagccctgcaccagatgcctgtgaggagccaccaacatttg

SEQ ID NO: 234527 - DNA, 100 bp, Homo sapiens
ccgtccctggattcggggctggacgcagcaagcggggcgctgtgtccccaagctccccgtcctcgggtgaaaggtgtagcagtcactcggcctacaccca

SEQ ID NO: 234528 - DNA, 74 bp, Homo sapiens
gactactgcgaggacaactatgtgcagggtgtcaaattgagaaccaggtagatccccaccacctacagtaaaaa

SEQ ID NO: 234529 - DNA, 100 bp, Homo sapiens
cctcaggcgtgcgcggacggtgtgcggtgtcaagctgagctcccagactctgatacaggctggggatgatgagaagaaccagaggacgatcactgtcaac

SEQ ID NO: 234530 - DNA, 82 bp, Homo sapiens
gaagatatatgaaaccggaacgaatcagtccgggacacgaggccatgatagggatgaggaagaaatgaccaaacgagatgac

SEQ ID NO: 234531 - DNA, 74 bp, Homo sapiens
ggcggaggtggaccggatgctcagtgccggtggtggtgtgcacattgagccccggtatagacagttcccccagc

SEQ ID NO: 234532 - DNA, 90 bp, Homo sapiens
aagacgaagtcaacagtggagtgggccaggtgagccgttctccaaccctttggcccccgatggccacgatgtggatgatcctcactcctt

SEQ ID NO: 234533 - DNA, 75 bp, Homo sapiens
tgagactcctgctcagtgtagcattaagaaatgctgagccgattatcaggattagcaaatgttgttttgcatgaa

SEQ ID NO: 234534 - DNA, 99 bp, Homo sapiens
attctgctgtcagccgatcacatcatcattgctactggagggcggccgagataccccacgcacatctacgaactgcgtgtgatggagaccaaacccgac

SEQ ID NO: 234535 - DNA, 100 bp, Homo sapiens
ggagatgcctgacgcatctgtctgaggagcggtcagtgacgcgatggagcgggcaagtatatgactgctgctgctcctatgcaagggacctacattcctc

SEQ ID NO: 234536 - DNA, 75 bp, Homo sapiens
gcggaagtggccggcgagcccggtccccgccggcaccatgctacgagagtacaaggtagtgggtcgctgcctgcc

SEQ ID NO: 234537 - DNA, 82 bp, Homo sapiens
aaggggaaccttggaatgaactgccagcaggcggtgtccatctcttcacagtcatggctgatcttgtcatccacttttggga

SEQ ID NO: 234538 - DNA, 90 bp, Homo sapiens
cggaggcttcgagtgacccgggtgccgaggagcgggaagagttgctggggtgcggctgaagatgctgtacgcggccacgcgggccacagt

SEQ ID NO: 234539 - DNA, 100 bp, Homo sapiens
catatgatttcagctgcaatggcaggatgccacagtgataccacacctcatggcactgcttagcaggtcccgctatacccaggagtacatctgtcagatc

SEQ ID NO: 234540 - DNA, 74 bp, Homo sapiens
tcacctttaactctccttatgctgggtgaaaacaaagtgacaaccatgagtggaaaaaactaattatggttcag

SEQ ID NO: 234541 - DNA, 100 bp, Homo sapiens
ggaagtggcctgaggccctcacctgaagccaagcagatgacagcaccaggcttcttgtatagcctgcagaaccggcaagtgtccagagaatggctgggat

SEQ ID NO: 234542 - DNA, 82 bp, Homo sapiens
ctcggaggagcggctgctgctgctgctgctgctgctggtggcccctttgcaggctccttcctcagagaagcttcctgttatg

SEQ ID NO: 234543 - DNA, 82 bp, Homo sapiens
catggggaagcgggacaatcgggtggtgtcgtgaaaactacccctaaaagccaaaatgggaaaggaaaagactcatatcaac

SEQ ID NO: 234544 - DNA, 74 bp, Homo sapiens
tgacggtggaggttcgcggctctaacggggctttctacaagggaactctaatgatccaggacaaagaagttacc

SEQ ID NO: 234545 - DNA, 75 bp, Homo sapiens
tgctgtgtgctggagggcactaccagatgggagatctcagggaacacagaggatatccctttggtgcgctggagg

SEQ ID NO: 234546 - DNA, 100 bp, Homo sapiens
cgccgcgtgtcctcggagcgcggtccctgtattggtctcctgctcctagagggaactctaatgatccaggacaaagaagttaccctggagtatgtatcaa

SEQ ID NO: 234547 - DNA, 82 bp, Homo sapiens
ctggttctacttcacactgcagaactgggttctggactttgggcgtcccattgccatggtttttagaacttcagccataaaa

SEQ ID NO: 234548 - DNA, 80 bp, Homo sapiens
accctggagcctcagttggaagcagccgatccagcctgcggagcctgtggggcaggaggtgtttgacaagcgagcagcca

SEQ ID NO: 234549 - DNA, 74 bp, Homo sapiens
cccgcttcgatcgcctcgcgccggctgctctttccggccatggccatgcagaaaatctttgcccgggaaatctt

SEQ ID NO: 234550 - DNA, 73 bp, Homo sapiens
cccatgcgagtacctgaggaaggatcggatgccaatggtgatggtgaccagggccatgagaatgccgcattgc

SEQ ID NO: 234551 - DNA, 80 bp, Homo sapiens
ccaagccgcggagcctccagacgggcctgagacctgggaggaagctggagaaaagatgccctctgaatctttgtgtttgg

SEQ ID NO: 234552 - DNA, 115 bp, Homo sapiens
gagcgctcctgtggggatgaaggccgagggcttcgtggatgccctgcaccgggtccggcagtaattcgccaaaatgacgaacacaaagggaaagaggagaggcacccgatatatg

SEQ ID NO: 234553 - DNA, 98 bp, Homo sapiens
ggcagtgctgaggcggaacaggccgggcaccaaggcgcagactcgtcctcccactgacttgagctttaactttgatgccaacaaacaacaaagacagc

SEQ ID NO: 234554 - DNA, 100 bp, Homo sapiens
agactacatttatgccgtaacaccgttacttgaagatgctttaatggatagggtggagagattcaaccagttagcgtgaaagttggagataaagttcttc

SEQ ID NO: 234555 - DNA, 100 bp, Homo sapiens
ccgtgaagggcattcagaaatacaaagcaaagattgtttttgcagactcagattgatggacaacttttcttaattaagcaccttttgatacttcgtgaac

SEQ ID NO: 234556 - DNA, 75 bp, Homo sapiens
aagaactgtaatacttctggaatccagacagaatggtacatgatgttgattgatggcacaaatgaagtttttatg

SEQ ID NO: 234557 - DNA, 100 bp, Homo sapiens
gtttcctgcgcgaccacagctatgcgaccgaaggtacaatccttggatttaccctccgaccatacagaatgagctaccgggaagtcaagtacttctcctt

SEQ ID NO: 234558 - DNA, 50 bp, Homo sapiens
gagccccgtaggagcaggaaatccacagttcgttttctagccaaggaaaa

SEQ ID NO: 234559 - DNA, 95 bp, Homo sapiens
cagattggaaacacactgatccggaaactaaatatattttgccaactttggaaaaagaattattcttggcagagcacagtgaccttgaagaaggt

SEQ ID NO: 234560 - DNA, 96 bp, Homo sapiens
cgctgcggacggacgctcgcctgccggctgagtgaacagagtatctgccaagcccgggcttccgtgatggtctacgatgacaccagtaagaaatgg

SEQ ID NO: 234561 - DNA, 75 bp, Homo sapiens
gtttggctgactggggagtcggcaggcggcagtatgatgggggatgatgaagatgcctgtagtgacaccgaggcc

SEQ ID NO: 234562 - DNA, 75 bp, Homo sapiens
cgcgactgggaggagcgccggaacgccgaggcccaggttttagatggagcaggattagatattgatttccatctt

SEQ ID NO: 234563 - DNA, 83 bp, Homo sapiens
caacggcgaggactgcctcaaccaggttttaaaatcaaagatgggaaaatcggagaaaattgcccttccccatggccagcttg

SEQ ID NO: 234564 - DNA, 97 bp, Homo sapiens
atgggcagaacgaattcagtgatatcattaagtccagatctgacaggtgatttggcttctgcacagttaggaggagcaccaaaccgatgggaggttt

SEQ ID NO: 234565 - DNA, 82 bp, Homo sapiens
gaggtgccgacatggggcttaagatgtcctgcctgaaaggttcacgtacggccacgcgggcaccatctacaaagacttcgtg

SEQ ID NO: 234566 - DNA, 90 bp, Homo sapiens
gcttcgtgaagctaatcaagcaattaatcccaagttgcttcagttggtcgaagacagaggttcaggtggtggagacactgccacttgctg

SEQ ID NO: 234567 - DNA, 75 bp, Homo sapiens
cgaggtgccaccgtggaaggacagaatggcagtacgtccgagacacagtcgtgggcaccatgggcctgaaggcca

SEQ ID NO: 234568 - DNA, 100 bp, Homo sapiens
acccctggctctataagctgaattatggcagcccagtcaagttgactaatctccttcagaatcaagcagtgaaaggaaaagttgctggagcactcctgag

SEQ ID NO: 234569 - DNA, 50 bp, Homo sapiens
ggcagatgttgttgaagataaagacaaggatgacagtgatgggattccgt

SEQ ID NO: 234570 - DNA, 75 bp, Homo sapiens
aaacatttcaactccctacagttgtgccatgcgacatctggaggacctgttgatgctagttcagagtatcagcaa

SEQ ID NO: 234571 - DNA, 83 bp, Homo sapiens
aatgaatgtttccatctcttcagagatgaaccagggactttgaacatgtcggggatcgccctcagcagactcgcccaggagag

SEQ ID NO: 234572 - DNA, 90 bp, Homo sapiens
acattttgtggaattcgtgaaacttgtccgtgccaaatttcctgaacacaccattatgtaatagctcttcaagtctgcaataaaaaatgg

SEQ ID NO: 234573 - DNA, 100 bp, Homo sapiens
aggactctattcagagactgaaggcactcaagagctttttaagattctgcatagtattttgttaaatggcgaaacccgtgaggctgctctcagttacatg

SEQ ID NO: 234574 - DNA, 100 bp, Homo sapiens
tgacaacggaggggtgcggcaagcctataaggtaatcttcagcaagtactgcaactccagcgacatcatggacctgttctgcatcgccaccggcctgcct

SEQ ID NO: 234575 - DNA, 82 bp, Homo sapiens
aatagtcagctacctctggactcgagatgaggggagcccagcagcaggggttggttttcagaagatcctgacactgacatat

SEQ ID NO: 234576 - DNA, 100 bp, Homo sapiens
cttgcatccagatcctgaggatgaggattcagatgactacgatggagaagaatatgatgtggaagcacatgaaacctccacagctgttgagaaaaaggag

SEQ ID NO: 234577 - DNA, 50 bp, Homo sapiens
tgttttcctcacattcctcaagcagctacaagtgtattcatcagagtttg

SEQ ID NO: 234578 - DNA, 100 bp, Homo sapiens
cctggaccccaacgaggtgtgggagatcgtgggcgagctgggcgacggcgccttcggcaaggtttacaagagagagccaggtagagctccgggaacaaat

SEQ ID NO: 234579 - DNA, 90 bp, Homo sapiens
tgttaaggattccaagtaactcttatttgatgcggaaaacgccatgcggtacataaatgggacgcgtctggatgaccgaatcattcgcac

SEQ ID NO: 234580 - DNA, 89 bp, Homo sapiens
cttccagtgccaaaccaaactggagctggtgcagcaggaattgggatcgtgtcgctgcgattttaggtgatgggcaagtcagaaagtca

SEQ ID NO: 234581 - DNA, 83 bp, Homo sapiens
ttcagcttcctctcgggcatgaccggaaaggccaaggagcggtggtgccccccccgggcacggggccatgtacaacgggatcg

SEQ ID NO: 234582 - DNA, 83 bp, Homo sapiens
cgtccgtccgccgccaccacccactccggacacagttacagaatgtctgaaggggacagtgtgggagaatccgtccatgggaa

SEQ ID NO: 234583 - DNA, 100 bp, Homo sapiens
aatgtggactgaccaaaaagcagctggacagcacaattggaatccaccctgtctgtgcagagctaatggttgcagagaagaatggaacaatccggtttta

SEQ ID NO: 234584 - DNA, 83 bp, Homo sapiens
cccaaatcagtctgaaagtacctgctatgaagtggcgctcctgaggtatctcagatgaagacatcatcaacattactcttcct

SEQ ID NO: 234585 - DNA, 50 bp, Homo sapiens
cgagccccagagcaatattccaggtggccaaagcattctggatggcaatc

SEQ ID NO: 234586 - DNA, 74 bp, Homo sapiens
ctggcctggtttgatactgacctgtaaatcatcctttaggtattacatgaaacctttcctaaacatacatttct

SEQ ID NO: 234587 - DNA, 90 bp, Homo sapiens
cggagagcacgagagacccgagttcatcgcctacccccatctccgcatcaggaccaaggcagaatccagagaccacatttgaagtatatg

SEQ ID NO: 234588 - DNA, 95 bp, Homo sapiens
caggactgcgcccccgggagcgggcgcccagagccgattacacctcaacaagaaggcaactgacaaacagccttatagcaagctcccaggtgtct

SEQ ID NO: 234589 - DNA, 95 bp, Homo sapiens
agacgcggggacgctggctcgctccctccctccctccctccgacgctggcgtctctggccgagcctctttttgtggaaaacgacagcagcagcag

SEQ ID NO: 234590 - DNA, 83 bp, Homo sapiens
tgggcgaaaattggatgtgaaaatgaagccagaccgagggatgttggtggtaaatgtaacgtggaggaacaagacatatgtag

SEQ ID NO: 234591 - DNA, 75 bp, Homo sapiens
ctggcacccagcacaatgaagatcaagatccagctccaggtcccacaggggctcttcttccccacgaaaaagatc

SEQ ID NO: 234592 - DNA, 100 bp, Homo sapiens
ggagatgatgatgaaattcagtttgatgacattggagatgatgatgaagatattgatgacggtgattctgggggtccacttgtctgtaatggtgtgcttc

SEQ ID NO: 234593 - DNA, 83 bp, Homo sapiens
gtcagtaacagccaagatgctgcggaatctgctgaatcatttgctgtttcaaatagagaactgtgcgatgatgagaaagagtt

SEQ ID NO: 234594 - DNA, 90 bp, Homo sapiens
atcaacatcatccacgtgcagacgctgacccaggaggcctctctgcgcttcactctgccgggctccggcactgaggggcccgccaagcaa

SEQ ID NO: 234595 - DNA, 98 bp, Homo sapiens
tccgagtcatacccccaggagtaagagcccatagcagtctgccagacaatagagcatatggatggagttcgctcttgttgcccaggctggaatgcaat

SEQ ID NO: 234596 - DNA, 107 bp, Homo sapiens
agaaaaccttagaagagaagcatttagagagcatcagcaatagtggatctccttacgtagcagccaaaataaatgaagcaaaagacttgctagaaacaaccaccaaa

SEQ ID NO: 234597 - DNA, 100 bp, Homo sapiens
cagctaccatagttgctattgatgaagaaagtcggaatgacttaattcagtgcacaaatgagatgaatgtgaacatcccacagttggcagacagtttatt

SEQ ID NO: 234598 - DNA, 50 bp, Homo sapiens
tacagctcatcatggatgcttataatccatcttctctacgaagagtgact

SEQ ID NO: 234599 - DNA, 82 bp, Homo sapiens
tggcctggaggctatccagcgaattctgtggccacactgcgaggagatcggttctgggtcggaggctacaggaagactccca

SEQ ID NO: 234600 - DNA, 50 bp, Homo sapiens
gtggttccatggtgcaatctcaagagagctggaagtacaccttgttggag

SEQ ID NO: 234601 - DNA, 98 bp, Homo sapiens
tcggtcccgcgctgcgcatccccgcggacgccacagcgctctgagctgactgctgcccactttggaggaggcggtgggctccttcacaagaagactca

SEQ ID NO: 234602 - DNA, 75 bp, Homo sapiens
tgaagtatcttcaaaaattcatccctgaaattactatcagtgatatacttagtgccgaaaacatttgaagagtcg

SEQ ID NO: 234603 - DNA, 101 bp, Homo sapiens
tgggattttgccttttggtaatgctgtttctgcttaagttggcaagacactccaagtttggcatgaaaggtactttagattgattgccgagcggggcagtt

SEQ ID NO: 234604 - DNA, 88 bp, Homo sapiens
cagagaaggagaggcagttcccgggtggaagagagggcgccctgcgtccggcagaggaggcgagcatcccgctcaggtgatgaggaac

SEQ ID NO: 234605 - DNA, 100 bp, Homo sapiens
cagagtgatgggaaacgcgtgagccaggccgagaggttcggctttccagtttggcagcagcactacaaatttcaacttcacaaacaacagtccatcagga

SEQ ID NO: 234606 - DNA, 83 bp, Homo sapiens
agatggcggatgccctgcagtacctgcagaaggtctctggagacatcttcagcagaacccagcgggtgccgcttctccacccg

SEQ ID NO: 234607 - DNA, 88 bp, Homo sapiens
gaaattctggaataaatttttggagaataaatccccttggaggaaaatgaccacagagtattcagccatggcctcgctggctggtggg

SEQ ID NO: 234608 - DNA, 73 bp, Homo sapiens
gctgttaacacttcctagataacggcctgctggagtatgatactgtgaccagggaagtaaaagttttattgga

SEQ ID NO: 234609 - DNA, 77 bp, Homo sapiens
ccggaccccgccccctgcggcccagcgcccccaggccatcgaagacggcaatttggaggaaatggaagaggaagtac

SEQ ID NO: 234610 - DNA, 82 bp, Homo sapiens
gaagacatgtccgagctgttccggcccttccacacgttgctgcggaaaataaggtcaaaatgcagatcttcgtgaaaaccct

SEQ ID NO: 234611 - DNA, 101 bp, Homo sapiens
gccagtataaatgcagtgacgatttgggatgatgaaattgttgcagacttttacgtagctgttccagaaataatgcctgaacttaatcgattaaggaagaa

SEQ ID NO: 234612 - DNA, 100 bp, Homo sapiens
ctcaagtgaagcaaaagccttccatgattactttgaggtggtatcaacatcctacagaagaagaattaagaattcttgcagggaaacaacaaaaagggaa

SEQ ID NO: 234613 - DNA, 97 bp, Homo sapiens
aaaattaaaagtcgtcttggagacaaggaagcagttctcaacaggcgaaattacaagagtccattgaatatgaagacttggggaaaaataattctgt

SEQ ID NO: 234614 - DNA, 100 bp, Homo sapiens
ccaatgataaaattcaagcggtcatcgatgcgggagtatgtaggagacttgtggaactgctgatgttgtgggctgcacactgcagaaagatacagctgaa

SEQ ID NO: 234615 - DNA, 90 bp, Homo sapiens
cgggagcctcgtggctgcgtcaccgccgcccccccagacaagatggacaccgcggaggaagggacgtccagatcggtgacatcgtcacag

SEQ ID NO: 234616 - DNA, 75 bp, Homo sapiens
ctttgaaatacttcttacaggctacccatgttcagccagcaatctgcacatcgtgctgccacacgaggcttcatt

SEQ ID NO: 234617 - DNA, 100 bp, Homo sapiens
aagtacaccgtggtgacattgtatcattggtccagtagacaagatttgactctggaggtgacgtctgagccaataggtatttggagtctggagaaaaagc

SEQ ID NO: 234618 - DNA, 98 bp, Homo sapiens
tggatcatcccccactaccccagacctcatcatcaactccatccaacacttcgtttactccgggcaagaatatcacggcatgggcatgagtagcttga

SEQ ID NO: 234619 - DNA, 95 bp, Homo sapiens
tctggaacaactggtgctgatggctcccttggcgaaggagtctgtttttcaacccaggaagtgccttaatacgtcctggtcgttttgacatgcaa

SEQ ID NO: 234620 - DNA, 87 bp, Homo sapiens
aacccactgtcttccccgtggttccaagactgctgaaccggatgtttgaccgaggcacacgtgtttcacgttgacaggtttgcttgg

SEQ ID NO: 234621 - DNA, 73 bp, Homo sapiens
gatatttggagttcttacaacatggcagacattgacaaaaactggcgatggaatatgagaggagccctctgga

SEQ ID NO: 234622 - DNA, 119 bp, Homo sapiens
caaggtgcccttaggggacctggatctatatgatggcacatacataactttggagagcaaagacatcaggatcgacgagaacgtgctaggagcccagctggacgttgaggccgcccatt

SEQ ID NO: 234623 - DNA, 51 bp, Homo sapiens
gagggttgtggagaagtttttgaagaggctcatcaacagagcagacgagca

SEQ ID NO: 234624 - DNA, 100 bp, Homo sapiens
caacctgtcaaagccttcttaattatgtctgagaaaaggatcaccccttctgtgtcattctctgaggaaaacaagttcttctcaaggaggaaagtctgaa

SEQ ID NO: 234625 - DNA, 101 bp, Homo sapiens
ctctggggactgcggccggcgccgggacctggaggggacgctggggccgaagcagcatgtgacaccgaccaggtgaatactgctatgcatgaggcaaaact

SEQ ID NO: 234626 - DNA, 95 bp, Homo sapiens
tggaacttttaagtggagtggtggatcagaccaaagatggggagctgacacgtttctcccagcacaaagttgggagtgacaccagagcctcctgc

SEQ ID NO: 234627 - DNA, 99 bp, Homo sapiens
ccacgtgcagacatctacaaccttcgatctcctgacgaattgatgactacagcatggttcgatttttaccttacgatcagtcagatgaagaaagcatga

SEQ ID NO: 234628 - DNA, 50 bp, Homo sapiens
caccaggactcctgacaaccaggaaggagaaacagggtttcaccatgttg

SEQ ID NO: 234629 - DNA, 76 bp, Homo sapiens
cttggggaaggtgtgtttcctcgccacaggtgtggaatgcagtagccctctgggcctgggatattgtggttgataa

SEQ ID NO: 234630 - DNA, 50 bp, Homo sapiens
gttggtgaaatctacagtttgcaagatagttttgaggcagctgtgccatc

SEQ ID NO: 234631 - DNA, 122 bp, Homo sapiens
gccgtacttctgattttgaaacacctgggtctgggcttcccgggcgagcggtgggttgaaaggattgttgacaaaaggaaaaataaaaaagggaagacagagtatttggttcggtggaaagg

SEQ ID NO: 234632 - DNA, 82 bp, Homo sapiens
tgctgcagtccaggctgaagacagagggctctgatctgtgcgacagagtttggtgcacctcgatttggaggaagtagggcag

SEQ ID NO: 234633 - DNA, 118 bp, Homo sapiens
gtggcgaacggggcgagcctggaggattgtcactccaacctcttttcgctgccgtgctatcaagactaatcaggaccttctcccagaaactccatggacgcacattttctacaatgat

SEQ ID NO: 234634 - DNA, 100 bp, Homo sapiens
taagactcgaaggcagcacaggacctggaaaaattacatgagccctggtattccttgaacatgcatacctttcccagcgtgagggacatggaccgtgccg

SEQ ID NO: 234635 - DNA, 75 bp, Homo sapiens
atttagagccaaactgtccaaggctttggcagtacgtcagcctgtcatatgcatcaacaaccatgtattttgttc

SEQ ID NO: 234636 - DNA, 83 bp, Homo sapiens
tgattggtagctaagactcccgaatacttcagaagtggggaaatgagcctggagacacaggccccatccttcccaatggggac

SEQ ID NO: 234637 - DNA, 100 bp, Homo sapiens
tacctcgtctcaaaacctggctgctatcagagaagaagggtgtttggggtgtgttttacaaaggacagtcattttgtttactcattcagccctgttgcag

SEQ ID NO: 234638 - DNA, 96 bp, Homo sapiens
tccgtgtgcggggaggtaacaagaaataccgtgccctgaggttggacgtggggaatttctcctggggctcagagtaataactgaagtgaagtgatg

SEQ ID NO: 234639 - DNA, 90 bp, Homo sapiens
ggaacatggcggatcggctcacgcagcttcaggacgctgtgaattcgatcctgtccctggaggctgtaatttggagttcgatttagatat

SEQ ID NO: 234640 - DNA, 75 bp, Homo sapiens
tttttgaagcctttgcaaaagaggaactctctggaatgaaaaataaaatacaagtagttgtgcttgaaaacgaag

SEQ ID NO: 234641 - DNA, 100 bp, Homo sapiens
cgtgtgcaacgcgctactggcccaggttgtacgtggacactataaaggtcagcaaattggcaaagtagtccaggtttacaggaagaaatatgttatctac

SEQ ID NO: 234642 - DNA, 96 bp, Homo sapiens
tgaaaagcgaagccgttagtcccttaatacaaaggaatccagactccaaaatgatgcaaatcaacctgactggatttttgaatggaaaaaatgctc

SEQ ID NO: 234643 - DNA, 74 bp, Homo sapiens
ctgccttctgctcagctgatgatggacaagaacatctaaatatattgctgtttgggttagcacaaaacctgcag

SEQ ID NO: 234644 - DNA, 101 bp, Homo sapiens
gtgaaactgatcagacgaactacgaacccctggacgggagagtctgccggcggagaatataaggtgctggagaatctggtaaaagcaccattgtgaagcag

SEQ ID NO: 234645 - DNA, 75 bp, Homo sapiens
tgacccaaaggctccaggcctgggggcctttagaaggaagtttattcagttccggcatgttcagaacaacctgat

SEQ ID NO: 234646 - DNA, 82 bp, Homo sapiens
gccctggggccggcgatgtgccaccgaggctgaggatgatggtagattgccaggtcaaaatgcagatcttcgtgaaaaccct

SEQ ID NO: 234647 - DNA, 100 bp, Homo sapiens
tttgtggaagatggcgcctgttgtgacaggggccaattcctgtccccccagcagcatggcatcgtgtgctgaaccctctgagccctctgccccactgccc

SEQ ID NO: 234648 - DNA, 50 bp, Homo sapiens
tgtacgcttcctcgcttttccagacaccaaccttctaccgtgtgagcccc

SEQ ID NO: 234649 - DNA, 100 bp, Homo sapiens
acatcgaccggcgacagcagccaggagtcatgagcgacagcggcgagcagaactacggcgagcgggagggagccatggatttgctgcgggagctgaaggc

SEQ ID NO: 234650 - DNA, 82 bp, Homo sapiens
cgagaccgcgtgcgaggaccgctacgagttccagggagctctgtcctggtgaccgtgcccgggttatgacgactaatcccaa

SEQ ID NO: 234651 - DNA, 100 bp, Homo sapiens
ggggcctagcgctatgcctgcggcggagactgcatcaggctctcgttacagaatgtctgaaggggacagtgtgggagaatccgtccatgggaaaccttcg

SEQ ID NO: 234652 - DNA, 82 bp, Homo sapiens
aggatcttcctctccctcgggacccaaggccacaaaggagagctccgtggagagaaggctatgactttgcagccgtcctgga

SEQ ID NO: 234653 - DNA, 98 bp, Homo sapiens
cgaggctggccggagcctgctggagtcgccgggactcaccagcggcagcgacaccccgcagcaggacagaattggcagcaatgaaacagattctcgtt

SEQ ID NO: 234654 - DNA, 74 bp, Homo sapiens
ccgcttagcctgatgctggaaggacgaagaccacagagtattcagccatggcctcgctggctggtgggctggac

SEQ ID NO: 234655 - DNA, 101 bp, Homo sapiens
gtaaatgggaaggacaggcagagctaaacaagtgtgcaggagaagagaattgggtggacagcaggaccatctacgtgggacacagggagccacctccgggc

SEQ ID NO: 234656 - DNA, 75 bp, Homo sapiens
gggctccctcgtgaagaacctgaaggacacactaggaggagacatcacagctttcccagatcgggaggaaaaata

SEQ ID NO: 234657 - DNA, 74 bp, Homo sapiens
ggagttgataatcagcaaagactgctacacattgtctggcctcacaggtggttatgaagacagtatggagtttc

SEQ ID NO: 234658 - DNA, 75 bp, Homo sapiens
cttgatcctcctcctaattgcagatggggcaccctggcatgcattatgccccaatgggaatgcaccctatgggtc

SEQ ID NO: 234659 - DNA, 100 bp, Homo sapiens
gggagcacagcacagacaacaaccgaacatacccttctatccaggagtccttcaataatgttaaacagtggctgcaggaaatagatcgttatgccagtga

SEQ ID NO: 234660 - DNA, 75 bp, Homo sapiens
cgggaactgctgacgcttgatgagaaggacccacggcgtctgttcgaagatgcagacaatctctttgaacatgaa

SEQ ID NO: 234661 - DNA, 100 bp, Homo sapiens
tgaattcaaaactatgtgggaggagcccagcaatctgtgtttcgcaaaccctccagagcgaaaagctgttgctatatgatacagtccagagtgaactaga

SEQ ID NO: 234662 - DNA, 100 bp, Homo sapiens
ttttgctcagcccttgtctcgggaccgcagggtgaggtggctttgaccccgggttgcccggccagcacgaccgaggaggtggctggacagctggaggatg

SEQ ID NO: 234663 - DNA, 75 bp, Homo sapiens
ccagcactggactcatggaggctgagcatttattcagttctacagcgagtcgggcatgcctaccaaacatctttc

SEQ ID NO: 234664 - DNA, 80 bp, Homo sapiens
aattacagctactccagcaacatcttgtccataaggctgaaccggcaagctccaaaagaagcacttgctcagtgtgtctt

SEQ ID NO: 234665 - DNA, 98 bp, Homo sapiens
ctgcttgacctcctaaatgcaacagcctgataggcagacactgatgtggagtgcaacctggccaaaagaagtaagacagcttgcagaggatttccttc

SEQ ID NO: 234666 - DNA, 101 bp, Homo sapiens
accgcacgcctcttctaccgggcgccccacgggccgaagccggaattgaatgatctggcacgggaccctccagcacagtgttcagcaggtcctgttggaga

SEQ ID NO: 234667 - DNA, 50 bp, Homo sapiens
ttccgttctgaccaacgaaaagatggttttcaaaattcacttctacagat

SEQ ID NO: 234668 - DNA, 87 bp, Homo sapiens
attattctgcaagacaaagggaagaaataaaattttcccatactgagatgcggaaggattgcaatgcccgccagcacagtggcggca

SEQ ID NO: 234669 - DNA, 73 bp, Homo sapiens
ttgtacacaactgtgatgctggagaattatcagaacctggtctggctggaggagaaggcagagcccccccagg

SEQ ID NO: 234670 - DNA, 98 bp, Homo sapiens
agttctccaatgatatctacagcacctatcacttgttccctccaagacaactgaatgcctgattacatcaaccccagagccgtgcagctgggctccct

SEQ ID NO: 234671 - DNA, 75 bp, Homo sapiens
cccgtccatcatagtcaactgcgtggaagagaaggagtggtgaaaggacataggaaggagtctggggaactgtac

SEQ ID NO: 234672 - DNA, 100 bp, Homo sapiens
cggcattcccatgagccacgttgcccggcaggttcgagatgtgaggatgatttctgacagaaattcaagacgttccaaaggaattgcttatgtggagttc

SEQ ID NO: 234673 - DNA, 82 bp, Homo sapiens
tgaagctgccgttctttaatatgctggatgagctgctgaagcccaccgaattaggttgtgaccgagattcccgacgagagag

SEQ ID NO: 234674 - DNA, 100 bp, Homo sapiens
aagctactcaatacgcgccacaacgtccgactgcactcacacgacgtgcgctatgggtcagtggtttgagtccagccaatgacactggagccaaaaagaa

SEQ ID NO: 234675 - DNA, 82 bp, Homo sapiens
tcaatatctgtcttcggtggactccttcggcagtccacccaccgccgccgcctcccagtgggaatgtaagacggacttagat

SEQ ID NO: 234676 - DNA, 100 bp, Homo sapiens
ggcccaaaacccacagaagttgtattagatgatgacagagaagatctttttgcagtttgttgcatattctaaggacccagacataggcttggtggcccgt

SEQ ID NO: 234677 - DNA, 100 bp, Homo sapiens
gaggggctccggctggtctgtggtgagatatgcacccaatgtccagggagcgtgcaaaatttgtcaaaagtggccttttattgtaaaacgacacgagagc

SEQ ID NO: 234678 - DNA, 82 bp, Homo sapiens
gtctctctgctgcggcgcggggaccgctgtgctctcgcattccacgcctacgggaaggcaggcaagatgctggtggagacca

SEQ ID NO: 234679 - DNA, 100 bp, Homo sapiens
acgtgagctgggccctgggccagaggcagaaaacggacggaagaaaaggtctggccgagctccagagattatattggggttgccattttgtgaagccata

SEQ ID NO: 234680 - DNA, 101 bp, Homo sapiens
gccgtggggacgccggagaactgtgcccattacttctgcctggactgcattgtcgaatggtccaagaacaccttccaccatgaccacctcagcaagttccc

SEQ ID NO: 234681 - DNA, 100 bp, Homo sapiens
tttataaactgcctggccgaatcagccttttcacgctcaagaatcctcactatggatgggctcattgaggacattaagcatcggcggtattatgagaagc

SEQ ID NO: 234682 - DNA, 99 bp, Homo sapiens
tgatagctgtacgtatgaagcaatgtataatattcagtcccaggcgccatctatcaccgagagcagcacctttgaactgtcatacataaagtacacaga

SEQ ID NO: 234683 - DNA, 75 bp, Homo sapiens
aactacctaatgttatacaggctctggaaaaacatgaaggtaactaaatgaccatggaatctggagccgagaacc

SEQ ID NO: 234684 - DNA, 100 bp, Homo sapiens
ttcgagcgccgcggacgcgtcatcgagtgtgacgtggtgaaaggccggaagctgagaggaaaagccttttattttgtcaacggcaaagtgttttgtgaag

SEQ ID NO: 234685 - DNA, 99 bp, Homo sapiens
cccagaaccactgcctacaaaccaccctctcctgaccctgaagaactgtggataaagtggccagtgtgtacgaagccccgggctttttcctggacctgg

SEQ ID NO: 234686 - DNA, 100 bp, Homo sapiens
ctcagaagagtggagggagcgaatcgccaacacgagtggagacctttggcgacttggcctttggcgacatcttcctccacctgctcacgggcaaccttgc

SEQ ID NO: 234687 - DNA, 100 bp, Homo sapiens
cggcgctcgagggaccatggccgatcctcgcgtgagacagatcaagatcaagaccggcgtggtgaagcgagaacattacgtggtagaggtcaagcttcca

SEQ ID NO: 234688 - DNA, 99 bp, Homo sapiens
tttagattcagctaaacgtgggtttcttactaaggacgagctgatcaagtatatgactgaagaaggattgtcttcaaggaaagtggtgttaaatacaaa

SEQ ID NO: 234689 - DNA, 50 bp, Homo sapiens
ccggagaggagtggcctcgcccgcttgagtgtgaacatggctacgcctct

SEQ ID NO: 234690 - DNA, 101 bp, Homo sapiens
ccagcggcagaacccgagtatcctaaaggcatccgggccgtgctgctggggcctcccggggccggtaaagggacccaggtctgccatcatggatgttctcg

SEQ ID NO: 234691 - DNA, 60 bp, Homo sapiens
aattccattcttttccttattcttctgatgtggatccagatccataaatggactaggaca

SEQ ID NO: 234692 - DNA, 100 bp, Homo sapiens
gggaagccagagctgactgaagattatctttctcaaggaatagatctttctggaatagaagtgatagaaaatgatctactttttattgcaagagcccgac

SEQ ID NO: 234693 - DNA, 100 bp, Homo sapiens
acgaggaagaggaggtttctgagattttaggtgatgggcaagtcagaaagtcagatggatataactgatatcaacactccaaagccaaagaagaaacagc

SEQ ID NO: 234694 - DNA, 75 bp, Homo sapiens
cgaaatgctgaagcgctgtaaaactcagcttaaggtggacccaagtggagagattgtggaactggcgaaaggtgc

SEQ ID NO: 234695 - DNA, 83 bp, Homo sapiens
aagctactactacgtggtgcttggaaaggctttatcctgtggataaacgcagagtgaacgagtttggggagtcctacgaggag

SEQ ID NO: 234696 - DNA, 51 bp, Homo sapiens
acagaatggaaaatatgagaccgggcaggctggagtgcaatggcgtgatct

SEQ ID NO: 234697 - DNA, 100 bp, Homo sapiens
cggtgccagcacctttcggcttctgagacggcggcagcagcggcattcagggtctgaaaagccctcaagaaagcctcagtgatcttggtgccatagagag

SEQ ID NO: 234698 - DNA, 80 bp, Homo sapiens
gcggacatggtcatgagctttgtgaacctgggaactctgcgaccttcaagtcgtttgaggaccgagttgggaccataaag

SEQ ID NO: 234699 - DNA, 107 bp, Homo sapiens
gtctcagtccgaccgggctagctttggcgaggggacggagccggatcaggagccgccgccgccatatcaggagagattaaacagattctagaaaatgaacttcagat

SEQ ID NO: 234700 - DNA, 82 bp, Homo sapiens
agatactgcttggttggagatcatgaccaaatatgctgtgggagaagagtgtgacttcgagttgccctcaaattggctgtag

SEQ ID NO: 234701 - DNA, 75 bp, Homo sapiens
cccggctccggcggacccttctccggcagaacccatcttttacttcggtgatgtggaatactctgtggatgagag

SEQ ID NO: 234702 - DNA, 75 bp, Homo sapiens
ggcaggaaccgggaccgccagcgcaggaggtggagaaaatcagaattcttttgcgtaatgttgatctgatggata

SEQ ID NO: 234703 - DNA, 83 bp, Homo sapiens
agcctgcgtaactttctcccttgatccgggagtctttccactggggtttggacagaggagccaaaggccaaatttccactttc

SEQ ID NO: 234704 - DNA, 100 bp, Homo sapiens
atccgcacccacacgggcgagaagccctacgagtgcaacatctgcaaggtccgcttcaccaggtgctactcgtgagcagtagtcgccatccagacagatg

SEQ ID NO: 234705 - DNA, 100 bp, Homo sapiens
agaaagtactccaagatgatagaatgattttaaagttatgggactacaacagcagccacaggaaccttgaagttcaaggcagcttgcctcgagatttcat

SEQ ID NO: 234706 - DNA, 98 bp, Homo sapiens
cggagcgagagcgagtgcctgagcaacatccgcgagttcctgcgcggctgcggggcttccctgcggctggaggcgcagtgagcctgcaggccgacctc

SEQ ID NO: 234707 - DNA, 51 bp, Homo sapiens
gaagctgcagccgcacctggccaaggttctcgaggctggacagtccaagat

SEQ ID NO: 234708 - DNA, 100 bp, Homo sapiens
actcccccatcgtatgaatcttttgccaggcagtatagcaggaatgagcccctgacctttgcatggttacgccgatacatcaaatggcctttacttccac

SEQ ID NO: 234709 - DNA, 80 bp, Homo sapiens
accagttcgatgttgtgataaggtgtcagcttcctctggtgcaaccagcaagtcttccagtatgaatcccacagaaacca

SEQ ID NO: 234710 - DNA, 51 bp, Homo sapiens
gcccggaccagcctgccccggcgccgagaaaatatttacaccagcagctcc

SEQ ID NO: 234711 - DNA, 88 bp, Homo sapiens
gagaggggagccggcgaggatcaaaatcttcgaaggaggtgtcgggcggccgaagcacatgcgggtgatggctggagccctggagggg

SEQ ID NO: 234712 - DNA, 98 bp, Homo sapiens
gtggaaacgcttgtagggtttcaccagggttgaaaggaggagcaggaggtactgatggacaaggaggtaccttccggtacacctttcatggcgatcct

SEQ ID NO: 234713 - DNA, 110 bp, Homo sapiens
gggcaccgcaggttttggactcgctgaagcgtggtgaactatgacaatgtagtggacacaggttctgaaacagatgaggaagacaagcttcatattgctgaggatgacgg

SEQ ID NO: 234714 - DNA, 83 bp, Homo sapiens
attggatgtgaaaatgaagccagaccgagtctcacaccattttgctggtacagcctaccaagaggccagaaggcagaacttat

SEQ ID NO: 234715 - DNA, 121 bp, Homo sapiens
gagctgctgcttccttcggccttgtccgagcaaacagaggcgctcatccacagagccacatctgttaggttgaatttcaggcaggatctgaaggccaacttctgcctcagcattatctaaa

SEQ ID NO: 234716 - DNA, 100 bp, Homo sapiens
cggatggccccaggtgtaagcgcagaaagcaggcgaacccgcggcgcaataacgcctgccctcaagtatgtgttgtatacattggttggctttgtgggtt

SEQ ID NO: 234717 - DNA, 100 bp, Homo sapiens
gctgcctgtgggaagcccgccctggttggagctgcagtttcctaccagtttgctgccactgcagagccccgccatggaagacacgccgttggtgatatcg

SEQ ID NO: 234718 - DNA, 50 bp, Homo sapiens
gtgaagtgggagcagatatgtcacacggccatggttgcttgttatccggg

SEQ ID NO: 234719 - DNA, 95 bp, Homo sapiens
tctttaaaattgactggatttgcagctttctacaagttctgattaaagtcagaaatagacacaatgatgtggttcctacaatggcacaaggagtg

SEQ ID NO: 234720 - DNA, 100 bp, Homo sapiens
ggagcctttgatgaagtgacctcatgcctggtgaaggtgccagagaagacagaaggtggcaacaacatggctctgaacctgacagagttcaacactgccc

SEQ ID NO: 234721 - DNA, 88 bp, Homo sapiens
tctttatacccaaactactgatgccttgataaagaaattcatagatactcaaacctcacagaccattcgttcctggttaactcggaaa

SEQ ID NO: 234722 - DNA, 83 bp, Homo sapiens
atgaaagttccatatttaagtagtctgcttcagcctttttcaggtaactgtgacatttgatgatgtggccttatatttttcgg

SEQ ID NO: 234723 - DNA, 76 bp, Homo sapiens
gaagaaaagaaaggaatccgtaaagacccatttctctatgagtctcacaccattttgctggtacagcctaccaaga

SEQ ID NO: 234724 - DNA, 75 bp, Homo sapiens
cgtcagtccctgctctgtgcgcgcctccatctgggccatggatggttgctgatatgtgttcaagatgagtgggat

SEQ ID NO: 234725 - DNA, 98 bp, Homo sapiens
cccaccgtacttgcaagaaagcagccccagaggggggacacagcgattgccacgcgccattggaatgtccctggccaaggagctcatattctctgcgc

SEQ ID NO: 234726 - DNA, 80 bp, Homo sapiens
cctgctgctcgccgcgtcctgcgcctggtcagggctgaaatctctttaatgatggagggaagcaggcagacgcgagtgtc

SEQ ID NO: 234727 - DNA, 83 bp, Homo sapiens
gctactgcgaagacagctggcagatgatatcatcaagttgaatcgaaaggaagggaagaagcagaattttccaagactaaata

SEQ ID NO: 234728 - DNA, 87 bp, Homo sapiens
gaacctgacctggtttgaattcctgtcggacagcagccgctcttctaaaacattcaaaccaaagaagaatatccctgaaggatctca

SEQ ID NO: 234729 - DNA, 43 bp, Homo sapiens
ggcctgactctgggagcacgcacgagcagctgatgcagctgta

SEQ ID NO: 234730 - DNA, 50 bp, Homo sapiens
cgtccccgaccttgcctgaacaagagtccgaaattgaagttcagaggaag

SEQ ID NO: 234731 - DNA, 100 bp, Homo sapiens
gtttcttttccggccctgggatgtcacggacagtcattttgtttactcattcagccctgttgcaggtcccaataaactcttcataaggttgacagaagca

SEQ ID NO: 234732 - DNA, 75 bp, Homo sapiens
aggagagaggaggaggagtgcggcgcggcggccccgggaccaaggaggtttgacatctacaggaaggtgcccaag

SEQ ID NO: 234733 - DNA, 100 bp, Homo sapiens
ccgacatgctgacatctctccaggagagaaactcacgctctctcaccagaactcagagtcttcctaatattaccagtgttccttgcctgtatctcccctt

SEQ ID NO: 234734 - DNA, 101 bp, Homo sapiens
tgtgcttccgagtaaggctcactaaatacctctatgaggagtatcttcatttttccagaaaggaggagtcaaggaagcccttagtgaacgagaactcttca

SEQ ID NO: 234735 - DNA, 50 bp, Homo sapiens
atgggaatgttcaattccatgccgagtgatagctactttcacatgttcag

SEQ ID NO: 234736 - DNA, 96 bp, Homo sapiens
agagagcctggaacttgcaccagaagattgttgaagatgctgttgagcaaggccgcattgacaggaagattgagttccccctgcctgatgaaaaga

SEQ ID NO: 234737 - DNA, 51 bp, Homo sapiens
caggcagggccggccaaagcaagatcagggagtggggaaggccagggccag

SEQ ID NO: 234738 - DNA, 100 bp, Homo sapiens
cagcagaggagaccctgggagtcagggatggacaccaggtgatggcttggacaacagtgtagcttcccccagcacaggtgacgatgatgaccctgataag

SEQ ID NO: 234739 - DNA, 82 bp, Homo sapiens
cgtccgacgaggatatcgtgtctggagcagtggagcccaaagacccctggagacatgagctgtttcccattcagatggaggg

SEQ ID NO: 234740 - DNA, 96 bp, Homo sapiens
aagatggccgtccatttcactatctcttctatactggcaaacagtcatactattcattaatgcataaggtagaagatagcaccatgccgattcgtc

SEQ ID NO: 234741 - DNA, 74 bp, Homo sapiens
ccggacccaaagtgccatgtctttaatgtcatcatcagatttgaaatatttaaagtggatacaaaactatttca

SEQ ID NO: 234742 - DNA, 50 bp, Homo sapiens
ttgaaagaatgtctaactgcttatgataatatgcagcatgcatactggga

SEQ ID NO: 234743 - DNA, 73 bp, Homo sapiens
aaaggagtgtccagaaaagagtagcagcagtgaggaagagctgccgagacgcggagcgtgctttggacaccat

SEQ ID NO: 234744 - DNA, 82 bp, Homo sapiens
agcctcagttggaagcagccgatccagcctgcggagcctgtggggcagggaaaacttgttattggacacaatatgctcttgg

SEQ ID NO: 234745 - DNA, 83 bp, Homo sapiens
aacgcagcccgtgcctgtgaacctcggcggtgcgtccctgggactctgctccgtgaggttctgtttcaagctgattccagcca

SEQ ID NO: 234746 - DNA, 75 bp, Homo sapiens
ctaaaacgattgcagagccttggggtgcccggtgcggctgcttcaaggtttggagcaggtatgttaagaagttag

SEQ ID NO: 234747 - DNA, 73 bp, Homo sapiens
ccaccttctgaaagaaatggcacttcatcaacttgtcaagagccctatgagtttgtctctctggaatggctgc

SEQ ID NO: 234748 - DNA, 50 bp, Homo sapiens
agcttgtgaaactgagggaataggtgcttgaggaatccaaagccctcgtg

SEQ ID NO: 234749 - DNA, 51 bp, Homo sapiens
gacaccggcgaggaacttggcaggagcagtgaggagaatgaataccttcca

SEQ ID NO: 234750 - DNA, 110 bp, Homo sapiens
aggccgaggagacgcgggccttcgagcagctcatgaccgacctcaccctgtcgcggacttcccaagtaagaagcggaagaggagccgctggaaccaagacacaatggaac

SEQ ID NO: 234751 - DNA, 100 bp, Homo sapiens
caaggctgtgtggttcaaaaagtggatgtttgtgaagaaatatgggaacctttttagcttggagcttggtgacatatctgcagttcttattactggcttg

SEQ ID NO: 234752 - DNA, 83 bp, Homo sapiens
cacaaaagatggcatctggctggttcagcaaaatgatgcttcaacacccaggccaggtctctgcctcggaagtgagtgcttct

SEQ ID NO: 234753 - DNA, 100 bp, Homo sapiens
gcctgcccgacggctctcctctgactgcagcgtcactcaggtgaaacagctgaggaatcgggcagatgaagatgctcgaatgattcacatgagtatgcag

SEQ ID NO: 234754 - DNA, 75 bp, Homo sapiens
agattctcaagaaaatgaagaaaaagcttctgaatatagagcatctgaaatgaaggaggaagaggagcgaaggcg

SEQ ID NO: 234755 - DNA, 102 bp, Homo sapiens
ggacagaagatggtgcagaagaaaccagccgaacttcagggtttccaccgttcgttcaaggattatatctgtccaagatgcgagtctggttttatcgaggag

SEQ ID NO: 234756 - DNA, 74 bp, Homo sapiens
ccttacccttcgctcccagcccagctctttgacctcatctaccgcgaggagacgctgttcaacgtcatcaagag

SEQ ID NO: 234757 - DNA, 95 bp, Homo sapiens
gaacagtttccggtcaatgagcactattttggattagtcaatgtgttggaaatcaatagctcttctagcctttgcattgtttaaatataatagtg

SEQ ID NO: 234758 - DNA, 82 bp, Homo sapiens
cagcggcgcccgcagccgcagccccctgctccggaggctggtgcaggtctcggcgcggaagatggccggcggcgtggacggc

SEQ ID NO: 234759 - DNA, 83 bp, Homo sapiens
tcagtggagaagctgagcagagatggagctttcctcatggatgcaggctctgaccctgatgctcccataagacagaaaatgcc

SEQ ID NO: 234760 - DNA, 75 bp, Homo sapiens
gggctttcgtcgcgagatggaacgctgggtgaggccgcagcgtttgatgacgagtggcggcgggagacctcccga

SEQ ID NO: 234761 - DNA, 98 bp, Homo sapiens
tgaagctcatcatgaccttccagaattacgggcaagcgctgttcaaacccatgaagtacttcgtactggatttcgaggctggcatcctgcagtatttt

SEQ ID NO: 234762 - DNA, 90 bp, Homo sapiens
gaagacctcactgaccccagagtggcagaaaggctgatgcagcagatggtgatggaatttcctgataatgtgttaaatctcgatggacat

SEQ ID NO: 234763 - DNA, 75 bp, Homo sapiens
cagccacccccggccctgctgccacagcaggcctccggtgtggctgtctctgatggtgtcatcaaggtgttcaac

SEQ ID NO: 234764 - DNA, 75 bp, Homo sapiens
aggcatagatgttgcaaacattatgaagataattgcatctcttattgcattaaaaaatattctacatcattggag

SEQ ID NO: 234765 - DNA, 83 bp, Homo sapiens
gctcctaagcctgcacagccgcggcggcagcagcagtgagagctgatccagtgtctctttgggccacttcaggcggggccgag

SEQ ID NO: 234766 - DNA, 74 bp, Homo sapiens
agagcccagagtatagagcggaagcaagagaggtttctaagcatgaattgaggaacagaagaagcagagcagat

SEQ ID NO: 234767 - DNA, 100 bp, Homo sapiens
acaagtcctgcgcttggggatcctctgtacgcccgttcactgttagagatgtttatgattacttccgagctgtcctgcagcgtgatgaaagaagtgaacg

SEQ ID NO: 234768 - DNA, 100 bp, Homo sapiens
caagaaggcctctgcctcagggcaggctcagagtatctctgatgaatatataacacctatgtttagtttttataaaagtattggggaactgaaaatgact

SEQ ID NO: 234769 - DNA, 117 bp, Homo sapiens
caccagcgctgtcactagcgccgcctgctcccgcgggcccgcggacccagctgtcaggcaagagctcttcagtatccccatcagccagtttccgaggtgctgagaagcacagaaact

SEQ ID NO: 234770 - DNA, 96 bp, Homo sapiens
gcaagtcccccccggagaaaaagttgaagcgttatgtgctgtaaactgcaaaccataatcctgtcttaatactgcaaacaaatcatagtggaacta

SEQ ID NO: 234771 - DNA, 100 bp, Homo sapiens
ccgcaccatcggcaagggcaacttcgcggtggtcaagcgggccacgcacctcgtcaccaaggccaagagctcttcagtatccccatcagccagtttccga

SEQ ID NO: 234772 - DNA, 75 bp, Homo sapiens
caagaaggccctggacacagcaatatctctgggctttcacagccacttccggctcctgcgtcgctccggaagcct

SEQ ID NO: 234773 - DNA, 75 bp, Homo sapiens
gctgaagtgttgaagtttgtctcctgtcctcctgaccctcacaaagggatcggacagagcgggatgccaccagct

SEQ ID NO: 234774 - DNA, 50 bp, Homo sapiens
cttcgatgtgcgagactttggaaaggacccgtgcatctcttccgactctc

SEQ ID NO: 234775 - DNA, 74 bp, Homo sapiens
gctttggcatggtcaagatagacctgaaaaccaagtcttgtagtggagtgctgatgagtaaagaatctcctgtc

SEQ ID NO: 234776 - DNA, 83 bp, Homo sapiens
cttttggccaggggaccaagctggagatcaaactgagaaagatcagtctaaagaaaaggagaagaaagtgaaaaaaacaattc

SEQ ID NO: 234777 - DNA, 90 bp, Homo sapiens
ggggccctcttgataaaaagagatgtggggggattctcgacctgctaacagaactggaccttttcggctctccccggaggctcagccccc

SEQ ID NO: 234778 - DNA, 100 bp, Homo sapiens
tcaagttcgaaatatggcaactttgaaagataacagagatttgggattagaatctaccttaatatcgtcaaaacctcagtctcattcactgagtacctct

SEQ ID NO: 234779 - DNA, 50 bp, Homo sapiens
attattactgggttcctatactggaagaaaaaatgctgggcatcttggtg

SEQ ID NO: 234780 - DNA, 96 bp, Homo sapiens
gatgtcgacgactgggacaatgagaacagctctgcgcggctttttgagcggtcccgcatcaaggctctggcaggctgaccaactgactgaagagca

SEQ ID NO: 234781 - DNA, 100 bp, Homo sapiens
cggctctcgtcagcctcccgccggccgtctccttaacaccgaacaccggctttgttcgcgggggtcacagctctcatggctgcagctagcgtgacccccc

SEQ ID NO: 234782 - DNA, 83 bp, Homo sapiens
caaggatggcatcctctaccagcagcatgtcaagtttggcaaggtcatttgattgcccgcctcagaacgatggatctgcatct

SEQ ID NO: 234783 - DNA, 75 bp, Homo sapiens
aggacaaacccatttccgtccacacccgctcgtccaggaatagccaggccagaagaaggaaggcctgtggtgagt

SEQ ID NO: 234784 - DNA, 75 bp, Homo sapiens
attatccccagctgccagaagaaggtgacacccagttgacaactgtgcagggagttgtcacaagtttctgtggtg

SEQ ID NO: 234785 - DNA, 100 bp, Homo sapiens
ggatgactcggatgtctggtggggcggagcagacacagactatgcagatgggaggcacattttacaatatgggataagctattggaaagatctcggaaaa

SEQ ID NO: 234786 - DNA, 97 bp, Homo sapiens
ccagttcgcagtagcagtggaatgggaggaagaggaccaggagctgcattatctattctagacaaatttcttgaagaatcctccaaactgcagtctg

SEQ ID NO: 234787 - DNA, 136 bp, Homo sapiens
cgggcaggcgccgggaggccgagccagcgactaagaggaccgagaggtggcgtggacaggtatgtgcactgcgcgtgaccagccgggcccgcagccgcatcctcagggcagggggcaagatcctcactttcgacca

SEQ ID NO: 234788 - DNA, 82 bp, Homo sapiens
caaggttccgcgccgggcgtggacggtgtggggcggtcccggccccgcaggtcagcccaaggccaaccccactgtcactctg

SEQ ID NO: 234789 - DNA, 113 bp, Homo sapiens
gggctccgtggacatctcaggtcttcagggtcttccatctgtgtgctacatctcagccttggtcttgtcctgcttactcaccttcctggtcctgatgcgctcactggtgacac

SEQ ID NO: 234790 - DNA, 100 bp, Homo sapiens
tgaagcaatacattgagtttgtggcagacagacttatgctggaactgggttttagcaaggaccagctttatccagggactctaccattcccacccctttg

SEQ ID NO: 234791 - DNA, 75 bp, Homo sapiens
agaggaaattaactatctgtacttataaggctaatctgtgaggtgagcttatgtaagatcaacagcaaagttcta

SEQ ID NO: 234792 - DNA, 50 bp, Homo sapiens
gcctcccgagtagccgggattatagatggaatttcgctcttgttgcccag

SEQ ID NO: 234793 - DNA, 100 bp, Homo sapiens
aaaccacagtagaccctaatgatgaagaggtatccaaaatgttgaaagattatgactggattaatgcagagagacacctctttggccaacccaatagtgc

SEQ ID NO: 234794 - DNA, 73 bp, Homo sapiens
gctttgcagctgacctacatctcgaagttaaacacagtgggaatatcacttttgatgagattgtcaacattgc

SEQ ID NO: 234795 - DNA, 83 bp, Homo sapiens
tgaccatggctccctgcagtaccctttaacgggccaggtctggattaatggctttaaccttggccgctattggccagcccggg

SEQ ID NO: 234796 - DNA, 100 bp, Homo sapiens
aagaaggccttgactacggaggggttgccagatggtttcacccaaatatcactggtgtggaggcagaaaacctactgttgacaagaggagttgatggcag

SEQ ID NO: 234797 - DNA, 100 bp, Homo sapiens
ccccccccgcccagagtcatggcggcagcagccgctctgagggcgcctgctcaggtgagccctattcccagaggcaggtggtgctgaccctgtaacccaa

SEQ ID NO: 234798 - DNA, 100 bp, Homo sapiens
ctcggccgatgaagtgcagaggtttttttctgatgcctgaaaacttcatgcctcctgttcccatcacatcaccaatcatgaacccgttgggtgaccccca

SEQ ID NO: 234799 - DNA, 101 bp, Homo sapiens
ggggtcatcaatgctcctgagaagggaactgggaacagccaggtgccccaaagcaaatacgcggagctgctggccatcattgaagagctggggaaggagat

SEQ ID NO: 234800 - DNA, 95 bp, Homo sapiens
aggtttcccaacagtgatgtcacaagattgaccacattgatcacaatctgttacctaaagcaataaaaaatggccagaggatcagtgtccgatga

SEQ ID NO: 234801 - DNA, 74 bp, Homo sapiens
tggactttgaccaagctggccaggtggcctcagcctccattcagacaatgattgaagctcacgttgatgtcaag

SEQ ID NO: 234802 - DNA, 100 bp, Homo sapiens
tggacctgccgcagatcgctgtagtgggcggccagagcgccggcaagagctcggtgctggagaacttcgtgggccgcttcctgcctgacacagctcactt

SEQ ID NO: 234803 - DNA, 75 bp, Homo sapiens
gcgcggccagacctgcgtggtgcactacaccgcctgcagaattttcttcctgccccttgaactctgatgaagaag

SEQ ID NO: 234804 - DNA, 96 bp, Homo sapiens
ctgctctcctctttgtaaccgaggagtcaagaaatgtgtcccgacccaggctaagcttgagcatggctgagcaggagcccacagccgagcagctgg

SEQ ID NO: 234805 - DNA, 100 bp, Homo sapiens
ctcccctggcagtgtgacggctgggcgacttgcgaggatgagagcgacgaagccaactgtccagggacactccggacgcaggcccggccaggagagttcg

SEQ ID NO: 234806 - DNA, 100 bp, Homo sapiens
ccagatcgttagggtgctgactgaggatgagatggggcacccagagataggagatgctattgcccggctcaaggaggagccagcaccgctctttgacctt

SEQ ID NO: 234807 - DNA, 100 bp, Homo sapiens
atggcaaaagaaacatgtacacagcacatccactaccaattggacgggatagggtgcagagcattgtagaccaaggagccatggataggagaagtatggg

SEQ ID NO: 234808 - DNA, 100 bp, Homo sapiens
ggcatgtccgcttcgaccttcccccacaagagcaaaatatgctgtgaattccatcaagaagaaagtcaacgacaagaacccacacgtcgccttgtatgcc

SEQ ID NO: 234809 - DNA, 96 bp, Homo sapiens
cttcattttagagctgtaccagacaggttccacagaggtggtgaagcagtattttccaatttgaagattcatttgaaggtggctcctgccacctgc

SEQ ID NO: 234810 - DNA, 100 bp, Homo sapiens
acgttcgaagaatgacagcaagccctactgagcgtgctcccctctgagactggagtgagagggtcttctggttttgctgttactgctcagtgtagtcaca

SEQ ID NO: 234811 - DNA, 100 bp, Homo sapiens
tccgctgaggtggacgtgtacaacccgacgaggaacgaatgggacaagatcccgtccatgaatcagacctgcctagagctggaacgttacctccagagcg

SEQ ID NO: 234812 - DNA, 88 bp, Homo sapiens
actaccacatatgatcttcagaagaaaacctggaattgaatgatctggcacgggaccctccagcacagtgttcagcaggtcctgttgg

SEQ ID NO: 234813 - DNA, 100 bp, Homo sapiens
gctgaaggacaaggggctactcctgcgctgctacacgcagtgtctctctttcaacgctatcatggaagaactgggaatctcactgaagaatcagaaaaaa

SEQ ID NO: 234814 - DNA, 80 bp, Homo sapiens
acactgaagcaatggagctggccaacaggcgtctcttgtcagcacaaatatgcaagtggtgacccaggatgaaagagagc

SEQ ID NO: 234815 - DNA, 100 bp, Homo sapiens
actatatgatttggataaagatgaaaagatctcccgtgatgagctgttacaggatgctttgcgtgtgggatggaaaatggattccgagtctataacactg

SEQ ID NO: 234816 - DNA, 82 bp, Homo sapiens
gcgcacttcgtcatgttcttcgcgccctgggctgggttacgacccctacaaccctgagctgcccaagccccccgcgcagagg

SEQ ID NO: 234817 - DNA, 75 bp, Homo sapiens
ggagtgcatctccctcaccaggcagtgccaggagtggtggctcacacctgtaatcccagctctgggaggccaagg

SEQ ID NO: 234818 - DNA, 100 bp, Homo sapiens
gtgtgccgaagagattcttttacatctggaggaaactgatgaaaattttcacaagtgtgatgaatgcagactctgctaccattttggctgtttggatcct

SEQ ID NO: 234819 - DNA, 90 bp, Homo sapiens
atttatttctttggagacaaaactatgccaccccgtcgcagaatttagtctcaaaggaaacttcaaccacagcactgcaggcctctgttg

SEQ ID NO: 234820 - DNA, 75 bp, Homo sapiens
atttcctctagtttctggataatgagcaggcacacagagaaccatggagtctggcagtaccgccgccagtgagga

SEQ ID NO: 234821 - DNA, 96 bp, Homo sapiens
cgagctgagtggttgtgtggtcgcgtctcggaaaccggtagcgcttgcagcatggttgacagactaatggagttgcattttaaatatctgggtgca

SEQ ID NO: 234822 - DNA, 76 bp, Homo sapiens
agagcgcgaatatcgtcatcgttagaagattcttggtgccaccattgagaactccaggattgtcctgcagatcgac

SEQ ID NO: 234823 - DNA, 98 bp, Homo sapiens
aggaagcggctagtgatgtcctggccagtccgggggagagagaagcagaacatccagtcatggataaaaatgagctggttcagaaggccaaactggcc

SEQ ID NO: 234824 - DNA, 50 bp, Homo sapiens
actgtgctgtcaaaccatgtcaatctgtggttgtgtcaaaccgattggtg

SEQ ID NO: 234825 - DNA, 96 bp, Homo sapiens
atctgaaggctggcaacattctctttaccttagatggagatatcaaattgggggggacacagcgattgccacgcgccattggaatgtccctggcca

SEQ ID NO: 234826 - DNA, 100 bp, Homo sapiens
cacctagaagaataagagatgtgattaatgtattccaccacctccgccagttaagaggaaaaagattattggaggagctcttagtttccttgcaatgggg

SEQ ID NO: 234827 - DNA, 95 bp, Homo sapiens
acaagtactcggaaggtcagttctgatacattggagaccattgctcctgatacactctgtgcagttttagagagagacacactcagtattcgaga

SEQ ID NO: 234828 - DNA, 100 bp, Homo sapiens
ctggcatgggcctctccaccgtgcctgacctgctgctgccactggccctgggctgcatcttgtacctgctgtgcttccggcagcacccttttgaggatgg

SEQ ID NO: 234829 - DNA, 74 bp, Homo sapiens
ccggcgccgaatcactgactggcacaggtgttggggaattttcaacgtccggttcatctaatacagacactggt

SEQ ID NO: 234830 - DNA, 49 bp, Homo sapiens
tggagaggcaagcacggattccagaagacttgcactatctgccagatgc

SEQ ID NO: 234831 - DNA, 73 bp, Homo sapiens
atggagaccacagggaagtcaaagagacaaggtctcaccatgttgcccagaatggacccgaactcctgagctc

SEQ ID NO: 234832 - DNA, 101 bp, Homo sapiens
tgtgatcacacgcctaatgatgtccgagttggagaacaggcgtggccagcactggctccttgatgttctctttgccatgaaggaggataatgagaaggtgc

SEQ ID NO: 234833 - DNA, 50 bp, Homo sapiens
ggcggcctgcgcagccacctcaaggaagatgatccctatgatcttgaaga

SEQ ID NO: 234834 - DNA, 50 bp, Homo sapiens
agaggccaaccaacctttggaggctcagctggaagctcagaaagccacgc

SEQ ID NO: 234835 - DNA, 101 bp, Homo sapiens
cagaagacagagggttttcttttgagcgtttgctgccaattgatggggcaaatgatctcttttttcagccacctccactgactcctacctccaaagtttat

SEQ ID NO: 234836 - DNA, 51 bp, Homo sapiens
ctgagaatcttgctgaagagctcaagtgatatttgtgatcccaatccatgt

SEQ ID NO: 234837 - DNA, 98 bp, Homo sapiens
ggaaaacccccattcattctggattggtggatctgaagtacaaaatattttccagcaccaatgttgttatgaattattcagagatcgagtctaaggtt

SEQ ID NO: 234838 - DNA, 82 bp, Homo sapiens
aggaatccgagaagagcagagcggagggagccccagacacggtgtggacactgccagcggctgcagccgacttggaatgacc

SEQ ID NO: 234839 - DNA, 98 bp, Homo sapiens
aggtgttgacgccgcatgtctactgggctcagcgacaccgcgagctatatctgcgcgtggagctgagtgacgtacagtatgacttctctttggaaaag

SEQ ID NO: 234840 - DNA, 90 bp, Homo sapiens
gccctcttgataaaaagagatgtggggggattctcgacctgctaacagaactggaccttttcgcatggcttctcgctgtttctgggatgc

SEQ ID NO: 234841 - DNA, 100 bp, Homo sapiens
gacagggtcctgggatagcttcctcaagatctggaactaacgccagtaggcatcagtgtttttctgaccgaagttctcatttcctgacaatggaaatgga

SEQ ID NO: 234842 - DNA, 97 bp, Homo sapiens
ctcgctctccgccgcccgcaccgccgcccgcgccctcaccagggtttggacagaggagccaaaggccaaatttccactttcagcagttttatttcag

SEQ ID NO: 234843 - DNA, 51 bp, Homo sapiens
gtgggggtgtgcaaacccgagagaactggggttgactttgataaagattgt

SEQ ID NO: 234844 - DNA, 75 bp, Homo sapiens
ggccgaactgctgtatgggctctatgcttgtggttggtggcatcgaccgggtttatgaaattggacgccagttcc

SEQ ID NO: 234845 - DNA, 75 bp, Homo sapiens
gaaaggtgacaaaaggcagaaggagggagaccccaaaaagaggcttcagggatgacttcttagggggcaggggag

SEQ ID NO: 234846 - DNA, 101 bp, Homo sapiens
ccacaactctgcagtggaccacagcattcctgaaatacatccaggaaagacatggagattctcttaaaaagcaaaatcctttatatgatacagaaagatgc

SEQ ID NO: 234847 - DNA, 89 bp, Homo sapiens
atcaaatcaatggattttttaccattgtttcatcaacgtctaagaaacttggagaactccagcggagctgcccaagccctccatctcca

SEQ ID NO: 234848 - DNA, 83 bp, Homo sapiens
cgagcaaaggccctgaaacaggagggagcgcgttacagaatgtctgaaggggacagtgtgggagaatccgtccatgggaaacc

SEQ ID NO: 234849 - DNA, 75 bp, Homo sapiens
aaagagagtggaaatttacagctgccctatgtctacttccccagcaggacagcatcattctcctatatcttctag

SEQ ID NO: 234850 - DNA, 99 bp, Homo sapiens
atttgtggttgggaaagatggacttacgggagcttggtgtgagttcttgatacgaatgaaaggccaagagtttgttgatgagattcaaggtagatatcc

SEQ ID NO: 234851 - DNA, 75 bp, Homo sapiens
tcttcagctcctgcagctctgaagtggttctggactgcttcaccagtttttctactggctccttctttgaactgg

SEQ ID NO: 234852 - DNA, 100 bp, Homo sapiens
agaccgaattcagaaggatatcgacgtcgtgatccagaagtccagagctgaggactgcctgtttgcagccttatgccagcctggaccatcttggaggcag

SEQ ID NO: 234853 - DNA, 82 bp, Homo sapiens
gcagttcaacaagggcccctcgtacgggctgtcggccgaggtcaagaaccgggccccttcccagctgcctgcctgccctagc

SEQ ID NO: 234854 - DNA, 82 bp, Homo sapiens
agctcctactcctccctcaactccctcatcgacctgcctagagctggaacgttacctccagagcgagccctgctatgtttca

SEQ ID NO: 234855 - DNA, 99 bp, Homo sapiens
tgaaatcctgtcctgaagactgtaagacgccttcctgagtcctggatctttcttccttctggaaatctttgactgtgggtagttatttatttctgaata

SEQ ID NO: 234856 - DNA, 82 bp, Homo sapiens
ccgatttaaagctgagctgcgaggaaaatggcggcgggaggagtgcctgtgaagaaaacggggtattgccctgaggcttata

SEQ ID NO: 234857 - DNA, 105 bp, Homo sapiens
gatgcgtctacggatgagcatttagtgaaggatttgggcagcctcaatgggtatcggttttatggagaacctgtaataaaagcatgtattgaaaatggagccagt

SEQ ID NO: 234858 - DNA, 100 bp, Homo sapiens
ttgtgaaccgggtcgcggcggccgaggctcgggtggtattcatgggtagtttgaaatatccagatgagaatggatttgatgccttcctgaagaagcatgg

SEQ ID NO: 234859 - DNA, 88 bp, Homo sapiens
catgactttgctccagcctggcttaatttccctactccaccatcatcaacaaaggatccatcagttacacaagtgacaagaaatgttc

SEQ ID NO: 234860 - DNA, 100 bp, Homo sapiens
ccaggtgtgggggatgatggtgacgcttctcactcacgtgtgaaggtacgaggaacagcaaattcaggaaaaagtggcgacctttcgactcatgttgctg

SEQ ID NO: 234861 - DNA, 100 bp, Homo sapiens
cctccaccgtttcctccaggacagcacctagtcgtggccggaggagtctcagagctgtcagaaagacacagataatgtacaagtggatagagcccaaaat

SEQ ID NO: 234862 - DNA, 100 bp, Homo sapiens
gcaggcaggaaggaagccattgatgcctgggctccttacttacctcagtacatagaccacgtcatatcacagcagcccgacggccatggaggctgaagag

SEQ ID NO: 234863 - DNA, 101 bp, Homo sapiens
acagttcatttcaacagccagggagaaagcctggatgctcaaggtttcttcttgaagggctcaaggaatgaagcatcccacaaaatgatcctgctgaataa

SEQ ID NO: 234864 - DNA, 75 bp, Homo sapiens
ggaacggagaatgctggccacagatggtgctgcccaacaggtactccaaagattcaggtttactcacgtcatcca

SEQ ID NO: 234865 - DNA, 100 bp, Homo sapiens
aaacttcaatcttttctacatggattttgccttccatgaaaagtaaagccaatcccagctgaaggaatcaagtcaaatccttccaagcggcatagagacc

SEQ ID NO: 234866 - DNA, 51 bp, Homo sapiens
cgtctggatcacggatgtaggaagtgagaaaatacggtacatgtccccatg

SEQ ID NO: 234867 - DNA, 100 bp, Homo sapiens
aactgtttaaccggatcccattgtacccagagtgcagagccgcctttccagcatgcaggggctgctcagcatatcccagtagaatacgggcttttccagg

SEQ ID NO: 234868 - DNA, 74 bp, Homo sapiens
gaatttcaacttgccaatgtgcaaagctgcagaaaccacagtggtagaggaatcctatgaggatggttgtgagg

SEQ ID NO: 234869 - DNA, 75 bp, Homo sapiens
ccgaagaagaaaggattcgttacagccagagattggttcgagaacttgtcttggacaattgcaaatcaaatgatg

SEQ ID NO: 234870 - DNA, 75 bp, Homo sapiens
acgactcccgatagtgagagacctgctcaagctctcttaagagattatgcaactccgaagtcaagcccgcactct

SEQ ID NO: 234871 - DNA, 89 bp, Homo sapiens
gccatcatgaatccagctagcaaagtaattgcactgaaaggccaaggagcgggagctggaactgaagaacacctggtcagagaacaagc

SEQ ID NO: 234872 - DNA, 100 bp, Homo sapiens
gagatggagatgggcagacggattcatttagagctgcggaacaggacgccctctgatcattgcagtgtcgagatggctatgaaccctgtgtaaatgaagg

SEQ ID NO: 234873 - DNA, 98 bp, Homo sapiens
ggaattggtgggttcttggtctcactgagttctagaatgaagctgcagaccctcgcagcgatggatgactacagtgtgatcggccgctccctgttcaa

SEQ ID NO: 234874 - DNA, 87 bp, Homo sapiens
ataaggagattcctgagacaacaaggacctcccagatgcaagagctgcacaagtctctccggaatgcttcagacatgcctgaaacaa

SEQ ID NO: 234875 - DNA, 90 bp, Homo sapiens
tccactacgaaggccacctacaaatagcaggtagaacttccagaattctcccaaaggttatggccattgcaccaacccattatatctggc

SEQ ID NO: 234876 - DNA, 50 bp, Homo sapiens
gtcgacttcgccggagactgccaggtttttagaacttcagccataaaaat

SEQ ID NO: 234877 - DNA, 96 bp, Homo sapiens
attgcaccacagatatatgggttaattctgcttggtcagaatcgtgatggcattgtgttcagcactgatgactattttcaccatcaagatgggtac

SEQ ID NO: 234878 - DNA, 75 bp, Homo sapiens
cggcgttggaggccaccgtttccaggctctattccgttcgctggttcgccacctcaggggaacgatggccatgga

SEQ ID NO: 234879 - DNA, 83 bp, Homo sapiens
attgtacagaaactacaaggccacacaggaggcaagtgaggcctatctggttggcctttttgaagacaccaacctgtgtgcta

SEQ ID NO: 234880 - DNA, 87 bp, Homo sapiens
gcaatgacaacatcatcttctcagaaggcagttatttggcagaaaagcagagtatcagatcacaagatggctctcatgtcagttctg

SEQ ID NO: 234881 - DNA, 83 bp, Homo sapiens
agaagctgtggcacctcttccagaactcggccaccgccgtggcccagctctacaaaggtcgcccagctccggcgctgacgggt

SEQ ID NO: 234882 - DNA, 74 bp, Homo sapiens
tcgacttggagtctttgtccaggacgatggaattactctgatcaccaaagaggaagcctctggaagttctgtca

SEQ ID NO: 234883 - DNA, 93 bp, Homo sapiens
gaaggaatactacaccctcatggacatcgcctacatctacccctggcggcgggttgcttgtctggagatggagccactacaggcgggcctggg

SEQ ID NO: 234884 - DNA, 84 bp, Homo sapiens
cacgcaaccccagatccatttacactttacatgccctctggtggtcagaagatgctgtgctgtctcgttaggatgaatggatta

SEQ ID NO: 234885 - DNA, 101 bp, Homo sapiens
cggccaccgcctcagcgggagaggagtctccaccaggactgaccgctgccgcccagcacgtccaggacaaaactttcggtttgaagaataagaaaggagca

SEQ ID NO: 234886 - DNA, 87 bp, Homo sapiens
tcggaagggtctttgttccctgcagccctcccacgaaggacagaataacgggctcccagattcacaagccccaccaagaggatcacc

SEQ ID NO: 234887 - DNA, 97 bp, Homo sapiens
gcgctcgaccgcctggagaagctgctgcgctgctcgcgttgaacccctgaacagtgcccaagtgttgtctctttgttgtcagagagttacaaccctc

SEQ ID NO: 234888 - DNA, 99 bp, Homo sapiens
tttctaatcatcccagtagttttggaatgtacccatctcagatgaagcgtgatgggaaggctctggagaggttcctgcaggattactttgatggcaatc

SEQ ID NO: 234889 - DNA, 75 bp, Homo sapiens
actatcctctgagatcccagatcatgaggttcaaaccttgtactactcagctgatcacaagctgcttgatgggaa

SEQ ID NO: 234890 - DNA, 89 bp, Homo sapiens
cgtggccgccatccactgcggccacaccttccacttgcagtgacagatgtgctggtgctgagctgtgatctgataacagacgttgcctt

SEQ ID NO: 234891 - DNA, 100 bp, Homo sapiens
cttcggcagtccacccaccgccgccgcctcccagaaaggcctaaagaatgtatttgacgaagcaatattggctgccctggagcctccagaaccgaagaag

SEQ ID NO: 234892 - DNA, 82 bp, Homo sapiens
accaactaccttttagagtgggatgagacttaattcagtgcacaaatgagatgaatgtgaacatcccacagttggcagacag

SEQ ID NO: 234893 - DNA, 82 bp, Homo sapiens
aactgttctaatgaggtcctatctattactgctatgttgtcagatgtggaagatgtcaagtttgtgatcaactatgactatc

SEQ ID NO: 234894 - DNA, 116 bp, Homo sapiens
ctcagttggaagcagccgatccagcctgcggagcctgtggggcaggtatggatcctggcgggagccagtcaacccctattatgtcaatgccggctatgccctggccccagccacca

SEQ ID NO: 234895 - DNA, 100 bp, Homo sapiens
atcgttgctgccttcttcgtcaagcacattagcagtagaaggcacaaagacagagctgctgggaagcccccgaaacctaaatacagtccttacaacaaac

SEQ ID NO: 234896 - DNA, 101 bp, Homo sapiens
tggcgaaatgcaggcgaaatgtggaaaatttcctagaagcttgcagaaaaattggtgtacctcagttttctggatatgccgcagaaggatccgtgccagaa

SEQ ID NO: 234897 - DNA, 100 bp, Homo sapiens
ctccgatccctgggattcaacacacaaatacgctctgttcaggttattggtggcatatgtgtcagaagaattggatacaaaactccctcttgatggtgga

SEQ ID NO: 234898 - DNA, 97 bp, Homo sapiens
ggtgaacaacccgttcttgcctcaggccagtcgcctccaggccaagagggatccttcacccgtgtctggggtgagcccctccagactccgaatagga

SEQ ID NO: 234899 - DNA, 75 bp, Homo sapiens
cagagttgcgaccgcgcggcagtgccgcagaatggaattcggcattgttcctacacagcttctcggcaacatctc

SEQ ID NO: 234900 - DNA, 88 bp, Homo sapiens
accccgaacgggttgcttcccccgctgcgagtgtgtgttttaatagaaaagttgtcactttccaaaatgccctttagaggtgacaccg

SEQ ID NO: 234901 - DNA, 83 bp, Homo sapiens
gtgggcatgtctctgaccatctggacggtgtgtggggtcctgtcactatttggattgacttctaaggactcttggtacatgag

SEQ ID NO: 234902 - DNA, 75 bp, Homo sapiens
cttgagccacgtgcatgaaccaaacccacttcgttcaagacaggtgtttaagcaaatgaagctgttgtcatttct

SEQ ID NO: 234903 - DNA, 83 bp, Homo sapiens
ggtccaagggcctgtaatcccgtccaacaggttggcaaaagcagcttttgatgatgcaattgcagaactggatacgctgagtg

SEQ ID NO: 234904 - DNA, 100 bp, Homo sapiens
gcccggccggagctgggtctggagacgccgtggcagcctgaacggagtgtgcgacggattgggagccgccgcctccatgctgagtttgctgcggaacgag

SEQ ID NO: 234905 - DNA, 80 bp, Homo sapiens
cttacctgctacacagtgtacaaaactctgggttcccttcattatcctgtggaagtagcggtagcagttcatccaacacg

SEQ ID NO: 234906 - DNA, 116 bp, Homo sapiens
cggacagccgcgcgctgagggtctcggggcgggcgccgcgggacctctccgggccatggaaactatgttccaacttcctgtcaacaatcttggcagtttaagaaaagcccggaaaa

SEQ ID NO: 234907 - DNA, 50 bp, Homo sapiens
gcggctctttgtatgatgacgaaaatcaggaaaatgtttccaacctggtg

SEQ ID NO: 234908 - DNA, 51 bp, Homo sapiens
agagaagagcacagaatgtaccagagagccatacttcccattgcctccagc

SEQ ID NO: 234909 - DNA, 100 bp, Homo sapiens
tgtgaaccctgagagaatcggtatttctggagatagtgcaggagggaatttagctgcagcagtgactcaacagtcaggtgacacacagtcttttgcacag

SEQ ID NO: 234910 - DNA, 74 bp, Homo sapiens
aactaattcatgcagatccaaagctcttgctttgtgtctccagaaatgctttgggttcatctttcattgctgca

SEQ ID NO: 234911 - DNA, 96 bp, Homo sapiens
aagcgaggaacactctgatggacatgaggctgagccagctatgtttccagtgtcctctgggtgtttccaagagcaacaagaaacgaataaatctct

SEQ ID NO: 234912 - DNA, 80 bp, Homo sapiens
gtgtacagtggcatgggccccgattacaggcatctggcaggagaagtggctaaggagtggcaggagctggatgacgcaga

SEQ ID NO: 234913 - DNA, 87 bp, Homo sapiens
tcaatactgttggctcaaaagaaggaccgagatctcactcagcagacagcagcagcccgggagcctgagctcaggaggaactcttac

SEQ ID NO: 234914 - DNA, 121 bp, Homo sapiens
cctgctcctccaggcgctgcccagccccttgtcagccagggctgaacccccgcagatctttaatctcatgaagtacgacagctacagccgcttcttaaagtctgacttgtttttaaaacac

SEQ ID NO: 234915 - DNA, 98 bp, Homo sapiens
gaagataaagaacttcagtggaccttcataatgctgacctacctgaataacacactggtagaagattgctcatcctgtttgggctcagtaatcagctg

SEQ ID NO: 234916 - DNA, 98 bp, Homo sapiens
acgtcgcttgggggccacggcgcggacgccatggtagagcgggaaaaggccattcttttggccaacctacaggagtcacagacacagctggaacacac

SEQ ID NO: 234917 - DNA, 83 bp, Homo sapiens
gccgatccagcctgcggagcctgtggggcagagtatctgactgtcttctctcagatgattgcatttcatgatccagagctgag

SEQ ID NO: 234918 - DNA, 87 bp, Homo sapiens
cagacgacaagcacacactatggcgctgaaacggattaataagttcatcagagaagatatgaaatataaagatgctactaataaaca

SEQ ID NO: 234919 - DNA, 130 bp, Homo sapiens
gtcgacggcagggtctgaggtcatcggggatgtggacgaaggggccgacctcctagagagcctggggatggtgaatgaatggggctgtcacgacctccacctcacgagtccttcctccacgggcagcggc

SEQ ID NO: 234920 - DNA, 82 bp, Homo sapiens
ggaggatgcctatgtattccctggggatggcgcatcacacaccaaaggctaaggcagctggataagcacagccaggccacag

SEQ ID NO: 234921 - DNA, 75 bp, Homo sapiens
cgccggcgagatgcctttgttcaccgccaaccccttcgagcaagacgtggaaatgcactcggtgatggaaagaga

SEQ ID NO: 234922 - DNA, 89 bp, Homo sapiens
cgggacaccccggaagctgggaaatggatacctgggatgaactcctaattggtagtgtagaagtgaaaaaggtaatggcatgccccagg

SEQ ID NO: 234923 - DNA, 100 bp, Homo sapiens
agctcatgaagaaagtaatggaaaagttacacaattctattattccagcatatcctcttctcagtttattcattgatgcagaaagcaggcagctggtcac

SEQ ID NO: 234924 - DNA, 75 bp, Homo sapiens
taacacacctactgggattccttgggcaatggtgaatttgaaaaggtgcctggaatacttattaagaaacgatgc

SEQ ID NO: 234925 - DNA, 82 bp, Homo sapiens
aggagcgcctggctcttctccacaaagacaccaaaatgatgcttcaacacccaggccaggtctctgcctcggaagtgagtgc

SEQ ID NO: 234926 - DNA, 98 bp, Homo sapiens
cggagtgagaagcaagaaggccctggacacagcaatatctctgggctttcacaggagaacctttacaaatagatcacttggtttttgtagtccatggg

SEQ ID NO: 234927 - DNA, 100 bp, Homo sapiens
gctcctgctgtaaggagtgcatgctgtgtcttggggccctttgggacgagtgctgtgactgtgttgggacgagtgatccatatgtgaagtttaaaatcgg

SEQ ID NO: 234928 - DNA, 95 bp, Homo sapiens
cgcactgtggatccagagacacaggcacgactagaagcattgctagaagcagcagctgatgaccaaacacccaggcaaacgtctgggttgtggac

SEQ ID NO: 234929 - DNA, 51 bp, Homo sapiens
gatggaacaacagccatggagaatgagtctacccatggtgttggaatgaat

SEQ ID NO: 234930 - DNA, 75 bp, Homo sapiens
cggggcgggcgccgcgggacctctccgggccatgggaggagacatcacagctttcccagatcgggaggaaaaata

SEQ ID NO: 234931 - DNA, 100 bp, Homo sapiens
gtactgaaaagaggaaaagaatgatatcaactggctcagaattgaatgaagattaccctaaggaaaatgattcatcatcctcatcagaaccgggtgtctg

SEQ ID NO: 234932 - DNA, 50 bp, Homo sapiens
ccgcggccccggccggaggagacagccatcgacgagtacaagccccagga

SEQ ID NO: 234933 - DNA, 75 bp, Homo sapiens
caagaatttatcaaaggaaagatggatccagacaagattttatttggagagaagcaagcatctttgcctctttgg

SEQ ID NO: 234934 - DNA, 100 bp, Homo sapiens
gaccgcatcaaagacgaatttcagctactgcaagctcagtaccacagaaccgcatgaaggagagcctcgcattgtttgggactatcctggaactaccctg

SEQ ID NO: 234935 - DNA, 98 bp, Homo sapiens
tgacgacatcacgcacaaggtgctcaggcttgcagggtggcccccgctccgacttcgacatggcctatgagcgtggccggatctccgtgtccctgcag

SEQ ID NO: 234936 - DNA, 75 bp, Homo sapiens
ggggcgctccaggaggcactcacaggcccagtggagcaggcagcaagtaaaggaggagctggccacctggctgcg

SEQ ID NO: 234937 - DNA, 90 bp, Homo sapiens
tgtgggtgacaggttgaaagtgatcttcctggagaactaccgtgtgtccttggctgagaaaggctctaattgcctggacgaagaaccccg

SEQ ID NO: 234938 - DNA, 71 bp, Homo sapiens
actgccaaccggccagaggacgagtgtgtcgccctggcagcatacaagtggctggtttgctacctgctccg

SEQ ID NO: 234939 - DNA, 50 bp, Homo sapiens
ggaatgttccctgacaatttcgttaaggcatgttatgttacccagagaac

SEQ ID NO: 234940 - DNA, 98 bp, Homo sapiens
cggatctcagctccgacgcccgaggagaaggaggagtggattaagtgcattaagaatggccttgatgaagatgacaggcatggccggggtcagctctt

SEQ ID NO: 234941 - DNA, 50 bp, Homo sapiens
cagacagctccttctttattgttgtattccctgaatgactataaaccacc

SEQ ID NO: 234942 - DNA, 87 bp, Homo sapiens
gggttgtatttggaaacgcggagtgagtttttccgtgctgtgtagaacatccagtcatggataaaaatgagctggttcagaaggcca

SEQ ID NO: 234943 - DNA, 82 bp, Homo sapiens
ccgctctgggatcccggccaccagcaattgtccggtgctgactgggttacttttttaaacactaggaatggtaatttctact

SEQ ID NO: 234944 - DNA, 100 bp, Homo sapiens
gaggacaccgtgacttcccggacgctgggaaatgggagtgttgacatttagggatgtggccatagaattctctctggaggagtggcaatgcctggacacc

SEQ ID NO: 234945 - DNA, 90 bp, Homo sapiens
cggggccccggaacccgagctggagctgaagcgcaggctgcggggcgcggagtcgggaggtgtggatgaggtcaccattgtcaacatttt

SEQ ID NO: 234946 - DNA, 108 bp, Homo sapiens
tgggctgctcttcctgaggttttcctaagccatcccctggcggaaccgcccccagttttcggctttgtgagaaaccttaccatcaaacacgatggccagcaacgttac

SEQ ID NO: 234947 - DNA, 75 bp, Homo sapiens
agtagttacttggaaagtccaagaggcccaaggttatggctcatagttcaccccagagcattttagatgatgttg

SEQ ID NO: 234948 - DNA, 82 bp, Homo sapiens
ggcgtcggacctgcacgagctgtctggtggtctttgggaagaagcttcctgcctttgccaccatccccatccaccagctgca

SEQ ID NO: 234949 - DNA, 74 bp, Homo sapiens
ggaggagcaagttcgactccagcgagggaaaacggaggggctatcaacagcaggacgcccatgaattcatgcgc

SEQ ID NO: 234950 - DNA, 153 bp, Homo sapiens
gggccctccagccatggagccgcacgtgctcggcgcggtcctgtactggctgctgctgccctgcgcgctgctggctgtttgagttcctgagatctagttggtgagagacatgatgttctaccggttgctgtcgattgttggaagacaaagagc

SEQ ID NO: 234951 - DNA, 75 bp, Homo sapiens
taggcctgatagactgattaaaccacagatgttgaaagtgtgatgaacagtgtggtatccctactcttgatcctg

SEQ ID NO: 234952 - DNA, 83 bp, Homo sapiens
ccgcgccgcatggaggccggctgaggagcgccgctgcctcgcctcgccatggccatgcagaaaatctttgcccgggaaatctt

SEQ ID NO: 234953 - DNA, 100 bp, Homo sapiens
ccgggtctgagcgcggctgcccaggttgacctttctgcgggagcagttggaattgatcacaccttttcagttgtacttcaatcctgaattaatctttaaa

SEQ ID NO: 234954 - DNA, 100 bp, Homo sapiens
cgctaacaactgcccagctttgaggaactgaaattaccattcacttttttaagtggacatattcatgaattgaggattcatgtaccatggacaaaactgg

SEQ ID NO: 234955 - DNA, 49 bp, Homo sapiens
gcctcacccgaggatattaaaaaggcatgcgaggtgcctttggaaagcc

SEQ ID NO: 234956 - DNA, 99 bp, Homo sapiens
aagacaatggtccttaaccttttggcatctcagcctcctttcgaaagaataaacgactggaggaagtgaaaagagaagaaagagaattactggaggctc

SEQ ID NO: 234957 - DNA, 90 bp, Homo sapiens
cgacaggcggcgcgggcggcggcttcgccgtggcccagtgcataaaccagcacagctccccgtccctgtcctcacagtcgccaccctccg

SEQ ID NO: 234958 - DNA, 74 bp, Homo sapiens
cgggccccgatggccccgaccgcgtgctggagctcttcgacccacccaaggtccttatgtcgtcagaagatcga

SEQ ID NO: 234959 - DNA, 99 bp, Homo sapiens
attcagtgtataatggactctcagaataaaggaaagacctcagagtgttctcagtcatcaccgagtggtcttctcacatcatccttcaggcagcaccaa

SEQ ID NO: 234960 - DNA, 82 bp, Homo sapiens
gtttttctcccaagccattcacagctattacagtgaccacggatcaagatgtggagtagggcgaaactggggctgggcatct

SEQ ID NO: 234961 - DNA, 90 bp, Homo sapiens
cggagatctctctcatctcgctcggctgcgggaaatcgggctgaagcgactgagtccgcgatggaggagccgaggaggtgctgctgctgg

SEQ ID NO: 234962 - DNA, 116 bp, Homo sapiens
gaggacagcgcgtgcccgcgaggagccgccgcgcgcccgcgccctccgcgcgacgccagggcgaagctgtgctcaggcccgggctggacgcagagccagagctgtccccagaggag

SEQ ID NO: 234963 - DNA, 50 bp, Homo sapiens
gcctcccaaattgctgggattacagaattagacctttacgagaagcacag

SEQ ID NO: 234964 - DNA, 98 bp, Homo sapiens
tcagccagctgaattcattgaggaccagtcaattctaaactatctcatggtggatgttcctggacatggaaaggtgatggtggacattgcatatggcg

SEQ ID NO: 234965 - DNA, 50 bp, Homo sapiens
tggagtccggacatctgaaacttggctttagaatccaaattagcagcttg

SEQ ID NO: 234966 - DNA, 101 bp, Homo sapiens
cagtgattgttcgcactccatctggaaagttacgactctactgcaaaggagctatcatgatacatggtgatggcttgcagagtcgtaaacaaaagaagaca

SEQ ID NO: 234967 - DNA, 87 bp, Homo sapiens
gggaggcgtattggcggctactctttaaaaaggtcatgcaagacaagataatctgccttccgaaaagagtgcagcctgctcagaacc

SEQ ID NO: 234968 - DNA, 100 bp, Homo sapiens
gcctgctgcagacatactaaaccacttagccaatcacaacgccaatctagaatactctgcggacacagcattgttggttttgccatgtactattttacct

SEQ ID NO: 234969 - DNA, 90 bp, Homo sapiens
tgcctgaagctcaagggactgtgtccaccctcagcggtgaccacccgtcaggtgcgtaccattgtggaagaggtccaggatggcaaggtc

SEQ ID NO: 234970 - DNA, 74 bp, Homo sapiens
acatggaagtctccaagcctgtgccatccacctgccaaggaaaagcacaagatatgtcttgtcgttcaagactt

SEQ ID NO: 234971 - DNA, 100 bp, Homo sapiens
gtgaggatggagtggctgcaaacaaaaagaatgcctgttattaaaccagacatagccaactgggagctctcagtaaaattgcatgataaagttcataccg

SEQ ID NO: 234972 - DNA, 100 bp, Homo sapiens
tggagataatgcatctgctttcaagattgtagctctgaagaaagcaaatggtgatgccactttgaaatttgaaccatttgttcttcatgtgcagtgtcga

SEQ ID NO: 234973 - DNA, 75 bp, Homo sapiens
aacgcttagaaagagatcacatctttcgacttgaaaaatttttcagtgaatatgagaagttacttcattcagaaa

SEQ ID NO: 234974 - DNA, 113 bp, Homo sapiens
acgttcttccaagaaaccaacattcccaacagccaccaccaccaccagatgacaatgcagatcttcgtgaagactctgactggtaagaccatcaccctcgaggttgagcccag

SEQ ID NO: 234975 - DNA, 100 bp, Homo sapiens
ccgtgtcctcctccgtcatcgagcagctcttcttcgtccgtttgagtgtgaacatggctacgcctcttcattcccgtccatgccgagcccccgactgcag

SEQ ID NO: 234976 - DNA, 90 bp, Homo sapiens
cacagacacagctcatgtctcattaatcacaccaacaaaaagatcctgtggtacagacagagggatgtcccggaagccggaggaccttta

SEQ ID NO: 234977 - DNA, 100 bp, Homo sapiens
ccttcgtacccacagtgcttcatgagaggtcagcccaaggctgccccctcggtcactctgttcccgccctcctctgaggagcttcaagccaacaaggcca

SEQ ID NO: 234978 - DNA, 74 bp, Homo sapiens
tataacaccaccttcaaaaatttctatacaaactggactctcaggacaaaacgacaccagccaaaccagcagcc

SEQ ID NO: 234979 - DNA, 75 bp, Homo sapiens
caatttgattctaacattgcaccagctgatcctgttggcagtggcaatgacccctggtcagcctggagtgcctcc

SEQ ID NO: 234980 - DNA, 82 bp, Homo sapiens
cggcagctgcagtgacatgtccagcatgaatcccgaatattcaaggagcagggacaagttacaggaatgttctccaagcagc

SEQ ID NO: 234981 - DNA, 100 bp, Homo sapiens
aaggtgaagatgatgaagatgctgataatgatgacaacagtggctgtagtggggaaaataaagttttagacgtactctgggaactggctcaccttccaac

SEQ ID NO: 234982 - DNA, 82 bp, Homo sapiens
ccgcccgcgccggaagagccacgccgccggaagaattaacctcgagtctgcacgcttttaagaacaaggcctttaaaaaatc

SEQ ID NO: 234983 - DNA, 100 bp, Homo sapiens
tgtttggggagacgtccgccaaggtacgtggtcatctcccgggaggagagggagcagaacctgctggcgttccagcacagtgagcgcatctacttccggg

SEQ ID NO: 234984 - DNA, 76 bp, Homo sapiens
gctaacttcagcggtggcaccgggatcggttgccttgagcctggtaagaatgattgatgttggctgatattggagt

SEQ ID NO: 234985 - DNA, 75 bp, Homo sapiens
cgccccggtttgacgcacacggcaccaaactgtaaagtcagtgataaatcttttgtttgctgcatatactggaga

SEQ ID NO: 234986 - DNA, 80 bp, Homo sapiens
ctgcgttctggtgctgttgctcatgcctcgtctcatttgcaagaaaatgatgcatcctgttgccagcagtaatccagctt

SEQ ID NO: 234987 - DNA, 75 bp, Homo sapiens
ttccacgtccttgcttcacctcaggtaaagaattctgaaggtggactctatgtatgcatgaatacatttttggcc

SEQ ID NO: 234988 - DNA, 106 bp, Homo sapiens
ggaagatgcaatgctgatgtttgataaaactaccaacaggcacagaggtgctggagaatctggtaaaagcaccattgtgaagcagatgaggatcctgcatgttaat

SEQ ID NO: 234989 - DNA, 100 bp, Homo sapiens
ctaagctgtgctctgattcacgtttagaagctgaccagacaaagagagttcatggcctcccacgggaacgacgccgcgagagccaggtttgagtccaaag

SEQ ID NO: 234990 - DNA, 50 bp, Homo sapiens
tagcaagtcacattcaagaaagacacgagacgacttcctgggccaggtgg

SEQ ID NO: 234991 - DNA, 75 bp, Homo sapiens
gaggacacttctctgtcgtcacagttaggtttgttgataagccggggcccttcgtgggaccctgcggtcactgga

SEQ ID NO: 234992 - DNA, 75 bp, Homo sapiens
gaaaattgtttgcagaaggatgaaaaggctttattgccaaactgtgtatgcaacagcgttattgcaacaggctaa

SEQ ID NO: 234993 - DNA, 75 bp, Homo sapiens
tacaacccgacgaggaacgaatgggacaagatcccgtccatgaatcagcccaagagttccatggcctccacttcc

SEQ ID NO: 234994 - DNA, 94 bp, Homo sapiens
gcatttttttgtggagtggtttgaatatcgtaagcgcacgtttaaacatctcaaggtagcctttccagtaaatatatgactcagggaaaagcct

SEQ ID NO: 234995 - DNA, 74 bp, Homo sapiens
gagcaaccagagttctactacgatgagtttggtttccgtgtgtacaaggaaggagtcgttcacgcctactgagg

SEQ ID NO: 234996 - DNA, 100 bp, Homo sapiens
ggaagatgaagaggaagaggaagaggaagatgaagaggaagactatgatgtttataaaaggcagttatacttaagcatgaacattgacgacaaactggaa

SEQ ID NO: 234997 - DNA, 100 bp, Homo sapiens
aaagatgatgttgtaacagtgactgaacttcgagaaaccaagacctctgaatacttcagcctttcccaccatcctttagactacaggattttattaatgg

SEQ ID NO: 234998 - DNA, 108 bp, Homo sapiens
ttcagcaagcctatatcacatgtttatgttctatgctccctaatgaagatgctattaaggaggcttcctgtgtccagtaccggttagtggtccgggatgtgaacaccc

SEQ ID NO: 234999 - DNA, 98 bp, Homo sapiens
gggccgcggcctccgagcgcgcgggatttgcagttatcatgtgatgtaaaacttgatcctcgtccagaataccatcggtgtatactaacttggcatca

SEQ ID NO: 235000 - DNA, 97 bp, Homo sapiens
tcgtggagacggtgctcaacctgataaatttgcgcctcattttggtaagcggaaaaacaaaagagttcctgttttctcctaacgattctgcttctga

SEQ ID NO: 235001 - DNA, 73 bp, Homo sapiens
ccgctctctgctcatcaatgcagttgaggcctcctgtatccgaacacgggtatatgagtgtaacaaacgctgc

SEQ ID NO: 235002 - DNA, 82 bp, Homo sapiens
gattataaccggagattctcagggcaacccagatctctggagaatgctggaggagaccttaaggatggccaccaccactatg

SEQ ID NO: 235003 - DNA, 111 bp, Homo sapiens
aaacatggcggtggactcggcgatggagctgttatttttagatacttttaaacacccgagcgctgagttcattcggctcctaaagaagtagcagtgtccaaggaacaagaa

SEQ ID NO: 235004 - DNA, 80 bp, Homo sapiens
tgatgctgccatctttccaggaggctttggagcggctaaaaacctaagctccaccatgaggcgaggtggatggaggaagc

SEQ ID NO: 235005 - DNA, 95 bp, Homo sapiens
taatgaggagtacggagaattctataagagcttgaccaatgactgggaagatcacttggcagtgaagaggaagttagaagatctgagctctgagt

SEQ ID NO: 235006 - DNA, 100 bp, Homo sapiens
aagaaaatcaatctaaacatttgtgggaagttgtattcatcaataatgaaatgctgactaaggaacaagggcaagtgtccagagaatggctgggatgaaa

SEQ ID NO: 235007 - DNA, 82 bp, Homo sapiens
cctgcccagacggctcacctgtgcgggatggaacaaaagagatggacagagacgtatgtgcgttggtctcctaagggcacct

SEQ ID NO: 235008 - DNA, 90 bp, Homo sapiens
aaactgctacaagacaacaccctgatctggcatggacatagatcaggctgggcgccccaaatgcccattggacccgtacttcatcatgcc

SEQ ID NO: 235009 - DNA, 71 bp, Homo sapiens
ctgaatttaattcgaggctttcatgctatagaaagtctcctgcaggacctggagttgctggctaccttacc

SEQ ID NO: 235010 - DNA, 80 bp, Homo sapiens
tactcgcttgcctacccgccggcccgcgggtctacttcctcaaagcttggtttatggcagctccaggacctcgcaccccg

SEQ ID NO: 235011 - DNA, 100 bp, Homo sapiens
tcaaactcccaggctcaagcaatcctaccatgtcagccttcccagtagctggaactacagatgatggacttccaaaaccagaactaatatcctggattga

SEQ ID NO: 235012 - DNA, 98 bp, Homo sapiens
gcggagcccgcccgccggcagcgccgctccccagggagggagtccgcagcctgagagacattactgccgggagtgttgagtgaagggaccaggtggag

SEQ ID NO: 235013 - DNA, 100 bp, Homo sapiens
cagctctattcccatggacccagagcagcccgacggccatggaggctgaagagacgatggaatgccttcaggagttccctgaacatcataaaatgatcct

SEQ ID NO: 235014 - DNA, 83 bp, Homo sapiens
atccaatcagagcattcaagggatggtgaaatggatgatagtcgagcatataggttgctgtagatgaatgttcttagctgtca

SEQ ID NO: 235015 - DNA, 111 bp, Homo sapiens
ggtgagctggagaacctgaagtagcaaaggcaagaaggcaacgacgttccatctgtggaaggacctaccaaccagtgttccttgcctgtatctccccttggttcaatagct

SEQ ID NO: 235016 - DNA, 75 bp, Homo sapiens
ttagctcaactccaccagctgtcagtagtgttctcagtacaggatttggtgctatggagaaatttttggtagaat

SEQ ID NO: 235017 - DNA, 50 bp, Homo sapiens
cccaactggcagcccgtgcagtgtctattatcctcccagtccacaacgct

SEQ ID NO: 235018 - DNA, 82 bp, Homo sapiens
ctcagaggccccggtgctggcagctgagcccgaggctgacaaggccacactggtgtgtctcataagtgacttctacccggga

SEQ ID NO: 235019 - DNA, 75 bp, Homo sapiens
gagctggagctggagctgtcggaagtagtgagttgaaactcttggaggaagcaaccatttcagtctgcaggtcat

SEQ ID NO: 235020 - DNA, 75 bp, Homo sapiens
ggcacttctctactgtctggctgtgctgggatatgcagtgaaagacccctgacaaaagacaatcatcttctgggt

SEQ ID NO: 235021 - DNA, 100 bp, Homo sapiens
cgatcgcggagcggattctgcttttaggagtacccgccaacaagcgggaccgagcaggaatccgtatctgggaacaggcatagaatgtcaagctaaccag

SEQ ID NO: 235022 - DNA, 100 bp, Homo sapiens
cggaagtgccccttagcgggtgggggaagctggtaggcacgggcggctccgcagtgaccggactcgggggagatgcattcctggagcaagctgtgtcata

SEQ ID NO: 235023 - DNA, 90 bp, Homo sapiens
gttgcttcagtacccataatgtattcttggtctcccctacagcagaattttatggttttacagacatttcaccagaggaattgaggcttg

SEQ ID NO: 235024 - DNA, 100 bp, Homo sapiens
ggagagggattcgtggtgaaggtccggggcttgccctggtcttgctcggccgatgaagtgcagaggtttttttctggatgagaacaagttgagcagtgcc

SEQ ID NO: 235025 - DNA, 83 bp, Homo sapiens
cgattcgcacgagctgtcagagctgggtcagcccaaggccaaccccactgtcactctgttcccgccctcctctgaggagctcc

SEQ ID NO: 235026 - DNA, 80 bp, Homo sapiens
gtccaggctcggagcgcggcacggagacggcggcagcgctggactaggtggcaggtcccacgacagtgatgtccgagggc

SEQ ID NO: 235027 - DNA, 71 bp, Homo sapiens
ccacgaccattatatgctggaatggttccttggtggactccattatgctggtggaagagggcttcagtgtg

SEQ ID NO: 235028 - DNA, 50 bp, Homo sapiens
gccggctgcaggagcagctagcgcagagctcatcagtcaatcagtcagct

SEQ ID NO: 235029 - DNA, 75 bp, Homo sapiens
cgtggatccaagatggcgacggcgatggatcttaagattgaaagtgatgttcaagaaccaactgaaccagaggat

SEQ ID NO: 235030 - DNA, 75 bp, Homo sapiens
cagaaatcacattggaccctcctcccaactgtaggtgtaattgaaaagtgatcctctcttcagagatgtcaaaaa

SEQ ID NO: 235031 - DNA, 90 bp, Homo sapiens
taaaaatgattcgggaatatcggcaaatgggaaatcctcattgacgattcaatttgttgaaggccaatttgtggactcctacgatccaac

SEQ ID NO: 235032 - DNA, 100 bp, Homo sapiens
gttgcagagcctgcggggcaagatctgtgattttacaacgagatgctgctctccatagggatgctcatgctgtcagccacacaagtctacaccatcttga

SEQ ID NO: 235033 - DNA, 74 bp, Homo sapiens
atatagaacactaaagtgttacatgacagatgtatgagctgtctgtgatcctggaaacatacgtgtgactgaag

SEQ ID NO: 235034 - DNA, 97 bp, Homo sapiens
agacgaattaaagggagattacacagaagcaaaagccttgatagcatggatttctgtgagctcactgtttatgatgataaagactacaggagaattc

SEQ ID NO: 235035 - DNA, 90 bp, Homo sapiens
ccctgctctacaacgtgcctgcagtggccgaggagattcaggatgaagttggagctgacatggacccaaatcctcgggccgccctggagc

SEQ ID NO: 235036 - DNA, 100 bp, Homo sapiens
tgacgcggcgtcaatgaactgagactaagtcaaaagccggtttgttgcatattctaaggacccagacataggcttggtggcccgtctcttgtctttcctg

SEQ ID NO: 235037 - DNA, 75 bp, Homo sapiens
cttctcagaagacagagggttttcttttgaggtagtgggcagcagtcagtgacaggtgtaacctctgtggatgac

SEQ ID NO: 235038 - DNA, 90 bp, Homo sapiens
gactgggcggtgccggcgccggagacgatgccgttgtatataatgaacagattcgtgatctcttagtaaattcagggccacttgctgtcc

SEQ ID NO: 235039 - DNA, 82 bp, Homo sapiens
gggccgtgggcccccggaacgagctcttgtaaatgtaaaactctgggccattgatcgacaatgttttcaaacaataatgatg

SEQ ID NO: 235040 - DNA, 75 bp, Homo sapiens
taaactgcttgaacatcctttgactggttagccagattcctgtcttggtcacacagataagttcaaccaatcatc

SEQ ID NO: 235041 - DNA, 100 bp, Homo sapiens
aggctcatctatacacttcaaggacatacgagctattctcaagctggaataactgagactgaatggacaagtggatcttcaaaaggcggacctctgcagg

SEQ ID NO: 235042 - DNA, 58 bp, Homo sapiens
cagaagtccagagctgaggactgcctgtttgcagggaaagacattcccggtcaggcat

SEQ ID NO: 235043 - DNA, 90 bp, Homo sapiens
ggattgtccaaaagaatctggatgggcctaatttttggtggggaaaggaaagcgctctagcgagtgctgatttagaagaagaaattcacc

SEQ ID NO: 235044 - DNA, 97 bp, Homo sapiens
aatgatcccaatttccagatgccttgttcaacaggtccagacatcatctggtctccctgaacctgaaatcacaccatggatgattttgagcgtcgca

SEQ ID NO: 235045 - DNA, 98 bp, Homo sapiens
cccccgcttgccgcagccgcctcagaacccgaccaacatccagaacttccagctgcccccagattgcagccaaaattggaggcgatgctgccacgaca

SEQ ID NO: 235046 - DNA, 98 bp, Homo sapiens
aacaatgacacccacacgcaggagccctctgcccagcaggccaactgcattgactccacagcctcagccgaggccgtgtttgcctccgaagtgaaaaa

SEQ ID NO: 235047 - DNA, 83 bp, Homo sapiens
ctggaagggaaggaaaaacctgtatgtggaaccacctaaaactctctgcagaggaattagagcgaaaacggcaagagatgatg

SEQ ID NO: 235048 - DNA, 82 bp, Homo sapiens
cgctgggagagaggtacctctccttttccctctccctttccctaaggcacaaatcctgaagagcccgtgggcgtggactgct

SEQ ID NO: 235049 - DNA, 51 bp, Homo sapiens
tctccctcaatgctgacgatgagaacccagctgaggtgggtgtcctggttg

SEQ ID NO: 235050 - DNA, 146 bp, Homo sapiens
gtctgctggtgggactcaatgttctcgatgccaatctctgcttgaaaggagaagacttggattctcagaaatttctgaataaattggcagaagaacgcagacagaagaaggaaacttaagatgtgcaaggagatttaatgatttca

SEQ ID NO: 235051 - DNA, 82 bp, Homo sapiens
cactgcctgcgcagctccggccgcctggctccccatactagtcgccggtggagccatcgaagcccccacccacaggctgaca

SEQ ID NO: 235052 - DNA, 50 bp, Homo sapiens
ggacaacatgtcccaacattacatcccacgtttgtcaccctccgtctccc

SEQ ID NO: 235053 - DNA, 75 bp, Homo sapiens
ctgtgtgcctgcgccgcgctgcagaagagcaggcacctcctggaccagatgctggtggtgttcaagtcagccccc

SEQ ID NO: 235054 - DNA, 75 bp, Homo sapiens
tcttcttcgagtatttgtagaagggttgcctgcggacacgctgggcctctgtcctgatgctgctgagctccctgg

SEQ ID NO: 235055 - DNA, 100 bp, Homo sapiens
aatcaacccaagatgcttgtgcaaaaatgcggacttggattctcacttgcatttatcttcagctgctcctatttaatcctctcgtcaaaactgaagggat

SEQ ID NO: 235056 - DNA, 82 bp, Homo sapiens
cgggtgcaggagcaggacttacggcagtgggggctgacaggtatggcctcacaagtcttggtctacccaccatatgtttatc

SEQ ID NO: 235057 - DNA, 100 bp, Homo sapiens
cttcattcagatgtggtggaatatgccaaggaaaaactggagagcttcatcaaaaatagtgatagctttgataacttcaggtgcatctagaagaccctgg

SEQ ID NO: 235058 - DNA, 75 bp, Homo sapiens
ctgtgataaagttggtcagtctcgcactggaacttgggaatcagtgaaacgtacaaccaggaaagagcagactgc

SEQ ID NO: 235059 - DNA, 83 bp, Homo sapiens
cgggagtcggggatagtgtcatcggttcggtaaagtttctgttctctgcattttgaaagcgaagcagaagccgtagaatcagc

SEQ ID NO: 235060 - DNA, 90 bp, Homo sapiens
tgaagagagatatgccaccagcatttattaagaggaagataccaactagagataaaaataccagaaacatacccatttaatccccctaag

SEQ ID NO: 235061 - DNA, 100 bp, Homo sapiens
ctgcgtggggggccgccaccggccgccgccgccgccgcccaggcgcagatctcccttgagtttagaaatctggctgagaaataccaaacagtgattgccg

SEQ ID NO: 235062 - DNA, 100 bp, Homo sapiens
tggaggcggcccgcttcctggaatggcaagcgcagcaacaacagagagcacgtggcccactgctcagtggagcgtggaggacgaggaggaggccgtccac

SEQ ID NO: 235063 - DNA, 83 bp, Homo sapiens
gacttcctcacccgcgcctgcgacctcgaagtcccgggcccagagcccggccagcaggagcagttggtcttcggcagcgggga

SEQ ID NO: 235064 - DNA, 76 bp, Homo sapiens
taagacacctatttatgatctccattgcaataaacgctatcagttgagggatttgcagttgataaaatggctggag

SEQ ID NO: 235065 - DNA, 87 bp, Homo sapiens
acaaaagatgcaatgcctatcaacaaagctacaatcatgccacgggggccaacacttggacatgtggtgatctttgtgaagtctgtg

SEQ ID NO: 235066 - DNA, 100 bp, Homo sapiens
gccaaggcgtgagaattcctcaatgactgccctctaaaggaagaggacagcctcgggggtaacagcaagaccgccatggtggctactgtgagtcctgcag

SEQ ID NO: 235067 - DNA, 74 bp, Homo sapiens
ggcgggaaggaagatccggcgcggggcacaggatccggagctggagcccccagataagaccatcatcatgtgga

SEQ ID NO: 235068 - DNA, 100 bp, Homo sapiens
tggtgatccttcgggacaagattcgcttctatgagggtgtggtatctgtgcgctttgaagaagatgaagacaggaacttgtgtctaatagcatatccatt

SEQ ID NO: 235069 - DNA, 75 bp, Homo sapiens
cttaacacagtagcagctggaaccatgacaggcatgttgtataaatgtacagacttttggaacagcgatcgtaat

SEQ ID NO: 235070 - DNA, 85 bp, Homo sapiens
aatatggaaacgactcctcggccgagctgagtgaggaaagatatggatgaagttgaagagaaatctaaagatgttataaacttta

SEQ ID NO: 235071 - DNA, 97 bp, Homo sapiens
ggcactcacctgtgcaaccccagggacctggaaagacagacaggatggggaggaggttcttcagtgtatgcctgctgtgcggtcagagaagaaacgc

SEQ ID NO: 235072 - DNA, 99 bp, Homo sapiens
ggtagtgccagctacggtccgcggctggggttccctcctccgtttctgtatccccacgagtgacttgctgtctcctgactcagtcctgagttgcttgta

SEQ ID NO: 235073 - DNA, 75 bp, Homo sapiens
acacacccagacgcacacttctgccaagcatagccaccacgtattgttatgacagcagagggtgatgctccagag

SEQ ID NO: 235074 - DNA, 83 bp, Homo sapiens
atggccgctgtgtggttgcaacggagataaattcccggaaccgcgattcggcgtgtcagcattttgaaagcgaagcagaagcc

SEQ ID NO: 235075 - DNA, 99 bp, Homo sapiens
tcaacgaatcatccacgcacctgcagctctgctgagagagtgcaagccgtgggggacacagcaggtcaggagagattcaacagcattacctcagcttat

SEQ ID NO: 235076 - DNA, 74 bp, Homo sapiens
cgggaccccccgaccagacggccccagcagtgctactgaagagtacaggggctcaggtccaggtggcaggggat

SEQ ID NO: 235077 - DNA, 90 bp, Homo sapiens
caacattactcagttgccagaagatgcatttaagaactttccttttctagaagagctgtatggcctcacaagtcttggtctacccaccat

SEQ ID NO: 235078 - DNA, 80 bp, Homo sapiens
cagtctgatccttttgttggcagaacagtacgtatttggcattcaagcacctaccggcttgagagcacactgaattatgg

SEQ ID NO: 235079 - DNA, 76 bp, Homo sapiens
gtaaccaaacaagaagacctcatgagagagaccaagagtttacggagcaaaagtgctgacaacttcttccagcgaa

SEQ ID NO: 235080 - DNA, 75 bp, Homo sapiens
tgactactggggccagggaaccctggtcaccgtctcctcagaaactggcgatggaatatgagaggagccctctgg

SEQ ID NO: 235081 - DNA, 87 bp, Homo sapiens
ctgccactgctgctccgtggagatcgtcccgcgcctgccgaacccagcgggtgccgcttctccacccgaggcttccacctccaacga

SEQ ID NO: 235082 - DNA, 50 bp, Homo sapiens
accgtggctcacaagatgaaagagcacggattaatgaaaatcaagttcca

SEQ ID NO: 235083 - DNA, 76 bp, Homo sapiens
caggctaggatgtgacacttaagtgttagtgagaagataaactcagctctgaagaaagctgttgggggtgttgcct

SEQ ID NO: 235084 - DNA, 90 bp, Homo sapiens
ggaactacatcaacaggtgttgaagggaaggggcaagttcgcccaggatgtcagtcacctgcagcacaaaactgtgatcttcatgtttgc

SEQ ID NO: 235085 - DNA, 98 bp, Homo sapiens
tgcagttgttgaaattgtccccgcagttttcaatcatgctggttatattctgggcactaaatgaaggcgtttctaggcaatttgattcgttcagagat

SEQ ID NO: 235086 - DNA, 101 bp, Homo sapiens
ggcctccccagccacgtggaactgtactaggttttgacaagcttgcatcatgcgtgagtataagctagtcgttcttggctcaggaggcgttggaaagtctg

SEQ ID NO: 235087 - DNA, 74 bp, Homo sapiens
agttgggcttggtaccgtgctgcccagaatgcccttcgggaggactggaatgtcacgtggaataccagcaaccc

SEQ ID NO: 235088 - DNA, 100 bp, Homo sapiens
ctttggaaatagttccctttcgagttgcagcttacaacaagaaaaagaagcgtatggactactatgactctgaacagtcttgagagctgatgacaataac

SEQ ID NO: 235089 - DNA, 98 bp, Homo sapiens
tttggcccagctcatgaattcgagcggctctcataaagatctggctggcaactacaagagactgtgaaaaggaagttggaaggagctcgatcaccact

SEQ ID NO: 235090 - DNA, 90 bp, Homo sapiens
gccgggaacccttgccgctgctgtcctgcgaccccaagcagacttaattcagtgcacaaatgagatgaatgtgaacatcccacagttggc

SEQ ID NO: 235091 - DNA, 100 bp, Homo sapiens
ttgtggaaagttccaaactgtctgatgctggggatcgcttacacctgagacgaactacagaacagcacgtaccagaggtggaagtccaagtcaaacgcag

SEQ ID NO: 235092 - DNA, 75 bp, Homo sapiens
ctcagcaagactctcgagcccatgtacgtcagcctgtcatatgcatcaacaaccatgtattttgttcgatttgta

SEQ ID NO: 235093 - DNA, 100 bp, Homo sapiens
tggccctcgccgcggccctgctgctcctggccctctgcttgcttgtccggcgcaccaggtgcccgactccagccatgctggcgctactgtgttcctgcct

SEQ ID NO: 235094 - DNA, 74 bp, Homo sapiens
agctgtgctcgcgctactctctctttctggcctggaggctatccagcgaagtgtttggattgtgagctatttca

SEQ ID NO: 235095 - DNA, 90 bp, Homo sapiens
cgacatcagagatgaggacagcattgctgctccttgcagccctggctgtggctacagggccaggagatgatccctactcaagtgcagagc

SEQ ID NO: 235096 - DNA, 49 bp, Homo sapiens
gttctcgtggagtcagacaatgaggcaagacatctgtatagattctgct

SEQ ID NO: 235097 - DNA, 80 bp, Homo sapiens
tttgagccctatgagcagtggaacctagggaaagtaggttgttgaaagaggaagaactgcgaaaagaggaagtccaaact

SEQ ID NO: 235098 - DNA, 146 bp, Homo sapiens
cttttcttcccctcggatatagaatagacattcccaagaatggcaagttaaacatacagtcgcctctgacaagccaggctgaaggtgatgtggccgccctcaaccgacgcatccagctcgttgaggaggagttggacagggctcag

SEQ ID NO: 235099 - DNA, 75 bp, Homo sapiens
tcggaaaccggtagcgcttgcagcatgcatttaaatcaaacggtattgagatggattgggttatgaaacataatg

SEQ ID NO: 235100 - DNA, 100 bp, Homo sapiens
cacaactgtatcagacccaaacttggttgggattgttgtttacacgccagttattaatggcatagagaaggagacgtgccagaagatggaagaagacggg

SEQ ID NO: 235101 - DNA, 82 bp, Homo sapiens
tggagggcttcgcgtctgcttcggagaccgtaagggttccatcataatgaatggatccaatatggcaaatacatcaccgagt

SEQ ID NO: 235102 - DNA, 105 bp, Homo sapiens
tagagttcagcttccaaagagatacagggcagaggaaaatgcaagaagactgatggagcaggcttgcaatattaaagtcccagaacagttttcttctgggctcca

SEQ ID NO: 235103 - DNA, 100 bp, Homo sapiens
aaagcctgaacaggcagggccagacccaggtccggcctctttggcctacccccgttggctccgctgccccaggtcgatgagtcccctgtcaacgacagcc

SEQ ID NO: 235104 - DNA, 100 bp, Homo sapiens
cagggacgtggtcctggctctgggggacaggactccagaagacctttccagattcgtggttgagctgcagcagagggagcttgccttgaaggacaagaac

SEQ ID NO: 235105 - DNA, 51 bp, Homo sapiens
ctcaaagaccacacagacatcaccaagccatacacactgctgctatggata

SEQ ID NO: 235106 - DNA, 71 bp, Homo sapiens
gggctgaagaagcagttctacaaggcgagccaggggttcagtcggctgccgtcaatgtcatctgcgagctg

SEQ ID NO: 235107 - DNA, 75 bp, Homo sapiens
cctggcctggccgggaccatgggagtggggaaggccagggccagattctgcagcgcttcccagagaaggactggg

SEQ ID NO: 235108 - DNA, 100 bp, Homo sapiens
ctcctcgcgagctaacgagtgtctctcgcgcgctcccttccctccgcgtgggtgtagaacacctgaaggagaagctcattagccaggcccaggaagtgag

SEQ ID NO: 235109 - DNA, 100 bp, Homo sapiens
ggaccagcaagggctctgtgtgcccaggatgcgccggcctccaggtcttgggcgtctttggtactggcttttttaggggtctgcctggggattacccttg

SEQ ID NO: 235110 - DNA, 75 bp, Homo sapiens
ggtgaatttaaaggagcagccctggtgtcacctatcagtaaaaggcgtggtgaccaagatgaagatgcagaggac

SEQ ID NO: 235111 - DNA, 99 bp, Homo sapiens
cacggcccttccacagtaccttccacaataccagtgctaatctgactgagaggccagattacctgtccctaatactgagcagaagctggtgaatgaaac

SEQ ID NO: 235112 - DNA, 75 bp, Homo sapiens
gcctctgttccctggaggactttctctggaagaaaaaatgctgggcatcttggtgcagcacaaagtccggagtgg

SEQ ID NO: 235113 - DNA, 98 bp, Homo sapiens
ttggccagaactacgacattacaatggaagtgcctgagatcatcagctccatccgtcaggcggggaagatcgcccggcaggaggagctgcactgcccg

SEQ ID NO: 235114 - DNA, 101 bp, Homo sapiens
atgtgtagaaagtgaaatcagaggagatgtaactatcggtactaggttttgacaagcttgcatcatgcgtgagtataagctagtcgttcttggctcaggag

SEQ ID NO: 235115 - DNA, 49 bp, Homo sapiens
cccagcagcacttcctggaagacattccatggcaatagattctggtttc

SEQ ID NO: 235116 - DNA, 107 bp, Homo sapiens
gaggagcccggagggaaccggcgacgaggggaccatgtaccgggacccggaggcggccagcccagcccagagcatgttccagatcccagagtttgagccgagtgagc

SEQ ID NO: 235117 - DNA, 100 bp, Homo sapiens
gcagccgccacctacccagtgaccatgataggaaagggggctgtatacagctttgatccagtagggtcttaccagagagactccttcaaggctggaggct

SEQ ID NO: 235118 - DNA, 74 bp, Homo sapiens
tggagtccagcctgccagacagaaagttatggtgaaaggaggaacgctaaagtgtgcaggatcaagacaaaaaa

SEQ ID NO: 235119 - DNA, 74 bp, Homo sapiens
ggagaatgcaaagcaactgctcattagataaaataccatgaggagtttgagaagagccgcatgggccctagcgg

SEQ ID NO: 235120 - DNA, 90 bp, Homo sapiens
ggtgcaacctggcctgctgcagtgggtgaagttttggtaggaagcgtcagcccccgtagcacctctgttaccacgacttctagtgcctct

SEQ ID NO: 235121 - DNA, 90 bp, Homo sapiens
aacaagcagcctattatgcccagacaagtccccagggaatgccacagcatcctccagcacctcaggtaatagcctgcagctggtgttttg

SEQ ID NO: 235122 - DNA, 75 bp, Homo sapiens
cggtgtctgctcctgtcgccttcgcctcctaatccctagccactatgatgcggcattccaaaagaactcactgtc

SEQ ID NO: 235123 - DNA, 76 bp, Homo sapiens
ccgcgggccaggagagcgctcggcgggctgcccagagaaaactgcgccaggccagcaccaacgtgaaacactggaa

SEQ ID NO: 235124 - DNA, 75 bp, Homo sapiens
cgaaaacgtggttgtagagttccgtgactcccagccaccttctgggtgaaccctcagttcaagatccggctggat

SEQ ID NO: 235125 - DNA, 98 bp, Homo sapiens
ggcgagcggctgtgtggatgtcggcgaagccgcgggcgagctcagaattctgcaaatgcagattttgcaaactttgatgcatttggacagtctagtgg

SEQ ID NO: 235126 - DNA, 51 bp, Homo sapiens
ccggacgcaaagctgtcatcgtgaaggatctgtgccagttcagaagcaggc

SEQ ID NO: 235127 - DNA, 90 bp, Homo sapiens
taattgctgaacttaaaaagcagtctaaacctgtgaccacccctgaagaaattgcacagatggctgatcactgggaaactgcacctcgtc

SEQ ID NO: 235128 - DNA, 100 bp, Homo sapiens
ctcctgcagcccaccgtctacttgacctttccagctcacccccagggccttatggtcaagaaatgtatgcgtttcgatctgaggaaagattcaaatcccc

SEQ ID NO: 235129 - DNA, 75 bp, Homo sapiens
ttaaatatcttcgagctgaacctgaggaccattattttttaatggtggaggatgcgctatcttatcttgaccagg

SEQ ID NO: 235130 - DNA, 100 bp, Homo sapiens
atgcaagaaaacagcatgcaggtgtctgcaaaggtatgcttcagaagtgtccttctgttgatgacttcgtaagtgccctcgtttccgacttggatctgga

SEQ ID NO: 235131 - DNA, 75 bp, Homo sapiens
ctgactcctacttcctctgtatagagcaactgttgaactcagctgcctgtagtaatagttatgcacgagtgcgag

SEQ ID NO: 235132 - DNA, 75 bp, Homo sapiens
ggcgactgtcattcacaaccccctgaaagcatttacttacagcctcgaagatggagttccacgatcaacaggaat

SEQ ID NO: 235133 - DNA, 90 bp, Homo sapiens
gaccattcttccctgggctggtgaagtacatgaactcagggccggttgtggccatgatgacacctttgaggccctgtgcatcgagccgtt

SEQ ID NO: 235134 - DNA, 75 bp, Homo sapiens
ttctccagcgccctggcctccctcaccttggacacctcgcttgggtatcatgatattagctggtttgacatcaag

SEQ ID NO: 235135 - DNA, 100 bp, Homo sapiens
aattgagtcatgaaactgtaaccattgaattgaagaacggaacacaggtccatggaacaatcacaggtaaaaatgtctccatcgtatcatcagtccaaag

SEQ ID NO: 235136 - DNA, 75 bp, Homo sapiens
caatgacccaacatctcttcggaaaaacctcaggtggcctccatgaaccagcgccgtgtggatttctaccttgcc

SEQ ID NO: 235137 - DNA, 90 bp, Homo sapiens
gttagtgaatctatggattttagatatctgccagatgaaaaagttgccctcaaattggctgtagccacacggatataagaaagtcagatc

SEQ ID NO: 235138 - DNA, 75 bp, Homo sapiens
gccctcatcctggttctggaatcctcagttcaagctctttcctggagagtaaccccagtttggtccacaaggctt

SEQ ID NO: 235139 - DNA, 100 bp, Homo sapiens
gaaaacttcccttccctttcgaacagtgctcggcatggcagggattccagggctcctcttccttctcttctttctgctctgtgctgttgggcaagtgagc

SEQ ID NO: 235140 - DNA, 98 bp, Homo sapiens
ctcagaagagtgagagagagctattagagattgtgaagaagaatttcgatctccgccctggggtcattgtcaggaacttagtgatttggcccgtgacc

SEQ ID NO: 235141 - DNA, 52 bp, Homo sapiens
tgtaatcccagcactttgagaggctgaggcaggtggatcatgaggtcaggag

SEQ ID NO: 235142 - DNA, 90 bp, Homo sapiens
ctgcgtcaccgccgcccccccagacaagatggacaccgcggaggaaggcattgtcaaggattctgaagacatttacaatttaaagaaccc

SEQ ID NO: 235143 - DNA, 97 bp, Homo sapiens
cgggagttcaagaagaacactccagagtttccgttactatggcaatgacggcagggactacaacaacctttcctatgagcaaccatacccgggaaag

SEQ ID NO: 235144 - DNA, 98 bp, Homo sapiens
agacatccgctccttgcccgagaacatccagtttgatgtttactacaagtcgacttgggaataagtgtcaagacggataatgtggccacttcttcccc

SEQ ID NO: 235145 - DNA, 99 bp, Homo sapiens
aaacatacagtcgcctctgacaagccagattgagaggatccagaatccagatctctggaatagctaccaggcaaagaaaaaaactatggatgccaagaa

SEQ ID NO: 235146 - DNA, 51 bp, Homo sapiens
ctgagagatgcggccccctcgcagggtttatgaaggcgagcgtgccatgac

SEQ ID NO: 235147 - DNA, 51 bp, Homo sapiens
cagcaaccagctagctactcgagaggaaactctgatgaggaagaaagtgct

SEQ ID NO: 235148 - DNA, 75 bp, Homo sapiens
tgcgcttcctggagagccacctggatgacgccgagccctacctcctcacgactgtagtcagcttttaacctctgg

SEQ ID NO: 235149 - DNA, 83 bp, Homo sapiens
tctctctttctggcctggaggctatccagctggacggctgcattcatcgggccgccggccccctgcttaccgacgagtgccgg

SEQ ID NO: 235150 - DNA, 50 bp, Homo sapiens
agctcgtggcctgcctctgcgtgccacctgtggaatcctctcaagaggaa

SEQ ID NO: 235151 - DNA, 100 bp, Homo sapiens
ctactccttagctttcctggcagggtctgagcgggaaagttccgaagaataggagtggctgagttagctacggagttcatttggggccgggaagcagaga

SEQ ID NO: 235152 - DNA, 138 bp, Homo sapiens
gcactgccaaatagcagaagaataccatgaggtcaaaaaggaaatcaccctgcttgagcaaaggaaacatccacgacagcgatggcagttccagcagcagccaccagagcctcaagagcacagccaaatgggcggcat

SEQ ID NO: 235153 - DNA, 50 bp, Homo sapiens
tgaccctcagcgccggtgcatgtcgattgcctccggagccagcgtggtgg

SEQ ID NO: 235154 - DNA, 74 bp, Homo sapiens
gtgatggagattttgatgtggatgatgccaaagttttattagatttgttcccgacaaggagttttctggttcag

SEQ ID NO: 235155 - DNA, 83 bp, Homo sapiens
ctcgctggcctgcgacccagccagccagcaacctggaccggtctcggcgcggaagatggccggcggcgtggacggccccatcg

SEQ ID NO: 235156 - DNA, 100 bp, Homo sapiens
cactggactacttacaaaaatggtgctgggtaggccaggtttcagcatcgcagacaagaagcgcaggacaggctgcattggggccaaacacagaatcagc

SEQ ID NO: 235157 - DNA, 75 bp, Homo sapiens
gtgcggctgcaggtagagtgtcttaggatggtgccatgacaatggtgtgaactacaagattggagagaagtggga

SEQ ID NO: 235158 - DNA, 112 bp, Homo sapiens
cagcatcttggctgaccttgagtgcagctccccctataagcctcggcctccacaggacagcctttcctgcctcagggaagaagagagagacagactacagtgatggagaccc

SEQ ID NO: 235159 - DNA, 100 bp, Homo sapiens
tttatcttggtctttgaccttcttattgtgatgcaggttttaaatgcacagagagcaggatacaaggcagccatagttcacaatgttgattctgatgacc

SEQ ID NO: 235160 - DNA, 100 bp, Homo sapiens
gaatatttccacatttgtgttctctgtgtaacgtagaatgtagtcatttgaagggtatcactgggatacatcagattggatgccaagcgttcctctgccg

SEQ ID NO: 235161 - DNA, 145 bp, Homo sapiens
gctcaggctgaaattgaacagtaccgcctgcagagggagaaagaattcaaggccaaggaagctgcgagctccacaatggccaggtcctcactgttctccggattgacaatacctgtgcacccatctccttcgacctgggagccgc

SEQ ID NO: 235162 - DNA, 75 bp, Homo sapiens
attcgcagtggtcgcttcttctccttggtcaattggcatgattttgctttttttgatcctgtaatgtatgagagt

SEQ ID NO: 235163 - DNA, 102 bp, Homo sapiens
ctttgcttacgtaccacttaaggacattgtggcaatcatcctgaatgaatttagagccaaactgtccaaggctttggcagattactacagcatcccatttcc

SEQ ID NO: 235164 - DNA, 76 bp, Homo sapiens
agaagttggactgtgttatagtagtcttcataggagagctctgggtgaaccaggaggatgaggtggaggaggggcc

SEQ ID NO: 235165 - DNA, 88 bp, Homo sapiens
gccatggaagaaatgatgatggaaatgaagtataataccaagaaagccccacttggcctggagctgctgaagactgctattgggaaag

SEQ ID NO: 235166 - DNA, 122 bp, Homo sapiens
tgaaatcgaaaatatgatgaactctatttttaagggtatatttgttcatagataccgtgttccttgcctgtatctccccttggttcaatagctaccagatttttggaagaggaggaactgag

SEQ ID NO: 235167 - DNA, 74 bp, Homo sapiens
gctacccgagcccgtcaccctgagatggagccattgatagcatccaccaggtgggcgtgtactgtctggccctg

SEQ ID NO: 235168 - DNA, 100 bp, Homo sapiens
ccctcttctccaaaagcagtgatgtctggagatgatggatggcccaggagagaatgatcctgatttgaaacctgcagaccaccctcgcttctgtgaagag

SEQ ID NO: 235169 - DNA, 75 bp, Homo sapiens
aaagacgggccattttccagacctcatccaggtctcggcgcggaagatggccggcggcgtggacggccccatcgg

SEQ ID NO: 235170 - DNA, 50 bp, Homo sapiens
tctgtcttggaggacatcagaagagtcagcgtgggagaaattgtaacgag

SEQ ID NO: 235171 - DNA, 96 bp, Homo sapiens
gcgaggatgacgaggtgccggtggagcccgagtctgactccggggacgaggaagaggaggaccttttaccaatttgaggctgcgtgggacagctcc

SEQ ID NO: 235172 - DNA, 75 bp, Homo sapiens
atatgaacaatccgtctggatcacggatgtaggaagtggcatttgcaagtaaaatcactggcatgttgttggaat

SEQ ID NO: 235173 - DNA, 75 bp, Homo sapiens
tcgttgcgaacaaggaaaatggtcatccccacctgtttgcttgggtgataaagtcatcccactcgctattcctca

SEQ ID NO: 235174 - DNA, 50 bp, Homo sapiens
cctatgttacgtggatgtttgtaacacttaattcagtgcacaaatgagat

SEQ ID NO: 235175 - DNA, 101 bp, Homo sapiens
gacggatacaaacaacattgcctacttatttctctcagctgccaacagatggctggaggtcaggacggatcaccacgatgaatgacacggtaactatctgg

SEQ ID NO: 235176 - DNA, 100 bp, Homo sapiens
gtacaagatttaaaaagcatcgtagagcttcacgaggctgacattgtggtcctaggctcacctaagccagaagagattccccttacttggatacaaccag

SEQ ID NO: 235177 - DNA, 100 bp, Homo sapiens
ctccgtcccccgcgggtctgctctgtgtgccatggacggcccgtggaccgggagcccgtggaccgggagccggtggtgtgccaccccgacctggaggagc

SEQ ID NO: 235178 - DNA, 96 bp, Homo sapiens
gaactcagccggttctatttcagctaatgccaccctgactgtcctagaaaccagcctggacaccaagtctgtgtcagaaggccacctcaagaggaa

SEQ ID NO: 235179 - DNA, 98 bp, Homo sapiens
gcttttttccttcctaggagaaatcgaggagctgcggctctaccccccggacctaccgtatgtgaacgggagctgtgtgtgtttgcttttcaaaccct

SEQ ID NO: 235180 - DNA, 78 bp, Homo sapiens
aagagggttgtccgtgatccacaaggcattagagcatggtggacccaagtggagagattgtggaactggcgaaaggtg

SEQ ID NO: 235181 - DNA, 100 bp, Homo sapiens
atcacccaggtcagcaagggcacctgcgagcaaggaaaattgcctaagaattatgacccaaaagttaccccagatccagaaagatggctgccaatgcgag

SEQ ID NO: 235182 - DNA, 80 bp, Homo sapiens
caacaacaattccgatggcaaagccgttgccaagcatatgaaacactctcagatgctaatagacgaaaagagtatgatac

SEQ ID NO: 235183 - DNA, 100 bp, Homo sapiens
atatccggaacacagccacgcctggggagctgggccgcctcgtcaacaggaacttagctggaaatgatcttcattggttagcatgtgccttatatgtggc

SEQ ID NO: 235184 - DNA, 75 bp, Homo sapiens
ctccatgcgcagtcatgagtcgcttcaagtttatcggcgtaagacagagtatggaagacgtgtattttggatctt

SEQ ID NO: 235185 - DNA, 80 bp, Homo sapiens
atcaacaccggggagtctgcgggttcagcagactgtacaggatctttttggcagagccccaagtaaagctgtcaatcctg

SEQ ID NO: 235186 - DNA, 96 bp, Homo sapiens
ctaagaagacgtttggtttaaagaattaaaaggaagaacaacttaagagcttcttcaaaggaaggaaatctcagatggaggaagtgcaagatgaac

SEQ ID NO: 235187 - DNA, 74 bp, Homo sapiens
gcaggagcagcttctggatgaaatacatcgtgagaagagaggtacgttcttcagatgtgtcatggtctgatact

SEQ ID NO: 235188 - DNA, 75 bp, Homo sapiens
ctcgactccaaatggttgaaaacagatatacagaattatatccagatcgagagacagaagattctgaaagggttc

SEQ ID NO: 235189 - DNA, 101 bp, Homo sapiens
ctgctctgaaagctcttcttgaaaaatgcaaagatgtagatgagagaaatgagaaaatcccgttttgtcaacctaatgaagcattcaaagaagacatatga

SEQ ID NO: 235190 - DNA, 83 bp, Homo sapiens
gtgatggcacaaaacaatctgggcatgccaccaatggtgatgagcagatcaaatggggagcctgcggccttgtgttggcaggc

SEQ ID NO: 235191 - DNA, 90 bp, Homo sapiens
tatattgttacaattttttttcaagaactgccgtcttctttgcctgcactaatggattttttatcaagcagaaatgcatcgaacaacgag

SEQ ID NO: 235192 - DNA, 120 bp, Homo sapiens
ggcgggcctcgcgggtccgggagcgcggcggagacgatgcctgagatcagagtcacgcccttgggtcttgggcgtctttggtactggcttttttaggggtctgcctggggattacccttg

SEQ ID NO: 235193 - DNA, 80 bp, Homo sapiens
agggcctgttacagtctacccctacatgcatgtgcctccggagccagcgtggtggccatagacaacaagatcgaacaggc

SEQ ID NO: 235194 - DNA, 100 bp, Homo sapiens
gagtctccaagccctgctcaacgtgctgcagggccagcagccagaaggcctccagtctgagccacctgaggtcctaggtgaccctggcagcaaccccaac

SEQ ID NO: 235195 - DNA, 90 bp, Homo sapiens
tggcgactaagaggcgaaaacgtcactggaaagaagaatggcaatggggaggcaggggaattccttcctgaggatttcagagatggagag

SEQ ID NO: 235196 - DNA, 98 bp, Homo sapiens
cgggagtaccagctggaagggatgaactggcttctttttaactggtataacaggtcctgaccactggcatgaacttttcccaaatgccaagggggaaa

SEQ ID NO: 235197 - DNA, 73 bp, Homo sapiens
gatgacatatttttggacctgaaacagaaattctggaacacctatatgggaattcggcaccggttgagaggta

SEQ ID NO: 235198 - DNA, 99 bp, Homo sapiens
ctcggcttctccagcttcggtaggagaggatccggcgccgaatcactgactggcacaggtgttgggaatagcctaacatggcagaccagagacagcgct

SEQ ID NO: 235199 - DNA, 87 bp, Homo sapiens
cccatcccggaggtctccgccggctcccgggagtacatcgatgcccaccctgagaccatcgtcctggacccgctccctgccatcaga

SEQ ID NO: 235200 - DNA, 98 bp, Homo sapiens
ggaggggccgggccgagcccgggggcgctttcgcacgcgaagcaaccgctagagcaggacctggtctcccgagagcctttgcaaaatgttagcacagt

SEQ ID NO: 235201 - DNA, 100 bp, Homo sapiens
ccaggatgtcctgaaggagccctcaattgcattggaaaagctgcgggaactcagctttagtggtggacccaagtggagagattgtggaactggcgaaagg

SEQ ID NO: 235202 - DNA, 82 bp, Homo sapiens
tgagccccgctacccgccccacagcctttcctacccagtgcagatcgcccggacgcacacgcaataccaagaaggagggtga

SEQ ID NO: 235203 - DNA, 49 bp, Homo sapiens
gttaaagttggatgtgctggaacagtttcgtgtggctgatcaaagaaag

SEQ ID NO: 235204 - DNA, 98 bp, Homo sapiens
agcagcgcctgatcgagtccctccggaactcacactccagctggtaatgccgctgtcatcaaatatgaggagaaacctccaaaaccagcatttcagaa

SEQ ID NO: 235205 - DNA, 98 bp, Homo sapiens
agtggttgaatgccatggatgagattggattgcctaaggtggataaattagatgcttcagaatcactgagaaaagaagaagaacaagctacagagaca

SEQ ID NO: 235206 - DNA, 50 bp, Homo sapiens
gtttctaggaaaggccggacaccaggagggtgaggacaaaatcttcttaa

SEQ ID NO: 235207 - DNA, 101 bp, Homo sapiens
ttatgatctacctaccaatcgtgaaaactatattcacagaatctaaacagtgggaatgtttgacatctgaatgcagagtgctcctaattgagtctttagct

SEQ ID NO: 235208 - DNA, 97 bp, Homo sapiens
agctgagaagcccataccactatttgttgagaaatgtgtggaatttattgaagatacagcactattcctgatcagagaactccagttgcttcaacac

SEQ ID NO: 235209 - DNA, 100 bp, Homo sapiens
tctcttacgtctgcggaagtgcagctgcctcagttcttagcgcaggtattggcaagcttgccagtgtacctgctggtggggctgtagccgtctctgctgc

SEQ ID NO: 235210 - DNA, 90 bp, Homo sapiens
ggtgccacatcctagcccctttccttactggatcctcaaaccagaagaaaacctgaatctctgaggagctctttgttcaatgcctagcca

SEQ ID NO: 235211 - DNA, 100 bp, Homo sapiens
cagagttcaaggaggccttccagctgtttgaccgaacaggtacaaatctattgtcaagtacaagacagctttctactccttctaccttcctatagctgca

SEQ ID NO: 235212 - DNA, 82 bp, Homo sapiens
tgttcgttgtgccagcgactaaaaagagcaaagtgcagaggaaagttccacttccagaaaaagaactacagaagacgatatc

SEQ ID NO: 235213 - DNA, 100 bp, Homo sapiens
aaattagacaagaaacattggaaaagaaatcctgataagaactgctttgtttctggcatttgaagtcaaagagtattcagcgttggatgaattacaaaag

SEQ ID NO: 235214 - DNA, 51 bp, Homo sapiens
ccgaaacaccggtaggagcggggagtggctagaaagtttgaaatggtgggg

SEQ ID NO: 235215 - DNA, 100 bp, Homo sapiens
atcatggatcaatctcaaacaaagagtggcagaatttagtgacatttggaagcttttcaaacatggttccctgtagtcatccatatattggtaccctgag

SEQ ID NO: 235216 - DNA, 124 bp, Homo sapiens
gtcttcatctttacagaggaatagtctacaaaggaagacttgtaacctggagaagaggaaataatgcaaaaggtgtcccaaggctcctgaccagtgaacaaagatttgagaaagacagccaagc

SEQ ID NO: 235217 - DNA, 90 bp, Homo sapiens
gaggatttatagatcagaatctcagtccaacaaaagagctgtaggtaaaacttgcctactgatcagttacacaaccaatgcatttcctgg

SEQ ID NO: 235218 - DNA, 100 bp, Homo sapiens
tgaagcattgcttcaaagcatggggctaactccagaatcccccattgacaagttggatggcttgaggactggtactaaaaggaaacgtgactgggaggcc

SEQ ID NO: 235219 - DNA, 100 bp, Homo sapiens
tggaaaaactgcgctgctccatgtcttcgccaaggactgcttccccgaggtttgtggagaaaaacagcgctttgagaagttgatggaacatttcaggaat

SEQ ID NO: 235220 - DNA, 75 bp, Homo sapiens
gccagaagcgggcggcgcgggggagatgaacctaaaggcagacccagaagagctttttacaaaactagagaaaat

SEQ ID NO: 235221 - DNA, 100 bp, Homo sapiens
tagtaactttggaaaacagtccatgtattacaccagagttgcttcgtatatttcagaatatgtcaccacttcttgatggagtttcactcttgtcgcccag

SEQ ID NO: 235222 - DNA, 83 bp, Homo sapiens
gggcgcagtttctcacgacgggccgagcctgccactgctgtattcatcaccaaagaaaaaacttacaccaatgcagaaatcgg

SEQ ID NO: 235223 - DNA, 50 bp, Homo sapiens
ggccgccgagagggttcacaaaggggagagctggtgacggcctccaaggc

SEQ ID NO: 235224 - DNA, 50 bp, Homo sapiens
actccatccaacacttcgtttactccgatctcattcgtcggttcggatcc

SEQ ID NO: 235225 - DNA, 50 bp, Homo sapiens
tatccagaacctccaatctttcgacccctttgctgatgcaagtaagggtg

SEQ ID NO: 235226 - DNA, 75 bp, Homo sapiens
aaggagatcggccacgagaagcaccgggactgggtcagctctcagagacttcgagggtccgaggggccacggcgg

SEQ ID NO: 235227 - DNA, 100 bp, Homo sapiens
cctgtacagcctgcagaactagcaagtgcaccggcacctggaccaacacgaagtgagatacctgcagtttgccttccgctggatgaacaacctgctgatg

SEQ ID NO: 235228 - DNA, 100 bp, Homo sapiens
caagatccttgatgtcatgctcaaggggctctttaaggatctcaccactgagctgagttgggagctgaccattcccccagaagtacagcggatcgtcaag

SEQ ID NO: 235229 - DNA, 74 bp, Homo sapiens
tgctgggcaggtcatgagtcaccatgggccgcgatgggcctcttggaacattggtgtgttcatctgcattcgat

SEQ ID NO: 235230 - DNA, 82 bp, Homo sapiens
cgagagccacactttcaagtaaaccagacaggccgacggtcgcaaggtcctacggtcaagcatccgggagtttctatgcagc

SEQ ID NO: 235231 - DNA, 75 bp, Homo sapiens
aaattaataaaatgcacatatcccagtccattgaggtcgggggtggagagacctacaccatcggcttgcagtttg

SEQ ID NO: 235232 - DNA, 50 bp, Homo sapiens
ggaactctgcgtggatcgtttggaaataactctctttgctcacaagttac

SEQ ID NO: 235233 - DNA, 100 bp, Homo sapiens
tcttgttttgggaactgcttcacaggatccagaaaaggaaagacgagaatccaggacttgaatcgtatcttcccactttctgaggactactctggatcag

SEQ ID NO: 235234 - DNA, 100 bp, Homo sapiens
caagttagtcacaagcctggtggagagccaaagatcaaaggcaattgaaggaacagactaaaaatcgtgtcctggaaggaaactacaggtactaccaggg

SEQ ID NO: 235235 - DNA, 89 bp, Homo sapiens
gctgaagaaagaaggtgggagcggagagcgcaggcgtgatcctctggaccttctccatctacctggagtcagtggccatcttgccgcag

SEQ ID NO: 235236 - DNA, 100 bp, Homo sapiens
ctggccgttgccaacacgggaattctagtgtttcaggttcaatgtatctatgcctgcctacctcaatctgcaagggagtgtcagaaaggccccgcattcg

SEQ ID NO: 235237 - DNA, 100 bp, Homo sapiens
gagaacttagaggatgcttctcaatgcaagaagttaagaagctctttcgaatcaagttgtccccaacagtgggccatggttgcttgttatccgggcaatg

SEQ ID NO: 235238 - DNA, 105 bp, Homo sapiens
aaatccatctcattaatgacaatcagccatcctggattggacagggccatggcacctgcaaggtgtttctcagcaagattgaggaccgtgtttcagggcgtgggg

SEQ ID NO: 235239 - DNA, 101 bp, Homo sapiens
ggacaaccttgaccatcctgagagatgtgatcctggtgttgatggaagccagcaagttcagctccggcaagtcatttgattcacccggtgatgaaatgggg

SEQ ID NO: 235240 - DNA, 74 bp, Homo sapiens
cagaaacccaggacagtagcacacagactgacacatctcacagtgggaattatatccagatcgagagacagaag

SEQ ID NO: 235241 - DNA, 83 bp, Homo sapiens
gtggacctgctggcgcaggacgccgacatcgtgtgccgctgccagggcgaagctgtgctcaggcccgggctggacgcagagcc

SEQ ID NO: 235242 - DNA, 89 bp, Homo sapiens
cctcaaacgtggagatcaactcctctctgttaatggagtgaaacctctgtagaggagcaggatgcaaccgacaggctgtggccggacag

SEQ ID NO: 235243 - DNA, 50 bp, Homo sapiens
ttgatagcatggatttctgtgagctcactatttcccatcagatatcgcta

SEQ ID NO: 235244 - DNA, 98 bp, Homo sapiens
gtgactagacggccagccagtcatcaaacggagagagaaacccctcctcgttttgcccagcatggcacgtttgagtacgaatattctcagcgatggaa

SEQ ID NO: 235245 - DNA, 100 bp, Homo sapiens
aggaaggccaagtcgagggccaagacgaagacagttttgcacactagggaccaagaagccctcggggacactgctgagaaaagactgccgaagggaagac

SEQ ID NO: 235246 - DNA, 82 bp, Homo sapiens
cgctgccagcatcgccgccgccaggtggacgacatccttggagaaggcagcgacgacagcgacagcgagaagaggaggcctg

SEQ ID NO: 235247 - DNA, 90 bp, Homo sapiens
tcatggtgatgccggggatgatcagccgcatcctgtacacaggttccatactgccctctgtaggaagctctgtaggcagtgtaaacggat

SEQ ID NO: 235248 - DNA, 100 bp, Homo sapiens
gattttgtcgctggacgtctagagatgtgggcatggcagacaaatctgtagccttgtcctgccaagaagttactgatgatgaggtcttagatgcaagctg

SEQ ID NO: 235249 - DNA, 75 bp, Homo sapiens
tgtgaactgtgaggagttcgccgagttccagacgaagttatacggaagcgtctcctcattgatggagatggtgct

SEQ ID NO: 235250 - DNA, 50 bp, Homo sapiens
tggctggccaagttactggagccgatgtggagctgatcagaataatgttc

SEQ ID NO: 235251 - DNA, 75 bp, Homo sapiens
gcccaacaaggaaacctcttagaaaaaagagtagaatgaatggcagatgtggagctattcttgctgatgaaatgg

SEQ ID NO: 235252 - DNA, 75 bp, Homo sapiens
catttgccttatacagctaaagccatggaaagaaaatcctgagcgagcagctctgtactttgtttctggcgtgtg

SEQ ID NO: 235253 - DNA, 75 bp, Homo sapiens
ctgaggaatcggcaaactccctggtctctgttggtgtagaagccaaaatcaggacttaaccaccaccatgtcgag

SEQ ID NO: 235254 - DNA, 100 bp, Homo sapiens
tggagatcaagcgcagcgatgaacattctagtatgccagtagaaaaaaatatcactttagaaaggccttctaatgtaaatctcacatgccagttcacaac

SEQ ID NO: 235255 - DNA, 50 bp, Homo sapiens
gcattatccaacggctgctggaagcacccacatgcaggatctccaggagg

SEQ ID NO: 235256 - DNA, 76 bp, Homo sapiens
ggcctctcggcctctgccggagaaacaggtcctgtccatgaagaaggagctgaacccagtggagctggatttcctc

SEQ ID NO: 235257 - DNA, 123 bp, Homo sapiens
ggaggatgaggagatggaggcgtcgggcgtgagcggaaatgaggaggagatggtggaggaggctgaaggaaagaccacagcaagattctttcattcgtctcctcctagcctgggggaccaggc

SEQ ID NO: 235258 - DNA, 100 bp, Homo sapiens
ggcaccaacttgggcaaaatatatgccatgaaagtcctaaggaaggtgccagagtactgttccgtgtggggctgacactggtgcgcctggcgctgggcac

SEQ ID NO: 235259 - DNA, 100 bp, Homo sapiens
ttcctcccggtcacctccaaatcttgctgcttttaattcaactcagaggagagtaacaacatggtggtgcctgccatgcagctcgccagcaagatcccgg

SEQ ID NO: 235260 - DNA, 101 bp, Homo sapiens
gtattttcagcgagggtactgtatttatggagaccgctgcagggtggatccatgctgtgctcacttctcaggactgtatggcttttggggggaacttcctg

SEQ ID NO: 235261 - DNA, 96 bp, Homo sapiens
gaaaagatatgggttctgtagccttggatgcagggactgccaaaggatatgttcaaggaatgagtgatttactttcccctcttttatatgtgatgg

SEQ ID NO: 235262 - DNA, 77 bp, Homo sapiens
aagctcaaggccgaagccgagcagaggatctaaatacaagagtggcctattgacctttccaaagtgaaactgatgag

SEQ ID NO: 235263 - DNA, 71 bp, Homo sapiens
caccaagagggcgggagaactcactgaggatgaggtgattaaggaagtccaggagttttacaaggacacct

SEQ ID NO: 235264 - DNA, 51 bp, Homo sapiens
ggaggaggtggcggcggcgggaagatgttaattatagaaaatgccaagtag

SEQ ID NO: 235265 - DNA, 75 bp, Homo sapiens
cgacggggccaggaagcaattctggaagcgcagcaacagcaagctcccgggcagatagcctgggctggaagctct

SEQ ID NO: 235266 - DNA, 98 bp, Homo sapiens
tgtgatcacagagcctatttacccagaagtagtccatatgttgaaggcacagttaaatgaaacactcacaaaacttagaactgaacaaaatgaaagac

SEQ ID NO: 235267 - DNA, 100 bp, Homo sapiens
aaggggatgaagatgatgaggatgaagaagataaagaagacaaaaaaggaaaaaagactgatatctgtgaagatgaggtctatgttaacaatgaatgggc

SEQ ID NO: 235268 - DNA, 75 bp, Homo sapiens
ttgagtatgctccatgtagatcacagtgcctggaagagctgggatgtctggttgagtcctatggcatgaatgttt

SEQ ID NO: 235269 - DNA, 100 bp, Homo sapiens
tgattagcaatttaaagatcctctccaagcagcaggctcagcagcatccggaaacaatcacagagatgatgacacagcttccgtgactagccttaactct

SEQ ID NO: 235270 - DNA, 76 bp, Homo sapiens
aaggtggcctaccaggaggccaggggtgtcgccatggtccgggcccaccagctggtcttgccaccttgcgacgtag

SEQ ID NO: 235271 - DNA, 134 bp, Homo sapiens
ggtgacagcgggctggggactggcggctgcaactgcctgccgcgccgagggaccgccgggcggcggaaagcagcttagaccatgctcagcctccaagcagccttgtcatcgacaaagaatctgaagtttacaag

SEQ ID NO: 235272 - DNA, 100 bp, Homo sapiens
ctccgccccgacccgggccccgcggccctcgatgaggtccagaggtgtccttctaaagctggtagaggtttcacgagtcatcagggacccagaacccttc

SEQ ID NO: 235273 - DNA, 112 bp, Homo sapiens
tgggtgtagagattatggaaaaattcaatacaattagtgtctccaaatgcaacaggtcctggaaggaggaagcaacaatcctgagtgaaacctcgacaagaagtatccaata

SEQ ID NO: 235274 - DNA, 99 bp, Homo sapiens
cagaggaggcgggagagtgagagaaaggctggaagacgagacttaattcagtgcacaaatgagatgaatgtgaacatcccacagttggcagacagttta

SEQ ID NO: 235275 - DNA, 74 bp, Homo sapiens
tcgggagccgtggggcagaggctgcagagccccaggaggattttgactaaaggagaagttcaagtatcagataa

SEQ ID NO: 235276 - DNA, 90 bp, Homo sapiens
ttgctgctggaccctaggcactgttgaaacaactgcaccatctgcaggagcccagcaagtactatactggcaattgctggagaagatttt

SEQ ID NO: 235277 - DNA, 82 bp, Homo sapiens
tgacagatggcgtcctcctggcccagattatccaggttgtggttggcctttaccagagtttgatccaagccagattcgactg

SEQ ID NO: 235278 - DNA, 100 bp, Homo sapiens
ggttttcaggaactcataaatgccacctcaacaattcagaggatatggaatattatcttgtaaaatggaaaggatggccagattctacaaatacttggga

SEQ ID NO: 235279 - DNA, 100 bp, Homo sapiens
caagacgtggacactgagccccagaaacgaaatacagaggagtcatcctcacctgttagggatttactaaccagacataaagtgttggtagcagacttct

SEQ ID NO: 235280 - DNA, 113 bp, Homo sapiens
ccacctttgtcaccagaatgaatgaagtgcttcagatttaaatacgatgccctcctagctagccgtcacgggatggagggcttcatggactcagggacacagacggacgccgt

SEQ ID NO: 235281 - DNA, 75 bp, Homo sapiens
gagacacgccaaagctcccaaggttcgatacaagaggctgttttcctagcgtggcttgctgcctttggtaagaac

SEQ ID NO: 235282 - DNA, 75 bp, Homo sapiens
ggcagagacaccttctggcccgtccgctgcctggcccggaagcggaggaactcacgggatggggacccgctgccc

SEQ ID NO: 235283 - DNA, 87 bp, Homo sapiens
actgacggagacgcagatgtggacttgaaagaagctgcagcggaggaaggcgaggtgatagctgcaaacattgggtacgccactgtg

SEQ ID NO: 235284 - DNA, 99 bp, Homo sapiens
ggcttgcctggccctcctggcccccctggctatggatcacagggaattaaaggtctaaaattcccaggactccacagctttgcaccagataagcctgga

SEQ ID NO: 235285 - DNA, 101 bp, Homo sapiens
caggagcatttccaggggaagcgtgggctggaccaggatgtgcgggtgctgaaggtagtcaagatgctgagggttggaaaagcaaaagcagatgtgtggcc

SEQ ID NO: 235286 - DNA, 101 bp, Homo sapiens
ggaggaaggatctcaagagcaggacgaattgcatcacagagacaccaagaataaaatacagtgttggatccctttctcctgtttctgcaagtgtcctgaaa

SEQ ID NO: 235287 - DNA, 83 bp, Homo sapiens
ccaagaacaatagcttgccctcataaaacttctttagctggagaaaaaccgactcttggtgcagtgctccagcagaatccctc

SEQ ID NO: 235288 - DNA, 99 bp, Homo sapiens
tggagttcttacaacatggcagacattgacaagtaacagttaacctcttccacatgcagcatctgcaggctgcttcccttgcagacagtttacagtctc

SEQ ID NO: 235289 - DNA, 75 bp, Homo sapiens
gtcctccgttagctaattaaaacatttttcagggacgtagccatccagagaattcggttccctcaaaattataaa

SEQ ID NO: 235290 - DNA, 116 bp, Homo sapiens
cagagctttcacgaaggcaccgacgtcatcatgctgaccaccaatcagatccgtaagggcgtgatggtgggcatgggtcagaaggattcctatgtgggcgacgaggcccagagcaa

SEQ ID NO: 235291 - DNA, 100 bp, Homo sapiens
gagcgatcaacacgctgaacggcttgaggctccagtcaaaaaccattaagaaaccagtaaagacagctctggcaccaagccagccaacaagcggcccatg

SEQ ID NO: 235292 - DNA, 83 bp, Homo sapiens
tcggaatattacagcggcgaccagtcagggggatatgagactttctactcggaatatcctgagtgttgcgtggatgtaaaacc

SEQ ID NO: 235293 - DNA, 75 bp, Homo sapiens
cctgacgcggggcaagattctgctgtgcacagatggcaggcagcagattctgagtttgggcatggacctgcagtt

SEQ ID NO: 235294 - DNA, 100 bp, Homo sapiens
atggtgagcatgatggagggtgtcatccaggcggagtacgtccagcttgttactgaacttcgaatgacaagagccattcagcctcagatcaatgcttttt

SEQ ID NO: 235295 - DNA, 98 bp, Homo sapiens
ctgaatgctataaagccaggacttgttaaaaagatcaatagattgcctacccccattgcaggactgggagagtcccgtattctcagagtaaaagttgt

SEQ ID NO: 235296 - DNA, 100 bp, Homo sapiens
cgcccgcaaccggggcgaatcatggcggccgccaagggactacttctgatgaagaaagtggcataattaaagctgaggacctcacgcctgtaatcccgcc

SEQ ID NO: 235297 - DNA, 90 bp, Homo sapiens
ctaggttctgggaagatggcgaaggtctcagagctttacgatgtcacttgggaaggccaataacggaaaactgcctgacaacaaagtcat

SEQ ID NO: 235298 - DNA, 101 bp, Homo sapiens
ccaggctcagtctgtccatcatcaaagaccaggttcaagggtctctccagaaaatcttgtggacaaatccaggggaaggaaagtatgcctcagactcctcc

SEQ ID NO: 235299 - DNA, 89 bp, Homo sapiens
atgttggagaactacagaaacctggtctccctaggtggctggcatttgagtccagggccttccgcggggagcagtttgttctggagaag

SEQ ID NO: 235300 - DNA, 85 bp, Homo sapiens
aaaagagttgattgaaattatctctggtgctgcagctctgtctgctggagtttgttggagttccactccagaccctgtttgcctg

SEQ ID NO: 235301 - DNA, 82 bp, Homo sapiens
aggtctccagagccttctctctcctgtacgagctcaactggaggcagtcctgtgcggaaatctgaagaaaaaacagatacaa

SEQ ID NO: 235302 - DNA, 76 bp, Homo sapiens
tgccctgctctgctctaacaacatttgacagaataacgggctcccagattcacaagccccaccaagaggatcaccc

SEQ ID NO: 235303 - DNA, 98 bp, Homo sapiens
tcctggccgggctcatgcttgttaccggctccatcaacacgctctcggcaaagatgatcacggacgtgcagctcgccatcttcgccaacatgctgggc

SEQ ID NO: 235304 - DNA, 101 bp, Homo sapiens
ggaaggtgatgtcgtaaagccgggagtgtcgtaaaccaggtcatgaaacgagtgcgtaccgagcagattcagatggcagtgtcctgctacctcaaacgccg

SEQ ID NO: 235305 - DNA, 50 bp, Homo sapiens
gtcagaccgatatgtcaaaatcaagtcagagccgagttagtggaaaagtg

SEQ ID NO: 235306 - DNA, 104 bp, Homo sapiens
gaaaaattatttgcactggagcaacaaggagatcatgcacgccctgaagatgacctggcacgtgcactgctttacctgtgctgcctgcaagacgcccatccgga

SEQ ID NO: 235307 - DNA, 85 bp, Homo sapiens
gcgtatggagtggaaacgcttgtagggtttcaccagttgttgacctcctgtactggagagacattaagaagactggagtggtgtt

SEQ ID NO: 235308 - DNA, 100 bp, Homo sapiens
ctctgctgctctctcatttgctggccatcggattggggggcagacactggcctcagatacctgacctggtaccctctatgaggcctgcggtgctgggctc

SEQ ID NO: 235309 - DNA, 74 bp, Homo sapiens
catccgcgggtccatcacacaagggttggatgggctgtctgagcgctgtgcccagtacaagaaggacggagctg

SEQ ID NO: 235310 - DNA, 96 bp, Homo sapiens
gattaccactccagctgctgggaacgggcgagaaagaggaggaggcgagaaactcccaccgacccacagaggtgaatctggattgggaaagtcgac

SEQ ID NO: 235311 - DNA, 75 bp, Homo sapiens
gttcttccaaagtgcccggacccaaaacaggaagatggacaaccggaaattttctacacattttggaattcagtt

SEQ ID NO: 235312 - DNA, 90 bp, Homo sapiens
ggaggccaagcgaccacccaaagaagattgtcactgctgttccaagggcacacgcagagggatttggaattcctggagagttgcctttgt

SEQ ID NO: 235313 - DNA, 75 bp, Homo sapiens
agacatgagaagattcatactggtcagaatggcggcagcggagcatcgtcattcttcaggattgccctgctggcc

SEQ ID NO: 235314 - DNA, 96 bp, Homo sapiens
aggacagttcgctacacagcaatgcatcgagtgccctgtactctgtggggatgacggcagtgggcctggccatcctgtggtatgttttccgtctgg

SEQ ID NO: 235315 - DNA, 99 bp, Homo sapiens
tgcagcatatttgtttttctctgatttctccagaatttggagattatttgtaaacggttgtcctccaccccgctggaaatcctgttctttctgaacggg

SEQ ID NO: 235316 - DNA, 101 bp, Homo sapiens
gtcgtggagtttgtacggaaagaagatatgacctatgcagttcgaaaactggataacactaagtttagatctcatgagggtctttttggagttcctgagct

SEQ ID NO: 235317 - DNA, 97 bp, Homo sapiens
agaacagagatggcggggagagacggccaagcagcaccagcgtgcctttgggtgataagggagcattagtttggatgaattcaagtcattttgccat

SEQ ID NO: 235318 - DNA, 98 bp, Homo sapiens
ccgagtggaggaagcaatacatccagtatgaggactgtgaaggccttattgttcgctctgccaccaaggtgaccgctgatgtcatcaacgcagctgag

SEQ ID NO: 235319 - DNA, 98 bp, Homo sapiens
gaggattccgggacccgcgagcggagcggcgcgtgggtcggttgcggtcggccccggcagagttttgcggcctccaggtggtggatccaatttttcat

SEQ ID NO: 235320 - DNA, 89 bp, Homo sapiens
aaaggcgatcttcctgtttgtggataagacagtcccacagtccaggagttccaccatcttcctctgaagacgtagccatcttgctccat

SEQ ID NO: 235321 - DNA, 100 bp, Homo sapiens
ctctgttataagagagggagagataaaccaccgcttacagatattgggaggaaggaacctaggaagcaagcaggaagtctggcctcgctctcggatgcac

SEQ ID NO: 235322 - DNA, 100 bp, Homo sapiens
gtgcaatcctcacattcaagctgataggctgcgctaccggaatgtcatccagcgagtgattagcaacagccaactcagtttataaatccagaaacacctg

SEQ ID NO: 235323 - DNA, 90 bp, Homo sapiens
cctttcaaggtcatgatgttggattctgttgcctgggtaccaccagagggaaagctggggcgcactctcgagtggaccctgaggagctct

SEQ ID NO: 235324 - DNA, 75 bp, Homo sapiens
ggcggctgatttagaaggaggttcaggctacggtgagccgaagtgagcagcggttccatcgcagtgaacgccgac

SEQ ID NO: 235325 - DNA, 90 bp, Homo sapiens
tgggcccagtttatggcttccagtggaggcattttggggcagaatacagagatatggaatcagcttgcctgggaccagtggcagggaccc

SEQ ID NO: 235326 - DNA, 90 bp, Homo sapiens
gttgttgcttgggcgcttctccgctgcgtgtaggtgaagggggcttcctgaccgagaactctgaggagtgtattataaatgagataactg

SEQ ID NO: 235327 - DNA, 98 bp, Homo sapiens
gaagcaaagaccaaatcagaatccacttcagattcccagttctcaatcttccttcctccttacaagatacaagcaaccttcaaccttcccagagatgg

SEQ ID NO: 235328 - DNA, 100 bp, Homo sapiens
aacaatcgcttcaatgatgggaaggtggatcccgccgggaggtactttgctggaaaatgtttataggaggccttagctgggacactacaaagaaagatct

SEQ ID NO: 235329 - DNA, 74 bp, Homo sapiens
aaacaactttgaggatgagccacctttattagaaggtgcctgatgtgttgccagtgttgccagacctcccgtta

SEQ ID NO: 235330 - DNA, 98 bp, Homo sapiens
gggatcggcattgcctgtgtgcaggtgggccccctcatcctgtgccacagccagggtatccaggatgccaaccgttgggtccctaccctcctccatac

SEQ ID NO: 235331 - DNA, 124 bp, Homo sapiens
tttaaaccattctgaagactgactgagcgtggaagttgctcaacaaaaaaaggaacgggtatattgactgggctggcttagatgaagatgaagatgcacatgtctgggaggataattgggatga

SEQ ID NO: 235332 - DNA, 75 bp, Homo sapiens
ctggctcagccgcaagtacccgtccatcatagtcaactgcgtggaagagaagcgagtaaccagctcataaatcac

SEQ ID NO: 235333 - DNA, 50 bp, Homo sapiens
gcagttccatcagctcagccaggtcttctcttccgccctctctggatgag

SEQ ID NO: 235334 - DNA, 75 bp, Homo sapiens
aatgagctgaaaagacttcgctgttattaaaccttcaagaatgttctcgtccatctccactggtggctgtggtgg

SEQ ID NO: 235335 - DNA, 75 bp, Homo sapiens
aggagaattcatacctgaagagaaatttggaagccatcaatacattgattatggattggatatgtctacttctgg

SEQ ID NO: 235336 - DNA, 100 bp, Homo sapiens
gaagaaaggaaatgttaggatcactttattctggacgtagacaagtttggcaacgagatcacccagctggcccggcccctgcctgtggagtatctcatca

SEQ ID NO: 235337 - DNA, 80 bp, Homo sapiens
gtggcagtggaaaatgcgctcgggctggaccagcagatgtcgtgatctcaacagcttgtcacccaacagaaaacatcatc

SEQ ID NO: 235338 - DNA, 75 bp, Homo sapiens
actgtggccgaggcccacctgctgacatctacctgccaggatgaaacaggcgcctatttaatcgacagagacccc

SEQ ID NO: 235339 - DNA, 100 bp, Homo sapiens
atcgtaagcgcacgtttaaacatctcaagctgtcaccactgactaaagaagagaaaactgcggcagagcaattcaaatttcacatgccagatttatgaag

SEQ ID NO: 235340 - DNA, 96 bp, Homo sapiens
gccaccggacctacagctgcattcactgcagagctcacttggccaatcatgatgaactaatttccaaggactttgcctcccgggccaaactggcag

SEQ ID NO: 235341 - DNA, 100 bp, Homo sapiens
aagaaacaagttcttggcaagagaggcatcctccttgaagtatttggctgaggagttttcaatcccagtggtcttcaagctgacagagaagctgacggaa

SEQ ID NO: 235342 - DNA, 100 bp, Homo sapiens
tgggacgtctgagactttctccttcaagtacttggcagatcactctcttagcaggtttttgattggtcaaggagcacatgtaggggctgtcaacagtgaa

SEQ ID NO: 235343 - DNA, 75 bp, Homo sapiens
gaagccatgcccctcaggctggaacttgccctgtctcctcgcagatgagtaaaatgattaacctttcagttcctg

SEQ ID NO: 235344 - DNA, 83 bp, Homo sapiens
caggaaaagactcaggacggacaagcacagtcttcggaaggtcagcccaaggccaaccccactgtcactctgttcccgccctc

SEQ ID NO: 235345 - DNA, 90 bp, Homo sapiens
gaagcggcagcgaacgttctcggatgataatgaagataattcaaatgatgggacccagccatccaaaaggaggcgaatgggctcaggaga

SEQ ID NO: 235346 - DNA, 128 bp, Homo sapiens
gggcagaaaacacccagtttgtcaaggacttcttgaaaggcaacattaagaaggagctgtttaaggaatcagagatcattgatttcttcctgggggcctctctcaaggatgaggttttgaagattatg

SEQ ID NO: 235347 - DNA, 90 bp, Homo sapiens
ccggcccgaccccgacccggcccggtcaggccccatactcaggagccaaaaacctgtatatcatctccgtgaaggggatcaagggacggc

SEQ ID NO: 235348 - DNA, 50 bp, Homo sapiens
taggaaatcctaatcatgatgctgttatttcaagaaaccaagaagggcca

SEQ ID NO: 235349 - DNA, 100 bp, Homo sapiens
tgctgctgctcctgctgcagccgccgcctccgacctgggcgctcagcccccggatcagcctgcctctggaaaaggttaagaagttcttacaagagttcta

SEQ ID NO: 235350 - DNA, 74 bp, Homo sapiens
actgcgactctaaacggactcatgtactttgtcagacctgcctagagctggaacgttacctccagagcgagccc

SEQ ID NO: 235351 - DNA, 101 bp, Homo sapiens
gtccagagcattcagctgtctcaaatgcagcagcgtgcagggtcaaagacagccggccccccatgtcagtggtctaggatggccagtgaaggcaccaacat

SEQ ID NO: 235352 - DNA, 90 bp, Homo sapiens
gtcggacggttccgaggcgttgccgggagccgggcgcggctctgtgtggactcggagaaacgcggccccatggctgggggttatggagtg

SEQ ID NO: 235353 - DNA, 75 bp, Homo sapiens
gaggagaaaacagcaggcacccaagcgggcggcaggtatctgcccaaactggaacttatgctgtagacatttctt

SEQ ID NO: 235354 - DNA, 82 bp, Homo sapiens
gtgcagtggagaagctgagagaagaggaaaagaggagtggccaggcagagaacatttataatgatgaagaccctgaaggaag

SEQ ID NO: 235355 - DNA, 75 bp, Homo sapiens
gacacgccaaacctgagtttctacagaaatgagatccgcttcctgcccaacggtgctggagaatctggtaaaagc

SEQ ID NO: 235356 - DNA, 100 bp, Homo sapiens
aagccattaataatgttagaagaatgacttctcatccaactcttccttacttggccacagatgtctttaattccaaaaacctggccgttcaggcacaaaa

SEQ ID NO: 235357 - DNA, 83 bp, Homo sapiens
gtcaaatactttgcacaggaagctataagtgaatcctcagacgttgcaattgatatctaaaaagaagtcacttgctggagcag

SEQ ID NO: 235358 - DNA, 152 bp, Homo sapiens
gtggagaagattgggggctggctgaggaaaaatgtgctggtggtagctgcagcagcccttggaattgcttttgtcgagggaggtggctgccgcttcctgcgctacgactgtgtgatctcctccccgaggaagggctgggcactcctgcaccc

SEQ ID NO: 235359 - DNA, 82 bp, Homo sapiens
actctcggactgagaaacgcaaggaccaagaatcgccttcagccctgtctggtgcatccttggcagaaagtgaggaggaaaa

SEQ ID NO: 235360 - DNA, 90 bp, Homo sapiens
gtttactgaagataagccaactttgaatttcttctatcaacagaacactgagctgaaggttgaagtggagagcttgaaacgagaactcca

SEQ ID NO: 235361 - DNA, 100 bp, Homo sapiens
cccagacggctcacctgtgcgggatggaacaaaagtactaaggctcgtacgtctgcatcgattatcttacgtggggcaaatgatttcatgtgtgatgaga

SEQ ID NO: 235362 - DNA, 89 bp, Homo sapiens
taattgctatcaatgcgaatgatcctgaagcctcaaagtttcatggtggaaaacgaagctcattcccaacgtgcaaagccaaggcagcg

SEQ ID NO: 235363 - DNA, 82 bp, Homo sapiens
gggagacggacgttgagagaacgaggaggaaggagagaaaatggcgtccacggcctcccgcgacgatgcccctcaacgttag

SEQ ID NO: 235364 - DNA, 75 bp, Homo sapiens
tgaggcctggagaggttaaagagacccgttcagagtcctacagtggcaggaagccaaattggcagagaatgcttg

SEQ ID NO: 235365 - DNA, 90 bp, Homo sapiens
gtgctgagtcagtgtgacagtccatatgtaaccaaatattatggatcctatctgaagaccctggaagctgtcctgaatttcaaatactct

SEQ ID NO: 235366 - DNA, 101 bp, Homo sapiens
aagcaggttttaaatcaagatttaacattccaacacataaaaattatttatccaacagctcctcccagatagtcactgccaatccttggaacacaattgct

SEQ ID NO: 235367 - DNA, 100 bp, Homo sapiens
ttggccaccctggaccaattttacgataagagagctgcttcctttgtcagcgttctgcatgctctgatggcagcattagattgcctcggtctggcatggt

SEQ ID NO: 235368 - DNA, 90 bp, Homo sapiens
gcgggcggcatcggctgcgagctcctcaagaatctcgtgctcaccggtttctcccacatcgacctgggaagtcgttgcatatgatgatcc

SEQ ID NO: 235369 - DNA, 101 bp, Homo sapiens
ctcagcctgcggatgtgaggctgatgaagaggaaaacaggaatcaccccaatgctacagctgatccgggccatcctgaaagtccctgaagatccaacccag

SEQ ID NO: 235370 - DNA, 75 bp, Homo sapiens
ctcctgttgacccggtccgcccgtcggtctgcagcgcggctgaggatcagcagcaggctcgtcagtctcagcttg

SEQ ID NO: 235371 - DNA, 100 bp, Homo sapiens
cagggagcggacgcgggtgcacaccatcagcgcagccttcgaggcgctcaggaagcagatgccccctaaaaagggaggtgatggaattaaaccaccccca

SEQ ID NO: 235372 - DNA, 97 bp, Homo sapiens
tcgagtaggaaaccggtaccaggcagacatcaccgacttgttaaaagaaggccgccatggcatcagatgaaggcaaactttttgttggagggctgag

SEQ ID NO: 235373 - DNA, 98 bp, Homo sapiens
tgcagtgtatgaacccagggcactgtggggacagggcgacgtgtgtccaggcgtttgccggtgcgtgctctggaggaggccaacgccgacctggaagt

SEQ ID NO: 235374 - DNA, 88 bp, Homo sapiens
gaggactctggagctgacagcgcgcacttcacccgcagttggtgtcgtgaaaactacccctaaaagccaaaatgggaaaggaaaagac

SEQ ID NO: 235375 - DNA, 74 bp, Homo sapiens
gcaaggagcgcggaatcggggagcgtccggagctagctggatcctctaggcagtttacaggctggtaacctaca

SEQ ID NO: 235376 - DNA, 82 bp, Homo sapiens
tctctccctctgcccccccttccccacgcaaccccagatccatttacactttacaaagaactgatgaccaccccaattttac

SEQ ID NO: 235377 - DNA, 50 bp, Homo sapiens
ctcccaagtagctgagattacaggctggagtgctatggcatgatcttggc

SEQ ID NO: 235378 - DNA, 100 bp, Homo sapiens
caggccatgattggaccatcccccaatcctctcatcttgtcctacctgaagtatgccattagttcccaggtggacccaagtggagagattgtggaactgg

SEQ ID NO: 235379 - DNA, 98 bp, Homo sapiens
agaaattccacccagtatttcaagagtcacttctttacttggtgcaggaaggcagtctttgctacgtacagcaaaagaaaacatccagtacagacctt

SEQ ID NO: 235380 - DNA, 100 bp, Homo sapiens
ctttcatggagttcacagaagagtcgaggagagggaatctggaaaaattgcaatcaaaacatcatttctctaagaaaattttgggtaaccgaagttctgg

SEQ ID NO: 235381 - DNA, 90 bp, Homo sapiens
gggagaggagccgcacccggccggcccggccccagccccatggacctccgagcagcatggccgaaacagaagccctgtcgaagcttcggg

SEQ ID NO: 235382 - DNA, 50 bp, Homo sapiens
atgttgccctgagttacataaatagatgttcctcctgctgatcaagagaa

SEQ ID NO: 235383 - DNA, 105 bp, Homo sapiens
ataaaagagaatgtaacatcatgcttccggtatcagcagatgttgcacacaaacttggtataccttgctacaatagcagattctaatcaaaatatgcagtctctt

SEQ ID NO: 235384 - DNA, 75 bp, Homo sapiens
aagggcattcagaaatacaaagcaaagattgtttttgcagatctcttacctcagctagaagctccgagttctctt

SEQ ID NO: 235385 - DNA, 100 bp, Homo sapiens
cagtgacctggggaacctgctcaaagccctgggtcgcttggaagaagccaaggtgctctctctgccccaccgtcggttggtctgctactgccggctcttt

SEQ ID NO: 235386 - DNA, 133 bp, Homo sapiens
gcacgcggctgctgccgacccctggcacctggcgcccagcgcgcccgtggccgctgccgcctccgccccagggcagctgcaatgactctccgcacggtattattgtcattgcaagcactattggcagctgcag

SEQ ID NO: 235387 - DNA, 100 bp, Homo sapiens
cactattattcatgaggcaaatgaggaacagggcaatagtatgatgtgggctcgggatgagtttgaaggcctcttcaagcagccagcagaaaatgtcaac

SEQ ID NO: 235388 - DNA, 90 bp, Homo sapiens
ctggggagcgcctcgtcgacatgagtgatgtggaggaaaacaacttcgagggcagacaatcccacagagtattgatgaggaaactgaagt

SEQ ID NO: 235389 - DNA, 101 bp, Homo sapiens
gaagaagaccactgttaaagatgtcctattctagcttgacagccctgtggggaagactaatccctttctagaggttcttgggtgtctctggggagtccctg

SEQ ID NO: 235390 - DNA, 76 bp, Homo sapiens
caccagtggaactgatgagccgacattgtggatatcaagcctgccaatatggaagagctaacagaggtgattacag

SEQ ID NO: 235391 - DNA, 100 bp, Homo sapiens
ctggcattgacctctcagatcccaaacaactggcagaatttgctaggctgtgggtgagcgtggaggatgctcagatgcacaccgtcaccatctggctcac

SEQ ID NO: 235392 - DNA, 98 bp, Homo sapiens
tttcggatgatgccttcaatactacctttatttccaccataggtctagatgttgatggaatatatcgagttagtggcaatctggcaacaatacagaag

SEQ ID NO: 235393 - DNA, 100 bp, Homo sapiens
agggttgccgggcgggacagtgattccagcccttcaggctggacgtaaagaaagaagtgatgcactcaattctgcaatagataaaatgaccaagaagacc

SEQ ID NO: 235394 - DNA, 82 bp, Homo sapiens
acgcggacatggtcatgagctttgtgaacctgggagccttcacgtaaatgggtccagtcatgcctcccagtaagaagccaga

SEQ ID NO: 235395 - DNA, 83 bp, Homo sapiens
cagacgccaaggcccctccggccagggccgggagccgggccggcctagccagagtatcctgagctccagctggaccctaaatt

SEQ ID NO: 235396 - DNA, 100 bp, Homo sapiens
tctcttcaaccagatactcacacttcagcagtccatcaagcaactgaagggtcaagtgctggaaacatgcatgaagagctgcggcaagcggttccacgac

SEQ ID NO: 235397 - DNA, 97 bp, Homo sapiens
gggcctcccctcaccaccaggaccaagtgtgcaggtgtcatggagaaactccagctgggcccagagattctgcagcgggaaaatccaaggcttattt

SEQ ID NO: 235398 - DNA, 85 bp, Homo sapiens
ggaaaatgttttgccacgtggatgtgaagatttcctctaaaaggcaatttgaatcaacccatagaagtgacagcgctgtattcat

SEQ ID NO: 235399 - DNA, 100 bp, Homo sapiens
tgtgcaccctcgccttgtgtcaatggaggcacctgtcggcagactggtgacttcacttttgagtgcaactgccttccagttaatagaagatgaaattgca

SEQ ID NO: 235400 - DNA, 50 bp, Homo sapiens
cgatccgcccacagacctcaaattcaaagcatcctggtggggaagaagtt

SEQ ID NO: 235401 - DNA, 89 bp, Homo sapiens
gttgtgttggatcattttgaaaaacagtattccaaagaactcggagatgcctggaatacagtaaggatagaccactggaacaatgagaa

SEQ ID NO: 235402 - DNA, 74 bp, Homo sapiens
tcagcctggcgccggagctgaaacacgacgtgaaggtcagcccaaggctgccccctcggtcactctgttcccgc

SEQ ID NO: 235403 - DNA, 51 bp, Homo sapiens
ggcgcggggaccgctgtgctctcggggaactgccctctagggagacgttcc

SEQ ID NO: 235404 - DNA, 74 bp, Homo sapiens
acaagttccgatcagaggtgaaaccaacagccagtgatatgctatacatgcttctcccgttggcaacggttaca

SEQ ID NO: 235405 - DNA, 100 bp, Homo sapiens
tatcatggattcccagcgcgggacagccaggtctacatccggataaaagacgatgaatggaatatttatcgccggtatacagagttcaggagtttgcacc

SEQ ID NO: 235406 - DNA, 82 bp, Homo sapiens
cgctcatgtgtcggaactagatctttctgacaacaaactcgaagactggcatgagtgagaaagatcagtctaaagaaaagga

SEQ ID NO: 235407 - DNA, 50 bp, Homo sapiens
aattgaaggacaacttcctcctctgtcatgctgcaaagcttggagcccag

SEQ ID NO: 235408 - DNA, 75 bp, Homo sapiens
caaaggggaagttgctgcgctctgctcggtgtcgtggcctcgcagatgtcctattttgtaacggattatgatcca

SEQ ID NO: 235409 - DNA, 100 bp, Homo sapiens
aggctgccctcaaactcctggactgaaacgatcctctcatctcagcctccaaaagtgctggcattacaggaaagaccacagcaagattctttcattcgtc

SEQ ID NO: 235410 - DNA, 100 bp, Homo sapiens
acttgaatttctgcaaacgaacacagcaccgggagctctgcagacctgtgtcggcgcggaacccggactgagacatgctgatggtggcctgcgttttgga

SEQ ID NO: 235411 - DNA, 87 bp, Homo sapiens
tcgctgcccagaagaagggaaggcgcgagtgaggaaaggaggtactgtagatccacagaccagcatggctgccactgctgctgtgag

SEQ ID NO: 235412 - DNA, 90 bp, Homo sapiens
atgatgatggaaatgaagtataataccaagaaagccccacttgggcaagcaggaggacttcaagacgacagttctggagggtatggagac

SEQ ID NO: 235413 - DNA, 98 bp, Homo sapiens
ctcaacacccagagatcttgattattccagagtcaaaatgcagatcttcgtgaaaacccttaccggcaagaccatcacccttgaggtggagcccagtg

SEQ ID NO: 235414 - DNA, 97 bp, Homo sapiens
tgtgaatccaggaagagagactgactgggcaacatgttattcaggtggagccgccaccaaaatgcagattttcgtgaaaacccttacggggaagacc

SEQ ID NO: 235415 - DNA, 80 bp, Homo sapiens
ctgactttcagctatggaatcggaggagagacttcagcatgcaaaccttcatctgttcggcttgcaccgtcattttcatt

SEQ ID NO: 235416 - DNA, 125 bp, Homo sapiens
gaaggctgtgcggtctgccaggagctgcggccccgtccggcccgggctggtgtcatggagaaactccagctgggcccagagattctgcagcgggaaaatccaaggcttatttatgccaggctgag

SEQ ID NO: 235417 - DNA, 98 bp, Homo sapiens
caagaagaccattcagatgggatctttccggatcaatccagatggcagccagtcagtggtggaggtggccgtttgtatgcaggggcaaaaggtgctct

SEQ ID NO: 235418 - DNA, 100 bp, Homo sapiens
gacgcgcagatagcagagccatccttggggagactgagtgccctttgcggcttgctgtctgccagcactgtgatttagaactttccattctcaaactgaa

SEQ ID NO: 235419 - DNA, 51 bp, Homo sapiens
attgtgggaccttgtgatcatgacatttgggcttccaggacagttttgtca

SEQ ID NO: 235420 - DNA, 100 bp, Homo sapiens
ggagaatgtcatcaagcagcacattcaagcatttaaatcaaacggtattgagatggattgggttatgaaacataatggtccaaatgacgctagtgatggg

SEQ ID NO: 235421 - DNA, 75 bp, Homo sapiens
aagatggcgactgtcgaaccgcgggtccatatggaatatttgctggtagggatgcctccagaggactggccacat

SEQ ID NO: 235422 - DNA, 99 bp, Homo sapiens
ctatgttcaagatcaaaatgaagactgcctttacttaaacatctatgtgcccatggaagatgggaagttctggcacatcgctgacctgcaccttgaccc

SEQ ID NO: 235423 - DNA, 100 bp, Homo sapiens
cagcagtcaaaagcacaagctgaaatgcagtccaggaggttgtgcccagacatttccttcttccagagggccactgactacccttgcctcctcatcctgg

SEQ ID NO: 235424 - DNA, 75 bp, Homo sapiens
cactcctccaagaaccaacccccaaattggctgggacaggagtgggctttgccaccaggaaagtggctggcatgg

SEQ ID NO: 235425 - DNA, 83 bp, Homo sapiens
cagcatgtcggtggcggggctgaagaagcagttctacaaggcgagccaggaacaagatcactcaaggtgaaggataatctact

SEQ ID NO: 235426 - DNA, 100 bp, Homo sapiens
caagttatcctttggaaatgtgctcacactggcgaactttctgaccaagtatacaactacccagagggcctaggagaagtgctgtatagagagcagttcg

SEQ ID NO: 235427 - DNA, 80 bp, Homo sapiens
tattgtggatcaaactcaaactccaaacctcaagatcagtcacacatagacaactctctgaagtatatattaagtggcag

SEQ ID NO: 235428 - DNA, 90 bp, Homo sapiens
cgaacgtggggcaggatggacggcaagacgtggcccagtggaacatcgggagcctccggaccatcctggacatggtggagcgcgagtgcg

SEQ ID NO: 235429 - DNA, 90 bp, Homo sapiens
cacgctgtcggcgctatagcaacggtagctagctgcagggccagtggcacgggcagagcggcttgggtaaatccaccttaatcaacaccc

SEQ ID NO: 235430 - DNA, 74 bp, Homo sapiens
aagaatttcgatctccgccctggggtcattgtcagaattggcagagggggtcgatttgggaggaaaggtgtggc

SEQ ID NO: 235431 - DNA, 101 bp, Homo sapiens
cctgcaagcatggcaaagactggcaaaagcacaaggattctcgctgtgacagagacaacaccgagtatgagaaatgtacagatcagctctcaaaatgtctt

SEQ ID NO: 235432 - DNA, 90 bp, Homo sapiens
caaccacctggaagttgactaaggggagaaggagtctcgttggaaaacggagctttcctgctctgggaccctaccaaggtgcccccacga

SEQ ID NO: 235433 - DNA, 91 bp, Homo sapiens
atattactgtaccgttagaagtttttgagatcccaaaatggctgggcgaaaacttgctctaaaaaccattgactgggtagcttttgcagag

SEQ ID NO: 235434 - DNA, 50 bp, Homo sapiens
ggtggatacggaagagtatacaaggctaatctagacgaaatccagatgag

SEQ ID NO: 235435 - DNA, 98 bp, Homo sapiens
tggcttgggacgaaagtgtcaaggcattacggctcccattgagaggtacagccccgtggtggaggccggctcggacatggtcttccggtggaccatca

SEQ ID NO: 235436 - DNA, 100 bp, Homo sapiens
aaatggatttgcatcttgtaatgtgtttaacaaagccacgaataacctataatggactctcacagaaggaggaagaggaggacacttttattgaagaaca

SEQ ID NO: 235437 - DNA, 120 bp, Homo sapiens
aaaaagcagagcgactcggttaagggaaagcgccgagatgacgggctttctgctgccgcccgcaagcagaggtctcatctgagtagcagcttcctgccctccttcttggagataagtcgg

SEQ ID NO: 235438 - DNA, 75 bp, Homo sapiens
tttatggagcatatattatggaacacaagaccttgtacacagacagacggctagtgcagtggtacagcacatgtc

SEQ ID NO: 235439 - DNA, 100 bp, Homo sapiens
atcaaaactgaagatggtttgaaacagcttcacaagaaaaagtgtgagcgctactgggctgagccaggagagatgcagctggaatttggccctttctctg

SEQ ID NO: 235440 - DNA, 50 bp, Homo sapiens
acagagactcggagagcatcactggttcccagacgttatgatgataagcg

SEQ ID NO: 235441 - DNA, 82 bp, Homo sapiens
aaagctttaaaaacattgacatttaagttggacacattcagctaacgtattttagcaggtggagtgaggttgaagattcctg

SEQ ID NO: 235442 - DNA, 100 bp, Homo sapiens
gaacttttttgaatgggaggcattgatcatgcctgtttaaagaagaaaacccgtatgctagatttgaaaacaactaaagcgctccagcacatcagtcccg

SEQ ID NO: 235443 - DNA, 74 bp, Homo sapiens
cgtgcacttgcaggccgggcagtgcggcaaccaaatcggcgccaagcggaggaggtgaggaagctgaaggcgcg

SEQ ID NO: 235444 - DNA, 100 bp, Homo sapiens
ggagcttaaaaagctgcacgcaagtgttaaacttctgaataatccagaatggctactctgatctatgttgataaggaaaatggagaaccaggcacccgtg

SEQ ID NO: 235445 - DNA, 74 bp, Homo sapiens
cagcaatccaaaagagtctcaaggatccttcaaataacttcagggtttatggctacaaatgatttgatgacgga

SEQ ID NO: 235446 - DNA, 83 bp, Homo sapiens
gtcactactggaactgcacaaactggccactgacaaaaatgacccccatgctttgaattgtattccatggtgccatctatttg

SEQ ID NO: 235447 - DNA, 90 bp, Homo sapiens
taatcactcctgtctacaggcctgtgaggctgaagtttctctttggctcatcagccacccaggccttggacctagttgatcgacagtcca

SEQ ID NO: 235448 - DNA, 74 bp, Homo sapiens
attgctactgctgcctctgtcactcctggtgaccagcattcaaggtaaaacgaaccattaccagacaacagtgg

SEQ ID NO: 235449 - DNA, 101 bp, Homo sapiens
tgcacttttgattgtgtattatggataccaaggaagagaagaaggaacggaaacaaagttattttgctcggaccagtcctgcctctgttgtagaagacatg

SEQ ID NO: 235450 - DNA, 100 bp, Homo sapiens
tgcacattatggcaagaagggcgctgttttcgacaggtgtgcaggtttcggcacatggagattgataatgttgctgaggcacagtgcatcgccaaccaag

SEQ ID NO: 235451 - DNA, 73 bp, Homo sapiens
ggaaccgtgctgccccgccccgctccacccgtgagggggatcctcttggtgtatgacatcaccaaccgctggt

SEQ ID NO: 235452 - DNA, 100 bp, Homo sapiens
tgcctggaggagaatcaagagctccgagggaatcccgctggctccgtggtgatggaacgcatccggatggacattcgcaaagtggacgccgtctttgtgg

SEQ ID NO: 235453 - DNA, 100 bp, Homo sapiens
cttcaccccaatgctttcaagaggctgggagcatcacttgcctttaataatatctacagggaattcagggtaattgggatacttctggcagcgaactgag

SEQ ID NO: 235454 - DNA, 100 bp, Homo sapiens
cggaagaccgcgcgcagggcctgcagcgggagctggacggcgagcgcgagcggcgcgagaaaagctgcgggtggaagtggagcagccccatcaccagctg

SEQ ID NO: 235455 - DNA, 80 bp, Homo sapiens
gctgagcggcgagtttccgatttaaagctgagctgcgaggaaaatggcggcgggagggaaggatggagacgctgaaggat

SEQ ID NO: 235456 - DNA, 92 bp, Homo sapiens
ggcagtacgagcagatgcataaggagctgacagacaagctcgagacaatgcagatcttcgtgaagactctgactggtaagaccatcaccctc

SEQ ID NO: 235457 - DNA, 75 bp, Homo sapiens
ggaaagatgaaaccagaactcttgaattcagaagcatgatgccttcttctgtagagtgggcgctttgcagaatac

SEQ ID NO: 235458 - DNA, 100 bp, Homo sapiens
gcaccaaggcccccaagccctccttcgtgtcgtacgtacgccctgaggtgctttggagcttgctgatgtgtctaatgaactgccagggctgaagtggatg

SEQ ID NO: 235459 - DNA, 103 bp, Homo sapiens
agtagaaaaacactatctcttctatgacggagaatccgtttcaggaaagatgaagtaaagaaggtcttagacaaattttacaagaggaaagaaattcagaaac

SEQ ID NO: 235460 - DNA, 50 bp, Homo sapiens
ttccatctcaggacctcagcagaagggacgaaggggaggaccaggctggc

SEQ ID NO: 235461 - DNA, 74 bp, Homo sapiens
gggaggtgaatttccatgtcaacatagtcctgcagttggaattgatcacaccttttcagttgtacttcaatcct

SEQ ID NO: 235462 - DNA, 133 bp, Homo sapiens
aaaaacttccagaacatctgggagaatatttaatggaaaatcgcttggttaaaacctgacacttttaacaggtggccattaagcagatgaatcttcagcagcagcccaagaaagagctgattattaatgagat

SEQ ID NO: 235463 - DNA, 100 bp, Homo sapiens
cctgttggaggaactggcccggaaacaggaggacagctgtccgtggcacagtgcacgcagcggcccgtggacatcgtcttcctgctggacggctccgagc

SEQ ID NO: 235464 - DNA, 100 bp, Homo sapiens
tgaggttgctcctcccggggcccttcccgggcaaggaatgggccttgacgaaggagaagtcggtgaagcacatggatttgtgccttactgtggtggaccg

SEQ ID NO: 235465 - DNA, 50 bp, Homo sapiens
aatagcaacttctgttgataagttggacatgcacatgatggtgtccaagc

SEQ ID NO: 235466 - DNA, 100 bp, Homo sapiens
gccaaatggaagtatatgatgctgaattgttcaacatgcagccactattttcagatttttgatgaaattgagtcatgaaactgtaaccattgaattgaag

SEQ ID NO: 235467 - DNA, 100 bp, Homo sapiens
gggcagacggctgggagccgctccgacatagggcctgattacattccaacagaggaagaaaggagagtcttcgcagaatgcaatgatgaaagcttctggt

SEQ ID NO: 235468 - DNA, 51 bp, Homo sapiens
aaagtaatcttggaatataaaggctggaacctatttgcctcagtcctatct

SEQ ID NO: 235469 - DNA, 82 bp, Homo sapiens
tcatccagccttagcaaaccagaggatttttagactctgaggagcagttggagctaatccacattatggaaatggaaaccac

SEQ ID NO: 235470 - DNA, 75 bp, Homo sapiens
gccacattcttgcagctgcctacaaattcaagagtgaccagggatgatatgagggaaggcaccattggagatatg

SEQ ID NO: 235471 - DNA, 82 bp, Homo sapiens
ctggtccttcgcccccaagactgcgactctaaacggactcatgtactttgtcagatctctttgttgggcagctaaagagctc

SEQ ID NO: 235472 - DNA, 100 bp, Homo sapiens
ggctgggtcgctgcattctcgatgccaccggggtgggctgcactggtgaccacgagctttatcttcaagccaggatgaagggagactgggcaagactctt

SEQ ID NO: 235473 - DNA, 90 bp, Homo sapiens
caaaaccaggctgaacccagagagttcctgcaacaacaatacagtgccggtggtggtgtgcacattgagccccggtatagacagttcccc

SEQ ID NO: 235474 - DNA, 100 bp, Homo sapiens
caggggacgtggcttttgtgaagcacagcacggtactggagaacacggatggaggttgctcaaagaagtacagtctttaaaacaaccatacctgaagaag

SEQ ID NO: 235475 - DNA, 75 bp, Homo sapiens
gttccccctccctcagcttccgccccaaaaggacatgtctcaggaaggctatggaactagatctcaacctcctct

SEQ ID NO: 235476 - DNA, 82 bp, Homo sapiens
cctgtctgaactctcaagcaccggatgcaagtagactgagagcctccgccaaccattggcctttaccagagtttgatccaag

SEQ ID NO: 235477 - DNA, 73 bp, Homo sapiens
ccaagtacctgcagatcctgacctctctgatgagatggatcggtgctggagaatctggtaaaagcaccattgt

SEQ ID NO: 235478 - DNA, 100 bp, Homo sapiens
tgtacctgttttatacttgcttttgcttcagcgttctgtggttgtcaacaggtaacaatctctgatgaaccagacatattatataagcgcctctcggttt

SEQ ID NO: 235479 - DNA, 96 bp, Homo sapiens
caagttagatgccgattacccacttcgagtcctttattgtggaggtctagagaattctaaagcaatgtgtgttcttgctggctcagaccactcagc

SEQ ID NO: 235480 - DNA, 90 bp, Homo sapiens
cgagcgcccggattggggatgagtatgcggaggacagctctgatgaggagatgttggcgccagcagctggtgagggccctggggtggacc

SEQ ID NO: 235481 - DNA, 78 bp, Homo sapiens
aaacggcgagagtgggcgagaacgtccactgcgggccggcgaaagctgatggtgggcagtggtggtgctggctgcgtt

SEQ ID NO: 235482 - DNA, 82 bp, Homo sapiens
cgccatcctggaggagctgagcgcaatcactcaggtggccatcaaagtgattccccggaatcgtgtgctgggctggtccccc

SEQ ID NO: 235483 - DNA, 90 bp, Homo sapiens
ctctctccccagaaatccaacttctcaagagtgcctggaagagctgggatgtctggttgagtcctatggcatgaatgtttgccaaccaac

SEQ ID NO: 235484 - DNA, 75 bp, Homo sapiens
cctgtaacacttgatgttcttcaccaagttcaaaccttgtactactcagctgatcacaagctgcttgatgggaac

SEQ ID NO: 235485 - DNA, 90 bp, Homo sapiens
gggggcttgtcagccccgtgcagcgacgatctacgcacacgcgcacgcctggctcggggacacctgagtggacgtgatgctgaatccagg

SEQ ID NO: 235486 - DNA, 89 bp, Homo sapiens
ggaggacgcgccgcggccaggcagggaggagaccggcacccagacaggtggcgaaggcagaggagttgtgggctgcacactgcagaaag

SEQ ID NO: 235487 - DNA, 100 bp, Homo sapiens
aaacttccagaacatctgggagaatatttaatggaaaatcgcttggttaaaacctgacacttttaacagtgatctcttgtgggaaccctgggactccaag

SEQ ID NO: 235488 - DNA, 50 bp, Homo sapiens
tttgacttcagcttctcctcggctggttatgaagaagaaactcaaaataa

SEQ ID NO: 235489 - DNA, 75 bp, Homo sapiens
ctgtacgccacctgggaggtggaccggagctcgtccagctgcgtgcctagatgccctgtacagacttttggggaa

SEQ ID NO: 235490 - DNA, 75 bp, Homo sapiens
aacttcagcattaattctgttgccagcacctattctgagtttgcgccgtgcttcctcaaagactgggaaatgcac

SEQ ID NO: 235491 - DNA, 98 bp, Homo sapiens
gggagtctgcggtcgttccctcggctgtggaccgggcggcacgcacgcggtgcagggtaacatggcggatgcggaagtgccaaacccaagtctgaaat

SEQ ID NO: 235492 - DNA, 100 bp, Homo sapiens
ccagcctcccaaggagcctcacatgctgttcgatcgcatccgcttggtggtgaccaaggccccaaccacgtctcctacgtggaccctcacctggctccca

SEQ ID NO: 235493 - DNA, 75 bp, Homo sapiens
cttcagatcactgtcaatgggaccgttctcagctccagtggaaccagagaccgtcaatgtgcccgcgtgctggcc

SEQ ID NO: 235494 - DNA, 96 bp, Homo sapiens
gtgcctcgggtcggtgcaccgtccgggattttatccaccggcactgccaagatcagcaactttattccacagccaattggaaaatgcaagcgtgta

SEQ ID NO: 235495 - DNA, 76 bp, Homo sapiens
ccgagaccatcgaaggccacaggagaagaaaaaagccaagggtttggaagaaggacccagcccagttcctgcaggt

SEQ ID NO: 235496 - DNA, 80 bp, Homo sapiens
cgcagtggtcgcttcttctccttggtcagggctcatcttctaccggaaaggggtgaaggctgtggaccccaagactggcc

SEQ ID NO: 235497 - DNA, 85 bp, Homo sapiens
aaacaatgtgagatgtctccagcatttttacggacccaatcatgagcactgctttaatagggaatggtcgttggaggtcagaatg

SEQ ID NO: 235498 - DNA, 100 bp, Homo sapiens
tcagaatccaaggaaagaaaggaagcgaagcctctgcattgagttctaggacagctgaggcagtcatggatcaggtaatgcagtttgttgagccaagtcg

SEQ ID NO: 235499 - DNA, 75 bp, Homo sapiens
gctcttccatccgcctttgatcgtcttcctcttcagccatccagcacagggatctcgttctcctcattttttggg

SEQ ID NO: 235500 - DNA, 82 bp, Homo sapiens
ggagatggaaaaggagttcgagcagatcgacaagtccgggagctgggcggccatttaccagatttgggaatggatgatgaag

SEQ ID NO: 235501 - DNA, 100 bp, Homo sapiens
agaaaccaccaactgtactgcaacgactgctatctcagattcaaatcgtgactctggtggccctgtggtctgcaacggacagctccaaggagttgtctcc

SEQ ID NO: 235502 - DNA, 90 bp, Homo sapiens
cgctccgcgctctggcgctacggtctggccgtcggctgcggcgccatcgatggcttgaaacccctccttcctgtgtctgtgcggagtcag

SEQ ID NO: 235503 - DNA, 100 bp, Homo sapiens
tatcgaagatgaagacttaaagttagagctgcgacgactacgagataagatgagctttctgatgttagccaaggcggatctaaagctaccactccagcat

SEQ ID NO: 235504 - DNA, 100 bp, Homo sapiens
tgtgaagggacttgagggcagcgagatggaatcagcaagagaaaacatcgaccttcaaatcggcttcaccaccgaccctcggatggcccgctcctccccc

SEQ ID NO: 235505 - DNA, 76 bp, Homo sapiens
tccagagctgaggactgcctgtttgcaggttagaagggcccccctctctgaaggcccccactccctgggatgctac

SEQ ID NO: 235506 - DNA, 113 bp, Homo sapiens
cggcggcggaggctgccatggacgacgaggaggagacgtaccggctctggaaaatccgcaagaccatcatgcagtaagactttgaccccgacgcaggcttcagtgattgccgc

SEQ ID NO: 235507 - DNA, 101 bp, Homo sapiens
gggggcactgcccgcccgggctctggccaccagcccctcgggttccaagatgcagctactggagacagagttctcacacaccgtgggcgagctcatcgagg

SEQ ID NO: 235508 - DNA, 100 bp, Homo sapiens
gggggctgctgaccgagagagctcactcagccaggattggaggctgttgtcattggagaagttcatgagaatgttactctgcactgtggcaacatctcgg

SEQ ID NO: 235509 - DNA, 83 bp, Homo sapiens
ccgccagcgacgtgcgcctcgggagtcggcctgtgaggtcagcccaaggccaaccccactgtcactctgttcccgccctcctc

SEQ ID NO: 235510 - DNA, 76 bp, Homo sapiens
ccctcgaagtgcgcaaacttgacactcaccctgaccggaaaatatgagagccacacccgtgttcacacaggtgaga

SEQ ID NO: 235511 - DNA, 75 bp, Homo sapiens
tgtttgagaaaaggcctaagaattttggcattggcatagaatgtcaagctaaccaggcgtccgctacttcagaag

SEQ ID NO: 235512 - DNA, 75 bp, Homo sapiens
ccaatttaccagagataattgataacaccctgtaacagctgagtagatgaactctatgaagcttattgtatccag

SEQ ID NO: 235513 - DNA, 75 bp, Homo sapiens
gaacagctcgagagagcattacaagccagcctctgggaccgaggtcctcagaatggttggaatgaccctccagct

SEQ ID NO: 235514 - DNA, 83 bp, Homo sapiens
ctgatccgcaagcatgctcagaccttcattgctctgtgtgccaccgaataagaaagccttgagttttgtgaaaaaccggagaa

SEQ ID NO: 235515 - DNA, 100 bp, Homo sapiens
aagtgctcctgcaagcctggctaccaaggggaaggcaggcagtgtgagggctggagtgcagtaacaccactgaagctcactgtaactttgaactgctgga

SEQ ID NO: 235516 - DNA, 75 bp, Homo sapiens
aagaatacgcagcctctacagcgaacccttcaaggaacccccaaaggatagatcactgcgaccagaggaaattga

SEQ ID NO: 235517 - DNA, 83 bp, Homo sapiens
cgacaagccgctggcagccgcggatctcaccgccgctcagggtttacccaaggtccagcctagcccctaggcaccatgtcgga

SEQ ID NO: 235518 - DNA, 100 bp, Homo sapiens
cgcggcgggcgcggagatgtggcccctggtagcggcgctgttgctgggctcggcgtgctgcgacaatgcagatcttcgtgaagactctgactggtaagac

SEQ ID NO: 235519 - DNA, 100 bp, Homo sapiens
gtgtgctgcagaacccccagaccatcatagcactgcagtttcctcctgaaggctggctccggctctccctcaataatggcagcatcacccacctggtgat

SEQ ID NO: 235520 - DNA, 80 bp, Homo sapiens
ggcagctgtcactgagcccctggaacagagcgagagtatcgtcttccccagggaggtcctgaactacacagctgagaaca

SEQ ID NO: 235521 - DNA, 100 bp, Homo sapiens
agatgtggtacacactcagttaattaatctggaagcccagaacctcatggccctcaccaatgtggacaccccattgaaaggtggacttaataccccattg

SEQ ID NO: 235522 - DNA, 118 bp, Homo sapiens
acaagagcctcatccacaccgtgttgctgcaaaaggactatcaggtggtcttttggtgccttaatgaagagtcggattttgaagcagccttcagcgtgggagccactggcgtcataac

SEQ ID NO: 235523 - DNA, 82 bp, Homo sapiens
tccctctcagcctccgcctggtctctggaccaagaatcgccttcagccctgtctggtgcatccttggcagaaagtgaggagg

SEQ ID NO: 235524 - DNA, 89 bp, Homo sapiens
gtcatctccagatgctagggttatggcttgaaattttgacaaacttggcaaatgaagccaacatatcaactcttcttcgagaatttcag

SEQ ID NO: 235525 - DNA, 74 bp, Homo sapiens
tgtggacaaacctctccgcatcattggggatccttacaaagtgcagcacttttctgtagaaggtcagttggaat

SEQ ID NO: 235526 - DNA, 90 bp, Homo sapiens
gcccacctgcgtaagggggcagagacaggtgatggcccgctccctctccccacccccggagctggaagaaagggatgtggccgcatactc

SEQ ID NO: 235527 - DNA, 51 bp, Homo sapiens
gtgcgacaacgcggcgcagaatgcacttgccggcggtcccaacccagcagg

SEQ ID NO: 235528 - DNA, 82 bp, Homo sapiens
gtccggagccagccaacgagcgatacatccagaaagtgcccagaagaaacttcctgctggaaaaaatgaaaaagcagtattt

SEQ ID NO: 235529 - DNA, 100 bp, Homo sapiens
aagcagtattagttccagtttacagatgaggaagcaggaacgggaaagggcgccctgcgtccggcagaggaggcgagcatcccgctcaggtgatgaggaa

SEQ ID NO: 235530 - DNA, 50 bp, Homo sapiens
cggaaatcagctctacagttcaggaccgtatccttgatgagcttgacaaa

SEQ ID NO: 235531 - DNA, 100 bp, Homo sapiens
gggcccaaggcgtgaggcgccgcccgggtgtccccgcggcgcaggaggcggtggagcgcagagcgggcgagcgcgaaatgcatcttctgcagacaccggg

SEQ ID NO: 235532 - DNA, 114 bp, Homo sapiens
aagaagtggagcgtgtcctgaaggagttccaccaggccgggaagcccatcgggtttgacaactattcagccaatgtgatggtggacagcaagccagtgaacctggggctgtggg

SEQ ID NO: 235533 - DNA, 83 bp, Homo sapiens
ccaggatacaagattagacaacagagtcattgatcttaggggtggtggccttgtccatgtcacctgtggatgacactttcatt

SEQ ID NO: 235534 - DNA, 75 bp, Homo sapiens
gtgggcttgtccaactggagcttcctgtatgtcaccgtctcgctagaggagaaggaacgctggatacgggccaag

SEQ ID NO: 235535 - DNA, 100 bp, Homo sapiens
tttatctcaaggcctgagtagccggtaacaaacgagggttcccgggattggaccgacgcagccatgatgagacaaaaggacccagtgaaaggaatgacag

SEQ ID NO: 235536 - DNA, 96 bp, Homo sapiens
tgtaagtgcgtttgaaggcttccacaccctctactccaggttccctgtattgaacactgatatacaaggaatgaatagaagtcaagaaaaacagac

SEQ ID NO: 235537 - DNA, 100 bp, Homo sapiens
gccagctggagcgatgcaagctcggatccgagactggcagcatgagcagcatgaggtatgtgaagacaactgggaatgccacagtggaccacctctccaa

SEQ ID NO: 235538 - DNA, 90 bp, Homo sapiens
cagattcgcagtggtcgcttcttctccttgggaagcatgctagagtgaaagaaagagagcacgaacgtcggaaacgacatcgagaagaac

SEQ ID NO: 235539 - DNA, 98 bp, Homo sapiens
ctcgccatggccaagtcgggtggctgcggcgcgggagccggcgtgggcggcggcaacggggcactgacctgggtggatttgacgggatctgaactata

SEQ ID NO: 235540 - DNA, 100 bp, Homo sapiens
ctcaaaaccctcctcatcatctactccttcgtcttctggtgtgttgttggtggctgcaatgccagctttgcttctcagggagggctagctcgtcatgtac

SEQ ID NO: 235541 - DNA, 87 bp, Homo sapiens
gaacaccaaccaaattgtcgccattaagaaacgttcaagagaataataaggcaaataaacttaaccaagtcccaattctaaggactc

SEQ ID NO: 235542 - DNA, 98 bp, Homo sapiens
gcagcggctgccgggccgggactggtgcgcgagggcgaaggggcagaactcaggcacctcgacactcaggtccagcgctgtgaggacatcctgcagca

SEQ ID NO: 235543 - DNA, 82 bp, Homo sapiens
gaatatctgcagcaagtattcgaggcggagagacttcctccaaatggtcctggatgcccgacattctgcaagtcccatgggc

SEQ ID NO: 235544 - DNA, 80 bp, Homo sapiens
ctgtgtgtccagaacgtgccatggagacgcttaacgccacccaggctactttgggaaagttggtatgaagcattaccact

SEQ ID NO: 235545 - DNA, 75 bp, Homo sapiens
tagttaaaggcccagatgataggaatcccatctcatttagtatgtccgtggttcagaccctgtattaaagctttt

SEQ ID NO: 235546 - DNA, 100 bp, Homo sapiens
gaggccggctgcagccccaagacagagcgctactcctggcagtgcgtcaatcagagcgtcctgtgcgccgtgctggtatagaggactctaagaagtgggg

SEQ ID NO: 235547 - DNA, 100 bp, Homo sapiens
aggagccacctagactggatgcagagcatggctatgacttctgccaggtcctgcagtggtttgccgagagggtggacaggatcatcctgctctttgacgc

SEQ ID NO: 235548 - DNA, 90 bp, Homo sapiens
aaagaaatgcttctttgtgaaattttttggaacagaagatcatttcattgtactgacaacctcagctggcatcatggaccatgaagaagc

SEQ ID NO: 235549 - DNA, 100 bp, Homo sapiens
aaggcactcagctcaaatacacacacctgttgccattatagagctggaattaggcaaatatggacaggtgcgtataacccgtatatagagataattgaac

SEQ ID NO: 235550 - DNA, 51 bp, Homo sapiens
tcacggccaacgccttggcactaggcacatgcagatgacaatccaggctct

SEQ ID NO: 235551 - DNA, 100 bp, Homo sapiens
ccaacgcatcatgccagggagccaagcgtcctgcccggccctgtgagccgtgagctttgaggcggtgggatgtgtcagcagaatgtctcctgcccccgag

SEQ ID NO: 235552 - DNA, 83 bp, Homo sapiens
cgcggcggggctgaggcggccgcggggcccgagcgcagaaccgggctgtgggtcggcccaaggggaagctgggcccggcctcc

SEQ ID NO: 235553 - DNA, 51 bp, Homo sapiens
cagtactctgtaacacccagctaccagagctccagcattgactttctagca

SEQ ID NO: 235554 - DNA, 90 bp, Homo sapiens
tccatgtgacatggtttctccctatgttacgtggatgtttgtaacacggcaaatggatacatcttgttttttcatattacatctacaaga

SEQ ID NO: 235555 - DNA, 75 bp, Homo sapiens
gattgaatctggtgttatcaacttaaaagatgccacctctaaggtcagagtcagagttggaatcagggctacggc

SEQ ID NO: 235556 - DNA, 90 bp, Homo sapiens
cctcttttgacttggactatgactttcaacgggactattatgatagtgccggtggtggtgtgcacattgagccccggtatagacagttcc

SEQ ID NO: 235557 - DNA, 75 bp, Homo sapiens
gagcacagagaaggaggaagtaatggggctgtgcataggggaggtggacatgttgagtgaaattaacattgctcc

SEQ ID NO: 235558 - DNA, 75 bp, Homo sapiens
atggaaatgaagtataataccaagaaagccccacttgattctgctcctaagtgtaggagagaacttggtgcctct

SEQ ID NO: 235559 - DNA, 75 bp, Homo sapiens
ggccccgaccgcgtgctggagctcttcgacccacccaaggtaaaaggtccaggagttgggctgcttggaatttcc

SEQ ID NO: 235560 - DNA, 83 bp, Homo sapiens
caagtttctttcccaagaccaaattaatggatcactactcttggaatcaaagataaatccaaatactgcatatcagaaacaac

SEQ ID NO: 235561 - DNA, 76 bp, Homo sapiens
ccgagagcgtggagcgggctgggccaggtccttctggcactcctctggtggaccgcccccatcggccacacttgcc

SEQ ID NO: 235562 - DNA, 82 bp, Homo sapiens
cgggacccggtgtctgctcctgtcgccttcgcctcctaatccctagccactatggctcttgtcaggatggtgaagctgttca

SEQ ID NO: 235563 - DNA, 100 bp, Homo sapiens
tgcatgcgcggaggccgcctgctagcaagggtgggctgaaaaacagcaaacatgaatgcaccctgtcttcacaagaatatgttcatgaattacgatcggg

SEQ ID NO: 235564 - DNA, 82 bp, Homo sapiens
cctggcactacttgtccaagacgtactggtggcgaggttttaaaatcaaagatgggaaaatcggagaaaattgcccttcccc

SEQ ID NO: 235565 - DNA, 117 bp, Homo sapiens
aagaaactcttcgactacttcaaccaggaggttttccgagacaacaacggcaccgcggtgtgcattgtgcagaagcgggacacggagaagatgtacgccatgaagtacatgaacaag

SEQ ID NO: 235566 - DNA, 97 bp, Homo sapiens
gtccgtaatcagtgacgaggtccgctacgtaaatccctttgcggcggtcacccacaaaagctgtatataatgccagacattggaatcatccagattc

SEQ ID NO: 235567 - DNA, 90 bp, Homo sapiens
gaactcagtttatatgagttacaacgaacacctcagcttttcaggatgtccagcaaagaatcctgtgggaaaaaagagacatctcagagg

SEQ ID NO: 235568 - DNA, 100 bp, Homo sapiens
accccgggccagctctggggaagtatgaacggtgccttagcgtttgtggacacttcggactgcacggtcatgaacatcgcagagcactacatggcttccg

SEQ ID NO: 235569 - DNA, 100 bp, Homo sapiens
ggaaagttggggacatgctgctacaatacggctaatctttcattgggaccgaaagcaaagaacggcccgggatgttggacttcacgggcaaggccaagtg

SEQ ID NO: 235570 - DNA, 100 bp, Homo sapiens
ttggtgatattttgatctgccgtgatcaatatcaggaaaggccccatcttcccttcacacctgatggtggatgcttccaaaagcatcgaagctgtccatg

SEQ ID NO: 235571 - DNA, 51 bp, Homo sapiens
cgacatggcccggaggcagcagaagtcactgtgtgcccagtattctgcaga

SEQ ID NO: 235572 - DNA, 100 bp, Homo sapiens
gtggttgaagtgctccaggacagcgtggactttgatattgatgtgaacgcctctgtgtttgaaacaaacattcgaggagatctattgggaaactgattat

SEQ ID NO: 235573 - DNA, 74 bp, Homo sapiens
attccaagtaactcttatttgccaaaacctattgatgtacaagtcattacacaccacatgcagcgatatgcagt

SEQ ID NO: 235574 - DNA, 83 bp, Homo sapiens
ctgcagacggcgagacctcctgcacagttcagaggaatatccttgacttcccccagcatgtttccccctccaaggacatccgg

SEQ ID NO: 235575 - DNA, 100 bp, Homo sapiens
gagaagagactacagcagctgcaaagtgatgaactttctgcggtgactgtgtcgggtcatgtatacaataatcagtatggagttttaacattgaatgcgg

SEQ ID NO: 235576 - DNA, 74 bp, Homo sapiens
atcagggacagtggcggatgtgcactgctacaggactctactatggaggttaagagcaggcttatgtgatcgct

SEQ ID NO: 235577 - DNA, 100 bp, Homo sapiens
cggacgccgactcggaggtgggtccggggagcccgactcggaccgcggagaatgtcatacccaggctatcccccaacaggctacccacctttccctggat

SEQ ID NO: 235578 - DNA, 76 bp, Homo sapiens
atcaaccctgctgacaccttgatcgtggacttctagcctccagaactggtgcggacgcgtcatcactgcagaaacg

SEQ ID NO: 235579 - DNA, 100 bp, Homo sapiens
tggagacatccgctaaaacatcaatgaatgtaaatgaaatattcatggcaataggcccaagaaacagatattttcaagaaaaagaagaggaaaggacagg

SEQ ID NO: 235580 - DNA, 90 bp, Homo sapiens
gaggagcctggctaagcaaaaccctgcagaacggctgcctaatttacagcaaccatgaggaatggtggaaagcagcagacataattggag

SEQ ID NO: 235581 - DNA, 75 bp, Homo sapiens
ctgcgctctgaggaccctgaccagcagtacttgggccgttgctccagggagaactgcaaatatcttcatccaccc

SEQ ID NO: 235582 - DNA, 75 bp, Homo sapiens
ctggggacagtttggtattaaaaactggggctgtggctgagatgtcacatggcagataggatcacaaatttctgt

SEQ ID NO: 235583 - DNA, 75 bp, Homo sapiens
gggcgagaggaggcgagaggcgcaaagacaatgcagatcttcgtgaagactctgactggtaagaccatcaccctc

SEQ ID NO: 235584 - DNA, 50 bp, Homo sapiens
ctgggctgatggcccccctcgtgaagatgtccgttccaaatgggagtatg

SEQ ID NO: 235585 - DNA, 50 bp, Homo sapiens
aatctgaatgctgttatcactgccggtggtggtgtgcacattgagccccg

SEQ ID NO: 235586 - DNA, 90 bp, Homo sapiens
cctagggctcctgccgtggtggacctgggagaagtgtctggtaagcatcagatggtgaaggagaaggagacacagaagtgatgcagcagg

SEQ ID NO: 235587 - DNA, 116 bp, Homo sapiens
gttcttgccggctccctacggtgccgtgtgtgcgtgagagaagaccagtctttcctctagatgaaggatttgggggcagagcacttggcaggtcatgaaggggtccaacttctcgg

SEQ ID NO: 235588 - DNA, 82 bp, Homo sapiens
gcgagccgggtgtgagctgcctgaaaatgcactcggatgccgccgctgtcacacaggaagtcctggagaacctgaaggaccg

SEQ ID NO: 235589 - DNA, 82 bp, Homo sapiens
agcctcgttgcggccatcgccctgccggaccgcgcctcaggctcccccaggtctcggcgcggaagatggccggcggcgtgga

SEQ ID NO: 235590 - DNA, 96 bp, Homo sapiens
gttcacgcacgggatccagagcgccgcgcacttcgtcatgttcttcgcgccctgaccatggtgaatccgggcagcagctcgcagccgcccccggtg

SEQ ID NO: 235591 - DNA, 83 bp, Homo sapiens
ggcgacagcaacagctctgccggctggaagatacgtcggtaacctttccagagatgtgacagaagctctaattctgcaactct

SEQ ID NO: 235592 - DNA, 100 bp, Homo sapiens
ccagcccctctccagctcgaaatcgatgaccccataggaaatattaacctggccatggaaatcgctgagaagcacctggatattcctaaaatgttggatg

SEQ ID NO: 235593 - DNA, 80 bp, Homo sapiens
tctcgcatcacaaccaaaatccagagttctatgatgagtacctgccatcctggctggacttgaccccagggacattgtgg

SEQ ID NO: 235594 - DNA, 100 bp, Homo sapiens
gccctgtcatcccacctgagaaccatgctcaccgaccctgagcaatttacagcaatgagggatttatacatgaaaaatggacaaggatttgcattagttt

SEQ ID NO: 235595 - DNA, 73 bp, Homo sapiens
catcaggacaccgggagtgggagagattggactgggagactcagcagctgcctgccctgtcctgtgcagtggg

SEQ ID NO: 235596 - DNA, 97 bp, Homo sapiens
ccatgggcaagatatctcagtgttctccgctctcataggtcagattgtttgctacatgaggagaacttctcggtgaggtgccctaagcacaaggtga

SEQ ID NO: 235597 - DNA, 97 bp, Homo sapiens
gacggtaggagcctccgtgcggagaccactgttcaaggccacaggagatttactgaccttaagcactatagtgatgaactgcagtctgtcatctcac

SEQ ID NO: 235598 - DNA, 82 bp, Homo sapiens
cggatgatgaagtagtacagagtctaccctgatgggagagtctgcatttccatcctccacgcgccaggcgatgaccccatgg

SEQ ID NO: 235599 - DNA, 90 bp, Homo sapiens
agcctgcagagcgcgcagtacctccggatgagctttctgatgttagccaaggcggatctaaagctaccactccagcatcaacagctaatt

SEQ ID NO: 235600 - DNA, 90 bp, Homo sapiens
gcaggcactttcccggtccccagtcaagtccatcatctccagaaccagctagtcttcctgcagaagatattagtgcaaactccaatggcc

SEQ ID NO: 235601 - DNA, 100 bp, Homo sapiens
tagccgcatcttcgggggcagcccggcagctgccggcggcgcggcgagagagcggctgacagaggggatgcgaggtcagttcaccgggacctggaggccc

SEQ ID NO: 235602 - DNA, 75 bp, Homo sapiens
gcctaacttctactgacgaagcttggaagttgcagaagattgcagccaaaattggaggcgatgctgccacgacag

SEQ ID NO: 235603 - DNA, 74 bp, Homo sapiens
tccttcagtggaccactctgcaatgacctggaggaatcagacatcattgatcttgagaaacgctattggttatt

SEQ ID NO: 235604 - DNA, 89 bp, Homo sapiens
agcacagattgctgctgtatgcagagaggtacatcaagagagtgtacacatgattgaagtcacaagtaatttgattaatgaaactctag

SEQ ID NO: 235605 - DNA, 101 bp, Homo sapiens
aagaatatgaaaatgttggaaatgcagcatctaagtggccaaaagtggaggatcctatgcctgaatctaagtgctggtcccaaaggcgataacatctatga

SEQ ID NO: 235606 - DNA, 83 bp, Homo sapiens
ctggtcccctgctttaaccatcgaaaatgagacagaagcattaaaatgcgtggctcaggctagcaagaacagatcactggcag

SEQ ID NO: 235607 - DNA, 100 bp, Homo sapiens
ctgcaaccaagcacctgaaacagcagtctcccatcaaaggacgtgcacagccttatgatcccaatttttacgatgaaacctatgattatggtggttttac

SEQ ID NO: 235608 - DNA, 98 bp, Homo sapiens
aggaatcatggcggctgcgctgttcgtgctgctgggattcgcgctgctgggcacccacggagcctccggggctgattgcatgagactcgttcaggaga

SEQ ID NO: 235609 - DNA, 90 bp, Homo sapiens
cccccgggacagtctccgaagtctcgagcaggacctgaaggagaagaaggagaaggtggaggagaaggcaagccggaaagagcgaaagaa

SEQ ID NO: 235610 - DNA, 75 bp, Homo sapiens
cagacagacagctggcaagaggcagcctgggggccacagctgcttcagtcgtaaatctgggaagggcttttacat

SEQ ID NO: 235611 - DNA, 82 bp, Homo sapiens
attggctattctttacaactgtacccggacagcgaccgtcaagacaccagaaagtttgatgcaggcattggaagacttagat

SEQ ID NO: 235612 - DNA, 89 bp, Homo sapiens
gggaatttctgcccagatagtgtctgcagctggttggttctggacattacacagcatacgcaactcacgaaggccgctggttccacttc

SEQ ID NO: 235613 - DNA, 98 bp, Homo sapiens
ccaggaggagtttgagcataagctgcacgagaagtttgaccgtctgaagaaactgcaccaggacgagaagaagaaactggaggataagaagaaatccc

SEQ ID NO: 235614 - DNA, 75 bp, Homo sapiens
ctcttactttgacaagccaggctaacattgaagatggtgatggaatttcctgataatgtgttaaatctcgatgga

SEQ ID NO: 235615 - DNA, 51 bp, Homo sapiens
ccatgtcatccacttcgcccaacctccaggatctgcaggcccaagaccgag

SEQ ID NO: 235616 - DNA, 76 bp, Homo sapiens
ctggggaaaaggcaaaaatcccatctaccgcaactctcagttcgagagtaaagatgtgaagttcatttccaatccg

SEQ ID NO: 235617 - DNA, 75 bp, Homo sapiens
tgccaggcttcccaacattcttgtctgtgatcaatgagctgagcaatgttcctgttcctgtcatgctaatgccag

SEQ ID NO: 235618 - DNA, 50 bp, Homo sapiens
ggcggaggtcgataagctggaactgatgtgaaatcccattctctggctgg

SEQ ID NO: 235619 - DNA, 80 bp, Homo sapiens
ggccgaccagggacctgcccgcctgcggctgctccgggaggaaaggaagtgacaagtacagaagaaataaaaggtgttca

SEQ ID NO: 235620 - DNA, 82 bp, Homo sapiens
cgggattttatccaccggcactgccaagatcaggaatggaagttggatacactttgtgacttgtacgagacactgaccatta

SEQ ID NO: 235621 - DNA, 83 bp, Homo sapiens
gtccgagacgtcaaactcctagtgggttcgtgctggccgtgggcagcgccgtctttgatgccatgttcaacgggggaatggcc

SEQ ID NO: 235622 - DNA, 73 bp, Homo sapiens
actgggatgatgcgctgcagccagctggcccccagggccctgcagatctgtgtgcctgtggagtcctcaagcc

SEQ ID NO: 235623 - DNA, 83 bp, Homo sapiens
ctcgggggccgctctgggatcccggccaccagcaattgtccgtctgttcggcacttgaagtactccttgtttaagaaatcact

SEQ ID NO: 235624 - DNA, 100 bp, Homo sapiens
ttttctaatcatcagcatttacatgacagaaatcacctatgtttacagcgacaggtcagcccaagactaccccgtcggtcattctgttcctgccgtcctg

SEQ ID NO: 235625 - DNA, 100 bp, Homo sapiens
tatttgatcctggggagtctgattcagatgacaactgtacagatgtcactgagacgagttgtactgctgtcacaggaaatggacgctggattacaagcat

SEQ ID NO: 235626 - DNA, 100 bp, Homo sapiens
ctttatctttctgtggatccttacatggacccagatgatgtggtaccagttggccaaagaagagcctggtgttggtgcatgtgctttggactagcattta

SEQ ID NO: 235627 - DNA, 101 bp, Homo sapiens
gggaccagctctccctgcagatccaggatactcccgggggcgtccagttgtgcagccaatggctgtgatcaaaaattcaacacaaaatcaaacttgaagaa

SEQ ID NO: 235628 - DNA, 75 bp, Homo sapiens
ttctgggacagctctactgacggaaaaccagtagattcccagacatcgcgaagtgaatctgaaattgtgccaaaa

SEQ ID NO: 235629 - DNA, 83 bp, Homo sapiens
gaattacatagcccaagtagtcccaggaatactcccccagttgcaagaggcgcaggaccgtggaagacttcaacaaattctgc

SEQ ID NO: 235630 - DNA, 115 bp, Homo sapiens
ctctccagtttccatatgttgagattctacttattcatcagtttgttgtgcttgtcaagatcagggaacctcagaacctgttctggatccacagcaaatccaagcatttgatcag

SEQ ID NO: 235631 - DNA, 75 bp, Homo sapiens
aggcatttcaatcacattatgatcaggatcctcatgaccagccaaagagaagaagaattaggaagcataaatcaa

SEQ ID NO: 235632 - DNA, 82 bp, Homo sapiens
gctcaagccactgatcaaggtcatagaaagtgaagattatggccaacagttagaaatcagacaaggtcttgctgtgttgccc

SEQ ID NO: 235633 - DNA, 88 bp, Homo sapiens
gttcctgtagctctgatgagtgcaatgacaacatcatcttctcagaaggccccgtgaagcttggcggggaggccgcccacctcccaca

SEQ ID NO: 235634 - DNA, 80 bp, Homo sapiens
atcgaaccgcccgcaggcccgtcgcagctccattaatgcaactaccattacactaagggcgtctctggccgagcctcttt

SEQ ID NO: 235635 - DNA, 82 bp, Homo sapiens
ccgctcgctctgcgagcctcccggggctggcgggctgtgagccgtgagctttgaggcggtgggatgtgtcagcagaatgtct

SEQ ID NO: 235636 - DNA, 100 bp, Homo sapiens
acaggagttccgatcgacccggtaccaagaaggggagtgcccgcggcagaaagaatcttcaagagggagacatagggaaaaggaagacataaaaatcact

SEQ ID NO: 235637 - DNA, 51 bp, Homo sapiens
aatgtgttactccattgctgaggagtggtatgccattgcattggccttaag

SEQ ID NO: 235638 - DNA, 100 bp, Homo sapiens
gaagactttgcttcattaaagtgtctgagaaggaagctgcgcagttggacagcattggcttcagcataatcaggaaatgcatccatgctgtggaaaccag

SEQ ID NO: 235639 - DNA, 50 bp, Homo sapiens
gcagtcaactcctggaccactagtgaacaggcctttgagagcagccagaa

SEQ ID NO: 235640 - DNA, 50 bp, Homo sapiens
cagtgtcttccaatggcccctcagagcttgatgcattagatgccaatgat

SEQ ID NO: 235641 - DNA, 75 bp, Homo sapiens
gaaaaactcgccaaactgcaggcacaagtgcgcattggtgggaaacactttgttagtgaacgtaaatatgatgag

SEQ ID NO: 235642 - DNA, 105 bp, Homo sapiens
ttggattttcactggacttccacaaggacagccatgggaggtgtgcaactgaggaacatggctcaagaaactaatcacagccaagtgcctatgctttgttccact

SEQ ID NO: 235643 - DNA, 100 bp, Homo sapiens
atcctgcaaagtgatgcctcagatatcagaaaggtagatttgtcaaaaaacctgttgtcatcatgggatgaagtgatacacattgctgatcagctcagac

SEQ ID NO: 235644 - DNA, 100 bp, Homo sapiens
gcgcctgctgtttcgcttctacgacatcagctctggctgcatccgaatagatgggcaggacatttcacaggcagcaatcagcatctttggcatggttggg

SEQ ID NO: 235645 - DNA, 50 bp, Homo sapiens
cactattgaagaaacagactttgaccaagccaccctggtagaacaagtaa

SEQ ID NO: 235646 - DNA, 98 bp, Homo sapiens
ctcccaaagcgctgggattacagccatcatgtatgtcatgggagcacttggccctgcagtgggatatttattaggtggacttcttattggtttttatg

SEQ ID NO: 235647 - DNA, 100 bp, Homo sapiens
ctagacctgaactcttcagataatcagagtggaggaagtacagccagcagtaaaaatgcatttgcaaagggagaaaatgaaggccaaacagaagcaggct

SEQ ID NO: 235648 - DNA, 75 bp, Homo sapiens
ctgggggatacggtggagaagatcgcatggcagaaagggggcatctttaagtcccatgaagctgaggtcttgaag

SEQ ID NO: 235649 - DNA, 75 bp, Homo sapiens
agcccttgggccgcgtctcctttgagcctgaactctttgcttccggaatccgggattgttgctgacatagaatta

SEQ ID NO: 235650 - DNA, 75 bp, Homo sapiens
tgactattgcaccacgcccggggggacgctcttctccaccacaccgggagcagtgcctgatttgagatggggtcc

SEQ ID NO: 235651 - DNA, 100 bp, Homo sapiens
gggaaatggcggagtatctggcctccatcttcggcaccgagaaagacaatggtcgtggagtcggactttgtgaaatacgagggcaagtttgcaaaccacg

SEQ ID NO: 235652 - DNA, 97 bp, Homo sapiens
agccagccgctgttttgccggaggagcccctcaggcccaaatgaagaaacacccctgccgccagtgtgacaagtctttcagctcgtcccacagcctg

SEQ ID NO: 235653 - DNA, 74 bp, Homo sapiens
cggcgagtccgcgacggtcgccgcccacggcgagctgtgtgttctcatttcacccaaaacctttggacagtgca

SEQ ID NO: 235654 - DNA, 100 bp, Homo sapiens
cgccatcgtggccacgcttctcatcctggacatctggtctcggacagcccgggagacgagccctcggagtccccatacgaaagtgcagacgaaacacaaa

SEQ ID NO: 235655 - DNA, 100 bp, Homo sapiens
catcaagaactgtaatacttctggaatccagacagaatgaatatggcatttcaggctgaacaaaaaataaaagcagatattttacgaagcttgagtactg

SEQ ID NO: 235656 - DNA, 75 bp, Homo sapiens
gtcagtgttatatcctccaggaatactggccagatacagaagatcattgagacactgacacagcagcttcaggca

SEQ ID NO: 235657 - DNA, 74 bp, Homo sapiens
tcgtcttatagttgagaatttatcctcaagagtcagctggcagtcgagtaatcctgcctgtgtctgtagatgag

SEQ ID NO: 235658 - DNA, 98 bp, Homo sapiens
ttgagaacttcagtaactttaccaacagaatgagaatggatcttggagaatgtctgaaagtccatgacctggctttaagagcggattatgaaattgca

SEQ ID NO: 235659 - DNA, 101 bp, Homo sapiens
agaaatctgagcctcagcaagagaaattaaccctatacctctgacccaggacagtcattttgtttactcattcagccctgttgcaggtcccaataaactct

SEQ ID NO: 235660 - DNA, 90 bp, Homo sapiens
ggaacaaaaggtcccggaccccccggatctgacggggcgggacctggcgccaccttgcaggtgtgggccatgtttgaggattgccccagc

SEQ ID NO: 235661 - DNA, 98 bp, Homo sapiens
agcaagcaccacgcggcctacgtgaacaacctgaacgtcaccgaggagaagtaccaggaggcgttggccaagggtgaatctggattgggaaagtcgac

SEQ ID NO: 235662 - DNA, 100 bp, Homo sapiens
gagcggaaacaaaggcacgcaaaacggaaaagcgtgtgtaggggagcggaaaaggaagtcaccaccgtggcctgcgacggctggagtgcagtggtgtgat

SEQ ID NO: 235663 - DNA, 75 bp, Homo sapiens
ggactggatccacgagcagatggagaaccacgttcgtttgaagtaggaatgctagtctggcataaacataaaaaa

SEQ ID NO: 235664 - DNA, 98 bp, Homo sapiens
cggaagatgaggaatgaggtggtccataaagtgagctgatgaacttattagtcctaaagacattgatcctgtccagcgctatgtcccactaaaggatc

SEQ ID NO: 235665 - DNA, 100 bp, Homo sapiens
ctggtgaagaagcctgtgcccaagctcatcgagaagtgctggaccgaggacgaagtgagggagcactatgtctgcggaagtccccgaggcagcctccgcg

SEQ ID NO: 235666 - DNA, 50 bp, Homo sapiens
caaaatgtagaccactcacaggaagcagctattcctgcaccaactgacct

SEQ ID NO: 235667 - DNA, 87 bp, Homo sapiens
cgaagccgcgccagaactgtactctccgagaggtcgttttcccgtccccgagagcaagctgcatatctatgtgagactgaattttcc

SEQ ID NO: 235668 - DNA, 83 bp, Homo sapiens
ccagcccgggtccccgcgttcacagccccagcgcaggttgtgaccgagattcccgacgagagagactgaggggaagagaggaa

SEQ ID NO: 235669 - DNA, 75 bp, Homo sapiens
gctgttgctggtctctggctccctcctcccagggccaggcgccgctcagaacgatgttgccatcccaacattacc

SEQ ID NO: 235670 - DNA, 100 bp, Homo sapiens
aacgtcaataagctcctggtgggcaacaagagcgacctcaccaccaagaaggtggtggacaacaccacagccaaggtggatgaagccgcttccagggaag

SEQ ID NO: 235671 - DNA, 90 bp, Homo sapiens
cccggagcaggccaagttcggggccaggacgtcgggaggacctggtctcggtccagctcgacttccagctcaggctccagcaccagcact

SEQ ID NO: 235672 - DNA, 75 bp, Homo sapiens
ctcagcggtgggcagtcctagtccgaggtgccaccgtggaaggacagaatggatcaaaatacttgctggatggtg

SEQ ID NO: 235673 - DNA, 123 bp, Homo sapiens
ctaaactcaatgctgctgtgtgggaagaagatttgtaaagaaaactcttaggcagaagatcctgaaggagaaggctgtgcccatgatagaaggctacatgtttgaggagcatgagatgatccg

SEQ ID NO: 235674 - DNA, 90 bp, Homo sapiens
ggcgacgcggggccatgtgcaggaccctaacgacaggcgcctccggcccatttacggtcaccgacgatgagggcgcacctgctgtcctgg

SEQ ID NO: 235675 - DNA, 75 bp, Homo sapiens
aaactggccaagaagggccttactccttcacagatcgtgcgtcagcatttatcccgtttgccaaccattgatccg

SEQ ID NO: 235676 - DNA, 102 bp, Homo sapiens
gttcaggctgccctcaaactcctggactgaaacgatcctctcatctcagcctccaaaagtgctggcattacaggagtggaagctggacacactatgtgactt

SEQ ID NO: 235677 - DNA, 78 bp, Homo sapiens
ctcaagctcatattttgaagtgtttacgggcttgcttccggcgtcatggctcaaagggccttcccgaatccttatgct

SEQ ID NO: 235678 - DNA, 90 bp, Homo sapiens
cgaatgtgggccaaggagaaagaggctcagaaggagacgattaaggatcttcccaagatgaaccaggagctacagaaggcccaaaagaag

SEQ ID NO: 235679 - DNA, 98 bp, Homo sapiens
tcggccgcccgggaccgccagctctgtccgctgcccacagcctagcagtcgggaccgtactgaggaacttacaatgtctcagaaaaatggtgggaatg

SEQ ID NO: 235680 - DNA, 83 bp, Homo sapiens
cacacaagcaccccaataacctcaagcgtgagtgcatctccatccacgttggccaggctggtgtccagattggcaatgcctgc

SEQ ID NO: 235681 - DNA, 100 bp, Homo sapiens
cgccgccgccgcccagagactgctgagcccgtccgtccgccgccaccacccactccggacacagatggactcaccctgtcacccaggttggactgcactg

SEQ ID NO: 235682 - DNA, 90 bp, Homo sapiens
gatggcgccagaacgaagaccctactaggcaaggtgccttggcatctcccaatggggtggctttgctctgggctcctgttccctgtgagc

SEQ ID NO: 235683 - DNA, 83 bp, Homo sapiens
cggcagaagccgagttcaacatcctcctggccaccgactcctacaaggttttttattggcacctcagtctcaacattttcttt

SEQ ID NO: 235684 - DNA, 100 bp, Homo sapiens
gctgcagtgcaggtgcacttttatctttgcaatggcaagaggaaaaaaagccagtctcaacgttttacttatacaccagtccctggtgatttgggtaacc

SEQ ID NO: 235685 - DNA, 101 bp, Homo sapiens
taagaccgcgaccagacaggcggcgccatcttcgaacttagacttccggaaggactttggcgaggattcaggggtcagtttacttcataaaaaatcattag

SEQ ID NO: 235686 - DNA, 100 bp, Homo sapiens
aagagaggctatgtgaaggctgggctctggactccagaggcagtgatagaacacccagacgcagatacttgccagaactaatacagctgatgaaatacct

SEQ ID NO: 235687 - DNA, 75 bp, Homo sapiens
ttttacctttggttcacaacatcatcaaatgctcgttgccagaggaaaaaaacaagagcagctgctcttttgaga

SEQ ID NO: 235688 - DNA, 75 bp, Homo sapiens
cgagcaggaggcgccatcatggaccttcgtggggatccaggcctctgaggcctccaggatggaggatgccaccaa

SEQ ID NO: 235689 - DNA, 90 bp, Homo sapiens
ggaccgagctggaggagctgggtgtgggagacctgtcggccatggagcctaatgatagtaccagtaccgctgtggaggagcctgacagct

SEQ ID NO: 235690 - DNA, 98 bp, Homo sapiens
caccatctgaaaacaacatcatgcagtggaatgcagttatatttgggttcccgtgtggccggtggttagggaagggcatggatgatggaagcctggag

SEQ ID NO: 235691 - DNA, 83 bp, Homo sapiens
cccttctctcccctccactttctcccggaaagtttcctacactactgaggtttaggggcactgtgaagcaaaagccacgcctc

SEQ ID NO: 235692 - DNA, 75 bp, Homo sapiens
gcccgctgccttgtggaggagttgagaaaaaccaaggatgacggctgcccgaagccccccgagattgcacatggc

SEQ ID NO: 235693 - DNA, 75 bp, Homo sapiens
gagcggagcgcaggcgccgagactgacaacgcggtcccacaggacaaattgatggccaggagatcactgccaccg

SEQ ID NO: 235694 - DNA, 100 bp, Homo sapiens
atcgtgatcttcacagtgctcctgcagtctctctgtgtggctgtaacttacgtgtactttaccaacgagctgaagcagaactctcttgatagagcccaag

SEQ ID NO: 235695 - DNA, 74 bp, Homo sapiens
agaccttgccactcagatctgcaaacagcaaagcccagattgtccagaacatcgtgggcacagctctgatgatt

SEQ ID NO: 235696 - DNA, 98 bp, Homo sapiens
cgcatctgcttgcctacttcttcacggagctcaaccatgaccaagtgcagaagtgggctaccttgagaatggagcgaggagccaaggagaagaaccac

SEQ ID NO: 235697 - DNA, 74 bp, Homo sapiens
tgcgtgtcatcaagaagtactggctccagttccgggaaggcccctgggatccagcaggccatccatggcaacct

SEQ ID NO: 235698 - DNA, 76 bp, Homo sapiens
aaagaacatgctcacatcttcaggtgcctcattcacatacgtcaaggaaattgagaataactgaagtgaagtgatg

SEQ ID NO: 235699 - DNA, 100 bp, Homo sapiens
tgccggcctattttcagaggccggaaaatgccctcaaacgcgccaacggtgtggacactgccagcggctgcagccgacttggaatgacctgggagacaaa

SEQ ID NO: 235700 - DNA, 100 bp, Homo sapiens
ccacctacagaaacaaaatgtcaacaaattgatggaattatatccagatcgagagacagaagattctgaaagggttcaatgaaatgagagtcatcttgga

SEQ ID NO: 235701 - DNA, 75 bp, Homo sapiens
ggggagcgcctcgtcgacatgagtgatgtggaggaaaacaacttcgagggcagactgcatgaaagcggttacgat

SEQ ID NO: 235702 - DNA, 100 bp, Homo sapiens
gacgaggaggagatcaatatcagtaatgcacaggtgacacaaacaaagtttctccccaatgctccgaaagctctcattgttgaaccttcccgggagttag

SEQ ID NO: 235703 - DNA, 100 bp, Homo sapiens
ggaggaatgcttgaatatagccagttccattgaggtagaaaatctggtgtattaactgtgaaaattttagagctgcatgaggaatgtgccatgcaagttg

SEQ ID NO: 235704 - DNA, 100 bp, Homo sapiens
atcagcttaatgaacaactacgatgacttgtctcccacggtcatccgctcagggctgaaagatatcttcacagtcatcacttcttggagttggttacctt

SEQ ID NO: 235705 - DNA, 83 bp, Homo sapiens
cgcgcagccccgcacggcccgggcccacgttattcagcttctcaaggctggaaaagcgaaggaagtttcctacaatgcactag

SEQ ID NO: 235706 - DNA, 97 bp, Homo sapiens
acaccctggtgaccaagagggattcaaaggacgctggtcagaaacattttggggctactgtgtgcaagtcttgtggtatgatatatactgcttccaa

SEQ ID NO: 235707 - DNA, 100 bp, Homo sapiens
gagttggggcctaccaagccaaggtcctacagctcttgttggagctgtcggaaaaggtaacagaagatggaactcgaaatcccaatgaaaaacctaccca

SEQ ID NO: 235708 - DNA, 51 bp, Homo sapiens
atacagaattacgcatttccacttctaatgcagcatctggaatcaagagac

SEQ ID NO: 235709 - DNA, 98 bp, Homo sapiens
acgggtcaaagaactatgccagcaggccaggtaccagacagcctgtgaacaaccggggcagacgcagccgtagacaccagctccgaaatcaccaccaa

SEQ ID NO: 235710 - DNA, 97 bp, Homo sapiens
tcctgctgctgagctacccgagcggcggcggcggcagcagcggcagcggcaagcaccgtgtggctgaccagctgcagacgaactatgccagtgacct

SEQ ID NO: 235711 - DNA, 74 bp, Homo sapiens
gcctcagcacctgcttgtttggaaggttttgctgttactgctcagtgtagtcacaccttgaataagaaatggaa

SEQ ID NO: 235712 - DNA, 87 bp, Homo sapiens
gtccgtaatcagtgacgaggtccgctacgtaaatccctttgcggcggtattctaccttgtaaatactgttatttgtatatactgtaa

SEQ ID NO: 235713 - DNA, 90 bp, Homo sapiens
aaaacaaataagttatgctatgaggatgacaaactctggagtaattggagccaagaaatgagtatagctgagcaactgggggcatttgca

SEQ ID NO: 235714 - DNA, 100 bp, Homo sapiens
agactgaccgcggggcagctgcggagcatgtcgaccccggcccggaggaggctcatgcgggatttcaagcggtgctggaaacatgcatgaagagctgcgg

SEQ ID NO: 235715 - DNA, 75 bp, Homo sapiens
aaagaatactattgttgccacaggccacataaagaagatccctaatagtcatttctcaacaattatatagtcaac

SEQ ID NO: 235716 - DNA, 80 bp, Homo sapiens
aagttcttcagcttctcagccccccagctctattaccaggttttaaacttcgccatgatcgtgtcttctgcactcatgat

SEQ ID NO: 235717 - DNA, 100 bp, Homo sapiens
accgtggtactcaatgaggaagggatctgcacacagaaatgtgccctgaactggacggacataccagtggccatggtagagacggggtttcgccatgttg

SEQ ID NO: 235718 - DNA, 82 bp, Homo sapiens
cggtattggagctgaaggcggcggcagagaacttgccggtgccagctgagctcctctggtgcaagtgtggtagctattgaca

SEQ ID NO: 235719 - DNA, 75 bp, Homo sapiens
ctccgcacctcggggacattattgcgcgtggaacggctgcttttggaaggtggagctgatcagaataatgttcag

SEQ ID NO: 235720 - DNA, 99 bp, Homo sapiens
ggagaatctgctgtcgcctgcagctgctcgcctgtctccgtcggaagggagcccaagctttgcagaggagagaccttcctgccctactacacgggccgc

SEQ ID NO: 235721 - DNA, 100 bp, Homo sapiens
aacccgcaaacctcatcatccacccacttctagatgagccggttccgagtctgaggaagacataaccttgtgcctgcctgcccacctctctctctggtcc

SEQ ID NO: 235722 - DNA, 100 bp, Homo sapiens
atccaacacctttccccagctctgcgcgtaccgcgctctttggaaacgaatttcattgaagtcaacaagagagacatagtcttcctggtggatggctcat

SEQ ID NO: 235723 - DNA, 100 bp, Homo sapiens
ctccaactctcagcccaccaatgaaagccactctatcaaagccatcctgaaaaatcctcaaaataaattcgctgctctggacaatgaagaggaggataaa

SEQ ID NO: 235724 - DNA, 82 bp, Homo sapiens
ttccaaggaagaatttcctctgaagcaccgagggaagtcttgccggaccatcacctttgagcagttccaggaggcgctggag

SEQ ID NO: 235725 - DNA, 100 bp, Homo sapiens
aattgtaaaattctggtttaacacggggcagatgccattgccacaggtcactatgcaagaacttccctggaagatgaagaagtctttgagcagaagcacg

SEQ ID NO: 235726 - DNA, 100 bp, Homo sapiens
gtcgtggaagcaggactgcgccgcgtcttcctcaagggttgagaatgcttgcaccaagcttgtccaggcagctcagatgcttcagtcagacccttactca

SEQ ID NO: 235727 - DNA, 98 bp, Homo sapiens
tgcagcgtggcttcctttggtgccagctctttgtctaggtgagacatggaatccattaaaattgcattatcagttaagaaatgtacgggaacgattag

SEQ ID NO: 235728 - DNA, 98 bp, Homo sapiens
actagcaagatgaaagtgctgagattcattgcagaggttgatctttgctgggaaacagctggaagatggacgcaccctgtctgactacaacatccaga

SEQ ID NO: 235729 - DNA, 90 bp, Homo sapiens
gactcttggcctgtccctcacatccgatgcaccctttttgtcagattatcaggatgagggcatcctctggtatcacgattccaaaacccc

SEQ ID NO: 235730 - DNA, 74 bp, Homo sapiens
cgcatcgcaaccaccgccctggccatctaccatgtgagataattgacgaccttgccaacctagtggagaacaca

SEQ ID NO: 235731 - DNA, 96 bp, Homo sapiens
tctgaacccctgaagggatcaccagaggtcaaaatgcagatcttcgtgaaaacccttaccggcaagaccatcacccttgaggtggagcccagtgac

SEQ ID NO: 235732 - DNA, 90 bp, Homo sapiens
agagcggagcctggcgggcgtgggaacccaggccccgccgaggcggccagcaggaggatgcattagcacaacaggcctttgaagaggctc

SEQ ID NO: 235733 - DNA, 83 bp, Homo sapiens
cctgcaggtactgacagatccgtagggaggacaccgtgacttcccggacgctgggaaatggaatcggtgagtttcaaggatgt

SEQ ID NO: 235734 - DNA, 74 bp, Homo sapiens
agcgcggagtgggcgatgccagcgtgccagaaaatcctgacttccgagaaatccgctcctttgtggagacgaag

SEQ ID NO: 235735 - DNA, 75 bp, Homo sapiens
catgctgccagacaaccagagcttgagacttccttcatataggagctggaggacacagcacattggaaatcaaga

SEQ ID NO: 235736 - DNA, 82 bp, Homo sapiens
ccttgtcactggagtgcaagaagaaattcccacctgtcaaagagctcatctacatgcactggatgaacacggtggtgaatta

SEQ ID NO: 235737 - DNA, 98 bp, Homo sapiens
gcctgttcagtactgtgggtgatatttgcctttagtgcactcttctccttcacagtaaagtggctgaattttctcccaaactggttggcttgactggc

SEQ ID NO: 235738 - DNA, 90 bp, Homo sapiens
gcagagaaaatgacagtcagcctcccaggacccattctcctgttgtcagatgactcctcattcagaggctggagtgcagtggtgtgatct

SEQ ID NO: 235739 - DNA, 80 bp, Homo sapiens
ggcagaggtggaggcgctttgaaagggtgatgcccggtatctgatctccaactctaaagaccagaccatcaaactctggg

SEQ ID NO: 235740 - DNA, 75 bp, Homo sapiens
ggccgctgagattctgtcgtgtcgtcgctgctggcacttcaggctctggtgccacatcatctcacagttcaacca

SEQ ID NO: 235741 - DNA, 111 bp, Homo sapiens
gagcaagcagggaaagagagcgccaggtgcttagcagggattttgcttatgtagcaagagataaagatacaagaattttgaaatgtcatgtatttcgatgtgacacaccag

SEQ ID NO: 235742 - DNA, 73 bp, Homo sapiens
cggccatctcgctgcccgacgatgtccgcaggcggaaccaatgagatcctcccggaaggggatgccacaacca

SEQ ID NO: 235743 - DNA, 100 bp, Homo sapiens
ccccaggcagagacgggggaagcagcacgggatcccagcctcaggcctgcacggacggtgttggttggggcaattaagttggaatatgcaaggttggtta

SEQ ID NO: 235744 - DNA, 75 bp, Homo sapiens
ggcgccacacggtgaaggtgacgccgagcaccgtgctgcttcaggtttggtgcacctcgatttggaggaagtagg

SEQ ID NO: 235745 - DNA, 100 bp, Homo sapiens
gcaagaaacaagagccaacaagcatctgttatatgccatcttggcagcaggcagcatgatgcagacccacggggactttgatgttgccctcaccaaatac

SEQ ID NO: 235746 - DNA, 100 bp, Homo sapiens
cttgcaggcaatgaatgatatcagacccagtgccatgagggaaatagcaattgatgtcccaaatgcctttagatgttgttctggaaaaactttagtaatg

SEQ ID NO: 235747 - DNA, 75 bp, Homo sapiens
gttacattgtcgctcactctgcccatcacgtgccacatttgcttggggaaggcagtaacagagaagaattttgaa

SEQ ID NO: 235748 - DNA, 98 bp, Homo sapiens
gctggcgctacgcccaggcccactccaccatcgtcagcgagccgaacgcacggccggcgacgcagagcgggcgacactcggtgtccgtggaggtgcag

SEQ ID NO: 235749 - DNA, 100 bp, Homo sapiens
ttgacttcactgtcaccatgaaaggtctagaagatcagttactggggagggtcattctcacagagaagcaggccctcgggaccaaggatcacgtcatgac

SEQ ID NO: 235750 - DNA, 108 bp, Homo sapiens
gctttcattgtgggagagatgaagaacctgagtcaggacgtaaatggaaccctgcttgtcaaaattcccaaaaatgatcccctcaatgaagttcataactttaacttt

SEQ ID NO: 235751 - DNA, 100 bp, Homo sapiens
gaaggccctatcaggacatggagtatgaaagacggaattctgttctcttgagggcattgaatgtcaggcctctgagcccaagctaagccatcatatccct

SEQ ID NO: 235752 - DNA, 100 bp, Homo sapiens
tgcaacaaaggcagactgagcgccagagaggacgtttccaactcaaaactgccactctccgcccctacctgagtgccgtgcgggccacattgcaggctgc

SEQ ID NO: 235753 - DNA, 75 bp, Homo sapiens
tcgcccctgcccggcgtggagggcgcggggggcgcggagtacctgtttgaaaatggtagaatagataacattttt

SEQ ID NO: 235754 - DNA, 101 bp, Homo sapiens
acatccttgtctgtgaagctaaactcaatgctgctgtgtgggaagaagatttgtaaagaaaactcttaggtacaacagaatagctcgggaatggactcaga

SEQ ID NO: 235755 - DNA, 83 bp, Homo sapiens
cagacgttagcgtgagtgatcactctcaatcccggccggaaaactcaaatatatgtgaggtgtgcaacaaatggggacggctg

SEQ ID NO: 235756 - DNA, 51 bp, Homo sapiens
gagaagtaaagattttgctgaaaatctattgaagacaatgaagtatatttg

SEQ ID NO: 235757 - DNA, 83 bp, Homo sapiens
gctggtcgggcttcagtactcgggcaagaccaccttcgtcaacgtgatcgcggccacggcgtatgcctccaaggacggggtcc

SEQ ID NO: 235758 - DNA, 100 bp, Homo sapiens
aaagagaactcgcatgatggaaatattttctgaaacatctataccaaaactcacctttcctggtggtttactaattggttgtagtcctggttttatgaat

SEQ ID NO: 235759 - DNA, 76 bp, Homo sapiens
tgtggctgctaccccactcctgggccgtccctgaaggtacagcttcttccattgagtattctactagaccaagaga

SEQ ID NO: 235760 - DNA, 80 bp, Homo sapiens
ctgacattatctcatccacagacaaacttgttggtaaacctcacaaatgtggatattgtggccgaagctataaacagcga

SEQ ID NO: 235761 - DNA, 83 bp, Homo sapiens
gctgcctctttgtccgttcgcaggctcttgtcaggatggtgaagctgttcatcggaaacctgccccgggaggctacagagcag

SEQ ID NO: 235762 - DNA, 88 bp, Homo sapiens
ctgcatctttttaccttttgtgctgagccaactcgagccaggctgcaaaaaggtcacagagatgcggcggaccctgacgcctgccagc

SEQ ID NO: 235763 - DNA, 98 bp, Homo sapiens
gctcaccaagcacacccgcaaggtcgtgcacgatgccaaggaagaggtagatagtgctggaaggcgtgctaggtacaccgcaaagactccacagcaaa

SEQ ID NO: 235764 - DNA, 75 bp, Homo sapiens
gcccaacttctgcgggatcttcaaccacctcgagcggctgctggacgaagttgacggactggacaaagcttctat

SEQ ID NO: 235765 - DNA, 100 bp, Homo sapiens
gctccgtggccttagctgtgctcgcgctactctctctttctggcctggaggctatccagcattgacaagtatctctatgccatgcggctctccgatgaaa

SEQ ID NO: 235766 - DNA, 88 bp, Homo sapiens
gaagccatggacgccttcacccgcttcaccaaccagacccagggccgggaccgactcttcagccccccgaatccaagcccaacttcac

SEQ ID NO: 235767 - DNA, 82 bp, Homo sapiens
gggctggctgcggccgccctgggccgggccccaccggacggtgtgaacccacatccctgcccccagggccacctgcaggacg

SEQ ID NO: 235768 - DNA, 100 bp, Homo sapiens
tgccgaggtgcgggagagcctggctgagctggagctggagctgtcggaagggcacggccgagcagatgaggactgtgtggacgaccgggccagacaccgg

SEQ ID NO: 235769 - DNA, 75 bp, Homo sapiens
gtttgctgatgaagattcacctgtgcatggttattcagcttctcaaggctggaaaagcgaaggaagtttcctaca

SEQ ID NO: 235770 - DNA, 113 bp, Homo sapiens
catcctgccgtccttctccactttcgccagcccgtgccgcgagcgcggcctgcaggaggagaactacgatgacccgcacaaaacccctgcctccccagttgtccacatcaggg

SEQ ID NO: 235771 - DNA, 87 bp, Homo sapiens
cggtgctggagaacttcgtgggccggtcctggtgcttgatggtcgaggccatctcctgggccgcctggcggccatcgtggctaaaca

SEQ ID NO: 235772 - DNA, 100 bp, Homo sapiens
tgcaaagtgggacgcggcacctacggtcacgtctacaaggcgaggcggaaagatgggtaaaaccagtaatccatagcaggatcaacgtgtcagctcgctt

SEQ ID NO: 235773 - DNA, 131 bp, Homo sapiens
gccgccgcagccatgaccgtggagttcgaggagtgcgtcaaggactccccgcgcttcaggtgctggagaatctggtaaaagcaccattgtgaagcagatgaggatcctgcatgttaatgggtttaatggag

SEQ ID NO: 235774 - DNA, 90 bp, Homo sapiens
ccgagagcgcgaatatcgtcatcgttagaagacagtatgctggctatgactattcgcagcaaggcagatttgtccctccagacatgatgc

SEQ ID NO: 235775 - DNA, 82 bp, Homo sapiens
cggctgcagacttggccaaatggacgggactattaaggatttttagactctgaggagcagttggagctaatccacattatgg

SEQ ID NO: 235776 - DNA, 75 bp, Homo sapiens
caggctcacggagatggagacgctgcagtctcaggtgtgcctaccgcatgttgccgctgctgtttctgctgggac

SEQ ID NO: 235777 - DNA, 82 bp, Homo sapiens
gaagcagctggtggggctctactgcgacaaggatcccatgacagattctgttgtcacgtctccttacagagtttgagcggtg

SEQ ID NO: 235778 - DNA, 116 bp, Homo sapiens
ccgtcccggctcacctggcggtgcccgaggagtagtcgctggagtccgcgcctccctggacaatgcagatcttcgtgaagactctgactggtaagaccatcaccctcgaggttgag

SEQ ID NO: 235779 - DNA, 50 bp, Homo sapiens
atggaagactaccaggctgcggaggaggtggaaaacgaagctcattccca

SEQ ID NO: 235780 - DNA, 100 bp, Homo sapiens
gcctccgtctcaggctgccccggacatgagcaagcccccgacagctcagccagacttcccctatggtcagtatgtgtttgtgaccctcacctgcgccttc

SEQ ID NO: 235781 - DNA, 83 bp, Homo sapiens
ctcgggccgcgggagctgtgtatctgcatgcgagtctgccgaacttggagccgctggtaactaggatttctacctcaaccgcg

SEQ ID NO: 235782 - DNA, 98 bp, Homo sapiens
ggtgggccaaatcactgtggacatgggtggcatggagaaatcgttgtcaaaacagagatgtccgtcagtatgttcaaggttgtggagtgtaactccag

SEQ ID NO: 235783 - DNA, 100 bp, Homo sapiens
gccagaagacaagagagacggcgaggcgcgctccctgcccggcagcgactcggagagacaggatcttactctgttttccaggctggagtgcaatgtccac

SEQ ID NO: 235784 - DNA, 75 bp, Homo sapiens
tgcctcagcctccccagtatctgggattacagggcactgtgaggtgaatgctattgtacacgttttatagatgag

SEQ ID NO: 235785 - DNA, 100 bp, Homo sapiens
gagaggaagaattctttgatgccgtcacaggaagcgagtcacgtcccagcgctgctccctggagtttctggaagatgccgtgggatgcgctccagcacag

SEQ ID NO: 235786 - DNA, 100 bp, Homo sapiens
ctgcaggcgcagattgatgagctcaagctgcagctggccaagaaggaggaggagctgcagggcgcactggccaggaatttaaactttgggataatgagct

SEQ ID NO: 235787 - DNA, 101 bp, Homo sapiens
agaaatgagcagaaaggagttggggcttgatgaaggcgtggatagcctgaaggcagccattcagtctctgcgatatgataccagctattttgtggagtatt

SEQ ID NO: 235788 - DNA, 100 bp, Homo sapiens
agcagcagtcggcttctctacgcagaacccgggagtaggagactcagaatcgaatctcttctccctccccttcttgtggtgaatggagagaatgtggagc

SEQ ID NO: 235789 - DNA, 74 bp, Homo sapiens
gctcacccgtggaaagtacaggtcctgacagctgctgagtcagtgctgattctctcaaatagagcttgaaggat

SEQ ID NO: 235790 - DNA, 74 bp, Homo sapiens
gttacccacgactgcctgggacctggccaagggctccacacaccaagaccaagctccataatgggagaagtaaa

SEQ ID NO: 235791 - DNA, 99 bp, Homo sapiens
ggatcgtgaccgagaccgtgaccgagagcgtgaccgagagcgcgaatatcgtcatcgttagaagctgaactgtcccaagcaataaacagtggtacattg

SEQ ID NO: 235792 - DNA, 103 bp, Homo sapiens
ctctccagcaccagcttccagttagtggatatagcacaccatccccagccatcctcccgagagctggatgacagcagcagtgagtccagtgacctccagctgg

SEQ ID NO: 235793 - DNA, 75 bp, Homo sapiens
cagagcggtatccctgtctcagcgaagtggtgaaagagcatcagacagagggataaattggaagaaatcttgcgg

SEQ ID NO: 235794 - DNA, 75 bp, Homo sapiens
agccccctgtgcgccaccattgcagccaaaggcaaagcgaaggctggagctaggagaaagcggtcatcagtacct

SEQ ID NO: 235795 - DNA, 147 bp, Homo sapiens
cgtagcgcggccgggcggccggcgaggggggcgccgcggcgggtggatgagagttggccccgatatccgctcaggatggcatccacagcgtcacggccttctgcaccctgcgtgtcaccatcatcacggacgacatgctgaccaaca

SEQ ID NO: 235796 - DNA, 100 bp, Homo sapiens
gcgccgcgcacttcgtcatgttcttcgcgccctgccggtggctgctggcagcggaatcccccagatcaagtgcttcctcaacggggtgaagatcccccac

SEQ ID NO: 235797 - DNA, 100 bp, Homo sapiens
ggagcaaccacccgagcagacggagtacacggagcagcggccccggccccgccaacgctgccgccggtcaggatggctaaaggtgaccccaagaaaccaa

SEQ ID NO: 235798 - DNA, 83 bp, Homo sapiens
cggctggacttctccatcaccaaggtagttagaaacaaacctgtggcaaggcaggctcctggcaaacggaagtgcaattgtcg

SEQ ID NO: 235799 - DNA, 107 bp, Homo sapiens
ctgccatcttagtctagggactgaggagtcgccgccgccccgagtcccgacaatgcagatcttcgtgaagactctgactggtaagaccatcaccctcgaggttgagc

SEQ ID NO: 235800 - DNA, 75 bp, Homo sapiens
aaaatcggcagctgagacggccttggccgagcagcggaaagagctcagtgctagaaagcctggtggggagggacc

SEQ ID NO: 235801 - DNA, 100 bp, Homo sapiens
agattcaccaaataagctatatactttggttacctatgtacctgttaccactttcaaaagctttcatgagaaggacaagaagccatattgccgaaaggat

SEQ ID NO: 235802 - DNA, 50 bp, Homo sapiens
tgctgacgctgggcccgcctcgagtgaagatgctcattcggaatctgctg

SEQ ID NO: 235803 - DNA, 97 bp, Homo sapiens
tgcccgttatgcatgagagtcaccatgctcaaagtgaatatattaaggaatggaagttggatacactttgtgacttgtacgagacactgaccattac

SEQ ID NO: 235804 - DNA, 50 bp, Homo sapiens
ttcagctttagaaatacactggaaggagatatgtcagtattgaattctcc

SEQ ID NO: 235805 - DNA, 100 bp, Homo sapiens
tctgatgtcagatttatctcatgctgtgcaggacccatgccccctttgtgatgaagccaaggaagtactcaagccttatgaaaacagggtaatataatac

SEQ ID NO: 235806 - DNA, 75 bp, Homo sapiens
cctcaagtgatcctcctgccttagcttccaagaatgctgaggttacagaaacgccacctcctggatatatcagtg

SEQ ID NO: 235807 - DNA, 75 bp, Homo sapiens
atcagacccagtgccatgagggaaatagcaattgatgtcccaaatatcagtacaatggaacatgaattttcaata

SEQ ID NO: 235808 - DNA, 75 bp, Homo sapiens
tggcaacaagagtctgtccgtaaagttgaattcagctgatcactgctcccaaggctgagaacaatatgtatgtgc

SEQ ID NO: 235809 - DNA, 100 bp, Homo sapiens
cccgcggcgtcgggtttgggctggaggtcgccatggggcgaggcagcggcaccttcgagcgtctcctagggcggcgactggcggcgcgatggacctgacc

SEQ ID NO: 235810 - DNA, 82 bp, Homo sapiens
ggatatctttcttcactcctcttcacttcttcagctccataaaaatacagactcaccagttcctgctttgatgtgacatgtg

SEQ ID NO: 235811 - DNA, 83 bp, Homo sapiens
gcttgcctgtgcgcgcgtgcgcggacatggcctcaaacggatgaccgagtgggagacagcagcaccagcggtggcagagaccc

SEQ ID NO: 235812 - DNA, 101 bp, Homo sapiens
cagaagggttgactcagagcatggtggacagatgtattcagcgggtattcccctacatctcagccatggtgaacaacggctccctcagctatgatcatgag

SEQ ID NO: 235813 - DNA, 87 bp, Homo sapiens
cttgtctacctctggttcctgtgcagtggtcatggtgaatggagaccatcggattgggatctttgccaagagggcaattcaagctgg

SEQ ID NO: 235814 - DNA, 96 bp, Homo sapiens
accacctttgtcaccagaatgaatgaagtgcttcagatttaaataacctgtggatgaagagccagagtcctctgaggtcgatgctgctggtcggtg

SEQ ID NO: 235815 - DNA, 51 bp, Homo sapiens
ccgcgggccaggagagcgctcggcggtccagcctcctgagcccagggacct

SEQ ID NO: 235816 - DNA, 74 bp, Homo sapiens
aagagtaaaagtccaccagcggaagaagcattgcatgcatttattcagccagagattctggatggcccaaatca

SEQ ID NO: 235817 - DNA, 83 bp, Homo sapiens
aggagctaaagcagcgtgcgttcagccctggggacctcagcagccatgtcgaagccccatagtgaagccgggactgccttcat

SEQ ID NO: 235818 - DNA, 100 bp, Homo sapiens
ggcagaagccttcctcaagaaagctgtggtgcagtccccgcaggtcacagggaggtggttgactcaatggttcagcattttaaagtaactatatttggag

SEQ ID NO: 235819 - DNA, 74 bp, Homo sapiens
aagaagcttgggctcacttccacaaatgtctcctaaaaacccagaacagaagatcattaagagagtgattgctc

SEQ ID NO: 235820 - DNA, 76 bp, Homo sapiens
ttttgtagacttcaacagtgaggaggatgccaaagctgccaaggaggctattgagggcacctacattgacaagaaa

SEQ ID NO: 235821 - DNA, 74 bp, Homo sapiens
gccagcgacccgctgctcagcgtcctcatgtggggggtaaaccactcgaaagcgtggatacccatcaacgaagt

SEQ ID NO: 235822 - DNA, 74 bp, Homo sapiens
gttggtcccggcggagatccagtgggaagagccggcggctgcccgggcgctctcgaacagtgtggcctgatgaa

SEQ ID NO: 235823 - DNA, 101 bp, Homo sapiens
cacaaaggcattgtgggaccccttggacctcctggaccaaaaggcgaaaaggcagcaattcccccaggcaagcaaccgtcttcactagcttctccaaatcc

SEQ ID NO: 235824 - DNA, 90 bp, Homo sapiens
aaataatgtgaggcgacaagcaacaacaatcatagctgcaaaccagtccagctacgggggcccagccagccagcagctgagtgggggtta

SEQ ID NO: 235825 - DNA, 89 bp, Homo sapiens
gcacgtcctcaagcagctggagcgggtcaagagtgagaagctgctgctctatgacacgctgcagggggagctgcaggagcggatccaga

SEQ ID NO: 235826 - DNA, 100 bp, Homo sapiens
gcgcgtttggctgcaatgagctcggcctcggggctccgcagggggcacccggcaggaacttagtgatttggcccgtgaccctccagcacaatgttctgca

SEQ ID NO: 235827 - DNA, 82 bp, Homo sapiens
ccgcgtccagcacctacgtcccgctgccgtcgccgccgccaccatgcccaagagaaagcggaatcggacatgtccaaaccac

SEQ ID NO: 235828 - DNA, 101 bp, Homo sapiens
gaagagctctttcaaggaatcataatgctacagccctttgactatgatccgaatgaaaagagtaaacacaagtttatggtacagacaatttttgctccacc

SEQ ID NO: 235829 - DNA, 100 bp, Homo sapiens
gctggcccagagcaccatgtcaatgagaaagaaggaggaatctgaagccttggcctgtaactgcaacctgcatgcccggcgctgccgcttcaacatggag

SEQ ID NO: 235830 - DNA, 88 bp, Homo sapiens
aaggatttggacggtttctcattgatttcagttggcaaaagcagcttttgatgatgcaattgcagaactggatacgctgagtgaagaa

SEQ ID NO: 235831 - DNA, 74 bp, Homo sapiens
ggcacggagacggcggcagcgctggactaggtggcaggtggaaaatgagcttatatatgaagaagtcagcgagt

SEQ ID NO: 235832 - DNA, 116 bp, Homo sapiens
gcaagatttggggaatctatagttaatcttggcgacattgacaatgatggctttgaaggtgaccaagaatatggcccaggtgaccaaagccctggacaaggccctgagcaccatgg

SEQ ID NO: 235833 - DNA, 128 bp, Homo sapiens
ggagctgtgagctctgctacttcaagtaccaggtcctggcgatcagcaccaagaacccactgcagtttctcaagtcaaagaaggccctgtcctagcaactagttcaggagctggtgtttttaagatgg

SEQ ID NO: 235834 - DNA, 74 bp, Homo sapiens
ataccgtgccctgaggttggacgtggggaatttctcctggggctcagagtctttgtgtccctggtgatgttgga

SEQ ID NO: 235835 - DNA, 98 bp, Homo sapiens
ccagactgaggaagacccggaaacttaggggccacgtgagccacggccacggccgcatagattgtctcctacctacttgatcttccagaaaaagatga

SEQ ID NO: 235836 - DNA, 100 bp, Homo sapiens
tcaagccagtgtcctgacccagtgccttaaggttttggtgaaattagccgaaaacacttcctgtgatttcttgcccaggagtcgttcacgcctactgagg

SEQ ID NO: 235837 - DNA, 100 bp, Homo sapiens
tggacgtgccccttagtcaccttccggatatcccagaagctcctgagagactgatgacagacaccattaatgaaccaatcttgctgtgtcgatttcctgt

SEQ ID NO: 235838 - DNA, 98 bp, Homo sapiens
tcaggtggactgaaggccgctatgatcgaattggtggaaaggttgaagttcaagagctcagaccctaaaaaaagagtagttgaacagctacggaagaa

SEQ ID NO: 235839 - DNA, 75 bp, Homo sapiens
cggcggccagctgggctccacagcccaggttgaggctgtgaagctgggcagggtttcagctgagctgaggttgga

SEQ ID NO: 235840 - DNA, 100 bp, Homo sapiens
ccgctcatcgccatcacccgcaacccggtgttcccgcgctttatcaagattatcgaggaagcaggtcctggggaccaaggtggacgcggagcgtgacggc

SEQ ID NO: 235841 - DNA, 115 bp, Homo sapiens
gtcgtatctaatatccttcttgcttatagaggacagttatattctcttttctcaacagggcatatcgatgcatttacttcaaaactttttctactggaagaaattacctcagaag

SEQ ID NO: 235842 - DNA, 87 bp, Homo sapiens
atcagggcatacatctttcttcgacaaagggaatgaatctgaagtctgctgcagtaaaacacagaaggctttaaaatgttttcttgc

SEQ ID NO: 235843 - DNA, 101 bp, Homo sapiens
ttggcagatccatggccaccatcatgacagatgagactcagtccgctagtagcacactccagaaacacaaatcttcctcctcctttacaccttttatagac

SEQ ID NO: 235844 - DNA, 76 bp, Homo sapiens
tcaccgcggccatcctgcaggcacagttgccgattacagacaaggaagctgagccttcacaaggtcgaacaacaca

SEQ ID NO: 235845 - DNA, 100 bp, Homo sapiens
gagcccttgcttttgcctggacccccagcatcatggtttcccatttcatggggtctctcaggttcttgctctgtcacctaagctggagtgcagtagggtg

SEQ ID NO: 235846 - DNA, 100 bp, Homo sapiens
ggagtgacggtgccaccgcggcgcgaaagagccagacttctcagaggtcagtctgttcaacaagtgggaccccagggccttctgtatgttcagcaaagag

SEQ ID NO: 235847 - DNA, 100 bp, Homo sapiens
cggagagcatgtgtgtcggatatatgtcagcccaggatgggaaagccaagatgagaccctttttgctcttcctgctgcatctgagcctgtgatacgctcc

SEQ ID NO: 235848 - DNA, 82 bp, Homo sapiens
cgaggtggagcgcgacaacctggccgaggacatcatgcgcctccgggagaaatgatgctggagggtcttgaaatctttacag

SEQ ID NO: 235849 - DNA, 83 bp, Homo sapiens
tggacactctttgtcatctcaatggctggggaaggtgctcaattcccatacatgcactagagcgatctagggcagccctgcag

SEQ ID NO: 235850 - DNA, 80 bp, Homo sapiens
atgatggcagcctgtatacgcttggaagcaagaataatgaaggcctgacggcttattcaaacctccttagagctaacatg

SEQ ID NO: 235851 - DNA, 101 bp, Homo sapiens
cttcaccaccatggcctccgtctgccacacgctgatggtgcagcaccgcatgatggtacccaaagtcagcttagaccatgctcagcctccaagcagccttg

SEQ ID NO: 235852 - DNA, 90 bp, Homo sapiens
gaaagaagctgcagcggaggaaggcgaggctgaagccgacgtagcttctctgaacagacgcatccagctggttgaggaagagttggatcg

SEQ ID NO: 235853 - DNA, 50 bp, Homo sapiens
aacagagagctcaccagattactgatgagcatgcagtccattcagaatct

SEQ ID NO: 235854 - DNA, 100 bp, Homo sapiens
cagcccctcaggagccctggaggagtgctatgtcacagaaattgaccaaggtcagaatggcggcagcggagcatcgtcattcttcaggattgccctgctg

SEQ ID NO: 235855 - DNA, 101 bp, Homo sapiens
gcaactttagatggcggagatgttttattcacaggaataagacgagttggaagaagacctgatcaacaacttcagggtgaagggaaaataattgatagaag

SEQ ID NO: 235856 - DNA, 83 bp, Homo sapiens
cccgtcccgaccctggccgccccgagcggagcctggagatcagttggccttatttcctcagtggaaatctactcactatgatg

SEQ ID NO: 235857 - DNA, 75 bp, Homo sapiens
cttcacccagcatttcatccctcgtcgaaaggattggattggcatctttagaggattaatgaaaatcaagttcca

SEQ ID NO: 235858 - DNA, 73 bp, Homo sapiens
cgggcgtcgacaccgccagcgccgtggtggagttcaagcggaaggaggacactgtacatacagggcgagcggc

SEQ ID NO: 235859 - DNA, 51 bp, Homo sapiens
actagcatcctcctggaggagctcgggtcagccctgacaaaggtcagctag

SEQ ID NO: 235860 - DNA, 74 bp, Homo sapiens
ctgccttcagcttcctttgccgctctgcatcatgttggcaatgtctacttcgatctgaagtctagaggagacaa

SEQ ID NO: 235861 - DNA, 50 bp, Homo sapiens
cttcacttggcaaactcaacaagcggagctggagtttgttcagatcatca

SEQ ID NO: 235862 - DNA, 51 bp, Homo sapiens
tcccaagtagctgggattgcagtattgactcggagacaaaaagaggccaag

SEQ ID NO: 235863 - DNA, 82 bp, Homo sapiens
ttgcctttctggcccatacacaggcatttttagatgaattcactaactggtcaagaataaatcccaacaaggccaggattcc

SEQ ID NO: 235864 - DNA, 82 bp, Homo sapiens
ttcagggtataaatgatctcgtcactcctttctttgtggtcttcatttgtgaatacatagtttttcagaagaagtgaagtca

SEQ ID NO: 235865 - DNA, 74 bp, Homo sapiens
ctcgctccgctcgtcccgctcgtcatggcctacccgggatacggaggagggggatacccacccaccatcccagg

SEQ ID NO: 235866 - DNA, 83 bp, Homo sapiens
gacagctcaggctgcccagatggtggctcccggagtccaggagcacgtgaattgcctctgcttacgttcaggccctgtcctaa

SEQ ID NO: 235867 - DNA, 83 bp, Homo sapiens
ccaggcgaagctggccgagcaggctgagcgatacgacggagcttcctccagctgggcgccggcctgagcgtgggcctgagcgg

SEQ ID NO: 235868 - DNA, 82 bp, Homo sapiens
gtgacggtcatcggcggcgggctgatgggcgccggcattgcccaggaactgtggctgcaccatctgtcttcatcttcccgcc

SEQ ID NO: 235869 - DNA, 90 bp, Homo sapiens
ctcggcaacaattacttacctggcccaggaggatgggcccgttgtgacccgggaaaaggagaagatgaaggaagccaaggatgcccgcta

SEQ ID NO: 235870 - DNA, 100 bp, Homo sapiens
tgggtcctctggtgcgaaattccggatttccttgggtcttccggtaggagctgtaatcaattgtgctgacaacacagcattcagagtgattaacaatggc

SEQ ID NO: 235871 - DNA, 100 bp, Homo sapiens
acttgttggagtgctggtgaatcatttcaagagagaagatggcgaattagaagatggtgaaatagacgatgcaggatttgaagaaatacaagaaaaagaa

SEQ ID NO: 235872 - DNA, 83 bp, Homo sapiens
cggccaagcaagaagaaagacgtggcagcaagcgggagtcggggatagtgtcatcggttcgatttgaagaccttgcttctcat

SEQ ID NO: 235873 - DNA, 96 bp, Homo sapiens
aaattgcagtctgggaaactagaggcagggtggcaggagatgccacagcttgcagggcacagttgaggagagcagagccaggactgtctccagttt

SEQ ID NO: 235874 - DNA, 100 bp, Homo sapiens
ttttggaagagggagtcaccactggacctccaaggaagccacgtgcagacatctacaaccttcgatctcctgacgattccttcctcagagatcacctatg

SEQ ID NO: 235875 - DNA, 75 bp, Homo sapiens
gaccagctcatgggcacggctcgggacgagccccacagtcttcgttataacctcacggtgctgtcctgggatgga

SEQ ID NO: 235876 - DNA, 74 bp, Homo sapiens
gcgagcagcagttgagcgagcccgaggacatggagatggaagggtgtcctgttcccagacctgagctgatctac

SEQ ID NO: 235877 - DNA, 100 bp, Homo sapiens
gaaggagcgggaacagatgagtgaagcagaggtgggggtgtttgtccagcgactccggggcctgatgaatgacatcggctgtgtggcttgcgcatcctgc

SEQ ID NO: 235878 - DNA, 75 bp, Homo sapiens
ggaaaagtggcactgaggctctggaacttctgcccagctctccttgttatgccccgtggtgccctgcttgtcaaa

SEQ ID NO: 235879 - DNA, 90 bp, Homo sapiens
gcaaccttgaaacgaaagtgaccgaggagctccttttcgagcttttccaccagggtttgtgaaacaggatctgataatcaacctcttggt

SEQ ID NO: 235880 - DNA, 97 bp, Homo sapiens
cttccgtgggacaatatgttcaagagaatggccgaatttgggcctgactccggcgggagagtaaagctgacaagctctctactgatgatctgaactc

SEQ ID NO: 235881 - DNA, 100 bp, Homo sapiens
ccaatatgccagctgtcaaagccatcatatatcagtatatggaagaggatgcttatagaattttatgagtcaccagatccagaaagaagaaaaagatttc

SEQ ID NO: 235882 - DNA, 75 bp, Homo sapiens
cgcagctgccccatgtgccagaaggagttcgcccccagtgagaaagatcagtctaaagaaaaggagaagaaagtg

SEQ ID NO: 235883 - DNA, 90 bp, Homo sapiens
ctagtttgttgcaaaataatgtaaacgtcaatgcacaaaatggatttggaaggactgcgctgcaggtgaccaagaatatggcccaggtga

SEQ ID NO: 235884 - DNA, 100 bp, Homo sapiens
ccgaggtaccgctgaagaggaatcaattttgttttcggctttgtgagaaaccttaccatcaaacacgatggccagcaacgttaccaacaagacagatcct

SEQ ID NO: 235885 - DNA, 101 bp, Homo sapiens
agaaacaagtgaccaacagttgaatcaaagtatggacacaggtggcaggtccagcggaaagtgatctgcatccccaaaagtatcactccttctcgaatcct

SEQ ID NO: 235886 - DNA, 100 bp, Homo sapiens
gagtagctggaaccatcatatgcaccagcacgcctggctaagagtgtgaggaagaggctgtctgtgtcattatgtgtgcgtcggtcaagtataatatccg

SEQ ID NO: 235887 - DNA, 75 bp, Homo sapiens
aaatgattaagattaacttcaagttgtctcatataatggcagcaaaggctgtagcaaatacaatgagaacatcac

SEQ ID NO: 235888 - DNA, 100 bp, Homo sapiens
gataagctcatcagcgtggaggacctgtggaaggcatggaagtcatcagaagcttcctccagattaggccgagcacttgctgagctatttggacttcttg

SEQ ID NO: 235889 - DNA, 100 bp, Homo sapiens
aaagccagttatccacggactggaagatcaaaagaggaccttacacataggaagctcacacctggctccgccaaatccagacaagcagtttctgatctcc

SEQ ID NO: 235890 - DNA, 100 bp, Homo sapiens
gatgactacaaacataggatgttttggcgagagatgtattcagtggaggaagctgaattctgcttggtcagaatcgtgatggcattgtgttcagcactga

SEQ ID NO: 235891 - DNA, 83 bp, Homo sapiens
gtgcactccgcacctcggggacattattgcgcgtggaacggctgcttttggaagttgccaggtataaactccgaattgttaag

SEQ ID NO: 235892 - DNA, 100 bp, Homo sapiens
ggccgggaaaagtggcactgaggctctggaacttctgcccagctctccttggagagaacattgaaagtattctctaagctatttgaagagagtgactaaa

SEQ ID NO: 235893 - DNA, 98 bp, Homo sapiens
ggatgtggcagccccgagccatggctctcgccgtccgagtcgtttattggggctgaggaagctgccctcgaaaccctccagaagacatctgtcctgca

SEQ ID NO: 235894 - DNA, 75 bp, Homo sapiens
ctcatggatgttcttcttcgagtatttgtagaaggacaaatttacatgtattggagaccagaccagaagcccttc

SEQ ID NO: 235895 - DNA, 75 bp, Homo sapiens
agggtgatcagatctgtttgtaccatatccggaaaagttgtagctttcaagattcccaaatgctggaaaatcctc

SEQ ID NO: 235896 - DNA, 82 bp, Homo sapiens
ccggtgacgtccctcccgctggtcaccactccggcaccagccttatgccagcctggaccatcttggaggcagtgtaggatca

SEQ ID NO: 235897 - DNA, 75 bp, Homo sapiens
agaactcaagagcagaatctccgctcgatgcattctatttctcatcatttggctcataactggaggaaggcacca

SEQ ID NO: 235898 - DNA, 101 bp, Homo sapiens
atttgatgtcttagagaaacttggagaaggttcctttcttgcctggtccagctgccgccactcctgagtaccaccgacatcctgtggctgtcctgcttttg

SEQ ID NO: 235899 - DNA, 75 bp, Homo sapiens
agttcgtctcttacgtctgcggaagtgcagctgcctcagttcttagcgcaggacattgccgagaatggctgcgcc

SEQ ID NO: 235900 - DNA, 99 bp, Homo sapiens
tggaaactgtgaggtgatttgcaggtggatatcatccagtgaaaattggagacctcttcaatggccggtatcatgttattagaaagcttggatgggggc

SEQ ID NO: 235901 - DNA, 74 bp, Homo sapiens
tcccacctgcgacacatcgagcacatggaggttcctccccgggcagaagaaatcaccattccagctgatgtcac

SEQ ID NO: 235902 - DNA, 90 bp, Homo sapiens
ggcggcagcggctgcggagaaggcgagcgaagacttcccaagtaagaagcggaagaggagccgctggaaccaagacacaatggaacagaa

SEQ ID NO: 235903 - DNA, 100 bp, Homo sapiens
gtgtaatgctgtccgccaggccctgcaggacctgctttcggagtacatgggcaataagcgccaagaaccagaaccagaacagccacccagaccagagccc

SEQ ID NO: 235904 - DNA, 101 bp, Homo sapiens
ggacaacagaaccaaagagttcagacgtgagaaaggaagtggcagtgaagctagaatctcagaaggccaggcatccccagttgctgtacgagagcaagctc

SEQ ID NO: 235905 - DNA, 100 bp, Homo sapiens
aaatgaaactagcccatgatgaacctgttttctccgtgaccacaatattaaccaggatgaatggcggtggatcttcttgttccaaccaaagtgactggca

SEQ ID NO: 235906 - DNA, 100 bp, Homo sapiens
tgaacccagaggtcgtggaggtggccgtggaggcagaggtggcatggggctgttttggagtcagcggaagatcaccaaggccagggagtggttccaccgc

SEQ ID NO: 235907 - DNA, 100 bp, Homo sapiens
tgggaggccgcgtctttctcggcagcctgcttctgcaaagtggtacgatcgaagggactatgtcttcattgaattttgtgttgaagacagtaaggatgtt

SEQ ID NO: 235908 - DNA, 83 bp, Homo sapiens
tagacgctggatttttttcgggtagtggaaaaccagtaaggtacctgccgtgggcagatctgagctttcttcttggacacccc

SEQ ID NO: 235909 - DNA, 83 bp, Homo sapiens
cgagaggaaactgttgtgcctcttcatattggcgatcctgttgtattaccagttgaccagtgcagagctctcctccttaccag

SEQ ID NO: 235910 - DNA, 75 bp, Homo sapiens
gcgagcaggagcgagagtgtgtcgactgcctgtggaggaaccgattgtgtccacagatgaggtcatcttcccact

SEQ ID NO: 235911 - DNA, 98 bp, Homo sapiens
tcctgagtggctgggactacagtttaccagtaaatcagaagctctattactaaaaatacgtggagttatcaaccagttggcatttggcattgacaaaa

SEQ ID NO: 235912 - DNA, 75 bp, Homo sapiens
tgatctggaccattattttgcatttccaggtaagaagagttcctgggtcaagtggtcaccttcataaaaccgaag

SEQ ID NO: 235913 - DNA, 100 bp, Homo sapiens
ggcagcggcctgggaactcttagctgagcaggcgagagaaagaagatgctgatatgctacaacacggatgaacctggaggacgtggtgcagtgaaataag

SEQ ID NO: 235914 - DNA, 74 bp, Homo sapiens
gaaaatcatattatagatggagtaaagcccttgtgggaacacatttttcagctgaatctttgttctcaagacct

SEQ ID NO: 235915 - DNA, 76 bp, Homo sapiens
ttcgtcgggggtttggtgggcggcccaccgggactcgccgttggtggatccataaagaacccagccaacccgcaga

SEQ ID NO: 235916 - DNA, 100 bp, Homo sapiens
ccctcaagccgaagccttcagtgggactcccccagcagatacattctcagagaagactttgcagttgtgcagcaagaaattattatgatgaaagactgta

SEQ ID NO: 235917 - DNA, 100 bp, Homo sapiens
tcaactgcagcgatggttacattgaatactacatatgtcgagggaatgcagaaagagttaaggaaggcagggtcatggaggacgctggcggcggcgagga

SEQ ID NO: 235918 - DNA, 99 bp, Homo sapiens
cacctacagaaacaaaatgtcaacaaattgatgggtgaagccaaaaaccttccctcttacccggggccgagcaagatgagggattgctactgcacggtg

SEQ ID NO: 235919 - DNA, 90 bp, Homo sapiens
ttcagctcctctgtgtttgccgcctgggttatatgtcaccacacccatctccattaggagccccagagcacgtctccagccctatgtctg

SEQ ID NO: 235920 - DNA, 82 bp, Homo sapiens
ccgcggccggaccgagcgcctcgacctcggtctgaggtgacgcggcgcacggcgcggatggtggccgagtggcagtgtgtgg

SEQ ID NO: 235921 - DNA, 100 bp, Homo sapiens
atgccagtgagaggcccaagtccctagacacgatgaggcgagtggtacgacagagcaagtttcggcatgtatttgggcaagcggtgaaaaatgaccagtg

SEQ ID NO: 235922 - DNA, 96 bp, Homo sapiens
atgatggtgactgcctggatccacgtcttctacaagaggttggttaaatctagacttaagaggctctgctcctcagaagttggacttctgaaaaat

SEQ ID NO: 235923 - DNA, 80 bp, Homo sapiens
cgctgctgctgcccggcctcggggtctctaattaacagaagatggcaaagcccagccacagcagctatgtccttcagcag

SEQ ID NO: 235924 - DNA, 90 bp, Homo sapiens
gtttttctgttttgcctgaatacatgatttaaacaagagatttccacagaaggatttaaaccggatgaggagtgaattgctggtgcctgg

SEQ ID NO: 235925 - DNA, 87 bp, Homo sapiens
cgggacgctgcacctcccgcgccgcacggtggacgagcacaggaagtcctggagaacctgaaggaccgctggtaccaggcggacagc

SEQ ID NO: 235926 - DNA, 100 bp, Homo sapiens
cgactatattgagaaggaggtaaaggtagtaagcattaataatgtctttcatctttgagtggatctacaatggcttcagcagtgtgctccagttcctagg

SEQ ID NO: 235927 - DNA, 100 bp, Homo sapiens
tctgagctgttcctcccagctacgagctgccccagagtttgccttctgccaggtggatgcctccatcgctctggccctggccctggccgtcctgtgtgat

SEQ ID NO: 235928 - DNA, 124 bp, Homo sapiens
tattattgctactattgtgtgtttttctagttaagtcccaaggtgtcaacgacaatgaggagatatgatagacgctgctactttgaagtccaggaaaatgttagaagaaattatgaaatatgaa

SEQ ID NO: 235929 - DNA, 76 bp, Homo sapiens
cgactcttgcctgcactgactgttcttgatgggaaaatcgttgcccagggtaaactgctcttgcaggacacattct

SEQ ID NO: 235930 - DNA, 95 bp, Homo sapiens
atctgctcagtcctcctagagaatggcgtggactttgctgccgtggatgagaatggaaacaatgactttctgctgacccctctgtcacccactgc

SEQ ID NO: 235931 - DNA, 83 bp, Homo sapiens
gtcccggcgccgtcgcgccactcctccgatgcaaagtttattgaaggtgttgtgttacagttattagaggaagatgatgttgt

SEQ ID NO: 235932 - DNA, 90 bp, Homo sapiens
cattacagaccggtggatcctgtccttcatgcagtctctcattggcttctttgagactgaaatggcagattgatgaagatccctgcctca

SEQ ID NO: 235933 - DNA, 100 bp, Homo sapiens
gtactgaccaagatgagcaacatctacatccaggagcctcccacgaatgggaaggtgcagtagacattgttgcaatcatgatcggcaatctgaaaggcac

SEQ ID NO: 235934 - DNA, 71 bp, Homo sapiens
accagacttgggatcagttataaactctagagtggactatcctattaagtgtaatctcactgcttaatgag

SEQ ID NO: 235935 - DNA, 89 bp, Homo sapiens
cgtcggccgcatccgtttccacgactttctgggagactcaggcaaatttctggagatgtgcaatgatctcttagctagagtggagccac

SEQ ID NO: 235936 - DNA, 90 bp, Homo sapiens
gaggaagagagaagacttggcgatagttccctttctagaaaggtggtggtcaccaatacaattccacatgaagtccagaagctccagtgc

SEQ ID NO: 235937 - DNA, 75 bp, Homo sapiens
tctgatgaagatgatgatgaattgggtagagagaccaaagatcttgatgaggatgaagatttgataaagtggaag

SEQ ID NO: 235938 - DNA, 100 bp, Homo sapiens
gcaacccagacgtgcaacaaagtgcgatggccggtctaattgaagccaacggagaactcaaggtcttcatagaccagaaccttagtcccgggaaaggtaa

SEQ ID NO: 235939 - DNA, 90 bp, Homo sapiens
tgcagctgcctcagttcttagcgcaggttacaggaaatacaggaggcagaggaacaaataaaagacaccacgagaaacagacacatccag

SEQ ID NO: 235940 - DNA, 97 bp, Homo sapiens
ctggggaccatcaccatcacaggtgtcatggagaaactccagctgggcccagagattctgcagcgggaaaatccaaggcttatttatgccaggctga

SEQ ID NO: 235941 - DNA, 51 bp, Homo sapiens
ggcagttccaagaggaaatcagatggctctgagagattcctctgcgaatct

SEQ ID NO: 235942 - DNA, 50 bp, Homo sapiens
ccccgcccaccaggaggggtcctcaggatggttcatatcatgaagatgtt

SEQ ID NO: 235943 - DNA, 98 bp, Homo sapiens
gccgagtgggtgtctggtgccggcgtttgggctacggttgttgttggcgactgtgcttcaagcgggcagaaatttagcatctggagaggttggatttt

SEQ ID NO: 235944 - DNA, 82 bp, Homo sapiens
ctgatctcggctgtcggagtgggtgtcctcaagaaagatcctgcaaaagttccaggtgcccacactggaaacttggagatcc

SEQ ID NO: 235945 - DNA, 88 bp, Homo sapiens
ttctactagactcttgcctgtcagaggagctgttgaatgtttatttgaaatgggctttgaagagattgtgtctgcagttcaatactgc

SEQ ID NO: 235946 - DNA, 51 bp, Homo sapiens
cagcgggccaggaagcgcatccaggagtcaggtcaattcagtgaagatatg

SEQ ID NO: 235947 - DNA, 74 bp, Homo sapiens
cccggacctgcagtccaacctcctgcaggtggacaatggagtcatcagaacccactgtgaggaagtgacttctc

SEQ ID NO: 235948 - DNA, 98 bp, Homo sapiens
ggagtgaaggaggcttgctccatcctggcagaagcactttgtgacatggatattcgaaataaactgactattgcagatatcatccgaacatgtttggg

SEQ ID NO: 235949 - DNA, 50 bp, Homo sapiens
aactattgccacttcgtatctgtggccgtagctccatattggacatcccc

SEQ ID NO: 235950 - DNA, 98 bp, Homo sapiens
gcggacctacgaccgcgagggcttcaagaagcgggcggcgtgcctgtgcttccggagcgagcaggaggacgagtttctccttggaccaagatgactga

SEQ ID NO: 235951 - DNA, 74 bp, Homo sapiens
ctggaggtcctctctggagagaggctggaagatgagaagtttttgtctgaagtttttgcacaattaacagatga

SEQ ID NO: 235952 - DNA, 75 bp, Homo sapiens
ggtgtccgagtgcgccctgatgctggcgcagggcacggtgggcgcctacctggtttggcatagaaatggtacccc

SEQ ID NO: 235953 - DNA, 90 bp, Homo sapiens
atcctgccaacattgttcatgactttaacaaggaacaagcacatcatgattgacttggggactggcaacaacaacaagattaactgggcc

SEQ ID NO: 235954 - DNA, 98 bp, Homo sapiens
tgattcttaaggctctgttccttagagatccaaaggtgcccaagcaaggaaagaaataatgaagagacacatgtgttagctgcagccttttgaaacac

SEQ ID NO: 235955 - DNA, 96 bp, Homo sapiens
ggaaagatgcatgttctgccactaattggtggaaaaatctcctccctggttcgaagggctgccctcacacacaacgacaaccacttcaattatgag

SEQ ID NO: 235956 - DNA, 99 bp, Homo sapiens
ctccgtgcgtgagcgccggcaggcaccttgcgcgcgcggatgtacgattatagtttggatatgtggagtttgggttgtatgctggcaagtatgatcttt

SEQ ID NO: 235957 - DNA, 82 bp, Homo sapiens
ttcgcagggaggatgtcgggacaccccggaagctgggaaatgcagcgtccgtctccaagagagtatgaagagagtgcgtctg

SEQ ID NO: 235958 - DNA, 82 bp, Homo sapiens
gtgattcaggagaactggtcgccatcaagaaagtattgcaggacaagagatttaagctgctgataaagatgatagttcagaa

SEQ ID NO: 235959 - DNA, 117 bp, Homo sapiens
gagaacgtgcgggaagagaagatcatcgagcatttcaaacggtgagaagccctaccactgcaactgggacggctgcggctggaagtttgcgcgctcagacgagctcacgcgccacta

SEQ ID NO: 235960 - DNA, 101 bp, Homo sapiens
ggaaatcgacttcggtttcagttggagttggaatttgtgcaatgtttagccaacccaaattaccttaattataccccatgtttccccatcactcgaggagt

SEQ ID NO: 235961 - DNA, 98 bp, Homo sapiens
caggttccagaccctgccttctcttctgaaaggctgaactcacgggaatcaaatggcgtaggtacaattttggagggcatggggactgtggacccata

SEQ ID NO: 235962 - DNA, 100 bp, Homo sapiens
catggattcagaaatatctttggtggaaacgatacctgactatgttgcaactggacatgtctcaggaaggctatggaactagatctcaacctcctctggc

SEQ ID NO: 235963 - DNA, 75 bp, Homo sapiens
ttgtttgtggatcgctgtgatcgtcacttgttcttccctgtggaacagtagagacctagtctgccttctttcaca

SEQ ID NO: 235964 - DNA, 82 bp, Homo sapiens
gcctcccgagtcactgcagccaacccttcagcaagattgtctaaagccccaggaaaaatggtggaaaattcaccgtcgccat

SEQ ID NO: 235965 - DNA, 88 bp, Homo sapiens
aaggagggcaagatgttccaagcaacaaggatgtcacatctctagattggaatgaagtacatgacctgctcagtgactatgagctcaa

SEQ ID NO: 235966 - DNA, 82 bp, Homo sapiens
gaggatggcgcctgtgggcacagacaaggagctcagtgacctcctggacttcagcatgattcctggtcgggtggcttccagt

SEQ ID NO: 235967 - DNA, 95 bp, Homo sapiens
ctctgcagccatgaagccaaccgtcccgaggtacatgtcccagagcaagcacacggaggcccgggagctcatgtactcgggagccctgctcttct

SEQ ID NO: 235968 - DNA, 100 bp, Homo sapiens
attggccagtatgaagtggtgaaggagtgtgtgcagcgggttggtacattgtgacctatgccttggggatctaccatctaaatcttttcatagcttttct

SEQ ID NO: 235969 - DNA, 80 bp, Homo sapiens
ggatgttcgtactggaagtcatgaggacagggtgatcagttatgaagaagggaaagctttggcagaatcttggaatgcag

SEQ ID NO: 235970 - DNA, 100 bp, Homo sapiens
aaccccagccgaccttgagctccaggagttcgtctcttacgtctgcggaagtgcagctgcctcagttcttagcgcagcattgagaagttctgtgcagaag

SEQ ID NO: 235971 - DNA, 51 bp, Homo sapiens
ctcactgcagaggtgctggagctggcagatcattcccgaactgaagtatgg

SEQ ID NO: 235972 - DNA, 75 bp, Homo sapiens
ccaatctgaatatcaaaatagcagggtggcccagttgaaatccttcccttcctctaccttggaagtgcctaccat

SEQ ID NO: 235973 - DNA, 98 bp, Homo sapiens
ggctcccatcccgagcttgcgtagtggttctgtgtggcgctgagagtcctgtgtatggaaactcacatgagtcagctcagtctagaagggtagtaatt

SEQ ID NO: 235974 - DNA, 76 bp, Homo sapiens
ggtgtcttccgctgacgtggctcttgccctggcaagtgctgcctcccaaaatgtagagacggggtttcgccgtgtt

SEQ ID NO: 235975 - DNA, 82 bp, Homo sapiens
ttgcctacccgccggcccgcgggtctacttcctcaaaggccagaagcggactcctagaagaggggagcagcaaggatggaat

SEQ ID NO: 235976 - DNA, 98 bp, Homo sapiens
aaaatccagcagtatgacaaggcactggatgatgcaatcaaagctcgacttctcaatcccaagtggccaaaggtgtcatttacaggaaaacaaggtga

SEQ ID NO: 235977 - DNA, 100 bp, Homo sapiens
gccgcccgcccgcgccgtgctggactccaccaacgccgacggtatcagcgccctgcaccagaaatcttcccaaggctgcagacaccgacggatttgcttt

SEQ ID NO: 235978 - DNA, 99 bp, Homo sapiens
aggaggcatcacggggggagtcatttacctccctggtctcaggtgtctctcacaggatcttgaagcagcctatcacattacagatatccatgaagcttt

SEQ ID NO: 235979 - DNA, 99 bp, Homo sapiens
gcggggtttcggcggccgggagggagttgtcggcgccgcggccgctgcggacggacgctcgcctgccggctgaggaactgtggaaggtgcatcagtgaa

SEQ ID NO: 235980 - DNA, 90 bp, Homo sapiens
gatcttttcaatgctgcgaaagctgccaaaagtgacatgcagtagaacttcatggaggaacacggagtgacccaaaccgaacatatggct

SEQ ID NO: 235981 - DNA, 100 bp, Homo sapiens
aattagtgacatgtcaacactgctgagagaaatcaatgacgtgtttgaaggaagacgagcagaaaaatatggctcaggagactaaccagaccccggggcc

SEQ ID NO: 235982 - DNA, 52 bp, Homo sapiens
tgttcagtgaacttagcattcctctaggtgttatgaagcggagattgaggag

SEQ ID NO: 235983 - DNA, 83 bp, Homo sapiens
atcagccccacagcctcctgagtatcctggacgcccagacatggctgtcccaggagtcgttcacgcctactgaggagcatgtg

SEQ ID NO: 235984 - DNA, 75 bp, Homo sapiens
gtggtcaataaaggcttctttttcggacttggactgctgagaaggaagaatttgaacatcaacagaaagagctgg

SEQ ID NO: 235985 - DNA, 96 bp, Homo sapiens
gcggaaaatactacagagtgtgcacactggctatcattgatccaggacgctgccaaggtctgcagagaattcaccgagcgtgagcaaggagaagtc

SEQ ID NO: 235986 - DNA, 73 bp, Homo sapiens
ccagaggagctcaaaatggagttgccggagagacagcccagggaaaagtgttttaggcttccagagtagaaat

SEQ ID NO: 235987 - DNA, 103 bp, Homo sapiens
agtaactgaacattggtctaaagtctttccaaaaggtcaaggttcacaaggtgtgggccatgtttgaggattgccccagcattcagttctatgagtaataaat

SEQ ID NO: 235988 - DNA, 87 bp, Homo sapiens
tctgaggaatcggcaaactccctggtctctgttggtgtagaagccaaaatcagggaatttgaagtactgccttgtaattcttaatca

SEQ ID NO: 235989 - DNA, 90 bp, Homo sapiens
tcatatcttcacttggcaaactcaacaaggagatcatgaatcagacagataaaaatcaacaagaaatcccatcataccttaatgatgaac

SEQ ID NO: 235990 - DNA, 99 bp, Homo sapiens
atgaaatgctgactaaggaacaaggatctagtgaaaagccatttgatgtatgcggtcagagaagaagtggaggtcctcaaagagcaaatcaaagaacta

SEQ ID NO: 235991 - DNA, 74 bp, Homo sapiens
agcccgtggagtcggctgagggaaaagcgaggcaaggcaggcgggtgctggagaatctggtaaaagcaccattg

SEQ ID NO: 235992 - DNA, 97 bp, Homo sapiens
catttgtctgtttgatatcaccaaactggaggatgcctatgtattccctggggatggcgcatcacacaccaaagagcccccctccatgcgcctgaag

SEQ ID NO: 235993 - DNA, 90 bp, Homo sapiens
tccaaaaacagtggataattttgtggccttagctacaggagagccttacgacagtctgcctacctcacagacctgcttcttccagctgag

SEQ ID NO: 235994 - DNA, 90 bp, Homo sapiens
atcttggcatcaataaggagttatatatgatctttaatctcatgaagtacgacagctacagccgcttcttaaagtctgacttgtttttaa

SEQ ID NO: 235995 - DNA, 100 bp, Homo sapiens
atggtgcattgcagttgcgtgttgttcagaaagggtcttactgaagtaacacaaagcttaaaaatggaaaatgaagagtttaagaagaggttcagtgatg

SEQ ID NO: 235996 - DNA, 77 bp, Homo sapiens
gggtccctgaagagggaagacacgcggaaacaggaccagctccagcagaagatcatgtgccccgggcctgtcacctg

SEQ ID NO: 235997 - DNA, 100 bp, Homo sapiens
ctctttaagaagaaatttggaggggtgcaagaacttttaaatcaacgtaggcgaaaaccaagagtacatcggcctcgttctcctatattggaagaaaaag

SEQ ID NO: 235998 - DNA, 100 bp, Homo sapiens
ctgggctgtcggcctggaccttgcagccgcaatgtcccagaaatcctggatagaaagcactttgaccaagagggaatgtgtatatattataccaagttcc

SEQ ID NO: 235999 - DNA, 100 bp, Homo sapiens
ctcaacatcgacagcattatccaacggctgctggaaggggtggcctatgtatgcacagctactgattgatttattcaaatatttagcgcctttccttaga

SEQ ID NO: 236000 - DNA, 95 bp, Homo sapiens
caggaggcccggaggctggggctcatcacccaggagcagtggcagcactaccaccggtcagctgctccttgacaagcacatggggatgaagaggt

SEQ ID NO: 236001 - DNA, 90 bp, Homo sapiens
aggctggagttgcaaggacccaggggatcacctaatgccagaagccgtgacagaccatgccaccactgccctgctccactatcagctgcc

SEQ ID NO: 236002 - DNA, 95 bp, Homo sapiens
ggctctgcatagaggcagacctccagaactacctgtaaattatgtgaaacctccaaatgtgggtatggcctcacaagtcttggtctacccaccat

SEQ ID NO: 236003 - DNA, 82 bp, Homo sapiens
cgcaagcccaccctccagcacctcctcgcataaaacgttcaataaagattagagattcaaaatttggtttagctcttgtcat

SEQ ID NO: 236004 - DNA, 100 bp, Homo sapiens
ccatggctgcggcggcccagctctctctgacacagggccgcgatgggcctcttggaacattggtgtgttcatctgcattcgatgtgctggaatccacagg

SEQ ID NO: 236005 - DNA, 100 bp, Homo sapiens
cgcggggcagccgccgctcctccgggttaacaagcacaagccctggctggagcccacctaccacggcatagtcacagagaacgacaacaccgtgctcctc

SEQ ID NO: 236006 - DNA, 75 bp, Homo sapiens
gacgaaggccctactgggcaaggtaccgggtgtctggtccgagccgtggagatggccgcccagcgccaggccgac

SEQ ID NO: 236007 - DNA, 100 bp, Homo sapiens
ccccgggagggggcggggcgcgtttaagagctgcgggccgggtgcggacggcggaggcggcgggactggtccctgtttgctgctttgtggtgcacaagcg

SEQ ID NO: 236008 - DNA, 112 bp, Homo sapiens
ctgctgtacaccctcaacaaacaccagcgctttggcgccatcatgaccgggtcctataacaacttcttcaggatgtttgatagagacacgcggagggatgtgaccctggagg

SEQ ID NO: 236009 - DNA, 82 bp, Homo sapiens
cgctggaccacgtgctcacccacggctgcttcgacatcttcaccacggaggaggagtgacttaagagattaaaattaatttg

SEQ ID NO: 236010 - DNA, 80 bp, Homo sapiens
gatggtggacgagcttaagagagctccggctcctggtggtcgccgtgcagggcctgatccatctgctcgtggacctcatc

SEQ ID NO: 236011 - DNA, 90 bp, Homo sapiens
cagccatcagccctgtgggatggcagccactgatttgtcctatgttcttcgaagggaaggagctgcggctgaagcaggagtatttcgtgg

SEQ ID NO: 236012 - DNA, 82 bp, Homo sapiens
aactgtgctcaactctggctgggtcctgctgcgtttataaaccatgggcatggcctatctgcacgcgcagcactacatccac

SEQ ID NO: 236013 - DNA, 90 bp, Homo sapiens
cgcagaccagcgcccgaaggccgacacgctggccctgaggcaacggctcatcagttccacgtggtgatcggctctcaggcggaagaaggc

SEQ ID NO: 236014 - DNA, 100 bp, Homo sapiens
ttgatgtctacctctatgaggtagatattaaaccagacaagtgtcctaggagagtgaacaggatttatgagcagcttccagaagtacagaaaaagagaga

SEQ ID NO: 236015 - DNA, 100 bp, Homo sapiens
gtggctactctgcctcggggacgaaagcagtgttttaactcaaatgggtgatgaaaaggactcttggaaagtgaaaactttagatgaaattcttcaggaa

SEQ ID NO: 236016 - DNA, 75 bp, Homo sapiens
gagacacctggggatgaggagcttggatttgaagcagcagttgctgccttgggacaatctctatgggaagcagaa

SEQ ID NO: 236017 - DNA, 82 bp, Homo sapiens
aaagactgtggaacttttaagtggagtggtggatcagaccaaagatggccacataaagaagatccctaatagtcatttctca

SEQ ID NO: 236018 - DNA, 83 bp, Homo sapiens
cgttggagaggtgttaccggaacggcggcgacaagggtgttcccgaactagagtgggtttttagaacttcagccataaaaatg

SEQ ID NO: 236019 - DNA, 50 bp, Homo sapiens
cgcctacttcctgccggcgcaggaacctttcagctcttggggcattggtg

SEQ ID NO: 236020 - DNA, 75 bp, Homo sapiens
gtttgatcacaagacgggcaagacctgcagccagttacctactgcgagccggccttctggtgctccatctcctac

SEQ ID NO: 236021 - DNA, 100 bp, Homo sapiens
tcaagtgggacttacggtccacagatgagccagtatggaccacaaggcaaaaacgtccccgaagccagcagttgtagagactgttacaacagccaagcca

SEQ ID NO: 236022 - DNA, 98 bp, Homo sapiens
gagtgaagatgagttgacaccttttgacatgagcatccaggccttgctgtctctaaccctgatctgatctcctgccttgagcaaataaaagagccctg

SEQ ID NO: 236023 - DNA, 50 bp, Homo sapiens
gagcttcttcctatttgccatgggtcttcgatgccaagaacatgatggct

SEQ ID NO: 236024 - DNA, 75 bp, Homo sapiens
cagacaccgtgggaagcatacctgttttcaaaactggttctcctgaaaagaaagctgaacattcatctataaatc

SEQ ID NO: 236025 - DNA, 98 bp, Homo sapiens
caaaagcagctggaggaggctgaggaggagaggacagaggtgcctggggcaacctccaccttgacggttccagggaaacagtgcttcttagtcctacg

SEQ ID NO: 236026 - DNA, 100 bp, Homo sapiens
actgcattaagtgatgcatacagtggtctggaactgaaagtgatgcgtatttctgagttatgcctgtatttaagaagctgagtgaaacccaaagaagtcc

SEQ ID NO: 236027 - DNA, 76 bp, Homo sapiens
gcgtcgcgatgtgtggcgactgtgtggagaaggaatatcccaaccggggaatgacagaggaagaggaagacaaact

SEQ ID NO: 236028 - DNA, 96 bp, Homo sapiens
cccacgtctacaatggagtcgagtctagaattcacacagagccacctaggttggatggcaagcatgtggtgtttggcaaagtgaaagaaggcatga

SEQ ID NO: 236029 - DNA, 80 bp, Homo sapiens
ctggccacacattattcgaataggagaccttaaacctacagtgatggaatggggagaagatattaaagcagtttcaaaag

SEQ ID NO: 236030 - DNA, 73 bp, Homo sapiens
cggattcgggaactgactgctgtagttcagaagaggttcgattttcatttgagcagccagatggtagagcgca

SEQ ID NO: 236031 - DNA, 75 bp, Homo sapiens
ggagaatctgggcgtcgctctagaggttgcagattttaaagatgcccttgccagagtatatggagtgatacccaa

SEQ ID NO: 236032 - DNA, 86 bp, Homo sapiens
gaactggtcgccatcaagaaagtattgcaggacaagagatttaaggttcgagaacttgtcttggacaattgcaaatcaaatgatgg

SEQ ID NO: 236033 - DNA, 74 bp, Homo sapiens
tgaagatgctacgaacccagcggccggccatggtgcagacagagataccccagaatcttccatgctccgtcaca

SEQ ID NO: 236034 - DNA, 75 bp, Homo sapiens
tgctgcccttccggagtccgccccgtgaggagaatggtcaaaatgcagatcttcgtgaaaacccttaccggcaag

SEQ ID NO: 236035 - DNA, 100 bp, Homo sapiens
agctgccacctgcctttgacctttttgaagcctttgcaaaaattacaggaatgaagaactgttgcctaattggaaagtgccagcattccagacttcaaaa

SEQ ID NO: 236036 - DNA, 90 bp, Homo sapiens
gccatgaaggccttgtgctgaccaagctgctcacctcgactcagatgccactgcatcatcagataacagcgagacggaggggacacccaa

SEQ ID NO: 236037 - DNA, 97 bp, Homo sapiens
ttcgctcgcgttggaggccgccttttcagaagcggctgcgcacggactgctggagatggtggagtccgtcagcagcctgcttctgcaaagtggtacg

SEQ ID NO: 236038 - DNA, 101 bp, Homo sapiens
ttggaatttggagctggagacctacaggggcctttgttcggtctcaagctgttccgtaatctcacaccaagatgggctgtgcttaagagtaaaacttcagc

SEQ ID NO: 236039 - DNA, 90 bp, Homo sapiens
gaacctggaggaggtggagttctgtgtggaaggctccataaaaatacagactcaccagttcctgctttgatgtgacatgtgactccccag

SEQ ID NO: 236040 - DNA, 82 bp, Homo sapiens
gccagagtcacacacggtcctaagagctgggcaccaggaagcgaaggctgcagcctcccgcgacgatgcccctcaacgttag

SEQ ID NO: 236041 - DNA, 97 bp, Homo sapiens
cccgttcgccaccaattatgggagggctggccaacttctgctacagacgactcagttttggagatcatattcattggaggacactggaagatgggaa

SEQ ID NO: 236042 - DNA, 74 bp, Homo sapiens
gaagctcagcttgcgaggctgcattggtgttggggattcctccttgaagcattgacatgtagagaagaactcct

SEQ ID NO: 236043 - DNA, 100 bp, Homo sapiens
gaaatcttctaaaagaagaaaaacaacgagccaagctccagaaaatgctgcccaagaacaccttccaccatgaccacctcagcaagttcccacttaaata

SEQ ID NO: 236044 - DNA, 95 bp, Homo sapiens
tggtttaaaacggtcactgaaggaggtcattaacgggctgaagcagaggatcctgaagctggaacagcagtgcaaggagaaggacggcaccatca

SEQ ID NO: 236045 - DNA, 100 bp, Homo sapiens
cttgctggtcctgtggcagagtacttgaagatcagtaaagagattgggggagacgtgcagaaacatatgaaacgactacaaagtgccatgacagaaggtg

SEQ ID NO: 236046 - DNA, 100 bp, Homo sapiens
gtctacagtaagcggtcaggaaagccccgtggctatgccttcatcgagtacgaacacgagcgagacatgcactatgacagtcgtctagaggagctcaaag

SEQ ID NO: 236047 - DNA, 127 bp, Homo sapiens
aaaaagcatccccgaggaggaagacgaatcgttaaacatctgaaagggtcagactgattcttgctattccaaatcctcttccacgttgacagcccttcagatatttcaacactcctctcagcatcct

SEQ ID NO: 236048 - DNA, 100 bp, Homo sapiens
ctatggcagcagcgtggcctccgccaccgtgcacatccgaatggtttgtcccatgaggagcacccccatagccatcctctctatggacatggtgtatgca

SEQ ID NO: 236049 - DNA, 98 bp, Homo sapiens
tgaactgggtgctttatatagggtgtgatgaatgcagactctgctaccattttggctgtttggatcctcctttgaaaaagtctcctaaacagacaggc

SEQ ID NO: 236050 - DNA, 90 bp, Homo sapiens
agagagagagcttggttaacttgggagaaagtttcatctgtggatggagtattggaggtgtgattgcctatatcagttcttccagctcag

SEQ ID NO: 236051 - DNA, 97 bp, Homo sapiens
agcagagtttcttactatgtgaagatcttctctatggaagaatgtcattcagaggatttaatcctgaggttgagaatgtgacagtgatgataacatg

SEQ ID NO: 236052 - DNA, 100 bp, Homo sapiens
ccaagctgtacgagctgcacgtcttcaccttcggcagccggctgtacgcacacaccatcgcagcccagagcatgttccagatcccagagtttgagccgag

SEQ ID NO: 236053 - DNA, 83 bp, Homo sapiens
cacgtggtctgtagcgacagcggcttggaagtgctctaccagagttgcgctgctggatcagtgcctggcaccagacacttctg

SEQ ID NO: 236054 - DNA, 100 bp, Homo sapiens
cagccaccgactgggggcaacttggcacttagaaccgcagcagggacgtcggtttgctatcgggactcggcgaggacggacttgacccaatgaaagaagc

SEQ ID NO: 236055 - DNA, 98 bp, Homo sapiens
cacattttgcacaagggcagtcaccatgaaagggaccatggctaaacctcctggatcattagccagaagcagcagcctgtgccgttcacgccgcagca

SEQ ID NO: 236056 - DNA, 100 bp, Homo sapiens
agagtcaccacaaggccaagggcaagtgatttgacagatgggctcaaggacagcttgcctgactgcagccataaggatgaagcctcttcaggtagagaag

SEQ ID NO: 236057 - DNA, 100 bp, Homo sapiens
agttacacaaagagatggcccaacggatggaacagattgagaacacagaagcagtacatcaacaattccaaaagtttttgactgaaataagcaaactcac

SEQ ID NO: 236058 - DNA, 83 bp, Homo sapiens
ccggcgccatgtccagcgctcggacccccctacccacgctgaacgagagggacacggagcagacaatgcagatcttcgtgaag

SEQ ID NO: 236059 - DNA, 50 bp, Homo sapiens
gctccagtgcttttgccacattcaagttatggtggagaattcagacttta

SEQ ID NO: 236060 - DNA, 90 bp, Homo sapiens
atattagtgcttatctttttaaacaaggactcttcagacaggaaatctgcctcattcgtaccggctcatcagtgttgtcagtcacattgg

SEQ ID NO: 236061 - DNA, 74 bp, Homo sapiens
ggatcatgtctgcgagccaggattcccgacgccggttttcatctgtgatgcggggacagctgcgctccttgctg

SEQ ID NO: 236062 - DNA, 82 bp, Homo sapiens
gcggactccgcatcccgcaccccgatggtagccgaggagctgacaatgcagatcttcgtgaagactctgactggtaagacca

SEQ ID NO: 236063 - DNA, 123 bp, Homo sapiens
tggattccttgtacacgttgggggtgtagttagtgcacgttctgtgaagcttttggatcgtatccacaatcctggaaacccagcgtttgctggcagaaccagttcctggcatcaaagccgaac

SEQ ID NO: 236064 - DNA, 80 bp, Homo sapiens
tcaccggcttgaggggctgcgtgaggcgcggaggcagctgccatgcaaagaaagcccaaatcatattcttcttctttaat

SEQ ID NO: 236065 - DNA, 116 bp, Homo sapiens
ttttggaacgcccgtgccgcgtctccgcgttcccagcccgggtccccgcgttcacagccccagcgcagcctcccgcgacgatgcccctcaacgttagcttcaccaacaggaactat

SEQ ID NO: 236066 - DNA, 90 bp, Homo sapiens
cgccgcctgctgccgctgttgctgctgctcggcctggcccgcggcgccgcgggagcgccgggccccgacgttcttcaggagagaatacca

SEQ ID NO: 236067 - DNA, 110 bp, Homo sapiens
aatcacccaacatgctggtgtacagaaaggttgaagctccattcataccaaagtttagaggctctggagataccagcaactttgatgactatgaagaagaagatatccgt

SEQ ID NO: 236068 - DNA, 100 bp, Homo sapiens
agcagcttcaatggattctgagcttcatcccttgagagatcaatgtcttattgtgatgagtctcgactgtcaaatcttcttcagaggatcacccgggaaa

SEQ ID NO: 236069 - DNA, 121 bp, Homo sapiens
tttttttttacctctgcaggaatctgtcttggaggacatcagaagtccagaacacatattacataatggagccgggagacagactagggctggcttgatccggccacgcagtccaggaaag

SEQ ID NO: 236070 - DNA, 96 bp, Homo sapiens
aagttactgaaaaggaggtagaaatactcttcattcaagtcaatcagtttgcattgggcgccaatgcttcggcattagagaaagagattggtccag

SEQ ID NO: 236071 - DNA, 85 bp, Homo sapiens
ttccccagccctgtggatgctgcattccgtcaaggtcacaacagtgtctttctgatcaaggccttgatagattcctgtgcaggcc

SEQ ID NO: 236072 - DNA, 97 bp, Homo sapiens
atcccctgtttgagaaaaggcctaagaattttggcattgatttaccggaacattccaggatttttacgtacacttatggatgccctgagaaaagaca

SEQ ID NO: 236073 - DNA, 90 bp, Homo sapiens
gtggtgtgaacgggcatctcctcccagcagctcatgcaacatctcctctggggaaatgcagaaggttcctggtacagttcagacaggaca

SEQ ID NO: 236074 - DNA, 74 bp, Homo sapiens
gaaatactaaacatcacagaaaaacaacgatttatggatggagataaggatgaaaactttcggaagagaaagtt

SEQ ID NO: 236075 - DNA, 74 bp, Homo sapiens
caagaaacctcaggacttgagtaacagcaacatggttgcctgttcactctgatcgtagtattggaagttctggc

SEQ ID NO: 236076 - DNA, 98 bp, Homo sapiens
ccaggggaaggaggccacggcagtggtggaccagatcttggcccaggaagagaactggaagtttgagaagaataatttggaggagaggtcagtgctct

SEQ ID NO: 236077 - DNA, 50 bp, Homo sapiens
catcactgcttccctcagccataacaggtttggacatatttgactctttt

SEQ ID NO: 236078 - DNA, 75 bp, Homo sapiens
gaccccggtacatctgaaagccgggaaatggtgacttctgggggaacagaaagcatactgatggcctgcaaagca

SEQ ID NO: 236079 - DNA, 100 bp, Homo sapiens
ctcactttgacgatgaggagacctggacttttgggtcaaaagatccctcgggctggtggaagggccggcttcacggccaggagggccttttcccaggaaa

SEQ ID NO: 236080 - DNA, 113 bp, Homo sapiens
gctggggccctgtgtagaagctccatcccccttgtctttgtgcttgcctgcgtccccagactcagaggatattgtacctgtggatgcatcttatgaagtaaaagaactatatg

SEQ ID NO: 236081 - DNA, 74 bp, Homo sapiens
aggcaccaaggacctccaagacagatcagccaaatggccgatgacacagtggcagaactggacaggcatctggc

SEQ ID NO: 236082 - DNA, 100 bp, Homo sapiens
acaactacgagtttgacatcaatgaaggtttcgagttctttgaagccagtgccaaggagaacatcaatgtgaagcaggtcttcgagcgcctggtggatgt

SEQ ID NO: 236083 - DNA, 95 bp, Homo sapiens
gccctctcgctgttgctggtctctggctccctcctcccagggccaggcgccgctcagaacggagattacctggggcaattgatgttatcggtcag

SEQ ID NO: 236084 - DNA, 109 bp, Homo sapiens
cccggtttccctcggcgtgctactgtgcgctcgatccagcaccatggggaagcgggacaatcgggtgactgggctggcttagatgaagatgaagatgcacatgtctggg

SEQ ID NO: 236085 - DNA, 50 bp, Homo sapiens
cagcaagaaagaccatcaagtttaccagcataatcaccagcaacacccgg

SEQ ID NO: 236086 - DNA, 100 bp, Homo sapiens
ggagaaggtcaaggcagtggaaggtgccgacgccaccgccgagcccatgatcctggaacagtacgtggtggtgtccaactataagaagcaggagaactcg

SEQ ID NO: 236087 - DNA, 100 bp, Homo sapiens
aaagaagtgaccaaaaagtcatctacatttcaggatcaaatctaaatcgctgtggtttccgaggctcttcatacctgggtattccgttcaatccatcaaa

SEQ ID NO: 236088 - DNA, 83 bp, Homo sapiens
agatggagaaaacccacaaagaagtcacagaacaactgcagaaccaggaagacagcgcttccagcaacccgtttgcactcccc

SEQ ID NO: 236089 - DNA, 75 bp, Homo sapiens
ggtggaaaagcaacgttcttggatgcctgggagggattaatgaaaatcaagttccatcctcagacaagaggtaaa

SEQ ID NO: 236090 - DNA, 75 bp, Homo sapiens
cggaccaccgcggggtccccggcaaggtctttcatggtgctgattcagacatagaatggctacagaaagactttg

SEQ ID NO: 236091 - DNA, 98 bp, Homo sapiens
ggaagccgcggcggacagaccctccgaaggcctggcggccagcgattgctgatctgtgcatggcactctgatggttctaaaacatccctacccaagaa

SEQ ID NO: 236092 - DNA, 100 bp, Homo sapiens
ccttgctctccctggatctgattgagcctctcttacagctgttgccagtatctaacgtggtgagcgtaatggcctctcagcgcatactcatgtggaactt

SEQ ID NO: 236093 - DNA, 74 bp, Homo sapiens
agcccgtgccgcgagcgcggcctgcaggagggttgtgagtcccggcccagcccctccacccccctgcccccccg

SEQ ID NO: 236094 - DNA, 101 bp, Homo sapiens
tggatcctgggcgacgtcttcatcggccgctactacactgtgtttgaccgtgacaacaacaggaacgacaaatcctccacccctgggctcaagtccaacac

SEQ ID NO: 236095 - DNA, 75 bp, Homo sapiens
gggacagaggcaccaaggacctccaagacagacagtactacgcttacctcaccgacacacagtgcaagcgcgtag

SEQ ID NO: 236096 - DNA, 75 bp, Homo sapiens
gccccgcgtcatgcggctcctcggctggtgtagtttatgccaacgtgacttcattcatacagatgaaccaaggat

SEQ ID NO: 236097 - DNA, 75 bp, Homo sapiens
cgggactgcccgtcgaggtgcgcggctccaacggggccttctacaagaagctgacgggtcgcctcatgctggccg

SEQ ID NO: 236098 - DNA, 96 bp, Homo sapiens
tttcaagagtcacttctttacttggtgcaggaaggcagtctttgctacgtacagcaaaagctgaatgcaatatccatacatctccttctccgggaa

SEQ ID NO: 236099 - DNA, 74 bp, Homo sapiens
ttaaagctgagctgcgaggaaaatggcggcgggagtgtgccgtgcaggtgaagctggagctggggcaccgcgcc

SEQ ID NO: 236100 - DNA, 110 bp, Homo sapiens
agagctcctggaccaatgcatcttcccaccaccttaaaccactgctatctgctctatgcaagcacttagacaacctatgggaagaacaccgtggcagcgtggtcctgttt

SEQ ID NO: 236101 - DNA, 100 bp, Homo sapiens
gtttcaagctgctcaaaaactgggaggatatgaaacagtgcgccgcctggagttcaaccaggccatggacgacttcaagaccatgttccccaacatggat

SEQ ID NO: 236102 - DNA, 98 bp, Homo sapiens
attgtggccattgagcacagcagccgtcctatcaatgtgattaatgagggccccaaggctgttgcagctcctcgacctgatcggttggtcaatcgctt

SEQ ID NO: 236103 - DNA, 100 bp, Homo sapiens
gggctaaagagcgtcgtgtggcagacaagagtgagccatggagctacgtgtggggaacaagtaccgcctgggacggaagatcgggagcgggtccttcgga

SEQ ID NO: 236104 - DNA, 100 bp, Homo sapiens
tcgatggtcggcggcgcccggatgggcagctgaggaaccgcggggaaaggcgaatgggtgcttttgaatgtgttcgtaaagtgtatcagacagatggact

SEQ ID NO: 236105 - DNA, 75 bp, Homo sapiens
tcgacgaccgacagggtggtgaaaggagtccatagaggccactgtattctattgaagaacatgtctaacagtaac

SEQ ID NO: 236106 - DNA, 74 bp, Homo sapiens
atttatggtcgcctttttgaatgagtgcctgatttgagatggggtcccaggtctcggtggaatcgggagctctg

SEQ ID NO: 236107 - DNA, 82 bp, Homo sapiens
acctggcccagcgccacggggtggacctggaaggaggtatatcgaattccaaagaaaagtcaaactgaaaaggaaaacacaa

SEQ ID NO: 236108 - DNA, 75 bp, Homo sapiens
cgcgggggcgacgcgcgggaacaacgcgagtcggcgcgcgggacgaaggagaacatattgtgatgttcgtgcctc

SEQ ID NO: 236109 - DNA, 75 bp, Homo sapiens
gtgtgctgctgctgtgtggagcagtcttcgtttcgcccagccaggaacttgctactaccagcaccatgccctacc

SEQ ID NO: 236110 - DNA, 75 bp, Homo sapiens
gctgcaccgacctcgacgtcttgcctgtgtcccacttgttcgcggcctataggttatcaatactctggctgacca

SEQ ID NO: 236111 - DNA, 96 bp, Homo sapiens
ggcgacgtgtcccctagtccctacagcagcagcagctggcgccgctctcgcagtccctacagccctgtgctcagattcacaatgacatcctttcaa

SEQ ID NO: 236112 - DNA, 82 bp, Homo sapiens
agagcctcgcctttgccgatccgccgcccgtccacacccgccgccagggctgaagaagatgcagagcagcctgaagctggtg

SEQ ID NO: 236113 - DNA, 100 bp, Homo sapiens
ctttgaagagatcgactacaaggagatcgaggtggaagaggatattggtgctggaaaaggcaaatactatgctgtcaattttccaatgagagatggtata

SEQ ID NO: 236114 - DNA, 103 bp, Homo sapiens
aaggagggcactctaatcgtccgccagagttcacatgagactctgaatatagtggaggagaagaagcgggcagaggttgggaaagacgaaagagtaatcacag

SEQ ID NO: 236115 - DNA, 107 bp, Homo sapiens
cggagcctccgctgccagcgacatgttcaagctgatggtgagaccattctaaaaggcctccagtccattttccaggagcaggggatggcggagtcggtgcacacctg

SEQ ID NO: 236116 - DNA, 80 bp, Homo sapiens
ctctgctgctgccgccggcgaaggaggaggcgttgccggcaccctggaggagaagaggttctgctggaacaagctggtgt

SEQ ID NO: 236117 - DNA, 83 bp, Homo sapiens
tctgctgaccgcgggccctgccctgggctggaacgaccctgaaccacgaagctgccctgagacgctcactcacgctgtgggga

SEQ ID NO: 236118 - DNA, 74 bp, Homo sapiens
gatgacattggagatgatgatgaagatattgatgacgttcatcaaggcttataagaagtttggtctccctcttg

SEQ ID NO: 236119 - DNA, 83 bp, Homo sapiens
gtccacccaccgccgccgcctcccaggtgaggaaaatagcagctgaatactatgacaacctccctcactacaattcctggata

SEQ ID NO: 236120 - DNA, 76 bp, Homo sapiens
gattttctgcagaagatgaagctttgagtaacattgccagagagaccatggcaaaagttataaccaccgtactgaa

SEQ ID NO: 236121 - DNA, 90 bp, Homo sapiens
acatgcgggcactgcgccatgacagaggtggcagcaccctggacggaggagacagtgaagcagtgtctgtacctctacctggccctcctg

SEQ ID NO: 236122 - DNA, 98 bp, Homo sapiens
cagccccttcgccaaacagccttacaaagacatccagctctaaggagctcaaaacatcctgaggacagtgcctggagataaacaacttgatgcagatg

SEQ ID NO: 236123 - DNA, 98 bp, Homo sapiens
tcctcctcacggtcctcctggctgtgctcatatacacctgcctagactcaagtctgggtttcagctgccgccagccctattgctgctgttgctgttct

SEQ ID NO: 236124 - DNA, 75 bp, Homo sapiens
gctcaaagctgctgccgccccttgggctaaaaggaaatggctagtgatgagctgaaagagatgcggaaaaacttg

SEQ ID NO: 236125 - DNA, 82 bp, Homo sapiens
aggaggtcctttttggccccaggtgactcttaactcccaggacagagagaaatggaataatcgtatcgctgatctacgtaaa

SEQ ID NO: 236126 - DNA, 97 bp, Homo sapiens
tttccacagaaggactgggatgatacaccttttccacagggaattgagttgccaaggccacctttgatgccatttctaagacctacagctacctgac

SEQ ID NO: 236127 - DNA, 98 bp, Homo sapiens
gtcagatgccccttttaaactccctcttcaaaactcatctcctgggtgactggtcagcagcaaggacaagatggagtaaaagtccagcaagctactat

SEQ ID NO: 236128 - DNA, 90 bp, Homo sapiens
ttacagattggtccaatccctaggtgccatgtttcagaacagagtaagacccctggtaaagaagaactgaagatattatacagataccag

SEQ ID NO: 236129 - DNA, 96 bp, Homo sapiens
gaatgggtgttgctcttaggatgtatcccctcaagttctaacattcccatggaccagccctgctgtcgtggtctctatgactttgagccagaaaac

SEQ ID NO: 236130 - DNA, 98 bp, Homo sapiens
cctgcacctgtgtcccaccccacccacagacggccttctgcaattccgacctcggtgctggcatcggccccaccattcagattggggaggagacggtg

SEQ ID NO: 236131 - DNA, 96 bp, Homo sapiens
ctttcgtttccctctgagggaattgggaggtcggcggccccaaaattaagtgggcagaccaacatccacctcagcaaaaacttcttcctgacgaat

SEQ ID NO: 236132 - DNA, 98 bp, Homo sapiens
tgaggactgactggggttctgagactccctgtcccggaccgcaggtcctagcagaagatgtgactcagactgcctctgggtggggctggctggcccac

SEQ ID NO: 236133 - DNA, 100 bp, Homo sapiens
aagaacggaagtccttccagaaggagcttgtgatggttcagggccttggccccacctttaagctcacacttcacctgcagaacacctcaacaacccgtcc

SEQ ID NO: 236134 - DNA, 83 bp, Homo sapiens
cgagcagtatgccgccctggccacggggactctcttctggatgacaatgcagatcttcgtgaagactctgactggtaagacca

SEQ ID NO: 236135 - DNA, 50 bp, Homo sapiens
gagcgacggaagccagaccccaggagaatggagatgaggcgcctggtgtt

SEQ ID NO: 236136 - DNA, 99 bp, Homo sapiens
atggtggtgtcccacctttttgggaagggcagcaggatgggtgtggaagcagtgatggcacttttggaggggaccccagataccccagcctgtgtagtg

SEQ ID NO: 236137 - DNA, 100 bp, Homo sapiens
gttggaccttccggagcttctcagaagacagagggttttcttttgaggatggcactggatctttaaaacgcagtggttcctttagcaaactccgggcttc

SEQ ID NO: 236138 - DNA, 74 bp, Homo sapiens
cctcggtgggggcttagcgcactggaggagcggcgggcttcagacagggtgtacagcaagctgtgattcctggg

SEQ ID NO: 236139 - DNA, 100 bp, Homo sapiens
tctgcattagttggtgtttgcaatatcgttcagcaagaatggggtggtgcaattccttgccagatggcaggatggtggctggcaaagtgttgatggcaaa

SEQ ID NO: 236140 - DNA, 98 bp, Homo sapiens
ttttgcattacagcctccctgctttgcccgcctgctgctggaagcttagcaggtgatctgtgaaaatggttcgctattcacttgacccggagaacccc

SEQ ID NO: 236141 - DNA, 75 bp, Homo sapiens
gaaaatcgcttggttaaaacctgacacttttaacaggtgtgactgcacagaaaagttacaaaacaaatttgactt

SEQ ID NO: 236142 - DNA, 83 bp, Homo sapiens
ctgctgagatgcgcaaattcactccccagtacaaaggtgacaaccagggcatccccatcatgtccagcatcaagctgaaagag

SEQ ID NO: 236143 - DNA, 88 bp, Homo sapiens
gagaccgtgaccgagagcgtgaccgagagcgcgaatatcgtcatcgttagaagggtggtatttccaacattttggaggaactggttgt

SEQ ID NO: 236144 - DNA, 75 bp, Homo sapiens
ggacgttggggcggcctggctccctcagggtatttgaagtataccatacaactgttttgaaaatccagcgtggac

SEQ ID NO: 236145 - DNA, 74 bp, Homo sapiens
tggggccgcggtgctgaggacgcaaatgtgcaccgacagtaaatggttcacggccgacatcatgtccatagggg

SEQ ID NO: 236146 - DNA, 100 bp, Homo sapiens
tctgtggaagaaatgggcatgccagatgcctggaagatcagaggctcacattccaggtggctatggcggttccagcagcagcagtagctatggcagtggc

SEQ ID NO: 236147 - DNA, 82 bp, Homo sapiens
cagcggccgagcgggcggcttcctggcctgggcgctccggtggcggcggagctgtttttggaaggaagaaagatggaaagcg

SEQ ID NO: 236148 - DNA, 83 bp, Homo sapiens
ataaggaaagttgttgccctgtttcttccaatacagtcaaaatccaagtccaagaaattgcatctgatggtctcaagggtcgt

SEQ ID NO: 236149 - DNA, 154 bp, Homo sapiens
agggcttgggaaggggaaggaaacctctctgaaatctgacacctgctctcccggcaaggaaacttcgcaggctggtactccaaagattcaggtttactcacgtcatccagcagagaatggaaagtcaaatttcctgaattgctatgtgtctggg

SEQ ID NO: 236150 - DNA, 125 bp, Homo sapiens
ctaaataccagtatggtggactgaattctggacgtcctgtcactccacctcgaacagctaatccgccgaagaaaagcgccagcagccctgtggtggcgacgacgatggaccaggagccagtgggc

SEQ ID NO: 236151 - DNA, 100 bp, Homo sapiens
gcctggtgggcccagtcctcggtgcggcgcggccaggagaacccatccccccacggaccttgactgaagctggcacaatggcactttgctacagtgctgc

SEQ ID NO: 236152 - DNA, 50 bp, Homo sapiens
gctcagtcggccaagaagccctgcccagattatggattggatatgtctac

SEQ ID NO: 236153 - DNA, 100 bp, Homo sapiens
gccgtctcagcctgggcgtcgctgaagctgtgtctgcggggaggcagcggaaggcggcagcaatcccacagagtattgatgaggaaactgaagtttggag

SEQ ID NO: 236154 - DNA, 74 bp, Homo sapiens
ggggacctgccctcctggacgcggagcctggcatggatttcattggtcgcgacgccctcctgcagcagaagcag

SEQ ID NO: 236155 - DNA, 100 bp, Homo sapiens
agttcagtggtaggatcatggcttactgcagtctggaactcctgggctcaaaccatcctcccacctcagccttatcatccagcccctcttagaacttgac

SEQ ID NO: 236156 - DNA, 100 bp, Homo sapiens
gggaagggaagtgtgctaaggcgggatgtgtcagtcaaagcagcctctgaacttctcatgaaactctcagaaaatatttacaccagcagctccagttcat

SEQ ID NO: 236157 - DNA, 74 bp, Homo sapiens
agctttagtgaaatgggctaataatgctggcaaagtggaaaaatgtgcgcaaagaacagtctgaacttgatcaa

SEQ ID NO: 236158 - DNA, 114 bp, Homo sapiens
gggtcagagcattttctctgtgccaccagagagtttcgtgtgcgaatatgacagatacctagcatctagcaaaataatggcagctgcttaccttgaccccaacttgaatcacac

SEQ ID NO: 236159 - DNA, 80 bp, Homo sapiens
cttagtgaatatgatcaagttctcgtggagtcagacaatgagtcctctttgatacgcaacctacggctctctgagtcctt

SEQ ID NO: 236160 - DNA, 75 bp, Homo sapiens
gagccccgcgtttcagccctagggaagttggtaatcagtggataaattacatatcattctgtggtcttagaacac

SEQ ID NO: 236161 - DNA, 87 bp, Homo sapiens
agggatgaggcctcttcagagccgcctccccaaaccagcttcctcagatatggagtctggagaacggttaccatcctcagcagcctc

SEQ ID NO: 236162 - DNA, 101 bp, Homo sapiens
ctgcaaaaatgtctctctatccatctctcgaagacttgaagtttttcagaagaagtgaagtcaagatgaagaaccatttgcttttctggggagtcctggcg

SEQ ID NO: 236163 - DNA, 100 bp, Homo sapiens
gatgattaaaacggaatttacactgacagaagcagtggtcgaatccagtagaaaactggtcaaggaagcttatccatatattcctgcacatattacaaag

SEQ ID NO: 236164 - DNA, 75 bp, Homo sapiens
ggaggtcaaactggcaatatttgggagagcaggcgtgggcaagtcagcatattgagtatcagtgctgatattgaa

SEQ ID NO: 236165 - DNA, 90 bp, Homo sapiens
gaaagctgtgtggtgcgagtaactgtacagtggaaatgtttcaacgtgcgcaagcgttgcggcggcgggcagaggactactacagatgca

SEQ ID NO: 236166 - DNA, 74 bp, Homo sapiens
cagggtgaaccacagcaagttcatggtcacggagaaggcagcctacataggtacatgtcccagagcaagcacac

SEQ ID NO: 236167 - DNA, 97 bp, Homo sapiens
tccggacagccgcgcgctgagggtctcggggcgggcgccgcgggacctctccgggccatgggcatcctattttcattggtggtgatgctgtatgtca

SEQ ID NO: 236168 - DNA, 75 bp, Homo sapiens
gttcaagcgaaaacatgaccgctgagcccatgagctgggaatggtgaggaagaaattctgccccactgtaacttg

SEQ ID NO: 236169 - DNA, 100 bp, Homo sapiens
aatgaggatgaagattcaccaaataagctatatactttggttacctatgtacctgttaccactttcaaaaaaggaagaggcccagcagaagggactcgct

SEQ ID NO: 236170 - DNA, 83 bp, Homo sapiens
agcctacatcttcggcctgggccttaccatcttcatcatgcacatcttcaagcatgctcagaggaggcctaccagaaactggc

SEQ ID NO: 236171 - DNA, 100 bp, Homo sapiens
gcaagatgtggcagaagaacaagaagttgagaccgagaatgtggaaacaggttaatgttgaagaaggaaaatgcggaagtcgtcatttgacaagttttat

SEQ ID NO: 236172 - DNA, 96 bp, Homo sapiens
cattatatccagctgggaactgtctacaggcgtgaattacccttcactaagtcggctcatctcaccaatccttggaatgaacataaaccagtaaag

SEQ ID NO: 236173 - DNA, 84 bp, Homo sapiens
gtgggcgaagcccaagcccctgtcccctacgtcctacatgagggggatatgagactttctactcggaatatcctgagtgttgcg

SEQ ID NO: 236174 - DNA, 100 bp, Homo sapiens
cacgtggaagccgtatatatagacattgcagatcgaagccaagtgctcagcaagacaattggtgtgacctttgcagccatggttggagctggaatgctgg

SEQ ID NO: 236175 - DNA, 100 bp, Homo sapiens
ctccccgtggctttctaaagcgagtcttcaagcgaaagaagcctcaacttcgtctggagaaaagtggtgacttattgcaactttcatcctttgaaacgtg

SEQ ID NO: 236176 - DNA, 90 bp, Homo sapiens
agcggacaccctgaaggtcccggtgctcacttggacatgactttttaaaactgtggacttaaatgttctgcaaagtcttacacaaaagcc

SEQ ID NO: 236177 - DNA, 80 bp, Homo sapiens
caaaatgtcaacaaattgatggcgcctgtacagatcagtttatgaaaagaacaagatgaaaatccacatcgtgcccgaca

SEQ ID NO: 236178 - DNA, 98 bp, Homo sapiens
cctgcctgtgtgagagccacgtgtgccgcgctctgggcacagccttggaaagtcaggaccgcgacggcagcagagcaacggagtcttgccctgtcacc

SEQ ID NO: 236179 - DNA, 75 bp, Homo sapiens
cggcatgcggcccaacgccaagaacaactatcctgtggagcacccagacaaattcctgaagtttggcatgacacc

SEQ ID NO: 236180 - DNA, 90 bp, Homo sapiens
cagacatccaaatctggtattcaacaaataattgagtgctttcgatcagcttttcatgcaacacccaacacttataagcggaagaacaca

SEQ ID NO: 236181 - DNA, 90 bp, Homo sapiens
taacaagtgataaccacaaatggacccagttaaatttccaggcaccaaaacctacattgaccctgaaacctatgaggacccaaatagagc

SEQ ID NO: 236182 - DNA, 114 bp, Homo sapiens
gtcgggaacagccatgcaaaggcaggggaggaagccacctcgagctgtggaaatacaaagaactctgaatcaacttggaacacctcaagattcacctgaattgaggcaacagtt

SEQ ID NO: 236183 - DNA, 50 bp, Homo sapiens
caggggaggcacagtgtctgctgacgctgaccggaaaggagattgagatt

SEQ ID NO: 236184 - DNA, 100 bp, Homo sapiens
gggcctggcggaccccggaagtgtgggcgcggctgcggtttaacccgcggtggcggcggcgacggcggccctggcaggctaacaataaatgcccttgccc

SEQ ID NO: 236185 - DNA, 83 bp, Homo sapiens
ccaaggaaaaactggagagcttcatcaaaaatagtgatagctttgataagcttcgctgcatcaccacatttcagtagcacaga

SEQ ID NO: 236186 - DNA, 90 bp, Homo sapiens
caagagtataatgtctatggtgaagtcttttgtacagtggttaggagactacctaggtggagaagcgtactgggccggcggcctgcacct

SEQ ID NO: 236187 - DNA, 82 bp, Homo sapiens
gaaggccaaggctgcagaagccaaagccacgggggatatgagactttctactcggaatatcctgagtgttgcgtggatgtaa

SEQ ID NO: 236188 - DNA, 99 bp, Homo sapiens
accatcttcgacttgagcgaagttttatgcaagatgttcagaaaatcattggtaaagatgtttgaagataaaggattagactgcatttttttggaaact

SEQ ID NO: 236189 - DNA, 96 bp, Homo sapiens
ggcggcggcgctttcggcgcgggcccgggccccgagcgcccgaacagggtttggaaatcccttgtctccaggttgctgggattgacttcttgctca

SEQ ID NO: 236190 - DNA, 74 bp, Homo sapiens
tctctagactttttggacgatgtgcggcggatgaacaagcggcagatgctgcagttggagaagaaacttgaacg

SEQ ID NO: 236191 - DNA, 83 bp, Homo sapiens
tccagcaccctcatcgccctggccgacaagcacgcaaggggatatgagactttctactcggaatatcctgagtgttgcgtgga

SEQ ID NO: 236192 - DNA, 75 bp, Homo sapiens
agaaacacaggctagactggaagctttactagaagctgcagctgcagggaagtcaacatttgtgaatatccttaa

SEQ ID NO: 236193 - DNA, 75 bp, Homo sapiens
tcatttatgagagcgaccgtgatggggccattgaagacatcatcacaggaacctcactctggagcctgagatcat

SEQ ID NO: 236194 - DNA, 96 bp, Homo sapiens
cgcctttctcattattataggctccctcctgctgtcaggctacatcagcaaaggggtccagaggtgtccttctaaagctggtagaggtttcacgag

SEQ ID NO: 236195 - DNA, 96 bp, Homo sapiens
gacgaagttgatggcctggagaagaaagatgttttgcctactgttgatccgaaacccaaggacttggacttcgcccagcagaagctgaccgataag

SEQ ID NO: 236196 - DNA, 83 bp, Homo sapiens
ggtagtctgcctggtcgcaattgcttctatagttgattgaatgctcttaacacggagagcaatttttccagctagtcaaatta

SEQ ID NO: 236197 - DNA, 75 bp, Homo sapiens
ccctgactaccctggaagtagcaggccgcatgcttggaggatgaatctgaggacacagatactgatggggaagag

SEQ ID NO: 236198 - DNA, 98 bp, Homo sapiens
agaggtgaaggagagaacagaggaacctatggagacagagcccaaagagatgagtgaatttcataattataacttggatctgaagaagagtgattttt

SEQ ID NO: 236199 - DNA, 104 bp, Homo sapiens
cgccaaccgcaaccattgacgccatgtcgggttattcgagtgaccgagaccgcggccgggaccgagggtgccaagtcctgccctgccaacttcttggcagctgc

SEQ ID NO: 236200 - DNA, 75 bp, Homo sapiens
ggggcggcggccacgccaaggacggattcatgacagatgctgcccgccgagagcaggagtccctaaagaagaaga

SEQ ID NO: 236201 - DNA, 85 bp, Homo sapiens
atactttgccttttaaaagaaatgccacccacattcagagacacaagtgcagcagtttggcccctccagccagcgtcaggtgcag

SEQ ID NO: 236202 - DNA, 51 bp, Homo sapiens
aaaacacgccagcttcaaagcaaggtgccaggattgctgagtattcccagt

SEQ ID NO: 236203 - DNA, 99 bp, Homo sapiens
gaagattcaccaaataagctatatactttggttacctatgtacctgttaccactttcaaaagttacgaaggtgagaatctgatgaaaattctaaaagac

SEQ ID NO: 236204 - DNA, 90 bp, Homo sapiens
actggtcttggtagcggaggcacccgaatgctgcccgggtgagggccgttgctccagggagaactgcaaatatcttcatccacccccaca

SEQ ID NO: 236205 - DNA, 122 bp, Homo sapiens
ctacaggtgcttgccactatgcccaactaacatttggaattttcgtatacgtggattctagaggggtgacagcgaaacgaacagtaagaggaccttgtgcatgaataatttgtttccacact

SEQ ID NO: 236206 - DNA, 82 bp, Homo sapiens
ctcgccatggccgacgaaaagcccaaggcccagctgagagccagcctggaggttacccagcagcaggccacccaggccgaag

SEQ ID NO: 236207 - DNA, 75 bp, Homo sapiens
aggaagatggcggatctggaggagcagttgtctgatgaagagaagggaagccccacccaccagaagccaagatgt

SEQ ID NO: 236208 - DNA, 100 bp, Homo sapiens
cgcctccagcgccgcgggatgtagcgcgggggaccgcggcccccagcagagcccgcctgcccggctgtcaaaatgcagatcttcgtgaaaacccttaccg

SEQ ID NO: 236209 - DNA, 75 bp, Homo sapiens
ccgatagcttcgatcgccgcttcttccccatctccaaggaccagcctcggcaatgtgtattcctccatcatatgc

SEQ ID NO: 236210 - DNA, 100 bp, Homo sapiens
gtttccttttgaagctgcccgtagatttcagcaatatccccacataccttctcaagtgaaacaaagagtcctcttcgtggaaaagaaaaaaatacgctcc

SEQ ID NO: 236211 - DNA, 100 bp, Homo sapiens
gaaagaacaccaaaagggaactctaaagatttagttggaaaagtaggccatgttacaggagctgaattttggtgcatatttgggtcttccagctttcctg

SEQ ID NO: 236212 - DNA, 50 bp, Homo sapiens
ataaacatgcaatgaacccaaaaggactggggactccactgtgagaccac

SEQ ID NO: 236213 - DNA, 75 bp, Homo sapiens
gtcagagggctgtgaagacgcacggtgccaggaccaagtatctgggctatgagggcctcgtggagggaggtgaga

SEQ ID NO: 236214 - DNA, 75 bp, Homo sapiens
ggcaagcagctggaagatggacgtactttgtctgactacaatattcaaaaggtaaatcgggtccttcctcgctcc

SEQ ID NO: 236215 - DNA, 74 bp, Homo sapiens
tctgtatggcagaaagcaatggatcatattgagatcaacctctagaatcccgtagactctgcaacaagccaatt

SEQ ID NO: 236216 - DNA, 101 bp, Homo sapiens
aaatgattgtggcagtaaagaagtgtatgtgaagacaaaggctcaggtcccaatggtgctgactgctggtcccaagtggttgctggatgtgacttggcaag

SEQ ID NO: 236217 - DNA, 112 bp, Homo sapiens
gctggagctgggtcagtccgccgctcaccccgcggccgcaccttcccgccttctcaggaccaagaatcgccttcagccctgtctggtgcatccttggcagaaagtgaggagg

SEQ ID NO: 236218 - DNA, 100 bp, Homo sapiens
cagaatgaccagcgaaatcggaaaagaaaagctgaaccatatgaaactagccaagggcttcgatggacgaaatggagaaaagggtgaaacaggtgctcct

SEQ ID NO: 236219 - DNA, 100 bp, Homo sapiens
caggtgtatgatcttttggaggaggaggatgaatttgatagagaggtggagccgccaccaaaatgcagattttcgtgaaaacccttacggggaagaccat

SEQ ID NO: 236220 - DNA, 100 bp, Homo sapiens
gcggatgagctggcccgctacttcccagaccggaacgtggcactcttcgtggccacctggaacatgcagggccagaagatgacagatttgaagatctgga

SEQ ID NO: 236221 - DNA, 100 bp, Homo sapiens
aggactgtgcaggggactctgtcacatatgccaccacgggctgttccctgaccctgcaccatacggagaaaccagaacatgaagacatatgtgaataccg

SEQ ID NO: 236222 - DNA, 75 bp, Homo sapiens
cgcgcctgcgacctgcccgcctgggtgtcgtgaaaactacccctaaaagccaaaatgggaaaggaaaagactcat

SEQ ID NO: 236223 - DNA, 75 bp, Homo sapiens
cttgtgcctccaaggaaaatccacctcgcagcttgtaaatctacagtactatactggcaattgctggagaagatt

SEQ ID NO: 236224 - DNA, 50 bp, Homo sapiens
gatcgctgtgatcgtcacttggatgccctgcacagcgtaaagaagagact

SEQ ID NO: 236225 - DNA, 75 bp, Homo sapiens
cagggccaggcgcagacctttctccaagaggagtactacgagatgtcctacggcttgaacatcgagatgcacaaa

SEQ ID NO: 236226 - DNA, 100 bp, Homo sapiens
tctcattggactcaagccagcatggctcacaccacaaaggttaacggcagtgcctcaggaaggtgggagtcaatcattttgacaagtctcctgaaaggaa

SEQ ID NO: 236227 - DNA, 75 bp, Homo sapiens
aaatgagtctggaaaactgggccaaagcagtgaaacgctccatgaattggtgatgatgaacagtctacacagatg

SEQ ID NO: 236228 - DNA, 97 bp, Homo sapiens
aaaaatagtgatagctttgataaattctgaaaaagagttccacgtcctcccttatcgagtctttgttccccttcctggatccactgtaatgttgtgt

SEQ ID NO: 236229 - DNA, 100 bp, Homo sapiens
ccgggcttttgctgatatgcatgcatgtaccgaccttctgaacaaggccaacacctatgcagggaaaacaaagtgcatgatgaagtcttcagactgtgtc

SEQ ID NO: 236230 - DNA, 60 bp, Homo sapiens
caagcacgagggcgcgctcgagacgctcctgagcaataagagctaactgccatcaagagc

SEQ ID NO: 236231 - DNA, 100 bp, Homo sapiens
tgaaattgttaggcgtggagagggagtgatgtcttccagactcggtgctgtacccgccggttcaggataagtttgaggtgctgaattacacaagcattcc

SEQ ID NO: 236232 - DNA, 96 bp, Homo sapiens
cccagcttcacgagtacaatgacatcaaggatgtggggcagatgctgatgggcaaactagagcagcccgacggccatggaggctgaagagacgatg

SEQ ID NO: 236233 - DNA, 128 bp, Homo sapiens
caagcagcaggtttgatcaaccattcttctcagagcaagaaacctaccatactggtcttgtccagaaggctaaaaaagcaaaggacaggttgttgaaacgagaaggggatgatcgagcagagtcaggg

SEQ ID NO: 236234 - DNA, 75 bp, Homo sapiens
agcggatcgggtggagtgtaggtcatatcgccgcggtctctcaggcagctgcagagcttcaacagtactgtatgc

SEQ ID NO: 236235 - DNA, 75 bp, Homo sapiens
aacggaccagccccagtgatggagcaatggcaaactatgaaagtacaggcaaaatcctgacagatgactttgcag

SEQ ID NO: 236236 - DNA, 92 bp, Homo sapiens
gacgtcttgcctgtgtcccacttgttcgcggcctatagtgttatagttttgccgctggactcttccctcccttcccccaccccatcaggatg

SEQ ID NO: 236237 - DNA, 88 bp, Homo sapiens
gataccacagaatcacttaattcttccttgtccaatggaacaagtgatgctgggaacacaacagtagatgagttaatgatgagactca

SEQ ID NO: 236238 - DNA, 100 bp, Homo sapiens
tcacacaggatccgcccctggacatggaggagaaggtccgcttcaaggaatgaaggatggcagcatgccgtgcattaaaagctgttttggtagatctcag

SEQ ID NO: 236239 - DNA, 83 bp, Homo sapiens
gaccatcttggtgagaaacattaagacctactaccaggatatggaggcacagcaagttaatgaagcagaatcagcaagagaac

SEQ ID NO: 236240 - DNA, 100 bp, Homo sapiens
tattatgcaggtggtctgtgaagccacacagtgtccagatacgaggggtacagccaaagaccggagctttggagagatgaagtttaaacagtgtcctaca

SEQ ID NO: 236241 - DNA, 83 bp, Homo sapiens
taaacatcgtgggggatctcttacggaaagtaggggtcttctcagtacagcatggtggctggggcaggccgagagaatggcat

SEQ ID NO: 236242 - DNA, 50 bp, Homo sapiens
gacaggaatggaacacacttggatgcagtagtcgtgaaaggtgccaaatt

SEQ ID NO: 236243 - DNA, 100 bp, Homo sapiens
ccccgccctcctcagcctgatcctggaagagactcggggccccccagcctccgccaacccagagctggaagaggcgccgctgacggtgaagagtgacatg

SEQ ID NO: 236244 - DNA, 50 bp, Homo sapiens
ctggcacctacgtctgcactactaggaacaggaaatatagtggtcattat

SEQ ID NO: 236245 - DNA, 96 bp, Homo sapiens
ggtaccatggagactgatgaccactcccgtggaagtcgctgaccagcatcattgagtactactacatgtggaagaccaccgacagatacgtgcagc

SEQ ID NO: 236246 - DNA, 50 bp, Homo sapiens
ccggccaccagcaattgtccgggggctgttgtggttccgactataaacag

SEQ ID NO: 236247 - DNA, 98 bp, Homo sapiens
tggtttagaaatggaaaaatgtgatccttggacctcccagagcttcagcctgcagcctttgtgtcttcttaccagcccatgtacctgacacatgaacc

SEQ ID NO: 236248 - DNA, 83 bp, Homo sapiens
gttaaggattccaagtaactcttatttggagatgattattgacagagtaaatggacaggctgttcctagatatttgatatatg

SEQ ID NO: 236249 - DNA, 100 bp, Homo sapiens
agagtgcatgagctcggagctgctggaggagttgatgtcctcagaagcagtcctgcgttaactgcggccgggaggctatgagcgagtgcaccggctgcca

SEQ ID NO: 236250 - DNA, 100 bp, Homo sapiens
tagcaggctcatcaacctcgtggactggtcagagattttctaccctagcaaggatggtacgaagattccaatgttcattgtgcataaaaaaggcataaaa

SEQ ID NO: 236251 - DNA, 80 bp, Homo sapiens
gggcgctcctgagaccctccagcgctgcctggaggagaatcaagagctccgaggtttttagaacttcagccataaaaatg

SEQ ID NO: 236252 - DNA, 82 bp, Homo sapiens
catacgcgctctccctgtttagggcttcagataacagggagcgtgcttatgaacatagtgcctatggacaccatgaacgggg

SEQ ID NO: 236253 - DNA, 100 bp, Homo sapiens
ggccggacggtcatggtcaacattgaggtgtcccgacccaggctaagcttgagcatggctgagcaggagcccacagccgagcagctggcccagattgcag

SEQ ID NO: 236254 - DNA, 100 bp, Homo sapiens
aaccagtttatttggttacaaccctggataacacaatggaagacctgttaacgctggaatatgtaaaggtatgatctcgtgaaaccttgagagaaactga

SEQ ID NO: 236255 - DNA, 50 bp, Homo sapiens
cttcgatgtgcgagactttggaaagggatgtttcagcagcccctgagaag

SEQ ID NO: 236256 - DNA, 100 bp, Homo sapiens
attttctgcaggccccacgagtgggaggtgctgagccgctcagagcaatgctaagaagacgtttggtttaaagaattaaaaggaagaacaacttaagagc

SEQ ID NO: 236257 - DNA, 80 bp, Homo sapiens
ccggccctgcgcgtgcgccgtggcgcggcccggctgacagtatgccaagtacatggaaaaccatagcattgaaggagtga

SEQ ID NO: 236258 - DNA, 98 bp, Homo sapiens
ggctaaaagacgaaataccaccggaactggtcgaatgaggcacctaaaaattgtataccgcagattcagttctgcaggctggaaatccaagatgaagt

SEQ ID NO: 236259 - DNA, 100 bp, Homo sapiens
tggaagtgcggggctccaatggcgctttctacaagttttctggatatgccgcagaaggatccgtgccagaagcaagcctgtgagatacagaaatgtttac

SEQ ID NO: 236260 - DNA, 74 bp, Homo sapiens
gcgccctggagagaggagagaaaatgtccactggacctctgtccagttcaggacctcaaggggctcggctatga

SEQ ID NO: 236261 - DNA, 80 bp, Homo sapiens
ttttgagctggtggaagtggttggaaatggcacctatggacaagtctataagcattaaagggcagtatttaaagtcagtt

SEQ ID NO: 236262 - DNA, 90 bp, Homo sapiens
cgaaggctgtgcggtctgccaggagctgcggccccgtccggcccgggctggcacgtgtggttctcaaatataggcattctgatgggaact

SEQ ID NO: 236263 - DNA, 97 bp, Homo sapiens
agaaactgaaaggccaacgtgggagacaaagaagagcctgaaagagccaaatcttaccttctggaccatggattttacagtttttggaggcagtctg

SEQ ID NO: 236264 - DNA, 90 bp, Homo sapiens
ggaaagcctggagtcctggctcagtttggtgcacctcgatttggaggaagtagggcagggcccttatctggaaagaagtttggaaaccct

SEQ ID NO: 236265 - DNA, 100 bp, Homo sapiens
tcctgtgagctgcctggcccggtgatgctcgacagcctggactctgcaacacctgtcaactccatctgcagtgttcaagttagagatgtttatgattact

SEQ ID NO: 236266 - DNA, 98 bp, Homo sapiens
acaaaagagttgattgaaattatctctggtgctgcagctctgaaagatatgatccgccaaatgatgattaaaatatttcgctgcattgagccagagct

SEQ ID NO: 236267 - DNA, 82 bp, Homo sapiens
gtgttggcagcagtgctgttaccactctgggtgatccagccaaagaagccaagtacaagaagctggagaagcgatgagaaac

SEQ ID NO: 236268 - DNA, 74 bp, Homo sapiens
ggaaccctggtcaccgtctcctcaggacgtggcccagtggaacatcgggagcctccggaccatcctggacatgg

SEQ ID NO: 236269 - DNA, 88 bp, Homo sapiens
aaagagaaacgcacttcatcttcatccctccggagaaaaagaatgtgaaattgactaaatacatggacatcaatgcaagcttgaataa

SEQ ID NO: 236270 - DNA, 74 bp, Homo sapiens
tggctgtgctgcgcgacccccgcgcatgggaagcgtgacagcaatgacagtgttttttcccctggatacagcta

SEQ ID NO: 236271 - DNA, 75 bp, Homo sapiens
cagcgtgcgttcagccctgggaggtggggctggtgtccgagcacttctcgcaggccccgcagaggctgtccttct

SEQ ID NO: 236272 - DNA, 90 bp, Homo sapiens
gagctgcctttacaggacgaaaggaaatcaatgtgttgacagttgcattagtcaaccaagaccgagagaacaatattgagaaaagaagcc

SEQ ID NO: 236273 - DNA, 100 bp, Homo sapiens
gttggtccaagtgtcccggcctgaggtgtcggccggatccctccttctcccggcgcctcaagcggaaggcatggaagaggagatggttcgtgttacgcag

SEQ ID NO: 236274 - DNA, 100 bp, Homo sapiens
gccaattgcttcaatacccaagggtccttcaagtgtaaatgcaagcagggatataaaggcaatggacttcggtgttctgactccccccaggtacagtgcc

SEQ ID NO: 236275 - DNA, 100 bp, Homo sapiens
tacctgttgagcagaggatggacatcagtcgctacgcatttcggatctggaaacctctagaacaagttatcacagaaactgcaaagaagatttcaactcc

SEQ ID NO: 236276 - DNA, 90 bp, Homo sapiens
agaaacagaggactaattttggcagttctaaatttgaatttgaggcatgaaaacagccctggaagtctgccctggcgcctgcactgagac

SEQ ID NO: 236277 - DNA, 99 bp, Homo sapiens
gcagcagcagcctccgccgccgccaccgccgcctccgccgctgcctcaggagcggaacaacgtcggcgagcgggagcatctgctgcacccaagcctgag

SEQ ID NO: 236278 - DNA, 75 bp, Homo sapiens
tgtcatagaaactcacatgagacaaatgcgctcagcttcaattgaggcagtaatgaaccaggaaaaaagaagcag

SEQ ID NO: 236279 - DNA, 51 bp, Homo sapiens
ctggcccggaaacaggaggacgagcttactccacgggaacagcctctagat

SEQ ID NO: 236280 - DNA, 100 bp, Homo sapiens
cacaagaacatgtctgtacacctgtccccctgcttcagcagcagtgttgtactgctacttctataaacggacagccgtaagactaggcgatcctcacttc

SEQ ID NO: 236281 - DNA, 83 bp, Homo sapiens
tgactaccctggttacctcatatcgtgagtgcatctccatccacgttggccaggctggtgtccagattggcaatgcctgctgg

SEQ ID NO: 236282 - DNA, 100 bp, Homo sapiens
tgtcatctccttcatgaaaaagtaccattttgctgcttaagattagacaagccattctgggtacgactcttcttttggaagcaggtggcagaaaaaatcc

SEQ ID NO: 236283 - DNA, 118 bp, Homo sapiens
atagacaaaggagaaaaagggagcttcgcaccttttcattttctgacgatgaaaataaacctccttcaccaaagtcaaacgcttcagagaaccaaagcatgaaagacgtccgtggagg

SEQ ID NO: 236284 - DNA, 100 bp, Homo sapiens
gaacacccgagatctcaggggatttggctgacgcctcacaaacctccacattgtgttatccaagataaattctgtgggattataaacatttcagtagaag

SEQ ID NO: 236285 - DNA, 92 bp, Homo sapiens
tgattgcgttacaagctttgtctccttcgacttggagtctttgtccaggacgaatggcttcctttgggtggaagaggaaaattggtgagaag

SEQ ID NO: 236286 - DNA, 98 bp, Homo sapiens
acctgcccggtgcccgaggaggcagccaagctcgtagcctgccactccgtgcactctcagcgttctcatctctcttccttcaccatgaagctgatgga

SEQ ID NO: 236287 - DNA, 51 bp, Homo sapiens
ggcgaacacgccgcggtcctcgtcgtggtgcagtggctcacacctgtaatc

SEQ ID NO: 236288 - DNA, 100 bp, Homo sapiens
gcgggagtggcacggcgggcgggcgagcgaggggctaacttcagcggtggcaccgggatcggttgccttgagcctggctacatccagaagatcaagtcgg

SEQ ID NO: 236289 - DNA, 74 bp, Homo sapiens
catctcctttgcaggatgttggtctttgatccaggtgaatcgaaacgcatcaccctggtcctccagcagccaca

SEQ ID NO: 236290 - DNA, 100 bp, Homo sapiens
atcagagtggaggaagtacagccagcacttctcacctggggcgggtgggttctgcaccaccctcccaccctccttcctccgtgtggacgatagagccaca

SEQ ID NO: 236291 - DNA, 82 bp, Homo sapiens
cgaatgcgctacttgaacggactcgatcgtttttagaacttcagccataaaaatgggcagaattttccttgatcatatcggt

SEQ ID NO: 236292 - DNA, 100 bp, Homo sapiens
gtgggatcattggctatgtaaaagcaggagttcaaagaaggacgcagagccagccacacagccccacaggtcctctttagccacagggaacctcctctgg

SEQ ID NO: 236293 - DNA, 99 bp, Homo sapiens
cacagtcccctgttccgaggtcaggaggatgcaagtcctgacagattcagcaacactgatctgtgccagttcagaagcaggcgagcctcttccctgatg

SEQ ID NO: 236294 - DNA, 75 bp, Homo sapiens
acaagtatgctgcaagtgagaacatatttaacaggtcgtcaaagtcctacattttagctttcagtgctgaacttc

SEQ ID NO: 236295 - DNA, 82 bp, Homo sapiens
gaagggaaaacagtccagatccccgtgtatgactttgtctcccattcccgactagacgcttgaagcaaagctgccatcccag

SEQ ID NO: 236296 - DNA, 80 bp, Homo sapiens
acatttcaggaaaacagagaaagaagtgataggagggctctgtaggtgagccaccagctgggcagcatcatggacctctt

SEQ ID NO: 236297 - DNA, 100 bp, Homo sapiens
agcgtgggtgaagataggatcaagatggccatgtggcaggtgtaactatgttttcaccaaagaccaacatcaagagtgaggggaaaggatcttcaaggag

SEQ ID NO: 236298 - DNA, 82 bp, Homo sapiens
gcaggacttacggcagtgggggctgacagacaatgcagatcttcgtgaagactctgactggtaagaccatcaccctcgaggt

SEQ ID NO: 236299 - DNA, 50 bp, Homo sapiens
cagggagccaagcgtcctgcccggccgaacaagatcactcaaggtgaagg

SEQ ID NO: 236300 - DNA, 96 bp, Homo sapiens
acaaatgcacgcgacaggaaccagataagtttataccatggatagcacaaaggagaagtgtgacagttacaaagatgatcttctgcttaggatggg

SEQ ID NO: 236301 - DNA, 90 bp, Homo sapiens
tcaaccttttttgataagaagtcgttccaggggtagaggaggcatgaaggatgaccgtcgggacagatactctgcgggcaaaaggggtgg

SEQ ID NO: 236302 - DNA, 75 bp, Homo sapiens
gacaagatacctctcgcatgtccacctcacaggtgacagagttagtccttgataattgcctgtgtgtcaatgggg

SEQ ID NO: 236303 - DNA, 103 bp, Homo sapiens
ggagttcgtctcttacgtctgcggaagtgcagctgcctcagttcttagcgcaggcgtgcaatggaattgagttttgccctggtaaatgggaataatatccgag

SEQ ID NO: 236304 - DNA, 100 bp, Homo sapiens
cattaacattgttcgcaaacgctggaccaagctgactgaaagattcttcaagaatacaccttggcccgaggctgaagccattgctccacaggttggcaat

SEQ ID NO: 236305 - DNA, 74 bp, Homo sapiens
gacaccctgtcgcagcttctgaagatcgagaagaagctggaaccactgtcacaggatgaagaccagcacgcgga

SEQ ID NO: 236306 - DNA, 99 bp, Homo sapiens
cactacgacagtgagaaaggaggactgggcacttggagtcctgcatgccaaaatcattgcagctataacattgatgggtcctcagtggtggttgaaaac

SEQ ID NO: 236307 - DNA, 75 bp, Homo sapiens
tggggaaccacacagccagagaggcattgggatcccgtggcagttgcagcactgaagtggagaaggagacccagg

SEQ ID NO: 236308 - DNA, 100 bp, Homo sapiens
cttacgcacttaaaataattgggcagaagagaagcagtgaaggagtgcagaggcatcacctgaaagcacctggctgcagtggaagaaagaaagatcaagt

SEQ ID NO: 236309 - DNA, 50 bp, Homo sapiens
cttctgctctcagtgtcccggacttcaggaccggaagctcaccaagctgg

SEQ ID NO: 236310 - DNA, 74 bp, Homo sapiens
tcctgggctgcatgggctctatcaaggaaaacaagtgtctgcttatgtcggcatttgcaagtaaaatcactggc

SEQ ID NO: 236311 - DNA, 100 bp, Homo sapiens
atgcccgggccggagtgagtgcgcgcgggcgaaaatggcgtacatccagggaactgctcgcagaaagaagaaggtggttcatagaacagccacagcagat

SEQ ID NO: 236312 - DNA, 100 bp, Homo sapiens
tgcatttgtgacatccccacccctgagccctgacccaactactccggactacatcaactccttgctggccagcgtcgtctcggagatgcagccaagaaag

SEQ ID NO: 236313 - DNA, 98 bp, Homo sapiens
atagttgattactgccttctgctgcagcgaaaatggttcacaggcaccagccagaccccctaaaccacgaccgcgcaggactgcaccagaaattcacc

SEQ ID NO: 236314 - DNA, 75 bp, Homo sapiens
gttcaactttgtcctctctcaggtattctctactgccgctgatggtcaaacgcaagtggaaattaaagtgtgtca

SEQ ID NO: 236315 - DNA, 83 bp, Homo sapiens
gttccttagaaaggagcagcaggttttaaaatcaaagatgggaaaatcggagaaaattgcccttccccatggccagcttgttc

SEQ ID NO: 236316 - DNA, 75 bp, Homo sapiens
ccagtgctcatggtcaccggcttcgtcttcatccagggcatcgagtgtgaacatggctacgcctcttcattcccg

SEQ ID NO: 236317 - DNA, 121 bp, Homo sapiens
ggaagtgtcttggcaagttatggcaatgtgatcgtcatcacagtcaactatcgacttggagtactcgatcttcaagcactccacatgttgcctcagacagttgactggtcatcttttcctc

SEQ ID NO: 236318 - DNA, 101 bp, Homo sapiens
tctagacttccccaaggcgtgtacccaggtactccaaagattcaggtttactcacgtcatccagcagagaatggaaagtcaaatttcctgaattgctatgt

SEQ ID NO: 236319 - DNA, 100 bp, Homo sapiens
gtgctcggatggctcgggccaggccaccggacagccagagactgctgctactttgaaacgtacgatagaggccctgatggacagaggagcaatagtgagg

SEQ ID NO: 236320 - DNA, 82 bp, Homo sapiens
gacagtcctcgtcagcactgactttcagctatggaatcggaactctgcgaccttcaagtcgtttgaggaccgagttgggacc

SEQ ID NO: 236321 - DNA, 82 bp, Homo sapiens
ggaggaatcccgcaaccgaagcacaaaagttatcaaacccggtggaccatatgtagatattacagtgacagagagaaacaca

SEQ ID NO: 236322 - DNA, 73 bp, Homo sapiens
ggacgcgcccgggacgcgcggcggcaccgggaggccgggccgagcgaatatgcttttaaggctattaaccagg

SEQ ID NO: 236323 - DNA, 82 bp, Homo sapiens
ctagatctttctgacaacaaactcgaagactggcatgagcaaaggaaggagtctgaaactcagtgtcaaactgaaaataaat

SEQ ID NO: 236324 - DNA, 50 bp, Homo sapiens
tgatttctgcatttccaactgaggggctgctggagtcctctgcagagaag

SEQ ID NO: 236325 - DNA, 83 bp, Homo sapiens
tctaccttctggaagctactactacgtggtgcttggaaagagtgaagacatttccacctggacacctgaccatgtgcctgccc

SEQ ID NO: 236326 - DNA, 100 bp, Homo sapiens
ggagaagatattggccgacaaggaagtgaagaaggcgcatcactcccagctgcgcaaagcttgcgaggtggcgttagatagaagaatttcgaaggctgag

SEQ ID NO: 236327 - DNA, 96 bp, Homo sapiens
gtggagcgagctgtgtctgacaccaagaaagcagtgaaatatcagagcaaggcccggagggaggctgagttagctgcccgaatcctcctggaccag

SEQ ID NO: 236328 - DNA, 101 bp, Homo sapiens
caccttgaagaggaagacggggcggaagaccaagatcatcgagatgtgcttttttaggaccaaaggatatatttccttactcagaaaataaggaaaagtat

SEQ ID NO: 236329 - DNA, 88 bp, Homo sapiens
gcgccccggatgtggcgcggctgcgcgaggagcaggaaaagacctcagaatatattattcaagcttacaaatatggtgcatttgagaa

SEQ ID NO: 236330 - DNA, 96 bp, Homo sapiens
ctggactcatggaggctgagcatttattcaggattactacagcatcccatttcccacacccactactccgctgactgggagggatggtagcctggc

SEQ ID NO: 236331 - DNA, 80 bp, Homo sapiens
gcagcgtgcgttcagccctggggaatgggccttgacgaaggagaagtcggtgaagcacatggatttgtgccttactgtgg

SEQ ID NO: 236332 - DNA, 100 bp, Homo sapiens
ttcgaattaccgtggttgatgatgcagacactgttgaactctgtggtgcgcttaaggttcgagaacttgtcttggacaattgcaaatcaaatgatggaaa

SEQ ID NO: 236333 - DNA, 75 bp, Homo sapiens
ggctgggaaggaaaaacagaatcagctgttccctgcgaaaggaatgaatctgaagtctgctgcagtaaaacacag

SEQ ID NO: 236334 - DNA, 50 bp, Homo sapiens
ggcccgccgggcccgcagtgtgtcctcatcaccgggggcatcgtggccac

SEQ ID NO: 236335 - DNA, 100 bp, Homo sapiens
ccctgctcttcctcctccctcagctccgagtcatcgcgtctctccacagagccatccagcgagacagcacccaagaaaacctcatttggctcgctgaagg

SEQ ID NO: 236336 - DNA, 75 bp, Homo sapiens
cttccctcgggaattccacctctgcgtttttccctccaggctttcagtccagtgtaaagctgttggagcgcggga

SEQ ID NO: 236337 - DNA, 100 bp, Homo sapiens
aattcagtgcagtaggatactgaaactgacattatttgctttccgcttggccctcatccagcttcagatttcttccatcaaatcagataacgtcactcgc

SEQ ID NO: 236338 - DNA, 100 bp, Homo sapiens
agtatatcaatgtggattgtgcaaaattaaaacgactcctgaagggctcagaaatacagctcttcatgaagcaactctgcttggccttgcaggaagagag

SEQ ID NO: 236339 - DNA, 99 bp, Homo sapiens
aggtgctctggagctggatggtgaactgggagtgtccactcgccttccaccagcatggcaacgtcttcacagtaccgccagctgctcagtgactacggg

SEQ ID NO: 236340 - DNA, 96 bp, Homo sapiens
ctggcctcagccggatttcccagccaaacgcagagagagatgccctggaccatcttgctctttgcagctggctccaaacaggcatgcgaggtgcct

SEQ ID NO: 236341 - DNA, 75 bp, Homo sapiens
ataagagcctggtgagacggagctatcggcgccgcggcaagagccagacttcaagccccattgaggtggcccgcc

SEQ ID NO: 236342 - DNA, 90 bp, Homo sapiens
caaagaatgaatcaaaccttggggacctcttactgggctttcttaaatattatgctacagaatttgagtgccaatgaactggctgtgcag

SEQ ID NO: 236343 - DNA, 96 bp, Homo sapiens
gcttcatcctcggcggcggtggccgctagctccaaggaagatcacctcagccagttctcagacacttaggggacatgttctctgcaggaccactct

SEQ ID NO: 236344 - DNA, 51 bp, Homo sapiens
aggagttgtcacccactgaaggaaggaatagctattcagtcagacagaacc

SEQ ID NO: 236345 - DNA, 100 bp, Homo sapiens
tctgtgggagacgaagaaggcagaaggagccacttgcggtccagcacagagctccatccagacctgctcacagattgcctcaccgtgcagtccctgcagc

SEQ ID NO: 236346 - DNA, 90 bp, Homo sapiens
tgggggattcgcagggaggatgtcgggacaccccggaagctgggaaatgggatccacaaatgctaaagagctgtcttccaagggagtgaa

SEQ ID NO: 236347 - DNA, 75 bp, Homo sapiens
ccaggcaatgctggatagataccgaattcttatcacaaaggggcttcacaaaggtcagagttcacattcggcagg

SEQ ID NO: 236348 - DNA, 96 bp, Homo sapiens
ccgggggcaaggccaaaaagaagtctacaggtgtatccagcagctccaaagagacagcaaccagcaagaatgggccatagtgacgatggtggtttt

SEQ ID NO: 236349 - DNA, 98 bp, Homo sapiens
ttgacctcttcgatgtgcgagactttggaaaggactcagtctcctttgaggatgtggccgtgaacttcaccctggaggagtgggctttgctggattct

SEQ ID NO: 236350 - DNA, 75 bp, Homo sapiens
tgattgcctccagtggagatatcatcaaggaccctgatgcttggtgtgacctgagtaaatttgacctccctgagg

SEQ ID NO: 236351 - DNA, 50 bp, Homo sapiens
ggaaggctatggctttgggtcaggagaggagagccagagaagtgacaggg

SEQ ID NO: 236352 - DNA, 100 bp, Homo sapiens
ggagaaccgagaccgacttctttctctttaccctcattggcgcttctctcctgcagtccgcctctgggccctgccgacccgctatcccatattggagaat

SEQ ID NO: 236353 - DNA, 83 bp, Homo sapiens
aataccactatcttcctgaagtatgggagttttgtggttcatgatataccttctggatcttatgtagtggaagttgtatctcc

SEQ ID NO: 236354 - DNA, 100 bp, Homo sapiens
agggaaggaaatcatgtcaagcgaagccttgaaaaagctgccctgagacggtgtcccgccgaaaggcatgttatgttacccagagaactttccaaacaag

SEQ ID NO: 236355 - DNA, 75 bp, Homo sapiens
acaccactgaagcattgccaagattcacaatgacatcctttcaagaagtcccattgcagacttccaactttgccc

SEQ ID NO: 236356 - DNA, 75 bp, Homo sapiens
tctaaacttggcaccaagtatgatgaagattatggaagagattcgggccctcccactaagaaaattcgatcatct

SEQ ID NO: 236357 - DNA, 90 bp, Homo sapiens
gcaccccttcctggtcaatctgtggtctcaccaacggctttgggggtgcgaggagcgagcaggagccgggcggcggcctggggaggaagg

SEQ ID NO: 236358 - DNA, 76 bp, Homo sapiens
gcatctctctccaacctgcattctgctacagaagaagtttccaaaaatctggttgccatgaaagaaattctgtatg

SEQ ID NO: 236359 - DNA, 50 bp, Homo sapiens
ttccatcggaatatgtaccgactggaaatgcaataccttatttccagatg

SEQ ID NO: 236360 - DNA, 109 bp, Homo sapiens
gacgaagacatgacacttacaagatggacagggatgataattgggcctccaagagtttattgttggccaaaaccaggctttgattgaaccaggatgaatgcgggtgttg

SEQ ID NO: 236361 - DNA, 88 bp, Homo sapiens
caagtcatggctattaagagtcgtgtggtgctgccctaccttgtgcccaagcaaacggaaggcttccggaagcgctggttcaccatgg

SEQ ID NO: 236362 - DNA, 74 bp, Homo sapiens
agacatgatgcaaggaggcgtgtacggctcaggtggagaaagcaattaccagctctggctgggtcgccacaact

SEQ ID NO: 236363 - DNA, 100 bp, Homo sapiens
ggtcagacgaacgtggggcaggatggacggcaagatttacagctgttggaggatggtgatctgactgtgataggagatcggggaaccacgctgagtggag

SEQ ID NO: 236364 - DNA, 90 bp, Homo sapiens
gaccaacaccagaagaactagaacaacgcaatatattgcaacgagcaggaaaggacaaggagtccccgaagctgacactgagttcatggg

SEQ ID NO: 236365 - DNA, 75 bp, Homo sapiens
cgagccggggcgaagctggatcccctagattcacagaagtcttcaggagcaaacacaagcaaagacagaccacat

SEQ ID NO: 236366 - DNA, 98 bp, Homo sapiens
cggccatggcgacgggcggccagcagaaggagaacacgctgcttcacctcttcgccggcgggcttggcttggactcatcgtcaacagcagcagcatca

SEQ ID NO: 236367 - DNA, 96 bp, Homo sapiens
ccagaaactacaggctgaaaagcatgacgtaccaaacaggcacgagataaggattttcagtcaatgcatcatcggagcgactcaacatgggtgaaa

SEQ ID NO: 236368 - DNA, 101 bp, Homo sapiens
cggcccacgcgcagcgacagggagagacaatgcagatcttcgtgaagactctgactggtaagaccatcaccctcgaggttgagcccagtgacaccatcgag

SEQ ID NO: 236369 - DNA, 99 bp, Homo sapiens
ccattccagcactggactcatggaggctgagcatttattcaggtcacacagcggcagtgataaagagcacagggatgtggagagatctcaagaacaaga

SEQ ID NO: 236370 - DNA, 100 bp, Homo sapiens
gagcgagtcaggaacagccacgctgaaagctcggccaagagtccggcccctgctgaccttccttccgctgttaacttaccaagactggttacacctggag

SEQ ID NO: 236371 - DNA, 125 bp, Homo sapiens
tgtcccctcatgtgggtgagctgtcaaaccttactcatctggagctcattgcttcttggacacttaatgattgttggcaagaaatgtgctgctgatctgggcctgaataagggttatcgaatggt

SEQ ID NO: 236372 - DNA, 75 bp, Homo sapiens
acttacgtgtactttaccaacgagctgaagcaggaccccgcagggatctttgaattggtggaacttgttggaaat

SEQ ID NO: 236373 - DNA, 74 bp, Homo sapiens
aattggtcattctcgctaacaactgcccagctttgagggttacttgattagctgtgtttggaactgctaccgat

SEQ ID NO: 236374 - DNA, 100 bp, Homo sapiens
ggagattctaagtccatcatcacgtgtcgggtgtcccttctggatggtactgatgttagtgtggacttgccagtatgccttgcaatagctcattattccc

SEQ ID NO: 236375 - DNA, 100 bp, Homo sapiens
aacaactggaaactgttttggatgatcttgaccccgaggtggtcacgggctcgggccgccaggaggcccagaagacggacgcggagtaccgcaagctctt

SEQ ID NO: 236376 - DNA, 83 bp, Homo sapiens
cgcagagcgcgggaggcggcggcggcgcggagcccaggcgccatgtcagaaccggctggggatgtccgtcagaacccatgcgg

SEQ ID NO: 236377 - DNA, 75 bp, Homo sapiens
aacggcagggcagccagcccgcacctgtcaggattcaggagcagttccagaaaaatcccgacagttacaatggtg

SEQ ID NO: 236378 - DNA, 74 bp, Homo sapiens
atgtttccatctcttcagagatgaaccaggaaaaggccaaagttgttgagcccctggactatgagaatgttatt

SEQ ID NO: 236379 - DNA, 100 bp, Homo sapiens
cgaatatcgtcatcgttagaaggtcgtaatgggaactggcatttcagctgggtttaacttgaaagaatcatacaatgtggatgtcgttggaacacttcct

SEQ ID NO: 236380 - DNA, 98 bp, Homo sapiens
gctgcacccacgaatctgcccacccctcctgtaacccagcctgtttcacttcttgcgggctacattgagagacctcagctgattcgagcaaaagtgcc

SEQ ID NO: 236381 - DNA, 98 bp, Homo sapiens
gccacgtgcatgaaccaaacccacttcgttcaagacaggtgtttaagcgaccaggactaaaacctccagaggaacggacaatagaatacctagaagaa

SEQ ID NO: 236382 - DNA, 100 bp, Homo sapiens
cgcacggactgctggagatggtggagtccgtcatggcctggtttgctttcgaccctggctcggcgcactcggacatcatcctctccaatgacaacctgac

SEQ ID NO: 236383 - DNA, 100 bp, Homo sapiens
tccggaagttcctggtccacaacgtcaaggagctggaagtgctgctgatgtgcaacaaaaatcaaccagactattatgaagtggtttctcagcccattga

SEQ ID NO: 236384 - DNA, 75 bp, Homo sapiens
tgaagagctatggtgaaacaccactgaagcattgccaaggtaagaatgattgatgttggctgatattggagtgct

SEQ ID NO: 236385 - DNA, 82 bp, Homo sapiens
gcctcgcctcgggacccgcggtccccgctcttgctggagctgacatggacccaaatcctcgggccgccctggagcgccagca

SEQ ID NO: 236386 - DNA, 74 bp, Homo sapiens
acgctatgagagatacagtggcaatcaggttctcttttgagtcactggaactggaggacccgtcttctgggctg

SEQ ID NO: 236387 - DNA, 100 bp, Homo sapiens
ctgggccatggaactggcggacgtgggggcggcagccagctcgcaggtttccacgggctcccttgctcagcagtatgcgcaccctaacgctaccctgcac

SEQ ID NO: 236388 - DNA, 75 bp, Homo sapiens
gaccctcacggagctgggcgacgagctgaccctgggagacatcgacgccctgggcgctgcctatggcacagccaa

SEQ ID NO: 236389 - DNA, 82 bp, Homo sapiens
cggacgaggaggacgcgcccgccaccgacatctactttggaaatgatggcgggaacacagcaaaggagaccatgtcctggag

SEQ ID NO: 236390 - DNA, 97 bp, Homo sapiens
gaaatgttgacgcccctggggagattggacaagtatgctgcaagtgagaacatatttaacaggaaaattctgtttgaagatttccggtcctggcttt

SEQ ID NO: 236391 - DNA, 99 bp, Homo sapiens
tacaccttgcttctgtagaccagctccaacaggattccatggtagctgggatgttagggctcaggacttgcaattgtgaccaaatatattacaaagggc

SEQ ID NO: 236392 - DNA, 75 bp, Homo sapiens
cctctggccgagctgcaaccgcctccgcctattacagaggaagagagaagggcacagttacctaagtatcaacgt

SEQ ID NO: 236393 - DNA, 100 bp, Homo sapiens
gagcctcagagagggatgggttacatgcccaagaggggacttgatgttaacaaatgtgagattgccagagacaccacccacttggagattgaacccttca

SEQ ID NO: 236394 - DNA, 51 bp, Homo sapiens
ctaccgcaactctcagttcgagagtaaagaagaagttggattccatgggtt

SEQ ID NO: 236395 - DNA, 75 bp, Homo sapiens
ttatgaatatctgtgccacttagaggaagccaaaagatgaccctgatgatctgcaatgtaagcggggagaacatg

SEQ ID NO: 236396 - DNA, 75 bp, Homo sapiens
cctgccgtctgctcttctgcctcttgatctccgccaccgtcttcaggccagcacttaaatatagatccggtggta

SEQ ID NO: 236397 - DNA, 74 bp, Homo sapiens
gccccttgttcagcatgtgccacattatcagtctcagcctcgagtttggaagaaaacaaggcagtagtaaggag

SEQ ID NO: 236398 - DNA, 88 bp, Homo sapiens
tttgaccccatcatgtcgcggggctccatcgagattcccctccgggacactgacgagcttcttacagtacatttctagtgaagtaaac

SEQ ID NO: 236399 - DNA, 51 bp, Homo sapiens
catggtcagtgcacgcacagcgccagggtgagaactctgtctcagtcgacg

SEQ ID NO: 236400 - DNA, 100 bp, Homo sapiens
aggcgagctcgcgatgagtggtctcggcaggctcttcgggaaggactctggacattaatgtgaaggccccagccctgatgacaaaggcagtggtgccaga

SEQ ID NO: 236401 - DNA, 83 bp, Homo sapiens
atttgttaaggattccaagtaactcttatttgtgatgctattgctgagattagagccatttgtattgaagaaattggagtatg

SEQ ID NO: 236402 - DNA, 100 bp, Homo sapiens
tcagatgaaagtgggaacatggattttgacaacttcatcagctgcttggtcaggctggacgccatgttccataagaccatcatcatgtggaaactgacca

SEQ ID NO: 236403 - DNA, 83 bp, Homo sapiens
atggcaagggagcattccaggagagaaaggacggggaggtttactgcatcgacgcgcggttctacgggaacgtcagccggttc

SEQ ID NO: 236404 - DNA, 75 bp, Homo sapiens
cgcaaacttgacactcaccctgaccgggccatcgatgcacccctcggagctaatagcggagatgagaaacagtgg

SEQ ID NO: 236405 - DNA, 98 bp, Homo sapiens
ggtgatggagggcttctacgtcatcttcgacagagcccagaagagggtgggcttcgcagcgagcccctgtgcagggtatcgaggcaccaagccagatt

SEQ ID NO: 236406 - DNA, 48 bp, Homo sapiens
cagtgccacccaaggagaagaaggtggatctccttacgtagcagccaa

SEQ ID NO: 236407 - DNA, 90 bp, Homo sapiens
cagacaaagaaagttcgaaaagttcctccaggtttgccatcttcaatcctgataacttaagtgactctctcttttccggtgatgaagaaa

SEQ ID NO: 236408 - DNA, 83 bp, Homo sapiens
gaaattatgggaagagatgttcaaggtacaggtttgcagattccgccagcagcacagcaagctctacagatgagtggctcttt

SEQ ID NO: 236409 - DNA, 100 bp, Homo sapiens
gggaatgccacagcatcctccagcacctcaggtattctctactgccgctgatggtcaaacgcaagtggaaattaaagtgtgtcagggtgaaagagagatg

SEQ ID NO: 236410 - DNA, 80 bp, Homo sapiens
tgctacagcatcccacattaagtcaacgctgatcttgcatctttaatggataaaacatttgagagaaagttgcctgttag

SEQ ID NO: 236411 - DNA, 97 bp, Homo sapiens
gccaccggctccctcgggagctcatcttcgtggggcgtgaggagtgtgagctcatgctacaggatgataatgaagataattcaaatgatgggaccca

SEQ ID NO: 236412 - DNA, 75 bp, Homo sapiens
aacaattcaaggggagctgggctggatctcttatccatcacatgggattgagaggatccagaatccagatctctg

SEQ ID NO: 236413 - DNA, 75 bp, Homo sapiens
aacccaaactggctcctagtttctctgatgcacagaccggagttctgggaaatcgttcattcatttacagatgaa

SEQ ID NO: 236414 - DNA, 75 bp, Homo sapiens
agctgagggccgtgcgggcccaccttgaacaagagttcaaggaggccttctccctctttgacaaggatggagatg

SEQ ID NO: 236415 - DNA, 75 bp, Homo sapiens
gtctatgtggcgcccggcataggtcccgtcaggaagcccaagtatgtggaaagccccagagtgcctggagatgca

SEQ ID NO: 236416 - DNA, 74 bp, Homo sapiens
ttaaattgacaacaatggccatgtatccaactaaagatgactcagagccatctggagaagaaacagtagaaagg

SEQ ID NO: 236417 - DNA, 100 bp, Homo sapiens
cagagctgcaggacctagaagatgccattcatcaccaccagggaatatatgaacatatcactcttgcttattctgagcacttcagaatccagaggtggtg

SEQ ID NO: 236418 - DNA, 89 bp, Homo sapiens
gcactggcaggggccgcgctctgctgcttcctcgtcctagtgatccacgcgcagttcctcaaagaaggcaagaaggttcagtttcggaa

SEQ ID NO: 236419 - DNA, 147 bp, Homo sapiens
ggacttggaacaaaaggacttgtacagagatgtcatgttggagaactacagcaacttggtctcactggcccatgatgatgccatttggtcagttgcttgggggacaaacaagaaggaaaactctgagacagtggtcacaggctccct

SEQ ID NO: 236420 - DNA, 100 bp, Homo sapiens
gaactaattgactctctgggttctaaccccttcttaacaaggaatcagattccccgtactccagaaaacttgaaacacggctctagataaggaggggcag

SEQ ID NO: 236421 - DNA, 100 bp, Homo sapiens
gaataagcttcgacacctctcagttgtcaccctggctgctaaagtaaagccagtaagaatttcagttgtgggcctccagtcttctggaatgtcttcactg

SEQ ID NO: 236422 - DNA, 100 bp, Homo sapiens
ttagaaaacacttttgcaaagatcagactttgtggttggcctctccatcctgctgcggggcacagtccacgagaagctcaagtgggcctttaatctctac

SEQ ID NO: 236423 - DNA, 100 bp, Homo sapiens
aattctataaaagcatgaaaatttatgtggaaaatttaattgactgccttaatgaaaaggtggacattgaagtggacctaattcggttttccttttaaaa

SEQ ID NO: 236424 - DNA, 51 bp, Homo sapiens
gacctcttccactccgaggaaatcaaggacttgtttacactgggcatgtaa

SEQ ID NO: 236425 - DNA, 98 bp, Homo sapiens
gatcggttcctccaggagaagttagcttcagagttctttgtggatggacttgattctgatgagagaatgtccagtgctaggagactcataagttggag

SEQ ID NO: 236426 - DNA, 87 bp, Homo sapiens
gtgtccagcatgggagagtacatgagacgatgaagcaaaggatgataatgaagataattcaaatgatgggacccagccatccaaaag

SEQ ID NO: 236427 - DNA, 75 bp, Homo sapiens
ggaaagagaggcttttgcagagtcactcaggacaagcttgaagaataactgaagtgaagtgatggactccgattt

SEQ ID NO: 236428 - DNA, 100 bp, Homo sapiens
agacacggcaagctggtgattaacaaagacctcgcggaggaagatctggtaccaaaggagaatttggagagctggctaaattatttgaagaaagaattgc

SEQ ID NO: 236429 - DNA, 100 bp, Homo sapiens
tggaccagggagccctacagcgtctcttcaaaaagggcagcaaggcgaaccccatccctactcactggagctcagctttgatttttaacctcccttcccc

SEQ ID NO: 236430 - DNA, 50 bp, Homo sapiens
gccggtctctgttccgcaggatgtgttgggcaaccattccaaggggctta

SEQ ID NO: 236431 - DNA, 100 bp, Homo sapiens
cagatgggatctttccggatcaatccagatggcagccagtcagtggtggaggatatttctacccagctctcagacattttggacaatgtcaattgtgtca

SEQ ID NO: 236432 - DNA, 100 bp, Homo sapiens
catccacaaagtgtatgaagcggtggagctgctcaagtcaaaccatttttacagaaaaccatgagctgttttccaagagcttcatctccatggaagtgcc

SEQ ID NO: 236433 - DNA, 87 bp, Homo sapiens
accacaacaatgaagagaaaaataggctgccagcaaacagtcttccgcaggaaggagatgtgtctctagtgatccctgaaaagttcc

SEQ ID NO: 236434 - DNA, 100 bp, Homo sapiens
caagggaaacctcgtgaaggagtccggcactgaacaccaccggggcccgtccacctcccgcaggaggagcctgatctggttagtgcaatttatggccgag

SEQ ID NO: 236435 - DNA, 100 bp, Homo sapiens
taaaacccagtgcgtacgcattgctacaaaaggacatgtctcaggaaggctatggaactagatctcaacctcctctggcccccggaaaacctaaccatga

SEQ ID NO: 236436 - DNA, 110 bp, Homo sapiens
ctggacgaggacgaggacgacctggaggtgttcagcaagattcagaatggacagtttagaagaacctcagaaaaaagtctttaaggctcgaaaaacgatgagagtgagtg

SEQ ID NO: 236437 - DNA, 80 bp, Homo sapiens
gcagcgcgtcgtggggcgagcggcaggttagagcagccagcgggtacagaatggattttggaagagggagtcaccactgg

SEQ ID NO: 236438 - DNA, 79 bp, Homo sapiens
cctcattctgcacgacgatgaggtgacagtcacgaagatggctgtgccacccacgtatgccgatcttggcaaatctgcc

SEQ ID NO: 236439 - DNA, 98 bp, Homo sapiens
ccagactgggtggacgctgaggaatgccaccgctgcagggtgcagttcggggtgatgacccgtaagcacttgacccctgacaagatctaccacgtcac

SEQ ID NO: 236440 - DNA, 96 bp, Homo sapiens
ctgagcttcaaaaggggggacatcctcaagcccgtggaagccaccgatgatgccttttgggaccagttctgggcagacacagccacctcggtgcag

SEQ ID NO: 236441 - DNA, 75 bp, Homo sapiens
cagctttggcaataaaaaggaaaagaacagaggccttagaacaagaaccttattttggggagtaaagtcaattgg

SEQ ID NO: 236442 - DNA, 74 bp, Homo sapiens
gaaactcgaggagctaaaagcgaaggccgcggggaaggggcccttggagcaagcaccagaagcaccaggctttt

SEQ ID NO: 236443 - DNA, 50 bp, Homo sapiens
agtgctggtgaatcatttcaagagtcaggtcaattcagtgaagatatgat

SEQ ID NO: 236444 - DNA, 100 bp, Homo sapiens
ctgactacctgctgtacaccctcaacaaacaccagcgctttgggaaacatgccctgaactgtcacagaatgaaaccagcgctcttcagcgtcctgtgtga

SEQ ID NO: 236445 - DNA, 101 bp, Homo sapiens
tccttttccatcaacaggggcaaatcgaagtagagagcgaaaccatcttcaagttagcagcgtttattttacagtggatgtaaagctggatcccgccacgg

SEQ ID NO: 236446 - DNA, 78 bp, Homo sapiens
atgaggtgcttggttcaggccagtttggcatcgtttatggagagcatgtgattgcgaccagcagattgatagctgtac

SEQ ID NO: 236447 - DNA, 100 bp, Homo sapiens
taatgacctcaggtttgtcggtcgaagtggaagaggcatgttatgttacccagagaactttccaaacaagtacctaaaactcatctgatgtctgaagagg

SEQ ID NO: 236448 - DNA, 101 bp, Homo sapiens
gaggatcccgtgcacgagtgtggcacccagcctggtccgggttttctgttccccagagccacctgccaagacctctaccccagaagacttcatccgaatga

SEQ ID NO: 236449 - DNA, 98 bp, Homo sapiens
ggctccggaggcttggtgactccagtggcccagacctcctgccccccgaggtctgcagtctcctgaacccagcagccatctacgccaacaacgagatc

SEQ ID NO: 236450 - DNA, 75 bp, Homo sapiens
ggatcctgctccacagagaatgctctgcacccgttgatgatctcatctggccaccgcgttctggaagaggcgaga

SEQ ID NO: 236451 - DNA, 73 bp, Homo sapiens
tattattgtaaggagtgcaccatccaggagaaggacgaggaagaagccagacgacagtcaggagctcagtatg

SEQ ID NO: 236452 - DNA, 99 bp, Homo sapiens
atttgagtttgacttctatctgtgcagccacgcaggcatccaggtggtgatctttgtgaagtctgtgcagcggtgcattgccttggcccagctactagt

SEQ ID NO: 236453 - DNA, 100 bp, Homo sapiens
tgttcccgcgtttctggtcctcatcagtcagatatataaactctcttcacaagaagaaagtattgggacattattggatgctatcatttgtagaatgtca

SEQ ID NO: 236454 - DNA, 50 bp, Homo sapiens
aaatgctttcagcaacttccctatagaccggccaggcctcatgaacgttc

SEQ ID NO: 236455 - DNA, 88 bp, Homo sapiens
attatttacaatgctaccctgctttttctggtgtcctgaacctggaagttgtgctttttaaggtctggaagctccgagtttatcttgg

SEQ ID NO: 236456 - DNA, 100 bp, Homo sapiens
ggcaaggtgattttatcaaatgtgtggaacagaaggaatttagtggttatgttcaacaagtaaaatatgcaatgacaagaataaaagctgccatgccaag

SEQ ID NO: 236457 - DNA, 90 bp, Homo sapiens
caactgtttatctctgctctgaacaggttgtttacattcagagctctatcaataagaggaatacatattacagtgaattcgacaaccgca

SEQ ID NO: 236458 - DNA, 100 bp, Homo sapiens
ggaaaagtgaacttttcgaggcatttgacttgtttgatgttcgtgactttggaaagttgatttggagcatatgcgaacaataaaacctgaaaaacactta

SEQ ID NO: 236459 - DNA, 75 bp, Homo sapiens
cagctgtatagcatcttcactgtaaaggagcgggacgaccctgggacagtctccactggggcagatccagctgac

SEQ ID NO: 236460 - DNA, 100 bp, Homo sapiens
catttacttaacacatcatgaaggctagtttggatgtggaggggaatagactccatctatccatatgagacaccactcaccaacagcgaggagtccctgg

SEQ ID NO: 236461 - DNA, 98 bp, Homo sapiens
aagaaaatcacagcctttgtacccaatgacggttgcttgaactttattgaggccaaagatgaagaggaagcctttctggattggagtgatgatgatga

SEQ ID NO: 236462 - DNA, 97 bp, Homo sapiens
tttaaggaatccctctcattttgacaaggaaagcaaaagcccagagagatcacacaactatttagaaaggtgtccctggccagtgtccttccacctg

SEQ ID NO: 236463 - DNA, 88 bp, Homo sapiens
ctgccatcagctgagcaagtccaccaacagtttctgtgtcccacttcatctttaataaggaagatgagaagtttttgtctgaagtttt

SEQ ID NO: 236464 - DNA, 74 bp, Homo sapiens
agtagtgtttgggaagaaaaacagaggagttctattaagacgaactcctctttcctaaaatggagtcgagtaaa

SEQ ID NO: 236465 - DNA, 100 bp, Homo sapiens
gaagccccagctgcactacgcgcataagctgtggccatgactactgaagtaggctctgtgtctgaagtgaagaaggactctagccagttaggaacagatg

SEQ ID NO: 236466 - DNA, 100 bp, Homo sapiens
gaagccctcaagggctgaaaataaatagggaagatggagacaccctctgggggtcctctctgagtcaaatccagtggccttgctgagccatggagagaac

SEQ ID NO: 236467 - DNA, 82 bp, Homo sapiens
tctacttcaacccgcaccttgtgttccggaagttccaggttttaaaatcaaagatgggaaaatcggagaaaattgcccttcc

SEQ ID NO: 236468 - DNA, 100 bp, Homo sapiens
cgacattatacaagaaacagcaagcaaatcatttggttttggcagtctgcgggccaggcatcgacatccgcaacgactatcagcagctgaagcgcctgga

SEQ ID NO: 236469 - DNA, 80 bp, Homo sapiens
tgatgccagaggtcaacaaggttctggacaagatgaagtctttctgccaggaaaggacttagaagccttacaaatacatc

SEQ ID NO: 236470 - DNA, 100 bp, Homo sapiens
acagggattcagtggctgaggagctgggatctagcaattgggaggcagcagacttgggtaatgaagagagaaaacaaaagttcttgagacttatgggtgc

SEQ ID NO: 236471 - DNA, 90 bp, Homo sapiens
cccaccacgagcgcctcttcaagccaggctccaagtagcctgtataccagcacggccagttccatgccattgcagtgtcaactaggcctc

SEQ ID NO: 236472 - DNA, 100 bp, Homo sapiens
tgatatttgcctttagtgcactcttctccttcacagtaaagtggctgaaactctataaaacaggtcgggagatgcaggagaggatcatggacctgcttgt

SEQ ID NO: 236473 - DNA, 100 bp, Homo sapiens
ggcttatgagtggaacatggctagcaggaatgcttactgttgcgtggttcgttattaacaggatctagtgaaaagccatttgatgtatgcggtcagagaa

SEQ ID NO: 236474 - DNA, 74 bp, Homo sapiens
atacgtttagcttcaaaaatgacaagttcgataaaagtgtgcagaccaagactgcttttcaggaagccttggac

SEQ ID NO: 236475 - DNA, 80 bp, Homo sapiens
aactacatgtaaaattaatgcagttcccgatgagctttgatccaaaccttctccacaacaatggacataatgggtaccct

SEQ ID NO: 236476 - DNA, 75 bp, Homo sapiens
ggacagtgcggctactcttgatcctctccggctgcttggtctacggcacaggcgtaggttcctttctcctgtact

SEQ ID NO: 236477 - DNA, 100 bp, Homo sapiens
aggaggaggaagagtccagtgaaggctccagcaggagaagacagacacggtccgctgcatcaagtcctgccgccccaacgatgtcacatgcgtgttcgac

SEQ ID NO: 236478 - DNA, 90 bp, Homo sapiens
gaagctctgagagaatggctgtggaagtccaatatcagatggaaatgatgcggagccttcgccatgtaaacattgatcatcttcacgtgg

SEQ ID NO: 236479 - DNA, 75 bp, Homo sapiens
ccgcatcgagcccggcgacatgttgctgcagcatcacagcttctacgacttcatcgtcaccaaggcacgggggaa

SEQ ID NO: 236480 - DNA, 100 bp, Homo sapiens
tccaaagcctcttacagcctggggagtgcgagagaaacccagccgaagcatttaaaaggaactgtggctgcaccatctgtcttcatcttcccgccatctg

SEQ ID NO: 236481 - DNA, 74 bp, Homo sapiens
acttcaagaatgaagctgcggaccctcgcgtgtacagtattttctccaaggtacactccgatcggaatgtatac

SEQ ID NO: 236482 - DNA, 98 bp, Homo sapiens
cgcttgttatgttttcatcacttctctccagaagtcagcagataagcagagagccctagaagaaaccaaagcctacaccacccaatccttagcaagtg

SEQ ID NO: 236483 - DNA, 76 bp, Homo sapiens
tcgctcggctgcgggaaatcgggctgaagcgactgagtccgcgatggaggggcactatggcagacaaagttaggag

SEQ ID NO: 236484 - DNA, 98 bp, Homo sapiens
ggtgctggaaaggaatgaggagttacagagggccgagaaggacaggatcagctccaagcgcttggtgaccctggcccggggactttcgcccgcctttc

SEQ ID NO: 236485 - DNA, 101 bp, Homo sapiens
tggagttcagtggtaggatcatggcttactgcagtctggaactcctgggctcaaaccatcctcccacctcagccttatggagtcttgccctgttgcccagg

SEQ ID NO: 236486 - DNA, 82 bp, Homo sapiens
cttggactgagtcctgcaggacacagataaaaatgaatgccatttcccatccagtactgaagtgttaaagttagaagacatt

SEQ ID NO: 236487 - DNA, 98 bp, Homo sapiens
agaagaaaaccaaacagatgtctggactcttttaaatggaagcaaagatgacttcctcatatatgataggttcatttatacagggagcagagaaatcc

SEQ ID NO: 236488 - DNA, 90 bp, Homo sapiens
tggtcaagcagccagtactggtggaatagtctttggccaggaggagatgttaaagtaacccatcttgcaggacgacattgaagattggtc

SEQ ID NO: 236489 - DNA, 96 bp, Homo sapiens
tccatccgagagaagctatgtttagcatcttctgtcatgagaagtggcgatcaaaattggtctgctaccgctgccacggccccccctgctgccccg

SEQ ID NO: 236490 - DNA, 100 bp, Homo sapiens
ggagacgcgggccttcgagcagctcatgaccgacctcaccctgtcgcggaaccaggacaatcctgtgattgatgaaatagacttccttgaagcttttaaa

SEQ ID NO: 236491 - DNA, 128 bp, Homo sapiens
ccatcatcctgctcctgctgctcatcattgccctcatgctctggcggctgcactggcgcaggctcctcagcaaggtggacccaagtggagagattgtggaactggcgaaaggtgcatgtccctggaag

SEQ ID NO: 236492 - DNA, 83 bp, Homo sapiens
ggaggcgctacgccaggaccgacgggaagaaatatggctacacacacctttctgcaggagagctgcttcgtgatgaaaggaag

SEQ ID NO: 236493 - DNA, 100 bp, Homo sapiens
gccggtgctggagaaggcgcggcgcacgcgagcgctgctacagcccggggacttcctcaaaggcttcaagatggagtggacagtgcaatgaaggaagaag

SEQ ID NO: 236494 - DNA, 100 bp, Homo sapiens
tgagaaaagcgagaccgcgtgcgaggaccggtcatcatcagatttgaaatatttaaagtggatacaaaactatttcagcaatgcagacaattaagtgtgt

SEQ ID NO: 236495 - DNA, 49 bp, Homo sapiens
catgcccatgcgagtacctgaggaaggactgtcttattccactcttcgg

SEQ ID NO: 236496 - DNA, 96 bp, Homo sapiens
gcaaagctcaccctcccgagttgaaaaagtatatttgcttacttaaactaccatgttcctcgaacgagacgagaaatcctggagaccctaatcaaa

SEQ ID NO: 236497 - DNA, 100 bp, Homo sapiens
attccaagtaactcttatttgggcatttgacactcttgcaaaagcattgaatcctggagagagcacagcctgccagagctcagtagcgggcatggaagga

SEQ ID NO: 236498 - DNA, 83 bp, Homo sapiens
cctttatgaaccagtgtatcccaactccggaccaaaatttaacagtgccatccgaggaaagattgggttgcctcatagcatca

SEQ ID NO: 236499 - DNA, 100 bp, Homo sapiens
aagagagcagtaccctgatggagtcccttgcagacgagggtgacaatagagtgtggtgtcatgtttgtgagagagaaaacactttcgagtgccagaaccc

SEQ ID NO: 236500 - DNA, 87 bp, Homo sapiens
gacccaggagtttcctgtgtccagcgctgccggagccgcctgagatttctctatgaatcatcatcaagaactctgggagaacttttg

SEQ ID NO: 236501 - DNA, 98 bp, Homo sapiens
ggatgccctgcagtacctgcagaaggtctctggagacatcttcagcagtctcggaaagggagcgacccagacaaagagaagaaaggcctggagagtcg

SEQ ID NO: 236502 - DNA, 100 bp, Homo sapiens
gaaaacaacttcgagggcagaacacctagctgttgggcagaagagggtgcagaaaagaggtcacatcagcgttctgcgtcatgggggagtgctgatcaac

SEQ ID NO: 236503 - DNA, 100 bp, Homo sapiens
tctccgagctcgcctgcatctactcggccctcattctgcacgacgatgaggtgacagtcacggtgtcattccacacatccacaaatctctgattgggaag

SEQ ID NO: 236504 - DNA, 83 bp, Homo sapiens
gctcaaattgtgacatatgatcttctgtcagtcatttgccatcatggaactgcaagtagctccatctactctttgaagcttct

SEQ ID NO: 236505 - DNA, 100 bp, Homo sapiens
aatctacaaattttgctactgtcagatggattgactatggaaaagttgccaaattggttccagcaacagatagaaatgctttaagttcactctggggaaa

SEQ ID NO: 236506 - DNA, 100 bp, Homo sapiens
gggcccagatattacccaacaaccttgtgcaaggtatgaggctgaatatggagagaaggagaaatgagtctctacttggactaataaaagtgaaatataa

SEQ ID NO: 236507 - DNA, 95 bp, Homo sapiens
agacctgtgtcctgttccgcttctccgaggacgccttcaactccacttttatctccaccataggataattttcaggaagacccaatccagatgtc

SEQ ID NO: 236508 - DNA, 82 bp, Homo sapiens
ggaagctggagccacctgcggggctgaagaagatgcagagcagcctgaagctggtggactgtatcatcgaggtccacgatgc

SEQ ID NO: 236509 - DNA, 75 bp, Homo sapiens
atattgcccttcttcccttagaagaactgctgaaccgactctgagaaatttggtgaaaggtgtagcagtcactcg

SEQ ID NO: 236510 - DNA, 101 bp, Homo sapiens
ggagaagagccatggaaacaggaggaagaattcccaagccaaagctttccagtcactcaagactgcttgcaactgattgcagacagtgaaacaccaactat

SEQ ID NO: 236511 - DNA, 82 bp, Homo sapiens
cttagctgtgctcgcgctactctctctttctggcctggaggctatccagcaagctgccagtaactcagattctagccatgaa

SEQ ID NO: 236512 - DNA, 99 bp, Homo sapiens
cgagatctcaagctggagaacatcctcttggatgccaatgggaatatcaaggctctcaccacacacttgttcatgggcgcagcaaagaagagggatcca

SEQ ID NO: 236513 - DNA, 100 bp, Homo sapiens
ctccagcgggcctggactgtgggctggtgtgtggaactgccggagcggttgcagggcacacattactcggtgcagtcggacatctggagcatgggcctgt

SEQ ID NO: 236514 - DNA, 99 bp, Homo sapiens
ggccagcggtccacatggacgtgcggggccctgaagcccccggcgggcgcgcgctgcgggacgcgtcaccgagacttggagccagaatctgagcctcag

SEQ ID NO: 236515 - DNA, 90 bp, Homo sapiens
cagcagtagcggcagccctgaggacgcctggaagctccgaccccaggagccagcccatcaacctgaaccattacgccaccaagaagagcg

SEQ ID NO: 236516 - DNA, 100 bp, Homo sapiens
gaagaacgcttcgcccgttggtgctatgagccgtgtaaagccagtggaatatagtcagatgtacagttatagctacaaccagtattatcagcagtaccag

SEQ ID NO: 236517 - DNA, 82 bp, Homo sapiens
actggccgaatggcagcagtagatgacttgcaatttgaagacatgcacatgatggtgtccaagccagaacagtgggtaaagc

SEQ ID NO: 236518 - DNA, 75 bp, Homo sapiens
cccacagggagcccactccttcatcaacgaggacgagattgaggagctgcgggccgagatgctggagatgcggga

SEQ ID NO: 236519 - DNA, 99 bp, Homo sapiens
ggaactggagcaattgaagctgactactaaggagaataagcttgacaaaagtaagctgaagccaggaacaagagttgctttggatatgactacactaac

SEQ ID NO: 236520 - DNA, 75 bp, Homo sapiens
tatctttattgaagctcacctttgtctaaataaaccaagatcactccatggatgaaatgacagctgtggtgaaaa

SEQ ID NO: 236521 - DNA, 100 bp, Homo sapiens
cagcagctgtcgccgccgctctcaggagacgcaggtcagaatggaaatgggctgcagaccgggcagctattgtcagccgctggaactggcttcaggctca

SEQ ID NO: 236522 - DNA, 75 bp, Homo sapiens
caagcagatctactactcggacaagtacttcgacgaacactacgagtaccgatgatgtctttctacctaaagata

SEQ ID NO: 236523 - DNA, 50 bp, Homo sapiens
ccggctcccttgcggtggtgttggggctgaccccgcactacatctaccca

SEQ ID NO: 236524 - DNA, 113 bp, Homo sapiens
gtgcagcccgggatatgagcctgtttctggggcaaaaacattcaagaatgagagcgagaacacctgtcaaggtctacgaccccttccgctttgacccagagaacagcaagggg

SEQ ID NO: 236525 - DNA, 75 bp, Homo sapiens
gggcaggagcacgacatcaccctcttcgtcaaggagctgtcataaccctggggaaggcacagaagttccgattca

SEQ ID NO: 236526 - DNA, 75 bp, Homo sapiens
gagccctgcagacttttcatttacgtgcatttgcacagtataacttggaccagtttactccagtaaaaattgaag

SEQ ID NO: 236527 - DNA, 100 bp, Homo sapiens
caaaggggaatcttgagtgtttgaatgccatccttatacatggagttgatattacaaccagtgacactgcaggctcctgggtaaacagactggtctgact

SEQ ID NO: 236528 - DNA, 50 bp, Homo sapiens
acttaaatccagaccttattcttcaggatggcacatttcctagaggcaga

SEQ ID NO: 236529 - DNA, 83 bp, Homo sapiens
gtacaaggacatcctgcgcaaggccgtgcagaaggttttgtaccagctgaatcctggggccttgggggtgaacctggtggtgg

SEQ ID NO: 236530 - DNA, 100 bp, Homo sapiens
cattcggaaggccctgtcccagctcaagggtggggggctggctcaggccgcctaccctgcccaggaaagaccacagcaagattctttcattcgtctcctc

SEQ ID NO: 236531 - DNA, 75 bp, Homo sapiens
cctatgtgaaaggcggtctcagtacattcttcgaagcacaggatgccctctcagctctcatttcactcttcagtg

SEQ ID NO: 236532 - DNA, 87 bp, Homo sapiens
agaaaggggcagatcgccggcaccacgagagcccggcccgcctgtgtggacgagcaagtgcaccggcacctggaccaacacgaagtg

SEQ ID NO: 236533 - DNA, 100 bp, Homo sapiens
tgatgggcacctcccgggacggctaggcagctggaagagaaagaccgagtgctaaagaagcaggatgcattctacaaagaacagctggctagactggagg

SEQ ID NO: 236534 - DNA, 51 bp, Homo sapiens
cgacggcgcagtgcgaagcgaaacagttaatgttggagaagattgtccagt

SEQ ID NO: 236535 - DNA, 50 bp, Homo sapiens
ctcagcctgtgggtacctgcccagatgcaaccttaaaatcagtgacaaga

SEQ ID NO: 236536 - DNA, 100 bp, Homo sapiens
gcagacagctccaaccacccagacaacaagcacaagaatcgatacataaatatcgttgcctacagctttcgaagacgggatactgctcagcaaggtgttg

SEQ ID NO: 236537 - DNA, 90 bp, Homo sapiens
cttgccttgagtcagtgcgccgctctccagcccgcttgaacgttcagggtaccaacatttctttccatggatgttgatggacgtgtcatc

SEQ ID NO: 236538 - DNA, 75 bp, Homo sapiens
ggaacgcaggagacacaagaagcggatccaggaaaactcaatgtgagtagtgacactgtccagcatggtgtggaa

SEQ ID NO: 236539 - DNA, 50 bp, Homo sapiens
cgtacccacagtgcttcatgagaggaccaagaatcgccttcagccctgtc

SEQ ID NO: 236540 - DNA, 51 bp, Homo sapiens
tcctatgcaagaaacgcaactgtcttagcagtgtctgcaaaaacgaatctt

SEQ ID NO: 236541 - DNA, 75 bp, Homo sapiens
gaggactgtgccatctgggaggcccagaaggtgctggacagggaattctcaatcacaatcctctgacaactgttg

SEQ ID NO: 236542 - DNA, 80 bp, Homo sapiens
acagctagaattggaaaaccttacagatggcgatgttatagccccactcataacacctcaaaaaaaggaatggaacgaca

SEQ ID NO: 236543 - DNA, 100 bp, Homo sapiens
cgcctcagcacggggacccccgggccggccttcacgccgcagagccgctgcagcgcatggatttaggagaatgtaccaaaatccacgacttggccctccg

SEQ ID NO: 236544 - DNA, 98 bp, Homo sapiens
gcgtctggacatctgtagctgtcgtttggtttgatcttgttgactatgaggaagttctagggagtgaccttcacaatggcatcataggattcagtgag

SEQ ID NO: 236545 - DNA, 90 bp, Homo sapiens
gaagcagatgagaacgaggaggaagctgtcatcctagaggagaaaactgcagtccgggatggctcagtcggcccctccaaagtcgcgcag

SEQ ID NO: 236546 - DNA, 75 bp, Homo sapiens
cttggatgtaggacaatggaagagttagggatcatagacggtatttctatgtaaacgaacagtcgggcgagtctc

SEQ ID NO: 236547 - DNA, 104 bp, Homo sapiens
taaaactccagcgagatccgggccgtgaacgaaagcagtgacggaggagcttgtaccaccgggaggtggggaagacagggctccagctaccacaggacgggctc

SEQ ID NO: 236548 - DNA, 100 bp, Homo sapiens
accgaggccacgtggacccggccaacgacacatttgacattgatccgatggtggttactgggttttaccacatggcccaggctcgtctggaactcctggg

SEQ ID NO: 236549 - DNA, 90 bp, Homo sapiens
tattctggataatagcaagatcatcagtgaggagtgtcggaaagaggcccttcctcaccagactctgtcctgagacctcggcggtacccc

SEQ ID NO: 236550 - DNA, 99 bp, Homo sapiens
aagaaacagaaatgaaacttctcaaatgagccaacctgagtcacaagccaacaagtcccaaatttggaaaagctgactcatatgaaaagctggaaaaac

SEQ ID NO: 236551 - DNA, 99 bp, Homo sapiens
cggcaggagcggagagtttgctccaccaggccaggaccccactgatgactccaggcttcccagggccgaagcggagcaggaaaaggaccagctcaggac

SEQ ID NO: 236552 - DNA, 101 bp, Homo sapiens
ctcaatagaagatgacgtttgccagctagtgtatgtggaaagagctgaagtgctcaaatctgaagatttccaagattatcccctaaaactcatagacccag

SEQ ID NO: 236553 - DNA, 100 bp, Homo sapiens
ggaaatatagtgataaaggaaaggaagaaatgcaatttgctgttggctggagtggttccttaaatgtcgaagaagggacagtgattgttcatggatttac

SEQ ID NO: 236554 - DNA, 96 bp, Homo sapiens
ccagctgtgggcatctccgtcaccctccttgggctattcgatgccgtgtatgcatctgacagggtggtttcagacaccctcacaggttttctacca

SEQ ID NO: 236555 - DNA, 96 bp, Homo sapiens
tcatgattaaggaagaagtggatagttccgtgaagaagatcaaagctgcctttgctgaattacacaactggtacagtgaaggtgaaattcgattta

SEQ ID NO: 236556 - DNA, 100 bp, Homo sapiens
gctggaagtcattcaacgggaattgaatagcaatcatcctcttccagtggtagcgtgtttgggtctggaaacactggaagagggggaggtttcttcagtg

SEQ ID NO: 236557 - DNA, 73 bp, Homo sapiens
aaagattgggcagtcactggggagaacgttggatggcaagcatgtggtgtttggcaaagtgaaagaaggcatg

SEQ ID NO: 236558 - DNA, 74 bp, Homo sapiens
cggcccacagtgggggtgtgcaaacccgagagaactggagtatgctcaggtaatcaaaatgttgggaaatggac

SEQ ID NO: 236559 - DNA, 98 bp, Homo sapiens
ccggtgtgacctgtcccttcagtaagactttgaccccgacgcaggcttcagtgattgccgcggatcagaagcctgagcactttggctcgagacaatta

SEQ ID NO: 236560 - DNA, 50 bp, Homo sapiens
ggatgcaccttcccctgccttggaaagagcttgatgcattagatgccaat

SEQ ID NO: 236561 - DNA, 89 bp, Homo sapiens
tttccgttacttggctattggctccttacggacatccaaaaattgcttggaactgacttcatgggtaccataagtacagagaacaaggg

SEQ ID NO: 236562 - DNA, 100 bp, Homo sapiens
cttcaagaagaaaaccgtggatggggctcacaacgaagtaagacagtagatgacaattctgcaaagcagactgcgcacaataaagaaaaacgaagaaagg

SEQ ID NO: 236563 - DNA, 97 bp, Homo sapiens
ctcgcctcgggtctcgggggccgctctgggatcccggccaccagcaattgtccgtgaagaatgcaaattgcacatcagattttgaggaatactttgc

SEQ ID NO: 236564 - DNA, 90 bp, Homo sapiens
acagggctactgttttccaatcctcagatggactcaccctgtcacccaggttggactgcactggcctcaacctcctgagttcaagtgatc

SEQ ID NO: 236565 - DNA, 100 bp, Homo sapiens
ctcaagaccaaggaaaagctggcacagaccgccacggtcaaggagaagctgcgccttgatcctgacagcgagatcgccaccaccggtgtgcgggtgtccc

SEQ ID NO: 236566 - DNA, 50 bp, Homo sapiens
ctccagccgcgcagtcccgaagagttcagtcaagaacaatacccaagtgc

SEQ ID NO: 236567 - DNA, 50 bp, Homo sapiens
tcggcagtcgcgaagcagcaaccatgtaagactttgaccccgacgcaggc

SEQ ID NO: 236568 - DNA, 83 bp, Homo sapiens
ctctcatcttgggaatctgcgtcagaagtcactcgcagtcccgtcagcccaggtcagcccaaggccaaccccactgtcactct

SEQ ID NO: 236569 - DNA, 85 bp, Homo sapiens
tgtcgaggctctccctgcacagcatcgcgcagaacaaagggatcagtggaatcaactatgaaattataatcatagatgatggaag

SEQ ID NO: 236570 - DNA, 110 bp, Homo sapiens
gccgcccgcaggctccggcttccgtcccggacagagcccgtggtcgcgcaggattgtgcagactggtgcttaaaatggaagtcgatattaatggagagtctagaagtacc

SEQ ID NO: 236571 - DNA, 100 bp, Homo sapiens
ctggaacttcatcatcatctacttcacaggaattgccatttacttaattcagtgcacaaatgagatgaatgtgaacatcccacagttggcagacagttta

SEQ ID NO: 236572 - DNA, 100 bp, Homo sapiens
tcgtaattacattctctcggccagcgcctccgcggtctgccctggccgtgaaggccccatcttcttcggagatgagcagcacggctttgtgttcagccac

SEQ ID NO: 236573 - DNA, 74 bp, Homo sapiens
ggagggagctgaccgaccgactccaggcgacggctgcgacgaggagctggtgggtcccctgtatgcacgctccc

SEQ ID NO: 236574 - DNA, 98 bp, Homo sapiens
acaggaatacatggaagtccgggagagaatacacagagccaattctttggatcggaggcaggaatcctggagaagatgttgagaggtttaagcaacaa

SEQ ID NO: 236575 - DNA, 100 bp, Homo sapiens
gtagagtcattaacaaggagcatgtactggccgcagcaaagccatggccatgcagaaaatctttgcccgggaaatcttggactccaggggcaaccccacg

SEQ ID NO: 236576 - DNA, 82 bp, Homo sapiens
ccgaagattaaaaaactggagccagtccttttgccaggttcgacgaggtgctttataaatcatctcaggactttcaacccag

SEQ ID NO: 236577 - DNA, 51 bp, Homo sapiens
gacttggggatccaaaggcacagaaccatatttatttagagtcagaatgga

SEQ ID NO: 236578 - DNA, 50 bp, Homo sapiens
ttcctgtgtgaaattgcttctgtcaaagcaattctgtggtgttcttggtc

SEQ ID NO: 236579 - DNA, 90 bp, Homo sapiens
ccaccatgaaaagtcagatcttctgattttagattttggtacatttcagatggggcattctcttctcccaccctcgggactttaccccag

SEQ ID NO: 236580 - DNA, 88 bp, Homo sapiens
ttcgcagtggtcgcttcttctccttggttcaaagatcacccaacattaaatgaaagatatttattacttcatctgcttggtagaggtg

SEQ ID NO: 236581 - DNA, 98 bp, Homo sapiens
ggaaaatctccccggtgactttcagactgtgccctgtccacggtgcctcctgcatgtcctgctgccctgagctgtcccgagctaggtgacagcgtacc

SEQ ID NO: 236582 - DNA, 100 bp, Homo sapiens
gtttgaacccgatggatgcttaaagattattgatgattcctccccggggctgtgcttatgtctgcatggttcatcgacaagatgcatttcgagctcttca

SEQ ID NO: 236583 - DNA, 101 bp, Homo sapiens
actacacaaccgtctccagccttggtctgagtggactgtcctgcagtgttctaagaacggaagcatctgggctggatggaatttagcatcaagcagagtcc

SEQ ID NO: 236584 - DNA, 92 bp, Homo sapiens
ccaaattgagcgacttgagaaaatcctgcagcgttcaagtttggaagtgaagagatccttctgtaaaggtttttggaattatgtctgctgaa

SEQ ID NO: 236585 - DNA, 75 bp, Homo sapiens
gaccgtgaccgagagcgtgaccgagagcgcgaatatcgtcatcgttagaaggccttcactattctgtgtgatatt

SEQ ID NO: 236586 - DNA, 100 bp, Homo sapiens
gccgcggccatggaggacgagcggaaaaacggagcctacgctttgtgacaacaaactgtgctctgcagttttcatcccgtggaatccgacccggcctgac

SEQ ID NO: 236587 - DNA, 83 bp, Homo sapiens
agactggaagaacagtgtcatcagtggctgcatcacgggaggagctattggtttcagagcccagctcaacattggcaatgtgc

SEQ ID NO: 236588 - DNA, 101 bp, Homo sapiens
gaagaatagagccataaagaaagcaaagcgcagaaatgttggatttgaagctggctgaaggcggtgcaggtcctcatggtgctctccctcattctctgctg

SEQ ID NO: 236589 - DNA, 75 bp, Homo sapiens
gctactccagtttcccacgacacttcctctgtgacgagggtgcaggtatctctggggactacatcgatcgcgtgg

SEQ ID NO: 236590 - DNA, 88 bp, Homo sapiens
tacttcagatttacgtacccctgggacaagacttctccactgaattgctgtttatcttgcagattatggactttcctacagatattgt

SEQ ID NO: 236591 - DNA, 75 bp, Homo sapiens
aggtaccaaggattggagcacagaggctcagaagcaagtccagaatgaagactattctcagcaatcagactgtcg

SEQ ID NO: 236592 - DNA, 98 bp, Homo sapiens
ggcggtccacggccggaatggcagcaagctcagcctctgaagagccaatccattcaggatgggaaaccacgcaggcaaacgagaattaaatgccgaga

SEQ ID NO: 236593 - DNA, 94 bp, Homo sapiens
ggcggcgcagccaccccgcgggatacgcctcagcgcggatatcaacttacgagtgaagtggcccaacgatatttattacagtgacctcatgaag

SEQ ID NO: 236594 - DNA, 100 bp, Homo sapiens
gagacataagaccgttggttctgacgaggcacagcgtttcttgcaagaatgggagacctcccagtgccaagtgtataagcgtgtccagaattggtgggtc

SEQ ID NO: 236595 - DNA, 51 bp, Homo sapiens
ctgttggagcctcttgttacacaggtattctctactgccgctgatggtcaa

SEQ ID NO: 236596 - DNA, 96 bp, Homo sapiens
ggtgctggagctgttccgggccgcgcagctgccgaacgacgtggtcctacagtgaagtacatgcgagaagccacgccctatgtgaagaaaggatcc

SEQ ID NO: 236597 - DNA, 100 bp, Homo sapiens
tccgagtggaggctcaccgaggcgaaggggccaaccatgggaaaggagagtggatgggactcaggcaagtatatcgcgtcaacacagcgacctgacggga

SEQ ID NO: 236598 - DNA, 83 bp, Homo sapiens
ccgccgcctccgcccagggccacctaaggagcggaccccgcatcttcgccgtctggaaaggtgctggagaatctggtaaaagc

SEQ ID NO: 236599 - DNA, 100 bp, Homo sapiens
gagtacaacacggtggcaagcaagtttaatcagacctgctcacacttcagaatagagaagaatttcctgttgagatataaaggcccatctgatcactgga

SEQ ID NO: 236600 - DNA, 100 bp, Homo sapiens
tggattggcatcccaacaacgttttgctggcagcaggatcatgtgacttcaaatgcaggttgaggaacaggttagcaccactgagagagtgtttcaggat

SEQ ID NO: 236601 - DNA, 89 bp, Homo sapiens
gtttctctgctgcaccgacctcgacgtcttgcctgtgtcccacttgttcgcggcctatagttcgcccattgagccgagagatcacaatg

SEQ ID NO: 236602 - DNA, 98 bp, Homo sapiens
gtactaaactttctgagcttcatgacaatcaggacggtcttgtgcatgtgcagtctttgccaacaaaaaaaattaccaagaaacctattccagatgag

SEQ ID NO: 236603 - DNA, 89 bp, Homo sapiens
gctgagcttggcgcacgggccgaccaggaggtgcgggagacgcggcggcggcacgagcggcgcctggtggaggtggacagcagccggca

SEQ ID NO: 236604 - DNA, 100 bp, Homo sapiens
gcactctgcaggggatcccccagatggactggagtccagagttgccaccagatgggatattcaaaaatacgccagagaggcctacaacctgggggtcagg

SEQ ID NO: 236605 - DNA, 98 bp, Homo sapiens
caaccacctcgagcggctgctggacgaagaccttagctggatctccaaaatacaagtgaatcacccggcagttctgaggcgtgcggaacaaatccagg

SEQ ID NO: 236606 - DNA, 100 bp, Homo sapiens
cttcgtggcccggcaccgttccgcggacgtgctcggtcatcgtgatgtcaggtcatgagaccatccgagtgctggaagtcggagtggatgcccaactccc

SEQ ID NO: 236607 - DNA, 100 bp, Homo sapiens
gccctggcggatgatgtggtcgggtctgtgctggactgcttcagcacatggattaattgatgtatgttgagtttatggagctgccttttggtggcttgct

SEQ ID NO: 236608 - DNA, 126 bp, Homo sapiens
aagctgtcatcacaaaagagttgattgaaattatctctggtgctgcagctctgggctttgttatgcacctaaagccatattggaagctccagaagaaagagcaccccccggaagtcagcagggaaa

SEQ ID NO: 236609 - DNA, 83 bp, Homo sapiens
ggctgtttggaaagacccaggagaagccgcccaaagaactgtaagactttgaccccgacgcaggcttcagtgattgccgcgga

SEQ ID NO: 236610 - DNA, 89 bp, Homo sapiens
gtcggcctggaccttgcagccgcaatggaacatcatcttcagcgggctatttcagcacagcaggtgtatggcgagaagagggataatat

SEQ ID NO: 236611 - DNA, 87 bp, Homo sapiens
gagcgcgaatatcgtcatcgttagaagcatggggctgcttttggtccaccgcaaggtggatttcatcctccttattggcaaccagga

SEQ ID NO: 236612 - DNA, 75 bp, Homo sapiens
tgctgtggcagcatgtgtggggacggagtggacattctcggctcagaatgcatcccttcgagatctccaagcacc

SEQ ID NO: 236613 - DNA, 100 bp, Homo sapiens
ggccaggggaccaagctggagatcaaacgtgaagacattcagtgaagcttgcctgatggtaaggaaaccagccctagaacttctgcattacctgaaaaac

SEQ ID NO: 236614 - DNA, 100 bp, Homo sapiens
cgctgatgctgggaggcctccagggatggagagtggcctggctggcaacggcacagattcttctaacagagaaaatgccattgaggatgaagaggaggag

SEQ ID NO: 236615 - DNA, 75 bp, Homo sapiens
gccatcaccgagcaccctgagaacttcaaccactgttccatccctgacccatctttgtcgtttggaaattcggtc

SEQ ID NO: 236616 - DNA, 74 bp, Homo sapiens
tcccagagctgcagcggcgcctggacgactggacagaagcagtacaacatccacgtgggaactgctggatcaaa

SEQ ID NO: 236617 - DNA, 100 bp, Homo sapiens
gaggcgagctcgcgatgagtggtctcggcaggctcttcgggaaggggttccccactgaaggacttggtccagctgtctggcagggaggagagacagaagc

SEQ ID NO: 236618 - DNA, 80 bp, Homo sapiens
caacgccccggtggagaagctgagccactgtagtctgcagatcaaagctctggcgaaaatccatgcctttgttcaagaca

SEQ ID NO: 236619 - DNA, 100 bp, Homo sapiens
gtccatttattcctattttctctgacagctggatgaaaggatgacaagagcacctcaaaggcagcagcctcaaggagcagccatggccccagacttgtcg

SEQ ID NO: 236620 - DNA, 82 bp, Homo sapiens
ggaaaagtcaagctggtcttgaagcacaacagctcccagcccctccaaagatttactttcccatccgtgactcctggaatgc

SEQ ID NO: 236621 - DNA, 74 bp, Homo sapiens
gttcttgactccgctgctcgccatgtactatactggcaattgctggagaagattttgcaattgttgcttctgat

SEQ ID NO: 236622 - DNA, 109 bp, Homo sapiens
cagaccctggagcctcagttggaagcagccgatccagcctgcggagcctgtggggcagttgcagagtgggcaggatcttaagacccgataggtgcagaacccatctgga

SEQ ID NO: 236623 - DNA, 76 bp, Homo sapiens
gttatgacaccatggatctcttcaggcacactacagaactaaatatgcatgaacaggagtacagctgtgtagtaaa

SEQ ID NO: 236624 - DNA, 75 bp, Homo sapiens
ctcattccatcttcattcatgactccagacagtggctatgattttggctatatggtaaagttgcttacagattct

SEQ ID NO: 236625 - DNA, 101 bp, Homo sapiens
ggatcgtgaccgagaccgtgaccgagagcgtgaccgagagcgcgaatatcgtcatcgttagaaggaaaaatgaggaagctgtgagtaccagtggaaggaac

SEQ ID NO: 236626 - DNA, 83 bp, Homo sapiens
ccggagcagagccgaagctcgccggagaagaggagccccagcgccccggtttgcaaagcaggggctttgaccacgacctttga

SEQ ID NO: 236627 - DNA, 100 bp, Homo sapiens
gggagagatgatggtgtctgcagcagagtgacagcagtggagattgagagaaaagagcgatcgtcttctgatcaaaggaggtaaaattgttaatgatgac

SEQ ID NO: 236628 - DNA, 100 bp, Homo sapiens
ggatcgctacggaccttaaaatacccgcaacagccccttcgtcccaaaatttcgaggatgtcagatgtaaatgtatctgccctccctataaagaaaattc

SEQ ID NO: 236629 - DNA, 98 bp, Homo sapiens
agctccggccgccacttgcgcctctccagcctccgcaggcccaaccgccgccagcaccatggccagcaccatttccgcggagctggagtttgttcaga

SEQ ID NO: 236630 - DNA, 100 bp, Homo sapiens
gcaggcaaggaaatttgaggttgttgcatctggaagtaaacatgtagctacttcttctaataaaacagaggatacaagaccctcctgaaaggaatttccg

SEQ ID NO: 236631 - DNA, 120 bp, Homo sapiens
cccatcctgccgtccttctccactttcgccagcccgtgccgcgagcgcggcctgcaggaggctgaaggtgatgtggccgccctcaaccgacgcatccagctcgttgaggaggagttggac

SEQ ID NO: 236632 - DNA, 90 bp, Homo sapiens
cactagctgcgatgcatgtgatcaagcgaggctggtgagattggagagatgaaggatggagtcccagagggagcacaacttcagggaccg

SEQ ID NO: 236633 - DNA, 100 bp, Homo sapiens
ctgatattaagccatcaaatgtggaacctatggaaaaggctcctgggtgtggacaaggtgctgggctatgccctcaacgagtggctgcaggacatccgca

SEQ ID NO: 236634 - DNA, 90 bp, Homo sapiens
gtttcgacgtgtccttccagcagtcgagcaccgccaagtcggccacctggacggagtatgctgtgaactgccatgtgatcacctgggaga

SEQ ID NO: 236635 - DNA, 90 bp, Homo sapiens
tggctcatcagctttgcactatgcagtggaagggaaggtgtggctcattgactttaatccatttggtgaagtcacagattcactgctgtt

SEQ ID NO: 236636 - DNA, 100 bp, Homo sapiens
gcgccctgagagaacagggtggccgcttggtccagttgccaccttccagagaagaggtacgagatgacaagacaaccataaagtgtgaaacctccccgcc

SEQ ID NO: 236637 - DNA, 89 bp, Homo sapiens
aaggagcacaacgggcaggtgacagggtctccgtctctccaccgggggcttcatccttccagggaggagaagagggactccagaatggc

SEQ ID NO: 236638 - DNA, 76 bp, Homo sapiens
agaattcaggaaaatcaggccaagagattgtgttcacctattgaaaattaaaaagacattttgtttatgtaaaaga

SEQ ID NO: 236639 - DNA, 100 bp, Homo sapiens
aaatatttacagtcggaggagtactcggtgaaatcctgtcctgaagactgtaagctgccactgggcccaagagatgggtgctctcctaggcgccccttcc

SEQ ID NO: 236640 - DNA, 100 bp, Homo sapiens
cagcattgaaccagaggagtcaagccacccgaggggactgcctggccttccagatgcgagctgggttgcttccctgagggcccccgctggccaaggcctg

SEQ ID NO: 236641 - DNA, 123 bp, Homo sapiens
agacggtgcgcctgtgcagccctcccaggtggagtacacggcagactacaatgcagatcttcgtgaagactctgactggtaagaccatcaccctcgaggttgagcccagtgacaccatcgaga

SEQ ID NO: 236642 - DNA, 100 bp, Homo sapiens
caactgcggacatgctgggtggatccggatcgcatggaagacgcagcctggccgcgctctcccagggtattgtccagtcagaagaaaaacttgtcatcag

SEQ ID NO: 236643 - DNA, 50 bp, Homo sapiens
aattagcatctgaacaattgcaagcaggtagaagagcagaggatggctct

SEQ ID NO: 236644 - DNA, 82 bp, Homo sapiens
gcgtggacacacaagcaccccaataacctcaagcggagctggagtttgttcagatcatcatcatcgtggtggtgatgatggt

SEQ ID NO: 236645 - DNA, 100 bp, Homo sapiens
aagaaaggacatttctgggggtagtagaatgcttgaggcctggaatttaaacctgagccactatctgaaggctttttggaaaggatataaacaacggaag

SEQ ID NO: 236646 - DNA, 51 bp, Homo sapiens
cccagttattgctgcagttagtgttgggtgataaaagaaaatgtggctgaa

SEQ ID NO: 236647 - DNA, 101 bp, Homo sapiens
gagaggacccaacatggggcagaagcttgaaatcctcattaaagatactctcgttgctctaggtcgtaaccagcctttgaaaaaggagaaaccaaaatgga

SEQ ID NO: 236648 - DNA, 49 bp, Homo sapiens
ttgtggcgaatggggctcacgtcgagccgagtgtactacttcaaccaca

SEQ ID NO: 236649 - DNA, 109 bp, Homo sapiens
ggcttttcacggagcaggctcggagcctacggggctggcctcggactggatggggattgggatcaaagccactcacattaagttaccaagaacaaccacagaatctgag

SEQ ID NO: 236650 - DNA, 100 bp, Homo sapiens
agggctccgggcaccaggagcatatcaaagttgaagagagttttaagacactgttctgggctatatttggactttctgaagtgaaatcagtggtcatcaa

SEQ ID NO: 236651 - DNA, 83 bp, Homo sapiens
gggcattcccgacggcccgcccctcaaggacaacctcggcctgagacaccggaggaccggggaacggcaggagcagctgatgg

SEQ ID NO: 236652 - DNA, 82 bp, Homo sapiens
tcagagcggtatccctgtctcagcgaagtggtgaaagagcatcaggttgagcaatgtttaaagcgtttgaaaaacatgaatt

SEQ ID NO: 236653 - DNA, 90 bp, Homo sapiens
gttcagcagaaataatcaagagttgacatcataccaggtactactgagcgagtgtgcttgatccagggaacggttgaagcactgaatgca

SEQ ID NO: 236654 - DNA, 80 bp, Homo sapiens
aggaagtgattcggagaaactgagagcattgaatgtgcaggttctttcaggtgggtttggaggatttgggacaacatcta

SEQ ID NO: 236655 - DNA, 74 bp, Homo sapiens
ggaacacaacagcctcacaattccgagtccagcatgtgcttcggaggccagagtctccgggaccattatggcag

SEQ ID NO: 236656 - DNA, 95 bp, Homo sapiens
cggccaacatggcggaacgcaggagacacaagaagcggatccaggatttttagactctgaggagcagttggagctaatccacattatggaaatgg

SEQ ID NO: 236657 - DNA, 100 bp, Homo sapiens
actgactgccagggccgaagatctagacaacaggaattgatgtggccagcaaatccttcctcttgttttttaccaacagactgcagtttcttcactacca

SEQ ID NO: 236658 - DNA, 75 bp, Homo sapiens
atgagcccctgtggaggtgaagacattgtggaagaacatgtgatcatccaggccgagttctatctgaatcctgac

SEQ ID NO: 236659 - DNA, 83 bp, Homo sapiens
cggcccggcagcgacatggaaggaactgtggctgcaccatctgtcttcatcttcccgccatctgatgagcagttgaaatctgg

SEQ ID NO: 236660 - DNA, 100 bp, Homo sapiens
gttcaccactcatttgcaacttatatcgccagtccagcagctaaggatattttgtgcagcctcaagtactacagccttccagcagccttcccagacccac

SEQ ID NO: 236661 - DNA, 90 bp, Homo sapiens
tacttcagttgttcagtcagattggaccctgtaaaagctgtaaaatgataacagagctatatcgagaagtttactgactttcttcggctc

SEQ ID NO: 236662 - DNA, 100 bp, Homo sapiens
tgccccaggctctgcagcccctgctgctggttctgcccctgctgcaggtgcagctcagtggaagatgatgacaaccagaagacatgagctaaggtttctg

SEQ ID NO: 236663 - DNA, 98 bp, Homo sapiens
ctgttttgaagagaaggggaataagactgcatctgttcatatgagaaaataaacagagttgtctttgttggaaactttttacgtgtcaataccctctc

SEQ ID NO: 236664 - DNA, 83 bp, Homo sapiens
cgggaagagttcagagagcatctggagctaattgtgaaaaatagtgcaacctacaatgtttcctgctctacgaaacgcactct

SEQ ID NO: 236665 - DNA, 100 bp, Homo sapiens
aagcgcattgcctcgttggatgccgccaatgcccgcctcatgagtgccctgacccagctgaaagagaggtgacgacggcagcggctcgggcagcggtgat

SEQ ID NO: 236666 - DNA, 74 bp, Homo sapiens
gaggcggacgacgaccggctcaacaaggaagtggtaaggctatgtcgcctgtgccaaggtgtgctgggctcggt

SEQ ID NO: 236667 - DNA, 82 bp, Homo sapiens
cagacttggccaaatggacgggactattaaggtattagaaaactactcggatgctccaatgacaccaaaacagattctgcag

SEQ ID NO: 236668 - DNA, 75 bp, Homo sapiens
cacatgaggaaacagcttgatcgtctgggcctgtgtttcagctgggataggggggcagtgcccaaaggaaatgcc

SEQ ID NO: 236669 - DNA, 100 bp, Homo sapiens
tgcccgccgccgcccgcgccaccggcatggcgctccggggcttctgcagcgccgatggctccgacccgctctgggttgctatggtgacagactatggggc

SEQ ID NO: 236670 - DNA, 51 bp, Homo sapiens
ggtgagtcggtgacctggcctgtgaggtgctggagaatctggtaaaagcac

SEQ ID NO: 236671 - DNA, 75 bp, Homo sapiens
ctcgcccgggggcatcaggtttttctcccgctccagaaaaaatgatggtggtgctaccccagtacaggatgaacg

SEQ ID NO: 236672 - DNA, 90 bp, Homo sapiens
tgagaaccctacttgcctaaatgaggaatgtctttcctaccatctaaaatacgaaggtttctggctgggctacctagtcctcaaagagtt

SEQ ID NO: 236673 - DNA, 51 bp, Homo sapiens
cctggttgagctcaaagttattttacattctggaatgaaacctctgaagaa

SEQ ID NO: 236674 - DNA, 101 bp, Homo sapiens
gagctgggtctggagacgccgtggcagcctgaacggagtgtgcgacggattgggaggttcgagaacttgtcttggacaattgcaaatcaaatgatggaaaa

SEQ ID NO: 236675 - DNA, 82 bp, Homo sapiens
gcctacatcgtcgtgcaggtcgagaccccaggcacagagaccccatcctacaagccttatgccagcctggaccatcttggag

SEQ ID NO: 236676 - DNA, 98 bp, Homo sapiens
gaaaacctaaccatgaagacttgaacttaatacagcaagaaagaccatcaagtttaccaaaaaggatgcgcctccacttagcaaggctgggcaggatg

SEQ ID NO: 236677 - DNA, 83 bp, Homo sapiens
caacaagtatgttgattactcaaggattaattagtaaaggtacctagtagaactgggttgtatcaagccgctctgtgatctcc

SEQ ID NO: 236678 - DNA, 75 bp, Homo sapiens
ctgacgaaattccacaaaacctcttctggaaacaatgatgattattccccaccttctaagagacaaagaccaacg

SEQ ID NO: 236679 - DNA, 100 bp, Homo sapiens
caagaggaggacagttcgctacacagcaatgcatcgaggccatggtaggggaggagtgtgtaggtgccatcgtttgcaagttggatatgcacaaaaagat

SEQ ID NO: 236680 - DNA, 76 bp, Homo sapiens
aagggaccacggtcaccgtctcctcaggagctgacatggacccaaatcctcgggccgccctggagcgccagcagct

SEQ ID NO: 236681 - DNA, 100 bp, Homo sapiens
ggatgccccccggagccgcgggctggcagaaatatggctacacacacctttctgcaggagagctgcttcgtgatgaaaggaagaacccagattcacagta

SEQ ID NO: 236682 - DNA, 83 bp, Homo sapiens
gctcgcgctactctctctttctggcctggaggctatccagctccctgaagaggaaggagaaggaatatgagcatgaaatggag

SEQ ID NO: 236683 - DNA, 90 bp, Homo sapiens
gcaagaagaagcagaatagacacttcattgttccagcttctcgcttcaagctcctgaagacaccaactctacaacattacctgtcatata

SEQ ID NO: 236684 - DNA, 146 bp, Homo sapiens
caagcccccaaggcccttcggcgggcccctgctgaaagaccggcatgccctattctgtgggcttccgcgaagtactccaaagattcaggtttactcacgtcatccagcagagaatggaaagtcaaatttcctgaattgctatgtgt

SEQ ID NO: 236685 - DNA, 74 bp, Homo sapiens
aaaaacttgtgagggcgaaggtcgtattgaatggtgttgtaggttgggataattcttcactattccacccttgc

SEQ ID NO: 236686 - DNA, 98 bp, Homo sapiens
tgaagacagtggctggcggtgcctggacgtacaacggttaagaagattgtctaccaaatatagaacagaaaagatatatcccacagccactggagaaa

SEQ ID NO: 236687 - DNA, 50 bp, Homo sapiens
ggcgccctggggccccggagagggggctgaggccatggttctggagagcg

SEQ ID NO: 236688 - DNA, 100 bp, Homo sapiens
tctggagacgcgagcataatccttttgcagacatctcaacgctggctctccagacttaattcagtgcacaaatgagatgaatgtgaacatcccacagttg

SEQ ID NO: 236689 - DNA, 87 bp, Homo sapiens
aagccacctgttatcccagttctacaagagccttatacaggatgctgtgttctttgctcctttgtgaatgtctgttgctggtagctg

SEQ ID NO: 236690 - DNA, 99 bp, Homo sapiens
gtgaccctcttagatggcaccgaatacagctgtgacctggagggcggcgactggcggcgcgatggacctgaccgggctcctgctggacgaagaaggcac

SEQ ID NO: 236691 - DNA, 83 bp, Homo sapiens
ctccctctgccctatgaacagcttaagcacttttaccgaaaaccttctccccaggttgctgctgactcagccattctagaagt

SEQ ID NO: 236692 - DNA, 80 bp, Homo sapiens
ctcctgagtagctgggattgcagagacatcattaatctggtggctcaggtggttccaatttatgctgtttcccacctctt

SEQ ID NO: 236693 - DNA, 100 bp, Homo sapiens
tcctgccttaagaaaaaacaaaaatattgacaactttttaagcagatcatgtttcgccaagggatgcatgacttgaaagtctggcctaatgtagaagcag

SEQ ID NO: 236694 - DNA, 82 bp, Homo sapiens
caccgctgggtgcctgagctccgcatggagcctgcagcctttgtttaacttgtgtttcccattaaacactaccaggacaaaa

SEQ ID NO: 236695 - DNA, 82 bp, Homo sapiens
agacacacctaccaagaagccagtcaagcggccaggcccagctgagagccagcctggaggttacccagcagcaggccaccca

SEQ ID NO: 236696 - DNA, 98 bp, Homo sapiens
tacagaatccaactcaaatatcaaggactatgatcagaatgctttcaaggagtttttgggcacatgatggcagggcacagtcttttgctgagcgcctg

SEQ ID NO: 236697 - DNA, 98 bp, Homo sapiens
tcagagtgatagatcattcacaatatctgtgtcgttcttggcagaaattatattttccagcccgtgtctgcagggtttgaacataatctttcatgtag

SEQ ID NO: 236698 - DNA, 74 bp, Homo sapiens
gctgcagcgagacccccccatatgaagatgctatcgaggattatgtgtgcctggaatacttattaagaaacgat

SEQ ID NO: 236699 - DNA, 100 bp, Homo sapiens
ctcggggccagcgcatggggctgctgagaccgctccggacgtgcgaagcgttcgcggtgcgatacacacacaggcacattggaaacgcagtagaaaatgg

SEQ ID NO: 236700 - DNA, 90 bp, Homo sapiens
cacgagcatggcatggccccgcaggtcttcacccaggccctggagtgcatgcgcaggcccacccttcctccattctgagcacataaaaac

SEQ ID NO: 236701 - DNA, 78 bp, Homo sapiens
cagcgtgaccagtggccacctctgcagtgtcttccacaacctggaaaatggccacccagcagaaagcctctgacgaga

SEQ ID NO: 236702 - DNA, 101 bp, Homo sapiens
cctcggcagggaggatgacggagctgcagtcggcactgctactgcgaagacagctggcaggaagcaggagctggccaacagctcggatgcgaccctcccag

SEQ ID NO: 236703 - DNA, 50 bp, Homo sapiens
gaatttcacccaggttctgacagttgccattacccagggaggagcaatac

SEQ ID NO: 236704 - DNA, 98 bp, Homo sapiens
tgcagaaatgctcactgcaaaagtgaaagaaatatgtgccgtatcacgaatttctaagaaagaaattggtcggtgttttaaacttattttgaaagcgc

SEQ ID NO: 236705 - DNA, 96 bp, Homo sapiens
ttctgactcacacgggggagtcgggggagtcgtaaacaaccctgaagagaacagccaggcctgccccaggatgggtgagttcaacgagaagaagac

SEQ ID NO: 236706 - DNA, 87 bp, Homo sapiens
ccgcttccccatcatcgccagctgcacactcttggggctctacctctttttcaaagtgggagacctccacagaacccttccagcaag

SEQ ID NO: 236707 - DNA, 75 bp, Homo sapiens
gtgaagagacaggaggcagtagccaaacacccaggccactgcctgctgggggcccttcaataagccaaggcctgc

SEQ ID NO: 236708 - DNA, 100 bp, Homo sapiens
cacggccactgtgtacaagatatgtgcctggatgcagctcacctccgagatttctgcatattttggatctggctcatccgtgatatacaattttcaagaa

SEQ ID NO: 236709 - DNA, 100 bp, Homo sapiens
aatgacatctcgctgtaatgcagtgggagacaagttggatggcttgaggactggtactaaaaggaaacgtgactgggaggccattgccagcagaatggag

SEQ ID NO: 236710 - DNA, 83 bp, Homo sapiens
ccatgacgcccatgcactaccacctgcgggagatcatcatctgcacctaccgccagcctgatcctgcctgaagatggtgccac

SEQ ID NO: 236711 - DNA, 101 bp, Homo sapiens
ccgtctgaactaggatgtcccgacatgaaggtgctggagaatctggtaaaagcaccattgtgaagcagatgaggatcctgcatgttaatgggtttaatgga

SEQ ID NO: 236712 - DNA, 82 bp, Homo sapiens
tctttctggcctggaggctatccagcgttctccttactatgacaatgtccgccccctctcttaccctgattcggatgctgtg

SEQ ID NO: 236713 - DNA, 51 bp, Homo sapiens
ctgtcactcggcttcttgaggagtttttctttaacatcagcactgatgacc

SEQ ID NO: 236714 - DNA, 100 bp, Homo sapiens
aacccagtactacgcatatgtaactgagcgccaaaaagtacactgcctcaacacacttttctccaggctcctgttggatcaccaggatgccattgctccg

SEQ ID NO: 236715 - DNA, 83 bp, Homo sapiens
agaacctgcccttcgccaaggagatcgtctctctcatcgaggcccaaaccgccaagtgctgtccccggcataggtccatctct

SEQ ID NO: 236716 - DNA, 90 bp, Homo sapiens
ggagaggccgtgtagcgtcgccgttactccgaggagataccagtcggtagaggagggtaaaactgattattatgctcggaaacgcttggt

SEQ ID NO: 236717 - DNA, 98 bp, Homo sapiens
aagtaatcagtctttgacaagtgatgagaagctgtcggagcttcccaaggtgatgaagggagtatgccagcagatatagccacattactaaaaacatc

SEQ ID NO: 236718 - DNA, 82 bp, Homo sapiens
ccgcgtctccgcgttcccagcccgggtccccgcgttcacagccccagcgcagtgtgccggtccaacaaaagcccttgggtct

SEQ ID NO: 236719 - DNA, 100 bp, Homo sapiens
aaagtcgagggatgtacagcaacagaatgagaagctacaaacaagaaatgggaaaactcgaaacagattttacggtctggaaaatcccgaagcagaagcc

SEQ ID NO: 236720 - DNA, 100 bp, Homo sapiens
acagagccgggagttcaagaagaacactccagaggtgaaagaaaatggcccgaaccaagcagactgctcgtaagtccaccggtgggaaagccccccgcaa

SEQ ID NO: 236721 - DNA, 109 bp, Homo sapiens
gtccagcaagactatgaatctctgttccaaatgctttgctgcttccacagcgcggcacctgtacctccggggtggcgctggggttggctccatgaccaagatctatggg

SEQ ID NO: 236722 - DNA, 100 bp, Homo sapiens
gcggatgtggcagccccgagccatggctctcgccgtccgagtcgtttattgttgaaatggatgcagtcagaactgaatgttgaagaagtggtaaatgaca

SEQ ID NO: 236723 - DNA, 90 bp, Homo sapiens
atcacaattactgatgggagcaagttgactaccaccagtggagtccaggatgaggttttgatgatgatggttcagaatttcatgaacata

SEQ ID NO: 236724 - DNA, 97 bp, Homo sapiens
tgcaccttctccatcaggtgcagaagggaagaggaagaacgtctgagaaataaaattcgagctgatcatgagaaggccttggaagaagcaaaagaaa

SEQ ID NO: 236725 - DNA, 100 bp, Homo sapiens
gccaccgggaggtgtggaagagccggggaccagttactctccacaagaaaattcacacaaccacagtgctcttcatagttcaaattcacattcttctaat

SEQ ID NO: 236726 - DNA, 75 bp, Homo sapiens
cctcgggagctcatcttcgtggggcgtgaggagtgtgagctcatgctacagaccaagatcactccatggatgaaa

SEQ ID NO: 236727 - DNA, 97 bp, Homo sapiens
ctgttcctttttgctgacgtgtcatttctaagtactttctcctactccataaagacttcaacgaatcagtgggaagtggcctacagtgggtcggcta

SEQ ID NO: 236728 - DNA, 75 bp, Homo sapiens
cccagacaagatggacaccgcggaggaaggtagttgtcctgggaacccctgcagaagaagatggtggtggcaaaa

SEQ ID NO: 236729 - DNA, 87 bp, Homo sapiens
gggagtggagcttggtttcgggatctcggtgctgcagacggcgagacctcctgcacagatgctctctgtgtgggtatgtgtgtagcc

SEQ ID NO: 236730 - DNA, 71 bp, Homo sapiens
gaatttccatgtcaacatagtcctgcctcgatgacttacgagccctcaaggggaagcattttctcctggac

SEQ ID NO: 236731 - DNA, 97 bp, Homo sapiens
ctgctcaccatgtggtttggggagtctgaggccaatgtcagagaaatctttgacaagaccatgctcgacagctgaccaaggccatgatgcgaaaggc

SEQ ID NO: 236732 - DNA, 75 bp, Homo sapiens
gtccccagtgagggtgtacaaatacccctttgaattaattatggctgcctgttacatgaacagaatatggcaaaa

SEQ ID NO: 236733 - DNA, 100 bp, Homo sapiens
aagattcaccaaataagctatatactttggttacctatgtacctgttaccactttcaaaatttggcaatgaggagcagcagctggcgtgggccaagcggg

SEQ ID NO: 236734 - DNA, 75 bp, Homo sapiens
gaaggatgaattctgtaggtggtgcatccaaaacagtctcttcaagaaaatgaggaggaggagattgggaaccta

SEQ ID NO: 236735 - DNA, 115 bp, Homo sapiens
cgcaaggccgcccgggaactgctgacgcttgatgagaaggacccacggcgtctgttcgaaggtaaaagtacacctgtaagccagcttggttccgcagactttcccgaggcccccg

SEQ ID NO: 236736 - DNA, 87 bp, Homo sapiens
acaactccgcaaacgaaaaagaacgacatgatgcaatcttcaggaaagtaagaggataatccgcaagatgggattatggtgaaacta

SEQ ID NO: 236737 - DNA, 104 bp, Homo sapiens
ttctaacagaattattttgggagggttttctcaggctggattctagtgacatttataacgaattgaaagaaacatatcctaattatcttcctctgtacgttgca

SEQ ID NO: 236738 - DNA, 83 bp, Homo sapiens
cggaaaggtgcctagaagaacaaggtgcaggaccccgtggcagccagataagctggtggtggtatggacccgtcggaaccgac

SEQ ID NO: 236739 - DNA, 100 bp, Homo sapiens
gggtaatacagaaagaatctgaggtggctcacgttgaccaactctttgatgatgcatccagaaggacaggtggagggaagcgccccagacaaggaagctg

SEQ ID NO: 236740 - DNA, 124 bp, Homo sapiens
tcggtgcagctgccagatccgctgatctagtgcttctcgaaaaaaaccttcaggcggcccatgggtcaacagcgacctcatttacattacagctaagaaagatggcactcatgtggtggaaaat

SEQ ID NO: 236741 - DNA, 100 bp, Homo sapiens
aaggaaatgaattacctcccttgacggctctaattttacttgtaaaataccatgaagattttgaaaaaacaaaggggagaggctttactcccgtcgtgga

SEQ ID NO: 236742 - DNA, 75 bp, Homo sapiens
taagcatccagaggccctgagcagctttcagcactggaggggatcctcttggtgtatgacatcaccaaccgctgg

SEQ ID NO: 236743 - DNA, 100 bp, Homo sapiens
gcgggatcccagcctcaggcgtgcgcggacggtgtgcggatcaggatctaagggatttaaatggacagaatgctttctgacatcttggatcatctgaaga

SEQ ID NO: 236744 - DNA, 82 bp, Homo sapiens
gagcagaggggacagaggcaccaaggacctccaagacaggttacgagaagtttctgagaagctgaacaaatataatttaaac

SEQ ID NO: 236745 - DNA, 75 bp, Homo sapiens
ctccgcccctctctgtcttctctgcagtgggagcagagaattctcttatccaacatcaacatcttggtcagattt

SEQ ID NO: 236746 - DNA, 100 bp, Homo sapiens
ccgcatcaaacagagtgaactttctgccaagatgcgcaccctcatcacatgtgtggattctgggattctcagagtctggcatgacaaggacaaggacaca

SEQ ID NO: 236747 - DNA, 96 bp, Homo sapiens
ccaaaaccaagcactgacatgccactcatggatgggtctaggaaagacaatccaggcaattggaattacttacttctataaagaggaatggcctct

SEQ ID NO: 236748 - DNA, 102 bp, Homo sapiens
caaggaggccttccagctgtttgaccgaacagtagccacgatggaggtgatgaacctgatggagcagcctatcaaggtgactgagtggcagcagacatacac

SEQ ID NO: 236749 - DNA, 74 bp, Homo sapiens
taaagatggaaaaccagttattgaatatcaagaggaggagttgttgctgcccaaactccaaaatgatggtagag

SEQ ID NO: 236750 - DNA, 89 bp, Homo sapiens
cgcggagtggaccccggctgcggcccctggtgtgtcccggcatggatatccggaacaacctcactaggttgcatgagctggagaattgc

SEQ ID NO: 236751 - DNA, 76 bp, Homo sapiens
cagaattgccaagatttatgacagggacagcaatcagacctattgctttgagagctgtgacctccattgctcgtgc

SEQ ID NO: 236752 - DNA, 100 bp, Homo sapiens
caccggtcgcatgtgactgaactcttcaccccagtctgtggctttcccgttgcagtgagagccacgagccaaggtggtcttccgggatccgtatcggttt

SEQ ID NO: 236753 - DNA, 100 bp, Homo sapiens
cgcggagggtcgaggcggcgcggcctgagatatgcacccaatgtccagggagcgtgcaaaatttgtcaaaagtggccttttattgtaaaacgacacgaga

SEQ ID NO: 236754 - DNA, 75 bp, Homo sapiens
gggagactgaaccatctccacatctagttgccccaggtccttaaacaggccctgaaggaatttggagaaccctgg

SEQ ID NO: 236755 - DNA, 51 bp, Homo sapiens
ttccagagcgcagctatcggtgctttgcagttctgcttttccagaatcctg

SEQ ID NO: 236756 - DNA, 100 bp, Homo sapiens
ggcgctgatgcttcgggatggacgatcaccggcgtaatcaacccagcgttggacaaatactttccgtcagactctggagtgagaatcatagctgagcccg

SEQ ID NO: 236757 - DNA, 100 bp, Homo sapiens
ctttagtgaaatgggctaataatgctggcaaagtggaaaaatgtgcgagtcaagggtccagagaaggaggagaagttgagacaggcggtcaagcaggtgc

SEQ ID NO: 236758 - DNA, 101 bp, Homo sapiens
aagatggatatattctgtgccttaaccgaattcctcatgggaggaagaaccattctgacaaagggactacttctgatgaagaaagtggcataattaaagct

SEQ ID NO: 236759 - DNA, 82 bp, Homo sapiens
acggcgtggaccacatagacatttacgcggatgtcggcgaagagttcaaccagataacatccctgaggacctcagagaccct

SEQ ID NO: 236760 - DNA, 100 bp, Homo sapiens
ctctcttccaaatcctgtagccataaatgtctggctaatggcatttacaggagaacgtatgaaggtcaactccctgtgctggccatcacagatcccgacg

SEQ ID NO: 236761 - DNA, 98 bp, Homo sapiens
tttgtctccttcgacttggagtctttgtccaggacgcaccagtggcagttcgcagcctccaggacttggctcgcatcgccatccggggcaccattaaa

SEQ ID NO: 236762 - DNA, 97 bp, Homo sapiens
caaattgaaggcacaggaatatccatgtcggcttgtagagagattgcaatgacacccccaaccatggttgtgaagatgctagcgacacatcgctgtt

SEQ ID NO: 236763 - DNA, 83 bp, Homo sapiens
gtgattgcacacgacgtggatcccatcgagaatgagtccctggaacgccagatgcgtgaaatggaagagaactttgccgttga

SEQ ID NO: 236764 - DNA, 100 bp, Homo sapiens
accaggggcgacggcgtactttgggcttcatcatggaggactacctgcagggttgtcgagctgctctgcaggggtacacatctttctggaatgactgcat

SEQ ID NO: 236765 - DNA, 100 bp, Homo sapiens
gctctattgccgggagcagccctattacctgaacctgatcgagctcttcctgcaggagctgcggcgccaagatgagtggagaggagaacccagccagcaa

SEQ ID NO: 236766 - DNA, 75 bp, Homo sapiens
gcccgaaacgccgaatataatcccaagaatcctgaggttggcttgaagcctgtgtggtatagtcccaaagttttc

SEQ ID NO: 236767 - DNA, 83 bp, Homo sapiens
cccctcctgatcgccctgggcttgcttctcgcggcccctgcgcaagcccacctgaaaaaggtacaccaggggttggaaaaacc

SEQ ID NO: 236768 - DNA, 100 bp, Homo sapiens
gtgcccattacttctgcctggactgcattgtcgaatggtccaagatgagcagcaccagcagtaagagggctccgaccacggcaacccagaggctgaagca

SEQ ID NO: 236769 - DNA, 82 bp, Homo sapiens
agaacttctcctcccaggttgtggaacgacacaacaagccggaagtggaagtcaggcatcacgttgggtggtttccatttag

SEQ ID NO: 236770 - DNA, 82 bp, Homo sapiens
gccgtgatctccagcgccggcctcctcagtgcgaagaagctgcagccgcacctggccaaggacaatgcagatcttcgtgaag

SEQ ID NO: 236771 - DNA, 100 bp, Homo sapiens
cagaagaatttggacttctgggttccacagaatgggctgagtttgcctatctggggcgcctggctcacgaggttggctggaagtaccaggcagtgacagc

SEQ ID NO: 236772 - DNA, 147 bp, Homo sapiens
agttcacttgcttgacctacaaggaatctgagggtgccctcaatgagcacatgaccagcttagcttctgtcctaaaggaaccctaaggactctgcaatatgaataattccctagagaacaccatctcctttgaagagtacatccgag

SEQ ID NO: 236773 - DNA, 75 bp, Homo sapiens
catggattcagtatggagaagagatggcttcccagttacgactcttcgatccccagctgaaagagaagccagaag

SEQ ID NO: 236774 - DNA, 100 bp, Homo sapiens
ctttctttttccctgtggctcagcccgttcgctggactgcaaaccgagctcccgtctgccttgcagtcattgaagtcaacaagagagacatagtcttcct

SEQ ID NO: 236775 - DNA, 82 bp, Homo sapiens
cgagaaatggccgcgtcggcaggagccttcacgtaaatgggtccagtcatgcctcccagtaagaagccagaaagctcaggaa

SEQ ID NO: 236776 - DNA, 101 bp, Homo sapiens
agacctctacttagctcagcaattcttaccttaatcctgaggttggcttgaagcctgtgtggtatagtcccaaagttttcattgaaggtgctgatgcagag

SEQ ID NO: 236777 - DNA, 90 bp, Homo sapiens
ggcgccgcgtagcttccatccgccagctgccatgagcgagcgcctccgtcccagggccgcaagcttcttatcattgggaccactagccgc

SEQ ID NO: 236778 - DNA, 98 bp, Homo sapiens
ccgggacctgtgacagggctggtagcagcgcagaggaaaggcggcttttagccagagctgcatcctgtggccctataacactcttctccaaaaggacc

SEQ ID NO: 236779 - DNA, 90 bp, Homo sapiens
tctgggcttacctgtctttaatactgtgaaggaggcaactttggctttggggattcacgtggtggcggtggaaatttcggaccaggacca

SEQ ID NO: 236780 - DNA, 83 bp, Homo sapiens
ccgcgcagccctcggagcacggttgacatcatggacatatgtgagtccatcctggagaggaagcggcatgacagcgaaaggtc

SEQ ID NO: 236781 - DNA, 75 bp, Homo sapiens
accgacacactatgctccctccaaagccacagatttgaccagttttgggccatcaatcggaaactcatggaatat

SEQ ID NO: 236782 - DNA, 100 bp, Homo sapiens
ccatgcgcagtcatgagtcgcttcaagtttatcggccttcacctaccaccatatccaggagatcatggtccagctgctgcggacagtgaaccggacagtc

SEQ ID NO: 236783 - DNA, 98 bp, Homo sapiens
gcgaggcgagcgcgggagcctgggcggcgagccgggtgtgagctgcctgaaaatgcactcggatgccgccgctgtcacggggatctgatgagcttctt

SEQ ID NO: 236784 - DNA, 75 bp, Homo sapiens
gcgcgtcgtgcgcctgggggtgcgcgcctgcgacctgcccgcctggatcgggtgctaccaaggttttgcttttgc

SEQ ID NO: 236785 - DNA, 80 bp, Homo sapiens
gaacaacaaggtgttgatgccgccggacgttgtggacatcggatacccaaggagacgaagctgaagcaggagaaggaggg

SEQ ID NO: 236786 - DNA, 100 bp, Homo sapiens
gggggctccgcggcgtcctcggcgctgaaggggttaattcaacagttcaccaccattaccggtgctgcccaccaaccctgaggagagctggcaggtgtac

SEQ ID NO: 236787 - DNA, 50 bp, Homo sapiens
cttttaccttctaccattgatgctcattcccttggtggtgttcatgactg

SEQ ID NO: 236788 - DNA, 83 bp, Homo sapiens
gtcacgggcgccggggcggctgccgacggcgggactggacaaatttacatgtattggagaccagaccagaagcccttctgaat

SEQ ID NO: 236789 - DNA, 51 bp, Homo sapiens
agatcggcagagacaccttctggcccgtgtgacagcgagagcggcccggac

SEQ ID NO: 236790 - DNA, 99 bp, Homo sapiens
ttgctgtgatcaaggctatgttgcctctgtgttaggccaatgaagttaaatgaagttcgaaagagattgaatgagctaagagaattagttcattattat

SEQ ID NO: 236791 - DNA, 98 bp, Homo sapiens
cccatctggactaccaaggagaagctatagactacttctactccaccaggaagatttgtttagtgaatgaccctaggccccagcacaagtacaacaaa

SEQ ID NO: 236792 - DNA, 100 bp, Homo sapiens
gcttttgtggaactactctacggcatctggagcaactgatccaggatgagaagactgataaaagaagaagctagctgaacagctgtaaaatgcccaaatc

SEQ ID NO: 236793 - DNA, 100 bp, Homo sapiens
aaggaacagatccccggaggaggaaatctgaaatagagtactatgctatgttggctaaaactggtgtccatcactacagtggcaataatattgaactggg

SEQ ID NO: 236794 - DNA, 100 bp, Homo sapiens
ggaacccatcagcgtcagcagcgagcaggtggttcgagatcagatctctcactgcacagtgaaattgcgccagaccacaggtctcatggagtactgcttg

SEQ ID NO: 236795 - DNA, 75 bp, Homo sapiens
cgggtcgggggtcccgtgtgcatattttaccaaatgttgcaagaactctggagttcttatggtagtaaaatgccg

SEQ ID NO: 236796 - DNA, 74 bp, Homo sapiens
ttgagaatcccagccaagttttaaattgtgaaagctattcctctacacagccgactagttatgatcagagcagt

SEQ ID NO: 236797 - DNA, 83 bp, Homo sapiens
ctttcacaataagagcagaggatggaacacttcagtgcattcaagactatgtcagagagtcacaatgaccttgcacaataaca

SEQ ID NO: 236798 - DNA, 98 bp, Homo sapiens
ggattcgcggcccggagctcgggaccgacctgcctagagctggaacgttacctccagagcgagccctgctatgtttcagcctcagaaatcaaatttga

SEQ ID NO: 236799 - DNA, 82 bp, Homo sapiens
atcaggaagatactgcagagatattctactccatctcattcattgtacaggaactgtggctgcaccatctgtcttcatcttc

SEQ ID NO: 236800 - DNA, 101 bp, Homo sapiens
aggaaatgagggcaacttctgaagacttcaacaaggagtacgagacccaatctagtgcagaagccaaatttgtgaagcagctagaccaatgtgaaatgatt

SEQ ID NO: 236801 - DNA, 100 bp, Homo sapiens
ctccccagaatacaccttgcttctgtagaccagctccaacaggattccatggtagctgggatgttagggctcagaccaaactagagtcagaacgaatact

SEQ ID NO: 236802 - DNA, 82 bp, Homo sapiens
aaacatggaaaagctcctattctgattgctacagatgtggcctccagagggctaggtcagattgtcttagtcaagatcctga

SEQ ID NO: 236803 - DNA, 100 bp, Homo sapiens
agacatcaagccacctgtatcaccatggggattgtgcttcagaaggaaagtggaggatagggtggagcccagtgacaccatcgaaaatgtgaaggccaag

SEQ ID NO: 236804 - DNA, 96 bp, Homo sapiens
cagggactgaaacggggggagagaacaatgataaagaagaagaagagaagaaagatgaaacttcgagctcctctgtgaaactggaacgccaagctg

SEQ ID NO: 236805 - DNA, 90 bp, Homo sapiens
atggaggccgtgaagaccttcaatagcgagaacccttaggagaaatcttgagagtggacagcaattgtgaagatcgccagagagttctgt

SEQ ID NO: 236806 - DNA, 100 bp, Homo sapiens
ctgccctcagctgcactgtggcaaggcttttgcttccaaatacaagctgtataggagaataaaggcagccccgttgatgactgaaaatgacaaagcatcc

SEQ ID NO: 236807 - DNA, 83 bp, Homo sapiens
aaaaagtagatgttatcatatctgagtggatgctcgaattacatctttacaagaggaggtgaagcatctcaaacataatctcg

SEQ ID NO: 236808 - DNA, 121 bp, Homo sapiens
ctgagactgggcctgaagggagagtttcagttcttcattgacggaatgaatctgaagtctgctgcagtaaaacacagaaggctttaaaatgttttcttgcataaaattcaaaacttttaag

SEQ ID NO: 236809 - DNA, 101 bp, Homo sapiens
attgtgatccagaagcaaacattcatatcccaacattcctgtgtcaattcgacggagctggatgaactcattcaggttgctgtagtaaaactaaaaaatgc

SEQ ID NO: 236810 - DNA, 100 bp, Homo sapiens
aaagagctgagacagaagtacaacgtgcgatccatgcccatccgaaaggatgatgaagttcagggtgttgaaagcagcaggggcctagaagacattaaac

SEQ ID NO: 236811 - DNA, 99 bp, Homo sapiens
ctccggctccggcttctgctgttgctcttctccgccgcggcactgatccccacaggaaggatctgagtctctccctgcggagacagccctgaagaactc

SEQ ID NO: 236812 - DNA, 97 bp, Homo sapiens
actgcttcaggagcctaaagcgtggggaactgcaagcacatgttgaccagataactgaaatggcagcagtaatgaggaaagccattgaaattgacga

SEQ ID NO: 236813 - DNA, 90 bp, Homo sapiens
tcagcgggagaggagtctccaccaggactgaccgctgccgcccagcacgtccaggaagccattaatttgctagaaccaatgacaaacgac

SEQ ID NO: 236814 - DNA, 114 bp, Homo sapiens
ggcagcacggagagcctgcaggagaagcccatggagatcgggagtaccctgacttctaccggaagctctacggcctcttggacccctctgtctttcacgtcaagtaccgcgccc

SEQ ID NO: 236815 - DNA, 98 bp, Homo sapiens
cggattacactcctgcttccagacgacaagtcgatttaaattccaggttgtcatcaatggccgagagtttcccccagctgaagctggaagcaagaaag

SEQ ID NO: 236816 - DNA, 90 bp, Homo sapiens
ctgcggctggtccaggccttccagtacacagacgagcatggggaagggacagcaccagactattctctgcgtgttgcactgcatagtgaa

SEQ ID NO: 236817 - DNA, 82 bp, Homo sapiens
gggtgaagtttgcaacggcggccgtgattgtaagcggagatgaatattctatctttcctcagacatactccatagatattaa

SEQ ID NO: 236818 - DNA, 100 bp, Homo sapiens
ctttcacaataagagcagaggatggaacacttcagtgcattcaaggtgtcatggagaaactccagctgggcccagagattctgcagcgggaaaatccaag

SEQ ID NO: 236819 - DNA, 98 bp, Homo sapiens
gtcagccttcccagtagctgggaccacagctcttcctgctgcccacattcctgcaccccctcatgagggtagtcccagagaccaggcgatggcatctg

SEQ ID NO: 236820 - DNA, 83 bp, Homo sapiens
gcatgctgaacatgctcatcgtgttccgcttcctgcgtatcatccccagcatgaagacaatgcagatcttcgtgaagactctg

SEQ ID NO: 236821 - DNA, 100 bp, Homo sapiens
agaaaaggaagcaacaacataatgcccagagttggagccaattaaaccagagtcgtccttgtctactccactaccaaatgttgaagttcttcaagaatca

SEQ ID NO: 236822 - DNA, 98 bp, Homo sapiens
attgcaagcattctatccaaatgaccaatgatgcgagctcagagtcaatagcatccttctctaaacaggaggtcatgagtagctttctgccagaggga

SEQ ID NO: 236823 - DNA, 96 bp, Homo sapiens
gcccctaggcccgggtcccggatccccgcgcacccggccagagccccacagtcttcgttataacctcacggtgctgtcctgggatggatctgtgca

SEQ ID NO: 236824 - DNA, 76 bp, Homo sapiens
aaacctgtgaaaaagaacttgccaaaatcaacacattttattcagatcggcgccaatggtgtgccatagccatcct

SEQ ID NO: 236825 - DNA, 74 bp, Homo sapiens
tgagcaagacttcggcagctgtgccgacctggaaaaggagccaaggcaaagagggaccactgtgctcatggacc

SEQ ID NO: 236826 - DNA, 50 bp, Homo sapiens
cgaagcagcccatgcggtgactgaacagagaaaggagttcatgaaggcag

SEQ ID NO: 236827 - DNA, 74 bp, Homo sapiens
gtgtcagcagacaggcctgcagataccccagctcctgcccctcctaaagctgaagccaaagcgaaggctttaaa

SEQ ID NO: 236828 - DNA, 88 bp, Homo sapiens
gagccttgttgatccttaacgagctggtccgaatcagcagcatggagggagagaggctgacccgcggctgattgagtccctctcccag

SEQ ID NO: 236829 - DNA, 74 bp, Homo sapiens
caacttccagtcctgcaagctccattcatggtatgagagaatcgaaatcccaatccatattgtacctcatgtca

SEQ ID NO: 236830 - DNA, 75 bp, Homo sapiens
ccctgccggagatccctcagccctggctggccatgtttttggtatactgtgcactggagaaagaacctgtgccaa

SEQ ID NO: 236831 - DNA, 103 bp, Homo sapiens
ggaccgtgggcagccagggtcggtgaagagttttgcggcctccaggtggtggatccaatttttcattaggttttgatgaaccaacagaacaacctgtgaggaa

SEQ ID NO: 236832 - DNA, 76 bp, Homo sapiens
tactcgggcaagaccaccttcgtcaatgtcatcgcgcaatctgcacatcgtgctgccacacgaggcttcattcgtt

SEQ ID NO: 236833 - DNA, 100 bp, Homo sapiens
gggaagggacctcgaatgtgggaccccagcccctctccagctcgaaatcgttctgggttgaatgatggacagtggcacgaggttcgcttcctagccaagg

SEQ ID NO: 236834 - DNA, 82 bp, Homo sapiens
ccactttcgccagcccgtgccgcgagcgcggcctgcaggaggtctgcagcccagagggcaccttctgcaaacatgtctgtgg

SEQ ID NO: 236835 - DNA, 96 bp, Homo sapiens
tttggaaactgaacaggcaggattagaatcatacgtaggtaacctttccagagatgtgacagaagtccttatacttcagttgttcagtcagattgg

SEQ ID NO: 236836 - DNA, 75 bp, Homo sapiens
agatccgcatggagcctgacgagacgcttcaagcacaaatgccagcctgatatctacttcttctacaattgccaa

SEQ ID NO: 236837 - DNA, 75 bp, Homo sapiens
ggccaattctgccataagccctgtcctccagatatggagtttggacctccaacagttaatgataaactaatgaga

SEQ ID NO: 236838 - DNA, 75 bp, Homo sapiens
catttcatgtagatactccagaggaaagtggaagagaaagccaatacccacctcctcttgggcatgtgcttagac

SEQ ID NO: 236839 - DNA, 74 bp, Homo sapiens
ggttttgaaaaatgtcaaaccagaccaatgggtgaagattgactggggcgactttggggtagaggcagtgtctg

SEQ ID NO: 236840 - DNA, 97 bp, Homo sapiens
gcggaggacgacgcgctcaaccagatcgcgcgggaggtgtcatggagaaactccagctgggcccagagattctgcagcgggaaaatccaaggcttat

SEQ ID NO: 236841 - DNA, 75 bp, Homo sapiens
tgttttgatgattggcagagacccactgtctgggcagaaaaggcctctcaaacactcacctcatttggaatgaag

SEQ ID NO: 236842 - DNA, 100 bp, Homo sapiens
gcctcattcccagttacatccgtgattctgctgcagctgtagtagtttacgatatcacaagaattcagaaattggtattagcaggaagaatgggagaagc

SEQ ID NO: 236843 - DNA, 100 bp, Homo sapiens
gttgaagagttcaactttcccagaagttgttctaacgctgcctttgctttaaaacagtattacttgcggtaagaatgattgatgttggctgatattggag

SEQ ID NO: 236844 - DNA, 75 bp, Homo sapiens
ggccgcgggccctgtgtcttgcaggagtaccagcagttcaggaactgtggctgcaccatctgtcttcatcttccc

SEQ ID NO: 236845 - DNA, 74 bp, Homo sapiens
cggaagctggcgtactccggcagcgaaagcggtgcagacgggaggaaggtagcaaattatggagttggaggaca

SEQ ID NO: 236846 - DNA, 77 bp, Homo sapiens
cggaagtattgacggaaagcttgaattacctacatgtggatatcaaagtattgcagagtgccttagcagccatccga

SEQ ID NO: 236847 - DNA, 50 bp, Homo sapiens
atgagatccgcttcctgcccaacggatggcactggatctttaaaacgcag

SEQ ID NO: 236848 - DNA, 83 bp, Homo sapiens
ctttccccgtcagcatcccagccgtgctcacgctgctgcggactctggagcgtgagaaccagcgcctggaggctgtcctggcg

SEQ ID NO: 236849 - DNA, 75 bp, Homo sapiens
tggagcctccgccgagtcgcagacaacgcctccgggagggtcatttaggaaatcgtaaatcatgtgaagatggga

SEQ ID NO: 236850 - DNA, 101 bp, Homo sapiens
tcccgtcaccctcaccaatgtcgtcttccggctcgaaggctctgggttacagaggcccaagatcctcaacgttggacatatctgaagagatggattaagaa

SEQ ID NO: 236851 - DNA, 75 bp, Homo sapiens
acgaggcggcgggctggagacatggaccgcggcgagcaagatgaaattgaaatggccaatgagcacaccctcatt

SEQ ID NO: 236852 - DNA, 50 bp, Homo sapiens
cagtccctcgtccagccacccccaggagaagtacagcatcggggagccca

SEQ ID NO: 236853 - DNA, 88 bp, Homo sapiens
tccagatttgatggccttcacaatccaagttccacaatatattgactactgccacaattccggagtgggaatagctttgcgaaaaatg

SEQ ID NO: 236854 - DNA, 100 bp, Homo sapiens
tttgctgacctgataatgaagaattattttgcaccactggatgttgtttactggtggagattttcattttacctttatgtatttacctacggagtcagat

SEQ ID NO: 236855 - DNA, 82 bp, Homo sapiens
cgttaccttcttgctggcgttggtgggagccgtgctctacctctatccgctgagctccttgccaaaaaacagccattaaaaa

SEQ ID NO: 236856 - DNA, 101 bp, Homo sapiens
caatcctaaagcaatagcagtagatccaatagcaggcttcagtgaaaggagtccttctgtcactcgtcactagctcgctcgctcactgtgggaggagcccg

SEQ ID NO: 236857 - DNA, 100 bp, Homo sapiens
gacgacattcgaaggatggaagaagagacgaagagacagctggatgaagctgttgccaaaatggttcaacagtgctgtacttatgttgaggaaatcacag

SEQ ID NO: 236858 - DNA, 99 bp, Homo sapiens
tgcctggcactcatatttaaaatcataatgacagtattcacttttggcatcaagggaatcctgcaaaacctggcagctatgtatggaggcaggcccagc

SEQ ID NO: 236859 - DNA, 82 bp, Homo sapiens
gagcgagttacgagaattcccggccgctgcaagggtgaccatgaaccagaccgaacataatctgacagtgtcccagattccg

SEQ ID NO: 236860 - DNA, 100 bp, Homo sapiens
gcagcagggaaaggcaaaggcaaaggcggctcgggagattcagccgtgaagcaagtgcagatagatggccttacagacaagacgatgactgagttggaga

SEQ ID NO: 236861 - DNA, 101 bp, Homo sapiens
cgcaagccccgctgccttgctacggctactacccctgctttatgccaccacgggctgttccctgaccctgcaccatacggagaaaccagaacatgaagaca

SEQ ID NO: 236862 - DNA, 75 bp, Homo sapiens
ttagcagtcacgacctccagcacagggatgcttgaagatggaaagaaatttgattcctcccgggacagaaacaag

SEQ ID NO: 236863 - DNA, 129 bp, Homo sapiens
ttgtttcttatatgtgatgccattccagcactggactcatggaggctgagcatttattcaggtgaactctctccatgccgaatcaacaacggtggctgccaggacctgtgtctgctcactcaccagggc

SEQ ID NO: 236864 - DNA, 131 bp, Homo sapiens
acaacaccgtgctcctcgaccccccactgatcgcgctggataaagatgcgcctctgcgatttgcaggaaattgtgggtttcttggaaggctctggatatctgtgacagacctcagggacacagataatttg

SEQ ID NO: 236865 - DNA, 74 bp, Homo sapiens
tgagcctccgcgccccgcaggccctggcaatgccaagtgagtacacctatgtgaaactgagaagtgattgctcg

SEQ ID NO: 236866 - DNA, 75 bp, Homo sapiens
ctatgaagacacgcttcttctggaagaccagccaacagggagagcgcgcggcggacgcgcccgggacgcgcggcg

SEQ ID NO: 236867 - DNA, 100 bp, Homo sapiens
tcccgtcctttcgctatgaagagagcgacctggagcggggatacacggttgtgaagatgagaaaagaagtgaagagaattcgagttttagttatccgaaa

SEQ ID NO: 236868 - DNA, 75 bp, Homo sapiens
cctgatggctccacgcatttcccttcgtggctttggtgaagcacgtgcagtctaaaggatacccaaatgaacgtt

SEQ ID NO: 236869 - DNA, 100 bp, Homo sapiens
cgccgcaggccgggaggagccgcagcgccgggcgaccccgcccgggcctcgggcatcaccaactctgaatttcatactggtcaagcagagaagattttgc

SEQ ID NO: 236870 - DNA, 51 bp, Homo sapiens
ggcgcctccggcccatttacggtgttacagggtcttgattatttacatacc

SEQ ID NO: 236871 - DNA, 75 bp, Homo sapiens
cgcctgtcacctggacccgcgcgtgttcgtggacggcctgtgccgggccggtctaattgaagccaacggagaact

SEQ ID NO: 236872 - DNA, 87 bp, Homo sapiens
cctatatacttggagttggagacaggcacctggataaccttttgctaacaaaaacagtctcaaaccatgaattatgtgggacagctg

SEQ ID NO: 236873 - DNA, 100 bp, Homo sapiens
ggccgcggccatggcgtacgcctatctcttcaagtacatcataatcggcgacacagagactctccaacatgtgccttctgaccatacaaatgaaacttcc

SEQ ID NO: 236874 - DNA, 115 bp, Homo sapiens
cgctggtggtgcaggcgctgcgccgcaacgccgagcgcaccgacatctgcctgctcaaagcaattctgtggtgttcttggtcacacatttatggagtttctgaagggcagtggag

SEQ ID NO: 236875 - DNA, 82 bp, Homo sapiens
gtcggcagagcaaggggcttacgcagaaggacctggccacgggtgcagcccggaatcccgaggatgtggaccgggagcggcg

SEQ ID NO: 236876 - DNA, 100 bp, Homo sapiens
caagaaatcacagtgctgagtcagtgtgacagtccatatgtaaccaaatattatggatcctatctgaagatcatggggaatttcagaggtcatgccctcc

SEQ ID NO: 236877 - DNA, 100 bp, Homo sapiens
cctggaggtgccatttccctctctgttgaagcaaaggccggggcagacctcctagccctgagcctgtgcaattatttcgagagtcaaaatgtggatttcc

SEQ ID NO: 236878 - DNA, 82 bp, Homo sapiens
ctacaatacctcttgggactgggctcgatttgaggccgtatctgaggaacagcagcctgcactcaagggcaaaaagggaaag

SEQ ID NO: 236879 - DNA, 75 bp, Homo sapiens
cgtggagcggctgaagggcatgtccctgcttgtcagggctgagagcgacggctagtcttgaattcctgacctcag

SEQ ID NO: 236880 - DNA, 85 bp, Homo sapiens
ctttttcagaaatgcgcagagcaaacatctttcaaagaataactgaagtgaagtgatggactccgatttggagagtagtaagacg

SEQ ID NO: 236881 - DNA, 75 bp, Homo sapiens
cgcggaaagaaatgcttctttgtgaaattttttggaacagaagatcagttttgagtgatgaggtgaagaggaagc

SEQ ID NO: 236882 - DNA, 83 bp, Homo sapiens
gttaaggattccaagtaactcttatttgaactgtaagagtaaatgggtccagtaattggaatgactccagataagagagctga

SEQ ID NO: 236883 - DNA, 83 bp, Homo sapiens
caggaacccacagataaccaagtcagacttcgtaagagaaaggatattgagtcgttgatgtctgagggtaacaaatctcgcac

SEQ ID NO: 236884 - DNA, 50 bp, Homo sapiens
agagactttccgttacatgaagagtggtttttcctcctgtctcatgaggt

SEQ ID NO: 236885 - DNA, 82 bp, Homo sapiens
cttcaccgccgacttcaagaagattaaaaccgaagatctcagtgactccctgcagcagaccctctcccatcggccatgccac

SEQ ID NO: 236886 - DNA, 75 bp, Homo sapiens
agctgtgcagccgcgaggaggcgcgggaggtgttcgagaacgaccccgagacgattgacgagatgcctgaggctg

SEQ ID NO: 236887 - DNA, 83 bp, Homo sapiens
agccgctcttaggcgacacacctggaagcagggcgccctgcgtccggcagaggaggcgagcatcccgctcaggtgatgaggaa

SEQ ID NO: 236888 - DNA, 83 bp, Homo sapiens
tattgctgtgggtgctgggacttcccgtccgcggcgtggagggaagctcttcgtgggcggtcttgactggagcacgacccaag

SEQ ID NO: 236889 - DNA, 97 bp, Homo sapiens
cattgtgacagaaacttcctttaccattgatgagctggaagaactttatgctcttttcaaggcatgctggccaacctagtggagcagaacatctccg

SEQ ID NO: 236890 - DNA, 76 bp, Homo sapiens
agtacaccgtggtgacattgtatcattggtttgtgtgacttcattgagacacattacctgaatgagcaggtgaaag

SEQ ID NO: 236891 - DNA, 100 bp, Homo sapiens
gacgagaacgtgcgcggggtgatcaccatgaacgaggagtacgagacgaggttcctgtgcaactcttcacaggtgagggttcagagtatggtgccagtgg

SEQ ID NO: 236892 - DNA, 75 bp, Homo sapiens
ggaattagcagaagacattatgtcagtttcaccagtgatcattaaagaatgggcagcttacaaaggaaagtctcc

SEQ ID NO: 236893 - DNA, 51 bp, Homo sapiens
ctgatcatcaaccaccttgacctgaccagagctccttaataagcatttata

SEQ ID NO: 236894 - DNA, 50 bp, Homo sapiens
ggcaacccccagcggcttaagccatggctctctgctttctatccgtcaag

SEQ ID NO: 236895 - DNA, 74 bp, Homo sapiens
cgcgatggggcccttctgggcgagaaaggccagatgacgtgtactactgtggaataaagtacatcaaagatgat

SEQ ID NO: 236896 - DNA, 99 bp, Homo sapiens
tcaccaaactggaggatgcctatgtattccctggggatggcgcatcacacaccaaagattgagaggatccagaatccagatctctggaatagctaccag

SEQ ID NO: 236897 - DNA, 74 bp, Homo sapiens
ggtgtaccaggcgaagctggccgagcaggctgagcgatacgacgacatgccttgaattggaacgctacctacag

SEQ ID NO: 236898 - DNA, 100 bp, Homo sapiens
gttaaggattccaagtaactcttatttgctctacattaatcatactcctccaccactgtccaagagtaaggagagagaaatggacaagaaagatttggac

SEQ ID NO: 236899 - DNA, 80 bp, Homo sapiens
ctcatcagtgagctgtccctgctggaggagcgcttccgggggagcccaaagaagtgtgaagctgaagaggcagagccacc

SEQ ID NO: 236900 - DNA, 100 bp, Homo sapiens
atatgaatatcatcttggctggaggccaggtggacaacctgtcatcactgacttctgaaaaggaaaatttgttggcagattgtttgcagggttgttttgt

SEQ ID NO: 236901 - DNA, 98 bp, Homo sapiens
ccacagaggcggcggagagatggccttcagcggttcccaggctccctacctgagtccaactctaaaatagagctcaagcttgagaagagagaaccact

SEQ ID NO: 236902 - DNA, 75 bp, Homo sapiens
ctgaaatccgacactactgattctagtcaaggatgacccctccggcgaaggtgtcctgccctcggcccgcggccc

SEQ ID NO: 236903 - DNA, 90 bp, Homo sapiens
tcctctttgacaacacgggccctcttccgccctctctggatgagggaacagaagtggaggaaacaaaagaagcagcagcacgcacagtcc

SEQ ID NO: 236904 - DNA, 99 bp, Homo sapiens
gccgagaatcacctcaatggcaagaattcctctttgactctgactggagagtgaaaccagcagtgtgtgtagcagcagtgacactgggctctttaccaa

SEQ ID NO: 236905 - DNA, 82 bp, Homo sapiens
aaaataccacgacaaaaccaccctaggcattgtctaaatataggagcagatctgcagatggggccaagaattacttcgaaca

SEQ ID NO: 236906 - DNA, 101 bp, Homo sapiens
caactgccaaatgggcttgaagctgcttacgaatttgccgacagagatgaagtccggtttttcaaagtttatgggaaaaacagatggagactattacaccc

SEQ ID NO: 236907 - DNA, 74 bp, Homo sapiens
gccttgcttggagctgacgccgacgggagttagctgtgccagtggttcatgacgggggcgctcttttggccttt

SEQ ID NO: 236908 - DNA, 75 bp, Homo sapiens
gccctaaacttcgcctggtccaacttcaggctttgaacttggcctactccagcatttacggcagctaccggaact

SEQ ID NO: 236909 - DNA, 75 bp, Homo sapiens
gagacgatgcgccccgcgcagccgcctgcgcctgcgggagccatagcctgggctggaagctcttctacgtcacag

SEQ ID NO: 236910 - DNA, 101 bp, Homo sapiens
gcagcagcagcaggcgaggaggaagatggcgggacggctgccggcctgtgtggtggactgtggcacggggtaagaatgattgatgttggctgatattggag

SEQ ID NO: 236911 - DNA, 100 bp, Homo sapiens
ctgcagaaggtctctggagacatcttcagcagggaaggtattcatgtaaatcaagaattactgcaaatatctccttgtatcacagagcagttcattgagc

SEQ ID NO: 236912 - DNA, 100 bp, Homo sapiens
gttcgtcatggggctgtttggaaagacccaggagaagccgcccaaagaactgatgccttcaattaagttgcagagttctgatggagagatatttgaagtt

SEQ ID NO: 236913 - DNA, 75 bp, Homo sapiens
tctagcggccgggactctgaactatggcgggcaatgccaggaagctggtgaagggtttcctctcctccaccatgg

SEQ ID NO: 236914 - DNA, 100 bp, Homo sapiens
aggctcctcagagtgcactgagatcccaggaggatggccacatccccccgggctacatctcacaggacatgatccacatcgcggacaccaaggtcgccag

SEQ ID NO: 236915 - DNA, 100 bp, Homo sapiens
cctcagtctcccaaagtgctggaattacaggggtgtatgcaacagcgttattgcaacaggctaacgaaaacagacaaaattcaactggaaaagcatgttt

SEQ ID NO: 236916 - DNA, 98 bp, Homo sapiens
gaacctgtacaacgagacggtggagactctcatggctggggaagttagtgccatggttgtttttccagaaaggaggagtcaaggaagcccttagtgaa

SEQ ID NO: 236917 - DNA, 100 bp, Homo sapiens
gggccaggaagtcggagtttgagccccggaggcagagcggctgccatggtaactaggatttctacctcaaccgcgagacctatgcaaggacggtgtggac

SEQ ID NO: 236918 - DNA, 100 bp, Homo sapiens
tataattcccggcttctcgagaagacactacagcctcaaggaggtcttgggcgtctttggtactggcttttttaggggtctgcctggggattacccttgc

SEQ ID NO: 236919 - DNA, 76 bp, Homo sapiens
aaatcaggactgaaatacattaatgtgggtgatttagctcgagaaggaatcccccatcccagaagacaaagaccgc

SEQ ID NO: 236920 - DNA, 100 bp, Homo sapiens
gtgctggcatccagtcccatcatggagggaaaactcgatgccttgtgggtcctactgaggaaaggatatgatcgtgtgtctgtgatgcgtccacagccag

SEQ ID NO: 236921 - DNA, 82 bp, Homo sapiens
catgatgtgcgatgtgcggaagggcacctccacccgctcctttagcggcagagttttccgagtgaccttcttgatgctggct

SEQ ID NO: 236922 - DNA, 80 bp, Homo sapiens
aagccccggacgcaggcctggtatggagaacgagaggaaagaagtcccttatcacggaacgtcaaggtcgtgggaaataa

SEQ ID NO: 236923 - DNA, 75 bp, Homo sapiens
caagaagtattcaaaccagaaaacattagcctgaggaacaaacggcagttctgctactgcgaattgatgacatcg

SEQ ID NO: 236924 - DNA, 50 bp, Homo sapiens
tcccaaagtgctaggattacaggtttcattgctgcagatatcaaagggac

SEQ ID NO: 236925 - DNA, 100 bp, Homo sapiens
atttgtggcctatacgctgattcattgattagacttctttgcacaggagagctgctaaaaattactgcggtgaacagctgtggaggaagatgcagagtca

SEQ ID NO: 236926 - DNA, 100 bp, Homo sapiens
gcctccgaagatgggggatttctacgacccggagcacccgacccctgatggtttgagtccagccaatgacactggagccaaaaagaagaaaaagaaacaa

SEQ ID NO: 236927 - DNA, 100 bp, Homo sapiens
ggacttttgggaatgaggctcgattcatcaggcggtcttgtacacccaatgcagaggaccctgatgctcccataagacagaaaatgccccttgatgatct

SEQ ID NO: 236928 - DNA, 75 bp, Homo sapiens
gccatctttccaggaggctttggagcggctaaaaacctggggatatgagactttctactcggaatatcctgagtg

SEQ ID NO: 236929 - DNA, 100 bp, Homo sapiens
tgttcgacaatggcagcatctacaaccctgaagtgcttgatatcacagaggaaactctgcattctcgcttcctggagaaatttggagagcttgtaatgac

SEQ ID NO: 236930 - DNA, 74 bp, Homo sapiens
ccgggactctgaactatggcggatggtgccatgacaatggtgtgaactacaagattggagagaagtgggaccgt

SEQ ID NO: 236931 - DNA, 74 bp, Homo sapiens
gactattctccgggagccgtccgtgtcaccgccggaacctggcgcagcagaagatggctgtgccacccacgtat

SEQ ID NO: 236932 - DNA, 100 bp, Homo sapiens
tgttaactgtctggcctatgatgaagccatcatggctcagcaggaccgaattcagcaagaggtgacagtttcctgaggagaggggtgtatccaggcttac

SEQ ID NO: 236933 - DNA, 90 bp, Homo sapiens
cggaagccaaggagacaggaacatgtggctgctcccagctctactccttctctgcctctcaggggccatccatccaacctttaacttgaa

SEQ ID NO: 236934 - DNA, 100 bp, Homo sapiens
gcctcacccagttccaggtagacatggaggccgtcggggagacgctgtggtgtgactggggcaggaccatcaggtacggcttcaggtccagagcgtggag

SEQ ID NO: 236935 - DNA, 85 bp, Homo sapiens
cgggaggctcccgggcttgcgtggattgtaaaccatggctgtgtggatacaagctcagcagctccaaggagaagcccttcatcag

SEQ ID NO: 236936 - DNA, 75 bp, Homo sapiens
cagtcttcctcttgatccatatgtttcagggcgctattttcttggaaggtgttactgttaaaggtgtaactcaag

SEQ ID NO: 236937 - DNA, 82 bp, Homo sapiens
cttggcgcctgcccctgcaacgggagcatgatgccttcttctgtagagtgggcgctttgcagaatacgtgttgaatgaaatc

SEQ ID NO: 236938 - DNA, 90 bp, Homo sapiens
cagagacaaaggtggcagctttggagcaagtggagagccagaaaaggatccagaactggagtggaagctgtctgtgatcctggaaacata

SEQ ID NO: 236939 - DNA, 75 bp, Homo sapiens
gatgatgctgaaaggaataacaaggcttatctctaggatccataagccattcaaactcctccccacgacactctg

SEQ ID NO: 236940 - DNA, 75 bp, Homo sapiens
tttgtgcaatgtttagccaacccaaattaccttaattgcaggagtagggctgattggagccattgtacagtgtcg

SEQ ID NO: 236941 - DNA, 75 bp, Homo sapiens
tgggtgcagttcctgcagtaccccactctacgatcagcagctgaccatgccactgcctcggtacggctccgggca

SEQ ID NO: 236942 - DNA, 95 bp, Homo sapiens
ggaatccattatggtgtcattacatgtgaaggctgcaagggtctcactgtgccacccagctggagtatagtggtgcaaacacagcttgctgcaac

SEQ ID NO: 236943 - DNA, 96 bp, Homo sapiens
atctctgctctggaaagttcttgtcaataccaagcaacagccaactcagtttataaatccagaaacacctggctatgttggatttgcaaacctccc

SEQ ID NO: 236944 - DNA, 90 bp, Homo sapiens
aggagccctgccgaggagctgaaggccttcagagtccttggggtgattgacaagctgttccaaagacctaatgcgcttgctgtccagcag

SEQ ID NO: 236945 - DNA, 125 bp, Homo sapiens
tacagcgttcacaagacttcatcacctctttgtacatcttctgcaattactcgaaatgccagatctggagtaaggaatattgtcatcacctggattttgagaaagaaaaataacttctctgcaag

SEQ ID NO: 236946 - DNA, 74 bp, Homo sapiens
aactaagaccaagtcctcgctggactgctcagggtgccagacctcatcgtgatgtgtccaatctagatcccaac

SEQ ID NO: 236947 - DNA, 75 bp, Homo sapiens
tacatctactgccagctcaggcacaaatgtacatggttctccaaggtaggagcattgcttttcgtggtgaaagag

SEQ ID NO: 236948 - DNA, 95 bp, Homo sapiens
ctccatcacccaccaacaacaccacaataatccacagccaaggagcatcagatccatgctgctgctgactcggagccccacagcttggcacaggc

SEQ ID NO: 236949 - DNA, 102 bp, Homo sapiens
ggaccacaggcttccagtacgagctggttaggaggcacagggcgtcggacctgcacgagctgtctggtactccaaagattcaggtttactcacgtcatccag

SEQ ID NO: 236950 - DNA, 83 bp, Homo sapiens
gcgacgctaagttgctgatcgtggcgccattgagacccagagcagcagttctgaagagatagtgcccagccctccctcgccac

SEQ ID NO: 236951 - DNA, 87 bp, Homo sapiens
tctttttactgccaagttcccactctgcatggtgttccacatcattgacttactgctttgtgaggagcgagaacccgagcagcgcca

SEQ ID NO: 236952 - DNA, 90 bp, Homo sapiens
cagggccgtgccgcagatgcccaccggaatggagaaggaagaggagtcgggcgtctctggccgagcctctttttgtggaaaacgacagca

SEQ ID NO: 236953 - DNA, 90 bp, Homo sapiens
ggcgggctgatgggcgccggcattgcccagttagaccgattcaaagaaccacctgcatatggacctatgtgtgatatcctgtggtcagac

SEQ ID NO: 236954 - DNA, 75 bp, Homo sapiens
ctgggatctgatgatgatgagcaagaagatcctaatgattattgtaaagcacgtcagctaactgttcagatgatg

SEQ ID NO: 236955 - DNA, 75 bp, Homo sapiens
gacagtgcccaggggtctgagtctcacagcttgtaaaggacaatctctatgggaagcagaaggcaaggaccccgg

SEQ ID NO: 236956 - DNA, 82 bp, Homo sapiens
ccccagaagctccatatacttcccatgataaacttaaggatgaagatttgataaagtggaaggcactgtttgaggaagtccc

SEQ ID NO: 236957 - DNA, 85 bp, Homo sapiens
ccaacgcctggctcggagcagcagcctctgaggtggacgcggatctgtcaacatgggtaaaggagaccccaacaagccgcggggc

SEQ ID NO: 236958 - DNA, 75 bp, Homo sapiens
aggaggcgagctagccgggagttacaccgccaccgccaggtgtggacactgccagcggctgcagccgacttggaa

SEQ ID NO: 236959 - DNA, 100 bp, Homo sapiens
gcccttggcctcctcctgctgctactgtgtccagcgcagtctgatctgaaatgtgtccaggatgccaagggaggttctttctacagagatcactgccctg

SEQ ID NO: 236960 - DNA, 100 bp, Homo sapiens
aggaattgtggatggttcggggagcattggagctgcagtgggccaggtgttgcaccctggcctgctcgctcaggtgcatatggacctgctgctgatgaag

SEQ ID NO: 236961 - DNA, 75 bp, Homo sapiens
gcgggacctggcgccaccttgcaggagatacaactcgtcaacgaatcaaattcagtgatgacagagtatgcaaga

SEQ ID NO: 236962 - DNA, 83 bp, Homo sapiens
ggatccacgcctgatggctccacgcatttcccttcgtgactgtccaagtgattgtccaggctcggcttggtgaaaagatttgc

SEQ ID NO: 236963 - DNA, 75 bp, Homo sapiens
cgcaactgtctgatctcagttcatgggtctgcggaagagggagctgctgaaggagctgctaccagtcatcgggca

SEQ ID NO: 236964 - DNA, 88 bp, Homo sapiens
tcgggcaaagaccgaattgaaatctttccctcgcgaatttttttgaagggaaggagctaagattgaagcaggaatactttgtggtggc

SEQ ID NO: 236965 - DNA, 99 bp, Homo sapiens
caacatctccttcgcagccgcgcaaaaaaaagcagcccgacggccatggaggctgaagagacgatggaatgccttcaggagttccctgaacatcataaa

SEQ ID NO: 236966 - DNA, 92 bp, Homo sapiens
ccgccgtagccgcctccgagcccgccgccacatcctctgagacaatgcagatcttcgtgaagactctgactggtaagaccatcaccctcgag

SEQ ID NO: 236967 - DNA, 99 bp, Homo sapiens
cctgcctcagaacagactgtcacagtggaggaagggcgaacgctgttggagaagctgttcagccagcaggagaacgggcctccagaagaagcagagaag

SEQ ID NO: 236968 - DNA, 74 bp, Homo sapiens
accattttatgatttactggatgaactgataaaacccaccagtctagttctctcctgcgctatggtggaaacct

SEQ ID NO: 236969 - DNA, 83 bp, Homo sapiens
ggggctcagtctgttcttgtgaggctgagggtctggggccctgtttgtgctcttcgtcctggcctacatccacatcgtcttct

SEQ ID NO: 236970 - DNA, 74 bp, Homo sapiens
tgttttttctacctgttgacgtgtcaagcactaactaactggcatcaaatactcacaacatagctcaggatctg

SEQ ID NO: 236971 - DNA, 75 bp, Homo sapiens
gtgcccttgtggcgaatggggctcacgtcgagaatatgatgaagaatgggctaagaaaattcagagtgaaaagtt

SEQ ID NO: 236972 - DNA, 75 bp, Homo sapiens
ctctttccccgtcagcatcccagccgtgctcacggaacttgctactaccagcaccatgccctaccaatatccagc

SEQ ID NO: 236973 - DNA, 50 bp, Homo sapiens
atatggcgcaactgcggcgcgtattcctggagtggagagccactcttttt

SEQ ID NO: 236974 - DNA, 100 bp, Homo sapiens
cagagcctcgcctttgccgatccgccgcccgtccacacccgccgccagcaagagtgagccatggagctacgtgtggggaacaagtaccgcctgggacgga

SEQ ID NO: 236975 - DNA, 99 bp, Homo sapiens
atcagaccaattggagagaagttgccaacatctggaggctgttctgctttggagttaaaggtgaccaagaatatggcccaggtgaccaaagccctggac

SEQ ID NO: 236976 - DNA, 82 bp, Homo sapiens
aggcttcgagtgacccgggtgccgaggagcgggaagagttgctggggaagcgccgcggagccatcaacagcaagcagctcac

SEQ ID NO: 236977 - DNA, 96 bp, Homo sapiens
gagaggaaacaaaaagttaaacaagcaagcctgccataagtgagaaggtctatcagctgggaggcatctgcaagctggtggacctcctccgcagcc

SEQ ID NO: 236978 - DNA, 50 bp, Homo sapiens
aaaaataccacgacaaaaccaccctaggccacaacacacagtgatcttgt

SEQ ID NO: 236979 - DNA, 71 bp, Homo sapiens
accatttcaacatggggctgctgatggatcctgactgctgtcatggcgtgccctctggagaaggccctgga

SEQ ID NO: 236980 - DNA, 75 bp, Homo sapiens
tgacgtgcagctctccaagacgctggagctgcgcgtggcctacgtggacgaatgtcagctcttccgagaccaggt

SEQ ID NO: 236981 - DNA, 100 bp, Homo sapiens
acttacgtgtactttaccaacgagctgaagcagaatgtgaaagatgttgcagaagtgttccagaagtggctgaagatagaaggaaaaaagtgccactgcc

SEQ ID NO: 236982 - DNA, 100 bp, Homo sapiens
gcatgctactgattcagcacttagaccctatatctacggacctacgtctcagggggaaaggatgcaaattctccagaatttcaagcacaaccccaaaatt

SEQ ID NO: 236983 - DNA, 83 bp, Homo sapiens
gttttaacaacctggatcttcgaacttttgacacggctttggaaacgacgtcatgtgttaggaaactactaaagttcctgggg

SEQ ID NO: 236984 - DNA, 101 bp, Homo sapiens
gggtcgtggacagatcctgtgttcttctatgtccaggccaaaagaaagcaattcagagttttgtttcttagcacagtacgtacaagacatacttgtaaaca

SEQ ID NO: 236985 - DNA, 75 bp, Homo sapiens
gaatacccggctgatcctccagtaccttgattcagagagaagacagatttctggttcagtaagggtgagagccag

SEQ ID NO: 236986 - DNA, 82 bp, Homo sapiens
catcttcgaacttagacttccggaaggactttggcgaggaatttcttgaggttggcaaaaagcagcctgctctggatgttct

SEQ ID NO: 236987 - DNA, 80 bp, Homo sapiens
gtagcagccgggctggtcctgctgcgagccggcggcccggagtggggcggcggatttccgtgagggtggaagaaaatcat

SEQ ID NO: 236988 - DNA, 83 bp, Homo sapiens
tgattccccggaatcgtgtgctgggctggtcccccttgctattccttgagcgagagcgggcagcccagctagcagaaagtaaa

SEQ ID NO: 236989 - DNA, 74 bp, Homo sapiens
aacgaggcaaggagctaaagcagcgtgcgttcagccctgggagcggttctggtgaggttggaaggatgcagcca

SEQ ID NO: 236990 - DNA, 75 bp, Homo sapiens
tgaacactctgtgcagcgagttacatgttgagccatttcaggaagcagaacatcagagagccatgcagagacgtg

SEQ ID NO: 236991 - DNA, 75 bp, Homo sapiens
gatgatcagccaggcacagaaggtccccctccggatgattgacagtgtggagagccgtgatatgttccagttgca

SEQ ID NO: 236992 - DNA, 100 bp, Homo sapiens
gaatacaccttgcttctgtagaccagctccaacaggattccatggtagctgggatgttagggctcagctctctgatgtaaaggatggagtaaatcaagca

SEQ ID NO: 236993 - DNA, 103 bp, Homo sapiens
gttccctgcatcctaagactcgaaggcagcacaggacctggaaaaattacatatgtgtatatctcatgattgatatggagaaactagtcatgggccaaaggtc

SEQ ID NO: 236994 - DNA, 75 bp, Homo sapiens
gcaaagaagacgtcatcttcttctaaaagggccgtgactcaagaaaactttagaaactgttcctttggagaggaa

SEQ ID NO: 236995 - DNA, 90 bp, Homo sapiens
tcacacaaaagcacacaaagacctcctcctccacaggggagacagagccatgctgtgacctacaagcaaactaaatagccaacatttctg

SEQ ID NO: 236996 - DNA, 100 bp, Homo sapiens
ctgcggctccccaaggctctgcgcgagatgaactggcttgactacttcggctttcatctgagtggcacagtaactgagctggccactgcctctgaaccag

SEQ ID NO: 236997 - DNA, 75 bp, Homo sapiens
aagcagagggtgagatggatgagtccagcattctaagacgaagagggctccagctgcacatcattgactcctggg

SEQ ID NO: 236998 - DNA, 100 bp, Homo sapiens
ccggtcccgagccggacaaggcgccgcggcgactcaacaagcggcgcttcccggggctgcggctcttcgggcacagtttttggctttcacccccaaccag

SEQ ID NO: 236999 - DNA, 97 bp, Homo sapiens
cttggcagccttcctgatttctgcagctctgtgtgaagattccgtctctagagcctttgaggtcactcctgacgctgacatggctgtgaagagctgg

SEQ ID NO: 237000 - DNA, 75 bp, Homo sapiens
tcttaagcaagtggctggaacaggtgtacccaaggagtgaaagctggacattgaagaagccaaaatctgtttcca

SEQ ID NO: 237001 - DNA, 74 bp, Homo sapiens
cctcaggcgtgcgcggacggtgtgcgggagatcctgctgggccgtggcttcaccttttggcagtggtttgatgg

SEQ ID NO: 237002 - DNA, 80 bp, Homo sapiens
attctgaacatgaatgaccacggctttgtgatctgactgcagccatgagcagcaatgagtgcttcaagtgtggacgatct

SEQ ID NO: 237003 - DNA, 100 bp, Homo sapiens
agaacatctgggagaatatttaatggaaaatcgcttggttaaaacctgacacttttaacaggtcctggctataagtcaccatggcacagcaagctgccga

SEQ ID NO: 237004 - DNA, 97 bp, Homo sapiens
cgagcagcgagggcgagagcttcgcgggctcggtgcaaacaaccatgtccaagggacctgcagttggtattgatcttggcaccacctactcttgtgt

SEQ ID NO: 237005 - DNA, 90 bp, Homo sapiens
gagaaataaggacaaaagccaagaggaggacagttcgctacacagcaatgcatcgagattgtccgtgtggagcccttggtgaccatgggc

SEQ ID NO: 237006 - DNA, 74 bp, Homo sapiens
ctaaatgatggttgttatgcaaagtcgcagtctagcagaagcttgttcagatggggatgttaatgctgttcgta

SEQ ID NO: 237007 - DNA, 82 bp, Homo sapiens
ctctatcaaggaaaacaagtgtctgcttatgtcgaatctacctgttactcgtattttggacaatcttatggagatgaagtca

SEQ ID NO: 237008 - DNA, 122 bp, Homo sapiens
tggggctaggagtactggccgagatggctaagaagtccatgccaggaggtcgtctgcagtcaggtccctatcactgttcagtccatcgtcattcagtctctaaataaaacgctcacccgacg

SEQ ID NO: 237009 - DNA, 100 bp, Homo sapiens
ataaggagcctttctaaggagaccacccgttataatcatcccaagcccaacttgctgtatcagaagtttgtgaagaacgtgctggccaaagcgctctatg

SEQ ID NO: 237010 - DNA, 82 bp, Homo sapiens
tcaaggatcccagttttctctggatgacgtggctgaaggtgatgtggccgccctcaaccgacgcatccagctcgttgaggag

SEQ ID NO: 237011 - DNA, 100 bp, Homo sapiens
ctgggtgccgccgtcccccagctgcgcaaccctaggaactctcggtgcaatacagttgacccttggacaacatggattggaaccgtgcaggtctactaac

SEQ ID NO: 237012 - DNA, 134 bp, Homo sapiens
gtcagaaggacctctaccgagatgtgatgttggagaactacaggaacatggtcttgctggacttaattcagtgcacaaatgagatgaatgtgaacatcccacagttggcagacagtttatttgaaagaactact

SEQ ID NO: 237013 - DNA, 50 bp, Homo sapiens
ctaaaacaccagaactcaacctggatcaagctgaagtgggggaatggctc

SEQ ID NO: 237014 - DNA, 51 bp, Homo sapiens
cagcacgtggtcgtactatactgcaaggtcgcagaacttgaaaagcgcctg

SEQ ID NO: 237015 - DNA, 82 bp, Homo sapiens
ctggagtgggattgctagatcacatgggccaaggttcagctttacgctcatgggctgcatgctctaactctgggtggcctgg

SEQ ID NO: 237016 - DNA, 90 bp, Homo sapiens
cttggcaagaaagtcctaaacctgctgaagctgcagcatatcgtgagtgatgagatctgtgtgcaggtgactgacctttacctggcagaa

SEQ ID NO: 237017 - DNA, 97 bp, Homo sapiens
tccattggaatttaagtcccatcagtggtttggagcatctgtgaggtcgaaacaggataaaattttgtgggcaagttacggaagcaatggctaaagg

SEQ ID NO: 237018 - DNA, 100 bp, Homo sapiens
gaaatatgggagacgacagaccgtttgtgtgcaatgccccgggctgtggacagctggaaggatggtcttgccttcaatgccctgatccaccggcacagac

SEQ ID NO: 237019 - DNA, 75 bp, Homo sapiens
ctcagccatcgtgtctgctgcaaagcttaatttgcccattaatattataggcggcgtcgtggcgttagccatcgc

SEQ ID NO: 237020 - DNA, 50 bp, Homo sapiens
ggtcccgccgggtctgaagcctgaacagacatgccaatatttggtttctg

SEQ ID NO: 237021 - DNA, 75 bp, Homo sapiens
catcaactgccgcaacaataagaaactcctgggccgcgtgaaggccttcgatagacaaatttacatgtattggag

SEQ ID NO: 237022 - DNA, 105 bp, Homo sapiens
tgaagagcgacaagccgctggcagccgcggatctcaccgccgctcaggggagtgcatccgccccaacccttttccccctcgtctcctgtgagaattccccgtcgg

SEQ ID NO: 237023 - DNA, 98 bp, Homo sapiens
ccctgcaggccctgtccaattggtacccggaaattaaagaggagctggaggagctggaccgcatcacagagcagacgctctttgacctgtacaaatac

SEQ ID NO: 237024 - DNA, 88 bp, Homo sapiens
cgctgcgcggcgcggcggccgggccctcgagacggggacgtttggaaattttagcattcaggtgccaggaatgcagatgggacagcca

SEQ ID NO: 237025 - DNA, 75 bp, Homo sapiens
ctgatctaacccctagaaacagaaaccgatctgctcctccgtataaaggacatcagtcatttcttaatgcaagac

SEQ ID NO: 237026 - DNA, 83 bp, Homo sapiens
aaaggaccaagaagaggaagaagaccaaggcccaccatgccccagtatgacatgatgggaagaaatcagactgctgtgagaga

SEQ ID NO: 237027 - DNA, 83 bp, Homo sapiens
ctgtacagcatcaactacctgcactttggggagcctaagtcctgctacgagttccagggagctctgtcctggtgaccgtgccc

SEQ ID NO: 237028 - DNA, 74 bp, Homo sapiens
cttcgacgcgatgttccgccggagcttgaatcgttttcaatcatcctcttccagtggtagcgtgtttgggtctg

SEQ ID NO: 237029 - DNA, 75 bp, Homo sapiens
gaaagaggctagaacaccaaggaattagaattgaatttgtaggtcaaattggtacccagatgctagagccatgca

SEQ ID NO: 237030 - DNA, 50 bp, Homo sapiens
cggagcgcagcgcggccgcacaggcatttgacattatcacagactgacat

SEQ ID NO: 237031 - DNA, 76 bp, Homo sapiens
agggagcagaggggacagaggcaccaaggacctccaagacagaacatcgatatattgaactcttcttgaattctac

SEQ ID NO: 237032 - DNA, 75 bp, Homo sapiens
cctgaagtcggtgtctgctgcgttcacggcaggattcggttaggaagctggaagacttccgattagagaaaggtg

SEQ ID NO: 237033 - DNA, 75 bp, Homo sapiens
gagcctcagcggtctgcgcctggcagcaggaaaggcagactacaagttactgagcacctccctgagaaaattgaa

SEQ ID NO: 237034 - DNA, 75 bp, Homo sapiens
gccagctgcacactcttggggctctacctctttttcaaatcttgctggtggatgccctccttactccccaatata

SEQ ID NO: 237035 - DNA, 100 bp, Homo sapiens
aaatgttccaccaggacttgatgaatataatccattctcggattctagaacattggtagctggcagtgttgtgatggcttttgaagaagtatgcccggac

SEQ ID NO: 237036 - DNA, 100 bp, Homo sapiens
gaacgctgctgtctaacgcgctattccagctcatcccagagttaatgacagttcggactatcacaggaaatatctactatgcaaggtcaggaactaagat

SEQ ID NO: 237037 - DNA, 74 bp, Homo sapiens
gtgtgaacgtgaaggggatggcgagctgcaggctaactcaggtgagatggagccgctatagtcctgaattcaag

SEQ ID NO: 237038 - DNA, 75 bp, Homo sapiens
tcggccatcttggctcctccacaagtggatctccttacgtagcagccaaaataaatgaagcaaaagacttgctag

SEQ ID NO: 237039 - DNA, 100 bp, Homo sapiens
gaagaaggatatgattctgttttctctgttgtgagacgccatcagtttcgatggagtgaaattcagaaaggagtggctgtgtggagtggtgtgaatgtgg

SEQ ID NO: 237040 - DNA, 78 bp, Homo sapiens
catgaatgaccacggctttgtggatgttgcttcagagtgtgaagtcaaatgcatgccaacattccagttttttaagaa

SEQ ID NO: 237041 - DNA, 100 bp, Homo sapiens
gaaaaattcaagaagttgaaaaacgcttttcacgtcacctggagagatgcacaggagcttgagaagctggcttctcgaaagttgagaataaatgctaaag

SEQ ID NO: 237042 - DNA, 74 bp, Homo sapiens
cgccagtcacctcttcatggcaaccatataacaatcagtcacactcaggaatggtggaaagcagcagacataat

SEQ ID NO: 237043 - DNA, 75 bp, Homo sapiens
aaattcagacggctcccgaggggtgtccgcaatgttgccagtgtctgtctgcagattggctacccaactgttgca

SEQ ID NO: 237044 - DNA, 100 bp, Homo sapiens
ggacaattcttctctcgggctgcccaagcgacagctgtcagaggggcaggagcttctgggagccaccgtctgaaggtcaaaatgcagatcttcgtgaaaa

SEQ ID NO: 237045 - DNA, 75 bp, Homo sapiens
caagattttaaaaaaatcccatgaggagaaggcattctaatttagattcacaatgacatcctttcaagaagtccc

SEQ ID NO: 237046 - DNA, 75 bp, Homo sapiens
acgtctgtctggtgataccaggggcagagggaccactctgacaggaattcatgatttgttcctgtagctgaaaca

SEQ ID NO: 237047 - DNA, 100 bp, Homo sapiens
gaaattcatctttaaggacgaagagagggtaaagcatgaatcatcctccagtgatgaggagcgcgcagctgccaagccatcaaacgcaggccacctccct

SEQ ID NO: 237048 - DNA, 96 bp, Homo sapiens
cacaagatgaaatgttgacgcccctggggagattggacaagtatgctgcaagtgagaacatatttaacaggttcctggatgcctatgctgagcaca

SEQ ID NO: 237049 - DNA, 74 bp, Homo sapiens
ttggccattggaaattgcagaataatgtctcagatcctcctggccaacttcttggcccagacagaggccctgat

SEQ ID NO: 237050 - DNA, 74 bp, Homo sapiens
gaagcatgaagtcacagggctactgttttccaatcctcaggtgcctaatggataagaacttcgttaggattggg

SEQ ID NO: 237051 - DNA, 82 bp, Homo sapiens
gcttggtttcgggatctcggtgctgcagacggcgagacctcctgcacaggtacgaggctaccccacgttattgcttttccga

SEQ ID NO: 237052 - DNA, 74 bp, Homo sapiens
tttgtggatcgctgtgatcgtcacttgatctctggaaacatggctacagaacatgttaatggaaatggtactga

SEQ ID NO: 237053 - DNA, 74 bp, Homo sapiens
gcgaccgccaagaaaggcagcgaggtggagagcggctctcaaaattagagagatgtgtaattgtccaccactgt

SEQ ID NO: 237054 - DNA, 83 bp, Homo sapiens
accccctcttccaacaggtcgtcagcaagatggacaacatcagccgagccgcgggggtggtccagctgctcacctgtgacctg

SEQ ID NO: 237055 - DNA, 75 bp, Homo sapiens
tgggaggttggggtctctgggagctctgcagtttcaccagtgatcattaaagaatgggcagcttacaaaggaaag

SEQ ID NO: 237056 - DNA, 75 bp, Homo sapiens
cttatccctcaggatggtgattatgcagagaatatgttattccatccttggcccacagatttatggcagagatgg

SEQ ID NO: 237057 - DNA, 98 bp, Homo sapiens
gatggccttatcaatgaagctactaggtcttgccccagaagctgcgggcacatccacgcctgaaatgcggcgctcagtcctggtcaggaacccaggcc

SEQ ID NO: 237058 - DNA, 75 bp, Homo sapiens
ttctagcagtgcagggaacttgggagtactcattcctgtaatagctgtgccacatgaaatgaagatcacctctgc

SEQ ID NO: 237059 - DNA, 82 bp, Homo sapiens
gggagacctggccttcctcaacttccagaacaacctgcagcaggagtgcgccggtctcggggaaatgcccggttccttcgtg

SEQ ID NO: 237060 - DNA, 97 bp, Homo sapiens
tgcgcagggccaagttcaagtttcctggccgccagaagggtccttttgtacaagtggatgaactgatggaaattttccgaagatgcaagataccaaa

SEQ ID NO: 237061 - DNA, 83 bp, Homo sapiens
gtaaatgagaagaagcccttagcctaatgaagcgataaggtaagcttcctgcctgacacagctcacttcaagaagtgcacaat

SEQ ID NO: 237062 - DNA, 100 bp, Homo sapiens
tgattcctatagtcaaaaccagcagtcctatcattcacaaagggaaaactacagccaccacacacaaggtgttgagccagtgcaggttcaggaaactgtg

SEQ ID NO: 237063 - DNA, 83 bp, Homo sapiens
gcgccaccccgcggtcatcggtcaccggtcgctctcaggaacagcagtaagactttgaccccgacgcaggcttcagtgattgc

SEQ ID NO: 237064 - DNA, 90 bp, Homo sapiens
gtagtgtttgggaagaaaaacagaggagttctattaagacggctatggccatcatcaatggctccctttatgtctttggaggtacaaccg

SEQ ID NO: 237065 - DNA, 82 bp, Homo sapiens
cagctccatttctggagtctgggtcttccgaggccaggagcttgcctttccggacaagaggaccctgccttggtgtgagagt

SEQ ID NO: 237066 - DNA, 95 bp, Homo sapiens
gccagatcatcggtcaggccaagaagcatccgagcaacggtggcagccgaagttaggaagcagatctccggacaatatagtggttctccccaact

SEQ ID NO: 237067 - DNA, 75 bp, Homo sapiens
cgaggtgtccatggatggctgcaagtcctgagcctcctacctctgctggaagcccagatcccattgtgtgccaac

SEQ ID NO: 237068 - DNA, 97 bp, Homo sapiens
gcctttaccaacgccatcaccgacctcatcagtgagctgtccctgctggaggagcgcttccgggtgaaaggtgtagcagtcactcggcctacaccca

SEQ ID NO: 237069 - DNA, 100 bp, Homo sapiens
tagcattggtaaagaacgatcgtccagtggagataattctgaaataatcagcagaaacggaatggaatgccaagaatctgcattgagaataactaaacat

SEQ ID NO: 237070 - DNA, 71 bp, Homo sapiens
tcatcgtgcagacggcagagattgcggagattgccaggctgagaacgggaagcttgtcatcaatggaaatc

SEQ ID NO: 237071 - DNA, 75 bp, Homo sapiens
gggtgtctcgtgtgtgaacatcacagaaaatccatcctctcagtattggaaggaagtggcagaaaaacggagaaa

SEQ ID NO: 237072 - DNA, 83 bp, Homo sapiens
tgagcactgcctgggacctgtgctgagagagcgctagatacaaggcagatccaaccatccccaccgtggtcctacgatcagtc

SEQ ID NO: 237073 - DNA, 73 bp, Homo sapiens
tctagttctgttgtggttagacttgcagatttcaatatataccagggacatagttctcaaactacttcagtat

SEQ ID NO: 237074 - DNA, 98 bp, Homo sapiens
atcttggacagcgtgggtatcgaggcggacgacgaccggctcaacaagaaaccagcctggacaccaagtctgtgtcagaaggccacctcaagaggaac

SEQ ID NO: 237075 - DNA, 105 bp, Homo sapiens
agggactggcagctccactgccgtcaactcctgttctcctcagagcctgatcctccccggcgtgaaggtcatcatcgcacacaccgagaccaaaggacccttggg

SEQ ID NO: 237076 - DNA, 100 bp, Homo sapiens
cccaagtttaaatgacctgctatgcccacagagcttgatccagaagtgcacaggtatgagactgagagaggaatacgtctaacagtggaagctgatctcc

SEQ ID NO: 237077 - DNA, 75 bp, Homo sapiens
gacgagccggccgtcccgggccgggggacccgcccgccatggccaccaagattttaggtgatgggcaagtcagaa

SEQ ID NO: 237078 - DNA, 74 bp, Homo sapiens
taaaagacagtcctcgtcagcactgactttcagctatggaatcggtggaagcagggaaaggcctggagatgagg

SEQ ID NO: 237079 - DNA, 50 bp, Homo sapiens
tcagcatgctgtgtctagctcaagatgccttcaattaagttgcagagttc

SEQ ID NO: 237080 - DNA, 50 bp, Homo sapiens
cgccgctgtccggagccccacaggtattgttgcagcatctggcagtgaga

SEQ ID NO: 237081 - DNA, 73 bp, Homo sapiens
tgaagtttcgtcaagactggggacccattacttcaatttcatttcgcacagacacccatcatactgactccaa

SEQ ID NO: 237082 - DNA, 96 bp, Homo sapiens
caggggccgtccccaggacactgtccggatcttccctccctgcaaaacaccgaattgctcataaaccgcattccaaaccaaaaacttcagatattt

SEQ ID NO: 237083 - DNA, 82 bp, Homo sapiens
gcgatggccgggatcctggagcactcggtcatgtacccggtggactcggtgaaggcctggaagaaacgctggtttatcctgc

SEQ ID NO: 237084 - DNA, 100 bp, Homo sapiens
ggcggacctgtgaggggatccgacttgccggcagaacttacgctgcgggaccccgggcactgttgctgctgcgggagggctggagcagcttcaccactgg

SEQ ID NO: 237085 - DNA, 100 bp, Homo sapiens
tggaactccagcctgcgccaccacgtcacgcacacgctcggcgctgcgatccgcgcatataacgatatccaggtgaaagaactggagaagcgtgcctcag

SEQ ID NO: 237086 - DNA, 75 bp, Homo sapiens
gtctaggctgggttcattacatgattcatgagccagtgagagtagcatgtttgtctccaagagacgtttcatttt

SEQ ID NO: 237087 - DNA, 100 bp, Homo sapiens
ctttacgcttgtgtgataaaactggggaagttggtgaaccatctaaagaagagaaggctgtggccaagtatcttcgattcaactgtccaacaaagtccac

SEQ ID NO: 237088 - DNA, 100 bp, Homo sapiens
tccagatcgggatttacgtggagatcaagcgcagcgatgatccagacatttaatgtggatgcaccatgccagaccgtggaagatttaacgaatggggttg

SEQ ID NO: 237089 - DNA, 119 bp, Homo sapiens
ttttctccccacccttgccctacttggactcttgattggaatgttctccctgcagcagtcagcccaaaggaagatattgatgatgttaagaagttcaaaccgggttacctggaagctac

SEQ ID NO: 237090 - DNA, 74 bp, Homo sapiens
ctgcgcgcctaccaggctcgaccccagggggatatgagactttctactcggaatatcctgagtgttgcgtggat

SEQ ID NO: 237091 - DNA, 75 bp, Homo sapiens
gagagggaagagattcagccagcacactcctcgcgagcaagagagctgtagtacacatggatgaacgacgagaag

SEQ ID NO: 237092 - DNA, 75 bp, Homo sapiens
caagaagcaaaaaagggactgctaagaagataccaccagctaatggcagcattagccgctgttgggcctcctaat

SEQ ID NO: 237093 - DNA, 100 bp, Homo sapiens
gcacaatatcatggattttgccatgccctatttcatccaggtcatgaaggagtacttgacaaaggtggaagaagagcccgaagaagaacctgaagagaca

SEQ ID NO: 237094 - DNA, 100 bp, Homo sapiens
atctccttcccagccttcagaaattgccggtctgggagttgggggcaaggagaagatcctggtgaccattgtgaggtagatattttgttctaattttcca

SEQ ID NO: 237095 - DNA, 103 bp, Homo sapiens
cgaattcagaaggatatcgacgtcgtgatccagaagtccagagctgaggactgcctgtttgcagtgccaaatctttggagtgttgatggagaagttacagtag

SEQ ID NO: 237096 - DNA, 100 bp, Homo sapiens
ctgccgagaagccagtcacgccgggagctggtacacagcctcaggtgatgtttgcagacagaaaaagtaaactgtcaaggaattcagagcattgggtact

SEQ ID NO: 237097 - DNA, 75 bp, Homo sapiens
gaaagaggaggaaaacaaaagctgctacttatggaagatacaaagggattctcagcaagttacagaagtatcttt

SEQ ID NO: 237098 - DNA, 100 bp, Homo sapiens
ctgtgaagcagtgtgcgaagatttccaatcatttctaaaattactgacagccctgtcctaggagcacaacgtccgagaaatgctcagcttgactgctcca

SEQ ID NO: 237099 - DNA, 74 bp, Homo sapiens
aagattcatacgcagctggcagatattatcatagttgctgcagccaagagtcgaagctaaaccagaagttcaat

SEQ ID NO: 237100 - DNA, 78 bp, Homo sapiens
gccccagggcaagccccgctccggccaacaaggtgcagcagttggaggaagaaaatacagagcttagaacaacagtga

SEQ ID NO: 237101 - DNA, 100 bp, Homo sapiens
cagcagatttcccaagagcagcggaaaatgatccagtcacaggtgtttctaactggggaggctatgccctggcctgcgcactctacatcctgtactcatg

SEQ ID NO: 237102 - DNA, 90 bp, Homo sapiens
gaaacatgatacaatctgcaaatgaacatgaacgattggatgcccatcgccaaggagtatgatccactcaaagcgggcagcattgatggc

SEQ ID NO: 237103 - DNA, 100 bp, Homo sapiens
ctctttccagcagaagcccagcggcaaaaatctcaggttattgcttacaactcagaaggtaaaagtaatccaagtgaagtagtagaatttactacttgcc

SEQ ID NO: 237104 - DNA, 78 bp, Homo sapiens
ataaaggatgggttttaactacagacccagtctctgccaagtgcacattcaggttcccgagcacaaacatcaagataa

SEQ ID NO: 237105 - DNA, 100 bp, Homo sapiens
caacagagattgcacaaatgaactgtctaattcttgcaagtgggccccatgctgattgagtttaacatgcctgtggacctggagctcgtggcaaagcaga

SEQ ID NO: 237106 - DNA, 100 bp, Homo sapiens
atcccagatctacctgacgggcctgcgagggttgaagattgtgaagcaatagcctaagcccattccagatgatgggatttattggcaggccaaccttgac

SEQ ID NO: 237107 - DNA, 96 bp, Homo sapiens
atgaatatggtgtttcttctatcattccaaactttcagatctctcaagattcagtagggaacagcaaatgcagccctgaggatttggctactgcat

SEQ ID NO: 237108 - DNA, 100 bp, Homo sapiens
ccaggaggaggttttcaggaccaaaattgtggaaaagtcactctgagtgaagatagtccaagtcctaagagacagcgcctctctcattcagtctttgatt

SEQ ID NO: 237109 - DNA, 112 bp, Homo sapiens
atccatggtttctatgcccctctatgcagtcatgtatcctgtgtttaatgaggtacctagtcgatagtcgctggttcaaacagtggaaaaaatatgttggctttgacagttg

SEQ ID NO: 237110 - DNA, 100 bp, Homo sapiens
agctttcgtcacctgtccttctacattttcgatagagacgttttccggagggattccatcatagggactggtgattgcagctggaagtgcccatgaccga

SEQ ID NO: 237111 - DNA, 90 bp, Homo sapiens
cctgccagagccaaggccaagctctccaagttcagcatccccaagcagggggagagcacaaagttatcattgttgggctggataatgcag

SEQ ID NO: 237112 - DNA, 83 bp, Homo sapiens
gattggatgtccaacctgggggaatgggtaccacagaccatgtcatcgtcctggcgtccacgaaccgagctgacattttggac

SEQ ID NO: 237113 - DNA, 51 bp, Homo sapiens
gttcttggtgcttggcatgaggggattgttcattgctgctggaggaagatc

SEQ ID NO: 237114 - DNA, 82 bp, Homo sapiens
cgagccgagccgagcggagccggcggagcctctggaatcacccgggtcgctgttcctgagggaacggcaggagcagctgatg

SEQ ID NO: 237115 - DNA, 96 bp, Homo sapiens
cgttcctgacgaagcaggagatcctcctgtcccgctcccggtcccctcggaggagagcccactcccctgagagacggagggaagagaggagtgtgc

SEQ ID NO: 237116 - DNA, 75 bp, Homo sapiens
caaagggaccacggtcaccgtctcctcagtgaataaccctataccttccaatttgaaatcagaagcaaaaaaggc

SEQ ID NO: 237117 - DNA, 82 bp, Homo sapiens
actgttgcgggccccgggacctgggctgggaacccgcggtggagcgggacacgaacgtggctttacaggaagtatggtgctg

SEQ ID NO: 237118 - DNA, 101 bp, Homo sapiens
cttccagccaccccctctccagtctgctcaggaactagccagctgtggatggagtaagaaggagaaacacagtcttgcccctaacgttgtggcctttaccc

SEQ ID NO: 237119 - DNA, 75 bp, Homo sapiens
gcggagtcggggctcctgacggagaactgtgtttatgaaactgtagttttgcctttggatgaaagggcatttgag

SEQ ID NO: 237120 - DNA, 50 bp, Homo sapiens
gcgacggcgaccatagctctctgcccatgacgcttccggagacaaccctg

SEQ ID NO: 237121 - DNA, 51 bp, Homo sapiens
tcgtggtgggatcaggaaagcaggagcttcttcaggaggagacacgccaga

SEQ ID NO: 237122 - DNA, 75 bp, Homo sapiens
aaagattctgggaaatcagggctccttcttaactaaaggaaaaattccggaactgttggcttcgggcatggttga

SEQ ID NO: 237123 - DNA, 100 bp, Homo sapiens
tcacattgtccctgtgtctagcagtttcagaggttctctccataaatgaagaagggctaaggcgatgcgaagagaatacaaaagtctttggtcggcctat

SEQ ID NO: 237124 - DNA, 90 bp, Homo sapiens
tggtggcaaggtcaccatggatgggcgagtcaacgggggcctcaacctctccagagccattgacgcaaacatgcagatctttgtgaagac

SEQ ID NO: 237125 - DNA, 75 bp, Homo sapiens
gccgtggccctccccggaatgccagctttgctccaatggaggacaaactcaaccaggcacacctcgaggtccagc

SEQ ID NO: 237126 - DNA, 75 bp, Homo sapiens
acccaacctagtgggtgtaatacatcatgaactgcagggagctggtcaggctcaccatcgagaagcagggacgtc

SEQ ID NO: 237127 - DNA, 100 bp, Homo sapiens
cagactggtgctggaaaatcttatacaatgatgggtaaacaagaagaaagccaggctggcatcattccacagcataccataaagtctccaaaggatggca

SEQ ID NO: 237128 - DNA, 97 bp, Homo sapiens
cggcagcgacggcaccatgtcagacaaggaaattactcatgatgtcaaagtgaaaccaatccgtaatctaaatggacattcaattgggcaatataga

SEQ ID NO: 237129 - DNA, 75 bp, Homo sapiens
tgccagatggtgcaatgttcaaagtactcaagatgaatttgagattcttctttggagcagaataaaagatctggc

SEQ ID NO: 237130 - DNA, 100 bp, Homo sapiens
tgcactgcactgaggacccggtgccggaggccgtgggcggcgacatgcagcagctgaaccagctgggcgcgcagaagatggcagtgaacgtatactcaac

SEQ ID NO: 237131 - DNA, 100 bp, Homo sapiens
ctcgctcaagatggcggcgcagccaccccgcgggatacgcctcagcgcgttataggtgggcatttattccagaagtggacacagagggccctgccttcct

SEQ ID NO: 237132 - DNA, 76 bp, Homo sapiens
aaatttcttgggtgaaaaatatatccgcagggttcggatgagaccagccttgttagatgacttggataaagaacta

SEQ ID NO: 237133 - DNA, 75 bp, Homo sapiens
tctgcctgacttggaccctggaaaacctggccctcttcaatttctgacaaaagatcagtaaccctgtacagggac

SEQ ID NO: 237134 - DNA, 74 bp, Homo sapiens
gtggggccgcgcaggcaaggacaaggccacagagtcggggtcttcacggaagctcttcgtgggcggtcttgact

SEQ ID NO: 237135 - DNA, 100 bp, Homo sapiens
cctggttctgccttctggacaatctttccgaggtcatgacgccagtcagatcacactagccttgggcacagctgcctcctaccccagggcctgccaggct

SEQ ID NO: 237136 - DNA, 75 bp, Homo sapiens
agaagcttgggctcacttccacaaattttgcagaaaaaacttcagcatgtgccaggaacacaacctcaccttgat

SEQ ID NO: 237137 - DNA, 75 bp, Homo sapiens
gggtatttccccagctcatctgtgaagccctgccctgtggatggaagggttctaggagcagccgttgtgaaccag

SEQ ID NO: 237138 - DNA, 100 bp, Homo sapiens
tgacccagaccctctcctttccctttgagaccgtgaagagaaagatgcaggaactgcaagcacatgttgaccagataactgaaatggcagcagtaatgag

SEQ ID NO: 237139 - DNA, 82 bp, Homo sapiens
gaagatgttccgggctctgatgccaggccctgggaggagcggggacactgaggacctctctccaaattggcctctcaactca

SEQ ID NO: 237140 - DNA, 100 bp, Homo sapiens
cgagaaactcccaccgacccacagagtacgaggatgtcgtccaggaaagattgtgcagatgactgaagcagaagttcgaggcttatgtatcaagtctcgg
